United States Patent Application Publication US 2007/0042381 A1 - sequence listing, part 63

SEQ ID NO: 2864188 - RNA, 15 nt, Human
agaggggacucuggg

SEQ ID NO: 2864189 - RNA, 18 nt, Human
agaggggacucugggcua

SEQ ID NO: 2864190 - RNA, 22 nt, Human
agaggggaaaccaguguagccu

SEQ ID NO: 2864191 - RNA, 12 nt, Human
agaggggaagga

SEQ ID NO: 2864192 - RNA, 22 nt, Human
agaggggaacagacuggaagca

SEQ ID NO: 2864193 - RNA, 14 nt, Human
agagggcuugugaa

SEQ ID NO: 2864194 - RNA, 18 nt, Human
agagggcuugugaacaga

SEQ ID NO: 2864195 - RNA, 19 nt, Human
agaggaugucucaaacuuc

SEQ ID NO: 2864196 - RNA, 13 nt, Human
agaggaugugcaa

SEQ ID NO: 2864197 - RNA, 22 nt, Human
agaggauuagguuccauccuuu

SEQ ID NO: 2864198 - RNA, 20 nt, Human
agaggaugagcucuacccag

SEQ ID NO: 2864199 - RNA, 22 nt, Human
agaggaugagagcccagaggua

SEQ ID NO: 2864200 - RNA, 13 nt, Human
agaggaugagagc

SEQ ID NO: 2864201 - RNA, 14 nt, Human
agaggaugagagcc

SEQ ID NO: 2864202 - RNA, 17 nt, Human
agaggaugagagcccag

SEQ ID NO: 2864203 - RNA, 18 nt, Human
agaggaugagagcccaga

SEQ ID NO: 2864204 - RNA, 22 nt, Human
agccgcugugagccccuggucc

SEQ ID NO: 2864205 - RNA, 18 nt, Human
agccggccaauggaaacc

SEQ ID NO: 2864206 - RNA, 19 nt, Human
agccucccaaagugcuggg

SEQ ID NO: 2864207 - RNA, 18 nt, Human
agccucccaaagugcugg

SEQ ID NO: 2864208 - RNA, 14 nt, Human
agccgcagccuccc

SEQ ID NO: 2864209 - RNA, 18 nt, Human
agccgauucaccugagca

SEQ ID NO: 2864210 - RNA, 16 nt, Human
agccgcugugagcccc

SEQ ID NO: 2864211 - RNA, 19 nt, Human
agccgcugugagccccugg

SEQ ID NO: 2864212 - RNA, 18 nt, Human
agccgcagccucccucug

SEQ ID NO: 2864213 - RNA, 21 nt, Human
agccgagaucacgccacugca

SEQ ID NO: 2864214 - RNA, 17 nt, Human
agccucccgaguagcug

SEQ ID NO: 2864215 - RNA, 22 nt, Human
agccucccgaauagcugggacu

SEQ ID NO: 2864216 - RNA, 20 nt, Human
agccucccgaauagcuggga

SEQ ID NO: 2864217 - RNA, 19 nt, Human
agccucccgaauagcuggg

SEQ ID NO: 2864218 - RNA, 18 nt, Human
agccucccgaauagcugg

SEQ ID NO: 2864219 - RNA, 20 nt, Human
agccucccaaagugcuggga

SEQ ID NO: 2864220 - RNA, 17 nt, Human
agccucccaaagugcug

SEQ ID NO: 2864221 - RNA, 22 nt, Human
agccucccgaguagcugggacu

SEQ ID NO: 2864222 - RNA, 21 nt, Human
agccucccucugaccugcagg

SEQ ID NO: 2864223 - RNA, 15 nt, Human
agccucccucugacc

SEQ ID NO: 2864224 - RNA, 14 nt, Human
agccucccucugac

SEQ ID NO: 2864225 - RNA, 13 nt, Human
agccucccucuga

SEQ ID NO: 2864226 - RNA, 11 nt, Human
agccucccuga

SEQ ID NO: 2864227 - RNA, 22 nt, Human
agccucccucugaccugcaggc

SEQ ID NO: 2864228 - RNA, 12 nt, Human
agccucccugaa

SEQ ID NO: 2864229 - RNA, 11 nt, Human
agccuccucug

SEQ ID NO: 2864230 - RNA, 12 nt, Human
agccuccucugu

SEQ ID NO: 2864231 - RNA, 15 nt, Human
agccuccucugucug

SEQ ID NO: 2864232 - RNA, 16 nt, Human
agccuccucugucugc

SEQ ID NO: 2864233 - RNA, 18 nt, Human
agccuccucugucugccc

SEQ ID NO: 2864234 - RNA, 19 nt, Human
agccuccucugucugcccu

SEQ ID NO: 2864235 - RNA, 20 nt, Human
agccuccucugucugcccuu

SEQ ID NO: 2864236 - RNA, 21 nt, Human
agccuccucugucugcccuuc

SEQ ID NO: 2864237 - RNA, 11 nt, Human
agccuccugag

SEQ ID NO: 2864238 - RNA, 19 nt, Human
agccucccgaguagggagg

SEQ ID NO: 2864239 - RNA, 21 nt, Human
agcccaacgggaagcaaccuc

SEQ ID NO: 2864240 - RNA, 20 nt, Human
agcccaaaggggacaggccu

SEQ ID NO: 2864241 - RNA, 21 nt, Human
agcccaaaggggacaggccuc

SEQ ID NO: 2864242 - RNA, 23 nt, Human
agcccaaaggggacaggccucac

SEQ ID NO: 2864243 - RNA, 18 nt, Human
agccccacugccagcagc

SEQ ID NO: 2864244 - RNA, 17 nt, Human
agccccacugccagcag

SEQ ID NO: 2864245 - RNA, 16 nt, Human
agccccacugccagca

SEQ ID NO: 2864246 - RNA, 15 nt, Human
agccccacugccagc

SEQ ID NO: 2864247 - RNA, 14 nt, Human
agccccacugccag

SEQ ID NO: 2864248 - RNA, 12 nt, Human
agccccacugcc

SEQ ID NO: 2864249 - RNA, 20 nt, Human
agccccacugccagcagcag

SEQ ID NO: 2864250 - RNA, 19 nt, Human
agccccacugccagcagca

SEQ ID NO: 2864251 - RNA, 12 nt, Human
agccccagagca

SEQ ID NO: 2864252 - RNA, 15 nt, Human
agccccagcacuaac

SEQ ID NO: 2864253 - RNA, 12 nt, Human
agccccagcacu

SEQ ID NO: 2864254 - RNA, 16 nt, Human
agccccagagcagggu

SEQ ID NO: 2864255 - RNA, 20 nt, Human
agccgagaucacgccacugc

SEQ ID NO: 2864256 - RNA, 19 nt, Human
agccgagaucacgccacug

SEQ ID NO: 2864257 - RNA, 22 nt, Human
agcccugaggugaaagggagcu

SEQ ID NO: 2864258 - RNA, 21 nt, Human
agcccugaggugaaagggagc

SEQ ID NO: 2864259 - RNA, 24 nt, Human
agcccuacucccugcagaugccac

SEQ ID NO: 2864260 - RNA, 15 nt, Human
agcccuagagccugc

SEQ ID NO: 2864261 - RNA, 16 nt, Human
agcccuagagccugcc

SEQ ID NO: 2864262 - RNA, 17 nt, Human
agcccuagagccugccu

SEQ ID NO: 2864263 - RNA, 20 nt, Human
agcccuagagccugccugga

SEQ ID NO: 2864264 - RNA, 22 nt, Human
agcccuagagccugccuggagc

SEQ ID NO: 2864265 - RNA, 19 nt, Human
agcccugacgcaaugaaaa

SEQ ID NO: 2864266 - RNA, 18 nt, Human
agcccugagaaagcccug

SEQ ID NO: 2864267 - RNA, 19 nt, Human
agcccugagaaagcccugu

SEQ ID NO: 2864268 - RNA, 18 nt, Human
agcccuacucccugcaga

SEQ ID NO: 2864269 - RNA, 17 nt, Human
agcccuacucccugcag

SEQ ID NO: 2864270 - RNA, 16 nt, Human
agcccuacucccugca

SEQ ID NO: 2864271 - RNA, 15 nt, Human
agcccuacucccugc

SEQ ID NO: 2864272 - RNA, 21 nt, Human
agcccuacucccugcagaugc

SEQ ID NO: 2864273 - RNA, 20 nt, Human
agcccuacucccugcagaug

SEQ ID NO: 2864274 - RNA, 14 nt, Human
agcccuagagccug

SEQ ID NO: 2864275 - RNA, 21 nt, Human
agcccuaaccccuuccagauc

SEQ ID NO: 2864276 - RNA, 18 nt, Human
agcccuaaccccuuccag

SEQ ID NO: 2864277 - RNA, 17 nt, Human
agcccuaaccccuucca

SEQ ID NO: 2864278 - RNA, 13 nt, Human
agcccuacucccu

SEQ ID NO: 2864279 - RNA, 15 nt, Human
agcccuacagagcug

SEQ ID NO: 2864280 - RNA, 17 nt, Human
agcccuacagagcugug

SEQ ID NO: 2864281 - RNA, 18 nt, Human
agcccuacagagcugugg

SEQ ID NO: 2864282 - RNA, 16 nt, Human
agccccagugcccaca

SEQ ID NO: 2864283 - RNA, 23 nt, Human
agccccagggucuucccuaccuc

SEQ ID NO: 2864284 - RNA, 18 nt, Human
agccccagggugcccaga

SEQ ID NO: 2864285 - RNA, 23 nt, Human
agccccauaauuuuuuuuuuccu

SEQ ID NO: 2864286 - RNA, 21 nt, Human
agccccaggccucuguguccu

SEQ ID NO: 2864287 - RNA, 18 nt, Human
agccccagggucuucccu

SEQ ID NO: 2864288 - RNA, 22 nt, Human
agccccagggucuucccuaccu

SEQ ID NO: 2864289 - RNA, 20 nt, Human
agccccagggucuucccuac

SEQ ID NO: 2864290 - RNA, 12 nt, Human
agccccaggccu

SEQ ID NO: 2864291 - RNA, 15 nt, Human
agccccaggccucug

SEQ ID NO: 2864292 - RNA, 16 nt, Human
agccccaggccucugu

SEQ ID NO: 2864293 - RNA, 18 nt, Human
agccccaggccucugugu

SEQ ID NO: 2864294 - RNA, 14 nt, Human
agauguaauguuuu

SEQ ID NO: 2864295 - RNA, 17 nt, Human
agauguaauguuuucuu

SEQ ID NO: 2864296 - RNA, 23 nt, Human
agauguaauguuuucuuugcaaa

SEQ ID NO: 2864297 - RNA, 16 nt, Human
agauguaccuggugga

SEQ ID NO: 2864298 - RNA, 14 nt, Human
agcagucucugccu

SEQ ID NO: 2864299 - RNA, 15 nt, Human
agcagucucugccuu

SEQ ID NO: 2864300 - RNA, 16 nt, Human
agcagucucugccuug

SEQ ID NO: 2864301 - RNA, 17 nt, Human
agcagucucugccuugc

SEQ ID NO: 2864302 - RNA, 19 nt, Human
agcagucucugccuugccu

SEQ ID NO: 2864303 - RNA, 20 nt, Human
agcagucucugccuugccuu

SEQ ID NO: 2864304 - RNA, 13 nt, Human
agcagugagcaga

SEQ ID NO: 2864305 - RNA, 16 nt, Human
agcagugagaaaaagc

SEQ ID NO: 2864306 - RNA, 21 nt, Human
agcagugagaaaaagcuccug

SEQ ID NO: 2864307 - RNA, 22 nt, Human
agcagugagaaaaagcuccugu

SEQ ID NO: 2864308 - RNA, 12 nt, Human
agcagcccaaau

SEQ ID NO: 2864309 - RNA, 13 nt, Human
agcagcccaaauu

SEQ ID NO: 2864310 - RNA, 15 nt, Human
agcagccccgggagg

SEQ ID NO: 2864311 - RNA, 19 nt, Human
agcacuaaggugugcucug

SEQ ID NO: 2864312 - RNA, 16 nt, Human
agcacuaacguaaaua

SEQ ID NO: 2864313 - RNA, 13 nt, Human
agcacugccagga

SEQ ID NO: 2864314 - RNA, 20 nt, Human
agcacugggaucacaggugu

SEQ ID NO: 2864315 - RNA, 23 nt, Human
agcaguugagucgucaucacuuu

SEQ ID NO: 2864316 - RNA, 13 nt, Human
agcaguuguguca

SEQ ID NO: 2864317 - RNA, 17 nt, Human
agccagauccucuuggu

SEQ ID NO: 2864318 - RNA, 16 nt, Human
agccauugcacccagc

SEQ ID NO: 2864319 - RNA, 20 nt, Human
agccauugcacccagcccag

SEQ ID NO: 2864320 - RNA, 20 nt, Human
agccauuaccauggagacaa

SEQ ID NO: 2864321 - RNA, 18 nt, Human
agccauuaccauggagac

SEQ ID NO: 2864322 - RNA, 14 nt, Human
agccauuaaaugaa

SEQ ID NO: 2864323 - RNA, 17 nt, Human
agccauuaaaugaauau

SEQ ID NO: 2864324 - RNA, 18 nt, Human
agccauuaaaugaauauu

SEQ ID NO: 2864325 - RNA, 21 nt, Human
agccauuaaaugaauauuuug

SEQ ID NO: 2864326 - RNA, 22 nt, Human
agccauuaaaugaauauuuuga

SEQ ID NO: 2864327 - RNA, 16 nt, Human
agcaugccaacaagaa

SEQ ID NO: 2864328 - RNA, 17 nt, Human
agcaugccaacaagaau

SEQ ID NO: 2864329 - RNA, 18 nt, Human
agcaugccaacaagaaug

SEQ ID NO: 2864330 - RNA, 19 nt, Human
agcaugccaacaagaaugc

SEQ ID NO: 2864331 - RNA, 20 nt, Human
agcaugccaacaagaaugca

SEQ ID NO: 2864332 - RNA, 12 nt, Human
agccagauccuc

SEQ ID NO: 2864333 - RNA, 14 nt, Human
agccagauccucuu

SEQ ID NO: 2864334 - RNA, 15 nt, Human
agccagauccucuug

SEQ ID NO: 2864335 - RNA, 16 nt, Human
agccagauccucuugg

SEQ ID NO: 2864336 - RNA, 23 nt, Human
agccaaagcuaggccuggccaga

SEQ ID NO: 2864337 - RNA, 20 nt, Human
agccaaagcuaggccuggcc

SEQ ID NO: 2864338 - RNA, 19 nt, Human
agccaaagcuaggccuggc

SEQ ID NO: 2864339 - RNA, 18 nt, Human
agccaaagcuaggccugg

SEQ ID NO: 2864340 - RNA, 21 nt, Human
agcaugaaaggcuuuuaaauu

SEQ ID NO: 2864341 - RNA, 12 nt, Human
agcaucuucugg

SEQ ID NO: 2864342 - RNA, 12 nt, Human
aaaaaauuuaag

SEQ ID NO: 2864343 - RNA, 14 nt, Human
aaaaacacaaaagu

SEQ ID NO: 2864344 - RNA, 11 nt, Human
aaaaacaaaaa

SEQ ID NO: 2864345 - RNA, 14 nt, Human
aaaaaauuuaagug

SEQ ID NO: 2864346 - RNA, 12 nt, Human
aaaaacaaccaa

SEQ ID NO: 2864347 - RNA, 14 nt, Human
aaaacaaccaagcg

SEQ ID NO: 2864348 - RNA, 15 nt, Human
aaaacaaaauuuuau

SEQ ID NO: 2864349 - RNA, 14 nt, Human
aaaacaaaacuaua

SEQ ID NO: 2864350 - RNA, 20 nt, Human
aaaacaaaacuauacuugaa

SEQ ID NO: 2864351 - RNA, 10 nt, Human
aaaacaaaac

SEQ ID NO: 2864352 - RNA, 14 nt, Human
aaaacaaaacaaaa

SEQ ID NO: 2864353 - RNA, 16 nt, Human
aaaacaaaacaaaacu

SEQ ID NO: 2864354 - RNA, 22 nt, Human
aaaaauuuuauaaaauuaagca

SEQ ID NO: 2864355 - RNA, 17 nt, Human
aaaaauuugaacacugg

SEQ ID NO: 2864356 - RNA, 13 nt, Human
aaaaauuuaagug

SEQ ID NO: 2864357 - RNA, 22 nt, Human
aaaacaacuauggaucagaaua

SEQ ID NO: 2864358 - RNA, 22 nt, Human
aaaacaacuuaauaaaaacuua

SEQ ID NO: 2864359 - RNA, 12 nt, Human
aaaacaagugaa

SEQ ID NO: 2864360 - RNA, 15 nt, Human
aaaacaagugaaaua

SEQ ID NO: 2864361 - RNA, 15 nt, Human
aaaacaagaaugaaa

SEQ ID NO: 2864362 - RNA, 19 nt, Human
aaaacaaucauuugcuuuu

SEQ ID NO: 2864363 - RNA, 19 nt, Human
aaaacaaucuggaagaaaa

SEQ ID NO: 2864364 - RNA, 16 nt, Human
aaaacaaucacacuca

SEQ ID NO: 2864365 - RNA, 19 nt, Human
aaaaauuccuuuguguuuc

SEQ ID NO: 2864366 - RNA, 13 nt, Human
aaaaauuccagaa

SEQ ID NO: 2864367 - RNA, 18 nt, Human
aaaaauuccuaagaauca

SEQ ID NO: 2864368 - RNA, 13 nt, Human
aaaaauugaagag

SEQ ID NO: 2864369 - RNA, 19 nt, Human
aaaaauugaagagagauau

SEQ ID NO: 2864370 - RNA, 18 nt, Human
aaaaauugguucuuuauu

SEQ ID NO: 2864371 - RNA, 14 nt, Human
aaaaauugucuuca

SEQ ID NO: 2864372 - RNA, 19 nt, Human
aaaaagacuuuaaaaguga

SEQ ID NO: 2864373 - RNA, 19 nt, Human
aaaaagagaauuagauuau

SEQ ID NO: 2864374 - RNA, 14 nt, Human
aaaaagacagggcu

SEQ ID NO: 2864375 - RNA, 15 nt, Human
aaaaagacucuuuuu

SEQ ID NO: 2864376 - RNA, 13 nt, Human
aaaaagacaaaca

SEQ ID NO: 2864377 - RNA, 22 nt, Human
aaaaauucagcaaaccauuuuu

SEQ ID NO: 2864378 - RNA, 16 nt, Human
aaaaacauagaaaaau

SEQ ID NO: 2864379 - RNA, 14 nt, Human
aaaaacauauucuu

SEQ ID NO: 2864380 - RNA, 15 nt, Human
aaaaacauauucuug

SEQ ID NO: 2864381 - RNA, 14 nt, Human
aaaaaccaaaacug

SEQ ID NO: 2864382 - RNA, 16 nt, Human
aaaaaccacacaaaga

SEQ ID NO: 2864383 - RNA, 12 nt, Human
aaaaacauugcc

SEQ ID NO: 2864384 - RNA, 15 nt, Human
aaaaacauugccuuu

SEQ ID NO: 2864385 - RNA, 15 nt, Human
aaaaacugucuuuaa

SEQ ID NO: 2864386 - RNA, 20 nt, Human
aaaaacugucuuuaaaagag

SEQ ID NO: 2864387 - RNA, 21 nt, Human
aaaaacuuagugacaaaauag

SEQ ID NO: 2864388 - RNA, 22 nt, Human
aaaaacuugugcuauaaagcua

SEQ ID NO: 2864389 - RNA, 22 nt, Human
aaaaacuggaacggugaaggug

SEQ ID NO: 2864390 - RNA, 15 nt, Human
aaaaacuugaaaaua

SEQ ID NO: 2864391 - RNA, 22 nt, Human
cacuucugugagacccccacac

SEQ ID NO: 2864392 - RNA, 18 nt, Human
cacuucuuguuccccacu

SEQ ID NO: 2864393 - RNA, 21 nt, Human
cacuucugugagacccccaca

SEQ ID NO: 2864394 - RNA, 20 nt, Human
cacuucugugagacccccac

SEQ ID NO: 2864395 - RNA, 12 nt, Human
cacuucuuccuu

SEQ ID NO: 2864396 - RNA, 13 nt, Human
cacuucuuccuuu

SEQ ID NO: 2864397 - RNA, 15 nt, Human
cacuucuuccuuucu

SEQ ID NO: 2864398 - RNA, 16 nt, Human
cacuucuuccuuucuc

SEQ ID NO: 2864399 - RNA, 17 nt, Human
cacuucuuccuuucucu

SEQ ID NO: 2864400 - RNA, 19 nt, Human
cacuucuuccuuucucuuu

SEQ ID NO: 2864401 - RNA, 19 nt, Human
cacuucuggucaaucaaca

SEQ ID NO: 2864402 - RNA, 14 nt, Human
cacuucuguccaua

SEQ ID NO: 2864403 - RNA, 14 nt, Human
cacuucuguccugu

SEQ ID NO: 2864404 - RNA, 16 nt, Human
cacuucuguccuguga

SEQ ID NO: 2864405 - RNA, 18 nt, Human
cacuucuguccugugagg

SEQ ID NO: 2864406 - RNA, 13 nt, Human
cacuugcagacuc

SEQ ID NO: 2864407 - RNA, 23 nt, Human
cacuugaugauacaaugaacacu

SEQ ID NO: 2864408 - RNA, 14 nt, Human
cacuugauucauaa

SEQ ID NO: 2864409 - RNA, 15 nt, Human
cacuugauucauaaa

SEQ ID NO: 2864410 - RNA, 18 nt, Human
cacuugaggucaggaguu

SEQ ID NO: 2864411 - RNA, 19 nt, Human
cacuugaugacccccaacc

SEQ ID NO: 2864412 - RNA, 17 nt, Human
cacuugaaauucuuuca

SEQ ID NO: 2864413 - RNA, 17 nt, Human
cacuugaacaaaaucug

SEQ ID NO: 2864414 - RNA, 18 nt, Human
cacuugaacaaaaucugu

SEQ ID NO: 2864415 - RNA, 22 nt, Human
cacuugaacaaaaucuguugcc

SEQ ID NO: 2864416 - RNA, 15 nt, Human
cacuucuuuuauaac

SEQ ID NO: 2864417 - RNA, 13 nt, Human
cacuugccugggu

SEQ ID NO: 2864418 - RNA, 17 nt, Human
cacuuggcaucagcugg

SEQ ID NO: 2864419 - RNA, 19 nt, Human
cacuuggcaucagcuggcg

SEQ ID NO: 2864420 - RNA, 19 nt, Human
cacuuggggagauuugcca

SEQ ID NO: 2864421 - RNA, 19 nt, Human
cacuuggcccaaguggcag

SEQ ID NO: 2864422 - RNA, 22 nt, Human
cacuuggcccaaguggcagagc

SEQ ID NO: 2864423 - RNA, 22 nt, Human
cacuugcagacucuacagaggc

SEQ ID NO: 2864424 - RNA, 19 nt, Human
cacuugcagacucuacaga

SEQ ID NO: 2864425 - RNA, 18 nt, Human
cacuugcagacucuacag

SEQ ID NO: 2864426 - RNA, 14 nt, Human
cacuugcagacucu

SEQ ID NO: 2864427 - RNA, 24 nt, Human
cacuugcagacucuacagaggcca

SEQ ID NO: 2864428 - RNA, 14 nt, Human
cacuugauuccuug

SEQ ID NO: 2864429 - RNA, 12 nt, Human
cacuugcauguc

SEQ ID NO: 2864430 - RNA, 12 nt, Human
cacuugcauuuc

SEQ ID NO: 2864431 - RNA, 12 nt, Human
cacuugccuggg

SEQ ID NO: 2864432 - RNA, 15 nt, Human
cacuugcuacccuga

SEQ ID NO: 2864433 - RNA, 22 nt, Human
cacuugccgcgucgcccuccca

SEQ ID NO: 2864434 - RNA, 13 nt, Human
cacuugcccugcu

SEQ ID NO: 2864435 - RNA, 14 nt, Human
cacuugcccugcuc

SEQ ID NO: 2864436 - RNA, 17 nt, Human
cacuugcccugcucccu

SEQ ID NO: 2864437 - RNA, 18 nt, Human
cacuucaauaauugucca

SEQ ID NO: 2864438 - RNA, 19 nt, Human
cacuucaauaauuguccau

SEQ ID NO: 2864439 - RNA, 15 nt, Human
cacuucaaugcacau

SEQ ID NO: 2864440 - RNA, 17 nt, Human
cacuucaaggugacaga

SEQ ID NO: 2864441 - RNA, 18 nt, Human
cacuucaaggugacagaa

SEQ ID NO: 2864442 - RNA, 22 nt, Human
cacuucaaggugacagaaggac

SEQ ID NO: 2864443 - RNA, 18 nt, Human
cacuucacuccagccugg

SEQ ID NO: 2864444 - RNA, 16 nt, Human
cacuucagaauuccau

SEQ ID NO: 2864445 - RNA, 14 nt, Human
cacuguugauguau

SEQ ID NO: 2864446 - RNA, 15 nt, Human
cacuguugauguauc

SEQ ID NO: 2864447 - RNA, 16 nt, Human
cacuguugauguaucu

SEQ ID NO: 2864448 - RNA, 17 nt, Human
cacuguugauguaucug

SEQ ID NO: 2864449 - RNA, 18 nt, Human
cacuguugauguaucuga

SEQ ID NO: 2864450 - RNA, 13 nt, Human
cacuguugaauuu

SEQ ID NO: 2864451 - RNA, 17 nt, Human
cacuguugaaaauuauu

SEQ ID NO: 2864452 - RNA, 18 nt, Human
cacuguugaaaauuauuu

SEQ ID NO: 2864453 - RNA, 14 nt, Human
cacuguugaaaauu

SEQ ID NO: 2864454 - RNA, 16 nt, Human
cacuguugaaaauuau

SEQ ID NO: 2864455 - RNA, 17 nt, Human
cacuguugaauuuucuc

SEQ ID NO: 2864456 - RNA, 16 nt, Human
cacuuauuguaaauuu

SEQ ID NO: 2864457 - RNA, 21 nt, Human
cacuguugaaaauuauuuuaa

SEQ ID NO: 2864458 - RNA, 23 nt, Human
cacuucaggcucuucuccuuuca

SEQ ID NO: 2864459 - RNA, 16 nt, Human
cacuucauugagaguu

SEQ ID NO: 2864460 - RNA, 18 nt, Human
cacuucaggucaggaguu

SEQ ID NO: 2864461 - RNA, 14 nt, Human
cacuucaggcucuu

SEQ ID NO: 2864462 - RNA, 15 nt, Human
cacuucaggcucuuc

SEQ ID NO: 2864463 - RNA, 16 nt, Human
cacuucaggcucuucu

SEQ ID NO: 2864464 - RNA, 20 nt, Human
cacuucaggcucuucuccuu

SEQ ID NO: 2864465 - RNA, 22 nt, Human
cacuucugccauauucuguugg

SEQ ID NO: 2864466 - RNA, 16 nt, Human
cacuucucaucacaca

SEQ ID NO: 2864467 - RNA, 17 nt, Human
cacuucucaucacacac

SEQ ID NO: 2864468 - RNA, 18 nt, Human
cacuucucaucacacaca

SEQ ID NO: 2864469 - RNA, 19 nt, Human
cacuucucaucacacacau

SEQ ID NO: 2864470 - RNA, 20 nt, Human
cacuucucaucacacacaug

SEQ ID NO: 2864471 - RNA, 21 nt, Human
cacuucucaucacacacaugg

SEQ ID NO: 2864472 - RNA, 21 nt, Human
cacuucucuuaaacuugugaa

SEQ ID NO: 2864473 - RNA, 23 nt, Human
cacuucucuuaaacuugugaaug

SEQ ID NO: 2864474 - RNA, 21 nt, Human
cacuucgcgugcccucgcugc

SEQ ID NO: 2864475 - RNA, 17 nt, Human
cacuucggccagagcug

SEQ ID NO: 2864476 - RNA, 21 nt, Human
cacuucggccaggucacacga

SEQ ID NO: 2864477 - RNA, 23 nt, Human
cacuucggccaggucacacgacc

SEQ ID NO: 2864478 - RNA, 23 nt, Human
cacuucgggcuguguaaacacag

SEQ ID NO: 2864479 - RNA, 17 nt, Human
cacuucuaaauagcaau

SEQ ID NO: 2864480 - RNA, 18 nt, Human
cacuucuaaaugaagugc

SEQ ID NO: 2864481 - RNA, 17 nt, Human
cacuucuaaaugaagug

SEQ ID NO: 2864482 - RNA, 20 nt, Human
cacuucuaggguaugggaaa

SEQ ID NO: 2864483 - RNA, 21 nt, Human
cacuucucacaucuuaugcua

SEQ ID NO: 2864484 - RNA, 20 nt, Human
cacuuccaggggaaccugcc

SEQ ID NO: 2864485 - RNA, 22 nt, Human
cacuucauugagaguuuugucu

SEQ ID NO: 2864486 - RNA, 19 nt, Human
cacuuccaaaauucuuauu

SEQ ID NO: 2864487 - RNA, 20 nt, Human
cacuuccauaaucuggacuc

SEQ ID NO: 2864488 - RNA, 12 nt, Human
cacuuccagggg

SEQ ID NO: 2864489 - RNA, 17 nt, Human
cacuuccaggggaaccu

SEQ ID NO: 2864490 - RNA, 14 nt, Human
cacuuccaggggaa

SEQ ID NO: 2864491 - RNA, 17 nt, Human
cacuuccuguuuuauaa

SEQ ID NO: 2864492 - RNA, 23 nt, Human
cacuuccuacaagagcagccugu

SEQ ID NO: 2864493 - RNA, 17 nt, Human
cacuuccuacaagagca

SEQ ID NO: 2864494 - RNA, 12 nt, Human
cacuucccugcu

SEQ ID NO: 2864495 - RNA, 13 nt, Human
cacuucccugcug

SEQ ID NO: 2864496 - RNA, 14 nt, Human
cacuucccugcugc

SEQ ID NO: 2864497 - RNA, 15 nt, Human
cacuucccugcugcc

SEQ ID NO: 2864498 - RNA, 16 nt, Human
cacuucccugcugccu

SEQ ID NO: 2864499 - RNA, 18 nt, Human
cacuucccugcugccugu

SEQ ID NO: 2864500 - RNA, 15 nt, Human
cacuguggcugucug

SEQ ID NO: 2864501 - RNA, 19 nt, Human
cacuguggaacuaauaaau

SEQ ID NO: 2864502 - RNA, 20 nt, Human
cacuguggaacuaauaaaua

SEQ ID NO: 2864503 - RNA, 23 nt, Human
cacuguggaacuaauaaauacau

SEQ ID NO: 2864504 - RNA, 16 nt, Human
cacugugcucagggcu

SEQ ID NO: 2864505 - RNA, 13 nt, Human
cacugugcucagg

SEQ ID NO: 2864506 - RNA, 15 nt, Human
cacugugcucagggc

SEQ ID NO: 2864507 - RNA, 16 nt, Human
cacugugccaugugcc

SEQ ID NO: 2864508 - RNA, 15 nt, Human
cacugugccaugugc

SEQ ID NO: 2864509 - RNA, 18 nt, Human
cacugugccaugugccag

SEQ ID NO: 2864510 - RNA, 13 nt, Human
cacugugcaggug

SEQ ID NO: 2864511 - RNA, 22 nt, Human
cacugugcaggugcuauuguua

SEQ ID NO: 2864512 - RNA, 17 nt, Human
cacugugcccagcccgg

SEQ ID NO: 2864513 - RNA, 22 nt, Human
cacugugcccagcccggaccuu

SEQ ID NO: 2864514 - RNA, 14 nt, Human
cacugugcuauaaa

SEQ ID NO: 2864515 - RNA, 21 nt, Human
cacugugccuuugcaaaucag

SEQ ID NO: 2864516 - RNA, 22 nt, Human
cacugugccuuugcaaaucagu

SEQ ID NO: 2864517 - RNA, 16 nt, Human
cacugugggacucuuc

SEQ ID NO: 2864518 - RNA, 12 nt, Human
cacugugggugu

SEQ ID NO: 2864519 - RNA, 15 nt, Human
cacugugggugugug

SEQ ID NO: 2864520 - RNA, 16 nt, Human
cacuguggguguguga

SEQ ID NO: 2864521 - RNA, 19 nt, Human
cacugugggugugugacuc

SEQ ID NO: 2864522 - RNA, 20 nt, Human
cacugugggugugugacucu

SEQ ID NO: 2864523 - RNA, 18 nt, Human
cacugugguaaaugccac

SEQ ID NO: 2864524 - RNA, 19 nt, Human
cacugugguaaaugccaca

SEQ ID NO: 2864525 - RNA, 20 nt, Human
cacugugguaaaugccacac

SEQ ID NO: 2864526 - RNA, 13 nt, Human
cacugugguggca

SEQ ID NO: 2864527 - RNA, 14 nt, Human
cacuguucaugcug

SEQ ID NO: 2864528 - RNA, 16 nt, Human
cacuguucaugcuggc

SEQ ID NO: 2864529 - RNA, 17 nt, Human
cacuguucaugcuggcg

SEQ ID NO: 2864530 - RNA, 19 nt, Human
cacuguucaugcuggcgag

SEQ ID NO: 2864531 - RNA, 23 nt, Human
cacuguucuauucaucucaagga

SEQ ID NO: 2864532 - RNA, 21 nt, Human
cacuguucucccuucggugga

SEQ ID NO: 2864533 - RNA, 23 nt, Human
cacuguuacuuucguacauuggc

SEQ ID NO: 2864534 - RNA, 22 nt, Human
cacuguuagcuuuuuaaaacau

SEQ ID NO: 2864535 - RNA, 23 nt, Human
cacuguuagcuuuuuaaaacauu

SEQ ID NO: 2864536 - RNA, 17 nt, Human
cacuguauuuguaucuc

SEQ ID NO: 2864537 - RNA, 20 nt, Human
cacugucacccuccaccucu

SEQ ID NO: 2864538 - RNA, 14 nt, Human
cacuguauuuguau

SEQ ID NO: 2864539 - RNA, 16 nt, Human
cacugucacccuccac

SEQ ID NO: 2864540 - RNA, 16 nt, Human
cacugucaugcuucau

SEQ ID NO: 2864541 - RNA, 13 nt, Human
cacugucccuccu

SEQ ID NO: 2864542 - RNA, 14 nt, Human
cacugucccuccug

SEQ ID NO: 2864543 - RNA, 15 nt, Human
cacugucccuccugg

SEQ ID NO: 2864544 - RNA, 16 nt, Human
cacugucccuccuggu

SEQ ID NO: 2864545 - RNA, 20 nt, Human
cacugucccuccugguguca

SEQ ID NO: 2864546 - RNA, 18 nt, Human
cacuguccuccaagccag

SEQ ID NO: 2864547 - RNA, 22 nt, Human
cacuguccuccacacaagggaa

SEQ ID NO: 2864548 - RNA, 17 nt, Human
cacuguccuccaagcca

SEQ ID NO: 2864549 - RNA, 14 nt, Human
cacuguccuccaag

SEQ ID NO: 2864550 - RNA, 14 nt, Human
cacugugccaugug

SEQ ID NO: 2864551 - RNA, 16 nt, Human
cacugugaccuugacu

SEQ ID NO: 2864552 - RNA, 12 nt, Human
cacugugacaca

SEQ ID NO: 2864553 - RNA, 13 nt, Human
cacugugacacac

SEQ ID NO: 2864554 - RNA, 15 nt, Human
cacugugacacacua

SEQ ID NO: 2864555 - RNA, 16 nt, Human
cacugugacacacuac

SEQ ID NO: 2864556 - RNA, 17 nt, Human
cacugugacacacuaca

SEQ ID NO: 2864557 - RNA, 22 nt, Human
cacugugacacacuacaccaca

SEQ ID NO: 2864558 - RNA, 21 nt, Human
cacugucuuauggauucauuu

SEQ ID NO: 2864559 - RNA, 15 nt, Human
cacuguaugauuuau

SEQ ID NO: 2864560 - RNA, 22 nt, Human
cacuguaugauuuauaaacaga

SEQ ID NO: 2864561 - RNA, 18 nt, Human
cacuguaugcuggacggc

SEQ ID NO: 2864562 - RNA, 16 nt, Human
cacuguaugcuggacg

SEQ ID NO: 2864563 - RNA, 23 nt, Human
cacuguauaaauaggagaggaug

SEQ ID NO: 2864564 - RNA, 19 nt, Human
cacuguauaaauaggagag

SEQ ID NO: 2864565 - RNA, 21 nt, Human
cacuguauaaauaggagagga

SEQ ID NO: 2864566 - RNA, 15 nt, Human
cacuguauaaauagg

SEQ ID NO: 2864567 - RNA, 16 nt, Human
cacuguauaaauagga

SEQ ID NO: 2864568 - RNA, 17 nt, Human
cacuguauaaauaggag

SEQ ID NO: 2864569 - RNA, 18 nt, Human
cacuguauaaauaggaga

SEQ ID NO: 2864570 - RNA, 13 nt, Human
cacuguauaaaua

SEQ ID NO: 2864571 - RNA, 14 nt, Human
cacuguauaaauag

SEQ ID NO: 2864572 - RNA, 18 nt, Human
cacuguaguucuaagacu

SEQ ID NO: 2864573 - RNA, 20 nt, Human
cacuguaguucuaagacuca

SEQ ID NO: 2864574 - RNA, 14 nt, Human
cacuguaguucuaa

SEQ ID NO: 2864575 - RNA, 15 nt, Human
cacuguaguucuaag

SEQ ID NO: 2864576 - RNA, 16 nt, Human
cacuguaguucuaaga

SEQ ID NO: 2864577 - RNA, 17 nt, Human
cacuguaguucuaagac

SEQ ID NO: 2864578 - RNA, 18 nt, Human
cacuguagaaugauuuca

SEQ ID NO: 2864579 - RNA, 18 nt, Human
cacugcgcuuuauuuucu

SEQ ID NO: 2864580 - RNA, 17 nt, Human
cacuguaccauauagca

SEQ ID NO: 2864581 - RNA, 20 nt, Human
cacuguacaagguaccccuu

SEQ ID NO: 2864582 - RNA, 16 nt, Human
cacuggcuaaagauaa

SEQ ID NO: 2864583 - RNA, 13 nt, Human
cacuggccccuca

SEQ ID NO: 2864584 - RNA, 24 nt, Human
cacuggccccucaaaucguccagc

SEQ ID NO: 2864585 - RNA, 22 nt, Human
cacuguaagacucauucccuag

SEQ ID NO: 2864586 - RNA, 17 nt, Human
cacugacagccucccac

SEQ ID NO: 2864587 - RNA, 16 nt, Human
cacugacagccuccca

SEQ ID NO: 2864588 - RNA, 20 nt, Human
cacugacagccucccacccc

SEQ ID NO: 2864589 - RNA, 17 nt, Human
cacugaccauccacucu

SEQ ID NO: 2864590 - RNA, 16 nt, Human
cacugaccauccacuc

SEQ ID NO: 2864591 - RNA, 23 nt, Human
cacugaccauccacucuacccuc

SEQ ID NO: 2864592 - RNA, 14 nt, Human
cacugacccuucca

SEQ ID NO: 2864593 - RNA, 15 nt, Human
cacugacccuuccag

SEQ ID NO: 2864594 - RNA, 16 nt, Human
cacugacccuuccaga

SEQ ID NO: 2864595 - RNA, 18 nt, Human
cacugacccuuccagaca

SEQ ID NO: 2864596 - RNA, 19 nt, Human
cacugacccuuccagacau

SEQ ID NO: 2864597 - RNA, 21 nt, Human
cacugacccuuccagacauac

SEQ ID NO: 2864598 - RNA, 19 nt, Human
cacugacuacuggcucuca

SEQ ID NO: 2864599 - RNA, 20 nt, Human
cacugaccuuggagagacac

SEQ ID NO: 2864600 - RNA, 22 nt, Human
cacugaccuuggagagacacag

SEQ ID NO: 2864601 - RNA, 15 nt, Human
cacugacuacuggcu

SEQ ID NO: 2864602 - RNA, 23 nt, Human
cacugacauuguuggccaaagcc

SEQ ID NO: 2864603 - RNA, 15 nt, Human
cacugacagccuccc

SEQ ID NO: 2864604 - RNA, 14 nt, Human
cacugacagccucc

SEQ ID NO: 2864605 - RNA, 13 nt, Human
cacugacagccuc

SEQ ID NO: 2864606 - RNA, 19 nt, Human
cacucugucgcccagucug

SEQ ID NO: 2864607 - RNA, 16 nt, Human
cacucugucgcccagu

SEQ ID NO: 2864608 - RNA, 15 nt, Human
cacucugucgcccag

SEQ ID NO: 2864609 - RNA, 17 nt, Human
cacucugggcuccagag

SEQ ID NO: 2864610 - RNA, 18 nt, Human
cacucuggucuuggaauu

SEQ ID NO: 2864611 - RNA, 16 nt, Human
cacucugggcuccaga

SEQ ID NO: 2864612 - RNA, 13 nt, Human
cacucuggccuca

SEQ ID NO: 2864613 - RNA, 15 nt, Human
cacucugggcuccag

SEQ ID NO: 2864614 - RNA, 14 nt, Human
cacucugggcucca

SEQ ID NO: 2864615 - RNA, 12 nt, Human
cacucuggccuc

SEQ ID NO: 2864616 - RNA, 20 nt, Human
cacucugggcacacucugcc

SEQ ID NO: 2864617 - RNA, 21 nt, Human
cacucugggcacacucugcca

SEQ ID NO: 2864618 - RNA, 22 nt, Human
cacugauauuuuaccucuuauu

SEQ ID NO: 2864619 - RNA, 13 nt, Human
cacugcaaccucc

SEQ ID NO: 2864620 - RNA, 23 nt, Human
cacugcaaccuccgccucuuggg

SEQ ID NO: 2864621 - RNA, 16 nt, Human
cacugcaaccuccgcc

SEQ ID NO: 2864622 - RNA, 14 nt, Human
cacugcaaccuccg

SEQ ID NO: 2864623 - RNA, 16 nt, Human
cacugcaacuucugcc

SEQ ID NO: 2864624 - RNA, 23 nt, Human
cacugcaaccuucgccaccuggg

SEQ ID NO: 2864625 - RNA, 22 nt, Human
cacugcaaccuucgccaccugg

SEQ ID NO: 2864626 - RNA, 14 nt, Human
cacugcaaccuucg

SEQ ID NO: 2864627 - RNA, 17 nt, Human
cacugcaacuucugccu

SEQ ID NO: 2864628 - RNA, 18 nt, Human
cacugcaaucauauguga

SEQ ID NO: 2864629 - RNA, 12 nt, Human
cacugcaagucc

SEQ ID NO: 2864630 - RNA, 19 nt, Human
cacugcaaguccuuuugua

SEQ ID NO: 2864631 - RNA, 20 nt, Human
cacugcaaguccuuuuguaa

SEQ ID NO: 2864632 - RNA, 21 nt, Human
cacugcaaguccuuuuguaaa

SEQ ID NO: 2864633 - RNA, 22 nt, Human
cacugcaaguccuuuuguaaag

SEQ ID NO: 2864634 - RNA, 18 nt, Human
cacugcacagugcaucuc

SEQ ID NO: 2864635 - RNA, 19 nt, Human
cacugcacagugcaucuca

SEQ ID NO: 2864636 - RNA, 21 nt, Human
cacugcacagugcaucucagc

SEQ ID NO: 2864637 - RNA, 22 nt, Human
cacugcacagugcaucucagcc

SEQ ID NO: 2864638 - RNA, 16 nt, Human
cacugcaauccugucu

SEQ ID NO: 2864639 - RNA, 19 nt, Human
cacugcaauccugucuuuc

SEQ ID NO: 2864640 - RNA, 24 nt, Human
cacugaugggcaacccccagccug

SEQ ID NO: 2864641 - RNA, 18 nt, Human
cacugaugggcaaccccc

SEQ ID NO: 2864642 - RNA, 14 nt, Human
cacugaugggcaac

SEQ ID NO: 2864643 - RNA, 16 nt, Human
cacugaugcuuagaug

SEQ ID NO: 2864644 - RNA, 15 nt, Human
cacugaugcuuagau

SEQ ID NO: 2864645 - RNA, 17 nt, Human
cacugaugcuguucucu

SEQ ID NO: 2864646 - RNA, 23 nt, Human
cacugaugcuguucucuucuuca

SEQ ID NO: 2864647 - RNA, 19 nt, Human
cacugauauuuuaccucuu

SEQ ID NO: 2864648 - RNA, 18 nt, Human
cacugauauauuuuccag

SEQ ID NO: 2864649 - RNA, 13 nt, Human
cacugauauucag

SEQ ID NO: 2864650 - RNA, 15 nt, Human
cacugauauucagaa

SEQ ID NO: 2864651 - RNA, 16 nt, Human
cacugaggccugagac

SEQ ID NO: 2864652 - RNA, 19 nt, Human
cacugaggccugagaccca

SEQ ID NO: 2864653 - RNA, 21 nt, Human
cacugaggccugagacccagg

SEQ ID NO: 2864654 - RNA, 22 nt, Human
cacugaggccugagacccagga

SEQ ID NO: 2864655 - RNA, 23 nt, Human
cacugaggccugagacccaggac

SEQ ID NO: 2864656 - RNA, 15 nt, Human
cacugagcugucaug

SEQ ID NO: 2864657 - RNA, 19 nt, Human
cacugccuuuuuauuuaua

SEQ ID NO: 2864658 - RNA, 15 nt, Human
cacugccugggcuga

SEQ ID NO: 2864659 - RNA, 12 nt, Human
cacugccuuuuu

SEQ ID NO: 2864660 - RNA, 22 nt, Human
cacugccugauggaccugucac

SEQ ID NO: 2864661 - RNA, 15 nt, Human
cacugccucuggaau

SEQ ID NO: 2864662 - RNA, 19 nt, Human
cacugccugggcugacccc

SEQ ID NO: 2864663 - RNA, 13 nt, Human
cacugccuguaua

SEQ ID NO: 2864664 - RNA, 15 nt, Human
cacugccuguauacu

SEQ ID NO: 2864665 - RNA, 16 nt, Human
cacugccuguauacuu

SEQ ID NO: 2864666 - RNA, 17 nt, Human
cacugccuguauacuuu

SEQ ID NO: 2864667 - RNA, 23 nt, Human
cacugccuguauacuuuaguaug

SEQ ID NO: 2864668 - RNA, 13 nt, Human
cacugccugggcu

SEQ ID NO: 2864669 - RNA, 12 nt, Human
cacugccugggc

SEQ ID NO: 2864670 - RNA, 11 nt, Human
cacugccuggg

SEQ ID NO: 2864671 - RNA, 20 nt, Human
cacugccuucgauacaccgg

SEQ ID NO: 2864672 - RNA, 22 nt, Human
cacugccuucgauacaccgggc

SEQ ID NO: 2864673 - RNA, 17 nt, Human
cacugcucccugaagcc

SEQ ID NO: 2864674 - RNA, 18 nt, Human
cacugcucccugaagcca

SEQ ID NO: 2864675 - RNA, 19 nt, Human
cacugcucccugaagccag

SEQ ID NO: 2864676 - RNA, 20 nt, Human
cacugcucccugaagccagc

SEQ ID NO: 2864677 - RNA, 21 nt, Human
cacugcucccugaagccagcc

SEQ ID NO: 2864678 - RNA, 22 nt, Human
cacugcucccugaagccagccu

SEQ ID NO: 2864679 - RNA, 23 nt, Human
cacugcucccugaagccagccuu

SEQ ID NO: 2864680 - RNA, 14 nt, Human
cacugcucccugaa

SEQ ID NO: 2864681 - RNA, 11 nt, Human
cacugcucccu

SEQ ID NO: 2864682 - RNA, 12 nt, Human
cacugcucccua

SEQ ID NO: 2864683 - RNA, 21 nt, Human
cacugcucccuaagccagccu

SEQ ID NO: 2864684 - RNA, 22 nt, Human
cacugcucccuaagccagccug

SEQ ID NO: 2864685 - RNA, 23 nt, Human
cacugcucccuaagccagccugg

SEQ ID NO: 2864686 - RNA, 12 nt, Human
cacugcucuggu

SEQ ID NO: 2864687 - RNA, 20 nt, Human
cacugcucugaugaagagga

SEQ ID NO: 2864688 - RNA, 15 nt, Human
cacugcugcccagcc

SEQ ID NO: 2864689 - RNA, 17 nt, Human
cacugcucuccagccug

SEQ ID NO: 2864690 - RNA, 23 nt, Human
cacugcucuccagccugggaggc

SEQ ID NO: 2864691 - RNA, 13 nt, Human
cacugcugcagua

SEQ ID NO: 2864692 - RNA, 17 nt, Human
cacugcugcccagccuc

SEQ ID NO: 2864693 - RNA, 18 nt, Human
cacugcacuauagccuag

SEQ ID NO: 2864694 - RNA, 19 nt, Human
cacugcaccgggccacaga

SEQ ID NO: 2864695 - RNA, 18 nt, Human
cacugcaccgggccacag

SEQ ID NO: 2864696 - RNA, 16 nt, Human
cacugcaccgggccac

SEQ ID NO: 2864697 - RNA, 15 nt, Human
cacugcaccgggcca

SEQ ID NO: 2864698 - RNA, 14 nt, Human
cacugcaccgggcc

SEQ ID NO: 2864699 - RNA, 23 nt, Human
cacugcacagugcaucucagccc

SEQ ID NO: 2864700 - RNA, 12 nt, Human
cacugccucugc

SEQ ID NO: 2864701 - RNA, 13 nt, Human
cacugccucugcc

SEQ ID NO: 2864702 - RNA, 14 nt, Human
cacugccucugccu

SEQ ID NO: 2864703 - RNA, 15 nt, Human
cacugccucugccuu

SEQ ID NO: 2864704 - RNA, 16 nt, Human
cacugccucugccuua

SEQ ID NO: 2864705 - RNA, 23 nt, Human
cacugccucugccuuagaggagc

SEQ ID NO: 2864706 - RNA, 16 nt, Human
cacugccucuuccucc

SEQ ID NO: 2864707 - RNA, 15 nt, Human
cacugcccgcacacc

SEQ ID NO: 2864708 - RNA, 17 nt, Human
cacugcccgcacacccu

SEQ ID NO: 2864709 - RNA, 18 nt, Human
cacugcccgcacacccuc

SEQ ID NO: 2864710 - RNA, 19 nt, Human
cacugcccgcacacccuca

SEQ ID NO: 2864711 - RNA, 18 nt, Human
cacugcccucgcacggcc

SEQ ID NO: 2864712 - RNA, 20 nt, Human
cacugcuuuuggucugugug

SEQ ID NO: 2864713 - RNA, 18 nt, Human
cacugcuugaugaagcaa

SEQ ID NO: 2864714 - RNA, 19 nt, Human
cacugcuugaugaagcaag

SEQ ID NO: 2864715 - RNA, 23 nt, Human
cacugcuugaugaagcaaggaag

SEQ ID NO: 2864716 - RNA, 12 nt, Human
cacugcuggcug

SEQ ID NO: 2864717 - RNA, 13 nt, Human
cacugcuggcugc

SEQ ID NO: 2864718 - RNA, 14 nt, Human
cacugcuggcugcc

SEQ ID NO: 2864719 - RNA, 15 nt, Human
cacugcuggcugccu

SEQ ID NO: 2864720 - RNA, 16 nt, Human
cacugcuggcugccuu

SEQ ID NO: 2864721 - RNA, 21 nt, Human
cacugcuggcugccuuagaac

SEQ ID NO: 2864722 - RNA, 21 nt, Human
cacugcuuuuggucuguguga

SEQ ID NO: 2864723 - RNA, 13 nt, Human
cacugcuuuuggc

SEQ ID NO: 2864724 - RNA, 17 nt, Human
cacugcuuuuggccugg

SEQ ID NO: 2864725 - RNA, 18 nt, Human
cacugcuuuuggccugga

SEQ ID NO: 2864726 - RNA, 16 nt, Human
cacuggaccacugggc

SEQ ID NO: 2864727 - RNA, 15 nt, Human
cacuggacucaccuc

SEQ ID NO: 2864728 - RNA, 15 nt, Human
cacuggacuccggcc

SEQ ID NO: 2864729 - RNA, 16 nt, Human
cacuggacuccggccc

SEQ ID NO: 2864730 - RNA, 18 nt, Human
cacuggacucaccucccc

SEQ ID NO: 2864731 - RNA, 19 nt, Human
cacuggacuccggcccucc

SEQ ID NO: 2864732 - RNA, 20 nt, Human
cacuggagccaucucuuccu

SEQ ID NO: 2864733 - RNA, 18 nt, Human
cacuggcagacuguguaa

SEQ ID NO: 2864734 - RNA, 19 nt, Human
cacuggcagacuguguaaa

SEQ ID NO: 2864735 - RNA, 21 nt, Human
cacuggcagacuguguaaaau

SEQ ID NO: 2864736 - RNA, 14 nt, Human
cacuggccaucccu

SEQ ID NO: 2864737 - RNA, 23 nt, Human
cacuggaugcaaagaaaaucaga

SEQ ID NO: 2864738 - RNA, 19 nt, Human
cacuggaugcaaagaaaau

SEQ ID NO: 2864739 - RNA, 19 nt, Human
cacuggaguggcucgccag

SEQ ID NO: 2864740 - RNA, 20 nt, Human
cacuggaguggcucgccagg

SEQ ID NO: 2864741 - RNA, 21 nt, Human
cacuggaguggcucgccaggc

SEQ ID NO: 2864742 - RNA, 22 nt, Human
cacuggaguggcucgccaggcc

SEQ ID NO: 2864743 - RNA, 15 nt, Human
cacuggagcccagga

SEQ ID NO: 2864744 - RNA, 14 nt, Human
cacuggagcccagg

SEQ ID NO: 2864745 - RNA, 13 nt, Human
cacuggagcccag

SEQ ID NO: 2864746 - RNA, 12 nt, Human
cacuggagccca

SEQ ID NO: 2864747 - RNA, 11 nt, Human
cacuggagccc

SEQ ID NO: 2864748 - RNA, 23 nt, Human
cacgugguuggggcccugcccug

SEQ ID NO: 2864749 - RNA, 23 nt, Human
cacguguuuuauuccuguauguu

SEQ ID NO: 2864750 - RNA, 22 nt, Human
cacguguuuuauuccuguaugu

SEQ ID NO: 2864751 - RNA, 13 nt, Human
cacguguacuggc

SEQ ID NO: 2864752 - RNA, 16 nt, Human
cacguguacuggcucc

SEQ ID NO: 2864753 - RNA, 17 nt, Human
cacguguacuggcuccu

SEQ ID NO: 2864754 - RNA, 18 nt, Human
cacguguacuggcuccuc

SEQ ID NO: 2864755 - RNA, 16 nt, Human
cacgugggcucauaug

SEQ ID NO: 2864756 - RNA, 15 nt, Human
cacguguccuguagu

SEQ ID NO: 2864757 - RNA, 16 nt, Human
cacguguccuguaguu

SEQ ID NO: 2864758 - RNA, 14 nt, Human
cacgugucuuccac

SEQ ID NO: 2864759 - RNA, 14 nt, Human
cacuaaaauuuuag

SEQ ID NO: 2864760 - RNA, 15 nt, Human
cacuaaaauuuuagg

SEQ ID NO: 2864761 - RNA, 22 nt, Human
cacuaaacuuuacccaaaaacu

SEQ ID NO: 2864762 - RNA, 12 nt, Human
cacuaaagcagu

SEQ ID NO: 2864763 - RNA, 13 nt, Human
cacguucuuuccc

SEQ ID NO: 2864764 - RNA, 16 nt, Human
cacguugccucuacuu

SEQ ID NO: 2864765 - RNA, 18 nt, Human
cacguuccacaguugcca

SEQ ID NO: 2864766 - RNA, 14 nt, Human
cacguacacacaca

SEQ ID NO: 2864767 - RNA, 19 nt, Human
cacguacacacacauacac

SEQ ID NO: 2864768 - RNA, 18 nt, Human
cacguacacacacauaca

SEQ ID NO: 2864769 - RNA, 15 nt, Human
cacguauuccccuuc

SEQ ID NO: 2864770 - RNA, 20 nt, Human
cacgucacguguagugucca

SEQ ID NO: 2864771 - RNA, 20 nt, Human
cacgguuugaagccuggaac

SEQ ID NO: 2864772 - RNA, 20 nt, Human
cacguaaguuaauaagcaaa

SEQ ID NO: 2864773 - RNA, 19 nt, Human
cacgguuugaagccuggaa

SEQ ID NO: 2864774 - RNA, 15 nt, Human
cacguacaaaaucca

SEQ ID NO: 2864775 - RNA, 18 nt, Human
cacguggaggagcagugc

SEQ ID NO: 2864776 - RNA, 20 nt, Human
cacguggaggagcagugcag

SEQ ID NO: 2864777 - RNA, 21 nt, Human
cacguggaggagcagugcagg

SEQ ID NO: 2864778 - RNA, 23 nt, Human
cacguggagagcuggugcccgga

SEQ ID NO: 2864779 - RNA, 15 nt, Human
cacguggagagcugg

SEQ ID NO: 2864780 - RNA, 13 nt, Human
cacguggagagcu

SEQ ID NO: 2864781 - RNA, 21 nt, Human
cacgugcgcugggcacuuccc

SEQ ID NO: 2864782 - RNA, 22 nt, Human
cacguggcugcgugccccugcu

SEQ ID NO: 2864783 - RNA, 16 nt, Human
cacgugcagcucaagg

SEQ ID NO: 2864784 - RNA, 13 nt, Human
cacgugacagccg

SEQ ID NO: 2864785 - RNA, 15 nt, Human
cacgucugucuucac

SEQ ID NO: 2864786 - RNA, 14 nt, Human
cacgucugucuuca

SEQ ID NO: 2864787 - RNA, 18 nt, Human
cacgucuguaaucccagc

SEQ ID NO: 2864788 - RNA, 17 nt, Human
cacgguuugaagccugg

SEQ ID NO: 2864789 - RNA, 18 nt, Human
cacgguuugaagccugga

SEQ ID NO: 2864790 - RNA, 15 nt, Human
cacgguagugccuga

SEQ ID NO: 2864791 - RNA, 17 nt, Human
cacgguauuuauagaga

SEQ ID NO: 2864792 - RNA, 22 nt, Human
cacgguauuuauagagagagac

SEQ ID NO: 2864793 - RNA, 16 nt, Human
cacggucuucccucuu

SEQ ID NO: 2864794 - RNA, 14 nt, Human
cacgguagugccug

SEQ ID NO: 2864795 - RNA, 15 nt, Human
cacgggggcagcuga

SEQ ID NO: 2864796 - RNA, 22 nt, Human
cacgggggcagcugauacaaau

SEQ ID NO: 2864797 - RNA, 15 nt, Human
cacgggggccaagga

SEQ ID NO: 2864798 - RNA, 18 nt, Human
cacgggacggaagugcuu

SEQ ID NO: 2864799 - RNA, 12 nt, Human
cacggcugcuga

SEQ ID NO: 2864800 - RNA, 13 nt, Human
cacggcugcugag

SEQ ID NO: 2864801 - RNA, 20 nt, Human
cacggcucacugcagccuca

SEQ ID NO: 2864802 - RNA, 19 nt, Human
cacggcucacugcagccuc

SEQ ID NO: 2864803 - RNA, 17 nt, Human
cacggcucacugcagcc

SEQ ID NO: 2864804 - RNA, 16 nt, Human
cacggcucacugcagc

SEQ ID NO: 2864805 - RNA, 17 nt, Human
cacgcuggaccuugaac

SEQ ID NO: 2864806 - RNA, 14 nt, Human
cacgcuccuuccuc

SEQ ID NO: 2864807 - RNA, 20 nt, Human
cacgcuggaccuugaacugg

SEQ ID NO: 2864808 - RNA, 15 nt, Human
cacggcucacugcag

SEQ ID NO: 2864809 - RNA, 23 nt, Human
cacgcgugcacacaccagagccc

SEQ ID NO: 2864810 - RNA, 15 nt, Human
cacgcgcgcacacac

SEQ ID NO: 2864811 - RNA, 22 nt, Human
cacgcgcgcacacacacacaua

SEQ ID NO: 2864812 - RNA, 17 nt, Human
cacgcgcgcgcacacac

SEQ ID NO: 2864813 - RNA, 19 nt, Human
cacgcgcuucgacuuuucu

SEQ ID NO: 2864814 - RNA, 15 nt, Human
cacgcgggggccuug

SEQ ID NO: 2864815 - RNA, 14 nt, Human
cacgcguauuuaca

SEQ ID NO: 2864816 - RNA, 23 nt, Human
cacgcgcgcacacacacacauac

SEQ ID NO: 2864817 - RNA, 21 nt, Human
cacgcgugcacacaccagagc

SEQ ID NO: 2864818 - RNA, 16 nt, Human
cacgcgugcacacacc

SEQ ID NO: 2864819 - RNA, 15 nt, Human
cacgcgugcacacac

SEQ ID NO: 2864820 - RNA, 15 nt, Human
cacgccuuccccuca

SEQ ID NO: 2864821 - RNA, 16 nt, Human
cacgccuuccccucag

SEQ ID NO: 2864822 - RNA, 19 nt, Human
cacgcgccccccucccaga

SEQ ID NO: 2864823 - RNA, 20 nt, Human
cacgcgccccccucccagag

SEQ ID NO: 2864824 - RNA, 21 nt, Human
cacgcgccccccucccagagg

SEQ ID NO: 2864825 - RNA, 22 nt, Human
cacgcgccccccucccagaggc

SEQ ID NO: 2864826 - RNA, 23 nt, Human
cacgcgccccccucccagaggcg

SEQ ID NO: 2864827 - RNA, 17 nt, Human
cacgcgcccuuucuacc

SEQ ID NO: 2864828 - RNA, 13 nt, Human
cacgcgcgcacac

SEQ ID NO: 2864829 - RNA, 16 nt, Human
cacgccuguaauccca

SEQ ID NO: 2864830 - RNA, 23 nt, Human
cacgccugcaaacgcugccugcc

SEQ ID NO: 2864831 - RNA, 22 nt, Human
cacgccugcaaacgcugccugc

SEQ ID NO: 2864832 - RNA, 21 nt, Human
cacgccugcaaacgcugccug

SEQ ID NO: 2864833 - RNA, 22 nt, Human
cacgccucccacugggguccag

SEQ ID NO: 2864834 - RNA, 21 nt, Human
cacgccucucccuaggagaag

SEQ ID NO: 2864835 - RNA, 17 nt, Human
cacgccugcaaacgcug

SEQ ID NO: 2864836 - RNA, 17 nt, Human
cacgccucccacugggg

SEQ ID NO: 2864837 - RNA, 18 nt, Human
cacgccucccacuggggu

SEQ ID NO: 2864838 - RNA, 13 nt, Human
cacgccucccacu

SEQ ID NO: 2864839 - RNA, 14 nt, Human
cacgccucccacug

SEQ ID NO: 2864840 - RNA, 15 nt, Human
cacgccucccacugg

SEQ ID NO: 2864841 - RNA, 16 nt, Human
cacgccucccacuggg

SEQ ID NO: 2864842 - RNA, 22 nt, Human
cacgccuaugaucccagcacuu

SEQ ID NO: 2864843 - RNA, 21 nt, Human
cacgccuaugaucccagcacu

SEQ ID NO: 2864844 - RNA, 19 nt, Human
cacgccuaugaucccagca

SEQ ID NO: 2864845 - RNA, 18 nt, Human
cacgccuaugaucccagc

SEQ ID NO: 2864846 - RNA, 21 nt, Human
cacgcccuccccuccccugcu

SEQ ID NO: 2864847 - RNA, 16 nt, Human
cacgcccuccccuccc

SEQ ID NO: 2864848 - RNA, 20 nt, Human
cacgcccuccccuccccugc

SEQ ID NO: 2864849 - RNA, 24 nt, Human
cacgcccuccccuccccugcugca

SEQ ID NO: 2864850 - RNA, 21 nt, Human
cacgccgggaaccaagcagga

SEQ ID NO: 2864851 - RNA, 16 nt, Human
cacgagaccccggcuu

SEQ ID NO: 2864852 - RNA, 14 nt, Human
cacgauccugccac

SEQ ID NO: 2864853 - RNA, 15 nt, Human
cacgauccugccacc

SEQ ID NO: 2864854 - RNA, 19 nt, Human
cacgauccugccacccugu

SEQ ID NO: 2864855 - RNA, 13 nt, Human
cacgcaccugggu

SEQ ID NO: 2864856 - RNA, 12 nt, Human
cacgcacgcaca

SEQ ID NO: 2864857 - RNA, 13 nt, Human
cacgcacgcacac

SEQ ID NO: 2864858 - RNA, 14 nt, Human
cacgcacgcacaca

SEQ ID NO: 2864859 - RNA, 15 nt, Human
cacgcacgcacacac

SEQ ID NO: 2864860 - RNA, 14 nt, Human
cacgcacacacaca

SEQ ID NO: 2864861 - RNA, 13 nt, Human
cacgcacacacac

SEQ ID NO: 2864862 - RNA, 15 nt, Human
cacgcacacacacaa

SEQ ID NO: 2864863 - RNA, 12 nt, Human
cacgcacacaca

SEQ ID NO: 2864864 - RNA, 17 nt, Human
cacgauuuucuccagcu

SEQ ID NO: 2864865 - RNA, 19 nt, Human
cacgauuuucuccagcuca

SEQ ID NO: 2864866 - RNA, 21 nt, Human
cacgauuuucuccagcucaga

SEQ ID NO: 2864867 - RNA, 23 nt, Human
cacgauuuucuccagcucagaac

SEQ ID NO: 2864868 - RNA, 13 nt, Human
cacgcaacuugaa

SEQ ID NO: 2864869 - RNA, 15 nt, Human
cacgcaacuugaaau

SEQ ID NO: 2864870 - RNA, 15 nt, Human
cacgccacugcacua

SEQ ID NO: 2864871 - RNA, 13 nt, Human
cacgccacugcac

SEQ ID NO: 2864872 - RNA, 16 nt, Human
cacgcacgcacacaca

SEQ ID NO: 2864873 - RNA, 18 nt, Human
cacgcacauauacacaca

SEQ ID NO: 2864874 - RNA, 20 nt, Human
cacgcagauuagcaggccaa

SEQ ID NO: 2864875 - RNA, 22 nt, Human
cacgccacugcacuccagccug

SEQ ID NO: 2864876 - RNA, 14 nt, Human
cacgccacugcacu

SEQ ID NO: 2864877 - RNA, 15 nt, Human
cacgcccuccccucc

SEQ ID NO: 2864878 - RNA, 13 nt, Human
cacgcccuccccu

SEQ ID NO: 2864879 - RNA, 19 nt, Human
caccugugaguuuaaagca

SEQ ID NO: 2864880 - RNA, 20 nt, Human
caccugugaguuuaaagcaa

SEQ ID NO: 2864881 - RNA, 22 nt, Human
caccuguggaacauaaaaagga

SEQ ID NO: 2864882 - RNA, 10 nt, Human
caccuguggg

SEQ ID NO: 2864883 - RNA, 20 nt, Human
caccuguggguguagccagg

SEQ ID NO: 2864884 - RNA, 22 nt, Human
caccuguggguguagccaggua

SEQ ID NO: 2864885 - RNA, 22 nt, Human
caccuuagccugcccuccuuuc

SEQ ID NO: 2864886 - RNA, 13 nt, Human
caccuuagcuggc

SEQ ID NO: 2864887 - RNA, 17 nt, Human
caccuuaccaacuuucu

SEQ ID NO: 2864888 - RNA, 18 nt, Human
caccuuaccaacuuucug

SEQ ID NO: 2864889 - RNA, 19 nt, Human
caccuuaccaacuuucugu

SEQ ID NO: 2864890 - RNA, 14 nt, Human
caccuuccagcucc

SEQ ID NO: 2864891 - RNA, 15 nt, Human
caccuuccagcuccu

SEQ ID NO: 2864892 - RNA, 15 nt, Human
caccuucauuuugag

SEQ ID NO: 2864893 - RNA, 16 nt, Human
caccuucauuuugagg

SEQ ID NO: 2864894 - RNA, 22 nt, Human
caccuucauuuugaggggagga

SEQ ID NO: 2864895 - RNA, 18 nt, Human
caccuucccacuuuccca

SEQ ID NO: 2864896 - RNA, 16 nt, Human
caccuuccagcuccug

SEQ ID NO: 2864897 - RNA, 18 nt, Human
caccuuccagcuccugua

SEQ ID NO: 2864898 - RNA, 19 nt, Human
caccuucaauuccugggcc

SEQ ID NO: 2864899 - RNA, 18 nt, Human
caccuucaauuccugggc

SEQ ID NO: 2864900 - RNA, 17 nt, Human
caccuucaauuccuggg

SEQ ID NO: 2864901 - RNA, 18 nt, Human
cacgaauuugcuggggaa

SEQ ID NO: 2864902 - RNA, 22 nt, Human
cacgaauuugcuggggaaucuc

SEQ ID NO: 2864903 - RNA, 14 nt, Human
cacgaccggggcca

SEQ ID NO: 2864904 - RNA, 18 nt, Human
cacgaccggggccagcac

SEQ ID NO: 2864905 - RNA, 17 nt, Human
cacgaccuaggcaguag

SEQ ID NO: 2864906 - RNA, 23 nt, Human
cacgaccuaggcaguaggccggu

SEQ ID NO: 2864907 - RNA, 19 nt, Human
cacgacgcccucuccccac

SEQ ID NO: 2864908 - RNA, 15 nt, Human
cacgacgcugcagag

SEQ ID NO: 2864909 - RNA, 13 nt, Human
caccuugacaggg

SEQ ID NO: 2864910 - RNA, 23 nt, Human
caccuucguuuacuaugccugug

SEQ ID NO: 2864911 - RNA, 22 nt, Human
caccuucguuuacuaugccugu

SEQ ID NO: 2864912 - RNA, 21 nt, Human
caccuucguuuacuaugccug

SEQ ID NO: 2864913 - RNA, 13 nt, Human
caccuucccaugc

SEQ ID NO: 2864914 - RNA, 14 nt, Human
caccuucccaugcc

SEQ ID NO: 2864915 - RNA, 12 nt, Human
caccuucccuug

SEQ ID NO: 2864916 - RNA, 14 nt, Human
caccuucccuugcc

SEQ ID NO: 2864917 - RNA, 15 nt, Human
caccuucccuugcca

SEQ ID NO: 2864918 - RNA, 17 nt, Human
caccuucccuugccacu

SEQ ID NO: 2864919 - RNA, 18 nt, Human
caccuucccuugccacuu

SEQ ID NO: 2864920 - RNA, 19 nt, Human
caccuucccuugccacuuu

SEQ ID NO: 2864921 - RNA, 21 nt, Human
caccuucccuugccacuuugc

SEQ ID NO: 2864922 - RNA, 16 nt, Human
caccuugacagggcac

SEQ ID NO: 2864923 - RNA, 15 nt, Human
caccuugacagggca

SEQ ID NO: 2864924 - RNA, 18 nt, Human
caccuugacagggcacac

SEQ ID NO: 2864925 - RNA, 12 nt, Human
caccuucugagu

SEQ ID NO: 2864926 - RNA, 20 nt, Human
caccuucuuauuauauauau

SEQ ID NO: 2864927 - RNA, 14 nt, Human
cacucaagaagcag

SEQ ID NO: 2864928 - RNA, 15 nt, Human
cacucaagaagcagg

SEQ ID NO: 2864929 - RNA, 17 nt, Human
cacucaagaagcaggcu

SEQ ID NO: 2864930 - RNA, 13 nt, Human
cacucaagcuugg

SEQ ID NO: 2864931 - RNA, 13 nt, Human
cacucaagcacug

SEQ ID NO: 2864932 - RNA, 14 nt, Human
cacucaagcacuga

SEQ ID NO: 2864933 - RNA, 15 nt, Human
cacucaagcacugau

SEQ ID NO: 2864934 - RNA, 16 nt, Human
cacucaagcacugaua

SEQ ID NO: 2864935 - RNA, 23 nt, Human
cacucaagaagcaggcuacacug

SEQ ID NO: 2864936 - RNA, 19 nt, Human
cacucaagaagcaggcuac

SEQ ID NO: 2864937 - RNA, 20 nt, Human
cacucaagaagcaggcuaca

SEQ ID NO: 2864938 - RNA, 21 nt, Human
cacuauguugcccaggcaggu

SEQ ID NO: 2864939 - RNA, 20 nt, Human
cacuauguugcccaggcagg

SEQ ID NO: 2864940 - RNA, 12 nt, Human
cacuauuuuaga

SEQ ID NO: 2864941 - RNA, 19 nt, Human
cacuauuuaucugugcaaa

SEQ ID NO: 2864942 - RNA, 19 nt, Human
cacucagaagacacugaug

SEQ ID NO: 2864943 - RNA, 18 nt, Human
cacucagaagacacugau

SEQ ID NO: 2864944 - RNA, 22 nt, Human
cacucagaagacacugaugggc

SEQ ID NO: 2864945 - RNA, 17 nt, Human
cacuauaguuuaaaaca

SEQ ID NO: 2864946 - RNA, 12 nt, Human
cacucagaccug

SEQ ID NO: 2864947 - RNA, 20 nt, Human
cacucacauuuauucugcuc

SEQ ID NO: 2864948 - RNA, 19 nt, Human
cacucacauuuauucugcu

SEQ ID NO: 2864949 - RNA, 13 nt, Human
cacucacaugaca

SEQ ID NO: 2864950 - RNA, 14 nt, Human
cacucacaugacac

SEQ ID NO: 2864951 - RNA, 18 nt, Human
cacucaccaguguccccu

SEQ ID NO: 2864952 - RNA, 21 nt, Human
cacucaccaguguccccucca

SEQ ID NO: 2864953 - RNA, 14 nt, Human
cacucaccaugaag

SEQ ID NO: 2864954 - RNA, 17 nt, Human
cacucagaagacacuga

SEQ ID NO: 2864955 - RNA, 16 nt, Human
cacucagaagacacug

SEQ ID NO: 2864956 - RNA, 12 nt, Human
cacucagaagac

SEQ ID NO: 2864957 - RNA, 15 nt, Human
cacuaaaguauguaa

SEQ ID NO: 2864958 - RNA, 16 nt, Human
cacuaaaguauguaaa

SEQ ID NO: 2864959 - RNA, 15 nt, Human
cacuaaagccagccu

SEQ ID NO: 2864960 - RNA, 16 nt, Human
cacuaaagccagccug

SEQ ID NO: 2864961 - RNA, 17 nt, Human
cacuaaagccagccuga

SEQ ID NO: 2864962 - RNA, 18 nt, Human
cacuaaagccagccugac

SEQ ID NO: 2864963 - RNA, 20 nt, Human
cacuaaagccagccugaccu

SEQ ID NO: 2864964 - RNA, 21 nt, Human
cacuaaagccagccugaccuu

SEQ ID NO: 2864965 - RNA, 16 nt, Human
cacuaaaucagagaca

SEQ ID NO: 2864966 - RNA, 15 nt, Human
cacuaaaucagagac

SEQ ID NO: 2864967 - RNA, 13 nt, Human
cacuaaaucagag

SEQ ID NO: 2864968 - RNA, 22 nt, Human
cacuaaaguauguaaaguaugu

SEQ ID NO: 2864969 - RNA, 16 nt, Human
cacuaaccacgcugga

SEQ ID NO: 2864970 - RNA, 15 nt, Human
cacuaaccacgcugg

SEQ ID NO: 2864971 - RNA, 14 nt, Human
cacuaaccacgcug

SEQ ID NO: 2864972 - RNA, 19 nt, Human
cacuaacucaccagcccca

SEQ ID NO: 2864973 - RNA, 18 nt, Human
cacuaacucaccagcccc

SEQ ID NO: 2864974 - RNA, 15 nt, Human
cacuaacucaccagc

SEQ ID NO: 2864975 - RNA, 14 nt, Human
cacuaacucaccag

SEQ ID NO: 2864976 - RNA, 18 nt, Human
cacuaaccacgcuggacc

SEQ ID NO: 2864977 - RNA, 20 nt, Human
cacuaacguugagccccugg

SEQ ID NO: 2864978 - RNA, 18 nt, Human
cacuaaggugugcucuga

SEQ ID NO: 2864979 - RNA, 17 nt, Human
cacuaaggugugcucug

SEQ ID NO: 2864980 - RNA, 21 nt, Human
cacuagugaccccuucccugu

SEQ ID NO: 2864981 - RNA, 21 nt, Human
cacuauagccuaggugacaga

SEQ ID NO: 2864982 - RNA, 15 nt, Human
cacuauacaaacaaa

SEQ ID NO: 2864983 - RNA, 19 nt, Human
cacuaucauaguuaacaua

SEQ ID NO: 2864984 - RNA, 13 nt, Human
cacuauccaugca

SEQ ID NO: 2864985 - RNA, 16 nt, Human
cacuauccaugcacca

SEQ ID NO: 2864986 - RNA, 18 nt, Human
cacuauccaugcaccaaa

SEQ ID NO: 2864987 - RNA, 19 nt, Human
cacuauccaugcaccaaac

SEQ ID NO: 2864988 - RNA, 14 nt, Human
cacuauagccuagg

SEQ ID NO: 2864989 - RNA, 19 nt, Human
cacuauguugcccaggcag

SEQ ID NO: 2864990 - RNA, 18 nt, Human
cacuauguugcccaggca

SEQ ID NO: 2864991 - RNA, 17 nt, Human
cacuauguugcccaggc

SEQ ID NO: 2864992 - RNA, 16 nt, Human
cacuauguugcccagg

SEQ ID NO: 2864993 - RNA, 15 nt, Human
cacuauguugcccag

SEQ ID NO: 2864994 - RNA, 19 nt, Human
cacuaucccggcugcccuu

SEQ ID NO: 2864995 - RNA, 18 nt, Human
cacuaucccggcugcccu

SEQ ID NO: 2864996 - RNA, 13 nt, Human
cacucuccaucac

SEQ ID NO: 2864997 - RNA, 12 nt, Human
cacucuccccac

SEQ ID NO: 2864998 - RNA, 15 nt, Human
cacucuccccacacu

SEQ ID NO: 2864999 - RNA, 14 nt, Human
cacucuccccacac

SEQ ID NO: 2865000 - RNA, 21 nt, Human
cacucuccccacacuaaccug

SEQ ID NO: 2865001 - RNA, 21 nt, Human
cacucuacccucccacccccu

SEQ ID NO: 2865002 - RNA, 11 nt, Human
cacucuagauu

SEQ ID NO: 2865003 - RNA, 14 nt, Human
cacucuagauucca

SEQ ID NO: 2865004 - RNA, 17 nt, Human
cacucuacccucccacc

SEQ ID NO: 2865005 - RNA, 16 nt, Human
cacucuacccucccac

SEQ ID NO: 2865006 - RNA, 15 nt, Human
cacucuacccuccca

SEQ ID NO: 2865007 - RNA, 17 nt, Human
cacucuacccuauacaa

SEQ ID NO: 2865008 - RNA, 19 nt, Human
cacucuacccucccacccc

SEQ ID NO: 2865009 - RNA, 18 nt, Human
cacucuacccucccaccc

SEQ ID NO: 2865010 - RNA, 14 nt, Human
cacucuacuuagca

SEQ ID NO: 2865011 - RNA, 18 nt, Human
cacucuaccagugcaggc

SEQ ID NO: 2865012 - RNA, 22 nt, Human
cacucgugugcaacagacaagu

SEQ ID NO: 2865013 - RNA, 20 nt, Human
cacucgugugcaacagacaa

SEQ ID NO: 2865014 - RNA, 20 nt, Human
cacucgcuucccccauagcc

SEQ ID NO: 2865015 - RNA, 16 nt, Human
cacucgcuucccccau

SEQ ID NO: 2865016 - RNA, 14 nt, Human
cacucggcuuugga

SEQ ID NO: 2865017 - RNA, 22 nt, Human
cacucggcauuucaaaugugcu

SEQ ID NO: 2865018 - RNA, 11 nt, Human
cacuccuugca

SEQ ID NO: 2865019 - RNA, 15 nt, Human
cacuccuugcaucaa

SEQ ID NO: 2865020 - RNA, 13 nt, Human
cacucgcuucccc

SEQ ID NO: 2865021 - RNA, 15 nt, Human
cacucucuaccagau

SEQ ID NO: 2865022 - RNA, 13 nt, Human
cacucuccuugca

SEQ ID NO: 2865023 - RNA, 15 nt, Human
cacucuccuugcagu

SEQ ID NO: 2865024 - RNA, 17 nt, Human
cacucuccuugcaguuc

SEQ ID NO: 2865025 - RNA, 23 nt, Human
cacucugccccccccccccaucu

SEQ ID NO: 2865026 - RNA, 15 nt, Human
cacucugcucgccuu

SEQ ID NO: 2865027 - RNA, 18 nt, Human
cacucugcucgccuuagc

SEQ ID NO: 2865028 - RNA, 11 nt, Human
cacucugcccc

SEQ ID NO: 2865029 - RNA, 13 nt, Human
cacucucuggaag

SEQ ID NO: 2865030 - RNA, 14 nt, Human
cacucucuggaagc

SEQ ID NO: 2865031 - RNA, 17 nt, Human
cacucucuucccuuucc

SEQ ID NO: 2865032 - RNA, 20 nt, Human
cacucugacgcaaaaccacu

SEQ ID NO: 2865033 - RNA, 16 nt, Human
cacucugccagcaaag

SEQ ID NO: 2865034 - RNA, 17 nt, Human
cacucugccagcaaaga

SEQ ID NO: 2865035 - RNA, 20 nt, Human
cacucugccagcaaagagga

SEQ ID NO: 2865036 - RNA, 12 nt, Human
cacucugccagg

SEQ ID NO: 2865037 - RNA, 13 nt, Human
cacucugccaggg

SEQ ID NO: 2865038 - RNA, 14 nt, Human
cacucugccagggc

SEQ ID NO: 2865039 - RNA, 15 nt, Human
cacucugccagggca

SEQ ID NO: 2865040 - RNA, 16 nt, Human
cacucugccagggcag

SEQ ID NO: 2865041 - RNA, 19 nt, Human
cacucugccagggcagugc

SEQ ID NO: 2865042 - RNA, 16 nt, Human
cacucugauagaauua

SEQ ID NO: 2865043 - RNA, 15 nt, Human
cacucugcagacugc

SEQ ID NO: 2865044 - RNA, 18 nt, Human
cacucugcagacugcuag

SEQ ID NO: 2865045 - RNA, 14 nt, Human
cacucugcugcuua

SEQ ID NO: 2865046 - RNA, 11 nt, Human
cacucugcugc

SEQ ID NO: 2865047 - RNA, 12 nt, Human
cacucugcugcu

SEQ ID NO: 2865048 - RNA, 21 nt, Human
cacucaggaggcugaggcagg

SEQ ID NO: 2865049 - RNA, 16 nt, Human
cacucaguccauagca

SEQ ID NO: 2865050 - RNA, 22 nt, Human
cacucagcucuuggcuccacug

SEQ ID NO: 2865051 - RNA, 11 nt, Human
cacucagcccc

SEQ ID NO: 2865052 - RNA, 12 nt, Human
cacucagccccu

SEQ ID NO: 2865053 - RNA, 13 nt, Human
cacucagccccua

SEQ ID NO: 2865054 - RNA, 15 nt, Human
cacucagccccuagg

SEQ ID NO: 2865055 - RNA, 16 nt, Human
cacucagccccuagga

SEQ ID NO: 2865056 - RNA, 17 nt, Human
cacucagccccuaggag

SEQ ID NO: 2865057 - RNA, 18 nt, Human
cacucagccccuaggagu

SEQ ID NO: 2865058 - RNA, 22 nt, Human
cacucagccccuaggaguauau

SEQ ID NO: 2865059 - RNA, 19 nt, Human
cacucaggccaacaagcca

SEQ ID NO: 2865060 - RNA, 12 nt, Human
cacucaggcugg

SEQ ID NO: 2865061 - RNA, 13 nt, Human
cacucaggcugga

SEQ ID NO: 2865062 - RNA, 14 nt, Human
cacucaggcuggag

SEQ ID NO: 2865063 - RNA, 20 nt, Human
cacucaggcuggaguacagu

SEQ ID NO: 2865064 - RNA, 20 nt, Human
cacucaggggucacugaggc

SEQ ID NO: 2865065 - RNA, 20 nt, Human
cacucaggaggcugaggcag

SEQ ID NO: 2865066 - RNA, 19 nt, Human
cacucaggaggcugaggca

SEQ ID NO: 2865067 - RNA, 15 nt, Human
cacucauuccuguag

SEQ ID NO: 2865068 - RNA, 16 nt, Human
cacucauccccucacu

SEQ ID NO: 2865069 - RNA, 19 nt, Human
cacucagcuuccuacccac

SEQ ID NO: 2865070 - RNA, 19 nt, Human
cacucagugcagcaauaua

SEQ ID NO: 2865071 - RNA, 16 nt, Human
cacucaguuuaugcug

SEQ ID NO: 2865072 - RNA, 13 nt, Human
cacucauuccugu

SEQ ID NO: 2865073 - RNA, 14 nt, Human
cacuccugccaagg

SEQ ID NO: 2865074 - RNA, 13 nt, Human
cacuccugccaag

SEQ ID NO: 2865075 - RNA, 16 nt, Human
cacuccucagggcagc

SEQ ID NO: 2865076 - RNA, 13 nt, Human
cacuccucagggc

SEQ ID NO: 2865077 - RNA, 12 nt, Human
cacuccucccuc

SEQ ID NO: 2865078 - RNA, 13 nt, Human
cacuccucccucc

SEQ ID NO: 2865079 - RNA, 14 nt, Human
cacuccucccuccg

SEQ ID NO: 2865080 - RNA, 22 nt, Human
cacucccuucccaugacccagg

SEQ ID NO: 2865081 - RNA, 14 nt, Human
cacucccuccagca

SEQ ID NO: 2865082 - RNA, 15 nt, Human
cacucccuccagcac

SEQ ID NO: 2865083 - RNA, 17 nt, Human
cacucccuccagcacaa

SEQ ID NO: 2865084 - RNA, 19 nt, Human
cacucccuccagcacaaac

SEQ ID NO: 2865085 - RNA, 20 nt, Human
cacucccuccagcacaaaca

SEQ ID NO: 2865086 - RNA, 21 nt, Human
cacucccuugguggcaagagc

SEQ ID NO: 2865087 - RNA, 21 nt, Human
cacuccggugugccugcagcc

SEQ ID NO: 2865088 - RNA, 20 nt, Human
cacuccggugugccugcagc

SEQ ID NO: 2865089 - RNA, 19 nt, Human
cacuccggugugccugcag

SEQ ID NO: 2865090 - RNA, 17 nt, Human
cacuccggugugccugc

SEQ ID NO: 2865091 - RNA, 22 nt, Human
cacuccggugugccugcagccc

SEQ ID NO: 2865092 - RNA, 13 nt, Human
cacuccuaccugg

SEQ ID NO: 2865093 - RNA, 14 nt, Human
cacuccuaccuggu

SEQ ID NO: 2865094 - RNA, 12 nt, Human
cacuccuagaga

SEQ ID NO: 2865095 - RNA, 19 nt, Human
cacuccuagagaacgcagc

SEQ ID NO: 2865096 - RNA, 21 nt, Human
cacuccuagagaacgcagccc

SEQ ID NO: 2865097 - RNA, 22 nt, Human
cacuccuagagaacgcagcccu

SEQ ID NO: 2865098 - RNA, 13 nt, Human
caccucccugccc

SEQ ID NO: 2865099 - RNA, 14 nt, Human
caccucccugccca

SEQ ID NO: 2865100 - RNA, 15 nt, Human
caccucccugcccag

SEQ ID NO: 2865101 - RNA, 16 nt, Human
caccucccugcccagg

SEQ ID NO: 2865102 - RNA, 17 nt, Human
caccucccugcccaggc

SEQ ID NO: 2865103 - RNA, 23 nt, Human
caccucccugcccaggccggcca

SEQ ID NO: 2865104 - RNA, 14 nt, Human
caccuccucaugua

SEQ ID NO: 2865105 - RNA, 14 nt, Human
caccucccugaccc

SEQ ID NO: 2865106 - RNA, 11 nt, Human
caccuccugcc

SEQ ID NO: 2865107 - RNA, 13 nt, Human
caccuccugccuc

SEQ ID NO: 2865108 - RNA, 14 nt, Human
caccuccugccucg

SEQ ID NO: 2865109 - RNA, 22 nt, Human
caccuccuugucacuuuauuac

SEQ ID NO: 2865110 - RNA, 14 nt, Human
caccuccuucaauu

SEQ ID NO: 2865111 - RNA, 15 nt, Human
caccucuacccaaac

SEQ ID NO: 2865112 - RNA, 16 nt, Human
caccucuacccaaacc

SEQ ID NO: 2865113 - RNA, 18 nt, Human
caccucuacccaaacccu

SEQ ID NO: 2865114 - RNA, 21 nt, Human
caccucuacccaaacccuagg

SEQ ID NO: 2865115 - RNA, 22 nt, Human
caccucuacccaaacccuaggu

SEQ ID NO: 2865116 - RNA, 21 nt, Human
caccucccccaucucuucugg

SEQ ID NO: 2865117 - RNA, 14 nt, Human
caccucccccaucu

SEQ ID NO: 2865118 - RNA, 14 nt, Human
caccuccccacgcc

SEQ ID NO: 2865119 - RNA, 17 nt, Human
caccuccccacgcccuc

SEQ ID NO: 2865120 - RNA, 19 nt, Human
caccuccccacgcccuccc

SEQ ID NO: 2865121 - RNA, 21 nt, Human
caccuccccacgcccuccccu

SEQ ID NO: 2865122 - RNA, 9 nt, Human
caccucccc

SEQ ID NO: 2865123 - RNA, 13 nt, Human
caccuccccacgc

SEQ ID NO: 2865124 - RNA, 12 nt, Human
caccucccagga

SEQ ID NO: 2865125 - RNA, 11 nt, Human
caccucccagg

SEQ ID NO: 2865126 - RNA, 13 nt, Human
caccuccaguccc

SEQ ID NO: 2865127 - RNA, 22 nt, Human
caccuccagucccccuauccuu

SEQ ID NO: 2865128 - RNA, 12 nt, Human
caccuccagccc

SEQ ID NO: 2865129 - RNA, 14 nt, Human
caccuccagcccgg

SEQ ID NO: 2865130 - RNA, 16 nt, Human
caccuccagcccggga

SEQ ID NO: 2865131 - RNA, 17 nt, Human
caccuccagcccgggag

SEQ ID NO: 2865132 - RNA, 18 nt, Human
caccuccagcccgggagc

SEQ ID NO: 2865133 - RNA, 20 nt, Human
caccuccagcccgggagccu

SEQ ID NO: 2865134 - RNA, 21 nt, Human
caccuccagcccgggagccua

SEQ ID NO: 2865135 - RNA, 22 nt, Human
caccuccagcccgggagccuag

SEQ ID NO: 2865136 - RNA, 10 nt, Human
caccucccag

SEQ ID NO: 2865137 - RNA, 15 nt, Human
caccuccaucccaga

SEQ ID NO: 2865138 - RNA, 21 nt, Human
caccuccauuaaagucugaau

SEQ ID NO: 2865139 - RNA, 18 nt, Human
caccgggccacagagaaa

SEQ ID NO: 2865140 - RNA, 15 nt, Human
caccgggccacagag

SEQ ID NO: 2865141 - RNA, 22 nt, Human
caccgggcacucagaagacacu

SEQ ID NO: 2865142 - RNA, 15 nt, Human
caccgggcacucaga

SEQ ID NO: 2865143 - RNA, 18 nt, Human
caccgguccagcuggccu

SEQ ID NO: 2865144 - RNA, 17 nt, Human
caccgguccagcuggcc

SEQ ID NO: 2865145 - RNA, 16 nt, Human
caccgguccagcuggc

SEQ ID NO: 2865146 - RNA, 15 nt, Human
caccgguccagcugg

SEQ ID NO: 2865147 - RNA, 20 nt, Human
caccggggacaggccgcagc

SEQ ID NO: 2865148 - RNA, 15 nt, Human
caccggggccucgga

SEQ ID NO: 2865149 - RNA, 13 nt, Human
caccgggccugga

SEQ ID NO: 2865150 - RNA, 23 nt, Human
caccucaguucccuuggccucag

SEQ ID NO: 2865151 - RNA, 22 nt, Human
caccucaguucccuuggccuca

SEQ ID NO: 2865152 - RNA, 21 nt, Human
caccucaguucccuuggccuc

SEQ ID NO: 2865153 - RNA, 20 nt, Human
caccucaguucccuuggccu

SEQ ID NO: 2865154 - RNA, 19 nt, Human
caccucaguucccuuggcc

SEQ ID NO: 2865155 - RNA, 18 nt, Human
caccucaguucccuuggc

SEQ ID NO: 2865156 - RNA, 17 nt, Human
caccucaguucccuugg

SEQ ID NO: 2865157 - RNA, 11 nt, Human
caccucaguuc

SEQ ID NO: 2865158 - RNA, 23 nt, Human
caccucaggccaggugcaguggc

SEQ ID NO: 2865159 - RNA, 20 nt, Human
caccgugccuggccacgccc

SEQ ID NO: 2865160 - RNA, 14 nt, Human
caccguacugugga

SEQ ID NO: 2865161 - RNA, 15 nt, Human
caccgugccuggcca

SEQ ID NO: 2865162 - RNA, 18 nt, Human
caccggccgauggagaca

SEQ ID NO: 2865163 - RNA, 12 nt, Human
caccggcgcgcu

SEQ ID NO: 2865164 - RNA, 14 nt, Human
caccgggcacucag

SEQ ID NO: 2865165 - RNA, 13 nt, Human
caccgcccgucug

SEQ ID NO: 2865166 - RNA, 15 nt, Human
caccgcccgucugug

SEQ ID NO: 2865167 - RNA, 23 nt, Human
caccgcccucccuccccagcucc

SEQ ID NO: 2865168 - RNA, 15 nt, Human
caccgacuagccagg

SEQ ID NO: 2865169 - RNA, 21 nt, Human
caccgcggcgcuucccagcac

SEQ ID NO: 2865170 - RNA, 19 nt, Human
caccgcugcuccacgcgcu

SEQ ID NO: 2865171 - RNA, 18 nt, Human
caccgcuucugccuuuuc

SEQ ID NO: 2865172 - RNA, 19 nt, Human
caccgcuuuuguucucgca

SEQ ID NO: 2865173 - RNA, 23 nt, Human
caccugaagacucauucuucugu

SEQ ID NO: 2865174 - RNA, 15 nt, Human
caccugaagacucau

SEQ ID NO: 2865175 - RNA, 14 nt, Human
caccugaagacuca

SEQ ID NO: 2865176 - RNA, 14 nt, Human
caccucuucacccc

SEQ ID NO: 2865177 - RNA, 20 nt, Human
caccucuucaccccccacuc

SEQ ID NO: 2865178 - RNA, 22 nt, Human
caccucugugaccucaggcacu

SEQ ID NO: 2865179 - RNA, 12 nt, Human
caccucugugcc

SEQ ID NO: 2865180 - RNA, 13 nt, Human
caccucuguggca

SEQ ID NO: 2865181 - RNA, 20 nt, Human
caccucuguggcauugaaau

SEQ ID NO: 2865182 - RNA, 20 nt, Human
caccucugugaccucaggca

SEQ ID NO: 2865183 - RNA, 19 nt, Human
caccucuggacuggcuaga

SEQ ID NO: 2865184 - RNA, 13 nt, Human
caccucuguaauu

SEQ ID NO: 2865185 - RNA, 14 nt, Human
caccucuguaauuu

SEQ ID NO: 2865186 - RNA, 19 nt, Human
caccucugucauuuguugu

SEQ ID NO: 2865187 - RNA, 13 nt, Human
caccucugugacc

SEQ ID NO: 2865188 - RNA, 14 nt, Human
caccucugugaccu

SEQ ID NO: 2865189 - RNA, 15 nt, Human
caccucugugaccuc

SEQ ID NO: 2865190 - RNA, 17 nt, Human
caccucugugaccucag

SEQ ID NO: 2865191 - RNA, 18 nt, Human
caccucugugaccucagg

SEQ ID NO: 2865192 - RNA, 19 nt, Human
caccucugugaccucaggc

SEQ ID NO: 2865193 - RNA, 18 nt, Human
caccucuggacuggcuag

SEQ ID NO: 2865194 - RNA, 17 nt, Human
caccucuggacuggcua

SEQ ID NO: 2865195 - RNA, 13 nt, Human
caccucuggacug

SEQ ID NO: 2865196 - RNA, 12 nt, Human
caccucugcuuu

SEQ ID NO: 2865197 - RNA, 16 nt, Human
caccucugcuuucuga

SEQ ID NO: 2865198 - RNA, 22 nt, Human
caccucugcggaccccagcugu

SEQ ID NO: 2865199 - RNA, 20 nt, Human
caccucugcggaccccagcu

SEQ ID NO: 2865200 - RNA, 21 nt, Human
caccucugcggaccccagcug

SEQ ID NO: 2865201 - RNA, 12 nt, Human
caccucugcgga

SEQ ID NO: 2865202 - RNA, 18 nt, Human
caccucugcggaccccag

SEQ ID NO: 2865203 - RNA, 19 nt, Human
caccucugcggaccccagc

SEQ ID NO: 2865204 - RNA, 19 nt, Human
caccucugccagaagaucc

SEQ ID NO: 2865205 - RNA, 12 nt, Human
caccucugccag

SEQ ID NO: 2865206 - RNA, 13 nt, Human
caccucugccaga

SEQ ID NO: 2865207 - RNA, 16 nt, Human
caccucucuccuuugc

SEQ ID NO: 2865208 - RNA, 21 nt, Human
caccugagcaggaccucugaa

SEQ ID NO: 2865209 - RNA, 20 nt, Human
caccugagcaggaccucuga

SEQ ID NO: 2865210 - RNA, 19 nt, Human
caccugagcaggaccucug

SEQ ID NO: 2865211 - RNA, 16 nt, Human
caccugagcaggaccu

SEQ ID NO: 2865212 - RNA, 18 nt, Human
caccugagguuaggaguu

SEQ ID NO: 2865213 - RNA, 23 nt, Human
caccugcacuuaaggcacucugu

SEQ ID NO: 2865214 - RNA, 23 nt, Human
caccugagucacccuaccugugc

SEQ ID NO: 2865215 - RNA, 19 nt, Human
caccugagucacccuaccu

SEQ ID NO: 2865216 - RNA, 17 nt, Human
caccugcaaagcucugu

SEQ ID NO: 2865217 - RNA, 20 nt, Human
caccugcaaagcucuguggc

SEQ ID NO: 2865218 - RNA, 15 nt, Human
caccugcuggaguga

SEQ ID NO: 2865219 - RNA, 14 nt, Human
caccugcucuucua

SEQ ID NO: 2865220 - RNA, 19 nt, Human
caccucuccuacucacuua

SEQ ID NO: 2865221 - RNA, 15 nt, Human
caccugcagggcugc

SEQ ID NO: 2865222 - RNA, 14 nt, Human
caccuggcuuguuu

SEQ ID NO: 2865223 - RNA, 16 nt, Human
caccuggcuuguuuau

SEQ ID NO: 2865224 - RNA, 21 nt, Human
caccuggcuuguuuauuuugu

SEQ ID NO: 2865225 - RNA, 22 nt, Human
caccuggcuuguuuauuuugug

SEQ ID NO: 2865226 - RNA, 23 nt, Human
caccuguacucaggaggcugagg

SEQ ID NO: 2865227 - RNA, 11 nt, Human
caccuguacag

SEQ ID NO: 2865228 - RNA, 12 nt, Human
caccuguacagu

SEQ ID NO: 2865229 - RNA, 18 nt, Human
caccuguacaguggaacc

SEQ ID NO: 2865230 - RNA, 15 nt, Human
caccuguacucagga

SEQ ID NO: 2865231 - RNA, 22 nt, Human
caccuguacucaggaggcugag

SEQ ID NO: 2865232 - RNA, 16 nt, Human
caccuguacucaggag

SEQ ID NO: 2865233 - RNA, 18 nt, Human
caccugucucagccuccc

SEQ ID NO: 2865234 - RNA, 17 nt, Human
caccugucucagccucc

SEQ ID NO: 2865235 - RNA, 15 nt, Human
caccugucucagccu

SEQ ID NO: 2865236 - RNA, 19 nt, Human
caccugucucagccuccca

SEQ ID NO: 2865237 - RNA, 18 nt, Human
caccuguaaucccagcac

SEQ ID NO: 2865238 - RNA, 20 nt, Human
caccuguaaucccagcacac

SEQ ID NO: 2865239 - RNA, 16 nt, Human
caccuguaaucccagc

SEQ ID NO: 2865240 - RNA, 17 nt, Human
caccuguaaucccagca

SEQ ID NO: 2865241 - RNA, 18 nt, Human
caccuguaaagugccuua

SEQ ID NO: 2865242 - RNA, 14 nt, Human
caccuguaagaaac

SEQ ID NO: 2865243 - RNA, 20 nt, Human
caccugguacucccucucag

SEQ ID NO: 2865244 - RNA, 16 nt, Human
caccugggcuuaagaa

SEQ ID NO: 2865245 - RNA, 19 nt, Human
caccugggcuuaagaaauc

SEQ ID NO: 2865246 - RNA, 18 nt, Human
caccugggucuuuaugca

SEQ ID NO: 2865247 - RNA, 14 nt, Human
caccuggggcugcu

SEQ ID NO: 2865248 - RNA, 15 nt, Human
caccuggggcugcug

SEQ ID NO: 2865249 - RNA, 18 nt, Human
cacccucaaccucuucug

SEQ ID NO: 2865250 - RNA, 16 nt, Human
cacccuaguuucccug

SEQ ID NO: 2865251 - RNA, 17 nt, Human
cacccuaguuucccuga

SEQ ID NO: 2865252 - RNA, 20 nt, Human
cacccuagucccuuccccuc

SEQ ID NO: 2865253 - RNA, 18 nt, Human
cacccuagucccuucccc

SEQ ID NO: 2865254 - RNA, 15 nt, Human
cacccucacucugcc

SEQ ID NO: 2865255 - RNA, 16 nt, Human
cacccucacucugcca

SEQ ID NO: 2865256 - RNA, 17 nt, Human
cacccucacucugccag

SEQ ID NO: 2865257 - RNA, 18 nt, Human
cacccucacucugccagg

SEQ ID NO: 2865258 - RNA, 19 nt, Human
cacccucacucugccaggg

SEQ ID NO: 2865259 - RNA, 21 nt, Human
cacccucacucugccagggca

SEQ ID NO: 2865260 - RNA, 22 nt, Human
cacccucacucugccagggcag

SEQ ID NO: 2865261 - RNA, 17 nt, Human
cacccugucuaaaaaac

SEQ ID NO: 2865262 - RNA, 17 nt, Human
cacccgugagcgccugu

SEQ ID NO: 2865263 - RNA, 18 nt, Human
cacccgugagcgccugug

SEQ ID NO: 2865264 - RNA, 23 nt, Human
cacccgugagcgccugugcacac

SEQ ID NO: 2865265 - RNA, 17 nt, Human
cacccuagucccuuccc

SEQ ID NO: 2865266 - RNA, 16 nt, Human
cacccuagucccuucc

SEQ ID NO: 2865267 - RNA, 16 nt, Human
cacccuaccugugccu

SEQ ID NO: 2865268 - RNA, 16 nt, Human
cacccuagcccucucc

SEQ ID NO: 2865269 - RNA, 21 nt, Human
cacccggccccugcugguuca

SEQ ID NO: 2865270 - RNA, 18 nt, Human
cacccggccccugcuggu

SEQ ID NO: 2865271 - RNA, 17 nt, Human
cacccggccccugcugg

SEQ ID NO: 2865272 - RNA, 16 nt, Human
cacccggccccugcug

SEQ ID NO: 2865273 - RNA, 14 nt, Human
cacccggccccugc

SEQ ID NO: 2865274 - RNA, 13 nt, Human
cacccggccccug

SEQ ID NO: 2865275 - RNA, 12 nt, Human
cacccggccccu

SEQ ID NO: 2865276 - RNA, 16 nt, Human
caccccucugcccuca

SEQ ID NO: 2865277 - RNA, 10 nt, Human
caccccugcu

SEQ ID NO: 2865278 - RNA, 13 nt, Human
caccccuccagga

SEQ ID NO: 2865279 - RNA, 17 nt, Human
caccccuaccccuggcu

SEQ ID NO: 2865280 - RNA, 18 nt, Human
caccccuaccccuggcug

SEQ ID NO: 2865281 - RNA, 24 nt, Human
caccccuaccccuggcuguacugc

SEQ ID NO: 2865282 - RNA, 15 nt, Human
caccccuaaagagau

SEQ ID NO: 2865283 - RNA, 12 nt, Human
caccccucacuc

SEQ ID NO: 2865284 - RNA, 17 nt, Human
caccccucacucuggcc

SEQ ID NO: 2865285 - RNA, 18 nt, Human
caccccucaguugugcag

SEQ ID NO: 2865286 - RNA, 22 nt, Human
caccccuccagaacacggcuca

SEQ ID NO: 2865287 - RNA, 12 nt, Human
caccccuuagau

SEQ ID NO: 2865288 - RNA, 17 nt, Human
caccccuguccucacug

SEQ ID NO: 2865289 - RNA, 18 nt, Human
caccccuguccucacugc

SEQ ID NO: 2865290 - RNA, 20 nt, Human
caccccuguccucacugcuc

SEQ ID NO: 2865291 - RNA, 21 nt, Human
caccccuguccucacugcucc

SEQ ID NO: 2865292 - RNA, 23 nt, Human
caccccuguccucacugcucccu

SEQ ID NO: 2865293 - RNA, 23 nt, Human
cacccuuccccuccuucucccuu

SEQ ID NO: 2865294 - RNA, 13 nt, Human
cacccuuccuucu

SEQ ID NO: 2865295 - RNA, 22 nt, Human
cacccuuccccuccuucucccu

SEQ ID NO: 2865296 - RNA, 14 nt, Human
cacccuuccccucc

SEQ ID NO: 2865297 - RNA, 13 nt, Human
cacccuuccccuc

SEQ ID NO: 2865298 - RNA, 14 nt, Human
cacccuuagaaaau

SEQ ID NO: 2865299 - RNA, 15 nt, Human
cacccuuagaaaaug

SEQ ID NO: 2865300 - RNA, 19 nt, Human
cacccuuagaaaauguguc

SEQ ID NO: 2865301 - RNA, 18 nt, Human
cacccuguuuggauuuuu

SEQ ID NO: 2865302 - RNA, 19 nt, Human
cacccuguuuggauuuuua

SEQ ID NO: 2865303 - RNA, 20 nt, Human
cacccuguuuggauuuuuaa

SEQ ID NO: 2865304 - RNA, 21 nt, Human
cacccuguuuggauuuuuaau

SEQ ID NO: 2865305 - RNA, 22 nt, Human
cacccuguuuggauuuuuaauu

SEQ ID NO: 2865306 - RNA, 17 nt, Human
cacccuuaacccaagga

SEQ ID NO: 2865307 - RNA, 18 nt, Human
cacccuuaacccaaggag

SEQ ID NO: 2865308 - RNA, 20 nt, Human
cacccuuaacccaaggagca

SEQ ID NO: 2865309 - RNA, 23 nt, Human
cacccuuaacccaaggagcacag

SEQ ID NO: 2865310 - RNA, 15 nt, Human
cacccuguggcccug

SEQ ID NO: 2865311 - RNA, 16 nt, Human
cacccuguggcccugg

SEQ ID NO: 2865312 - RNA, 17 nt, Human
cacccuguggcccuggc

SEQ ID NO: 2865313 - RNA, 20 nt, Human
cacccuguggcccuggcucu

SEQ ID NO: 2865314 - RNA, 18 nt, Human
cacccuuggccugucuca

SEQ ID NO: 2865315 - RNA, 15 nt, Human
cacccuuggccuguc

SEQ ID NO: 2865316 - RNA, 13 nt, Human
cacccuuggccug

SEQ ID NO: 2865317 - RNA, 12 nt, Human
cacccuuggccu

SEQ ID NO: 2865318 - RNA, 13 nt, Human
cacccuucuuuuc

SEQ ID NO: 2865319 - RNA, 14 nt, Human
cacccuucuuuucu

SEQ ID NO: 2865320 - RNA, 15 nt, Human
cacccuucuuuucuc

SEQ ID NO: 2865321 - RNA, 16 nt, Human
cacccuucuuuucuca

SEQ ID NO: 2865322 - RNA, 19 nt, Human
cacccuucuuuucucaugu

SEQ ID NO: 2865323 - RNA, 20 nt, Human
cacccuucuuuucucaugug

SEQ ID NO: 2865324 - RNA, 21 nt, Human
cacccuucuuuucucaugugu

SEQ ID NO: 2865325 - RNA, 19 nt, Human
cacccuuggacaagacaaa

SEQ ID NO: 2865326 - RNA, 23 nt, Human
cacccuuggccugucucaucccc

SEQ ID NO: 2865327 - RNA, 21 nt, Human
cacccuuggccugucucaucc

SEQ ID NO: 2865328 - RNA, 13 nt, Human
caccccucccucu

SEQ ID NO: 2865329 - RNA, 19 nt, Human
cacccuuucuugacaaaac

SEQ ID NO: 2865330 - RNA, 21 nt, Human
caccgaaguggacuggccccu

SEQ ID NO: 2865331 - RNA, 19 nt, Human
caccgacgcgucuccuguu

SEQ ID NO: 2865332 - RNA, 22 nt, Human
caccgaaguggacuggccccug

SEQ ID NO: 2865333 - RNA, 23 nt, Human
caccgaaguggacuggccccugg

SEQ ID NO: 2865334 - RNA, 17 nt, Human
caccgacgcgucuccug

SEQ ID NO: 2865335 - RNA, 18 nt, Human
caccgacgcgucuccugu

SEQ ID NO: 2865336 - RNA, 12 nt, Human
caccgagugggg

SEQ ID NO: 2865337 - RNA, 21 nt, Human
cagacacugaccauccacucu

SEQ ID NO: 2865338 - RNA, 11 nt, Human
cagacauaaag

SEQ ID NO: 2865339 - RNA, 12 nt, Human
cagacauaaagc

SEQ ID NO: 2865340 - RNA, 13 nt, Human
cagacauaaagcc

SEQ ID NO: 2865341 - RNA, 14 nt, Human
cagacauaaagcca

SEQ ID NO: 2865342 - RNA, 15 nt, Human
cagacauaaagccau

SEQ ID NO: 2865343 - RNA, 22 nt, Human
cagacauaaagccauguuuccu

SEQ ID NO: 2865344 - RNA, 12 nt, Human
cagacauguuuu

SEQ ID NO: 2865345 - RNA, 18 nt, Human
cagacauguuuuccguga

SEQ ID NO: 2865346 - RNA, 22 nt, Human
cagacauguuuuccgugaaaac

SEQ ID NO: 2865347 - RNA, 23 nt, Human
cagacaugguggcaugcaccugc

SEQ ID NO: 2865348 - RNA, 22 nt, Human
cagacauccauguuuguaaaac

SEQ ID NO: 2865349 - RNA, 23 nt, Human
cagacauccauguuuguaaaacu

SEQ ID NO: 2865350 - RNA, 15 nt, Human
cagacaucucugcac

SEQ ID NO: 2865351 - RNA, 17 nt, Human
cagacaucucugcaccc

SEQ ID NO: 2865352 - RNA, 19 nt, Human
cagacauccauguuuguaa

SEQ ID NO: 2865353 - RNA, 17 nt, Human
cagacauacgaaacaca

SEQ ID NO: 2865354 - RNA, 18 nt, Human
cagacauacgaaacacaa

SEQ ID NO: 2865355 - RNA, 19 nt, Human
cagacauacgaaacacaaa

SEQ ID NO: 2865356 - RNA, 13 nt, Human
cagacauauuuaa

SEQ ID NO: 2865357 - RNA, 14 nt, Human
cagacauauuuaac

SEQ ID NO: 2865358 - RNA, 15 nt, Human
cagacauauuuaacu

SEQ ID NO: 2865359 - RNA, 17 nt, Human
cagacauauuuaacugg

SEQ ID NO: 2865360 - RNA, 15 nt, Human
cagacaucaugaauu

SEQ ID NO: 2865361 - RNA, 18 nt, Human
cagacacgccuuccccuc

SEQ ID NO: 2865362 - RNA, 19 nt, Human
cagacacgccuuccccuca

SEQ ID NO: 2865363 - RNA, 22 nt, Human
cagacaccuugacagggcacac

SEQ ID NO: 2865364 - RNA, 20 nt, Human
cagacaccuugacagggcac

SEQ ID NO: 2865365 - RNA, 19 nt, Human
cagacaccuugacagggca

SEQ ID NO: 2865366 - RNA, 14 nt, Human
cagacacccucaac

SEQ ID NO: 2865367 - RNA, 15 nt, Human
cagacacccucaacc

SEQ ID NO: 2865368 - RNA, 21 nt, Human
cagacacccucaaccucuucu

SEQ ID NO: 2865369 - RNA, 23 nt, Human
cagacacaggcccggcuccaggc

SEQ ID NO: 2865370 - RNA, 22 nt, Human
cagacacaggcccggcuccagg

SEQ ID NO: 2865371 - RNA, 21 nt, Human
cagacacaggcccggcuccag

SEQ ID NO: 2865372 - RNA, 18 nt, Human
cagacacaggcccggcuc

SEQ ID NO: 2865373 - RNA, 17 nt, Human
cagacacaggcccggcu

SEQ ID NO: 2865374 - RNA, 15 nt, Human
cagacacaggcccgg

SEQ ID NO: 2865375 - RNA, 14 nt, Human
cagacacaggcccg

SEQ ID NO: 2865376 - RNA, 13 nt, Human
cagacacaggccc

SEQ ID NO: 2865377 - RNA, 13 nt, Human
cagaauugaucau

SEQ ID NO: 2865378 - RNA, 15 nt, Human
cagaauugaaacacu

SEQ ID NO: 2865379 - RNA, 16 nt, Human
cagaauugaaacacuu

SEQ ID NO: 2865380 - RNA, 17 nt, Human
cagaauugaaacacuuu

SEQ ID NO: 2865381 - RNA, 21 nt, Human
cagaauugaaacacuuuuuug

SEQ ID NO: 2865382 - RNA, 19 nt, Human
cagaauugugcaaauggaa

SEQ ID NO: 2865383 - RNA, 20 nt, Human
cagaauuaugauggaagaca

SEQ ID NO: 2865384 - RNA, 21 nt, Human
cagaauuaugauggaagacag

SEQ ID NO: 2865385 - RNA, 13 nt, Human
cagaauuauuuuu

SEQ ID NO: 2865386 - RNA, 15 nt, Human
cagaauuauuuuuaa

SEQ ID NO: 2865387 - RNA, 21 nt, Human
cagaauuauuuuuaaaaagaa

SEQ ID NO: 2865388 - RNA, 18 nt, Human
cagaaugcugcaggacuu

SEQ ID NO: 2865389 - RNA, 15 nt, Human
cagaaucucgcucug

SEQ ID NO: 2865390 - RNA, 13 nt, Human
cagaaucuuuguu

SEQ ID NO: 2865391 - RNA, 15 nt, Human
cagaaucuuuguuaa

SEQ ID NO: 2865392 - RNA, 16 nt, Human
cagaaucuuuguuaag

SEQ ID NO: 2865393 - RNA, 12 nt, Human
cagaaugaaaaa

SEQ ID NO: 2865394 - RNA, 13 nt, Human
cagaaugaaaaau

SEQ ID NO: 2865395 - RNA, 14 nt, Human
cagaaugaaaaaug

SEQ ID NO: 2865396 - RNA, 15 nt, Human
cagaaugaaaaauga

SEQ ID NO: 2865397 - RNA, 16 nt, Human
cagaaugaaaaaugaa

SEQ ID NO: 2865398 - RNA, 17 nt, Human
cagaaugaaaaaugaaa

SEQ ID NO: 2865399 - RNA, 18 nt, Human
cagaaugaaaaaugaaag

SEQ ID NO: 2865400 - RNA, 19 nt, Human
cagaaugaaaaaugaaaga

SEQ ID NO: 2865401 - RNA, 21 nt, Human
cagaaugaaaaaugaaagaug

SEQ ID NO: 2865402 - RNA, 22 nt, Human
cagaaugaaaaaugaaagauga

SEQ ID NO: 2865403 - RNA, 23 nt, Human
cagaaugaaaaaugaaagaugau

SEQ ID NO: 2865404 - RNA, 19 nt, Human
cagaauggugaucacucca

SEQ ID NO: 2865405 - RNA, 21 nt, Human
cagaaugcuguacaucuauuu

SEQ ID NO: 2865406 - RNA, 18 nt, Human
cagaaugcuguacaucua

SEQ ID NO: 2865407 - RNA, 17 nt, Human
cagaaugcuguacaucu

SEQ ID NO: 2865408 - RNA, 16 nt, Human
cagaaugcuguacauc

SEQ ID NO: 2865409 - RNA, 11 nt, Human
cagaaugcugu

SEQ ID NO: 2865410 - RNA, 12 nt, Human
cagaauguaucu

SEQ ID NO: 2865411 - RNA, 13 nt, Human
cagaauguaucug

SEQ ID NO: 2865412 - RNA, 14 nt, Human
cagaauguaucugu

SEQ ID NO: 2865413 - RNA, 17 nt, Human
cagaauguaucugugaa

SEQ ID NO: 2865414 - RNA, 18 nt, Human
cagaauguaucugugaag

SEQ ID NO: 2865415 - RNA, 16 nt, Human
cagaauguuuuacugu

SEQ ID NO: 2865416 - RNA, 20 nt, Human
cagaauguuuuacugugaaa

SEQ ID NO: 2865417 - RNA, 17 nt, Human
cagaauguuuuuaaaau

SEQ ID NO: 2865418 - RNA, 15 nt, Human
cagaauuuuaggaac

SEQ ID NO: 2865419 - RNA, 21 nt, Human
cagaauuuuaggaacuucaga

SEQ ID NO: 2865420 - RNA, 23 nt, Human
cagaauuuuaggaacuucagaga

SEQ ID NO: 2865421 - RNA, 16 nt, Human
cagaauuuggaaaucc

SEQ ID NO: 2865422 - RNA, 22 nt, Human
cagaauuuggaaauccuaguuu

SEQ ID NO: 2865423 - RNA, 16 nt, Human
cagaauuuuggaagau

SEQ ID NO: 2865424 - RNA, 15 nt, Human
cagaauuuuuuuugu

SEQ ID NO: 2865425 - RNA, 18 nt, Human
cagaauuuuuuuuguugu

SEQ ID NO: 2865426 - RNA, 19 nt, Human
cagaauuuuuuuuguuguu

SEQ ID NO: 2865427 - RNA, 16 nt, Human
cagacaacagaaguca

SEQ ID NO: 2865428 - RNA, 15 nt, Human
cagacaacagaaguc

SEQ ID NO: 2865429 - RNA, 14 nt, Human
cagacaacagaagu

SEQ ID NO: 2865430 - RNA, 13 nt, Human
cagacaacagaag

SEQ ID NO: 2865431 - RNA, 22 nt, Human
cagacaaaugugguuacacacu

SEQ ID NO: 2865432 - RNA, 16 nt, Human
cagacaauacguuuga

SEQ ID NO: 2865433 - RNA, 17 nt, Human
cagacaauaugugagug

SEQ ID NO: 2865434 - RNA, 22 nt, Human
cagacaauaugugagugccuuu

SEQ ID NO: 2865435 - RNA, 21 nt, Human
cagacaagugacuguaucugu

SEQ ID NO: 2865436 - RNA, 21 nt, Human
cagacaaaguaauuccucuca

SEQ ID NO: 2865437 - RNA, 22 nt, Human
cagacaacagaagucaugaagc

SEQ ID NO: 2865438 - RNA, 17 nt, Human
cagacaacagaagucau

SEQ ID NO: 2865439 - RNA, 12 nt, Human
cagacacacaca

SEQ ID NO: 2865440 - RNA, 14 nt, Human
cagacacacacaca

SEQ ID NO: 2865441 - RNA, 11 nt, Human
cagacacacac

SEQ ID NO: 2865442 - RNA, 17 nt, Human
cagacaaggaaauaccc

SEQ ID NO: 2865443 - RNA, 13 nt, Human
cagacacacacac

SEQ ID NO: 2865444 - RNA, 14 nt, Human
cagacacacacacg

SEQ ID NO: 2865445 - RNA, 15 nt, Human
cagacacacacacgc

SEQ ID NO: 2865446 - RNA, 16 nt, Human
cagacacacacacgca

SEQ ID NO: 2865447 - RNA, 17 nt, Human
cagacacacacacgcac

SEQ ID NO: 2865448 - RNA, 18 nt, Human
cagacacacacacgcacg

SEQ ID NO: 2865449 - RNA, 21 nt, Human
cagacacacacacgcacgcac

SEQ ID NO: 2865450 - RNA, 22 nt, Human
cagacacacacacgcacgcaca

SEQ ID NO: 2865451 - RNA, 14 nt, Human
cagacuacacagga

SEQ ID NO: 2865452 - RNA, 16 nt, Human
cagacuacacaggaug

SEQ ID NO: 2865453 - RNA, 15 nt, Human
cagacuacuauuuuc

SEQ ID NO: 2865454 - RNA, 16 nt, Human
cagacuacuauuuucu

SEQ ID NO: 2865455 - RNA, 19 nt, Human
cagacuacuauuuucuuuu

SEQ ID NO: 2865456 - RNA, 20 nt, Human
cagacuacuauuuucuuuuu

SEQ ID NO: 2865457 - RNA, 22 nt, Human
cagacucaaaugcucagaccag

SEQ ID NO: 2865458 - RNA, 23 nt, Human
cagacucaaaugcucagaccagc

SEQ ID NO: 2865459 - RNA, 13 nt, Human
cagaccugcuuuu

SEQ ID NO: 2865460 - RNA, 20 nt, Human
cagaccugcuuuuugaaaug

SEQ ID NO: 2865461 - RNA, 21 nt, Human
cagaccugcuuuuugaaauga

SEQ ID NO: 2865462 - RNA, 23 nt, Human
cagaccugcuuuuugaaaugaaa

SEQ ID NO: 2865463 - RNA, 23 nt, Human
cagaccuccccagccccuagccc

SEQ ID NO: 2865464 - RNA, 12 nt, Human
cagaccucugga

SEQ ID NO: 2865465 - RNA, 13 nt, Human
cagaccucuggau

SEQ ID NO: 2865466 - RNA, 12 nt, Human
cagaccucccca

SEQ ID NO: 2865467 - RNA, 14 nt, Human
cagaccuccccagc

SEQ ID NO: 2865468 - RNA, 15 nt, Human
cagaccuccccagcc

SEQ ID NO: 2865469 - RNA, 16 nt, Human
cagaccuccccagccc

SEQ ID NO: 2865470 - RNA, 18 nt, Human
cagaccuccccagccccu

SEQ ID NO: 2865471 - RNA, 19 nt, Human
cagaccuccccagccccua

SEQ ID NO: 2865472 - RNA, 21 nt, Human
cagaccuccccagccccuagc

SEQ ID NO: 2865473 - RNA, 22 nt, Human
cagaccuccccagccccuagcc

SEQ ID NO: 2865474 - RNA, 23 nt, Human
cagacgccggggacagaggccug

SEQ ID NO: 2865475 - RNA, 13 nt, Human
cagaccuuuuauc

SEQ ID NO: 2865476 - RNA, 21 nt, Human
cagaccuucuaggacgccacc

SEQ ID NO: 2865477 - RNA, 23 nt, Human
cagagaaaguacuucuccacccu

SEQ ID NO: 2865478 - RNA, 19 nt, Human
cagagaaaguacuucucca

SEQ ID NO: 2865479 - RNA, 17 nt, Human
cagagaaaggcaaggga

SEQ ID NO: 2865480 - RNA, 15 nt, Human
cagagaaagggacaa

SEQ ID NO: 2865481 - RNA, 18 nt, Human
cagagaaagaggaagcuu

SEQ ID NO: 2865482 - RNA, 13 nt, Human
cagagaaagagga

SEQ ID NO: 2865483 - RNA, 15 nt, Human
cagagaaagaggaag

SEQ ID NO: 2865484 - RNA, 17 nt, Human
cagagaaagaggaagcu

SEQ ID NO: 2865485 - RNA, 15 nt, Human
cagacuuuuguacau

SEQ ID NO: 2865486 - RNA, 16 nt, Human
cagacuuuuguacauc

SEQ ID NO: 2865487 - RNA, 20 nt, Human
cagacuuuuuuuaaauagua

SEQ ID NO: 2865488 - RNA, 14 nt, Human
cagacuuggcucag

SEQ ID NO: 2865489 - RNA, 21 nt, Human
cagacuaggauaauguccaac

SEQ ID NO: 2865490 - RNA, 13 nt, Human
cagacuugucaag

SEQ ID NO: 2865491 - RNA, 24 nt, Human
cagacuuccuugagacacggagcc

SEQ ID NO: 2865492 - RNA, 18 nt, Human
cagacuugccaugugacu

SEQ ID NO: 2865493 - RNA, 19 nt, Human
cagacuugccaugugacuc

SEQ ID NO: 2865494 - RNA, 20 nt, Human
cagacuugccaugugacucu

SEQ ID NO: 2865495 - RNA, 21 nt, Human
cagacuugccaugugacucug

SEQ ID NO: 2865496 - RNA, 15 nt, Human
cagacuuccuugaga

SEQ ID NO: 2865497 - RNA, 21 nt, Human
cagacuucccugaauguauug

SEQ ID NO: 2865498 - RNA, 13 nt, Human
cagacucauccug

SEQ ID NO: 2865499 - RNA, 18 nt, Human
cagacucauccugaacag

SEQ ID NO: 2865500 - RNA, 19 nt, Human
cagacucauccugaacagc

SEQ ID NO: 2865501 - RNA, 20 nt, Human
cagacucauccugaacagca

SEQ ID NO: 2865502 - RNA, 22 nt, Human
cagacucauccugaacagcaug

SEQ ID NO: 2865503 - RNA, 21 nt, Human
cagaccaacguuacucagggc

SEQ ID NO: 2865504 - RNA, 23 nt, Human
cagaccaacguuacucagggcuc

SEQ ID NO: 2865505 - RNA, 22 nt, Human
cagaccaccccgccugcccuca

SEQ ID NO: 2865506 - RNA, 15 nt, Human
cagaccaccccgccu

SEQ ID NO: 2865507 - RNA, 19 nt, Human
cagaccaccccgccugccc

SEQ ID NO: 2865508 - RNA, 20 nt, Human
cagaccacaucuuuaucugu

SEQ ID NO: 2865509 - RNA, 13 nt, Human
cagaccaccccgc

SEQ ID NO: 2865510 - RNA, 13 nt, Human
cagaccagcucuu

SEQ ID NO: 2865511 - RNA, 13 nt, Human
cagaccccuggcu

SEQ ID NO: 2865512 - RNA, 14 nt, Human
cagaccccuggcuu

SEQ ID NO: 2865513 - RNA, 15 nt, Human
cagaccccuggcuuu

SEQ ID NO: 2865514 - RNA, 16 nt, Human
cagaccccuggcuuuu

SEQ ID NO: 2865515 - RNA, 18 nt, Human
cagaccccuggcuuuuca

SEQ ID NO: 2865516 - RNA, 13 nt, Human
cagaccccaggcu

SEQ ID NO: 2865517 - RNA, 14 nt, Human
cagacccggcugcg

SEQ ID NO: 2865518 - RNA, 12 nt, Human
cagacccggcug

SEQ ID NO: 2865519 - RNA, 23 nt, Human
cagaccccuggcuuuucacugcu

SEQ ID NO: 2865520 - RNA, 21 nt, Human
cagaccccuggcuuuucacug

SEQ ID NO: 2865521 - RNA, 22 nt, Human
cagaccccuggcuuuucacugc

SEQ ID NO: 2865522 - RNA, 16 nt, Human
cagacccggcugcgug

SEQ ID NO: 2865523 - RNA, 20 nt, Human
cagaagcacugggaucacag

SEQ ID NO: 2865524 - RNA, 14 nt, Human
cagaagaaaauucu

SEQ ID NO: 2865525 - RNA, 22 nt, Human
cagaagcaagggggugauguag

SEQ ID NO: 2865526 - RNA, 23 nt, Human
cagaagauccccucaggacugca

SEQ ID NO: 2865527 - RNA, 13 nt, Human
cagaagccucugg

SEQ ID NO: 2865528 - RNA, 23 nt, Human
cagaagcccugauguguccucag

SEQ ID NO: 2865529 - RNA, 23 nt, Human
cagaagcaguugagucgucauca

SEQ ID NO: 2865530 - RNA, 13 nt, Human
cagaagcauuugu

SEQ ID NO: 2865531 - RNA, 14 nt, Human
cagaagcauuugua

SEQ ID NO: 2865532 - RNA, 15 nt, Human
cagaagcauuuguau

SEQ ID NO: 2865533 - RNA, 17 nt, Human
cagaagcauuuguauuu

SEQ ID NO: 2865534 - RNA, 19 nt, Human
cagaagcauuuguauuuug

SEQ ID NO: 2865535 - RNA, 20 nt, Human
cagaagcauuuguauuuugu

SEQ ID NO: 2865536 - RNA, 21 nt, Human
cagaagcauuuguauuuugug

SEQ ID NO: 2865537 - RNA, 22 nt, Human
cagaagcauuuguauuuugugu

SEQ ID NO: 2865538 - RNA, 21 nt, Human
cagaagacacugaugggcaac

SEQ ID NO: 2865539 - RNA, 18 nt, Human
cagaagacaaaaagacaa

SEQ ID NO: 2865540 - RNA, 14 nt, Human
cagaagacaccaga

SEQ ID NO: 2865541 - RNA, 15 nt, Human
cagaagacaccagag

SEQ ID NO: 2865542 - RNA, 16 nt, Human
cagaagacaccagagc

SEQ ID NO: 2865543 - RNA, 17 nt, Human
cagaagacaccagagca

SEQ ID NO: 2865544 - RNA, 18 nt, Human
cagaagacaccagagcag

SEQ ID NO: 2865545 - RNA, 19 nt, Human
cagaagacaccagagcaga

SEQ ID NO: 2865546 - RNA, 20 nt, Human
cagaagauagcuucacccca

SEQ ID NO: 2865547 - RNA, 15 nt, Human
cagaagauccccuca

SEQ ID NO: 2865548 - RNA, 18 nt, Human
cagaagauccccucagga

SEQ ID NO: 2865549 - RNA, 19 nt, Human
cagaagauccccucaggac

SEQ ID NO: 2865550 - RNA, 23 nt, Human
cagaagaggguguguuugaaauc

SEQ ID NO: 2865551 - RNA, 20 nt, Human
cagaagaguugugcacgcag

SEQ ID NO: 2865552 - RNA, 16 nt, Human
cagaagagaggggaag

SEQ ID NO: 2865553 - RNA, 20 nt, Human
cagaagacaccagagcagau

SEQ ID NO: 2865554 - RNA, 21 nt, Human
cagaagacaccagagcagaug

SEQ ID NO: 2865555 - RNA, 21 nt, Human
cagaagaccacaaaaauugac

SEQ ID NO: 2865556 - RNA, 16 nt, Human
cagaagaccccugacu

SEQ ID NO: 2865557 - RNA, 16 nt, Human
cagaacuugaaugugu

SEQ ID NO: 2865558 - RNA, 14 nt, Human
cagaagaagagaag

SEQ ID NO: 2865559 - RNA, 17 nt, Human
cagaagaagagaagcug

SEQ ID NO: 2865560 - RNA, 18 nt, Human
cagaagaagagaagcugc

SEQ ID NO: 2865561 - RNA, 19 nt, Human
cagaagaagagaagcugcu

SEQ ID NO: 2865562 - RNA, 20 nt, Human
cagaagaagagaagcugcug

SEQ ID NO: 2865563 - RNA, 21 nt, Human
cagaagaagagaagcugcuga

SEQ ID NO: 2865564 - RNA, 23 nt, Human
cagaagaagagaagcugcugacc

SEQ ID NO: 2865565 - RNA, 15 nt, Human
cagaagaaaggaaca

SEQ ID NO: 2865566 - RNA, 16 nt, Human
cagaagaaaggaacau

SEQ ID NO: 2865567 - RNA, 12 nt, Human
cagaacuaaaug

SEQ ID NO: 2865568 - RNA, 14 nt, Human
cagaacuaaauguu

SEQ ID NO: 2865569 - RNA, 17 nt, Human
cagaacuaaauguucua

SEQ ID NO: 2865570 - RNA, 18 nt, Human
cagaacuaaauguucuau

SEQ ID NO: 2865571 - RNA, 21 nt, Human
cagaacggagccccaggccuc

SEQ ID NO: 2865572 - RNA, 21 nt, Human
cagaaccucuuccccagaaag

SEQ ID NO: 2865573 - RNA, 22 nt, Human
cagaacccuuggagccaaugga

SEQ ID NO: 2865574 - RNA, 23 nt, Human
cagaaccccuacaugaaacagaa

SEQ ID NO: 2865575 - RNA, 15 nt, Human
cagaaccauccauag

SEQ ID NO: 2865576 - RNA, 12 nt, Human
cagaacccaggg

SEQ ID NO: 2865577 - RNA, 13 nt, Human
cagaacccagggc

SEQ ID NO: 2865578 - RNA, 14 nt, Human
cagaacccagggcu

SEQ ID NO: 2865579 - RNA, 15 nt, Human
cagaacccagggcuc

SEQ ID NO: 2865580 - RNA, 18 nt, Human
cagaacccagggcucugc

SEQ ID NO: 2865581 - RNA, 19 nt, Human
cagaacccagggcucugcc

SEQ ID NO: 2865582 - RNA, 20 nt, Human
cagaacccagggcucugccc

SEQ ID NO: 2865583 - RNA, 21 nt, Human
cagaacccagggcucugcccc

SEQ ID NO: 2865584 - RNA, 22 nt, Human
cagaacccagggcucugcccca

SEQ ID NO: 2865585 - RNA, 18 nt, Human
cagaaccucuuccccaga

SEQ ID NO: 2865586 - RNA, 16 nt, Human
cagaaccucuucccca

SEQ ID NO: 2865587 - RNA, 15 nt, Human
cagaaccucuucccc

SEQ ID NO: 2865588 - RNA, 14 nt, Human
cagaaccucuuccc

SEQ ID NO: 2865589 - RNA, 12 nt, Human
cagaaccucuuc

SEQ ID NO: 2865590 - RNA, 19 nt, Human
cagaacccuuggcuugccc

SEQ ID NO: 2865591 - RNA, 14 nt, Human
cagaacccuuggcu

SEQ ID NO: 2865592 - RNA, 15 nt, Human
cagaacucacugggg

SEQ ID NO: 2865593 - RNA, 18 nt, Human
cagaacucacuggggccu

SEQ ID NO: 2865594 - RNA, 17 nt, Human
cagaacucuuaaaaaug

SEQ ID NO: 2865595 - RNA, 19 nt, Human
cagaacucuuaaaaauguu

SEQ ID NO: 2865596 - RNA, 20 nt, Human
cagaacucuuaaaaauguuu

SEQ ID NO: 2865597 - RNA, 15 nt, Human
cagaacuugaaugug

SEQ ID NO: 2865598 - RNA, 14 nt, Human
cagaacuucccuga

SEQ ID NO: 2865599 - RNA, 15 nt, Human
cagaacuucccugau

SEQ ID NO: 2865600 - RNA, 11 nt, Human
cagaacugcca

SEQ ID NO: 2865601 - RNA, 12 nt, Human
cagaacugccau

SEQ ID NO: 2865602 - RNA, 14 nt, Human
cagaacugccauua

SEQ ID NO: 2865603 - RNA, 19 nt, Human
cagaacugccauuauuuuc

SEQ ID NO: 2865604 - RNA, 20 nt, Human
cagaacugccauuauuuucu

SEQ ID NO: 2865605 - RNA, 21 nt, Human
cagaacugccauuauuuucug

SEQ ID NO: 2865606 - RNA, 22 nt, Human
cagaacugccauuauuuucugu

SEQ ID NO: 2865607 - RNA, 17 nt, Human
cagaaucuaaagccagu

SEQ ID NO: 2865608 - RNA, 15 nt, Human
cagaaucuaaagcca

SEQ ID NO: 2865609 - RNA, 16 nt, Human
cagaaucuaaagccag

SEQ ID NO: 2865610 - RNA, 17 nt, Human
cagaagucaugaagccc

SEQ ID NO: 2865611 - RNA, 16 nt, Human
cagaagucaugaagcc

SEQ ID NO: 2865612 - RNA, 22 nt, Human
cagaaggugccacuuuacccac

SEQ ID NO: 2865613 - RNA, 23 nt, Human
cagaagguugcucuagauugaga

SEQ ID NO: 2865614 - RNA, 12 nt, Human
cagaagggagca

SEQ ID NO: 2865615 - RNA, 13 nt, Human
cagaagggagcag

SEQ ID NO: 2865616 - RNA, 15 nt, Human
cagaagccucuggcu

SEQ ID NO: 2865617 - RNA, 14 nt, Human
cagaagccucuggc

SEQ ID NO: 2865618 - RNA, 19 nt, Human
cagaagccucuggcuagag

SEQ ID NO: 2865619 - RNA, 16 nt, Human
cagaagccucuggguc

SEQ ID NO: 2865620 - RNA, 15 nt, Human
cagaagccugaggcu

SEQ ID NO: 2865621 - RNA, 14 nt, Human
cagaagccugaggc

SEQ ID NO: 2865622 - RNA, 19 nt, Human
cagaagccugaggcuggga

SEQ ID NO: 2865623 - RNA, 16 nt, Human
cagaagcuucugccca

SEQ ID NO: 2865624 - RNA, 14 nt, Human
cagaagcuucagaa

SEQ ID NO: 2865625 - RNA, 17 nt, Human
cagaaggaugaaugagg

SEQ ID NO: 2865626 - RNA, 18 nt, Human
cagaaggauuuuuuaaag

SEQ ID NO: 2865627 - RNA, 20 nt, Human
cagaaggauuuuuuaaaguu

SEQ ID NO: 2865628 - RNA, 24 nt, Human
cagaaagaaguggggacagagcag

SEQ ID NO: 2865629 - RNA, 19 nt, Human
cagaaacuguucccaccug

SEQ ID NO: 2865630 - RNA, 17 nt, Human
cagaaacgcauccagca

SEQ ID NO: 2865631 - RNA, 21 nt, Human
cagaaaccuauccucacugcc

SEQ ID NO: 2865632 - RNA, 22 nt, Human
cagaaaccuauccucacugccc

SEQ ID NO: 2865633 - RNA, 14 nt, Human
cagaaacacugccu

SEQ ID NO: 2865634 - RNA, 13 nt, Human
cagaaacacugcc

SEQ ID NO: 2865635 - RNA, 12 nt, Human
cagaaacacugc

SEQ ID NO: 2865636 - RNA, 19 nt, Human
cagaaacacugccuuuuua

SEQ ID NO: 2865637 - RNA, 18 nt, Human
cagaaacacugccuuuuu

SEQ ID NO: 2865638 - RNA, 17 nt, Human
cagaaacacugccuuuu

SEQ ID NO: 2865639 - RNA, 15 nt, Human
cagaaacacugccuu

SEQ ID NO: 2865640 - RNA, 21 nt, Human
cagaaacacugccuuuuuauu

SEQ ID NO: 2865641 - RNA, 12 nt, Human
cagaaacuagaa

SEQ ID NO: 2865642 - RNA, 20 nt, Human
cagaaccaccccggcccccu

SEQ ID NO: 2865643 - RNA, 16 nt, Human
cagaacaucauuagaa

SEQ ID NO: 2865644 - RNA, 15 nt, Human
cagaacaucauuaga

SEQ ID NO: 2865645 - RNA, 17 nt, Human
cagaacaucauuagaac

SEQ ID NO: 2865646 - RNA, 18 nt, Human
cagaacaucauuagaaca

SEQ ID NO: 2865647 - RNA, 21 nt, Human
cagaacaucgcgaugggaacc

SEQ ID NO: 2865648 - RNA, 16 nt, Human
cagaaccaaagcucaa

SEQ ID NO: 2865649 - RNA, 18 nt, Human
cagaaagcugugaacagg

SEQ ID NO: 2865650 - RNA, 17 nt, Human
cagaaaagggaaguugu

SEQ ID NO: 2865651 - RNA, 18 nt, Human
cagaaaagggaaguugug

SEQ ID NO: 2865652 - RNA, 15 nt, Human
cagaaaacuuuaaaa

SEQ ID NO: 2865653 - RNA, 20 nt, Human
cagaaaacuuuaaaaaauau

SEQ ID NO: 2865654 - RNA, 12 nt, Human
cagaaaagcaua

SEQ ID NO: 2865655 - RNA, 16 nt, Human
cagaaaacgggaagcg

SEQ ID NO: 2865656 - RNA, 19 nt, Human
cagaaaauauuauguguuu

SEQ ID NO: 2865657 - RNA, 14 nt, Human
cagaaaauguugag

SEQ ID NO: 2865658 - RNA, 23 nt, Human
cagaaaauguugagaaucccaaa

SEQ ID NO: 2865659 - RNA, 18 nt, Human
cagaaaauguugagaauc

SEQ ID NO: 2865660 - RNA, 20 nt, Human
cagaaacaaaaacacuaaaa

SEQ ID NO: 2865661 - RNA, 18 nt, Human
cagaaacaaaaacacuaa

SEQ ID NO: 2865662 - RNA, 16 nt, Human
cagaaaauugcacaau

SEQ ID NO: 2865663 - RNA, 15 nt, Human
cacuuggucugccag

SEQ ID NO: 2865664 - RNA, 16 nt, Human
cacuuggucugccagg

SEQ ID NO: 2865665 - RNA, 18 nt, Human
cacuuggucugccaggcc

SEQ ID NO: 2865666 - RNA, 13 nt, Human
cacuuugauguca

SEQ ID NO: 2865667 - RNA, 20 nt, Human
cacuuugaugucauguguuc

SEQ ID NO: 2865668 - RNA, 23 nt, Human
cacuuugaugucauguguucccu

SEQ ID NO: 2865669 - RNA, 11 nt, Human
cacuuucucuu

SEQ ID NO: 2865670 - RNA, 22 nt, Human
cacuuucucuucuuguuucucc

SEQ ID NO: 2865671 - RNA, 12 nt, Human
cacuuugaaaua

SEQ ID NO: 2865672 - RNA, 15 nt, Human
cacuuugaaauaccu

SEQ ID NO: 2865673 - RNA, 16 nt, Human
cacuuugaaauaccuc

SEQ ID NO: 2865674 - RNA, 18 nt, Human
cacuuugaaauaccucau

SEQ ID NO: 2865675 - RNA, 21 nt, Human
cacuuugaaauaccucauguu

SEQ ID NO: 2865676 - RNA, 22 nt, Human
cacuuugaaauaccucauguuu

SEQ ID NO: 2865677 - RNA, 23 nt, Human
cacuuugcauaugagccgugaac

SEQ ID NO: 2865678 - RNA, 13 nt, Human
cacuuugccuccu

SEQ ID NO: 2865679 - RNA, 16 nt, Human
cacuuugccuccugug

SEQ ID NO: 2865680 - RNA, 17 nt, Human
cacuuugccuccugugu

SEQ ID NO: 2865681 - RNA, 14 nt, Human
cacuuugcacagcu

SEQ ID NO: 2865682 - RNA, 17 nt, Human
cacuuugcacagcucuc

SEQ ID NO: 2865683 - RNA, 13 nt, Human
cacuuugcacauu

SEQ ID NO: 2865684 - RNA, 14 nt, Human
cacuuugcacauuu

SEQ ID NO: 2865685 - RNA, 15 nt, Human
cacuuugcacauuuu

SEQ ID NO: 2865686 - RNA, 18 nt, Human
cacuuugcacauuuugau

SEQ ID NO: 2865687 - RNA, 19 nt, Human
cacuuugcacgacgcccuc

SEQ ID NO: 2865688 - RNA, 20 nt, Human
cacuuugcacgacgcccucu

SEQ ID NO: 2865689 - RNA, 21 nt, Human
cacuuugcacgacgcccucuc

SEQ ID NO: 2865690 - RNA, 23 nt, Human
cacuuugcacgacgcccucuccc

SEQ ID NO: 2865691 - RNA, 23 nt, Human
cacuuugggaggccaaggagggc

SEQ ID NO: 2865692 - RNA, 20 nt, Human
cacuuugguacauggccagu

SEQ ID NO: 2865693 - RNA, 19 nt, Human
cacuuugguacauggccag

SEQ ID NO: 2865694 - RNA, 12 nt, Human
cacuuuugcaag

SEQ ID NO: 2865695 - RNA, 21 nt, Human
cacuuuugcaagguuccacag

SEQ ID NO: 2865696 - RNA, 16 nt, Human
cacuuuuccucccuca

SEQ ID NO: 2865697 - RNA, 19 nt, Human
cacuuuuuauuagauaacg

SEQ ID NO: 2865698 - RNA, 16 nt, Human
cacuuuuaugagcuuc

SEQ ID NO: 2865699 - RNA, 20 nt, Human
cacuuugucgcccaggcugg

SEQ ID NO: 2865700 - RNA, 12 nt, Human
cacuuuguaaau

SEQ ID NO: 2865701 - RNA, 13 nt, Human
cacuuuguaaauu

SEQ ID NO: 2865702 - RNA, 13 nt, Human
cacuuuucaguga

SEQ ID NO: 2865703 - RNA, 12 nt, Human
cacuuuucaccu

SEQ ID NO: 2865704 - RNA, 18 nt, Human
cacuuuucaccuccuuca

SEQ ID NO: 2865705 - RNA, 18 nt, Human
cacuuuuauuuagcacca

SEQ ID NO: 2865706 - RNA, 17 nt, Human
cagaaaaaggcugugcu

SEQ ID NO: 2865707 - RNA, 21 nt, Human
cagaaaaauaacuucaagcaa

SEQ ID NO: 2865708 - RNA, 13 nt, Human
cagaaaaauggag

SEQ ID NO: 2865709 - RNA, 18 nt, Human
cagaaaaauggagcaaag

SEQ ID NO: 2865710 - RNA, 20 nt, Human
cagaaaaauggagcaaagug

SEQ ID NO: 2865711 - RNA, 14 nt, Human
cagaaaaccccagc

SEQ ID NO: 2865712 - RNA, 22 nt, Human
cacuuuuuuggggguaaaaaau

SEQ ID NO: 2865713 - RNA, 20 nt, Human
cagaaaaaaugucuguaaau

SEQ ID NO: 2865714 - RNA, 19 nt, Human
cagaaaaaaugucuguaaa

SEQ ID NO: 2865715 - RNA, 13 nt, Human
cacuuuuugaacu

SEQ ID NO: 2865716 - RNA, 16 nt, Human
cacuuuuugaacuaag

SEQ ID NO: 2865717 - RNA, 19 nt, Human
cacuuuuugaacuaagaaa

SEQ ID NO: 2865718 - RNA, 18 nt, Human
cagauaaucagccucuua

SEQ ID NO: 2865719 - RNA, 17 nt, Human
cagauaaucagccucuu

SEQ ID NO: 2865720 - RNA, 16 nt, Human
cagauaaucagccucu

SEQ ID NO: 2865721 - RNA, 15 nt, Human
cagauaaucagccuc

SEQ ID NO: 2865722 - RNA, 14 nt, Human
cagauaaucagugu

SEQ ID NO: 2865723 - RNA, 19 nt, Human
cagauaaucagccucuuaa

SEQ ID NO: 2865724 - RNA, 13 nt, Human
cagauacaaugua

SEQ ID NO: 2865725 - RNA, 14 nt, Human
cagauacaauguau

SEQ ID NO: 2865726 - RNA, 20 nt, Human
cagauaagacauaucucuaa

SEQ ID NO: 2865727 - RNA, 20 nt, Human
cagauaacugaggaggggag

SEQ ID NO: 2865728 - RNA, 17 nt, Human
cagauaaccagcuguaa

SEQ ID NO: 2865729 - RNA, 13 nt, Human
cagauaacugagg

SEQ ID NO: 2865730 - RNA, 17 nt, Human
cagauaacaaugcagca

SEQ ID NO: 2865731 - RNA, 20 nt, Human
cagauaacaaugcagcaagg

SEQ ID NO: 2865732 - RNA, 22 nt, Human
cagauaacaaugcagcaaggcc

SEQ ID NO: 2865733 - RNA, 16 nt, Human
cagauaacauaccuuu

SEQ ID NO: 2865734 - RNA, 15 nt, Human
cagauaacauuugug

SEQ ID NO: 2865735 - RNA, 14 nt, Human
cagauaacugagga

SEQ ID NO: 2865736 - RNA, 17 nt, Human
cagaguuuguguguugu

SEQ ID NO: 2865737 - RNA, 19 nt, Human
cagaguuuguguguugucu

SEQ ID NO: 2865738 - RNA, 22 nt, Human
cagaguuuguguguugucuuga

SEQ ID NO: 2865739 - RNA, 16 nt, Human
cagaguuugccuuccu

SEQ ID NO: 2865740 - RNA, 17 nt, Human
cagaguuugccuuccuu

SEQ ID NO: 2865741 - RNA, 19 nt, Human
cagaguuugccuuccuuuc

SEQ ID NO: 2865742 - RNA, 20 nt, Human
cagaguuugccuuccuuucu

SEQ ID NO: 2865743 - RNA, 22 nt, Human
cagaguuugccuuccuuucucc

SEQ ID NO: 2865744 - RNA, 13 nt, Human
cagaguuuggaua

SEQ ID NO: 2865745 - RNA, 17 nt, Human
cagaguguagccagguc

SEQ ID NO: 2865746 - RNA, 19 nt, Human
cagaguguagccagguccc

SEQ ID NO: 2865747 - RNA, 18 nt, Human
cagaguguggacucuggu

SEQ ID NO: 2865748 - RNA, 16 nt, Human
cagaguuccccaugca

SEQ ID NO: 2865749 - RNA, 18 nt, Human
cagaguuccccaugcaga

SEQ ID NO: 2865750 - RNA, 24 nt, Human
cagaguuccccaugcagacaugag

SEQ ID NO: 2865751 - RNA, 20 nt, Human
cagaguucuauacuguaaag

SEQ ID NO: 2865752 - RNA, 21 nt, Human
cagaguucuauacuguaaagc

SEQ ID NO: 2865753 - RNA, 20 nt, Human
cagaguugacaugagauuua

SEQ ID NO: 2865754 - RNA, 13 nt, Human
cagauccuuguuu

SEQ ID NO: 2865755 - RNA, 23 nt, Human
cagauccuggguacugaaagccu

SEQ ID NO: 2865756 - RNA, 17 nt, Human
cagauacaauguauuua

SEQ ID NO: 2865757 - RNA, 14 nt, Human
cagauacacacaca

SEQ ID NO: 2865758 - RNA, 14 nt, Human
cagauccuuguuuc

SEQ ID NO: 2865759 - RNA, 15 nt, Human
cagauccuuguuuca

SEQ ID NO: 2865760 - RNA, 16 nt, Human
cagauccuuguuucaa

SEQ ID NO: 2865761 - RNA, 18 nt, Human
cagauccuuguuucaaac

SEQ ID NO: 2865762 - RNA, 19 nt, Human
cagauccuuguuucaaaca

SEQ ID NO: 2865763 - RNA, 22 nt, Human
cagauacaggaaaagcugcuga

SEQ ID NO: 2865764 - RNA, 21 nt, Human
cagauacaggaaaagcugcug

SEQ ID NO: 2865765 - RNA, 20 nt, Human
cagauacaggaaaagcugcu

SEQ ID NO: 2865766 - RNA, 15 nt, Human
cagaucugugcccca

SEQ ID NO: 2865767 - RNA, 14 nt, Human
cagaucugugcccc

SEQ ID NO: 2865768 - RNA, 13 nt, Human
cagaucugugccc

SEQ ID NO: 2865769 - RNA, 12 nt, Human
cagaucugugcc

SEQ ID NO: 2865770 - RNA, 13 nt, Human
cagaucugucuga

SEQ ID NO: 2865771 - RNA, 18 nt, Human
cagaucuggucccuugca

SEQ ID NO: 2865772 - RNA, 17 nt, Human
cagaucuggucccuugc

SEQ ID NO: 2865773 - RNA, 14 nt, Human
cagaugcaaugacu

SEQ ID NO: 2865774 - RNA, 13 nt, Human
cagaugcaccagc

SEQ ID NO: 2865775 - RNA, 16 nt, Human
cagaugcaccagcccu

SEQ ID NO: 2865776 - RNA, 14 nt, Human
cagaugcaccagcc

SEQ ID NO: 2865777 - RNA, 22 nt, Human
cagaugcaccagcccuuagcag

SEQ ID NO: 2865778 - RNA, 17 nt, Human
cagaugcaccagcccuu

SEQ ID NO: 2865779 - RNA, 20 nt, Human
cagaugcagagagccauuuu

SEQ ID NO: 2865780 - RNA, 16 nt, Human
cagaugcagagagcca

SEQ ID NO: 2865781 - RNA, 18 nt, Human
cagaugcagagagccauu

SEQ ID NO: 2865782 - RNA, 15 nt, Human
cagaugaauguauuu

SEQ ID NO: 2865783 - RNA, 19 nt, Human
cagaugaauguauuuauuu

SEQ ID NO: 2865784 - RNA, 23 nt, Human
cagaugaauguauuuauuuggga

SEQ ID NO: 2865785 - RNA, 18 nt, Human
cagaucuuucuccuugaa

SEQ ID NO: 2865786 - RNA, 14 nt, Human
cagaugaaaauuug

SEQ ID NO: 2865787 - RNA, 15 nt, Human
cagaugaaaauuuga

SEQ ID NO: 2865788 - RNA, 17 nt, Human
cagaugaaaauuugaga

SEQ ID NO: 2865789 - RNA, 12 nt, Human
cagaugaauaaa

SEQ ID NO: 2865790 - RNA, 13 nt, Human
cagaugaauaaac

SEQ ID NO: 2865791 - RNA, 14 nt, Human
cagaugaauaaacu

SEQ ID NO: 2865792 - RNA, 20 nt, Human
cagaugaacucuuagaaaug

SEQ ID NO: 2865793 - RNA, 23 nt, Human
cagaucugugccccaugccuguc

SEQ ID NO: 2865794 - RNA, 21 nt, Human
cagaucugugccccaugccug

SEQ ID NO: 2865795 - RNA, 20 nt, Human
cagaucugugccccaugccu

SEQ ID NO: 2865796 - RNA, 18 nt, Human
cagaucugugccccaugc

SEQ ID NO: 2865797 - RNA, 18 nt, Human
cagaucugucugauagga

SEQ ID NO: 2865798 - RNA, 15 nt, Human
cagaucuuggacuca

SEQ ID NO: 2865799 - RNA, 14 nt, Human
cagaucuuggacuc

SEQ ID NO: 2865800 - RNA, 22 nt, Human
cagaucuuggacucaugaggag

SEQ ID NO: 2865801 - RNA, 20 nt, Human
cagaucuuggacucaugagg

SEQ ID NO: 2865802 - RNA, 19 nt, Human
cagaucuuggacucaugag

SEQ ID NO: 2865803 - RNA, 18 nt, Human
cagaucuuggacucauga

SEQ ID NO: 2865804 - RNA, 18 nt, Human
cagaugaucaacucuucg

SEQ ID NO: 2865805 - RNA, 14 nt, Human
cagaugauccauga

SEQ ID NO: 2865806 - RNA, 19 nt, Human
cagaugaugagaauuucua

SEQ ID NO: 2865807 - RNA, 22 nt, Human
cagaugaugagaauuucuaaaa

SEQ ID NO: 2865808 - RNA, 16 nt, Human
cagaugacaagauggu

SEQ ID NO: 2865809 - RNA, 14 nt, Human
cagaugagaacaaa

SEQ ID NO: 2865810 - RNA, 15 nt, Human
cagaugagaacaaag

SEQ ID NO: 2865811 - RNA, 16 nt, Human
cagaugagaacaaagc

SEQ ID NO: 2865812 - RNA, 17 nt, Human
cagaugagaacaaagcu

SEQ ID NO: 2865813 - RNA, 18 nt, Human
cagaugagaacaaagcug

SEQ ID NO: 2865814 - RNA, 19 nt, Human
cagaugagaacaaagcugu

SEQ ID NO: 2865815 - RNA, 21 nt, Human
cagaugagaacaaagcuguua

SEQ ID NO: 2865816 - RNA, 18 nt, Human
cagagugagacucugucu

SEQ ID NO: 2865817 - RNA, 17 nt, Human
cagagugagacucuguc

SEQ ID NO: 2865818 - RNA, 16 nt, Human
cagagugagacucugu

SEQ ID NO: 2865819 - RNA, 19 nt, Human
cagagugagacccugucuc

SEQ ID NO: 2865820 - RNA, 15 nt, Human
cagagugagacccug

SEQ ID NO: 2865821 - RNA, 23 nt, Human
cagagucucacuguugcccaggc

SEQ ID NO: 2865822 - RNA, 22 nt, Human
cagagucucacuguugcccagg

SEQ ID NO: 2865823 - RNA, 23 nt, Human
cagagucucgcucuguugcccag

SEQ ID NO: 2865824 - RNA, 20 nt, Human
cagagugagacucugucuca

SEQ ID NO: 2865825 - RNA, 19 nt, Human
cagagugagacucugucuc

SEQ ID NO: 2865826 - RNA, 23 nt, Human
cagagugcaagccccugcuccag

SEQ ID NO: 2865827 - RNA, 15 nt, Human
cagagugcacagcug

SEQ ID NO: 2865828 - RNA, 16 nt, Human
cagagugcacagcugu

SEQ ID NO: 2865829 - RNA, 17 nt, Human
cagagugcacagcuguc

SEQ ID NO: 2865830 - RNA, 18 nt, Human
cagagugcaagccccugc

SEQ ID NO: 2865831 - RNA, 20 nt, Human
cagagugagacccugucucu

SEQ ID NO: 2865832 - RNA, 20 nt, Human
cagagugcaagccccugcuc

SEQ ID NO: 2865833 - RNA, 15 nt, Human
cagagugcuuuucug

SEQ ID NO: 2865834 - RNA, 13 nt, Human
cagaguggccugg

SEQ ID NO: 2865835 - RNA, 12 nt, Human
cagaguggccug

SEQ ID NO: 2865836 - RNA, 23 nt, Human
cagaguggccuggccaggagcuc

SEQ ID NO: 2865837 - RNA, 22 nt, Human
cagaguggccuggccaggagcu

SEQ ID NO: 2865838 - RNA, 21 nt, Human
cagaguggccuggccaggagc

SEQ ID NO: 2865839 - RNA, 18 nt, Human
cagaguggccuggccagg

SEQ ID NO: 2865840 - RNA, 17 nt, Human
cagaguggccuggccag

SEQ ID NO: 2865841 - RNA, 16 nt, Human
cagaguggccuggcca

SEQ ID NO: 2865842 - RNA, 15 nt, Human
cagaguggccuggcc

SEQ ID NO: 2865843 - RNA, 23 nt, Human
cagagggagugacagaggcagcc

SEQ ID NO: 2865844 - RNA, 22 nt, Human
cagagggagugacagaggcagc

SEQ ID NO: 2865845 - RNA, 21 nt, Human
cagagggagugacagaggcag

SEQ ID NO: 2865846 - RNA, 20 nt, Human
cagagggagugacagaggca

SEQ ID NO: 2865847 - RNA, 18 nt, Human
cagagggcccaggcaggc

SEQ ID NO: 2865848 - RNA, 16 nt, Human
cagagggcccaggcag

SEQ ID NO: 2865849 - RNA, 15 nt, Human
cagagggcccaggca

SEQ ID NO: 2865850 - RNA, 13 nt, Human
cagagggcccagg

SEQ ID NO: 2865851 - RNA, 21 nt, Human
cagagucucacuguugcccag

SEQ ID NO: 2865852 - RNA, 20 nt, Human
cagagucucacuguugccca

SEQ ID NO: 2865853 - RNA, 19 nt, Human
cagagucucacuguugccc

SEQ ID NO: 2865854 - RNA, 17 nt, Human
cagagucucacuguugc

SEQ ID NO: 2865855 - RNA, 13 nt, Human
cagagucucacug

SEQ ID NO: 2865856 - RNA, 14 nt, Human
cagaguccuuucca

SEQ ID NO: 2865857 - RNA, 15 nt, Human
cagaguccuuuccaa

SEQ ID NO: 2865858 - RNA, 15 nt, Human
cagagcauuuaagag

SEQ ID NO: 2865859 - RNA, 16 nt, Human
cagaguccuuaaaaug

SEQ ID NO: 2865860 - RNA, 22 nt, Human
cagagggcccaggcaggccacc

SEQ ID NO: 2865861 - RNA, 20 nt, Human
cagaggcuauuauuuucacu

SEQ ID NO: 2865862 - RNA, 15 nt, Human
cagaggcgucccgca

SEQ ID NO: 2865863 - RNA, 19 nt, Human
cagaggcgucccgcaccug

SEQ ID NO: 2865864 - RNA, 22 nt, Human
cagaggcgucccgcaccugucu

SEQ ID NO: 2865865 - RNA, 13 nt, Human
cagaggccugccc

SEQ ID NO: 2865866 - RNA, 14 nt, Human
cagaggccugcccg

SEQ ID NO: 2865867 - RNA, 19 nt, Human
cagagggagugacagaggc

SEQ ID NO: 2865868 - RNA, 18 nt, Human
cagagggagugacagagg

SEQ ID NO: 2865869 - RNA, 16 nt, Human
cagagggagugacaga

SEQ ID NO: 2865870 - RNA, 14 nt, Human
cagagggagugaca

SEQ ID NO: 2865871 - RNA, 22 nt, Human
cagaggcugaguuuucucuuug

SEQ ID NO: 2865872 - RNA, 22 nt, Human
cagaggcagccccauucugccu

SEQ ID NO: 2865873 - RNA, 20 nt, Human
cagaggcagccccauucugc

SEQ ID NO: 2865874 - RNA, 19 nt, Human
cagaggcagccccauucug

SEQ ID NO: 2865875 - RNA, 18 nt, Human
cagaggcagccccauucu

SEQ ID NO: 2865876 - RNA, 15 nt, Human
cagaggcagccccau

SEQ ID NO: 2865877 - RNA, 14 nt, Human
cagaggcagcccca

SEQ ID NO: 2865878 - RNA, 13 nt, Human
cagaggcagcccc

SEQ ID NO: 2865879 - RNA, 12 nt, Human
cagaggcagccc

SEQ ID NO: 2865880 - RNA, 16 nt, Human
cagaggccaugggccu

SEQ ID NO: 2865881 - RNA, 19 nt, Human
cagaggccaugggccuccu

SEQ ID NO: 2865882 - RNA, 23 nt, Human
cagaggcagccccauucugccug

SEQ ID NO: 2865883 - RNA, 21 nt, Human
cagaggccaugggccuccugu

SEQ ID NO: 2865884 - RNA, 20 nt, Human
cagaggccaugggccuccug

SEQ ID NO: 2865885 - RNA, 14 nt, Human
cagaggccaacacu

SEQ ID NO: 2865886 - RNA, 17 nt, Human
cagaggccaacacugug

SEQ ID NO: 2865887 - RNA, 18 nt, Human
cagaggccaacacugugg

SEQ ID NO: 2865888 - RNA, 14 nt, Human
cagaggccauggca

SEQ ID NO: 2865889 - RNA, 14 nt, Human
cagagcccccagga

SEQ ID NO: 2865890 - RNA, 18 nt, Human
cagagcccccaggaagcc

SEQ ID NO: 2865891 - RNA, 16 nt, Human
cagagccccuacagca

SEQ ID NO: 2865892 - RNA, 21 nt, Human
cagagccccuacagcauuguu

SEQ ID NO: 2865893 - RNA, 12 nt, Human
cagagccugcag

SEQ ID NO: 2865894 - RNA, 19 nt, Human
cagagccucccaaggagaa

SEQ ID NO: 2865895 - RNA, 23 nt, Human
cagagccucccaaggagaacaaa

SEQ ID NO: 2865896 - RNA, 14 nt, Human
cagagccucgcucu

SEQ ID NO: 2865897 - RNA, 16 nt, Human
cagagccucgcucugu

SEQ ID NO: 2865898 - RNA, 17 nt, Human
cagaggaacuguccaga

SEQ ID NO: 2865899 - RNA, 19 nt, Human
cagaggaacuguccagaga

SEQ ID NO: 2865900 - RNA, 14 nt, Human
cagaggaaaucugu

SEQ ID NO: 2865901 - RNA, 18 nt, Human
cagaggaaaucuguaaca

SEQ ID NO: 2865902 - RNA, 13 nt, Human
cagagccugcagu

SEQ ID NO: 2865903 - RNA, 22 nt, Human
cagaggaacuguccagagagca

SEQ ID NO: 2865904 - RNA, 20 nt, Human
cagaggaacuguccagagag

SEQ ID NO: 2865905 - RNA, 21 nt, Human
cagaggaacuguccagagagc

SEQ ID NO: 2865906 - RNA, 14 nt, Human
cagaggagccuuuu

SEQ ID NO: 2865907 - RNA, 22 nt, Human
cagaggagccuuuuuaaaacac

SEQ ID NO: 2865908 - RNA, 15 nt, Human
cagaggagccuuuuu

SEQ ID NO: 2865909 - RNA, 21 nt, Human
cagaggaggcagaauaagaaa

SEQ ID NO: 2865910 - RNA, 20 nt, Human
cagaggagagauagccugug

SEQ ID NO: 2865911 - RNA, 21 nt, Human
cagaggagagauagccugugg

SEQ ID NO: 2865912 - RNA, 22 nt, Human
cagaggagagauagccuguggc

SEQ ID NO: 2865913 - RNA, 23 nt, Human
cagaggagagauagccuguggcc

SEQ ID NO: 2865914 - RNA, 11 nt, Human
cagaggcagcc

SEQ ID NO: 2865915 - RNA, 23 nt, Human
cagaggaugagcucuacccaggg

SEQ ID NO: 2865916 - RNA, 21 nt, Human
cagaggaguacaggugaagca

SEQ ID NO: 2865917 - RNA, 17 nt, Human
cagaggaguacagguga

SEQ ID NO: 2865918 - RNA, 21 nt, Human
cagaggaugagcucuacccag

SEQ ID NO: 2865919 - RNA, 19 nt, Human
cagaggaugagcucuaccc

SEQ ID NO: 2865920 - RNA, 17 nt, Human
cagaggaugagcucuac

SEQ ID NO: 2865921 - RNA, 15 nt, Human
cagaggaugagcucu

SEQ ID NO: 2865922 - RNA, 14 nt, Human
cagaggaccuguau

SEQ ID NO: 2865923 - RNA, 17 nt, Human
cagaggaccuguauuua

SEQ ID NO: 2865924 - RNA, 20 nt, Human
cagaggaccuguauuuaagc

SEQ ID NO: 2865925 - RNA, 21 nt, Human
cagaggaccuguauuuaagca

SEQ ID NO: 2865926 - RNA, 22 nt, Human
cagaggaccuguauuuaagcaa

SEQ ID NO: 2865927 - RNA, 23 nt, Human
cagaggaauccuggcagcccaga

SEQ ID NO: 2865928 - RNA, 17 nt, Human
cagaggaauuuauaccu

SEQ ID NO: 2865929 - RNA, 18 nt, Human
cagaggaauuuauaccuc

SEQ ID NO: 2865930 - RNA, 22 nt, Human
cagaggaauccuggcagcccag

SEQ ID NO: 2865931 - RNA, 21 nt, Human
cagaggaauccuggcagccca

SEQ ID NO: 2865932 - RNA, 20 nt, Human
cagaggaauccuggcagccc

SEQ ID NO: 2865933 - RNA, 19 nt, Human
cagaggaauccuggcagcc

SEQ ID NO: 2865934 - RNA, 18 nt, Human
cagaggaauccuggcagc

SEQ ID NO: 2865935 - RNA, 17 nt, Human
cagaggaauccuggcag

SEQ ID NO: 2865936 - RNA, 16 nt, Human
cagaggaauccuggca

SEQ ID NO: 2865937 - RNA, 20 nt, Human
cagagcccaccuuggcucaa

SEQ ID NO: 2865938 - RNA, 19 nt, Human
cagagcccaccuuggcuca

SEQ ID NO: 2865939 - RNA, 17 nt, Human
cagagcccaccuuggcu

SEQ ID NO: 2865940 - RNA, 15 nt, Human
cagagcccaccuugg

SEQ ID NO: 2865941 - RNA, 17 nt, Human
cagagccaugcugggaa

SEQ ID NO: 2865942 - RNA, 15 nt, Human
cagagcaggggcagg

SEQ ID NO: 2865943 - RNA, 14 nt, Human
cagagcaggggcag

SEQ ID NO: 2865944 - RNA, 13 nt, Human
cagagcaggcaau

SEQ ID NO: 2865945 - RNA, 21 nt, Human
cagagcaggaagcauucagag

SEQ ID NO: 2865946 - RNA, 12 nt, Human
cagagcaggacc

SEQ ID NO: 2865947 - RNA, 13 nt, Human
cagagcaggaccu

SEQ ID NO: 2865948 - RNA, 14 nt, Human
cagagcaggaccuc

SEQ ID NO: 2865949 - RNA, 15 nt, Human
cagagcaggaccucc

SEQ ID NO: 2865950 - RNA, 16 nt, Human
cagagcaggaccuccc

SEQ ID NO: 2865951 - RNA, 18 nt, Human
cagagcaggaccucccuu

SEQ ID NO: 2865952 - RNA, 19 nt, Human
cagagcaggaccucccuuc

SEQ ID NO: 2865953 - RNA, 22 nt, Human
cagagcaggaccucccuuccga

SEQ ID NO: 2865954 - RNA, 22 nt, Human
cagagccaccccuaaagagaua

SEQ ID NO: 2865955 - RNA, 21 nt, Human
cagagcauuuccaacaccaca

SEQ ID NO: 2865956 - RNA, 13 nt, Human
cagagccacacau

SEQ ID NO: 2865957 - RNA, 14 nt, Human
cagagccacacaug

SEQ ID NO: 2865958 - RNA, 15 nt, Human
cagagccacacaugg

SEQ ID NO: 2865959 - RNA, 17 nt, Human
cagagccacacaugggc

SEQ ID NO: 2865960 - RNA, 13 nt, Human
cagagcagaugca

SEQ ID NO: 2865961 - RNA, 14 nt, Human
cagagcagaugcag

SEQ ID NO: 2865962 - RNA, 15 nt, Human
cagagcagaugcaga

SEQ ID NO: 2865963 - RNA, 16 nt, Human
cagagcagaugcagag

SEQ ID NO: 2865964 - RNA, 19 nt, Human
cagagcagaugcagagagc

SEQ ID NO: 2865965 - RNA, 20 nt, Human
cagagcagaugcagagagcc

SEQ ID NO: 2865966 - RNA, 21 nt, Human
cagagcagaugcagagagcca

SEQ ID NO: 2865967 - RNA, 20 nt, Human
cagagcaccuuugcacagga

SEQ ID NO: 2865968 - RNA, 22 nt, Human
cagagcaccuuugcacaggaug

SEQ ID NO: 2865969 - RNA, 23 nt, Human
cagagcaccuuugcacaggaugc

SEQ ID NO: 2865970 - RNA, 21 nt, Human
cagagcacuagguucaauucc

SEQ ID NO: 2865971 - RNA, 22 nt, Human
cagagcacuagguucaauuccc

SEQ ID NO: 2865972 - RNA, 20 nt, Human
cagagaccguccucaccccu

SEQ ID NO: 2865973 - RNA, 17 nt, Human
cagagaccucccuguuc

SEQ ID NO: 2865974 - RNA, 18 nt, Human
cagagaccuccugccucc

SEQ ID NO: 2865975 - RNA, 15 nt, Human
cagagaccugaagug

SEQ ID NO: 2865976 - RNA, 19 nt, Human
cagagacccucugccacca

SEQ ID NO: 2865977 - RNA, 20 nt, Human
cagagacccucugccaccag

SEQ ID NO: 2865978 - RNA, 13 nt, Human
cagagaccguccu

SEQ ID NO: 2865979 - RNA, 16 nt, Human
cagagaccguccucac

SEQ ID NO: 2865980 - RNA, 17 nt, Human
cagagaccguccucacc

SEQ ID NO: 2865981 - RNA, 18 nt, Human
cagagaccguccucaccc

SEQ ID NO: 2865982 - RNA, 19 nt, Human
cagagaccguccucacccc

SEQ ID NO: 2865983 - RNA, 15 nt, Human
cagagacccucugcc

SEQ ID NO: 2865984 - RNA, 18 nt, Human
cagagcacagcagccccu

SEQ ID NO: 2865985 - RNA, 22 nt, Human
cagagauuggaaugggcagcuc

SEQ ID NO: 2865986 - RNA, 23 nt, Human
cagagauuggaaugggcagcuca

SEQ ID NO: 2865987 - RNA, 16 nt, Human
cagagaugugcaccca

SEQ ID NO: 2865988 - RNA, 21 nt, Human
cagagauuggaaugggcagcu

SEQ ID NO: 2865989 - RNA, 17 nt, Human
cagagauugaacuccaa

SEQ ID NO: 2865990 - RNA, 19 nt, Human
cagagauugaacuccaaga

SEQ ID NO: 2865991 - RNA, 15 nt, Human
cagagauugcuucuc

SEQ ID NO: 2865992 - RNA, 16 nt, Human
cagagauugcuucuca

SEQ ID NO: 2865993 - RNA, 16 nt, Human
cagagcaaaauaauuu

SEQ ID NO: 2865994 - RNA, 14 nt, Human
cagagcaaaauaau

SEQ ID NO: 2865995 - RNA, 19 nt, Human
cagagauuuauauaaaugu

SEQ ID NO: 2865996 - RNA, 20 nt, Human
cagagcaagauccugucuuu

SEQ ID NO: 2865997 - RNA, 18 nt, Human
cagagcaagauccugucu

SEQ ID NO: 2865998 - RNA, 15 nt, Human
cagagcaaccucuca

SEQ ID NO: 2865999 - RNA, 16 nt, Human
cagagcaacgaccagg

SEQ ID NO: 2866000 - RNA, 22 nt, Human
cagagcaacgaccagggccgag

SEQ ID NO: 2866001 - RNA, 14 nt, Human
cagagaugugcacc

SEQ ID NO: 2866002 - RNA, 18 nt, Human
cagagaugucaucagagc

SEQ ID NO: 2866003 - RNA, 23 nt, Human
cagagaugucaucagagcuccuc

SEQ ID NO: 2866004 - RNA, 16 nt, Human
cagagauucccaagcc

SEQ ID NO: 2866005 - RNA, 22 nt, Human
cagagauaguggggagacuucu

SEQ ID NO: 2866006 - RNA, 15 nt, Human
cagagaguggcuccu

SEQ ID NO: 2866007 - RNA, 18 nt, Human
cagagaguggcuccuccc

SEQ ID NO: 2866008 - RNA, 13 nt, Human
cagagaguggcuc

SEQ ID NO: 2866009 - RNA, 14 nt, Human
cagagaguggcucc

SEQ ID NO: 2866010 - RNA, 16 nt, Human
cagagaccuccugccu

SEQ ID NO: 2866011 - RNA, 15 nt, Human
cagagaguccugugc

SEQ ID NO: 2866012 - RNA, 21 nt, Human
cagagaaugaaagggcccaga

SEQ ID NO: 2866013 - RNA, 20 nt, Human
cagagaaugaaagggcccag

SEQ ID NO: 2866014 - RNA, 14 nt, Human
cagagaauucuuag

SEQ ID NO: 2866015 - RNA, 19 nt, Human
cagagaaucauacuuagca

SEQ ID NO: 2866016 - RNA, 19 nt, Human
cagagaauauaacaugaaa

SEQ ID NO: 2866017 - RNA, 22 nt, Human
cagagaauauaacaugaaauga

SEQ ID NO: 2866018 - RNA, 18 nt, Human
cagagaauaucaagauga

SEQ ID NO: 2866019 - RNA, 16 nt, Human
cagagaauaugucugc

SEQ ID NO: 2866020 - RNA, 20 nt, Human
cagagaauaugucugcuccu

SEQ ID NO: 2866021 - RNA, 19 nt, Human
cagagaaugaaagggccca

SEQ ID NO: 2866022 - RNA, 11 nt, Human
cagagaagggc

SEQ ID NO: 2866023 - RNA, 18 nt, Human
cagagaagggcauaaaac

SEQ ID NO: 2866024 - RNA, 22 nt, Human
cagagaagggcauaaaacagcu

SEQ ID NO: 2866025 - RNA, 20 nt, Human
cagagaagggcuccugcagg

SEQ ID NO: 2866026 - RNA, 21 nt, Human
cagagaagggcuccugcaggc

SEQ ID NO: 2866027 - RNA, 13 nt, Human
cagagaagcuggg

SEQ ID NO: 2866028 - RNA, 15 nt, Human
cagagaagcugggga

SEQ ID NO: 2866029 - RNA, 21 nt, Human
cagagaagcuggggaggagcu

SEQ ID NO: 2866030 - RNA, 19 nt, Human
cagagaagcggauuuccag

SEQ ID NO: 2866031 - RNA, 11 nt, Human
cagagaacagc

SEQ ID NO: 2866032 - RNA, 24 nt, Human
cagagaacagcgaaguagcuugcu

SEQ ID NO: 2866033 - RNA, 20 nt, Human
cagagacaaaauauuuccca

SEQ ID NO: 2866034 - RNA, 12 nt, Human
cagagacaaaau

SEQ ID NO: 2866035 - RNA, 23 nt, Human
cagagaauuucuaccauuucaga

SEQ ID NO: 2866036 - RNA, 22 nt, Human
cagagaauuucuaccauuucag

SEQ ID NO: 2866037 - RNA, 16 nt, Human
cagagaauuucuacca

SEQ ID NO: 2866038 - RNA, 15 nt, Human
cagagaauuucuacc

SEQ ID NO: 2866039 - RNA, 13 nt, Human
cagagaauuucua

SEQ ID NO: 2866040 - RNA, 15 nt, Human
cagagaccaggcccu

SEQ ID NO: 2866041 - RNA, 16 nt, Human
cagagaccaggcccug

SEQ ID NO: 2866042 - RNA, 22 nt, Human
cagagaccaggcccuggcuaag

SEQ ID NO: 2866043 - RNA, 15 nt, Human
cagagaccaggcugu

SEQ ID NO: 2866044 - RNA, 16 nt, Human
cagagaccaggcugug

SEQ ID NO: 2866045 - RNA, 18 nt, Human
cagagaccaggcuguguc

SEQ ID NO: 2866046 - RNA, 14 nt, Human
cagagacagcugau

SEQ ID NO: 2866047 - RNA, 21 nt, Human
cagagacagcugauacuucau

SEQ ID NO: 2866048 - RNA, 15 nt, Human
caggaaguacuucca

SEQ ID NO: 2866049 - RNA, 19 nt, Human
caggaaguacuuccaccuc

SEQ ID NO: 2866050 - RNA, 18 nt, Human
caggaaucaaaaauugaa

SEQ ID NO: 2866051 - RNA, 19 nt, Human
caggaauauugucauccuu

SEQ ID NO: 2866052 - RNA, 16 nt, Human
caggaaucaagagcug

SEQ ID NO: 2866053 - RNA, 17 nt, Human
caggaaucaagagcugc

SEQ ID NO: 2866054 - RNA, 18 nt, Human
caggaaucaagagcugcc

SEQ ID NO: 2866055 - RNA, 23 nt, Human
caggaaucaagagcugcccuccu

SEQ ID NO: 2866056 - RNA, 19 nt, Human
caggaaggcugagaggaga

SEQ ID NO: 2866057 - RNA, 23 nt, Human
caggaaggaggagccgaccggga

SEQ ID NO: 2866058 - RNA, 12 nt, Human
caggaaggccug

SEQ ID NO: 2866059 - RNA, 13 nt, Human
caggaaggccugg

SEQ ID NO: 2866060 - RNA, 14 nt, Human
caggaaggccuggg

SEQ ID NO: 2866061 - RNA, 15 nt, Human
caggaaggccugggu

SEQ ID NO: 2866062 - RNA, 18 nt, Human
caggaaggccugggugga

SEQ ID NO: 2866063 - RNA, 18 nt, Human
caggaaggagagccugcu

SEQ ID NO: 2866064 - RNA, 17 nt, Human
caggaaggagagccugc

SEQ ID NO: 2866065 - RNA, 21 nt, Human
caggaagggcaggaaggagag

SEQ ID NO: 2866066 - RNA, 19 nt, Human
caggaauguguggccugca

SEQ ID NO: 2866067 - RNA, 21 nt, Human
caggaauguguggccugcaca

SEQ ID NO: 2866068 - RNA, 23 nt, Human
caggaauguguggccugcacagu

SEQ ID NO: 2866069 - RNA, 16 nt, Human
caggaauguguggccu

SEQ ID NO: 2866070 - RNA, 17 nt, Human
caggaauguguggccug

SEQ ID NO: 2866071 - RNA, 14 nt, Human
caggaaugaucucu

SEQ ID NO: 2866072 - RNA, 15 nt, Human
caggaauuugggacc

SEQ ID NO: 2866073 - RNA, 18 nt, Human
caggaauuugggacccug

SEQ ID NO: 2866074 - RNA, 19 nt, Human
caggaauuugggacccugc

SEQ ID NO: 2866075 - RNA, 20 nt, Human
caggaauuugggacccugcu

SEQ ID NO: 2866076 - RNA, 21 nt, Human
caggaauuugggacccugcuu

SEQ ID NO: 2866077 - RNA, 22 nt, Human
caggaauuugggacccugcuuu

SEQ ID NO: 2866078 - RNA, 23 nt, Human
caggaauuugggacccugcuuua

SEQ ID NO: 2866079 - RNA, 13 nt, Human
caggaccugccug

SEQ ID NO: 2866080 - RNA, 21 nt, Human
caggaccucugaaacccugga

SEQ ID NO: 2866081 - RNA, 14 nt, Human
caggacaccacacc

SEQ ID NO: 2866082 - RNA, 17 nt, Human
caggacaccacacccag

SEQ ID NO: 2866083 - RNA, 19 nt, Human
caggacaccacacccagcc

SEQ ID NO: 2866084 - RNA, 20 nt, Human
caggacaccacacccagccu

SEQ ID NO: 2866085 - RNA, 21 nt, Human
caggacaccacacccagccuc

SEQ ID NO: 2866086 - RNA, 21 nt, Human
caggaagucccuugccauccu

SEQ ID NO: 2866087 - RNA, 19 nt, Human
caggaccugccuguagccc

SEQ ID NO: 2866088 - RNA, 15 nt, Human
caggaccugccugua

SEQ ID NO: 2866089 - RNA, 14 nt, Human
caggaccugccugu

SEQ ID NO: 2866090 - RNA, 13 nt, Human
caggaccuuuuga

SEQ ID NO: 2866091 - RNA, 20 nt, Human
caggaccuuuugaaguaguu

SEQ ID NO: 2866092 - RNA, 14 nt, Human
caggaaggaaguca

SEQ ID NO: 2866093 - RNA, 12 nt, Human
caggaaggagag

SEQ ID NO: 2866094 - RNA, 16 nt, Human
caggaaggagagccug

SEQ ID NO: 2866095 - RNA, 15 nt, Human
caggaaggagagccu

SEQ ID NO: 2866096 - RNA, 14 nt, Human
caggaaggagagcc

SEQ ID NO: 2866097 - RNA, 13 nt, Human
caggaaggagagc

SEQ ID NO: 2866098 - RNA, 21 nt, Human
caggaagccugcaguccugga

SEQ ID NO: 2866099 - RNA, 13 nt, Human
caggaagccugca

SEQ ID NO: 2866100 - RNA, 19 nt, Human
caggaagccugcaguccug

SEQ ID NO: 2866101 - RNA, 22 nt, Human
caggaagcauucagagagcagc

SEQ ID NO: 2866102 - RNA, 18 nt, Human
caggaagcauucagagag

SEQ ID NO: 2866103 - RNA, 19 nt, Human
caggaagcauucagagagc

SEQ ID NO: 2866104 - RNA, 20 nt, Human
caggaagcauucagagagca

SEQ ID NO: 2866105 - RNA, 15 nt, Human
caggaagcaccccau

SEQ ID NO: 2866106 - RNA, 14 nt, Human
caggaagcacccca

SEQ ID NO: 2866107 - RNA, 17 nt, Human
caggaagcaccccaugc

SEQ ID NO: 2866108 - RNA, 16 nt, Human
caggaagcaccccaug

SEQ ID NO: 2866109 - RNA, 14 nt, Human
caggaagcagcuuu

SEQ ID NO: 2866110 - RNA, 15 nt, Human
caggaacuauaaaaa

SEQ ID NO: 2866111 - RNA, 17 nt, Human
caggaacuauaaaaaca

SEQ ID NO: 2866112 - RNA, 19 nt, Human
caggaacuagacugccugg

SEQ ID NO: 2866113 - RNA, 21 nt, Human
caggaaccuguccuaaggaac

SEQ ID NO: 2866114 - RNA, 13 nt, Human
caggaacugggcc

SEQ ID NO: 2866115 - RNA, 12 nt, Human
caggaacugggc

SEQ ID NO: 2866116 - RNA, 21 nt, Human
cagcuucucauccugcaggca

SEQ ID NO: 2866117 - RNA, 19 nt, Human
cagcuucucauccugcagg

SEQ ID NO: 2866118 - RNA, 20 nt, Human
cagcuucucauccugcaggc

SEQ ID NO: 2866119 - RNA, 18 nt, Human
cagcuucucauccugcag

SEQ ID NO: 2866120 - RNA, 18 nt, Human
cagcuucuauccuugacu

SEQ ID NO: 2866121 - RNA, 21 nt, Human
cagcuucauuuccugugucuu

SEQ ID NO: 2866122 - RNA, 20 nt, Human
cagcuucauuuccugugucu

SEQ ID NO: 2866123 - RNA, 19 nt, Human
cagcuucauuuccuguguc

SEQ ID NO: 2866124 - RNA, 14 nt, Human
cagcuuccuaccca

SEQ ID NO: 2866125 - RNA, 19 nt, Human
cagcuuccuacccacaccu

SEQ ID NO: 2866126 - RNA, 20 nt, Human
cagcuuccuacccacaccuc

SEQ ID NO: 2866127 - RNA, 22 nt, Human
cagcuuccuacccacaccucug

SEQ ID NO: 2866128 - RNA, 12 nt, Human
cagcuuccuguc

SEQ ID NO: 2866129 - RNA, 13 nt, Human
cagcuuccuguca

SEQ ID NO: 2866130 - RNA, 18 nt, Human
cagcuuccuguccccauc

SEQ ID NO: 2866131 - RNA, 21 nt, Human
cagcuuccuguccccaucugu

SEQ ID NO: 2866132 - RNA, 17 nt, Human
cagcuucauuuguguca

SEQ ID NO: 2866133 - RNA, 17 nt, Human
cagcuguacuucgucuu

SEQ ID NO: 2866134 - RNA, 13 nt, Human
cagcuucauuugu

SEQ ID NO: 2866135 - RNA, 15 nt, Human
cagcuucauuugugu

SEQ ID NO: 2866136 - RNA, 21 nt, Human
cagcuugaggguugggcuggu

SEQ ID NO: 2866137 - RNA, 20 nt, Human
cagcuugaggguugggcugg

SEQ ID NO: 2866138 - RNA, 19 nt, Human
cagcuugaggguugggcug

SEQ ID NO: 2866139 - RNA, 18 nt, Human
cagcuugaggguugggcu

SEQ ID NO: 2866140 - RNA, 14 nt, Human
cagcuugcgaauaa

SEQ ID NO: 2866141 - RNA, 16 nt, Human
cagcuugcgaauaaca

SEQ ID NO: 2866142 - RNA, 17 nt, Human
cagcuugccagaugcug

SEQ ID NO: 2866143 - RNA, 20 nt, Human
cagcuugccagaugcugcag

SEQ ID NO: 2866144 - RNA, 21 nt, Human
cagcuugccagaugcugcaga

SEQ ID NO: 2866145 - RNA, 17 nt, Human
cagcuuggcccuuuccu

SEQ ID NO: 2866146 - RNA, 14 nt, Human
cagcuugggagagc

SEQ ID NO: 2866147 - RNA, 18 nt, Human
cagcuugggagagccccu

SEQ ID NO: 2866148 - RNA, 23 nt, Human
cagcuugggagagccccuggggc

SEQ ID NO: 2866149 - RNA, 15 nt, Human
cagcuugaggguugg

SEQ ID NO: 2866150 - RNA, 14 nt, Human
cagcuugaggguug

SEQ ID NO: 2866151 - RNA, 23 nt, Human
cagcuuucuccccgcuaaggaag

SEQ ID NO: 2866152 - RNA, 15 nt, Human
cagcuuucugaccuu

SEQ ID NO: 2866153 - RNA, 21 nt, Human
cagcuuucugaccuucagcuc

SEQ ID NO: 2866154 - RNA, 22 nt, Human
cagcuuucugaccuucagcuca

SEQ ID NO: 2866155 - RNA, 19 nt, Human
cagcuuucuugcucccuuc

SEQ ID NO: 2866156 - RNA, 21 nt, Human
cagcuuucuugcucccuucag

SEQ ID NO: 2866157 - RNA, 22 nt, Human
cagcuuucuugcucccuucagc

SEQ ID NO: 2866158 - RNA, 23 nt, Human
cagcuuucuugcucccuucagcc

SEQ ID NO: 2866159 - RNA, 23 nt, Human
cagcuuuccccaugucucgacuc

SEQ ID NO: 2866160 - RNA, 21 nt, Human
cagcuuucaucuuuguggaug

SEQ ID NO: 2866161 - RNA, 13 nt, Human
cagcuuuauguuc

SEQ ID NO: 2866162 - RNA, 16 nt, Human
cagcuuucaaagcauu

SEQ ID NO: 2866163 - RNA, 17 nt, Human
cagcuuucaaagcauuu

SEQ ID NO: 2866164 - RNA, 14 nt, Human
cagcuuucaagugc

SEQ ID NO: 2866165 - RNA, 17 nt, Human
cagcuuucaagugccuu

SEQ ID NO: 2866166 - RNA, 14 nt, Human
cagcuuucagggcc

SEQ ID NO: 2866167 - RNA, 16 nt, Human
cagcuuucagggccau

SEQ ID NO: 2866168 - RNA, 19 nt, Human
cagcuuucagggccauggu

SEQ ID NO: 2866169 - RNA, 20 nt, Human
cagcuugugugcaaaagcag

SEQ ID NO: 2866170 - RNA, 22 nt, Human
cagcuuuaaaaaauuaaucugg

SEQ ID NO: 2866171 - RNA, 19 nt, Human
cagcuuuacaugcaauuua

SEQ ID NO: 2866172 - RNA, 21 nt, Human
cagcuuuacaugcaauuuauu

SEQ ID NO: 2866173 - RNA, 22 nt, Human
cagcuuuaaacucagggacaga

SEQ ID NO: 2866174 - RNA, 18 nt, Human
cagcuuuacacacacaga

SEQ ID NO: 2866175 - RNA, 15 nt, Human
cagcuuuacaugcaa

SEQ ID NO: 2866176 - RNA, 13 nt, Human
cagcuuuaaacaa

SEQ ID NO: 2866177 - RNA, 15 nt, Human
cagcuuuaaacaaau

SEQ ID NO: 2866178 - RNA, 17 nt, Human
cagcuuuaaacucaggg

SEQ ID NO: 2866179 - RNA, 18 nt, Human
cagcuuuaaacucaggga

SEQ ID NO: 2866180 - RNA, 19 nt, Human
cagcuuuaaacucagggac

SEQ ID NO: 2866181 - RNA, 20 nt, Human
cagcuuuaaacucagggaca

SEQ ID NO: 2866182 - RNA, 21 nt, Human
cagcuuuaaacucagggacag

SEQ ID NO: 2866183 - RNA, 22 nt, Human
cagcuuguaaauagcucaggug

SEQ ID NO: 2866184 - RNA, 21 nt, Human
cagcuuguaaauagcucaggu

SEQ ID NO: 2866185 - RNA, 22 nt, Human
cagcuuggggccaccaaagcug

SEQ ID NO: 2866186 - RNA, 15 nt, Human
cagcuuguaggagcu

SEQ ID NO: 2866187 - RNA, 16 nt, Human
cagcuuguaggagcug

SEQ ID NO: 2866188 - RNA, 19 nt, Human
cagcuuguaugcaauggau

SEQ ID NO: 2866189 - RNA, 23 nt, Human
cagcuuguaugcaauggauuuuc

SEQ ID NO: 2866190 - RNA, 14 nt, Human
cagcuugugcacaa

SEQ ID NO: 2866191 - RNA, 15 nt, Human
cagcuugugcacaau

SEQ ID NO: 2866192 - RNA, 20 nt, Human
cagcuuguaaauagcucagg

SEQ ID NO: 2866193 - RNA, 19 nt, Human
cagcuuguaaauagcucag

SEQ ID NO: 2866194 - RNA, 18 nt, Human
cagcuuguaaauagcuca

SEQ ID NO: 2866195 - RNA, 21 nt, Human
cagcuuggggccaccaaagcu

SEQ ID NO: 2866196 - RNA, 20 nt, Human
cagcuuggggccaccaaagc

SEQ ID NO: 2866197 - RNA, 23 nt, Human
caggaacagcuaugggagcccca

SEQ ID NO: 2866198 - RNA, 22 nt, Human
caggaacagcuaugggagcccc

SEQ ID NO: 2866199 - RNA, 20 nt, Human
caggaacagcuaugggagcc

SEQ ID NO: 2866200 - RNA, 14 nt, Human
caggaacagcuaug

SEQ ID NO: 2866201 - RNA, 18 nt, Human
caggaacagaaggaugaa

SEQ ID NO: 2866202 - RNA, 15 nt, Human
caggaacagaaggau

SEQ ID NO: 2866203 - RNA, 14 nt, Human
caggaacagaagga

SEQ ID NO: 2866204 - RNA, 19 nt, Human
cagcuuuuugucuuuucug

SEQ ID NO: 2866205 - RNA, 16 nt, Human
cagcuuuuugucuuuu

SEQ ID NO: 2866206 - RNA, 13 nt, Human
cagcuuuuugucu

SEQ ID NO: 2866207 - RNA, 19 nt, Human
cagcuuuuuaaaguggguu

SEQ ID NO: 2866208 - RNA, 11 nt, Human
cagcuuuuaac

SEQ ID NO: 2866209 - RNA, 15 nt, Human
cagcuuuuaaccauc

SEQ ID NO: 2866210 - RNA, 16 nt, Human
cagcuuuuaaccaucu

SEQ ID NO: 2866211 - RNA, 21 nt, Human
cagcuuuuaaccaucugauau

SEQ ID NO: 2866212 - RNA, 20 nt, Human
cagcuuugagaagccuucag

SEQ ID NO: 2866213 - RNA, 19 nt, Human
cagcuuugagaagccuuca

SEQ ID NO: 2866214 - RNA, 16 nt, Human
cagcuuugaucccuga

SEQ ID NO: 2866215 - RNA, 17 nt, Human
cagcuuugaucccugac

SEQ ID NO: 2866216 - RNA, 20 nt, Human
cagcuuugaucccugacauc

SEQ ID NO: 2866217 - RNA, 18 nt, Human
cagcuuugagaagccuuc

SEQ ID NO: 2866218 - RNA, 16 nt, Human
cagcuuugagaagccu

SEQ ID NO: 2866219 - RNA, 14 nt, Human
cagcuuugauauuu

SEQ ID NO: 2866220 - RNA, 11 nt, Human
cagcuuugcua

SEQ ID NO: 2866221 - RNA, 22 nt, Human
cagcuuugcuaccaaagcaccu

SEQ ID NO: 2866222 - RNA, 18 nt, Human
cagcuguaacacagcuga

SEQ ID NO: 2866223 - RNA, 20 nt, Human
cagcuguaacacagcugaga

SEQ ID NO: 2866224 - RNA, 17 nt, Human
cagcuggguuggaaaac

SEQ ID NO: 2866225 - RNA, 16 nt, Human
cagcuggguuggaaaa

SEQ ID NO: 2866226 - RNA, 19 nt, Human
cagcuggguggcacugcca

SEQ ID NO: 2866227 - RNA, 20 nt, Human
cagcuggguggcacugccau

SEQ ID NO: 2866228 - RNA, 21 nt, Human
cagcuggguggcacugccaug

SEQ ID NO: 2866229 - RNA, 22 nt, Human
cagcuggguggcacugccaugc

SEQ ID NO: 2866230 - RNA, 16 nt, Human
cagcuggguggcacug

SEQ ID NO: 2866231 - RNA, 17 nt, Human
cagcuggguggcacugc

SEQ ID NO: 2866232 - RNA, 18 nt, Human
cagcuggguggcacugcc

SEQ ID NO: 2866233 - RNA, 22 nt, Human
cagcugcuuuugucuaugggac

SEQ ID NO: 2866234 - RNA, 18 nt, Human
cagcugcuggagacuccu

SEQ ID NO: 2866235 - RNA, 19 nt, Human
cagcugcuggagacuccua

SEQ ID NO: 2866236 - RNA, 23 nt, Human
cagcugcuggagacuccuaggca

SEQ ID NO: 2866237 - RNA, 12 nt, Human
cagcugcugucu

SEQ ID NO: 2866238 - RNA, 13 nt, Human
cagcugcugucuu

SEQ ID NO: 2866239 - RNA, 14 nt, Human
cagcugcugucuuc

SEQ ID NO: 2866240 - RNA, 23 nt, Human
cagcugcuuuugucuaugggacu

SEQ ID NO: 2866241 - RNA, 17 nt, Human
cagcuggaauuaugcug

SEQ ID NO: 2866242 - RNA, 13 nt, Human
cagcuggacagag

SEQ ID NO: 2866243 - RNA, 14 nt, Human
cagcuggacagagg

SEQ ID NO: 2866244 - RNA, 15 nt, Human
cagcuggacagaggg

SEQ ID NO: 2866245 - RNA, 16 nt, Human
cagcuggacagagggg

SEQ ID NO: 2866246 - RNA, 23 nt, Human
cagcuggacagaggggacucugg

SEQ ID NO: 2866247 - RNA, 24 nt, Human
cagcuggacagaggggacucuggg

SEQ ID NO: 2866248 - RNA, 18 nt, Human
cagcuggagaaauauggu

SEQ ID NO: 2866249 - RNA, 15 nt, Human
cagcuggacucugca

SEQ ID NO: 2866250 - RNA, 17 nt, Human
cagcuggacucugcauc

SEQ ID NO: 2866251 - RNA, 18 nt, Human
cagcuggacucugcaucc

SEQ ID NO: 2866252 - RNA, 19 nt, Human
cagcuggacucugcauccc

SEQ ID NO: 2866253 - RNA, 23 nt, Human
cagcuggacucugcaucccagca

SEQ ID NO: 2866254 - RNA, 16 nt, Human
cagcuggagaagaccc

SEQ ID NO: 2866255 - RNA, 18 nt, Human
cagcuggaugauggucuu

SEQ ID NO: 2866256 - RNA, 19 nt, Human
cagcuggccgggagccuga

SEQ ID NO: 2866257 - RNA, 15 nt, Human
cagcugggcucugca

SEQ ID NO: 2866258 - RNA, 16 nt, Human
cagcugggcucugcaa

SEQ ID NO: 2866259 - RNA, 23 nt, Human
cagcugggaucacauguggacuu

SEQ ID NO: 2866260 - RNA, 21 nt, Human
cagcucugcaggcuuaauaaa

SEQ ID NO: 2866261 - RNA, 17 nt, Human
cagcuggccuggacagu

SEQ ID NO: 2866262 - RNA, 16 nt, Human
cagcuggccuggacag

SEQ ID NO: 2866263 - RNA, 15 nt, Human
cagcuggccuggaca

SEQ ID NO: 2866264 - RNA, 14 nt, Human
cagcuggccuggac

SEQ ID NO: 2866265 - RNA, 13 nt, Human
cagcuggccugga

SEQ ID NO: 2866266 - RNA, 17 nt, Human
cagcugggcucugcaau

SEQ ID NO: 2866267 - RNA, 14 nt, Human
cagcugcuggagac

SEQ ID NO: 2866268 - RNA, 15 nt, Human
cagcugcuggagacu

SEQ ID NO: 2866269 - RNA, 20 nt, Human
cagcugcuauuuauuuuccu

SEQ ID NO: 2866270 - RNA, 21 nt, Human
cagcugcucaauaaaguacaa

SEQ ID NO: 2866271 - RNA, 22 nt, Human
cagcugcuauuuauuuuccuaa

SEQ ID NO: 2866272 - RNA, 16 nt, Human
cagcugaccuuuguca

SEQ ID NO: 2866273 - RNA, 17 nt, Human
cagcugaaugccuccug

SEQ ID NO: 2866274 - RNA, 20 nt, Human
cagcugaaugccuccugugg

SEQ ID NO: 2866275 - RNA, 21 nt, Human
cagcugaaugccuccuguggg

SEQ ID NO: 2866276 - RNA, 23 nt, Human
cagcugaaugccuccugugggga

SEQ ID NO: 2866277 - RNA, 18 nt, Human
cagcucuuggcuccacug

SEQ ID NO: 2866278 - RNA, 17 nt, Human
cagcucuuggcuccacu

SEQ ID NO: 2866279 - RNA, 16 nt, Human
cagcucuuggcuccac

SEQ ID NO: 2866280 - RNA, 22 nt, Human
cagcucuuugaaauagucugug

SEQ ID NO: 2866281 - RNA, 11 nt, Human
cagcucuuuuu

SEQ ID NO: 2866282 - RNA, 18 nt, Human
cagcucuuuuugugaagu

SEQ ID NO: 2866283 - RNA, 24 nt, Human
cagcugcgguccacccaggagccc

SEQ ID NO: 2866284 - RNA, 23 nt, Human
cagcugcgguccacccaggagcc

SEQ ID NO: 2866285 - RNA, 22 nt, Human
cagcugcgguccacccaggagc

SEQ ID NO: 2866286 - RNA, 21 nt, Human
cagcugcgguccacccaggag

SEQ ID NO: 2866287 - RNA, 20 nt, Human
cagcugcgguccacccagga

SEQ ID NO: 2866288 - RNA, 19 nt, Human
cagcugcgguccacccagg

SEQ ID NO: 2866289 - RNA, 15 nt, Human
cagcugcgcgggcuu

SEQ ID NO: 2866290 - RNA, 18 nt, Human
cagcugcgguccacccag

SEQ ID NO: 2866291 - RNA, 20 nt, Human
cagcucugccgucucuggag

SEQ ID NO: 2866292 - RNA, 19 nt, Human
cagcucugccgucucugga

SEQ ID NO: 2866293 - RNA, 11 nt, Human
cagcucugacu

SEQ ID NO: 2866294 - RNA, 18 nt, Human
cagcucugacuuuacacu

SEQ ID NO: 2866295 - RNA, 13 nt, Human
cagcucucuguau

SEQ ID NO: 2866296 - RNA, 16 nt, Human
cagcucucuguauaaa

SEQ ID NO: 2866297 - RNA, 18 nt, Human
cagcucucuguauaaaca

SEQ ID NO: 2866298 - RNA, 17 nt, Human
cagcucucaucugaggc

SEQ ID NO: 2866299 - RNA, 18 nt, Human
cagcucucaucugaggca

SEQ ID NO: 2866300 - RNA, 20 nt, Human
cagcucuagacacugccaca

SEQ ID NO: 2866301 - RNA, 15 nt, Human
cagcucuacuggucu

SEQ ID NO: 2866302 - RNA, 12 nt, Human
cagcucuccccu

SEQ ID NO: 2866303 - RNA, 16 nt, Human
cagcucggggagccuu

SEQ ID NO: 2866304 - RNA, 18 nt, Human
cagcucuaagucucaacu

SEQ ID NO: 2866305 - RNA, 15 nt, Human
cagcucuaauaaaac

SEQ ID NO: 2866306 - RNA, 16 nt, Human
cagcucuaauaaaaca

SEQ ID NO: 2866307 - RNA, 13 nt, Human
cagcucggggagc

SEQ ID NO: 2866308 - RNA, 19 nt, Human
cagcucgaauuaagaauau

SEQ ID NO: 2866309 - RNA, 14 nt, Human
cagcucgauccaaa

SEQ ID NO: 2866310 - RNA, 18 nt, Human
cagcucgauccaaauugu

SEQ ID NO: 2866311 - RNA, 20 nt, Human
cagcucgauccaaauugugc

SEQ ID NO: 2866312 - RNA, 22 nt, Human
cagcucgauccaaauugugcuu

SEQ ID NO: 2866313 - RNA, 19 nt, Human
cagcucgcaccccccuguu

SEQ ID NO: 2866314 - RNA, 22 nt, Human
cagcucgcaccccccuguucua

SEQ ID NO: 2866315 - RNA, 23 nt, Human
cagcucgcaccccccuguucuaa

SEQ ID NO: 2866316 - RNA, 14 nt, Human
cagcucaggggcag

SEQ ID NO: 2866317 - RNA, 15 nt, Human
cagcucaggggcagc

SEQ ID NO: 2866318 - RNA, 17 nt, Human
cagcucaggggcagcuc

SEQ ID NO: 2866319 - RNA, 18 nt, Human
cagcucaggggcagcuca

SEQ ID NO: 2866320 - RNA, 18 nt, Human
cagcucagucccaucaga

SEQ ID NO: 2866321 - RNA, 12 nt, Human
cagcucaguccc

SEQ ID NO: 2866322 - RNA, 15 nt, Human
cagcucaucucuguc

SEQ ID NO: 2866323 - RNA, 20 nt, Human
cagcucauagaguccccccu

SEQ ID NO: 2866324 - RNA, 15 nt, Human
cagcuccuguaacau

SEQ ID NO: 2866325 - RNA, 13 nt, Human
cagcucauucauu

SEQ ID NO: 2866326 - RNA, 16 nt, Human
cagcucauucauuuua

SEQ ID NO: 2866327 - RNA, 19 nt, Human
cagcucauucauuuuauau

SEQ ID NO: 2866328 - RNA, 20 nt, Human
cagcucauucauuuuauauu

SEQ ID NO: 2866329 - RNA, 23 nt, Human
cagcuccuucuguccuacucugu

SEQ ID NO: 2866330 - RNA, 21 nt, Human
cagcuccuucuguccuacucu

SEQ ID NO: 2866331 - RNA, 17 nt, Human
cagcuccuucuguccua

SEQ ID NO: 2866332 - RNA, 16 nt, Human
cagcuccuucuguccu

SEQ ID NO: 2866333 - RNA, 18 nt, Human
cagcucagcgccagccug

SEQ ID NO: 2866334 - RNA, 11 nt, Human
cagcucagcgc

SEQ ID NO: 2866335 - RNA, 13 nt, Human
cagcucagcgcca

SEQ ID NO: 2866336 - RNA, 17 nt, Human
cagcucagcgccagccu

SEQ ID NO: 2866337 - RNA, 23 nt, Human
cagcucuucuccaggcuguaucc

SEQ ID NO: 2866338 - RNA, 19 nt, Human
cagcucuucuccaggcugu

SEQ ID NO: 2866339 - RNA, 18 nt, Human
cagcucuucuccaggcug

SEQ ID NO: 2866340 - RNA, 17 nt, Human
cagcucuucuccaggcu

SEQ ID NO: 2866341 - RNA, 16 nt, Human
cagcucuucuccaggc

SEQ ID NO: 2866342 - RNA, 15 nt, Human
cagcucuucuccagg

SEQ ID NO: 2866343 - RNA, 14 nt, Human
cagcucuucuccag

SEQ ID NO: 2866344 - RNA, 13 nt, Human
cagcucuucucca

SEQ ID NO: 2866345 - RNA, 15 nt, Human
cagcucuuaaaugua

SEQ ID NO: 2866346 - RNA, 13 nt, Human
cagcucuucaucu

SEQ ID NO: 2866347 - RNA, 14 nt, Human
cagcucuucaucug

SEQ ID NO: 2866348 - RNA, 18 nt, Human
cagcucuucaucugccca

SEQ ID NO: 2866349 - RNA, 19 nt, Human
cagcucuucaucugcccaa

SEQ ID NO: 2866350 - RNA, 23 nt, Human
cagcucuguccugggagugagcu

SEQ ID NO: 2866351 - RNA, 21 nt, Human
cagcucuguguugccaugugu

SEQ ID NO: 2866352 - RNA, 17 nt, Human
cagcucuguguugccau

SEQ ID NO: 2866353 - RNA, 18 nt, Human
cagcucuguccugggagu

SEQ ID NO: 2866354 - RNA, 17 nt, Human
cagcucuguccugggag

SEQ ID NO: 2866355 - RNA, 16 nt, Human
cagcucuguccuggga

SEQ ID NO: 2866356 - RNA, 14 nt, Human
cagcucuguccugg

SEQ ID NO: 2866357 - RNA, 13 nt, Human
cagcucuguccug

SEQ ID NO: 2866358 - RNA, 12 nt, Human
cagcucuguccu

SEQ ID NO: 2866359 - RNA, 22 nt, Human
cagcucugccgucucuggagcg

SEQ ID NO: 2866360 - RNA, 12 nt, Human
cagcucuggcuu

SEQ ID NO: 2866361 - RNA, 14 nt, Human
cagcucuggcuucc

SEQ ID NO: 2866362 - RNA, 15 nt, Human
cagccuaccaugaga

SEQ ID NO: 2866363 - RNA, 21 nt, Human
cagccuagggcugagcugggg

SEQ ID NO: 2866364 - RNA, 13 nt, Human
cagccuaugagca

SEQ ID NO: 2866365 - RNA, 19 nt, Human
cagccuaugagcauccuga

SEQ ID NO: 2866366 - RNA, 21 nt, Human
cagccuaugagcauccugagc

SEQ ID NO: 2866367 - RNA, 22 nt, Human
cagccuaugagcauccugagcc

SEQ ID NO: 2866368 - RNA, 23 nt, Human
cagccuaugagcauccugagccc

SEQ ID NO: 2866369 - RNA, 18 nt, Human
cagccucaaccuccuggg

SEQ ID NO: 2866370 - RNA, 17 nt, Human
cagccucaaccuccugg

SEQ ID NO: 2866371 - RNA, 21 nt, Human
cagccucaaccuccugggcua

SEQ ID NO: 2866372 - RNA, 20 nt, Human
cagccucaaccuccugggcu

SEQ ID NO: 2866373 - RNA, 19 nt, Human
cagccucaaccuccugggc

SEQ ID NO: 2866374 - RNA, 15 nt, Human
cagccucacccuugc

SEQ ID NO: 2866375 - RNA, 16 nt, Human
cagccucacccuugcg

SEQ ID NO: 2866376 - RNA, 13 nt, Human
cagccucacuugg

SEQ ID NO: 2866377 - RNA, 21 nt, Human
cagccucacuuggucugccag

SEQ ID NO: 2866378 - RNA, 22 nt, Human
cagccucacuuggucugccagg

SEQ ID NO: 2866379 - RNA, 23 nt, Human
cagccucacuuggucugccaggc

SEQ ID NO: 2866380 - RNA, 15 nt, Human
cagccucaguccucc

SEQ ID NO: 2866381 - RNA, 16 nt, Human
cagccucaguccuccc

SEQ ID NO: 2866382 - RNA, 14 nt, Human
cagccuccaagcuc

SEQ ID NO: 2866383 - RNA, 19 nt, Human
cagccucaguccuccccuc

SEQ ID NO: 2866384 - RNA, 21 nt, Human
cagccucaguccuccccucac

SEQ ID NO: 2866385 - RNA, 22 nt, Human
cagccucaguccuccccucaca

SEQ ID NO: 2866386 - RNA, 23 nt, Human
cagccucaguccuccccucacag

SEQ ID NO: 2866387 - RNA, 20 nt, Human
cagccuccaacacaaggcuc

SEQ ID NO: 2866388 - RNA, 22 nt, Human
cagccuccaacacaaggcucca

SEQ ID NO: 2866389 - RNA, 20 nt, Human
cagccuccaagcuccaucuc

SEQ ID NO: 2866390 - RNA, 22 nt, Human
cagccucccgaauagcugggac

SEQ ID NO: 2866391 - RNA, 21 nt, Human
cagccucccgaauagcuggga

SEQ ID NO: 2866392 - RNA, 20 nt, Human
cagccucccgaauagcuggg

SEQ ID NO: 2866393 - RNA, 18 nt, Human
cagccucccacccccauc

SEQ ID NO: 2866394 - RNA, 16 nt, Human
cagccucccaccccca

SEQ ID NO: 2866395 - RNA, 19 nt, Human
cagccucccacccccaucu

SEQ ID NO: 2866396 - RNA, 14 nt, Human
cagccucccacccc

SEQ ID NO: 2866397 - RNA, 22 nt, Human
cagccucccaaagugcugagau

SEQ ID NO: 2866398 - RNA, 15 nt, Human
cagccucccaaagug

SEQ ID NO: 2866399 - RNA, 21 nt, Human
cagccucccaaagugcugaga

SEQ ID NO: 2866400 - RNA, 23 nt, Human
cagccucccaaagugcugggauu

SEQ ID NO: 2866401 - RNA, 21 nt, Human
cagccucccaaagugcuggga

SEQ ID NO: 2866402 - RNA, 20 nt, Human
cagccucccaaagugcuggg

SEQ ID NO: 2866403 - RNA, 19 nt, Human
cagccucccaaagugcugg

SEQ ID NO: 2866404 - RNA, 15 nt, Human
cagccuccaugcugc

SEQ ID NO: 2866405 - RNA, 17 nt, Human
cagccuccaugcugccu

SEQ ID NO: 2866406 - RNA, 20 nt, Human
cagccuccaugcugccucca

SEQ ID NO: 2866407 - RNA, 14 nt, Human
cagccuccagccug

SEQ ID NO: 2866408 - RNA, 15 nt, Human
cagccuccagccugc

SEQ ID NO: 2866409 - RNA, 14 nt, Human
cagccucccaaagu

SEQ ID NO: 2866410 - RNA, 18 nt, Human
cagccuccaugcugccuc

SEQ ID NO: 2866411 - RNA, 14 nt, Human
cagccuccaugcug

SEQ ID NO: 2866412 - RNA, 12 nt, Human
cagccuacaguu

SEQ ID NO: 2866413 - RNA, 9 nt, Human
cagccgugc

SEQ ID NO: 2866414 - RNA, 14 nt, Human
cagccgugccuuca

SEQ ID NO: 2866415 - RNA, 16 nt, Human
cagccgugccuucagc

SEQ ID NO: 2866416 - RNA, 18 nt, Human
cagccgugccuucagcuc

SEQ ID NO: 2866417 - RNA, 20 nt, Human
cagccgugccuucagcucua

SEQ ID NO: 2866418 - RNA, 23 nt, Human
cagcccugcuuugggcugcccug

SEQ ID NO: 2866419 - RNA, 21 nt, Human
cagcccugcuuugggcugccc

SEQ ID NO: 2866420 - RNA, 22 nt, Human
cagcccugcuuugggcugcccu

SEQ ID NO: 2866421 - RNA, 11 nt, Human
cagcccugcuu

SEQ ID NO: 2866422 - RNA, 13 nt, Human
cagcccugcuuug

SEQ ID NO: 2866423 - RNA, 19 nt, Human
cagcccugcuuugggcugc

SEQ ID NO: 2866424 - RNA, 20 nt, Human
cagcccugcuuugggcugcc

SEQ ID NO: 2866425 - RNA, 21 nt, Human
cagcccuggcagggggcaugc

SEQ ID NO: 2866426 - RNA, 12 nt, Human
cagcccuggcuc

SEQ ID NO: 2866427 - RNA, 15 nt, Human
cagcccuggcucugc

SEQ ID NO: 2866428 - RNA, 16 nt, Human
cagcccuggcucugca

SEQ ID NO: 2866429 - RNA, 13 nt, Human
cagcccuggggcu

SEQ ID NO: 2866430 - RNA, 14 nt, Human
cagcccuggggcug

SEQ ID NO: 2866431 - RNA, 18 nt, Human
cagcccugagaaagcccu

SEQ ID NO: 2866432 - RNA, 19 nt, Human
cagcccugagaaagcccug

SEQ ID NO: 2866433 - RNA, 22 nt, Human
cagcccugaggugaaagggagc

SEQ ID NO: 2866434 - RNA, 12 nt, Human
cagcccugaggu

SEQ ID NO: 2866435 - RNA, 21 nt, Human
cagcccuccccauggagccag

SEQ ID NO: 2866436 - RNA, 16 nt, Human
cagcccucccugcccc

SEQ ID NO: 2866437 - RNA, 17 nt, Human
cagcccucccugccccu

SEQ ID NO: 2866438 - RNA, 18 nt, Human
cagcccucccugccccuc

SEQ ID NO: 2866439 - RNA, 22 nt, Human
cagcccucccugccccucccuu

SEQ ID NO: 2866440 - RNA, 22 nt, Human
cagcccuccaucuaaacugccc

SEQ ID NO: 2866441 - RNA, 20 nt, Human
cagcccuccccauggagcca

SEQ ID NO: 2866442 - RNA, 23 nt, Human
cagcccuccaucuaaacugcccc

SEQ ID NO: 2866443 - RNA, 13 nt, Human
cagcccucccugc

SEQ ID NO: 2866444 - RNA, 15 nt, Human
cagcccucccugccc

SEQ ID NO: 2866445 - RNA, 23 nt, Human
cagcccuagagccugccuggagc

SEQ ID NO: 2866446 - RNA, 18 nt, Human
cagcccuagagccugccu

SEQ ID NO: 2866447 - RNA, 20 nt, Human
cagcccuagagccugccugg

SEQ ID NO: 2866448 - RNA, 21 nt, Human
cagcccuagagccugccugga

SEQ ID NO: 2866449 - RNA, 22 nt, Human
cagcccuagagccugccuggag

SEQ ID NO: 2866450 - RNA, 12 nt, Human
cagcccuagagc

SEQ ID NO: 2866451 - RNA, 15 nt, Human
cagcccuagagccug

SEQ ID NO: 2866452 - RNA, 16 nt, Human
cagcccuagagccugc

SEQ ID NO: 2866453 - RNA, 14 nt, Human
cagcccgggagccu

SEQ ID NO: 2866454 - RNA, 15 nt, Human
cagcccgggagccua

SEQ ID NO: 2866455 - RNA, 16 nt, Human
cagcccgggagccuag

SEQ ID NO: 2866456 - RNA, 19 nt, Human
cagcccgggagccuaggac

SEQ ID NO: 2866457 - RNA, 20 nt, Human
cagcccgggagccuaggacc

SEQ ID NO: 2866458 - RNA, 21 nt, Human
cagcccgggagccuaggacca

SEQ ID NO: 2866459 - RNA, 15 nt, Human
cagccccuuuccaaa

SEQ ID NO: 2866460 - RNA, 23 nt, Human
cagccccuuuccaaaauuuuuca

SEQ ID NO: 2866461 - RNA, 17 nt, Human
cagcccggccgcuccac

SEQ ID NO: 2866462 - RNA, 18 nt, Human
cagcccggaccuuggcag

SEQ ID NO: 2866463 - RNA, 15 nt, Human
cagcccggaccuugg

SEQ ID NO: 2866464 - RNA, 14 nt, Human
cagccccauucugc

SEQ ID NO: 2866465 - RNA, 13 nt, Human
cagccccauucug

SEQ ID NO: 2866466 - RNA, 18 nt, Human
cagccccauucugccugc

SEQ ID NO: 2866467 - RNA, 17 nt, Human
cagccccauucugccug

SEQ ID NO: 2866468 - RNA, 16 nt, Human
cagccccauucugccu

SEQ ID NO: 2866469 - RNA, 13 nt, Human
cagccccaucugu

SEQ ID NO: 2866470 - RNA, 17 nt, Human
cagccccaucugugcau

SEQ ID NO: 2866471 - RNA, 20 nt, Human
cagccccaucugugcauucu

SEQ ID NO: 2866472 - RNA, 18 nt, Human
cagccccagugcccacag

SEQ ID NO: 2866473 - RNA, 17 nt, Human
cagccccagugcccaca

SEQ ID NO: 2866474 - RNA, 16 nt, Human
cagccccagugcccac

SEQ ID NO: 2866475 - RNA, 15 nt, Human
cagccccagugccca

SEQ ID NO: 2866476 - RNA, 14 nt, Human
cagccccagugccc

SEQ ID NO: 2866477 - RNA, 13 nt, Human
cagccccagugcc

SEQ ID NO: 2866478 - RNA, 20 nt, Human
cagccccacugccagcagca

SEQ ID NO: 2866479 - RNA, 19 nt, Human
cagccccacugccagcagc

SEQ ID NO: 2866480 - RNA, 18 nt, Human
cagccccacugccagcag

SEQ ID NO: 2866481 - RNA, 16 nt, Human
cagccccacugccagc

SEQ ID NO: 2866482 - RNA, 15 nt, Human
cagccccacugccag

SEQ ID NO: 2866483 - RNA, 14 nt, Human
cagccccacugcca

SEQ ID NO: 2866484 - RNA, 13 nt, Human
cagccccacugcc

SEQ ID NO: 2866485 - RNA, 12 nt, Human
cagccccacugc

SEQ ID NO: 2866486 - RNA, 22 nt, Human
cagccccacugccagcagcagc

SEQ ID NO: 2866487 - RNA, 21 nt, Human
cagccccacugccagcagcag

SEQ ID NO: 2866488 - RNA, 15 nt, Human
cagccccagagcagg

SEQ ID NO: 2866489 - RNA, 19 nt, Human
cagcccagaagaaaauucu

SEQ ID NO: 2866490 - RNA, 22 nt, Human
cagccccacccaggagggaggg

SEQ ID NO: 2866491 - RNA, 21 nt, Human
cagccccacccaggagggagg

SEQ ID NO: 2866492 - RNA, 16 nt, Human
cagccccacccaggag

SEQ ID NO: 2866493 - RNA, 15 nt, Human
cagccccacccagga

SEQ ID NO: 2866494 - RNA, 14 nt, Human
cagccccacccagg

SEQ ID NO: 2866495 - RNA, 13 nt, Human
cagccccacccag

SEQ ID NO: 2866496 - RNA, 12 nt, Human
cagccccaccca

SEQ ID NO: 2866497 - RNA, 11 nt, Human
cagccccaccc

SEQ ID NO: 2866498 - RNA, 15 nt, Human
cagcuacuuccuccu

SEQ ID NO: 2866499 - RNA, 19 nt, Human
cagcuacugauuuuuguga

SEQ ID NO: 2866500 - RNA, 17 nt, Human
cagcuacuuaagagaaa

SEQ ID NO: 2866501 - RNA, 20 nt, Human
cagcuacuuaagagaaaugg

SEQ ID NO: 2866502 - RNA, 17 nt, Human
cagcuacuuccuccucc

SEQ ID NO: 2866503 - RNA, 21 nt, Human
cagcuacuuccuccuccccac

SEQ ID NO: 2866504 - RNA, 23 nt, Human
cagcuacucagaagccugaggcu

SEQ ID NO: 2866505 - RNA, 22 nt, Human
cagcuacucagaagccugaggc

SEQ ID NO: 2866506 - RNA, 16 nt, Human
cagcuacugauuuuug

SEQ ID NO: 2866507 - RNA, 19 nt, Human
cagcuacucgggaggcuga

SEQ ID NO: 2866508 - RNA, 12 nt, Human
cagcuacaacag

SEQ ID NO: 2866509 - RNA, 13 nt, Human
cagcuacaacagc

SEQ ID NO: 2866510 - RNA, 17 nt, Human
cagcuacaacagccuca

SEQ ID NO: 2866511 - RNA, 15 nt, Human
cagcuacagcuuucu

SEQ ID NO: 2866512 - RNA, 20 nt, Human
cagcuacagcuuucuugcuc

SEQ ID NO: 2866513 - RNA, 18 nt, Human
cagcuacccacuauccuu

SEQ ID NO: 2866514 - RNA, 21 nt, Human
cagcuaccucaaccaaugcca

SEQ ID NO: 2866515 - RNA, 17 nt, Human
cagcuacccuguguaua

SEQ ID NO: 2866516 - RNA, 21 nt, Human
cagcuacccuuuuucuccagc

SEQ ID NO: 2866517 - RNA, 24 nt, Human
cagcuacccuuuuucuccagcugg

SEQ ID NO: 2866518 - RNA, 21 nt, Human
cagcuacucagaagccugagg

SEQ ID NO: 2866519 - RNA, 20 nt, Human
cagcuacucagaagccugag

SEQ ID NO: 2866520 - RNA, 19 nt, Human
cagcuacucagaagccuga

SEQ ID NO: 2866521 - RNA, 16 nt, Human
cagcuacucagaagcc

SEQ ID NO: 2866522 - RNA, 15 nt, Human
cagcuacucagaagc

SEQ ID NO: 2866523 - RNA, 14 nt, Human
cagcuacucagaag

SEQ ID NO: 2866524 - RNA, 16 nt, Human
cagcuaaugggacacu

SEQ ID NO: 2866525 - RNA, 15 nt, Human
cagcuaaugggacac

SEQ ID NO: 2866526 - RNA, 21 nt, Human
cagcuaaggaggggaaaaaaa

SEQ ID NO: 2866527 - RNA, 22 nt, Human
cagcuaaggaggggaaaaaaau

SEQ ID NO: 2866528 - RNA, 18 nt, Human
cagcuaagggaagacauu

SEQ ID NO: 2866529 - RNA, 19 nt, Human
cagcuaagggaagacauuu

SEQ ID NO: 2866530 - RNA, 21 nt, Human
cagcuaagggaagacauuucu

SEQ ID NO: 2866531 - RNA, 23 nt, Human
cagcuaagggaagacauuucuuu

SEQ ID NO: 2866532 - RNA, 19 nt, Human
cagcuaaucagcauucuca

SEQ ID NO: 2866533 - RNA, 14 nt, Human
cagcgccagccugu

SEQ ID NO: 2866534 - RNA, 15 nt, Human
cagcuaagcuaggaa

SEQ ID NO: 2866535 - RNA, 18 nt, Human
cagcuaagcuaggaauga

SEQ ID NO: 2866536 - RNA, 20 nt, Human
cagcgagcccugguggcagu

SEQ ID NO: 2866537 - RNA, 19 nt, Human
cagcgagcccugguggcag

SEQ ID NO: 2866538 - RNA, 17 nt, Human
cagcgagcccugguggc

SEQ ID NO: 2866539 - RNA, 16 nt, Human
cagcgagcccuggugg

SEQ ID NO: 2866540 - RNA, 13 nt, Human
cagcgagcccugg

SEQ ID NO: 2866541 - RNA, 18 nt, Human
cagcgaccuuccucaucc

SEQ ID NO: 2866542 - RNA, 19 nt, Human
cagcgacauagcccauccc

SEQ ID NO: 2866543 - RNA, 16 nt, Human
cagcgaaguagcuugc

SEQ ID NO: 2866544 - RNA, 18 nt, Human
cagcgaaguagcuugcuc

SEQ ID NO: 2866545 - RNA, 19 nt, Human
cagcgaaguagcuugcucc

SEQ ID NO: 2866546 - RNA, 22 nt, Human
cagcgaaguagcuugcucccug

SEQ ID NO: 2866547 - RNA, 20 nt, Human
cagcgacauagcccaucccu

SEQ ID NO: 2866548 - RNA, 16 nt, Human
cagcgaccgcccccuc

SEQ ID NO: 2866549 - RNA, 17 nt, Human
cagcgaccgcccccucc

SEQ ID NO: 2866550 - RNA, 18 nt, Human
cagcgaccgcccccuccu

SEQ ID NO: 2866551 - RNA, 18 nt, Human
cagcgccaagugcgugcc

SEQ ID NO: 2866552 - RNA, 23 nt, Human
cagcgccaagugcgugccgugug

SEQ ID NO: 2866553 - RNA, 24 nt, Human
cagcgccaagugcgugccguguga

SEQ ID NO: 2866554 - RNA, 21 nt, Human
cagcgagcccugguggcagug

SEQ ID NO: 2866555 - RNA, 14 nt, Human
cagcgagggcagcu

SEQ ID NO: 2866556 - RNA, 17 nt, Human
cagcgagggcagcugcu

SEQ ID NO: 2866557 - RNA, 16 nt, Human
cagcgagggcagcugc

SEQ ID NO: 2866558 - RNA, 15 nt, Human
cagcgagggcagcug

SEQ ID NO: 2866559 - RNA, 18 nt, Human
cagcgagggcagcugcua

SEQ ID NO: 2866560 - RNA, 22 nt, Human
cagcgaguuguggaaagccucu

SEQ ID NO: 2866561 - RNA, 19 nt, Human
cagcucaccagccccagug

SEQ ID NO: 2866562 - RNA, 17 nt, Human
cagcucaccagccccag

SEQ ID NO: 2866563 - RNA, 16 nt, Human
cagcucaccagcccca

SEQ ID NO: 2866564 - RNA, 15 nt, Human
cagcucaccagcccc

SEQ ID NO: 2866565 - RNA, 13 nt, Human
cagcucaccagcc

SEQ ID NO: 2866566 - RNA, 16 nt, Human
cagcucaauggacugg

SEQ ID NO: 2866567 - RNA, 20 nt, Human
cagcucaaggaaaggccuga

SEQ ID NO: 2866568 - RNA, 19 nt, Human
cagcucaaggaaaggccug

SEQ ID NO: 2866569 - RNA, 13 nt, Human
cagcuaugcuggu

SEQ ID NO: 2866570 - RNA, 23 nt, Human
cagcuauaccugugccucggcuu

SEQ ID NO: 2866571 - RNA, 19 nt, Human
cagcuaucgaacuucacaa

SEQ ID NO: 2866572 - RNA, 24 nt, Human
cagcuaucgaacuucacaacuagg

SEQ ID NO: 2866573 - RNA, 22 nt, Human
cagcuauaccugugccucggcu

SEQ ID NO: 2866574 - RNA, 21 nt, Human
cagcuauaccugugccucggc

SEQ ID NO: 2866575 - RNA, 19 nt, Human
cagcuauaccugugccucg

SEQ ID NO: 2866576 - RNA, 17 nt, Human
cagcuauaccugugccu

SEQ ID NO: 2866577 - RNA, 23 nt, Human
cagcuaugggagccccagggucu

SEQ ID NO: 2866578 - RNA, 22 nt, Human
cagcuaugggagccccaggguc

SEQ ID NO: 2866579 - RNA, 21 nt, Human
cagcuaugggagccccagggu

SEQ ID NO: 2866580 - RNA, 20 nt, Human
cagcuaugggagccccaggg

SEQ ID NO: 2866581 - RNA, 18 nt, Human
cagcuaugggagccccag

SEQ ID NO: 2866582 - RNA, 17 nt, Human
cagcuaugggagcccca

SEQ ID NO: 2866583 - RNA, 15 nt, Human
cagcuaugggagccc

SEQ ID NO: 2866584 - RNA, 13 nt, Human
cagcuaugggagc

SEQ ID NO: 2866585 - RNA, 18 nt, Human
cagcuagaaaacauuuuu

SEQ ID NO: 2866586 - RNA, 17 nt, Human
cagcuacuugguuugug

SEQ ID NO: 2866587 - RNA, 19 nt, Human
cagcuacuugguuuguguu

SEQ ID NO: 2866588 - RNA, 20 nt, Human
cagcuaguccuagugaaccu

SEQ ID NO: 2866589 - RNA, 16 nt, Human
cagcuauaccugugcc

SEQ ID NO: 2866590 - RNA, 15 nt, Human
cagcuauaccugugc

SEQ ID NO: 2866591 - RNA, 21 nt, Human
cagcucaccagccccagugcc

SEQ ID NO: 2866592 - RNA, 20 nt, Human
cagcucaccagccccagugc

SEQ ID NO: 2866593 - RNA, 22 nt, Human
cagcucaccagccccagugccc

SEQ ID NO: 2866594 - RNA, 20 nt, Human
cagcucaauggacuggaagg

SEQ ID NO: 2866595 - RNA, 13 nt, Human
cagcucacagugc

SEQ ID NO: 2866596 - RNA, 20 nt, Human
cagcucacagugcugugugc

SEQ ID NO: 2866597 - RNA, 13 nt, Human
cagcucacgcuuc

SEQ ID NO: 2866598 - RNA, 17 nt, Human
cagcucacgcuucacag

SEQ ID NO: 2866599 - RNA, 19 nt, Human
cagcucacgcuucacagug

SEQ ID NO: 2866600 - RNA, 14 nt, Human
cagcucacugcaac

SEQ ID NO: 2866601 - RNA, 12 nt, Human
cagcucacugca

SEQ ID NO: 2866602 - RNA, 13 nt, Human
cagcucagaaccc

SEQ ID NO: 2866603 - RNA, 14 nt, Human
cagcucagaaccca

SEQ ID NO: 2866604 - RNA, 15 nt, Human
cagcucagaacccag

SEQ ID NO: 2866605 - RNA, 16 nt, Human
cagcucagaacccagg

SEQ ID NO: 2866606 - RNA, 17 nt, Human
cagcucagaacccaggg

SEQ ID NO: 2866607 - RNA, 18 nt, Human
cagcucagaacccagggc

SEQ ID NO: 2866608 - RNA, 19 nt, Human
cagcucagaacccagggcu

SEQ ID NO: 2866609 - RNA, 20 nt, Human
cagcucagaacccagggcuc

SEQ ID NO: 2866610 - RNA, 21 nt, Human
cagcucagaacccagggcucu

SEQ ID NO: 2866611 - RNA, 12 nt, Human
cagcucagaacc

SEQ ID NO: 2866612 - RNA, 21 nt, Human
cagcucacugcaaccuucgcc

SEQ ID NO: 2866613 - RNA, 15 nt, Human
cagcucacugcaacc

SEQ ID NO: 2866614 - RNA, 21 nt, Human
cagccuucccccucccagggc

SEQ ID NO: 2866615 - RNA, 20 nt, Human
cagccuucccccucccaggg

SEQ ID NO: 2866616 - RNA, 14 nt, Human
cagccuucccccuc

SEQ ID NO: 2866617 - RNA, 16 nt, Human
cagccuucuuccaucc

SEQ ID NO: 2866618 - RNA, 18 nt, Human
cagccuucuuccauccca

SEQ ID NO: 2866619 - RNA, 14 nt, Human
cagccuugaacucu

SEQ ID NO: 2866620 - RNA, 18 nt, Human
cagccuugaacucugggc

SEQ ID NO: 2866621 - RNA, 19 nt, Human
cagccuugaacucugggcu

SEQ ID NO: 2866622 - RNA, 21 nt, Human
cagccuucuuccaucccagga

SEQ ID NO: 2866623 - RNA, 23 nt, Human
cagccuucuuccaucccaggaca

SEQ ID NO: 2866624 - RNA, 17 nt, Human
cagccuuugccuccccg

SEQ ID NO: 2866625 - RNA, 18 nt, Human
cagccuuuggccuuggcu

SEQ ID NO: 2866626 - RNA, 14 nt, Human
cagccuuugggaaa

SEQ ID NO: 2866627 - RNA, 19 nt, Human
cagccugguccaugcaggg

SEQ ID NO: 2866628 - RNA, 23 nt, Human
cagccugguccaugcagggggcu

SEQ ID NO: 2866629 - RNA, 13 nt, Human
cagccuggggccu

SEQ ID NO: 2866630 - RNA, 15 nt, Human
cagccuggggccugg

SEQ ID NO: 2866631 - RNA, 16 nt, Human
cagccuggggccuggc

SEQ ID NO: 2866632 - RNA, 17 nt, Human
cagccuggggccuggca

SEQ ID NO: 2866633 - RNA, 18 nt, Human
cagccuggggccuggcag

SEQ ID NO: 2866634 - RNA, 19 nt, Human
cagccuggggccuggcagg

SEQ ID NO: 2866635 - RNA, 20 nt, Human
cagccuggggccuggcaggg

SEQ ID NO: 2866636 - RNA, 22 nt, Human
cagccuggggccuggcagggag

SEQ ID NO: 2866637 - RNA, 12 nt, Human
cagccuguggca

SEQ ID NO: 2866638 - RNA, 21 nt, Human
cagccuguggcaucuuugccu

SEQ ID NO: 2866639 - RNA, 19 nt, Human
cagccuguggcaucuuugc

SEQ ID NO: 2866640 - RNA, 15 nt, Human
cagccuguggcaucu

SEQ ID NO: 2866641 - RNA, 19 nt, Human
cagccugucccauggacac

SEQ ID NO: 2866642 - RNA, 21 nt, Human
cagccugucccauggacacuc

SEQ ID NO: 2866643 - RNA, 22 nt, Human
cagccugucccauggacacucc

SEQ ID NO: 2866644 - RNA, 21 nt, Human
cagccuggcuucuggagcccu

SEQ ID NO: 2866645 - RNA, 20 nt, Human
cagccuggcuucuggagccc

SEQ ID NO: 2866646 - RNA, 11 nt, Human
cagccugggac

SEQ ID NO: 2866647 - RNA, 23 nt, Human
cagccugggacaguuuaucauga

SEQ ID NO: 2866648 - RNA, 16 nt, Human
cagccugggaggcaca

SEQ ID NO: 2866649 - RNA, 17 nt, Human
cagccugggaggcacag

SEQ ID NO: 2866650 - RNA, 20 nt, Human
cagccugggaggcacagcaa

SEQ ID NO: 2866651 - RNA, 20 nt, Human
cagccugggcaacagagcaa

SEQ ID NO: 2866652 - RNA, 19 nt, Human
cagccugggcaacagagca

SEQ ID NO: 2866653 - RNA, 18 nt, Human
cagccugggcaacaaagu

SEQ ID NO: 2866654 - RNA, 16 nt, Human
cagccugggccccagc

SEQ ID NO: 2866655 - RNA, 15 nt, Human
cagccugggccccag

SEQ ID NO: 2866656 - RNA, 15 nt, Human
cagccugggcgacag

SEQ ID NO: 2866657 - RNA, 11 nt, Human
cagccugggcg

SEQ ID NO: 2866658 - RNA, 12 nt, Human
cagccugggccc

SEQ ID NO: 2866659 - RNA, 21 nt, Human
cagccugggcagccaggcugc

SEQ ID NO: 2866660 - RNA, 20 nt, Human
cagccugggcagccaggcug

SEQ ID NO: 2866661 - RNA, 19 nt, Human
cagccugggcagccaggcu

SEQ ID NO: 2866662 - RNA, 18 nt, Human
cagccugggcagccaggc

SEQ ID NO: 2866663 - RNA, 17 nt, Human
cagccugggcagccagg

SEQ ID NO: 2866664 - RNA, 20 nt, Human
cagccugggcagcauagcaa

SEQ ID NO: 2866665 - RNA, 14 nt, Human
cagccugcugccca

SEQ ID NO: 2866666 - RNA, 15 nt, Human
cagccugcugcccag

SEQ ID NO: 2866667 - RNA, 23 nt, Human
cagccugcuucccaccucccugc

SEQ ID NO: 2866668 - RNA, 21 nt, Human
cagccuggcacagggcagugg

SEQ ID NO: 2866669 - RNA, 13 nt, Human
cagccuggcacag

SEQ ID NO: 2866670 - RNA, 20 nt, Human
cagccuggcacagggcagug

SEQ ID NO: 2866671 - RNA, 16 nt, Human
cagccuggagaugaaa

SEQ ID NO: 2866672 - RNA, 17 nt, Human
cagccuggagacccacc

SEQ ID NO: 2866673 - RNA, 10 nt, Human
cagccuggca

SEQ ID NO: 2866674 - RNA, 19 nt, Human
cagccuggcuucuggagcc

SEQ ID NO: 2866675 - RNA, 17 nt, Human
cagccuggcuucuggag

SEQ ID NO: 2866676 - RNA, 16 nt, Human
cagccuggcuucugga

SEQ ID NO: 2866677 - RNA, 15 nt, Human
cagccuggcuucugg

SEQ ID NO: 2866678 - RNA, 14 nt, Human
cagccuggcuucug

SEQ ID NO: 2866679 - RNA, 23 nt, Human
cagccucccgaguagcugggacu

SEQ ID NO: 2866680 - RNA, 22 nt, Human
cagccucccgaguagcugggac

SEQ ID NO: 2866681 - RNA, 23 nt, Human
cagccucccucugaccugcaggc

SEQ ID NO: 2866682 - RNA, 22 nt, Human
cagccucccucugaccugcagg

SEQ ID NO: 2866683 - RNA, 21 nt, Human
cagccucccucugaccugcag

SEQ ID NO: 2866684 - RNA, 15 nt, Human
cagccucccucugac

SEQ ID NO: 2866685 - RNA, 14 nt, Human
cagccucccucuga

SEQ ID NO: 2866686 - RNA, 13 nt, Human
cagccucccucug

SEQ ID NO: 2866687 - RNA, 18 nt, Human
cagccucccgaguagcug

SEQ ID NO: 2866688 - RNA, 21 nt, Human
cagccucccgaguagcuggga

SEQ ID NO: 2866689 - RNA, 20 nt, Human
cagccucccgaguagcuggg

SEQ ID NO: 2866690 - RNA, 19 nt, Human
cagccucccgaguagcugg

SEQ ID NO: 2866691 - RNA, 23 nt, Human
cagccucccgaauagcugggacu

SEQ ID NO: 2866692 - RNA, 23 nt, Human
cagccucguuggaagaggaacag

SEQ ID NO: 2866693 - RNA, 22 nt, Human
cagccucguuggaagaggaaca

SEQ ID NO: 2866694 - RNA, 18 nt, Human
cagccucguuggaagagg

SEQ ID NO: 2866695 - RNA, 20 nt, Human
cagccuccugaguagcugga

SEQ ID NO: 2866696 - RNA, 15 nt, Human
cagccuccugaguag

SEQ ID NO: 2866697 - RNA, 23 nt, Human
cagccuccucugucugcccuuca

SEQ ID NO: 2866698 - RNA, 17 nt, Human
cagccuccucugucugc

SEQ ID NO: 2866699 - RNA, 12 nt, Human
cagccuccucug

SEQ ID NO: 2866700 - RNA, 18 nt, Human
cagcaacacagccugggc

SEQ ID NO: 2866701 - RNA, 16 nt, Human
cagcaacacagccugg

SEQ ID NO: 2866702 - RNA, 19 nt, Human
cagcaacacagccugggcc

SEQ ID NO: 2866703 - RNA, 14 nt, Human
cagcaacacagccu

SEQ ID NO: 2866704 - RNA, 14 nt, Human
cagcaacacagagc

SEQ ID NO: 2866705 - RNA, 20 nt, Human
cagcaacuucuucuccaucc

SEQ ID NO: 2866706 - RNA, 22 nt, Human
cagcaacuucuucuccaucccu

SEQ ID NO: 2866707 - RNA, 11 nt, Human
cagcaagaaaa

SEQ ID NO: 2866708 - RNA, 13 nt, Human
cagcaagaaaaaa

SEQ ID NO: 2866709 - RNA, 14 nt, Human
cagcaagaaaaaaa

SEQ ID NO: 2866710 - RNA, 17 nt, Human
cagcaagaaaaaaaaau

SEQ ID NO: 2866711 - RNA, 19 nt, Human
cagcaagaaaaaaaaaugc

SEQ ID NO: 2866712 - RNA, 21 nt, Human
cagcaagaaaaaaaaaugcca

SEQ ID NO: 2866713 - RNA, 22 nt, Human
cagcaagaaaaaaaaaugccau

SEQ ID NO: 2866714 - RNA, 14 nt, Human
cagcaaaccaagag

SEQ ID NO: 2866715 - RNA, 15 nt, Human
cagcaaaccaagaga

SEQ ID NO: 2866716 - RNA, 16 nt, Human
cagcaaaccaagagau

SEQ ID NO: 2866717 - RNA, 23 nt, Human
cagcaaaccaagagauugcuaau

SEQ ID NO: 2866718 - RNA, 11 nt, Human
cagcaaaccau

SEQ ID NO: 2866719 - RNA, 12 nt, Human
cagcaaaccauu

SEQ ID NO: 2866720 - RNA, 21 nt, Human
cagcaaaccauuuuuaaagua

SEQ ID NO: 2866721 - RNA, 24 nt, Human
cagcaaaccauuuuuaaaguagaa

SEQ ID NO: 2866722 - RNA, 20 nt, Human
cagcaaagaggacucgcuug

SEQ ID NO: 2866723 - RNA, 21 nt, Human
cagcaaagaggacucgcuugu

SEQ ID NO: 2866724 - RNA, 12 nt, Human
cagauuuugaua

SEQ ID NO: 2866725 - RNA, 13 nt, Human
cagauuuugauaa

SEQ ID NO: 2866726 - RNA, 15 nt, Human
cagauuuugauaacu

SEQ ID NO: 2866727 - RNA, 18 nt, Human
cagauuuugauaacuguu

SEQ ID NO: 2866728 - RNA, 20 nt, Human
cagauuuugauaacuguuua

SEQ ID NO: 2866729 - RNA, 14 nt, Human
cagcaaaaauauaa

SEQ ID NO: 2866730 - RNA, 15 nt, Human
cagcaaaaauauaaa

SEQ ID NO: 2866731 - RNA, 18 nt, Human
cagcaaaaauauaaaaua

SEQ ID NO: 2866732 - RNA, 18 nt, Human
cagcaaaaaaguccaauu

SEQ ID NO: 2866733 - RNA, 23 nt, Human
cagauuuuuugaaccauccacuu

SEQ ID NO: 2866734 - RNA, 22 nt, Human
cagauuuuuuacagcugccugc

SEQ ID NO: 2866735 - RNA, 21 nt, Human
cagauuuugggguuguguugu

SEQ ID NO: 2866736 - RNA, 23 nt, Human
cagauuuugggguuguguuguca

SEQ ID NO: 2866737 - RNA, 20 nt, Human
cagauuuugggguuguguug

SEQ ID NO: 2866738 - RNA, 19 nt, Human
cagauuuuuuacagcugcc

SEQ ID NO: 2866739 - RNA, 22 nt, Human
cagauuuuuauauuaguugcuu

SEQ ID NO: 2866740 - RNA, 23 nt, Human
cagauuuuuauauuaguugcuuu

SEQ ID NO: 2866741 - RNA, 17 nt, Human
cagauuuuucggaggcc

SEQ ID NO: 2866742 - RNA, 18 nt, Human
cagauuuuucggaggccc

SEQ ID NO: 2866743 - RNA, 15 nt, Human
cagauuuuaauuguc

SEQ ID NO: 2866744 - RNA, 16 nt, Human
cagauuuuaauuguca

SEQ ID NO: 2866745 - RNA, 18 nt, Human
cagauuuuaauugucaug

SEQ ID NO: 2866746 - RNA, 19 nt, Human
cagauuuuaauugucaugg

SEQ ID NO: 2866747 - RNA, 14 nt, Human
cagauucacacugu

SEQ ID NO: 2866748 - RNA, 19 nt, Human
cagauucacacugucuggu

SEQ ID NO: 2866749 - RNA, 13 nt, Human
cagauuauuuugg

SEQ ID NO: 2866750 - RNA, 16 nt, Human
cagauuauuuuggaaa

SEQ ID NO: 2866751 - RNA, 18 nt, Human
cagauuauuuuggaaagu

SEQ ID NO: 2866752 - RNA, 18 nt, Human
cagauguuuccagacuuc

SEQ ID NO: 2866753 - RNA, 23 nt, Human
cagauguuuccagacuuccuuga

SEQ ID NO: 2866754 - RNA, 23 nt, Human
cagauguuuuggucaaguaguuu

SEQ ID NO: 2866755 - RNA, 17 nt, Human
cagauucccagagcaaa

SEQ ID NO: 2866756 - RNA, 14 nt, Human
cagauucccagagc

SEQ ID NO: 2866757 - RNA, 14 nt, Human
cagauucagucuug

SEQ ID NO: 2866758 - RNA, 15 nt, Human
cagauucagucuugc

SEQ ID NO: 2866759 - RNA, 16 nt, Human
cagauucagucuugcc

SEQ ID NO: 2866760 - RNA, 17 nt, Human
cagauucagucuugccu

SEQ ID NO: 2866761 - RNA, 18 nt, Human
cagauucagucuugccuu

SEQ ID NO: 2866762 - RNA, 20 nt, Human
cagauucagucuugccuuac

SEQ ID NO: 2866763 - RNA, 21 nt, Human
cagauucccagagcaaaauaa

SEQ ID NO: 2866764 - RNA, 19 nt, Human
cagauucccagagcaaaau

SEQ ID NO: 2866765 - RNA, 18 nt, Human
cagauucccagagcaaaa

SEQ ID NO: 2866766 - RNA, 22 nt, Human
cagauuaucuauuugugugugu

SEQ ID NO: 2866767 - RNA, 14 nt, Human
cagaugggggaaag

SEQ ID NO: 2866768 - RNA, 19 nt, Human
cagaugggggaaagcacag

SEQ ID NO: 2866769 - RNA, 12 nt, Human
cagauguaaugu

SEQ ID NO: 2866770 - RNA, 13 nt, Human
cagauguaauguu

SEQ ID NO: 2866771 - RNA, 14 nt, Human
cagauguaauguuu

SEQ ID NO: 2866772 - RNA, 15 nt, Human
cagauguaauguuuu

SEQ ID NO: 2866773 - RNA, 16 nt, Human
cagauguaauguuuuc

SEQ ID NO: 2866774 - RNA, 22 nt, Human
cagauguaauguuuucuuugca

SEQ ID NO: 2866775 - RNA, 23 nt, Human
cagauguaauguuuucuuugcaa

SEQ ID NO: 2866776 - RNA, 16 nt, Human
cagauggugaagcauu

SEQ ID NO: 2866777 - RNA, 19 nt, Human
cagaugguuuccacauuua

SEQ ID NO: 2866778 - RNA, 22 nt, Human
cagaugguuuccacauuuagau

SEQ ID NO: 2866779 - RNA, 22 nt, Human
cagaugucccuugaugcacaga

SEQ ID NO: 2866780 - RNA, 23 nt, Human
cagaugucccuugaugcacagag

SEQ ID NO: 2866781 - RNA, 14 nt, Human
cagauguggagcca

SEQ ID NO: 2866782 - RNA, 15 nt, Human
cagauguggagccag

SEQ ID NO: 2866783 - RNA, 16 nt, Human
cagauguggagccagg

SEQ ID NO: 2866784 - RNA, 17 nt, Human
cagauguggagccaggc

SEQ ID NO: 2866785 - RNA, 18 nt, Human
cagauguggagccaggcg

SEQ ID NO: 2866786 - RNA, 16 nt, Human
cagaugugacuguaua

SEQ ID NO: 2866787 - RNA, 16 nt, Human
cagaugugaugcuuga

SEQ ID NO: 2866788 - RNA, 14 nt, Human
cagaugugcagcag

SEQ ID NO: 2866789 - RNA, 15 nt, Human
cagaugugcagcaga

SEQ ID NO: 2866790 - RNA, 16 nt, Human
cagaugugcagcagau

SEQ ID NO: 2866791 - RNA, 17 nt, Human
cagaugugcagcagauu

SEQ ID NO: 2866792 - RNA, 19 nt, Human
cagaugugcagcagauugg

SEQ ID NO: 2866793 - RNA, 20 nt, Human
cagaugugcagcagauugga

SEQ ID NO: 2866794 - RNA, 15 nt, Human
cagauguuuccagac

SEQ ID NO: 2866795 - RNA, 16 nt, Human
cagauguuuccagacu

SEQ ID NO: 2866796 - RNA, 14 nt, Human
cagauguuuccaga

SEQ ID NO: 2866797 - RNA, 20 nt, Human
cagaugugggcuuugauuuc

SEQ ID NO: 2866798 - RNA, 17 nt, Human
cagauguucccccaucu

SEQ ID NO: 2866799 - RNA, 22 nt, Human
cagauguucgguuuuuuuccug

SEQ ID NO: 2866800 - RNA, 17 nt, Human
cagauguugaauucuuu

SEQ ID NO: 2866801 - RNA, 19 nt, Human
cagauguugaauucuuuug

SEQ ID NO: 2866802 - RNA, 17 nt, Human
cagauggaaauauuuug

SEQ ID NO: 2866803 - RNA, 18 nt, Human
cagauggaaauauuuuga

SEQ ID NO: 2866804 - RNA, 21 nt, Human
cagauggaaugcuguguuaaa

SEQ ID NO: 2866805 - RNA, 19 nt, Human
cagauggaaugcuguguua

SEQ ID NO: 2866806 - RNA, 17 nt, Human
cagauggaaugcugugu

SEQ ID NO: 2866807 - RNA, 16 nt, Human
cagauggaaugcugug

SEQ ID NO: 2866808 - RNA, 13 nt, Human
cagauggcccgga

SEQ ID NO: 2866809 - RNA, 21 nt, Human
cagauggcccggaugcugcuu

SEQ ID NO: 2866810 - RNA, 22 nt, Human
cagauggcccggaugcugcuuc

SEQ ID NO: 2866811 - RNA, 20 nt, Human
cagaugggaggaaagagagc

SEQ ID NO: 2866812 - RNA, 22 nt, Human
cagaugggaggaaagagagcag

SEQ ID NO: 2866813 - RNA, 23 nt, Human
cagaugggaggaaagagagcagg

SEQ ID NO: 2866814 - RNA, 23 nt, Human
cagaugggcauaugugucagugg

SEQ ID NO: 2866815 - RNA, 22 nt, Human
cagauggauugauaauugcauu

SEQ ID NO: 2866816 - RNA, 23 nt, Human
cagauggauugauaauugcauuc

SEQ ID NO: 2866817 - RNA, 12 nt, Human
cagauggcacuu

SEQ ID NO: 2866818 - RNA, 22 nt, Human
cagaugcgucccaagauguuga

SEQ ID NO: 2866819 - RNA, 21 nt, Human
cagaugcuaaaaucccuggau

SEQ ID NO: 2866820 - RNA, 23 nt, Human
cagaugcuagcgcguugccuguc

SEQ ID NO: 2866821 - RNA, 11 nt, Human
cagaugcucaa

SEQ ID NO: 2866822 - RNA, 14 nt, Human
cagaugcuccaaga

SEQ ID NO: 2866823 - RNA, 15 nt, Human
cagaugcuccaagau

SEQ ID NO: 2866824 - RNA, 16 nt, Human
cagaugcuccaagauu

SEQ ID NO: 2866825 - RNA, 18 nt, Human
cagaugcuccaagauucu

SEQ ID NO: 2866826 - RNA, 19 nt, Human
cagaugcuccaagauucua

SEQ ID NO: 2866827 - RNA, 20 nt, Human
cagaugcuccaagauucuag

SEQ ID NO: 2866828 - RNA, 23 nt, Human
cagaugcuccaagauucuagaug

SEQ ID NO: 2866829 - RNA, 21 nt, Human
cagaugcuccaagauucuaga

SEQ ID NO: 2866830 - RNA, 22 nt, Human
cagaugcuccaagauucuagau

SEQ ID NO: 2866831 - RNA, 15 nt, Human
cagaugcugugcaaa

SEQ ID NO: 2866832 - RNA, 21 nt, Human
cagaugcgucccaagauguug

SEQ ID NO: 2866833 - RNA, 20 nt, Human
cagaugcgucccaagauguu

SEQ ID NO: 2866834 - RNA, 13 nt, Human
cagaugcguccca

SEQ ID NO: 2866835 - RNA, 15 nt, Human
cagaugccccagagc

SEQ ID NO: 2866836 - RNA, 18 nt, Human
cagaugccccagagcugu

SEQ ID NO: 2866837 - RNA, 20 nt, Human
cagaugccacccuagccaau

SEQ ID NO: 2866838 - RNA, 18 nt, Human
cagaugccacccuagcca

SEQ ID NO: 2866839 - RNA, 16 nt, Human
cagaugccacccuagc

SEQ ID NO: 2866840 - RNA, 19 nt, Human
cagaugcccagagggccca

SEQ ID NO: 2866841 - RNA, 15 nt, Human
cagaugcccagaggg

SEQ ID NO: 2866842 - RNA, 16 nt, Human
cagaugccccagagcu

SEQ ID NO: 2866843 - RNA, 13 nt, Human
cagaugccccaga

SEQ ID NO: 2866844 - RNA, 22 nt, Human
cagaugcccagagggcccaggc

SEQ ID NO: 2866845 - RNA, 20 nt, Human
cagaugcccagagggcccag

SEQ ID NO: 2866846 - RNA, 12 nt, Human
cagcaagugaga

SEQ ID NO: 2866847 - RNA, 17 nt, Human
cagcaagugagagcugg

SEQ ID NO: 2866848 - RNA, 16 nt, Human
cagcaagugagagcug

SEQ ID NO: 2866849 - RNA, 15 nt, Human
cagcaagugagagcu

SEQ ID NO: 2866850 - RNA, 14 nt, Human
cagcaagugagagc

SEQ ID NO: 2866851 - RNA, 12 nt, Human
cagcaaggcccu

SEQ ID NO: 2866852 - RNA, 16 nt, Human
cagcaaggcccugcug

SEQ ID NO: 2866853 - RNA, 18 nt, Human
cagcaaggcccugcugcc

SEQ ID NO: 2866854 - RNA, 19 nt, Human
cagcaaggcccugcugccc

SEQ ID NO: 2866855 - RNA, 22 nt, Human
cagcaagaagauccuaaaacaa

SEQ ID NO: 2866856 - RNA, 14 nt, Human
cagcaagaauaaaa

SEQ ID NO: 2866857 - RNA, 16 nt, Human
cagcaagaauaaaaaa

SEQ ID NO: 2866858 - RNA, 15 nt, Human
cagcaagaauauugu

SEQ ID NO: 2866859 - RNA, 12 nt, Human
cagcaagagaga

SEQ ID NO: 2866860 - RNA, 15 nt, Human
cagcaagagagaacc

SEQ ID NO: 2866861 - RNA, 17 nt, Human
cagcaagagagaaccua

SEQ ID NO: 2866862 - RNA, 19 nt, Human
cagcaagcccuacagagcu

SEQ ID NO: 2866863 - RNA, 21 nt, Human
cagcaagcccuacagagcugu

SEQ ID NO: 2866864 - RNA, 21 nt, Human
cagcaagugagagcugggugu

SEQ ID NO: 2866865 - RNA, 19 nt, Human
cagcaagugagagcugggu

SEQ ID NO: 2866866 - RNA, 19 nt, Human
cagcaauauauuaccagca

SEQ ID NO: 2866867 - RNA, 20 nt, Human
cagcaauauauuaccagcaa

SEQ ID NO: 2866868 - RNA, 22 nt, Human
cagcaauauauuaccagcaaga

SEQ ID NO: 2866869 - RNA, 23 nt, Human
cagcaauauauuaccagcaagaa

SEQ ID NO: 2866870 - RNA, 15 nt, Human
cagcaauauguaaau

SEQ ID NO: 2866871 - RNA, 18 nt, Human
cagcaaugacaucucagg

SEQ ID NO: 2866872 - RNA, 16 nt, Human
cagcaauauguaaaua

SEQ ID NO: 2866873 - RNA, 19 nt, Human
cagcaaugacaucucaggg

SEQ ID NO: 2866874 - RNA, 20 nt, Human
cagcaaugacaucucagggg

SEQ ID NO: 2866875 - RNA, 21 nt, Human
cagcaaugacaucucaggggc

SEQ ID NO: 2866876 - RNA, 16 nt, Human
cagcaauuuaaauguu

SEQ ID NO: 2866877 - RNA, 20 nt, Human
cagcaauucuccugccucag

SEQ ID NO: 2866878 - RNA, 19 nt, Human
cagcaauucuccugccuca

SEQ ID NO: 2866879 - RNA, 15 nt, Human
cagcaauuuaaaugu

SEQ ID NO: 2866880 - RNA, 14 nt, Human
cagcaauuuaaaug

SEQ ID NO: 2866881 - RNA, 12 nt, Human
cagcacaaaaug

SEQ ID NO: 2866882 - RNA, 11 nt, Human
cagcacaaaca

SEQ ID NO: 2866883 - RNA, 13 nt, Human
cagcacaaacaca

SEQ ID NO: 2866884 - RNA, 14 nt, Human
cagcacaaacacaa

SEQ ID NO: 2866885 - RNA, 15 nt, Human
cagcacaaacacaag

SEQ ID NO: 2866886 - RNA, 16 nt, Human
cagcacaaacacaagg

SEQ ID NO: 2866887 - RNA, 18 nt, Human
cagcaauucuccugccuc

SEQ ID NO: 2866888 - RNA, 17 nt, Human
cagcaauucuccugccu

SEQ ID NO: 2866889 - RNA, 16 nt, Human
cagcaauucuccugcc

SEQ ID NO: 2866890 - RNA, 15 nt, Human
cagcaauucuccugc

SEQ ID NO: 2866891 - RNA, 20 nt, Human
cagcacuuugggagaccaag

SEQ ID NO: 2866892 - RNA, 13 nt, Human
cagcagaggcggu

SEQ ID NO: 2866893 - RNA, 22 nt, Human
cagcagaggcggucuucaacau

SEQ ID NO: 2866894 - RNA, 20 nt, Human
cagcagauaacaaugcagca

SEQ ID NO: 2866895 - RNA, 24 nt, Human
cagcagauaacaaugcagcaaggc

SEQ ID NO: 2866896 - RNA, 12 nt, Human
cagcagcaggug

SEQ ID NO: 2866897 - RNA, 16 nt, Human
cagcagcagcagguga

SEQ ID NO: 2866898 - RNA, 13 nt, Human
cagcagcagguga

SEQ ID NO: 2866899 - RNA, 15 nt, Human
cagcagcagcaggug

SEQ ID NO: 2866900 - RNA, 14 nt, Human
cagcagcagcaggu

SEQ ID NO: 2866901 - RNA, 13 nt, Human
cagcagcagcagg

SEQ ID NO: 2866902 - RNA, 14 nt, Human
cagcagauuggaag

SEQ ID NO: 2866903 - RNA, 15 nt, Human
cagcagauuggaagg

SEQ ID NO: 2866904 - RNA, 16 nt, Human
cagcagauuggaagga

SEQ ID NO: 2866905 - RNA, 18 nt, Human
cagcagauuggaaggaga

SEQ ID NO: 2866906 - RNA, 20 nt, Human
cagcagauuggaaggagaca

SEQ ID NO: 2866907 - RNA, 23 nt, Human
cagcagauuggaaggagacacag

SEQ ID NO: 2866908 - RNA, 11 nt, Human
cagcagcaaga

SEQ ID NO: 2866909 - RNA, 13 nt, Human
cagcagcaagaaa

SEQ ID NO: 2866910 - RNA, 14 nt, Human
cagcagcaagaaaa

SEQ ID NO: 2866911 - RNA, 15 nt, Human
cagcagcaagaaaaa

SEQ ID NO: 2866912 - RNA, 17 nt, Human
cagcagcaagaaaaaaa

SEQ ID NO: 2866913 - RNA, 20 nt, Human
cagcagcaagaaaaaaaaau

SEQ ID NO: 2866914 - RNA, 22 nt, Human
cagcagcaagaaaaaaaaaugc

SEQ ID NO: 2866915 - RNA, 13 nt, Human
cagcagcauuuuu

SEQ ID NO: 2866916 - RNA, 21 nt, Human
cagcagcauuuuuauuucaga

SEQ ID NO: 2866917 - RNA, 21 nt, Human
cagcagccgccuuaagcugau

SEQ ID NO: 2866918 - RNA, 22 nt, Human
cagcagccgccuuaagcugauc

SEQ ID NO: 2866919 - RNA, 12 nt, Human
cagcagccugcu

SEQ ID NO: 2866920 - RNA, 15 nt, Human
cagcagccugcuucc

SEQ ID NO: 2866921 - RNA, 20 nt, Human
cagcagccugcuucccaccu

SEQ ID NO: 2866922 - RNA, 21 nt, Human
cagcagccugcuucccaccuc

SEQ ID NO: 2866923 - RNA, 22 nt, Human
cagcagccugcuucccaccucc

SEQ ID NO: 2866924 - RNA, 13 nt, Human
cagcagccccugc

SEQ ID NO: 2866925 - RNA, 16 nt, Human
cagcagccccugcaca

SEQ ID NO: 2866926 - RNA, 23 nt, Human
cagcagccccugcacaaagcccu

SEQ ID NO: 2866927 - RNA, 22 nt, Human
cagcagaaaacuugugugaaau

SEQ ID NO: 2866928 - RNA, 21 nt, Human
cagcagaauggugaucacucc

SEQ ID NO: 2866929 - RNA, 15 nt, Human
cagcagaagacaaaa

SEQ ID NO: 2866930 - RNA, 13 nt, Human
cagcagaaggauu

SEQ ID NO: 2866931 - RNA, 18 nt, Human
cagcacuuugggaggcug

SEQ ID NO: 2866932 - RNA, 23 nt, Human
cagcacuuugggaggcugaggcg

SEQ ID NO: 2866933 - RNA, 22 nt, Human
cagcacuuugggaggcugaggc

SEQ ID NO: 2866934 - RNA, 20 nt, Human
cagcacuuugggaggcugag

SEQ ID NO: 2866935 - RNA, 19 nt, Human
cagcacuuugggaggcuga

SEQ ID NO: 2866936 - RNA, 14 nt, Human
cagcacuugucuca

SEQ ID NO: 2866937 - RNA, 17 nt, Human
cagcacuugucucauuu

SEQ ID NO: 2866938 - RNA, 20 nt, Human
cagcacuugucucauuuuaa

SEQ ID NO: 2866939 - RNA, 21 nt, Human
cagcacuugucucauuuuaau

SEQ ID NO: 2866940 - RNA, 23 nt, Human
cagcacuugucucauuuuaaugu

SEQ ID NO: 2866941 - RNA, 13 nt, Human
cagcacuuauuua

SEQ ID NO: 2866942 - RNA, 13 nt, Human
cagcacuuguaua

SEQ ID NO: 2866943 - RNA, 12 nt, Human
cagcagcuucac

SEQ ID NO: 2866944 - RNA, 16 nt, Human
cagcagcuucaccaga

SEQ ID NO: 2866945 - RNA, 17 nt, Human
cagcagcuucaccagag

SEQ ID NO: 2866946 - RNA, 18 nt, Human
cagcagcuucaccagagc

SEQ ID NO: 2866947 - RNA, 18 nt, Human
cagcaggaggccaggccg

SEQ ID NO: 2866948 - RNA, 15 nt, Human
cagcaggaggccagg

SEQ ID NO: 2866949 - RNA, 14 nt, Human
cagcaggaggccag

SEQ ID NO: 2866950 - RNA, 16 nt, Human
cagcaggaguggugca

SEQ ID NO: 2866951 - RNA, 21 nt, Human
cagcaggaguggugcagacag

SEQ ID NO: 2866952 - RNA, 22 nt, Human
cagcaggaguggugcagacaga

SEQ ID NO: 2866953 - RNA, 13 nt, Human
cagcaggcagcgc

SEQ ID NO: 2866954 - RNA, 15 nt, Human
cagcaggcagcgcca

SEQ ID NO: 2866955 - RNA, 16 nt, Human
cagcaggcagcgccaa

SEQ ID NO: 2866956 - RNA, 17 nt, Human
cagcauccuggcacccg

SEQ ID NO: 2866957 - RNA, 16 nt, Human
cagcauccuggcaccc

SEQ ID NO: 2866958 - RNA, 15 nt, Human
cagcauccuggcacc

SEQ ID NO: 2866959 - RNA, 14 nt, Human
cagcauccuggcac

SEQ ID NO: 2866960 - RNA, 13 nt, Human
cagccaacucauu

SEQ ID NO: 2866961 - RNA, 13 nt, Human
cagccaacagcua

SEQ ID NO: 2866962 - RNA, 15 nt, Human
cagccaacagcuaca

SEQ ID NO: 2866963 - RNA, 18 nt, Human
cagccaacagcuacaaca

SEQ ID NO: 2866964 - RNA, 19 nt, Human
cagccaacagcuacaacag

SEQ ID NO: 2866965 - RNA, 20 nt, Human
cagccaacagcuacaacagc

SEQ ID NO: 2866966 - RNA, 23 nt, Human
cagccaacagcuacaacagccuc

SEQ ID NO: 2866967 - RNA, 17 nt, Human
cagccaaacccaugagg

SEQ ID NO: 2866968 - RNA, 16 nt, Human
cagccaaacccaugag

SEQ ID NO: 2866969 - RNA, 18 nt, Human
cagcauuuuuauuucaga

SEQ ID NO: 2866970 - RNA, 17 nt, Human
cagccaaacccugucug

SEQ ID NO: 2866971 - RNA, 16 nt, Human
cagccaaacccugucu

SEQ ID NO: 2866972 - RNA, 15 nt, Human
cagccaaacccuguc

SEQ ID NO: 2866973 - RNA, 19 nt, Human
cagccaaacccaugaggca

SEQ ID NO: 2866974 - RNA, 18 nt, Human
cagcauuuuacugauuca

SEQ ID NO: 2866975 - RNA, 16 nt, Human
cagcauuucuuuucug

SEQ ID NO: 2866976 - RNA, 11 nt, Human
cagcauuugau

SEQ ID NO: 2866977 - RNA, 12 nt, Human
cagcauuugaua

SEQ ID NO: 2866978 - RNA, 14 nt, Human
cagcauuugauaau

SEQ ID NO: 2866979 - RNA, 15 nt, Human
cagcauuugauaaug

SEQ ID NO: 2866980 - RNA, 17 nt, Human
cagcauuugauaaugau

SEQ ID NO: 2866981 - RNA, 22 nt, Human
cagcauuugauaaugauaaaac

SEQ ID NO: 2866982 - RNA, 20 nt, Human
cagcauccuggcacccggcc

SEQ ID NO: 2866983 - RNA, 19 nt, Human
cagcauccuggcacccggc

SEQ ID NO: 2866984 - RNA, 21 nt, Human
cagcauccuggcacccggccc

SEQ ID NO: 2866985 - RNA, 23 nt, Human
cagcauccuuuucugcagagggg

SEQ ID NO: 2866986 - RNA, 14 nt, Human
cagcaucuucuggu

SEQ ID NO: 2866987 - RNA, 15 nt, Human
cagcaucuucugguu

SEQ ID NO: 2866988 - RNA, 14 nt, Human
cagcauucucacuc

SEQ ID NO: 2866989 - RNA, 15 nt, Human
cagcauucucacucc

SEQ ID NO: 2866990 - RNA, 18 nt, Human
cagcauucucaggcacca

SEQ ID NO: 2866991 - RNA, 14 nt, Human
cagcauucccuccc

SEQ ID NO: 2866992 - RNA, 20 nt, Human
cagcauucucaggcaccagu

SEQ ID NO: 2866993 - RNA, 19 nt, Human
cagcauucucaggcaccag

SEQ ID NO: 2866994 - RNA, 15 nt, Human
cagcaugaggacaga

SEQ ID NO: 2866995 - RNA, 22 nt, Human
cagcaugaggacagaccacaga

SEQ ID NO: 2866996 - RNA, 17 nt, Human
cagcauggucccugccu

SEQ ID NO: 2866997 - RNA, 18 nt, Human
cagcauggucccugccuu

SEQ ID NO: 2866998 - RNA, 20 nt, Human
cagcauggucccugccuuag

SEQ ID NO: 2866999 - RNA, 23 nt, Human
cagcauggucccugccuuaggcc

SEQ ID NO: 2867000 - RNA, 20 nt, Human
cagcaugacauaacagugca

SEQ ID NO: 2867001 - RNA, 21 nt, Human
cagcaugacauaacagugcag

SEQ ID NO: 2867002 - RNA, 15 nt, Human
cagcauggcacuccc

SEQ ID NO: 2867003 - RNA, 18 nt, Human
cagcauggcacucccucc

SEQ ID NO: 2867004 - RNA, 19 nt, Human
cagcauggcacucccucca

SEQ ID NO: 2867005 - RNA, 20 nt, Human
cagcauggcacucccuccag

SEQ ID NO: 2867006 - RNA, 21 nt, Human
cagcauggcacucccuccagc

SEQ ID NO: 2867007 - RNA, 22 nt, Human
cagcauggcacucccuccagca

SEQ ID NO: 2867008 - RNA, 14 nt, Human
cagcaugugcccuc

SEQ ID NO: 2867009 - RNA, 16 nt, Human
cagcaugugcccuccu

SEQ ID NO: 2867010 - RNA, 13 nt, Human
cagcaugugccuu

SEQ ID NO: 2867011 - RNA, 18 nt, Human
cagcauguauaguugcuu

SEQ ID NO: 2867012 - RNA, 19 nt, Human
cagcauguauaguugcuuu

SEQ ID NO: 2867013 - RNA, 11 nt, Human
cagccaccccg

SEQ ID NO: 2867014 - RNA, 14 nt, Human
cagccacacuugaa

SEQ ID NO: 2867015 - RNA, 16 nt, Human
cagccaccuaaacggu

SEQ ID NO: 2867016 - RNA, 16 nt, Human
cagccaccucucuuuu

SEQ ID NO: 2867017 - RNA, 15 nt, Human
cagccaccucucuuu

SEQ ID NO: 2867018 - RNA, 21 nt, Human
cagccaccccgggcucucugc

SEQ ID NO: 2867019 - RNA, 20 nt, Human
cagccaccccgggcucucug

SEQ ID NO: 2867020 - RNA, 17 nt, Human
cagccaccccgggcucu

SEQ ID NO: 2867021 - RNA, 12 nt, Human
cagccaccagcg

SEQ ID NO: 2867022 - RNA, 22 nt, Human
cagccaccccgggcucucugcu

SEQ ID NO: 2867023 - RNA, 12 nt, Human
cagccacacugu

SEQ ID NO: 2867024 - RNA, 15 nt, Human
cagccacacccaggc

SEQ ID NO: 2867025 - RNA, 19 nt, Human
cagccacacccaggcacuu

SEQ ID NO: 2867026 - RNA, 20 nt, Human
cagccaagugccaaaugcuc

SEQ ID NO: 2867027 - RNA, 20 nt, Human
cagccaagggaugaaagaga

SEQ ID NO: 2867028 - RNA, 11 nt, Human
cagccaagcuu

SEQ ID NO: 2867029 - RNA, 13 nt, Human
cagccaagcuugu

SEQ ID NO: 2867030 - RNA, 22 nt, Human
cagccacggccaggccagaggg

SEQ ID NO: 2867031 - RNA, 21 nt, Human
cagccacggccaggccagagg

SEQ ID NO: 2867032 - RNA, 19 nt, Human
cagccacggccaggccaga

SEQ ID NO: 2867033 - RNA, 18 nt, Human
cagccacggccaggccag

SEQ ID NO: 2867034 - RNA, 17 nt, Human
cagccacggccaggcca

SEQ ID NO: 2867035 - RNA, 16 nt, Human
cagccacggccaggcc

SEQ ID NO: 2867036 - RNA, 15 nt, Human
cagccacggccaggc

SEQ ID NO: 2867037 - RNA, 14 nt, Human
cagccacggccagg

SEQ ID NO: 2867038 - RNA, 18 nt, Human
cagccagugagaugaggg

SEQ ID NO: 2867039 - RNA, 23 nt, Human
cagccauacuuaucucucugugc

SEQ ID NO: 2867040 - RNA, 20 nt, Human
cagccauacuuaucucucug

SEQ ID NO: 2867041 - RNA, 21 nt, Human
cagccauacuuaucucucugu

SEQ ID NO: 2867042 - RNA, 13 nt, Human
cagccaucaaaau

SEQ ID NO: 2867043 - RNA, 23 nt, Human
cagccacggccaggccagaggga

SEQ ID NO: 2867044 - RNA, 21 nt, Human
cagccacuccccuccacucuc

SEQ ID NO: 2867045 - RNA, 10 nt, Human
cagccacucu

SEQ ID NO: 2867046 - RNA, 21 nt, Human
cagccacuucggccaggucac

SEQ ID NO: 2867047 - RNA, 22 nt, Human
cagccacuucggccaggucaca

SEQ ID NO: 2867048 - RNA, 15 nt, Human
cagccccacaacuuu

SEQ ID NO: 2867049 - RNA, 14 nt, Human
cagccccacacagc

SEQ ID NO: 2867050 - RNA, 15 nt, Human
cagccccacacagcu

SEQ ID NO: 2867051 - RNA, 16 nt, Human
cagccccacacagcua

SEQ ID NO: 2867052 - RNA, 16 nt, Human
cagcccaucucggagc

SEQ ID NO: 2867053 - RNA, 17 nt, Human
cagcccaucucggagca

SEQ ID NO: 2867054 - RNA, 19 nt, Human
cagcccauccauaguaacu

SEQ ID NO: 2867055 - RNA, 23 nt, Human
cagcccauccauaguaacugaca

SEQ ID NO: 2867056 - RNA, 17 nt, Human
cagcccaugcccaccug

SEQ ID NO: 2867057 - RNA, 16 nt, Human
cagcccaugcccaccu

SEQ ID NO: 2867058 - RNA, 15 nt, Human
cagcccaugcccacc

SEQ ID NO: 2867059 - RNA, 12 nt, Human
cagcccauuucu

SEQ ID NO: 2867060 - RNA, 13 nt, Human
cagcccauuucuc

SEQ ID NO: 2867061 - RNA, 16 nt, Human
cagcccauuucuccag

SEQ ID NO: 2867062 - RNA, 17 nt, Human
cagcccauuucuccaga

SEQ ID NO: 2867063 - RNA, 18 nt, Human
cagcccauuucuccagaa

SEQ ID NO: 2867064 - RNA, 20 nt, Human
cagcccauuucuccagaacc

SEQ ID NO: 2867065 - RNA, 16 nt, Human
cagcccauggcccugu

SEQ ID NO: 2867066 - RNA, 17 nt, Human
cagcccauggcccugug

SEQ ID NO: 2867067 - RNA, 18 nt, Human
cagcccauggcccugugc

SEQ ID NO: 2867068 - RNA, 21 nt, Human
cagcccaugcccaccugccca

SEQ ID NO: 2867069 - RNA, 19 nt, Human
cagcccaugcccaccugcc

SEQ ID NO: 2867070 - RNA, 24 nt, Human
cagcccaugcccaccugcccauca

SEQ ID NO: 2867071 - RNA, 18 nt, Human
cagcccacuucugccaua

SEQ ID NO: 2867072 - RNA, 12 nt, Human
cagcccagagac

SEQ ID NO: 2867073 - RNA, 14 nt, Human
cagcccagagacuu

SEQ ID NO: 2867074 - RNA, 13 nt, Human
cagcccagagacu

SEQ ID NO: 2867075 - RNA, 21 nt, Human
cagcccagagacuuuguagau

SEQ ID NO: 2867076 - RNA, 17 nt, Human
cagcccagagacuuugu

SEQ ID NO: 2867077 - RNA, 20 nt, Human
cagcccagaggccaacacug

SEQ ID NO: 2867078 - RNA, 23 nt, Human
cagcccaggccgggguggagcau

SEQ ID NO: 2867079 - RNA, 23 nt, Human
cagcccagcuuggcccuuuccuu

SEQ ID NO: 2867080 - RNA, 13 nt, Human
cagcccaauccag

SEQ ID NO: 2867081 - RNA, 16 nt, Human
cagcccaauccaggua

SEQ ID NO: 2867082 - RNA, 17 nt, Human
cagcccaauccagguac

SEQ ID NO: 2867083 - RNA, 22 nt, Human
cagcccaauccagguacgcaca

SEQ ID NO: 2867084 - RNA, 23 nt, Human
cagcccaauccagguacgcacag

SEQ ID NO: 2867085 - RNA, 19 nt, Human
cagcccacauagugauggu

SEQ ID NO: 2867086 - RNA, 15 nt, Human
cagcccacuucugcc

SEQ ID NO: 2867087 - RNA, 24 nt, Human
cagcccacauuggauucaucagca

SEQ ID NO: 2867088 - RNA, 17 nt, Human
cagcccacgucacgugu

SEQ ID NO: 2867089 - RNA, 17 nt, Human
cagccaucaaaaugcuu

SEQ ID NO: 2867090 - RNA, 16 nt, Human
cagccaucaaaaugcu

SEQ ID NO: 2867091 - RNA, 21 nt, Human
cagccaugcccgcauuagcuc

SEQ ID NO: 2867092 - RNA, 14 nt, Human
cagccauguacaga

SEQ ID NO: 2867093 - RNA, 19 nt, Human
cagccauguacagacagag

SEQ ID NO: 2867094 - RNA, 16 nt, Human
cagccauuaccaugga

SEQ ID NO: 2867095 - RNA, 20 nt, Human
cagcccaaaggggacaggcc

SEQ ID NO: 2867096 - RNA, 21 nt, Human
cagcccaaaggggacaggccu

SEQ ID NO: 2867097 - RNA, 22 nt, Human
cagcccaaaggggacaggccuc

SEQ ID NO: 2867098 - RNA, 23 nt, Human
cagcccaaaggggacaggccuca

SEQ ID NO: 2867099 - RNA, 20 nt, Human
cagccauuaccauggagaca

SEQ ID NO: 2867100 - RNA, 20 nt, Human
cagccauuacccagcuaaau

SEQ ID NO: 2867101 - RNA, 23 nt, Human
cagccauuacccagcuaaauaau

SEQ ID NO: 2867102 - RNA, 15 nt, Human
cagccauugcaccca

SEQ ID NO: 2867103 - RNA, 17 nt, Human
cagccauugcacccagc

SEQ ID NO: 2867104 - RNA, 21 nt, Human
cagccauugcacccagcccag

SEQ ID NO: 2867105 - RNA, 22 nt, Human
cagccauugcacccagcccaga

SEQ ID NO: 2867106 - RNA, 14 nt, Human
cagcucaccagccc

SEQ ID NO: 2867107 - RNA, 18 nt, Human
caggccgcgcccuuuccc

SEQ ID NO: 2867108 - RNA, 13 nt, Human
caggccggccagc

SEQ ID NO: 2867109 - RNA, 14 nt, Human
caggccggccagcc

SEQ ID NO: 2867110 - RNA, 15 nt, Human
caggccggccagccu

SEQ ID NO: 2867111 - RNA, 16 nt, Human
caggccggccagccuc

SEQ ID NO: 2867112 - RNA, 21 nt, Human
caggccggccagccucacccu

SEQ ID NO: 2867113 - RNA, 19 nt, Human
caggccggcgagcccugug

SEQ ID NO: 2867114 - RNA, 17 nt, Human
caggcuagcuggagccu

SEQ ID NO: 2867115 - RNA, 18 nt, Human
caggcuagcuggagccug

SEQ ID NO: 2867116 - RNA, 18 nt, Human
caggcuaguccggaccca

SEQ ID NO: 2867117 - RNA, 23 nt, Human
caggcuaguccggacccaccuca

SEQ ID NO: 2867118 - RNA, 20 nt, Human
caggcuccuuuagcgcccag

SEQ ID NO: 2867119 - RNA, 19 nt, Human
caggcuccuuuagcgccca

SEQ ID NO: 2867120 - RNA, 14 nt, Human
caggcuccuuuagc

SEQ ID NO: 2867121 - RNA, 18 nt, Human
caggcuccugccaccacg

SEQ ID NO: 2867122 - RNA, 12 nt, Human
caggcuccgccc

SEQ ID NO: 2867123 - RNA, 16 nt, Human
caggcuccgcccuuag

SEQ ID NO: 2867124 - RNA, 17 nt, Human
caggcuccgcccuuagu

SEQ ID NO: 2867125 - RNA, 18 nt, Human
caggcuccgcccuuaguc

SEQ ID NO: 2867126 - RNA, 22 nt, Human
caggcuccgcccuuaguccccc

SEQ ID NO: 2867127 - RNA, 16 nt, Human
caggcuccugccacca

SEQ ID NO: 2867128 - RNA, 15 nt, Human
caggcuccugccacc

SEQ ID NO: 2867129 - RNA, 14 nt, Human
caggcuccugccac

SEQ ID NO: 2867130 - RNA, 13 nt, Human
caggcuccugcca

SEQ ID NO: 2867131 - RNA, 21 nt, Human
caggcuccuuuagcgcccagu

SEQ ID NO: 2867132 - RNA, 13 nt, Human
caggcucucaaca

SEQ ID NO: 2867133 - RNA, 13 nt, Human
caggcucuccauu

SEQ ID NO: 2867134 - RNA, 14 nt, Human
caggcucucaacag

SEQ ID NO: 2867135 - RNA, 19 nt, Human
caggcccggcuccaggcuc

SEQ ID NO: 2867136 - RNA, 18 nt, Human
caggcccggcuccaggcu

SEQ ID NO: 2867137 - RNA, 16 nt, Human
caggcccggcuccagg

SEQ ID NO: 2867138 - RNA, 17 nt, Human
caggcccggcuccaggc

SEQ ID NO: 2867139 - RNA, 21 nt, Human
caggcccggcuccaggcuccu

SEQ ID NO: 2867140 - RNA, 20 nt, Human
caggcccggcuccaggcucc

SEQ ID NO: 2867141 - RNA, 22 nt, Human
caggcccggcuccaggcuccuu

SEQ ID NO: 2867142 - RNA, 15 nt, Human
caggcccgucugucc

SEQ ID NO: 2867143 - RNA, 16 nt, Human
caggcccgucugucca

SEQ ID NO: 2867144 - RNA, 17 nt, Human
caggcccgucuguccau

SEQ ID NO: 2867145 - RNA, 19 nt, Human
caggcccgucuguccaucu

SEQ ID NO: 2867146 - RNA, 20 nt, Human
caggcccgucuguccaucug

SEQ ID NO: 2867147 - RNA, 21 nt, Human
caggcccgucuguccaucugc

SEQ ID NO: 2867148 - RNA, 22 nt, Human
caggcccgucuguccaucugcc

SEQ ID NO: 2867149 - RNA, 23 nt, Human
caggcccgucuguccaucugccc

SEQ ID NO: 2867150 - RNA, 12 nt, Human
caggcccugcag

SEQ ID NO: 2867151 - RNA, 13 nt, Human
caggcccugcagu

SEQ ID NO: 2867152 - RNA, 15 nt, Human
caggcccugcagugu

SEQ ID NO: 2867153 - RNA, 16 nt, Human
caggcccugcaguguu

SEQ ID NO: 2867154 - RNA, 17 nt, Human
caggcccugcaguguuc

SEQ ID NO: 2867155 - RNA, 13 nt, Human
caggcccugcucc

SEQ ID NO: 2867156 - RNA, 14 nt, Human
caggcccugcuccu

SEQ ID NO: 2867157 - RNA, 15 nt, Human
caggcccugcuccug

SEQ ID NO: 2867158 - RNA, 16 nt, Human
caggcccugcuccugc

SEQ ID NO: 2867159 - RNA, 17 nt, Human
caggcccugcuccugca

SEQ ID NO: 2867160 - RNA, 19 nt, Human
caggcccugcuccugcagc

SEQ ID NO: 2867161 - RNA, 20 nt, Human
caggcccugcuccugcagca

SEQ ID NO: 2867162 - RNA, 22 nt, Human
caggcccugcuccugcagcaug

SEQ ID NO: 2867163 - RNA, 10 nt, Human
caggcccugg

SEQ ID NO: 2867164 - RNA, 15 nt, Human
caggcccuggaacuc

SEQ ID NO: 2867165 - RNA, 11 nt, Human
caggcccuggc

SEQ ID NO: 2867166 - RNA, 20 nt, Human
caggcccuggcuaagaccca

SEQ ID NO: 2867167 - RNA, 22 nt, Human
caggcccuggcugagggcagcu

SEQ ID NO: 2867168 - RNA, 21 nt, Human
caggcccuuauuuucaagaaa

SEQ ID NO: 2867169 - RNA, 15 nt, Human
caggcccuuccucuc

SEQ ID NO: 2867170 - RNA, 16 nt, Human
caggcccuuccucucc

SEQ ID NO: 2867171 - RNA, 17 nt, Human
caggcccuuccucucca

SEQ ID NO: 2867172 - RNA, 19 nt, Human
caggcccuuugaagccuca

SEQ ID NO: 2867173 - RNA, 20 nt, Human
caggcccuuugaagccucag

SEQ ID NO: 2867174 - RNA, 21 nt, Human
caggcccuuugaagccucagc

SEQ ID NO: 2867175 - RNA, 22 nt, Human
caggcccuuugaagccucagcu

SEQ ID NO: 2867176 - RNA, 19 nt, Human
caggcccuuccucuccacu

SEQ ID NO: 2867177 - RNA, 20 nt, Human
caggcccuuccucuccacug

SEQ ID NO: 2867178 - RNA, 21 nt, Human
caggcccuuccucuccacugc

SEQ ID NO: 2867179 - RNA, 23 nt, Human
caggcccuuccucuccacugccu

SEQ ID NO: 2867180 - RNA, 23 nt, Human
caggcuguaucccaugagccuca

SEQ ID NO: 2867181 - RNA, 22 nt, Human
caggcuguaucccaugagccuc

SEQ ID NO: 2867182 - RNA, 16 nt, Human
caggcuuaauaaaaau

SEQ ID NO: 2867183 - RNA, 20 nt, Human
caggcuuaauaaaaaugaca

SEQ ID NO: 2867184 - RNA, 21 nt, Human
caggcuuaauaaaaaugacag

SEQ ID NO: 2867185 - RNA, 17 nt, Human
caggcuguucugcacug

SEQ ID NO: 2867186 - RNA, 18 nt, Human
caggcuguucugcacuga

SEQ ID NO: 2867187 - RNA, 19 nt, Human
caggcuguucugcacugaa

SEQ ID NO: 2867188 - RNA, 20 nt, Human
caggcuguucugcacugaaa

SEQ ID NO: 2867189 - RNA, 21 nt, Human
caggcuguucugcacugaaaa

SEQ ID NO: 2867190 - RNA, 22 nt, Human
caggcuguucugcacugaaaag

SEQ ID NO: 2867191 - RNA, 14 nt, Human
caggcugugaguuu

SEQ ID NO: 2867192 - RNA, 21 nt, Human
caggcuguaucccaugagccu

SEQ ID NO: 2867193 - RNA, 20 nt, Human
caggcuguaucccaugagcc

SEQ ID NO: 2867194 - RNA, 14 nt, Human
caggcuguauccca

SEQ ID NO: 2867195 - RNA, 23 nt, Human
caggcuggucucgaacuccugac

SEQ ID NO: 2867196 - RNA, 18 nt, Human
caggcuggugggaggggc

SEQ ID NO: 2867197 - RNA, 15 nt, Human
caggcuggugggagg

SEQ ID NO: 2867198 - RNA, 20 nt, Human
caggcuggucuugaaguccu

SEQ ID NO: 2867199 - RNA, 21 nt, Human
caggcuggucuugaaguccug

SEQ ID NO: 2867200 - RNA, 19 nt, Human
caggcuggucucaaacucu

SEQ ID NO: 2867201 - RNA, 22 nt, Human
caggcuggucucgaacuccuga

SEQ ID NO: 2867202 - RNA, 20 nt, Human
caggcuggucucgaacuccu

SEQ ID NO: 2867203 - RNA, 12 nt, Human
caggcuggucuc

SEQ ID NO: 2867204 - RNA, 23 nt, Human
caggcuggucucaaacuccugac

SEQ ID NO: 2867205 - RNA, 13 nt, Human
caggcuggucuca

SEQ ID NO: 2867206 - RNA, 14 nt, Human
caggcuggucucaa

SEQ ID NO: 2867207 - RNA, 17 nt, Human
caggcuggucuaaaacu

SEQ ID NO: 2867208 - RNA, 18 nt, Human
caggcuggucuaaaacuc

SEQ ID NO: 2867209 - RNA, 14 nt, Human
caggcuuccuuggc

SEQ ID NO: 2867210 - RNA, 20 nt, Human
caggcugagccacucucuuc

SEQ ID NO: 2867211 - RNA, 21 nt, Human
caggcuuaugaauauauuuaa

SEQ ID NO: 2867212 - RNA, 21 nt, Human
caggcuuccugcaauuuucua

SEQ ID NO: 2867213 - RNA, 22 nt, Human
caggcuuccugcaauuuucuaa

SEQ ID NO: 2867214 - RNA, 15 nt, Human
cagggaaaagcagcu

SEQ ID NO: 2867215 - RNA, 19 nt, Human
caggcuuuguacagagugc

SEQ ID NO: 2867216 - RNA, 15 nt, Human
caggcuugccugcag

SEQ ID NO: 2867217 - RNA, 16 nt, Human
caggcuugccugcagg

SEQ ID NO: 2867218 - RNA, 17 nt, Human
caggcuugccugcaggc

SEQ ID NO: 2867219 - RNA, 18 nt, Human
caggcuugccugcaggca

SEQ ID NO: 2867220 - RNA, 23 nt, Human
caggcugggcuucaguggcagcu

SEQ ID NO: 2867221 - RNA, 16 nt, Human
caggcuggucuaaaac

SEQ ID NO: 2867222 - RNA, 16 nt, Human
caggcugggugacaga

SEQ ID NO: 2867223 - RNA, 18 nt, Human
caggcugggugacagagc

SEQ ID NO: 2867224 - RNA, 23 nt, Human
caggcugggugacagagcgagac

SEQ ID NO: 2867225 - RNA, 15 nt, Human
caggcuggccagccg

SEQ ID NO: 2867226 - RNA, 17 nt, Human
caggcuggccagccgcu

SEQ ID NO: 2867227 - RNA, 19 nt, Human
caggcuggccagccgcucu

SEQ ID NO: 2867228 - RNA, 16 nt, Human
caggcuggcccugccc

SEQ ID NO: 2867229 - RNA, 15 nt, Human
caggcuggcccugcc

SEQ ID NO: 2867230 - RNA, 14 nt, Human
caggcuggcccugc

SEQ ID NO: 2867231 - RNA, 12 nt, Human
caggcuggcccu

SEQ ID NO: 2867232 - RNA, 14 nt, Human
caggcuggacgugg

SEQ ID NO: 2867233 - RNA, 15 nt, Human
caggcugcuugggau

SEQ ID NO: 2867234 - RNA, 12 nt, Human
caggcugcuugg

SEQ ID NO: 2867235 - RNA, 22 nt, Human
caggcuggacaugcugacuguc

SEQ ID NO: 2867236 - RNA, 12 nt, Human
caggcuggccag

SEQ ID NO: 2867237 - RNA, 13 nt, Human
caggcuggccagc

SEQ ID NO: 2867238 - RNA, 14 nt, Human
caggcuggccagcc

SEQ ID NO: 2867239 - RNA, 15 nt, Human
caggcuggaguacag

SEQ ID NO: 2867240 - RNA, 21 nt, Human
caggcugcuggggccucagac

SEQ ID NO: 2867241 - RNA, 23 nt, Human
caggcugcuggggccucagacga

SEQ ID NO: 2867242 - RNA, 22 nt, Human
caggcugcuucaaucccagccu

SEQ ID NO: 2867243 - RNA, 23 nt, Human
caggcugcucuugaacuccugac

SEQ ID NO: 2867244 - RNA, 20 nt, Human
caggcugcucuugaacuccu

SEQ ID NO: 2867245 - RNA, 12 nt, Human
caggcugcucuu

SEQ ID NO: 2867246 - RNA, 21 nt, Human
caggcugccaaggccagagug

SEQ ID NO: 2867247 - RNA, 22 nt, Human
caggcugccaaggccagagugg

SEQ ID NO: 2867248 - RNA, 14 nt, Human
caggcugcagcugg

SEQ ID NO: 2867249 - RNA, 17 nt, Human
caggcugcagcuggaca

SEQ ID NO: 2867250 - RNA, 18 nt, Human
caggcugcagcuggacag

SEQ ID NO: 2867251 - RNA, 19 nt, Human
caggcugcagcuggacaga

SEQ ID NO: 2867252 - RNA, 20 nt, Human
caggcugcagcuggacagag

SEQ ID NO: 2867253 - RNA, 21 nt, Human
caggcugagccucagucuccc

SEQ ID NO: 2867254 - RNA, 17 nt, Human
caggcugagccucaguc

SEQ ID NO: 2867255 - RNA, 16 nt, Human
caggcugagccucagu

SEQ ID NO: 2867256 - RNA, 15 nt, Human
caggcugagccucag

SEQ ID NO: 2867257 - RNA, 14 nt, Human
caggcugagccuca

SEQ ID NO: 2867258 - RNA, 13 nt, Human
caggcugagccuc

SEQ ID NO: 2867259 - RNA, 18 nt, Human
caggcucuucuccuuuca

SEQ ID NO: 2867260 - RNA, 22 nt, Human
caggcucuucuccuuucacaac

SEQ ID NO: 2867261 - RNA, 12 nt, Human
caggcugagccu

SEQ ID NO: 2867262 - RNA, 14 nt, Human
caggcucuucuccu

SEQ ID NO: 2867263 - RNA, 15 nt, Human
caggcucuucuccuu

SEQ ID NO: 2867264 - RNA, 12 nt, Human
caggcucuucuc

SEQ ID NO: 2867265 - RNA, 15 nt, Human
caggggacucagccc

SEQ ID NO: 2867266 - RNA, 21 nt, Human
caggggacucagcccugaggu

SEQ ID NO: 2867267 - RNA, 20 nt, Human
caggggacucagcccugagg

SEQ ID NO: 2867268 - RNA, 18 nt, Human
caggggacucagcccuga

SEQ ID NO: 2867269 - RNA, 17 nt, Human
caggggacucagcccug

SEQ ID NO: 2867270 - RNA, 23 nt, Human
caggggacucagcccugagguga

SEQ ID NO: 2867271 - RNA, 17 nt, Human
cagggccuggaagacag

SEQ ID NO: 2867272 - RNA, 18 nt, Human
cagggccuggaagacaga

SEQ ID NO: 2867273 - RNA, 19 nt, Human
cagggccuggaagacagag

SEQ ID NO: 2867274 - RNA, 12 nt, Human
cagggccugggg

SEQ ID NO: 2867275 - RNA, 13 nt, Human
cagggccuggggc

SEQ ID NO: 2867276 - RNA, 14 nt, Human
cagggccuggggcc

SEQ ID NO: 2867277 - RNA, 15 nt, Human
cagggccuggggccu

SEQ ID NO: 2867278 - RNA, 17 nt, Human
cagggccuggggccuga

SEQ ID NO: 2867279 - RNA, 18 nt, Human
cagggccuggggccugag

SEQ ID NO: 2867280 - RNA, 19 nt, Human
cagggccuggggccugaga

SEQ ID NO: 2867281 - RNA, 20 nt, Human
cagggccuggggccugagag

SEQ ID NO: 2867282 - RNA, 21 nt, Human
cagggccuggggccugagaga

SEQ ID NO: 2867283 - RNA, 22 nt, Human
cagggccuggggccugagagaa

SEQ ID NO: 2867284 - RNA, 23 nt, Human
cagggccuggggccugagagaau

SEQ ID NO: 2867285 - RNA, 11 nt, Human
cagggccuggu

SEQ ID NO: 2867286 - RNA, 12 nt, Human
cagggccugguu

SEQ ID NO: 2867287 - RNA, 13 nt, Human
cagggccugguug

SEQ ID NO: 2867288 - RNA, 18 nt, Human
cagggccugguugaagaa

SEQ ID NO: 2867289 - RNA, 19 nt, Human
cagggccugguugaagaag

SEQ ID NO: 2867290 - RNA, 19 nt, Human
caggggaggcggcacucca

SEQ ID NO: 2867291 - RNA, 16 nt, Human
caggggaggugauagc

SEQ ID NO: 2867292 - RNA, 14 nt, Human
caggggccagagga

SEQ ID NO: 2867293 - RNA, 15 nt, Human
caggggccagaggaa

SEQ ID NO: 2867294 - RNA, 20 nt, Human
caggggcccaaggcggcccc

SEQ ID NO: 2867295 - RNA, 21 nt, Human
caggggcccaaggcggccccu

SEQ ID NO: 2867296 - RNA, 12 nt, Human
caggggcagcuc

SEQ ID NO: 2867297 - RNA, 22 nt, Human
caggggcccaaggcggccccuc

SEQ ID NO: 2867298 - RNA, 17 nt, Human
caggggcuacaagaggg

SEQ ID NO: 2867299 - RNA, 18 nt, Human
caggggcuacaagaggga

SEQ ID NO: 2867300 - RNA, 19 nt, Human
caggggcuacaagagggaa

SEQ ID NO: 2867301 - RNA, 13 nt, Human
caggggcucugga

SEQ ID NO: 2867302 - RNA, 14 nt, Human
caggggcucuggag

SEQ ID NO: 2867303 - RNA, 15 nt, Human
caggggcucuggaga

SEQ ID NO: 2867304 - RNA, 16 nt, Human
caggggcucuggagag

SEQ ID NO: 2867305 - RNA, 17 nt, Human
caggggcucuggagaga

SEQ ID NO: 2867306 - RNA, 18 nt, Human
caggggcucuggagagaa

SEQ ID NO: 2867307 - RNA, 20 nt, Human
caggggcucuggagagaaac

SEQ ID NO: 2867308 - RNA, 19 nt, Human
caggggcugacacuucaag

SEQ ID NO: 2867309 - RNA, 13 nt, Human
caggggcugcagu

SEQ ID NO: 2867310 - RNA, 19 nt, Human
caggggcucuggagagaaa

SEQ ID NO: 2867311 - RNA, 22 nt, Human
caggggcgugaggucccaggaa

SEQ ID NO: 2867312 - RNA, 17 nt, Human
cagggggcaugaccaga

SEQ ID NO: 2867313 - RNA, 18 nt, Human
cagggggacuagccccug

SEQ ID NO: 2867314 - RNA, 16 nt, Human
cagggggagaaugggu

SEQ ID NO: 2867315 - RNA, 19 nt, Human
cagggggaagguggggucc

SEQ ID NO: 2867316 - RNA, 14 nt, Human
cagggggaagaagc

SEQ ID NO: 2867317 - RNA, 15 nt, Human
cagggggaagaagca

SEQ ID NO: 2867318 - RNA, 20 nt, Human
cagggggaagaagcagagag

SEQ ID NO: 2867319 - RNA, 21 nt, Human
cagggggaagaagcagagaga

SEQ ID NO: 2867320 - RNA, 11 nt, Human
cagggggaagg

SEQ ID NO: 2867321 - RNA, 23 nt, Human
cagggggaaggccaaggggaguc

SEQ ID NO: 2867322 - RNA, 22 nt, Human
cagggggaugccacuccucccu

SEQ ID NO: 2867323 - RNA, 22 nt, Human
cagggcaugccccggccaccuc

SEQ ID NO: 2867324 - RNA, 23 nt, Human
cagggcaugccccggccaccucu

SEQ ID NO: 2867325 - RNA, 20 nt, Human
cagggcauggccagguggcc

SEQ ID NO: 2867326 - RNA, 15 nt, Human
cagggcaugccacgu

SEQ ID NO: 2867327 - RNA, 18 nt, Human
cagggcaugccccggcca

SEQ ID NO: 2867328 - RNA, 21 nt, Human
cagggcaugccccggccaccu

SEQ ID NO: 2867329 - RNA, 22 nt, Human
cagggcagugcuagugagcugg

SEQ ID NO: 2867330 - RNA, 13 nt, Human
cagggcagguggg

SEQ ID NO: 2867331 - RNA, 16 nt, Human
cagggccaugccugcc

SEQ ID NO: 2867332 - RNA, 17 nt, Human
cagggccaugccugccc

SEQ ID NO: 2867333 - RNA, 15 nt, Human
cagggccaguggggc

SEQ ID NO: 2867334 - RNA, 16 nt, Human
cagggccaguggggcc

SEQ ID NO: 2867335 - RNA, 17 nt, Human
cagggccaguggggccu

SEQ ID NO: 2867336 - RNA, 18 nt, Human
cagggccaguggggccug

SEQ ID NO: 2867337 - RNA, 19 nt, Human
cagggccaguggggccugu

SEQ ID NO: 2867338 - RNA, 20 nt, Human
cagggccaguggggccugug

SEQ ID NO: 2867339 - RNA, 21 nt, Human
cagggccaguggggccugugg

SEQ ID NO: 2867340 - RNA, 22 nt, Human
cagggccaguggggccugugga

SEQ ID NO: 2867341 - RNA, 19 nt, Human
cagggccagggcccugcag

SEQ ID NO: 2867342 - RNA, 18 nt, Human
cagggccagggcccugca

SEQ ID NO: 2867343 - RNA, 16 nt, Human
cagggccagggcccug

SEQ ID NO: 2867344 - RNA, 15 nt, Human
cagggccagggcccu

SEQ ID NO: 2867345 - RNA, 13 nt, Human
cagggccagggcc

SEQ ID NO: 2867346 - RNA, 12 nt, Human
cagggccagggc

SEQ ID NO: 2867347 - RNA, 14 nt, Human
cagggccaggacug

SEQ ID NO: 2867348 - RNA, 15 nt, Human
cagggccaggacuga

SEQ ID NO: 2867349 - RNA, 18 nt, Human
cagggccaggacugagcc

SEQ ID NO: 2867350 - RNA, 20 nt, Human
cagggccaggacugagcccc

SEQ ID NO: 2867351 - RNA, 17 nt, Human
cagggccaacuugaggg

SEQ ID NO: 2867352 - RNA, 19 nt, Human
cagggccaacuugagggcc

SEQ ID NO: 2867353 - RNA, 22 nt, Human
cagggccaacuugagggcccag

SEQ ID NO: 2867354 - RNA, 16 nt, Human
cagggccaauccccag

SEQ ID NO: 2867355 - RNA, 12 nt, Human
cagggccaggac

SEQ ID NO: 2867356 - RNA, 13 nt, Human
cagggccaggacu

SEQ ID NO: 2867357 - RNA, 14 nt, Human
cagggcccugcaga

SEQ ID NO: 2867358 - RNA, 13 nt, Human
cagggcccugcag

SEQ ID NO: 2867359 - RNA, 23 nt, Human
cagggccgaccagaggagccuuu

SEQ ID NO: 2867360 - RNA, 14 nt, Human
cagggccgaggagg

SEQ ID NO: 2867361 - RNA, 22 nt, Human
cagggccgaggaggugccugga

SEQ ID NO: 2867362 - RNA, 14 nt, Human
cagggccgaccaga

SEQ ID NO: 2867363 - RNA, 18 nt, Human
cagggcccugcagagggg

SEQ ID NO: 2867364 - RNA, 15 nt, Human
cagggcccugcagag

SEQ ID NO: 2867365 - RNA, 12 nt, Human
cagggccuggaa

SEQ ID NO: 2867366 - RNA, 22 nt, Human
cagggccugcaggaccugccug

SEQ ID NO: 2867367 - RNA, 22 nt, Human
cagggccugagccuggccagcc

SEQ ID NO: 2867368 - RNA, 21 nt, Human
cagggccugagccuggccagc

SEQ ID NO: 2867369 - RNA, 20 nt, Human
cagggccugagccuggccag

SEQ ID NO: 2867370 - RNA, 19 nt, Human
cagggccugagccuggcca

SEQ ID NO: 2867371 - RNA, 18 nt, Human
cagggccugagccuggcc

SEQ ID NO: 2867372 - RNA, 17 nt, Human
cagggccugagccuggc

SEQ ID NO: 2867373 - RNA, 16 nt, Human
cagggccugagccugg

SEQ ID NO: 2867374 - RNA, 23 nt, Human
cagggccucccgcaucaagguca

SEQ ID NO: 2867375 - RNA, 16 nt, Human
cagggccucacacggu

SEQ ID NO: 2867376 - RNA, 12 nt, Human
cagggcccagag

SEQ ID NO: 2867377 - RNA, 13 nt, Human
cagggcccagagg

SEQ ID NO: 2867378 - RNA, 16 nt, Human
cagggcccagaggcug

SEQ ID NO: 2867379 - RNA, 17 nt, Human
cagggcccagaggcuga

SEQ ID NO: 2867380 - RNA, 17 nt, Human
cagggacagagccaugc

SEQ ID NO: 2867381 - RNA, 16 nt, Human
cagggaccacacccug

SEQ ID NO: 2867382 - RNA, 22 nt, Human
cagggaccacacccuguacugu

SEQ ID NO: 2867383 - RNA, 12 nt, Human
cagggacaggau

SEQ ID NO: 2867384 - RNA, 19 nt, Human
cagggacgaagaagagcca

SEQ ID NO: 2867385 - RNA, 22 nt, Human
cagggacgaagaagagccacag

SEQ ID NO: 2867386 - RNA, 23 nt, Human
cagggacgaagaagagccacagu

SEQ ID NO: 2867387 - RNA, 23 nt, Human
cagggacugaaaaccucuccuca

SEQ ID NO: 2867388 - RNA, 21 nt, Human
cagggacugaaaaccucuccu

SEQ ID NO: 2867389 - RNA, 20 nt, Human
cagggacugaaaaccucucc

SEQ ID NO: 2867390 - RNA, 14 nt, Human
cagggcacaccggg

SEQ ID NO: 2867391 - RNA, 17 nt, Human
cagggcaaucaauguuc

SEQ ID NO: 2867392 - RNA, 18 nt, Human
cagggcaaugaugaauga

SEQ ID NO: 2867393 - RNA, 14 nt, Human
cagggcaaaugaca

SEQ ID NO: 2867394 - RNA, 20 nt, Human
cagggcaaaugacaugcacu

SEQ ID NO: 2867395 - RNA, 21 nt, Human
cagggcaaaugacaugcacug

SEQ ID NO: 2867396 - RNA, 22 nt, Human
cagggcaaaugacaugcacuga

SEQ ID NO: 2867397 - RNA, 23 nt, Human
cagggcaaaugacaugcacugac

SEQ ID NO: 2867398 - RNA, 15 nt, Human
cagggcaaaauauuc

SEQ ID NO: 2867399 - RNA, 21 nt, Human
cagggcaaaauauucacuggg

SEQ ID NO: 2867400 - RNA, 23 nt, Human
cagggcaaaauauucacugggcc

SEQ ID NO: 2867401 - RNA, 16 nt, Human
cagggauugcugccac

SEQ ID NO: 2867402 - RNA, 18 nt, Human
cagggauguacaaggcga

SEQ ID NO: 2867403 - RNA, 21 nt, Human
cagggauguagauuaagguga

SEQ ID NO: 2867404 - RNA, 21 nt, Human
cagggcacaccgggcacucag

SEQ ID NO: 2867405 - RNA, 19 nt, Human
cagggcacaccgggcacuc

SEQ ID NO: 2867406 - RNA, 17 nt, Human
cagggcacaccgggcac

SEQ ID NO: 2867407 - RNA, 15 nt, Human
cagggcacaccgggc

SEQ ID NO: 2867408 - RNA, 23 nt, Human
cagggcacaccgggcacucagaa

SEQ ID NO: 2867409 - RNA, 22 nt, Human
cagggcacaccgggcacucaga

SEQ ID NO: 2867410 - RNA, 21 nt, Human
cagggcagccucccccggcuc

SEQ ID NO: 2867411 - RNA, 12 nt, Human
cagggcagcccc

SEQ ID NO: 2867412 - RNA, 21 nt, Human
cagggcacccuguggcccugg

SEQ ID NO: 2867413 - RNA, 22 nt, Human
cagggcacccuguggcccuggc

SEQ ID NO: 2867414 - RNA, 15 nt, Human
cagggcagagccggg

SEQ ID NO: 2867415 - RNA, 12 nt, Human
cagggcagagcc

SEQ ID NO: 2867416 - RNA, 16 nt, Human
cagggcagagccggga

SEQ ID NO: 2867417 - RNA, 15 nt, Human
cagggacagagccau

SEQ ID NO: 2867418 - RNA, 16 nt, Human
cagggacagagccaug

SEQ ID NO: 2867419 - RNA, 23 nt, Human
cagggaauuucaggaacuagaga

SEQ ID NO: 2867420 - RNA, 14 nt, Human
cagggaauuucuau

SEQ ID NO: 2867421 - RNA, 16 nt, Human
cagggaauuucuaucu

SEQ ID NO: 2867422 - RNA, 13 nt, Human
cagggacagagcc

SEQ ID NO: 2867423 - RNA, 14 nt, Human
cagggacagagcca

SEQ ID NO: 2867424 - RNA, 14 nt, Human
cagggaauccaagc

SEQ ID NO: 2867425 - RNA, 15 nt, Human
cagggaaguggggag

SEQ ID NO: 2867426 - RNA, 21 nt, Human
cagggaaguggggagaggugg

SEQ ID NO: 2867427 - RNA, 23 nt, Human
cagggaauccaagccuccacagc

SEQ ID NO: 2867428 - RNA, 23 nt, Human
cagggaaugccugagugccuggc

SEQ ID NO: 2867429 - RNA, 18 nt, Human
cagggaauccaagccucc

SEQ ID NO: 2867430 - RNA, 18 nt, Human
cagggaagggggagcugg

SEQ ID NO: 2867431 - RNA, 23 nt, Human
cagggaaggccugacuucugcug

SEQ ID NO: 2867432 - RNA, 21 nt, Human
cagggaagggacugggagggg

SEQ ID NO: 2867433 - RNA, 16 nt, Human
cagggaaggccugacu

SEQ ID NO: 2867434 - RNA, 17 nt, Human
cagggaaggggacaagg

SEQ ID NO: 2867435 - RNA, 15 nt, Human
cagggaaggggacaa

SEQ ID NO: 2867436 - RNA, 15 nt, Human
cagggaaggccugac

SEQ ID NO: 2867437 - RNA, 13 nt, Human
cagggaagcuggc

SEQ ID NO: 2867438 - RNA, 17 nt, Human
cagggaagcuggccgag

SEQ ID NO: 2867439 - RNA, 14 nt, Human
cagggaagcuggcc

SEQ ID NO: 2867440 - RNA, 22 nt, Human
cagggaaacagcuaaugggaca

SEQ ID NO: 2867441 - RNA, 16 nt, Human
cagggaaacagcuaau

SEQ ID NO: 2867442 - RNA, 21 nt, Human
cagggaaaagcagcucucccc

SEQ ID NO: 2867443 - RNA, 20 nt, Human
cagggaaaagcagcucuccc

SEQ ID NO: 2867444 - RNA, 19 nt, Human
cagggaaaagcagcucucc

SEQ ID NO: 2867445 - RNA, 17 nt, Human
cagggaaaagcagcucu

SEQ ID NO: 2867446 - RNA, 22 nt, Human
cagggaagagcagaacggagcc

SEQ ID NO: 2867447 - RNA, 15 nt, Human
cagggaagagcagaa

SEQ ID NO: 2867448 - RNA, 17 nt, Human
cagggaagagcagaacg

SEQ ID NO: 2867449 - RNA, 13 nt, Human
cagggaacaguau

SEQ ID NO: 2867450 - RNA, 15 nt, Human
caggcccccaccacu

SEQ ID NO: 2867451 - RNA, 13 nt, Human
caggcccccacca

SEQ ID NO: 2867452 - RNA, 16 nt, Human
caggcccccaccacac

SEQ ID NO: 2867453 - RNA, 17 nt, Human
caggcccccaccacaca

SEQ ID NO: 2867454 - RNA, 18 nt, Human
caggcccccaccacacau

SEQ ID NO: 2867455 - RNA, 19 nt, Human
caggcccccaccacacauc

SEQ ID NO: 2867456 - RNA, 20 nt, Human
caggcccccaccacacaucc

SEQ ID NO: 2867457 - RNA, 21 nt, Human
caggcccccaccacacauccc

SEQ ID NO: 2867458 - RNA, 22 nt, Human
caggcccccaccacacauccca

SEQ ID NO: 2867459 - RNA, 23 nt, Human
caggcccccaccacacaucccag

SEQ ID NO: 2867460 - RNA, 13 nt, Human
caggccccugcca

SEQ ID NO: 2867461 - RNA, 16 nt, Human
caggccauucugccgc

SEQ ID NO: 2867462 - RNA, 15 nt, Human
caggcccaacuguga

SEQ ID NO: 2867463 - RNA, 22 nt, Human
caggcccaacugugagcaagga

SEQ ID NO: 2867464 - RNA, 21 nt, Human
caggccauuccccgucucugg

SEQ ID NO: 2867465 - RNA, 13 nt, Human
caggcccacucag

SEQ ID NO: 2867466 - RNA, 14 nt, Human
caggcccacucagg

SEQ ID NO: 2867467 - RNA, 13 nt, Human
caggcaugugcca

SEQ ID NO: 2867468 - RNA, 16 nt, Human
caggccaggugcagug

SEQ ID NO: 2867469 - RNA, 15 nt, Human
caggccaggugcagu

SEQ ID NO: 2867470 - RNA, 23 nt, Human
caggccaccauauucagugcugu

SEQ ID NO: 2867471 - RNA, 21 nt, Human
caggccaucaucaguggagcc

SEQ ID NO: 2867472 - RNA, 18 nt, Human
caggccauuccccgucuc

SEQ ID NO: 2867473 - RNA, 23 nt, Human
caggccaagagcagaggcagcga

SEQ ID NO: 2867474 - RNA, 19 nt, Human
caggccaaggccuucuccu

SEQ ID NO: 2867475 - RNA, 15 nt, Human
caggccaaggucuga

SEQ ID NO: 2867476 - RNA, 19 nt, Human
caggccaaggucugagcca

SEQ ID NO: 2867477 - RNA, 20 nt, Human
caggccaaggucugagccac

SEQ ID NO: 2867478 - RNA, 18 nt, Human
caggccaaguuaaaggcu

SEQ ID NO: 2867479 - RNA, 21 nt, Human
caggccaagagcagaggcagc

SEQ ID NO: 2867480 - RNA, 19 nt, Human
caggccaagagcagaggca

SEQ ID NO: 2867481 - RNA, 21 nt, Human
caggcauuugacugaagaugc

SEQ ID NO: 2867482 - RNA, 23 nt, Human
caggcauuugacugaagaugcag

SEQ ID NO: 2867483 - RNA, 13 nt, Human
caggcauuuguuc

SEQ ID NO: 2867484 - RNA, 18 nt, Human
caggcauuugacugaaga

SEQ ID NO: 2867485 - RNA, 18 nt, Human
caggccaagagcagaggc

SEQ ID NO: 2867486 - RNA, 17 nt, Human
caggccaagaaacgucu

SEQ ID NO: 2867487 - RNA, 20 nt, Human
caggccccugccacccuggg

SEQ ID NO: 2867488 - RNA, 19 nt, Human
caggccccugccacccugg

SEQ ID NO: 2867489 - RNA, 17 nt, Human
caggccccugccacccu

SEQ ID NO: 2867490 - RNA, 15 nt, Human
caggccccugccacc

SEQ ID NO: 2867491 - RNA, 15 nt, Human
caggcccggcuccag

SEQ ID NO: 2867492 - RNA, 14 nt, Human
caggcccggcucca

SEQ ID NO: 2867493 - RNA, 13 nt, Human
caggcccggcucc

SEQ ID NO: 2867494 - RNA, 18 nt, Human
caggcaaaauccuugcuu

SEQ ID NO: 2867495 - RNA, 14 nt, Human
caggcaaaauccuu

SEQ ID NO: 2867496 - RNA, 16 nt, Human
caggcaaagcaaguga

SEQ ID NO: 2867497 - RNA, 22 nt, Human
caggauuugaacucagaucugu

SEQ ID NO: 2867498 - RNA, 14 nt, Human
caggauuugcacag

SEQ ID NO: 2867499 - RNA, 12 nt, Human
caggauuucuaa

SEQ ID NO: 2867500 - RNA, 21 nt, Human
caggauuugaacucagaucug

SEQ ID NO: 2867501 - RNA, 22 nt, Human
caggauuugcacagaagcacau

SEQ ID NO: 2867502 - RNA, 17 nt, Human
caggauuugcugggaga

SEQ ID NO: 2867503 - RNA, 19 nt, Human
caggauuuguucucugucc

SEQ ID NO: 2867504 - RNA, 20 nt, Human
caggauuuguucucugucca

SEQ ID NO: 2867505 - RNA, 16 nt, Human
caggauuugcacagaa

SEQ ID NO: 2867506 - RNA, 15 nt, Human
caggauuugcacaga

SEQ ID NO: 2867507 - RNA, 15 nt, Human
caggauuuaaaaacu

SEQ ID NO: 2867508 - RNA, 18 nt, Human
caggauuuaaaaacugga

SEQ ID NO: 2867509 - RNA, 19 nt, Human
caggauuuaaaaacuggaa

SEQ ID NO: 2867510 - RNA, 20 nt, Human
caggauuuaaaaacuggaac

SEQ ID NO: 2867511 - RNA, 17 nt, Human
caggcaacuucaguccu

SEQ ID NO: 2867512 - RNA, 19 nt, Human
caggcaacuucaguccugg

SEQ ID NO: 2867513 - RNA, 20 nt, Human
caggcaacuucaguccuggg

SEQ ID NO: 2867514 - RNA, 21 nt, Human
caggcaacuucaguccuggga

SEQ ID NO: 2867515 - RNA, 22 nt, Human
caggcaacuucaguccugggag

SEQ ID NO: 2867516 - RNA, 21 nt, Human
caggcaagcaccuccugccuc

SEQ ID NO: 2867517 - RNA, 16 nt, Human
caggcaagcaccuccu

SEQ ID NO: 2867518 - RNA, 15 nt, Human
caggcaagcaccucc

SEQ ID NO: 2867519 - RNA, 14 nt, Human
caggcaagcaccuc

SEQ ID NO: 2867520 - RNA, 13 nt, Human
caggcagguccag

SEQ ID NO: 2867521 - RNA, 19 nt, Human
caggcaggaagggcaggaa

SEQ ID NO: 2867522 - RNA, 20 nt, Human
caggcaggcuaaggcgugga

SEQ ID NO: 2867523 - RNA, 23 nt, Human
caggcaggcuaaggcguggagcu

SEQ ID NO: 2867524 - RNA, 21 nt, Human
caggcaggccaaggccuucuc

SEQ ID NO: 2867525 - RNA, 12 nt, Human
caggcagcccua

SEQ ID NO: 2867526 - RNA, 14 nt, Human
caggcagcuuucua

SEQ ID NO: 2867527 - RNA, 17 nt, Human
caggcagcuuucuagaa

SEQ ID NO: 2867528 - RNA, 18 nt, Human
caggcagcuuucuagaag

SEQ ID NO: 2867529 - RNA, 12 nt, Human
caggcagcgaug

SEQ ID NO: 2867530 - RNA, 21 nt, Human
caggcagcgauggucucagaa

SEQ ID NO: 2867531 - RNA, 13 nt, Human
caggcagcgccaa

SEQ ID NO: 2867532 - RNA, 18 nt, Human
caggcagcgauggucuca

SEQ ID NO: 2867533 - RNA, 19 nt, Human
caggcagcgccaagugcgu

SEQ ID NO: 2867534 - RNA, 20 nt, Human
caggcagcgccaagugcgug

SEQ ID NO: 2867535 - RNA, 17 nt, Human
caggcagcggggagggg

SEQ ID NO: 2867536 - RNA, 19 nt, Human
caggcagcuuuuucucucc

SEQ ID NO: 2867537 - RNA, 22 nt, Human
caggcagcuuuuucucucccac

SEQ ID NO: 2867538 - RNA, 18 nt, Human
caggcaggaagggcagga

SEQ ID NO: 2867539 - RNA, 20 nt, Human
caggcaggaaggcugagagg

SEQ ID NO: 2867540 - RNA, 20 nt, Human
caggcauguucucugaggac

SEQ ID NO: 2867541 - RNA, 19 nt, Human
caggcauguucucugagga

SEQ ID NO: 2867542 - RNA, 18 nt, Human
caggcauguucucugagg

SEQ ID NO: 2867543 - RNA, 15 nt, Human
caggcauguucucug

SEQ ID NO: 2867544 - RNA, 14 nt, Human
caggcauugaggaa

SEQ ID NO: 2867545 - RNA, 15 nt, Human
caggcauugaggaag

SEQ ID NO: 2867546 - RNA, 20 nt, Human
caggcauugaggaagagucu

SEQ ID NO: 2867547 - RNA, 12 nt, Human
caggcaggucuu

SEQ ID NO: 2867548 - RNA, 19 nt, Human
caggcagguccaggguuug

SEQ ID NO: 2867549 - RNA, 15 nt, Human
caggcagguccaggg

SEQ ID NO: 2867550 - RNA, 14 nt, Human
caggcagguccagg

SEQ ID NO: 2867551 - RNA, 22 nt, Human
caggcaggucuugaacuccugg

SEQ ID NO: 2867552 - RNA, 13 nt, Human
caggcaggucuug

SEQ ID NO: 2867553 - RNA, 23 nt, Human
caggcaggucuugaacuccuggc

SEQ ID NO: 2867554 - RNA, 14 nt, Human
caggcauggggggu

SEQ ID NO: 2867555 - RNA, 23 nt, Human
caggcaugggugcaaggaaaauu

SEQ ID NO: 2867556 - RNA, 15 nt, Human
caggcaucugauuug

SEQ ID NO: 2867557 - RNA, 12 nt, Human
caggcaugaagu

SEQ ID NO: 2867558 - RNA, 20 nt, Human
caggcauaaaauagaguaaa

SEQ ID NO: 2867559 - RNA, 14 nt, Human
caggcaucacagcu

SEQ ID NO: 2867560 - RNA, 15 nt, Human
caggcaucacagcua

SEQ ID NO: 2867561 - RNA, 13 nt, Human
caggcagucucuc

SEQ ID NO: 2867562 - RNA, 20 nt, Human
caggcagguagccaggggga

SEQ ID NO: 2867563 - RNA, 14 nt, Human
caggcaggugccug

SEQ ID NO: 2867564 - RNA, 16 nt, Human
caggcaggugccugga

SEQ ID NO: 2867565 - RNA, 19 nt, Human
caggaugggggcuggccuc

SEQ ID NO: 2867566 - RNA, 15 nt, Human
caggaugguguuacu

SEQ ID NO: 2867567 - RNA, 21 nt, Human
caggaugguguuacugcaguu

SEQ ID NO: 2867568 - RNA, 22 nt, Human
caggaugguguuacugcaguug

SEQ ID NO: 2867569 - RNA, 15 nt, Human
caggauggccuggcc

SEQ ID NO: 2867570 - RNA, 16 nt, Human
caggauggccuggcca

SEQ ID NO: 2867571 - RNA, 18 nt, Human
caggaugggggcuggccu

SEQ ID NO: 2867572 - RNA, 17 nt, Human
caggauggccuggccag

SEQ ID NO: 2867573 - RNA, 24 nt, Human
caggauggccuggccagggccugg

SEQ ID NO: 2867574 - RNA, 21 nt, Human
caggaugggggcuggccucug

SEQ ID NO: 2867575 - RNA, 19 nt, Human
caggauguacaaggacagc

SEQ ID NO: 2867576 - RNA, 15 nt, Human
caggauucagccgga

SEQ ID NO: 2867577 - RNA, 17 nt, Human
caggauucagccggagg

SEQ ID NO: 2867578 - RNA, 13 nt, Human
caggaugcuggcc

SEQ ID NO: 2867579 - RNA, 13 nt, Human
caggaugcugggu

SEQ ID NO: 2867580 - RNA, 15 nt, Human
caggaugcugggugg

SEQ ID NO: 2867581 - RNA, 16 nt, Human
caggaugcuggguggc

SEQ ID NO: 2867582 - RNA, 18 nt, Human
caggaucaagcaugaaag

SEQ ID NO: 2867583 - RNA, 15 nt, Human
caggaugacccugcg

SEQ ID NO: 2867584 - RNA, 16 nt, Human
caggaugaccuggaua

SEQ ID NO: 2867585 - RNA, 17 nt, Human
caggaugaccuggauaa

SEQ ID NO: 2867586 - RNA, 13 nt, Human
caggaucagucug

SEQ ID NO: 2867587 - RNA, 14 nt, Human
caggaucagucuga

SEQ ID NO: 2867588 - RNA, 20 nt, Human
caggauauccuuaucagagc

SEQ ID NO: 2867589 - RNA, 21 nt, Human
caggauauccuuaucagagcu

SEQ ID NO: 2867590 - RNA, 22 nt, Human
caggauauccuuaucagagcua

SEQ ID NO: 2867591 - RNA, 12 nt, Human
caggaucagcca

SEQ ID NO: 2867592 - RNA, 15 nt, Human
caggaucaguuaacu

SEQ ID NO: 2867593 - RNA, 16 nt, Human
caggaucccaggggcc

SEQ ID NO: 2867594 - RNA, 23 nt, Human
caggaucaugguguaauaagaca

SEQ ID NO: 2867595 - RNA, 21 nt, Human
caggaucccaggggcccaagg

SEQ ID NO: 2867596 - RNA, 17 nt, Human
caggauccaagcuaagc

SEQ ID NO: 2867597 - RNA, 13 nt, Human
caggauccagccu

SEQ ID NO: 2867598 - RNA, 14 nt, Human
caggauccagccuc

SEQ ID NO: 2867599 - RNA, 15 nt, Human
caggauccagccuca

SEQ ID NO: 2867600 - RNA, 15 nt, Human
caggaucauggugua

SEQ ID NO: 2867601 - RNA, 16 nt, Human
caggaucaugguguaa

SEQ ID NO: 2867602 - RNA, 17 nt, Human
caggaucaguuaacuau

SEQ ID NO: 2867603 - RNA, 18 nt, Human
caggaucaugguguaaua

SEQ ID NO: 2867604 - RNA, 19 nt, Human
caggaucaugguguaauaa

SEQ ID NO: 2867605 - RNA, 21 nt, Human
caggaucaugguguaauaaga

SEQ ID NO: 2867606 - RNA, 22 nt, Human
caggaucaugguguaauaagac

SEQ ID NO: 2867607 - RNA, 22 nt, Human
caggaucccaggggcccaaggc

SEQ ID NO: 2867608 - RNA, 23 nt, Human
caggaucgcaagagccauguaga

SEQ ID NO: 2867609 - RNA, 20 nt, Human
caggauccucuccuuugaaa

SEQ ID NO: 2867610 - RNA, 19 nt, Human
caggaucucagaucacugc

SEQ ID NO: 2867611 - RNA, 18 nt, Human
caggauaauaaaguguuu

SEQ ID NO: 2867612 - RNA, 21 nt, Human
caggaguuugagaccagccug

SEQ ID NO: 2867613 - RNA, 18 nt, Human
caggauaaacugaaaacu

SEQ ID NO: 2867614 - RNA, 13 nt, Human
caggauagacuuu

SEQ ID NO: 2867615 - RNA, 22 nt, Human
caggaguuugaggcugcagcga

SEQ ID NO: 2867616 - RNA, 21 nt, Human
caggaguuugaggcugcagcg

SEQ ID NO: 2867617 - RNA, 20 nt, Human
caggaguuugaggcugcagc

SEQ ID NO: 2867618 - RNA, 18 nt, Human
caggaguuugaggcugca

SEQ ID NO: 2867619 - RNA, 16 nt, Human
caggaguuggaagugu

SEQ ID NO: 2867620 - RNA, 19 nt, Human
caggaguucgaggcugcag

SEQ ID NO: 2867621 - RNA, 23 nt, Human
caggaguucgagaccagccuggc

SEQ ID NO: 2867622 - RNA, 23 nt, Human
caggaguucgagaccagccuggg

SEQ ID NO: 2867623 - RNA, 18 nt, Human
caggaguucgaggcugca

SEQ ID NO: 2867624 - RNA, 22 nt, Human
caggagugggaaaacacugcca

SEQ ID NO: 2867625 - RNA, 17 nt, Human
caggaguggugcagaca

SEQ ID NO: 2867626 - RNA, 20 nt, Human
caggaguggugcagacagaa

SEQ ID NO: 2867627 - RNA, 24 nt, Human
caggaguggugcagacagaagucu

SEQ ID NO: 2867628 - RNA, 21 nt, Human
caggaguucgagaccagccug

SEQ ID NO: 2867629 - RNA, 23 nt, Human
caggaguucaauaaaugucuguu

SEQ ID NO: 2867630 - RNA, 21 nt, Human
caggaguucaauaaaugucug

SEQ ID NO: 2867631 - RNA, 24 nt, Human
caggagucccaaggaaagccccag

SEQ ID NO: 2867632 - RNA, 12 nt, Human
caggagugagca

SEQ ID NO: 2867633 - RNA, 21 nt, Human
caggagucccaaggaaagccc

SEQ ID NO: 2867634 - RNA, 19 nt, Human
caggagucccaaggaaagc

SEQ ID NO: 2867635 - RNA, 19 nt, Human
caggaguccaagaccagac

SEQ ID NO: 2867636 - RNA, 20 nt, Human
caggaguccaagaccagacu

SEQ ID NO: 2867637 - RNA, 18 nt, Human
caggagucccaaggaaag

SEQ ID NO: 2867638 - RNA, 17 nt, Human
caggagucccaaggaaa

SEQ ID NO: 2867639 - RNA, 16 nt, Human
caggagucccaaggaa

SEQ ID NO: 2867640 - RNA, 15 nt, Human
caggagucccaagga

SEQ ID NO: 2867641 - RNA, 12 nt, Human
caggagccuggc

SEQ ID NO: 2867642 - RNA, 11 nt, Human
caggagccugg

SEQ ID NO: 2867643 - RNA, 15 nt, Human
caggagccugugccu

SEQ ID NO: 2867644 - RNA, 16 nt, Human
caggagccugugccuc

SEQ ID NO: 2867645 - RNA, 13 nt, Human
caggagcgcaaga

SEQ ID NO: 2867646 - RNA, 15 nt, Human
caggagcgcaagaua

SEQ ID NO: 2867647 - RNA, 16 nt, Human
caggagcgcaagauag

SEQ ID NO: 2867648 - RNA, 18 nt, Human
caggagccccgaggccuu

SEQ ID NO: 2867649 - RNA, 16 nt, Human
caggagccccgaggcc

SEQ ID NO: 2867650 - RNA, 15 nt, Human
caggagccccgaggc

SEQ ID NO: 2867651 - RNA, 15 nt, Human
caggagcagccucag

SEQ ID NO: 2867652 - RNA, 20 nt, Human
caggagcagccucagaacaa

SEQ ID NO: 2867653 - RNA, 23 nt, Human
caggagcagccucagaacaaagu

SEQ ID NO: 2867654 - RNA, 22 nt, Human
caggagccccgaggccuucucu

SEQ ID NO: 2867655 - RNA, 20 nt, Human
caggagccccgaggccuucu

SEQ ID NO: 2867656 - RNA, 23 nt, Human
caggagccccgaggccuucucug

SEQ ID NO: 2867657 - RNA, 12 nt, Human
caggagaguaga

SEQ ID NO: 2867658 - RNA, 23 nt, Human
caggagagagaaagccaggcagg

SEQ ID NO: 2867659 - RNA, 16 nt, Human
caggagauugagaagg

SEQ ID NO: 2867660 - RNA, 17 nt, Human
caggagauugagaagga

SEQ ID NO: 2867661 - RNA, 19 nt, Human
caggagauugagaaggaga

SEQ ID NO: 2867662 - RNA, 20 nt, Human
caggagauugagaaggagag

SEQ ID NO: 2867663 - RNA, 21 nt, Human
caggagauugagaaggagaga

SEQ ID NO: 2867664 - RNA, 22 nt, Human
caggagauugagaaggagagaa

SEQ ID NO: 2867665 - RNA, 23 nt, Human
caggagauugagaaggagagaaa

SEQ ID NO: 2867666 - RNA, 23 nt, Human
caggagacacugugcuauaaauc

SEQ ID NO: 2867667 - RNA, 12 nt, Human
caggagacaucc

SEQ ID NO: 2867668 - RNA, 14 nt, Human
caggagacaggaag

SEQ ID NO: 2867669 - RNA, 13 nt, Human
caggagacgacag

SEQ ID NO: 2867670 - RNA, 15 nt, Human
caggagacaggaagg

SEQ ID NO: 2867671 - RNA, 19 nt, Human
caggagagagaaagccagg

SEQ ID NO: 2867672 - RNA, 20 nt, Human
caggagagagaaagccaggc

SEQ ID NO: 2867673 - RNA, 12 nt, Human
caggagagagaa

SEQ ID NO: 2867674 - RNA, 13 nt, Human
caggagagagaaa

SEQ ID NO: 2867675 - RNA, 14 nt, Human
caggagagagaaag

SEQ ID NO: 2867676 - RNA, 18 nt, Human
caggagagagaaagccag

SEQ ID NO: 2867677 - RNA, 19 nt, Human
caggacuuugaggcaagug

SEQ ID NO: 2867678 - RNA, 11 nt, Human
caggagaacca

SEQ ID NO: 2867679 - RNA, 17 nt, Human
caggagaaccacuacau

SEQ ID NO: 2867680 - RNA, 13 nt, Human
caggacucacagg

SEQ ID NO: 2867681 - RNA, 22 nt, Human
caggacucacagguuggaagag

SEQ ID NO: 2867682 - RNA, 16 nt, Human
caggacucagaagccu

SEQ ID NO: 2867683 - RNA, 19 nt, Human
caggacucagaagccucug

SEQ ID NO: 2867684 - RNA, 18 nt, Human
caggacucagaagccucu

SEQ ID NO: 2867685 - RNA, 21 nt, Human
caggacucagaagccucuggg

SEQ ID NO: 2867686 - RNA, 20 nt, Human
caggacucagaagccucugg

SEQ ID NO: 2867687 - RNA, 14 nt, Human
caggacucagcucc

SEQ ID NO: 2867688 - RNA, 17 nt, Human
caggacucagcucccca

SEQ ID NO: 2867689 - RNA, 18 nt, Human
caggacucagcuccccag

SEQ ID NO: 2867690 - RNA, 21 nt, Human
caggacucccuccucaccucu

SEQ ID NO: 2867691 - RNA, 20 nt, Human
caggacucccuccucaccuc

SEQ ID NO: 2867692 - RNA, 19 nt, Human
caggacucccuccucaccu

SEQ ID NO: 2867693 - RNA, 17 nt, Human
caggacucccuccucac

SEQ ID NO: 2867694 - RNA, 16 nt, Human
caggacucccuccuca

SEQ ID NO: 2867695 - RNA, 15 nt, Human
caggacucccuccuc

SEQ ID NO: 2867696 - RNA, 14 nt, Human
caggacucccuccu

SEQ ID NO: 2867697 - RNA, 13 nt, Human
caggacucccucc

SEQ ID NO: 2867698 - RNA, 19 nt, Human
caggacucagcuccccaga

SEQ ID NO: 2867699 - RNA, 20 nt, Human
caggacucagcuccccagag

SEQ ID NO: 2867700 - RNA, 21 nt, Human
caggacucagcuccccagagu

SEQ ID NO: 2867701 - RNA, 14 nt, Human
caggacugagcccc

SEQ ID NO: 2867702 - RNA, 17 nt, Human
caggacugagccccgca

SEQ ID NO: 2867703 - RNA, 18 nt, Human
caggacugagccccgcag

SEQ ID NO: 2867704 - RNA, 20 nt, Human
caggacugagccccgcagac

SEQ ID NO: 2867705 - RNA, 19 nt, Human
caggacugcaacaggcuug

SEQ ID NO: 2867706 - RNA, 14 nt, Human
caggacugugacuc

SEQ ID NO: 2867707 - RNA, 23 nt, Human
caggacucccuccucaccucugg

SEQ ID NO: 2867708 - RNA, 16 nt, Human
caggacuccuccccac

SEQ ID NO: 2867709 - RNA, 22 nt, Human
caggacucccuccucaccucug

SEQ ID NO: 2867710 - RNA, 14 nt, Human
caggacucugaccc

SEQ ID NO: 2867711 - RNA, 12 nt, Human
caggacucugac

SEQ ID NO: 2867712 - RNA, 12 nt, Human
caggacucugcc

SEQ ID NO: 2867713 - RNA, 13 nt, Human
caggacucugccu

SEQ ID NO: 2867714 - RNA, 15 nt, Human
caggacucugccucc

SEQ ID NO: 2867715 - RNA, 16 nt, Human
caggacucugccuccu

SEQ ID NO: 2867716 - RNA, 23 nt, Human
cagugauguaccaugaaacaaag

SEQ ID NO: 2867717 - RNA, 17 nt, Human
cagugaugggagaguag

SEQ ID NO: 2867718 - RNA, 15 nt, Human
cagugcccuccagga

SEQ ID NO: 2867719 - RNA, 19 nt, Human
cagugcccucauuuuaugu

SEQ ID NO: 2867720 - RNA, 17 nt, Human
cagugcccucauuuuau

SEQ ID NO: 2867721 - RNA, 23 nt, Human
cagugagucgaggacagggaggu

SEQ ID NO: 2867722 - RNA, 22 nt, Human
cagugagucgaggacagggagg

SEQ ID NO: 2867723 - RNA, 20 nt, Human
cagugagucgaggacaggga

SEQ ID NO: 2867724 - RNA, 19 nt, Human
cagugagucgaggacaggg

SEQ ID NO: 2867725 - RNA, 14 nt, Human
cagugagugagccu

SEQ ID NO: 2867726 - RNA, 15 nt, Human
cagugagugagccug

SEQ ID NO: 2867727 - RNA, 16 nt, Human
cagugagugagccugg

SEQ ID NO: 2867728 - RNA, 17 nt, Human
cagugagugagccuggc

SEQ ID NO: 2867729 - RNA, 18 nt, Human
cagugagugagccuggcu

SEQ ID NO: 2867730 - RNA, 18 nt, Human
cagugagucucuggggca

SEQ ID NO: 2867731 - RNA, 20 nt, Human
cagugauauggcagaagaca

SEQ ID NO: 2867732 - RNA, 21 nt, Human
cagugauauggcagaagacac

SEQ ID NO: 2867733 - RNA, 22 nt, Human
cagugauauggcagaagacacc

SEQ ID NO: 2867734 - RNA, 23 nt, Human
cagugauauggcagaagacacca

SEQ ID NO: 2867735 - RNA, 19 nt, Human
cagugagugagccuggcuc

SEQ ID NO: 2867736 - RNA, 20 nt, Human
cagugagugagccuggcucu

SEQ ID NO: 2867737 - RNA, 21 nt, Human
cagugagugagccuggcucuu

SEQ ID NO: 2867738 - RNA, 15 nt, Human
cagugauauggcaga

SEQ ID NO: 2867739 - RNA, 18 nt, Human
cagugauauggcagaaga

SEQ ID NO: 2867740 - RNA, 21 nt, Human
cagugccuggauccccucugu

SEQ ID NO: 2867741 - RNA, 15 nt, Human
cagucuugcagcagg

SEQ ID NO: 2867742 - RNA, 19 nt, Human
cagucuugccuuacacaaa

SEQ ID NO: 2867743 - RNA, 16 nt, Human
cagucuuggcucacug

SEQ ID NO: 2867744 - RNA, 13 nt, Human
cagucuugugcuu

SEQ ID NO: 2867745 - RNA, 17 nt, Human
cagucuuuaaaggccca

SEQ ID NO: 2867746 - RNA, 18 nt, Human
cagucuuuaaaggcccag

SEQ ID NO: 2867747 - RNA, 19 nt, Human
cagucuuuaaaggcccagc

SEQ ID NO: 2867748 - RNA, 20 nt, Human
cagucuuuaaaggcccagcc

SEQ ID NO: 2867749 - RNA, 21 nt, Human
cagucuuuaaaggcccagccc

SEQ ID NO: 2867750 - RNA, 22 nt, Human
cagucuuuaaaggcccagcccc

SEQ ID NO: 2867751 - RNA, 23 nt, Human
cagucuuuaaaggcccagccccu

SEQ ID NO: 2867752 - RNA, 14 nt, Human
cagucuugcagcag

SEQ ID NO: 2867753 - RNA, 12 nt, Human
cagucuuuuucu

SEQ ID NO: 2867754 - RNA, 14 nt, Human
cagucuuuuucugu

SEQ ID NO: 2867755 - RNA, 16 nt, Human
cagucuuuuucuguug

SEQ ID NO: 2867756 - RNA, 18 nt, Human
cagucuuuuucuguugua

SEQ ID NO: 2867757 - RNA, 19 nt, Human
cagucuuuuucuguuguaa

SEQ ID NO: 2867758 - RNA, 20 nt, Human
cagucuuuuucuguuguaac

SEQ ID NO: 2867759 - RNA, 21 nt, Human
cagucuuuuucuguuguaacu

SEQ ID NO: 2867760 - RNA, 18 nt, Human
cagucuuucaugugugcc

SEQ ID NO: 2867761 - RNA, 19 nt, Human
cagucuggaaugcaguggu

SEQ ID NO: 2867762 - RNA, 12 nt, Human
caguccuuccac

SEQ ID NO: 2867763 - RNA, 15 nt, Human
caguccuuaaaaauc

SEQ ID NO: 2867764 - RNA, 16 nt, Human
caguccuuaaaaauca

SEQ ID NO: 2867765 - RNA, 11 nt, Human
cagucugucuu

SEQ ID NO: 2867766 - RNA, 14 nt, Human
cagucugucuucug

SEQ ID NO: 2867767 - RNA, 17 nt, Human
cagucugucuucuguau

SEQ ID NO: 2867768 - RNA, 21 nt, Human
cagucugucuucuguauauaa

SEQ ID NO: 2867769 - RNA, 22 nt, Human
cagucugucuucuguauauaaa

SEQ ID NO: 2867770 - RNA, 23 nt, Human
cagucugucuucuguauauaaau

SEQ ID NO: 2867771 - RNA, 23 nt, Human
cagucuugaauuucuaaaaaaca

SEQ ID NO: 2867772 - RNA, 22 nt, Human
cagucuugaauuucuaaaaaac

SEQ ID NO: 2867773 - RNA, 15 nt, Human
cagucuugaauuucu

SEQ ID NO: 2867774 - RNA, 21 nt, Human
caguccucucccaaguccaca

SEQ ID NO: 2867775 - RNA, 23 nt, Human
caguccuccccucacagccucug

SEQ ID NO: 2867776 - RNA, 20 nt, Human
caguccuccgguugcauacu

SEQ ID NO: 2867777 - RNA, 22 nt, Human
caguccuccccucacagccucu

SEQ ID NO: 2867778 - RNA, 12 nt, Human
caguccuccccu

SEQ ID NO: 2867779 - RNA, 13 nt, Human
caguccuccccuc

SEQ ID NO: 2867780 - RNA, 14 nt, Human
caguccuccccuca

SEQ ID NO: 2867781 - RNA, 15 nt, Human
caguccuccccucac

SEQ ID NO: 2867782 - RNA, 18 nt, Human
caguccuccccucacagc

SEQ ID NO: 2867783 - RNA, 19 nt, Human
caguccuccccucacagcc

SEQ ID NO: 2867784 - RNA, 20 nt, Human
caguccuccccucacagccu

SEQ ID NO: 2867785 - RNA, 21 nt, Human
caguccuccccucacagccuc

SEQ ID NO: 2867786 - RNA, 21 nt, Human
caguccugccuggccaggcag

SEQ ID NO: 2867787 - RNA, 13 nt, Human
caguccugcucca

SEQ ID NO: 2867788 - RNA, 14 nt, Human
caguccugcuccag

SEQ ID NO: 2867789 - RNA, 15 nt, Human
caguccugcuccaga

SEQ ID NO: 2867790 - RNA, 16 nt, Human
caguccugcuccagaa

SEQ ID NO: 2867791 - RNA, 17 nt, Human
caguccugccuggccag

SEQ ID NO: 2867792 - RNA, 16 nt, Human
caguccugccuggcca

SEQ ID NO: 2867793 - RNA, 18 nt, Human
caguccugccuggccagg

SEQ ID NO: 2867794 - RNA, 23 nt, Human
caguccuggagcaaucacagaug

SEQ ID NO: 2867795 - RNA, 15 nt, Human
caguccugccuggcc

SEQ ID NO: 2867796 - RNA, 14 nt, Human
caguccugccuggc

SEQ ID NO: 2867797 - RNA, 13 nt, Human
caguccugccugg

SEQ ID NO: 2867798 - RNA, 12 nt, Human
caguccugccug

SEQ ID NO: 2867799 - RNA, 19 nt, Human
caguccugccucagccucc

SEQ ID NO: 2867800 - RNA, 17 nt, Human
caguccugccucagccu

SEQ ID NO: 2867801 - RNA, 23 nt, Human
caguccugggagaaccucaggcu

SEQ ID NO: 2867802 - RNA, 14 nt, Human
caguccuguaguuu

SEQ ID NO: 2867803 - RNA, 16 nt, Human
caguccuguaguuuua

SEQ ID NO: 2867804 - RNA, 17 nt, Human
caguccuguaguuuuau

SEQ ID NO: 2867805 - RNA, 18 nt, Human
caguccuguaguuuuauu

SEQ ID NO: 2867806 - RNA, 22 nt, Human
caguccugggagaaccucaggc

SEQ ID NO: 2867807 - RNA, 21 nt, Human
caguccugggagaaccucagg

SEQ ID NO: 2867808 - RNA, 13 nt, Human
caguccugggaga

SEQ ID NO: 2867809 - RNA, 12 nt, Human
caguccugggag

SEQ ID NO: 2867810 - RNA, 18 nt, Human
cagucuggaaugcagugg

SEQ ID NO: 2867811 - RNA, 18 nt, Human
cagugagauuacagagga

SEQ ID NO: 2867812 - RNA, 19 nt, Human
cagugagauuacagaggaa

SEQ ID NO: 2867813 - RNA, 20 nt, Human
cagugagauuacagaggaag

SEQ ID NO: 2867814 - RNA, 14 nt, Human
cagugagaugaggg

SEQ ID NO: 2867815 - RNA, 20 nt, Human
cagugagaugagggaugggc

SEQ ID NO: 2867816 - RNA, 21 nt, Human
cagugagaaaaagcuccuguc

SEQ ID NO: 2867817 - RNA, 22 nt, Human
cagugagaaaaagcuccugucc

SEQ ID NO: 2867818 - RNA, 14 nt, Human
cagugagaaaaagc

SEQ ID NO: 2867819 - RNA, 19 nt, Human
cagugagaaaaagcuccug

SEQ ID NO: 2867820 - RNA, 20 nt, Human
cagugagaaaaagcuccugu

SEQ ID NO: 2867821 - RNA, 22 nt, Human
cagugacgugcaccuguacuca

SEQ ID NO: 2867822 - RNA, 18 nt, Human
cagugacgugcaccugua

SEQ ID NO: 2867823 - RNA, 17 nt, Human
cagugacgugcaccugu

SEQ ID NO: 2867824 - RNA, 24 nt, Human
cagugacccuucccaaucagcacu

SEQ ID NO: 2867825 - RNA, 19 nt, Human
cagugaccugcuggguaaa

SEQ ID NO: 2867826 - RNA, 16 nt, Human
cagugacgugcaccug

SEQ ID NO: 2867827 - RNA, 12 nt, Human
cagugaauucuu

SEQ ID NO: 2867828 - RNA, 14 nt, Human
cagugacaaaccau

SEQ ID NO: 2867829 - RNA, 18 nt, Human
cagugagucgaggacagg

SEQ ID NO: 2867830 - RNA, 17 nt, Human
cagugagucgaggacag

SEQ ID NO: 2867831 - RNA, 23 nt, Human
cagugagggguauaucugggcug

SEQ ID NO: 2867832 - RNA, 12 nt, Human
cagugagccuga

SEQ ID NO: 2867833 - RNA, 24 nt, Human
cagugcgcgugcacguggagagcu

SEQ ID NO: 2867834 - RNA, 16 nt, Human
cagugcuagugagcug

SEQ ID NO: 2867835 - RNA, 19 nt, Human
cagugcuagugagcugggc

SEQ ID NO: 2867836 - RNA, 21 nt, Human
cagugcuagugagcugggcau

SEQ ID NO: 2867837 - RNA, 15 nt, Human
caguaugauuuauaa

SEQ ID NO: 2867838 - RNA, 16 nt, Human
caguaugcugccccug

SEQ ID NO: 2867839 - RNA, 17 nt, Human
caguaugcuugcucuaa

SEQ ID NO: 2867840 - RNA, 23 nt, Human
caguaucuauauauguguaugua

SEQ ID NO: 2867841 - RNA, 18 nt, Human
caguaucuuugcacucca

SEQ ID NO: 2867842 - RNA, 18 nt, Human
caguaucuauauaugugu

SEQ ID NO: 2867843 - RNA, 16 nt, Human
caguaucuauauaugu

SEQ ID NO: 2867844 - RNA, 19 nt, Human
caguaucuauauaugugua

SEQ ID NO: 2867845 - RNA, 20 nt, Human
caguaucuauauauguguau

SEQ ID NO: 2867846 - RNA, 21 nt, Human
caguaucuauauauguguaug

SEQ ID NO: 2867847 - RNA, 22 nt, Human
caguaucuauauauguguaugu

SEQ ID NO: 2867848 - RNA, 15 nt, Human
caguaucccacaucc

SEQ ID NO: 2867849 - RNA, 14 nt, Human
caguaucccacauc

SEQ ID NO: 2867850 - RNA, 13 nt, Human
caguaucccacau

SEQ ID NO: 2867851 - RNA, 12 nt, Human
caguaucccaca

SEQ ID NO: 2867852 - RNA, 16 nt, Human
caguaucccacaucca

SEQ ID NO: 2867853 - RNA, 16 nt, Human
caguauccacuuugca

SEQ ID NO: 2867854 - RNA, 24 nt, Human
caguauccaugcucuugaccuugu

SEQ ID NO: 2867855 - RNA, 14 nt, Human
caguauauuuaaac

SEQ ID NO: 2867856 - RNA, 15 nt, Human
caguauauuuaaacu

SEQ ID NO: 2867857 - RNA, 16 nt, Human
caguauauuuaaacuc

SEQ ID NO: 2867858 - RNA, 23 nt, Human
caguagucuugaugaccaaaguc

SEQ ID NO: 2867859 - RNA, 22 nt, Human
caguaggggcuuauaauaaagg

SEQ ID NO: 2867860 - RNA, 22 nt, Human
caguaggugacacuauaguuua

SEQ ID NO: 2867861 - RNA, 17 nt, Human
caguaggauaagccacu

SEQ ID NO: 2867862 - RNA, 13 nt, Human
caguaggccggug

SEQ ID NO: 2867863 - RNA, 19 nt, Human
caguaggggcuuauaauaa

SEQ ID NO: 2867864 - RNA, 12 nt, Human
caguaggggagg

SEQ ID NO: 2867865 - RNA, 15 nt, Human
caguagagccagcuu

SEQ ID NO: 2867866 - RNA, 14 nt, Human
caguagagccagcu

SEQ ID NO: 2867867 - RNA, 13 nt, Human
caguagagccagc

SEQ ID NO: 2867868 - RNA, 12 nt, Human
caguagagccag

SEQ ID NO: 2867869 - RNA, 17 nt, Human
caguagagccagcuugg

SEQ ID NO: 2867870 - RNA, 16 nt, Human
caguagagccagcuug

SEQ ID NO: 2867871 - RNA, 23 nt, Human
caguagaggcuauggacagggca

SEQ ID NO: 2867872 - RNA, 18 nt, Human
caguagaaauaauaugca

SEQ ID NO: 2867873 - RNA, 19 nt, Human
caguagaaauaauaugcau

SEQ ID NO: 2867874 - RNA, 12 nt, Human
caguagacaagc

SEQ ID NO: 2867875 - RNA, 12 nt, Human
caguagacauuu

SEQ ID NO: 2867876 - RNA, 15 nt, Human
caguagacauuuuaa

SEQ ID NO: 2867877 - RNA, 16 nt, Human
caguagacauuuuaac

SEQ ID NO: 2867878 - RNA, 19 nt, Human
caguagacauuuuaacaag

SEQ ID NO: 2867879 - RNA, 20 nt, Human
caguagacauuuuaacaaga

SEQ ID NO: 2867880 - RNA, 21 nt, Human
caguagacauuuuaacaagaa

SEQ ID NO: 2867881 - RNA, 22 nt, Human
caguagacauuuuaacaagaag

SEQ ID NO: 2867882 - RNA, 15 nt, Human
cagucagcucuucau

SEQ ID NO: 2867883 - RNA, 18 nt, Human
cagucagcucuucaucug

SEQ ID NO: 2867884 - RNA, 22 nt, Human
cagucagcucuucaucugccca

SEQ ID NO: 2867885 - RNA, 13 nt, Human
cagucaucaucag

SEQ ID NO: 2867886 - RNA, 14 nt, Human
cagucaucaucagg

SEQ ID NO: 2867887 - RNA, 15 nt, Human
cagucaucaucaggg

SEQ ID NO: 2867888 - RNA, 16 nt, Human
cagucaucaucagggc

SEQ ID NO: 2867889 - RNA, 17 nt, Human
cagucaucaucagggcc

SEQ ID NO: 2867890 - RNA, 18 nt, Human
cagucaucaucagggccu

SEQ ID NO: 2867891 - RNA, 19 nt, Human
cagucaucaucagggccug

SEQ ID NO: 2867892 - RNA, 20 nt, Human
cagucaucaucagggccugg

SEQ ID NO: 2867893 - RNA, 22 nt, Human
cagucaucaucagggccugggg

SEQ ID NO: 2867894 - RNA, 23 nt, Human
cagucaucaucagggccuggggc

SEQ ID NO: 2867895 - RNA, 13 nt, Human
cagucaugcauaa

SEQ ID NO: 2867896 - RNA, 14 nt, Human
cagucaugcauaaa

SEQ ID NO: 2867897 - RNA, 16 nt, Human
cagucaugcauaaaua

SEQ ID NO: 2867898 - RNA, 17 nt, Human
cagucaugcauaaauau

SEQ ID NO: 2867899 - RNA, 18 nt, Human
cagucaugcauaaauaug

SEQ ID NO: 2867900 - RNA, 17 nt, Human
cagucagugcaaauguc

SEQ ID NO: 2867901 - RNA, 18 nt, Human
cagucagugcaaauguca

SEQ ID NO: 2867902 - RNA, 16 nt, Human
caguauuacuucugcu

SEQ ID NO: 2867903 - RNA, 16 nt, Human
caguaugucccauagg

SEQ ID NO: 2867904 - RNA, 15 nt, Human
caguauguuuuacac

SEQ ID NO: 2867905 - RNA, 16 nt, Human
caguauguuuuacacu

SEQ ID NO: 2867906 - RNA, 17 nt, Human
caguauguuuuacacug

SEQ ID NO: 2867907 - RNA, 18 nt, Human
caguauguuuuacacugu

SEQ ID NO: 2867908 - RNA, 20 nt, Human
caguauguuuuacacuguac

SEQ ID NO: 2867909 - RNA, 21 nt, Human
caguauggucuaacacuggca

SEQ ID NO: 2867910 - RNA, 15 nt, Human
caguauguauucuuu

SEQ ID NO: 2867911 - RNA, 17 nt, Human
caguauguauucuuuug

SEQ ID NO: 2867912 - RNA, 18 nt, Human
caguauuacuucugcuac

SEQ ID NO: 2867913 - RNA, 12 nt, Human
cagucacugcca

SEQ ID NO: 2867914 - RNA, 18 nt, Human
cagucacugccacuuugc

SEQ ID NO: 2867915 - RNA, 22 nt, Human
cagucacugccacuuugcacau

SEQ ID NO: 2867916 - RNA, 19 nt, Human
caguauuaauacuaaaaua

SEQ ID NO: 2867917 - RNA, 20 nt, Human
caguauuaauacuaaaauau

SEQ ID NO: 2867918 - RNA, 22 nt, Human
caguauuaauacuaaaauaugu

SEQ ID NO: 2867919 - RNA, 21 nt, Human
cagucacuucggccagagcug

SEQ ID NO: 2867920 - RNA, 22 nt, Human
cagucacuucggccagagcuga

SEQ ID NO: 2867921 - RNA, 23 nt, Human
cagucacuucggccagagcugaa

SEQ ID NO: 2867922 - RNA, 16 nt, Human
cagucagaaaacuuua

SEQ ID NO: 2867923 - RNA, 19 nt, Human
cagucagaaaacuuuaaaa

SEQ ID NO: 2867924 - RNA, 16 nt, Human
caguccauagcagaga

SEQ ID NO: 2867925 - RNA, 17 nt, Human
caguccagccuggagau

SEQ ID NO: 2867926 - RNA, 15 nt, Human
caguccaggaacaag

SEQ ID NO: 2867927 - RNA, 19 nt, Human
cagucccaucagagagcga

SEQ ID NO: 2867928 - RNA, 16 nt, Human
caguccagccuggaga

SEQ ID NO: 2867929 - RNA, 17 nt, Human
caguccauuuauauaug

SEQ ID NO: 2867930 - RNA, 18 nt, Human
caguccauuuauauauga

SEQ ID NO: 2867931 - RNA, 16 nt, Human
cagucccaaauccuuc

SEQ ID NO: 2867932 - RNA, 18 nt, Human
cagucccaaauccuuccc

SEQ ID NO: 2867933 - RNA, 19 nt, Human
cagucccaaauccuuccca

SEQ ID NO: 2867934 - RNA, 12 nt, Human
caguccaugcau

SEQ ID NO: 2867935 - RNA, 19 nt, Human
caguccaugcaugacagcc

SEQ ID NO: 2867936 - RNA, 23 nt, Human
caguccaugcaugacagccucua

SEQ ID NO: 2867937 - RNA, 16 nt, Human
cagucccaaugcacau

SEQ ID NO: 2867938 - RNA, 13 nt, Human
cagucccacugug

SEQ ID NO: 2867939 - RNA, 14 nt, Human
cagucccacugugc

SEQ ID NO: 2867940 - RNA, 15 nt, Human
cagucccacugugca

SEQ ID NO: 2867941 - RNA, 23 nt, Human
cagucccacugugcaggugcuau

SEQ ID NO: 2867942 - RNA, 22 nt, Human
cagucauuagacuccuccucca

SEQ ID NO: 2867943 - RNA, 24 nt, Human
cagucauggcaccaaagccaccag

SEQ ID NO: 2867944 - RNA, 18 nt, Human
cagucauuagacuccucc

SEQ ID NO: 2867945 - RNA, 22 nt, Human
cagucauguuuuaaauguacag

SEQ ID NO: 2867946 - RNA, 23 nt, Human
cagucauguuuuaaauguacagu

SEQ ID NO: 2867947 - RNA, 19 nt, Human
cagucaugcauaaauaugc

SEQ ID NO: 2867948 - RNA, 20 nt, Human
cagucaugcauaaauaugca

SEQ ID NO: 2867949 - RNA, 23 nt, Human
cagucaugcauaaauaugcagug

SEQ ID NO: 2867950 - RNA, 24 nt, Human
caguccaaggaaaccacagcugcu

SEQ ID NO: 2867951 - RNA, 13 nt, Human
caguccagccugg

SEQ ID NO: 2867952 - RNA, 14 nt, Human
caguccagccugga

SEQ ID NO: 2867953 - RNA, 15 nt, Human
caguccagccuggag

SEQ ID NO: 2867954 - RNA, 19 nt, Human
caguccaaggaaaccacag

SEQ ID NO: 2867955 - RNA, 22 nt, Human
caguccaaggaaaccacagcug

SEQ ID NO: 2867956 - RNA, 23 nt, Human
caguccaaggaaaccacagcugc

SEQ ID NO: 2867957 - RNA, 23 nt, Human
caguccaaauguccuccagaagc

SEQ ID NO: 2867958 - RNA, 22 nt, Human
caguccaaauguccuccagaag

SEQ ID NO: 2867959 - RNA, 17 nt, Human
caguccaaauguccucc

SEQ ID NO: 2867960 - RNA, 21 nt, Human
caguccaaauguccuccagaa

SEQ ID NO: 2867961 - RNA, 18 nt, Human
caguccaaauguccucca

SEQ ID NO: 2867962 - RNA, 14 nt, Human
cagucccuaaagaa

SEQ ID NO: 2867963 - RNA, 15 nt, Human
cagucccuauguauu

SEQ ID NO: 2867964 - RNA, 23 nt, Human
cagucccugagaccauuuaacau

SEQ ID NO: 2867965 - RNA, 19 nt, Human
caguccguguggauccaau

SEQ ID NO: 2867966 - RNA, 20 nt, Human
caguccguguggauccaaug

SEQ ID NO: 2867967 - RNA, 19 nt, Human
caguccccagcccuucaca

SEQ ID NO: 2867968 - RNA, 19 nt, Human
cagucccccuauccuuggc

SEQ ID NO: 2867969 - RNA, 21 nt, Human
cagucccccuauccuuggcac

SEQ ID NO: 2867970 - RNA, 22 nt, Human
cagucccccuauccuuggcacc

SEQ ID NO: 2867971 - RNA, 23 nt, Human
cagucccccuauccuuggcacca

SEQ ID NO: 2867972 - RNA, 23 nt, Human
caguccccgugaaggagagcccu

SEQ ID NO: 2867973 - RNA, 23 nt, Human
caguccccguggccaucccugug

SEQ ID NO: 2867974 - RNA, 16 nt, Human
cagucccccugcccca

SEQ ID NO: 2867975 - RNA, 17 nt, Human
cagucccccugccccag

SEQ ID NO: 2867976 - RNA, 15 nt, Human
cagggucucacucug

SEQ ID NO: 2867977 - RNA, 23 nt, Human
cagggucucacuauguugcccag

SEQ ID NO: 2867978 - RNA, 22 nt, Human
cagggucucacuauguugccca

SEQ ID NO: 2867979 - RNA, 21 nt, Human
cagggucucacuauguugccc

SEQ ID NO: 2867980 - RNA, 16 nt, Human
cagggucucacucugu

SEQ ID NO: 2867981 - RNA, 16 nt, Human
caggguuuugccaugu

SEQ ID NO: 2867982 - RNA, 13 nt, Human
caggguuuuuacc

SEQ ID NO: 2867983 - RNA, 19 nt, Human
caggguuuuuaccugucac

SEQ ID NO: 2867984 - RNA, 17 nt, Human
cagguaacaggcagaua

SEQ ID NO: 2867985 - RNA, 16 nt, Human
cagguaacaggcagau

SEQ ID NO: 2867986 - RNA, 15 nt, Human
cagguaacaggcaga

SEQ ID NO: 2867987 - RNA, 14 nt, Human
cagguaacaggcag

SEQ ID NO: 2867988 - RNA, 22 nt, Human
caggguccacaggaagugaaga

SEQ ID NO: 2867989 - RNA, 12 nt, Human
cagggucccugg

SEQ ID NO: 2867990 - RNA, 16 nt, Human
caggguauugcuugcc

SEQ ID NO: 2867991 - RNA, 18 nt, Human
caggguauugcuugccac

SEQ ID NO: 2867992 - RNA, 19 nt, Human
caggguauugcuugccacu

SEQ ID NO: 2867993 - RNA, 20 nt, Human
cagggguuauguggaagugu

SEQ ID NO: 2867994 - RNA, 21 nt, Human
caggguaacugugcugaaugc

SEQ ID NO: 2867995 - RNA, 21 nt, Human
caggggguggacaaacuggag

SEQ ID NO: 2867996 - RNA, 20 nt, Human
caggggucccagccaccccg

SEQ ID NO: 2867997 - RNA, 18 nt, Human
caggggucccagccaccc

SEQ ID NO: 2867998 - RNA, 16 nt, Human
cagggggugugucugc

SEQ ID NO: 2867999 - RNA, 16 nt, Human
caggggucacugaggc

SEQ ID NO: 2868000 - RNA, 17 nt, Human
caggggucacugaggcc

SEQ ID NO: 2868001 - RNA, 23 nt, Human
caggggucacugaggccugagac

SEQ ID NO: 2868002 - RNA, 13 nt, Human
caggggugacaca

SEQ ID NO: 2868003 - RNA, 15 nt, Human
caggggugacacaga

SEQ ID NO: 2868004 - RNA, 16 nt, Human
caggggugacacagac

SEQ ID NO: 2868005 - RNA, 17 nt, Human
caggggugacacagacu

SEQ ID NO: 2868006 - RNA, 18 nt, Human
caggggugacacagacuc

SEQ ID NO: 2868007 - RNA, 19 nt, Human
caggggugacacagacuca

SEQ ID NO: 2868008 - RNA, 23 nt, Human
caggucuugaacuccuggccuca

SEQ ID NO: 2868009 - RNA, 22 nt, Human
caggucuugaacuccuggccuc

SEQ ID NO: 2868010 - RNA, 21 nt, Human
caggucuugaacuccuggccu

SEQ ID NO: 2868011 - RNA, 20 nt, Human
caggucuugaacuccuggcc

SEQ ID NO: 2868012 - RNA, 19 nt, Human
caggucuugaacuccuggc

SEQ ID NO: 2868013 - RNA, 18 nt, Human
caggucuugaacuccugg

SEQ ID NO: 2868014 - RNA, 19 nt, Human
caggucucccacgugggag

SEQ ID NO: 2868015 - RNA, 20 nt, Human
caggucucccacgugggaga

SEQ ID NO: 2868016 - RNA, 12 nt, Human
caggucucccac

SEQ ID NO: 2868017 - RNA, 14 nt, Human
caggucucacgggc

SEQ ID NO: 2868018 - RNA, 13 nt, Human
caggucucccacg

SEQ ID NO: 2868019 - RNA, 22 nt, Human
caggucucccacgugggagaca

SEQ ID NO: 2868020 - RNA, 12 nt, Human
caggucuagacu

SEQ ID NO: 2868021 - RNA, 16 nt, Human
caggucgggcgcagga

SEQ ID NO: 2868022 - RNA, 20 nt, Human
cagguccucagagaauuucu

SEQ ID NO: 2868023 - RNA, 15 nt, Human
cagguccucagagaa

SEQ ID NO: 2868024 - RNA, 16 nt, Human
caggucccuccccuuc

SEQ ID NO: 2868025 - RNA, 17 nt, Human
caggucccaccuccagc

SEQ ID NO: 2868026 - RNA, 18 nt, Human
caggucccaccuccagcc

SEQ ID NO: 2868027 - RNA, 19 nt, Human
caggucccaccuccagccc

SEQ ID NO: 2868028 - RNA, 20 nt, Human
caggucccaccuccagcccg

SEQ ID NO: 2868029 - RNA, 23 nt, Human
caggucccaccuccagcccggga

SEQ ID NO: 2868030 - RNA, 14 nt, Human
caggucccccugca

SEQ ID NO: 2868031 - RNA, 15 nt, Human
caggucccccugcag

SEQ ID NO: 2868032 - RNA, 16 nt, Human
caggucccccugcagc

SEQ ID NO: 2868033 - RNA, 17 nt, Human
caggucccccugcagcu

SEQ ID NO: 2868034 - RNA, 18 nt, Human
caggucccccugcagcua

SEQ ID NO: 2868035 - RNA, 12 nt, Human
cagguccccuca

SEQ ID NO: 2868036 - RNA, 15 nt, Human
caggugagcccaugg

SEQ ID NO: 2868037 - RNA, 17 nt, Human
caggugagcccauggcc

SEQ ID NO: 2868038 - RNA, 14 nt, Human
caggugacauguga

SEQ ID NO: 2868039 - RNA, 16 nt, Human
caggugacaugugaaa

SEQ ID NO: 2868040 - RNA, 17 nt, Human
caggugacaugugaaac

SEQ ID NO: 2868041 - RNA, 18 nt, Human
caggugacaugugaaacc

SEQ ID NO: 2868042 - RNA, 21 nt, Human
caggugacaugugaaaccuuu

SEQ ID NO: 2868043 - RNA, 12 nt, Human
caggugacaugu

SEQ ID NO: 2868044 - RNA, 20 nt, Human
caggugaagcaccaagcuca

SEQ ID NO: 2868045 - RNA, 13 nt, Human
caggugaaaaugu

SEQ ID NO: 2868046 - RNA, 17 nt, Human
caggugaaaauguucau

SEQ ID NO: 2868047 - RNA, 20 nt, Human
caggucuucaucgaaucuac

SEQ ID NO: 2868048 - RNA, 16 nt, Human
cagguggaaggcagac

SEQ ID NO: 2868049 - RNA, 18 nt, Human
cagguggaaggcagacag

SEQ ID NO: 2868050 - RNA, 19 nt, Human
cagguggaaggcagacagc

SEQ ID NO: 2868051 - RNA, 20 nt, Human
caggugagcccauggcccuc

SEQ ID NO: 2868052 - RNA, 15 nt, Human
cagguggccacucca

SEQ ID NO: 2868053 - RNA, 22 nt, Human
cagguggcucugaggugccugu

SEQ ID NO: 2868054 - RNA, 16 nt, Human
cagguggccacuccag

SEQ ID NO: 2868055 - RNA, 19 nt, Human
cagguggccacuccagacc

SEQ ID NO: 2868056 - RNA, 21 nt, Human
cagguggccacuccagacccc

SEQ ID NO: 2868057 - RNA, 20 nt, Human
caggucaggaguucgagacc

SEQ ID NO: 2868058 - RNA, 17 nt, Human
caggucaggggugacac

SEQ ID NO: 2868059 - RNA, 18 nt, Human
caggucaggggugacaca

SEQ ID NO: 2868060 - RNA, 20 nt, Human
caggucaggggugacacaga

SEQ ID NO: 2868061 - RNA, 21 nt, Human
caggucaggggugacacagac

SEQ ID NO: 2868062 - RNA, 23 nt, Human
caggucaggggugacacagacuc

SEQ ID NO: 2868063 - RNA, 11 nt, Human
cagguauuuug

SEQ ID NO: 2868064 - RNA, 20 nt, Human
cagguauuuuguuucuuuua

SEQ ID NO: 2868065 - RNA, 12 nt, Human
caggucaacaga

SEQ ID NO: 2868066 - RNA, 13 nt, Human
caggucaacagaa

SEQ ID NO: 2868067 - RNA, 14 nt, Human
caggucaacagaau

SEQ ID NO: 2868068 - RNA, 15 nt, Human
caggucaacagaaug

SEQ ID NO: 2868069 - RNA, 16 nt, Human
caggucaacagaauga

SEQ ID NO: 2868070 - RNA, 17 nt, Human
caggucaacagaaugaa

SEQ ID NO: 2868071 - RNA, 18 nt, Human
caggucaacagaaugaaa

SEQ ID NO: 2868072 - RNA, 19 nt, Human
caggucaacagaaugaaaa

SEQ ID NO: 2868073 - RNA, 21 nt, Human
caggucaacagaaugaaaaau

SEQ ID NO: 2868074 - RNA, 22 nt, Human
caggucaacagaaugaaaaaug

SEQ ID NO: 2868075 - RNA, 23 nt, Human
caggucaacagaaugaaaaauga

SEQ ID NO: 2868076 - RNA, 16 nt, Human
cagguauguugccuuu

SEQ ID NO: 2868077 - RNA, 20 nt, Human
cagguauguugccuuuaugg

SEQ ID NO: 2868078 - RNA, 17 nt, Human
cagguauuaaucuugga

SEQ ID NO: 2868079 - RNA, 18 nt, Human
cagguauuauuaucuuua

SEQ ID NO: 2868080 - RNA, 23 nt, Human
cagguauggaaggguuuguggcu

SEQ ID NO: 2868081 - RNA, 14 nt, Human
cagguauggcucug

SEQ ID NO: 2868082 - RNA, 16 nt, Human
cagguauggcucugca

SEQ ID NO: 2868083 - RNA, 14 nt, Human
cagguauguugccu

SEQ ID NO: 2868084 - RNA, 15 nt, Human
cagguauguugccuu

SEQ ID NO: 2868085 - RNA, 21 nt, Human
cagguaacaggcagauacagg

SEQ ID NO: 2868086 - RNA, 20 nt, Human
cagguaacaggcagauacag

SEQ ID NO: 2868087 - RNA, 20 nt, Human
cagguaaucgaccugccucg

SEQ ID NO: 2868088 - RNA, 19 nt, Human
cagguaaucgaccugccuc

SEQ ID NO: 2868089 - RNA, 18 nt, Human
cagguaaucgaccugccu

SEQ ID NO: 2868090 - RNA, 17 nt, Human
cagguaaucgaccugcc

SEQ ID NO: 2868091 - RNA, 22 nt, Human
cagguaccuugaccuuuguaca

SEQ ID NO: 2868092 - RNA, 23 nt, Human
cagguaccuugaccuuuguacag

SEQ ID NO: 2868093 - RNA, 14 nt, Human
cagguacgcacaga

SEQ ID NO: 2868094 - RNA, 15 nt, Human
cagguacgcacagac

SEQ ID NO: 2868095 - RNA, 16 nt, Human
cagguacgcacagaca

SEQ ID NO: 2868096 - RNA, 17 nt, Human
cagguacgcacagacag

SEQ ID NO: 2868097 - RNA, 18 nt, Human
cagguacgcacagacagg

SEQ ID NO: 2868098 - RNA, 22 nt, Human
cagguacgcacagacagguuuu

SEQ ID NO: 2868099 - RNA, 17 nt, Human
cagguaaauuaagacau

SEQ ID NO: 2868100 - RNA, 22 nt, Human
cagguaguacuaagaguaugug

SEQ ID NO: 2868101 - RNA, 18 nt, Human
cagggucauguuugcagg

SEQ ID NO: 2868102 - RNA, 22 nt, Human
cagguagaagguugacacaguu

SEQ ID NO: 2868103 - RNA, 12 nt, Human
cagguagccagg

SEQ ID NO: 2868104 - RNA, 19 nt, Human
cagguagcugggauuacag

SEQ ID NO: 2868105 - RNA, 14 nt, Human
caguacccucucag

SEQ ID NO: 2868106 - RNA, 15 nt, Human
caguacccucucagc

SEQ ID NO: 2868107 - RNA, 16 nt, Human
caguacccucucagcu

SEQ ID NO: 2868108 - RNA, 19 nt, Human
caguacccucucagcucca

SEQ ID NO: 2868109 - RNA, 20 nt, Human
caguacccucucagcuccag

SEQ ID NO: 2868110 - RNA, 22 nt, Human
caguacccucucagcuccaggu

SEQ ID NO: 2868111 - RNA, 24 nt, Human
caguacccucucagcuccaggugg

SEQ ID NO: 2868112 - RNA, 14 nt, Human
caguacaugggaaa

SEQ ID NO: 2868113 - RNA, 15 nt, Human
caguacaugggaaag

SEQ ID NO: 2868114 - RNA, 20 nt, Human
caguaccuccugucucuggc

SEQ ID NO: 2868115 - RNA, 12 nt, Human
caguaccuccug

SEQ ID NO: 2868116 - RNA, 15 nt, Human
caguacuucagcaag

SEQ ID NO: 2868117 - RNA, 16 nt, Human
caguacuucagcaaga

SEQ ID NO: 2868118 - RNA, 18 nt, Human
caguacuucagcaagaga

SEQ ID NO: 2868119 - RNA, 19 nt, Human
caguacuucagcaagagag

SEQ ID NO: 2868120 - RNA, 20 nt, Human
caguacuucagcaagagaga

SEQ ID NO: 2868121 - RNA, 24 nt, Human
caguacuucagcaagagagaaccu

SEQ ID NO: 2868122 - RNA, 21 nt, Human
caguacuugugaaacacagcu

SEQ ID NO: 2868123 - RNA, 22 nt, Human
caguacuugugaaacacagcug

SEQ ID NO: 2868124 - RNA, 23 nt, Human
caguacuugugaaacacagcugu

SEQ ID NO: 2868125 - RNA, 13 nt, Human
caguaccuugcuu

SEQ ID NO: 2868126 - RNA, 15 nt, Human
caguacagcaugugc

SEQ ID NO: 2868127 - RNA, 17 nt, Human
caguaauuugaggacaa

SEQ ID NO: 2868128 - RNA, 12 nt, Human
caguaacacgcu

SEQ ID NO: 2868129 - RNA, 13 nt, Human
caguaauguuauu

SEQ ID NO: 2868130 - RNA, 20 nt, Human
caguaauauuuauauauuua

SEQ ID NO: 2868131 - RNA, 13 nt, Human
caguaauauuuau

SEQ ID NO: 2868132 - RNA, 23 nt, Human
caguaauaagaauggaaaagaga

SEQ ID NO: 2868133 - RNA, 17 nt, Human
caguaauagcacugcca

SEQ ID NO: 2868134 - RNA, 13 nt, Human
cagguucagcuug

SEQ ID NO: 2868135 - RNA, 16 nt, Human
cagguucaguauuaug

SEQ ID NO: 2868136 - RNA, 12 nt, Human
cagguucagcuu

SEQ ID NO: 2868137 - RNA, 24 nt, Human
cagguuaucgaaauaacaauguua

SEQ ID NO: 2868138 - RNA, 16 nt, Human
cagguucaacccacag

SEQ ID NO: 2868139 - RNA, 17 nt, Human
cagguucaacccacagc

SEQ ID NO: 2868140 - RNA, 19 nt, Human
cagguucaacccacagcua

SEQ ID NO: 2868141 - RNA, 22 nt, Human
cagguucaagcgauucuccugc

SEQ ID NO: 2868142 - RNA, 11 nt, Human
cagguuagaga

SEQ ID NO: 2868143 - RNA, 12 nt, Human
cagguuagagaa

SEQ ID NO: 2868144 - RNA, 19 nt, Human
cagguuaucgaaauaacaa

SEQ ID NO: 2868145 - RNA, 20 nt, Human
cagguuaucgaaauaacaau

SEQ ID NO: 2868146 - RNA, 23 nt, Human
cagguuaucgaaauaacaauguu

SEQ ID NO: 2868147 - RNA, 16 nt, Human
cagguuaucugggcau

SEQ ID NO: 2868148 - RNA, 14 nt, Human
caguaaauuugcua

SEQ ID NO: 2868149 - RNA, 15 nt, Human
caguaaauuugcuag

SEQ ID NO: 2868150 - RNA, 18 nt, Human
caguaacgcaggggaaac

SEQ ID NO: 2868151 - RNA, 21 nt, Human
caguaacgggucguaaugacu

SEQ ID NO: 2868152 - RNA, 22 nt, Human
caguaacgggucguaaugacuu

SEQ ID NO: 2868153 - RNA, 20 nt, Human
caguaacuuuauguguaaau

SEQ ID NO: 2868154 - RNA, 18 nt, Human
caguaacuuuauguguaa

SEQ ID NO: 2868155 - RNA, 19 nt, Human
caguaacuuuauguguaaa

SEQ ID NO: 2868156 - RNA, 16 nt, Human
caguaacuuuaugugu

SEQ ID NO: 2868157 - RNA, 17 nt, Human
caguaacuuuaugugua

SEQ ID NO: 2868158 - RNA, 14 nt, Human
caguaacuuuaugu

SEQ ID NO: 2868159 - RNA, 16 nt, Human
caggugugagucacca

SEQ ID NO: 2868160 - RNA, 13 nt, Human
caggugguuuuua

SEQ ID NO: 2868161 - RNA, 14 nt, Human
caggugucagccau

SEQ ID NO: 2868162 - RNA, 16 nt, Human
caggugucagccauug

SEQ ID NO: 2868163 - RNA, 17 nt, Human
caggugucagccauugc

SEQ ID NO: 2868164 - RNA, 18 nt, Human
caggugugagccaccacg

SEQ ID NO: 2868165 - RNA, 21 nt, Human
caggugugagucaccaagccc

SEQ ID NO: 2868166 - RNA, 20 nt, Human
caggugugagucaccaagcc

SEQ ID NO: 2868167 - RNA, 23 nt, Human
caggugugaaccaccacacccag

SEQ ID NO: 2868168 - RNA, 22 nt, Human
caggugugaaccaccacaccca

SEQ ID NO: 2868169 - RNA, 19 nt, Human
caggugugaaccaccacac

SEQ ID NO: 2868170 - RNA, 16 nt, Human
caggugugaaccacca

SEQ ID NO: 2868171 - RNA, 23 nt, Human
caggugugagucaccaagcccag

SEQ ID NO: 2868172 - RNA, 22 nt, Human
caggugugagucaccaagccca

SEQ ID NO: 2868173 - RNA, 21 nt, Human
caggugugagccaccacgccc

SEQ ID NO: 2868174 - RNA, 20 nt, Human
cagguguguccaccugggca

SEQ ID NO: 2868175 - RNA, 21 nt, Human
cagguguguccaccugggcau

SEQ ID NO: 2868176 - RNA, 17 nt, Human
cagguguuaacauucca

SEQ ID NO: 2868177 - RNA, 18 nt, Human
cagguguuaacauuccaa

SEQ ID NO: 2868178 - RNA, 18 nt, Human
caggugugccgacagaag

SEQ ID NO: 2868179 - RNA, 19 nt, Human
caggugugccgacagaagg

SEQ ID NO: 2868180 - RNA, 22 nt, Human
caggugugguggcucacaccug

SEQ ID NO: 2868181 - RNA, 20 nt, Human
caggugugguguaauuuaua

SEQ ID NO: 2868182 - RNA, 23 nt, Human
caggugugagccaccacaccugg

SEQ ID NO: 2868183 - RNA, 22 nt, Human
cagguguuacuguaauuccuca

SEQ ID NO: 2868184 - RNA, 19 nt, Human
cagguguuaacauuccaag

SEQ ID NO: 2868185 - RNA, 20 nt, Human
cagguguuaacauuccaaga

SEQ ID NO: 2868186 - RNA, 14 nt, Human
cagguguuuuucca

SEQ ID NO: 2868187 - RNA, 21 nt, Human
cagguguuuuuuaugaagugc

SEQ ID NO: 2868188 - RNA, 12 nt, Human
caggugugaacc

SEQ ID NO: 2868189 - RNA, 19 nt, Human
caggugucccugcacuugc

SEQ ID NO: 2868190 - RNA, 18 nt, Human
caggugucccugcacuug

SEQ ID NO: 2868191 - RNA, 16 nt, Human
caggugucccugcacu

SEQ ID NO: 2868192 - RNA, 15 nt, Human
caggugucccugcac

SEQ ID NO: 2868193 - RNA, 17 nt, Human
cagguggggcagcuuga

SEQ ID NO: 2868194 - RNA, 16 nt, Human
cagguggggcagcuug

SEQ ID NO: 2868195 - RNA, 15 nt, Human
cagguggggcagcuu

SEQ ID NO: 2868196 - RNA, 14 nt, Human
cagguggggcagcu

SEQ ID NO: 2868197 - RNA, 13 nt, Human
cagguggggcagc

SEQ ID NO: 2868198 - RNA, 16 nt, Human
caggugggcuucccag

SEQ ID NO: 2868199 - RNA, 19 nt, Human
caggugggcuucccagugg

SEQ ID NO: 2868200 - RNA, 22 nt, Human
caggugggcuucccaguggcug

SEQ ID NO: 2868201 - RNA, 23 nt, Human
caggugggcuucccaguggcugc

SEQ ID NO: 2868202 - RNA, 21 nt, Human
cagguggugagaaauuucugu

SEQ ID NO: 2868203 - RNA, 14 nt, Human
caggugucccugca

SEQ ID NO: 2868204 - RNA, 11 nt, Human
caggugucccu

SEQ ID NO: 2868205 - RNA, 16 nt, Human
cagguggugucacugu

SEQ ID NO: 2868206 - RNA, 18 nt, Human
cagguggugucacugucc

SEQ ID NO: 2868207 - RNA, 19 nt, Human
cagguggugucacuguccc

SEQ ID NO: 2868208 - RNA, 20 nt, Human
cagguggugucacugucccu

SEQ ID NO: 2868209 - RNA, 16 nt, Human
cauuccaacagugagu

SEQ ID NO: 2868210 - RNA, 21 nt, Human
cauuccaagaauagcaucugu

SEQ ID NO: 2868211 - RNA, 22 nt, Human
cauuccaccuucccaugcccug

SEQ ID NO: 2868212 - RNA, 17 nt, Human
cauuccaccuucccaug

SEQ ID NO: 2868213 - RNA, 14 nt, Human
cauuccaagacucu

SEQ ID NO: 2868214 - RNA, 17 nt, Human
cauuccaagacucuaga

SEQ ID NO: 2868215 - RNA, 16 nt, Human
cauuccaaagcuuuau

SEQ ID NO: 2868216 - RNA, 17 nt, Human
cauuccaaagcuuuauu

SEQ ID NO: 2868217 - RNA, 19 nt, Human
cauuccaaaggggaccccu

SEQ ID NO: 2868218 - RNA, 23 nt, Human
cauuccaaaggggaccccuauga

SEQ ID NO: 2868219 - RNA, 18 nt, Human
cauucaucuuguguuuua

SEQ ID NO: 2868220 - RNA, 16 nt, Human
cauucaugccuggcuu

SEQ ID NO: 2868221 - RNA, 17 nt, Human
cauucauggaccacugu

SEQ ID NO: 2868222 - RNA, 19 nt, Human
cauucauggaccacuguuu

SEQ ID NO: 2868223 - RNA, 22 nt, Human
cauucauggaccacuguuucuu

SEQ ID NO: 2868224 - RNA, 14 nt, Human
cauucaugccuggc

SEQ ID NO: 2868225 - RNA, 20 nt, Human
cauucauuuagcuaaacgga

SEQ ID NO: 2868226 - RNA, 14 nt, Human
cauucauuuuauau

SEQ ID NO: 2868227 - RNA, 15 nt, Human
cauucauuuuauauu

SEQ ID NO: 2868228 - RNA, 17 nt, Human
cauucauuuuauauuga

SEQ ID NO: 2868229 - RNA, 18 nt, Human
cauucauuuuauauugaa

SEQ ID NO: 2868230 - RNA, 20 nt, Human
cauucauuuuauauugaaaa

SEQ ID NO: 2868231 - RNA, 22 nt, Human
cauucauuuuauauugaaaaaa

SEQ ID NO: 2868232 - RNA, 23 nt, Human
cauucauuuuauauugaaaaaaa

SEQ ID NO: 2868233 - RNA, 15 nt, Human
cauucagagagcagc

SEQ ID NO: 2868234 - RNA, 16 nt, Human
cauucagaucacugaa

SEQ ID NO: 2868235 - RNA, 17 nt, Human
cauucagaucacugaau

SEQ ID NO: 2868236 - RNA, 21 nt, Human
cauucagaucacugaauuuau

SEQ ID NO: 2868237 - RNA, 23 nt, Human
cauucagaucacugaauuuauaa

SEQ ID NO: 2868238 - RNA, 21 nt, Human
cauucagcugagguucauuac

SEQ ID NO: 2868239 - RNA, 13 nt, Human
cauucaucucauu

SEQ ID NO: 2868240 - RNA, 18 nt, Human
cauucacuugcauuucuu

SEQ ID NO: 2868241 - RNA, 12 nt, Human
cauucagagagc

SEQ ID NO: 2868242 - RNA, 15 nt, Human
cauucacuugcauuu

SEQ ID NO: 2868243 - RNA, 13 nt, Human
cauucacuucucu

SEQ ID NO: 2868244 - RNA, 22 nt, Human
cauucacggagauaugaagagc

SEQ ID NO: 2868245 - RNA, 15 nt, Human
cauucacuagcuuug

SEQ ID NO: 2868246 - RNA, 13 nt, Human
cauuccccauggg

SEQ ID NO: 2868247 - RNA, 13 nt, Human
cauuccuauuucu

SEQ ID NO: 2868248 - RNA, 16 nt, Human
cauuccguugucugug

SEQ ID NO: 2868249 - RNA, 14 nt, Human
cauuccuaaaaugc

SEQ ID NO: 2868250 - RNA, 16 nt, Human
cauuccuaaaaugcuu

SEQ ID NO: 2868251 - RNA, 21 nt, Human
cauucccucucaucucaggua

SEQ ID NO: 2868252 - RNA, 13 nt, Human
cauucccucccau

SEQ ID NO: 2868253 - RNA, 17 nt, Human
cauuccccgucucuggu

SEQ ID NO: 2868254 - RNA, 13 nt, Human
cauuccauugccu

SEQ ID NO: 2868255 - RNA, 14 nt, Human
cauuccauugccua

SEQ ID NO: 2868256 - RNA, 16 nt, Human
cauuccauugccuagc

SEQ ID NO: 2868257 - RNA, 21 nt, Human
cauuccauugccuagcucuuu

SEQ ID NO: 2868258 - RNA, 18 nt, Human
cauuccaagacucuagag

SEQ ID NO: 2868259 - RNA, 22 nt, Human
cauuccaaggaguuggaaguga

SEQ ID NO: 2868260 - RNA, 13 nt, Human
cauuauucauuua

SEQ ID NO: 2868261 - RNA, 14 nt, Human
cauuauucauuuag

SEQ ID NO: 2868262 - RNA, 16 nt, Human
cauuauucauuuagug

SEQ ID NO: 2868263 - RNA, 20 nt, Human
cauuauucauuuagugaguu

SEQ ID NO: 2868264 - RNA, 12 nt, Human
cauuauucucuu

SEQ ID NO: 2868265 - RNA, 15 nt, Human
cauuauucucuuuua

SEQ ID NO: 2868266 - RNA, 18 nt, Human
cauuauucucuuuuaucu

SEQ ID NO: 2868267 - RNA, 14 nt, Human
cauuauugcuuauu

SEQ ID NO: 2868268 - RNA, 16 nt, Human
cauuauugcuuauugc

SEQ ID NO: 2868269 - RNA, 14 nt, Human
cauuagaaaaagag

SEQ ID NO: 2868270 - RNA, 19 nt, Human
cauuagaaaaauagcaacu

SEQ ID NO: 2868271 - RNA, 12 nt, Human
cauuagaacuuc

SEQ ID NO: 2868272 - RNA, 14 nt, Human
cauuagaauuauuu

SEQ ID NO: 2868273 - RNA, 19 nt, Human
cauuagaauuauuuaaaca

SEQ ID NO: 2868274 - RNA, 16 nt, Human
cauuaccacucaggca

SEQ ID NO: 2868275 - RNA, 16 nt, Human
cauuacucuuaaggaa

SEQ ID NO: 2868276 - RNA, 13 nt, Human
cauuacugggccu

SEQ ID NO: 2868277 - RNA, 14 nt, Human
cauuauuuauaugg

SEQ ID NO: 2868278 - RNA, 14 nt, Human
cauuauuuucuguc

SEQ ID NO: 2868279 - RNA, 15 nt, Human
cauuauuuucuguca

SEQ ID NO: 2868280 - RNA, 16 nt, Human
cauuauuuucugucag

SEQ ID NO: 2868281 - RNA, 17 nt, Human
cauuauuuucugucaga

SEQ ID NO: 2868282 - RNA, 18 nt, Human
cauuauuuucugucagau

SEQ ID NO: 2868283 - RNA, 23 nt, Human
cauuacuugauuaagauuuuaca

SEQ ID NO: 2868284 - RNA, 12 nt, Human
cauucaacaaga

SEQ ID NO: 2868285 - RNA, 23 nt, Human
cauucaaaugggugauauccuga

SEQ ID NO: 2868286 - RNA, 21 nt, Human
cauucaauauugacauuugua

SEQ ID NO: 2868287 - RNA, 13 nt, Human
cauucaauguuua

SEQ ID NO: 2868288 - RNA, 21 nt, Human
cauucaauuucaggcucccca

SEQ ID NO: 2868289 - RNA, 19 nt, Human
cauuacauuguuuaaagaa

SEQ ID NO: 2868290 - RNA, 12 nt, Human
cauuaccacuca

SEQ ID NO: 2868291 - RNA, 13 nt, Human
cauuaccacucag

SEQ ID NO: 2868292 - RNA, 14 nt, Human
cauuaccacucagg

SEQ ID NO: 2868293 - RNA, 15 nt, Human
cauuaccacucaggc

SEQ ID NO: 2868294 - RNA, 24 nt, Human
cauuacagggaaugccugagugcc

SEQ ID NO: 2868295 - RNA, 14 nt, Human
cauuaaguaaucaa

SEQ ID NO: 2868296 - RNA, 20 nt, Human
cauuaaguaaucaauaaaga

SEQ ID NO: 2868297 - RNA, 21 nt, Human
cauuaaguaaucaauaaagaa

SEQ ID NO: 2868298 - RNA, 16 nt, Human
cauuaauuuuuuuuca

SEQ ID NO: 2868299 - RNA, 12 nt, Human
cauuaauucuau

SEQ ID NO: 2868300 - RNA, 23 nt, Human
cauuacaaucgagacugcaaugu

SEQ ID NO: 2868301 - RNA, 13 nt, Human
cauuacaauggaa

SEQ ID NO: 2868302 - RNA, 21 nt, Human
cauuaagaauguugguuuacu

SEQ ID NO: 2868303 - RNA, 22 nt, Human
cauuaagaauguugguuuacuu

SEQ ID NO: 2868304 - RNA, 16 nt, Human
cauuaaccgaugcuuu

SEQ ID NO: 2868305 - RNA, 17 nt, Human
cauuaaccgaugcuuua

SEQ ID NO: 2868306 - RNA, 18 nt, Human
cauuaaccgaugcuuuac

SEQ ID NO: 2868307 - RNA, 20 nt, Human
cauuaaccgaugcuuuacca

SEQ ID NO: 2868308 - RNA, 22 nt, Human
cauuaaccgaugcuuuaccaaa

SEQ ID NO: 2868309 - RNA, 17 nt, Human
cauucuggcaguuuuga

SEQ ID NO: 2868310 - RNA, 19 nt, Human
cauucuggcaguuuugaca

SEQ ID NO: 2868311 - RNA, 20 nt, Human
cauucuggcaguuuugacau

SEQ ID NO: 2868312 - RNA, 12 nt, Human
cauucuuacuua

SEQ ID NO: 2868313 - RNA, 16 nt, Human
cauucugugaucauuu

SEQ ID NO: 2868314 - RNA, 17 nt, Human
cauucugugaucauuua

SEQ ID NO: 2868315 - RNA, 21 nt, Human
cauucuuacuuacuaaaauau

SEQ ID NO: 2868316 - RNA, 22 nt, Human
cauucuuacuuacuaaaauaua

SEQ ID NO: 2868317 - RNA, 23 nt, Human
cauucuuacuuacuaaaauauau

SEQ ID NO: 2868318 - RNA, 20 nt, Human
cauucugccugcccaggccc

SEQ ID NO: 2868319 - RNA, 19 nt, Human
cauucugccugcccaggcc

SEQ ID NO: 2868320 - RNA, 18 nt, Human
cauucugccugcccaggc

SEQ ID NO: 2868321 - RNA, 17 nt, Human
cauucugccugcccagg

SEQ ID NO: 2868322 - RNA, 16 nt, Human
cauucugccugcccag

SEQ ID NO: 2868323 - RNA, 15 nt, Human
cauucugccugccca

SEQ ID NO: 2868324 - RNA, 13 nt, Human
cauucugccugcc

SEQ ID NO: 2868325 - RNA, 12 nt, Human
cauucugccugc

SEQ ID NO: 2868326 - RNA, 21 nt, Human
cauuccugauaugauuuaaaa

SEQ ID NO: 2868327 - RNA, 15 nt, Human
cauucugagaccaaa

SEQ ID NO: 2868328 - RNA, 15 nt, Human
cauucugaugagcaa

SEQ ID NO: 2868329 - RNA, 20 nt, Human
cauucugauuuggaaaaaga

SEQ ID NO: 2868330 - RNA, 15 nt, Human
cauucugcauugcua

SEQ ID NO: 2868331 - RNA, 18 nt, Human
cauucugcauugcuagau

SEQ ID NO: 2868332 - RNA, 19 nt, Human
cauucugcauugcuagaua

SEQ ID NO: 2868333 - RNA, 20 nt, Human
cauucugcauugcuagauaa

SEQ ID NO: 2868334 - RNA, 21 nt, Human
cauucugcauugcuagauaaa

SEQ ID NO: 2868335 - RNA, 23 nt, Human
cauucugccgcccccuccugaac

SEQ ID NO: 2868336 - RNA, 22 nt, Human
cauucugccgcccccuccugaa

SEQ ID NO: 2868337 - RNA, 17 nt, Human
cauucugccucucuagg

SEQ ID NO: 2868338 - RNA, 18 nt, Human
cauucugccucucuagga

SEQ ID NO: 2868339 - RNA, 21 nt, Human
cauucugccgcccccuccuga

SEQ ID NO: 2868340 - RNA, 18 nt, Human
cauucugccgcccccucc

SEQ ID NO: 2868341 - RNA, 16 nt, Human
cauucugcccuguggg

SEQ ID NO: 2868342 - RNA, 17 nt, Human
cauucugcccuguggga

SEQ ID NO: 2868343 - RNA, 18 nt, Human
cauucugcccugugggac

SEQ ID NO: 2868344 - RNA, 20 nt, Human
cauucugcccugugggaccc

SEQ ID NO: 2868345 - RNA, 23 nt, Human
cauucuucuguacgucugacagg

SEQ ID NO: 2868346 - RNA, 21 nt, Human
cauucuuccuaguuuucuccu

SEQ ID NO: 2868347 - RNA, 18 nt, Human
cauucuuccuaguuuucu

SEQ ID NO: 2868348 - RNA, 13 nt, Human
cauucuuccuagu

SEQ ID NO: 2868349 - RNA, 17 nt, Human
cauucuuuuaacuucuu

SEQ ID NO: 2868350 - RNA, 18 nt, Human
cauucuuuuaacuucuuu

SEQ ID NO: 2868351 - RNA, 23 nt, Human
cauucuuguuuucuuucuuuaaa

SEQ ID NO: 2868352 - RNA, 13 nt, Human
cauucuuucccag

SEQ ID NO: 2868353 - RNA, 16 nt, Human
cauucuugguuggcug

SEQ ID NO: 2868354 - RNA, 17 nt, Human
cauucuugguuggcugg

SEQ ID NO: 2868355 - RNA, 21 nt, Human
cauucuugguuggcuggccuu

SEQ ID NO: 2868356 - RNA, 19 nt, Human
cauucuuguaaggcuuuga

SEQ ID NO: 2868357 - RNA, 21 nt, Human
cauucuuguaaggcuuugauu

SEQ ID NO: 2868358 - RNA, 22 nt, Human
cauucuuguaaggcuuugauua

SEQ ID NO: 2868359 - RNA, 14 nt, Human
cauugauuuccugu

SEQ ID NO: 2868360 - RNA, 15 nt, Human
cauugauucagccug

SEQ ID NO: 2868361 - RNA, 21 nt, Human
cauuguggugugagcuucaga

SEQ ID NO: 2868362 - RNA, 15 nt, Human
cauuguguugacauu

SEQ ID NO: 2868363 - RNA, 16 nt, Human
cauuguguugacauua

SEQ ID NO: 2868364 - RNA, 19 nt, Human
cauuguguugacauuaaga

SEQ ID NO: 2868365 - RNA, 15 nt, Human
cauuguuauuuauac

SEQ ID NO: 2868366 - RNA, 16 nt, Human
cauuguuauuuauaca

SEQ ID NO: 2868367 - RNA, 13 nt, Human
cauuguuauuuuc

SEQ ID NO: 2868368 - RNA, 14 nt, Human
cauuguuauuuuca

SEQ ID NO: 2868369 - RNA, 15 nt, Human
cauuguuauuuucag

SEQ ID NO: 2868370 - RNA, 19 nt, Human
cauuguuauuuucagugau

SEQ ID NO: 2868371 - RNA, 15 nt, Human
cauuguucaaaagga

SEQ ID NO: 2868372 - RNA, 16 nt, Human
cauuguucaaaaggaa

SEQ ID NO: 2868373 - RNA, 17 nt, Human
cauuguucaaaaggaac

SEQ ID NO: 2868374 - RNA, 12 nt, Human
cauuuaaaaaaa

SEQ ID NO: 2868375 - RNA, 17 nt, Human
cauuguuuuaaaaagaa

SEQ ID NO: 2868376 - RNA, 14 nt, Human
cauuguuagcacua

SEQ ID NO: 2868377 - RNA, 22 nt, Human
cauuguuagcacuaggcaccca

SEQ ID NO: 2868378 - RNA, 23 nt, Human
cauuguuuuaaaaagaaacaaga

SEQ ID NO: 2868379 - RNA, 12 nt, Human
cauuguuuugaa

SEQ ID NO: 2868380 - RNA, 14 nt, Human
cauuguuuugaaac

SEQ ID NO: 2868381 - RNA, 13 nt, Human
cauuguuuugaau

SEQ ID NO: 2868382 - RNA, 16 nt, Human
cauuguuuugaauauu

SEQ ID NO: 2868383 - RNA, 18 nt, Human
cauuguuuugaauauuac

SEQ ID NO: 2868384 - RNA, 19 nt, Human
cauuguuuugaauauuacu

SEQ ID NO: 2868385 - RNA, 22 nt, Human
cauuguuuugaauauuacuccu

SEQ ID NO: 2868386 - RNA, 12 nt, Human
cauuuaaguuuc

SEQ ID NO: 2868387 - RNA, 17 nt, Human
cauuuaagagacaguca

SEQ ID NO: 2868388 - RNA, 19 nt, Human
cauuuaagagacagucacc

SEQ ID NO: 2868389 - RNA, 23 nt, Human
cauuuaagagacagucaccccag

SEQ ID NO: 2868390 - RNA, 15 nt, Human
cauuuaaaaaaauca

SEQ ID NO: 2868391 - RNA, 16 nt, Human
cauuuaaauaucugaa

SEQ ID NO: 2868392 - RNA, 16 nt, Human
cauuuaaauguguaca

SEQ ID NO: 2868393 - RNA, 20 nt, Human
cauuuaaauguguacaaugu

SEQ ID NO: 2868394 - RNA, 21 nt, Human
cauuuaaauguguacaaugua

SEQ ID NO: 2868395 - RNA, 23 nt, Human
cauuuaaauuuuacccuuuagac

SEQ ID NO: 2868396 - RNA, 13 nt, Human
cauugacaaaucu

SEQ ID NO: 2868397 - RNA, 16 nt, Human
cauugacaaaucugug

SEQ ID NO: 2868398 - RNA, 18 nt, Human
cauugacaaaucugugua

SEQ ID NO: 2868399 - RNA, 21 nt, Human
cauugacaaaucuguguauau

SEQ ID NO: 2868400 - RNA, 15 nt, Human
cauugagcugugcaa

SEQ ID NO: 2868401 - RNA, 14 nt, Human
cauugagcugugca

SEQ ID NO: 2868402 - RNA, 16 nt, Human
cauugacaagaacuga

SEQ ID NO: 2868403 - RNA, 18 nt, Human
cauugaacacaaacugua

SEQ ID NO: 2868404 - RNA, 21 nt, Human
cauugagcugauauaaauucu

SEQ ID NO: 2868405 - RNA, 15 nt, Human
cauugaguaauauag

SEQ ID NO: 2868406 - RNA, 13 nt, Human
cauugaguagaca

SEQ ID NO: 2868407 - RNA, 21 nt, Human
cauugaguagacacauuuaag

SEQ ID NO: 2868408 - RNA, 23 nt, Human
cauugaguagacacauuuaagga

SEQ ID NO: 2868409 - RNA, 16 nt, Human
cauugaggaagagucu

SEQ ID NO: 2868410 - RNA, 17 nt, Human
cauugaggaagagucuu

SEQ ID NO: 2868411 - RNA, 17 nt, Human
cauugaucauaaacuga

SEQ ID NO: 2868412 - RNA, 14 nt, Human
cauugauauuguga

SEQ ID NO: 2868413 - RNA, 16 nt, Human
cauugauauugugaac

SEQ ID NO: 2868414 - RNA, 19 nt, Human
cauugauauugugaacauu

SEQ ID NO: 2868415 - RNA, 20 nt, Human
cauugauauugugaacauuu

SEQ ID NO: 2868416 - RNA, 14 nt, Human
cauugaaggccugg

SEQ ID NO: 2868417 - RNA, 22 nt, Human
cauugaacacaaacuguaaaua

SEQ ID NO: 2868418 - RNA, 16 nt, Human
cauucuuuuuuucuug

SEQ ID NO: 2868419 - RNA, 17 nt, Human
cauucuuuuuuucuugg

SEQ ID NO: 2868420 - RNA, 18 nt, Human
cauucuuuuuuucuuggc

SEQ ID NO: 2868421 - RNA, 19 nt, Human
cauucuuuuuuucuuggcc

SEQ ID NO: 2868422 - RNA, 13 nt, Human
cauuucuuuucug

SEQ ID NO: 2868423 - RNA, 15 nt, Human
cauuucuuuucuuuu

SEQ ID NO: 2868424 - RNA, 17 nt, Human
cauuucuuuucuuuuua

SEQ ID NO: 2868425 - RNA, 19 nt, Human
cauuucuuuucuuuuuaca

SEQ ID NO: 2868426 - RNA, 20 nt, Human
cauuucuuuucuuuuuacau

SEQ ID NO: 2868427 - RNA, 21 nt, Human
cauuucuuuucuuuuuacaua

SEQ ID NO: 2868428 - RNA, 20 nt, Human
cauuuaccagcaacuugaac

SEQ ID NO: 2868429 - RNA, 13 nt, Human
cauuuacuaaaca

SEQ ID NO: 2868430 - RNA, 15 nt, Human
cauuuacuaaacaua

SEQ ID NO: 2868431 - RNA, 17 nt, Human
cauuuacuaaacauaug

SEQ ID NO: 2868432 - RNA, 19 nt, Human
cauuuacuaaacauaugau

SEQ ID NO: 2868433 - RNA, 20 nt, Human
cauuuacuaaacauaugauu

SEQ ID NO: 2868434 - RNA, 21 nt, Human
cauuuacuaaacauaugauuu

SEQ ID NO: 2868435 - RNA, 12 nt, Human
cauuuacaugua

SEQ ID NO: 2868436 - RNA, 20 nt, Human
cauuuacauguauuauuuca

SEQ ID NO: 2868437 - RNA, 20 nt, Human
cauuuacaguccuucaaaau

SEQ ID NO: 2868438 - RNA, 22 nt, Human
cauuuaaggaugggguuaugaa

SEQ ID NO: 2868439 - RNA, 12 nt, Human
cauuuaauuuag

SEQ ID NO: 2868440 - RNA, 19 nt, Human
cauuuaauuuagugaucuu

SEQ ID NO: 2868441 - RNA, 16 nt, Human
cauuugcuuuuucacc

SEQ ID NO: 2868442 - RNA, 13 nt, Human
cauuugcuuuuug

SEQ ID NO: 2868443 - RNA, 16 nt, Human
cauuuucaccccaccc

SEQ ID NO: 2868444 - RNA, 20 nt, Human
cauuuuacccacacacagau

SEQ ID NO: 2868445 - RNA, 18 nt, Human
cauuuuacauuaaauuuu

SEQ ID NO: 2868446 - RNA, 17 nt, Human
cauuuuacuuuuuccug

SEQ ID NO: 2868447 - RNA, 20 nt, Human
cauuuuacuuuuuccuggcu

SEQ ID NO: 2868448 - RNA, 22 nt, Human
cauuuuacuuuuuccuggcuca

SEQ ID NO: 2868449 - RNA, 17 nt, Human
cauuugcacccuccgcc

SEQ ID NO: 2868450 - RNA, 15 nt, Human
cauuugcacccuccg

SEQ ID NO: 2868451 - RNA, 20 nt, Human
cauuugcacuggaguucuau

SEQ ID NO: 2868452 - RNA, 21 nt, Human
cauuugcacuggaguucuaug

SEQ ID NO: 2868453 - RNA, 14 nt, Human
cauuugauaaugau

SEQ ID NO: 2868454 - RNA, 16 nt, Human
cauuugauaaugauaa

SEQ ID NO: 2868455 - RNA, 17 nt, Human
cauuugauaaugauaaa

SEQ ID NO: 2868456 - RNA, 23 nt, Human
cauuugauaaugauaaaacaccu

SEQ ID NO: 2868457 - RNA, 11 nt, Human
cauuugauacc

SEQ ID NO: 2868458 - RNA, 16 nt, Human
cauuugauaccccugg

SEQ ID NO: 2868459 - RNA, 17 nt, Human
cauuugauaccccuggg

SEQ ID NO: 2868460 - RNA, 19 nt, Human
cauuugauaccccugggga

SEQ ID NO: 2868461 - RNA, 23 nt, Human
cauuucuugugauguuuugagag

SEQ ID NO: 2868462 - RNA, 19 nt, Human
cauuuuuaaucaugaaauu

SEQ ID NO: 2868463 - RNA, 16 nt, Human
cauuugauuuuucuaa

SEQ ID NO: 2868464 - RNA, 15 nt, Human
cauuuuccccccacu

SEQ ID NO: 2868465 - RNA, 14 nt, Human
cauuuuccccccac

SEQ ID NO: 2868466 - RNA, 17 nt, Human
cauuuucaccccacccu

SEQ ID NO: 2868467 - RNA, 22 nt, Human
cauuuuccccccacucucccca

SEQ ID NO: 2868468 - RNA, 17 nt, Human
cauuuuccuacaggcag

SEQ ID NO: 2868469 - RNA, 18 nt, Human
cauuuuccuacaggcagu

SEQ ID NO: 2868470 - RNA, 22 nt, Human
cauuuuccuacaggcagucucu

SEQ ID NO: 2868471 - RNA, 21 nt, Human
cauuuuccccccacucucccc

SEQ ID NO: 2868472 - RNA, 20 nt, Human
cauuuuccccccacucuccc

SEQ ID NO: 2868473 - RNA, 17 nt, Human
cauuuuccccccacucu

SEQ ID NO: 2868474 - RNA, 18 nt, Human
cauuuucuauaacagaua

SEQ ID NO: 2868475 - RNA, 19 nt, Human
cauuuucuauaacagauau

SEQ ID NO: 2868476 - RNA, 17 nt, Human
cauuuuuaguagagaca

SEQ ID NO: 2868477 - RNA, 15 nt, Human
cauuuuuaaucauga

SEQ ID NO: 2868478 - RNA, 16 nt, Human
ccaaaaucucaagaaa

SEQ ID NO: 2868479 - RNA, 15 nt, Human
ccaaaaugacaucuu

SEQ ID NO: 2868480 - RNA, 16 nt, Human
ccaaaaugacaucuuu

SEQ ID NO: 2868481 - RNA, 19 nt, Human
ccaaaaugacaucuuuuua

SEQ ID NO: 2868482 - RNA, 16 nt, Human
ccaaacaaauaugcaa

SEQ ID NO: 2868483 - RNA, 13 nt, Human
ccaaacaauuauu

SEQ ID NO: 2868484 - RNA, 19 nt, Human
ccaaacaccuuccagcucc

SEQ ID NO: 2868485 - RNA, 15 nt, Human
ccaaacaccuuccag

SEQ ID NO: 2868486 - RNA, 23 nt, Human
caugugucaacaccccugugugg

SEQ ID NO: 2868487 - RNA, 17 nt, Human
caugugucacuugugcu

SEQ ID NO: 2868488 - RNA, 18 nt, Human
caugugucacuugugcuu

SEQ ID NO: 2868489 - RNA, 22 nt, Human
caugugucacuugugcuuugcu

SEQ ID NO: 2868490 - RNA, 15 nt, Human
caugugucaugcaug

SEQ ID NO: 2868491 - RNA, 14 nt, Human
cauguguagccugu

SEQ ID NO: 2868492 - RNA, 15 nt, Human
cauguguagccuaug

SEQ ID NO: 2868493 - RNA, 16 nt, Human
cauguguagccuaugu

SEQ ID NO: 2868494 - RNA, 16 nt, Human
cauguguagccugugc

SEQ ID NO: 2868495 - RNA, 18 nt, Human
cauguguagccugugcau

SEQ ID NO: 2868496 - RNA, 14 nt, Human
caugugcacaugca

SEQ ID NO: 2868497 - RNA, 22 nt, Human
caugugccagguuuuuggucug

SEQ ID NO: 2868498 - RNA, 12 nt, Human
caugugcccucc

SEQ ID NO: 2868499 - RNA, 14 nt, Human
caugugcccuccug

SEQ ID NO: 2868500 - RNA, 18 nt, Human
caugugcccuccugaggg

SEQ ID NO: 2868501 - RNA, 16 nt, Human
caugugccucuuuguc

SEQ ID NO: 2868502 - RNA, 20 nt, Human
cauguguuuuaauuccaaua

SEQ ID NO: 2868503 - RNA, 18 nt, Human
cauguguuuuauaaaauc

SEQ ID NO: 2868504 - RNA, 18 nt, Human
cauguguuggcagccucu

SEQ ID NO: 2868505 - RNA, 13 nt, Human
cauguguucccuu

SEQ ID NO: 2868506 - RNA, 14 nt, Human
cauguguucccuuu

SEQ ID NO: 2868507 - RNA, 22 nt, Human
cauguguucccuuugucuuuca

SEQ ID NO: 2868508 - RNA, 21 nt, Human
cauguguccugguucccguuu

SEQ ID NO: 2868509 - RNA, 15 nt, Human
cauguguccugguuc

SEQ ID NO: 2868510 - RNA, 13 nt, Human
cauguuucauguu

SEQ ID NO: 2868511 - RNA, 22 nt, Human
cauguuucauguuuugugacua

SEQ ID NO: 2868512 - RNA, 16 nt, Human
cauguuucauguuuug

SEQ ID NO: 2868513 - RNA, 17 nt, Human
cauguuucauguuuugu

SEQ ID NO: 2868514 - RNA, 14 nt, Human
cauguuuccagcag

SEQ ID NO: 2868515 - RNA, 12 nt, Human
caugucuggcua

SEQ ID NO: 2868516 - RNA, 22 nt, Human
caugucuccuuuaagagcucug

SEQ ID NO: 2868517 - RNA, 14 nt, Human
caugucucgacuca

SEQ ID NO: 2868518 - RNA, 13 nt, Human
caugucuuguaca

SEQ ID NO: 2868519 - RNA, 14 nt, Human
caugucuuguacau

SEQ ID NO: 2868520 - RNA, 15 nt, Human
caugucuuguacaug

SEQ ID NO: 2868521 - RNA, 17 nt, Human
caugucuuguacaugug

SEQ ID NO: 2868522 - RNA, 16 nt, Human
caugugaucacgccug

SEQ ID NO: 2868523 - RNA, 17 nt, Human
caugugacucuggcuug

SEQ ID NO: 2868524 - RNA, 20 nt, Human
caugugacucuggcuuggcc

SEQ ID NO: 2868525 - RNA, 15 nt, Human
cauggucacacacug

SEQ ID NO: 2868526 - RNA, 14 nt, Human
cauggucacacacu

SEQ ID NO: 2868527 - RNA, 20 nt, Human
caugguagagaaucucuccc

SEQ ID NO: 2868528 - RNA, 11 nt, Human
cauggugaaaa

SEQ ID NO: 2868529 - RNA, 18 nt, Human
cauggugaaaauguacug

SEQ ID NO: 2868530 - RNA, 19 nt, Human
cauggugaaaauguacuga

SEQ ID NO: 2868531 - RNA, 18 nt, Human
caugguggcaugcaccug

SEQ ID NO: 2868532 - RNA, 20 nt, Human
caugguggcaugcaccugca

SEQ ID NO: 2868533 - RNA, 16 nt, Human
caugguggacccagcg

SEQ ID NO: 2868534 - RNA, 22 nt, Human
caugguggacccagcgggcagg

SEQ ID NO: 2868535 - RNA, 13 nt, Human
caugguguaauaa

SEQ ID NO: 2868536 - RNA, 14 nt, Human
caugguguaauaag

SEQ ID NO: 2868537 - RNA, 19 nt, Human
caugguggguucaggggac

SEQ ID NO: 2868538 - RNA, 22 nt, Human
caugucuauaaucccagcacuu

SEQ ID NO: 2868539 - RNA, 21 nt, Human
caugucgcuagccagugcucc

SEQ ID NO: 2868540 - RNA, 22 nt, Human
caugucgcuagccagugcucca

SEQ ID NO: 2868541 - RNA, 16 nt, Human
cauguaaaagcggaaa

SEQ ID NO: 2868542 - RNA, 16 nt, Human
cauguaaagaaauguc

SEQ ID NO: 2868543 - RNA, 17 nt, Human
cauguaaagaaaugucu

SEQ ID NO: 2868544 - RNA, 18 nt, Human
cauguaaagaaaugucuu

SEQ ID NO: 2868545 - RNA, 21 nt, Human
cauguaaagaaaugucuuaau

SEQ ID NO: 2868546 - RNA, 22 nt, Human
cauguaaacacgccugcaaacg

SEQ ID NO: 2868547 - RNA, 19 nt, Human
cauguaccauuugcauggc

SEQ ID NO: 2868548 - RNA, 13 nt, Human
cauguaccucccc

SEQ ID NO: 2868549 - RNA, 14 nt, Human
cauguaccuccccu

SEQ ID NO: 2868550 - RNA, 16 nt, Human
cauguaccuccccugc

SEQ ID NO: 2868551 - RNA, 17 nt, Human
cauguaccuccccugcc

SEQ ID NO: 2868552 - RNA, 18 nt, Human
cauguaccuccccugccu

SEQ ID NO: 2868553 - RNA, 19 nt, Human
cauguaccuccccugccuu

SEQ ID NO: 2868554 - RNA, 20 nt, Human
cauguaccuccccugccuug

SEQ ID NO: 2868555 - RNA, 21 nt, Human
cauguaccuccccugccuugc

SEQ ID NO: 2868556 - RNA, 22 nt, Human
cauguaccuccccugccuugcu

SEQ ID NO: 2868557 - RNA, 22 nt, Human
cauguacuaguuuuaguuuucu

SEQ ID NO: 2868558 - RNA, 18 nt, Human
cauguaaauaccagacug

SEQ ID NO: 2868559 - RNA, 21 nt, Human
cauguaaauaccagacugcag

SEQ ID NO: 2868560 - RNA, 22 nt, Human
cauguaaauaccagacugcagg

SEQ ID NO: 2868561 - RNA, 23 nt, Human
cauguaaauaccagacugcaggu

SEQ ID NO: 2868562 - RNA, 13 nt, Human
cauguacauuugg

SEQ ID NO: 2868563 - RNA, 14 nt, Human
cauguacauuugga

SEQ ID NO: 2868564 - RNA, 17 nt, Human
cauguacauuuggaacu

SEQ ID NO: 2868565 - RNA, 22 nt, Human
cauuaaaaaaaaaaaaaaaagu

SEQ ID NO: 2868566 - RNA, 13 nt, Human
cauguuuguaaaa

SEQ ID NO: 2868567 - RNA, 17 nt, Human
cauguuuuuguuuucuu

SEQ ID NO: 2868568 - RNA, 17 nt, Human
cauguuuggugcauaga

SEQ ID NO: 2868569 - RNA, 20 nt, Human
cauguuuggugcauagaacu

SEQ ID NO: 2868570 - RNA, 21 nt, Human
cauguuuggugcauagaacug

SEQ ID NO: 2868571 - RNA, 22 nt, Human
cauguuuggugcauagaacugg

SEQ ID NO: 2868572 - RNA, 14 nt, Human
cauguuugcuucau

SEQ ID NO: 2868573 - RNA, 14 nt, Human
cauguuuggaagac

SEQ ID NO: 2868574 - RNA, 12 nt, Human
cauuaaaccugu

SEQ ID NO: 2868575 - RNA, 23 nt, Human
cauguuuuuguuuucuuugaaug

SEQ ID NO: 2868576 - RNA, 13 nt, Human
cauuaaaaaugga

SEQ ID NO: 2868577 - RNA, 14 nt, Human
cauuaaaaauggaa

SEQ ID NO: 2868578 - RNA, 15 nt, Human
cauuaaaaauggaac

SEQ ID NO: 2868579 - RNA, 13 nt, Human
cauuaaaaaauga

SEQ ID NO: 2868580 - RNA, 21 nt, Human
cauuaaaaaaugaaauauuuu

SEQ ID NO: 2868581 - RNA, 22 nt, Human
cauuaaaaaaugaaauauuuuu

SEQ ID NO: 2868582 - RNA, 13 nt, Human
cauuaaaacugcu

SEQ ID NO: 2868583 - RNA, 14 nt, Human
cauuaaaacugcuu

SEQ ID NO: 2868584 - RNA, 15 nt, Human
cauuaaaacugcuuu

SEQ ID NO: 2868585 - RNA, 16 nt, Human
cauuaaaacugcuuuu

SEQ ID NO: 2868586 - RNA, 22 nt, Human
caugcuuugaaaaaucacuuga

SEQ ID NO: 2868587 - RNA, 18 nt, Human
cauggaaaccugaaaaaa

SEQ ID NO: 2868588 - RNA, 13 nt, Human
cauggaacacaaa

SEQ ID NO: 2868589 - RNA, 21 nt, Human
cauggaacacaaacacauugu

SEQ ID NO: 2868590 - RNA, 23 nt, Human
cauggaacacaaacacauuguua

SEQ ID NO: 2868591 - RNA, 14 nt, Human
caugcuucuuccuu

SEQ ID NO: 2868592 - RNA, 20 nt, Human
caugcuucucaucuugugaa

SEQ ID NO: 2868593 - RNA, 21 nt, Human
caugcuucucaucuugugaaa

SEQ ID NO: 2868594 - RNA, 22 nt, Human
caugcuucucaucuugugaaau

SEQ ID NO: 2868595 - RNA, 23 nt, Human
caugcuucucaucuugugaaaug

SEQ ID NO: 2868596 - RNA, 19 nt, Human
caugcuugugaaaaugugu

SEQ ID NO: 2868597 - RNA, 16 nt, Human
caugcuucuuccuuac

SEQ ID NO: 2868598 - RNA, 14 nt, Human
caugcuuuaaagug

SEQ ID NO: 2868599 - RNA, 15 nt, Human
caugcuuuaaagugu

SEQ ID NO: 2868600 - RNA, 18 nt, Human
caugcuuuaaaguguaau

SEQ ID NO: 2868601 - RNA, 19 nt, Human
caugcuuuaaaguguaaua

SEQ ID NO: 2868602 - RNA, 23 nt, Human
caugcuuuaaaguguaauaauau

SEQ ID NO: 2868603 - RNA, 17 nt, Human
cauggaaaccugaaaaa

SEQ ID NO: 2868604 - RNA, 13 nt, Human
cauggagcuggcc

SEQ ID NO: 2868605 - RNA, 14 nt, Human
cauggagcuggccg

SEQ ID NO: 2868606 - RNA, 17 nt, Human
cauggagccagcucccu

SEQ ID NO: 2868607 - RNA, 12 nt, Human
cauggagcuggc

SEQ ID NO: 2868608 - RNA, 14 nt, Human
cauggagccagcuc

SEQ ID NO: 2868609 - RNA, 19 nt, Human
cauggacguucggggcaug

SEQ ID NO: 2868610 - RNA, 14 nt, Human
cauggaccacuguu

SEQ ID NO: 2868611 - RNA, 16 nt, Human
cauggaccacuguuuc

SEQ ID NO: 2868612 - RNA, 18 nt, Human
cauggaccacuguuucuu

SEQ ID NO: 2868613 - RNA, 21 nt, Human
cauggaccacuguuucuugcu

SEQ ID NO: 2868614 - RNA, 22 nt, Human
cauggaccacuguuucuugcuu

SEQ ID NO: 2868615 - RNA, 23 nt, Human
cauggaccacuguuucuugcuug

SEQ ID NO: 2868616 - RNA, 14 nt, Human
caugcggagaacaa

SEQ ID NO: 2868617 - RNA, 16 nt, Human
caugcggagaacaaau

SEQ ID NO: 2868618 - RNA, 23 nt, Human
caugcggagaacaaaugugaagg

SEQ ID NO: 2868619 - RNA, 23 nt, Human
caugcagcccaugcccaccugcc

SEQ ID NO: 2868620 - RNA, 22 nt, Human
caugcagcccaugcccaccugc

SEQ ID NO: 2868621 - RNA, 14 nt, Human
caugcagcaucuaa

SEQ ID NO: 2868622 - RNA, 20 nt, Human
caugcagcccaugcccaccu

SEQ ID NO: 2868623 - RNA, 19 nt, Human
caugcagcccaugcccacc

SEQ ID NO: 2868624 - RNA, 16 nt, Human
caugcagcccaugccc

SEQ ID NO: 2868625 - RNA, 19 nt, Human
caugcagacaugagugcgu

SEQ ID NO: 2868626 - RNA, 15 nt, Human
caugggagcagucca

SEQ ID NO: 2868627 - RNA, 20 nt, Human
caugggagcaguccaugcau

SEQ ID NO: 2868628 - RNA, 18 nt, Human
cauggcaucaccuccacc

SEQ ID NO: 2868629 - RNA, 21 nt, Human
caugggagcugguuagaaaug

SEQ ID NO: 2868630 - RNA, 13 nt, Human
cauggaggcccuc

SEQ ID NO: 2868631 - RNA, 17 nt, Human
cauggaggcccuccugu

SEQ ID NO: 2868632 - RNA, 18 nt, Human
cauggaggcccuccugug

SEQ ID NO: 2868633 - RNA, 20 nt, Human
cauggaggcccuccugugcu

SEQ ID NO: 2868634 - RNA, 13 nt, Human
cauggagguucua

SEQ ID NO: 2868635 - RNA, 17 nt, Human
cauggcagaguuugugu

SEQ ID NO: 2868636 - RNA, 18 nt, Human
cauggcagaguuugugug

SEQ ID NO: 2868637 - RNA, 15 nt, Human
cauggagguucuaag

SEQ ID NO: 2868638 - RNA, 22 nt, Human
cauggcagaauaaucuuugggu

SEQ ID NO: 2868639 - RNA, 21 nt, Human
caugggcacaaagggcccaga

SEQ ID NO: 2868640 - RNA, 19 nt, Human
caugggcacaaagggccca

SEQ ID NO: 2868641 - RNA, 16 nt, Human
caugggauacaaccuc

SEQ ID NO: 2868642 - RNA, 18 nt, Human
caugggauacaaccuccc

SEQ ID NO: 2868643 - RNA, 21 nt, Human
caugggauacaaccucccucu

SEQ ID NO: 2868644 - RNA, 22 nt, Human
caugggauacaaccucccucuu

SEQ ID NO: 2868645 - RNA, 21 nt, Human
caugggaggugaaaggggcac

SEQ ID NO: 2868646 - RNA, 18 nt, Human
caugggccuccugugugu

SEQ ID NO: 2868647 - RNA, 20 nt, Human
caugggcaucuaugggagag

SEQ ID NO: 2868648 - RNA, 13 nt, Human
caugggccuggcc

SEQ ID NO: 2868649 - RNA, 23 nt, Human
caugggccuggccaccucucucc

SEQ ID NO: 2868650 - RNA, 14 nt, Human
caugggccagcccc

SEQ ID NO: 2868651 - RNA, 15 nt, Human
caugggccagccccu

SEQ ID NO: 2868652 - RNA, 16 nt, Human
caugggccagccccuc

SEQ ID NO: 2868653 - RNA, 17 nt, Human
caugggccagccccucc

SEQ ID NO: 2868654 - RNA, 21 nt, Human
caugggccagccccuccaucu

SEQ ID NO: 2868655 - RNA, 13 nt, Human
caugggcucugac

SEQ ID NO: 2868656 - RNA, 13 nt, Human
caugggcucuuca

SEQ ID NO: 2868657 - RNA, 24 nt, Human
caugggccuggccaccucucuccu

SEQ ID NO: 2868658 - RNA, 12 nt, Human
caugggcuucac

SEQ ID NO: 2868659 - RNA, 13 nt, Human
caugggcuucacu

SEQ ID NO: 2868660 - RNA, 14 nt, Human
caugggcuucacug

SEQ ID NO: 2868661 - RNA, 15 nt, Human
caugggcuucacugu

SEQ ID NO: 2868662 - RNA, 16 nt, Human
caugggcuucacugua

SEQ ID NO: 2868663 - RNA, 21 nt, Human
cauggggugggguagggcuga

SEQ ID NO: 2868664 - RNA, 21 nt, Human
caugggcuucacuguauaaau

SEQ ID NO: 2868665 - RNA, 17 nt, Human
caugggcuucacuguau

SEQ ID NO: 2868666 - RNA, 20 nt, Human
caugggcuucacuguauaaa

SEQ ID NO: 2868667 - RNA, 23 nt, Human
caugggcuucacuguauaaauag

SEQ ID NO: 2868668 - RNA, 15 nt, Human
cauggggaaaaaaau

SEQ ID NO: 2868669 - RNA, 18 nt, Human
cauggggaaaaaaaucau

SEQ ID NO: 2868670 - RNA, 20 nt, Human
cauggggaaaaaaaucaucu

SEQ ID NO: 2868671 - RNA, 21 nt, Human
cauggggaaaaaaaucaucua

SEQ ID NO: 2868672 - RNA, 16 nt, Human
cauggucaacccucag

SEQ ID NO: 2868673 - RNA, 17 nt, Human
cauggucaacccucagg

SEQ ID NO: 2868674 - RNA, 14 nt, Human
caugguaccagccc

SEQ ID NO: 2868675 - RNA, 15 nt, Human
caugguaccagcccu

SEQ ID NO: 2868676 - RNA, 16 nt, Human
caugguaccagcccug

SEQ ID NO: 2868677 - RNA, 17 nt, Human
caugguaccagcccugg

SEQ ID NO: 2868678 - RNA, 23 nt, Human
cauggguuauguguaugugccau

SEQ ID NO: 2868679 - RNA, 15 nt, Human
cauggguuaugugua

SEQ ID NO: 2868680 - RNA, 18 nt, Human
cauccauaguaguaugau

SEQ ID NO: 2868681 - RNA, 12 nt, Human
cauccauccagg

SEQ ID NO: 2868682 - RNA, 16 nt, Human
cauccauaguaguaug

SEQ ID NO: 2868683 - RNA, 19 nt, Human
cauccagugacaaaccauc

SEQ ID NO: 2868684 - RNA, 13 nt, Human
cauccaguucaug

SEQ ID NO: 2868685 - RNA, 17 nt, Human
cauccaguuaaccaagu

SEQ ID NO: 2868686 - RNA, 12 nt, Human
cauccauaaauc

SEQ ID NO: 2868687 - RNA, 17 nt, Human
cauccauaaauccaguu

SEQ ID NO: 2868688 - RNA, 17 nt, Human
cauccauaccagcucgc

SEQ ID NO: 2868689 - RNA, 18 nt, Human
cauccauaguaacugaca

SEQ ID NO: 2868690 - RNA, 19 nt, Human
cauccauaguaacugacau

SEQ ID NO: 2868691 - RNA, 17 nt, Human
cauccagguucagcuug

SEQ ID NO: 2868692 - RNA, 18 nt, Human
cauccacuuacauauauu

SEQ ID NO: 2868693 - RNA, 21 nt, Human
cauccacuuacauauauuuuu

SEQ ID NO: 2868694 - RNA, 16 nt, Human
cauccagacaucauga

SEQ ID NO: 2868695 - RNA, 22 nt, Human
cauccacucuacccucccaccc

SEQ ID NO: 2868696 - RNA, 19 nt, Human
cauccacucuacccuccca

SEQ ID NO: 2868697 - RNA, 18 nt, Human
cauccacucuacccuccc

SEQ ID NO: 2868698 - RNA, 10 nt, Human
caucauuaga

SEQ ID NO: 2868699 - RNA, 13 nt, Human
caucauuagaaca

SEQ ID NO: 2868700 - RNA, 17 nt, Human
caucauuacccuucccu

SEQ ID NO: 2868701 - RNA, 20 nt, Human
caucauuacccuucccugca

SEQ ID NO: 2868702 - RNA, 22 nt, Human
caucauuacccuucccugcacu

SEQ ID NO: 2868703 - RNA, 14 nt, Human
caucauuagaacaa

SEQ ID NO: 2868704 - RNA, 22 nt, Human
caucauuccuugagaaaaacaa

SEQ ID NO: 2868705 - RNA, 17 nt, Human
caucauuccuugagaaa

SEQ ID NO: 2868706 - RNA, 14 nt, Human
caucauucccucuc

SEQ ID NO: 2868707 - RNA, 16 nt, Human
caucauucccucucau

SEQ ID NO: 2868708 - RNA, 20 nt, Human
caucauucccucucaucuca

SEQ ID NO: 2868709 - RNA, 23 nt, Human
caucauucccucucaucucaggu

SEQ ID NO: 2868710 - RNA, 23 nt, Human
cauccacugugccaugugccagg

SEQ ID NO: 2868711 - RNA, 17 nt, Human
cauccacugugccaugu

SEQ ID NO: 2868712 - RNA, 14 nt, Human
cauccacugugcca

SEQ ID NO: 2868713 - RNA, 17 nt, Human
cauccacucuacccucc

SEQ ID NO: 2868714 - RNA, 19 nt, Human
caucccuugaccaggccug

SEQ ID NO: 2868715 - RNA, 12 nt, Human
caucccugugag

SEQ ID NO: 2868716 - RNA, 13 nt, Human
caucccugugagg

SEQ ID NO: 2868717 - RNA, 23 nt, Human
caucccuugaccaggccugggcc

SEQ ID NO: 2868718 - RNA, 13 nt, Human
caucccuuuccag

SEQ ID NO: 2868719 - RNA, 20 nt, Human
caucccuugaccaggccugg

SEQ ID NO: 2868720 - RNA, 24 nt, Human
caucccugagcaggaaaguuuacc

SEQ ID NO: 2868721 - RNA, 17 nt, Human
caucccugaggagccag

SEQ ID NO: 2868722 - RNA, 13 nt, Human
caucccugccugg

SEQ ID NO: 2868723 - RNA, 14 nt, Human
caucccugccuggu

SEQ ID NO: 2868724 - RNA, 15 nt, Human
caucccugccugguc

SEQ ID NO: 2868725 - RNA, 18 nt, Human
caucccugaggagccagg

SEQ ID NO: 2868726 - RNA, 16 nt, Human
caucccugccugguca

SEQ ID NO: 2868727 - RNA, 21 nt, Human
caucacccucuuccugugauc

SEQ ID NO: 2868728 - RNA, 14 nt, Human
caucacccucuucc

SEQ ID NO: 2868729 - RNA, 22 nt, Human
caucaccgacgcgucuccuguu

SEQ ID NO: 2868730 - RNA, 19 nt, Human
caucaccgacgcgucuccu

SEQ ID NO: 2868731 - RNA, 14 nt, Human
caucaccugccugu

SEQ ID NO: 2868732 - RNA, 17 nt, Human
caucacguguacuggcu

SEQ ID NO: 2868733 - RNA, 20 nt, Human
caucacguguacuggcuccu

SEQ ID NO: 2868734 - RNA, 18 nt, Human
caucaccucaggccaggu

SEQ ID NO: 2868735 - RNA, 15 nt, Human
caucaccucaggcca

SEQ ID NO: 2868736 - RNA, 13 nt, Human
caucaccuccacc

SEQ ID NO: 2868737 - RNA, 14 nt, Human
caucaccuccacca

SEQ ID NO: 2868738 - RNA, 13 nt, Human
caucaccucugua

SEQ ID NO: 2868739 - RNA, 13 nt, Human
caucaccucaggc

SEQ ID NO: 2868740 - RNA, 12 nt, Human
caucaccucagg

SEQ ID NO: 2868741 - RNA, 16 nt, Human
caucacuauccaugca

SEQ ID NO: 2868742 - RNA, 21 nt, Human
caucacuauccaugcaccaaa

SEQ ID NO: 2868743 - RNA, 22 nt, Human
caucacuauccaugcaccaaac

SEQ ID NO: 2868744 - RNA, 16 nt, Human
caucacucugcugcuu

SEQ ID NO: 2868745 - RNA, 14 nt, Human
caucagggacagga

SEQ ID NO: 2868746 - RNA, 12 nt, Human
caucagggacag

SEQ ID NO: 2868747 - RNA, 20 nt, Human
caucaguauuaauacuaaaa

SEQ ID NO: 2868748 - RNA, 18 nt, Human
caucagggacaggaugac

SEQ ID NO: 2868749 - RNA, 11 nt, Human
caucagggccu

SEQ ID NO: 2868750 - RNA, 12 nt, Human
caucagggccug

SEQ ID NO: 2868751 - RNA, 13 nt, Human
caucagggccugg

SEQ ID NO: 2868752 - RNA, 15 nt, Human
caucagggccugggg

SEQ ID NO: 2868753 - RNA, 16 nt, Human
caucagggccuggggc

SEQ ID NO: 2868754 - RNA, 18 nt, Human
caucagggccuggggccu

SEQ ID NO: 2868755 - RNA, 21 nt, Human
caucagggccuggggccugag

SEQ ID NO: 2868756 - RNA, 22 nt, Human
caucagggccuggggccugaga

SEQ ID NO: 2868757 - RNA, 23 nt, Human
caucagggccuggggccugagag

SEQ ID NO: 2868758 - RNA, 12 nt, Human
caucagggggaa

SEQ ID NO: 2868759 - RNA, 14 nt, Human
caucagggggaaga

SEQ ID NO: 2868760 - RNA, 17 nt, Human
caucagggggaagaagc

SEQ ID NO: 2868761 - RNA, 18 nt, Human
caucagggggaagaagca

SEQ ID NO: 2868762 - RNA, 19 nt, Human
caucagggggaagaagcag

SEQ ID NO: 2868763 - RNA, 21 nt, Human
caucagggggaagaagcagag

SEQ ID NO: 2868764 - RNA, 12 nt, Human
caucauaaaaua

SEQ ID NO: 2868765 - RNA, 20 nt, Human
caucaguuagagcugacaca

SEQ ID NO: 2868766 - RNA, 15 nt, Human
caucaguuauucauu

SEQ ID NO: 2868767 - RNA, 19 nt, Human
caucaguuccuuugugugu

SEQ ID NO: 2868768 - RNA, 15 nt, Human
caucaguuagagcug

SEQ ID NO: 2868769 - RNA, 16 nt, Human
caucaguuagagcuga

SEQ ID NO: 2868770 - RNA, 18 nt, Human
caucaguuagagcugaca

SEQ ID NO: 2868771 - RNA, 14 nt, Human
caucaguggagcca

SEQ ID NO: 2868772 - RNA, 15 nt, Human
caucagucccuaugu

SEQ ID NO: 2868773 - RNA, 17 nt, Human
caucagucccuauguau

SEQ ID NO: 2868774 - RNA, 20 nt, Human
caucaugaggaaagcaguug

SEQ ID NO: 2868775 - RNA, 16 nt, Human
caucaugaauuuuaca

SEQ ID NO: 2868776 - RNA, 21 nt, Human
caucaucaaggcacugccuga

SEQ ID NO: 2868777 - RNA, 17 nt, Human
caucaucaguggagcca

SEQ ID NO: 2868778 - RNA, 13 nt, Human
caucaucagggcc

SEQ ID NO: 2868779 - RNA, 14 nt, Human
caucaucagggccu

SEQ ID NO: 2868780 - RNA, 15 nt, Human
caucaucagggccug

SEQ ID NO: 2868781 - RNA, 16 nt, Human
caucaucagggccugg

SEQ ID NO: 2868782 - RNA, 20 nt, Human
caucauaguaaaagaaauga

SEQ ID NO: 2868783 - RNA, 13 nt, Human
caucaucaaggca

SEQ ID NO: 2868784 - RNA, 19 nt, Human
caucaucaaggcacugccu

SEQ ID NO: 2868785 - RNA, 20 nt, Human
caucaucaaggcacugccug

SEQ ID NO: 2868786 - RNA, 20 nt, Human
caucauaaaauaaaguauau

SEQ ID NO: 2868787 - RNA, 18 nt, Human
caucauaaaauaaaguau

SEQ ID NO: 2868788 - RNA, 14 nt, Human
caucauaaaauaaa

SEQ ID NO: 2868789 - RNA, 13 nt, Human
caucauaaaauaa

SEQ ID NO: 2868790 - RNA, 23 nt, Human
caucauaaaauaaaguauauaua

SEQ ID NO: 2868791 - RNA, 22 nt, Human
caucauaaaauaaaguauauau

SEQ ID NO: 2868792 - RNA, 15 nt, Human
caucaugucuggcua

SEQ ID NO: 2868793 - RNA, 14 nt, Human
caucaugucuggcu

SEQ ID NO: 2868794 - RNA, 10 nt, Human
caucauguca

SEQ ID NO: 2868795 - RNA, 13 nt, Human
caucaugucuggc

SEQ ID NO: 2868796 - RNA, 12 nt, Human
caucaugcaugu

SEQ ID NO: 2868797 - RNA, 12 nt, Human
caucaugcagcu

SEQ ID NO: 2868798 - RNA, 13 nt, Human
caucaugcagcuc

SEQ ID NO: 2868799 - RNA, 21 nt, Human
caucaugcuggaaccugcaaa

SEQ ID NO: 2868800 - RNA, 22 nt, Human
caucaugcuggaaccugcaaaa

SEQ ID NO: 2868801 - RNA, 23 nt, Human
cauauaccuauaauguguguaug

SEQ ID NO: 2868802 - RNA, 18 nt, Human
cauauacuguucuucauu

SEQ ID NO: 2868803 - RNA, 21 nt, Human
cauauacuguucuucauuuua

SEQ ID NO: 2868804 - RNA, 14 nt, Human
cauauagagaugaa

SEQ ID NO: 2868805 - RNA, 20 nt, Human
cauauagagaugaaguuugu

SEQ ID NO: 2868806 - RNA, 18 nt, Human
cauauagcaaaacuuuua

SEQ ID NO: 2868807 - RNA, 19 nt, Human
cauauagcaaaacuuuuaa

SEQ ID NO: 2868808 - RNA, 21 nt, Human
cauauagcaaaacuuuuaaac

SEQ ID NO: 2868809 - RNA, 22 nt, Human
cauauagcaaaacuuuuaaacu

SEQ ID NO: 2868810 - RNA, 19 nt, Human
cauauagccauugaucaua

SEQ ID NO: 2868811 - RNA, 18 nt, Human
cauauaggugauguuugc

SEQ ID NO: 2868812 - RNA, 19 nt, Human
cauauaggugauguuugcu

SEQ ID NO: 2868813 - RNA, 18 nt, Human
cauagugaugguuccccu

SEQ ID NO: 2868814 - RNA, 19 nt, Human
cauagugaugguuccccug

SEQ ID NO: 2868815 - RNA, 23 nt, Human
cauauauauguuuuaagaggcag

SEQ ID NO: 2868816 - RNA, 13 nt, Human
cauauauauuaca

SEQ ID NO: 2868817 - RNA, 12 nt, Human
cauauauauuac

SEQ ID NO: 2868818 - RNA, 16 nt, Human
cauauauauuacaagg

SEQ ID NO: 2868819 - RNA, 20 nt, Human
cauauauccuuuucuucuau

SEQ ID NO: 2868820 - RNA, 22 nt, Human
cauauauccuuuucuucuaugu

SEQ ID NO: 2868821 - RNA, 23 nt, Human
cauauauccuuuucuucuaugua

SEQ ID NO: 2868822 - RNA, 17 nt, Human
cauauaugaggacuugu

SEQ ID NO: 2868823 - RNA, 22 nt, Human
cauauauuuuuaaaaaaugaaa

SEQ ID NO: 2868824 - RNA, 14 nt, Human
cauaucuacagaua

SEQ ID NO: 2868825 - RNA, 17 nt, Human
cauaucgcugacuucau

SEQ ID NO: 2868826 - RNA, 18 nt, Human
cauaucgcugacuucaug

SEQ ID NO: 2868827 - RNA, 22 nt, Human
cauaucgcugacuucauggaau

SEQ ID NO: 2868828 - RNA, 18 nt, Human
cauaucggcucacaaaga

SEQ ID NO: 2868829 - RNA, 15 nt, Human
cagugcuguacuuga

SEQ ID NO: 2868830 - RNA, 19 nt, Human
cagugcuguccaugcuucu

SEQ ID NO: 2868831 - RNA, 22 nt, Human
cagugcuguccaugcuucucau

SEQ ID NO: 2868832 - RNA, 20 nt, Human
cagugcuguggccugggcaa

SEQ ID NO: 2868833 - RNA, 12 nt, Human
cagugcugugug

SEQ ID NO: 2868834 - RNA, 18 nt, Human
cagugcuguggccugggc

SEQ ID NO: 2868835 - RNA, 15 nt, Human
cagugcuguggccug

SEQ ID NO: 2868836 - RNA, 13 nt, Human
cagugcuguggcc

SEQ ID NO: 2868837 - RNA, 12 nt, Human
cagugcuguggc

SEQ ID NO: 2868838 - RNA, 15 nt, Human
cagugcuugccacag

SEQ ID NO: 2868839 - RNA, 17 nt, Human
cagugcuugccacagag

SEQ ID NO: 2868840 - RNA, 18 nt, Human
cagugcuugccacagagc

SEQ ID NO: 2868841 - RNA, 17 nt, Human
cagugcuguggccuggg

SEQ ID NO: 2868842 - RNA, 13 nt, Human
cauaguaaaagaa

SEQ ID NO: 2868843 - RNA, 14 nt, Human
cagugcuugccaca

SEQ ID NO: 2868844 - RNA, 20 nt, Human
cagugcuucagccugaggcu

SEQ ID NO: 2868845 - RNA, 19 nt, Human
cagugcuucagccugaggc

SEQ ID NO: 2868846 - RNA, 18 nt, Human
cagugcuucagccugagg

SEQ ID NO: 2868847 - RNA, 17 nt, Human
cagugcuucagccugag

SEQ ID NO: 2868848 - RNA, 16 nt, Human
cagugcuucagccuga

SEQ ID NO: 2868849 - RNA, 15 nt, Human
cagugcuucagccug

SEQ ID NO: 2868850 - RNA, 14 nt, Human
cagugcuucagccu

SEQ ID NO: 2868851 - RNA, 19 nt, Human
cagugcuguggccugggca

SEQ ID NO: 2868852 - RNA, 15 nt, Human
cauaguaugguggcu

SEQ ID NO: 2868853 - RNA, 20 nt, Human
cauaguaaguucagcacuug

SEQ ID NO: 2868854 - RNA, 21 nt, Human
cauaguaaguucagcacuugu

SEQ ID NO: 2868855 - RNA, 22 nt, Human
cauaguaacuucuuauggaauu

SEQ ID NO: 2868856 - RNA, 21 nt, Human
cauaguaacuucuuauggaau

SEQ ID NO: 2868857 - RNA, 15 nt, Human
cauaguaacugacau

SEQ ID NO: 2868858 - RNA, 20 nt, Human
cauaguaacugacaugauua

SEQ ID NO: 2868859 - RNA, 24 nt, Human
cauaguaacuucuuauggaauuga

SEQ ID NO: 2868860 - RNA, 23 nt, Human
cauaguaacuucuuauggaauug

SEQ ID NO: 2868861 - RNA, 16 nt, Human
cauaguaugguggcug

SEQ ID NO: 2868862 - RNA, 20 nt, Human
cauaguaguaugaugauaca

SEQ ID NO: 2868863 - RNA, 13 nt, Human
cauaguaguuuuu

SEQ ID NO: 2868864 - RNA, 17 nt, Human
cauaguaguuuuuacag

SEQ ID NO: 2868865 - RNA, 20 nt, Human
cauaguaguuuuuacagcug

SEQ ID NO: 2868866 - RNA, 13 nt, Human
cauagucacaugg

SEQ ID NO: 2868867 - RNA, 13 nt, Human
cauauugugccaa

SEQ ID NO: 2868868 - RNA, 20 nt, Human
cauauugugccaauauguau

SEQ ID NO: 2868869 - RNA, 14 nt, Human
cauauugguauuca

SEQ ID NO: 2868870 - RNA, 16 nt, Human
cauauugguauucacu

SEQ ID NO: 2868871 - RNA, 16 nt, Human
cauauuggaaaaauca

SEQ ID NO: 2868872 - RNA, 17 nt, Human
cauauuggcauggauuu

SEQ ID NO: 2868873 - RNA, 15 nt, Human
cauauucuugugcuu

SEQ ID NO: 2868874 - RNA, 17 nt, Human
cauauucuuucaauucu

SEQ ID NO: 2868875 - RNA, 20 nt, Human
cauauucuuuucugcaaaau

SEQ ID NO: 2868876 - RNA, 22 nt, Human
cauaugacauucaugccuggcu

SEQ ID NO: 2868877 - RNA, 16 nt, Human
cauauugaauguuucc

SEQ ID NO: 2868878 - RNA, 13 nt, Human
cauauugaugaaa

SEQ ID NO: 2868879 - RNA, 14 nt, Human
cauauugaugaaaa

SEQ ID NO: 2868880 - RNA, 15 nt, Human
cauauugaugaaaag

SEQ ID NO: 2868881 - RNA, 16 nt, Human
cauauugaugaaaaga

SEQ ID NO: 2868882 - RNA, 20 nt, Human
cauauugaugaaaagauuua

SEQ ID NO: 2868883 - RNA, 22 nt, Human
cauauucuguuggccaguguga

SEQ ID NO: 2868884 - RNA, 19 nt, Human
cauaugacauucaugccug

SEQ ID NO: 2868885 - RNA, 21 nt, Human
cauaugacauucaugccuggc

SEQ ID NO: 2868886 - RNA, 13 nt, Human
cauaucucuaauu

SEQ ID NO: 2868887 - RNA, 20 nt, Human
cauaucuugcgaauccaagc

SEQ ID NO: 2868888 - RNA, 21 nt, Human
cauaucuugcgaauccaagcu

SEQ ID NO: 2868889 - RNA, 22 nt, Human
cauaucuugcgaauccaagcuc

SEQ ID NO: 2868890 - RNA, 23 nt, Human
cauaucuugcgaauccaagcucc

SEQ ID NO: 2868891 - RNA, 18 nt, Human
cauaucuuaaagaaacag

SEQ ID NO: 2868892 - RNA, 20 nt, Human
cauaucuuaaagaaacagcu

SEQ ID NO: 2868893 - RNA, 23 nt, Human
cauaucuuaaagaaacagcuuuc

SEQ ID NO: 2868894 - RNA, 13 nt, Human
cauaugaaauccu

SEQ ID NO: 2868895 - RNA, 23 nt, Human
cauauugugcuucacaguagagc

SEQ ID NO: 2868896 - RNA, 21 nt, Human
cauauugugcuucacaguaga

SEQ ID NO: 2868897 - RNA, 21 nt, Human
cauauugugccaauauguauu

SEQ ID NO: 2868898 - RNA, 22 nt, Human
cauauugugccaauauguauug

SEQ ID NO: 2868899 - RNA, 14 nt, Human
cauauuuaaagaca

SEQ ID NO: 2868900 - RNA, 13 nt, Human
cauauuuaacugg

SEQ ID NO: 2868901 - RNA, 14 nt, Human
cauauuuaacuggu

SEQ ID NO: 2868902 - RNA, 10 nt, Human
cauauuuaau

SEQ ID NO: 2868903 - RNA, 13 nt, Human
cauauuuaauguu

SEQ ID NO: 2868904 - RNA, 14 nt, Human
cauauuuaauguuu

SEQ ID NO: 2868905 - RNA, 15 nt, Human
cauauuuaauguuuu

SEQ ID NO: 2868906 - RNA, 16 nt, Human
cauauuuaauguuuua

SEQ ID NO: 2868907 - RNA, 18 nt, Human
cauauuuaauguuuuaaa

SEQ ID NO: 2868908 - RNA, 20 nt, Human
cauauuuaauguuuuaaaug

SEQ ID NO: 2868909 - RNA, 21 nt, Human
cauauuuaauguuuuaaaugu

SEQ ID NO: 2868910 - RNA, 22 nt, Human
cauauuuaauguuuuaaaugua

SEQ ID NO: 2868911 - RNA, 23 nt, Human
cauauuuaauguuuuaaauguac

SEQ ID NO: 2868912 - RNA, 12 nt, Human
cauauuuggaag

SEQ ID NO: 2868913 - RNA, 13 nt, Human
cauauuuggaaga

SEQ ID NO: 2868914 - RNA, 15 nt, Human
cauauuuggaagaaa

SEQ ID NO: 2868915 - RNA, 14 nt, Human
cauauuuguggaau

SEQ ID NO: 2868916 - RNA, 16 nt, Human
caucaacaaagaaaua

SEQ ID NO: 2868917 - RNA, 16 nt, Human
caucaacaagauuucc

SEQ ID NO: 2868918 - RNA, 15 nt, Human
caucaaauggaagac

SEQ ID NO: 2868919 - RNA, 16 nt, Human
caucaaauggaagaca

SEQ ID NO: 2868920 - RNA, 17 nt, Human
caucaaauggaagacac

SEQ ID NO: 2868921 - RNA, 19 nt, Human
caucaaauggaagacacau

SEQ ID NO: 2868922 - RNA, 14 nt, Human
caugaagagcaaaa

SEQ ID NO: 2868923 - RNA, 15 nt, Human
caugaagagcaaaaa

SEQ ID NO: 2868924 - RNA, 17 nt, Human
caugaagagcaaaaaua

SEQ ID NO: 2868925 - RNA, 19 nt, Human
caugaagagcaaaaauauc

SEQ ID NO: 2868926 - RNA, 20 nt, Human
caugacucguauaugucuca

SEQ ID NO: 2868927 - RNA, 23 nt, Human
caugacucguauaugucucaggu

SEQ ID NO: 2868928 - RNA, 18 nt, Human
caugaccuuauccuuccu

SEQ ID NO: 2868929 - RNA, 20 nt, Human
caugaccuuauccuuccucu

SEQ ID NO: 2868930 - RNA, 14 nt, Human
caugaccuccaggg

SEQ ID NO: 2868931 - RNA, 22 nt, Human
caugaccugaucacuagccugu

SEQ ID NO: 2868932 - RNA, 23 nt, Human
caugaccugaucacuagccuguc

SEQ ID NO: 2868933 - RNA, 17 nt, Human
caugagauguguggacu

SEQ ID NO: 2868934 - RNA, 15 nt, Human
caugagaugugugga

SEQ ID NO: 2868935 - RNA, 23 nt, Human
caugagauguguggacuguggca

SEQ ID NO: 2868936 - RNA, 12 nt, Human
caugagaugugu

SEQ ID NO: 2868937 - RNA, 14 nt, Human
caugagaugugugg

SEQ ID NO: 2868938 - RNA, 22 nt, Human
caugagacccuggugccuggcu

SEQ ID NO: 2868939 - RNA, 23 nt, Human
caugagacccuggugccuggcuc

SEQ ID NO: 2868940 - RNA, 21 nt, Human
caugacuuguagcauauucuu

SEQ ID NO: 2868941 - RNA, 16 nt, Human
caugagaacaaacaga

SEQ ID NO: 2868942 - RNA, 20 nt, Human
caugagaauaagagaaagaa

SEQ ID NO: 2868943 - RNA, 19 nt, Human
caugagaaucuauauuuaa

SEQ ID NO: 2868944 - RNA, 12 nt, Human
caugagaaucua

SEQ ID NO: 2868945 - RNA, 22 nt, Human
caugagaaguugauauagaaca

SEQ ID NO: 2868946 - RNA, 21 nt, Human
caugagccucagcauccuggc

SEQ ID NO: 2868947 - RNA, 20 nt, Human
caugagccucagcauccugg

SEQ ID NO: 2868948 - RNA, 19 nt, Human
caugagccucagcauccug

SEQ ID NO: 2868949 - RNA, 18 nt, Human
caugagccucagcauccu

SEQ ID NO: 2868950 - RNA, 17 nt, Human
caugagccucagcaucc

SEQ ID NO: 2868951 - RNA, 15 nt, Human
caugagccucagcau

SEQ ID NO: 2868952 - RNA, 12 nt, Human
caugagccucag

SEQ ID NO: 2868953 - RNA, 17 nt, Human
caugagcauuggauaca

SEQ ID NO: 2868954 - RNA, 20 nt, Human
caugagcauuggauacagca

SEQ ID NO: 2868955 - RNA, 22 nt, Human
caugagcauuggauacagcagu

SEQ ID NO: 2868956 - RNA, 23 nt, Human
caugagcauuggauacagcagua

SEQ ID NO: 2868957 - RNA, 23 nt, Human
caugaggaggggccccccugccc

SEQ ID NO: 2868958 - RNA, 22 nt, Human
caugaggaggggccccccugcc

SEQ ID NO: 2868959 - RNA, 23 nt, Human
caugaggcaaugucaggaacaga

SEQ ID NO: 2868960 - RNA, 22 nt, Human
caugaggcaaugucaggaacag

SEQ ID NO: 2868961 - RNA, 24 nt, Human
caugaggcaaugucaggaacagaa

SEQ ID NO: 2868962 - RNA, 18 nt, Human
caugaggaacuguagaug

SEQ ID NO: 2868963 - RNA, 14 nt, Human
caugagcuuuuaua

SEQ ID NO: 2868964 - RNA, 21 nt, Human
caugaggaaagcaguugaaau

SEQ ID NO: 2868965 - RNA, 22 nt, Human
caugaggaaagcaguugaaaug

SEQ ID NO: 2868966 - RNA, 22 nt, Human
caugaggaacuguagaugaugu

SEQ ID NO: 2868967 - RNA, 15 nt, Human
caugaggaaggaaca

SEQ ID NO: 2868968 - RNA, 20 nt, Human
caugaggacaugauggagcg

SEQ ID NO: 2868969 - RNA, 22 nt, Human
caugaggacaugauggagcgca

SEQ ID NO: 2868970 - RNA, 21 nt, Human
caugaggacaugauggagcgc

SEQ ID NO: 2868971 - RNA, 21 nt, Human
caugaggaggggccccccugc

SEQ ID NO: 2868972 - RNA, 13 nt, Human
caugaggaggggc

SEQ ID NO: 2868973 - RNA, 19 nt, Human
caugaggagaaaaaaagca

SEQ ID NO: 2868974 - RNA, 23 nt, Human
caugagccucagcauccuggcac

SEQ ID NO: 2868975 - RNA, 22 nt, Human
caugagccucagcauccuggca

SEQ ID NO: 2868976 - RNA, 21 nt, Human
caugaguccuugaaaauauuu

SEQ ID NO: 2868977 - RNA, 14 nt, Human
caugagugcgugcu

SEQ ID NO: 2868978 - RNA, 17 nt, Human
caugaguccuugaaaau

SEQ ID NO: 2868979 - RNA, 18 nt, Human
caugaguccuugaaaaua

SEQ ID NO: 2868980 - RNA, 19 nt, Human
caugaguccuugaaaauau

SEQ ID NO: 2868981 - RNA, 20 nt, Human
caugaguccuugaaaauauu

SEQ ID NO: 2868982 - RNA, 13 nt, Human
caugauauuuugu

SEQ ID NO: 2868983 - RNA, 20 nt, Human
caugauauuuuguuuuuccc

SEQ ID NO: 2868984 - RNA, 21 nt, Human
caugauauuuuguuuuucccc

SEQ ID NO: 2868985 - RNA, 13 nt, Human
caugauaaaugau

SEQ ID NO: 2868986 - RNA, 22 nt, Human
caugaguuugcccugguuucac

SEQ ID NO: 2868987 - RNA, 16 nt, Human
caugaguuugcccugg

SEQ ID NO: 2868988 - RNA, 15 nt, Human
caugaguuugcccug

SEQ ID NO: 2868989 - RNA, 16 nt, Human
caugaguuuaaaucaa

SEQ ID NO: 2868990 - RNA, 18 nt, Human
caugagugcgugcucagu

SEQ ID NO: 2868991 - RNA, 18 nt, Human
caugaguuacugugcauu

SEQ ID NO: 2868992 - RNA, 16 nt, Human
caugcacucagcucuu

SEQ ID NO: 2868993 - RNA, 12 nt, Human
caugcacugacc

SEQ ID NO: 2868994 - RNA, 14 nt, Human
caugcacugacccu

SEQ ID NO: 2868995 - RNA, 17 nt, Human
caugcacugacccuucc

SEQ ID NO: 2868996 - RNA, 18 nt, Human
caugcacugacccuucca

SEQ ID NO: 2868997 - RNA, 19 nt, Human
caugcacugacccuuccag

SEQ ID NO: 2868998 - RNA, 20 nt, Human
caugcacugacccuuccaga

SEQ ID NO: 2868999 - RNA, 22 nt, Human
caugcacugacccuuccagaca

SEQ ID NO: 2869000 - RNA, 15 nt, Human
caugcacucagcucu

SEQ ID NO: 2869001 - RNA, 15 nt, Human
caugaugagcuccuc

SEQ ID NO: 2869002 - RNA, 19 nt, Human
caugaugagcuccucuucc

SEQ ID NO: 2869003 - RNA, 18 nt, Human
caugaugagcuccucuuc

SEQ ID NO: 2869004 - RNA, 22 nt, Human
caugaaauauagaucaguuaua

SEQ ID NO: 2869005 - RNA, 19 nt, Human
caugaaacagaaacaaaaa

SEQ ID NO: 2869006 - RNA, 14 nt, Human
caugaaacuccacc

SEQ ID NO: 2869007 - RNA, 15 nt, Human
caugaaacuccaccu

SEQ ID NO: 2869008 - RNA, 13 nt, Human
caugaaacaaagc

SEQ ID NO: 2869009 - RNA, 11 nt, Human
caugaaacacc

SEQ ID NO: 2869010 - RNA, 11 nt, Human
caugaaaauuu

SEQ ID NO: 2869011 - RNA, 13 nt, Human
caugaaaauuuua

SEQ ID NO: 2869012 - RNA, 14 nt, Human
caugaaaauuuuaa

SEQ ID NO: 2869013 - RNA, 17 nt, Human
caugaaaauuuuaaaaa

SEQ ID NO: 2869014 - RNA, 19 nt, Human
caugaaaauuuuaaaaaua

SEQ ID NO: 2869015 - RNA, 15 nt, Human
caugaaacagaaaca

SEQ ID NO: 2869016 - RNA, 13 nt, Human
caugaaacagaaa

SEQ ID NO: 2869017 - RNA, 22 nt, Human
caugaaaugauagauuugaccu

SEQ ID NO: 2869018 - RNA, 13 nt, Human
caugaaauaugca

SEQ ID NO: 2869019 - RNA, 14 nt, Human
caugaaauaugcau

SEQ ID NO: 2869020 - RNA, 15 nt, Human
caugaaauaugcauc

SEQ ID NO: 2869021 - RNA, 24 nt, Human
caugaaaguagacaguuuugagaa

SEQ ID NO: 2869022 - RNA, 22 nt, Human
caugaaaguagcagugugaagu

SEQ ID NO: 2869023 - RNA, 24 nt, Human
caugaaauugucuagcagagcagg

SEQ ID NO: 2869024 - RNA, 14 nt, Human
caugaaauuuuuaa

SEQ ID NO: 2869025 - RNA, 16 nt, Human
caugaaauuuuuguaa

SEQ ID NO: 2869026 - RNA, 17 nt, Human
caugaaauuuuuguaaa

SEQ ID NO: 2869027 - RNA, 18 nt, Human
caugaaauuuuuguaaau

SEQ ID NO: 2869028 - RNA, 14 nt, Human
caugaaauuacuua

SEQ ID NO: 2869029 - RNA, 18 nt, Human
caugaacacccuuagaaa

SEQ ID NO: 2869030 - RNA, 22 nt, Human
caugaacagaaaacauucugau

SEQ ID NO: 2869031 - RNA, 23 nt, Human
caugaacagaaaacauucugauu

SEQ ID NO: 2869032 - RNA, 17 nt, Human
caugaagacaggacagu

SEQ ID NO: 2869033 - RNA, 16 nt, Human
caugaagacaggacag

SEQ ID NO: 2869034 - RNA, 15 nt, Human
caugaagacaggaca

SEQ ID NO: 2869035 - RNA, 14 nt, Human
caugaagacaggac

SEQ ID NO: 2869036 - RNA, 14 nt, Human
caugaagacaggau

SEQ ID NO: 2869037 - RNA, 12 nt, Human
caugaagagaag

SEQ ID NO: 2869038 - RNA, 15 nt, Human
caugaagagaagcaa

SEQ ID NO: 2869039 - RNA, 16 nt, Human
caugaagagaagcaau

SEQ ID NO: 2869040 - RNA, 18 nt, Human
caugaagagaagcaauuu

SEQ ID NO: 2869041 - RNA, 21 nt, Human
caugaagagaagcaauuuugg

SEQ ID NO: 2869042 - RNA, 18 nt, Human
caucuuuuuuguuaacug

SEQ ID NO: 2869043 - RNA, 11 nt, Human
caucuuuuuaa

SEQ ID NO: 2869044 - RNA, 16 nt, Human
caucuuuuuaaagcuu

SEQ ID NO: 2869045 - RNA, 21 nt, Human
caucuuuuuaaagcuuaucca

SEQ ID NO: 2869046 - RNA, 22 nt, Human
caucuuuuuaaagcuuauccau

SEQ ID NO: 2869047 - RNA, 23 nt, Human
caucuuuuuaaagcuuauccaua

SEQ ID NO: 2869048 - RNA, 21 nt, Human
caucuuuuuaaccugcaaaau

SEQ ID NO: 2869049 - RNA, 13 nt, Human
caucuuuuacauu

SEQ ID NO: 2869050 - RNA, 13 nt, Human
caucuuuuaaaga

SEQ ID NO: 2869051 - RNA, 15 nt, Human
caucuuuuaaagaaa

SEQ ID NO: 2869052 - RNA, 14 nt, Human
caucuuuuaagaca

SEQ ID NO: 2869053 - RNA, 16 nt, Human
caucuuuuaagacaaa

SEQ ID NO: 2869054 - RNA, 21 nt, Human
caucuuuugaggcuucuguuc

SEQ ID NO: 2869055 - RNA, 14 nt, Human
caucuuugccucuc

SEQ ID NO: 2869056 - RNA, 17 nt, Human
caucuuugccuugggcu

SEQ ID NO: 2869057 - RNA, 15 nt, Human
caucuuugccuuggg

SEQ ID NO: 2869058 - RNA, 22 nt, Human
caucuuugccuugggcugcucc

SEQ ID NO: 2869059 - RNA, 23 nt, Human
caucuuugccuugggcugcuccu

SEQ ID NO: 2869060 - RNA, 11 nt, Human
caucuuugggg

SEQ ID NO: 2869061 - RNA, 12 nt, Human
caucuuugggga

SEQ ID NO: 2869062 - RNA, 15 nt, Human
caucuuuggggaggu

SEQ ID NO: 2869063 - RNA, 18 nt, Human
caucuuuggggagguguu

SEQ ID NO: 2869064 - RNA, 21 nt, Human
caucuuuggggagguguucac

SEQ ID NO: 2869065 - RNA, 19 nt, Human
caucuuugacacucugcag

SEQ ID NO: 2869066 - RNA, 21 nt, Human
caucuuuccugauggcaggau

SEQ ID NO: 2869067 - RNA, 21 nt, Human
caucuuucuucuauuuuauuc

SEQ ID NO: 2869068 - RNA, 16 nt, Human
caucuuucuucuauuu

SEQ ID NO: 2869069 - RNA, 17 nt, Human
caucuuuaucuguucuu

SEQ ID NO: 2869070 - RNA, 22 nt, Human
caucuuuacaaaacuacaugag

SEQ ID NO: 2869071 - RNA, 16 nt, Human
caucuuuaucuguucu

SEQ ID NO: 2869072 - RNA, 19 nt, Human
caucuuuccugauggcagg

SEQ ID NO: 2869073 - RNA, 13 nt, Human
caucuuuccuguc

SEQ ID NO: 2869074 - RNA, 11 nt, Human
caucuuucucu

SEQ ID NO: 2869075 - RNA, 20 nt, Human
caucuuucucuuuucuaaaa

SEQ ID NO: 2869076 - RNA, 22 nt, Human
caucucucuacuccuaccucag

SEQ ID NO: 2869077 - RNA, 21 nt, Human
caucucucuacuccuaccuca

SEQ ID NO: 2869078 - RNA, 23 nt, Human
caucucucccuccccugccauuu

SEQ ID NO: 2869079 - RNA, 20 nt, Human
caucucucccuccccugcca

SEQ ID NO: 2869080 - RNA, 16 nt, Human
caucucucccuccccu

SEQ ID NO: 2869081 - RNA, 15 nt, Human
caucucucccucccc

SEQ ID NO: 2869082 - RNA, 12 nt, Human
caucucucccuc

SEQ ID NO: 2869083 - RNA, 16 nt, Human
caucucucauccucca

SEQ ID NO: 2869084 - RNA, 17 nt, Human
caucucucauccuccag

SEQ ID NO: 2869085 - RNA, 12 nt, Human
caucucucccca

SEQ ID NO: 2869086 - RNA, 13 nt, Human
caucucuccccaa

SEQ ID NO: 2869087 - RNA, 23 nt, Human
caucucucuacuccuaccucagc

SEQ ID NO: 2869088 - RNA, 11 nt, Human
caucucugcac

SEQ ID NO: 2869089 - RNA, 13 nt, Human
caucucugcuugg

SEQ ID NO: 2869090 - RNA, 14 nt, Human
caucucuggaugcc

SEQ ID NO: 2869091 - RNA, 16 nt, Human
caucucuggaugccug

SEQ ID NO: 2869092 - RNA, 15 nt, Human
caucugaagagcaga

SEQ ID NO: 2869093 - RNA, 19 nt, Human
caucugaaggggcaaauuc

SEQ ID NO: 2869094 - RNA, 21 nt, Human
caucugaaggggcaaauucuu

SEQ ID NO: 2869095 - RNA, 22 nt, Human
caucugaaggggcaaauucuuu

SEQ ID NO: 2869096 - RNA, 18 nt, Human
caucugaauuugcccugg

SEQ ID NO: 2869097 - RNA, 19 nt, Human
caucugaauuugcccuggg

SEQ ID NO: 2869098 - RNA, 20 nt, Human
caucugaauuugcccuggga

SEQ ID NO: 2869099 - RNA, 23 nt, Human
caucugaauuugcccugggaaac

SEQ ID NO: 2869100 - RNA, 14 nt, Human
caucugaaaguaga

SEQ ID NO: 2869101 - RNA, 14 nt, Human
caucucuuuguaca

SEQ ID NO: 2869102 - RNA, 17 nt, Human
caucugccccuccccca

SEQ ID NO: 2869103 - RNA, 16 nt, Human
caucugccccuccccc

SEQ ID NO: 2869104 - RNA, 15 nt, Human
caucugccccucccc

SEQ ID NO: 2869105 - RNA, 14 nt, Human
caucugccccuccc

SEQ ID NO: 2869106 - RNA, 13 nt, Human
caucugccccucc

SEQ ID NO: 2869107 - RNA, 11 nt, Human
caucugccccu

SEQ ID NO: 2869108 - RNA, 20 nt, Human
caucugcauuuucaccccac

SEQ ID NO: 2869109 - RNA, 17 nt, Human
caucugcccaacugugu

SEQ ID NO: 2869110 - RNA, 19 nt, Human
caucugcccaacuguguag

SEQ ID NO: 2869111 - RNA, 22 nt, Human
caucugcccaacuguguagcau

SEQ ID NO: 2869112 - RNA, 19 nt, Human
caucugcauuuucacccca

SEQ ID NO: 2869113 - RNA, 13 nt, Human
caucugcacccuu

SEQ ID NO: 2869114 - RNA, 15 nt, Human
caucugcacccuucu

SEQ ID NO: 2869115 - RNA, 16 nt, Human
caucugcacccuucuu

SEQ ID NO: 2869116 - RNA, 17 nt, Human
caucugcacccuucuuu

SEQ ID NO: 2869117 - RNA, 18 nt, Human
caucugcacccuucuuuu

SEQ ID NO: 2869118 - RNA, 19 nt, Human
caucugcacccuucuuuuc

SEQ ID NO: 2869119 - RNA, 20 nt, Human
caucugcacccuucuuuucu

SEQ ID NO: 2869120 - RNA, 21 nt, Human
caucugcacccuucuuuucuc

SEQ ID NO: 2869121 - RNA, 22 nt, Human
caucugcacccuucuuuucuca

SEQ ID NO: 2869122 - RNA, 16 nt, Human
caucugcauugcccag

SEQ ID NO: 2869123 - RNA, 17 nt, Human
caucugcauugcccagu

SEQ ID NO: 2869124 - RNA, 18 nt, Human
caucugcauugcccaguc

SEQ ID NO: 2869125 - RNA, 21 nt, Human
caucucgcucccucccaggac

SEQ ID NO: 2869126 - RNA, 22 nt, Human
caucucgcucccucccaggacu

SEQ ID NO: 2869127 - RNA, 14 nt, Human
caucucggagcauc

SEQ ID NO: 2869128 - RNA, 15 nt, Human
caucucggagcaucc

SEQ ID NO: 2869129 - RNA, 20 nt, Human
caucucggagcaucccggag

SEQ ID NO: 2869130 - RNA, 21 nt, Human
caucucggagcaucccggagg

SEQ ID NO: 2869131 - RNA, 20 nt, Human
caucucgcucccucccagga

SEQ ID NO: 2869132 - RNA, 19 nt, Human
caucucgcucccucccagg

SEQ ID NO: 2869133 - RNA, 17 nt, Human
caucucgcucccuccca

SEQ ID NO: 2869134 - RNA, 14 nt, Human
caucucgcucccuc

SEQ ID NO: 2869135 - RNA, 18 nt, Human
caucuccuauaaucuguc

SEQ ID NO: 2869136 - RNA, 19 nt, Human
caucuccuauaaucuguca

SEQ ID NO: 2869137 - RNA, 20 nt, Human
caucuccuauaaucugucaa

SEQ ID NO: 2869138 - RNA, 21 nt, Human
caucuccuauaaucugucaaa

SEQ ID NO: 2869139 - RNA, 13 nt, Human
caucucccuuccu

SEQ ID NO: 2869140 - RNA, 22 nt, Human
caucucccuuccugugggagca

SEQ ID NO: 2869141 - RNA, 16 nt, Human
cauccgccuuuuguau

SEQ ID NO: 2869142 - RNA, 19 nt, Human
cauccgccuuuuguauaca

SEQ ID NO: 2869143 - RNA, 18 nt, Human
cauccuacaagacacagu

SEQ ID NO: 2869144 - RNA, 19 nt, Human
cauccuacaagacacagug

SEQ ID NO: 2869145 - RNA, 17 nt, Human
cauccuacaagacacag

SEQ ID NO: 2869146 - RNA, 17 nt, Human
caucuugcucugcugac

SEQ ID NO: 2869147 - RNA, 16 nt, Human
caucuugcucugcuga

SEQ ID NO: 2869148 - RNA, 19 nt, Human
caucuugcucugcugacag

SEQ ID NO: 2869149 - RNA, 15 nt, Human
caucuugcucugcug

SEQ ID NO: 2869150 - RNA, 15 nt, Human
caucuuguguuuuau

SEQ ID NO: 2869151 - RNA, 17 nt, Human
caucuuuaaacaguauu

SEQ ID NO: 2869152 - RNA, 19 nt, Human
caucuuuaaacaguauuuc

SEQ ID NO: 2869153 - RNA, 20 nt, Human
caucuugaagggcccaggag

SEQ ID NO: 2869154 - RNA, 20 nt, Human
caucuucuguugcucucugu

SEQ ID NO: 2869155 - RNA, 17 nt, Human
caucuucugccuuaguc

SEQ ID NO: 2869156 - RNA, 23 nt, Human
caucuuucuucuauuuuauuccc

SEQ ID NO: 2869157 - RNA, 13 nt, Human
ccaccucccucac

SEQ ID NO: 2869158 - RNA, 14 nt, Human
ccaccuccaguccc

SEQ ID NO: 2869159 - RNA, 24 nt, Human
ccaccuccagucccccuauccuug

SEQ ID NO: 2869160 - RNA, 12 nt, Human
ccaccuccccac

SEQ ID NO: 2869161 - RNA, 13 nt, Human
ccaccuccccacg

SEQ ID NO: 2869162 - RNA, 17 nt, Human
ccaccuccccacgcccu

SEQ ID NO: 2869163 - RNA, 18 nt, Human
ccaccuccccacgcccuc

SEQ ID NO: 2869164 - RNA, 23 nt, Human
ccaccuccccacgcccuccccuc

SEQ ID NO: 2869165 - RNA, 23 nt, Human
ccaccugcccaucacaggguugg

SEQ ID NO: 2869166 - RNA, 20 nt, Human
ccaccugcccaucacagggu

SEQ ID NO: 2869167 - RNA, 11 nt, Human
ccaccugccug

SEQ ID NO: 2869168 - RNA, 12 nt, Human
ccaccugccugc

SEQ ID NO: 2869169 - RNA, 13 nt, Human
ccaccugccugcg

SEQ ID NO: 2869170 - RNA, 16 nt, Human
ccaccugccugcgucu

SEQ ID NO: 2869171 - RNA, 20 nt, Human
ccaccugccugcgucuuccg

SEQ ID NO: 2869172 - RNA, 21 nt, Human
ccaccugccugcgucuuccgc

SEQ ID NO: 2869173 - RNA, 23 nt, Human
ccaccugccugcgucuuccgccc

SEQ ID NO: 2869174 - RNA, 12 nt, Human
ccaccugccugg

SEQ ID NO: 2869175 - RNA, 13 nt, Human
ccaccugccuggc

SEQ ID NO: 2869176 - RNA, 14 nt, Human
ccaccugccuggcc

SEQ ID NO: 2869177 - RNA, 15 nt, Human
ccaccugccuggccg

SEQ ID NO: 2869178 - RNA, 16 nt, Human
ccaccugccuggccgg

SEQ ID NO: 2869179 - RNA, 17 nt, Human
ccaccugccuggccggc

SEQ ID NO: 2869180 - RNA, 20 nt, Human
ccaccugccuggccggccag

SEQ ID NO: 2869181 - RNA, 22 nt, Human
ccaccugccuggccggccagcc

SEQ ID NO: 2869182 - RNA, 23 nt, Human
ccaccugccuggccggccagcca

SEQ ID NO: 2869183 - RNA, 15 nt, Human
ccaccucccucacca

SEQ ID NO: 2869184 - RNA, 16 nt, Human
ccaccugcccaucaca

SEQ ID NO: 2869185 - RNA, 15 nt, Human
ccaccugcccaucac

SEQ ID NO: 2869186 - RNA, 14 nt, Human
ccaccugcccauca

SEQ ID NO: 2869187 - RNA, 9 nt, Human
ccaccugcc

SEQ ID NO: 2869188 - RNA, 15 nt, Human
ccaccugcagggcug

SEQ ID NO: 2869189 - RNA, 17 nt, Human
ccaccugcagggcugcc

SEQ ID NO: 2869190 - RNA, 19 nt, Human
ccaccugcagggcugcccu

SEQ ID NO: 2869191 - RNA, 14 nt, Human
ccaccugcccaacc

SEQ ID NO: 2869192 - RNA, 14 nt, Human
ccacggccaggcca

SEQ ID NO: 2869193 - RNA, 13 nt, Human
ccacggccaggcc

SEQ ID NO: 2869194 - RNA, 12 nt, Human
ccacggccaggc

SEQ ID NO: 2869195 - RNA, 15 nt, Human
ccacggccaggccag

SEQ ID NO: 2869196 - RNA, 17 nt, Human
ccacgucugucuucaca

SEQ ID NO: 2869197 - RNA, 12 nt, Human
ccacgugucuuc

SEQ ID NO: 2869198 - RNA, 15 nt, Human
ccacgugucuuccac

SEQ ID NO: 2869199 - RNA, 16 nt, Human
ccacgugucuuccacu

SEQ ID NO: 2869200 - RNA, 18 nt, Human
ccacguggcugcgugccc

SEQ ID NO: 2869201 - RNA, 23 nt, Human
ccacguggcugcgugccccugcu

SEQ ID NO: 2869202 - RNA, 14 nt, Human
ccacccaggagccc

SEQ ID NO: 2869203 - RNA, 23 nt, Human
ccacccccuucucugcuccacca

SEQ ID NO: 2869204 - RNA, 20 nt, Human
ccacccccuucucugcucca

SEQ ID NO: 2869205 - RNA, 16 nt, Human
ccaccccgccugcccu

SEQ ID NO: 2869206 - RNA, 22 nt, Human
ccaccccgcaccccgcgugucc

SEQ ID NO: 2869207 - RNA, 12 nt, Human
ccacccaggagc

SEQ ID NO: 2869208 - RNA, 15 nt, Human
ccaccucagccuccc

SEQ ID NO: 2869209 - RNA, 19 nt, Human
ccacccccuucucugcucc

SEQ ID NO: 2869210 - RNA, 12 nt, Human
ccaccuccagcc

SEQ ID NO: 2869211 - RNA, 13 nt, Human
ccaccuccagccc

SEQ ID NO: 2869212 - RNA, 14 nt, Human
ccaccuccagcccg

SEQ ID NO: 2869213 - RNA, 18 nt, Human
ccaccuccagcccgggag

SEQ ID NO: 2869214 - RNA, 19 nt, Human
ccaccuccagcccgggagc

SEQ ID NO: 2869215 - RNA, 20 nt, Human
ccaccuccagcccgggagcc

SEQ ID NO: 2869216 - RNA, 22 nt, Human
ccaccuccagcccgggagccua

SEQ ID NO: 2869217 - RNA, 23 nt, Human
ccaccuccagcccgggagccuag

SEQ ID NO: 2869218 - RNA, 14 nt, Human
ccaccucagccucc

SEQ ID NO: 2869219 - RNA, 13 nt, Human
ccaccucagccuc

SEQ ID NO: 2869220 - RNA, 12 nt, Human
ccaccucagccu

SEQ ID NO: 2869221 - RNA, 13 nt, Human
ccaccccuacccc

SEQ ID NO: 2869222 - RNA, 16 nt, Human
ccaccccuaccccugg

SEQ ID NO: 2869223 - RNA, 19 nt, Human
ccaccccggcccccugccc

SEQ ID NO: 2869224 - RNA, 15 nt, Human
ccaccccggcccccu

SEQ ID NO: 2869225 - RNA, 17 nt, Human
ccaccccgggcucucug

SEQ ID NO: 2869226 - RNA, 14 nt, Human
ccaccccgggcucu

SEQ ID NO: 2869227 - RNA, 20 nt, Human
ccaccccgggcucucugcug

SEQ ID NO: 2869228 - RNA, 18 nt, Human
ccaccccgggcucucugc

SEQ ID NO: 2869229 - RNA, 21 nt, Human
ccacccuagccaaugucuccu

SEQ ID NO: 2869230 - RNA, 18 nt, Human
ccacccuagccaaugucu

SEQ ID NO: 2869231 - RNA, 13 nt, Human
ccacccucccugg

SEQ ID NO: 2869232 - RNA, 22 nt, Human
ccacuacggaauaguuggcuag

SEQ ID NO: 2869233 - RNA, 23 nt, Human
ccacuacggaauaguuggcuagg

SEQ ID NO: 2869234 - RNA, 21 nt, Human
ccacuaagaauucaaacuggg

SEQ ID NO: 2869235 - RNA, 18 nt, Human
ccacuaacuccugagaaa

SEQ ID NO: 2869236 - RNA, 22 nt, Human
ccacuccccuccacucucuacc

SEQ ID NO: 2869237 - RNA, 16 nt, Human
ccacuccccaccuuca

SEQ ID NO: 2869238 - RNA, 17 nt, Human
ccacuccagaccccugg

SEQ ID NO: 2869239 - RNA, 19 nt, Human
ccacuccagaccccuggcu

SEQ ID NO: 2869240 - RNA, 18 nt, Human
ccacucaguccauagcag

SEQ ID NO: 2869241 - RNA, 13 nt, Human
ccacucaccccgg

SEQ ID NO: 2869242 - RNA, 21 nt, Human
ccacucacaugacacccguga

SEQ ID NO: 2869243 - RNA, 16 nt, Human
ccacucaccagugucc

SEQ ID NO: 2869244 - RNA, 11 nt, Human
ccacucacccc

SEQ ID NO: 2869245 - RNA, 12 nt, Human
ccacucaccccg

SEQ ID NO: 2869246 - RNA, 11 nt, Human
ccacugccucu

SEQ ID NO: 2869247 - RNA, 16 nt, Human
ccacuggacuugagcu

SEQ ID NO: 2869248 - RNA, 20 nt, Human
ccacugcucccuaagccagc

SEQ ID NO: 2869249 - RNA, 24 nt, Human
ccacugcucccuaagccagccugg

SEQ ID NO: 2869250 - RNA, 21 nt, Human
ccacuggacuugagcuuggca

SEQ ID NO: 2869251 - RNA, 20 nt, Human
ccacuggacuugagcuuggc

SEQ ID NO: 2869252 - RNA, 22 nt, Human
ccacuggacuugagcuuggcag

SEQ ID NO: 2869253 - RNA, 19 nt, Human
ccacugcucuccagccugg

SEQ ID NO: 2869254 - RNA, 20 nt, Human
ccacugcacuccagccuggg

SEQ ID NO: 2869255 - RNA, 19 nt, Human
ccacugcacuccagccugg

SEQ ID NO: 2869256 - RNA, 18 nt, Human
ccacugcacuccagccug

SEQ ID NO: 2869257 - RNA, 19 nt, Human
ccacugccccuucauugau

SEQ ID NO: 2869258 - RNA, 21 nt, Human
ccacugcacuccagccugggc

SEQ ID NO: 2869259 - RNA, 16 nt, Human
ccacguuccacaguug

SEQ ID NO: 2869260 - RNA, 20 nt, Human
ccacguuccacaguugccac

SEQ ID NO: 2869261 - RNA, 13 nt, Human
ccacccaccucag

SEQ ID NO: 2869262 - RNA, 15 nt, Human
ccacccaccucagcc

SEQ ID NO: 2869263 - RNA, 14 nt, Human
ccacccaccucagc

SEQ ID NO: 2869264 - RNA, 16 nt, Human
ccacccaccucagccu

SEQ ID NO: 2869265 - RNA, 15 nt, Human
ccacccaaugcugau

SEQ ID NO: 2869266 - RNA, 14 nt, Human
ccaccacacauccc

SEQ ID NO: 2869267 - RNA, 15 nt, Human
ccaccacacauccca

SEQ ID NO: 2869268 - RNA, 17 nt, Human
ccaccacacaucccagc

SEQ ID NO: 2869269 - RNA, 20 nt, Human
ccaccacacaucccagccca

SEQ ID NO: 2869270 - RNA, 16 nt, Human
ccaccacacccagccc

SEQ ID NO: 2869271 - RNA, 14 nt, Human
ccaccacacccagc

SEQ ID NO: 2869272 - RNA, 14 nt, Human
ccacaucuugcucu

SEQ ID NO: 2869273 - RNA, 18 nt, Human
ccacaucuuccauuucca

SEQ ID NO: 2869274 - RNA, 16 nt, Human
ccacaucucugaaagc

SEQ ID NO: 2869275 - RNA, 19 nt, Human
ccacauccaacuccagcaa

SEQ ID NO: 2869276 - RNA, 18 nt, Human
ccacauccaacuccagca

SEQ ID NO: 2869277 - RNA, 23 nt, Human
ccacauagugaugguuccccugu

SEQ ID NO: 2869278 - RNA, 13 nt, Human
ccacacucuccau

SEQ ID NO: 2869279 - RNA, 16 nt, Human
ccacacucuccaucac

SEQ ID NO: 2869280 - RNA, 20 nt, Human
ccacacucuucuaugaccca

SEQ ID NO: 2869281 - RNA, 13 nt, Human
ccacacuggacuc

SEQ ID NO: 2869282 - RNA, 19 nt, Human
ccacauagugaugguuccc

SEQ ID NO: 2869283 - RNA, 21 nt, Human
ccacauagugaugguuccccu

SEQ ID NO: 2869284 - RNA, 22 nt, Human
ccacauagugaugguuccccug

SEQ ID NO: 2869285 - RNA, 23 nt, Human
ccacaucuugcucugcugacaga

SEQ ID NO: 2869286 - RNA, 22 nt, Human
ccacaucuugcucugcugacag

SEQ ID NO: 2869287 - RNA, 20 nt, Human
ccacaucuugcucugcugac

SEQ ID NO: 2869288 - RNA, 16 nt, Human
ccacaucuugcucugc

SEQ ID NO: 2869289 - RNA, 14 nt, Human
ccacaugaaaccua

SEQ ID NO: 2869290 - RNA, 19 nt, Human
ccacaugccaagcacugug

SEQ ID NO: 2869291 - RNA, 16 nt, Human
ccaccaaagcugccca

SEQ ID NO: 2869292 - RNA, 14 nt, Human
ccaccaaagcugcc

SEQ ID NO: 2869293 - RNA, 13 nt, Human
ccaccaaagcugc

SEQ ID NO: 2869294 - RNA, 12 nt, Human
ccaccaaagcug

SEQ ID NO: 2869295 - RNA, 19 nt, Human
ccaccaaagcugcccacug

SEQ ID NO: 2869296 - RNA, 18 nt, Human
ccaccaaagcugcccacu

SEQ ID NO: 2869297 - RNA, 21 nt, Human
ccaccaaagcugcccacuguu

SEQ ID NO: 2869298 - RNA, 12 nt, Human
ccacacccagcc

SEQ ID NO: 2869299 - RNA, 11 nt, Human
ccacacacagg

SEQ ID NO: 2869300 - RNA, 12 nt, Human
ccacacacaggu

SEQ ID NO: 2869301 - RNA, 16 nt, Human
ccaaacccaugaggca

SEQ ID NO: 2869302 - RNA, 14 nt, Human
ccaaacccugucug

SEQ ID NO: 2869303 - RNA, 12 nt, Human
ccaaacccuagg

SEQ ID NO: 2869304 - RNA, 13 nt, Human
ccaaacccuaggu

SEQ ID NO: 2869305 - RNA, 23 nt, Human
ccaaacccuagguucccgguccc

SEQ ID NO: 2869306 - RNA, 14 nt, Human
ccacacccagccca

SEQ ID NO: 2869307 - RNA, 13 nt, Human
ccacacccagccc

SEQ ID NO: 2869308 - RNA, 22 nt, Human
ccacacccaauuccacucugau

SEQ ID NO: 2869309 - RNA, 19 nt, Human
ccacacccuguacuguucu

SEQ ID NO: 2869310 - RNA, 23 nt, Human
ccacacccuguacuguucugugu

SEQ ID NO: 2869311 - RNA, 19 nt, Human
ccacaccucaguucccuug

SEQ ID NO: 2869312 - RNA, 18 nt, Human
ccacaccucaguucccuu

SEQ ID NO: 2869313 - RNA, 22 nt, Human
ccacaccucaguucccuuggcc

SEQ ID NO: 2869314 - RNA, 14 nt, Human
ccacaccucugcca

SEQ ID NO: 2869315 - RNA, 17 nt, Human
ccacacuccagcuggga

SEQ ID NO: 2869316 - RNA, 14 nt, Human
ccacacuccagcug

SEQ ID NO: 2869317 - RNA, 13 nt, Human
ccacacuccagcu

SEQ ID NO: 2869318 - RNA, 15 nt, Human
ccacaccucugccag

SEQ ID NO: 2869319 - RNA, 16 nt, Human
ccacaccucugccaga

SEQ ID NO: 2869320 - RNA, 15 nt, Human
ccagcaguacaauaa

SEQ ID NO: 2869321 - RNA, 17 nt, Human
ccagcaguacaauaaaa

SEQ ID NO: 2869322 - RNA, 21 nt, Human
ccagcaguacaauaaaaguaa

SEQ ID NO: 2869323 - RNA, 14 nt, Human
ccagcagucacuuc

SEQ ID NO: 2869324 - RNA, 17 nt, Human
ccagcagucacuucggc

SEQ ID NO: 2869325 - RNA, 16 nt, Human
ccagcagucucugccu

SEQ ID NO: 2869326 - RNA, 17 nt, Human
ccagcagucucugccuu

SEQ ID NO: 2869327 - RNA, 21 nt, Human
ccagcagucucugccuugccu

SEQ ID NO: 2869328 - RNA, 22 nt, Human
ccagcagucucugccuugccuu

SEQ ID NO: 2869329 - RNA, 23 nt, Human
ccagcagucucugccuugccuuu

SEQ ID NO: 2869330 - RNA, 12 nt, Human
ccagcacuaacg

SEQ ID NO: 2869331 - RNA, 22 nt, Human
ccagcaguugaaugacaacaga

SEQ ID NO: 2869332 - RNA, 13 nt, Human
ccagcaguucugu

SEQ ID NO: 2869333 - RNA, 14 nt, Human
ccagcaguucuguu

SEQ ID NO: 2869334 - RNA, 15 nt, Human
ccagcaguucuguua

SEQ ID NO: 2869335 - RNA, 18 nt, Human
ccagcaucaccugccugu

SEQ ID NO: 2869336 - RNA, 14 nt, Human
ccagcaucacuccc

SEQ ID NO: 2869337 - RNA, 16 nt, Human
ccagcaucacucccca

SEQ ID NO: 2869338 - RNA, 17 nt, Human
ccagcaucacuccccaa

SEQ ID NO: 2869339 - RNA, 21 nt, Human
ccagcaucacuccccaaggaa

SEQ ID NO: 2869340 - RNA, 17 nt, Human
ccagcaucaccugccug

SEQ ID NO: 2869341 - RNA, 16 nt, Human
ccagcaucaccugccu

SEQ ID NO: 2869342 - RNA, 15 nt, Human
ccagcaucaccugcc

SEQ ID NO: 2869343 - RNA, 14 nt, Human
ccagcaucaccugc

SEQ ID NO: 2869344 - RNA, 19 nt, Human
ccagcauccuuuucugcag

SEQ ID NO: 2869345 - RNA, 15 nt, Human
ccagcaucccuugac

SEQ ID NO: 2869346 - RNA, 18 nt, Human
ccagcaucccuugaccag

SEQ ID NO: 2869347 - RNA, 21 nt, Human
ccagcauccuuuucugcagag

SEQ ID NO: 2869348 - RNA, 21 nt, Human
ccagcaucccuugaccaggcc

SEQ ID NO: 2869349 - RNA, 15 nt, Human
ccagcauggguuagu

SEQ ID NO: 2869350 - RNA, 18 nt, Human
ccagcaugacauaacagu

SEQ ID NO: 2869351 - RNA, 20 nt, Human
ccagcaugacauaacagugc

SEQ ID NO: 2869352 - RNA, 21 nt, Human
ccagcaugacauaacagugca

SEQ ID NO: 2869353 - RNA, 11 nt, Human
ccagccagcca

SEQ ID NO: 2869354 - RNA, 13 nt, Human
ccagccagccacu

SEQ ID NO: 2869355 - RNA, 14 nt, Human
ccagccagccacuc

SEQ ID NO: 2869356 - RNA, 15 nt, Human
ccagccagccacucu

SEQ ID NO: 2869357 - RNA, 16 nt, Human
ccagccagccacucua

SEQ ID NO: 2869358 - RNA, 21 nt, Human
ccagccaggcagguccacaga

SEQ ID NO: 2869359 - RNA, 18 nt, Human
ccagccagauccucuugg

SEQ ID NO: 2869360 - RNA, 19 nt, Human
ccagccagauccucuuggu

SEQ ID NO: 2869361 - RNA, 13 nt, Human
ccagccagauccu

SEQ ID NO: 2869362 - RNA, 11 nt, Human
ccagccacucu

SEQ ID NO: 2869363 - RNA, 15 nt, Human
ccagccacucuacca

SEQ ID NO: 2869364 - RNA, 21 nt, Human
ccagccacucuaccagugcag

SEQ ID NO: 2869365 - RNA, 22 nt, Human
ccagccaccccgggcucucugc

SEQ ID NO: 2869366 - RNA, 21 nt, Human
ccagccaccccgggcucucug

SEQ ID NO: 2869367 - RNA, 22 nt, Human
ccagccaacuuuugcauguuuu

SEQ ID NO: 2869368 - RNA, 13 nt, Human
ccagccaccccgg

SEQ ID NO: 2869369 - RNA, 19 nt, Human
ccagccacacuugaaccua

SEQ ID NO: 2869370 - RNA, 19 nt, Human
ccagccaaacccugucuga

SEQ ID NO: 2869371 - RNA, 18 nt, Human
ccagccaaacccugucug

SEQ ID NO: 2869372 - RNA, 17 nt, Human
ccagccaaacccugucu

SEQ ID NO: 2869373 - RNA, 18 nt, Human
ccagcauuuuacugauuc

SEQ ID NO: 2869374 - RNA, 14 nt, Human
ccagcauucucagg

SEQ ID NO: 2869375 - RNA, 20 nt, Human
ccagcauucucaggcaccag

SEQ ID NO: 2869376 - RNA, 16 nt, Human
ccagcauucucaggca

SEQ ID NO: 2869377 - RNA, 21 nt, Human
ccagcccuuuuguugagccag

SEQ ID NO: 2869378 - RNA, 14 nt, Human
ccagcauuugggua

SEQ ID NO: 2869379 - RNA, 10 nt, Human
ccagccucag

SEQ ID NO: 2869380 - RNA, 14 nt, Human
ccagccucacccuu

SEQ ID NO: 2869381 - RNA, 17 nt, Human
ccagccucacccuugcg

SEQ ID NO: 2869382 - RNA, 11 nt, Human
ccagccucagu

SEQ ID NO: 2869383 - RNA, 19 nt, Human
ccagccgccaucagcccaa

SEQ ID NO: 2869384 - RNA, 19 nt, Human
ccagccuaugagcauccug

SEQ ID NO: 2869385 - RNA, 20 nt, Human
ccagccuaugagcauccuga

SEQ ID NO: 2869386 - RNA, 21 nt, Human
ccagccuaugagcauccugag

SEQ ID NO: 2869387 - RNA, 22 nt, Human
ccagccuaugagcauccugagc

SEQ ID NO: 2869388 - RNA, 23 nt, Human
ccagccuaugagcauccugagcc

SEQ ID NO: 2869389 - RNA, 12 nt, Human
ccagccucaguc

SEQ ID NO: 2869390 - RNA, 15 nt, Human
ccagccucaguccuc

SEQ ID NO: 2869391 - RNA, 19 nt, Human
ccagccucaguccuccccu

SEQ ID NO: 2869392 - RNA, 20 nt, Human
ccagccucaguccuccccuc

SEQ ID NO: 2869393 - RNA, 21 nt, Human
ccagccucaguccuccccuca

SEQ ID NO: 2869394 - RNA, 19 nt, Human
ccagccucaucucuuuguu

SEQ ID NO: 2869395 - RNA, 21 nt, Human
ccagccuccaagcuccaucuc

SEQ ID NO: 2869396 - RNA, 17 nt, Human
ccagcccuuagcaggga

SEQ ID NO: 2869397 - RNA, 13 nt, Human
ccagcccuguucu

SEQ ID NO: 2869398 - RNA, 16 nt, Human
ccagcccuuagcaggg

SEQ ID NO: 2869399 - RNA, 21 nt, Human
ccagcccuccuuaucaaagga

SEQ ID NO: 2869400 - RNA, 16 nt, Human
ccagccccagugccca

SEQ ID NO: 2869401 - RNA, 20 nt, Human
ccagcccgggagccuaggac

SEQ ID NO: 2869402 - RNA, 21 nt, Human
ccagcccgggagccuaggacc

SEQ ID NO: 2869403 - RNA, 22 nt, Human
ccagcccgggagccuaggacca

SEQ ID NO: 2869404 - RNA, 14 nt, Human
ccagcccuccccau

SEQ ID NO: 2869405 - RNA, 20 nt, Human
ccagcccuccccauggagcc

SEQ ID NO: 2869406 - RNA, 21 nt, Human
ccagcccuccccauggagcca

SEQ ID NO: 2869407 - RNA, 15 nt, Human
ccagccagggcugcu

SEQ ID NO: 2869408 - RNA, 13 nt, Human
ccagccagggcug

SEQ ID NO: 2869409 - RNA, 14 nt, Human
ccagccagggcugc

SEQ ID NO: 2869410 - RNA, 16 nt, Human
ccagccccacccagga

SEQ ID NO: 2869411 - RNA, 15 nt, Human
ccagccccacccagg

SEQ ID NO: 2869412 - RNA, 14 nt, Human
ccagccccacccag

SEQ ID NO: 2869413 - RNA, 14 nt, Human
ccagccccacacag

SEQ ID NO: 2869414 - RNA, 15 nt, Human
ccagccccacacagc

SEQ ID NO: 2869415 - RNA, 16 nt, Human
ccagccccacacagcu

SEQ ID NO: 2869416 - RNA, 21 nt, Human
ccagccccacacagcuacagc

SEQ ID NO: 2869417 - RNA, 15 nt, Human
ccagccccagugccc

SEQ ID NO: 2869418 - RNA, 13 nt, Human
ccagccccagugc

SEQ ID NO: 2869419 - RNA, 23 nt, Human
ccagccccacugccagcagcagc

SEQ ID NO: 2869420 - RNA, 21 nt, Human
ccagccccacugccagcagca

SEQ ID NO: 2869421 - RNA, 20 nt, Human
ccagccccacugccagcagc

SEQ ID NO: 2869422 - RNA, 19 nt, Human
ccagccccacugccagcag

SEQ ID NO: 2869423 - RNA, 18 nt, Human
ccagccccacugccagca

SEQ ID NO: 2869424 - RNA, 17 nt, Human
ccagccccacugccagc

SEQ ID NO: 2869425 - RNA, 16 nt, Human
ccagccccacugccag

SEQ ID NO: 2869426 - RNA, 13 nt, Human
ccagccccacugc

SEQ ID NO: 2869427 - RNA, 18 nt, Human
ccagccccacccaggagg

SEQ ID NO: 2869428 - RNA, 17 nt, Human
ccagccccacccaggag

SEQ ID NO: 2869429 - RNA, 21 nt, Human
ccagcaauucauaaaaacugc

SEQ ID NO: 2869430 - RNA, 20 nt, Human
ccagcaauucuccugccuca

SEQ ID NO: 2869431 - RNA, 19 nt, Human
ccagcaauucuccugccuc

SEQ ID NO: 2869432 - RNA, 18 nt, Human
ccagcaauucuccugccu

SEQ ID NO: 2869433 - RNA, 16 nt, Human
ccagcaauucuccugc

SEQ ID NO: 2869434 - RNA, 23 nt, Human
ccagcaaugacaucucaggggcc

SEQ ID NO: 2869435 - RNA, 17 nt, Human
ccagcaauauguaaaua

SEQ ID NO: 2869436 - RNA, 12 nt, Human
ccagcaaugaca

SEQ ID NO: 2869437 - RNA, 21 nt, Human
ccagcaaugacaucucagggg

SEQ ID NO: 2869438 - RNA, 22 nt, Human
ccagcaaugacaucucaggggc

SEQ ID NO: 2869439 - RNA, 22 nt, Human
ccagcaagugagagcugggugu

SEQ ID NO: 2869440 - RNA, 21 nt, Human
ccagcaagugagagcugggug

SEQ ID NO: 2869441 - RNA, 20 nt, Human
ccagcaagugagagcugggu

SEQ ID NO: 2869442 - RNA, 16 nt, Human
ccagcaagugagagcu

SEQ ID NO: 2869443 - RNA, 14 nt, Human
ccagcaacuucuuc

SEQ ID NO: 2869444 - RNA, 23 nt, Human
ccagauuaucuauuugugugugu

SEQ ID NO: 2869445 - RNA, 15 nt, Human
ccagcaagugagagc

SEQ ID NO: 2869446 - RNA, 23 nt, Human
ccagcaacuucuucuccaucccu

SEQ ID NO: 2869447 - RNA, 14 nt, Human
ccagcaacuugaac

SEQ ID NO: 2869448 - RNA, 19 nt, Human
ccagcaagaauaaaaaaga

SEQ ID NO: 2869449 - RNA, 21 nt, Human
ccagcaagaauaaaaaagaaa

SEQ ID NO: 2869450 - RNA, 17 nt, Human
ccagcaagagaaccccg

SEQ ID NO: 2869451 - RNA, 16 nt, Human
ccagaggagccuuuuu

SEQ ID NO: 2869452 - RNA, 15 nt, Human
ccagaggagccuuuu

SEQ ID NO: 2869453 - RNA, 13 nt, Human
ccagaggagccuu

SEQ ID NO: 2869454 - RNA, 17 nt, Human
ccagaggagccuuuuua

SEQ ID NO: 2869455 - RNA, 19 nt, Human
ccagaggccaacacugugg

SEQ ID NO: 2869456 - RNA, 23 nt, Human
ccagaggaauccuggcagcccag

SEQ ID NO: 2869457 - RNA, 22 nt, Human
ccagaggaauccuggcagccca

SEQ ID NO: 2869458 - RNA, 21 nt, Human
ccagaggaauccuggcagccc

SEQ ID NO: 2869459 - RNA, 20 nt, Human
ccagaggaauccuggcagcc

SEQ ID NO: 2869460 - RNA, 19 nt, Human
ccagaggaauccuggcagc

SEQ ID NO: 2869461 - RNA, 18 nt, Human
ccagaggaauccuggcag

SEQ ID NO: 2869462 - RNA, 17 nt, Human
ccagaggaauccuggca

SEQ ID NO: 2869463 - RNA, 21 nt, Human
ccagagggagugacagaggca

SEQ ID NO: 2869464 - RNA, 20 nt, Human
ccagagggagugacagaggc

SEQ ID NO: 2869465 - RNA, 19 nt, Human
ccagagggagugacagagg

SEQ ID NO: 2869466 - RNA, 18 nt, Human
ccagagggagugacagag

SEQ ID NO: 2869467 - RNA, 17 nt, Human
ccagagggagugacaga

SEQ ID NO: 2869468 - RNA, 16 nt, Human
ccagagggagugacag

SEQ ID NO: 2869469 - RNA, 17 nt, Human
ccagaggcgucccgcac

SEQ ID NO: 2869470 - RNA, 19 nt, Human
ccagaggcuauuauuuuca

SEQ ID NO: 2869471 - RNA, 13 nt, Human
ccagaggcugagu

SEQ ID NO: 2869472 - RNA, 24 nt, Human
ccagagcuguuuauggccucagcu

SEQ ID NO: 2869473 - RNA, 17 nt, Human
ccagaggaaccugaggc

SEQ ID NO: 2869474 - RNA, 14 nt, Human
ccagaggaacuguc

SEQ ID NO: 2869475 - RNA, 19 nt, Human
ccagaggaacuguccagag

SEQ ID NO: 2869476 - RNA, 23 nt, Human
ccagagcuguuuauggccucagc

SEQ ID NO: 2869477 - RNA, 22 nt, Human
ccagagcuguuuauggccucag

SEQ ID NO: 2869478 - RNA, 20 nt, Human
ccagaggaacuguccagaga

SEQ ID NO: 2869479 - RNA, 21 nt, Human
ccagaggaacuguccagagag

SEQ ID NO: 2869480 - RNA, 22 nt, Human
ccagaggaacuguccagagagc

SEQ ID NO: 2869481 - RNA, 23 nt, Human
ccagaggaacuguccagagagca

SEQ ID NO: 2869482 - RNA, 21 nt, Human
ccagagcuguuuauggccuca

SEQ ID NO: 2869483 - RNA, 20 nt, Human
ccagagcuguuuauggccuc

SEQ ID NO: 2869484 - RNA, 19 nt, Human
ccagagcuguuuauggccu

SEQ ID NO: 2869485 - RNA, 22 nt, Human
ccagagcugguggacccaggga

SEQ ID NO: 2869486 - RNA, 18 nt, Human
ccagagcugguggaccca

SEQ ID NO: 2869487 - RNA, 21 nt, Human
ccagagcugggaggcauggcc

SEQ ID NO: 2869488 - RNA, 14 nt, Human
ccagagcuggugga

SEQ ID NO: 2869489 - RNA, 14 nt, Human
ccagagcugggagg

SEQ ID NO: 2869490 - RNA, 23 nt, Human
ccagagcugaagaguugccccgu

SEQ ID NO: 2869491 - RNA, 15 nt, Human
ccagagcaaccucuc

SEQ ID NO: 2869492 - RNA, 16 nt, Human
ccagagcaaccucuca

SEQ ID NO: 2869493 - RNA, 19 nt, Human
ccagagcaaccucucacuc

SEQ ID NO: 2869494 - RNA, 21 nt, Human
ccagagcaaccucucacuccc

SEQ ID NO: 2869495 - RNA, 22 nt, Human
ccagagcaacgaccagggccga

SEQ ID NO: 2869496 - RNA, 12 nt, Human
ccagagauguca

SEQ ID NO: 2869497 - RNA, 13 nt, Human
ccagagcaaaaua

SEQ ID NO: 2869498 - RNA, 14 nt, Human
ccagagaggguggu

SEQ ID NO: 2869499 - RNA, 23 nt, Human
ccagagaggguggugaccucugc

SEQ ID NO: 2869500 - RNA, 21 nt, Human
ccagagaggguggugaccucu

SEQ ID NO: 2869501 - RNA, 20 nt, Human
ccagacaccuugacagggca

SEQ ID NO: 2869502 - RNA, 17 nt, Human
ccagaccccaggcugga

SEQ ID NO: 2869503 - RNA, 21 nt, Human
ccacuguaugauuuauaaaca

SEQ ID NO: 2869504 - RNA, 19 nt, Human
ccagacaccuugacagggc

SEQ ID NO: 2869505 - RNA, 17 nt, Human
ccagacaccuugacagg

SEQ ID NO: 2869506 - RNA, 14 nt, Human
ccacugucacccuc

SEQ ID NO: 2869507 - RNA, 21 nt, Human
ccagauugcaacaggcugggc

SEQ ID NO: 2869508 - RNA, 20 nt, Human
ccagauugcaacaggcuggg

SEQ ID NO: 2869509 - RNA, 19 nt, Human
ccagauugcaacaggcugg

SEQ ID NO: 2869510 - RNA, 23 nt, Human
ccagaugcaccagcccuuagcag

SEQ ID NO: 2869511 - RNA, 18 nt, Human
ccagagggcccaggcagg

SEQ ID NO: 2869512 - RNA, 17 nt, Human
ccagaugcgucccaaga

SEQ ID NO: 2869513 - RNA, 23 nt, Human
ccagagggagugacagaggcagc

SEQ ID NO: 2869514 - RNA, 22 nt, Human
ccagagggagugacagaggcag

SEQ ID NO: 2869515 - RNA, 13 nt, Human
ccagagggcccag

SEQ ID NO: 2869516 - RNA, 17 nt, Human
ccagagggcccaggcag

SEQ ID NO: 2869517 - RNA, 15 nt, Human
ccagagggcccaggc

SEQ ID NO: 2869518 - RNA, 14 nt, Human
ccagauggugggau

SEQ ID NO: 2869519 - RNA, 16 nt, Human
ccagauggugggaugu

SEQ ID NO: 2869520 - RNA, 21 nt, Human
ccagaugugaugcuugauauu

SEQ ID NO: 2869521 - RNA, 17 nt, Human
ccagauguuuccagacu

SEQ ID NO: 2869522 - RNA, 23 nt, Human
ccagauguuuccagacuuccuug

SEQ ID NO: 2869523 - RNA, 21 nt, Human
ccagaugcgucccaagauguu

SEQ ID NO: 2869524 - RNA, 14 nt, Human
ccagaugcugcaga

SEQ ID NO: 2869525 - RNA, 19 nt, Human
ccagaugcugcagagucac

SEQ ID NO: 2869526 - RNA, 22 nt, Human
ccagauggcuggaaggggucca

SEQ ID NO: 2869527 - RNA, 16 nt, Human
ccagaugggggaaagc

SEQ ID NO: 2869528 - RNA, 20 nt, Human
ccagaugggggaaagcacag

SEQ ID NO: 2869529 - RNA, 23 nt, Human
ccagauggcccggaugcugcuuc

SEQ ID NO: 2869530 - RNA, 22 nt, Human
ccaugggagcugguuagaaaug

SEQ ID NO: 2869531 - RNA, 16 nt, Human
ccauguuggccaggcu

SEQ ID NO: 2869532 - RNA, 17 nt, Human
ccauguuggccaggcug

SEQ ID NO: 2869533 - RNA, 21 nt, Human
ccauguuggccaggcugcucu

SEQ ID NO: 2869534 - RNA, 23 nt, Human
ccauguuggccaggcuggucuca

SEQ ID NO: 2869535 - RNA, 18 nt, Human
ccauguuggccaggcugc

SEQ ID NO: 2869536 - RNA, 18 nt, Human
ccauguuggucaggcugg

SEQ ID NO: 2869537 - RNA, 19 nt, Human
ccauguuggucaggcuggu

SEQ ID NO: 2869538 - RNA, 22 nt, Human
ccauguugguugcacuuuguag

SEQ ID NO: 2869539 - RNA, 16 nt, Human
ccauguuguaaugcug

SEQ ID NO: 2869540 - RNA, 17 nt, Human
ccauguuguaaugcugc

SEQ ID NO: 2869541 - RNA, 18 nt, Human
ccauguuguaaugcugca

SEQ ID NO: 2869542 - RNA, 20 nt, Human
ccauguuguaaugcugcacu

SEQ ID NO: 2869543 - RNA, 22 nt, Human
ccauguuguaaugcugcacuuc

SEQ ID NO: 2869544 - RNA, 13 nt, Human
ccauguuuguaaa

SEQ ID NO: 2869545 - RNA, 14 nt, Human
ccauguuuguaaaa

SEQ ID NO: 2869546 - RNA, 15 nt, Human
ccauguuuguaaaac

SEQ ID NO: 2869547 - RNA, 12 nt, Human
ccauuauuuucu

SEQ ID NO: 2869548 - RNA, 13 nt, Human
ccauuauuuucug

SEQ ID NO: 2869549 - RNA, 14 nt, Human
ccauuauuuucugu

SEQ ID NO: 2869550 - RNA, 16 nt, Human
ccauuauuuucuguca

SEQ ID NO: 2869551 - RNA, 17 nt, Human
ccauuauuuucugucag

SEQ ID NO: 2869552 - RNA, 18 nt, Human
ccauuauuuucugucaga

SEQ ID NO: 2869553 - RNA, 19 nt, Human
ccauuauuuucugucagau

SEQ ID NO: 2869554 - RNA, 19 nt, Human
ccauucacaauaaaagcuu

SEQ ID NO: 2869555 - RNA, 20 nt, Human
ccauucacaauaaaagcuua

SEQ ID NO: 2869556 - RNA, 19 nt, Human
ccauauucuguuggccagu

SEQ ID NO: 2869557 - RNA, 14 nt, Human
ccauaguaguauga

SEQ ID NO: 2869558 - RNA, 22 nt, Human
ccauauuggcauggauuucugu

SEQ ID NO: 2869559 - RNA, 21 nt, Human
ccauauugugcuucacaguag

SEQ ID NO: 2869560 - RNA, 14 nt, Human
ccaucuaaacugcc

SEQ ID NO: 2869561 - RNA, 18 nt, Human
ccauccucaaacacugca

SEQ ID NO: 2869562 - RNA, 19 nt, Human
ccauccucaagaucauuca

SEQ ID NO: 2869563 - RNA, 13 nt, Human
ccauccucaaaca

SEQ ID NO: 2869564 - RNA, 19 nt, Human
ccauccuauccacugggca

SEQ ID NO: 2869565 - RNA, 16 nt, Human
ccaucugauaucuaua

SEQ ID NO: 2869566 - RNA, 15 nt, Human
ccaucuaagcugcag

SEQ ID NO: 2869567 - RNA, 16 nt, Human
ccaucuaagcugcagc

SEQ ID NO: 2869568 - RNA, 17 nt, Human
ccaucuaagcugcagcu

SEQ ID NO: 2869569 - RNA, 20 nt, Human
ccaucuaagcugcagcuucc

SEQ ID NO: 2869570 - RNA, 21 nt, Human
ccaucuaagcugcagcuuccu

SEQ ID NO: 2869571 - RNA, 16 nt, Human
ccaucuaaacugcccc

SEQ ID NO: 2869572 - RNA, 15 nt, Human
ccaucuaaacugccc

SEQ ID NO: 2869573 - RNA, 14 nt, Human
ccaucugcccgccu

SEQ ID NO: 2869574 - RNA, 17 nt, Human
ccaucugcccgccugcc

SEQ ID NO: 2869575 - RNA, 18 nt, Human
ccaucugcccgccugccc

SEQ ID NO: 2869576 - RNA, 20 nt, Human
ccaucugcccgccugcccac

SEQ ID NO: 2869577 - RNA, 22 nt, Human
ccaucugcccgccugcccaccu

SEQ ID NO: 2869578 - RNA, 23 nt, Human
ccaucugcccgccugcccaccug

SEQ ID NO: 2869579 - RNA, 15 nt, Human
ccauggcccucccag

SEQ ID NO: 2869580 - RNA, 14 nt, Human
ccauggcccugugc

SEQ ID NO: 2869581 - RNA, 17 nt, Human
ccauggcugcacaguug

SEQ ID NO: 2869582 - RNA, 21 nt, Human
ccaugggaaaugucaacaagu

SEQ ID NO: 2869583 - RNA, 21 nt, Human
ccauggcgugucccucucgga

SEQ ID NO: 2869584 - RNA, 19 nt, Human
ccauggcgugucccucucg

SEQ ID NO: 2869585 - RNA, 16 nt, Human
cccaaagugcugggau

SEQ ID NO: 2869586 - RNA, 16 nt, Human
cccaaagucuguguga

SEQ ID NO: 2869587 - RNA, 15 nt, Human
cccaaagugcugaga

SEQ ID NO: 2869588 - RNA, 18 nt, Human
ccauuugucucuacuuuu

SEQ ID NO: 2869589 - RNA, 16 nt, Human
cccaaaucucuuccac

SEQ ID NO: 2869590 - RNA, 20 nt, Human
cccaaagugcugagauuaca

SEQ ID NO: 2869591 - RNA, 18 nt, Human
cccaaauaacuucagucc

SEQ ID NO: 2869592 - RNA, 21 nt, Human
cccaaauaacuucaguccugc

SEQ ID NO: 2869593 - RNA, 20 nt, Human
cccaacccuaucuccugaca

SEQ ID NO: 2869594 - RNA, 17 nt, Human
cccaaucccuuuauuac

SEQ ID NO: 2869595 - RNA, 21 nt, Human
cccaaucccuuuauuaccccc

SEQ ID NO: 2869596 - RNA, 22 nt, Human
cccaaugagacucuagggucca

SEQ ID NO: 2869597 - RNA, 17 nt, Human
cccaaugagacuugccu

SEQ ID NO: 2869598 - RNA, 18 nt, Human
cccaaugagacuugccuu

SEQ ID NO: 2869599 - RNA, 19 nt, Human
cccaaugagacuugccuuc

SEQ ID NO: 2869600 - RNA, 16 nt, Human
cccaaugcacauccau

SEQ ID NO: 2869601 - RNA, 20 nt, Human
cccaaugcacauccauuccc

SEQ ID NO: 2869602 - RNA, 14 nt, Human
cccaaucuccaucu

SEQ ID NO: 2869603 - RNA, 17 nt, Human
cccaagggaaagaaaag

SEQ ID NO: 2869604 - RNA, 23 nt, Human
cccaaucccagcuaccucaacca

SEQ ID NO: 2869605 - RNA, 17 nt, Human
cccaaggcucugagcaa

SEQ ID NO: 2869606 - RNA, 15 nt, Human
cccaaggcggccccu

SEQ ID NO: 2869607 - RNA, 15 nt, Human
cccaacccuggcacc

SEQ ID NO: 2869608 - RNA, 15 nt, Human
cccaaggacugaggg

SEQ ID NO: 2869609 - RNA, 16 nt, Human
cccaaggacugaggga

SEQ ID NO: 2869610 - RNA, 21 nt, Human
cccaaggacugagggacucug

SEQ ID NO: 2869611 - RNA, 14 nt, Human
cccaaggagcacag

SEQ ID NO: 2869612 - RNA, 15 nt, Human
cccaaggagcacagg

SEQ ID NO: 2869613 - RNA, 18 nt, Human
cccaaggagcacaggucc

SEQ ID NO: 2869614 - RNA, 20 nt, Human
cccaaggagcacagguccca

SEQ ID NO: 2869615 - RNA, 22 nt, Human
cccaaggagcacaggucccacc

SEQ ID NO: 2869616 - RNA, 22 nt, Human
cccaaggaaagccccagcacua

SEQ ID NO: 2869617 - RNA, 19 nt, Human
ccauuuggcagagcuucuu

SEQ ID NO: 2869618 - RNA, 16 nt, Human
ccauagucaaagagag

SEQ ID NO: 2869619 - RNA, 18 nt, Human
ccauuugugccagaggaa

SEQ ID NO: 2869620 - RNA, 16 nt, Human
ccauuugugccagagg

SEQ ID NO: 2869621 - RNA, 15 nt, Human
ccauuugugccagag

SEQ ID NO: 2869622 - RNA, 14 nt, Human
ccauuugugccaga

SEQ ID NO: 2869623 - RNA, 16 nt, Human
ccauuuguaauuaaau

SEQ ID NO: 2869624 - RNA, 20 nt, Human
ccauuuguaauuaaauuaug

SEQ ID NO: 2869625 - RNA, 13 nt, Human
ccauuuguaauuu

SEQ ID NO: 2869626 - RNA, 14 nt, Human
ccauuuguaauuug

SEQ ID NO: 2869627 - RNA, 12 nt, Human
ccauuuguaaaa

SEQ ID NO: 2869628 - RNA, 13 nt, Human
ccauuuguaaaac

SEQ ID NO: 2869629 - RNA, 20 nt, Human
ccauuuguaaaacuccggau

SEQ ID NO: 2869630 - RNA, 15 nt, Human
cccaaagugcuggga

SEQ ID NO: 2869631 - RNA, 13 nt, Human
cccaaagugcugg

SEQ ID NO: 2869632 - RNA, 18 nt, Human
cccaaaggggacaggccu

SEQ ID NO: 2869633 - RNA, 20 nt, Human
cccaaaggggacaggccuca

SEQ ID NO: 2869634 - RNA, 22 nt, Human
cccaaaggggacaggccucacc

SEQ ID NO: 2869635 - RNA, 21 nt, Human
ccaguuagacuaguccccggu

SEQ ID NO: 2869636 - RNA, 23 nt, Human
ccauauucuguuggccaguguga

SEQ ID NO: 2869637 - RNA, 15 nt, Human
ccauagucacauggc

SEQ ID NO: 2869638 - RNA, 21 nt, Human
ccauaguaugggacuggccuc

SEQ ID NO: 2869639 - RNA, 14 nt, Human
ccauaggcccacac

SEQ ID NO: 2869640 - RNA, 16 nt, Human
ccauaggcccacacac

SEQ ID NO: 2869641 - RNA, 17 nt, Human
ccauaggcccacacaca

SEQ ID NO: 2869642 - RNA, 18 nt, Human
ccauaggcccacacacag

SEQ ID NO: 2869643 - RNA, 19 nt, Human
ccauaggcccacacacagg

SEQ ID NO: 2869644 - RNA, 20 nt, Human
ccauaggcccacacacaggu

SEQ ID NO: 2869645 - RNA, 23 nt, Human
ccauaggcccacacacagguggu

SEQ ID NO: 2869646 - RNA, 13 nt, Human
ccauaggcccagu

SEQ ID NO: 2869647 - RNA, 12 nt, Human
ccauaggucacc

SEQ ID NO: 2869648 - RNA, 13 nt, Human
ccauaguaacuga

SEQ ID NO: 2869649 - RNA, 15 nt, Human
ccauaguaacugaca

SEQ ID NO: 2869650 - RNA, 16 nt, Human
ccauaguaacugacau

SEQ ID NO: 2869651 - RNA, 18 nt, Human
ccauaguaacugacauga

SEQ ID NO: 2869652 - RNA, 21 nt, Human
ccauaguaacugacaugauua

SEQ ID NO: 2869653 - RNA, 13 nt, Human
ccaguuaaggacc

SEQ ID NO: 2869654 - RNA, 21 nt, Human
ccaguuaaggaccguggcccu

SEQ ID NO: 2869655 - RNA, 22 nt, Human
ccaguuaaggaccguggcccug

SEQ ID NO: 2869656 - RNA, 19 nt, Human
ccaguguugccuaaguauu

SEQ ID NO: 2869657 - RNA, 18 nt, Human
ccaguguucuaugaacaa

SEQ ID NO: 2869658 - RNA, 17 nt, Human
ccaguguugccuaagua

SEQ ID NO: 2869659 - RNA, 22 nt, Human
ccagugugggguucugcuggga

SEQ ID NO: 2869660 - RNA, 15 nt, Human
ccaguguagccuugc

SEQ ID NO: 2869661 - RNA, 14 nt, Human
ccaguguagccuug

SEQ ID NO: 2869662 - RNA, 19 nt, Human
ccagugguuuccagucaug

SEQ ID NO: 2869663 - RNA, 16 nt, Human
ccaguguaauccccca

SEQ ID NO: 2869664 - RNA, 20 nt, Human
ccaguguaaucccccaggag

SEQ ID NO: 2869665 - RNA, 22 nt, Human
ccaguguaaucccccaggagaa

SEQ ID NO: 2869666 - RNA, 12 nt, Human
ccaguguacaua

SEQ ID NO: 2869667 - RNA, 14 nt, Human
ccaguguccccucc

SEQ ID NO: 2869668 - RNA, 16 nt, Human
ccaguguccccuccac

SEQ ID NO: 2869669 - RNA, 22 nt, Human
ccaguguccccuccacugucac

SEQ ID NO: 2869670 - RNA, 23 nt, Human
ccagugcccacaggaucagucug

SEQ ID NO: 2869671 - RNA, 19 nt, Human
ccaggcgccccuucccccu

SEQ ID NO: 2869672 - RNA, 18 nt, Human
ccaggcgccccuuccccc

SEQ ID NO: 2869673 - RNA, 22 nt, Human
ccaggccggugugggcuguguc

SEQ ID NO: 2869674 - RNA, 21 nt, Human
ccaggccgggguggagcaugg

SEQ ID NO: 2869675 - RNA, 17 nt, Human
ccaggccgggccuguac

SEQ ID NO: 2869676 - RNA, 18 nt, Human
ccaggccgggccuguaca

SEQ ID NO: 2869677 - RNA, 19 nt, Human
ccaggccgggccuguacag

SEQ ID NO: 2869678 - RNA, 23 nt, Human
ccaggccgggccuguacagucug

SEQ ID NO: 2869679 - RNA, 18 nt, Human
ccaggccggcgagcccug

SEQ ID NO: 2869680 - RNA, 24 nt, Human
ccaggcuguaucccaugagccuca

SEQ ID NO: 2869681 - RNA, 13 nt, Human
ccaggcuccgccc

SEQ ID NO: 2869682 - RNA, 14 nt, Human
ccaggcuccgcccu

SEQ ID NO: 2869683 - RNA, 17 nt, Human
ccaggcuccgcccuuag

SEQ ID NO: 2869684 - RNA, 18 nt, Human
ccaggcuccgcccuuagu

SEQ ID NO: 2869685 - RNA, 23 nt, Human
ccaggcuccgcccuuaguccccc

SEQ ID NO: 2869686 - RNA, 18 nt, Human
ccaggcuagcuggagccu

SEQ ID NO: 2869687 - RNA, 19 nt, Human
ccaggcuagcuggagccug

SEQ ID NO: 2869688 - RNA, 19 nt, Human
ccaggcuaguccggaccca

SEQ ID NO: 2869689 - RNA, 20 nt, Human
ccaggcuaguccggacccac

SEQ ID NO: 2869690 - RNA, 23 nt, Human
ccaggcuaguccggacccaccuc

SEQ ID NO: 2869691 - RNA, 21 nt, Human
ccaggcgggagcgguggcccu

SEQ ID NO: 2869692 - RNA, 22 nt, Human
ccaggcgggagcgguggcccug

SEQ ID NO: 2869693 - RNA, 17 nt, Human
ccaggccauucugccgc

SEQ ID NO: 2869694 - RNA, 15 nt, Human
ccaggccauucugcc

SEQ ID NO: 2869695 - RNA, 14 nt, Human
ccaggcccacucag

SEQ ID NO: 2869696 - RNA, 15 nt, Human
ccaggcccacucagg

SEQ ID NO: 2869697 - RNA, 16 nt, Human
ccaggcccacucaggg

SEQ ID NO: 2869698 - RNA, 19 nt, Human
ccaggccgcgcccuuuccc

SEQ ID NO: 2869699 - RNA, 14 nt, Human
ccaggccggccagc

SEQ ID NO: 2869700 - RNA, 15 nt, Human
ccaggccggccagcc

SEQ ID NO: 2869701 - RNA, 17 nt, Human
ccaggccggccagccuc

SEQ ID NO: 2869702 - RNA, 18 nt, Human
ccaggccggccagccuca

SEQ ID NO: 2869703 - RNA, 23 nt, Human
ccaggagcucuucaggccucccu

SEQ ID NO: 2869704 - RNA, 21 nt, Human
ccaggagcucuucaggccucc

SEQ ID NO: 2869705 - RNA, 18 nt, Human
ccaggagcucuucaggcc

SEQ ID NO: 2869706 - RNA, 13 nt, Human
ccaggagcucuuc

SEQ ID NO: 2869707 - RNA, 15 nt, Human
ccaggccagcugccu

SEQ ID NO: 2869708 - RNA, 19 nt, Human
ccaggagccccgaggccuu

SEQ ID NO: 2869709 - RNA, 16 nt, Human
ccaggagccccgaggc

SEQ ID NO: 2869710 - RNA, 12 nt, Human
ccaggagagaga

SEQ ID NO: 2869711 - RNA, 14 nt, Human
ccaggagagagaaa

SEQ ID NO: 2869712 - RNA, 15 nt, Human
ccaggagagagaaag

SEQ ID NO: 2869713 - RNA, 21 nt, Human
ccaggagagagaaagccaggc

SEQ ID NO: 2869714 - RNA, 16 nt, Human
ccaggagagagaaagc

SEQ ID NO: 2869715 - RNA, 17 nt, Human
ccaggagagagaaagcc

SEQ ID NO: 2869716 - RNA, 20 nt, Human
ccaggagccccgaggccuuc

SEQ ID NO: 2869717 - RNA, 17 nt, Human
ccaggagccugugccuc

SEQ ID NO: 2869718 - RNA, 16 nt, Human
ccaggagccugugccu

SEQ ID NO: 2869719 - RNA, 20 nt, Human
ccaggagaauaaaagaaauu

SEQ ID NO: 2869720 - RNA, 23 nt, Human
ccaggagaauaaaagaaauuccu

SEQ ID NO: 2869721 - RNA, 22 nt, Human
ccagccucaguccuccccucac

SEQ ID NO: 2869722 - RNA, 15 nt, Human
ccagccuccaugcug

SEQ ID NO: 2869723 - RNA, 16 nt, Human
ccagccuccaugcugc

SEQ ID NO: 2869724 - RNA, 14 nt, Human
ccagggagccuaga

SEQ ID NO: 2869725 - RNA, 16 nt, Human
ccagggagccuagaag

SEQ ID NO: 2869726 - RNA, 15 nt, Human
ccaggcugugcagcg

SEQ ID NO: 2869727 - RNA, 20 nt, Human
ccaggcugugcagcgcagcu

SEQ ID NO: 2869728 - RNA, 17 nt, Human
ccagguuuuuggucuga

SEQ ID NO: 2869729 - RNA, 15 nt, Human
ccagguucagcuugu

SEQ ID NO: 2869730 - RNA, 14 nt, Human
ccagguuccgaaga

SEQ ID NO: 2869731 - RNA, 21 nt, Human
ccagguuccccagccgcccac

SEQ ID NO: 2869732 - RNA, 18 nt, Human
ccagucuggaaugcagug

SEQ ID NO: 2869733 - RNA, 16 nt, Human
ccagucucucuuaaag

SEQ ID NO: 2869734 - RNA, 17 nt, Human
ccagucucucuuaaagu

SEQ ID NO: 2869735 - RNA, 23 nt, Human
ccagucucugcuccaccuuucag

SEQ ID NO: 2869736 - RNA, 18 nt, Human
ccagucguuagaauauag

SEQ ID NO: 2869737 - RNA, 12 nt, Human
ccaguaaacaga

SEQ ID NO: 2869738 - RNA, 17 nt, Human
ccaguaaacagaggagu

SEQ ID NO: 2869739 - RNA, 20 nt, Human
ccagucuggaaugcaguggu

SEQ ID NO: 2869740 - RNA, 19 nt, Human
ccagucuggaaugcagugg

SEQ ID NO: 2869741 - RNA, 18 nt, Human
ccagguaccuugaccuuu

SEQ ID NO: 2869742 - RNA, 14 nt, Human
ccagguacgcacag

SEQ ID NO: 2869743 - RNA, 15 nt, Human
ccagguacgcacaga

SEQ ID NO: 2869744 - RNA, 16 nt, Human
ccagguacgcacagac

SEQ ID NO: 2869745 - RNA, 17 nt, Human
ccagguacgcacagaca

SEQ ID NO: 2869746 - RNA, 18 nt, Human
ccagguacgcacagacag

SEQ ID NO: 2869747 - RNA, 23 nt, Human
ccagguaauggcaugagauagcu

SEQ ID NO: 2869748 - RNA, 20 nt, Human
ccagggcugcuagacggagg

SEQ ID NO: 2869749 - RNA, 21 nt, Human
ccagggcuggaaugauuucag

SEQ ID NO: 2869750 - RNA, 16 nt, Human
ccagggcucugaccag

SEQ ID NO: 2869751 - RNA, 14 nt, Human
ccagggcucugccc

SEQ ID NO: 2869752 - RNA, 16 nt, Human
ccagggcucugcccca

SEQ ID NO: 2869753 - RNA, 17 nt, Human
ccagggcucugccccag

SEQ ID NO: 2869754 - RNA, 18 nt, Human
ccagggcucugccccagu

SEQ ID NO: 2869755 - RNA, 19 nt, Human
ccagggcucugccccaguc

SEQ ID NO: 2869756 - RNA, 15 nt, Human
ccagggcugcccuga

SEQ ID NO: 2869757 - RNA, 16 nt, Human
ccagggcugcccugag

SEQ ID NO: 2869758 - RNA, 17 nt, Human
ccagggcugcccugaga

SEQ ID NO: 2869759 - RNA, 18 nt, Human
ccagggcugcccugagaa

SEQ ID NO: 2869760 - RNA, 19 nt, Human
ccagggcugcccugagaag

SEQ ID NO: 2869761 - RNA, 21 nt, Human
ccagggcugcccugagaagcu

SEQ ID NO: 2869762 - RNA, 23 nt, Human
ccagggcugcccugagaagcugc

SEQ ID NO: 2869763 - RNA, 14 nt, Human
ccagggagccuuug

SEQ ID NO: 2869764 - RNA, 15 nt, Human
ccagggagauuuuga

SEQ ID NO: 2869765 - RNA, 12 nt, Human
ccagggagccuu

SEQ ID NO: 2869766 - RNA, 13 nt, Human
ccagggagccuuu

SEQ ID NO: 2869767 - RNA, 16 nt, Human
ccagggccagggcccu

SEQ ID NO: 2869768 - RNA, 14 nt, Human
ccagggccagggcc

SEQ ID NO: 2869769 - RNA, 17 nt, Human
ccagggccagggcccug

SEQ ID NO: 2869770 - RNA, 19 nt, Human
ccuuggguagugagcagug

SEQ ID NO: 2869771 - RNA, 21 nt, Human
ccuuggguauuugcaauauuc

SEQ ID NO: 2869772 - RNA, 23 nt, Human
ccuuggggaggacaaaacuucuu

SEQ ID NO: 2869773 - RNA, 16 nt, Human
ccuuggucuuuguauc

SEQ ID NO: 2869774 - RNA, 17 nt, Human
ccuuggucuuuguaucu

SEQ ID NO: 2869775 - RNA, 21 nt, Human
ccuuggucuuuguaucuucca

SEQ ID NO: 2869776 - RNA, 14 nt, Human
ccuugagugggguu

SEQ ID NO: 2869777 - RNA, 22 nt, Human
ccuugagugggguuaucucugu

SEQ ID NO: 2869778 - RNA, 23 nt, Human
ccuugagugggguuaucucugug

SEQ ID NO: 2869779 - RNA, 15 nt, Human
ccuugaugauuuaau

SEQ ID NO: 2869780 - RNA, 14 nt, Human
ccuugaugcacaga

SEQ ID NO: 2869781 - RNA, 15 nt, Human
ccuugaugcacagag

SEQ ID NO: 2869782 - RNA, 18 nt, Human
ccuugaugcacagagaag

SEQ ID NO: 2869783 - RNA, 19 nt, Human
ccuugauuuaaacacacag

SEQ ID NO: 2869784 - RNA, 12 nt, Human
ccuugggacccc

SEQ ID NO: 2869785 - RNA, 12 nt, Human
ccuuucuccagg

SEQ ID NO: 2869786 - RNA, 14 nt, Human
ccuuguccuuuccc

SEQ ID NO: 2869787 - RNA, 16 nt, Human
ccuuguccacccaccu

SEQ ID NO: 2869788 - RNA, 15 nt, Human
ccuugguggcaagag

SEQ ID NO: 2869789 - RNA, 14 nt, Human
ccuuguccacccac

SEQ ID NO: 2869790 - RNA, 16 nt, Human
ccuugucacugguaga

SEQ ID NO: 2869791 - RNA, 14 nt, Human
ccuuguuucaaaca

SEQ ID NO: 2869792 - RNA, 20 nt, Human
ccuuguuucaaacacaaaug

SEQ ID NO: 2869793 - RNA, 22 nt, Human
ccuuguuucaaacacaaaugca

SEQ ID NO: 2869794 - RNA, 20 nt, Human
ccuuguuuaucagauacauc

SEQ ID NO: 2869795 - RNA, 22 nt, Human
ccuuguuuaucagauacaucac

SEQ ID NO: 2869796 - RNA, 23 nt, Human
ccuucuuucacucugucaucuuu

SEQ ID NO: 2869797 - RNA, 19 nt, Human
ccuucuugcauccuuccua

SEQ ID NO: 2869798 - RNA, 15 nt, Human
ccuugaaaauauuuu

SEQ ID NO: 2869799 - RNA, 21 nt, Human
ccuugaaaauaagaauagaaa

SEQ ID NO: 2869800 - RNA, 16 nt, Human
ccuugaacucugggcu

SEQ ID NO: 2869801 - RNA, 15 nt, Human
ccuugaaccugugag

SEQ ID NO: 2869802 - RNA, 16 nt, Human
ccuugaaccugugagu

SEQ ID NO: 2869803 - RNA, 17 nt, Human
ccuugaaccugugagua

SEQ ID NO: 2869804 - RNA, 18 nt, Human
ccuugaaccugugaguaa

SEQ ID NO: 2869805 - RNA, 21 nt, Human
ccuugaaccugugaguaaaua

SEQ ID NO: 2869806 - RNA, 22 nt, Human
ccuugaagccacugaagcuggg

SEQ ID NO: 2869807 - RNA, 19 nt, Human
ccuugaagccacugaagcu

SEQ ID NO: 2869808 - RNA, 14 nt, Human
ccuugaagccacug

SEQ ID NO: 2869809 - RNA, 13 nt, Human
ccuugaccuuccu

SEQ ID NO: 2869810 - RNA, 22 nt, Human
ccuugaccuuccucuggggcuc

SEQ ID NO: 2869811 - RNA, 14 nt, Human
ccuugaccuuugua

SEQ ID NO: 2869812 - RNA, 15 nt, Human
ccuugaccuuuguac

SEQ ID NO: 2869813 - RNA, 16 nt, Human
ccuugaccuuuguaca

SEQ ID NO: 2869814 - RNA, 17 nt, Human
ccuugaccuuuguacag

SEQ ID NO: 2869815 - RNA, 21 nt, Human
ccuugaccuuuguacagccca

SEQ ID NO: 2869816 - RNA, 13 nt, Human
ccuugaauaauaa

SEQ ID NO: 2869817 - RNA, 21 nt, Human
ccuugagggugcuuguucccu

SEQ ID NO: 2869818 - RNA, 11 nt, Human
ccuugagggag

SEQ ID NO: 2869819 - RNA, 21 nt, Human
ccuugacuggaccugguggcu

SEQ ID NO: 2869820 - RNA, 16 nt, Human
ccuugacuguugaugu

SEQ ID NO: 2869821 - RNA, 21 nt, Human
ccuugacuguugauguacuga

SEQ ID NO: 2869822 - RNA, 16 nt, Human
ccuugacuuagauucu

SEQ ID NO: 2869823 - RNA, 20 nt, Human
ccuugacuuugaacuaauga

SEQ ID NO: 2869824 - RNA, 21 nt, Human
ccuugaggaaacaacagcuuu

SEQ ID NO: 2869825 - RNA, 15 nt, Human
ccuucugugaaagua

SEQ ID NO: 2869826 - RNA, 14 nt, Human
ccuucuguggcuca

SEQ ID NO: 2869827 - RNA, 16 nt, Human
ccuucucuauaucaug

SEQ ID NO: 2869828 - RNA, 16 nt, Human
ccuucuuccaucccag

SEQ ID NO: 2869829 - RNA, 18 nt, Human
ccuucuuccaucccagga

SEQ ID NO: 2869830 - RNA, 19 nt, Human
ccuucuuccaucccaggac

SEQ ID NO: 2869831 - RNA, 17 nt, Human
ccuucuuauuauauaua

SEQ ID NO: 2869832 - RNA, 16 nt, Human
ccuucuuccccuuccc

SEQ ID NO: 2869833 - RNA, 14 nt, Human
ccuucuuccauccc

SEQ ID NO: 2869834 - RNA, 22 nt, Human
ccuucuuccaucccaggacacc

SEQ ID NO: 2869835 - RNA, 18 nt, Human
ccuucuucaggcugccua

SEQ ID NO: 2869836 - RNA, 13 nt, Human
ccuucuucagggc

SEQ ID NO: 2869837 - RNA, 16 nt, Human
ccuucuucagggccug

SEQ ID NO: 2869838 - RNA, 17 nt, Human
ccuucuucagggccugg

SEQ ID NO: 2869839 - RNA, 18 nt, Human
ccuucuucagggccuggu

SEQ ID NO: 2869840 - RNA, 21 nt, Human
ccuucuguggcucacagaacc

SEQ ID NO: 2869841 - RNA, 18 nt, Human
ccuucgggcgucugugug

SEQ ID NO: 2869842 - RNA, 15 nt, Human
ccuucuacugagccu

SEQ ID NO: 2869843 - RNA, 14 nt, Human
ccuucuacugagcc

SEQ ID NO: 2869844 - RNA, 22 nt, Human
ccuuccuuguuacccaugaaaa

SEQ ID NO: 2869845 - RNA, 12 nt, Human
ccuuccuuucuc

SEQ ID NO: 2869846 - RNA, 14 nt, Human
ccuuccuuucucca

SEQ ID NO: 2869847 - RNA, 16 nt, Human
ccuuccuuucuccagg

SEQ ID NO: 2869848 - RNA, 17 nt, Human
ccuuccuuucuccagga

SEQ ID NO: 2869849 - RNA, 19 nt, Human
ccuuccuuucuccaggacc

SEQ ID NO: 2869850 - RNA, 20 nt, Human
ccuuccuugcuguccuaggc

SEQ ID NO: 2869851 - RNA, 13 nt, Human
ccuuccuugaccu

SEQ ID NO: 2869852 - RNA, 14 nt, Human
ccuuccuugaccuu

SEQ ID NO: 2869853 - RNA, 13 nt, Human
ccuuccuuccugu

SEQ ID NO: 2869854 - RNA, 17 nt, Human
ccuuccaaaaauuauua

SEQ ID NO: 2869855 - RNA, 18 nt, Human
ccuuccaaaaauuauuau

SEQ ID NO: 2869856 - RNA, 17 nt, Human
ccuuccaaauaauaaag

SEQ ID NO: 2869857 - RNA, 20 nt, Human
ccuuccaaauaauaaagucu

SEQ ID NO: 2869858 - RNA, 21 nt, Human
ccuuccucuccuuccuuguua

SEQ ID NO: 2869859 - RNA, 13 nt, Human
ccuuccucugagg

SEQ ID NO: 2869860 - RNA, 20 nt, Human
ccuuccucugagccuuggga

SEQ ID NO: 2869861 - RNA, 15 nt, Human
ccuuccucucuccag

SEQ ID NO: 2869862 - RNA, 17 nt, Human
ccuuccucucuccagau

SEQ ID NO: 2869863 - RNA, 21 nt, Human
ccuuccucuccacugccuucg

SEQ ID NO: 2869864 - RNA, 16 nt, Human
ccuuccucugagccuu

SEQ ID NO: 2869865 - RNA, 15 nt, Human
ccuuccucugagccu

SEQ ID NO: 2869866 - RNA, 20 nt, Human
ccuucacuccggugugccug

SEQ ID NO: 2869867 - RNA, 14 nt, Human
ccuucacuccggug

SEQ ID NO: 2869868 - RNA, 21 nt, Human
ccuucacauuccccuggggac

SEQ ID NO: 2869869 - RNA, 16 nt, Human
ccuucacauuuuuuau

SEQ ID NO: 2869870 - RNA, 18 nt, Human
ccuucacauuuuuuaugg

SEQ ID NO: 2869871 - RNA, 17 nt, Human
ccuucaccccaguggcc

SEQ ID NO: 2869872 - RNA, 10 nt, Human
ccuucagaca

SEQ ID NO: 2869873 - RNA, 11 nt, Human
ccuucagacac

SEQ ID NO: 2869874 - RNA, 18 nt, Human
ccuucagaaccauccaua

SEQ ID NO: 2869875 - RNA, 23 nt, Human
ccuucacuccggugugccugcag

SEQ ID NO: 2869876 - RNA, 14 nt, Human
ccuucacuuaggaa

SEQ ID NO: 2869877 - RNA, 13 nt, Human
ccuucagccccca

SEQ ID NO: 2869878 - RNA, 17 nt, Human
ccuucagcccccagccc

SEQ ID NO: 2869879 - RNA, 18 nt, Human
ccuucagcccccagcccc

SEQ ID NO: 2869880 - RNA, 19 nt, Human
ccuucagcccccagccccu

SEQ ID NO: 2869881 - RNA, 17 nt, Human
ccuucagacacccucaa

SEQ ID NO: 2869882 - RNA, 20 nt, Human
ccuucagacacccucaaccu

SEQ ID NO: 2869883 - RNA, 21 nt, Human
ccugugugugaaaggaagcuc

SEQ ID NO: 2869884 - RNA, 20 nt, Human
ccuguuaauguauuuguuca

SEQ ID NO: 2869885 - RNA, 13 nt, Human
ccuguuuggauuu

SEQ ID NO: 2869886 - RNA, 16 nt, Human
ccuguuuggauuuuua

SEQ ID NO: 2869887 - RNA, 20 nt, Human
ccuguuuuagaagguucucu

SEQ ID NO: 2869888 - RNA, 13 nt, Human
ccuguuucucugc

SEQ ID NO: 2869889 - RNA, 13 nt, Human
ccuguuucugaaa

SEQ ID NO: 2869890 - RNA, 15 nt, Human
ccuguuucugaaaag

SEQ ID NO: 2869891 - RNA, 16 nt, Human
ccuguuucugaaaaga

SEQ ID NO: 2869892 - RNA, 17 nt, Human
ccuguuucugaaaagaa

SEQ ID NO: 2869893 - RNA, 19 nt, Human
ccuguuucugaaaagaaau

SEQ ID NO: 2869894 - RNA, 12 nt, Human
ccuguuucuucc

SEQ ID NO: 2869895 - RNA, 13 nt, Human
ccuguuucuuccu

SEQ ID NO: 2869896 - RNA, 16 nt, Human
ccuguuuaauauuuaa

SEQ ID NO: 2869897 - RNA, 21 nt, Human
ccuguuuaauauuuaaacagc

SEQ ID NO: 2869898 - RNA, 19 nt, Human
ccuguuuauucccaucuuu

SEQ ID NO: 2869899 - RNA, 16 nt, Human
ccuguuucaaucacug

SEQ ID NO: 2869900 - RNA, 17 nt, Human
ccuguuucaaucacugu

SEQ ID NO: 2869901 - RNA, 13 nt, Human
ccuguugugccac

SEQ ID NO: 2869902 - RNA, 14 nt, Human
ccuguugugccaca

SEQ ID NO: 2869903 - RNA, 15 nt, Human
ccuguugugccacag

SEQ ID NO: 2869904 - RNA, 14 nt, Human
ccuguuuaauauuu

SEQ ID NO: 2869905 - RNA, 15 nt, Human
ccuguuuaauauuua

SEQ ID NO: 2869906 - RNA, 21 nt, Human
ccugugugugcgccuacagga

SEQ ID NO: 2869907 - RNA, 20 nt, Human
ccugugugugcgccuacagg

SEQ ID NO: 2869908 - RNA, 12 nt, Human
ccuguguggcca

SEQ ID NO: 2869909 - RNA, 15 nt, Human
ccuguguggccacuu

SEQ ID NO: 2869910 - RNA, 20 nt, Human
ccuguguggccacuucuguc

SEQ ID NO: 2869911 - RNA, 23 nt, Human
ccuguguggccacuucuguccau

SEQ ID NO: 2869912 - RNA, 17 nt, Human
ccugugugguacucuga

SEQ ID NO: 2869913 - RNA, 19 nt, Human
ccugugugguacucugaaa

SEQ ID NO: 2869914 - RNA, 22 nt, Human
ccugugucuugcaauggcagcc

SEQ ID NO: 2869915 - RNA, 20 nt, Human
ccugugucugcgaaguccua

SEQ ID NO: 2869916 - RNA, 23 nt, Human
ccugugucugcgaaguccuaugg

SEQ ID NO: 2869917 - RNA, 23 nt, Human
ccugugucuucuccaccacgcug

SEQ ID NO: 2869918 - RNA, 21 nt, Human
ccugugucuugcaauggcagc

SEQ ID NO: 2869919 - RNA, 19 nt, Human
ccugugucuugcaauggca

SEQ ID NO: 2869920 - RNA, 17 nt, Human
ccugugucuugcaaugg

SEQ ID NO: 2869921 - RNA, 17 nt, Human
ccuguguccaccugugg

SEQ ID NO: 2869922 - RNA, 18 nt, Human
ccuguguccaccuguggg

SEQ ID NO: 2869923 - RNA, 19 nt, Human
ccuguguccaccugugggu

SEQ ID NO: 2869924 - RNA, 17 nt, Human
ccuguguauacagcccu

SEQ ID NO: 2869925 - RNA, 14 nt, Human
ccuguguauggaaa

SEQ ID NO: 2869926 - RNA, 20 nt, Human
ccuguguauggaaaaaccau

SEQ ID NO: 2869927 - RNA, 15 nt, Human
ccugugucaauccag

SEQ ID NO: 2869928 - RNA, 16 nt, Human
ccugugucaauccaga

SEQ ID NO: 2869929 - RNA, 21 nt, Human
ccugugucaauccagauggug

SEQ ID NO: 2869930 - RNA, 14 nt, Human
ccuguguacugugu

SEQ ID NO: 2869931 - RNA, 19 nt, Human
ccuuaauuuuuuuuucaua

SEQ ID NO: 2869932 - RNA, 23 nt, Human
ccuuaaucagguccucagagaau

SEQ ID NO: 2869933 - RNA, 22 nt, Human
ccuuaaugcuucauaugaggag

SEQ ID NO: 2869934 - RNA, 13 nt, Human
ccuuaauuacuua

SEQ ID NO: 2869935 - RNA, 15 nt, Human
ccuuaauuacuuaaa

SEQ ID NO: 2869936 - RNA, 16 nt, Human
ccuuaauuacuuaaaa

SEQ ID NO: 2869937 - RNA, 22 nt, Human
ccuuaagaccuacuguucuaaa

SEQ ID NO: 2869938 - RNA, 14 nt, Human
ccuuaagcccuggc

SEQ ID NO: 2869939 - RNA, 16 nt, Human
ccuuaagcccuggccc

SEQ ID NO: 2869940 - RNA, 18 nt, Human
ccuuaagcccuggccccc

SEQ ID NO: 2869941 - RNA, 23 nt, Human
ccuuaagaccuacuguucuaaag

SEQ ID NO: 2869942 - RNA, 13 nt, Human
ccuuaacccaagg

SEQ ID NO: 2869943 - RNA, 15 nt, Human
ccuuaacccaaggag

SEQ ID NO: 2869944 - RNA, 17 nt, Human
ccuuaacccaaggagca

SEQ ID NO: 2869945 - RNA, 18 nt, Human
ccuuaacccaaggagcac

SEQ ID NO: 2869946 - RNA, 20 nt, Human
ccuuaacccaaggagcacag

SEQ ID NO: 2869947 - RNA, 12 nt, Human
ccuuaacacuga

SEQ ID NO: 2869948 - RNA, 23 nt, Human
ccuuaaagaaagucgaauuaaua

SEQ ID NO: 2869949 - RNA, 22 nt, Human
ccuuaaaggcaccaucuaauag

SEQ ID NO: 2869950 - RNA, 12 nt, Human
ccuuaaaaugga

SEQ ID NO: 2869951 - RNA, 13 nt, Human
ccuuaaaauggaa

SEQ ID NO: 2869952 - RNA, 17 nt, Human
ccuguuuuucugggugg

SEQ ID NO: 2869953 - RNA, 16 nt, Human
ccuguuuuguacauag

SEQ ID NO: 2869954 - RNA, 16 nt, Human
ccuguuuuuuuuucau

SEQ ID NO: 2869955 - RNA, 13 nt, Human
ccuuaaaaaucac

SEQ ID NO: 2869956 - RNA, 15 nt, Human
ccuguuuuucugggu

SEQ ID NO: 2869957 - RNA, 16 nt, Human
ccuguuuuucugggug

SEQ ID NO: 2869958 - RNA, 17 nt, Human
ccuuaccacugcucuga

SEQ ID NO: 2869959 - RNA, 13 nt, Human
ccuuacauuugug

SEQ ID NO: 2869960 - RNA, 19 nt, Human
ccuuacauuugugagauuc

SEQ ID NO: 2869961 - RNA, 15 nt, Human
ccuuaccaacuuucu

SEQ ID NO: 2869962 - RNA, 17 nt, Human
ccuuaccaacuuucugu

SEQ ID NO: 2869963 - RNA, 20 nt, Human
ccuuaccacugcucugauga

SEQ ID NO: 2869964 - RNA, 18 nt, Human
ccuuaccaacuuucugua

SEQ ID NO: 2869965 - RNA, 19 nt, Human
ccuuaccaacuuucuguaa

SEQ ID NO: 2869966 - RNA, 16 nt, Human
ccuuaccccuuagccu

SEQ ID NO: 2869967 - RNA, 15 nt, Human
ccuuaccccuuagcc

SEQ ID NO: 2869968 - RNA, 23 nt, Human
ccuuaccccacaacgugcaacug

SEQ ID NO: 2869969 - RNA, 19 nt, Human
ccuuaccccaguuuuuuga

SEQ ID NO: 2869970 - RNA, 13 nt, Human
ccuuaccccugcc

SEQ ID NO: 2869971 - RNA, 20 nt, Human
ccuuaccccuggcuguuugg

SEQ ID NO: 2869972 - RNA, 17 nt, Human
ccuuacgaucaggcaca

SEQ ID NO: 2869973 - RNA, 18 nt, Human
ccuuacgaucaggcacag

SEQ ID NO: 2869974 - RNA, 21 nt, Human
ccuuacgaucaggcacagguc

SEQ ID NO: 2869975 - RNA, 23 nt, Human
ccuuacgaucaggcacaggucag

SEQ ID NO: 2869976 - RNA, 16 nt, Human
ccuuacgcuuugucac

SEQ ID NO: 2869977 - RNA, 18 nt, Human
ccuuagaagucacacagu

SEQ ID NO: 2869978 - RNA, 17 nt, Human
ccuuagaagucacacag

SEQ ID NO: 2869979 - RNA, 13 nt, Human
ccuuacuucuugc

SEQ ID NO: 2869980 - RNA, 16 nt, Human
ccuuacuucuugcccu

SEQ ID NO: 2869981 - RNA, 17 nt, Human
ccuuacuucuugcccug

SEQ ID NO: 2869982 - RNA, 23 nt, Human
cgagcaguccugccucagccucc

SEQ ID NO: 2869983 - RNA, 14 nt, Human
cgagcaucccccaa

SEQ ID NO: 2869984 - RNA, 21 nt, Human
cgagcaucccccaaaguucac

SEQ ID NO: 2869985 - RNA, 21 nt, Human
cgagcaguccugccucagccu

SEQ ID NO: 2869986 - RNA, 17 nt, Human
cgagcaguccugccuca

SEQ ID NO: 2869987 - RNA, 15 nt, Human
cgagcaguccugccu

SEQ ID NO: 2869988 - RNA, 20 nt, Human
cgagaucacgccacugcacu

SEQ ID NO: 2869989 - RNA, 18 nt, Human
cgagaucacgccacugca

SEQ ID NO: 2869990 - RNA, 16 nt, Human
cgagaucacgccacug

SEQ ID NO: 2869991 - RNA, 20 nt, Human
cgagcaauauuuauggaugc

SEQ ID NO: 2869992 - RNA, 14 nt, Human
cgagcaaagaucaa

SEQ ID NO: 2869993 - RNA, 15 nt, Human
cgagcaaagaucaaa

SEQ ID NO: 2869994 - RNA, 20 nt, Human
cgagcaaagaucaaaauaaa

SEQ ID NO: 2869995 - RNA, 23 nt, Human
cgagcaaagaucaaaauaaaaag

SEQ ID NO: 2869996 - RNA, 17 nt, Human
cgagaucacgccacugc

SEQ ID NO: 2869997 - RNA, 14 nt, Human
cgagagucugucuc

SEQ ID NO: 2869998 - RNA, 15 nt, Human
cgagagucugucuca

SEQ ID NO: 2869999 - RNA, 17 nt, Human
cgagaccagccuggcca

SEQ ID NO: 2870000 - RNA, 14 nt, Human
cgagaccagccugg

SEQ ID NO: 2870001 - RNA, 13 nt, Human
cgagaccagccug

SEQ ID NO: 2870002 - RNA, 16 nt, Human
cgagaccagccuggcc

SEQ ID NO: 2870003 - RNA, 15 nt, Human
cgagaccagccuggc

SEQ ID NO: 2870004 - RNA, 14 nt, Human
cgaauagcugggac

SEQ ID NO: 2870005 - RNA, 13 nt, Human
cgaauagcuggga

SEQ ID NO: 2870006 - RNA, 20 nt, Human
cgagaaauaaaguuugcuua

SEQ ID NO: 2870007 - RNA, 22 nt, Human
cgaaguggacuggccccugggu

SEQ ID NO: 2870008 - RNA, 13 nt, Human
cgaagacacagac

SEQ ID NO: 2870009 - RNA, 14 nt, Human
cgaagaagaugcuc

SEQ ID NO: 2870010 - RNA, 18 nt, Human
cgaagaagagccacagug

SEQ ID NO: 2870011 - RNA, 17 nt, Human
cgaagaauggagaggaa

SEQ ID NO: 2870012 - RNA, 16 nt, Human
cgaagaagagccacag

SEQ ID NO: 2870013 - RNA, 17 nt, Human
cgaagaagagccacagu

SEQ ID NO: 2870014 - RNA, 15 nt, Human
cgaagaagagccaca

SEQ ID NO: 2870015 - RNA, 14 nt, Human
cgaacuucacaacu

SEQ ID NO: 2870016 - RNA, 14 nt, Human
cgaacuggcugcaa

SEQ ID NO: 2870017 - RNA, 12 nt, Human
cgaacuggcugc

SEQ ID NO: 2870018 - RNA, 19 nt, Human
cgaacuccuaaccucaagu

SEQ ID NO: 2870019 - RNA, 14 nt, Human
cgaacuccugaccu

SEQ ID NO: 2870020 - RNA, 23 nt, Human
cgaaccgugagcaggaaggccug

SEQ ID NO: 2870021 - RNA, 22 nt, Human
cgaaagggacuuggaagcuccg

SEQ ID NO: 2870022 - RNA, 18 nt, Human
cgaaagcucuagaaucug

SEQ ID NO: 2870023 - RNA, 19 nt, Human
cgaaagggacuuggaagcu

SEQ ID NO: 2870024 - RNA, 11 nt, Human
cgaaagagaga

SEQ ID NO: 2870025 - RNA, 12 nt, Human
cgaaagagagag

SEQ ID NO: 2870026 - RNA, 13 nt, Human
cgaaagagagaga

SEQ ID NO: 2870027 - RNA, 22 nt, Human
cgaaagagagagaaacaaacuu

SEQ ID NO: 2870028 - RNA, 23 nt, Human
cgaaagagagagaaacaaacuuu

SEQ ID NO: 2870029 - RNA, 11 nt, Human
cgaaagcacac

SEQ ID NO: 2870030 - RNA, 12 nt, Human
cgaaagcacaca

SEQ ID NO: 2870031 - RNA, 13 nt, Human
cgaaagcucuaga

SEQ ID NO: 2870032 - RNA, 14 nt, Human
cgaaagcucuagaa

SEQ ID NO: 2870033 - RNA, 20 nt, Human
ccuuuuacuacagcuaugaa

SEQ ID NO: 2870034 - RNA, 22 nt, Human
ccuuuuauguaguaauugacau

SEQ ID NO: 2870035 - RNA, 11 nt, Human
ccuuuuauagc

SEQ ID NO: 2870036 - RNA, 16 nt, Human
ccuuuuauagcuauua

SEQ ID NO: 2870037 - RNA, 22 nt, Human
ccuuuuauaggugagaaaaaaa

SEQ ID NO: 2870038 - RNA, 15 nt, Human
ccuuuuauugacaca

SEQ ID NO: 2870039 - RNA, 18 nt, Human
ccuuuuuuuccaucuuua

SEQ ID NO: 2870040 - RNA, 14 nt, Human
ccuuuuuuuccuuu

SEQ ID NO: 2870041 - RNA, 16 nt, Human
ccuuuuuuuccuuuuu

SEQ ID NO: 2870042 - RNA, 22 nt, Human
cgaaaaccaggccuuaucucca

SEQ ID NO: 2870043 - RNA, 13 nt, Human
cgaaaaccaggcc

SEQ ID NO: 2870044 - RNA, 15 nt, Human
cgaaaagagucuucc

SEQ ID NO: 2870045 - RNA, 18 nt, Human
cgaaaccugggauucagg

SEQ ID NO: 2870046 - RNA, 15 nt, Human
cgaaacuuguuauug

SEQ ID NO: 2870047 - RNA, 17 nt, Human
cgaaacuuguuauugug

SEQ ID NO: 2870048 - RNA, 19 nt, Human
cgaaacuuguuauugugaa

SEQ ID NO: 2870049 - RNA, 21 nt, Human
cgaaacuuguuauugugaaug

SEQ ID NO: 2870050 - RNA, 23 nt, Human
cgaaacuuguuauugugaaugau

SEQ ID NO: 2870051 - RNA, 18 nt, Human
cgaaaauucauuucacau

SEQ ID NO: 2870052 - RNA, 23 nt, Human
cgaaacacaaaccacaacugaca

SEQ ID NO: 2870053 - RNA, 17 nt, Human
cgaaacacagaaaccuu

SEQ ID NO: 2870054 - RNA, 21 nt, Human
cgaaaccaauuccucauccuc

SEQ ID NO: 2870055 - RNA, 22 nt, Human
cgcagcccuagagccugccugg

SEQ ID NO: 2870056 - RNA, 19 nt, Human
cgcagcccuagagccugcc

SEQ ID NO: 2870057 - RNA, 20 nt, Human
cgcagcccuagagccugccu

SEQ ID NO: 2870058 - RNA, 12 nt, Human
cgcagaccuccc

SEQ ID NO: 2870059 - RNA, 17 nt, Human
cgcaccccccaagcugu

SEQ ID NO: 2870060 - RNA, 14 nt, Human
cgcaccccccuguu

SEQ ID NO: 2870061 - RNA, 18 nt, Human
cgcaccccccuguucuaa

SEQ ID NO: 2870062 - RNA, 21 nt, Human
cgcaccccccuguucuaaggg

SEQ ID NO: 2870063 - RNA, 22 nt, Human
cgcaccccgauguggaccucua

SEQ ID NO: 2870064 - RNA, 19 nt, Human
cgcagaccuccccagcccc

SEQ ID NO: 2870065 - RNA, 20 nt, Human
cgcagaccuccccagccccu

SEQ ID NO: 2870066 - RNA, 13 nt, Human
cgcagaccucugg

SEQ ID NO: 2870067 - RNA, 15 nt, Human
cgcagaccucuggau

SEQ ID NO: 2870068 - RNA, 19 nt, Human
cgcagaccucuggauuagg

SEQ ID NO: 2870069 - RNA, 15 nt, Human
cgcagaccuccccag

SEQ ID NO: 2870070 - RNA, 16 nt, Human
cgcagaccuccccagc

SEQ ID NO: 2870071 - RNA, 17 nt, Human
cgcagaccuccccagcc

SEQ ID NO: 2870072 - RNA, 18 nt, Human
cgcagaccuccccagccc

SEQ ID NO: 2870073 - RNA, 10 nt, Human
cgcagcccug

SEQ ID NO: 2870074 - RNA, 17 nt, Human
cgcagcccuagagccug

SEQ ID NO: 2870075 - RNA, 18 nt, Human
cgcagcccuagagccugc

SEQ ID NO: 2870076 - RNA, 12 nt, Human
cgcagccccauc

SEQ ID NO: 2870077 - RNA, 13 nt, Human
cgcagccccaucu

SEQ ID NO: 2870078 - RNA, 18 nt, Human
cgcagccccaucugugca

SEQ ID NO: 2870079 - RNA, 15 nt, Human
cgauucauauugaau

SEQ ID NO: 2870080 - RNA, 22 nt, Human
cgauucaccugagcaggaccuc

SEQ ID NO: 2870081 - RNA, 14 nt, Human
cgauuugucccagg

SEQ ID NO: 2870082 - RNA, 14 nt, Human
cgauuuuauuacug

SEQ ID NO: 2870083 - RNA, 16 nt, Human
cgauuuuauuacuggc

SEQ ID NO: 2870084 - RNA, 19 nt, Human
cgauuuuauuacuggcgug

SEQ ID NO: 2870085 - RNA, 17 nt, Human
cgauuuucuccagcuca

SEQ ID NO: 2870086 - RNA, 18 nt, Human
cgcaaaccacacuggacu

SEQ ID NO: 2870087 - RNA, 15 nt, Human
cgcaaaccacacugg

SEQ ID NO: 2870088 - RNA, 16 nt, Human
cgcaaaccacacugga

SEQ ID NO: 2870089 - RNA, 13 nt, Human
cgauuuugccugu

SEQ ID NO: 2870090 - RNA, 12 nt, Human
cgcacauauaca

SEQ ID NO: 2870091 - RNA, 16 nt, Human
cgcacauauacacaca

SEQ ID NO: 2870092 - RNA, 18 nt, Human
cgcacauauacacacaca

SEQ ID NO: 2870093 - RNA, 10 nt, Human
cgcacagcag

SEQ ID NO: 2870094 - RNA, 12 nt, Human
cgcacagcagcc

SEQ ID NO: 2870095 - RNA, 15 nt, Human
cgcacagcagccugc

SEQ ID NO: 2870096 - RNA, 20 nt, Human
cgcacagcagccugcuuccc

SEQ ID NO: 2870097 - RNA, 20 nt, Human
cgcacacccucacucugcca

SEQ ID NO: 2870098 - RNA, 22 nt, Human
cgcacacccucacucugccagg

SEQ ID NO: 2870099 - RNA, 12 nt, Human
cgcacagacagg

SEQ ID NO: 2870100 - RNA, 13 nt, Human
cgcacagacaggu

SEQ ID NO: 2870101 - RNA, 16 nt, Human
cgcacacacacacaua

SEQ ID NO: 2870102 - RNA, 22 nt, Human
cgcacacacacacacacacauc

SEQ ID NO: 2870103 - RNA, 18 nt, Human
cgcacacacacacauaca

SEQ ID NO: 2870104 - RNA, 22 nt, Human
cgcaagagccauguagaagcug

SEQ ID NO: 2870105 - RNA, 20 nt, Human
cgcaagauagauuuggaaua

SEQ ID NO: 2870106 - RNA, 16 nt, Human
cgagcccugguggcag

SEQ ID NO: 2870107 - RNA, 15 nt, Human
cgagcccugguggca

SEQ ID NO: 2870108 - RNA, 13 nt, Human
cgauguaaauuau

SEQ ID NO: 2870109 - RNA, 23 nt, Human
cgauguggaccucuacuuuccag

SEQ ID NO: 2870110 - RNA, 21 nt, Human
ccugcaagccugucugagacu

SEQ ID NO: 2870111 - RNA, 13 nt, Human
ccugcaaggccca

SEQ ID NO: 2870112 - RNA, 14 nt, Human
ccugcaaggcccac

SEQ ID NO: 2870113 - RNA, 15 nt, Human
ccugcaaggcccaca

SEQ ID NO: 2870114 - RNA, 16 nt, Human
ccugcaaggcccacag

SEQ ID NO: 2870115 - RNA, 19 nt, Human
ccugcaaggcccacaggag

SEQ ID NO: 2870116 - RNA, 21 nt, Human
ccugcaaggcccacaggaggc

SEQ ID NO: 2870117 - RNA, 22 nt, Human
ccugcaaaauuugaugccagga

SEQ ID NO: 2870118 - RNA, 19 nt, Human
ccugcaauuucauaugcug

SEQ ID NO: 2870119 - RNA, 19 nt, Human
ccugcaauguaucccuucu

SEQ ID NO: 2870120 - RNA, 16 nt, Human
ccugcaauauuugaau

SEQ ID NO: 2870121 - RNA, 13 nt, Human
ccugcaaucccag

SEQ ID NO: 2870122 - RNA, 14 nt, Human
ccugcaaugaaagg

SEQ ID NO: 2870123 - RNA, 22 nt, Human
ccugcaaugaaagguacuauau

SEQ ID NO: 2870124 - RNA, 13 nt, Human
ccugcaauauuug

SEQ ID NO: 2870125 - RNA, 13 nt, Human
ccugcagggcugc

SEQ ID NO: 2870126 - RNA, 16 nt, Human
ccugcaggccaggcca

SEQ ID NO: 2870127 - RNA, 15 nt, Human
ccugcagggccaagc

SEQ ID NO: 2870128 - RNA, 18 nt, Human
ccugcaguacuuuaccuc

SEQ ID NO: 2870129 - RNA, 20 nt, Human
ccugcaguacuuuaccuccu

SEQ ID NO: 2870130 - RNA, 23 nt, Human
ccugcacuccucagggcagccuc

SEQ ID NO: 2870131 - RNA, 12 nt, Human
ccugcacuccuc

SEQ ID NO: 2870132 - RNA, 21 nt, Human
ccugcacuaauuugauguuua

SEQ ID NO: 2870133 - RNA, 14 nt, Human
ccugcacuaaagcc

SEQ ID NO: 2870134 - RNA, 19 nt, Human
ccugcacuaaagccagccu

SEQ ID NO: 2870135 - RNA, 20 nt, Human
ccugcacuaaagccagccug

SEQ ID NO: 2870136 - RNA, 21 nt, Human
ccugcacuaaagccagccuga

SEQ ID NO: 2870137 - RNA, 18 nt, Human
ccugcaggccaggccagc

SEQ ID NO: 2870138 - RNA, 15 nt, Human
ccugcaggcugagcc

SEQ ID NO: 2870139 - RNA, 16 nt, Human
ccugcaggcugagcca

SEQ ID NO: 2870140 - RNA, 12 nt, Human
ccugcaggccag

SEQ ID NO: 2870141 - RNA, 22 nt, Human
ccugcaggccaagagcagaggc

SEQ ID NO: 2870142 - RNA, 21 nt, Human
ccugcaggccaagagcagagg

SEQ ID NO: 2870143 - RNA, 16 nt, Human
ccugcaggccaagagc

SEQ ID NO: 2870144 - RNA, 22 nt, Human
ccugcaaacgcugccugcccgu

SEQ ID NO: 2870145 - RNA, 21 nt, Human
ccugcaaacgcugccugcccg

SEQ ID NO: 2870146 - RNA, 22 nt, Human
ccugcaaacgcugccugcccac

SEQ ID NO: 2870147 - RNA, 19 nt, Human
ccugcaaacgcugccugcc

SEQ ID NO: 2870148 - RNA, 18 nt, Human
ccugcaaacgcugccugc

SEQ ID NO: 2870149 - RNA, 17 nt, Human
ccugcaaacgcugccug

SEQ ID NO: 2870150 - RNA, 16 nt, Human
ccugcaaacgcugccu

SEQ ID NO: 2870151 - RNA, 15 nt, Human
ccugcaaacgcugcc

SEQ ID NO: 2870152 - RNA, 17 nt, Human
ccugcaaacagaacagg

SEQ ID NO: 2870153 - RNA, 18 nt, Human
ccugcaaacagaacaggg

SEQ ID NO: 2870154 - RNA, 19 nt, Human
ccugcaaacagaacagggu

SEQ ID NO: 2870155 - RNA, 20 nt, Human
ccugcaaacagaacaggguc

SEQ ID NO: 2870156 - RNA, 21 nt, Human
ccugcaaacagaacaggguca

SEQ ID NO: 2870157 - RNA, 13 nt, Human
ccugauuguaaac

SEQ ID NO: 2870158 - RNA, 19 nt, Human
ccugcaaaaucuguucuaa

SEQ ID NO: 2870159 - RNA, 20 nt, Human
ccugauuguguauauucaua

SEQ ID NO: 2870160 - RNA, 14 nt, Human
ccugcaaaaaauac

SEQ ID NO: 2870161 - RNA, 15 nt, Human
ccugcaaaaaauacu

SEQ ID NO: 2870162 - RNA, 17 nt, Human
ccugauugccaagcuca

SEQ ID NO: 2870163 - RNA, 13 nt, Human
ccugauugaccug

SEQ ID NO: 2870164 - RNA, 16 nt, Human
ccugauugaccugcuc

SEQ ID NO: 2870165 - RNA, 17 nt, Human
ccugauugaccugcucc

SEQ ID NO: 2870166 - RNA, 17 nt, Human
ccugccagccuggcuuc

SEQ ID NO: 2870167 - RNA, 16 nt, Human
ccugccagccuggcuu

SEQ ID NO: 2870168 - RNA, 15 nt, Human
ccugccagccuggcu

SEQ ID NO: 2870169 - RNA, 14 nt, Human
ccugccagccuggc

SEQ ID NO: 2870170 - RNA, 14 nt, Human
ccugccagagggga

SEQ ID NO: 2870171 - RNA, 18 nt, Human
ccugccagaggggaagga

SEQ ID NO: 2870172 - RNA, 12 nt, Human
ccugccagcccc

SEQ ID NO: 2870173 - RNA, 15 nt, Human
ccugccagccccaca

SEQ ID NO: 2870174 - RNA, 18 nt, Human
ccugccagccccacacag

SEQ ID NO: 2870175 - RNA, 13 nt, Human
ccugccagccugg

SEQ ID NO: 2870176 - RNA, 21 nt, Human
ccugccagccuggcuucugga

SEQ ID NO: 2870177 - RNA, 14 nt, Human
ccugcaucuuuagu

SEQ ID NO: 2870178 - RNA, 18 nt, Human
ccugcaucuuuagugcuu

SEQ ID NO: 2870179 - RNA, 16 nt, Human
ccugcaucuaagccca

SEQ ID NO: 2870180 - RNA, 17 nt, Human
ccugcaucuaagcccau

SEQ ID NO: 2870181 - RNA, 18 nt, Human
ccugcaugggccagcccc

SEQ ID NO: 2870182 - RNA, 21 nt, Human
ccugcagugggguuucgcagc

SEQ ID NO: 2870183 - RNA, 12 nt, Human
ccugcaguguuc

SEQ ID NO: 2870184 - RNA, 19 nt, Human
ccugcaguguucgcuuggc

SEQ ID NO: 2870185 - RNA, 20 nt, Human
ccugcaguguucgcuuggcu

SEQ ID NO: 2870186 - RNA, 21 nt, Human
ccugcaguguucgcuuggcuc

SEQ ID NO: 2870187 - RNA, 20 nt, Human
ccugcaguuaauuagcauuc

SEQ ID NO: 2870188 - RNA, 18 nt, Human
ccugcauccccuuggcug

SEQ ID NO: 2870189 - RNA, 21 nt, Human
ccugcauccccuuggcuguga

SEQ ID NO: 2870190 - RNA, 23 nt, Human
ccugcauccccuuggcugugagg

SEQ ID NO: 2870191 - RNA, 24 nt, Human
ccugcauccccuuggcugugaggc

SEQ ID NO: 2870192 - RNA, 23 nt, Human
ccugcaucccaggaugcugggug

SEQ ID NO: 2870193 - RNA, 23 nt, Human
ccugccacuuugguacauggcca

SEQ ID NO: 2870194 - RNA, 23 nt, Human
ccugcauguaaacacgccugcaa

SEQ ID NO: 2870195 - RNA, 22 nt, Human
ccugcauguaaacacgccugca

SEQ ID NO: 2870196 - RNA, 21 nt, Human
ccugcauguaaacacgccugc

SEQ ID NO: 2870197 - RNA, 20 nt, Human
ccugcauguaaacacgccug

SEQ ID NO: 2870198 - RNA, 22 nt, Human
ccugcccccagaccuuuuaucc

SEQ ID NO: 2870199 - RNA, 13 nt, Human
ccugagccaagga

SEQ ID NO: 2870200 - RNA, 14 nt, Human
ccugagcuuuaugg

SEQ ID NO: 2870201 - RNA, 21 nt, Human
ccugaggaaggaggggaagcu

SEQ ID NO: 2870202 - RNA, 23 nt, Human
ccugaggaaggaggggaagcugc

SEQ ID NO: 2870203 - RNA, 17 nt, Human
ccugacagaaggugcca

SEQ ID NO: 2870204 - RNA, 16 nt, Human
ccugacagaaggugcc

SEQ ID NO: 2870205 - RNA, 15 nt, Human
ccugacagaaggugc

SEQ ID NO: 2870206 - RNA, 14 nt, Human
ccugacagaaggug

SEQ ID NO: 2870207 - RNA, 16 nt, Human
ccugacagaaggacuc

SEQ ID NO: 2870208 - RNA, 18 nt, Human
ccugacagucuugugcuu

SEQ ID NO: 2870209 - RNA, 13 nt, Human
ccugacaucacag

SEQ ID NO: 2870210 - RNA, 14 nt, Human
ccugacaucacagc

SEQ ID NO: 2870211 - RNA, 17 nt, Human
ccugacaucacagcagc

SEQ ID NO: 2870212 - RNA, 18 nt, Human
ccugacaucacagcagcc

SEQ ID NO: 2870213 - RNA, 19 nt, Human
ccugacaucacagcagccu

SEQ ID NO: 2870214 - RNA, 20 nt, Human
ccugacaucacagcagccuc

SEQ ID NO: 2870215 - RNA, 21 nt, Human
ccugacaucacagcagccucc

SEQ ID NO: 2870216 - RNA, 14 nt, Human
ccugagcaacucuu

SEQ ID NO: 2870217 - RNA, 13 nt, Human
ccugagcaacucu

SEQ ID NO: 2870218 - RNA, 23 nt, Human
ccugagcaacucuugauuaucca

SEQ ID NO: 2870219 - RNA, 18 nt, Human
ccugagcaacucuugauu

SEQ ID NO: 2870220 - RNA, 15 nt, Human
ccugagcaacucuug

SEQ ID NO: 2870221 - RNA, 23 nt, Human
ccuggaaaggcucagucucagga

SEQ ID NO: 2870222 - RNA, 22 nt, Human
ccuggaacaucaucaaggcacu

SEQ ID NO: 2870223 - RNA, 24 nt, Human
ccuggaacauccuuugcagggcag

SEQ ID NO: 2870224 - RNA, 15 nt, Human
ccuggaaccuugcug

SEQ ID NO: 2870225 - RNA, 16 nt, Human
ccuggaaccuugcugu

SEQ ID NO: 2870226 - RNA, 17 nt, Human
ccuggaaccuugcuguc

SEQ ID NO: 2870227 - RNA, 18 nt, Human
ccuggaaccuugcugucc

SEQ ID NO: 2870228 - RNA, 20 nt, Human
ccuggaaccuugcuguccug

SEQ ID NO: 2870229 - RNA, 21 nt, Human
ccuggaaccuugcuguccuga

SEQ ID NO: 2870230 - RNA, 20 nt, Human
ccuggaacucuaucugggcc

SEQ ID NO: 2870231 - RNA, 22 nt, Human
ccuggaacucuaucugggccug

SEQ ID NO: 2870232 - RNA, 12 nt, Human
ccuggaagacag

SEQ ID NO: 2870233 - RNA, 13 nt, Human
ccuggaagacaga

SEQ ID NO: 2870234 - RNA, 14 nt, Human
ccuggaagacagag

SEQ ID NO: 2870235 - RNA, 15 nt, Human
ccuggaagacagaga

SEQ ID NO: 2870236 - RNA, 22 nt, Human
ccuggaagacagagaccuccug

SEQ ID NO: 2870237 - RNA, 15 nt, Human
ccuggaagcuuuguc

SEQ ID NO: 2870238 - RNA, 23 nt, Human
ccuggaagcuuuguccccugcuu

SEQ ID NO: 2870239 - RNA, 19 nt, Human
ccugcuucagauguggagc

SEQ ID NO: 2870240 - RNA, 21 nt, Human
ccugcuucagauguggagcca

SEQ ID NO: 2870241 - RNA, 22 nt, Human
ccugcuucagauguggagccag

SEQ ID NO: 2870242 - RNA, 23 nt, Human
ccugcuucagauguggagccagg

SEQ ID NO: 2870243 - RNA, 23 nt, Human
ccugcuuugggcugcccuggugc

SEQ ID NO: 2870244 - RNA, 21 nt, Human
ccugcuuugggcugcccuggu

SEQ ID NO: 2870245 - RNA, 22 nt, Human
ccugcuuugggcugcccuggug

SEQ ID NO: 2870246 - RNA, 20 nt, Human
ccugcuuugggcugcccugg

SEQ ID NO: 2870247 - RNA, 19 nt, Human
ccugcuuugggcugcccug

SEQ ID NO: 2870248 - RNA, 22 nt, Human
ccugcucuccgaccagacaccu

SEQ ID NO: 2870249 - RNA, 22 nt, Human
ccugcucuccaagucucagugg

SEQ ID NO: 2870250 - RNA, 23 nt, Human
ccugcucuccaagucucaguggc

SEQ ID NO: 2870251 - RNA, 16 nt, Human
ccugcucuccucuugc

SEQ ID NO: 2870252 - RNA, 18 nt, Human
ccugcucuccucuugcca

SEQ ID NO: 2870253 - RNA, 19 nt, Human
ccugcucuccucuugccac

SEQ ID NO: 2870254 - RNA, 21 nt, Human
ccugcucuccucuugccacug

SEQ ID NO: 2870255 - RNA, 22 nt, Human
ccugcucuccucuugccacugc

SEQ ID NO: 2870256 - RNA, 21 nt, Human
ccugcucuccgaccagacacc

SEQ ID NO: 2870257 - RNA, 13 nt, Human
ccugcuccugcag

SEQ ID NO: 2870258 - RNA, 14 nt, Human
ccugcuccugcagc

SEQ ID NO: 2870259 - RNA, 15 nt, Human
ccugcuccugcagca

SEQ ID NO: 2870260 - RNA, 16 nt, Human
ccugcuccugcagcau

SEQ ID NO: 2870261 - RNA, 17 nt, Human
ccugcuccugcagcaug

SEQ ID NO: 2870262 - RNA, 21 nt, Human
ccugcuccagaauuuggaaau

SEQ ID NO: 2870263 - RNA, 22 nt, Human
ccugcuccagaauuuggaaauc

SEQ ID NO: 2870264 - RNA, 13 nt, Human
ccugccuggagcg

SEQ ID NO: 2870265 - RNA, 14 nt, Human
ccugccuggccagg

SEQ ID NO: 2870266 - RNA, 13 nt, Human
ccugccuggccag

SEQ ID NO: 2870267 - RNA, 12 nt, Human
ccugccuggcca

SEQ ID NO: 2870268 - RNA, 11 nt, Human
ccugccuggcc

SEQ ID NO: 2870269 - RNA, 14 nt, Human
ccugccuucaugga

SEQ ID NO: 2870270 - RNA, 17 nt, Human
ccugccuuaggccuacc

SEQ ID NO: 2870271 - RNA, 13 nt, Human
ccugccuggcccc

SEQ ID NO: 2870272 - RNA, 23 nt, Human
ccugccuggccaggcagaucugu

SEQ ID NO: 2870273 - RNA, 22 nt, Human
ccugccuggccaggcagaucug

SEQ ID NO: 2870274 - RNA, 18 nt, Human
ccugccuggccaggcaga

SEQ ID NO: 2870275 - RNA, 14 nt, Human
ccugccuggccccu

SEQ ID NO: 2870276 - RNA, 15 nt, Human
ccugccuggccccuc

SEQ ID NO: 2870277 - RNA, 12 nt, Human
ccugccuggccg

SEQ ID NO: 2870278 - RNA, 14 nt, Human
ccugccuggccggc

SEQ ID NO: 2870279 - RNA, 15 nt, Human
ccugccuggccggcc

SEQ ID NO: 2870280 - RNA, 16 nt, Human
ccugccuggccggcca

SEQ ID NO: 2870281 - RNA, 17 nt, Human
ccugccuggccggccag

SEQ ID NO: 2870282 - RNA, 18 nt, Human
ccugccuggccggccagc

SEQ ID NO: 2870283 - RNA, 19 nt, Human
ccugccuggccggccagcc

SEQ ID NO: 2870284 - RNA, 23 nt, Human
ccugccuggccggccagccagcc

SEQ ID NO: 2870285 - RNA, 16 nt, Human
ccugccggagaggaag

SEQ ID NO: 2870286 - RNA, 18 nt, Human
ccugccggagaggaagag

SEQ ID NO: 2870287 - RNA, 21 nt, Human
ccugccggagaggaagagaca

SEQ ID NO: 2870288 - RNA, 15 nt, Human
ccugccgguaaacac

SEQ ID NO: 2870289 - RNA, 20 nt, Human
ccugccgguaaacacgccug

SEQ ID NO: 2870290 - RNA, 22 nt, Human
ccugccgguaaacacgccugca

SEQ ID NO: 2870291 - RNA, 21 nt, Human
ccugccgguaaacacgccugc

SEQ ID NO: 2870292 - RNA, 23 nt, Human
ccugccgguaaacacgccugcaa

SEQ ID NO: 2870293 - RNA, 22 nt, Human
ccugccccgcccagcugcaccu

SEQ ID NO: 2870294 - RNA, 16 nt, Human
ccugccccgcccagcu

SEQ ID NO: 2870295 - RNA, 14 nt, Human
ccugcgccugugau

SEQ ID NO: 2870296 - RNA, 15 nt, Human
ccugcgccugugaug

SEQ ID NO: 2870297 - RNA, 22 nt, Human
ccugcgcccaguccuuccaccu

SEQ ID NO: 2870298 - RNA, 22 nt, Human
ccugcgggucacaggagggagg

SEQ ID NO: 2870299 - RNA, 18 nt, Human
ccugcgggucacaggagg

SEQ ID NO: 2870300 - RNA, 20 nt, Human
ccugcgaaggggcccugguc

SEQ ID NO: 2870301 - RNA, 19 nt, Human
ccugcgaaggggcccuggu

SEQ ID NO: 2870302 - RNA, 17 nt, Human
ccugcgaaggggcccug

SEQ ID NO: 2870303 - RNA, 15 nt, Human
ccugcgaaggggccc

SEQ ID NO: 2870304 - RNA, 11 nt, Human
ccugccuuugc

SEQ ID NO: 2870305 - RNA, 14 nt, Human
ccugccuuugccuc

SEQ ID NO: 2870306 - RNA, 18 nt, Human
ccugccuuugggagcagg

SEQ ID NO: 2870307 - RNA, 11 nt, Human
ccugccuuuua

SEQ ID NO: 2870308 - RNA, 18 nt, Human
ccugcgauuuugccugug

SEQ ID NO: 2870309 - RNA, 18 nt, Human
ccugcgcccaguccuucc

SEQ ID NO: 2870310 - RNA, 20 nt, Human
ccugcgcccaguccuuccac

SEQ ID NO: 2870311 - RNA, 13 nt, Human
ccugccuugaagc

SEQ ID NO: 2870312 - RNA, 21 nt, Human
ccugccuugaagccacugaag

SEQ ID NO: 2870313 - RNA, 19 nt, Human
ccugccuugaagccacuga

SEQ ID NO: 2870314 - RNA, 17 nt, Human
ccugccuugaagccacu

SEQ ID NO: 2870315 - RNA, 16 nt, Human
ccugccuugaagccac

SEQ ID NO: 2870316 - RNA, 23 nt, Human
ccugccuugaagccacugaagcu

SEQ ID NO: 2870317 - RNA, 22 nt, Human
ccugccuugaagccacugaagc

SEQ ID NO: 2870318 - RNA, 16 nt, Human
ccugccuuguuuggau

SEQ ID NO: 2870319 - RNA, 19 nt, Human
ccugccuuggccucccaag

SEQ ID NO: 2870320 - RNA, 23 nt, Human
ccuggcuuuucacugcuggcugc

SEQ ID NO: 2870321 - RNA, 24 nt, Human
ccuggcuuuucacugcuggcugcc

SEQ ID NO: 2870322 - RNA, 20 nt, Human
ccuggcuuuucacugcuggc

SEQ ID NO: 2870323 - RNA, 18 nt, Human
ccuggcuuuucacugcug

SEQ ID NO: 2870324 - RNA, 21 nt, Human
ccuggcuuuucacugcuggcu

SEQ ID NO: 2870325 - RNA, 22 nt, Human
ccuggcuuuucacugcuggcug

SEQ ID NO: 2870326 - RNA, 23 nt, Human
ccuggcuguuuggacuuuguaua

SEQ ID NO: 2870327 - RNA, 14 nt, Human
ccuggcuucaggca

SEQ ID NO: 2870328 - RNA, 22 nt, Human
ccuggcuucaggcaauucuccu

SEQ ID NO: 2870329 - RNA, 13 nt, Human
ccuggcuguacug

SEQ ID NO: 2870330 - RNA, 14 nt, Human
ccuggcuguacugc

SEQ ID NO: 2870331 - RNA, 19 nt, Human
ccuggcuguacugcucagg

SEQ ID NO: 2870332 - RNA, 16 nt, Human
ccuggcuucuggagcc

SEQ ID NO: 2870333 - RNA, 15 nt, Human
ccuggcuucuggagc

SEQ ID NO: 2870334 - RNA, 14 nt, Human
ccuggcuucuggag

SEQ ID NO: 2870335 - RNA, 13 nt, Human
ccuggcuucugga

SEQ ID NO: 2870336 - RNA, 23 nt, Human
ccugggcauauccaccaccuccc

SEQ ID NO: 2870337 - RNA, 14 nt, Human
ccugggccaggguc

SEQ ID NO: 2870338 - RNA, 15 nt, Human
ccugggccagggucu

SEQ ID NO: 2870339 - RNA, 16 nt, Human
ccugggccagggucug

SEQ ID NO: 2870340 - RNA, 23 nt, Human
ccugggaaaccccuucucuguga

SEQ ID NO: 2870341 - RNA, 22 nt, Human
ccugggcauauccaccaccucc

SEQ ID NO: 2870342 - RNA, 18 nt, Human
ccuggggguucuuucuuc

SEQ ID NO: 2870343 - RNA, 12 nt, Human
ccuggggguggg

SEQ ID NO: 2870344 - RNA, 18 nt, Human
ccuggguggaucggccuc

SEQ ID NO: 2870345 - RNA, 22 nt, Human
ccuggguggaucggccuccucu

SEQ ID NO: 2870346 - RNA, 21 nt, Human
ccuggggguucuuucuuccuc

SEQ ID NO: 2870347 - RNA, 22 nt, Human
ccuggggguucuuucuuccucu

SEQ ID NO: 2870348 - RNA, 23 nt, Human
ccuggggguucuuucuuccucug

SEQ ID NO: 2870349 - RNA, 22 nt, Human
ccugggguaccaagagacuccu

SEQ ID NO: 2870350 - RNA, 13 nt, Human
ccuggguucccuu

SEQ ID NO: 2870351 - RNA, 17 nt, Human
ccuggguucccuuuccu

SEQ ID NO: 2870352 - RNA, 16 nt, Human
ccuggguuuaagggga

SEQ ID NO: 2870353 - RNA, 15 nt, Human
ccugguacucaagcc

SEQ ID NO: 2870354 - RNA, 17 nt, Human
ccugguacccuccuggc

SEQ ID NO: 2870355 - RNA, 16 nt, Human
ccugguacucaagccc

SEQ ID NO: 2870356 - RNA, 19 nt, Human
ccugguacucaagcccgcg

SEQ ID NO: 2870357 - RNA, 13 nt, Human
ccugguacucccu

SEQ ID NO: 2870358 - RNA, 20 nt, Human
ccugguacucccucucagga

SEQ ID NO: 2870359 - RNA, 14 nt, Human
ccugguacccuccu

SEQ ID NO: 2870360 - RNA, 15 nt, Human
ccugguacccuccug

SEQ ID NO: 2870361 - RNA, 17 nt, Human
ccuggucaggcccuggu

SEQ ID NO: 2870362 - RNA, 19 nt, Human
ccuggucaggcccuggugc

SEQ ID NO: 2870363 - RNA, 20 nt, Human
ccuggucacagggcaugccc

SEQ ID NO: 2870364 - RNA, 22 nt, Human
ccuggucacaggacucugccuc

SEQ ID NO: 2870365 - RNA, 23 nt, Human
ccuggucacaggacucugccucc

SEQ ID NO: 2870366 - RNA, 21 nt, Human
ccuggucacaggacucugccu

SEQ ID NO: 2870367 - RNA, 15 nt, Human
ccugguauggcugca

SEQ ID NO: 2870368 - RNA, 16 nt, Human
ccugguauggcugcag

SEQ ID NO: 2870369 - RNA, 21 nt, Human
ccugguccagggaagcuggcc

SEQ ID NO: 2870370 - RNA, 14 nt, Human
ccugguccagggaa

SEQ ID NO: 2870371 - RNA, 22 nt, Human
ccugguccagggaagcuggccg

SEQ ID NO: 2870372 - RNA, 13 nt, Human
ccugguccaugca

SEQ ID NO: 2870373 - RNA, 16 nt, Human
ccugguccaugcaggg

SEQ ID NO: 2870374 - RNA, 19 nt, Human
ccugguccaugcagggggc

SEQ ID NO: 2870375 - RNA, 10 nt, Human
ccuggugccc

SEQ ID NO: 2870376 - RNA, 15 nt, Human
ccuggccagaugcac

SEQ ID NO: 2870377 - RNA, 18 nt, Human
ccuggcagcccagagacu

SEQ ID NO: 2870378 - RNA, 17 nt, Human
ccuggcagcccagagac

SEQ ID NO: 2870379 - RNA, 15 nt, Human
ccuggcagcccagag

SEQ ID NO: 2870380 - RNA, 21 nt, Human
ccuggcagccgugccuucagc

SEQ ID NO: 2870381 - RNA, 22 nt, Human
ccuggcagccgugccuucagcu

SEQ ID NO: 2870382 - RNA, 17 nt, Human
ccuggcaggaugacccu

SEQ ID NO: 2870383 - RNA, 21 nt, Human
ccuggcuggagaauguggaga

SEQ ID NO: 2870384 - RNA, 22 nt, Human
ccuggcuggagaauguggagaa

SEQ ID NO: 2870385 - RNA, 23 nt, Human
ccuggcucccacaggcccuuccu

SEQ ID NO: 2870386 - RNA, 17 nt, Human
ccuggcucccacaggcc

SEQ ID NO: 2870387 - RNA, 17 nt, Human
ccuggacacucagaccu

SEQ ID NO: 2870388 - RNA, 16 nt, Human
ccuggacacucagacc

SEQ ID NO: 2870389 - RNA, 22 nt, Human
ccuggaauuagcuuggggccag

SEQ ID NO: 2870390 - RNA, 23 nt, Human
ccuggaauuagcuuggggccagg

SEQ ID NO: 2870391 - RNA, 23 nt, Human
ccuggcacuaacguugagccccu

SEQ ID NO: 2870392 - RNA, 14 nt, Human
ccuggcagcccaga

SEQ ID NO: 2870393 - RNA, 13 nt, Human
ccuggcagcccag

SEQ ID NO: 2870394 - RNA, 11 nt, Human
ccuggcagccc

SEQ ID NO: 2870395 - RNA, 23 nt, Human
ccuggcacccggccccugcuggu

SEQ ID NO: 2870396 - RNA, 22 nt, Human
ccuggcacgguggcucaggccu

SEQ ID NO: 2870397 - RNA, 18 nt, Human
ccuggcacgguggcucag

SEQ ID NO: 2870398 - RNA, 22 nt, Human
ccuggcacccggccccugcugg

SEQ ID NO: 2870399 - RNA, 14 nt, Human
cccgugggcucccg

SEQ ID NO: 2870400 - RNA, 22 nt, Human
cccgucucugguuccuccccuc

SEQ ID NO: 2870401 - RNA, 11 nt, Human
cccgucugucc

SEQ ID NO: 2870402 - RNA, 17 nt, Human
cccgucuguccaucugc

SEQ ID NO: 2870403 - RNA, 18 nt, Human
cccgucuguccaucugcc

SEQ ID NO: 2870404 - RNA, 19 nt, Human
cccgucuguccaucugccc

SEQ ID NO: 2870405 - RNA, 23 nt, Human
cccgucugugugugaccccuccu

SEQ ID NO: 2870406 - RNA, 20 nt, Human
cccgucgaggggcucucagc

SEQ ID NO: 2870407 - RNA, 12 nt, Human
cccgucucagug

SEQ ID NO: 2870408 - RNA, 13 nt, Human
cccgucucagugu

SEQ ID NO: 2870409 - RNA, 17 nt, Human
cccgggcucucugcugu

SEQ ID NO: 2870410 - RNA, 16 nt, Human
cccgggcucucugcug

SEQ ID NO: 2870411 - RNA, 20 nt, Human
cccggucccaccccucccuc

SEQ ID NO: 2870412 - RNA, 17 nt, Human
cccggucccgaguacag

SEQ ID NO: 2870413 - RNA, 18 nt, Human
cccggugcccaagaauag

SEQ ID NO: 2870414 - RNA, 19 nt, Human
cccgguggcggccccagca

SEQ ID NO: 2870415 - RNA, 18 nt, Human
cccgguggcggccccagc

SEQ ID NO: 2870416 - RNA, 14 nt, Human
cccguaaugcuuag

SEQ ID NO: 2870417 - RNA, 13 nt, Human
cccggggcccagg

SEQ ID NO: 2870418 - RNA, 14 nt, Human
cccggggcccaggg

SEQ ID NO: 2870419 - RNA, 15 nt, Human
cccggggcccagggg

SEQ ID NO: 2870420 - RNA, 16 nt, Human
cccuaauucagccaug

SEQ ID NO: 2870421 - RNA, 21 nt, Human
cccuaauucagccauguacag

SEQ ID NO: 2870422 - RNA, 22 nt, Human
cccuaauucagccauguacaga

SEQ ID NO: 2870423 - RNA, 23 nt, Human
cccuaaugcgcaggcuggcccug

SEQ ID NO: 2870424 - RNA, 17 nt, Human
cccuacacccagacccc

SEQ ID NO: 2870425 - RNA, 18 nt, Human
cccuacacccagacccca

SEQ ID NO: 2870426 - RNA, 13 nt, Human
cccuacagagcug

SEQ ID NO: 2870427 - RNA, 13 nt, Human
cccuacagcauug

SEQ ID NO: 2870428 - RNA, 16 nt, Human
cccguuacagcucccc

SEQ ID NO: 2870429 - RNA, 12 nt, Human
cccguggucucu

SEQ ID NO: 2870430 - RNA, 17 nt, Human
cccuaaugcgcaggcug

SEQ ID NO: 2870431 - RNA, 22 nt, Human
cccuaaugcgcaggcuggcccu

SEQ ID NO: 2870432 - RNA, 21 nt, Human
cccuaaugcgcaggcuggccc

SEQ ID NO: 2870433 - RNA, 23 nt, Human
cccuacuauucaguggcgagaaa

SEQ ID NO: 2870434 - RNA, 22 nt, Human
cccuacucauugggguuccgca

SEQ ID NO: 2870435 - RNA, 13 nt, Human
cccuacggaccag

SEQ ID NO: 2870436 - RNA, 14 nt, Human
cccuacggaccagg

SEQ ID NO: 2870437 - RNA, 14 nt, Human
cccuaccugugccu

SEQ ID NO: 2870438 - RNA, 23 nt, Human
cccuaccugauuggugcaacccu

SEQ ID NO: 2870439 - RNA, 22 nt, Human
cccuaccugauuggugcaaccc

SEQ ID NO: 2870440 - RNA, 16 nt, Human
cccuaccucaggcagg

SEQ ID NO: 2870441 - RNA, 13 nt, Human
cccuaccucaggc

SEQ ID NO: 2870442 - RNA, 21 nt, Human
cccuaccgagucucuucucca

SEQ ID NO: 2870443 - RNA, 14 nt, Human
cccuaccccuggcu

SEQ ID NO: 2870444 - RNA, 16 nt, Human
cccuaccccuggcugu

SEQ ID NO: 2870445 - RNA, 23 nt, Human
cccuaccccuggcuguacugcuc

SEQ ID NO: 2870446 - RNA, 18 nt, Human
cccuaccgagucucuucu

SEQ ID NO: 2870447 - RNA, 18 nt, Human
cccuacucccugcagaug

SEQ ID NO: 2870448 - RNA, 16 nt, Human
cccuacucccugcaga

SEQ ID NO: 2870449 - RNA, 15 nt, Human
cccuacucccugcag

SEQ ID NO: 2870450 - RNA, 21 nt, Human
cccuacucccugcagaugcca

SEQ ID NO: 2870451 - RNA, 19 nt, Human
cccuacucccugcagaugc

SEQ ID NO: 2870452 - RNA, 18 nt, Human
cccuagcccaggagagag

SEQ ID NO: 2870453 - RNA, 20 nt, Human
cccuagcggcagaaaggaaa

SEQ ID NO: 2870454 - RNA, 14 nt, Human
cccuaggagaccaa

SEQ ID NO: 2870455 - RNA, 20 nt, Human
cccuaggaguauauuuccgc

SEQ ID NO: 2870456 - RNA, 21 nt, Human
cccuaggaguauauuuccgca

SEQ ID NO: 2870457 - RNA, 21 nt, Human
cccuagcuuuauauauggaca

SEQ ID NO: 2870458 - RNA, 22 nt, Human
cccuagcuuuauauauggacau

SEQ ID NO: 2870459 - RNA, 23 nt, Human
cccuagcuuuauauauggacaug

SEQ ID NO: 2870460 - RNA, 17 nt, Human
cccuaggaacucagucc

SEQ ID NO: 2870461 - RNA, 21 nt, Human
cccgaguagcugggacuacag

SEQ ID NO: 2870462 - RNA, 18 nt, Human
cccgaguagcugggacua

SEQ ID NO: 2870463 - RNA, 17 nt, Human
cccgaguagcugggacu

SEQ ID NO: 2870464 - RNA, 16 nt, Human
cccgaguagcugggac

SEQ ID NO: 2870465 - RNA, 15 nt, Human
cccgaguagcuggga

SEQ ID NO: 2870466 - RNA, 14 nt, Human
cccgaguagcuggg

SEQ ID NO: 2870467 - RNA, 13 nt, Human
cccgaguagcugg

SEQ ID NO: 2870468 - RNA, 23 nt, Human
cccagagggcccaggcaggccac

SEQ ID NO: 2870469 - RNA, 22 nt, Human
cccagagggcccaggcaggcca

SEQ ID NO: 2870470 - RNA, 21 nt, Human
cccgaggccuucucugaagga

SEQ ID NO: 2870471 - RNA, 18 nt, Human
cccagagggcccaggcag

SEQ ID NO: 2870472 - RNA, 16 nt, Human
cccagagggcccaggc

SEQ ID NO: 2870473 - RNA, 15 nt, Human
cccagagggcccagg

SEQ ID NO: 2870474 - RNA, 14 nt, Human
cccagagggcccag

SEQ ID NO: 2870475 - RNA, 17 nt, Human
cccagaaaggagacuag

SEQ ID NO: 2870476 - RNA, 15 nt, Human
cccagaaaggagacu

SEQ ID NO: 2870477 - RNA, 14 nt, Human
cccagaaaggagac

SEQ ID NO: 2870478 - RNA, 13 nt, Human
cccagagggccca

SEQ ID NO: 2870479 - RNA, 16 nt, Human
cccagaggcuggguga

SEQ ID NO: 2870480 - RNA, 15 nt, Human
cccagaacuucccug

SEQ ID NO: 2870481 - RNA, 16 nt, Human
cccagaacuucccuga

SEQ ID NO: 2870482 - RNA, 19 nt, Human
cccagaacuucccugauug

SEQ ID NO: 2870483 - RNA, 16 nt, Human
cccagaagaaaauucu

SEQ ID NO: 2870484 - RNA, 16 nt, Human
cccgcugcugcugcug

SEQ ID NO: 2870485 - RNA, 13 nt, Human
cccgccugcccac

SEQ ID NO: 2870486 - RNA, 15 nt, Human
cccgccugcccaccu

SEQ ID NO: 2870487 - RNA, 16 nt, Human
cccgccugcccaccug

SEQ ID NO: 2870488 - RNA, 17 nt, Human
cccgccugcccaccugc

SEQ ID NO: 2870489 - RNA, 18 nt, Human
cccgccugcccaccugcc

SEQ ID NO: 2870490 - RNA, 20 nt, Human
cccgccugcccaccugccug

SEQ ID NO: 2870491 - RNA, 22 nt, Human
cccgaguagcugggacuacagg

SEQ ID NO: 2870492 - RNA, 15 nt, Human
cccgaguacagucug

SEQ ID NO: 2870493 - RNA, 17 nt, Human
cccgaggguugauuaag

SEQ ID NO: 2870494 - RNA, 19 nt, Human
cccgaggguugauuaaggc

SEQ ID NO: 2870495 - RNA, 18 nt, Human
cccgccgccugguacuca

SEQ ID NO: 2870496 - RNA, 14 nt, Human
cccgcccucuuccu

SEQ ID NO: 2870497 - RNA, 15 nt, Human
cccgcccucuuccug

SEQ ID NO: 2870498 - RNA, 17 nt, Human
cccgcccccugcccucc

SEQ ID NO: 2870499 - RNA, 14 nt, Human
cccgccccugcagc

SEQ ID NO: 2870500 - RNA, 15 nt, Human
cccgccccugcagca

SEQ ID NO: 2870501 - RNA, 17 nt, Human
cccgccccugcagcacg

SEQ ID NO: 2870502 - RNA, 16 nt, Human
cccgcccccugcccuc

SEQ ID NO: 2870503 - RNA, 19 nt, Human
cccgggcgcggccagcccc

SEQ ID NO: 2870504 - RNA, 21 nt, Human
cccgggcgcggccagccccgg

SEQ ID NO: 2870505 - RNA, 21 nt, Human
cccucccccgccacuccugaa

SEQ ID NO: 2870506 - RNA, 14 nt, Human
cccucuccuuccuu

SEQ ID NO: 2870507 - RNA, 15 nt, Human
cccucuccuuccuua

SEQ ID NO: 2870508 - RNA, 17 nt, Human
cccucucucuucugcuc

SEQ ID NO: 2870509 - RNA, 15 nt, Human
cccucucucuucugc

SEQ ID NO: 2870510 - RNA, 14 nt, Human
cccucucucuucug

SEQ ID NO: 2870511 - RNA, 13 nt, Human
cccucucucuucu

SEQ ID NO: 2870512 - RNA, 23 nt, Human
cccucucucuucugcuccacccu

SEQ ID NO: 2870513 - RNA, 22 nt, Human
cccucucucuucugcuccaccc

SEQ ID NO: 2870514 - RNA, 19 nt, Human
cccucucucuucugcucca

SEQ ID NO: 2870515 - RNA, 18 nt, Human
cccucucucuucugcucc

SEQ ID NO: 2870516 - RNA, 13 nt, Human
cccucugcucagc

SEQ ID NO: 2870517 - RNA, 14 nt, Human
cccucugcucagcc

SEQ ID NO: 2870518 - RNA, 15 nt, Human
cccucugcucagcca

SEQ ID NO: 2870519 - RNA, 15 nt, Human
cccucugcugaagac

SEQ ID NO: 2870520 - RNA, 19 nt, Human
cccucugcugaagacuugc

SEQ ID NO: 2870521 - RNA, 21 nt, Human
cccucugcugaagacuugccc

SEQ ID NO: 2870522 - RNA, 14 nt, Human
cccucugcugcugu

SEQ ID NO: 2870523 - RNA, 15 nt, Human
cccucugcugcuguc

SEQ ID NO: 2870524 - RNA, 12 nt, Human
cccucuggaggg

SEQ ID NO: 2870525 - RNA, 21 nt, Human
cccucuggagggguguggcuc

SEQ ID NO: 2870526 - RNA, 22 nt, Human
cccucuggagggguguggcucc

SEQ ID NO: 2870527 - RNA, 14 nt, Human
cccucugaccugca

SEQ ID NO: 2870528 - RNA, 19 nt, Human
cccucugaaaguuguacau

SEQ ID NO: 2870529 - RNA, 20 nt, Human
cccucugaaaguuguacaug

SEQ ID NO: 2870530 - RNA, 11 nt, Human
cccucucugga

SEQ ID NO: 2870531 - RNA, 13 nt, Human
cccucucugggcc

SEQ ID NO: 2870532 - RNA, 14 nt, Human
cccucucugggccu

SEQ ID NO: 2870533 - RNA, 19 nt, Human
cccucucugggccucagag

SEQ ID NO: 2870534 - RNA, 9 nt, Human
cccucugcc

SEQ ID NO: 2870535 - RNA, 12 nt, Human
cccucugccacc

SEQ ID NO: 2870536 - RNA, 13 nt, Human
cccucugccacca

SEQ ID NO: 2870537 - RNA, 15 nt, Human
cccucugaccugcac

SEQ ID NO: 2870538 - RNA, 16 nt, Human
cccucugaccugcacu

SEQ ID NO: 2870539 - RNA, 17 nt, Human
cccucugaccugcacug

SEQ ID NO: 2870540 - RNA, 19 nt, Human
cccucugaccugcacuggg

SEQ ID NO: 2870541 - RNA, 18 nt, Human
cccuccagaaccaccccg

SEQ ID NO: 2870542 - RNA, 12 nt, Human
cccuccacucuc

SEQ ID NO: 2870543 - RNA, 12 nt, Human
cccuccacuguc

SEQ ID NO: 2870544 - RNA, 19 nt, Human
cccuccagaacacggcuca

SEQ ID NO: 2870545 - RNA, 14 nt, Human
cccucccaggacuc

SEQ ID NO: 2870546 - RNA, 14 nt, Human
cccuccccauggag

SEQ ID NO: 2870547 - RNA, 16 nt, Human
cccucccccaaccccc

SEQ ID NO: 2870548 - RNA, 16 nt, Human
cccuccccaucccaug

SEQ ID NO: 2870549 - RNA, 22 nt, Human
cccucccagggccagggcccug

SEQ ID NO: 2870550 - RNA, 20 nt, Human
cccucccaggacucugaccc

SEQ ID NO: 2870551 - RNA, 16 nt, Human
cccuccccaaaguccc

SEQ ID NO: 2870552 - RNA, 13 nt, Human
cccuccccaggaa

SEQ ID NO: 2870553 - RNA, 15 nt, Human
cccuaguaaaaauac

SEQ ID NO: 2870554 - RNA, 16 nt, Human
cccuagucccuucccc

SEQ ID NO: 2870555 - RNA, 12 nt, Human
cccuagguuccc

SEQ ID NO: 2870556 - RNA, 17 nt, Human
cccuagguucccggucc

SEQ ID NO: 2870557 - RNA, 15 nt, Human
cccuagguucccugu

SEQ ID NO: 2870558 - RNA, 18 nt, Human
cccuagguucccuguucu

SEQ ID NO: 2870559 - RNA, 19 nt, Human
cccuagguucccuguucuu

SEQ ID NO: 2870560 - RNA, 23 nt, Human
cccuagguucccuguucuuccuc

SEQ ID NO: 2870561 - RNA, 22 nt, Human
cccuagucccuuccccucccug

SEQ ID NO: 2870562 - RNA, 17 nt, Human
cccuagucccuuccccu

SEQ ID NO: 2870563 - RNA, 19 nt, Human
cccuaguucuaccucaggc

SEQ ID NO: 2870564 - RNA, 16 nt, Human
cccuaguucccucugc

SEQ ID NO: 2870565 - RNA, 18 nt, Human
cccuaguucccucugcuc

SEQ ID NO: 2870566 - RNA, 21 nt, Human
cccuaguucccucugcucagc

SEQ ID NO: 2870567 - RNA, 23 nt, Human
cccuaguucccucugcucagcca

SEQ ID NO: 2870568 - RNA, 23 nt, Human
cccuauauguaguauaaagaaaa

SEQ ID NO: 2870569 - RNA, 19 nt, Human
cccuauacuguaguauucu

SEQ ID NO: 2870570 - RNA, 13 nt, Human
cccucuguccacc

SEQ ID NO: 2870571 - RNA, 17 nt, Human
cccucuguccaccagcc

SEQ ID NO: 2870572 - RNA, 21 nt, Human
cccugaaaccuaguacugccc

SEQ ID NO: 2870573 - RNA, 24 nt, Human
cccugaaaauguuuuucugccagg

SEQ ID NO: 2870574 - RNA, 12 nt, Human
cccugaaacacg

SEQ ID NO: 2870575 - RNA, 13 nt, Human
cccugaaacacga

SEQ ID NO: 2870576 - RNA, 19 nt, Human
cccugaaacacgaaacuug

SEQ ID NO: 2870577 - RNA, 21 nt, Human
cccugaaacacgaaacuuguu

SEQ ID NO: 2870578 - RNA, 23 nt, Human
cccugaaaauguuuuucugccag

SEQ ID NO: 2870579 - RNA, 22 nt, Human
cccugaaaauguuuuucugcca

SEQ ID NO: 2870580 - RNA, 19 nt, Human
cccugcacuugcagacucu

SEQ ID NO: 2870581 - RNA, 12 nt, Human
cccugcacuugc

SEQ ID NO: 2870582 - RNA, 19 nt, Human
cccugcacuaaagccagcc

SEQ ID NO: 2870583 - RNA, 20 nt, Human
cccugcacuaaagccagccu

SEQ ID NO: 2870584 - RNA, 21 nt, Human
cccugcacuaaagccagccug

SEQ ID NO: 2870585 - RNA, 22 nt, Human
cccugcacuaaagccagccuga

SEQ ID NO: 2870586 - RNA, 15 nt, Human
cccugcaaagcccag

SEQ ID NO: 2870587 - RNA, 23 nt, Human
cccugcaaaauuugaugccagga

SEQ ID NO: 2870588 - RNA, 13 nt, Human
cccugcaaacaga

SEQ ID NO: 2870589 - RNA, 18 nt, Human
cccugcaaacagaacagg

SEQ ID NO: 2870590 - RNA, 22 nt, Human
cccugcaaacagaacaggguca

SEQ ID NO: 2870591 - RNA, 24 nt, Human
cccugcaaacagaacagggucaug

SEQ ID NO: 2870592 - RNA, 20 nt, Human
cccugaggugaaagggagcu

SEQ ID NO: 2870593 - RNA, 18 nt, Human
cccugaggugaaagggag

SEQ ID NO: 2870594 - RNA, 18 nt, Human
cccugaggucagggagug

SEQ ID NO: 2870595 - RNA, 21 nt, Human
cccugaggucagggagugcug

SEQ ID NO: 2870596 - RNA, 23 nt, Human
cccugcacaaagcccuuccaugu

SEQ ID NO: 2870597 - RNA, 20 nt, Human
cccugcaaagcccagcuuga

SEQ ID NO: 2870598 - RNA, 19 nt, Human
cccugcaaagcccagcuug

SEQ ID NO: 2870599 - RNA, 17 nt, Human
cccugcaaagcccagcu

SEQ ID NO: 2870600 - RNA, 16 nt, Human
cccugcaaagcccagc

SEQ ID NO: 2870601 - RNA, 13 nt, Human
cccugcuggcucu

SEQ ID NO: 2870602 - RNA, 14 nt, Human
cccugcuggcucuu

SEQ ID NO: 2870603 - RNA, 15 nt, Human
cccugcuggcucuuc

SEQ ID NO: 2870604 - RNA, 17 nt, Human
cccugcuuugggcugcc

SEQ ID NO: 2870605 - RNA, 18 nt, Human
cccugcuuugggcugccc

SEQ ID NO: 2870606 - RNA, 19 nt, Human
cccugcuuugggcugcccu

SEQ ID NO: 2870607 - RNA, 17 nt, Human
cccuggacaagcagagg

SEQ ID NO: 2870608 - RNA, 20 nt, Human
cccugcuggcucuucugccc

SEQ ID NO: 2870609 - RNA, 21 nt, Human
cccugcuggcucuucugccca

SEQ ID NO: 2870610 - RNA, 20 nt, Human
cccugcuuugggcugcccug

SEQ ID NO: 2870611 - RNA, 23 nt, Human
cccuggaccaguggucucacaug

SEQ ID NO: 2870612 - RNA, 21 nt, Human
cccuggaccaguggucucaca

SEQ ID NO: 2870613 - RNA, 17 nt, Human
cccuggaccaguggucu

SEQ ID NO: 2870614 - RNA, 16 nt, Human
cccuggaccagugguc

SEQ ID NO: 2870615 - RNA, 16 nt, Human
cccugccagaggggaa

SEQ ID NO: 2870616 - RNA, 15 nt, Human
cccugggcucugccc

SEQ ID NO: 2870617 - RNA, 13 nt, Human
cccugggcucugc

SEQ ID NO: 2870618 - RNA, 16 nt, Human
cccugggcucugcccc

SEQ ID NO: 2870619 - RNA, 13 nt, Human
cccugguccuucc

SEQ ID NO: 2870620 - RNA, 15 nt, Human
cccugguccugaggg

SEQ ID NO: 2870621 - RNA, 18 nt, Human
cccugguccagggaagcu

SEQ ID NO: 2870622 - RNA, 16 nt, Human
cccugguccagggaag

SEQ ID NO: 2870623 - RNA, 17 nt, Human
cccugguccuuccaggc

SEQ ID NO: 2870624 - RNA, 16 nt, Human
cccugguccuuccagg

SEQ ID NO: 2870625 - RNA, 17 nt, Human
cccugggcucggaggcu

SEQ ID NO: 2870626 - RNA, 16 nt, Human
cccugggaggccccuu

SEQ ID NO: 2870627 - RNA, 14 nt, Human
cccugggagacaga

SEQ ID NO: 2870628 - RNA, 18 nt, Human
cccuggcuuuucacugcu

SEQ ID NO: 2870629 - RNA, 17 nt, Human
cccuggcuuuucacugc

SEQ ID NO: 2870630 - RNA, 19 nt, Human
cccuggcuuuucacugcug

SEQ ID NO: 2870631 - RNA, 22 nt, Human
cccuggcuuuucacugcuggcu

SEQ ID NO: 2870632 - RNA, 13 nt, Human
cccuggacuggga

SEQ ID NO: 2870633 - RNA, 14 nt, Human
cccuggacugggag

SEQ ID NO: 2870634 - RNA, 15 nt, Human
cccugggaaggccuc

SEQ ID NO: 2870635 - RNA, 18 nt, Human
cccugggaaggccucuug

SEQ ID NO: 2870636 - RNA, 21 nt, Human
cccugggaaggccucuuggag

SEQ ID NO: 2870637 - RNA, 18 nt, Human
cccugggaggcagugaug

SEQ ID NO: 2870638 - RNA, 20 nt, Human
cccacaggaagccugcaguc

SEQ ID NO: 2870639 - RNA, 22 nt, Human
cccacaggaagccugcaguccu

SEQ ID NO: 2870640 - RNA, 23 nt, Human
cccacaggaagccugcaguccug

SEQ ID NO: 2870641 - RNA, 13 nt, Human
cccacacacagau

SEQ ID NO: 2870642 - RNA, 12 nt, Human
cccacacacagg

SEQ ID NO: 2870643 - RNA, 13 nt, Human
cccacacacaggu

SEQ ID NO: 2870644 - RNA, 14 nt, Human
cccacacacaggug

SEQ ID NO: 2870645 - RNA, 15 nt, Human
cccacacacaggugg

SEQ ID NO: 2870646 - RNA, 14 nt, Human
cccacauuggaccc

SEQ ID NO: 2870647 - RNA, 19 nt, Human
cccacauuuagucucuuua

SEQ ID NO: 2870648 - RNA, 21 nt, Human
cccacauuuagucucuuuauu

SEQ ID NO: 2870649 - RNA, 21 nt, Human
cccacauuugugccgacacug

SEQ ID NO: 2870650 - RNA, 22 nt, Human
cccacauuugugccgacacugu

SEQ ID NO: 2870651 - RNA, 23 nt, Human
cccacauuugugccgacacuguu

SEQ ID NO: 2870652 - RNA, 18 nt, Human
cccacauucugaugagca

SEQ ID NO: 2870653 - RNA, 11 nt, Human
cccacacacag

SEQ ID NO: 2870654 - RNA, 11 nt, Human
cccaccacaca

SEQ ID NO: 2870655 - RNA, 19 nt, Human
cccacaugugacacauaug

SEQ ID NO: 2870656 - RNA, 16 nt, Human
cccacaugugacacau

SEQ ID NO: 2870657 - RNA, 16 nt, Human
cccacaggaggcaagc

SEQ ID NO: 2870658 - RNA, 22 nt, Human
cccacaggaggcaagcaagcuc

SEQ ID NO: 2870659 - RNA, 20 nt, Human
cccaccucugugaccucagg

SEQ ID NO: 2870660 - RNA, 21 nt, Human
cccaccucugugaccucaggc

SEQ ID NO: 2870661 - RNA, 15 nt, Human
cccaccucugugacc

SEQ ID NO: 2870662 - RNA, 17 nt, Human
cccaccucugugaccuc

SEQ ID NO: 2870663 - RNA, 18 nt, Human
cccaccucugugaccuca

SEQ ID NO: 2870664 - RNA, 14 nt, Human
cccaccucccugcc

SEQ ID NO: 2870665 - RNA, 15 nt, Human
cccaccucccugccc

SEQ ID NO: 2870666 - RNA, 16 nt, Human
cccaccucccugccca

SEQ ID NO: 2870667 - RNA, 17 nt, Human
cccaccucccugcccag

SEQ ID NO: 2870668 - RNA, 18 nt, Human
cccaccucccugcccagg

SEQ ID NO: 2870669 - RNA, 19 nt, Human
cccaccucccugcccaggc

SEQ ID NO: 2870670 - RNA, 17 nt, Human
cccaccucagccucccg

SEQ ID NO: 2870671 - RNA, 23 nt, Human
cccaccgggcugggagcucugca

SEQ ID NO: 2870672 - RNA, 17 nt, Human
cccaccgguccagcugg

SEQ ID NO: 2870673 - RNA, 16 nt, Human
cccaccgguccagcug

SEQ ID NO: 2870674 - RNA, 12 nt, Human
cccaccuccagc

SEQ ID NO: 2870675 - RNA, 13 nt, Human
cccaccuccagcc

SEQ ID NO: 2870676 - RNA, 14 nt, Human
cccaccuccagccc

SEQ ID NO: 2870677 - RNA, 18 nt, Human
cccaccuccagcccggga

SEQ ID NO: 2870678 - RNA, 10 nt, Human
cccaccuccc

SEQ ID NO: 2870679 - RNA, 13 nt, Human
cccaccuccccac

SEQ ID NO: 2870680 - RNA, 13 nt, Human
cccaccucccugc

SEQ ID NO: 2870681 - RNA, 14 nt, Human
cccaccuccccacg

SEQ ID NO: 2870682 - RNA, 15 nt, Human
cccaccuccccacgc

SEQ ID NO: 2870683 - RNA, 16 nt, Human
cccaccuccccacgcc

SEQ ID NO: 2870684 - RNA, 17 nt, Human
cccaccuccccacgccc

SEQ ID NO: 2870685 - RNA, 23 nt, Human
cccaccacuaggacucugaggcu

SEQ ID NO: 2870686 - RNA, 13 nt, Human
cccaccacacauc

SEQ ID NO: 2870687 - RNA, 15 nt, Human
cccaccacacauccc

SEQ ID NO: 2870688 - RNA, 16 nt, Human
cccaccacacauccca

SEQ ID NO: 2870689 - RNA, 17 nt, Human
cccaccacacaucccag

SEQ ID NO: 2870690 - RNA, 18 nt, Human
cccaccacacaucccagc

SEQ ID NO: 2870691 - RNA, 22 nt, Human
cccaccacacaucccagcccaa

SEQ ID NO: 2870692 - RNA, 21 nt, Human
cccacgcuggagugcagugag

SEQ ID NO: 2870693 - RNA, 20 nt, Human
cccacgcuggagugcaguga

SEQ ID NO: 2870694 - RNA, 19 nt, Human
cccacgcuggagugcagug

SEQ ID NO: 2870695 - RNA, 14 nt, Human
cccacgcuggagug

SEQ ID NO: 2870696 - RNA, 17 nt, Human
cccacgagaccccggcu

SEQ ID NO: 2870697 - RNA, 12 nt, Human
cccacuucugcc

SEQ ID NO: 2870698 - RNA, 22 nt, Human
cccacuugucacugacacaaag

SEQ ID NO: 2870699 - RNA, 23 nt, Human
cccacuugucacugacacaaagg

SEQ ID NO: 2870700 - RNA, 20 nt, Human
cccagaaaaaaaaaaacuua

SEQ ID NO: 2870701 - RNA, 12 nt, Human
cccaccugcagg

SEQ ID NO: 2870702 - RNA, 14 nt, Human
cccaccugcagggc

SEQ ID NO: 2870703 - RNA, 20 nt, Human
cccaccugcagggcugcccu

SEQ ID NO: 2870704 - RNA, 12 nt, Human
cccaccugccug

SEQ ID NO: 2870705 - RNA, 13 nt, Human
cccaccugccugg

SEQ ID NO: 2870706 - RNA, 14 nt, Human
cccaccugccuggc

SEQ ID NO: 2870707 - RNA, 23 nt, Human
cccaccugcccaucacaggguug

SEQ ID NO: 2870708 - RNA, 20 nt, Human
cccaccugcccaucacaggg

SEQ ID NO: 2870709 - RNA, 13 nt, Human
cccaccugcccau

SEQ ID NO: 2870710 - RNA, 13 nt, Human
ccgggcucucugc

SEQ ID NO: 2870711 - RNA, 16 nt, Human
ccgggcucucugcugu

SEQ ID NO: 2870712 - RNA, 14 nt, Human
ccgggcucucugcu

SEQ ID NO: 2870713 - RNA, 13 nt, Human
ccgggcugggagc

SEQ ID NO: 2870714 - RNA, 18 nt, Human
ccgggcugggagcucugc

SEQ ID NO: 2870715 - RNA, 19 nt, Human
ccgggcugggagcucugca

SEQ ID NO: 2870716 - RNA, 16 nt, Human
ccgguagggaggcagc

SEQ ID NO: 2870717 - RNA, 17 nt, Human
ccgguagggaggcagcc

SEQ ID NO: 2870718 - RNA, 18 nt, Human
ccgguagggaggcagccu

SEQ ID NO: 2870719 - RNA, 19 nt, Human
ccggucaccuagcaagcug

SEQ ID NO: 2870720 - RNA, 14 nt, Human
ccgguccagcuggc

SEQ ID NO: 2870721 - RNA, 22 nt, Human
ccgguaaacacgccugcaaacg

SEQ ID NO: 2870722 - RNA, 13 nt, Human
ccgcuaaggaaga

SEQ ID NO: 2870723 - RNA, 19 nt, Human
ccgcuuucuacccagcgag

SEQ ID NO: 2870724 - RNA, 15 nt, Human
ccggcuuccuuuccc

SEQ ID NO: 2870725 - RNA, 17 nt, Human
ccggcugugcucagaga

SEQ ID NO: 2870726 - RNA, 16 nt, Human
ccgcuuguggggaccc

SEQ ID NO: 2870727 - RNA, 17 nt, Human
ccgcuuguggggaccca

SEQ ID NO: 2870728 - RNA, 19 nt, Human
ccgcuuguggggacccagg

SEQ ID NO: 2870729 - RNA, 20 nt, Human
ccgcuuguggggacccaggc

SEQ ID NO: 2870730 - RNA, 21 nt, Human
ccgcuuguggggacccaggcu

SEQ ID NO: 2870731 - RNA, 23 nt, Human
ccgcuuguggggacccaggcucc

SEQ ID NO: 2870732 - RNA, 23 nt, Human
ccggcuuccuuucccaagccuuc

SEQ ID NO: 2870733 - RNA, 19 nt, Human
ccggcuuccuuucccaagc

SEQ ID NO: 2870734 - RNA, 12 nt, Human
ccgcuuucuacc

SEQ ID NO: 2870735 - RNA, 22 nt, Human
ccgcugauucucagggucucug

SEQ ID NO: 2870736 - RNA, 13 nt, Human
ccgcugauucuca

SEQ ID NO: 2870737 - RNA, 15 nt, Human
ccgcugauucucagg

SEQ ID NO: 2870738 - RNA, 15 nt, Human
ccgcucagcccuccc

SEQ ID NO: 2870739 - RNA, 19 nt, Human
ccgcucagcccucccugcc

SEQ ID NO: 2870740 - RNA, 21 nt, Human
ccgcucagcccucccugcccc

SEQ ID NO: 2870741 - RNA, 22 nt, Human
ccgcucagcccucccugccccu

SEQ ID NO: 2870742 - RNA, 19 nt, Human
ccgcucucuuccugccccu

SEQ ID NO: 2870743 - RNA, 22 nt, Human
ccgcucucuuccugccccucuu

SEQ ID NO: 2870744 - RNA, 21 nt, Human
ccgcucucuuuucuguacuuc

SEQ ID NO: 2870745 - RNA, 15 nt, Human
ccgcucaccuagagc

SEQ ID NO: 2870746 - RNA, 16 nt, Human
ccgcucaccuagagcc

SEQ ID NO: 2870747 - RNA, 17 nt, Human
ccgcucaccuagagcca

SEQ ID NO: 2870748 - RNA, 18 nt, Human
ccgcucaccuagagccag

SEQ ID NO: 2870749 - RNA, 19 nt, Human
ccgcucaccuagagccaga

SEQ ID NO: 2870750 - RNA, 20 nt, Human
ccgcucaccuagagccagac

SEQ ID NO: 2870751 - RNA, 20 nt, Human
ccgcuccagguaccuugacc

SEQ ID NO: 2870752 - RNA, 23 nt, Human
ccgcuccagguaccuugaccuuu

SEQ ID NO: 2870753 - RNA, 14 nt, Human
ccgaggcaggcaga

SEQ ID NO: 2870754 - RNA, 15 nt, Human
ccgaggcaggcagau

SEQ ID NO: 2870755 - RNA, 11 nt, Human
ccgaggcccug

SEQ ID NO: 2870756 - RNA, 12 nt, Human
ccgaggcccugc

SEQ ID NO: 2870757 - RNA, 13 nt, Human
ccgaggcccugca

SEQ ID NO: 2870758 - RNA, 14 nt, Human
ccgaggcccugcau

SEQ ID NO: 2870759 - RNA, 16 nt, Human
ccgaggcccugcaugg

SEQ ID NO: 2870760 - RNA, 14 nt, Human
ccgaggccuucucu

SEQ ID NO: 2870761 - RNA, 19 nt, Human
cccugguuuccugcccugg

SEQ ID NO: 2870762 - RNA, 18 nt, Human
cccugguuuccugcccug

SEQ ID NO: 2870763 - RNA, 22 nt, Human
cccugguucugaugaugugccu

SEQ ID NO: 2870764 - RNA, 15 nt, Human
cccuggucucugguc

SEQ ID NO: 2870765 - RNA, 13 nt, Human
cccuggucucugg

SEQ ID NO: 2870766 - RNA, 14 nt, Human
cccuggucucuggu

SEQ ID NO: 2870767 - RNA, 20 nt, Human
cccugguuucacuggcccaa

SEQ ID NO: 2870768 - RNA, 15 nt, Human
cccugguuucacugg

SEQ ID NO: 2870769 - RNA, 23 nt, Human
cccugguucugaugaugugccug

SEQ ID NO: 2870770 - RNA, 20 nt, Human
cccugguuggguggcaauuc

SEQ ID NO: 2870771 - RNA, 17 nt, Human
cccugguuuccugcccu

SEQ ID NO: 2870772 - RNA, 16 nt, Human
cccugguuuccugccc

SEQ ID NO: 2870773 - RNA, 17 nt, Human
ccgaguagcugggacua

SEQ ID NO: 2870774 - RNA, 20 nt, Human
ccgaguagcugggacuacag

SEQ ID NO: 2870775 - RNA, 15 nt, Human
ccgaggaggugccug

SEQ ID NO: 2870776 - RNA, 16 nt, Human
ccgauucaccugagca

SEQ ID NO: 2870777 - RNA, 19 nt, Human
ccgaguagcugggauuaca

SEQ ID NO: 2870778 - RNA, 20 nt, Human
ccgaguagcugggauuacag

SEQ ID NO: 2870779 - RNA, 22 nt, Human
ccgaugcuuuaccaaacagcaa

SEQ ID NO: 2870780 - RNA, 20 nt, Human
ccgaugguggguggggcugc

SEQ ID NO: 2870781 - RNA, 21 nt, Human
ccgaugguggguggggcugca

SEQ ID NO: 2870782 - RNA, 21 nt, Human
ccgcaaaccacacuggacucc

SEQ ID NO: 2870783 - RNA, 13 nt, Human
ccgcacacccuca

SEQ ID NO: 2870784 - RNA, 14 nt, Human
ccgcacacccucac

SEQ ID NO: 2870785 - RNA, 19 nt, Human
ccgcacacccucacucugc

SEQ ID NO: 2870786 - RNA, 20 nt, Human
ccgcacacccucacucugcc

SEQ ID NO: 2870787 - RNA, 21 nt, Human
ccgcacacccucacucugcca

SEQ ID NO: 2870788 - RNA, 22 nt, Human
ccgcacacccucacucugccag

SEQ ID NO: 2870789 - RNA, 23 nt, Human
ccgcacacccucacucugccagg

SEQ ID NO: 2870790 - RNA, 12 nt, Human
ccgcacagcagc

SEQ ID NO: 2870791 - RNA, 13 nt, Human
ccgcacagcagcc

SEQ ID NO: 2870792 - RNA, 14 nt, Human
ccgcacagcagccu

SEQ ID NO: 2870793 - RNA, 15 nt, Human
ccgcacagcagccug

SEQ ID NO: 2870794 - RNA, 16 nt, Human
ccgcacagcagccugc

SEQ ID NO: 2870795 - RNA, 21 nt, Human
ccgcacagcagccugcuuccc

SEQ ID NO: 2870796 - RNA, 22 nt, Human
ccgcacagcagccugcuuccca

SEQ ID NO: 2870797 - RNA, 15 nt, Human
ccgcaaaccacacug

SEQ ID NO: 2870798 - RNA, 16 nt, Human
ccgcaaaccacacugg

SEQ ID NO: 2870799 - RNA, 16 nt, Human
ccgcuaccucccuccc

SEQ ID NO: 2870800 - RNA, 20 nt, Human
ccgcuagagcagcccaaauu

SEQ ID NO: 2870801 - RNA, 11 nt, Human
ccgcucagccc

SEQ ID NO: 2870802 - RNA, 12 nt, Human
ccgcucagcccu

SEQ ID NO: 2870803 - RNA, 13 nt, Human
ccgcucagcccuc

SEQ ID NO: 2870804 - RNA, 22 nt, Human
ccgcguguccccggggcccagg

SEQ ID NO: 2870805 - RNA, 16 nt, Human
ccgcguuuagaccaag

SEQ ID NO: 2870806 - RNA, 19 nt, Human
ccgcguuuagaccaaggaa

SEQ ID NO: 2870807 - RNA, 17 nt, Human
ccgcggguuccgcaggc

SEQ ID NO: 2870808 - RNA, 19 nt, Human
ccgcggguuccgcaggcag

SEQ ID NO: 2870809 - RNA, 17 nt, Human
ccgcgucgcccucccag

SEQ ID NO: 2870810 - RNA, 20 nt, Human
ccgcggggacauugggaagg

SEQ ID NO: 2870811 - RNA, 19 nt, Human
ccgcgucgcccucccaggc

SEQ ID NO: 2870812 - RNA, 22 nt, Human
ccgcgugaucaaagccacacuc

SEQ ID NO: 2870813 - RNA, 17 nt, Human
ccgcgucuggugacaac

SEQ ID NO: 2870814 - RNA, 14 nt, Human
ccgcaccuguacag

SEQ ID NO: 2870815 - RNA, 22 nt, Human
ccgcaccuguacaguggaaccg

SEQ ID NO: 2870816 - RNA, 18 nt, Human
ccgcacagcucaggaggc

SEQ ID NO: 2870817 - RNA, 16 nt, Human
ccgcacagcucaggag

SEQ ID NO: 2870818 - RNA, 14 nt, Human
ccgcacagcucagg

SEQ ID NO: 2870819 - RNA, 13 nt, Human
ccgcacagcucag

SEQ ID NO: 2870820 - RNA, 12 nt, Human
ccgcacagcuca

SEQ ID NO: 2870821 - RNA, 13 nt, Human
ccgcaccccccaa

SEQ ID NO: 2870822 - RNA, 20 nt, Human
ccgcaccccgauguggaccu

SEQ ID NO: 2870823 - RNA, 20 nt, Human
ccgcgcucgccccaccggcg

SEQ ID NO: 2870824 - RNA, 16 nt, Human
ccgcgccuccuuccuu

SEQ ID NO: 2870825 - RNA, 12 nt, Human
ccgccuuuugua

SEQ ID NO: 2870826 - RNA, 22 nt, Human
ccgccugguacucaagcccgcg

SEQ ID NO: 2870827 - RNA, 23 nt, Human
ccgccugucucuuuaagggcaug

SEQ ID NO: 2870828 - RNA, 14 nt, Human
ccgccugguacuca

SEQ ID NO: 2870829 - RNA, 16 nt, Human
ccgccuuaagcugauc

SEQ ID NO: 2870830 - RNA, 23 nt, Human
ccgccuucacuccggugugccug

SEQ ID NO: 2870831 - RNA, 23 nt, Human
ccgccuuccgccccuucccuucc

SEQ ID NO: 2870832 - RNA, 12 nt, Human
ccgccuuccuug

SEQ ID NO: 2870833 - RNA, 22 nt, Human
ccgccuuccuugaccuuccucu

SEQ ID NO: 2870834 - RNA, 23 nt, Human
ccgccuuccuugaccuuccucug

SEQ ID NO: 2870835 - RNA, 15 nt, Human
ccuaaaauucagugg

SEQ ID NO: 2870836 - RNA, 15 nt, Human
ccuacaagacacagu

SEQ ID NO: 2870837 - RNA, 21 nt, Human
ccuacaagagcagccuguggc

SEQ ID NO: 2870838 - RNA, 18 nt, Human
ccuacaagauuuagaaaa

SEQ ID NO: 2870839 - RNA, 19 nt, Human
ccuacaagauuuagaaaaa

SEQ ID NO: 2870840 - RNA, 20 nt, Human
ccuacaagauuuagaaaaaa

SEQ ID NO: 2870841 - RNA, 22 nt, Human
ccuacaagauuuagaaaaaagu

SEQ ID NO: 2870842 - RNA, 13 nt, Human
ccuacaaggccua

SEQ ID NO: 2870843 - RNA, 14 nt, Human
ccuacaaggccuau

SEQ ID NO: 2870844 - RNA, 16 nt, Human
ccuacaaguuuaagua

SEQ ID NO: 2870845 - RNA, 14 nt, Human
ccuacacacuguca

SEQ ID NO: 2870846 - RNA, 15 nt, Human
ccuacacacugucau

SEQ ID NO: 2870847 - RNA, 22 nt, Human
ccuacacacugucaugcuucau

SEQ ID NO: 2870848 - RNA, 18 nt, Human
ccuacaagagcagccugu

SEQ ID NO: 2870849 - RNA, 17 nt, Human
ccuacaagagcagccug

SEQ ID NO: 2870850 - RNA, 19 nt, Human
ccuacaagagcagccugug

SEQ ID NO: 2870851 - RNA, 18 nt, Human
ccgugugagugugacagg

SEQ ID NO: 2870852 - RNA, 20 nt, Human
ccgugugagugugacagggc

SEQ ID NO: 2870853 - RNA, 21 nt, Human
ccgugugagugugacagggcc

SEQ ID NO: 2870854 - RNA, 22 nt, Human
ccgugugagugugacagggcca

SEQ ID NO: 2870855 - RNA, 14 nt, Human
ccguggguugcuaa

SEQ ID NO: 2870856 - RNA, 15 nt, Human
ccguggguugcuaac

SEQ ID NO: 2870857 - RNA, 17 nt, Human
ccguggguugcuaacug

SEQ ID NO: 2870858 - RNA, 18 nt, Human
ccguggguugcuaacuga

SEQ ID NO: 2870859 - RNA, 20 nt, Human
ccguggguugcuaacugaac

SEQ ID NO: 2870860 - RNA, 23 nt, Human
ccgugguuugaacacgaaagaaa

SEQ ID NO: 2870861 - RNA, 19 nt, Human
ccguguacauagugcauug

SEQ ID NO: 2870862 - RNA, 23 nt, Human
ccuaaaaggaaaucucaccccau

SEQ ID NO: 2870863 - RNA, 22 nt, Human
ccuaaaagugggcuugauucug

SEQ ID NO: 2870864 - RNA, 15 nt, Human
ccuaaaauacauuua

SEQ ID NO: 2870865 - RNA, 12 nt, Human
ccuaaaaucuug

SEQ ID NO: 2870866 - RNA, 17 nt, Human
ccuaaaagcacacucau

SEQ ID NO: 2870867 - RNA, 18 nt, Human
ccuaaaagcacacucauc

SEQ ID NO: 2870868 - RNA, 22 nt, Human
ccuaaaaggaaaucucacccca

SEQ ID NO: 2870869 - RNA, 13 nt, Human
ccuaaaagcaaaa

SEQ ID NO: 2870870 - RNA, 14 nt, Human
ccuaaaagcaaaau

SEQ ID NO: 2870871 - RNA, 22 nt, Human
ccuaaaagcaaaauaaaaacua

SEQ ID NO: 2870872 - RNA, 23 nt, Human
ccuaaaagcaaaauaaaaacuau

SEQ ID NO: 2870873 - RNA, 17 nt, Human
ccuacacccagacccca

SEQ ID NO: 2870874 - RNA, 19 nt, Human
ccuacacccagaccccagg

SEQ ID NO: 2870875 - RNA, 14 nt, Human
ccuaccacaugcca

SEQ ID NO: 2870876 - RNA, 13 nt, Human
ccuacccacaccu

SEQ ID NO: 2870877 - RNA, 21 nt, Human
ccuaccgagucucuucuccac

SEQ ID NO: 2870878 - RNA, 12 nt, Human
ccuaccucagcc

SEQ ID NO: 2870879 - RNA, 13 nt, Human
ccuaccucagccu

SEQ ID NO: 2870880 - RNA, 16 nt, Human
ccuaccucagccuaga

SEQ ID NO: 2870881 - RNA, 14 nt, Human
ccuaccucagccua

SEQ ID NO: 2870882 - RNA, 22 nt, Human
ccuaccgagucucuucuccacu

SEQ ID NO: 2870883 - RNA, 23 nt, Human
ccuaccgagucucuucuccacug

SEQ ID NO: 2870884 - RNA, 16 nt, Human
ccuaccaucagggaca

SEQ ID NO: 2870885 - RNA, 22 nt, Human
ccuaccaucagggacaggauga

SEQ ID NO: 2870886 - RNA, 23 nt, Human
ccuagggaagggugguggagcca

SEQ ID NO: 2870887 - RNA, 22 nt, Human
ccuagggaagggugguggagcc

SEQ ID NO: 2870888 - RNA, 17 nt, Human
ccuagggccacugaaga

SEQ ID NO: 2870889 - RNA, 18 nt, Human
ccuaggcuccaccccauc

SEQ ID NO: 2870890 - RNA, 17 nt, Human
ccuaggcuccaccccau

SEQ ID NO: 2870891 - RNA, 23 nt, Human
ccuacuucuuugcuuugcccagc

SEQ ID NO: 2870892 - RNA, 15 nt, Human
ccuaggcuccacccc

SEQ ID NO: 2870893 - RNA, 13 nt, Human
ccuacuuccugug

SEQ ID NO: 2870894 - RNA, 21 nt, Human
ccuacuuccccuuccuaauuc

SEQ ID NO: 2870895 - RNA, 21 nt, Human
ccuaccucagccuagacccuc

SEQ ID NO: 2870896 - RNA, 18 nt, Human
ccuaccucagccuagacc

SEQ ID NO: 2870897 - RNA, 15 nt, Human
ccuaccucaggcagg

SEQ ID NO: 2870898 - RNA, 15 nt, Human
ccuacuuccugugac

SEQ ID NO: 2870899 - RNA, 22 nt, Human
ccuacuucuuuugcucuuagcu

SEQ ID NO: 2870900 - RNA, 16 nt, Human
ccuacuucuuuugcuc

SEQ ID NO: 2870901 - RNA, 14 nt, Human
ccuauagucccagc

SEQ ID NO: 2870902 - RNA, 12 nt, Human
ccuaugcaauaa

SEQ ID NO: 2870903 - RNA, 14 nt, Human
ccuaugcaauaaaa

SEQ ID NO: 2870904 - RNA, 18 nt, Human
ccuauaugauuuauaguu

SEQ ID NO: 2870905 - RNA, 16 nt, Human
ccuauauaguuuauug

SEQ ID NO: 2870906 - RNA, 16 nt, Human
ccuauauccugugacu

SEQ ID NO: 2870907 - RNA, 15 nt, Human
ccuauaugagaagaa

SEQ ID NO: 2870908 - RNA, 22 nt, Human
ccuauaugagaagaauagccua

SEQ ID NO: 2870909 - RNA, 14 nt, Human
ccuauauguaguau

SEQ ID NO: 2870910 - RNA, 14 nt, Human
ccuauaaucuguca

SEQ ID NO: 2870911 - RNA, 15 nt, Human
ccuauaaucugucaa

SEQ ID NO: 2870912 - RNA, 23 nt, Human
ccuauaaucugucaaaacacugu

SEQ ID NO: 2870913 - RNA, 14 nt, Human
ccuauaacuugaug

SEQ ID NO: 2870914 - RNA, 17 nt, Human
ccuauaacuugaugcau

SEQ ID NO: 2870915 - RNA, 18 nt, Human
ccuauaacuugaugcaug

SEQ ID NO: 2870916 - RNA, 19 nt, Human
ccuauaacuugaugcaugu

SEQ ID NO: 2870917 - RNA, 20 nt, Human
ccuaguuuucuccucccagg

SEQ ID NO: 2870918 - RNA, 14 nt, Human
ccuaggcucaugga

SEQ ID NO: 2870919 - RNA, 18 nt, Human
ccuauagucccagcuacu

SEQ ID NO: 2870920 - RNA, 13 nt, Human
ccuauagucccag

SEQ ID NO: 2870921 - RNA, 19 nt, Human
ccuauacuguaguauucuu

SEQ ID NO: 2870922 - RNA, 14 nt, Human
ccuauaaugugugu

SEQ ID NO: 2870923 - RNA, 15 nt, Human
ccuauaaugugugua

SEQ ID NO: 2870924 - RNA, 16 nt, Human
ccuauaauguguguau

SEQ ID NO: 2870925 - RNA, 17 nt, Human
ccuauaauguguguaug

SEQ ID NO: 2870926 - RNA, 19 nt, Human
ccuauaauguguguaugug

SEQ ID NO: 2870927 - RNA, 21 nt, Human
ccuauaauguguguaugugua

SEQ ID NO: 2870928 - RNA, 20 nt, Human
ccuaguuugggaggagcaga

SEQ ID NO: 2870929 - RNA, 19 nt, Human
ccuaguuuucuccucccag

SEQ ID NO: 2870930 - RNA, 18 nt, Human
ccuaguuuucuccuccca

SEQ ID NO: 2870931 - RNA, 16 nt, Human
ccuaguuuucuccucc

SEQ ID NO: 2870932 - RNA, 15 nt, Human
ccuaguuuucuccuc

SEQ ID NO: 2870933 - RNA, 16 nt, Human
ccuaguuggugagaaa

SEQ ID NO: 2870934 - RNA, 22 nt, Human
ccuaguuggugagaaaccugua

SEQ ID NO: 2870935 - RNA, 23 nt, Human
ccuaguuggugagaaaccuguau

SEQ ID NO: 2870936 - RNA, 14 nt, Human
ccuaguuucccuga

SEQ ID NO: 2870937 - RNA, 13 nt, Human
ccuaguuuccucu

SEQ ID NO: 2870938 - RNA, 14 nt, Human
ccuaguuuccucuc

SEQ ID NO: 2870939 - RNA, 15 nt, Human
ccuaguuuccucucc

SEQ ID NO: 2870940 - RNA, 16 nt, Human
ccuaguuuccucuccu

SEQ ID NO: 2870941 - RNA, 17 nt, Human
ccuaguuuccucuccuu

SEQ ID NO: 2870942 - RNA, 15 nt, Human
ccuaguuugaccuca

SEQ ID NO: 2870943 - RNA, 17 nt, Human
ccuaguuugaccucaca

SEQ ID NO: 2870944 - RNA, 17 nt, Human
ccuaguucccucugcuc

SEQ ID NO: 2870945 - RNA, 18 nt, Human
ccuaguucccucugcuca

SEQ ID NO: 2870946 - RNA, 20 nt, Human
ccuaguucccucugcucagc

SEQ ID NO: 2870947 - RNA, 21 nt, Human
ccuaguucccucugcucagcc

SEQ ID NO: 2870948 - RNA, 22 nt, Human
ccuaguucccucugcucagcca

SEQ ID NO: 2870949 - RNA, 14 nt, Human
ccuccaccucuuca

SEQ ID NO: 2870950 - RNA, 14 nt, Human
ccuccaccaccgcc

SEQ ID NO: 2870951 - RNA, 19 nt, Human
ccuccaccuaccacucaca

SEQ ID NO: 2870952 - RNA, 21 nt, Human
ccuccaggcccgucuguccau

SEQ ID NO: 2870953 - RNA, 12 nt, Human
ccuccagcacaa

SEQ ID NO: 2870954 - RNA, 17 nt, Human
ccuccagcacaaacaca

SEQ ID NO: 2870955 - RNA, 20 nt, Human
ccuccagcacaaacacaagg

SEQ ID NO: 2870956 - RNA, 12 nt, Human
ccuccagcccgg

SEQ ID NO: 2870957 - RNA, 14 nt, Human
ccuccagcccggga

SEQ ID NO: 2870958 - RNA, 15 nt, Human
ccuccagcccgggag

SEQ ID NO: 2870959 - RNA, 16 nt, Human
ccuccagcccgggagc

SEQ ID NO: 2870960 - RNA, 17 nt, Human
ccuccagcccgggagcc

SEQ ID NO: 2870961 - RNA, 18 nt, Human
ccuccagcccgggagccu

SEQ ID NO: 2870962 - RNA, 19 nt, Human
ccuccagcccgggagccua

SEQ ID NO: 2870963 - RNA, 20 nt, Human
ccuccagcccgggagccuag

SEQ ID NO: 2870964 - RNA, 22 nt, Human
ccuccagcccgggagccuagga

SEQ ID NO: 2870965 - RNA, 23 nt, Human
ccuccagcccgggagccuaggac

SEQ ID NO: 2870966 - RNA, 23 nt, Human
ccuccaccucuucaccccccacu

SEQ ID NO: 2870967 - RNA, 18 nt, Human
ccuccagaagccucuggc

SEQ ID NO: 2870968 - RNA, 17 nt, Human
ccuccagaagccucugg

SEQ ID NO: 2870969 - RNA, 22 nt, Human
ccuccagaagccucuggcuaga

SEQ ID NO: 2870970 - RNA, 21 nt, Human
ccuccagaagccucuggcuag

SEQ ID NO: 2870971 - RNA, 20 nt, Human
ccuccagaagccucuggcua

SEQ ID NO: 2870972 - RNA, 19 nt, Human
ccuccagaagccucuggcu

SEQ ID NO: 2870973 - RNA, 18 nt, Human
ccuccaucuaaacugccc

SEQ ID NO: 2870974 - RNA, 24 nt, Human
ccuccaucucauguaucaucugga

SEQ ID NO: 2870975 - RNA, 15 nt, Human
ccucccaaagugcug

SEQ ID NO: 2870976 - RNA, 15 nt, Human
ccuccaugcugccuc

SEQ ID NO: 2870977 - RNA, 21 nt, Human
ccuccauuaaagucugaauca

SEQ ID NO: 2870978 - RNA, 20 nt, Human
ccuccauucuauuuuagaau

SEQ ID NO: 2870979 - RNA, 23 nt, Human
ccuccaugugggcuaguugggcu

SEQ ID NO: 2870980 - RNA, 14 nt, Human
ccuccaugcugccu

SEQ ID NO: 2870981 - RNA, 21 nt, Human
ccuccaucuguacuuggucca

SEQ ID NO: 2870982 - RNA, 16 nt, Human
ccuccaugacagcgcu

SEQ ID NO: 2870983 - RNA, 16 nt, Human
ccucccaaagugcugg

SEQ ID NO: 2870984 - RNA, 16 nt, Human
ccuccccauggagcca

SEQ ID NO: 2870985 - RNA, 20 nt, Human
ccuccccauuagagucagcc

SEQ ID NO: 2870986 - RNA, 18 nt, Human
ccucccaaagugcugaga

SEQ ID NO: 2870987 - RNA, 21 nt, Human
ccuccccauuagagucagccu

SEQ ID NO: 2870988 - RNA, 22 nt, Human
ccucccccaacccccaccccac

SEQ ID NO: 2870989 - RNA, 19 nt, Human
ccucccccaacccccaccc

SEQ ID NO: 2870990 - RNA, 18 nt, Human
ccucccccaacccccacc

SEQ ID NO: 2870991 - RNA, 13 nt, Human
ccucccccaaccc

SEQ ID NO: 2870992 - RNA, 20 nt, Human
ccucaucccguguucuccuu

SEQ ID NO: 2870993 - RNA, 23 nt, Human
ccucauccagggcucugaccagu

SEQ ID NO: 2870994 - RNA, 13 nt, Human
ccucaucccauga

SEQ ID NO: 2870995 - RNA, 12 nt, Human
ccucauauuuaa

SEQ ID NO: 2870996 - RNA, 13 nt, Human
ccucauauuuaaa

SEQ ID NO: 2870997 - RNA, 22 nt, Human
ccucauccaccccaucccuccc

SEQ ID NO: 2870998 - RNA, 14 nt, Human
ccucauccagggcu

SEQ ID NO: 2870999 - RNA, 15 nt, Human
ccucauccagggcuc

SEQ ID NO: 2871000 - RNA, 16 nt, Human
ccucaucuaugaggaa

SEQ ID NO: 2871001 - RNA, 21 nt, Human
ccucaucuaugaggaaagguu

SEQ ID NO: 2871002 - RNA, 13 nt, Human
ccucaucucauuc

SEQ ID NO: 2871003 - RNA, 13 nt, Human
ccucauccucaga

SEQ ID NO: 2871004 - RNA, 17 nt, Human
ccucauccucagaugcu

SEQ ID NO: 2871005 - RNA, 13 nt, Human
ccuccacagcgag

SEQ ID NO: 2871006 - RNA, 17 nt, Human
ccuccacagccgcagcc

SEQ ID NO: 2871007 - RNA, 16 nt, Human
ccuccacagccgcagc

SEQ ID NO: 2871008 - RNA, 15 nt, Human
ccuccacagccgcag

SEQ ID NO: 2871009 - RNA, 21 nt, Human
ccuccacagcgagggcagcug

SEQ ID NO: 2871010 - RNA, 20 nt, Human
ccuccacagcgagggcagcu

SEQ ID NO: 2871011 - RNA, 15 nt, Human
ccuccacagcgaggg

SEQ ID NO: 2871012 - RNA, 14 nt, Human
ccuccacagcgagg

SEQ ID NO: 2871013 - RNA, 23 nt, Human
ccuccacagcgagggcagcugcu

SEQ ID NO: 2871014 - RNA, 22 nt, Human
ccuccacagcgagggcagcugc

SEQ ID NO: 2871015 - RNA, 16 nt, Human
ccucaucuugaagggc

SEQ ID NO: 2871016 - RNA, 20 nt, Human
ccucaucuugaagggcccag

SEQ ID NO: 2871017 - RNA, 21 nt, Human
ccucaucuugaagggcccagg

SEQ ID NO: 2871018 - RNA, 22 nt, Human
ccucaucuugaagggcccagga

SEQ ID NO: 2871019 - RNA, 23 nt, Human
ccuccaaucccaccaacccucag

SEQ ID NO: 2871020 - RNA, 22 nt, Human
ccuccaaucccaccaacccuca

SEQ ID NO: 2871021 - RNA, 16 nt, Human
ccuccacacaagggaa

SEQ ID NO: 2871022 - RNA, 21 nt, Human
ccuccacacaagggaaggaca

SEQ ID NO: 2871023 - RNA, 11 nt, Human
ccuauggaaac

SEQ ID NO: 2871024 - RNA, 12 nt, Human
ccuauggaaacc

SEQ ID NO: 2871025 - RNA, 22 nt, Human
ccuauggaaacccgaggguuga

SEQ ID NO: 2871026 - RNA, 14 nt, Human
ccuauggaauuuau

SEQ ID NO: 2871027 - RNA, 16 nt, Human
ccuauggaauuuauaa

SEQ ID NO: 2871028 - RNA, 19 nt, Human
ccuaugcagagguccacaa

SEQ ID NO: 2871029 - RNA, 14 nt, Human
ccuaugcacauaug

SEQ ID NO: 2871030 - RNA, 20 nt, Human
ccuaugcacauauggacucu

SEQ ID NO: 2871031 - RNA, 21 nt, Human
ccuaugcacauauggacucug

SEQ ID NO: 2871032 - RNA, 11 nt, Human
ccucagugcca

SEQ ID NO: 2871033 - RNA, 22 nt, Human
ccucauaguaugguggcugggu

SEQ ID NO: 2871034 - RNA, 21 nt, Human
ccucauaguaugguggcuggg

SEQ ID NO: 2871035 - RNA, 18 nt, Human
ccucauagcccucacccu

SEQ ID NO: 2871036 - RNA, 17 nt, Human
ccucauagcccucaccc

SEQ ID NO: 2871037 - RNA, 20 nt, Human
ccucauaguaugguggcugg

SEQ ID NO: 2871038 - RNA, 22 nt, Human
ccucauagcccucacccugggg

SEQ ID NO: 2871039 - RNA, 21 nt, Human
ccucauagcccucacccuggg

SEQ ID NO: 2871040 - RNA, 19 nt, Human
ccuccuccaaaggcccccu

SEQ ID NO: 2871041 - RNA, 14 nt, Human
ccuccuccaccacc

SEQ ID NO: 2871042 - RNA, 18 nt, Human
ccuccuccaccaccgccc

SEQ ID NO: 2871043 - RNA, 17 nt, Human
ccuccuccaccucaccu

SEQ ID NO: 2871044 - RNA, 13 nt, Human
ccuccucaucccg

SEQ ID NO: 2871045 - RNA, 20 nt, Human
ccuccucaucccguguucuc

SEQ ID NO: 2871046 - RNA, 23 nt, Human
ccuccucaucccguguucuccuu

SEQ ID NO: 2871047 - RNA, 12 nt, Human
ccuccucaugua

SEQ ID NO: 2871048 - RNA, 20 nt, Human
ccuccucauguacauacccu

SEQ ID NO: 2871049 - RNA, 21 nt, Human
ccuccucauguacauacccug

SEQ ID NO: 2871050 - RNA, 13 nt, Human
ccuccucugucug

SEQ ID NO: 2871051 - RNA, 17 nt, Human
ccuccucugucugcccu

SEQ ID NO: 2871052 - RNA, 14 nt, Human
ccuccucugucugc

SEQ ID NO: 2871053 - RNA, 16 nt, Human
ccuccucugucugccc

SEQ ID NO: 2871054 - RNA, 22 nt, Human
ccuccugaaccgcacagcucag

SEQ ID NO: 2871055 - RNA, 20 nt, Human
ccuccugaaccgcacagcuc

SEQ ID NO: 2871056 - RNA, 12 nt, Human
ccuccucuuucu

SEQ ID NO: 2871057 - RNA, 14 nt, Human
ccuccucuuucucu

SEQ ID NO: 2871058 - RNA, 15 nt, Human
ccuccucuuucucuc

SEQ ID NO: 2871059 - RNA, 18 nt, Human
ccuccucuuucucucccc

SEQ ID NO: 2871060 - RNA, 21 nt, Human
ccuccucuuucucuccccaac

SEQ ID NO: 2871061 - RNA, 14 nt, Human
ccuccucuucaccc

SEQ ID NO: 2871062 - RNA, 16 nt, Human
ccuccucuucaccccg

SEQ ID NO: 2871063 - RNA, 19 nt, Human
ccuccucuucaccccggca

SEQ ID NO: 2871064 - RNA, 20 nt, Human
ccuccucuucaccccggcag

SEQ ID NO: 2871065 - RNA, 22 nt, Human
ccuccucuucaccccggcaggc

SEQ ID NO: 2871066 - RNA, 14 nt, Human
ccuccugggcuaag

SEQ ID NO: 2871067 - RNA, 17 nt, Human
ccuccuggugucacccc

SEQ ID NO: 2871068 - RNA, 18 nt, Human
ccuccuggugucacccca

SEQ ID NO: 2871069 - RNA, 19 nt, Human
ccuccuggugucaccccag

SEQ ID NO: 2871070 - RNA, 21 nt, Human
ccuccuggugucaccccagag

SEQ ID NO: 2871071 - RNA, 22 nt, Human
ccuccuggugucaccccagagc

SEQ ID NO: 2871072 - RNA, 15 nt, Human
ccuccugucucuggc

SEQ ID NO: 2871073 - RNA, 17 nt, Human
ccuccuggaaccuugcu

SEQ ID NO: 2871074 - RNA, 18 nt, Human
ccuccuggaaccuugcug

SEQ ID NO: 2871075 - RNA, 19 nt, Human
ccuccuggaaccuugcugu

SEQ ID NO: 2871076 - RNA, 10 nt, Human
ccuccugggg

SEQ ID NO: 2871077 - RNA, 12 nt, Human
ccuccuggggcc

SEQ ID NO: 2871078 - RNA, 13 nt, Human
ccuccuggggcca

SEQ ID NO: 2871079 - RNA, 14 nt, Human
ccuccuggggccag

SEQ ID NO: 2871080 - RNA, 15 nt, Human
ccuccuggggccagg

SEQ ID NO: 2871081 - RNA, 16 nt, Human
ccuccuggggccaggc

SEQ ID NO: 2871082 - RNA, 17 nt, Human
ccuccuggggccaggcc

SEQ ID NO: 2871083 - RNA, 18 nt, Human
ccuccuggggccaggccg

SEQ ID NO: 2871084 - RNA, 21 nt, Human
ccuccuggggccaggccgggc

SEQ ID NO: 2871085 - RNA, 23 nt, Human
ccuccugccucgaacuggcugca

SEQ ID NO: 2871086 - RNA, 18 nt, Human
ccucccugccccucccuu

SEQ ID NO: 2871087 - RNA, 21 nt, Human
ccucccugccccucccuucaa

SEQ ID NO: 2871088 - RNA, 15 nt, Human
ccucccgcaccccga

SEQ ID NO: 2871089 - RNA, 13 nt, Human
ccucccugccccu

SEQ ID NO: 2871090 - RNA, 22 nt, Human
ccucccugccccucccuucaac

SEQ ID NO: 2871091 - RNA, 24 nt, Human
ccucccugccccucccuucaacca

SEQ ID NO: 2871092 - RNA, 21 nt, Human
ccucccgaguagcugggacua

SEQ ID NO: 2871093 - RNA, 20 nt, Human
ccucccgaguagcugggacu

SEQ ID NO: 2871094 - RNA, 19 nt, Human
ccucccgaguagcugggac

SEQ ID NO: 2871095 - RNA, 18 nt, Human
ccucccgccccuucccac

SEQ ID NO: 2871096 - RNA, 19 nt, Human
ccucccccaucucccaccc

SEQ ID NO: 2871097 - RNA, 15 nt, Human
ccucccccagagggg

SEQ ID NO: 2871098 - RNA, 20 nt, Human
ccuccccugcugcaggggcu

SEQ ID NO: 2871099 - RNA, 16 nt, Human
ccuccccugcugcagg

SEQ ID NO: 2871100 - RNA, 13 nt, Human
ccuccccugggga

SEQ ID NO: 2871101 - RNA, 13 nt, Human
ccuccccuugaau

SEQ ID NO: 2871102 - RNA, 23 nt, Human
ccuccccuggggacagcaagggc

SEQ ID NO: 2871103 - RNA, 14 nt, Human
ccuccccuggggac

SEQ ID NO: 2871104 - RNA, 20 nt, Human
ccuccccuggggacagcaag

SEQ ID NO: 2871105 - RNA, 19 nt, Human
ccucgugguccccaacagc

SEQ ID NO: 2871106 - RNA, 20 nt, Human
ccucguuggaagaggaacag

SEQ ID NO: 2871107 - RNA, 15 nt, Human
ccucguuggaagagg

SEQ ID NO: 2871108 - RNA, 15 nt, Human
ccucgugguccccaa

SEQ ID NO: 2871109 - RNA, 18 nt, Human
ccucgugguccccaacag

SEQ ID NO: 2871110 - RNA, 19 nt, Human
ccucguuccuuucuccugu

SEQ ID NO: 2871111 - RNA, 21 nt, Human
ccucguuccuuucuccuguuu

SEQ ID NO: 2871112 - RNA, 14 nt, Human
ccucuagaggcaag

SEQ ID NO: 2871113 - RNA, 17 nt, Human
ccuccuucucccuuuuu

SEQ ID NO: 2871114 - RNA, 16 nt, Human
ccuccuucucccuuuu

SEQ ID NO: 2871115 - RNA, 15 nt, Human
ccuccuucucccuuu

SEQ ID NO: 2871116 - RNA, 20 nt, Human
ccuccuuccuugcuguccua

SEQ ID NO: 2871117 - RNA, 13 nt, Human
ccuccuucagaca

SEQ ID NO: 2871118 - RNA, 14 nt, Human
ccuccuucagacac

SEQ ID NO: 2871119 - RNA, 11 nt, Human
ccuccugugga

SEQ ID NO: 2871120 - RNA, 19 nt, Human
ccuccuguggaacccagca

SEQ ID NO: 2871121 - RNA, 20 nt, Human
ccuccuguggaacccagcag

SEQ ID NO: 2871122 - RNA, 15 nt, Human
ccuccuucagacacc

SEQ ID NO: 2871123 - RNA, 22 nt, Human
ccuccuucagacacccucaacc

SEQ ID NO: 2871124 - RNA, 13 nt, Human
ccucuaggcucug

SEQ ID NO: 2871125 - RNA, 16 nt, Human
ccucuaggcucugccu

SEQ ID NO: 2871126 - RNA, 17 nt, Human
ccucuaggcucugccuu

SEQ ID NO: 2871127 - RNA, 19 nt, Human
ccucuaggcucugccuucg

SEQ ID NO: 2871128 - RNA, 22 nt, Human
ccucuagcugugggggugaggg

SEQ ID NO: 2871129 - RNA, 15 nt, Human
ccucuagugcccucc

SEQ ID NO: 2871130 - RNA, 14 nt, Human
ccucuagugcccuc

SEQ ID NO: 2871131 - RNA, 13 nt, Human
ccucuauacaucu

SEQ ID NO: 2871132 - RNA, 15 nt, Human
ccucuauacaucucu

SEQ ID NO: 2871133 - RNA, 16 nt, Human
ccucuauacaucucuc

SEQ ID NO: 2871134 - RNA, 17 nt, Human
ccucuauacaucucucc

SEQ ID NO: 2871135 - RNA, 18 nt, Human
ccucuauacaucucuccc

SEQ ID NO: 2871136 - RNA, 19 nt, Human
ccucuauacaucucucccc

SEQ ID NO: 2871137 - RNA, 20 nt, Human
ccucuauacaucucucccca

SEQ ID NO: 2871138 - RNA, 21 nt, Human
ccucuauacaucucuccccaa

SEQ ID NO: 2871139 - RNA, 13 nt, Human
ccucuagugcccu

SEQ ID NO: 2871140 - RNA, 16 nt, Human
ccucucaccucagccu

SEQ ID NO: 2871141 - RNA, 14 nt, Human
ccucucaccucugu

SEQ ID NO: 2871142 - RNA, 15 nt, Human
ccucucaucucaggu

SEQ ID NO: 2871143 - RNA, 13 nt, Human
ccucucaguguuu

SEQ ID NO: 2871144 - RNA, 23 nt, Human
ccucucauauauagacagcuuug

SEQ ID NO: 2871145 - RNA, 13 nt, Human
ccucucacacaca

SEQ ID NO: 2871146 - RNA, 14 nt, Human
ccucucacacacau

SEQ ID NO: 2871147 - RNA, 13 nt, Human
ccucucaccucag

SEQ ID NO: 2871148 - RNA, 17 nt, Human
ccucuauuuauguuugc

SEQ ID NO: 2871149 - RNA, 19 nt, Human
ccucuaugaacuauggacg

SEQ ID NO: 2871150 - RNA, 21 nt, Human
ccucuauuuauguuugcacuu

SEQ ID NO: 2871151 - RNA, 17 nt, Human
ccucccgaauagcuggg

SEQ ID NO: 2871152 - RNA, 14 nt, Human
cuucggaccgcuug

SEQ ID NO: 2871153 - RNA, 21 nt, Human
cuucggaccgcuuguggggac

SEQ ID NO: 2871154 - RNA, 19 nt, Human
cuucguaucccgagucugg

SEQ ID NO: 2871155 - RNA, 21 nt, Human
cuucguaucccgagucuggga

SEQ ID NO: 2871156 - RNA, 22 nt, Human
cuucguaucccgagucugggac

SEQ ID NO: 2871157 - RNA, 23 nt, Human
cuucguaucccgagucugggaca

SEQ ID NO: 2871158 - RNA, 23 nt, Human
cuucgugaacauccccucccauc

SEQ ID NO: 2871159 - RNA, 15 nt, Human
cuucgugcccccccu

SEQ ID NO: 2871160 - RNA, 17 nt, Human
cuucgugcccccccuuc

SEQ ID NO: 2871161 - RNA, 21 nt, Human
cuucgugcggaaucagcuucu

SEQ ID NO: 2871162 - RNA, 15 nt, Human
cuucgggaccaggau

SEQ ID NO: 2871163 - RNA, 14 nt, Human
cuucgggaccagga

SEQ ID NO: 2871164 - RNA, 12 nt, Human
cuucgggaccag

SEQ ID NO: 2871165 - RNA, 16 nt, Human
cuucgguggaagagcu

SEQ ID NO: 2871166 - RNA, 17 nt, Human
cuucgguggaagagcuc

SEQ ID NO: 2871167 - RNA, 17 nt, Human
cuucucaucacacacau

SEQ ID NO: 2871168 - RNA, 19 nt, Human
cuucucaucacacacaugg

SEQ ID NO: 2871169 - RNA, 13 nt, Human
cuucguucuuuuu

SEQ ID NO: 2871170 - RNA, 15 nt, Human
cuucguucuuuuuaa

SEQ ID NO: 2871171 - RNA, 18 nt, Human
cuucguucuuuuuaaguu

SEQ ID NO: 2871172 - RNA, 20 nt, Human
cuucucauuccaacagugag

SEQ ID NO: 2871173 - RNA, 21 nt, Human
cuucucauuccaacagugagu

SEQ ID NO: 2871174 - RNA, 13 nt, Human
cuucucacuuuuu

SEQ ID NO: 2871175 - RNA, 17 nt, Human
cuucucauccugcaggc

SEQ ID NO: 2871176 - RNA, 15 nt, Human
cuucucauccugcag

SEQ ID NO: 2871177 - RNA, 16 nt, Human
cuucucauccugcagg

SEQ ID NO: 2871178 - RNA, 19 nt, Human
cuuccuuucccaagccuuc

SEQ ID NO: 2871179 - RNA, 15 nt, Human
cuuccuuucuccagg

SEQ ID NO: 2871180 - RNA, 16 nt, Human
cuuccuuucuccagga

SEQ ID NO: 2871181 - RNA, 17 nt, Human
cuuccuuucuccaggac

SEQ ID NO: 2871182 - RNA, 19 nt, Human
cuuccuuucuccaggacca

SEQ ID NO: 2871183 - RNA, 20 nt, Human
cuuccuuucucuuucucucu

SEQ ID NO: 2871184 - RNA, 21 nt, Human
cuuccuuucucuuucucucuu

SEQ ID NO: 2871185 - RNA, 23 nt, Human
cuuccuuucucuuucucucuucc

SEQ ID NO: 2871186 - RNA, 21 nt, Human
cuuccuuguuacccaugaaaa

SEQ ID NO: 2871187 - RNA, 15 nt, Human
cuuccuuuaaaaaac

SEQ ID NO: 2871188 - RNA, 16 nt, Human
cuuccuuuaaaaaacu

SEQ ID NO: 2871189 - RNA, 15 nt, Human
cuuccuuuacuuucc

SEQ ID NO: 2871190 - RNA, 16 nt, Human
cuuccuuuacuuuccc

SEQ ID NO: 2871191 - RNA, 17 nt, Human
cuuccuuuacuuucccu

SEQ ID NO: 2871192 - RNA, 18 nt, Human
cuuccuuuacuuucccuu

SEQ ID NO: 2871193 - RNA, 20 nt, Human
cuuccuuuacuuucccuugc

SEQ ID NO: 2871194 - RNA, 21 nt, Human
cuuccuuuacuuucccuugcu

SEQ ID NO: 2871195 - RNA, 22 nt, Human
cuuccuuuacuuucccuugcuu

SEQ ID NO: 2871196 - RNA, 23 nt, Human
cuuccuuuacuuucccuugcuuu

SEQ ID NO: 2871197 - RNA, 19 nt, Human
cuuccuuggcaucacaggg

SEQ ID NO: 2871198 - RNA, 16 nt, Human
cuuccuuacccaaacu

SEQ ID NO: 2871199 - RNA, 17 nt, Human
cuuccuuauuuuaagca

SEQ ID NO: 2871200 - RNA, 17 nt, Human
cuucgcuccugugucuu

SEQ ID NO: 2871201 - RNA, 19 nt, Human
cuucgcgugcccucgcugc

SEQ ID NO: 2871202 - RNA, 22 nt, Human
cuucgcgcccgccccugcagca

SEQ ID NO: 2871203 - RNA, 15 nt, Human
cuucgccaccugggu

SEQ ID NO: 2871204 - RNA, 16 nt, Human
cuucgcuccugugucu

SEQ ID NO: 2871205 - RNA, 21 nt, Human
cuuccuuuuaaguaaggucca

SEQ ID NO: 2871206 - RNA, 16 nt, Human
cuucgcaggcaugucc

SEQ ID NO: 2871207 - RNA, 14 nt, Human
cuucgccaccuggg

SEQ ID NO: 2871208 - RNA, 21 nt, Human
cuucgauacaccgggccugga

SEQ ID NO: 2871209 - RNA, 16 nt, Human
cuucgauacaccgggc

SEQ ID NO: 2871210 - RNA, 18 nt, Human
cuucccugauugaccugc

SEQ ID NO: 2871211 - RNA, 19 nt, Human
cuucccugauugaccugcu

SEQ ID NO: 2871212 - RNA, 20 nt, Human
cuucccugauugaccugcuc

SEQ ID NO: 2871213 - RNA, 21 nt, Human
cuucccugauugaccugcucc

SEQ ID NO: 2871214 - RNA, 22 nt, Human
cuucccugauugaccugcuccg

SEQ ID NO: 2871215 - RNA, 13 nt, Human
cuucccugcacua

SEQ ID NO: 2871216 - RNA, 18 nt, Human
cuucccugcgccugugau

SEQ ID NO: 2871217 - RNA, 14 nt, Human
cuucccugcugccu

SEQ ID NO: 2871218 - RNA, 21 nt, Human
cuuccucacagucccacugug

SEQ ID NO: 2871219 - RNA, 13 nt, Human
cuuccucacugcc

SEQ ID NO: 2871220 - RNA, 15 nt, Human
cuuccucacccugau

SEQ ID NO: 2871221 - RNA, 16 nt, Human
cuuccuauuucuaggg

SEQ ID NO: 2871222 - RNA, 17 nt, Human
cuuccuauuucuagggc

SEQ ID NO: 2871223 - RNA, 18 nt, Human
cuuccuauuucuagggcu

SEQ ID NO: 2871224 - RNA, 23 nt, Human
cuuccuauuucuagggcugggaa

SEQ ID NO: 2871225 - RNA, 22 nt, Human
cuuccuaguuuucuccucccag

SEQ ID NO: 2871226 - RNA, 23 nt, Human
cuuccuaguuuucuccucccagg

SEQ ID NO: 2871227 - RNA, 14 nt, Human
cuuccuauaacuug

SEQ ID NO: 2871228 - RNA, 15 nt, Human
cuuccuauaacuuga

SEQ ID NO: 2871229 - RNA, 17 nt, Human
cuuccuauaacuugaug

SEQ ID NO: 2871230 - RNA, 19 nt, Human
cuuccuauaacuugaugca

SEQ ID NO: 2871231 - RNA, 20 nt, Human
cuuccuauaacuugaugcau

SEQ ID NO: 2871232 - RNA, 22 nt, Human
cuuccuauaacuugaugcaugu

SEQ ID NO: 2871233 - RNA, 17 nt, Human
cuuccuaguuuucuccu

SEQ ID NO: 2871234 - RNA, 15 nt, Human
cuuccuaguuuucuc

SEQ ID NO: 2871235 - RNA, 16 nt, Human
cuuccucacugcccaa

SEQ ID NO: 2871236 - RNA, 13 nt, Human
cuuccugccccuc

SEQ ID NO: 2871237 - RNA, 15 nt, Human
cuuccugccccucuu

SEQ ID NO: 2871238 - RNA, 16 nt, Human
cuuccugccccucuuu

SEQ ID NO: 2871239 - RNA, 19 nt, Human
cuuccugccccucuuucuc

SEQ ID NO: 2871240 - RNA, 20 nt, Human
cuuccugccccucuuucucu

SEQ ID NO: 2871241 - RNA, 22 nt, Human
cuuccugccccucuuucucuuu

SEQ ID NO: 2871242 - RNA, 18 nt, Human
cuuccugugauccaccca

SEQ ID NO: 2871243 - RNA, 15 nt, Human
cuuccugugggagca

SEQ ID NO: 2871244 - RNA, 16 nt, Human
cuuccugugggagcag

SEQ ID NO: 2871245 - RNA, 16 nt, Human
cuuccugugauccacc

SEQ ID NO: 2871246 - RNA, 16 nt, Human
cuuccugugacuucag

SEQ ID NO: 2871247 - RNA, 16 nt, Human
cuuccugucuagucuc

SEQ ID NO: 2871248 - RNA, 20 nt, Human
cuuccugucuagucucuccu

SEQ ID NO: 2871249 - RNA, 23 nt, Human
cuuccugucuagucucuccugua

SEQ ID NO: 2871250 - RNA, 13 nt, Human
cuuccugugacuu

SEQ ID NO: 2871251 - RNA, 14 nt, Human
cuuccuguccccau

SEQ ID NO: 2871252 - RNA, 18 nt, Human
cuuccuguccccaucugu

SEQ ID NO: 2871253 - RNA, 19 nt, Human
cuuccuguccccaucuguc

SEQ ID NO: 2871254 - RNA, 18 nt, Human
cuuccagaucacugccac

SEQ ID NO: 2871255 - RNA, 17 nt, Human
cuuccagaucacugcca

SEQ ID NO: 2871256 - RNA, 15 nt, Human
cuuccagaucacugc

SEQ ID NO: 2871257 - RNA, 13 nt, Human
cuuccagaucacu

SEQ ID NO: 2871258 - RNA, 12 nt, Human
cuuccagacaua

SEQ ID NO: 2871259 - RNA, 21 nt, Human
cuuccacuuuuuuuuguaugu

SEQ ID NO: 2871260 - RNA, 20 nt, Human
cuuccacuuuuuuuuguaug

SEQ ID NO: 2871261 - RNA, 13 nt, Human
cuuccacugccuc

SEQ ID NO: 2871262 - RNA, 14 nt, Human
cuuccacugccucu

SEQ ID NO: 2871263 - RNA, 16 nt, Human
cuuccacugccucugc

SEQ ID NO: 2871264 - RNA, 17 nt, Human
cuuccacugccucugcc

SEQ ID NO: 2871265 - RNA, 18 nt, Human
cuuccacugccucugccu

SEQ ID NO: 2871266 - RNA, 19 nt, Human
cuuccacugccucugccuu

SEQ ID NO: 2871267 - RNA, 16 nt, Human
cuuccaauuaaugcuu

SEQ ID NO: 2871268 - RNA, 17 nt, Human
cuuccaauuaaugcuuu

SEQ ID NO: 2871269 - RNA, 20 nt, Human
cuuccagaucacugccacac

SEQ ID NO: 2871270 - RNA, 12 nt, Human
cuuccagauccu

SEQ ID NO: 2871271 - RNA, 23 nt, Human
cuucccaugacccaggcugggca

SEQ ID NO: 2871272 - RNA, 22 nt, Human
cuucccaugacccaggcugggc

SEQ ID NO: 2871273 - RNA, 17 nt, Human
cuucccaugucuuucuc

SEQ ID NO: 2871274 - RNA, 21 nt, Human
cuucccaugucuuucuccaaa

SEQ ID NO: 2871275 - RNA, 19 nt, Human
cuuccccagaaaggagacu

SEQ ID NO: 2871276 - RNA, 20 nt, Human
cuucccuaccucaggcagga

SEQ ID NO: 2871277 - RNA, 17 nt, Human
cuucccuaccucaggca

SEQ ID NO: 2871278 - RNA, 13 nt, Human
cuucccuaccuca

SEQ ID NO: 2871279 - RNA, 16 nt, Human
cuucccuaccucaggc

SEQ ID NO: 2871280 - RNA, 15 nt, Human
cuucccuaccucagg

SEQ ID NO: 2871281 - RNA, 15 nt, Human
cuucccccuccaauc

SEQ ID NO: 2871282 - RNA, 14 nt, Human
cuuccccagcgucc

SEQ ID NO: 2871283 - RNA, 18 nt, Human
cuuccccaucuucuaaac

SEQ ID NO: 2871284 - RNA, 23 nt, Human
cuucccccaccgguccagcuggc

SEQ ID NO: 2871285 - RNA, 14 nt, Human
cuucccccauagcc

SEQ ID NO: 2871286 - RNA, 16 nt, Human
cuucccccauagccac

SEQ ID NO: 2871287 - RNA, 15 nt, Human
cuucccccauagcca

SEQ ID NO: 2871288 - RNA, 18 nt, Human
cuucccccauagccaccc

SEQ ID NO: 2871289 - RNA, 12 nt, Human
cuucccccucca

SEQ ID NO: 2871290 - RNA, 14 nt, Human
cuucagccugaggc

SEQ ID NO: 2871291 - RNA, 20 nt, Human
cuucagccucuuucuguccc

SEQ ID NO: 2871292 - RNA, 20 nt, Human
cuucagccuccccaccuucu

SEQ ID NO: 2871293 - RNA, 20 nt, Human
cuucagccucccgaguagcu

SEQ ID NO: 2871294 - RNA, 16 nt, Human
cuucagccucccgagu

SEQ ID NO: 2871295 - RNA, 14 nt, Human
cuucagcaagagag

SEQ ID NO: 2871296 - RNA, 15 nt, Human
cuucagcaagagaga

SEQ ID NO: 2871297 - RNA, 17 nt, Human
cuucagcaagagagaac

SEQ ID NO: 2871298 - RNA, 20 nt, Human
cuucagcaagagagaaccua

SEQ ID NO: 2871299 - RNA, 14 nt, Human
cuucagccucccga

SEQ ID NO: 2871300 - RNA, 10 nt, Human
cuucagcacc

SEQ ID NO: 2871301 - RNA, 13 nt, Human
cuucagcauuccc

SEQ ID NO: 2871302 - RNA, 15 nt, Human
cuucagcauucccuc

SEQ ID NO: 2871303 - RNA, 16 nt, Human
cuucagcauucccucc

SEQ ID NO: 2871304 - RNA, 17 nt, Human
cuucagcauucccuccc

SEQ ID NO: 2871305 - RNA, 18 nt, Human
cuucagcauucccuccca

SEQ ID NO: 2871306 - RNA, 16 nt, Human
cuucagccuaguggcu

SEQ ID NO: 2871307 - RNA, 17 nt, Human
cuucagccuaguggcuu

SEQ ID NO: 2871308 - RNA, 19 nt, Human
cuucagccuaguggcuugu

SEQ ID NO: 2871309 - RNA, 23 nt, Human
cuucagccuaguggcuuguccuc

SEQ ID NO: 2871310 - RNA, 20 nt, Human
cuucagguuaucgaaauaac

SEQ ID NO: 2871311 - RNA, 21 nt, Human
cuucagguuaucgaaauaaca

SEQ ID NO: 2871312 - RNA, 22 nt, Human
cuucagguuaucgaaauaacaa

SEQ ID NO: 2871313 - RNA, 18 nt, Human
cuucaggucaggaguucg

SEQ ID NO: 2871314 - RNA, 16 nt, Human
cuucaggcaauucucc

SEQ ID NO: 2871315 - RNA, 18 nt, Human
cuucaggcaauucuccug

SEQ ID NO: 2871316 - RNA, 22 nt, Human
cuucaggcaauucuccugccuu

SEQ ID NO: 2871317 - RNA, 23 nt, Human
cuucaggcaauucuccugccuuu

SEQ ID NO: 2871318 - RNA, 21 nt, Human
cuucaggcauggggggugggg

SEQ ID NO: 2871319 - RNA, 13 nt, Human
cuucagccucucc

SEQ ID NO: 2871320 - RNA, 19 nt, Human
cuucagcuguacuucgucu

SEQ ID NO: 2871321 - RNA, 22 nt, Human
cuucagccugaggcugagacug

SEQ ID NO: 2871322 - RNA, 20 nt, Human
cuucagccugaggcugagac

SEQ ID NO: 2871323 - RNA, 16 nt, Human
cuucagccugaggcug

SEQ ID NO: 2871324 - RNA, 15 nt, Human
cuucagccugaggcu

SEQ ID NO: 2871325 - RNA, 16 nt, Human
cuucagucagaaaacu

SEQ ID NO: 2871326 - RNA, 11 nt, Human
cuucaguccug

SEQ ID NO: 2871327 - RNA, 12 nt, Human
cuucaguccugc

SEQ ID NO: 2871328 - RNA, 15 nt, Human
cuucaguccugcucc

SEQ ID NO: 2871329 - RNA, 17 nt, Human
cuucaguccugcuccag

SEQ ID NO: 2871330 - RNA, 18 nt, Human
cuucaguccugcuccaga

SEQ ID NO: 2871331 - RNA, 19 nt, Human
cuucaguccugcuccagaa

SEQ ID NO: 2871332 - RNA, 23 nt, Human
cuucaguccugcuccagaauuug

SEQ ID NO: 2871333 - RNA, 13 nt, Human
cuucaguccuggg

SEQ ID NO: 2871334 - RNA, 15 nt, Human
cuucaguccugggag

SEQ ID NO: 2871335 - RNA, 18 nt, Human
cuucaguccugggagacc

SEQ ID NO: 2871336 - RNA, 23 nt, Human
cuucaggaacacccccaugacau

SEQ ID NO: 2871337 - RNA, 19 nt, Human
cuucagugcaucugggaag

SEQ ID NO: 2871338 - RNA, 19 nt, Human
cuucauggccauagcuuuu

SEQ ID NO: 2871339 - RNA, 18 nt, Human
cuucauuuugaggggagg

SEQ ID NO: 2871340 - RNA, 14 nt, Human
cuuccaaagaaugu

SEQ ID NO: 2871341 - RNA, 22 nt, Human
cuuccaaagaauguuagagcac

SEQ ID NO: 2871342 - RNA, 17 nt, Human
cuuccaaagaauucuua

SEQ ID NO: 2871343 - RNA, 20 nt, Human
cuucauuaccuuuuuugaua

SEQ ID NO: 2871344 - RNA, 15 nt, Human
cuucauuagagcagg

SEQ ID NO: 2871345 - RNA, 16 nt, Human
cuucauuagagcaggc

SEQ ID NO: 2871346 - RNA, 11 nt, Human
cuucauuugug

SEQ ID NO: 2871347 - RNA, 13 nt, Human
cuucauuuguguc

SEQ ID NO: 2871348 - RNA, 14 nt, Human
cuucauuuguguca

SEQ ID NO: 2871349 - RNA, 18 nt, Human
cuucauuugugucaaugg

SEQ ID NO: 2871350 - RNA, 21 nt, Human
cuucauuuuauuaauauuuuu

SEQ ID NO: 2871351 - RNA, 22 nt, Human
cuucauuuuauuaauauuuuuc

SEQ ID NO: 2871352 - RNA, 16 nt, Human
cuuccaaaaauuauua

SEQ ID NO: 2871353 - RNA, 17 nt, Human
cuuccaaaaauuauuau

SEQ ID NO: 2871354 - RNA, 19 nt, Human
cuuccaaaaauuauuauaa

SEQ ID NO: 2871355 - RNA, 15 nt, Human
cuuccaaaauucuua

SEQ ID NO: 2871356 - RNA, 17 nt, Human
cuuccaaaauucuuauu

SEQ ID NO: 2871357 - RNA, 13 nt, Human
cuuagaaaaugug

SEQ ID NO: 2871358 - RNA, 16 nt, Human
cuucaaauccuuccaa

SEQ ID NO: 2871359 - RNA, 18 nt, Human
cuucaaauccuuccaaaa

SEQ ID NO: 2871360 - RNA, 12 nt, Human
cuuaguccccca

SEQ ID NO: 2871361 - RNA, 17 nt, Human
cuuagucccccaacucu

SEQ ID NO: 2871362 - RNA, 22 nt, Human
cuuagucccccaacucugagcc

SEQ ID NO: 2871363 - RNA, 23 nt, Human
cuuagucccccaacucugagccc

SEQ ID NO: 2871364 - RNA, 17 nt, Human
cuucaaauugucuuuug

SEQ ID NO: 2871365 - RNA, 21 nt, Human
cuucaaauuuuuuaaaagaga

SEQ ID NO: 2871366 - RNA, 18 nt, Human
cuucaaauuaaaacagcu

SEQ ID NO: 2871367 - RNA, 20 nt, Human
cuucaacugaccagccucca

SEQ ID NO: 2871368 - RNA, 23 nt, Human
cuucaacugaccagccuccaugc

SEQ ID NO: 2871369 - RNA, 17 nt, Human
cuucaacugaccagccu

SEQ ID NO: 2871370 - RNA, 16 nt, Human
cuucaacucccugccc

SEQ ID NO: 2871371 - RNA, 18 nt, Human
cuucaagaacucugggcu

SEQ ID NO: 2871372 - RNA, 22 nt, Human
cuucaacuccucgacaucacug

SEQ ID NO: 2871373 - RNA, 20 nt, Human
cuucacaguagagccagcuu

SEQ ID NO: 2871374 - RNA, 19 nt, Human
cuucacaguagagccagcu

SEQ ID NO: 2871375 - RNA, 18 nt, Human
cuucaacuugugccuggg

SEQ ID NO: 2871376 - RNA, 18 nt, Human
cuucacaguagagccagc

SEQ ID NO: 2871377 - RNA, 22 nt, Human
cuucacaguagagccagcuugg

SEQ ID NO: 2871378 - RNA, 23 nt, Human
cuucacagugaucgaugauucag

SEQ ID NO: 2871379 - RNA, 21 nt, Human
cuucacaguagagccagcuug

SEQ ID NO: 2871380 - RNA, 13 nt, Human
cuucaaggcuuca

SEQ ID NO: 2871381 - RNA, 14 nt, Human
cuucaaggcuucag

SEQ ID NO: 2871382 - RNA, 15 nt, Human
cuucaaggcuucagu

SEQ ID NO: 2871383 - RNA, 17 nt, Human
cuucaaggcuucagucu

SEQ ID NO: 2871384 - RNA, 18 nt, Human
cuucagauauuauugcuu

SEQ ID NO: 2871385 - RNA, 19 nt, Human
cuucagauauuauugcuuu

SEQ ID NO: 2871386 - RNA, 21 nt, Human
cuucagaugggaggaaagaga

SEQ ID NO: 2871387 - RNA, 23 nt, Human
cuucagaugggaggaaagagagc

SEQ ID NO: 2871388 - RNA, 17 nt, Human
cuucagauguggagcca

SEQ ID NO: 2871389 - RNA, 18 nt, Human
cuucagauguggagccag

SEQ ID NO: 2871390 - RNA, 19 nt, Human
cuucagauguggagccagg

SEQ ID NO: 2871391 - RNA, 20 nt, Human
cuucagauguggagccaggc

SEQ ID NO: 2871392 - RNA, 21 nt, Human
cuucagauguggagccaggcg

SEQ ID NO: 2871393 - RNA, 22 nt, Human
cuucagauguggagccaggcgu

SEQ ID NO: 2871394 - RNA, 12 nt, Human
cuucagagcuga

SEQ ID NO: 2871395 - RNA, 14 nt, Human
cuucagagcugaca

SEQ ID NO: 2871396 - RNA, 18 nt, Human
cuucagagcugacacagg

SEQ ID NO: 2871397 - RNA, 20 nt, Human
cuucagagcugacacaggau

SEQ ID NO: 2871398 - RNA, 18 nt, Human
cuguuuuagguuaaaaaa

SEQ ID NO: 2871399 - RNA, 13 nt, Human
cuguuuguuauug

SEQ ID NO: 2871400 - RNA, 14 nt, Human
cuguuuguuucaag

SEQ ID NO: 2871401 - RNA, 15 nt, Human
cuguuuguuucaaga

SEQ ID NO: 2871402 - RNA, 20 nt, Human
cuguuuguuucaagaaccug

SEQ ID NO: 2871403 - RNA, 14 nt, Human
cuguuuguuucaua

SEQ ID NO: 2871404 - RNA, 22 nt, Human
cuguuuuacaaaaaagaaaaga

SEQ ID NO: 2871405 - RNA, 17 nt, Human
cuguuuguagugaaaua

SEQ ID NO: 2871406 - RNA, 15 nt, Human
cuguuuuuagacacc

SEQ ID NO: 2871407 - RNA, 18 nt, Human
cuguuuuuagacaccuuc

SEQ ID NO: 2871408 - RNA, 21 nt, Human
cuguuuuguuuggcaaggaaa

SEQ ID NO: 2871409 - RNA, 22 nt, Human
cuguuuuguuuggcaaggaaag

SEQ ID NO: 2871410 - RNA, 21 nt, Human
cuguuuucucucggcucccca

SEQ ID NO: 2871411 - RNA, 14 nt, Human
cuguuugcugaugg

SEQ ID NO: 2871412 - RNA, 16 nt, Human
cuguuugcugaugguc

SEQ ID NO: 2871413 - RNA, 19 nt, Human
cuguuugcugauggucugg

SEQ ID NO: 2871414 - RNA, 12 nt, Human
cuguuugauucu

SEQ ID NO: 2871415 - RNA, 13 nt, Human
cuguuugauucuu

SEQ ID NO: 2871416 - RNA, 14 nt, Human
cuguuugauucuuu

SEQ ID NO: 2871417 - RNA, 23 nt, Human
cuguuuggaggagcaaaggcuga

SEQ ID NO: 2871418 - RNA, 19 nt, Human
cuguuuggauuuuuaauua

SEQ ID NO: 2871419 - RNA, 21 nt, Human
cuguuuggauuuuuaauuaaa

SEQ ID NO: 2871420 - RNA, 23 nt, Human
cuguuuggauuuuuaauuaaaaa

SEQ ID NO: 2871421 - RNA, 12 nt, Human
cuguuuggacug

SEQ ID NO: 2871422 - RNA, 16 nt, Human
cuguuuggacuuugua

SEQ ID NO: 2871423 - RNA, 17 nt, Human
cuguuugcuucaccgug

SEQ ID NO: 2871424 - RNA, 18 nt, Human
cuguuugcuucaccgugg

SEQ ID NO: 2871425 - RNA, 21 nt, Human
cuguuugcuucaccguggauu

SEQ ID NO: 2871426 - RNA, 17 nt, Human
cuguuucugcuugcucu

SEQ ID NO: 2871427 - RNA, 12 nt, Human
cuguuucuuccu

SEQ ID NO: 2871428 - RNA, 19 nt, Human
cuguuucuuccuguuaaug

SEQ ID NO: 2871429 - RNA, 12 nt, Human
cuguuucuugcu

SEQ ID NO: 2871430 - RNA, 13 nt, Human
cuguuucuugcuu

SEQ ID NO: 2871431 - RNA, 14 nt, Human
cuguuucuugcuug

SEQ ID NO: 2871432 - RNA, 15 nt, Human
cuguuucuugcuugu

SEQ ID NO: 2871433 - RNA, 16 nt, Human
cuguuucuugcuugua

SEQ ID NO: 2871434 - RNA, 19 nt, Human
cuguuucuugcuuguaccu

SEQ ID NO: 2871435 - RNA, 17 nt, Human
cuguuucaacacagacc

SEQ ID NO: 2871436 - RNA, 16 nt, Human
cuguuuauuucuguuu

SEQ ID NO: 2871437 - RNA, 15 nt, Human
cuguuuauucccauc

SEQ ID NO: 2871438 - RNA, 15 nt, Human
cuguuucaaucacug

SEQ ID NO: 2871439 - RNA, 16 nt, Human
cuguuucaaucacugu

SEQ ID NO: 2871440 - RNA, 17 nt, Human
cuguuucaaucacuguc

SEQ ID NO: 2871441 - RNA, 11 nt, Human
cuguuucacaa

SEQ ID NO: 2871442 - RNA, 11 nt, Human
cuguuucaagg

SEQ ID NO: 2871443 - RNA, 21 nt, Human
cuguuucaaggcacucuagau

SEQ ID NO: 2871444 - RNA, 22 nt, Human
cuguuucaaggcacucuagauu

SEQ ID NO: 2871445 - RNA, 17 nt, Human
cuguugcccaggcuggc

SEQ ID NO: 2871446 - RNA, 11 nt, Human
cuguucuugcu

SEQ ID NO: 2871447 - RNA, 12 nt, Human
cuguucuugcug

SEQ ID NO: 2871448 - RNA, 13 nt, Human
cuguucuugcugc

SEQ ID NO: 2871449 - RNA, 14 nt, Human
cuguucuugcugcu

SEQ ID NO: 2871450 - RNA, 15 nt, Human
cuguucuugcugcua

SEQ ID NO: 2871451 - RNA, 16 nt, Human
cuguucuugcugcuag

SEQ ID NO: 2871452 - RNA, 17 nt, Human
cuguucuugcugcuaga

SEQ ID NO: 2871453 - RNA, 18 nt, Human
cuguucuugcugcuagaa

SEQ ID NO: 2871454 - RNA, 19 nt, Human
cuguucuugcugcuagaac

SEQ ID NO: 2871455 - RNA, 20 nt, Human
cuguucuugcugcuagaacu

SEQ ID NO: 2871456 - RNA, 21 nt, Human
cuguucuugcugcuagaacuu

SEQ ID NO: 2871457 - RNA, 22 nt, Human
cuguucuugcugcuagaacuuu

SEQ ID NO: 2871458 - RNA, 13 nt, Human
cuguucuuccucc

SEQ ID NO: 2871459 - RNA, 14 nt, Human
cuguucuuccucca

SEQ ID NO: 2871460 - RNA, 15 nt, Human
cuguucuuccuccag

SEQ ID NO: 2871461 - RNA, 20 nt, Human
cuguucuuccuccagcugca

SEQ ID NO: 2871462 - RNA, 21 nt, Human
cuguucuuccuccagcugcac

SEQ ID NO: 2871463 - RNA, 22 nt, Human
cuguucuuccuccagcugcacc

SEQ ID NO: 2871464 - RNA, 23 nt, Human
cuguucuuccuccagcugcacca

SEQ ID NO: 2871465 - RNA, 16 nt, Human
cuguuaauaguucagg

SEQ ID NO: 2871466 - RNA, 19 nt, Human
cuguuaauagaucuuaggg

SEQ ID NO: 2871467 - RNA, 13 nt, Human
cuguuaauguauu

SEQ ID NO: 2871468 - RNA, 14 nt, Human
cuguuaauguauuu

SEQ ID NO: 2871469 - RNA, 18 nt, Human
cuguuaauguauuuguuc

SEQ ID NO: 2871470 - RNA, 19 nt, Human
cuguuaauguauuuguuca

SEQ ID NO: 2871471 - RNA, 12 nt, Human
cuguuaaccauu

SEQ ID NO: 2871472 - RNA, 19 nt, Human
cuguuaagaaaucuguuuu

SEQ ID NO: 2871473 - RNA, 11 nt, Human
cuguucugugu

SEQ ID NO: 2871474 - RNA, 21 nt, Human
cuguucuguuucaaggcacuc

SEQ ID NO: 2871475 - RNA, 14 nt, Human
cuguucuguuucaa

SEQ ID NO: 2871476 - RNA, 15 nt, Human
cuguucuguuucaag

SEQ ID NO: 2871477 - RNA, 13 nt, Human
cuguucugugucu

SEQ ID NO: 2871478 - RNA, 14 nt, Human
cuguucugugucuu

SEQ ID NO: 2871479 - RNA, 12 nt, Human
cuguucuuccuc

SEQ ID NO: 2871480 - RNA, 16 nt, Human
cuguugcccaggcugg

SEQ ID NO: 2871481 - RNA, 15 nt, Human
cuguugcccaggcug

SEQ ID NO: 2871482 - RNA, 14 nt, Human
cuguugcccaggcu

SEQ ID NO: 2871483 - RNA, 13 nt, Human
cuguugcccaggc

SEQ ID NO: 2871484 - RNA, 12 nt, Human
cuguugcccagg

SEQ ID NO: 2871485 - RNA, 21 nt, Human
cuguugcaauuaggauuuuga

SEQ ID NO: 2871486 - RNA, 22 nt, Human
cuguugcaauuaggauuuugau

SEQ ID NO: 2871487 - RNA, 12 nt, Human
cuguugaaaauu

SEQ ID NO: 2871488 - RNA, 15 nt, Human
cuguugacauauuua

SEQ ID NO: 2871489 - RNA, 16 nt, Human
cuguugacauauuuaa

SEQ ID NO: 2871490 - RNA, 17 nt, Human
cuguugacauauuuaau

SEQ ID NO: 2871491 - RNA, 18 nt, Human
cuguugacauauuuaaug

SEQ ID NO: 2871492 - RNA, 19 nt, Human
cuguugacauauuuaaugu

SEQ ID NO: 2871493 - RNA, 20 nt, Human
cuguugacauauuuaauguu

SEQ ID NO: 2871494 - RNA, 21 nt, Human
cuguugacauauuuaauguuu

SEQ ID NO: 2871495 - RNA, 22 nt, Human
cuguugacauauuuaauguuuu

SEQ ID NO: 2871496 - RNA, 23 nt, Human
cuguugacauauuuaauguuuua

SEQ ID NO: 2871497 - RNA, 14 nt, Human
cuguugaaaauuau

SEQ ID NO: 2871498 - RNA, 21 nt, Human
cuguugaaaauuauuuuaaac

SEQ ID NO: 2871499 - RNA, 22 nt, Human
cuguugaaaauuauuuuaaaca

SEQ ID NO: 2871500 - RNA, 12 nt, Human
cuguugaaagca

SEQ ID NO: 2871501 - RNA, 14 nt, Human
cuguugaaagcaaa

SEQ ID NO: 2871502 - RNA, 15 nt, Human
cuguugaaagcaaaa

SEQ ID NO: 2871503 - RNA, 16 nt, Human
cuguugaaagcaaaaa

SEQ ID NO: 2871504 - RNA, 17 nt, Human
cuguugaaagcaaaaau

SEQ ID NO: 2871505 - RNA, 18 nt, Human
cuguugaaagcaaaaaug

SEQ ID NO: 2871506 - RNA, 19 nt, Human
cuguugaaagcaaaaaugc

SEQ ID NO: 2871507 - RNA, 20 nt, Human
cuguugaaagcaaaaaugcu

SEQ ID NO: 2871508 - RNA, 22 nt, Human
cuguugaaagcaaaaaugcuaa

SEQ ID NO: 2871509 - RNA, 18 nt, Human
cuguugaagucaccuugu

SEQ ID NO: 2871510 - RNA, 18 nt, Human
cuguugauaauucuuauu

SEQ ID NO: 2871511 - RNA, 21 nt, Human
cuguugauaauucuuauuuug

SEQ ID NO: 2871512 - RNA, 15 nt, Human
cuguugacuggcugu

SEQ ID NO: 2871513 - RNA, 22 nt, Human
cuguugacuggcugugugaccu

SEQ ID NO: 2871514 - RNA, 14 nt, Human
cuguugauguaucu

SEQ ID NO: 2871515 - RNA, 15 nt, Human
cuguugauguaucug

SEQ ID NO: 2871516 - RNA, 16 nt, Human
cuguugauguaucuga

SEQ ID NO: 2871517 - RNA, 22 nt, Human
cuguugauguaucugaguugcc

SEQ ID NO: 2871518 - RNA, 23 nt, Human
cuguugauguaucugaguugcca

SEQ ID NO: 2871519 - RNA, 21 nt, Human
cuuaaugaaugagucuguugu

SEQ ID NO: 2871520 - RNA, 20 nt, Human
cuuaaugugauuacugcucu

SEQ ID NO: 2871521 - RNA, 22 nt, Human
cuuaaugugauuacugcucuau

SEQ ID NO: 2871522 - RNA, 13 nt, Human
cuuaauguucuua

SEQ ID NO: 2871523 - RNA, 14 nt, Human
cuuaauguucuuau

SEQ ID NO: 2871524 - RNA, 14 nt, Human
cuuaauauauuuga

SEQ ID NO: 2871525 - RNA, 13 nt, Human
cuuaauuaauuug

SEQ ID NO: 2871526 - RNA, 14 nt, Human
cuuaauuaauuuga

SEQ ID NO: 2871527 - RNA, 15 nt, Human
cuuaauuaauuugau

SEQ ID NO: 2871528 - RNA, 17 nt, Human
cuuaauuaauuugauua

SEQ ID NO: 2871529 - RNA, 18 nt, Human
cuuaauuaauuugauuaa

SEQ ID NO: 2871530 - RNA, 12 nt, Human
cuuaauuacuua

SEQ ID NO: 2871531 - RNA, 14 nt, Human
cuuaauuacuuaaa

SEQ ID NO: 2871532 - RNA, 16 nt, Human
cuuaauuacuuaaaaa

SEQ ID NO: 2871533 - RNA, 17 nt, Human
cuuaauuacuuaaaaaa

SEQ ID NO: 2871534 - RNA, 11 nt, Human
cuuaauuauua

SEQ ID NO: 2871535 - RNA, 15 nt, Human
cuuaauuauuauuug

SEQ ID NO: 2871536 - RNA, 18 nt, Human
cuuaauuauuauuugugu

SEQ ID NO: 2871537 - RNA, 19 nt, Human
cuuaauuauuauuuguguu

SEQ ID NO: 2871538 - RNA, 12 nt, Human
cuuaauuucuaa

SEQ ID NO: 2871539 - RNA, 14 nt, Human
cuuaaccaguugug

SEQ ID NO: 2871540 - RNA, 18 nt, Human
cuuaaccaguuguggugu

SEQ ID NO: 2871541 - RNA, 23 nt, Human
cuuaaccaguuguggugugagua

SEQ ID NO: 2871542 - RNA, 18 nt, Human
cuuaagaauuuugagcag

SEQ ID NO: 2871543 - RNA, 13 nt, Human
cuuaacauauuua

SEQ ID NO: 2871544 - RNA, 15 nt, Human
cuuaacauauuuacu

SEQ ID NO: 2871545 - RNA, 13 nt, Human
cuuaacaugggcu

SEQ ID NO: 2871546 - RNA, 16 nt, Human
cuuaacauuccuaaaa

SEQ ID NO: 2871547 - RNA, 19 nt, Human
cuuaacauuccuaaaaugc

SEQ ID NO: 2871548 - RNA, 17 nt, Human
cuuaacauauuuacuaa

SEQ ID NO: 2871549 - RNA, 17 nt, Human
cuuaacaaccuggccgc

SEQ ID NO: 2871550 - RNA, 18 nt, Human
cuuaaauuuuaauuuauu

SEQ ID NO: 2871551 - RNA, 13 nt, Human
cuuaaaaaucaca

SEQ ID NO: 2871552 - RNA, 21 nt, Human
cuuaaaaaucacacuguaaau

SEQ ID NO: 2871553 - RNA, 22 nt, Human
cuuaaaaaucacacuguaaaua

SEQ ID NO: 2871554 - RNA, 17 nt, Human
cuuaaauuuuaauuuau

SEQ ID NO: 2871555 - RNA, 12 nt, Human
cuuaagcuuccg

SEQ ID NO: 2871556 - RNA, 13 nt, Human
cuuaagcuuugga

SEQ ID NO: 2871557 - RNA, 22 nt, Human
cuuaagcuuuggacccaaggaa

SEQ ID NO: 2871558 - RNA, 23 nt, Human
cuuaagcuuuggacccaaggaaa

SEQ ID NO: 2871559 - RNA, 11 nt, Human
cuuaagcugau

SEQ ID NO: 2871560 - RNA, 23 nt, Human
cuuaagaccuacuguucuaaagc

SEQ ID NO: 2871561 - RNA, 20 nt, Human
cuuaagaccuacuguucuaa

SEQ ID NO: 2871562 - RNA, 22 nt, Human
cuuaagaccuacuguucuaaag

SEQ ID NO: 2871563 - RNA, 15 nt, Human
cuuaaggugaggccu

SEQ ID NO: 2871564 - RNA, 17 nt, Human
cuuaaggugaggccugu

SEQ ID NO: 2871565 - RNA, 18 nt, Human
cuuaaggugaggccuguc

SEQ ID NO: 2871566 - RNA, 19 nt, Human
cuuaaggugaggccugucu

SEQ ID NO: 2871567 - RNA, 20 nt, Human
cuuaaggugaggccugucug

SEQ ID NO: 2871568 - RNA, 21 nt, Human
cuuaaggugaggccugucugu

SEQ ID NO: 2871569 - RNA, 22 nt, Human
cuuaaggugaggccugucugug

SEQ ID NO: 2871570 - RNA, 23 nt, Human
cuuaaggugaggccugucuguga

SEQ ID NO: 2871571 - RNA, 16 nt, Human
cuuaagggaguuuaau

SEQ ID NO: 2871572 - RNA, 16 nt, Human
cuuaaggcacucuguu

SEQ ID NO: 2871573 - RNA, 19 nt, Human
cuuaaguauaucauguaaa

SEQ ID NO: 2871574 - RNA, 20 nt, Human
cuuaaguauaucauguaaag

SEQ ID NO: 2871575 - RNA, 18 nt, Human
cuuaauacuaccuugaaa

SEQ ID NO: 2871576 - RNA, 16 nt, Human
cuuaauacuaccuuga

SEQ ID NO: 2871577 - RNA, 20 nt, Human
cuuaauagaaacauugaaga

SEQ ID NO: 2871578 - RNA, 18 nt, Human
cuuagaaguuuguuguga

SEQ ID NO: 2871579 - RNA, 16 nt, Human
cuuagaccuuccauaa

SEQ ID NO: 2871580 - RNA, 18 nt, Human
cuuagaccuuccauaaug

SEQ ID NO: 2871581 - RNA, 20 nt, Human
cuuagagaauguucuccuaa

SEQ ID NO: 2871582 - RNA, 11 nt, Human
cuuagagcagu

SEQ ID NO: 2871583 - RNA, 19 nt, Human
cuuagagcaguuucugucc

SEQ ID NO: 2871584 - RNA, 22 nt, Human
cuuagagcaguuucuguccugc

SEQ ID NO: 2871585 - RNA, 15 nt, Human
cuuaguaaaauuuau

SEQ ID NO: 2871586 - RNA, 19 nt, Human
cuuaguaaaauuuauuuca

SEQ ID NO: 2871587 - RNA, 20 nt, Human
cuuaguaaaauuuauuucau

SEQ ID NO: 2871588 - RNA, 13 nt, Human
cuuaguaucucau

SEQ ID NO: 2871589 - RNA, 17 nt, Human
cuuaguaucucaucaac

SEQ ID NO: 2871590 - RNA, 19 nt, Human
cuuaguaucucaucaacaa

SEQ ID NO: 2871591 - RNA, 22 nt, Human
cuuaguaucucaucaacaaaga

SEQ ID NO: 2871592 - RNA, 20 nt, Human
cuuagaagucacacaguauu

SEQ ID NO: 2871593 - RNA, 17 nt, Human
cuuagaagucacacagu

SEQ ID NO: 2871594 - RNA, 16 nt, Human
cuuagaaauugcauuu

SEQ ID NO: 2871595 - RNA, 18 nt, Human
cuuagaaauguaaacugc

SEQ ID NO: 2871596 - RNA, 20 nt, Human
cuuagaaauguaaacugcca

SEQ ID NO: 2871597 - RNA, 21 nt, Human
cuuagaaauguaaacugccau

SEQ ID NO: 2871598 - RNA, 22 nt, Human
cuuagaaauguaaacugccaua

SEQ ID NO: 2871599 - RNA, 16 nt, Human
cuuacuguaagacauu

SEQ ID NO: 2871600 - RNA, 17 nt, Human
cuuacuguaagacauua

SEQ ID NO: 2871601 - RNA, 17 nt, Human
cuuacugauuauuuucu

SEQ ID NO: 2871602 - RNA, 14 nt, Human
cuuagaaagcaggg

SEQ ID NO: 2871603 - RNA, 16 nt, Human
cuuagaaagcaggggc

SEQ ID NO: 2871604 - RNA, 18 nt, Human
cuuagaaagcaggggcua

SEQ ID NO: 2871605 - RNA, 17 nt, Human
cuuagaaagcaggggcu

SEQ ID NO: 2871606 - RNA, 20 nt, Human
cuuaccuguaugucuccagu

SEQ ID NO: 2871607 - RNA, 15 nt, Human
cuuaccuguacacug

SEQ ID NO: 2871608 - RNA, 17 nt, Human
cuuaccuguacacugac

SEQ ID NO: 2871609 - RNA, 16 nt, Human
cuuaccuuuaccccau

SEQ ID NO: 2871610 - RNA, 12 nt, Human
cuuacucuaaga

SEQ ID NO: 2871611 - RNA, 20 nt, Human
cuuacucuaagaucuuagau

SEQ ID NO: 2871612 - RNA, 16 nt, Human
cuuacucuguccauuu

SEQ ID NO: 2871613 - RNA, 17 nt, Human
cuuacucuguccauuua

SEQ ID NO: 2871614 - RNA, 13 nt, Human
cuuacucuaagau

SEQ ID NO: 2871615 - RNA, 21 nt, Human
cuguuaaacuguuagcacugu

SEQ ID NO: 2871616 - RNA, 23 nt, Human
cuguuaaacuguuagcacuguug

SEQ ID NO: 2871617 - RNA, 18 nt, Human
cuguguugcgugucgugg

SEQ ID NO: 2871618 - RNA, 14 nt, Human
cuguguugccaugu

SEQ ID NO: 2871619 - RNA, 13 nt, Human
cuguguuguauua

SEQ ID NO: 2871620 - RNA, 15 nt, Human
cuguguuguauuaac

SEQ ID NO: 2871621 - RNA, 18 nt, Human
cuguguuguauuaacaaa

SEQ ID NO: 2871622 - RNA, 19 nt, Human
cuguguuguauuaacaaaa

SEQ ID NO: 2871623 - RNA, 21 nt, Human
cuguguuguauuaacaaaagu

SEQ ID NO: 2871624 - RNA, 22 nt, Human
cuguguuguauuaacaaaaguu

SEQ ID NO: 2871625 - RNA, 20 nt, Human
cuguguugcgugucgugggu

SEQ ID NO: 2871626 - RNA, 23 nt, Human
cuguguugcauuauucauuuagu

SEQ ID NO: 2871627 - RNA, 23 nt, Human
cugugugugugaaugaacacucu

SEQ ID NO: 2871628 - RNA, 17 nt, Human
cuguguaaaaagagagc

SEQ ID NO: 2871629 - RNA, 15 nt, Human
cuguguaaaauguaa

SEQ ID NO: 2871630 - RNA, 19 nt, Human
cuguguaaaauguaaugca

SEQ ID NO: 2871631 - RNA, 16 nt, Human
cuguguaaaaagagag

SEQ ID NO: 2871632 - RNA, 20 nt, Human
cugugucuuuuuucacuaca

SEQ ID NO: 2871633 - RNA, 13 nt, Human
cugugugaaaaug

SEQ ID NO: 2871634 - RNA, 20 nt, Human
cugugucuuucacagcuccu

SEQ ID NO: 2871635 - RNA, 22 nt, Human
cuguggucuucaaauugucuuu

SEQ ID NO: 2871636 - RNA, 21 nt, Human
cugugugcaccuuaccaacuu

SEQ ID NO: 2871637 - RNA, 16 nt, Human
cugugugcacaaauau

SEQ ID NO: 2871638 - RNA, 15 nt, Human
cugugugcagugaag

SEQ ID NO: 2871639 - RNA, 17 nt, Human
cugugugcagugaaggu

SEQ ID NO: 2871640 - RNA, 16 nt, Human
cugugugccuggggga

SEQ ID NO: 2871641 - RNA, 18 nt, Human
cugugugccugggggagu

SEQ ID NO: 2871642 - RNA, 18 nt, Human
cugugugaugaacuuucu

SEQ ID NO: 2871643 - RNA, 19 nt, Human
cugugugaugaacuuucuc

SEQ ID NO: 2871644 - RNA, 13 nt, Human
cugugugaaugug

SEQ ID NO: 2871645 - RNA, 14 nt, Human
cugugugaaugugg

SEQ ID NO: 2871646 - RNA, 17 nt, Human
cugugugaaugugggca

SEQ ID NO: 2871647 - RNA, 15 nt, Human
cugugugaugaacuu

SEQ ID NO: 2871648 - RNA, 16 nt, Human
cugugugaugaacuuu

SEQ ID NO: 2871649 - RNA, 16 nt, Human
cugugugugaccccuc

SEQ ID NO: 2871650 - RNA, 17 nt, Human
cugugugugaccccucc

SEQ ID NO: 2871651 - RNA, 18 nt, Human
cugugugugaccccuccu

SEQ ID NO: 2871652 - RNA, 19 nt, Human
cugugugugaccccuccug

SEQ ID NO: 2871653 - RNA, 20 nt, Human
cugugugugaccccuccugg

SEQ ID NO: 2871654 - RNA, 21 nt, Human
cugugugugaccccuccuggg

SEQ ID NO: 2871655 - RNA, 14 nt, Human
cugugugugcccug

SEQ ID NO: 2871656 - RNA, 15 nt, Human
cugugugugcccugu

SEQ ID NO: 2871657 - RNA, 15 nt, Human
cugugugcgcucugu

SEQ ID NO: 2871658 - RNA, 13 nt, Human
cuguggugucugc

SEQ ID NO: 2871659 - RNA, 15 nt, Human
cugugguaaaugcca

SEQ ID NO: 2871660 - RNA, 16 nt, Human
cugugguaaaugccac

SEQ ID NO: 2871661 - RNA, 17 nt, Human
cugugguaaaugccaca

SEQ ID NO: 2871662 - RNA, 18 nt, Human
cugugguaaaugccacac

SEQ ID NO: 2871663 - RNA, 23 nt, Human
cugugguaaaugccacacaccuu

SEQ ID NO: 2871664 - RNA, 16 nt, Human
cugugggugugugacu

SEQ ID NO: 2871665 - RNA, 19 nt, Human
cuguggguccgauaauauc

SEQ ID NO: 2871666 - RNA, 22 nt, Human
cuguggggucaacccuucugga

SEQ ID NO: 2871667 - RNA, 20 nt, Human
cugugggggugugcccccuu

SEQ ID NO: 2871668 - RNA, 19 nt, Human
cugugggggugugcccccu

SEQ ID NO: 2871669 - RNA, 24 nt, Human
cugugggggugagggucccaugug

SEQ ID NO: 2871670 - RNA, 23 nt, Human
cugugggggugagggucccaugu

SEQ ID NO: 2871671 - RNA, 14 nt, Human
cugugggaccccag

SEQ ID NO: 2871672 - RNA, 15 nt, Human
cugugggaccccagg

SEQ ID NO: 2871673 - RNA, 16 nt, Human
cugugggaccccaggc

SEQ ID NO: 2871674 - RNA, 17 nt, Human
cugugggaccccaggcc

SEQ ID NO: 2871675 - RNA, 18 nt, Human
cugugggaccccaggccc

SEQ ID NO: 2871676 - RNA, 19 nt, Human
cugugggaccccaggccca

SEQ ID NO: 2871677 - RNA, 20 nt, Human
cugugggagggacuuugcug

SEQ ID NO: 2871678 - RNA, 14 nt, Human
cuguggcugucugg

SEQ ID NO: 2871679 - RNA, 15 nt, Human
cuguggcugucugga

SEQ ID NO: 2871680 - RNA, 13 nt, Human
cuguggcugugga

SEQ ID NO: 2871681 - RNA, 20 nt, Human
cuguggcuucccaugucuuu

SEQ ID NO: 2871682 - RNA, 21 nt, Human
cuguggccguuaucuggaagu

SEQ ID NO: 2871683 - RNA, 19 nt, Human
cuguggccguuaucuggaa

SEQ ID NO: 2871684 - RNA, 20 nt, Human
cuguggccguuaucuggaag

SEQ ID NO: 2871685 - RNA, 19 nt, Human
cuguggagacaaugucugc

SEQ ID NO: 2871686 - RNA, 19 nt, Human
cuguggaaugagugugcau

SEQ ID NO: 2871687 - RNA, 21 nt, Human
cuguggaaugagugugcaugg

SEQ ID NO: 2871688 - RNA, 12 nt, Human
cuguggaagcaa

SEQ ID NO: 2871689 - RNA, 11 nt, Human
cugugccucug

SEQ ID NO: 2871690 - RNA, 18 nt, Human
cuguggaacauaaaaagg

SEQ ID NO: 2871691 - RNA, 21 nt, Human
cuguggaacauaaaaaggaca

SEQ ID NO: 2871692 - RNA, 16 nt, Human
cuguggaacccagcag

SEQ ID NO: 2871693 - RNA, 22 nt, Human
cuguggaacccagcaguucugu

SEQ ID NO: 2871694 - RNA, 23 nt, Human
cuguggaacccagcaguucuguu

SEQ ID NO: 2871695 - RNA, 18 nt, Human
cuguggaacuaauaaaua

SEQ ID NO: 2871696 - RNA, 22 nt, Human
cuguggaacuaauaaauacaua

SEQ ID NO: 2871697 - RNA, 16 nt, Human
cugugccucugccugu

SEQ ID NO: 2871698 - RNA, 12 nt, Human
cugugccucugc

SEQ ID NO: 2871699 - RNA, 13 nt, Human
cugugccucugcc

SEQ ID NO: 2871700 - RNA, 14 nt, Human
cugugccucugccu

SEQ ID NO: 2871701 - RNA, 15 nt, Human
cugugccucugccug

SEQ ID NO: 2871702 - RNA, 13 nt, Human
cuguggcccuggc

SEQ ID NO: 2871703 - RNA, 16 nt, Human
cuguggcccuggcucu

SEQ ID NO: 2871704 - RNA, 19 nt, Human
cuguggcccuggcucugcu

SEQ ID NO: 2871705 - RNA, 13 nt, Human
cuguggcccuguc

SEQ ID NO: 2871706 - RNA, 14 nt, Human
cuguggcccugucc

SEQ ID NO: 2871707 - RNA, 15 nt, Human
cuguggcccuguccu

SEQ ID NO: 2871708 - RNA, 22 nt, Human
cuguggagguacacucuuauag

SEQ ID NO: 2871709 - RNA, 20 nt, Human
cuguggauacccuuacccuu

SEQ ID NO: 2871710 - RNA, 17 nt, Human
cuguggaugagcccuca

SEQ ID NO: 2871711 - RNA, 15 nt, Human
cuguggaugagcccu

SEQ ID NO: 2871712 - RNA, 21 nt, Human
cugucuuuucagguuugucau

SEQ ID NO: 2871713 - RNA, 15 nt, Human
cuguggagcucagcc

SEQ ID NO: 2871714 - RNA, 16 nt, Human
cuguggagcucagccc

SEQ ID NO: 2871715 - RNA, 17 nt, Human
cuguggagcucagcccc

SEQ ID NO: 2871716 - RNA, 14 nt, Human
cuguggaggaagga

SEQ ID NO: 2871717 - RNA, 15 nt, Human
cuguggaggaaggau

SEQ ID NO: 2871718 - RNA, 14 nt, Human
cuguggagacuggg

SEQ ID NO: 2871719 - RNA, 16 nt, Human
cuguggaggaaggauu

SEQ ID NO: 2871720 - RNA, 17 nt, Human
cuguggaggaaggauug

SEQ ID NO: 2871721 - RNA, 19 nt, Human
cuguggaggaaggauugua

SEQ ID NO: 2871722 - RNA, 20 nt, Human
cuguggaggaaggauuguaa

SEQ ID NO: 2871723 - RNA, 21 nt, Human
cuguggaggaaggauuguaaa

SEQ ID NO: 2871724 - RNA, 22 nt, Human
cuguggaggaaggauuguaaaa

SEQ ID NO: 2871725 - RNA, 23 nt, Human
cuguggaggaaggauuguaaaaa

SEQ ID NO: 2871726 - RNA, 17 nt, Human
cuguggaggauugcuau

SEQ ID NO: 2871727 - RNA, 19 nt, Human
cugucuucacagcucugug

SEQ ID NO: 2871728 - RNA, 23 nt, Human
cugucuucacagcucuguguugc

SEQ ID NO: 2871729 - RNA, 22 nt, Human
cugucugagacucacaggaagg

SEQ ID NO: 2871730 - RNA, 13 nt, Human
cugucuucuguau

SEQ ID NO: 2871731 - RNA, 19 nt, Human
cugucuucuguauauaaau

SEQ ID NO: 2871732 - RNA, 21 nt, Human
cugucuucuguauauaaaugg

SEQ ID NO: 2871733 - RNA, 16 nt, Human
cugucuuuaaggaaaa

SEQ ID NO: 2871734 - RNA, 20 nt, Human
cugucuuuacuccucacacu

SEQ ID NO: 2871735 - RNA, 16 nt, Human
cugucuuuaaaagaga

SEQ ID NO: 2871736 - RNA, 17 nt, Human
cugucuuuaaaagagag

SEQ ID NO: 2871737 - RNA, 18 nt, Human
cugucuuuaaaagagaga

SEQ ID NO: 2871738 - RNA, 12 nt, Human
cugucuuguaau

SEQ ID NO: 2871739 - RNA, 13 nt, Human
cugucuuguaaua

SEQ ID NO: 2871740 - RNA, 14 nt, Human
cugucuuguaauau

SEQ ID NO: 2871741 - RNA, 18 nt, Human
cugucuuguaauauuuug

SEQ ID NO: 2871742 - RNA, 19 nt, Human
cugucuuguaauauuuugu

SEQ ID NO: 2871743 - RNA, 20 nt, Human
cugucuuguaauauuuugua

SEQ ID NO: 2871744 - RNA, 22 nt, Human
cugucuuguaauauuuuguauu

SEQ ID NO: 2871745 - RNA, 19 nt, Human
cugucuuuccuaagaccug

SEQ ID NO: 2871746 - RNA, 20 nt, Human
cugucuuuccuaagaccugg

SEQ ID NO: 2871747 - RNA, 23 nt, Human
cugucuuucugagcacacuuuag

SEQ ID NO: 2871748 - RNA, 14 nt, Human
cugucuuuggaaaa

SEQ ID NO: 2871749 - RNA, 20 nt, Human
cugucuuuggaaaaauguuu

SEQ ID NO: 2871750 - RNA, 22 nt, Human
cugucuuuggaaaaauguuugu

SEQ ID NO: 2871751 - RNA, 14 nt, Human
cugucugauuggcu

SEQ ID NO: 2871752 - RNA, 12 nt, Human
cugucugcagcc

SEQ ID NO: 2871753 - RNA, 13 nt, Human
cugucugcagccu

SEQ ID NO: 2871754 - RNA, 15 nt, Human
cugucugcagccuug

SEQ ID NO: 2871755 - RNA, 23 nt, Human
cugucauuugagcagggcucagc

SEQ ID NO: 2871756 - RNA, 20 nt, Human
cugucauuugagcagggcuc

SEQ ID NO: 2871757 - RNA, 22 nt, Human
cugucauuugagcagggcucag

SEQ ID NO: 2871758 - RNA, 21 nt, Human
cugucauuugagcagggcuca

SEQ ID NO: 2871759 - RNA, 15 nt, Human
cugucugcucagaca

SEQ ID NO: 2871760 - RNA, 23 nt, Human
cugucugguuucaccgaggacau

SEQ ID NO: 2871761 - RNA, 16 nt, Human
cugucugguuuuaaca

SEQ ID NO: 2871762 - RNA, 17 nt, Human
cugucugguuuuaacaa

SEQ ID NO: 2871763 - RNA, 18 nt, Human
cugucugguuuuaacaau

SEQ ID NO: 2871764 - RNA, 14 nt, Human
cugucuguaccuaa

SEQ ID NO: 2871765 - RNA, 13 nt, Human
cugucugugaccu

SEQ ID NO: 2871766 - RNA, 14 nt, Human
cugucugugaccug

SEQ ID NO: 2871767 - RNA, 12 nt, Human
cugucuguggcu

SEQ ID NO: 2871768 - RNA, 14 nt, Human
cugugaugcugggc

SEQ ID NO: 2871769 - RNA, 22 nt, Human
cugugaugagcugaucugcgga

SEQ ID NO: 2871770 - RNA, 18 nt, Human
cugugaugagcugaucug

SEQ ID NO: 2871771 - RNA, 16 nt, Human
cugugaugagcugauc

SEQ ID NO: 2871772 - RNA, 15 nt, Human
cugugaugagcugau

SEQ ID NO: 2871773 - RNA, 14 nt, Human
cugugaugagcuga

SEQ ID NO: 2871774 - RNA, 13 nt, Human
cugugaugagcug

SEQ ID NO: 2871775 - RNA, 17 nt, Human
cugugaggccccuggac

SEQ ID NO: 2871776 - RNA, 18 nt, Human
cugugaggccccuggaca

SEQ ID NO: 2871777 - RNA, 16 nt, Human
cugugauugugccuac

SEQ ID NO: 2871778 - RNA, 18 nt, Human
cugugaaaguacauuugg

SEQ ID NO: 2871779 - RNA, 23 nt, Human
cugugaaacuggcacugaauuaa

SEQ ID NO: 2871780 - RNA, 16 nt, Human
cugugaaaugcuggca

SEQ ID NO: 2871781 - RNA, 15 nt, Human
cugugaaacuggcac

SEQ ID NO: 2871782 - RNA, 13 nt, Human
cugugaaaccugu

SEQ ID NO: 2871783 - RNA, 19 nt, Human
cugugaaaccugugaagcu

SEQ ID NO: 2871784 - RNA, 15 nt, Human
cugugaacaggcugg

SEQ ID NO: 2871785 - RNA, 21 nt, Human
cugugaacaggcugggcugcu

SEQ ID NO: 2871786 - RNA, 13 nt, Human
cugugagccccug

SEQ ID NO: 2871787 - RNA, 12 nt, Human
cugugagccuug

SEQ ID NO: 2871788 - RNA, 15 nt, Human
cugugagccuuggcu

SEQ ID NO: 2871789 - RNA, 14 nt, Human
cugugagccccugg

SEQ ID NO: 2871790 - RNA, 15 nt, Human
cugugagccccuggu

SEQ ID NO: 2871791 - RNA, 16 nt, Human
cugugagccccugguc

SEQ ID NO: 2871792 - RNA, 21 nt, Human
cugugagccccugguccugag

SEQ ID NO: 2871793 - RNA, 15 nt, Human
cugugaggccccugg

SEQ ID NO: 2871794 - RNA, 17 nt, Human
cugugagccuuggcugu

SEQ ID NO: 2871795 - RNA, 17 nt, Human
cugugaggaaagcacac

SEQ ID NO: 2871796 - RNA, 20 nt, Human
cugugaggaaagcacacagu

SEQ ID NO: 2871797 - RNA, 16 nt, Human
cugugaggagccccau

SEQ ID NO: 2871798 - RNA, 17 nt, Human
cugugaggagccccauc

SEQ ID NO: 2871799 - RNA, 18 nt, Human
cugugaggagccccaucu

SEQ ID NO: 2871800 - RNA, 19 nt, Human
cugugaggagccccaucug

SEQ ID NO: 2871801 - RNA, 14 nt, Human
cugugccaugugcc

SEQ ID NO: 2871802 - RNA, 22 nt, Human
cugugcagggaggagguggcag

SEQ ID NO: 2871803 - RNA, 15 nt, Human
cugugcagggaggag

SEQ ID NO: 2871804 - RNA, 15 nt, Human
cugugcaaaaaaauu

SEQ ID NO: 2871805 - RNA, 16 nt, Human
cugugcaaaaaaauua

SEQ ID NO: 2871806 - RNA, 16 nt, Human
cugugcaaauccuuga

SEQ ID NO: 2871807 - RNA, 18 nt, Human
cugugcacgcaguggccu

SEQ ID NO: 2871808 - RNA, 19 nt, Human
cugugcacccagaagaaga

SEQ ID NO: 2871809 - RNA, 12 nt, Human
cugugcacgcag

SEQ ID NO: 2871810 - RNA, 17 nt, Human
cugugcacgcaguggcc

SEQ ID NO: 2871811 - RNA, 13 nt, Human
cugugcagggagg

SEQ ID NO: 2871812 - RNA, 15 nt, Human
cugugcagcgcagcu

SEQ ID NO: 2871813 - RNA, 17 nt, Human
cugugcagcgcagcugg

SEQ ID NO: 2871814 - RNA, 21 nt, Human
cugugcagcgcagcuggacuc

SEQ ID NO: 2871815 - RNA, 17 nt, Human
cugugccccaugccugu

SEQ ID NO: 2871816 - RNA, 21 nt, Human
cugugccccaugccuguccag

SEQ ID NO: 2871817 - RNA, 15 nt, Human
cugugccaugugcca

SEQ ID NO: 2871818 - RNA, 20 nt, Human
cugggguggggauagggagc

SEQ ID NO: 2871819 - RNA, 21 nt, Human
cugggguaccaagagacuccu

SEQ ID NO: 2871820 - RNA, 19 nt, Human
cuggggguggggagguguc

SEQ ID NO: 2871821 - RNA, 16 nt, Human
cugggguaccaagaga

SEQ ID NO: 2871822 - RNA, 20 nt, Human
cuggggguucuuucuuccuc

SEQ ID NO: 2871823 - RNA, 23 nt, Human
cuggggguucuuucuuccucugc

SEQ ID NO: 2871824 - RNA, 21 nt, Human
cuggguccuaauuaccagucu

SEQ ID NO: 2871825 - RNA, 18 nt, Human
cuggguccuugcaccccu

SEQ ID NO: 2871826 - RNA, 23 nt, Human
cuggguccuugcaccccucacuc

SEQ ID NO: 2871827 - RNA, 15 nt, Human
cugggguugucagcu

SEQ ID NO: 2871828 - RNA, 18 nt, Human
cugggguugucagcucuc

SEQ ID NO: 2871829 - RNA, 16 nt, Human
cuggguaaaugcaaag

SEQ ID NO: 2871830 - RNA, 16 nt, Human
cuggguaaaugcagcg

SEQ ID NO: 2871831 - RNA, 18 nt, Human
cugguaacaguucauguu

SEQ ID NO: 2871832 - RNA, 16 nt, Human
cugguaaacuauuugu

SEQ ID NO: 2871833 - RNA, 19 nt, Human
cugguaaacuauuugucuu

SEQ ID NO: 2871834 - RNA, 15 nt, Human
cugggcuucaguggc

SEQ ID NO: 2871835 - RNA, 12 nt, Human
cugggcugugug

SEQ ID NO: 2871836 - RNA, 18 nt, Human
cugggcuggggaggaccu

SEQ ID NO: 2871837 - RNA, 19 nt, Human
cugggcugcuacccagaaa

SEQ ID NO: 2871838 - RNA, 15 nt, Human
cugggcugcuggagg

SEQ ID NO: 2871839 - RNA, 22 nt, Human
cugggcuggccaguuggaacca

SEQ ID NO: 2871840 - RNA, 15 nt, Human
cugggcuggccaguu

SEQ ID NO: 2871841 - RNA, 19 nt, Human
cuggggaaagacacugccu

SEQ ID NO: 2871842 - RNA, 18 nt, Human
cuggggaaagacacugcc

SEQ ID NO: 2871843 - RNA, 16 nt, Human
cuggggaaagacacug

SEQ ID NO: 2871844 - RNA, 20 nt, Human
cuggggaaaacuccaccuuc

SEQ ID NO: 2871845 - RNA, 21 nt, Human
cugggauuacaagcgugagcc

SEQ ID NO: 2871846 - RNA, 22 nt, Human
cugggauuacaggcaugugcca

SEQ ID NO: 2871847 - RNA, 18 nt, Human
cugggauuacaggcguga

SEQ ID NO: 2871848 - RNA, 21 nt, Human
cugcuccacccuuggccuguc

SEQ ID NO: 2871849 - RNA, 18 nt, Human
cugcuccaccuuucagcc

SEQ ID NO: 2871850 - RNA, 21 nt, Human
cugcuccaccuuucagcccac

SEQ ID NO: 2871851 - RNA, 24 nt, Human
cugcuccaccuuucagcccacguc

SEQ ID NO: 2871852 - RNA, 20 nt, Human
cugcuccacccuuggccugu

SEQ ID NO: 2871853 - RNA, 16 nt, Human
cugggauggugggcuu

SEQ ID NO: 2871854 - RNA, 17 nt, Human
cugggauggugggcuuc

SEQ ID NO: 2871855 - RNA, 18 nt, Human
cugggauggugggcuuca

SEQ ID NO: 2871856 - RNA, 19 nt, Human
cugggauggugggcuucag

SEQ ID NO: 2871857 - RNA, 20 nt, Human
cugggauggugggcuucagg

SEQ ID NO: 2871858 - RNA, 21 nt, Human
cugggauggugggcuucaggg

SEQ ID NO: 2871859 - RNA, 22 nt, Human
cugggauggugggcuucagggc

SEQ ID NO: 2871860 - RNA, 11 nt, Human
cugcuccaccc

SEQ ID NO: 2871861 - RNA, 16 nt, Human
cugcuccaccacaucc

SEQ ID NO: 2871862 - RNA, 13 nt, Human
cugcuccaccaca

SEQ ID NO: 2871863 - RNA, 11 nt, Human
cugcuccacca

SEQ ID NO: 2871864 - RNA, 19 nt, Human
cugcuccacccuuggccug

SEQ ID NO: 2871865 - RNA, 18 nt, Human
cugcuccacccuuggccu

SEQ ID NO: 2871866 - RNA, 17 nt, Human
cugcuccacccuuggcc

SEQ ID NO: 2871867 - RNA, 16 nt, Human
cugcuccacccuuggc

SEQ ID NO: 2871868 - RNA, 15 nt, Human
cugcuccacccuugg

SEQ ID NO: 2871869 - RNA, 14 nt, Human
cugcuccacccuug

SEQ ID NO: 2871870 - RNA, 13 nt, Human
cugcuccacccuu

SEQ ID NO: 2871871 - RNA, 12 nt, Human
cugcuccacccu

SEQ ID NO: 2871872 - RNA, 21 nt, Human
cugggcaaggaggccacguga

SEQ ID NO: 2871873 - RNA, 15 nt, Human
cugggcaaggaggcc

SEQ ID NO: 2871874 - RNA, 14 nt, Human
cugggauuccuccc

SEQ ID NO: 2871875 - RNA, 19 nt, Human
cugggauuacaggugugca

SEQ ID NO: 2871876 - RNA, 18 nt, Human
cugggcaacagagcaaga

SEQ ID NO: 2871877 - RNA, 15 nt, Human
cugggcaacagagca

SEQ ID NO: 2871878 - RNA, 14 nt, Human
cugggcaaggaaaa

SEQ ID NO: 2871879 - RNA, 15 nt, Human
cugggcaaggaaaaa

SEQ ID NO: 2871880 - RNA, 17 nt, Human
cugggcaaggaaaaaga

SEQ ID NO: 2871881 - RNA, 18 nt, Human
cugggcaaggaaaaagaa

SEQ ID NO: 2871882 - RNA, 19 nt, Human
cugggcaaggaaaaagaaa

SEQ ID NO: 2871883 - RNA, 22 nt, Human
cugggcaaggaaaaagaaaaua

SEQ ID NO: 2871884 - RNA, 17 nt, Human
cugggauuuacacuuga

SEQ ID NO: 2871885 - RNA, 21 nt, Human
cugggauuuaugcucaugaac

SEQ ID NO: 2871886 - RNA, 17 nt, Human
cugggauuuuaaacuag

SEQ ID NO: 2871887 - RNA, 21 nt, Human
cugggauuuuaaacuagauga

SEQ ID NO: 2871888 - RNA, 22 nt, Human
cugggauuuuaaacuagaugac

SEQ ID NO: 2871889 - RNA, 23 nt, Human
cugggauuuuaaacuagaugacc

SEQ ID NO: 2871890 - RNA, 20 nt, Human
cugggccuccucacaacaug

SEQ ID NO: 2871891 - RNA, 17 nt, Human
cugggccuguugcccuu

SEQ ID NO: 2871892 - RNA, 11 nt, Human
cugggccuggg

SEQ ID NO: 2871893 - RNA, 12 nt, Human
cugggccugggc

SEQ ID NO: 2871894 - RNA, 13 nt, Human
cugggccugggcu

SEQ ID NO: 2871895 - RNA, 16 nt, Human
cugggccugggcuagg

SEQ ID NO: 2871896 - RNA, 16 nt, Human
cugggcucggaggcug

SEQ ID NO: 2871897 - RNA, 17 nt, Human
cugggcucggaggcugc

SEQ ID NO: 2871898 - RNA, 18 nt, Human
cugggcucggaggcugcc

SEQ ID NO: 2871899 - RNA, 21 nt, Human
cugggcucggaggcugccccc

SEQ ID NO: 2871900 - RNA, 21 nt, Human
cugggcuccuaaccuuccugu

SEQ ID NO: 2871901 - RNA, 13 nt, Human
cugggcucggagg

SEQ ID NO: 2871902 - RNA, 15 nt, Human
cugggcucggaggcu

SEQ ID NO: 2871903 - RNA, 23 nt, Human
cugggcucugccccagcucuggc

SEQ ID NO: 2871904 - RNA, 14 nt, Human
cugggcucugguuu

SEQ ID NO: 2871905 - RNA, 12 nt, Human
cugggcucuguc

SEQ ID NO: 2871906 - RNA, 18 nt, Human
cugggcucugccccagcu

SEQ ID NO: 2871907 - RNA, 17 nt, Human
cugggcucugccccagc

SEQ ID NO: 2871908 - RNA, 13 nt, Human
cugggcucugccc

SEQ ID NO: 2871909 - RNA, 22 nt, Human
cugggcucugcaauuccccucu

SEQ ID NO: 2871910 - RNA, 23 nt, Human
cugggcucugcaauuccccucug

SEQ ID NO: 2871911 - RNA, 16 nt, Human
cuggugucaccccaga

SEQ ID NO: 2871912 - RNA, 17 nt, Human
cuggugucaccccagag

SEQ ID NO: 2871913 - RNA, 18 nt, Human
cuggugucaccccagagc

SEQ ID NO: 2871914 - RNA, 19 nt, Human
cuggugucaccccagagcc

SEQ ID NO: 2871915 - RNA, 20 nt, Human
cuggugucaccccagagcca

SEQ ID NO: 2871916 - RNA, 22 nt, Human
cuggugucaccccagagccaca

SEQ ID NO: 2871917 - RNA, 23 nt, Human
cuggugucaccccagagccacac

SEQ ID NO: 2871918 - RNA, 20 nt, Human
cugguauugguggcuuuccu

SEQ ID NO: 2871919 - RNA, 18 nt, Human
cugguggcagugggagcu

SEQ ID NO: 2871920 - RNA, 14 nt, Human
cugguggcaguggg

SEQ ID NO: 2871921 - RNA, 15 nt, Human
cugguggcagcugcg

SEQ ID NO: 2871922 - RNA, 14 nt, Human
cugguauuccugcc

SEQ ID NO: 2871923 - RNA, 15 nt, Human
cugguauuccugccu

SEQ ID NO: 2871924 - RNA, 17 nt, Human
cugguauuccugccucc

SEQ ID NO: 2871925 - RNA, 13 nt, Human
cugguauggcugc

SEQ ID NO: 2871926 - RNA, 15 nt, Human
cugguauggcugcag

SEQ ID NO: 2871927 - RNA, 16 nt, Human
cugguauggcugcagu

SEQ ID NO: 2871928 - RNA, 17 nt, Human
cugguauggcugcaguc

SEQ ID NO: 2871929 - RNA, 18 nt, Human
cugguauggcugcagucc

SEQ ID NO: 2871930 - RNA, 23 nt, Human
cugguuaauauuuauaggucacu

SEQ ID NO: 2871931 - RNA, 13 nt, Human
cugguuagcagag

SEQ ID NO: 2871932 - RNA, 23 nt, Human
cugguuagaaaugcagaauccua

SEQ ID NO: 2871933 - RNA, 14 nt, Human
cugguuagaaaugc

SEQ ID NO: 2871934 - RNA, 14 nt, Human
cuguaaucccagcu

SEQ ID NO: 2871935 - RNA, 13 nt, Human
cuguaaucccagc

SEQ ID NO: 2871936 - RNA, 17 nt, Human
cuguaaucccagcacuu

SEQ ID NO: 2871937 - RNA, 18 nt, Human
cuguaaucccagcacacu

SEQ ID NO: 2871938 - RNA, 22 nt, Human
cuguaaucccagcuacucggga

SEQ ID NO: 2871939 - RNA, 19 nt, Human
cuguaaucccagcuacucg

SEQ ID NO: 2871940 - RNA, 14 nt, Human
cuguaauucagugu

SEQ ID NO: 2871941 - RNA, 23 nt, Human
cuguaauucaguguauuucaguu

SEQ ID NO: 2871942 - RNA, 18 nt, Human
cuguacgucugacaggca

SEQ ID NO: 2871943 - RNA, 16 nt, Human
cuguacgucugacagg

SEQ ID NO: 2871944 - RNA, 15 nt, Human
cuguacgucugacag

SEQ ID NO: 2871945 - RNA, 14 nt, Human
cuguacgucugaca

SEQ ID NO: 2871946 - RNA, 13 nt, Human
cuguaauuuaguu

SEQ ID NO: 2871947 - RNA, 16 nt, Human
cuguaauuuaguuauu

SEQ ID NO: 2871948 - RNA, 19 nt, Human
cuguaauuuaguuauugau

SEQ ID NO: 2871949 - RNA, 15 nt, Human
cuguacauauguaaa

SEQ ID NO: 2871950 - RNA, 16 nt, Human
cuguacauauguaaac

SEQ ID NO: 2871951 - RNA, 20 nt, Human
cuguacgucugacaggcaau

SEQ ID NO: 2871952 - RNA, 19 nt, Human
cuguacgucugacaggcaa

SEQ ID NO: 2871953 - RNA, 22 nt, Human
cuguacuaaaguaacgcaauaa

SEQ ID NO: 2871954 - RNA, 17 nt, Human
cuguacuaauucuuaca

SEQ ID NO: 2871955 - RNA, 23 nt, Human
cuguaccuuuugaggagccccag

SEQ ID NO: 2871956 - RNA, 20 nt, Human
cuguacauauuugagacuag

SEQ ID NO: 2871957 - RNA, 14 nt, Human
cuguacaucuauuu

SEQ ID NO: 2871958 - RNA, 13 nt, Human
cuguacucaggag

SEQ ID NO: 2871959 - RNA, 14 nt, Human
cuguacuccuccca

SEQ ID NO: 2871960 - RNA, 22 nt, Human
cuguaguuaggaaauaaaaccu

SEQ ID NO: 2871961 - RNA, 21 nt, Human
cuguaguuaggaaauaaaacc

SEQ ID NO: 2871962 - RNA, 20 nt, Human
cuguacucaggaggcugagg

SEQ ID NO: 2871963 - RNA, 20 nt, Human
cuguaguugcguggacucug

SEQ ID NO: 2871964 - RNA, 19 nt, Human
cuguaguucuaagacucaa

SEQ ID NO: 2871965 - RNA, 13 nt, Human
cuguaguucuaag

SEQ ID NO: 2871966 - RNA, 14 nt, Human
cuguaguucuaaga

SEQ ID NO: 2871967 - RNA, 16 nt, Human
cuguaguucuaagacu

SEQ ID NO: 2871968 - RNA, 15 nt, Human
cuguacuccucccag

SEQ ID NO: 2871969 - RNA, 16 nt, Human
cuguacuccucccagg

SEQ ID NO: 2871970 - RNA, 19 nt, Human
cuguacuccucccaggcgc

SEQ ID NO: 2871971 - RNA, 21 nt, Human
cuguacuccucccaggcgccc

SEQ ID NO: 2871972 - RNA, 19 nt, Human
cuguaucccaugagccuca

SEQ ID NO: 2871973 - RNA, 14 nt, Human
cuguauaaauagga

SEQ ID NO: 2871974 - RNA, 15 nt, Human
cuguauaaauaggag

SEQ ID NO: 2871975 - RNA, 16 nt, Human
cuguauaaauaggaga

SEQ ID NO: 2871976 - RNA, 19 nt, Human
cuguauaaauaggagagga

SEQ ID NO: 2871977 - RNA, 20 nt, Human
cuguaucccaugagccucag

SEQ ID NO: 2871978 - RNA, 13 nt, Human
cuguauaaauagg

SEQ ID NO: 2871979 - RNA, 18 nt, Human
cuguauaaacauuaaaug

SEQ ID NO: 2871980 - RNA, 19 nt, Human
cuguauaaacauuaaaugu

SEQ ID NO: 2871981 - RNA, 20 nt, Human
cuguauaaacauuaaauguc

SEQ ID NO: 2871982 - RNA, 21 nt, Human
cuguauaaacauuaaaugucu

SEQ ID NO: 2871983 - RNA, 17 nt, Human
cuguaguuuuauuuuau

SEQ ID NO: 2871984 - RNA, 18 nt, Human
cuguaguuuuauuuuaug

SEQ ID NO: 2871985 - RNA, 20 nt, Human
cuguaguuuuauuuuauguu

SEQ ID NO: 2871986 - RNA, 22 nt, Human
cuguaguuuuauuuuauguuua

SEQ ID NO: 2871987 - RNA, 24 nt, Human
cuguaguuuuauuuuauguuuaga

SEQ ID NO: 2871988 - RNA, 22 nt, Human
cuguaucccaugagccucagca

SEQ ID NO: 2871989 - RNA, 21 nt, Human
cuguaucccaugagccucagc

SEQ ID NO: 2871990 - RNA, 17 nt, Human
cuguauuagucacagag

SEQ ID NO: 2871991 - RNA, 19 nt, Human
cuguauuagucacagagau

SEQ ID NO: 2871992 - RNA, 18 nt, Human
cuguauuuuuaaagcaug

SEQ ID NO: 2871993 - RNA, 20 nt, Human
cuguauuuuuucuugcauug

SEQ ID NO: 2871994 - RNA, 21 nt, Human
cuguauuuuuucuugcauuga

SEQ ID NO: 2871995 - RNA, 22 nt, Human
cuguauuuuuucuugcauugac

SEQ ID NO: 2871996 - RNA, 23 nt, Human
cuguauuuuuucuugcauugaca

SEQ ID NO: 2871997 - RNA, 14 nt, Human
cuguauuuaagcaa

SEQ ID NO: 2871998 - RNA, 15 nt, Human
cuguauuuaagcaaa

SEQ ID NO: 2871999 - RNA, 16 nt, Human
cuguauuuaagcaaau

SEQ ID NO: 2872000 - RNA, 17 nt, Human
cuguauuuaagcaaaua

SEQ ID NO: 2872001 - RNA, 21 nt, Human
cuguauugugcugauugugga

SEQ ID NO: 2872002 - RNA, 19 nt, Human
cugucaaaacaaguuuuuc

SEQ ID NO: 2872003 - RNA, 21 nt, Human
cugucaaaacaaguuuuucug

SEQ ID NO: 2872004 - RNA, 14 nt, Human
cugucaaaacacug

SEQ ID NO: 2872005 - RNA, 15 nt, Human
cugucaaaacacugu

SEQ ID NO: 2872006 - RNA, 16 nt, Human
cugucaaaacacugug

SEQ ID NO: 2872007 - RNA, 17 nt, Human
cugucaaaacacugugg

SEQ ID NO: 2872008 - RNA, 18 nt, Human
cugucaaaacacugugga

SEQ ID NO: 2872009 - RNA, 19 nt, Human
cugucaaaacacuguggaa

SEQ ID NO: 2872010 - RNA, 20 nt, Human
cugucaaaacacuguggaac

SEQ ID NO: 2872011 - RNA, 21 nt, Human
cugucaaaaguuggacuaaau

SEQ ID NO: 2872012 - RNA, 18 nt, Human
gaacggugaaggugacag

SEQ ID NO: 2872013 - RNA, 13 nt, Human
gaacguaaagaac

SEQ ID NO: 2872014 - RNA, 16 nt, Human
gaacgggguccuucaa

SEQ ID NO: 2872015 - RNA, 22 nt, Human
gaacuauuggagggugggagag

SEQ ID NO: 2872016 - RNA, 15 nt, Human
gaacuauuggagggu

SEQ ID NO: 2872017 - RNA, 21 nt, Human
gaacuauggacggugcuccag

SEQ ID NO: 2872018 - RNA, 17 nt, Human
gaacuauggacggugcu

SEQ ID NO: 2872019 - RNA, 18 nt, Human
gaacuagcauauagccau

SEQ ID NO: 2872020 - RNA, 21 nt, Human
gaacuagcauauagccauuga

SEQ ID NO: 2872021 - RNA, 15 nt, Human
gaacuauaaagaagu

SEQ ID NO: 2872022 - RNA, 19 nt, Human
gaacuauaacaccugccac

SEQ ID NO: 2872023 - RNA, 16 nt, Human
gaacuagggaagcuca

SEQ ID NO: 2872024 - RNA, 23 nt, Human
gaacggagccccaggccucugug

SEQ ID NO: 2872025 - RNA, 22 nt, Human
gaacggagccccaggccucugu

SEQ ID NO: 2872026 - RNA, 21 nt, Human
gaaccuucuggccucccacag

SEQ ID NO: 2872027 - RNA, 13 nt, Human
gaaccuugcuguc

SEQ ID NO: 2872028 - RNA, 14 nt, Human
gaaccuugcugucc

SEQ ID NO: 2872029 - RNA, 15 nt, Human
gaaccuugcuguccu

SEQ ID NO: 2872030 - RNA, 16 nt, Human
gaaccuugcuguccug

SEQ ID NO: 2872031 - RNA, 17 nt, Human
gaaccuugcuguccuga

SEQ ID NO: 2872032 - RNA, 18 nt, Human
gaaccuucuggccuccca

SEQ ID NO: 2872033 - RNA, 19 nt, Human
gaaccuuccuuccugcuug

SEQ ID NO: 2872034 - RNA, 15 nt, Human
gaaccuuccuuccug

SEQ ID NO: 2872035 - RNA, 12 nt, Human
gaaccugugagu

SEQ ID NO: 2872036 - RNA, 17 nt, Human
gaaccugugaguaaaua

SEQ ID NO: 2872037 - RNA, 22 nt, Human
gaaccugugaguaaauauugag

SEQ ID NO: 2872038 - RNA, 16 nt, Human
gaaccuguccuaagga

SEQ ID NO: 2872039 - RNA, 12 nt, Human
gaacagaaggau

SEQ ID NO: 2872040 - RNA, 22 nt, Human
gaacacuuauaagugaagugau

SEQ ID NO: 2872041 - RNA, 12 nt, Human
gaacagaauguu

SEQ ID NO: 2872042 - RNA, 14 nt, Human
gaacagaauguuuu

SEQ ID NO: 2872043 - RNA, 15 nt, Human
gaacagaauguuuua

SEQ ID NO: 2872044 - RNA, 19 nt, Human
gaacagaaggaugaaugag

SEQ ID NO: 2872045 - RNA, 14 nt, Human
gaacagaaggauga

SEQ ID NO: 2872046 - RNA, 19 nt, Human
gaacagacaacagaaguca

SEQ ID NO: 2872047 - RNA, 18 nt, Human
gaacagacaacagaaguc

SEQ ID NO: 2872048 - RNA, 17 nt, Human
gaacagacaacagaagu

SEQ ID NO: 2872049 - RNA, 21 nt, Human
gaaccacaucuugcucugcug

SEQ ID NO: 2872050 - RNA, 20 nt, Human
gaaccacaucuugcucugcu

SEQ ID NO: 2872051 - RNA, 16 nt, Human
gaacagacuggaagca

SEQ ID NO: 2872052 - RNA, 15 nt, Human
gaacagacuggaagc

SEQ ID NO: 2872053 - RNA, 17 nt, Human
gaaccaccacacccagc

SEQ ID NO: 2872054 - RNA, 16 nt, Human
gaaccaccacacccag

SEQ ID NO: 2872055 - RNA, 12 nt, Human
gaaccguugcca

SEQ ID NO: 2872056 - RNA, 16 nt, Human
gaaccgcucaccuaga

SEQ ID NO: 2872057 - RNA, 17 nt, Human
gaaccgcucaccuagag

SEQ ID NO: 2872058 - RNA, 18 nt, Human
gaaccgcucaccuagagc

SEQ ID NO: 2872059 - RNA, 20 nt, Human
gaaccgcucaccuagagcca

SEQ ID NO: 2872060 - RNA, 22 nt, Human
gaaccgcucaccuagagccaga

SEQ ID NO: 2872061 - RNA, 19 nt, Human
gaacagaccggagaggaca

SEQ ID NO: 2872062 - RNA, 12 nt, Human
gaaccuaacugu

SEQ ID NO: 2872063 - RNA, 14 nt, Human
gaaccuaacuguau

SEQ ID NO: 2872064 - RNA, 16 nt, Human
gaaccuaacuguaucu

SEQ ID NO: 2872065 - RNA, 17 nt, Human
gaaccuaacuguaucuu

SEQ ID NO: 2872066 - RNA, 20 nt, Human
gaaccuaacuguaucuugag

SEQ ID NO: 2872067 - RNA, 14 nt, Human
gaaccuaauacccu

SEQ ID NO: 2872068 - RNA, 18 nt, Human
gaaccguuuugaagcuac

SEQ ID NO: 2872069 - RNA, 17 nt, Human
gaaccguuuugaagcua

SEQ ID NO: 2872070 - RNA, 19 nt, Human
gaaccguuuugaagcuacu

SEQ ID NO: 2872071 - RNA, 11 nt, Human
gaaccugaccc

SEQ ID NO: 2872072 - RNA, 17 nt, Human
gaaccucuuccccagaa

SEQ ID NO: 2872073 - RNA, 12 nt, Human
gaaccugacccc

SEQ ID NO: 2872074 - RNA, 16 nt, Human
gaaccugcaaaaaaua

SEQ ID NO: 2872075 - RNA, 19 nt, Human
gaacucaaacuucuggcuc

SEQ ID NO: 2872076 - RNA, 22 nt, Human
gaacuggguacuuguggacaca

SEQ ID NO: 2872077 - RNA, 17 nt, Human
gaacugggccuguugcc

SEQ ID NO: 2872078 - RNA, 12 nt, Human
gaacuggguaaa

SEQ ID NO: 2872079 - RNA, 16 nt, Human
gaacuggguaaaugca

SEQ ID NO: 2872080 - RNA, 19 nt, Human
gaacuggguaaaugcaaag

SEQ ID NO: 2872081 - RNA, 18 nt, Human
gaacuguagaugauguau

SEQ ID NO: 2872082 - RNA, 13 nt, Human
gaacuguccagag

SEQ ID NO: 2872083 - RNA, 22 nt, Human
gaacuguccagagagcaacucu

SEQ ID NO: 2872084 - RNA, 18 nt, Human
gaacugucggaggaaaga

SEQ ID NO: 2872085 - RNA, 20 nt, Human
gaacugucggaggaaagaca

SEQ ID NO: 2872086 - RNA, 14 nt, Human
gaacuguccagaga

SEQ ID NO: 2872087 - RNA, 15 nt, Human
gaacuguccagagag

SEQ ID NO: 2872088 - RNA, 16 nt, Human
gaacuguccagagagc

SEQ ID NO: 2872089 - RNA, 17 nt, Human
gaacuguccagagagca

SEQ ID NO: 2872090 - RNA, 15 nt, Human
gaacuuauucuguag

SEQ ID NO: 2872091 - RNA, 15 nt, Human
gaacuucaccugcaa

SEQ ID NO: 2872092 - RNA, 17 nt, Human
gaacuucaccugcaaag

SEQ ID NO: 2872093 - RNA, 19 nt, Human
gaacuucaccugcaaagcu

SEQ ID NO: 2872094 - RNA, 20 nt, Human
gaacuucaccugcaaagcuc

SEQ ID NO: 2872095 - RNA, 18 nt, Human
gaacugugcauagugcug

SEQ ID NO: 2872096 - RNA, 19 nt, Human
gaacugugcauagugcugg

SEQ ID NO: 2872097 - RNA, 22 nt, Human
gaacugugcauagugcugggau

SEQ ID NO: 2872098 - RNA, 15 nt, Human
gaacuuacuauucau

SEQ ID NO: 2872099 - RNA, 21 nt, Human
gaacuuacuauucauuaaaug

SEQ ID NO: 2872100 - RNA, 18 nt, Human
gaacuguccagagagcaa

SEQ ID NO: 2872101 - RNA, 20 nt, Human
gaacuuauccuaaaacaaau

SEQ ID NO: 2872102 - RNA, 17 nt, Human
gaacuugaaugugucag

SEQ ID NO: 2872103 - RNA, 23 nt, Human
gaacuuccagguguuacuguaau

SEQ ID NO: 2872104 - RNA, 12 nt, Human
gaacuugcaugg

SEQ ID NO: 2872105 - RNA, 21 nt, Human
gaacuugcagcugauguugga

SEQ ID NO: 2872106 - RNA, 19 nt, Human
gaacuuggaaagaaaugcc

SEQ ID NO: 2872107 - RNA, 13 nt, Human
gaagaagaugcuc

SEQ ID NO: 2872108 - RNA, 15 nt, Human
gaagaagagccacag

SEQ ID NO: 2872109 - RNA, 14 nt, Human
gaagaagagccaca

SEQ ID NO: 2872110 - RNA, 16 nt, Human
gaagaacuugcaugga

SEQ ID NO: 2872111 - RNA, 9 nt, Human
gaagaagaa

SEQ ID NO: 2872112 - RNA, 13 nt, Human
gaagaagaaaaaa

SEQ ID NO: 2872113 - RNA, 14 nt, Human
gaagaagaaaaaaa

SEQ ID NO: 2872114 - RNA, 16 nt, Human
gaagaagaaaaaaacg

SEQ ID NO: 2872115 - RNA, 12 nt, Human
gaagaagaaaag

SEQ ID NO: 2872116 - RNA, 14 nt, Human
gaagaagaaaagag

SEQ ID NO: 2872117 - RNA, 15 nt, Human
gaagaagaaaagaga

SEQ ID NO: 2872118 - RNA, 13 nt, Human
gaagaagaagaaa

SEQ ID NO: 2872119 - RNA, 14 nt, Human
gaagaagaagaaaa

SEQ ID NO: 2872120 - RNA, 15 nt, Human
gaagaagaagaaaag

SEQ ID NO: 2872121 - RNA, 15 nt, Human
gaagaagaagaagaa

SEQ ID NO: 2872122 - RNA, 16 nt, Human
gaagaagagaagcugc

SEQ ID NO: 2872123 - RNA, 17 nt, Human
gaagaagagaagcugcu

SEQ ID NO: 2872124 - RNA, 19 nt, Human
gaagaagagaagcugcuga

SEQ ID NO: 2872125 - RNA, 17 nt, Human
gaagaaacacuuucucu

SEQ ID NO: 2872126 - RNA, 18 nt, Human
gaagaaacacuuucucuu

SEQ ID NO: 2872127 - RNA, 14 nt, Human
gaagaaacagaaga

SEQ ID NO: 2872128 - RNA, 15 nt, Human
gaacuuggaggcacc

SEQ ID NO: 2872129 - RNA, 17 nt, Human
gaacuuggaggcaccau

SEQ ID NO: 2872130 - RNA, 9 nt, Human
gaagaaaag

SEQ ID NO: 2872131 - RNA, 11 nt, Human
gaagaaaagag

SEQ ID NO: 2872132 - RNA, 17 nt, Human
gaagaaaagagaagaag

SEQ ID NO: 2872133 - RNA, 19 nt, Human
gaagaaaagagaagaagaa

SEQ ID NO: 2872134 - RNA, 16 nt, Human
gaagaaaaugguuuau

SEQ ID NO: 2872135 - RNA, 16 nt, Human
gaaauauugcuggggu

SEQ ID NO: 2872136 - RNA, 14 nt, Human
gaaauauugcugua

SEQ ID NO: 2872137 - RNA, 18 nt, Human
gaaauauugcuguauagc

SEQ ID NO: 2872138 - RNA, 16 nt, Human
gaaauggauacuacau

SEQ ID NO: 2872139 - RNA, 21 nt, Human
gaaauggauacuacaucuuua

SEQ ID NO: 2872140 - RNA, 17 nt, Human
gaaauggaugcaaagua

SEQ ID NO: 2872141 - RNA, 20 nt, Human
gaaauggacugguuugagau

SEQ ID NO: 2872142 - RNA, 21 nt, Human
gaaauguuaaagguucacagg

SEQ ID NO: 2872143 - RNA, 14 nt, Human
gaaauguaaacugc

SEQ ID NO: 2872144 - RNA, 16 nt, Human
gaaauguaaacugcca

SEQ ID NO: 2872145 - RNA, 16 nt, Human
gaaauucuaaagagca

SEQ ID NO: 2872146 - RNA, 17 nt, Human
gaaauuacacccaaaga

SEQ ID NO: 2872147 - RNA, 20 nt, Human
gaaauuaaaacuauucaugc

SEQ ID NO: 2872148 - RNA, 13 nt, Human
gaaauuaaaguuu

SEQ ID NO: 2872149 - RNA, 22 nt, Human
gaaauuaagaaggcaaaaaugu

SEQ ID NO: 2872150 - RNA, 18 nt, Human
gaaauuaagaaggcaaaa

SEQ ID NO: 2872151 - RNA, 17 nt, Human
gaaauuaagaaggcaaa

SEQ ID NO: 2872152 - RNA, 14 nt, Human
gaaauuggcuggau

SEQ ID NO: 2872153 - RNA, 15 nt, Human
gaaauuggcuggaug

SEQ ID NO: 2872154 - RNA, 17 nt, Human
gaaauuggaacagaaug

SEQ ID NO: 2872155 - RNA, 22 nt, Human
gaaauuggaacagaauguuuua

SEQ ID NO: 2872156 - RNA, 20 nt, Human
gaaauugccuauccugcugu

SEQ ID NO: 2872157 - RNA, 21 nt, Human
gaaauugccuauccugcuguu

SEQ ID NO: 2872158 - RNA, 19 nt, Human
gaaauugcauuuccugaca

SEQ ID NO: 2872159 - RNA, 21 nt, Human
gaaauugacacaaguggaccu

SEQ ID NO: 2872160 - RNA, 11 nt, Human
gaaauucuguu

SEQ ID NO: 2872161 - RNA, 15 nt, Human
gaaauucuguuaaaa

SEQ ID NO: 2872162 - RNA, 18 nt, Human
gaaauucuguuaaaaucu

SEQ ID NO: 2872163 - RNA, 24 nt, Human
gaaauucuguuaaaaucuauucug

SEQ ID NO: 2872164 - RNA, 16 nt, Human
gaaauucuuucagcua

SEQ ID NO: 2872165 - RNA, 18 nt, Human
gaaauuuucuagacuuuc

SEQ ID NO: 2872166 - RNA, 20 nt, Human
gaaauuuucuagacuuucug

SEQ ID NO: 2872167 - RNA, 21 nt, Human
gaaauuugauuucuauucaag

SEQ ID NO: 2872168 - RNA, 21 nt, Human
gaaauuuucuagacuuucugu

SEQ ID NO: 2872169 - RNA, 16 nt, Human
gaaauuuucuugauuu

SEQ ID NO: 2872170 - RNA, 20 nt, Human
gaaauuuucuugauuugagu

SEQ ID NO: 2872171 - RNA, 13 nt, Human
gaaauuuugcaaa

SEQ ID NO: 2872172 - RNA, 15 nt, Human
gaaauuuugcaaaua

SEQ ID NO: 2872173 - RNA, 16 nt, Human
gaaauuuugcaaauau

SEQ ID NO: 2872174 - RNA, 17 nt, Human
gaaauuuugcaaauaua

SEQ ID NO: 2872175 - RNA, 19 nt, Human
gaaauuuugcaaauauaaa

SEQ ID NO: 2872176 - RNA, 21 nt, Human
gaaauuuugcaaauauaaaca

SEQ ID NO: 2872177 - RNA, 22 nt, Human
gaaauuuugcaaauauaaacau

SEQ ID NO: 2872178 - RNA, 21 nt, Human
gaacacugcccucgcacggcc

SEQ ID NO: 2872179 - RNA, 19 nt, Human
gaacacuggcagacugugu

SEQ ID NO: 2872180 - RNA, 22 nt, Human
gaacacuggcagacuguguaaa

SEQ ID NO: 2872181 - RNA, 13 nt, Human
gaaauuuacuaua

SEQ ID NO: 2872182 - RNA, 15 nt, Human
gaaauuugauuucua

SEQ ID NO: 2872183 - RNA, 14 nt, Human
gaaauuugauuucu

SEQ ID NO: 2872184 - RNA, 21 nt, Human
gaaauugucuagcagagcagg

SEQ ID NO: 2872185 - RNA, 13 nt, Human
gaaauugugaacu

SEQ ID NO: 2872186 - RNA, 18 nt, Human
gaaauugugaacucauug

SEQ ID NO: 2872187 - RNA, 20 nt, Human
gaaauugucuagcagagcag

SEQ ID NO: 2872188 - RNA, 15 nt, Human
gaaauuuaaacauua

SEQ ID NO: 2872189 - RNA, 14 nt, Human
gaaacauuuauauu

SEQ ID NO: 2872190 - RNA, 19 nt, Human
gaaacauuuauauuuuuau

SEQ ID NO: 2872191 - RNA, 12 nt, Human
gaaacauuuaua

SEQ ID NO: 2872192 - RNA, 19 nt, Human
gaaauaaaguuaaguuugu

SEQ ID NO: 2872193 - RNA, 17 nt, Human
gaaauaaaguuugcuua

SEQ ID NO: 2872194 - RNA, 13 nt, Human
gaaacaugacacu

SEQ ID NO: 2872195 - RNA, 16 nt, Human
gaaacaugacacugac

SEQ ID NO: 2872196 - RNA, 17 nt, Human
gaaacaugacacugacc

SEQ ID NO: 2872197 - RNA, 20 nt, Human
gaaacaugacucguauaugu

SEQ ID NO: 2872198 - RNA, 15 nt, Human
gaaauaauaugcauu

SEQ ID NO: 2872199 - RNA, 18 nt, Human
gaaauaauagaaugagca

SEQ ID NO: 2872200 - RNA, 19 nt, Human
gaaauaauguacaucuggc

SEQ ID NO: 2872201 - RNA, 13 nt, Human
gaaauaauaauau

SEQ ID NO: 2872202 - RNA, 16 nt, Human
gaaauaauaauaucca

SEQ ID NO: 2872203 - RNA, 13 nt, Human
gaaauaauaugca

SEQ ID NO: 2872204 - RNA, 14 nt, Human
gaaauaauaugcau

SEQ ID NO: 2872205 - RNA, 15 nt, Human
gaaauaacaauguua

SEQ ID NO: 2872206 - RNA, 16 nt, Human
gaaauaacaauguuaa

SEQ ID NO: 2872207 - RNA, 17 nt, Human
gaaauaacaauguuaag

SEQ ID NO: 2872208 - RNA, 18 nt, Human
gaaauaacaauguuaagg

SEQ ID NO: 2872209 - RNA, 20 nt, Human
gaaauaacaauguuaaggaa

SEQ ID NO: 2872210 - RNA, 21 nt, Human
gaaauaaauguaucauagaaa

SEQ ID NO: 2872211 - RNA, 15 nt, Human
gaaauaacaaaaugg

SEQ ID NO: 2872212 - RNA, 16 nt, Human
gaaauaacaaaaugga

SEQ ID NO: 2872213 - RNA, 17 nt, Human
gaaauaacaaaauggac

SEQ ID NO: 2872214 - RNA, 18 nt, Human
gaaauaacaaaauggaca

SEQ ID NO: 2872215 - RNA, 19 nt, Human
gaaauaacaaaauggacau

SEQ ID NO: 2872216 - RNA, 13 nt, Human
gaaauaugcaucu

SEQ ID NO: 2872217 - RNA, 14 nt, Human
gaaauaugcucuuu

SEQ ID NO: 2872218 - RNA, 18 nt, Human
gaaauaugcucuuuuguu

SEQ ID NO: 2872219 - RNA, 13 nt, Human
gaaauaugugaga

SEQ ID NO: 2872220 - RNA, 14 nt, Human
gaaauaugugagau

SEQ ID NO: 2872221 - RNA, 15 nt, Human
gaaauaugugagauu

SEQ ID NO: 2872222 - RNA, 21 nt, Human
gaaauaugugagauuuuuuau

SEQ ID NO: 2872223 - RNA, 15 nt, Human
gaaauagucugugug

SEQ ID NO: 2872224 - RNA, 17 nt, Human
gaaauagucugugugaa

SEQ ID NO: 2872225 - RNA, 14 nt, Human
gaaauauaauaaaa

SEQ ID NO: 2872226 - RNA, 15 nt, Human
gaaauauaauaaaau

SEQ ID NO: 2872227 - RNA, 20 nt, Human
gaaauauaauaaaauguguu

SEQ ID NO: 2872228 - RNA, 14 nt, Human
gaaauaggaaacaa

SEQ ID NO: 2872229 - RNA, 15 nt, Human
gaaauaggaaacaag

SEQ ID NO: 2872230 - RNA, 18 nt, Human
gaaauaggaaacaaguga

SEQ ID NO: 2872231 - RNA, 15 nt, Human
gaaauagguuagagu

SEQ ID NO: 2872232 - RNA, 14 nt, Human
gaaauacuauuuaa

SEQ ID NO: 2872233 - RNA, 15 nt, Human
gaaauacuauuuaaa

SEQ ID NO: 2872234 - RNA, 21 nt, Human
gaaauacaauucuacauuguc

SEQ ID NO: 2872235 - RNA, 14 nt, Human
gaaauacccuucuu

SEQ ID NO: 2872236 - RNA, 21 nt, Human
gaaauacccuucuuuuaugag

SEQ ID NO: 2872237 - RNA, 22 nt, Human
gaaauacccuucuuuuaugagc

SEQ ID NO: 2872238 - RNA, 11 nt, Human
gaaauaccuca

SEQ ID NO: 2872239 - RNA, 12 nt, Human
gaaauaccucau

SEQ ID NO: 2872240 - RNA, 16 nt, Human
gaaauaccucauguuu

SEQ ID NO: 2872241 - RNA, 17 nt, Human
gaaauaccucauguuua

SEQ ID NO: 2872242 - RNA, 21 nt, Human
gaaauaccucauguuuaugaa

SEQ ID NO: 2872243 - RNA, 23 nt, Human
gaaauaccucauguuuaugaaaa

SEQ ID NO: 2872244 - RNA, 14 nt, Human
gaagccucuggcua

SEQ ID NO: 2872245 - RNA, 13 nt, Human
gaagccucuggcu

SEQ ID NO: 2872246 - RNA, 17 nt, Human
gaagccucuggcuagag

SEQ ID NO: 2872247 - RNA, 22 nt, Human
gaagccuugccuaaauuuaaug

SEQ ID NO: 2872248 - RNA, 11 nt, Human
gaagccuuugu

SEQ ID NO: 2872249 - RNA, 10 nt, Human
gaagccuuug

SEQ ID NO: 2872250 - RNA, 19 nt, Human
gaagcuuuguccccugcuu

SEQ ID NO: 2872251 - RNA, 20 nt, Human
gaagcuuuguccccugcuuc

SEQ ID NO: 2872252 - RNA, 21 nt, Human
gaagcuuuguccccugcuuca

SEQ ID NO: 2872253 - RNA, 14 nt, Human
gaagcuuucugucu

SEQ ID NO: 2872254 - RNA, 22 nt, Human
gaagcgcgccacucgcuucccc

SEQ ID NO: 2872255 - RNA, 14 nt, Human
gaagcggauuucca

SEQ ID NO: 2872256 - RNA, 16 nt, Human
gaagcggauuuccagg

SEQ ID NO: 2872257 - RNA, 15 nt, Human
gaagcuugacuccca

SEQ ID NO: 2872258 - RNA, 20 nt, Human
gaagcggcccuaagggagug

SEQ ID NO: 2872259 - RNA, 16 nt, Human
gaagccgggaacagac

SEQ ID NO: 2872260 - RNA, 12 nt, Human
gaagccucuggc

SEQ ID NO: 2872261 - RNA, 17 nt, Human
gaagccucagcuaccca

SEQ ID NO: 2872262 - RNA, 20 nt, Human
gaagccagccuucuuccauc

SEQ ID NO: 2872263 - RNA, 10 nt, Human
gaagccagcu

SEQ ID NO: 2872264 - RNA, 12 nt, Human
gaagccagccuu

SEQ ID NO: 2872265 - RNA, 16 nt, Human
gaagcccaagugaaau

SEQ ID NO: 2872266 - RNA, 15 nt, Human
gaagcccaagugaaa

SEQ ID NO: 2872267 - RNA, 18 nt, Human
gaagccacugaagcuggg

SEQ ID NO: 2872268 - RNA, 15 nt, Human
gaagccacugaagcu

SEQ ID NO: 2872269 - RNA, 21 nt, Human
gaagacucauucuucuguacg

SEQ ID NO: 2872270 - RNA, 19 nt, Human
gaagacucauucuucugua

SEQ ID NO: 2872271 - RNA, 13 nt, Human
gaagaagcagaga

SEQ ID NO: 2872272 - RNA, 14 nt, Human
gaagaagcagagag

SEQ ID NO: 2872273 - RNA, 15 nt, Human
gaagaagcagagaga

SEQ ID NO: 2872274 - RNA, 16 nt, Human
gaaggagagccugcug

SEQ ID NO: 2872275 - RNA, 15 nt, Human
gaaggagagccugcu

SEQ ID NO: 2872276 - RNA, 13 nt, Human
gaaggagagccug

SEQ ID NO: 2872277 - RNA, 20 nt, Human
gaaggagagaaaguggguga

SEQ ID NO: 2872278 - RNA, 21 nt, Human
gaaggagagaaagugggugag

SEQ ID NO: 2872279 - RNA, 12 nt, Human
gaaggagagaaa

SEQ ID NO: 2872280 - RNA, 13 nt, Human
gaaggagagaaag

SEQ ID NO: 2872281 - RNA, 16 nt, Human
gaaggagagaaagugg

SEQ ID NO: 2872282 - RNA, 14 nt, Human
gaaggaaaaugaua

SEQ ID NO: 2872283 - RNA, 23 nt, Human
gaaggacccggaggggccuggca

SEQ ID NO: 2872284 - RNA, 13 nt, Human
gaaggagacacag

SEQ ID NO: 2872285 - RNA, 14 nt, Human
gaaggagacacaga

SEQ ID NO: 2872286 - RNA, 15 nt, Human
gaaggagacacagau

SEQ ID NO: 2872287 - RNA, 16 nt, Human
gaaggagacacagaug

SEQ ID NO: 2872288 - RNA, 17 nt, Human
gaaggagacacagaugu

SEQ ID NO: 2872289 - RNA, 19 nt, Human
gaagccuuuacugacccug

SEQ ID NO: 2872290 - RNA, 20 nt, Human
gaaggacggguuggggccgg

SEQ ID NO: 2872291 - RNA, 17 nt, Human
gaagggguuggauugca

SEQ ID NO: 2872292 - RNA, 20 nt, Human
gaaggguuuuccacccugga

SEQ ID NO: 2872293 - RNA, 21 nt, Human
gaaggguuuguggcugggggc

SEQ ID NO: 2872294 - RNA, 15 nt, Human
gaaggguuuguggcu

SEQ ID NO: 2872295 - RNA, 17 nt, Human
gaagggugguggagcca

SEQ ID NO: 2872296 - RNA, 19 nt, Human
gaagguucauguagagaaa

SEQ ID NO: 2872297 - RNA, 20 nt, Human
gaagguacugucaugggcua

SEQ ID NO: 2872298 - RNA, 13 nt, Human
gaaggcaaugcca

SEQ ID NO: 2872299 - RNA, 16 nt, Human
gaaggcagccaccagc

SEQ ID NO: 2872300 - RNA, 15 nt, Human
gaaggcagagaaagg

SEQ ID NO: 2872301 - RNA, 17 nt, Human
gaaggcagagaaaggga

SEQ ID NO: 2872302 - RNA, 22 nt, Human
gaaggcagagaaagggacaaug

SEQ ID NO: 2872303 - RNA, 13 nt, Human
gaaggcagacagc

SEQ ID NO: 2872304 - RNA, 14 nt, Human
gaaggcagacagca

SEQ ID NO: 2872305 - RNA, 15 nt, Human
gaaggcagacagcag

SEQ ID NO: 2872306 - RNA, 16 nt, Human
gaaggcagacagcagg

SEQ ID NO: 2872307 - RNA, 19 nt, Human
gaaggcagacagcaggcag

SEQ ID NO: 2872308 - RNA, 20 nt, Human
gaaggcagacagcaggcagc

SEQ ID NO: 2872309 - RNA, 21 nt, Human
gaaggcagacagcaggcagcg

SEQ ID NO: 2872310 - RNA, 13 nt, Human
gaaggcagggagg

SEQ ID NO: 2872311 - RNA, 14 nt, Human
gaaggcagggaggg

SEQ ID NO: 2872312 - RNA, 22 nt, Human
gaauaaucuuuggguaacuuca

SEQ ID NO: 2872313 - RNA, 13 nt, Human
gaauaaugggcuu

SEQ ID NO: 2872314 - RNA, 14 nt, Human
gaaguaaacugcag

SEQ ID NO: 2872315 - RNA, 20 nt, Human
gaauaauuauuuauuuaaua

SEQ ID NO: 2872316 - RNA, 21 nt, Human
gaauaauugcuuuuucacagu

SEQ ID NO: 2872317 - RNA, 13 nt, Human
gaauaauuauuua

SEQ ID NO: 2872318 - RNA, 18 nt, Human
gaauaauuauuuauuuaa

SEQ ID NO: 2872319 - RNA, 14 nt, Human
gaauaauguaaaau

SEQ ID NO: 2872320 - RNA, 22 nt, Human
gaauaauguaaaauguugaaua

SEQ ID NO: 2872321 - RNA, 23 nt, Human
gaauagaaauaaaggaugugauu

SEQ ID NO: 2872322 - RNA, 16 nt, Human
gaauagaagcaaauua

SEQ ID NO: 2872323 - RNA, 20 nt, Human
gaauacuuuuuacaauuaaa

SEQ ID NO: 2872324 - RNA, 12 nt, Human
gaauagaaagaa

SEQ ID NO: 2872325 - RNA, 13 nt, Human
gaauagaaagaaa

SEQ ID NO: 2872326 - RNA, 15 nt, Human
gaauagaaagaaagu

SEQ ID NO: 2872327 - RNA, 16 nt, Human
gaauagaaagaaaguc

SEQ ID NO: 2872328 - RNA, 14 nt, Human
gaauacuuuuuaca

SEQ ID NO: 2872329 - RNA, 15 nt, Human
gaauacuuuuuaaaa

SEQ ID NO: 2872330 - RNA, 15 nt, Human
gaauaaucuuugggu

SEQ ID NO: 2872331 - RNA, 23 nt, Human
gaauaagcucuaguucuuaacaa

SEQ ID NO: 2872332 - RNA, 20 nt, Human
gaauaaauucccaacuucuc

SEQ ID NO: 2872333 - RNA, 15 nt, Human
gaauaaauugcuccu

SEQ ID NO: 2872334 - RNA, 17 nt, Human
gaauaaagccugcuuuu

SEQ ID NO: 2872335 - RNA, 11 nt, Human
gaauaaacuuc

SEQ ID NO: 2872336 - RNA, 12 nt, Human
gaauaaacuuca

SEQ ID NO: 2872337 - RNA, 13 nt, Human
gaauaaacuucag

SEQ ID NO: 2872338 - RNA, 14 nt, Human
gaauaaacuucagc

SEQ ID NO: 2872339 - RNA, 15 nt, Human
gaauaaacuucagca

SEQ ID NO: 2872340 - RNA, 16 nt, Human
gaauaaacuucagcac

SEQ ID NO: 2872341 - RNA, 17 nt, Human
gaauaaacuucagcacc

SEQ ID NO: 2872342 - RNA, 18 nt, Human
gaauaaacuucagcacca

SEQ ID NO: 2872343 - RNA, 14 nt, Human
gaauaaagacaccu

SEQ ID NO: 2872344 - RNA, 13 nt, Human
gaaguuuacauuu

SEQ ID NO: 2872345 - RNA, 14 nt, Human
gaaguuuacauuuu

SEQ ID NO: 2872346 - RNA, 21 nt, Human
gaaguuuacauuuuuauuuau

SEQ ID NO: 2872347 - RNA, 22 nt, Human
gaaguuuacauuuuuauuuaug

SEQ ID NO: 2872348 - RNA, 17 nt, Human
gaaguuuauucucauuu

SEQ ID NO: 2872349 - RNA, 21 nt, Human
gaaguuuccuuggcuggugca

SEQ ID NO: 2872350 - RNA, 17 nt, Human
gaaguuuacauuguaaa

SEQ ID NO: 2872351 - RNA, 16 nt, Human
gaaguuuacauuguaa

SEQ ID NO: 2872352 - RNA, 13 nt, Human
gaagguuuuaagu

SEQ ID NO: 2872353 - RNA, 15 nt, Human
gaaguaaagaacugc

SEQ ID NO: 2872354 - RNA, 15 nt, Human
gaaguaaagccauua

SEQ ID NO: 2872355 - RNA, 19 nt, Human
gaaguaaagccauuaaaug

SEQ ID NO: 2872356 - RNA, 22 nt, Human
gaagguuuguguuuucucugga

SEQ ID NO: 2872357 - RNA, 14 nt, Human
gaauagcugggacu

SEQ ID NO: 2872358 - RNA, 23 nt, Human
gaauagccacauuuggaauacuu

SEQ ID NO: 2872359 - RNA, 18 nt, Human
gaauagccacauuuggaa

SEQ ID NO: 2872360 - RNA, 15 nt, Human
gaauagccacauuug

SEQ ID NO: 2872361 - RNA, 13 nt, Human
gaauagcaucugu

SEQ ID NO: 2872362 - RNA, 16 nt, Human
gaauagcaucuguaca

SEQ ID NO: 2872363 - RNA, 18 nt, Human
gaauagcaucuguacaaa

SEQ ID NO: 2872364 - RNA, 20 nt, Human
gaauagcaucuguacaaagg

SEQ ID NO: 2872365 - RNA, 15 nt, Human
gaauagaugcugacu

SEQ ID NO: 2872366 - RNA, 15 nt, Human
gaauagcugggacua

SEQ ID NO: 2872367 - RNA, 17 nt, Human
gaauagccuagauauga

SEQ ID NO: 2872368 - RNA, 22 nt, Human
gaauagccuagauaugaauaua

SEQ ID NO: 2872369 - RNA, 15 nt, Human
gaauagccuguggcc

SEQ ID NO: 2872370 - RNA, 11 nt, Human
gaaucacuguu

SEQ ID NO: 2872371 - RNA, 14 nt, Human
gaaucacuguuuuu

SEQ ID NO: 2872372 - RNA, 15 nt, Human
gaaucacuguuuuua

SEQ ID NO: 2872373 - RNA, 16 nt, Human
gaaucacuguuuuuag

SEQ ID NO: 2872374 - RNA, 17 nt, Human
gaaucacuguuuuuaga

SEQ ID NO: 2872375 - RNA, 23 nt, Human
gaaucacuguuuuuagacaccuu

SEQ ID NO: 2872376 - RNA, 16 nt, Human
gaauccccucccuguc

SEQ ID NO: 2872377 - RNA, 23 nt, Human
gaaucccccuugccaccccaccc

SEQ ID NO: 2872378 - RNA, 16 nt, Human
gaauccccgaaggugc

SEQ ID NO: 2872379 - RNA, 17 nt, Human
gaauccccucccuguca

SEQ ID NO: 2872380 - RNA, 20 nt, Human
gaaucccuagacuuuaggcu

SEQ ID NO: 2872381 - RNA, 14 nt, Human
gaaucccccuugcc

SEQ ID NO: 2872382 - RNA, 17 nt, Human
gaaucccccuugccacc

SEQ ID NO: 2872383 - RNA, 18 nt, Human
gaaucccccuugccaccc

SEQ ID NO: 2872384 - RNA, 17 nt, Human
gaauccacucccaggca

SEQ ID NO: 2872385 - RNA, 13 nt, Human
gaaucccagccgg

SEQ ID NO: 2872386 - RNA, 15 nt, Human
gaaucccagccggcc

SEQ ID NO: 2872387 - RNA, 20 nt, Human
gaauccaagccuccacagcg

SEQ ID NO: 2872388 - RNA, 17 nt, Human
gaauccaagccuccaca

SEQ ID NO: 2872389 - RNA, 16 nt, Human
gaauccacauuucuaa

SEQ ID NO: 2872390 - RNA, 15 nt, Human
gaauccaagcucccu

SEQ ID NO: 2872391 - RNA, 16 nt, Human
gaauccaagcucccug

SEQ ID NO: 2872392 - RNA, 17 nt, Human
gaauccaagcucccugc

SEQ ID NO: 2872393 - RNA, 18 nt, Human
gaauccaagcucccugcc

SEQ ID NO: 2872394 - RNA, 20 nt, Human
gaauccaagcucccugcccc

SEQ ID NO: 2872395 - RNA, 23 nt, Human
gaauccacguauuccccuuccca

SEQ ID NO: 2872396 - RNA, 17 nt, Human
gaauccacauuucuaaa

SEQ ID NO: 2872397 - RNA, 18 nt, Human
gaauccacauuucuaaaa

SEQ ID NO: 2872398 - RNA, 16 nt, Human
gaaucccacuguauga

SEQ ID NO: 2872399 - RNA, 17 nt, Human
gaaucccacuguaugau

SEQ ID NO: 2872400 - RNA, 15 nt, Human
gaauccaagccucca

SEQ ID NO: 2872401 - RNA, 14 nt, Human
gaauccaagccucc

SEQ ID NO: 2872402 - RNA, 16 nt, Human
gaaucagaguagaaau

SEQ ID NO: 2872403 - RNA, 17 nt, Human
gaaucagaguagaaaua

SEQ ID NO: 2872404 - RNA, 13 nt, Human
gaaucagcacaga

SEQ ID NO: 2872405 - RNA, 12 nt, Human
gaaucuggagac

SEQ ID NO: 2872406 - RNA, 22 nt, Human
gaaucuggagaccagggagccu

SEQ ID NO: 2872407 - RNA, 16 nt, Human
gaaucuggagaccagg

SEQ ID NO: 2872408 - RNA, 18 nt, Human
gaaucuggagaccaggga

SEQ ID NO: 2872409 - RNA, 20 nt, Human
gaauccuaggcuccacccca

SEQ ID NO: 2872410 - RNA, 12 nt, Human
gaauccuggcag

SEQ ID NO: 2872411 - RNA, 22 nt, Human
gaauccuauauagaaugcugca

SEQ ID NO: 2872412 - RNA, 10 nt, Human
gaauccuccu

SEQ ID NO: 2872413 - RNA, 17 nt, Human
gaauccuggcagcccag

SEQ ID NO: 2872414 - RNA, 16 nt, Human
gaauccuggcagccca

SEQ ID NO: 2872415 - RNA, 14 nt, Human
gaauccuggcagcc

SEQ ID NO: 2872416 - RNA, 13 nt, Human
gaauccuggcagc

SEQ ID NO: 2872417 - RNA, 17 nt, Human
gaaucuauauuuaacaa

SEQ ID NO: 2872418 - RNA, 13 nt, Human
gaaucuauuuaag

SEQ ID NO: 2872419 - RNA, 15 nt, Human
gaaucuauuuaagua

SEQ ID NO: 2872420 - RNA, 16 nt, Human
gaaucuauuuaaguaa

SEQ ID NO: 2872421 - RNA, 12 nt, Human
gaaucuauuuuc

SEQ ID NO: 2872422 - RNA, 15 nt, Human
gaaucuauuuucuau

SEQ ID NO: 2872423 - RNA, 16 nt, Human
gaaucuauuuucuaug

SEQ ID NO: 2872424 - RNA, 17 nt, Human
gaaucuauuuucuaugu

SEQ ID NO: 2872425 - RNA, 18 nt, Human
gaaucuauuuucuaugua

SEQ ID NO: 2872426 - RNA, 19 nt, Human
gaaucuauuuucuauguac

SEQ ID NO: 2872427 - RNA, 21 nt, Human
gaaucuauuuucuauguacua

SEQ ID NO: 2872428 - RNA, 23 nt, Human
gaaucuauuuucuauguacuagu

SEQ ID NO: 2872429 - RNA, 14 nt, Human
gaaugaaagggccc

SEQ ID NO: 2872430 - RNA, 19 nt, Human
gaaugaaagggcccagaga

SEQ ID NO: 2872431 - RNA, 19 nt, Human
gaaugccugagugccuggc

SEQ ID NO: 2872432 - RNA, 16 nt, Human
gaaugccugagugccu

SEQ ID NO: 2872433 - RNA, 18 nt, Human
gaaugccugagugccugg

SEQ ID NO: 2872434 - RNA, 14 nt, Human
gaaugccuccugug

SEQ ID NO: 2872435 - RNA, 16 nt, Human
gaaugccuccuguggg

SEQ ID NO: 2872436 - RNA, 17 nt, Human
gaaugccuccugugggg

SEQ ID NO: 2872437 - RNA, 18 nt, Human
gaaugccuccugugggga

SEQ ID NO: 2872438 - RNA, 19 nt, Human
gaaaaucaaauacauacuu

SEQ ID NO: 2872439 - RNA, 17 nt, Human
gaaaaucacuuugucua

SEQ ID NO: 2872440 - RNA, 18 nt, Human
gaaaaucacuuugucuaa

SEQ ID NO: 2872441 - RNA, 18 nt, Human
gaaaauauuuuuuauaua

SEQ ID NO: 2872442 - RNA, 14 nt, Human
gaaaaucaaauaca

SEQ ID NO: 2872443 - RNA, 15 nt, Human
gaaaaucaaauacau

SEQ ID NO: 2872444 - RNA, 14 nt, Human
gaaacacagaaacc

SEQ ID NO: 2872445 - RNA, 15 nt, Human
gaaacacagagaagc

SEQ ID NO: 2872446 - RNA, 12 nt, Human
gaaacacagcug

SEQ ID NO: 2872447 - RNA, 13 nt, Human
gaaacacagcugu

SEQ ID NO: 2872448 - RNA, 14 nt, Human
gaaacacagcuguu

SEQ ID NO: 2872449 - RNA, 15 nt, Human
gaaacacagcuguuc

SEQ ID NO: 2872450 - RNA, 23 nt, Human
gaaacacagcuguucuucuguuc

SEQ ID NO: 2872451 - RNA, 22 nt, Human
gaaacacagcuuacaaucgcaa

SEQ ID NO: 2872452 - RNA, 17 nt, Human
gaaacacugccuuuuua

SEQ ID NO: 2872453 - RNA, 16 nt, Human
gaaacacugccuuuuu

SEQ ID NO: 2872454 - RNA, 14 nt, Human
gaaacacugccuuu

SEQ ID NO: 2872455 - RNA, 13 nt, Human
gaaacacugccuu

SEQ ID NO: 2872456 - RNA, 12 nt, Human
gaaacacugccu

SEQ ID NO: 2872457 - RNA, 11 nt, Human
gaaacacugcc

SEQ ID NO: 2872458 - RNA, 14 nt, Human
gaaacacuccuugc

SEQ ID NO: 2872459 - RNA, 15 nt, Human
gaaacacuccuugca

SEQ ID NO: 2872460 - RNA, 16 nt, Human
gaaacacuccuugcau

SEQ ID NO: 2872461 - RNA, 17 nt, Human
gaaacacuccuugcauc

SEQ ID NO: 2872462 - RNA, 22 nt, Human
gaaacacugggcuucuagaacc

SEQ ID NO: 2872463 - RNA, 15 nt, Human
gaaacacgaaacuug

SEQ ID NO: 2872464 - RNA, 16 nt, Human
gaaacacgaaacuugu

SEQ ID NO: 2872465 - RNA, 17 nt, Human
gaaacacgaaacuuguu

SEQ ID NO: 2872466 - RNA, 18 nt, Human
gaaacacgaaacuuguua

SEQ ID NO: 2872467 - RNA, 22 nt, Human
gaaacacgaaacuuguuauugu

SEQ ID NO: 2872468 - RNA, 18 nt, Human
gaaacagcuaaugggaca

SEQ ID NO: 2872469 - RNA, 16 nt, Human
gaaacagauuucauac

SEQ ID NO: 2872470 - RNA, 20 nt, Human
gaaacagcucgacuuuaaaa

SEQ ID NO: 2872471 - RNA, 15 nt, Human
gaaacagcuuucaag

SEQ ID NO: 2872472 - RNA, 16 nt, Human
gaaacagcuuucaagu

SEQ ID NO: 2872473 - RNA, 18 nt, Human
gaaacagcuuucaagugc

SEQ ID NO: 2872474 - RNA, 20 nt, Human
gaaacagcuuucaagugccu

SEQ ID NO: 2872475 - RNA, 21 nt, Human
gaaacagcuuucaagugccuu

SEQ ID NO: 2872476 - RNA, 15 nt, Human
gaaacagcucgacuu

SEQ ID NO: 2872477 - RNA, 12 nt, Human
gaaacagaggcu

SEQ ID NO: 2872478 - RNA, 14 nt, Human
gaaacagauaccau

SEQ ID NO: 2872479 - RNA, 15 nt, Human
gaaacagauaccaua

SEQ ID NO: 2872480 - RNA, 21 nt, Human
gaaacagauaccauacucauu

SEQ ID NO: 2872481 - RNA, 22 nt, Human
gaaacagaaacaaaaacacuaa

SEQ ID NO: 2872482 - RNA, 14 nt, Human
gaaacagaaacaaa

SEQ ID NO: 2872483 - RNA, 14 nt, Human
gaaacacuuucucu

SEQ ID NO: 2872484 - RNA, 18 nt, Human
gaaacacuuugccuccug

SEQ ID NO: 2872485 - RNA, 19 nt, Human
gaaacacuuugccuccugu

SEQ ID NO: 2872486 - RNA, 20 nt, Human
gaaacacuuugccuccugug

SEQ ID NO: 2872487 - RNA, 22 nt, Human
gaaacacuuugccuccugugua

SEQ ID NO: 2872488 - RNA, 13 nt, Human
gaaacacuuuuuu

SEQ ID NO: 2872489 - RNA, 17 nt, Human
gaaaagcugcugacagu

SEQ ID NO: 2872490 - RNA, 13 nt, Human
gaaaagcugcuga

SEQ ID NO: 2872491 - RNA, 18 nt, Human
gaaaauaauguaauugua

SEQ ID NO: 2872492 - RNA, 19 nt, Human
gaaaauaauguaauuguaa

SEQ ID NO: 2872493 - RNA, 19 nt, Human
gaaaauaagugaauaauaa

SEQ ID NO: 2872494 - RNA, 18 nt, Human
gaaaauaagaauagaaau

SEQ ID NO: 2872495 - RNA, 20 nt, Human
gaaaagcuauuagccaggau

SEQ ID NO: 2872496 - RNA, 22 nt, Human
gaaaagcuauuagccaggauca

SEQ ID NO: 2872497 - RNA, 11 nt, Human
gaaaagcuauu

SEQ ID NO: 2872498 - RNA, 14 nt, Human
gaaaagcuauuagc

SEQ ID NO: 2872499 - RNA, 17 nt, Human
gaaaagcuauuagccag

SEQ ID NO: 2872500 - RNA, 19 nt, Human
gaaaagcuauuagccagga

SEQ ID NO: 2872501 - RNA, 16 nt, Human
gaaaauauaugauggc

SEQ ID NO: 2872502 - RNA, 15 nt, Human
gaaaauauauguauu

SEQ ID NO: 2872503 - RNA, 16 nt, Human
gaaaauauauguauuu

SEQ ID NO: 2872504 - RNA, 17 nt, Human
gaaaauauauguauuuu

SEQ ID NO: 2872505 - RNA, 20 nt, Human
gaaaauauauguauuuuuau

SEQ ID NO: 2872506 - RNA, 22 nt, Human
gaaaauauauguauuuuuauau

SEQ ID NO: 2872507 - RNA, 17 nt, Human
gaaaauauuauguguuu

SEQ ID NO: 2872508 - RNA, 22 nt, Human
gaaaauaucugcucaaaacuuu

SEQ ID NO: 2872509 - RNA, 18 nt, Human
gaaaaauaaaucuguucu

SEQ ID NO: 2872510 - RNA, 19 nt, Human
gaaaacaucacugaaaugc

SEQ ID NO: 2872511 - RNA, 19 nt, Human
gaaaacaaugcaaaaccuu

SEQ ID NO: 2872512 - RNA, 22 nt, Human
gaaaagcuaguguaccuccucu

SEQ ID NO: 2872513 - RNA, 24 nt, Human
gaaaagcuaguguaccuccucuca

SEQ ID NO: 2872514 - RNA, 16 nt, Human
gaaaaccaucuggccu

SEQ ID NO: 2872515 - RNA, 18 nt, Human
gaaaaccaucuggccugg

SEQ ID NO: 2872516 - RNA, 19 nt, Human
gaaaaccaucuggccuggc

SEQ ID NO: 2872517 - RNA, 20 nt, Human
gaaaaccaucuggccuggcc

SEQ ID NO: 2872518 - RNA, 21 nt, Human
gaaaaccaucuggccuggccu

SEQ ID NO: 2872519 - RNA, 22 nt, Human
gaaaaccagcuugcgaauaaca

SEQ ID NO: 2872520 - RNA, 18 nt, Human
gaaaaccaccccuuagau

SEQ ID NO: 2872521 - RNA, 21 nt, Human
gaaaaccaagccguggcuucc

SEQ ID NO: 2872522 - RNA, 18 nt, Human
gaaaaccaagccguggcu

SEQ ID NO: 2872523 - RNA, 19 nt, Human
gaaaaccaagccguggcuu

SEQ ID NO: 2872524 - RNA, 20 nt, Human
gaaaacauucugauuuggaa

SEQ ID NO: 2872525 - RNA, 11 nt, Human
gaaaaccaaaa

SEQ ID NO: 2872526 - RNA, 17 nt, Human
gaaaaccaaaaugacau

SEQ ID NO: 2872527 - RNA, 18 nt, Human
gaaaaccaaaaugacauc

SEQ ID NO: 2872528 - RNA, 21 nt, Human
gaaaaccaaaaugacaucuuu

SEQ ID NO: 2872529 - RNA, 14 nt, Human
cuuuucuuuaaaga

SEQ ID NO: 2872530 - RNA, 17 nt, Human
cuuuucuuuaaagaagu

SEQ ID NO: 2872531 - RNA, 18 nt, Human
cuuuucuuuaaagaaguu

SEQ ID NO: 2872532 - RNA, 14 nt, Human
cuuuucuuuaacuu

SEQ ID NO: 2872533 - RNA, 15 nt, Human
cuuuucuuuaacuuu

SEQ ID NO: 2872534 - RNA, 17 nt, Human
cuuuucuuuagagaacu

SEQ ID NO: 2872535 - RNA, 20 nt, Human
cuuuucuuuagagaacugaa

SEQ ID NO: 2872536 - RNA, 21 nt, Human
cuuuucuuuagagaacugaaa

SEQ ID NO: 2872537 - RNA, 22 nt, Human
cuuuucuuuagagaacugaaaa

SEQ ID NO: 2872538 - RNA, 13 nt, Human
cuuuuuuccuaau

SEQ ID NO: 2872539 - RNA, 15 nt, Human
cuuuuuucacuacau

SEQ ID NO: 2872540 - RNA, 17 nt, Human
cuuuugaggcuucuguu

SEQ ID NO: 2872541 - RNA, 15 nt, Human
cuuuugagugugugu

SEQ ID NO: 2872542 - RNA, 20 nt, Human
cuuuugagugugugugugca

SEQ ID NO: 2872543 - RNA, 23 nt, Human
cuuuugagugugugugugcaugu

SEQ ID NO: 2872544 - RNA, 17 nt, Human
cuuuuuugauaaaguuu

SEQ ID NO: 2872545 - RNA, 18 nt, Human
cuuuuuugauaaaguuuc

SEQ ID NO: 2872546 - RNA, 19 nt, Human
cuuuuuugauaaaguuucu

SEQ ID NO: 2872547 - RNA, 18 nt, Human
gaaaaaguuaaugcuuaa

SEQ ID NO: 2872548 - RNA, 20 nt, Human
gaaaaaguuaaugcuuaaga

SEQ ID NO: 2872549 - RNA, 16 nt, Human
gaaaaaggcugugcug

SEQ ID NO: 2872550 - RNA, 12 nt, Human
gaaaaaggguca

SEQ ID NO: 2872551 - RNA, 15 nt, Human
gaaaaaggcugugcu

SEQ ID NO: 2872552 - RNA, 21 nt, Human
cuuuuuugauaaaguuucuca

SEQ ID NO: 2872553 - RNA, 16 nt, Human
cuuuucucuuuuuagu

SEQ ID NO: 2872554 - RNA, 14 nt, Human
cuuuucucccauau

SEQ ID NO: 2872555 - RNA, 18 nt, Human
cuuuucccuguacuuuuc

SEQ ID NO: 2872556 - RNA, 12 nt, Human
cuuuucuaguuu

SEQ ID NO: 2872557 - RNA, 21 nt, Human
cuuuucuauuccuucuggccu

SEQ ID NO: 2872558 - RNA, 18 nt, Human
cuuuucucauguguuugc

SEQ ID NO: 2872559 - RNA, 13 nt, Human
cuuuucucagcug

SEQ ID NO: 2872560 - RNA, 12 nt, Human
cuuuucccucuu

SEQ ID NO: 2872561 - RNA, 13 nt, Human
cuuuucccucuuu

SEQ ID NO: 2872562 - RNA, 20 nt, Human
cuuuucccucuuuggcuccc

SEQ ID NO: 2872563 - RNA, 22 nt, Human
cuuuucccucuuuggcuccccu

SEQ ID NO: 2872564 - RNA, 15 nt, Human
cuuuucccucuuuuc

SEQ ID NO: 2872565 - RNA, 16 nt, Human
cuuuucccucuuuucu

SEQ ID NO: 2872566 - RNA, 19 nt, Human
cuuuucccucuuuucuuac

SEQ ID NO: 2872567 - RNA, 17 nt, Human
cuuuucccauuuguaau

SEQ ID NO: 2872568 - RNA, 19 nt, Human
cuuuucccauuuguaauuu

SEQ ID NO: 2872569 - RNA, 11 nt, Human
cuuuucugcug

SEQ ID NO: 2872570 - RNA, 23 nt, Human
cuuuucuggggaaagacacugcc

SEQ ID NO: 2872571 - RNA, 21 nt, Human
cuuuucuggggaaagacacug

SEQ ID NO: 2872572 - RNA, 19 nt, Human
cuuuucuggccaaaagcag

SEQ ID NO: 2872573 - RNA, 13 nt, Human
cuuuucuguacuu

SEQ ID NO: 2872574 - RNA, 11 nt, Human
cuuuucuuggc

SEQ ID NO: 2872575 - RNA, 12 nt, Human
cuuuucuuggca

SEQ ID NO: 2872576 - RNA, 21 nt, Human
cuuuucuuggcaaaagccuug

SEQ ID NO: 2872577 - RNA, 22 nt, Human
cuuuucuuggcaaaagccuugu

SEQ ID NO: 2872578 - RNA, 23 nt, Human
cuuuucuuggcaaaagccuugug

SEQ ID NO: 2872579 - RNA, 20 nt, Human
cuuuucauaaccuagccuua

SEQ ID NO: 2872580 - RNA, 22 nt, Human
cuuuucacuucgggcuguguaa

SEQ ID NO: 2872581 - RNA, 18 nt, Human
cuuuuacuacagcuauga

SEQ ID NO: 2872582 - RNA, 23 nt, Human
cuuuuacuacagcuaugaagaaa

SEQ ID NO: 2872583 - RNA, 16 nt, Human
cuuuucacugcuggcu

SEQ ID NO: 2872584 - RNA, 17 nt, Human
cuuuucacugcuggcug

SEQ ID NO: 2872585 - RNA, 18 nt, Human
cuuuucacugcuggcugc

SEQ ID NO: 2872586 - RNA, 20 nt, Human
cuuuucacugcuggcugccu

SEQ ID NO: 2872587 - RNA, 22 nt, Human
cuuuucauaaccuagccuuaga

SEQ ID NO: 2872588 - RNA, 21 nt, Human
cuuuucagguuugucaucaga

SEQ ID NO: 2872589 - RNA, 20 nt, Human
cuuuggacccaaggaaaacu

SEQ ID NO: 2872590 - RNA, 18 nt, Human
cuuuucaugcgugugugu

SEQ ID NO: 2872591 - RNA, 15 nt, Human
cuuuucauucucauu

SEQ ID NO: 2872592 - RNA, 17 nt, Human
cuuuguuucaaccaagu

SEQ ID NO: 2872593 - RNA, 13 nt, Human
cuuuguuucuugu

SEQ ID NO: 2872594 - RNA, 15 nt, Human
cuuuguuucuuguuu

SEQ ID NO: 2872595 - RNA, 17 nt, Human
cuuuguuucuuguuuau

SEQ ID NO: 2872596 - RNA, 20 nt, Human
cuuuguuuggauguaauuua

SEQ ID NO: 2872597 - RNA, 21 nt, Human
cuuuguuuggauguaauuuag

SEQ ID NO: 2872598 - RNA, 15 nt, Human
cuuuuacgagugcua

SEQ ID NO: 2872599 - RNA, 15 nt, Human
cuuuuaccagcuuuu

SEQ ID NO: 2872600 - RNA, 18 nt, Human
cuuuuaccagcuuuuaac

SEQ ID NO: 2872601 - RNA, 21 nt, Human
cuuuuaccagcuuuuaaccau

SEQ ID NO: 2872602 - RNA, 15 nt, Human
cuuugucccggggcu

SEQ ID NO: 2872603 - RNA, 13 nt, Human
cuuugggagacca

SEQ ID NO: 2872604 - RNA, 14 nt, Human
cuuuguccccugcu

SEQ ID NO: 2872605 - RNA, 15 nt, Human
cuuuguccccugcuu

SEQ ID NO: 2872606 - RNA, 16 nt, Human
cuuuguccccugcuuc

SEQ ID NO: 2872607 - RNA, 14 nt, Human
cuuugggaagccuu

SEQ ID NO: 2872608 - RNA, 19 nt, Human
cuuugggaagccuuuacug

SEQ ID NO: 2872609 - RNA, 20 nt, Human
cuuugucuaacucagaauua

SEQ ID NO: 2872610 - RNA, 18 nt, Human
cuuuguucuaaagaugga

SEQ ID NO: 2872611 - RNA, 15 nt, Human
cuuucccaagccuuc

SEQ ID NO: 2872612 - RNA, 20 nt, Human
cuuucccagugagucucugg

SEQ ID NO: 2872613 - RNA, 22 nt, Human
cuuucccaccccacgccuuauc

SEQ ID NO: 2872614 - RNA, 16 nt, Human
cuuucccacccuguuc

SEQ ID NO: 2872615 - RNA, 22 nt, Human
cuuucccacccuguucccaguc

SEQ ID NO: 2872616 - RNA, 19 nt, Human
cuuucccaccgcccucccu

SEQ ID NO: 2872617 - RNA, 14 nt, Human
cuuugcucuuucuu

SEQ ID NO: 2872618 - RNA, 16 nt, Human
cuuugcucuuguccca

SEQ ID NO: 2872619 - RNA, 11 nt, Human
cuuugcugcca

SEQ ID NO: 2872620 - RNA, 19 nt, Human
cuuugcugauuuccccucu

SEQ ID NO: 2872621 - RNA, 13 nt, Human
cuuugcuguaaga

SEQ ID NO: 2872622 - RNA, 17 nt, Human
cuuugcuguaagauguc

SEQ ID NO: 2872623 - RNA, 18 nt, Human
cuuugcuguaagaugucu

SEQ ID NO: 2872624 - RNA, 19 nt, Human
cuuugcuguaagaugucug

SEQ ID NO: 2872625 - RNA, 20 nt, Human
cuuugcuguaagaugucugu

SEQ ID NO: 2872626 - RNA, 22 nt, Human
cuuugcuguaagaugucuguuu

SEQ ID NO: 2872627 - RNA, 17 nt, Human
cuuuccaacguuuggaa

SEQ ID NO: 2872628 - RNA, 10 nt, Human
cuuuaaagaa

SEQ ID NO: 2872629 - RNA, 20 nt, Human
cuuuaaagaugaacucugaa

SEQ ID NO: 2872630 - RNA, 14 nt, Human
cuuuaaaggcccag

SEQ ID NO: 2872631 - RNA, 15 nt, Human
cuuuaaaggcccagc

SEQ ID NO: 2872632 - RNA, 16 nt, Human
cuuuaaaggcccagcc

SEQ ID NO: 2872633 - RNA, 18 nt, Human
cuuuaaaggcccagcccc

SEQ ID NO: 2872634 - RNA, 19 nt, Human
cuuuaaaggcccagccccu

SEQ ID NO: 2872635 - RNA, 20 nt, Human
cuuuaaaggcccagccccua

SEQ ID NO: 2872636 - RNA, 17 nt, Human
cuuuagaagugcauuuc

SEQ ID NO: 2872637 - RNA, 19 nt, Human
cuuuagaagugcauuucug

SEQ ID NO: 2872638 - RNA, 20 nt, Human
cuuuagaagugcauuucuga

SEQ ID NO: 2872639 - RNA, 20 nt, Human
cuuuagugaucacagcagcu

SEQ ID NO: 2872640 - RNA, 14 nt, Human
cuuuaguggcuuca

SEQ ID NO: 2872641 - RNA, 15 nt, Human
cuuuaguguauuuau

SEQ ID NO: 2872642 - RNA, 14 nt, Human
cuuuacuuuuaaac

SEQ ID NO: 2872643 - RNA, 17 nt, Human
cuuuacuuuagaagcac

SEQ ID NO: 2872644 - RNA, 18 nt, Human
cuuuacuuuagaagcaca

SEQ ID NO: 2872645 - RNA, 13 nt, Human
cuuuacuuucccu

SEQ ID NO: 2872646 - RNA, 14 nt, Human
cuuuacuuucccuu

SEQ ID NO: 2872647 - RNA, 16 nt, Human
cuuuacuuucccuugc

SEQ ID NO: 2872648 - RNA, 17 nt, Human
cuuuacuuucccuugcu

SEQ ID NO: 2872649 - RNA, 18 nt, Human
cuuuacuuucccuugcuu

SEQ ID NO: 2872650 - RNA, 19 nt, Human
cuuuacuuucccuugcuuu

SEQ ID NO: 2872651 - RNA, 22 nt, Human
cuuuacuuucccuugcuuuucc

SEQ ID NO: 2872652 - RNA, 23 nt, Human
cuuuacuuucccuugcuuuuccc

SEQ ID NO: 2872653 - RNA, 19 nt, Human
cuuuagaaagcugacauug

SEQ ID NO: 2872654 - RNA, 13 nt, Human
cuuguuuuguuug

SEQ ID NO: 2872655 - RNA, 15 nt, Human
cuuguuuuguuuguc

SEQ ID NO: 2872656 - RNA, 16 nt, Human
cuuguuuuguuugucu

SEQ ID NO: 2872657 - RNA, 18 nt, Human
cuuguuuuguuugucucu

SEQ ID NO: 2872658 - RNA, 22 nt, Human
cuuguuuuguuugucucuccuu

SEQ ID NO: 2872659 - RNA, 23 nt, Human
cuuguuuuguuugucucuccuuu

SEQ ID NO: 2872660 - RNA, 15 nt, Human
cuuguuuuuauaaua

SEQ ID NO: 2872661 - RNA, 23 nt, Human
cuuguuuuuauaauaaaaagcuu

SEQ ID NO: 2872662 - RNA, 18 nt, Human
cuuguuuuuauuaauuua

SEQ ID NO: 2872663 - RNA, 20 nt, Human
cuuguuuuuauuaauuuaua

SEQ ID NO: 2872664 - RNA, 20 nt, Human
cuuguuuucuuucuuuaaau

SEQ ID NO: 2872665 - RNA, 21 nt, Human
cuuguuuucuuucuuuaaaug

SEQ ID NO: 2872666 - RNA, 22 nt, Human
cuuguuuucuuucuuuaaaugu

SEQ ID NO: 2872667 - RNA, 23 nt, Human
cuuguuuucuuucuuuaaauguu

SEQ ID NO: 2872668 - RNA, 14 nt, Human
cuuguuuucuggga

SEQ ID NO: 2872669 - RNA, 19 nt, Human
cuuguuuuuuuuuuccacu

SEQ ID NO: 2872670 - RNA, 20 nt, Human
cuuguuuuuuuuuuccacuu

SEQ ID NO: 2872671 - RNA, 21 nt, Human
cuuguuuuuuuuuuccacuua

SEQ ID NO: 2872672 - RNA, 22 nt, Human
cuuuaaaccuguuuuuuuuuca

SEQ ID NO: 2872673 - RNA, 23 nt, Human
cuuuaaaccuguuuuuuuuucau

SEQ ID NO: 2872674 - RNA, 13 nt, Human
cuuuaaacucagg

SEQ ID NO: 2872675 - RNA, 20 nt, Human
cuuuaaaaaaaaaaguuaca

SEQ ID NO: 2872676 - RNA, 15 nt, Human
cuuuaaacucaggga

SEQ ID NO: 2872677 - RNA, 16 nt, Human
cuuuaaacucagggac

SEQ ID NO: 2872678 - RNA, 19 nt, Human
cuuuaaacucagggacaga

SEQ ID NO: 2872679 - RNA, 22 nt, Human
cuuuaaacucagggacagagcc

SEQ ID NO: 2872680 - RNA, 16 nt, Human
cuuguggggacccagg

SEQ ID NO: 2872681 - RNA, 17 nt, Human
cuuguggggacccaggc

SEQ ID NO: 2872682 - RNA, 18 nt, Human
cuuguggggacccaggcu

SEQ ID NO: 2872683 - RNA, 20 nt, Human
cuuguggggacccaggcucc

SEQ ID NO: 2872684 - RNA, 21 nt, Human
cuuguggggacccaggcuccg

SEQ ID NO: 2872685 - RNA, 18 nt, Human
cuuguggcccucucccuu

SEQ ID NO: 2872686 - RNA, 22 nt, Human
cuuguggcccucucccuuaccc

SEQ ID NO: 2872687 - RNA, 13 nt, Human
cuuguggcagagg

SEQ ID NO: 2872688 - RNA, 17 nt, Human
cuuguggcagaggaugu

SEQ ID NO: 2872689 - RNA, 12 nt, Human
cuuguaaauacc

SEQ ID NO: 2872690 - RNA, 14 nt, Human
cuuguaaauaccag

SEQ ID NO: 2872691 - RNA, 19 nt, Human
cuuguaaauaccaggauuu

SEQ ID NO: 2872692 - RNA, 19 nt, Human
cuuguguuaaguaugugua

SEQ ID NO: 2872693 - RNA, 20 nt, Human
cuuguguuguccuuuugucu

SEQ ID NO: 2872694 - RNA, 16 nt, Human
cuuguuguaaagcaau

SEQ ID NO: 2872695 - RNA, 17 nt, Human
cuuguuguaaagcaaua

SEQ ID NO: 2872696 - RNA, 20 nt, Human
cuuguuguugguuguuuuuu

SEQ ID NO: 2872697 - RNA, 14 nt, Human
cuuguuuucaguuu

SEQ ID NO: 2872698 - RNA, 11 nt, Human
cuuguuuucca

SEQ ID NO: 2872699 - RNA, 22 nt, Human
cuuguuuuccagucucuuguac

SEQ ID NO: 2872700 - RNA, 15 nt, Human
cuuguuugucuucca

SEQ ID NO: 2872701 - RNA, 13 nt, Human
cuuguuuuauaaa

SEQ ID NO: 2872702 - RNA, 22 nt, Human
cuuguuuuauaaaauuuugcuu

SEQ ID NO: 2872703 - RNA, 21 nt, Human
cuuuauuuuccccuaucauuu

SEQ ID NO: 2872704 - RNA, 13 nt, Human
cuuuauuuguuuu

SEQ ID NO: 2872705 - RNA, 16 nt, Human
cuuuauuuguuuuuuu

SEQ ID NO: 2872706 - RNA, 17 nt, Human
cuuucagggccaugguu

SEQ ID NO: 2872707 - RNA, 12 nt, Human
cuuucagguacu

SEQ ID NO: 2872708 - RNA, 11 nt, Human
cuuuauuuucu

SEQ ID NO: 2872709 - RNA, 14 nt, Human
cuuuauuucuguca

SEQ ID NO: 2872710 - RNA, 20 nt, Human
cuuuauuggguaucaagaca

SEQ ID NO: 2872711 - RNA, 23 nt, Human
cuuuauuccagaaugcuguacau

SEQ ID NO: 2872712 - RNA, 12 nt, Human
cuuuauuccuag

SEQ ID NO: 2872713 - RNA, 18 nt, Human
cuuuauucuugaaagaag

SEQ ID NO: 2872714 - RNA, 20 nt, Human
cuuuauucuugaaagaagaa

SEQ ID NO: 2872715 - RNA, 13 nt, Human
cuuuauucuuuuc

SEQ ID NO: 2872716 - RNA, 14 nt, Human
cuuuauugcuuuuu

SEQ ID NO: 2872717 - RNA, 18 nt, Human
cuuuauugcuuuuuugua

SEQ ID NO: 2872718 - RNA, 19 nt, Human
cuuuauugcuuuuuuguau

SEQ ID NO: 2872719 - RNA, 12 nt, Human
cuuuauuggaaa

SEQ ID NO: 2872720 - RNA, 18 nt, Human
cuuuauguggaaaacaga

SEQ ID NO: 2872721 - RNA, 23 nt, Human
cuuuauguggaaaacagaacauc

SEQ ID NO: 2872722 - RNA, 20 nt, Human
cuuuauaagucauuguaugu

SEQ ID NO: 2872723 - RNA, 12 nt, Human
cuuuauguguaa

SEQ ID NO: 2872724 - RNA, 14 nt, Human
cuuuauguguaaau

SEQ ID NO: 2872725 - RNA, 20 nt, Human
cuuuauguucauuuguuugu

SEQ ID NO: 2872726 - RNA, 13 nt, Human
cuuuauuaccagu

SEQ ID NO: 2872727 - RNA, 14 nt, Human
cuuuauuacccccu

SEQ ID NO: 2872728 - RNA, 20 nt, Human
cuuuauuacccccuccuuca

SEQ ID NO: 2872729 - RNA, 22 nt, Human
cuuuauuacccccuccuucaga

SEQ ID NO: 2872730 - RNA, 12 nt, Human
cuuuauuauuau

SEQ ID NO: 2872731 - RNA, 20 nt, Human
cuuuauuccagaaugcugua

SEQ ID NO: 2872732 - RNA, 20 nt, Human
cuuuauucuggcagaggagg

SEQ ID NO: 2872733 - RNA, 15 nt, Human
cuuuccaaggcuucu

SEQ ID NO: 2872734 - RNA, 11 nt, Human
cuuucccaagc

SEQ ID NO: 2872735 - RNA, 17 nt, Human
cuuuccaaaauuuuuca

SEQ ID NO: 2872736 - RNA, 18 nt, Human
cuuuccaaaauuuuucaa

SEQ ID NO: 2872737 - RNA, 14 nt, Human
cuuucaguuagccu

SEQ ID NO: 2872738 - RNA, 19 nt, Human
cuuggggaggacaaaacuu

SEQ ID NO: 2872739 - RNA, 23 nt, Human
cuuggggaggacaaaacuucuug

SEQ ID NO: 2872740 - RNA, 17 nt, Human
cuugggccaccccuccu

SEQ ID NO: 2872741 - RNA, 13 nt, Human
cuugggccacccc

SEQ ID NO: 2872742 - RNA, 19 nt, Human
cuugggccaaauccgcucu

SEQ ID NO: 2872743 - RNA, 20 nt, Human
cuugggccaaauccgcucuc

SEQ ID NO: 2872744 - RNA, 14 nt, Human
cuugggcugcuccu

SEQ ID NO: 2872745 - RNA, 17 nt, Human
cuuggcugcagggaguc

SEQ ID NO: 2872746 - RNA, 14 nt, Human
cuuggcugcaggga

SEQ ID NO: 2872747 - RNA, 16 nt, Human
cuuggcuuuucuagcc

SEQ ID NO: 2872748 - RNA, 22 nt, Human
cuuggcuuucauuauuaguacu

SEQ ID NO: 2872749 - RNA, 16 nt, Human
cuugggagagccccug

SEQ ID NO: 2872750 - RNA, 17 nt, Human
cuugggagagccccugg

SEQ ID NO: 2872751 - RNA, 18 nt, Human
cuugggagagccccuggg

SEQ ID NO: 2872752 - RNA, 22 nt, Human
cuugggagagccccuggggccu

SEQ ID NO: 2872753 - RNA, 18 nt, Human
cuugggaauggauccugg

SEQ ID NO: 2872754 - RNA, 10 nt, Human
cuugggaaug

SEQ ID NO: 2872755 - RNA, 16 nt, Human
cuuggcugcagggagu

SEQ ID NO: 2872756 - RNA, 18 nt, Human
cuuggaguauuggggucu

SEQ ID NO: 2872757 - RNA, 14 nt, Human
cuuggagggaccaa

SEQ ID NO: 2872758 - RNA, 21 nt, Human
cuuggagcuuacauaguuuua

SEQ ID NO: 2872759 - RNA, 20 nt, Human
cuuggagggcccacuuguau

SEQ ID NO: 2872760 - RNA, 19 nt, Human
cuuggagggcccacuugua

SEQ ID NO: 2872761 - RNA, 15 nt, Human
cuuggagggauaagc

SEQ ID NO: 2872762 - RNA, 15 nt, Human
cuugccaugugacuc

SEQ ID NO: 2872763 - RNA, 21 nt, Human
cuugccaugugacucuggcuu

SEQ ID NO: 2872764 - RNA, 23 nt, Human
cuugcccccugcccguguacaua

SEQ ID NO: 2872765 - RNA, 14 nt, Human
cuugcucugcugac

SEQ ID NO: 2872766 - RNA, 13 nt, Human
cuugcucugcuga

SEQ ID NO: 2872767 - RNA, 15 nt, Human
cuugcccuagaugag

SEQ ID NO: 2872768 - RNA, 19 nt, Human
cuugcccuagauaguuuau

SEQ ID NO: 2872769 - RNA, 20 nt, Human
cuugcccggauucugggagg

SEQ ID NO: 2872770 - RNA, 18 nt, Human
cuugcccggauucuggga

SEQ ID NO: 2872771 - RNA, 17 nt, Human
cuugcccggauucuggg

SEQ ID NO: 2872772 - RNA, 20 nt, Human
cuugccagagccgggcacau

SEQ ID NO: 2872773 - RNA, 14 nt, Human
cuugccagaugcug

SEQ ID NO: 2872774 - RNA, 17 nt, Human
cuugccagaugcugcag

SEQ ID NO: 2872775 - RNA, 13 nt, Human
cuugccagagccg

SEQ ID NO: 2872776 - RNA, 20 nt, Human
cuugccagaaguuguggauu

SEQ ID NO: 2872777 - RNA, 15 nt, Human
cuugccacuuugcac

SEQ ID NO: 2872778 - RNA, 17 nt, Human
cuugccacuuugcacga

SEQ ID NO: 2872779 - RNA, 14 nt, Human
cuugccacugccuc

SEQ ID NO: 2872780 - RNA, 15 nt, Human
cuugccacugccucu

SEQ ID NO: 2872781 - RNA, 21 nt, Human
cuucuccacccugcucuccga

SEQ ID NO: 2872782 - RNA, 13 nt, Human
cuugccacugccu

SEQ ID NO: 2872783 - RNA, 16 nt, Human
cuucuccacccugcuc

SEQ ID NO: 2872784 - RNA, 18 nt, Human
cuucuccacccugcucuc

SEQ ID NO: 2872785 - RNA, 17 nt, Human
cuucuccacccugcucu

SEQ ID NO: 2872786 - RNA, 23 nt, Human
cuuggaaagcaucaccucaggcc

SEQ ID NO: 2872787 - RNA, 20 nt, Human
cuuggaaagcaucaccucag

SEQ ID NO: 2872788 - RNA, 22 nt, Human
cuuggaaagcaucaccucaggc

SEQ ID NO: 2872789 - RNA, 21 nt, Human
cuuggaaagcaucaccucagg

SEQ ID NO: 2872790 - RNA, 13 nt, Human
cuuggaagcuccg

SEQ ID NO: 2872791 - RNA, 17 nt, Human
cuugcucugcugacaga

SEQ ID NO: 2872792 - RNA, 16 nt, Human
cuugcucugcugacag

SEQ ID NO: 2872793 - RNA, 16 nt, Human
cuugcuguccuaggcc

SEQ ID NO: 2872794 - RNA, 11 nt, Human
cuugcccugcu

SEQ ID NO: 2872795 - RNA, 12 nt, Human
cuugcccugcuc

SEQ ID NO: 2872796 - RNA, 13 nt, Human
cuugcccugcucc

SEQ ID NO: 2872797 - RNA, 15 nt, Human
cuugcccugcucccu

SEQ ID NO: 2872798 - RNA, 16 nt, Human
cuugcccugcucccuc

SEQ ID NO: 2872799 - RNA, 20 nt, Human
cuugcuguccuaggccacac

SEQ ID NO: 2872800 - RNA, 13 nt, Human
cuugcuguccuga

SEQ ID NO: 2872801 - RNA, 16 nt, Human
cuugcuguccugaucu

SEQ ID NO: 2872802 - RNA, 17 nt, Human
cuugcuguccugaucug

SEQ ID NO: 2872803 - RNA, 18 nt, Human
cuugcuguccugaucugu

SEQ ID NO: 2872804 - RNA, 12 nt, Human
cuugcugucucu

SEQ ID NO: 2872805 - RNA, 13 nt, Human
cuugcugucucug

SEQ ID NO: 2872806 - RNA, 14 nt, Human
cuugcugucucugc

SEQ ID NO: 2872807 - RNA, 15 nt, Human
cuugcugucucugcu

SEQ ID NO: 2872808 - RNA, 16 nt, Human
cuugcugucucugcuc

SEQ ID NO: 2872809 - RNA, 17 nt, Human
cuugcugucucugcucg

SEQ ID NO: 2872810 - RNA, 21 nt, Human
cuugcugucucugcucgcccu

SEQ ID NO: 2872811 - RNA, 17 nt, Human
cuugcuguccuaggcca

SEQ ID NO: 2872812 - RNA, 15 nt, Human
cuugcuuuucccucu

SEQ ID NO: 2872813 - RNA, 16 nt, Human
cuugcuuuucccucuu

SEQ ID NO: 2872814 - RNA, 17 nt, Human
cuugcuuuucccucuuu

SEQ ID NO: 2872815 - RNA, 18 nt, Human
cuugcuuuucccucuuuu

SEQ ID NO: 2872816 - RNA, 20 nt, Human
cuugcuuuucccucuuuucu

SEQ ID NO: 2872817 - RNA, 21 nt, Human
cuugcuuuucccucuuuucuu

SEQ ID NO: 2872818 - RNA, 22 nt, Human
cuugcuuuucccucuuuucuua

SEQ ID NO: 2872819 - RNA, 22 nt, Human
cuugcuuaccuugacuguugau

SEQ ID NO: 2872820 - RNA, 24 nt, Human
cuugcuuaccuugacuguugaugu

SEQ ID NO: 2872821 - RNA, 16 nt, Human
cuucucaucuugugaa

SEQ ID NO: 2872822 - RNA, 15 nt, Human
cuugcuguccuaggc

SEQ ID NO: 2872823 - RNA, 19 nt, Human
cuugcuguugacauauuua

SEQ ID NO: 2872824 - RNA, 20 nt, Human
cuugcuguugacauauuuaa

SEQ ID NO: 2872825 - RNA, 21 nt, Human
cuugcuguugacauauuuaau

SEQ ID NO: 2872826 - RNA, 23 nt, Human
cuugcuguugacauauuuaaugu

SEQ ID NO: 2872827 - RNA, 16 nt, Human
cuugcuguuggucaug

SEQ ID NO: 2872828 - RNA, 20 nt, Human
cuugcuguuggucauguggg

SEQ ID NO: 2872829 - RNA, 14 nt, Human
cuccccugccauuu

SEQ ID NO: 2872830 - RNA, 13 nt, Human
cuccccugcccug

SEQ ID NO: 2872831 - RNA, 12 nt, Human
cuccccugcccu

SEQ ID NO: 2872832 - RNA, 14 nt, Human
cuccccugcccugc

SEQ ID NO: 2872833 - RNA, 19 nt, Human
cuccccuuccucacugccc

SEQ ID NO: 2872834 - RNA, 21 nt, Human
cuccccuguuucaaucacugu

SEQ ID NO: 2872835 - RNA, 22 nt, Human
cuccccuugauuuaaacacaca

SEQ ID NO: 2872836 - RNA, 23 nt, Human
cuccccuugauuuaaacacacag

SEQ ID NO: 2872837 - RNA, 12 nt, Human
cuccccuucucu

SEQ ID NO: 2872838 - RNA, 23 nt, Human
cuccccagcaagugagagcuggg

SEQ ID NO: 2872839 - RNA, 22 nt, Human
cuccccagcaagugagagcugg

SEQ ID NO: 2872840 - RNA, 21 nt, Human
cuccccagcaagugagagcug

SEQ ID NO: 2872841 - RNA, 20 nt, Human
cuccccuccuccuggacucc

SEQ ID NO: 2872842 - RNA, 12 nt, Human
cuccccuccucc

SEQ ID NO: 2872843 - RNA, 20 nt, Human
cucccgaguagcugggacua

SEQ ID NO: 2872844 - RNA, 19 nt, Human
cucccgaguagcugggacu

SEQ ID NO: 2872845 - RNA, 18 nt, Human
cucccgaguagcugggac

SEQ ID NO: 2872846 - RNA, 15 nt, Human
cucccggugcccaag

SEQ ID NO: 2872847 - RNA, 21 nt, Human
cucccggugcccaagaauaga

SEQ ID NO: 2872848 - RNA, 16 nt, Human
cucccgccccuuccca

SEQ ID NO: 2872849 - RNA, 21 nt, Human
cucccgccagacuguuagaaa

SEQ ID NO: 2872850 - RNA, 22 nt, Human
cuccccuuucccucgcuaugug

SEQ ID NO: 2872851 - RNA, 22 nt, Human
cucccgaguagcugggauuaca

SEQ ID NO: 2872852 - RNA, 20 nt, Human
cucccgaguagggaggacca

SEQ ID NO: 2872853 - RNA, 17 nt, Human
cucccgauucccaacug

SEQ ID NO: 2872854 - RNA, 14 nt, Human
cucccugcccaggc

SEQ ID NO: 2872855 - RNA, 15 nt, Human
cucccugccccaaau

SEQ ID NO: 2872856 - RNA, 17 nt, Human
cucccugccccucccuu

SEQ ID NO: 2872857 - RNA, 18 nt, Human
cucccugccccucccuuc

SEQ ID NO: 2872858 - RNA, 20 nt, Human
cucccugccccucccuucaa

SEQ ID NO: 2872859 - RNA, 21 nt, Human
cucccugccccucccuucaac

SEQ ID NO: 2872860 - RNA, 13 nt, Human
cucccugccagag

SEQ ID NO: 2872861 - RNA, 14 nt, Human
cucccugccagagg

SEQ ID NO: 2872862 - RNA, 19 nt, Human
cucccugccagaggggaag

SEQ ID NO: 2872863 - RNA, 14 nt, Human
cucccuaaacugua

SEQ ID NO: 2872864 - RNA, 16 nt, Human
cucccuaagccagccu

SEQ ID NO: 2872865 - RNA, 17 nt, Human
cucccuaagccagccug

SEQ ID NO: 2872866 - RNA, 18 nt, Human
cucccuaagccagccugg

SEQ ID NO: 2872867 - RNA, 21 nt, Human
cucccuaaggcaugugugaaa

SEQ ID NO: 2872868 - RNA, 13 nt, Human
cucccugccccuc

SEQ ID NO: 2872869 - RNA, 14 nt, Human
cucccugccccucc

SEQ ID NO: 2872870 - RNA, 23 nt, Human
cucccugccccccagcccuccuu

SEQ ID NO: 2872871 - RNA, 17 nt, Human
cucccugccccccagcc

SEQ ID NO: 2872872 - RNA, 18 nt, Human
cuccucagggcagccucc

SEQ ID NO: 2872873 - RNA, 16 nt, Human
cuccucauccagggcu

SEQ ID NO: 2872874 - RNA, 20 nt, Human
cuccucauccagggcucuga

SEQ ID NO: 2872875 - RNA, 14 nt, Human
cuccucacccccag

SEQ ID NO: 2872876 - RNA, 21 nt, Human
cuccucacaacauggugucug

SEQ ID NO: 2872877 - RNA, 15 nt, Human
cuccucacacacccu

SEQ ID NO: 2872878 - RNA, 17 nt, Human
cuccucacacacccuga

SEQ ID NO: 2872879 - RNA, 19 nt, Human
cuccucacacacccugagg

SEQ ID NO: 2872880 - RNA, 16 nt, Human
cuccucacacuuacug

SEQ ID NO: 2872881 - RNA, 17 nt, Human
cuccucccaggcgcccc

SEQ ID NO: 2872882 - RNA, 12 nt, Human
cuccucccagcu

SEQ ID NO: 2872883 - RNA, 14 nt, Human
cuccucccagcuug

SEQ ID NO: 2872884 - RNA, 23 nt, Human
cuccucccagcuuguaggagcug

SEQ ID NO: 2872885 - RNA, 22 nt, Human
cuccucccaggcgccccuuccc

SEQ ID NO: 2872886 - RNA, 23 nt, Human
cuccucccaggcgccccuucccc

SEQ ID NO: 2872887 - RNA, 12 nt, Human
cuccucccagga

SEQ ID NO: 2872888 - RNA, 22 nt, Human
cuccuccgaggugguuuuaaag

SEQ ID NO: 2872889 - RNA, 19 nt, Human
cuccuccuggacuccugca

SEQ ID NO: 2872890 - RNA, 15 nt, Human
cuccuccucccccag

SEQ ID NO: 2872891 - RNA, 14 nt, Human
cuccuccuccccca

SEQ ID NO: 2872892 - RNA, 12 nt, Human
cuccuccucgga

SEQ ID NO: 2872893 - RNA, 13 nt, Human
cuccuccucggaa

SEQ ID NO: 2872894 - RNA, 12 nt, Human
cuccuccucuuu

SEQ ID NO: 2872895 - RNA, 13 nt, Human
cuccuccucuuuc

SEQ ID NO: 2872896 - RNA, 14 nt, Human
cuccuccucuuucu

SEQ ID NO: 2872897 - RNA, 15 nt, Human
cuccuccucuuucuc

SEQ ID NO: 2872898 - RNA, 16 nt, Human
cuccuccucuuucucu

SEQ ID NO: 2872899 - RNA, 17 nt, Human
cuccuccucuuucucuc

SEQ ID NO: 2872900 - RNA, 19 nt, Human
cuccuccucuuucucuccc

SEQ ID NO: 2872901 - RNA, 15 nt, Human
cuccuccuggacucc

SEQ ID NO: 2872902 - RNA, 14 nt, Human
cuccuccuggacuc

SEQ ID NO: 2872903 - RNA, 16 nt, Human
cuccuauuuuuguaaa

SEQ ID NO: 2872904 - RNA, 19 nt, Human
cuccuauuuuuguaaacug

SEQ ID NO: 2872905 - RNA, 20 nt, Human
cuccucaauuuuugucucag

SEQ ID NO: 2872906 - RNA, 21 nt, Human
cuccucaauuuuugucucaga

SEQ ID NO: 2872907 - RNA, 18 nt, Human
cuccgaggugguuuuaaa

SEQ ID NO: 2872908 - RNA, 22 nt, Human
cuccuaucagaaguuucucagc

SEQ ID NO: 2872909 - RNA, 13 nt, Human
cucccugugucca

SEQ ID NO: 2872910 - RNA, 21 nt, Human
cucccuguguccaccuguggg

SEQ ID NO: 2872911 - RNA, 13 nt, Human
cucccuguuauuu

SEQ ID NO: 2872912 - RNA, 24 nt, Human
cucccuguuauuuucaaguagcug

SEQ ID NO: 2872913 - RNA, 18 nt, Human
cucccugguucugaugau

SEQ ID NO: 2872914 - RNA, 19 nt, Human
cucccuuggggccuaugca

SEQ ID NO: 2872915 - RNA, 20 nt, Human
cucccuugguggcaagagcc

SEQ ID NO: 2872916 - RNA, 21 nt, Human
cucccuugguggcaagagccc

SEQ ID NO: 2872917 - RNA, 14 nt, Human
cuccuuggugccug

SEQ ID NO: 2872918 - RNA, 14 nt, Human
cuccuuccuuaccc

SEQ ID NO: 2872919 - RNA, 19 nt, Human
cuccuuccuuacccaaacu

SEQ ID NO: 2872920 - RNA, 23 nt, Human
cuccuuccuuacccaaacuguuc

SEQ ID NO: 2872921 - RNA, 22 nt, Human
cuccuuccuugcuguccuaggc

SEQ ID NO: 2872922 - RNA, 13 nt, Human
cuccuuccuuguu

SEQ ID NO: 2872923 - RNA, 22 nt, Human
cuccuuggugccuggccuggca

SEQ ID NO: 2872924 - RNA, 15 nt, Human
cuccuuggugccugg

SEQ ID NO: 2872925 - RNA, 19 nt, Human
cuccuuggugccuggccug

SEQ ID NO: 2872926 - RNA, 23 nt, Human
cucgacguuuacaagcccccccu

SEQ ID NO: 2872927 - RNA, 17 nt, Human
cucgagcaguccugccu

SEQ ID NO: 2872928 - RNA, 23 nt, Human
cucgagcaguccugccucagccu

SEQ ID NO: 2872929 - RNA, 15 nt, Human
cucgagcuuggggca

SEQ ID NO: 2872930 - RNA, 18 nt, Human
cucgagggcagggaccac

SEQ ID NO: 2872931 - RNA, 23 nt, Human
cucgagggcagggaccacacccu

SEQ ID NO: 2872932 - RNA, 14 nt, Human
cucgcaccuuucca

SEQ ID NO: 2872933 - RNA, 15 nt, Human
cucgcaccuuuccaa

SEQ ID NO: 2872934 - RNA, 17 nt, Human
cucgcacggccccgaag

SEQ ID NO: 2872935 - RNA, 16 nt, Human
cucgcaccccccuguu

SEQ ID NO: 2872936 - RNA, 17 nt, Human
cucgcaccccccuguuc

SEQ ID NO: 2872937 - RNA, 19 nt, Human
cucgcaccccccuguucua

SEQ ID NO: 2872938 - RNA, 20 nt, Human
cucgcaccccccuguucuaa

SEQ ID NO: 2872939 - RNA, 21 nt, Human
cucgcaccccccuguucuaag

SEQ ID NO: 2872940 - RNA, 23 nt, Human
cucgcaccccccuguucuaaggg

SEQ ID NO: 2872941 - RNA, 17 nt, Human
cucgauucauauugaau

SEQ ID NO: 2872942 - RNA, 19 nt, Human
cucgauguguacucuaacu

SEQ ID NO: 2872943 - RNA, 23 nt, Human
cucgcaaaaacguaucuccuaau

SEQ ID NO: 2872944 - RNA, 16 nt, Human
cucgcucuguuaccca

SEQ ID NO: 2872945 - RNA, 23 nt, Human
cucgcucugucgcccaggcugga

SEQ ID NO: 2872946 - RNA, 18 nt, Human
cucgcucccucccaggac

SEQ ID NO: 2872947 - RNA, 22 nt, Human
cucgcuauugucaccagggcug

SEQ ID NO: 2872948 - RNA, 15 nt, Human
cucgcucccucccag

SEQ ID NO: 2872949 - RNA, 15 nt, Human
cucgccgucugugaa

SEQ ID NO: 2872950 - RNA, 16 nt, Human
cucgccgucugugaau

SEQ ID NO: 2872951 - RNA, 13 nt, Human
cucgccucuccca

SEQ ID NO: 2872952 - RNA, 14 nt, Human
cucgccucucccac

SEQ ID NO: 2872953 - RNA, 15 nt, Human
cucgccuucaucucc

SEQ ID NO: 2872954 - RNA, 15 nt, Human
cucgcccuccuuucu

SEQ ID NO: 2872955 - RNA, 17 nt, Human
cucgcccuccuuucugu

SEQ ID NO: 2872956 - RNA, 19 nt, Human
cucgcccuccuuucugugc

SEQ ID NO: 2872957 - RNA, 24 nt, Human
cuccugugugugcgccuacaggag

SEQ ID NO: 2872958 - RNA, 23 nt, Human
cuccugugugugcgccuacagga

SEQ ID NO: 2872959 - RNA, 21 nt, Human
cuccugugugugcgccuacag

SEQ ID NO: 2872960 - RNA, 11 nt, Human
cuccuggacuc

SEQ ID NO: 2872961 - RNA, 22 nt, Human
cuccuggaacagaagacagcug

SEQ ID NO: 2872962 - RNA, 17 nt, Human
cuccuggaaccuugcug

SEQ ID NO: 2872963 - RNA, 18 nt, Human
cuccuggaaccuugcugu

SEQ ID NO: 2872964 - RNA, 19 nt, Human
cuccuggaaccuugcuguc

SEQ ID NO: 2872965 - RNA, 20 nt, Human
cuccuggaaccuugcugucc

SEQ ID NO: 2872966 - RNA, 21 nt, Human
cuccuggaaccuugcuguccu

SEQ ID NO: 2872967 - RNA, 22 nt, Human
cuccuggaaccuugcuguccug

SEQ ID NO: 2872968 - RNA, 23 nt, Human
cuccuggaaccuugcuguccuga

SEQ ID NO: 2872969 - RNA, 17 nt, Human
cuccuggaaaggcucag

SEQ ID NO: 2872970 - RNA, 19 nt, Human
cuccuggaaaggcucaguc

SEQ ID NO: 2872971 - RNA, 18 nt, Human
cuccuggaaaggcucagu

SEQ ID NO: 2872972 - RNA, 24 nt, Human
cuccuggaaaggcucagucucagg

SEQ ID NO: 2872973 - RNA, 23 nt, Human
cuccuggaaaggcucagucucag

SEQ ID NO: 2872974 - RNA, 22 nt, Human
cuccuggaaaggcucagucuca

SEQ ID NO: 2872975 - RNA, 20 nt, Human
cuccuggaaaggcucagucu

SEQ ID NO: 2872976 - RNA, 22 nt, Human
cuccuuaucaaaggacaccauu

SEQ ID NO: 2872977 - RNA, 17 nt, Human
cuccuuaucaaaggaca

SEQ ID NO: 2872978 - RNA, 16 nt, Human
cuccuucccaucgcug

SEQ ID NO: 2872979 - RNA, 17 nt, Human
cuccuucccaucgcugu

SEQ ID NO: 2872980 - RNA, 15 nt, Human
cuccucuccccagca

SEQ ID NO: 2872981 - RNA, 13 nt, Human
cuccucuccccag

SEQ ID NO: 2872982 - RNA, 23 nt, Human
cuccugccuagcugccuagcaag

SEQ ID NO: 2872983 - RNA, 11 nt, Human
cuccugccuca

SEQ ID NO: 2872984 - RNA, 12 nt, Human
cuccugccucag

SEQ ID NO: 2872985 - RNA, 16 nt, Human
cuccugccucagccuc

SEQ ID NO: 2872986 - RNA, 17 nt, Human
cuccugccucagccucc

SEQ ID NO: 2872987 - RNA, 21 nt, Human
cuccugccucgaacuggcugc

SEQ ID NO: 2872988 - RNA, 20 nt, Human
cuccugccucgaacuggcug

SEQ ID NO: 2872989 - RNA, 18 nt, Human
cuccugccucgaacuggc

SEQ ID NO: 2872990 - RNA, 21 nt, Human
cuccugccucagccuccugag

SEQ ID NO: 2872991 - RNA, 19 nt, Human
cuccugccucagccucccg

SEQ ID NO: 2872992 - RNA, 22 nt, Human
cuccugccucgaacuggcugca

SEQ ID NO: 2872993 - RNA, 11 nt, Human
cuccucccagc

SEQ ID NO: 2872994 - RNA, 22 nt, Human
cuccaucccucuaaugagacug

SEQ ID NO: 2872995 - RNA, 15 nt, Human
cuccaucccucuaau

SEQ ID NO: 2872996 - RNA, 13 nt, Human
cuccaucccucua

SEQ ID NO: 2872997 - RNA, 12 nt, Human
cuccaucccucu

SEQ ID NO: 2872998 - RNA, 17 nt, Human
cuccaucccaacagcca

SEQ ID NO: 2872999 - RNA, 22 nt, Human
cuccaucccaacagccaugccc

SEQ ID NO: 2873000 - RNA, 22 nt, Human
cuccaucacccucuuccuguga

SEQ ID NO: 2873001 - RNA, 18 nt, Human
cuccaucaguuagagcug

SEQ ID NO: 2873002 - RNA, 19 nt, Human
cuccaucaguuagagcuga

SEQ ID NO: 2873003 - RNA, 11 nt, Human
cuccaggcagg

SEQ ID NO: 2873004 - RNA, 15 nt, Human
cuccaucacccucuu

SEQ ID NO: 2873005 - RNA, 16 nt, Human
cuccaggcaccaucuc

SEQ ID NO: 2873006 - RNA, 17 nt, Human
cuccaggcaccaucucc

SEQ ID NO: 2873007 - RNA, 11 nt, Human
cuccaggacca

SEQ ID NO: 2873008 - RNA, 15 nt, Human
cuccaccuugcgggg

SEQ ID NO: 2873009 - RNA, 18 nt, Human
cuccacgauccugccacc

SEQ ID NO: 2873010 - RNA, 20 nt, Human
cuccacgauccugccacccu

SEQ ID NO: 2873011 - RNA, 23 nt, Human
cuccacgauccugccacccugua

SEQ ID NO: 2873012 - RNA, 15 nt, Human
cuccacgcgcuucga

SEQ ID NO: 2873013 - RNA, 12 nt, Human
cuccaccuuccc

SEQ ID NO: 2873014 - RNA, 14 nt, Human
cuccaccuucccac

SEQ ID NO: 2873015 - RNA, 22 nt, Human
cuccaccucuucaccccccacu

SEQ ID NO: 2873016 - RNA, 12 nt, Human
cuccagccuggg

SEQ ID NO: 2873017 - RNA, 21 nt, Human
cuccagccuuuggccuuggcu

SEQ ID NO: 2873018 - RNA, 13 nt, Human
cuccagcgcugag

SEQ ID NO: 2873019 - RNA, 20 nt, Human
cuccagccugggaggcacag

SEQ ID NO: 2873020 - RNA, 14 nt, Human
cuccagccugggca

SEQ ID NO: 2873021 - RNA, 13 nt, Human
cuccagccugggc

SEQ ID NO: 2873022 - RNA, 20 nt, Human
cuccagcgucaucggacucu

SEQ ID NO: 2873023 - RNA, 12 nt, Human
cuccacccuugg

SEQ ID NO: 2873024 - RNA, 15 nt, Human
cuccacccugcucuc

SEQ ID NO: 2873025 - RNA, 13 nt, Human
cuccaccacaucc

SEQ ID NO: 2873026 - RNA, 13 nt, Human
cuccacccugcuc

SEQ ID NO: 2873027 - RNA, 15 nt, Human
cuccacacaagggaa

SEQ ID NO: 2873028 - RNA, 20 nt, Human
cuccacacaagggaaggaca

SEQ ID NO: 2873029 - RNA, 21 nt, Human
cuccacacaagggaaggacag

SEQ ID NO: 2873030 - RNA, 17 nt, Human
cuccaaugucugcugag

SEQ ID NO: 2873031 - RNA, 19 nt, Human
cuccaaugucugcugagga

SEQ ID NO: 2873032 - RNA, 20 nt, Human
cuccaaugucugcugaggag

SEQ ID NO: 2873033 - RNA, 15 nt, Human
cuccaagucucagug

SEQ ID NO: 2873034 - RNA, 14 nt, Human
cuccaaaggccccc

SEQ ID NO: 2873035 - RNA, 16 nt, Human
cuccaagucucagugg

SEQ ID NO: 2873036 - RNA, 17 nt, Human
cuccaagucucaguggc

SEQ ID NO: 2873037 - RNA, 21 nt, Human
cuccaagucucaguggcuuca

SEQ ID NO: 2873038 - RNA, 22 nt, Human
cuccaaucccaccaacccucag

SEQ ID NO: 2873039 - RNA, 16 nt, Human
cucauuucuaaaagaa

SEQ ID NO: 2873040 - RNA, 22 nt, Human
cucauuugguuugauuuucccu

SEQ ID NO: 2873041 - RNA, 18 nt, Human
cucauuuuuuuaauuuau

SEQ ID NO: 2873042 - RNA, 20 nt, Human
cucauuuuuuuaauuuauua

SEQ ID NO: 2873043 - RNA, 22 nt, Human
cucauuuuuuuuuuuguuucug

SEQ ID NO: 2873044 - RNA, 23 nt, Human
cucauuuuuuuuuuuguuucuga

SEQ ID NO: 2873045 - RNA, 17 nt, Human
cuccaaaacccaugugg

SEQ ID NO: 2873046 - RNA, 20 nt, Human
cuccaaaacccaugugggaa

SEQ ID NO: 2873047 - RNA, 19 nt, Human
cucauuaaccgaugcuuua

SEQ ID NO: 2873048 - RNA, 23 nt, Human
cucauuaaccgaugcuuuaccaa

SEQ ID NO: 2873049 - RNA, 15 nt, Human
cucauuacugggccu

SEQ ID NO: 2873050 - RNA, 16 nt, Human
cucauuacugggccuu

SEQ ID NO: 2873051 - RNA, 18 nt, Human
cucauuacugggccuuag

SEQ ID NO: 2873052 - RNA, 17 nt, Human
cucauuugucacacacu

SEQ ID NO: 2873053 - RNA, 15 nt, Human
cucaucucuguccca

SEQ ID NO: 2873054 - RNA, 14 nt, Human
cucaucugcacccu

SEQ ID NO: 2873055 - RNA, 15 nt, Human
cucaucugcacccuu

SEQ ID NO: 2873056 - RNA, 18 nt, Human
cucaucugcacccuucuu

SEQ ID NO: 2873057 - RNA, 19 nt, Human
cucaucugcacccuucuuu

SEQ ID NO: 2873058 - RNA, 20 nt, Human
cucaucugcacccuucuuuu

SEQ ID NO: 2873059 - RNA, 21 nt, Human
cucaucugcacccuucuuuuc

SEQ ID NO: 2873060 - RNA, 13 nt, Human
cucaucugaggca

SEQ ID NO: 2873061 - RNA, 13 nt, Human
cucauuaaaaaaa

SEQ ID NO: 2873062 - RNA, 13 nt, Human
cucauguuuauga

SEQ ID NO: 2873063 - RNA, 15 nt, Human
cucauguuuaugaaa

SEQ ID NO: 2873064 - RNA, 17 nt, Human
cucauguuuaugaaaau

SEQ ID NO: 2873065 - RNA, 18 nt, Human
cucauguuuaugaaaaua

SEQ ID NO: 2873066 - RNA, 21 nt, Human
cucauguuuaugaaaauaaau

SEQ ID NO: 2873067 - RNA, 19 nt, Human
cucaucccguguucuccuu

SEQ ID NO: 2873068 - RNA, 18 nt, Human
cucaucccuaaugcugca

SEQ ID NO: 2873069 - RNA, 16 nt, Human
cucaucccguguucuc

SEQ ID NO: 2873070 - RNA, 23 nt, Human
cucauccccaggggucccagcca

SEQ ID NO: 2873071 - RNA, 16 nt, Human
cucauccccaguccca

SEQ ID NO: 2873072 - RNA, 19 nt, Human
cucauccccagucccaaug

SEQ ID NO: 2873073 - RNA, 16 nt, Human
cucaucauaaaauaaa

SEQ ID NO: 2873074 - RNA, 21 nt, Human
cucaucccuaaugcugcagau

SEQ ID NO: 2873075 - RNA, 16 nt, Human
cucauccucagaugcu

SEQ ID NO: 2873076 - RNA, 22 nt, Human
cucauccucagaugcucaaagu

SEQ ID NO: 2873077 - RNA, 13 nt, Human
cucauccuccagu

SEQ ID NO: 2873078 - RNA, 22 nt, Human
cucauccuccaguaccuugcuu

SEQ ID NO: 2873079 - RNA, 23 nt, Human
cucauccuccaguaccuugcuuc

SEQ ID NO: 2873080 - RNA, 13 nt, Human
cucauccuccugg

SEQ ID NO: 2873081 - RNA, 15 nt, Human
cucauccuccuggaa

SEQ ID NO: 2873082 - RNA, 23 nt, Human
cucauccuccuggaaccuugcug

SEQ ID NO: 2873083 - RNA, 14 nt, Human
cucauccugaacag

SEQ ID NO: 2873084 - RNA, 16 nt, Human
cucauccugaacagca

SEQ ID NO: 2873085 - RNA, 17 nt, Human
cucaucaaucaaauaag

SEQ ID NO: 2873086 - RNA, 23 nt, Human
cucauaguaugguggcuggguug

SEQ ID NO: 2873087 - RNA, 21 nt, Human
cucaucaaucaaauaaguauu

SEQ ID NO: 2873088 - RNA, 13 nt, Human
cucaucacacaca

SEQ ID NO: 2873089 - RNA, 14 nt, Human
cucaucacacacau

SEQ ID NO: 2873090 - RNA, 15 nt, Human
cucaucacacacaug

SEQ ID NO: 2873091 - RNA, 16 nt, Human
cucaucacacacaugg

SEQ ID NO: 2873092 - RNA, 17 nt, Human
cucaucacacacaugga

SEQ ID NO: 2873093 - RNA, 15 nt, Human
cucaucauaaaauaa

SEQ ID NO: 2873094 - RNA, 14 nt, Human
cucaucauaaaaua

SEQ ID NO: 2873095 - RNA, 12 nt, Human
cucaucauaaaa

SEQ ID NO: 2873096 - RNA, 12 nt, Human
cucaucacugug

SEQ ID NO: 2873097 - RNA, 13 nt, Human
cucaucacugugg

SEQ ID NO: 2873098 - RNA, 15 nt, Human
cucaucacuguggcu

SEQ ID NO: 2873099 - RNA, 16 nt, Human
cucaucacuguggcug

SEQ ID NO: 2873100 - RNA, 21 nt, Human
cucaucacuguggcugucugg

SEQ ID NO: 2873101 - RNA, 19 nt, Human
cucaggugauccacccacc

SEQ ID NO: 2873102 - RNA, 18 nt, Human
cucaggugauccacccac

SEQ ID NO: 2873103 - RNA, 20 nt, Human
cucaggugauccacccaccu

SEQ ID NO: 2873104 - RNA, 18 nt, Human
cucaggggaaaacuguua

SEQ ID NO: 2873105 - RNA, 21 nt, Human
cucauaguaugguggcugggu

SEQ ID NO: 2873106 - RNA, 21 nt, Human
cucauagcccucacccugggg

SEQ ID NO: 2873107 - RNA, 20 nt, Human
cucauagcccucacccuggg

SEQ ID NO: 2873108 - RNA, 17 nt, Human
cucauagcccucacccu

SEQ ID NO: 2873109 - RNA, 13 nt, Human
cucauagcccuca

SEQ ID NO: 2873110 - RNA, 21 nt, Human
cucauacuacauugaguagac

SEQ ID NO: 2873111 - RNA, 14 nt, Human
cucauaccucugac

SEQ ID NO: 2873112 - RNA, 15 nt, Human
cucauaccucugacc

SEQ ID NO: 2873113 - RNA, 21 nt, Human
cucauaccucugaccaacagg

SEQ ID NO: 2873114 - RNA, 18 nt, Human
cucagcauccuggcaccc

SEQ ID NO: 2873115 - RNA, 15 nt, Human
cucagcauccuggca

SEQ ID NO: 2873116 - RNA, 12 nt, Human
cucagccaagcu

SEQ ID NO: 2873117 - RNA, 13 nt, Human
cucagccaagcuu

SEQ ID NO: 2873118 - RNA, 14 nt, Human
cucagccaagcuug

SEQ ID NO: 2873119 - RNA, 17 nt, Human
cucagccacacccaggc

SEQ ID NO: 2873120 - RNA, 19 nt, Human
cucagccacacccaggcac

SEQ ID NO: 2873121 - RNA, 22 nt, Human
cucaggaggcugaggcaggagg

SEQ ID NO: 2873122 - RNA, 20 nt, Human
cucaggaggcugaggcagga

SEQ ID NO: 2873123 - RNA, 19 nt, Human
cucagcccacauagugaug

SEQ ID NO: 2873124 - RNA, 19 nt, Human
cucaggauuuaaaaacugg

SEQ ID NO: 2873125 - RNA, 20 nt, Human
cucaggauuuaaaaacugga

SEQ ID NO: 2873126 - RNA, 14 nt, Human
cucaggcacuagcc

SEQ ID NO: 2873127 - RNA, 15 nt, Human
cucaggcacuagccu

SEQ ID NO: 2873128 - RNA, 18 nt, Human
cucaggcacuagccuuug

SEQ ID NO: 2873129 - RNA, 19 nt, Human
cucaggcacuagccuuugg

SEQ ID NO: 2873130 - RNA, 14 nt, Human
cucaggcaccaguc

SEQ ID NO: 2873131 - RNA, 16 nt, Human
cucaggaggcugaggg

SEQ ID NO: 2873132 - RNA, 23 nt, Human
cucaggaggcugaggcaggagga

SEQ ID NO: 2873133 - RNA, 20 nt, Human
cucaggauauccuuaucaga

SEQ ID NO: 2873134 - RNA, 22 nt, Human
cucaggauauccuuaucagagc

SEQ ID NO: 2873135 - RNA, 12 nt, Human
cucaggauccaa

SEQ ID NO: 2873136 - RNA, 18 nt, Human
cucaggauccaagcuaag

SEQ ID NO: 2873137 - RNA, 20 nt, Human
cucaggauccaagcuaagca

SEQ ID NO: 2873138 - RNA, 14 nt, Human
cucagggacagagc

SEQ ID NO: 2873139 - RNA, 15 nt, Human
cucagggacagagcc

SEQ ID NO: 2873140 - RNA, 16 nt, Human
cucagggacagagcca

SEQ ID NO: 2873141 - RNA, 18 nt, Human
cucagggacagagccaug

SEQ ID NO: 2873142 - RNA, 19 nt, Human
cucagggacagagccaugc

SEQ ID NO: 2873143 - RNA, 23 nt, Human
cucaggcacuagccuuuggcucu

SEQ ID NO: 2873144 - RNA, 14 nt, Human
cucaggcagcucaa

SEQ ID NO: 2873145 - RNA, 15 nt, Human
cucaggcagcucaag

SEQ ID NO: 2873146 - RNA, 23 nt, Human
cucagggagcagggaaggccuga

SEQ ID NO: 2873147 - RNA, 22 nt, Human
cucagggagcagggaaggccug

SEQ ID NO: 2873148 - RNA, 21 nt, Human
cucagggagcagggaaggccu

SEQ ID NO: 2873149 - RNA, 19 nt, Human
cucagggagcagggaaggc

SEQ ID NO: 2873150 - RNA, 18 nt, Human
cucagggagcagggaagg

SEQ ID NO: 2873151 - RNA, 15 nt, Human
cucagggcuccuccc

SEQ ID NO: 2873152 - RNA, 16 nt, Human
cucagggcuccuccca

SEQ ID NO: 2873153 - RNA, 17 nt, Human
cucagggcuccucccag

SEQ ID NO: 2873154 - RNA, 18 nt, Human
cucagggcuccucccagc

SEQ ID NO: 2873155 - RNA, 19 nt, Human
cucagggcuccucccagcu

SEQ ID NO: 2873156 - RNA, 21 nt, Human
cucagggcuccucccagcuug

SEQ ID NO: 2873157 - RNA, 22 nt, Human
cucagggcuaaacgggcauugc

SEQ ID NO: 2873158 - RNA, 21 nt, Human
cucagggcagccucccccggc

SEQ ID NO: 2873159 - RNA, 14 nt, Human
cucagggcagccuc

SEQ ID NO: 2873160 - RNA, 19 nt, Human
cuauaugauuuauaguuug

SEQ ID NO: 2873161 - RNA, 13 nt, Human
cuauauggcaaga

SEQ ID NO: 2873162 - RNA, 19 nt, Human
cuauauggcaagaaagcug

SEQ ID NO: 2873163 - RNA, 21 nt, Human
cuauauguaguauaaagaaaa

SEQ ID NO: 2873164 - RNA, 12 nt, Human
cuauaugugaau

SEQ ID NO: 2873165 - RNA, 20 nt, Human
cuauauucuggccagacucg

SEQ ID NO: 2873166 - RNA, 18 nt, Human
cuauauugauuguccuuu

SEQ ID NO: 2873167 - RNA, 19 nt, Human
cuauauugcccaggcuggu

SEQ ID NO: 2873168 - RNA, 18 nt, Human
cuauaugugaauccucuu

SEQ ID NO: 2873169 - RNA, 17 nt, Human
cuauagccuaggugaca

SEQ ID NO: 2873170 - RNA, 15 nt, Human
cuaucugggccuggg

SEQ ID NO: 2873171 - RNA, 16 nt, Human
cuaucugggccugggc

SEQ ID NO: 2873172 - RNA, 17 nt, Human
cuaucugggccugggcu

SEQ ID NO: 2873173 - RNA, 21 nt, Human
cuaucugggccugggcuaggg

SEQ ID NO: 2873174 - RNA, 23 nt, Human
cuauauuuagauuguuaaaauaa

SEQ ID NO: 2873175 - RNA, 12 nt, Human
cuauauuugcua

SEQ ID NO: 2873176 - RNA, 22 nt, Human
cuauauuugcuagacucuagac

SEQ ID NO: 2873177 - RNA, 23 nt, Human
cuauauuugcuagacucuagaca

SEQ ID NO: 2873178 - RNA, 22 nt, Human
cuauauuuagauuguuaaaaua

SEQ ID NO: 2873179 - RNA, 16 nt, Human
cuauauuuaacaagau

SEQ ID NO: 2873180 - RNA, 13 nt, Human
cuauauuuagauu

SEQ ID NO: 2873181 - RNA, 13 nt, Human
cuauacaaauaua

SEQ ID NO: 2873182 - RNA, 14 nt, Human
cuauacaaauauaa

SEQ ID NO: 2873183 - RNA, 15 nt, Human
cuauacaaauauaaa

SEQ ID NO: 2873184 - RNA, 20 nt, Human
cuauagacuggaaaaaauga

SEQ ID NO: 2873185 - RNA, 21 nt, Human
cuauagacuggaaaaaaugag

SEQ ID NO: 2873186 - RNA, 15 nt, Human
cuauacaacuggaca

SEQ ID NO: 2873187 - RNA, 14 nt, Human
cuauacaucucucc

SEQ ID NO: 2873188 - RNA, 16 nt, Human
cuauacaucucucccc

SEQ ID NO: 2873189 - RNA, 18 nt, Human
cuauacaucucuccccaa

SEQ ID NO: 2873190 - RNA, 14 nt, Human
cuaguggcuugucc

SEQ ID NO: 2873191 - RNA, 15 nt, Human
cuaguggcuuguccu

SEQ ID NO: 2873192 - RNA, 19 nt, Human
cuauaaucccagcacuuug

SEQ ID NO: 2873193 - RNA, 12 nt, Human
cuauaaucuguc

SEQ ID NO: 2873194 - RNA, 13 nt, Human
cuauaaucuguca

SEQ ID NO: 2873195 - RNA, 14 nt, Human
cuauaaucugucaa

SEQ ID NO: 2873196 - RNA, 15 nt, Human
cuauaaucugucaaa

SEQ ID NO: 2873197 - RNA, 18 nt, Human
cuauaaucugucaaaaca

SEQ ID NO: 2873198 - RNA, 19 nt, Human
cuauaaucugucaaaacac

SEQ ID NO: 2873199 - RNA, 21 nt, Human
cuauaaucugucaaaacacug

SEQ ID NO: 2873200 - RNA, 22 nt, Human
cuauaaucugucaaaacacugu

SEQ ID NO: 2873201 - RNA, 21 nt, Human
cuaguggcucucaguuaaaau

SEQ ID NO: 2873202 - RNA, 14 nt, Human
cuagugagcugggc

SEQ ID NO: 2873203 - RNA, 16 nt, Human
cuagugagcugggcau

SEQ ID NO: 2873204 - RNA, 17 nt, Human
cuagugagcugggcaug

SEQ ID NO: 2873205 - RNA, 18 nt, Human
cuagugagcugggcaugg

SEQ ID NO: 2873206 - RNA, 19 nt, Human
cuagugauguuuuuaugau

SEQ ID NO: 2873207 - RNA, 19 nt, Human
cuauucaguggcgagaaau

SEQ ID NO: 2873208 - RNA, 23 nt, Human
cuauucaagguggccaaauuauu

SEQ ID NO: 2873209 - RNA, 22 nt, Human
cuauucaagguggccaaauuau

SEQ ID NO: 2873210 - RNA, 17 nt, Human
cuauggcugaguucugg

SEQ ID NO: 2873211 - RNA, 12 nt, Human
cuauuacaaaua

SEQ ID NO: 2873212 - RNA, 14 nt, Human
cuaugguuaugaaa

SEQ ID NO: 2873213 - RNA, 15 nt, Human
cuaugguuaugaaag

SEQ ID NO: 2873214 - RNA, 16 nt, Human
cuaugguuaugaaaga

SEQ ID NO: 2873215 - RNA, 21 nt, Human
cuauuaggugcaauuucaagg

SEQ ID NO: 2873216 - RNA, 16 nt, Human
cuauuagccaggauca

SEQ ID NO: 2873217 - RNA, 22 nt, Human
cuauuagccaggaucauggugu

SEQ ID NO: 2873218 - RNA, 23 nt, Human
cuauuacugucugguuuuaacaa

SEQ ID NO: 2873219 - RNA, 23 nt, Human
cuaugggacucaaugcacugaca

SEQ ID NO: 2873220 - RNA, 15 nt, Human
cuaugggagccccag

SEQ ID NO: 2873221 - RNA, 14 nt, Human
cuaugggagcccca

SEQ ID NO: 2873222 - RNA, 13 nt, Human
cuaugggagcccc

SEQ ID NO: 2873223 - RNA, 19 nt, Human
cuaugggagagugucaacc

SEQ ID NO: 2873224 - RNA, 21 nt, Human
cuaugggagagugucaaccag

SEQ ID NO: 2873225 - RNA, 22 nt, Human
cuaugggagagugucaaccaga

SEQ ID NO: 2873226 - RNA, 23 nt, Human
cuaugggagagugucaaccagac

SEQ ID NO: 2873227 - RNA, 22 nt, Human
cuaugggacucaaugcacugac

SEQ ID NO: 2873228 - RNA, 18 nt, Human
cuaugggacucaaugcac

SEQ ID NO: 2873229 - RNA, 19 nt, Human
cuaugggggcacugaggac

SEQ ID NO: 2873230 - RNA, 16 nt, Human
cuaugggagccccagg

SEQ ID NO: 2873231 - RNA, 13 nt, Human
cuauguaaacuac

SEQ ID NO: 2873232 - RNA, 13 nt, Human
cuaugcugcuuuu

SEQ ID NO: 2873233 - RNA, 15 nt, Human
cuaugcugcuuuuau

SEQ ID NO: 2873234 - RNA, 16 nt, Human
cuaugcugcuuuuaua

SEQ ID NO: 2873235 - RNA, 19 nt, Human
cuaugcugcuuuuauaucu

SEQ ID NO: 2873236 - RNA, 20 nt, Human
cuaugcugcuuuuauaucug

SEQ ID NO: 2873237 - RNA, 13 nt, Human
cuaugcuguuugu

SEQ ID NO: 2873238 - RNA, 18 nt, Human
cuaugcuguuuguaguga

SEQ ID NO: 2873239 - RNA, 21 nt, Human
cuaugcugguaggcuccugcc

SEQ ID NO: 2873240 - RNA, 14 nt, Human
cuauggaauuuaua

SEQ ID NO: 2873241 - RNA, 22 nt, Human
cuauggaauuuauaauucagua

SEQ ID NO: 2873242 - RNA, 12 nt, Human
cuauggacacag

SEQ ID NO: 2873243 - RNA, 14 nt, Human
cuauggacacaggg

SEQ ID NO: 2873244 - RNA, 15 nt, Human
cuauggacacagggu

SEQ ID NO: 2873245 - RNA, 19 nt, Human
cuauggacggugcuccagg

SEQ ID NO: 2873246 - RNA, 16 nt, Human
cuauggaaaaucagcu

SEQ ID NO: 2873247 - RNA, 22 nt, Human
cuauggacggugcuccaggcag

SEQ ID NO: 2873248 - RNA, 23 nt, Human
cuauggacggugcuccaggcagg

SEQ ID NO: 2873249 - RNA, 22 nt, Human
cuauggcagaaaaaaugucugu

SEQ ID NO: 2873250 - RNA, 16 nt, Human
cuauggcagaaaaaau

SEQ ID NO: 2873251 - RNA, 23 nt, Human
cuauggcagaaaaaaugucugua

SEQ ID NO: 2873252 - RNA, 14 nt, Human
cuauggcagaaaaa

SEQ ID NO: 2873253 - RNA, 19 nt, Human
cuauggagccuggcacagg

SEQ ID NO: 2873254 - RNA, 23 nt, Human
cuauggagccuggcacaggacug

SEQ ID NO: 2873255 - RNA, 22 nt, Human
cuaugcacauauggacucugca

SEQ ID NO: 2873256 - RNA, 21 nt, Human
cuaugaucccagcacuuuggg

SEQ ID NO: 2873257 - RNA, 13 nt, Human
cuaugcacauaug

SEQ ID NO: 2873258 - RNA, 18 nt, Human
cuaugcacauauggacuc

SEQ ID NO: 2873259 - RNA, 20 nt, Human
cuaugcagagguccacaaca

SEQ ID NO: 2873260 - RNA, 20 nt, Human
cuaugcacauauggacucug

SEQ ID NO: 2873261 - RNA, 21 nt, Human
cuaugcacauauggacucugc

SEQ ID NO: 2873262 - RNA, 22 nt, Human
cuaugaggaauaauuauuuauu

SEQ ID NO: 2873263 - RNA, 23 nt, Human
cuaugaggaauaauuauuuauuu

SEQ ID NO: 2873264 - RNA, 12 nt, Human
cuaugaggaaag

SEQ ID NO: 2873265 - RNA, 13 nt, Human
cuaugaggaaagg

SEQ ID NO: 2873266 - RNA, 14 nt, Human
cuaugaggaaaggu

SEQ ID NO: 2873267 - RNA, 14 nt, Human
cuaugagcauccug

SEQ ID NO: 2873268 - RNA, 18 nt, Human
cuaugagcauccugagcc

SEQ ID NO: 2873269 - RNA, 19 nt, Human
cuaugagcauccugagccc

SEQ ID NO: 2873270 - RNA, 21 nt, Human
cuaugagcauccugagccccg

SEQ ID NO: 2873271 - RNA, 22 nt, Human
cuaugagcauccugagccccgc

SEQ ID NO: 2873272 - RNA, 17 nt, Human
cuaugagucuagauguu

SEQ ID NO: 2873273 - RNA, 19 nt, Human
cuaugagucuagauguuua

SEQ ID NO: 2873274 - RNA, 15 nt, Human
cuaugaguggaaaaa

SEQ ID NO: 2873275 - RNA, 16 nt, Human
cuaugaguggaaaaag

SEQ ID NO: 2873276 - RNA, 20 nt, Human
cuaugaguggaaaaagccaa

SEQ ID NO: 2873277 - RNA, 13 nt, Human
cuaugagucuaga

SEQ ID NO: 2873278 - RNA, 14 nt, Human
cuaugagucuagau

SEQ ID NO: 2873279 - RNA, 15 nt, Human
cuaugagucuagaug

SEQ ID NO: 2873280 - RNA, 16 nt, Human
cuaugagucuagaugu

SEQ ID NO: 2873281 - RNA, 19 nt, Human
cuagugaccccuucccugu

SEQ ID NO: 2873282 - RNA, 20 nt, Human
cuagugaccccuucccuguc

SEQ ID NO: 2873283 - RNA, 15 nt, Human
cuagguaauuuuuac

SEQ ID NO: 2873284 - RNA, 16 nt, Human
cuagugacagcuugug

SEQ ID NO: 2873285 - RNA, 17 nt, Human
cuagucccuuccccucc

SEQ ID NO: 2873286 - RNA, 15 nt, Human
cuagucccuuccccu

SEQ ID NO: 2873287 - RNA, 14 nt, Human
cuagucccuucccc

SEQ ID NO: 2873288 - RNA, 14 nt, Human
cuaguccagugacc

SEQ ID NO: 2873289 - RNA, 12 nt, Human
cuaguacaaauu

SEQ ID NO: 2873290 - RNA, 13 nt, Human
cuaguacacuuuu

SEQ ID NO: 2873291 - RNA, 15 nt, Human
cuaguacacuuuuau

SEQ ID NO: 2873292 - RNA, 19 nt, Human
cuaguacacuuuuaugagc

SEQ ID NO: 2873293 - RNA, 17 nt, Human
cuagucaccccaaguag

SEQ ID NO: 2873294 - RNA, 21 nt, Human
cuaguaaguaauuaugcacua

SEQ ID NO: 2873295 - RNA, 22 nt, Human
cuaguaaguaauuaugcacuaa

SEQ ID NO: 2873296 - RNA, 16 nt, Human
cuaguaaaaauacaaa

SEQ ID NO: 2873297 - RNA, 13 nt, Human
cuagguuucaaag

SEQ ID NO: 2873298 - RNA, 14 nt, Human
cuagguuuuuuccu

SEQ ID NO: 2873299 - RNA, 15 nt, Human
cuagguucaauuccc

SEQ ID NO: 2873300 - RNA, 19 nt, Human
cuagguucccggucccgag

SEQ ID NO: 2873301 - RNA, 20 nt, Human
cuagguucccggucccgagu

SEQ ID NO: 2873302 - RNA, 13 nt, Human
cuagguucccugu

SEQ ID NO: 2873303 - RNA, 16 nt, Human
cuagguucccuguucu

SEQ ID NO: 2873304 - RNA, 21 nt, Human
cuagguucccuguucuuccuc

SEQ ID NO: 2873305 - RNA, 18 nt, Human
cuaggugacagagugaga

SEQ ID NO: 2873306 - RNA, 14 nt, Human
cuaggugacagagu

SEQ ID NO: 2873307 - RNA, 14 nt, Human
cuagguacuucagg

SEQ ID NO: 2873308 - RNA, 15 nt, Human
cuagguagaaaaagg

SEQ ID NO: 2873309 - RNA, 17 nt, Human
cuagguagaaaaagggu

SEQ ID NO: 2873310 - RNA, 18 nt, Human
cuagguagaaaaaggguc

SEQ ID NO: 2873311 - RNA, 19 nt, Human
cuagguagaaaaaggguca

SEQ ID NO: 2873312 - RNA, 24 nt, Human
cuaggugacagagugagacucugu

SEQ ID NO: 2873313 - RNA, 14 nt, Human
cuaggucauaaaga

SEQ ID NO: 2873314 - RNA, 23 nt, Human
cuaggucucggacuaagccuacc

SEQ ID NO: 2873315 - RNA, 23 nt, Human
cuagguggcaaggcugugcuccc

SEQ ID NO: 2873316 - RNA, 17 nt, Human
cuagguggcaaggcugu

SEQ ID NO: 2873317 - RNA, 19 nt, Human
cuagguggcaaggcugugc

SEQ ID NO: 2873318 - RNA, 22 nt, Human
cgcccaguuggguggaugccug

SEQ ID NO: 2873319 - RNA, 23 nt, Human
cgcccaguuggguggaugccugg

SEQ ID NO: 2873320 - RNA, 18 nt, Human
cgcccaugcacuggggac

SEQ ID NO: 2873321 - RNA, 12 nt, Human
cgccccacccag

SEQ ID NO: 2873322 - RNA, 21 nt, Human
cgccccaaaguaaaagaaacc

SEQ ID NO: 2873323 - RNA, 13 nt, Human
cgccccacccaga

SEQ ID NO: 2873324 - RNA, 15 nt, Human
cuaggguugcuggag

SEQ ID NO: 2873325 - RNA, 18 nt, Human
cuaggguugcuggagccu

SEQ ID NO: 2873326 - RNA, 19 nt, Human
cuaggguugcuggagccug

SEQ ID NO: 2873327 - RNA, 12 nt, Human
cuauaguauuug

SEQ ID NO: 2873328 - RNA, 15 nt, Human
cuauaguauuugauu

SEQ ID NO: 2873329 - RNA, 18 nt, Human
cuauaguauuugauucaa

SEQ ID NO: 2873330 - RNA, 22 nt, Human
cuauaguauuugauucaaaaua

SEQ ID NO: 2873331 - RNA, 13 nt, Human
cucagcaagcccu

SEQ ID NO: 2873332 - RNA, 17 nt, Human
cucagauccuuguuuca

SEQ ID NO: 2873333 - RNA, 19 nt, Human
cucagauccuuguuucaaa

SEQ ID NO: 2873334 - RNA, 15 nt, Human
cucagaucugucuga

SEQ ID NO: 2873335 - RNA, 18 nt, Human
cucagaucugucugauag

SEQ ID NO: 2873336 - RNA, 17 nt, Human
cucagcauccuggcacc

SEQ ID NO: 2873337 - RNA, 16 nt, Human
cucagcauccuggcac

SEQ ID NO: 2873338 - RNA, 22 nt, Human
cucagcagccgccuuaagcuga

SEQ ID NO: 2873339 - RNA, 23 nt, Human
cucagcagccgccuuaagcugau

SEQ ID NO: 2873340 - RNA, 13 nt, Human
cucagagagggca

SEQ ID NO: 2873341 - RNA, 15 nt, Human
cucagagagggcagg

SEQ ID NO: 2873342 - RNA, 23 nt, Human
cucagagagggcaggcaugaagu

SEQ ID NO: 2873343 - RNA, 21 nt, Human
cucagagaccugaagugugca

SEQ ID NO: 2873344 - RNA, 18 nt, Human
cucagaguucuauacugu

SEQ ID NO: 2873345 - RNA, 13 nt, Human
cucagagugcaag

SEQ ID NO: 2873346 - RNA, 17 nt, Human
cucagaucaguguacca

SEQ ID NO: 2873347 - RNA, 13 nt, Human
cucagaucacugc

SEQ ID NO: 2873348 - RNA, 17 nt, Human
cucagaucacugcaacc

SEQ ID NO: 2873349 - RNA, 21 nt, Human
cucagaucaguguaccauuug

SEQ ID NO: 2873350 - RNA, 15 nt, Human
cucagauccuuguuu

SEQ ID NO: 2873351 - RNA, 22 nt, Human
cucacuguugcccaggcuggcg

SEQ ID NO: 2873352 - RNA, 21 nt, Human
cucacuguugcccaggcuggc

SEQ ID NO: 2873353 - RNA, 17 nt, Human
cucagagaaaagagauu

SEQ ID NO: 2873354 - RNA, 23 nt, Human
cucagagaaaagagauugagaug

SEQ ID NO: 2873355 - RNA, 16 nt, Human
cucagacuuuuguaca

SEQ ID NO: 2873356 - RNA, 17 nt, Human
cucagacuuuuguacau

SEQ ID NO: 2873357 - RNA, 23 nt, Human
cucagagaauuucuaccauuuca

SEQ ID NO: 2873358 - RNA, 20 nt, Human
cucacuguugcccaggcugg

SEQ ID NO: 2873359 - RNA, 12 nt, Human
cucacugcccgc

SEQ ID NO: 2873360 - RNA, 18 nt, Human
cucacugcccgcacaccc

SEQ ID NO: 2873361 - RNA, 19 nt, Human
cucacugcccgcacacccu

SEQ ID NO: 2873362 - RNA, 20 nt, Human
cucacugcccgcacacccuc

SEQ ID NO: 2873363 - RNA, 21 nt, Human
cucacucugucgcccagucug

SEQ ID NO: 2873364 - RNA, 13 nt, Human
cucacucugucgc

SEQ ID NO: 2873365 - RNA, 22 nt, Human
cucacucugucgcccagucugg

SEQ ID NO: 2873366 - RNA, 15 nt, Human
cucacucuggccuca

SEQ ID NO: 2873367 - RNA, 12 nt, Human
cucacugcagcc

SEQ ID NO: 2873368 - RNA, 12 nt, Human
cucacugaagcc

SEQ ID NO: 2873369 - RNA, 15 nt, Human
cucacugaagccugc

SEQ ID NO: 2873370 - RNA, 16 nt, Human
cucacugaagccugcg

SEQ ID NO: 2873371 - RNA, 23 nt, Human
cucacugaagccugcguuggucc

SEQ ID NO: 2873372 - RNA, 15 nt, Human
cucacugauauauuu

SEQ ID NO: 2873373 - RNA, 22 nt, Human
cucacugauauauuuuccaggg

SEQ ID NO: 2873374 - RNA, 13 nt, Human
cucacugcagccu

SEQ ID NO: 2873375 - RNA, 18 nt, Human
cucacugcaaccuucacc

SEQ ID NO: 2873376 - RNA, 16 nt, Human
cucacuccuaccuggu

SEQ ID NO: 2873377 - RNA, 17 nt, Human
cucacuccuaccuggua

SEQ ID NO: 2873378 - RNA, 19 nt, Human
cucacuccuaccugguaau

SEQ ID NO: 2873379 - RNA, 12 nt, Human
cucacucugucg

SEQ ID NO: 2873380 - RNA, 11 nt, Human
cucacucuguc

SEQ ID NO: 2873381 - RNA, 14 nt, Human
cucacucuggccuc

SEQ ID NO: 2873382 - RNA, 11 nt, Human
cucacucugcc

SEQ ID NO: 2873383 - RNA, 12 nt, Human
cucacucugcca

SEQ ID NO: 2873384 - RNA, 13 nt, Human
cucacucugccag

SEQ ID NO: 2873385 - RNA, 14 nt, Human
cucacucugccagg

SEQ ID NO: 2873386 - RNA, 15 nt, Human
cucacucugccaggg

SEQ ID NO: 2873387 - RNA, 18 nt, Human
cucacucugccagggcag

SEQ ID NO: 2873388 - RNA, 20 nt, Human
cucacuauguugcccaggca

SEQ ID NO: 2873389 - RNA, 19 nt, Human
cucacuauguugcccaggc

SEQ ID NO: 2873390 - RNA, 22 nt, Human
cucaccccaucccacacccugg

SEQ ID NO: 2873391 - RNA, 21 nt, Human
cucaccccaucccacacccug

SEQ ID NO: 2873392 - RNA, 19 nt, Human
cucaccccaucccacaccc

SEQ ID NO: 2873393 - RNA, 14 nt, Human
cucacccccagcuu

SEQ ID NO: 2873394 - RNA, 18 nt, Human
cucacccccagcuuugcu

SEQ ID NO: 2873395 - RNA, 17 nt, Human
cucacccccagcuuugc

SEQ ID NO: 2873396 - RNA, 13 nt, Human
cucaccccauccc

SEQ ID NO: 2873397 - RNA, 12 nt, Human
cucaccccaucc

SEQ ID NO: 2873398 - RNA, 14 nt, Human
cucaccaucugugc

SEQ ID NO: 2873399 - RNA, 20 nt, Human
cucaccaguguccccuccac

SEQ ID NO: 2873400 - RNA, 23 nt, Human
cucaccaguguccccuccacugu

SEQ ID NO: 2873401 - RNA, 24 nt, Human
cucaccaguguccccuccacuguc

SEQ ID NO: 2873402 - RNA, 22 nt, Human
cucacuauguugcccaggcagg

SEQ ID NO: 2873403 - RNA, 21 nt, Human
cucacuauguugcccaggcag

SEQ ID NO: 2873404 - RNA, 23 nt, Human
cucacuauguugcccaggcaggu

SEQ ID NO: 2873405 - RNA, 19 nt, Human
cucacccccagcuuugcua

SEQ ID NO: 2873406 - RNA, 12 nt, Human
cucacuccccau

SEQ ID NO: 2873407 - RNA, 19 nt, Human
cucacuccccaugccacgu

SEQ ID NO: 2873408 - RNA, 15 nt, Human
cucacucccagucca

SEQ ID NO: 2873409 - RNA, 13 nt, Human
cucacuccuaccu

SEQ ID NO: 2873410 - RNA, 15 nt, Human
cucacuccuaccugg

SEQ ID NO: 2873411 - RNA, 22 nt, Human
cucacauuuauucugcucacau

SEQ ID NO: 2873412 - RNA, 12 nt, Human
cucacauuuaug

SEQ ID NO: 2873413 - RNA, 19 nt, Human
cucacauuuauucugcuca

SEQ ID NO: 2873414 - RNA, 15 nt, Human
cucacauuuauucug

SEQ ID NO: 2873415 - RNA, 18 nt, Human
cucaccagccccagugcc

SEQ ID NO: 2873416 - RNA, 17 nt, Human
cucaccagccccagugc

SEQ ID NO: 2873417 - RNA, 22 nt, Human
cucaccagccccacugccagca

SEQ ID NO: 2873418 - RNA, 21 nt, Human
cucaccagccccacugccagc

SEQ ID NO: 2873419 - RNA, 23 nt, Human
cucaccagccccacugccagcag

SEQ ID NO: 2873420 - RNA, 19 nt, Human
cucaccagcugcugcucug

SEQ ID NO: 2873421 - RNA, 15 nt, Human
cucaccagccccagu

SEQ ID NO: 2873422 - RNA, 14 nt, Human
cucaccagccccag

SEQ ID NO: 2873423 - RNA, 13 nt, Human
cucaccagcccca

SEQ ID NO: 2873424 - RNA, 20 nt, Human
cucaccagccccacugccag

SEQ ID NO: 2873425 - RNA, 19 nt, Human
cucaccagccccacugcca

SEQ ID NO: 2873426 - RNA, 18 nt, Human
cucaccagccccacugcc

SEQ ID NO: 2873427 - RNA, 17 nt, Human
cucaccagccccacugc

SEQ ID NO: 2873428 - RNA, 16 nt, Human
cucaccagccccacug

SEQ ID NO: 2873429 - RNA, 20 nt, Human
cucaccagaauugugcaaau

SEQ ID NO: 2873430 - RNA, 13 nt, Human
cucacaccaaauu

SEQ ID NO: 2873431 - RNA, 17 nt, Human
cucaagugauccuccca

SEQ ID NO: 2873432 - RNA, 18 nt, Human
cucaagugauccucccac

SEQ ID NO: 2873433 - RNA, 23 nt, Human
cucacaccaggcuugccugcagg

SEQ ID NO: 2873434 - RNA, 14 nt, Human
cucacagucccacu

SEQ ID NO: 2873435 - RNA, 17 nt, Human
cucacagucccacugug

SEQ ID NO: 2873436 - RNA, 18 nt, Human
cucacagucccacugugc

SEQ ID NO: 2873437 - RNA, 18 nt, Human
cucacagguuggaagaga

SEQ ID NO: 2873438 - RNA, 19 nt, Human
cucacagguuggaagagaa

SEQ ID NO: 2873439 - RNA, 22 nt, Human
cucacagguuggaagagaauca

SEQ ID NO: 2873440 - RNA, 23 nt, Human
cucacagguuggaagagaaucac

SEQ ID NO: 2873441 - RNA, 16 nt, Human
cucacaguaacccaaa

SEQ ID NO: 2873442 - RNA, 19 nt, Human
cucacaguaacccaaaccu

SEQ ID NO: 2873443 - RNA, 20 nt, Human
cucacaguaacccaaaccuc

SEQ ID NO: 2873444 - RNA, 23 nt, Human
cucacaguaacccaaaccucaag

SEQ ID NO: 2873445 - RNA, 13 nt, Human
cucacaguacagc

SEQ ID NO: 2873446 - RNA, 20 nt, Human
cucacaguacagcaugugcc

SEQ ID NO: 2873447 - RNA, 22 nt, Human
cucacaguacagcaugugccuu

SEQ ID NO: 2873448 - RNA, 16 nt, Human
cucacagccucugacc

SEQ ID NO: 2873449 - RNA, 19 nt, Human
cucacagccucugaccccu

SEQ ID NO: 2873450 - RNA, 21 nt, Human
cucacagccucugaccccucc

SEQ ID NO: 2873451 - RNA, 22 nt, Human
cucacagccucugaccccuccu

SEQ ID NO: 2873452 - RNA, 19 nt, Human
cucacaccgcgucugguga

SEQ ID NO: 2873453 - RNA, 11 nt, Human
cucacagccuc

SEQ ID NO: 2873454 - RNA, 12 nt, Human
cucacagccucu

SEQ ID NO: 2873455 - RNA, 13 nt, Human
cucacagccucug

SEQ ID NO: 2873456 - RNA, 14 nt, Human
cucacagccucuga

SEQ ID NO: 2873457 - RNA, 15 nt, Human
cucacagccucugac

SEQ ID NO: 2873458 - RNA, 17 nt, Human
cucaagugauucuccug

SEQ ID NO: 2873459 - RNA, 14 nt, Human
cucaaguccucuuu

SEQ ID NO: 2873460 - RNA, 21 nt, Human
cucaaguccucuuuucugaga

SEQ ID NO: 2873461 - RNA, 15 nt, Human
cucaagaaauuccca

SEQ ID NO: 2873462 - RNA, 15 nt, Human
cucaagaagcaggcu

SEQ ID NO: 2873463 - RNA, 16 nt, Human
cucaacuuucuguugg

SEQ ID NO: 2873464 - RNA, 17 nt, Human
cucaacuuucuguugga

SEQ ID NO: 2873465 - RNA, 13 nt, Human
cucaagaagcagg

SEQ ID NO: 2873466 - RNA, 14 nt, Human
cucaagaagcaggc

SEQ ID NO: 2873467 - RNA, 23 nt, Human
cucaagaagcaggcuacacugac

SEQ ID NO: 2873468 - RNA, 11 nt, Human
cucaagacaau

SEQ ID NO: 2873469 - RNA, 14 nt, Human
cuauuucaguacuu

SEQ ID NO: 2873470 - RNA, 19 nt, Human
cuauuucaguacuucagca

SEQ ID NO: 2873471 - RNA, 13 nt, Human
cuauuucauuuuu

SEQ ID NO: 2873472 - RNA, 13 nt, Human
cuauuucggccuu

SEQ ID NO: 2873473 - RNA, 22 nt, Human
cuauuucuacacagugggaacu

SEQ ID NO: 2873474 - RNA, 20 nt, Human
cuauuucuagggcugggaaa

SEQ ID NO: 2873475 - RNA, 19 nt, Human
cucaaaucguccagcgacc

SEQ ID NO: 2873476 - RNA, 16 nt, Human
cucaaaugcucagacc

SEQ ID NO: 2873477 - RNA, 13 nt, Human
cucaaaucuguua

SEQ ID NO: 2873478 - RNA, 17 nt, Human
cucaaccuccugggcua

SEQ ID NO: 2873479 - RNA, 15 nt, Human
cucaaccuccugggc

SEQ ID NO: 2873480 - RNA, 13 nt, Human
cucaaccuccugg

SEQ ID NO: 2873481 - RNA, 12 nt, Human
cucaacaauaaa

SEQ ID NO: 2873482 - RNA, 14 nt, Human
cucaacaauaaaac

SEQ ID NO: 2873483 - RNA, 19 nt, Human
cucaacaaagcacaguguu

SEQ ID NO: 2873484 - RNA, 15 nt, Human
cucaacaaagcacag

SEQ ID NO: 2873485 - RNA, 19 nt, Human
cucaaaugcucagaccagc

SEQ ID NO: 2873486 - RNA, 23 nt, Human
cuauuuaccugcaggcugagcca

SEQ ID NO: 2873487 - RNA, 12 nt, Human
cuauuccagcuc

SEQ ID NO: 2873488 - RNA, 13 nt, Human
cuauuccagcuca

SEQ ID NO: 2873489 - RNA, 17 nt, Human
cuauuccagcucauuca

SEQ ID NO: 2873490 - RNA, 23 nt, Human
cuauuccagcucauucauuuuau

SEQ ID NO: 2873491 - RNA, 11 nt, Human
cuauucaguug

SEQ ID NO: 2873492 - RNA, 14 nt, Human
cuauucaguugugu

SEQ ID NO: 2873493 - RNA, 15 nt, Human
cuauucaguuguguu

SEQ ID NO: 2873494 - RNA, 17 nt, Human
cuauucauuaaauguuu

SEQ ID NO: 2873495 - RNA, 18 nt, Human
cuauucauuaaauguuug

SEQ ID NO: 2873496 - RNA, 15 nt, Human
cuauuccaaaaaggu

SEQ ID NO: 2873497 - RNA, 14 nt, Human
cuauuccugaacua

SEQ ID NO: 2873498 - RNA, 19 nt, Human
cuauucucaaaguuuccua

SEQ ID NO: 2873499 - RNA, 21 nt, Human
cuauucucaaaguuuccuaau

SEQ ID NO: 2873500 - RNA, 16 nt, Human
cuauuccuucuggccu

SEQ ID NO: 2873501 - RNA, 17 nt, Human
cuauuccuucuggccuu

SEQ ID NO: 2873502 - RNA, 23 nt, Human
cuauuccuucuggccuuuccucu

SEQ ID NO: 2873503 - RNA, 12 nt, Human
cuauuccuuucc

SEQ ID NO: 2873504 - RNA, 14 nt, Human
cuauuccuuucccu

SEQ ID NO: 2873505 - RNA, 15 nt, Human
cuauuccuuucccuu

SEQ ID NO: 2873506 - RNA, 16 nt, Human
cuauuccuuucccuuc

SEQ ID NO: 2873507 - RNA, 17 nt, Human
cuauuccuuucccuucc

SEQ ID NO: 2873508 - RNA, 18 nt, Human
cuauuccuuucccuuccu

SEQ ID NO: 2873509 - RNA, 19 nt, Human
cuauuccuuucccuuccuc

SEQ ID NO: 2873510 - RNA, 20 nt, Human
cuauuccuuucccuuccucu

SEQ ID NO: 2873511 - RNA, 22 nt, Human
cuauuccuuucccuuccucuuc

SEQ ID NO: 2873512 - RNA, 15 nt, Human
cuauucgaaugaaaa

SEQ ID NO: 2873513 - RNA, 17 nt, Human
cuauucgaaugaaaaga

SEQ ID NO: 2873514 - RNA, 17 nt, Human
cuauuuauauguacaug

SEQ ID NO: 2873515 - RNA, 14 nt, Human
cuauuuaugccuug

SEQ ID NO: 2873516 - RNA, 20 nt, Human
cuauuuaugccuugaugauu

SEQ ID NO: 2873517 - RNA, 21 nt, Human
cuauuuaugccuugaugauuu

SEQ ID NO: 2873518 - RNA, 23 nt, Human
cuauuuaguuuuuguaauuuauu

SEQ ID NO: 2873519 - RNA, 22 nt, Human
cuauuuaguuuuuguaauuuau

SEQ ID NO: 2873520 - RNA, 20 nt, Human
cuauuuaguuuuuguaauuu

SEQ ID NO: 2873521 - RNA, 17 nt, Human
cuauuuaguuuuuguaa

SEQ ID NO: 2873522 - RNA, 18 nt, Human
cuauuuaauuaggaaaaa

SEQ ID NO: 2873523 - RNA, 21 nt, Human
cuauuuaauuaggaaaaaaac

SEQ ID NO: 2873524 - RNA, 21 nt, Human
cuauugugggacuuauuacaa

SEQ ID NO: 2873525 - RNA, 19 nt, Human
cuauugucaccagggcugg

SEQ ID NO: 2873526 - RNA, 15 nt, Human
cugcaaguccuuuug

SEQ ID NO: 2873527 - RNA, 18 nt, Human
cugcaaguccuuuuguaa

SEQ ID NO: 2873528 - RNA, 19 nt, Human
cugcaaguccuuuuguaaa

SEQ ID NO: 2873529 - RNA, 20 nt, Human
cugcaaguccuuuuguaaag

SEQ ID NO: 2873530 - RNA, 21 nt, Human
cugcaaguccuuuuguaaagu

SEQ ID NO: 2873531 - RNA, 19 nt, Human
cugcaagugacaucucuuu

SEQ ID NO: 2873532 - RNA, 14 nt, Human
cugcaauaacuucu

SEQ ID NO: 2873533 - RNA, 15 nt, Human
cugcaauaacuucug

SEQ ID NO: 2873534 - RNA, 16 nt, Human
cugcaauaacuucuga

SEQ ID NO: 2873535 - RNA, 17 nt, Human
cugcaauaacuucugac

SEQ ID NO: 2873536 - RNA, 18 nt, Human
cugcaauaacuucugacc

SEQ ID NO: 2873537 - RNA, 19 nt, Human
cugcaauaacuucugaccu

SEQ ID NO: 2873538 - RNA, 13 nt, Human
cugcacacagcac

SEQ ID NO: 2873539 - RNA, 11 nt, Human
cugcacacaag

SEQ ID NO: 2873540 - RNA, 17 nt, Human
cugcacacaagcccaca

SEQ ID NO: 2873541 - RNA, 22 nt, Human
cugcacacaagcccacagcaca

SEQ ID NO: 2873542 - RNA, 23 nt, Human
cugcacacaagcccacagcacag

SEQ ID NO: 2873543 - RNA, 22 nt, Human
cugcacaugaaucccacccaca

SEQ ID NO: 2873544 - RNA, 23 nt, Human
cugcacaugaaucccacccacau

SEQ ID NO: 2873545 - RNA, 13 nt, Human
cugcacaugaaga

SEQ ID NO: 2873546 - RNA, 14 nt, Human
cugcacaugaagaa

SEQ ID NO: 2873547 - RNA, 14 nt, Human
cugcacaugucuug

SEQ ID NO: 2873548 - RNA, 16 nt, Human
cugcacaugucuugua

SEQ ID NO: 2873549 - RNA, 21 nt, Human
cugcacaugucuuguacaugu

SEQ ID NO: 2873550 - RNA, 23 nt, Human
cugcacaugucuuguacaugugu

SEQ ID NO: 2873551 - RNA, 22 nt, Human
cugcacagugcaucucagccca

SEQ ID NO: 2873552 - RNA, 22 nt, Human
cugcacacgcuccuuccucuga

SEQ ID NO: 2873553 - RNA, 20 nt, Human
cugcacacgcuccuuccucu

SEQ ID NO: 2873554 - RNA, 14 nt, Human
cugcacacagcacg

SEQ ID NO: 2873555 - RNA, 15 nt, Human
cugcacuccucaggg

SEQ ID NO: 2873556 - RNA, 14 nt, Human
cugcacuccucagg

SEQ ID NO: 2873557 - RNA, 22 nt, Human
cugcacuccucagggcagccuc

SEQ ID NO: 2873558 - RNA, 18 nt, Human
cugcacuugcagacucua

SEQ ID NO: 2873559 - RNA, 19 nt, Human
cugcacucuuaagcuuccg

SEQ ID NO: 2873560 - RNA, 11 nt, Human
cugcacugaaa

SEQ ID NO: 2873561 - RNA, 12 nt, Human
cugcacugaaaa

SEQ ID NO: 2873562 - RNA, 14 nt, Human
cugcacugaaaagg

SEQ ID NO: 2873563 - RNA, 18 nt, Human
cugcacugaaaagguucu

SEQ ID NO: 2873564 - RNA, 12 nt, Human
cugcaccgggcc

SEQ ID NO: 2873565 - RNA, 13 nt, Human
cugauuucuucag

SEQ ID NO: 2873566 - RNA, 14 nt, Human
cugauuucuugcuu

SEQ ID NO: 2873567 - RNA, 13 nt, Human
cugauuucuugcu

SEQ ID NO: 2873568 - RNA, 13 nt, Human
cugauuuccccuc

SEQ ID NO: 2873569 - RNA, 22 nt, Human
cugauuugcaauaaaaaugaua

SEQ ID NO: 2873570 - RNA, 17 nt, Human
cugauuugcauauucau

SEQ ID NO: 2873571 - RNA, 17 nt, Human
cugauuugccacugaua

SEQ ID NO: 2873572 - RNA, 22 nt, Human
cugauuugccacugauauucag

SEQ ID NO: 2873573 - RNA, 21 nt, Human
cugauuguggaucuuuucauu

SEQ ID NO: 2873574 - RNA, 23 nt, Human
cugauuguggaucuuuucauucu

SEQ ID NO: 2873575 - RNA, 18 nt, Human
cugauuggcuuguagaau

SEQ ID NO: 2873576 - RNA, 20 nt, Human
cugauuggcuuguagaauug

SEQ ID NO: 2873577 - RNA, 22 nt, Human
cugauuggcuuguagaauuguu

SEQ ID NO: 2873578 - RNA, 23 nt, Human
cugauuggcuuguagaauuguua

SEQ ID NO: 2873579 - RNA, 16 nt, Human
cugaugguacaggaaa

SEQ ID NO: 2873580 - RNA, 17 nt, Human
cugauuggugcaacccu

SEQ ID NO: 2873581 - RNA, 12 nt, Human
cugauuguaaac

SEQ ID NO: 2873582 - RNA, 16 nt, Human
cugauuguaaacuuca

SEQ ID NO: 2873583 - RNA, 12 nt, Human
cugauuuuaaug

SEQ ID NO: 2873584 - RNA, 13 nt, Human
cugauuuuaaugg

SEQ ID NO: 2873585 - RNA, 14 nt, Human
cugauuuuaaugga

SEQ ID NO: 2873586 - RNA, 22 nt, Human
cugauuuuaauggauuguuaau

SEQ ID NO: 2873587 - RNA, 23 nt, Human
cugauuuuaauggauuguuaauu

SEQ ID NO: 2873588 - RNA, 21 nt, Human
cugauuuuaggagcuaaggcu

SEQ ID NO: 2873589 - RNA, 22 nt, Human
cugauuuuaggagcuaaggcuc

SEQ ID NO: 2873590 - RNA, 14 nt, Human
cugauuuggaaaaa

SEQ ID NO: 2873591 - RNA, 14 nt, Human
cugauuugguacuu

SEQ ID NO: 2873592 - RNA, 23 nt, Human
cugauuugguacuuuugagugug

SEQ ID NO: 2873593 - RNA, 18 nt, Human
cugauuuucaaagcuuuu

SEQ ID NO: 2873594 - RNA, 23 nt, Human
cugauuuuaggagcuaaggcucu

SEQ ID NO: 2873595 - RNA, 21 nt, Human
cugauuuucaaagcuuuuucc

SEQ ID NO: 2873596 - RNA, 21 nt, Human
cugauuuuuaugaugaugaaa

SEQ ID NO: 2873597 - RNA, 13 nt, Human
cugcaaaaaauac

SEQ ID NO: 2873598 - RNA, 23 nt, Human
cugcaaaaaauacuuuuucuaau

SEQ ID NO: 2873599 - RNA, 13 nt, Human
cugcaaaaaugga

SEQ ID NO: 2873600 - RNA, 21 nt, Human
cugcaaaaauggauauuauua

SEQ ID NO: 2873601 - RNA, 18 nt, Human
cugcaaacgcugccugcc

SEQ ID NO: 2873602 - RNA, 20 nt, Human
cugcaaacgcugccugccca

SEQ ID NO: 2873603 - RNA, 19 nt, Human
cugcaaacgcugccugccc

SEQ ID NO: 2873604 - RNA, 19 nt, Human
cugcaaacgcugccugccg

SEQ ID NO: 2873605 - RNA, 15 nt, Human
cugcaaagcccagcu

SEQ ID NO: 2873606 - RNA, 13 nt, Human
cugcaaagcccag

SEQ ID NO: 2873607 - RNA, 12 nt, Human
cugcaaagaaag

SEQ ID NO: 2873608 - RNA, 16 nt, Human
cugaggcucuuucugg

SEQ ID NO: 2873609 - RNA, 15 nt, Human
cugaggcucuuucug

SEQ ID NO: 2873610 - RNA, 22 nt, Human
cugaggcucugacccagugaga

SEQ ID NO: 2873611 - RNA, 23 nt, Human
cugaggcucugacccagugagau

SEQ ID NO: 2873612 - RNA, 18 nt, Human
cugaggcggguggaucac

SEQ ID NO: 2873613 - RNA, 15 nt, Human
cugaggccuccagcu

SEQ ID NO: 2873614 - RNA, 14 nt, Human
cugaggccugagac

SEQ ID NO: 2873615 - RNA, 15 nt, Human
cugaggccugagacc

SEQ ID NO: 2873616 - RNA, 18 nt, Human
cugaggccugagacccag

SEQ ID NO: 2873617 - RNA, 19 nt, Human
cugaggccugagacccagg

SEQ ID NO: 2873618 - RNA, 20 nt, Human
cugaggccugagacccagga

SEQ ID NO: 2873619 - RNA, 21 nt, Human
cugaggccugagacccaggac

SEQ ID NO: 2873620 - RNA, 23 nt, Human
cugagccccgcagaccuccccag

SEQ ID NO: 2873621 - RNA, 18 nt, Human
cugagccccgcccucuuc

SEQ ID NO: 2873622 - RNA, 19 nt, Human
cugagccccgcccucuucc

SEQ ID NO: 2873623 - RNA, 20 nt, Human
cugagccccgcccucuuccu

SEQ ID NO: 2873624 - RNA, 21 nt, Human
cugagccccgcccucuuccug

SEQ ID NO: 2873625 - RNA, 22 nt, Human
cugagccccgcccucuuccuga

SEQ ID NO: 2873626 - RNA, 23 nt, Human
cugagccccgcccucuuccugac

SEQ ID NO: 2873627 - RNA, 21 nt, Human
cugagccccgcagaccucccc

SEQ ID NO: 2873628 - RNA, 22 nt, Human
cugagccccgcagaccucccca

SEQ ID NO: 2873629 - RNA, 17 nt, Human
cugagccccgcagaccu

SEQ ID NO: 2873630 - RNA, 18 nt, Human
cugagccccgcagaccuc

SEQ ID NO: 2873631 - RNA, 19 nt, Human
cugagccccagggugccca

SEQ ID NO: 2873632 - RNA, 20 nt, Human
cugagccccagggugcccag

SEQ ID NO: 2873633 - RNA, 21 nt, Human
cugagccccagggugcccaga

SEQ ID NO: 2873634 - RNA, 22 nt, Human
cugagccccagggugcccagaa

SEQ ID NO: 2873635 - RNA, 15 nt, Human
cugaggcugagacug

SEQ ID NO: 2873636 - RNA, 20 nt, Human
cugaggcucuuucugggcca

SEQ ID NO: 2873637 - RNA, 18 nt, Human
cugaggcucuuucugggc

SEQ ID NO: 2873638 - RNA, 15 nt, Human
cugagggaggaccug

SEQ ID NO: 2873639 - RNA, 16 nt, Human
cugagggaggaccugg

SEQ ID NO: 2873640 - RNA, 17 nt, Human
cugagggaggaccuggg

SEQ ID NO: 2873641 - RNA, 19 nt, Human
cugagggaggaccuggggc

SEQ ID NO: 2873642 - RNA, 22 nt, Human
cugagggaggaccuggggcaca

SEQ ID NO: 2873643 - RNA, 14 nt, Human
cugagggacucuga

SEQ ID NO: 2873644 - RNA, 16 nt, Human
cugagggacucugaag

SEQ ID NO: 2873645 - RNA, 20 nt, Human
cugagggacucugaagccuc

SEQ ID NO: 2873646 - RNA, 21 nt, Human
cugagggacucugaagccucu

SEQ ID NO: 2873647 - RNA, 22 nt, Human
cugagggacucugaagccucug

SEQ ID NO: 2873648 - RNA, 16 nt, Human
cugagucagggcccag

SEQ ID NO: 2873649 - RNA, 17 nt, Human
cugagucagggcccaga

SEQ ID NO: 2873650 - RNA, 19 nt, Human
cugagucagggcccagagg

SEQ ID NO: 2873651 - RNA, 20 nt, Human
cugagucagggcccagaggc

SEQ ID NO: 2873652 - RNA, 22 nt, Human
cugagucagggcccagaggcug

SEQ ID NO: 2873653 - RNA, 23 nt, Human
cugagucagggcccagaggcuga

SEQ ID NO: 2873654 - RNA, 23 nt, Human
cugagucacccuaccugugccug

SEQ ID NO: 2873655 - RNA, 22 nt, Human
cugagucacccuaccugugccu

SEQ ID NO: 2873656 - RNA, 20 nt, Human
cugagucacccaugaagaca

SEQ ID NO: 2873657 - RNA, 22 nt, Human
cugagucacccaugaagacagg

SEQ ID NO: 2873658 - RNA, 23 nt, Human
cugagggacucugaagccucugg

SEQ ID NO: 2873659 - RNA, 16 nt, Human
cugauaaagcacagcu

SEQ ID NO: 2873660 - RNA, 18 nt, Human
cugauaaagcacagcugu

SEQ ID NO: 2873661 - RNA, 18 nt, Human
cugaguuucauucuccug

SEQ ID NO: 2873662 - RNA, 21 nt, Human
cugaguuucauucuccugccu

SEQ ID NO: 2873663 - RNA, 19 nt, Human
cugaguuucauucuccugc

SEQ ID NO: 2873664 - RNA, 20 nt, Human
cugaguuucauucuccugcc

SEQ ID NO: 2873665 - RNA, 17 nt, Human
cugaguuucauucuccu

SEQ ID NO: 2873666 - RNA, 11 nt, Human
cugaguugcca

SEQ ID NO: 2873667 - RNA, 14 nt, Human
cugaguugccaaga

SEQ ID NO: 2873668 - RNA, 16 nt, Human
cugaguugccaagaca

SEQ ID NO: 2873669 - RNA, 18 nt, Human
cugaguugccaagacaaa

SEQ ID NO: 2873670 - RNA, 20 nt, Human
cugaguugccaagacaaauc

SEQ ID NO: 2873671 - RNA, 19 nt, Human
cugaguucuggucaaagaa

SEQ ID NO: 2873672 - RNA, 13 nt, Human
cugaguuaugaug

SEQ ID NO: 2873673 - RNA, 15 nt, Human
cugaguuaugaugua

SEQ ID NO: 2873674 - RNA, 21 nt, Human
cugaguccaagaggguccuuu

SEQ ID NO: 2873675 - RNA, 16 nt, Human
cugauacauaacuaaa

SEQ ID NO: 2873676 - RNA, 17 nt, Human
cugauacauaacuaaau

SEQ ID NO: 2873677 - RNA, 18 nt, Human
cugauacauaacuaaauu

SEQ ID NO: 2873678 - RNA, 19 nt, Human
cugauacauaacuaaauuu

SEQ ID NO: 2873679 - RNA, 16 nt, Human
cugauauauuuuccag

SEQ ID NO: 2873680 - RNA, 23 nt, Human
cugauaucuggccuaaaaucuug

SEQ ID NO: 2873681 - RNA, 16 nt, Human
cugauaugauuuaaaa

SEQ ID NO: 2873682 - RNA, 18 nt, Human
cugauaugauuuaaaaca

SEQ ID NO: 2873683 - RNA, 19 nt, Human
cugauaugauuuaaaacau

SEQ ID NO: 2873684 - RNA, 21 nt, Human
cugauaugauuuaaaacaugu

SEQ ID NO: 2873685 - RNA, 23 nt, Human
cugauaugauuuaaaacauguaa

SEQ ID NO: 2873686 - RNA, 22 nt, Human
cugauaugauuuaaaacaugua

SEQ ID NO: 2873687 - RNA, 13 nt, Human
cugauaugggacu

SEQ ID NO: 2873688 - RNA, 15 nt, Human
cugauaugggacuga

SEQ ID NO: 2873689 - RNA, 16 nt, Human
cugauaugggacugag

SEQ ID NO: 2873690 - RNA, 16 nt, Human
cugaucaacaauuugg

SEQ ID NO: 2873691 - RNA, 22 nt, Human
cugaucacuagccugucauccu

SEQ ID NO: 2873692 - RNA, 15 nt, Human
cugaucaccugcccu

SEQ ID NO: 2873693 - RNA, 17 nt, Human
cugauauucagaauuau

SEQ ID NO: 2873694 - RNA, 20 nt, Human
cugauauucagaauuaugau

SEQ ID NO: 2873695 - RNA, 22 nt, Human
cugauauuucccuccccugggg

SEQ ID NO: 2873696 - RNA, 17 nt, Human
cugauauuuuaccucuu

SEQ ID NO: 2873697 - RNA, 23 nt, Human
cugauauuuuaccucuuauugca

SEQ ID NO: 2873698 - RNA, 21 nt, Human
cugauccuaacugaagagaca

SEQ ID NO: 2873699 - RNA, 15 nt, Human
cugcaucccagcacc

SEQ ID NO: 2873700 - RNA, 16 nt, Human
cugcaucccagcaccu

SEQ ID NO: 2873701 - RNA, 17 nt, Human
cugcaucccagcaccug

SEQ ID NO: 2873702 - RNA, 18 nt, Human
cugcaucccagcaccugc

SEQ ID NO: 2873703 - RNA, 20 nt, Human
cugcaucccagcaccugccu

SEQ ID NO: 2873704 - RNA, 21 nt, Human
cugcaucccagcaccugccuc

SEQ ID NO: 2873705 - RNA, 23 nt, Human
cugcaucccagcaccugccuccu

SEQ ID NO: 2873706 - RNA, 22 nt, Human
cugcaucccaggaugcugggug

SEQ ID NO: 2873707 - RNA, 23 nt, Human
cugcaucccaggaugcugggugg

SEQ ID NO: 2873708 - RNA, 14 nt, Human
cugcacuuugaugu

SEQ ID NO: 2873709 - RNA, 17 nt, Human
cugcacuuugaugucau

SEQ ID NO: 2873710 - RNA, 18 nt, Human
cugcacuuugaugucaug

SEQ ID NO: 2873711 - RNA, 19 nt, Human
cugcacuuugaugucaugu

SEQ ID NO: 2873712 - RNA, 20 nt, Human
cugcacuuugaugucaugug

SEQ ID NO: 2873713 - RNA, 21 nt, Human
cugcacuuugaugucaugugu

SEQ ID NO: 2873714 - RNA, 22 nt, Human
cugcacuuugaugucauguguu

SEQ ID NO: 2873715 - RNA, 23 nt, Human
cugcacuuugaugucauguguuc

SEQ ID NO: 2873716 - RNA, 23 nt, Human
cugcacuugcagacucuacagag

SEQ ID NO: 2873717 - RNA, 20 nt, Human
cugcauccuccgccucccgg

SEQ ID NO: 2873718 - RNA, 12 nt, Human
cugcauccccuu

SEQ ID NO: 2873719 - RNA, 22 nt, Human
cugcauccccuuggcugugagg

SEQ ID NO: 2873720 - RNA, 15 nt, Human
cugcauccccuuggc

SEQ ID NO: 2873721 - RNA, 16 nt, Human
cugcauccccuuggcu

SEQ ID NO: 2873722 - RNA, 19 nt, Human
cugcauccuccgccucccg

SEQ ID NO: 2873723 - RNA, 17 nt, Human
cugcaucuaagcccaug

SEQ ID NO: 2873724 - RNA, 18 nt, Human
cugcaucuaagcccaugg

SEQ ID NO: 2873725 - RNA, 21 nt, Human
cugcaucuuauagcacuuuga

SEQ ID NO: 2873726 - RNA, 22 nt, Human
cugcaucuuauagcacuuugaa

SEQ ID NO: 2873727 - RNA, 23 nt, Human
cugcaucuuauagcacuuugaaa

SEQ ID NO: 2873728 - RNA, 21 nt, Human
cugcauguaaacacgccugca

SEQ ID NO: 2873729 - RNA, 16 nt, Human
cugcaugggccagccc

SEQ ID NO: 2873730 - RNA, 17 nt, Human
cugcaugggccagcccc

SEQ ID NO: 2873731 - RNA, 19 nt, Human
cugcaugggccagccccuc

SEQ ID NO: 2873732 - RNA, 18 nt, Human
cugccaccucccugaccc

SEQ ID NO: 2873733 - RNA, 16 nt, Human
cugccaccucuccauc

SEQ ID NO: 2873734 - RNA, 17 nt, Human
cugccaccucuccaucc

SEQ ID NO: 2873735 - RNA, 12 nt, Human
cugccacacagg

SEQ ID NO: 2873736 - RNA, 21 nt, Human
cugccacaccagucacaugac

SEQ ID NO: 2873737 - RNA, 18 nt, Human
cugcauggagacgcauuu

SEQ ID NO: 2873738 - RNA, 20 nt, Human
cugcaugccuggucuuuccu

SEQ ID NO: 2873739 - RNA, 22 nt, Human
cugcaugccuggucuuuccucu

SEQ ID NO: 2873740 - RNA, 23 nt, Human
cugcaugccuggucuuuccucug

SEQ ID NO: 2873741 - RNA, 17 nt, Human
cugcaucuuuagugcuu

SEQ ID NO: 2873742 - RNA, 18 nt, Human
cugcaucuuuagugcuuu

SEQ ID NO: 2873743 - RNA, 15 nt, Human
cugcaugaauaucau

SEQ ID NO: 2873744 - RNA, 16 nt, Human
cugcaugaauaucaua

SEQ ID NO: 2873745 - RNA, 23 nt, Human
cugcccacuguuucucuugagcu

SEQ ID NO: 2873746 - RNA, 22 nt, Human
cugcccacuguuucucuugagc

SEQ ID NO: 2873747 - RNA, 13 nt, Human
cugcccacuguuu

SEQ ID NO: 2873748 - RNA, 17 nt, Human
cugccaugcagggccuc

SEQ ID NO: 2873749 - RNA, 20 nt, Human
cugccacaaccagccaggca

SEQ ID NO: 2873750 - RNA, 16 nt, Human
cugcccacugcugcag

SEQ ID NO: 2873751 - RNA, 17 nt, Human
cugcccagccuccaagc

SEQ ID NO: 2873752 - RNA, 22 nt, Human
cugcccaucacaggguugggcc

SEQ ID NO: 2873753 - RNA, 18 nt, Human
cugcccaucacaggguug

SEQ ID NO: 2873754 - RNA, 15 nt, Human
cugcccaucacaggg

SEQ ID NO: 2873755 - RNA, 15 nt, Human
cugccccaaacaaau

SEQ ID NO: 2873756 - RNA, 19 nt, Human
cugcccauucugcccugug

SEQ ID NO: 2873757 - RNA, 23 nt, Human
cugcccauucugcccugugggac

SEQ ID NO: 2873758 - RNA, 18 nt, Human
cugcccauuucauauucu

SEQ ID NO: 2873759 - RNA, 22 nt, Human
cugcccauuucgugagccccau

SEQ ID NO: 2873760 - RNA, 21 nt, Human
cugcccauucaccaaaauuau

SEQ ID NO: 2873761 - RNA, 15 nt, Human
cugccaugcagggcc

SEQ ID NO: 2873762 - RNA, 16 nt, Human
cugccaugcagggccu

SEQ ID NO: 2873763 - RNA, 22 nt, Human
cugccaucuuaguuuggauucu

SEQ ID NO: 2873764 - RNA, 23 nt, Human
cugccaucuuaguuuggauucuu

SEQ ID NO: 2873765 - RNA, 19 nt, Human
cugccaucuuaguuuggau

SEQ ID NO: 2873766 - RNA, 19 nt, Human
cugccacuuugguacaugg

SEQ ID NO: 2873767 - RNA, 16 nt, Human
cugccacuugaacaaa

SEQ ID NO: 2873768 - RNA, 12 nt, Human
cugccacuuugc

SEQ ID NO: 2873769 - RNA, 14 nt, Human
cugccacuuugcac

SEQ ID NO: 2873770 - RNA, 17 nt, Human
cugccacuuugcacauu

SEQ ID NO: 2873771 - RNA, 20 nt, Human
cugccacuuugcacauuuug

SEQ ID NO: 2873772 - RNA, 22 nt, Human
cugccacuuugcacauuuugau

SEQ ID NO: 2873773 - RNA, 17 nt, Human
cugccuagcaagcuggc

SEQ ID NO: 2873774 - RNA, 18 nt, Human
cugccuagcaagcuggcc

SEQ ID NO: 2873775 - RNA, 19 nt, Human
cugccuagcaagcuggccu

SEQ ID NO: 2873776 - RNA, 20 nt, Human
cugccuagcaagcuggccuc

SEQ ID NO: 2873777 - RNA, 17 nt, Human
cugccuagcugccuagc

SEQ ID NO: 2873778 - RNA, 18 nt, Human
cugccuagcugccuagca

SEQ ID NO: 2873779 - RNA, 21 nt, Human
cugccuagcugccuagcaagc

SEQ ID NO: 2873780 - RNA, 15 nt, Human
cugccuaauuacgau

SEQ ID NO: 2873781 - RNA, 23 nt, Human
cugccuaauuacgauaaggaaga

SEQ ID NO: 2873782 - RNA, 15 nt, Human
cugccucagccuccc

SEQ ID NO: 2873783 - RNA, 19 nt, Human
cugccucagccucccaaag

SEQ ID NO: 2873784 - RNA, 17 nt, Human
cugccucagccucccga

SEQ ID NO: 2873785 - RNA, 18 nt, Human
cugccucagccucccaag

SEQ ID NO: 2873786 - RNA, 22 nt, Human
cugccuccagaauggucuuucu

SEQ ID NO: 2873787 - RNA, 14 nt, Human
cugccuccagaaug

SEQ ID NO: 2873788 - RNA, 18 nt, Human
cugccgcccccuccugaa

SEQ ID NO: 2873789 - RNA, 16 nt, Human
cugccgccccacccag

SEQ ID NO: 2873790 - RNA, 19 nt, Human
cugccgcccccuccugaac

SEQ ID NO: 2873791 - RNA, 14 nt, Human
cugccgccucccag

SEQ ID NO: 2873792 - RNA, 16 nt, Human
cugccgccucccagcc

SEQ ID NO: 2873793 - RNA, 15 nt, Human
cugccgccucccagc

SEQ ID NO: 2873794 - RNA, 15 nt, Human
cugccggagaggaag

SEQ ID NO: 2873795 - RNA, 16 nt, Human
cugccggagaggaaga

SEQ ID NO: 2873796 - RNA, 17 nt, Human
cugccggagaggaagag

SEQ ID NO: 2873797 - RNA, 23 nt, Human
cugccggagaggaagagacacuc

SEQ ID NO: 2873798 - RNA, 13 nt, Human
cugccgcuaccuc

SEQ ID NO: 2873799 - RNA, 14 nt, Human
cugccgcuaccucc

SEQ ID NO: 2873800 - RNA, 17 nt, Human
cugccgcuaccucccuc

SEQ ID NO: 2873801 - RNA, 18 nt, Human
cugccgcuaccucccucc

SEQ ID NO: 2873802 - RNA, 19 nt, Human
cugccgccucccagccugg

SEQ ID NO: 2873803 - RNA, 18 nt, Human
cugccgccucccagccug

SEQ ID NO: 2873804 - RNA, 17 nt, Human
cugccccucucaccaaa

SEQ ID NO: 2873805 - RNA, 12 nt, Human
cugccccucucu

SEQ ID NO: 2873806 - RNA, 13 nt, Human
cugccccucucug

SEQ ID NO: 2873807 - RNA, 14 nt, Human
cugccccucucugg

SEQ ID NO: 2873808 - RNA, 15 nt, Human
cugccccucucuggg

SEQ ID NO: 2873809 - RNA, 16 nt, Human
cugccccucucugggc

SEQ ID NO: 2873810 - RNA, 17 nt, Human
cugccccucucugggcc

SEQ ID NO: 2873811 - RNA, 18 nt, Human
cugccccucucugggccu

SEQ ID NO: 2873812 - RNA, 22 nt, Human
cugccccucucugggccucaga

SEQ ID NO: 2873813 - RNA, 23 nt, Human
cugccccucucugggccucagag

SEQ ID NO: 2873814 - RNA, 12 nt, Human
cugccccucuuu

SEQ ID NO: 2873815 - RNA, 13 nt, Human
cugccccucuuuc

SEQ ID NO: 2873816 - RNA, 14 nt, Human
cugccccucuuucu

SEQ ID NO: 2873817 - RNA, 15 nt, Human
cugccccucuuucuc

SEQ ID NO: 2873818 - RNA, 16 nt, Human
cugccccucuuucucu

SEQ ID NO: 2873819 - RNA, 17 nt, Human
cugccccucuuucucuu

SEQ ID NO: 2873820 - RNA, 13 nt, Human
cugccccucucac

SEQ ID NO: 2873821 - RNA, 17 nt, Human
cugccccaaccugcuga

SEQ ID NO: 2873822 - RNA, 21 nt, Human
cugccccuccucucugcccua

SEQ ID NO: 2873823 - RNA, 21 nt, Human
cugccccaaacaaauaugcaa

SEQ ID NO: 2873824 - RNA, 21 nt, Human
cugccccaaauaacuucaguc

SEQ ID NO: 2873825 - RNA, 22 nt, Human
cugccccaaauaacuucagucc

SEQ ID NO: 2873826 - RNA, 23 nt, Human
cugccccaaauaacuucaguccu

SEQ ID NO: 2873827 - RNA, 20 nt, Human
cugccccuccucucugcccu

SEQ ID NO: 2873828 - RNA, 21 nt, Human
cugccucugacacacagcucu

SEQ ID NO: 2873829 - RNA, 18 nt, Human
cugccucugacacacagc

SEQ ID NO: 2873830 - RNA, 17 nt, Human
cugccucugacacacag

SEQ ID NO: 2873831 - RNA, 22 nt, Human
cugccugcccaggccccugcca

SEQ ID NO: 2873832 - RNA, 21 nt, Human
cugccugcccaggccccugcc

SEQ ID NO: 2873833 - RNA, 17 nt, Human
cugccugcccgcacagc

SEQ ID NO: 2873834 - RNA, 18 nt, Human
cugccugcccgcacagca

SEQ ID NO: 2873835 - RNA, 19 nt, Human
cugccugcccgcacagcag

SEQ ID NO: 2873836 - RNA, 20 nt, Human
cugccugcccgcacagcagc

SEQ ID NO: 2873837 - RNA, 23 nt, Human
cugccugcccgcacagcagccug

SEQ ID NO: 2873838 - RNA, 18 nt, Human
cugccuucugacggcccu

SEQ ID NO: 2873839 - RNA, 19 nt, Human
cugccuucugacggcccug

SEQ ID NO: 2873840 - RNA, 20 nt, Human
cugccuucugacggcccugc

SEQ ID NO: 2873841 - RNA, 21 nt, Human
cugccuucugacggcccugca

SEQ ID NO: 2873842 - RNA, 22 nt, Human
cugccuucugacggcccugcaa

SEQ ID NO: 2873843 - RNA, 23 nt, Human
cugccuucugacggcccugcaau

SEQ ID NO: 2873844 - RNA, 21 nt, Human
cugccuugaagccacugaagc

SEQ ID NO: 2873845 - RNA, 20 nt, Human
cugccuugaagccacugaag

SEQ ID NO: 2873846 - RNA, 16 nt, Human
cugccuugaagccacu

SEQ ID NO: 2873847 - RNA, 17 nt, Human
cugccuugaaccuguga

SEQ ID NO: 2873848 - RNA, 19 nt, Human
cugccuugaaccugugagu

SEQ ID NO: 2873849 - RNA, 14 nt, Human
cugccuggccacug

SEQ ID NO: 2873850 - RNA, 16 nt, Human
cugccuggccacugcu

SEQ ID NO: 2873851 - RNA, 18 nt, Human
cugccuggccacugcucc

SEQ ID NO: 2873852 - RNA, 11 nt, Human
cugccuggagc

SEQ ID NO: 2873853 - RNA, 18 nt, Human
cugccuggacuagaggga

SEQ ID NO: 2873854 - RNA, 18 nt, Human
cugcgguccacccaggag

SEQ ID NO: 2873855 - RNA, 17 nt, Human
cugcgguccacccagga

SEQ ID NO: 2873856 - RNA, 22 nt, Human
cugcgggaugguccuggggcuc

SEQ ID NO: 2873857 - RNA, 20 nt, Human
cugcgggaugguccuggggc

SEQ ID NO: 2873858 - RNA, 20 nt, Human
cugcgguccacccaggagcc

SEQ ID NO: 2873859 - RNA, 19 nt, Human
cugcgguccacccaggagc

SEQ ID NO: 2873860 - RNA, 20 nt, Human
cugcgugccagucaagaaga

SEQ ID NO: 2873861 - RNA, 22 nt, Human
cugcgugccagucaagaagaaa

SEQ ID NO: 2873862 - RNA, 16 nt, Human
cugcgugccccugcug

SEQ ID NO: 2873863 - RNA, 13 nt, Human
cugcgucuguguu

SEQ ID NO: 2873864 - RNA, 17 nt, Human
cugcgucuuccgccccu

SEQ ID NO: 2873865 - RNA, 23 nt, Human
cugcgucuuccgccccugccugc

SEQ ID NO: 2873866 - RNA, 19 nt, Human
cugcgggaugguccugggg

SEQ ID NO: 2873867 - RNA, 18 nt, Human
cugcgggaugguccuggg

SEQ ID NO: 2873868 - RNA, 17 nt, Human
cugcgggaugguccugg

SEQ ID NO: 2873869 - RNA, 15 nt, Human
cugcggaucucagcu

SEQ ID NO: 2873870 - RNA, 18 nt, Human
cugccucagccucccgag

SEQ ID NO: 2873871 - RNA, 19 nt, Human
cugcgaaggggcccugguc

SEQ ID NO: 2873872 - RNA, 18 nt, Human
cugcgaaggggcccuggu

SEQ ID NO: 2873873 - RNA, 17 nt, Human
cugccuuugacauuuaa

SEQ ID NO: 2873874 - RNA, 21 nt, Human
cugccuuugacauuuaauuua

SEQ ID NO: 2873875 - RNA, 18 nt, Human
cugccuuugauguuacag

SEQ ID NO: 2873876 - RNA, 17 nt, Human
cugcgaaggggcccugg

SEQ ID NO: 2873877 - RNA, 17 nt, Human
cugccuuugggagcagg

SEQ ID NO: 2873878 - RNA, 14 nt, Human
cugccuuugccucc

SEQ ID NO: 2873879 - RNA, 16 nt, Human
cugccuuugccuccag

SEQ ID NO: 2873880 - RNA, 20 nt, Human
cugccuuugccuccagaagc

SEQ ID NO: 2873881 - RNA, 21 nt, Human
cugccuuugccuccagaagca

SEQ ID NO: 2873882 - RNA, 20 nt, Human
cucuuuguucuaaagaugga

SEQ ID NO: 2873883 - RNA, 18 nt, Human
cucuuuguggggcuuggc

SEQ ID NO: 2873884 - RNA, 20 nt, Human
cucuuuguggggcuuggcgu

SEQ ID NO: 2873885 - RNA, 15 nt, Human
cucuuuuauauuugu

SEQ ID NO: 2873886 - RNA, 16 nt, Human
cucuuuuauauuugua

SEQ ID NO: 2873887 - RNA, 22 nt, Human
cucuuuuauauuuguaggagaa

SEQ ID NO: 2873888 - RNA, 23 nt, Human
cucuuuuauauuuguaggagaaa

SEQ ID NO: 2873889 - RNA, 14 nt, Human
cucuuuucaaaaca

SEQ ID NO: 2873890 - RNA, 23 nt, Human
cugaaagugaaaguccagaaacu

SEQ ID NO: 2873891 - RNA, 13 nt, Human
cugaaaguuaccc

SEQ ID NO: 2873892 - RNA, 15 nt, Human
cugaaaguuacccac

SEQ ID NO: 2873893 - RNA, 17 nt, Human
cugaaaguuacccacug

SEQ ID NO: 2873894 - RNA, 18 nt, Human
cugaaaguuacccacuga

SEQ ID NO: 2873895 - RNA, 22 nt, Human
cugaaaguuacccacugaagcc

SEQ ID NO: 2873896 - RNA, 12 nt, Human
cugaaaguucuu

SEQ ID NO: 2873897 - RNA, 14 nt, Human
cugaaaguuguaca

SEQ ID NO: 2873898 - RNA, 15 nt, Human
cugaaaguuguacau

SEQ ID NO: 2873899 - RNA, 16 nt, Human
cugaaaguuguacaug

SEQ ID NO: 2873900 - RNA, 20 nt, Human
cugaaaguuguacaugaaau

SEQ ID NO: 2873901 - RNA, 14 nt, Human
cucuguuguaagaa

SEQ ID NO: 2873902 - RNA, 19 nt, Human
cugaaagugaaaguccaga

SEQ ID NO: 2873903 - RNA, 12 nt, Human
cucuucugcucc

SEQ ID NO: 2873904 - RNA, 16 nt, Human
cucuucuccaggcugu

SEQ ID NO: 2873905 - RNA, 13 nt, Human
cucuucuccccag

SEQ ID NO: 2873906 - RNA, 14 nt, Human
cucuucuccccaga

SEQ ID NO: 2873907 - RNA, 12 nt, Human
cucuucucccag

SEQ ID NO: 2873908 - RNA, 13 nt, Human
cucuucucccaga

SEQ ID NO: 2873909 - RNA, 14 nt, Human
cucuucucccagaa

SEQ ID NO: 2873910 - RNA, 15 nt, Human
cucuucucccagaau

SEQ ID NO: 2873911 - RNA, 16 nt, Human
cucuucucccagaauc

SEQ ID NO: 2873912 - RNA, 17 nt, Human
cucuucucccagaaucc

SEQ ID NO: 2873913 - RNA, 21 nt, Human
cucuucucccagaaucccagc

SEQ ID NO: 2873914 - RNA, 22 nt, Human
cucuucucccagaaucccagcc

SEQ ID NO: 2873915 - RNA, 12 nt, Human
cugaaauuccaa

SEQ ID NO: 2873916 - RNA, 13 nt, Human
cugaaauuccaaa

SEQ ID NO: 2873917 - RNA, 14 nt, Human
cugaaauuccaaag

SEQ ID NO: 2873918 - RNA, 15 nt, Human
cugaaauuccaaagu

SEQ ID NO: 2873919 - RNA, 16 nt, Human
cugaaauuccaaaguc

SEQ ID NO: 2873920 - RNA, 17 nt, Human
cugaaauuccaaagucu

SEQ ID NO: 2873921 - RNA, 20 nt, Human
cugaaauuccaaagucucua

SEQ ID NO: 2873922 - RNA, 14 nt, Human
cugaaauucuaaag

SEQ ID NO: 2873923 - RNA, 18 nt, Human
cugaaauuccaaagucuc

SEQ ID NO: 2873924 - RNA, 16 nt, Human
cugaacaaaaaauaaa

SEQ ID NO: 2873925 - RNA, 21 nt, Human
cugaacaaacuaaaggugcac

SEQ ID NO: 2873926 - RNA, 16 nt, Human
cugaacaagaauugga

SEQ ID NO: 2873927 - RNA, 14 nt, Human
cugaacaagaauug

SEQ ID NO: 2873928 - RNA, 13 nt, Human
cugaacaagaauu

SEQ ID NO: 2873929 - RNA, 12 nt, Human
cugaacaagaau

SEQ ID NO: 2873930 - RNA, 19 nt, Human
cugaacaauaggcuguucc

SEQ ID NO: 2873931 - RNA, 21 nt, Human
cugaacaauaggcuguuccca

SEQ ID NO: 2873932 - RNA, 13 nt, Human
cugaacacaggca

SEQ ID NO: 2873933 - RNA, 14 nt, Human
cugaacacaggcag

SEQ ID NO: 2873934 - RNA, 15 nt, Human
cugaacacaggcagc

SEQ ID NO: 2873935 - RNA, 16 nt, Human
cugaacacaggcagcu

SEQ ID NO: 2873936 - RNA, 17 nt, Human
cugaacacaggcagcuu

SEQ ID NO: 2873937 - RNA, 18 nt, Human
cugaacacaggcagcuuu

SEQ ID NO: 2873938 - RNA, 19 nt, Human
cugaacacaggcagcuuuc

SEQ ID NO: 2873939 - RNA, 22 nt, Human
cugaacacaggcagcuuucuag

SEQ ID NO: 2873940 - RNA, 21 nt, Human
cugaacauuuacuacaguuuu

SEQ ID NO: 2873941 - RNA, 16 nt, Human
cugaaccccucccucc

SEQ ID NO: 2873942 - RNA, 21 nt, Human
cugaaccccgucgaggggcuc

SEQ ID NO: 2873943 - RNA, 13 nt, Human
cugaagaacagua

SEQ ID NO: 2873944 - RNA, 13 nt, Human
cugaacuuuggag

SEQ ID NO: 2873945 - RNA, 14 nt, Human
cugaacuuuggaga

SEQ ID NO: 2873946 - RNA, 16 nt, Human
cugaacuuuggagagu

SEQ ID NO: 2873947 - RNA, 14 nt, Human
cugaacuuugggaa

SEQ ID NO: 2873948 - RNA, 16 nt, Human
cugaacuuugggaagc

SEQ ID NO: 2873949 - RNA, 21 nt, Human
cugaacuuugggaagccuuua

SEQ ID NO: 2873950 - RNA, 17 nt, Human
cugaagucacacaguga

SEQ ID NO: 2873951 - RNA, 19 nt, Human
cugaagucacacagugagu

SEQ ID NO: 2873952 - RNA, 18 nt, Human
cugaagucacacagugag

SEQ ID NO: 2873953 - RNA, 21 nt, Human
cugaagucacacagugagucg

SEQ ID NO: 2873954 - RNA, 16 nt, Human
cugaagucacacagug

SEQ ID NO: 2873955 - RNA, 19 nt, Human
cugaagucacaucacagga

SEQ ID NO: 2873956 - RNA, 22 nt, Human
cugaagucacaucacaggacac

SEQ ID NO: 2873957 - RNA, 21 nt, Human
cugaagucacaucacaggaca

SEQ ID NO: 2873958 - RNA, 13 nt, Human
cugaagucacugc

SEQ ID NO: 2873959 - RNA, 14 nt, Human
cugaagucacugca

SEQ ID NO: 2873960 - RNA, 15 nt, Human
cugaagucacugcac

SEQ ID NO: 2873961 - RNA, 22 nt, Human
cugaauguuuaaagaucaugac

SEQ ID NO: 2873962 - RNA, 19 nt, Human
cugaauguuuauuccuuga

SEQ ID NO: 2873963 - RNA, 16 nt, Human
cugaauguuuauuccu

SEQ ID NO: 2873964 - RNA, 18 nt, Human
cugaauguuuauuccuug

SEQ ID NO: 2873965 - RNA, 17 nt, Human
cugaauuaaucaucuau

SEQ ID NO: 2873966 - RNA, 11 nt, Human
cugaauguauu

SEQ ID NO: 2873967 - RNA, 17 nt, Human
cugaaugugcugaucau

SEQ ID NO: 2873968 - RNA, 23 nt, Human
cugaaugugguuucaaucuaauu

SEQ ID NO: 2873969 - RNA, 14 nt, Human
cugaaugcugccac

SEQ ID NO: 2873970 - RNA, 15 nt, Human
cugaaugccuccugu

SEQ ID NO: 2873971 - RNA, 17 nt, Human
cugaaugccuccugugg

SEQ ID NO: 2873972 - RNA, 18 nt, Human
cugaaugccuccuguggg

SEQ ID NO: 2873973 - RNA, 19 nt, Human
cugaaugccuccugugggg

SEQ ID NO: 2873974 - RNA, 20 nt, Human
cugaaugccuccugugggga

SEQ ID NO: 2873975 - RNA, 22 nt, Human
cugaaugaaccuucuggccucc

SEQ ID NO: 2873976 - RNA, 19 nt, Human
cugaaugcuuauagguggc

SEQ ID NO: 2873977 - RNA, 21 nt, Human
cugaaugcuuauagguggccu

SEQ ID NO: 2873978 - RNA, 22 nt, Human
cugaaugcuuauagguggccuc

SEQ ID NO: 2873979 - RNA, 20 nt, Human
cugacugguuaacagcaguc

SEQ ID NO: 2873980 - RNA, 19 nt, Human
cugacuguaacauauucug

SEQ ID NO: 2873981 - RNA, 13 nt, Human
cugacuguccucu

SEQ ID NO: 2873982 - RNA, 14 nt, Human
cugacuguccucuc

SEQ ID NO: 2873983 - RNA, 16 nt, Human
cugacuguccucuccc

SEQ ID NO: 2873984 - RNA, 21 nt, Human
cugacuguccucuccccucca

SEQ ID NO: 2873985 - RNA, 22 nt, Human
cugacuguccucuccccuccag

SEQ ID NO: 2873986 - RNA, 17 nt, Human
cugacuguacuccuccc

SEQ ID NO: 2873987 - RNA, 12 nt, Human
cugagaaaacaa

SEQ ID NO: 2873988 - RNA, 21 nt, Human
cugacuuuuaaugucauuugu

SEQ ID NO: 2873989 - RNA, 10 nt, Human
cugagaaaag

SEQ ID NO: 2873990 - RNA, 13 nt, Human
cugagaaaagaac

SEQ ID NO: 2873991 - RNA, 14 nt, Human
cugagaaaacaagc

SEQ ID NO: 2873992 - RNA, 23 nt, Human
cugagaaaaugagugacuagacg

SEQ ID NO: 2873993 - RNA, 18 nt, Human
cugacuuugcucuuucuu

SEQ ID NO: 2873994 - RNA, 16 nt, Human
cugacuuugcucuuuc

SEQ ID NO: 2873995 - RNA, 19 nt, Human
cugaaugggaucaugaaag

SEQ ID NO: 2873996 - RNA, 12 nt, Human
cugacuaaauuu

SEQ ID NO: 2873997 - RNA, 13 nt, Human
cugacuaaauuug

SEQ ID NO: 2873998 - RNA, 18 nt, Human
cugacuaaauuuggggac

SEQ ID NO: 2873999 - RNA, 17 nt, Human
cugacuacuggcucuca

SEQ ID NO: 2874000 - RNA, 20 nt, Human
cugacuccacgauccugcca

SEQ ID NO: 2874001 - RNA, 18 nt, Human
cugacuccuaccugcccu

SEQ ID NO: 2874002 - RNA, 20 nt, Human
cugacuccuaccugcccugg

SEQ ID NO: 2874003 - RNA, 21 nt, Human
cugacuccuaccugcccugga

SEQ ID NO: 2874004 - RNA, 22 nt, Human
cugacuccuaccugcccuggaa

SEQ ID NO: 2874005 - RNA, 16 nt, Human
cugacucaucauuugu

SEQ ID NO: 2874006 - RNA, 16 nt, Human
cugacuacauuuuuuc

SEQ ID NO: 2874007 - RNA, 20 nt, Human
cugacuggauucauucucau

SEQ ID NO: 2874008 - RNA, 21 nt, Human
cugacuggauucauucucaua

SEQ ID NO: 2874009 - RNA, 14 nt, Human
cugacugcccagca

SEQ ID NO: 2874010 - RNA, 15 nt, Human
cugacugcccagcau

SEQ ID NO: 2874011 - RNA, 18 nt, Human
cugacugcccagcauuug

SEQ ID NO: 2874012 - RNA, 21 nt, Human
cugacgcaaaaccacuuuccu

SEQ ID NO: 2874013 - RNA, 21 nt, Human
cugaccuuugucaucuuucuu

SEQ ID NO: 2874014 - RNA, 23 nt, Human
cugaccuuugucaucuuucuucu

SEQ ID NO: 2874015 - RNA, 17 nt, Human
cugacgaaacuggcccc

SEQ ID NO: 2874016 - RNA, 20 nt, Human
cugacgaaacuggccccgga

SEQ ID NO: 2874017 - RNA, 21 nt, Human
cugacgaaacuggccccggau

SEQ ID NO: 2874018 - RNA, 18 nt, Human
cugaccuuugucaucuuu

SEQ ID NO: 2874019 - RNA, 21 nt, Human
cugaccagccuccaugcugcc

SEQ ID NO: 2874020 - RNA, 23 nt, Human
cugaccagccuccaugcugccuc

SEQ ID NO: 2874021 - RNA, 21 nt, Human
cugacgucugaagcuugacuc

SEQ ID NO: 2874022 - RNA, 22 nt, Human
cugacgucugaagcuugacucc

SEQ ID NO: 2874023 - RNA, 23 nt, Human
cugacgucugaagcuugacuccc

SEQ ID NO: 2874024 - RNA, 13 nt, Human
cugacggcccugc

SEQ ID NO: 2874025 - RNA, 14 nt, Human
cugacggcccugca

SEQ ID NO: 2874026 - RNA, 15 nt, Human
cugacggcccugcaa

SEQ ID NO: 2874027 - RNA, 16 nt, Human
cugacggcccugcaau

SEQ ID NO: 2874028 - RNA, 17 nt, Human
cugacggcccugcaaug

SEQ ID NO: 2874029 - RNA, 18 nt, Human
cugacgcaaugaaaaguc

SEQ ID NO: 2874030 - RNA, 18 nt, Human
cugacagacacaggcccg

SEQ ID NO: 2874031 - RNA, 17 nt, Human
cugacagacacaggccc

SEQ ID NO: 2874032 - RNA, 17 nt, Human
cugaccagccuccaugc

SEQ ID NO: 2874033 - RNA, 15 nt, Human
cugaauuugcccugg

SEQ ID NO: 2874034 - RNA, 16 nt, Human
cugaauuugcccuggg

SEQ ID NO: 2874035 - RNA, 18 nt, Human
cugaauuugcccugggaa

SEQ ID NO: 2874036 - RNA, 19 nt, Human
cugaauuugcccugggaaa

SEQ ID NO: 2874037 - RNA, 16 nt, Human
cugacagacacaggcc

SEQ ID NO: 2874038 - RNA, 21 nt, Human
cugaauuuggccugcacuaau

SEQ ID NO: 2874039 - RNA, 16 nt, Human
cugaauuuuggaggca

SEQ ID NO: 2874040 - RNA, 13 nt, Human
cugagauucuuca

SEQ ID NO: 2874041 - RNA, 23 nt, Human
cugagauuauaggcaccuaccac

SEQ ID NO: 2874042 - RNA, 24 nt, Human
cugagcaacagagugagacccugu

SEQ ID NO: 2874043 - RNA, 23 nt, Human
cugagcaacagagugagacccug

SEQ ID NO: 2874044 - RNA, 16 nt, Human
cugagcaacagaguga

SEQ ID NO: 2874045 - RNA, 20 nt, Human
cugagcaacucuugauuauc

SEQ ID NO: 2874046 - RNA, 15 nt, Human
cugagcaaauguggc

SEQ ID NO: 2874047 - RNA, 17 nt, Human
cugagcaaauguggcuc

SEQ ID NO: 2874048 - RNA, 20 nt, Human
cugagcaaauguggcuccug

SEQ ID NO: 2874049 - RNA, 21 nt, Human
cugagcaaauguggcuccugg

SEQ ID NO: 2874050 - RNA, 16 nt, Human
cugagcaggaccucug

SEQ ID NO: 2874051 - RNA, 14 nt, Human
cugagcacuggagu

SEQ ID NO: 2874052 - RNA, 16 nt, Human
cugagcacuggagugg

SEQ ID NO: 2874053 - RNA, 13 nt, Human
cugagcacagaug

SEQ ID NO: 2874054 - RNA, 11 nt, Human
cugagcacaga

SEQ ID NO: 2874055 - RNA, 17 nt, Human
cugagcacacuuuagug

SEQ ID NO: 2874056 - RNA, 16 nt, Human
cugagcccauguucug

SEQ ID NO: 2874057 - RNA, 19 nt, Human
cugagcccauguucugccc

SEQ ID NO: 2874058 - RNA, 20 nt, Human
cugagcccauguucugcccc

SEQ ID NO: 2874059 - RNA, 23 nt, Human
cugagcccauguucugcccccag

SEQ ID NO: 2874060 - RNA, 20 nt, Human
cugagcauacucaacaaaac

SEQ ID NO: 2874061 - RNA, 14 nt, Human
cugagccacagcag

SEQ ID NO: 2874062 - RNA, 18 nt, Human
cugagccacagcagcauu

SEQ ID NO: 2874063 - RNA, 19 nt, Human
cugagccacagcagcauuu

SEQ ID NO: 2874064 - RNA, 20 nt, Human
cugagccacagcagcauuuu

SEQ ID NO: 2874065 - RNA, 15 nt, Human
cugagccacucucuu

SEQ ID NO: 2874066 - RNA, 18 nt, Human
cugagcaggaccucugaa

SEQ ID NO: 2874067 - RNA, 20 nt, Human
cucuggcauuagaauuauuu

SEQ ID NO: 2874068 - RNA, 23 nt, Human
cucuggcauuagaauuauuuaaa

SEQ ID NO: 2874069 - RNA, 14 nt, Human
cucuggccacaaca

SEQ ID NO: 2874070 - RNA, 19 nt, Human
cucuggcaguucuggaaug

SEQ ID NO: 2874071 - RNA, 18 nt, Human
cucuggcauuagaauuau

SEQ ID NO: 2874072 - RNA, 19 nt, Human
cucuggcauuagaauuauu

SEQ ID NO: 2874073 - RNA, 22 nt, Human
cucuggauuggagauagggaaa

SEQ ID NO: 2874074 - RNA, 10 nt, Human
cucugccuga

SEQ ID NO: 2874075 - RNA, 23 nt, Human
cucuggaugccugauugccaagc

SEQ ID NO: 2874076 - RNA, 19 nt, Human
cucugccucaccgcuuccc

SEQ ID NO: 2874077 - RNA, 17 nt, Human
cucuggauuaggucucu

SEQ ID NO: 2874078 - RNA, 20 nt, Human
cucugccucugacacacagc

SEQ ID NO: 2874079 - RNA, 19 nt, Human
cucugccucugacacacag

SEQ ID NO: 2874080 - RNA, 16 nt, Human
cucugccucugacaca

SEQ ID NO: 2874081 - RNA, 18 nt, Human
cucugccgucucuggagc

SEQ ID NO: 2874082 - RNA, 17 nt, Human
cucugccgucucuggag

SEQ ID NO: 2874083 - RNA, 16 nt, Human
cucugccgucucugga

SEQ ID NO: 2874084 - RNA, 13 nt, Human
cucugucgcccag

SEQ ID NO: 2874085 - RNA, 15 nt, Human
cucugucgcccaggc

SEQ ID NO: 2874086 - RNA, 21 nt, Human
cucuggggcuguugaagucac

SEQ ID NO: 2874087 - RNA, 22 nt, Human
cucuggggcuguugaagucacc

SEQ ID NO: 2874088 - RNA, 14 nt, Human
cucuggggcucuag

SEQ ID NO: 2874089 - RNA, 16 nt, Human
cucuggggcucuaggg

SEQ ID NO: 2874090 - RNA, 22 nt, Human
cucuggggcucuaggguugcug

SEQ ID NO: 2874091 - RNA, 17 nt, Human
cucugucgcccagucug

SEQ ID NO: 2874092 - RNA, 22 nt, Human
cucugucgcccaggcuggagug

SEQ ID NO: 2874093 - RNA, 18 nt, Human
cucugucgcccaggcugg

SEQ ID NO: 2874094 - RNA, 19 nt, Human
cucugucgcccagucugga

SEQ ID NO: 2874095 - RNA, 18 nt, Human
cucugucgcccagucugg

SEQ ID NO: 2874096 - RNA, 15 nt, Human
cucugucuagcaugc

SEQ ID NO: 2874097 - RNA, 18 nt, Human
cucugucuagcaugccaa

SEQ ID NO: 2874098 - RNA, 15 nt, Human
cucugucuacaaaua

SEQ ID NO: 2874099 - RNA, 22 nt, Human
cucuguccugggagugagcugg

SEQ ID NO: 2874100 - RNA, 15 nt, Human
cucuguccugggagu

SEQ ID NO: 2874101 - RNA, 13 nt, Human
cucuguccuggga

SEQ ID NO: 2874102 - RNA, 14 nt, Human
cucuguccugggag

SEQ ID NO: 2874103 - RNA, 18 nt, Human
cucugggauuuaugcuca

SEQ ID NO: 2874104 - RNA, 19 nt, Human
cucugggauuuaugcucau

SEQ ID NO: 2874105 - RNA, 22 nt, Human
cucugggauuuaugcucaugaa

SEQ ID NO: 2874106 - RNA, 19 nt, Human
cucugggcacacucugcca

SEQ ID NO: 2874107 - RNA, 14 nt, Human
cucuggcuagaggc

SEQ ID NO: 2874108 - RNA, 23 nt, Human
cucugggaaccucccagaggucc

SEQ ID NO: 2874109 - RNA, 16 nt, Human
cucugggcuauggaca

SEQ ID NO: 2874110 - RNA, 17 nt, Human
cucugggcuauggacac

SEQ ID NO: 2874111 - RNA, 18 nt, Human
cucugggcuauggacaca

SEQ ID NO: 2874112 - RNA, 20 nt, Human
cucugggcuauggacacagg

SEQ ID NO: 2874113 - RNA, 21 nt, Human
cucugggcuauggacacaggg

SEQ ID NO: 2874114 - RNA, 20 nt, Human
cucuggggcaggcugcuuca

SEQ ID NO: 2874115 - RNA, 16 nt, Human
cucuguuucuccuucu

SEQ ID NO: 2874116 - RNA, 17 nt, Human
cucugugugcacaaaua

SEQ ID NO: 2874117 - RNA, 15 nt, Human
cucugugugcacaaa

SEQ ID NO: 2874118 - RNA, 23 nt, Human
cucugugucuaagauucuagauc

SEQ ID NO: 2874119 - RNA, 14 nt, Human
cucugugucugaga

SEQ ID NO: 2874120 - RNA, 17 nt, Human
cucuguguccuucccug

SEQ ID NO: 2874121 - RNA, 15 nt, Human
cucugugucuaagau

SEQ ID NO: 2874122 - RNA, 14 nt, Human
cucuguguccuucc

SEQ ID NO: 2874123 - RNA, 16 nt, Human
cucuguguccuucccu

SEQ ID NO: 2874124 - RNA, 18 nt, Human
cucugugucuaagauucu

SEQ ID NO: 2874125 - RNA, 19 nt, Human
cucugugucuaagauucua

SEQ ID NO: 2874126 - RNA, 21 nt, Human
cucugugucuaagauucuaga

SEQ ID NO: 2874127 - RNA, 22 nt, Human
cucugugucuaagauucuagau

SEQ ID NO: 2874128 - RNA, 20 nt, Human
cucuguugcccaggcuggag

SEQ ID NO: 2874129 - RNA, 22 nt, Human
cucuguugcccaggcuggagug

SEQ ID NO: 2874130 - RNA, 23 nt, Human
cucugugucagguggggcagcuu

SEQ ID NO: 2874131 - RNA, 22 nt, Human
cucugugucagguggggcagcu

SEQ ID NO: 2874132 - RNA, 21 nt, Human
cucugugucagguggggcagc

SEQ ID NO: 2874133 - RNA, 20 nt, Human
cucugugucagguggggcag

SEQ ID NO: 2874134 - RNA, 19 nt, Human
cucugugucagguggggca

SEQ ID NO: 2874135 - RNA, 23 nt, Human
cucugugaccugccccgcccagc

SEQ ID NO: 2874136 - RNA, 15 nt, Human
cucugugaccugccc

SEQ ID NO: 2874137 - RNA, 12 nt, Human
cucugugaccca

SEQ ID NO: 2874138 - RNA, 23 nt, Human
cucugugacccacuucucaucac

SEQ ID NO: 2874139 - RNA, 24 nt, Human
cucugugacccacuucucaucaca

SEQ ID NO: 2874140 - RNA, 14 nt, Human
cucugugaccucag

SEQ ID NO: 2874141 - RNA, 16 nt, Human
cucugugaccucaggc

SEQ ID NO: 2874142 - RNA, 19 nt, Human
cucugugaccucaggcacu

SEQ ID NO: 2874143 - RNA, 24 nt, Human
cucugugaccucaggcacuagccu

SEQ ID NO: 2874144 - RNA, 13 nt, Human
cucuucuccaggc

SEQ ID NO: 2874145 - RNA, 15 nt, Human
cucuucuccaggcug

SEQ ID NO: 2874146 - RNA, 12 nt, Human
cucuucuccacu

SEQ ID NO: 2874147 - RNA, 13 nt, Human
cucuucuccacug

SEQ ID NO: 2874148 - RNA, 16 nt, Human
cucuucgaagccuugc

SEQ ID NO: 2874149 - RNA, 18 nt, Human
cucuucgaagccuugccu

SEQ ID NO: 2874150 - RNA, 21 nt, Human
cucuucgcgcccgccccugca

SEQ ID NO: 2874151 - RNA, 23 nt, Human
cucuucgcgcccgccccugcagc

SEQ ID NO: 2874152 - RNA, 13 nt, Human
cucuucggcccuc

SEQ ID NO: 2874153 - RNA, 14 nt, Human
cucuucggcccuca

SEQ ID NO: 2874154 - RNA, 16 nt, Human
cucuucggcccucaga

SEQ ID NO: 2874155 - RNA, 17 nt, Human
cucuuccugugauccac

SEQ ID NO: 2874156 - RNA, 13 nt, Human
cucuuccugugau

SEQ ID NO: 2874157 - RNA, 19 nt, Human
cucuucuauuuuguaaacu

SEQ ID NO: 2874158 - RNA, 17 nt, Human
cucuucuauuuuguaaa

SEQ ID NO: 2874159 - RNA, 21 nt, Human
cucuuccccagaaaggagacu

SEQ ID NO: 2874160 - RNA, 12 nt, Human
cucuuccccaga

SEQ ID NO: 2874161 - RNA, 22 nt, Human
cucuuaagcuuccgccgucuca

SEQ ID NO: 2874162 - RNA, 15 nt, Human
cucuucccccuucca

SEQ ID NO: 2874163 - RNA, 16 nt, Human
cucuucccccuuccaa

SEQ ID NO: 2874164 - RNA, 15 nt, Human
cucuucccucagucc

SEQ ID NO: 2874165 - RNA, 17 nt, Human
cucuucccucaguccca

SEQ ID NO: 2874166 - RNA, 12 nt, Human
cucuuccugccc

SEQ ID NO: 2874167 - RNA, 13 nt, Human
cucuuccugcccc

SEQ ID NO: 2874168 - RNA, 14 nt, Human
cucuuccugccccu

SEQ ID NO: 2874169 - RNA, 16 nt, Human
cucuuccugccccucu

SEQ ID NO: 2874170 - RNA, 17 nt, Human
cucuuccugccccucuu

SEQ ID NO: 2874171 - RNA, 18 nt, Human
cucuuccugccccucuuu

SEQ ID NO: 2874172 - RNA, 19 nt, Human
cucuuccugccccucuuuc

SEQ ID NO: 2874173 - RNA, 20 nt, Human
cucuuccugccccucuuucu

SEQ ID NO: 2874174 - RNA, 21 nt, Human
cucuuccugccccucuuucuc

SEQ ID NO: 2874175 - RNA, 22 nt, Human
cucuuccugccccucuuucucu

SEQ ID NO: 2874176 - RNA, 23 nt, Human
cucuuccugccccucuuucucuu

SEQ ID NO: 2874177 - RNA, 19 nt, Human
cucugacacacagcucugu

SEQ ID NO: 2874178 - RNA, 18 nt, Human
cucugacacacagcucug

SEQ ID NO: 2874179 - RNA, 17 nt, Human
cucugacacacagcucu

SEQ ID NO: 2874180 - RNA, 16 nt, Human
cucugacacacagcuc

SEQ ID NO: 2874181 - RNA, 15 nt, Human
cucugacacacagcu

SEQ ID NO: 2874182 - RNA, 14 nt, Human
cucugacacacagc

SEQ ID NO: 2874183 - RNA, 22 nt, Human
cucugacaacagacuucugaaa

SEQ ID NO: 2874184 - RNA, 21 nt, Human
cucugacaacagacuucugaa

SEQ ID NO: 2874185 - RNA, 22 nt, Human
cucugaaggacauugcggacag

SEQ ID NO: 2874186 - RNA, 18 nt, Human
cucgcugcacaaauacuc

SEQ ID NO: 2874187 - RNA, 13 nt, Human
cucugaagucaca

SEQ ID NO: 2874188 - RNA, 23 nt, Human
cucugaagucacaucacaggaca

SEQ ID NO: 2874189 - RNA, 16 nt, Human
cucugacaacagacuu

SEQ ID NO: 2874190 - RNA, 14 nt, Human
cucugaggacacua

SEQ ID NO: 2874191 - RNA, 12 nt, Human
cucugaggacac

SEQ ID NO: 2874192 - RNA, 16 nt, Human
cucugaggacacuaac

SEQ ID NO: 2874193 - RNA, 22 nt, Human
cucugaggugccugucccaccc

SEQ ID NO: 2874194 - RNA, 15 nt, Human
cucugaggugccugu

SEQ ID NO: 2874195 - RNA, 19 nt, Human
cucugaggugccuguccca

SEQ ID NO: 2874196 - RNA, 17 nt, Human
cucugagagucuagauu

SEQ ID NO: 2874197 - RNA, 13 nt, Human
cucugagagucua

SEQ ID NO: 2874198 - RNA, 15 nt, Human
cucugagagucuaga

SEQ ID NO: 2874199 - RNA, 16 nt, Human
cucugagagucuagau

SEQ ID NO: 2874200 - RNA, 15 nt, Human
cucugaccugcaggc

SEQ ID NO: 2874201 - RNA, 14 nt, Human
cucugaccugcagg

SEQ ID NO: 2874202 - RNA, 13 nt, Human
cucugaccugcag

SEQ ID NO: 2874203 - RNA, 15 nt, Human
cucugaccugcacug

SEQ ID NO: 2874204 - RNA, 16 nt, Human
cucugaccugcaggcc

SEQ ID NO: 2874205 - RNA, 16 nt, Human
cucugacccagugaga

SEQ ID NO: 2874206 - RNA, 12 nt, Human
cucugaccccuc

SEQ ID NO: 2874207 - RNA, 20 nt, Human
cucugaccccagcauucuca

SEQ ID NO: 2874208 - RNA, 23 nt, Human
cucugacauuaugugguuuuaga

SEQ ID NO: 2874209 - RNA, 16 nt, Human
cucugaccaacaggcu

SEQ ID NO: 2874210 - RNA, 14 nt, Human
cucugacaagggcu

SEQ ID NO: 2874211 - RNA, 16 nt, Human
cucugacaagggcuga

SEQ ID NO: 2874212 - RNA, 17 nt, Human
cucugacaagggcugac

SEQ ID NO: 2874213 - RNA, 18 nt, Human
cucugacaagggcugacc

SEQ ID NO: 2874214 - RNA, 19 nt, Human
cucugacaagggcugaccu

SEQ ID NO: 2874215 - RNA, 20 nt, Human
cucugacaagggcugaccug

SEQ ID NO: 2874216 - RNA, 12 nt, Human
cucugaccugca

SEQ ID NO: 2874217 - RNA, 14 nt, Human
cucugaccugcacu

SEQ ID NO: 2874218 - RNA, 21 nt, Human
cucugaccccuccucacuggc

SEQ ID NO: 2874219 - RNA, 13 nt, Human
cucugaccccucc

SEQ ID NO: 2874220 - RNA, 14 nt, Human
cucugaccccuccu

SEQ ID NO: 2874221 - RNA, 16 nt, Human
cucugaccccuccuca

SEQ ID NO: 2874222 - RNA, 18 nt, Human
cucugaccccuccucacu

SEQ ID NO: 2874223 - RNA, 12 nt, Human
cucugccccagu

SEQ ID NO: 2874224 - RNA, 13 nt, Human
cucugccccaguc

SEQ ID NO: 2874225 - RNA, 17 nt, Human
cucugccccagucguua

SEQ ID NO: 2874226 - RNA, 20 nt, Human
cucugcccuaaugcgcaggc

SEQ ID NO: 2874227 - RNA, 12 nt, Human
cucugcccccug

SEQ ID NO: 2874228 - RNA, 17 nt, Human
cucugcccccugcuggc

SEQ ID NO: 2874229 - RNA, 14 nt, Human
cucugccgcuaccu

SEQ ID NO: 2874230 - RNA, 15 nt, Human
cucugccgcuaccuc

SEQ ID NO: 2874231 - RNA, 19 nt, Human
cucugccgcuaccucccuc

SEQ ID NO: 2874232 - RNA, 20 nt, Human
cucugccgcuaccucccucc

SEQ ID NO: 2874233 - RNA, 21 nt, Human
cucugccgcuaccucccuccc

SEQ ID NO: 2874234 - RNA, 15 nt, Human
cucugccgucucugg

SEQ ID NO: 2874235 - RNA, 23 nt, Human
cucugauaaaagggcaaaucugc

SEQ ID NO: 2874236 - RNA, 15 nt, Human
cucugaguccuggcc

SEQ ID NO: 2874237 - RNA, 16 nt, Human
cucugaguccuggccc

SEQ ID NO: 2874238 - RNA, 17 nt, Human
cucugaguccuggccca

SEQ ID NO: 2874239 - RNA, 18 nt, Human
cucugaguccuggcccaa

SEQ ID NO: 2874240 - RNA, 16 nt, Human
cucugcauuuuucugc

SEQ ID NO: 2874241 - RNA, 19 nt, Human
cucugcauuuuucugcaga

SEQ ID NO: 2874242 - RNA, 17 nt, Human
cucugcaucccagcacc

SEQ ID NO: 2874243 - RNA, 18 nt, Human
cucugcaucccagcaccu

SEQ ID NO: 2874244 - RNA, 19 nt, Human
cucugcaucccagcaccug

SEQ ID NO: 2874245 - RNA, 20 nt, Human
cucugcaucccagcaccugc

SEQ ID NO: 2874246 - RNA, 22 nt, Human
cucugcaucccagcaccugccu

SEQ ID NO: 2874247 - RNA, 23 nt, Human
cucugcaucccagcaccugccuc

SEQ ID NO: 2874248 - RNA, 11 nt, Human
gagcugcccuc

SEQ ID NO: 2874249 - RNA, 15 nt, Human
gagcugccccucucu

SEQ ID NO: 2874250 - RNA, 18 nt, Human
gagcugccccucucuggg

SEQ ID NO: 2874251 - RNA, 19 nt, Human
gagcugccccucucugggc

SEQ ID NO: 2874252 - RNA, 22 nt, Human
gagcucuucaggccucccucuc

SEQ ID NO: 2874253 - RNA, 19 nt, Human
gagcucuucaggccucccu

SEQ ID NO: 2874254 - RNA, 17 nt, Human
gagcucuucaggccucc

SEQ ID NO: 2874255 - RNA, 16 nt, Human
gagcucuucaggccuc

SEQ ID NO: 2874256 - RNA, 20 nt, Human
gagcucuggugauaaggaca

SEQ ID NO: 2874257 - RNA, 16 nt, Human
gagcucugcagagcag

SEQ ID NO: 2874258 - RNA, 15 nt, Human
gagcugcccuccuug

SEQ ID NO: 2874259 - RNA, 21 nt, Human
gagcugcccuccuuguccacc

SEQ ID NO: 2874260 - RNA, 23 nt, Human
gagcugcccuccuuguccaccca

SEQ ID NO: 2874261 - RNA, 19 nt, Human
gagcuguuuauggccucag

SEQ ID NO: 2874262 - RNA, 22 nt, Human
gagcuguuuauggccucagcug

SEQ ID NO: 2874263 - RNA, 15 nt, Human
gagcuguuuauguuu

SEQ ID NO: 2874264 - RNA, 16 nt, Human
gagcuguuuauguuuu

SEQ ID NO: 2874265 - RNA, 17 nt, Human
gagcuguuuauguuuuu

SEQ ID NO: 2874266 - RNA, 20 nt, Human
gagcuguuuauggccucagc

SEQ ID NO: 2874267 - RNA, 15 nt, Human
gagcuuaacagugug

SEQ ID NO: 2874268 - RNA, 22 nt, Human
gagcuuccaaggggcaaauuuu

SEQ ID NO: 2874269 - RNA, 14 nt, Human
gagcuucuggcacu

SEQ ID NO: 2874270 - RNA, 18 nt, Human
gagcuucuguugcugccu

SEQ ID NO: 2874271 - RNA, 11 nt, Human
gagcuaaggcu

SEQ ID NO: 2874272 - RNA, 21 nt, Human
gagccugggauuucuaugcag

SEQ ID NO: 2874273 - RNA, 13 nt, Human
gagcuaaggcucu

SEQ ID NO: 2874274 - RNA, 14 nt, Human
gagcuaaggcucua

SEQ ID NO: 2874275 - RNA, 15 nt, Human
gagcuaagggugggu

SEQ ID NO: 2874276 - RNA, 18 nt, Human
gagcuaagggugggugcu

SEQ ID NO: 2874277 - RNA, 20 nt, Human
gagcuaagggugggugcuca

SEQ ID NO: 2874278 - RNA, 22 nt, Human
gagcuaagggugggugcucaga

SEQ ID NO: 2874279 - RNA, 23 nt, Human
gagcuaagggugggugcucagaa

SEQ ID NO: 2874280 - RNA, 16 nt, Human
gagcuccucuccugga

SEQ ID NO: 2874281 - RNA, 17 nt, Human
gagcuccucuccuggag

SEQ ID NO: 2874282 - RNA, 18 nt, Human
gagcuccucuccuggagg

SEQ ID NO: 2874283 - RNA, 19 nt, Human
gagcuccucuccuggagga

SEQ ID NO: 2874284 - RNA, 19 nt, Human
gagcuccucuguccugcuu

SEQ ID NO: 2874285 - RNA, 21 nt, Human
gagcuccucuguccugcuucu

SEQ ID NO: 2874286 - RNA, 22 nt, Human
gagcuccucuguccugcuucug

SEQ ID NO: 2874287 - RNA, 19 nt, Human
gagcuccccuacggaccag

SEQ ID NO: 2874288 - RNA, 20 nt, Human
gagcuccccuacggaccagg

SEQ ID NO: 2874289 - RNA, 15 nt, Human
gagcuccucuccugg

SEQ ID NO: 2874290 - RNA, 17 nt, Human
gagcggucucaggcugg

SEQ ID NO: 2874291 - RNA, 22 nt, Human
gagcggucucaggcugguggga

SEQ ID NO: 2874292 - RNA, 23 nt, Human
gagcggucucaggcuggugggag

SEQ ID NO: 2874293 - RNA, 14 nt, Human
gagcgguggcccug

SEQ ID NO: 2874294 - RNA, 23 nt, Human
gagcgguggcccugucccuccca

SEQ ID NO: 2874295 - RNA, 13 nt, Human
gagcgguggggga

SEQ ID NO: 2874296 - RNA, 23 nt, Human
gagcgucaggguuggugugcuga

SEQ ID NO: 2874297 - RNA, 17 nt, Human
gagcgguggcccugucc

SEQ ID NO: 2874298 - RNA, 16 nt, Human
gagcgugaaucuguau

SEQ ID NO: 2874299 - RNA, 20 nt, Human
gagcguuagacugacuuguu

SEQ ID NO: 2874300 - RNA, 14 nt, Human
gagccuggugcccu

SEQ ID NO: 2874301 - RNA, 12 nt, Human
gagccuggugcc

SEQ ID NO: 2874302 - RNA, 12 nt, Human
gagccugcuggu

SEQ ID NO: 2874303 - RNA, 21 nt, Human
gagccugcuggucacagccuc

SEQ ID NO: 2874304 - RNA, 23 nt, Human
gagccugcuggucacagccuccu

SEQ ID NO: 2874305 - RNA, 15 nt, Human
gagccuggccagccu

SEQ ID NO: 2874306 - RNA, 17 nt, Human
gagccuggcccauagaa

SEQ ID NO: 2874307 - RNA, 18 nt, Human
gagccuggcccauagaaa

SEQ ID NO: 2874308 - RNA, 23 nt, Human
gagccuggcuccguccaggagcc

SEQ ID NO: 2874309 - RNA, 12 nt, Human
gagccuggcucu

SEQ ID NO: 2874310 - RNA, 17 nt, Human
gagccuggcacaggacu

SEQ ID NO: 2874311 - RNA, 18 nt, Human
gagccuggcacaggacug

SEQ ID NO: 2874312 - RNA, 19 nt, Human
gagccuggcacaggacuga

SEQ ID NO: 2874313 - RNA, 21 nt, Human
gagccuggcucuugugcugga

SEQ ID NO: 2874314 - RNA, 23 nt, Human
gagccuggcucuugugcuggaug

SEQ ID NO: 2874315 - RNA, 17 nt, Human
gagccugagucagggcc

SEQ ID NO: 2874316 - RNA, 21 nt, Human
gagccugagucagggcccaga

SEQ ID NO: 2874317 - RNA, 22 nt, Human
gagccugagucagggcccagag

SEQ ID NO: 2874318 - RNA, 15 nt, Human
gagccugaucucuuc

SEQ ID NO: 2874319 - RNA, 16 nt, Human
gagccugaucucuucc

SEQ ID NO: 2874320 - RNA, 17 nt, Human
gagccugaucucuuccu

SEQ ID NO: 2874321 - RNA, 18 nt, Human
gagccugaucucuuccug

SEQ ID NO: 2874322 - RNA, 19 nt, Human
gagccugaucucuuccugu

SEQ ID NO: 2874323 - RNA, 16 nt, Human
gagccugccuggagcg

SEQ ID NO: 2874324 - RNA, 17 nt, Human
gagcccugguggcagug

SEQ ID NO: 2874325 - RNA, 19 nt, Human
gagccucagcauccuggca

SEQ ID NO: 2874326 - RNA, 16 nt, Human
gagcccugguggcagu

SEQ ID NO: 2874327 - RNA, 15 nt, Human
gagcccugguggcag

SEQ ID NO: 2874328 - RNA, 21 nt, Human
gagccucagcauccuggcacc

SEQ ID NO: 2874329 - RNA, 20 nt, Human
gagccucagcauccuggcac

SEQ ID NO: 2874330 - RNA, 20 nt, Human
gagcaggagauugagaagga

SEQ ID NO: 2874331 - RNA, 22 nt, Human
gagcaggagauugagaaggaga

SEQ ID NO: 2874332 - RNA, 23 nt, Human
gagcaggagauugagaaggagag

SEQ ID NO: 2874333 - RNA, 19 nt, Human
gagcaggacucuauuuuaa

SEQ ID NO: 2874334 - RNA, 18 nt, Human
gagcaggagauugagaag

SEQ ID NO: 2874335 - RNA, 22 nt, Human
gagcagaaauuuaucuuucaaa

SEQ ID NO: 2874336 - RNA, 18 nt, Human
gagcaggcggugggcacc

SEQ ID NO: 2874337 - RNA, 22 nt, Human
gagcaggcggugggcacccacc

SEQ ID NO: 2874338 - RNA, 18 nt, Human
gagcaggcgguggggaga

SEQ ID NO: 2874339 - RNA, 18 nt, Human
gagccaccgcgcccagcc

SEQ ID NO: 2874340 - RNA, 14 nt, Human
gagccaccgugccu

SEQ ID NO: 2874341 - RNA, 20 nt, Human
gagccaccgugccuggccac

SEQ ID NO: 2874342 - RNA, 19 nt, Human
gagcagaugcagagagcca

SEQ ID NO: 2874343 - RNA, 21 nt, Human
gagcagaugcagagagccauu

SEQ ID NO: 2874344 - RNA, 14 nt, Human
gagcagaugcagag

SEQ ID NO: 2874345 - RNA, 16 nt, Human
gagcagaugcagagag

SEQ ID NO: 2874346 - RNA, 18 nt, Human
gagcagaugcagagagcc

SEQ ID NO: 2874347 - RNA, 22 nt, Human
gagcagaccaccccgccugccc

SEQ ID NO: 2874348 - RNA, 15 nt, Human
gagcagacaggagga

SEQ ID NO: 2874349 - RNA, 21 nt, Human
gagcagacaggaggaaucaug

SEQ ID NO: 2874350 - RNA, 17 nt, Human
gagcacuggguugacuu

SEQ ID NO: 2874351 - RNA, 13 nt, Human
gagcacuggguug

SEQ ID NO: 2874352 - RNA, 22 nt, Human
gagcacuggaguggcucgccag

SEQ ID NO: 2874353 - RNA, 14 nt, Human
gagcagacaggagg

SEQ ID NO: 2874354 - RNA, 17 nt, Human
gagcagaaguggagcug

SEQ ID NO: 2874355 - RNA, 23 nt, Human
gagcagaacggagccccaggccu

SEQ ID NO: 2874356 - RNA, 15 nt, Human
gagcacuuacuguaa

SEQ ID NO: 2874357 - RNA, 16 nt, Human
gagccauuuugugaau

SEQ ID NO: 2874358 - RNA, 21 nt, Human
gagccauuuugugaauggauu

SEQ ID NO: 2874359 - RNA, 13 nt, Human
gagcccaggcggg

SEQ ID NO: 2874360 - RNA, 15 nt, Human
gagcccaggcgggag

SEQ ID NO: 2874361 - RNA, 14 nt, Human
gagccauuuuguga

SEQ ID NO: 2874362 - RNA, 14 nt, Human
gagccaugcuggga

SEQ ID NO: 2874363 - RNA, 17 nt, Human
gagccaugggcacaaag

SEQ ID NO: 2874364 - RNA, 18 nt, Human
gagccaugggcacaaagg

SEQ ID NO: 2874365 - RNA, 21 nt, Human
gagccauguagaagcugcauc

SEQ ID NO: 2874366 - RNA, 22 nt, Human
gagccacugcaccgggccacag

SEQ ID NO: 2874367 - RNA, 14 nt, Human
gagccagacagacc

SEQ ID NO: 2874368 - RNA, 18 nt, Human
gagccacucucuucccuu

SEQ ID NO: 2874369 - RNA, 23 nt, Human
gagccauauaaguuugaaggaaa

SEQ ID NO: 2874370 - RNA, 18 nt, Human
gagcacacuuggcccaag

SEQ ID NO: 2874371 - RNA, 20 nt, Human
gagcacacuuuaguggccga

SEQ ID NO: 2874372 - RNA, 13 nt, Human
gagcacagguccc

SEQ ID NO: 2874373 - RNA, 14 nt, Human
gagcacagguccca

SEQ ID NO: 2874374 - RNA, 16 nt, Human
gagcacaggucccacc

SEQ ID NO: 2874375 - RNA, 18 nt, Human
gagcacaggucccaccuc

SEQ ID NO: 2874376 - RNA, 22 nt, Human
gagcacaggucccaccuccagc

SEQ ID NO: 2874377 - RNA, 23 nt, Human
gagcacaggucccaccuccagcc

SEQ ID NO: 2874378 - RNA, 16 nt, Human
gagcacccauuccaaa

SEQ ID NO: 2874379 - RNA, 19 nt, Human
gagcacccauuccaaagcu

SEQ ID NO: 2874380 - RNA, 13 nt, Human
gagcaaagcugau

SEQ ID NO: 2874381 - RNA, 22 nt, Human
gagcaaagaucaaaauaaaaag

SEQ ID NO: 2874382 - RNA, 14 nt, Human
gagcaaagaucaaa

SEQ ID NO: 2874383 - RNA, 18 nt, Human
gagcaaagaucaaaauaa

SEQ ID NO: 2874384 - RNA, 13 nt, Human
gagcaaagaucaa

SEQ ID NO: 2874385 - RNA, 22 nt, Human
gagaucuccuugcccuagauga

SEQ ID NO: 2874386 - RNA, 16 nt, Human
gagauuuuuuauugcu

SEQ ID NO: 2874387 - RNA, 17 nt, Human
gagauuuuuuauugcua

SEQ ID NO: 2874388 - RNA, 20 nt, Human
gagcaaaaauaucccuuccg

SEQ ID NO: 2874389 - RNA, 21 nt, Human
gagaugaaaucuuacagcugg

SEQ ID NO: 2874390 - RNA, 12 nt, Human
gagcaaaauaau

SEQ ID NO: 2874391 - RNA, 20 nt, Human
gagaucaaccccuucgcucc

SEQ ID NO: 2874392 - RNA, 16 nt, Human
gagauauugugaggac

SEQ ID NO: 2874393 - RNA, 20 nt, Human
gaaugcuguacaucuauuuu

SEQ ID NO: 2874394 - RNA, 17 nt, Human
gaaugcuguacaucuau

SEQ ID NO: 2874395 - RNA, 15 nt, Human
gaaugcuguacaucu

SEQ ID NO: 2874396 - RNA, 14 nt, Human
gaaugcuguacauc

SEQ ID NO: 2874397 - RNA, 13 nt, Human
gaaugcuguacau

SEQ ID NO: 2874398 - RNA, 21 nt, Human
gaaugcugcaggacuugagaa

SEQ ID NO: 2874399 - RNA, 10 nt, Human
gaaugcugcc

SEQ ID NO: 2874400 - RNA, 11 nt, Human
gaaugcugcca

SEQ ID NO: 2874401 - RNA, 12 nt, Human
gaaugcugccag

SEQ ID NO: 2874402 - RNA, 13 nt, Human
gaaugcugccagu

SEQ ID NO: 2874403 - RNA, 15 nt, Human
gaaugcugccagugu

SEQ ID NO: 2874404 - RNA, 23 nt, Human
gaaucugucucccaguuaugaau

SEQ ID NO: 2874405 - RNA, 12 nt, Human
gagaucagaaaa

SEQ ID NO: 2874406 - RNA, 23 nt, Human
gagaucuaaggaugucacagggc

SEQ ID NO: 2874407 - RNA, 20 nt, Human
gagaucgcgccacugcacuc

SEQ ID NO: 2874408 - RNA, 15 nt, Human
gagaucgugccacug

SEQ ID NO: 2874409 - RNA, 17 nt, Human
gagaucgugccacugca

SEQ ID NO: 2874410 - RNA, 20 nt, Human
gagaucgugccacugcacuc

SEQ ID NO: 2874411 - RNA, 18 nt, Human
gagaucgugccauugcac

SEQ ID NO: 2874412 - RNA, 21 nt, Human
gagaucgugccauugcacucc

SEQ ID NO: 2874413 - RNA, 12 nt, Human
gaggcagaguuu

SEQ ID NO: 2874414 - RNA, 13 nt, Human
gaggcagccccau

SEQ ID NO: 2874415 - RNA, 17 nt, Human
gaggcagccacuucggc

SEQ ID NO: 2874416 - RNA, 12 nt, Human
gaggcagccagg

SEQ ID NO: 2874417 - RNA, 23 nt, Human
gaggcaaugucaggaacagaagg

SEQ ID NO: 2874418 - RNA, 21 nt, Human
gaggcaaugucaggaacagaa

SEQ ID NO: 2874419 - RNA, 22 nt, Human
gaggauugcuugagcccaggag

SEQ ID NO: 2874420 - RNA, 19 nt, Human
gaggauugcuugagcccag

SEQ ID NO: 2874421 - RNA, 18 nt, Human
gaggauugcuugagccca

SEQ ID NO: 2874422 - RNA, 14 nt, Human
gaggauuauugaua

SEQ ID NO: 2874423 - RNA, 13 nt, Human
gaggcacaagaau

SEQ ID NO: 2874424 - RNA, 11 nt, Human
gaggcacagca

SEQ ID NO: 2874425 - RNA, 14 nt, Human
gaggcacagcaaac

SEQ ID NO: 2874426 - RNA, 18 nt, Human
gaggcacugaagugcuua

SEQ ID NO: 2874427 - RNA, 16 nt, Human
gaggcagaaaauugca

SEQ ID NO: 2874428 - RNA, 20 nt, Human
gaggcagaaaauugcacaau

SEQ ID NO: 2874429 - RNA, 22 nt, Human
gaggcagccccauucugccugc

SEQ ID NO: 2874430 - RNA, 21 nt, Human
gaggcagccccauucugccug

SEQ ID NO: 2874431 - RNA, 23 nt, Human
gaggcagccccauucugccugcc

SEQ ID NO: 2874432 - RNA, 22 nt, Human
gaggccaggaguuugagaccag

SEQ ID NO: 2874433 - RNA, 12 nt, Human
gaggccaggagu

SEQ ID NO: 2874434 - RNA, 22 nt, Human
gaggcaggccgacuguacuaaa

SEQ ID NO: 2874435 - RNA, 23 nt, Human
gaggcaggaggauugcuugagcc

SEQ ID NO: 2874436 - RNA, 20 nt, Human
gaggcagagguugcagugag

SEQ ID NO: 2874437 - RNA, 15 nt, Human
gaggaguacagguga

SEQ ID NO: 2874438 - RNA, 20 nt, Human
gaggaguaaccgcuccaggu

SEQ ID NO: 2874439 - RNA, 15 nt, Human
gaggaggugccugga

SEQ ID NO: 2874440 - RNA, 18 nt, Human
gaggagguggcagcccug

SEQ ID NO: 2874441 - RNA, 15 nt, Human
gaggagguggcagcc

SEQ ID NO: 2874442 - RNA, 19 nt, Human
gaggaggggccccccugcc

SEQ ID NO: 2874443 - RNA, 22 nt, Human
gaggaggggccccccugcccug

SEQ ID NO: 2874444 - RNA, 21 nt, Human
gaggaggggccccccugcccu

SEQ ID NO: 2874445 - RNA, 22 nt, Human
gaggagguggcagcccuguagg

SEQ ID NO: 2874446 - RNA, 20 nt, Human
gaggagguggcagcccugua

SEQ ID NO: 2874447 - RNA, 15 nt, Human
gaggaggugugagga

SEQ ID NO: 2874448 - RNA, 21 nt, Human
gaggaggugugaggaggaggc

SEQ ID NO: 2874449 - RNA, 12 nt, Human
gaggauguucug

SEQ ID NO: 2874450 - RNA, 13 nt, Human
gaggaugucccug

SEQ ID NO: 2874451 - RNA, 18 nt, Human
gaggaugucccugggcca

SEQ ID NO: 2874452 - RNA, 19 nt, Human
gaggaugucccugggccag

SEQ ID NO: 2874453 - RNA, 20 nt, Human
gaggaugucccugggccagg

SEQ ID NO: 2874454 - RNA, 18 nt, Human
gaggaugucucaaacuuc

SEQ ID NO: 2874455 - RNA, 16 nt, Human
gaggaucacuggagcc

SEQ ID NO: 2874456 - RNA, 17 nt, Human
gaggaucacuggagccc

SEQ ID NO: 2874457 - RNA, 20 nt, Human
gaggauguucugggacacag

SEQ ID NO: 2874458 - RNA, 17 nt, Human
gaggauguucugggaca

SEQ ID NO: 2874459 - RNA, 15 nt, Human
gaggauugcuaucug

SEQ ID NO: 2874460 - RNA, 15 nt, Human
gaggacaaccauucc

SEQ ID NO: 2874461 - RNA, 22 nt, Human
gaggaauuuucuuuguguagcu

SEQ ID NO: 2874462 - RNA, 13 nt, Human
gaggacaaaacuu

SEQ ID NO: 2874463 - RNA, 14 nt, Human
gaggacaaaacuuc

SEQ ID NO: 2874464 - RNA, 15 nt, Human
gaggacaaaacuucu

SEQ ID NO: 2874465 - RNA, 17 nt, Human
gaggacaaaacuucuug

SEQ ID NO: 2874466 - RNA, 22 nt, Human
gaggacaaaacuucuugucaga

SEQ ID NO: 2874467 - RNA, 23 nt, Human
gaggacaaaacuucuugucagac

SEQ ID NO: 2874468 - RNA, 22 nt, Human
gaggaauuuauaccucaaacua

SEQ ID NO: 2874469 - RNA, 14 nt, Human
gaggaauggacaga

SEQ ID NO: 2874470 - RNA, 15 nt, Human
gaggaauccagaccc

SEQ ID NO: 2874471 - RNA, 19 nt, Human
gaggaauccuggcagccca

SEQ ID NO: 2874472 - RNA, 17 nt, Human
gaggaauccuggcagcc

SEQ ID NO: 2874473 - RNA, 16 nt, Human
gaggaauccuggcagc

SEQ ID NO: 2874474 - RNA, 15 nt, Human
gaggaauccuggcag

SEQ ID NO: 2874475 - RNA, 20 nt, Human
gaggaauccuggcagcccag

SEQ ID NO: 2874476 - RNA, 22 nt, Human
gagcuucuuccaggugcccagc

SEQ ID NO: 2874477 - RNA, 18 nt, Human
gagcuucuggggucccca

SEQ ID NO: 2874478 - RNA, 19 nt, Human
gagcuucugggguccccag

SEQ ID NO: 2874479 - RNA, 20 nt, Human
gagcuucugggguccccagg

SEQ ID NO: 2874480 - RNA, 21 nt, Human
gagcuucugggguccccaggg

SEQ ID NO: 2874481 - RNA, 23 nt, Human
gagcuucugggguccccagggcu

SEQ ID NO: 2874482 - RNA, 21 nt, Human
gagcuucuguugcugccucau

SEQ ID NO: 2874483 - RNA, 11 nt, Human
gagcuucuggg

SEQ ID NO: 2874484 - RNA, 19 nt, Human
gaggaaggaacagcaaugg

SEQ ID NO: 2874485 - RNA, 14 nt, Human
gaggaauccagacc

SEQ ID NO: 2874486 - RNA, 21 nt, Human
gaggaauaauuauuuauuuaa

SEQ ID NO: 2874487 - RNA, 20 nt, Human
gaggaaucaugucaggccug

SEQ ID NO: 2874488 - RNA, 21 nt, Human
gaggaaucaugucaggccugu

SEQ ID NO: 2874489 - RNA, 22 nt, Human
gaggaaucaugucaggccugug

SEQ ID NO: 2874490 - RNA, 16 nt, Human
gaggaaggauuguaaa

SEQ ID NO: 2874491 - RNA, 14 nt, Human
gaggaaggauugua

SEQ ID NO: 2874492 - RNA, 15 nt, Human
gaggaaggauuguaa

SEQ ID NO: 2874493 - RNA, 18 nt, Human
gaggaauaauuauuuauu

SEQ ID NO: 2874494 - RNA, 16 nt, Human
gaggaaguacaaacua

SEQ ID NO: 2874495 - RNA, 17 nt, Human
gaggaauaauuauuuau

SEQ ID NO: 2874496 - RNA, 22 nt, Human
gaggaauaagaauggagcagua

SEQ ID NO: 2874497 - RNA, 15 nt, Human
gaggagcagugcagg

SEQ ID NO: 2874498 - RNA, 14 nt, Human
gaggagccagacag

SEQ ID NO: 2874499 - RNA, 16 nt, Human
gaggagccagacagac

SEQ ID NO: 2874500 - RNA, 13 nt, Human
gaggagccaggca

SEQ ID NO: 2874501 - RNA, 17 nt, Human
gaggagcagugcaggca

SEQ ID NO: 2874502 - RNA, 14 nt, Human
gaggagcauguuuu

SEQ ID NO: 2874503 - RNA, 21 nt, Human
gaggagcauguuuuguauaca

SEQ ID NO: 2874504 - RNA, 14 nt, Human
gaggacaggcggga

SEQ ID NO: 2874505 - RNA, 20 nt, Human
gaggacaggcgggaggaggu

SEQ ID NO: 2874506 - RNA, 14 nt, Human
gaggagccccagcu

SEQ ID NO: 2874507 - RNA, 21 nt, Human
gaggagcccauacucagccug

SEQ ID NO: 2874508 - RNA, 15 nt, Human
gaggagccccagcua

SEQ ID NO: 2874509 - RNA, 13 nt, Human
gaggagccccauc

SEQ ID NO: 2874510 - RNA, 17 nt, Human
gaggagccccaucuguc

SEQ ID NO: 2874511 - RNA, 18 nt, Human
gaggagccccaucugucu

SEQ ID NO: 2874512 - RNA, 23 nt, Human
gaggacagggaggugaccccagg

SEQ ID NO: 2874513 - RNA, 22 nt, Human
gaggacagggaggugaccccag

SEQ ID NO: 2874514 - RNA, 13 nt, Human
gaggacagggagg

SEQ ID NO: 2874515 - RNA, 13 nt, Human
gaggaggccucca

SEQ ID NO: 2874516 - RNA, 19 nt, Human
gaggagggaugcugccuga

SEQ ID NO: 2874517 - RNA, 13 nt, Human
gaggagcuucugg

SEQ ID NO: 2874518 - RNA, 14 nt, Human
gaggagcuucuggg

SEQ ID NO: 2874519 - RNA, 19 nt, Human
gaggaggaugucccugggc

SEQ ID NO: 2874520 - RNA, 21 nt, Human
gaggaggaugucccugggcca

SEQ ID NO: 2874521 - RNA, 22 nt, Human
gaggaggaugucccugggccag

SEQ ID NO: 2874522 - RNA, 23 nt, Human
gaggaggaugucccugggccagg

SEQ ID NO: 2874523 - RNA, 11 nt, Human
gaggagccuuu

SEQ ID NO: 2874524 - RNA, 13 nt, Human
gaggagccuuuuu

SEQ ID NO: 2874525 - RNA, 15 nt, Human
gaggagcugcuggcu

SEQ ID NO: 2874526 - RNA, 13 nt, Human
gaggagcugcugg

SEQ ID NO: 2874527 - RNA, 12 nt, Human
gaggagcugcug

SEQ ID NO: 2874528 - RNA, 11 nt, Human
gaggagcugcu

SEQ ID NO: 2874529 - RNA, 14 nt, Human
gaggccgaggcagg

SEQ ID NO: 2874530 - RNA, 12 nt, Human
gaggccugcccg

SEQ ID NO: 2874531 - RNA, 13 nt, Human
gaggccugcccgg

SEQ ID NO: 2874532 - RNA, 16 nt, Human
gaggccugcccgggcg

SEQ ID NO: 2874533 - RNA, 13 nt, Human
gaggccugagacc

SEQ ID NO: 2874534 - RNA, 14 nt, Human
gaggccugagaccc

SEQ ID NO: 2874535 - RNA, 17 nt, Human
gaggccugagacccagg

SEQ ID NO: 2874536 - RNA, 18 nt, Human
gaggccugagacccagga

SEQ ID NO: 2874537 - RNA, 13 nt, Human
gaggccccuggac

SEQ ID NO: 2874538 - RNA, 19 nt, Human
gaggccccuucuagguggc

SEQ ID NO: 2874539 - RNA, 20 nt, Human
gaggccccuucuagguggca

SEQ ID NO: 2874540 - RNA, 17 nt, Human
gaggccccuucucuccc

SEQ ID NO: 2874541 - RNA, 23 nt, Human
gaggccccuucucucccugccag

SEQ ID NO: 2874542 - RNA, 13 nt, Human
gaggcccggccuc

SEQ ID NO: 2874543 - RNA, 14 nt, Human
gaggcccuccugug

SEQ ID NO: 2874544 - RNA, 16 nt, Human
gaggcccuccugugcu

SEQ ID NO: 2874545 - RNA, 17 nt, Human
gaggcccuccugugcug

SEQ ID NO: 2874546 - RNA, 19 nt, Human
gaggcccuccugugcuggg

SEQ ID NO: 2874547 - RNA, 21 nt, Human
gaggcccuccugugcuggggg

SEQ ID NO: 2874548 - RNA, 18 nt, Human
gaggcccugcccaaugag

SEQ ID NO: 2874549 - RNA, 11 nt, Human
gaggcccugca

SEQ ID NO: 2874550 - RNA, 12 nt, Human
gaggcccugcau

SEQ ID NO: 2874551 - RNA, 13 nt, Human
gaggcccugcaug

SEQ ID NO: 2874552 - RNA, 14 nt, Human
gaggcccugcaugg

SEQ ID NO: 2874553 - RNA, 19 nt, Human
gaggcccugcaugggccag

SEQ ID NO: 2874554 - RNA, 14 nt, Human
gaggccuucucuga

SEQ ID NO: 2874555 - RNA, 20 nt, Human
gaggcggagcuugcagugag

SEQ ID NO: 2874556 - RNA, 21 nt, Human
gaggccuuaugaggguccucu

SEQ ID NO: 2874557 - RNA, 19 nt, Human
gaggcggguggaucaccug

SEQ ID NO: 2874558 - RNA, 12 nt, Human
gaggcgggugga

SEQ ID NO: 2874559 - RNA, 12 nt, Human
gaggccugucug

SEQ ID NO: 2874560 - RNA, 15 nt, Human
gaggccugucuguga

SEQ ID NO: 2874561 - RNA, 19 nt, Human
gaggccugucugugaccug

SEQ ID NO: 2874562 - RNA, 11 nt, Human
gaggccuucca

SEQ ID NO: 2874563 - RNA, 14 nt, Human
gaggccuuccagcu

SEQ ID NO: 2874564 - RNA, 15 nt, Human
gaggccuuccagcug

SEQ ID NO: 2874565 - RNA, 16 nt, Human
gaggccuuccagcugc

SEQ ID NO: 2874566 - RNA, 17 nt, Human
gaggccuuccagcugcu

SEQ ID NO: 2874567 - RNA, 18 nt, Human
gaggccuuccagcugcug

SEQ ID NO: 2874568 - RNA, 19 nt, Human
gaggccuuccagcugcugu

SEQ ID NO: 2874569 - RNA, 20 nt, Human
gaggccuuccagcugcuguc

SEQ ID NO: 2874570 - RNA, 21 nt, Human
gaggcugugugccugggggag

SEQ ID NO: 2874571 - RNA, 22 nt, Human
gaggcugugugccugggggagu

SEQ ID NO: 2874572 - RNA, 22 nt, Human
gaggcuuagcuuugcucugcca

SEQ ID NO: 2874573 - RNA, 21 nt, Human
gagggacuuugcugauuuccc

SEQ ID NO: 2874574 - RNA, 22 nt, Human
gagggacgucagacuuggcuca

SEQ ID NO: 2874575 - RNA, 14 nt, Human
gagggacucugaag

SEQ ID NO: 2874576 - RNA, 22 nt, Human
gagggacucugaagccucuggg

SEQ ID NO: 2874577 - RNA, 23 nt, Human
gagggacucugaagccucuggga

SEQ ID NO: 2874578 - RNA, 15 nt, Human
gagggacugccucug

SEQ ID NO: 2874579 - RNA, 16 nt, Human
gagggacugccucugc

SEQ ID NO: 2874580 - RNA, 18 nt, Human
gagggacugccucugcca

SEQ ID NO: 2874581 - RNA, 18 nt, Human
gagggacucugaagccuc

SEQ ID NO: 2874582 - RNA, 19 nt, Human
gagggacucugaagccucu

SEQ ID NO: 2874583 - RNA, 20 nt, Human
gagggacucugaagccucug

SEQ ID NO: 2874584 - RNA, 21 nt, Human
gagggacucugaagccucugg

SEQ ID NO: 2874585 - RNA, 18 nt, Human
gagggaccucucccaggg

SEQ ID NO: 2874586 - RNA, 17 nt, Human
gagggaccucucccagg

SEQ ID NO: 2874587 - RNA, 15 nt, Human
gagggaccucuccca

SEQ ID NO: 2874588 - RNA, 14 nt, Human
gagggaccucuccc

SEQ ID NO: 2874589 - RNA, 13 nt, Human
gagggaccucucc

SEQ ID NO: 2874590 - RNA, 15 nt, Human
gagggaccauguguc

SEQ ID NO: 2874591 - RNA, 16 nt, Human
gagggaccauguguca

SEQ ID NO: 2874592 - RNA, 21 nt, Human
gagggaccaugugucacuugu

SEQ ID NO: 2874593 - RNA, 23 nt, Human
gaggcuuuaugauaauagauucu

SEQ ID NO: 2874594 - RNA, 16 nt, Human
gaggcuuuggauuuga

SEQ ID NO: 2874595 - RNA, 14 nt, Human
gaggcuuuggauuu

SEQ ID NO: 2874596 - RNA, 15 nt, Human
gagggaaagugcaua

SEQ ID NO: 2874597 - RNA, 20 nt, Human
gaggcuuuggauuugacauu

SEQ ID NO: 2874598 - RNA, 11 nt, Human
gaggcuuugug

SEQ ID NO: 2874599 - RNA, 14 nt, Human
gaggcuuuguguug

SEQ ID NO: 2874600 - RNA, 16 nt, Human
gaggcuuuguguugua

SEQ ID NO: 2874601 - RNA, 10 nt, Human
gagggaaaag

SEQ ID NO: 2874602 - RNA, 15 nt, Human
gagggaaaagggaag

SEQ ID NO: 2874603 - RNA, 16 nt, Human
gagggaaaagggaagu

SEQ ID NO: 2874604 - RNA, 15 nt, Human
gaggcuuggaaagca

SEQ ID NO: 2874605 - RNA, 21 nt, Human
gagggaauccccgaaggugcu

SEQ ID NO: 2874606 - RNA, 17 nt, Human
gagggaaggauuuagga

SEQ ID NO: 2874607 - RNA, 14 nt, Human
gagggaagggacgg

SEQ ID NO: 2874608 - RNA, 19 nt, Human
gagggaccaacugggccca

SEQ ID NO: 2874609 - RNA, 18 nt, Human
gagggaccaacugggccc

SEQ ID NO: 2874610 - RNA, 17 nt, Human
gagggaccaacugggcc

SEQ ID NO: 2874611 - RNA, 14 nt, Human
gagggagugacaga

SEQ ID NO: 2874612 - RNA, 13 nt, Human
gagggagugacag

SEQ ID NO: 2874613 - RNA, 12 nt, Human
gagggcacuggu

SEQ ID NO: 2874614 - RNA, 20 nt, Human
gagggcacauuccuugccug

SEQ ID NO: 2874615 - RNA, 13 nt, Human
gaggggccuggca

SEQ ID NO: 2874616 - RNA, 14 nt, Human
gaggggccuggcag

SEQ ID NO: 2874617 - RNA, 18 nt, Human
gaggggccuggcagccgu

SEQ ID NO: 2874618 - RNA, 20 nt, Human
gaggggccuggcagccgugc

SEQ ID NO: 2874619 - RNA, 23 nt, Human
gagggcagaaagguucugcccgg

SEQ ID NO: 2874620 - RNA, 21 nt, Human
gagggcagaaagguucugccc

SEQ ID NO: 2874621 - RNA, 22 nt, Human
gagggcagaaagguucugcccg

SEQ ID NO: 2874622 - RNA, 23 nt, Human
gagggcacauuccuugccugcac

SEQ ID NO: 2874623 - RNA, 17 nt, Human
gagggcagaaagguucu

SEQ ID NO: 2874624 - RNA, 20 nt, Human
gagggcagaaagguucugcc

SEQ ID NO: 2874625 - RNA, 16 nt, Human
gagggcacugguggcc

SEQ ID NO: 2874626 - RNA, 18 nt, Human
gagggcacugguggcccg

SEQ ID NO: 2874627 - RNA, 16 nt, Human
gaucuuugcagacagg

SEQ ID NO: 2874628 - RNA, 13 nt, Human
gauagaguuccau

SEQ ID NO: 2874629 - RNA, 14 nt, Human
gaugaaaacauagc

SEQ ID NO: 2874630 - RNA, 21 nt, Human
gaugaaaaccuacauauucca

SEQ ID NO: 2874631 - RNA, 13 nt, Human
gaugaaaagauuu

SEQ ID NO: 2874632 - RNA, 13 nt, Human
gaucuuagauucu

SEQ ID NO: 2874633 - RNA, 14 nt, Human
gaucuuagauucuc

SEQ ID NO: 2874634 - RNA, 19 nt, Human
gaucuuagggugaaccacu

SEQ ID NO: 2874635 - RNA, 14 nt, Human
gaucuuauuuuucu

SEQ ID NO: 2874636 - RNA, 16 nt, Human
gaucuuauuuuucuaa

SEQ ID NO: 2874637 - RNA, 19 nt, Human
gaucuuauuuuucuaaacg

SEQ ID NO: 2874638 - RNA, 21 nt, Human
gaucuuauuuuucuaaacgua

SEQ ID NO: 2874639 - RNA, 19 nt, Human
gaucuucaaaaguaaugcc

SEQ ID NO: 2874640 - RNA, 24 nt, Human
gaucuucaaaaguaaugccucugu

SEQ ID NO: 2874641 - RNA, 19 nt, Human
gaucuuaagaggcugacag

SEQ ID NO: 2874642 - RNA, 20 nt, Human
gaucuguuuugaaggcaaaa

SEQ ID NO: 2874643 - RNA, 19 nt, Human
gaucuguuuugaaggcaaa

SEQ ID NO: 2874644 - RNA, 18 nt, Human
gauccucccaccucagcc

SEQ ID NO: 2874645 - RNA, 22 nt, Human
gauccuuagagguccucuggag

SEQ ID NO: 2874646 - RNA, 21 nt, Human
gauccuuagagguccucugga

SEQ ID NO: 2874647 - RNA, 17 nt, Human
gaucgaaccguuuugaa

SEQ ID NO: 2874648 - RNA, 20 nt, Human
gaucgcaagagccauguaga

SEQ ID NO: 2874649 - RNA, 17 nt, Human
gauccuuuuggagucag

SEQ ID NO: 2874650 - RNA, 15 nt, Human
gauccuuuuggaguc

SEQ ID NO: 2874651 - RNA, 21 nt, Human
gauccucccaccucagccucc

SEQ ID NO: 2874652 - RNA, 20 nt, Human
gauccucccaccucagccuc

SEQ ID NO: 2874653 - RNA, 19 nt, Human
gauccucccaccucagccu

SEQ ID NO: 2874654 - RNA, 18 nt, Human
gaucacgauguaaauuau

SEQ ID NO: 2874655 - RNA, 15 nt, Human
gaucacgccacugca

SEQ ID NO: 2874656 - RNA, 14 nt, Human
gaucacgccacugc

SEQ ID NO: 2874657 - RNA, 13 nt, Human
gaucacgccacug

SEQ ID NO: 2874658 - RNA, 23 nt, Human
gaucaaccccuucgcuccugugu

SEQ ID NO: 2874659 - RNA, 20 nt, Human
gaucaagcaugaaaggcuuu

SEQ ID NO: 2874660 - RNA, 14 nt, Human
gaucaccugagguu

SEQ ID NO: 2874661 - RNA, 17 nt, Human
gaucacgacgcugcaga

SEQ ID NO: 2874662 - RNA, 13 nt, Human
gauggcaggaugg

SEQ ID NO: 2874663 - RNA, 21 nt, Human
gauggcacuuagcuaucagaa

SEQ ID NO: 2874664 - RNA, 22 nt, Human
gaugggcaacccccagccugcu

SEQ ID NO: 2874665 - RNA, 20 nt, Human
gaugggagcuccucuccugg

SEQ ID NO: 2874666 - RNA, 21 nt, Human
gaugggagcuccucuccugga

SEQ ID NO: 2874667 - RNA, 21 nt, Human
gaugggaacgcagaugaucca

SEQ ID NO: 2874668 - RNA, 18 nt, Human
gauggcaggauggccugg

SEQ ID NO: 2874669 - RNA, 15 nt, Human
gauggcaggauggcc

SEQ ID NO: 2874670 - RNA, 17 nt, Human
gauggcaggauggccug

SEQ ID NO: 2874671 - RNA, 21 nt, Human
gaugccccgucccccucuggc

SEQ ID NO: 2874672 - RNA, 21 nt, Human
gaugcauucuugguuggcugg

SEQ ID NO: 2874673 - RNA, 15 nt, Human
gaugccugauugcca

SEQ ID NO: 2874674 - RNA, 22 nt, Human
gaugccugauugccaagcucag

SEQ ID NO: 2874675 - RNA, 21 nt, Human
gaugcuagcgcguugccuguc

SEQ ID NO: 2874676 - RNA, 16 nt, Human
gaugcuccaagauucu

SEQ ID NO: 2874677 - RNA, 19 nt, Human
gaugcucaguugcuaaaca

SEQ ID NO: 2874678 - RNA, 22 nt, Human
gaugcucaguugcuaaacacug

SEQ ID NO: 2874679 - RNA, 17 nt, Human
gaugcuccaagauucua

SEQ ID NO: 2874680 - RNA, 19 nt, Human
gaugcuccaagauucuaga

SEQ ID NO: 2874681 - RNA, 20 nt, Human
gaugcuccaagauucuagau

SEQ ID NO: 2874682 - RNA, 22 nt, Human
gaugcuccaagauucuagauga

SEQ ID NO: 2874683 - RNA, 21 nt, Human
gaugcucccuccccugcccug

SEQ ID NO: 2874684 - RNA, 20 nt, Human
gaugcucccuccccugcccu

SEQ ID NO: 2874685 - RNA, 15 nt, Human
gaugcucccuccccu

SEQ ID NO: 2874686 - RNA, 13 nt, Human
gaugcucccuccc

SEQ ID NO: 2874687 - RNA, 22 nt, Human
gaugcaugugguuugguuccuc

SEQ ID NO: 2874688 - RNA, 23 nt, Human
gaugcaugugguuugguuccucu

SEQ ID NO: 2874689 - RNA, 20 nt, Human
gaugcauguugauuaaacuc

SEQ ID NO: 2874690 - RNA, 20 nt, Human
gaugcauguuuuccagcucc

SEQ ID NO: 2874691 - RNA, 21 nt, Human
gaugcauguuuuccagcuccu

SEQ ID NO: 2874692 - RNA, 17 nt, Human
gaugcaaggaccaggac

SEQ ID NO: 2874693 - RNA, 14 nt, Human
gaugcaaggaccag

SEQ ID NO: 2874694 - RNA, 18 nt, Human
gaugcaaaguacaaugug

SEQ ID NO: 2874695 - RNA, 21 nt, Human
gaugcaaaguacaauguguuu

SEQ ID NO: 2874696 - RNA, 23 nt, Human
gaugcaaaguacaauguguuuuu

SEQ ID NO: 2874697 - RNA, 19 nt, Human
gaugcaaauagcaaaacua

SEQ ID NO: 2874698 - RNA, 20 nt, Human
gaugcaacacgcauggucaa

SEQ ID NO: 2874699 - RNA, 21 nt, Human
gaugacucccuuaaaauagaa

SEQ ID NO: 2874700 - RNA, 14 nt, Human
gaugcaaagaaaau

SEQ ID NO: 2874701 - RNA, 13 nt, Human
gaugcacagagaa

SEQ ID NO: 2874702 - RNA, 14 nt, Human
gaugcacagagaag

SEQ ID NO: 2874703 - RNA, 15 nt, Human
gaugcacagagaagc

SEQ ID NO: 2874704 - RNA, 17 nt, Human
gaugcacagagaagcug

SEQ ID NO: 2874705 - RNA, 18 nt, Human
gaugcacagagaagcugg

SEQ ID NO: 2874706 - RNA, 19 nt, Human
gaugcacagagaagcuggg

SEQ ID NO: 2874707 - RNA, 21 nt, Human
gaugcacagagaagcugggga

SEQ ID NO: 2874708 - RNA, 19 nt, Human
gaugcaaggaccaggacuc

SEQ ID NO: 2874709 - RNA, 18 nt, Human
gaugcaaggaccaggacu

SEQ ID NO: 2874710 - RNA, 11 nt, Human
gaugagaaagg

SEQ ID NO: 2874711 - RNA, 14 nt, Human
gaugacugaguccu

SEQ ID NO: 2874712 - RNA, 12 nt, Human
gaugacugaguc

SEQ ID NO: 2874713 - RNA, 14 nt, Human
gaugacuggcauuu

SEQ ID NO: 2874714 - RNA, 17 nt, Human
gaugacuggcauuuuau

SEQ ID NO: 2874715 - RNA, 18 nt, Human
gaugacuggcauuuuaua

SEQ ID NO: 2874716 - RNA, 20 nt, Human
gaugacuggcauuuuauaga

SEQ ID NO: 2874717 - RNA, 19 nt, Human
gaugacuggggugggaggu

SEQ ID NO: 2874718 - RNA, 22 nt, Human
gaugagaaagguugaagcacca

SEQ ID NO: 2874719 - RNA, 17 nt, Human
gaugacugaguccucgu

SEQ ID NO: 2874720 - RNA, 14 nt, Human
gaugauuuuuguca

SEQ ID NO: 2874721 - RNA, 18 nt, Human
gaugacuaaaauauuuau

SEQ ID NO: 2874722 - RNA, 15 nt, Human
gaugacuaaaauauu

SEQ ID NO: 2874723 - RNA, 12 nt, Human
gaugacuaaaau

SEQ ID NO: 2874724 - RNA, 18 nt, Human
gaugacucccuuaaaaua

SEQ ID NO: 2874725 - RNA, 19 nt, Human
gauuguccucauuucucca

SEQ ID NO: 2874726 - RNA, 20 nt, Human
gauuguccuuuaaaaaagaa

SEQ ID NO: 2874727 - RNA, 13 nt, Human
gauuguauugcug

SEQ ID NO: 2874728 - RNA, 15 nt, Human
gauuguauugcuguc

SEQ ID NO: 2874729 - RNA, 22 nt, Human
gauuggauuauuuaauaacauu

SEQ ID NO: 2874730 - RNA, 20 nt, Human
gauuguaggugcaagaugga

SEQ ID NO: 2874731 - RNA, 15 nt, Human
gauuggaccaggcca

SEQ ID NO: 2874732 - RNA, 22 nt, Human
gauuggagauagggaaagaaag

SEQ ID NO: 2874733 - RNA, 23 nt, Human
gauuggacggccugaugcucccu

SEQ ID NO: 2874734 - RNA, 16 nt, Human
gauuggacggccugau

SEQ ID NO: 2874735 - RNA, 13 nt, Human
gauuggauuauuu

SEQ ID NO: 2874736 - RNA, 20 nt, Human
gauuggauuauuuaauaaca

SEQ ID NO: 2874737 - RNA, 21 nt, Human
gauuggauuauuuaauaacau

SEQ ID NO: 2874738 - RNA, 12 nt, Human
gauugaccugcu

SEQ ID NO: 2874739 - RNA, 14 nt, Human
gauugaccugcucc

SEQ ID NO: 2874740 - RNA, 15 nt, Human
gauugaccugcuccg

SEQ ID NO: 2874741 - RNA, 18 nt, Human
gauugaccugcuccgcug

SEQ ID NO: 2874742 - RNA, 23 nt, Human
gauugaccugcuccgcugcuccu

SEQ ID NO: 2874743 - RNA, 16 nt, Human
gauugagaagaggaca

SEQ ID NO: 2874744 - RNA, 14 nt, Human
gauuggaccaggcc

SEQ ID NO: 2874745 - RNA, 18 nt, Human
gauuggaaggagacacag

SEQ ID NO: 2874746 - RNA, 19 nt, Human
gauuggaaggagacacaga

SEQ ID NO: 2874747 - RNA, 20 nt, Human
gauuggaaggagacacagau

SEQ ID NO: 2874748 - RNA, 21 nt, Human
gauuggaaggagacacagaug

SEQ ID NO: 2874749 - RNA, 22 nt, Human
gauuggaaggagacacagaugu

SEQ ID NO: 2874750 - RNA, 15 nt, Human
gauugaaaauucgcc

SEQ ID NO: 2874751 - RNA, 15 nt, Human
gauugaacuccaaga

SEQ ID NO: 2874752 - RNA, 21 nt, Human
gauugaaaacuuuucucagau

SEQ ID NO: 2874753 - RNA, 19 nt, Human
gauugaaaacuuuucucag

SEQ ID NO: 2874754 - RNA, 20 nt, Human
gauugaaaacuuuucucaga

SEQ ID NO: 2874755 - RNA, 18 nt, Human
gauucuagaucagaugcu

SEQ ID NO: 2874756 - RNA, 19 nt, Human
gauucuagaucagaugcuc

SEQ ID NO: 2874757 - RNA, 21 nt, Human
gauucuagaucagaugcucca

SEQ ID NO: 2874758 - RNA, 15 nt, Human
gauucuaaugucuuc

SEQ ID NO: 2874759 - RNA, 18 nt, Human
gauucuauaguucuagac

SEQ ID NO: 2874760 - RNA, 19 nt, Human
gauucuauaguucuagaca

SEQ ID NO: 2874761 - RNA, 23 nt, Human
gauucuagaucagaugcuccaag

SEQ ID NO: 2874762 - RNA, 15 nt, Human
gauucuauaguucua

SEQ ID NO: 2874763 - RNA, 17 nt, Human
gauucuauaguucuaga

SEQ ID NO: 2874764 - RNA, 14 nt, Human
gauucaccugagca

SEQ ID NO: 2874765 - RNA, 22 nt, Human
gauucccaagcucugcuccucu

SEQ ID NO: 2874766 - RNA, 12 nt, Human
gauucagaaauu

SEQ ID NO: 2874767 - RNA, 14 nt, Human
gauucacaucugca

SEQ ID NO: 2874768 - RNA, 12 nt, Human
gauucacacugu

SEQ ID NO: 2874769 - RNA, 19 nt, Human
gauucaaagguucuagguu

SEQ ID NO: 2874770 - RNA, 13 nt, Human
gauucaaagguuc

SEQ ID NO: 2874771 - RNA, 15 nt, Human
gauucaaagguucua

SEQ ID NO: 2874772 - RNA, 18 nt, Human
gauucaaagguucuaggu

SEQ ID NO: 2874773 - RNA, 15 nt, Human
gauuccggauccuaa

SEQ ID NO: 2874774 - RNA, 18 nt, Human
gauuccggauccuaagca

SEQ ID NO: 2874775 - RNA, 22 nt, Human
gauuccggauccuaagcaucua

SEQ ID NO: 2874776 - RNA, 22 nt, Human
gauuccuaagccacuugaaaug

SEQ ID NO: 2874777 - RNA, 23 nt, Human
gauuccucuguauugugcugauu

SEQ ID NO: 2874778 - RNA, 15 nt, Human
gauucuaaugaugau

SEQ ID NO: 2874779 - RNA, 20 nt, Human
gauucuaaagauucuauagu

SEQ ID NO: 2874780 - RNA, 15 nt, Human
gauucuaaaggucca

SEQ ID NO: 2874781 - RNA, 23 nt, Human
gauucuaccacacagcagcaguu

SEQ ID NO: 2874782 - RNA, 19 nt, Human
gauucuaauuuuuaagcaa

SEQ ID NO: 2874783 - RNA, 15 nt, Human
gauuccugagccagu

SEQ ID NO: 2874784 - RNA, 15 nt, Human
gauucuaaagauucu

SEQ ID NO: 2874785 - RNA, 16 nt, Human
gauucuaaagauucua

SEQ ID NO: 2874786 - RNA, 17 nt, Human
gauucuaaagauucuau

SEQ ID NO: 2874787 - RNA, 19 nt, Human
gauucccagagcaaaauaa

SEQ ID NO: 2874788 - RNA, 17 nt, Human
gauucccaggaugagca

SEQ ID NO: 2874789 - RNA, 13 nt, Human
gauucccagagca

SEQ ID NO: 2874790 - RNA, 19 nt, Human
gauuaaauauagauuagaa

SEQ ID NO: 2874791 - RNA, 20 nt, Human
gauuaaauauagauuagaaa

SEQ ID NO: 2874792 - RNA, 23 nt, Human
gauuaaauauagauuagaaaaau

SEQ ID NO: 2874793 - RNA, 14 nt, Human
gauguuuuauuauu

SEQ ID NO: 2874794 - RNA, 13 nt, Human
gauuaacaaauau

SEQ ID NO: 2874795 - RNA, 14 nt, Human
gauuaacaaauaug

SEQ ID NO: 2874796 - RNA, 16 nt, Human
gauuaacaaauaugcu

SEQ ID NO: 2874797 - RNA, 21 nt, Human
gauuaacaaauaugcuaauuu

SEQ ID NO: 2874798 - RNA, 13 nt, Human
gauucaaaauauu

SEQ ID NO: 2874799 - RNA, 14 nt, Human
gauucaaaauauuu

SEQ ID NO: 2874800 - RNA, 15 nt, Human
gauucaaaauauuua

SEQ ID NO: 2874801 - RNA, 16 nt, Human
gauucaaaauauuuaa

SEQ ID NO: 2874802 - RNA, 18 nt, Human
gauucaaaauauuuaaaa

SEQ ID NO: 2874803 - RNA, 22 nt, Human
gauucaaaauauuuaaaaaugu

SEQ ID NO: 2874804 - RNA, 23 nt, Human
gauucaaaauauuuaaaaauguc

SEQ ID NO: 2874805 - RNA, 13 nt, Human
gauuaagagccau

SEQ ID NO: 2874806 - RNA, 12 nt, Human
gauuaagauuuu

SEQ ID NO: 2874807 - RNA, 17 nt, Human
gauuaacuuauuuagag

SEQ ID NO: 2874808 - RNA, 19 nt, Human
gauuaacuuauuuagagau

SEQ ID NO: 2874809 - RNA, 13 nt, Human
gaugugccugggu

SEQ ID NO: 2874810 - RNA, 13 nt, Human
gauggugggaugu

SEQ ID NO: 2874811 - RNA, 17 nt, Human
gauggugggaugugguu

SEQ ID NO: 2874812 - RNA, 13 nt, Human
gauggugggcuuc

SEQ ID NO: 2874813 - RNA, 15 nt, Human
gauggugggcuucag

SEQ ID NO: 2874814 - RNA, 19 nt, Human
gauggugggcuucagggca

SEQ ID NO: 2874815 - RNA, 20 nt, Human
gaugguggguggggcugcag

SEQ ID NO: 2874816 - RNA, 15 nt, Human
gaugugccugggugg

SEQ ID NO: 2874817 - RNA, 19 nt, Human
gaugugcuuguuaacugag

SEQ ID NO: 2874818 - RNA, 14 nt, Human
gaugggcuuucucu

SEQ ID NO: 2874819 - RNA, 14 nt, Human
gaugggccuggcau

SEQ ID NO: 2874820 - RNA, 22 nt, Human
gaugggagcuccucuccuggag

SEQ ID NO: 2874821 - RNA, 15 nt, Human
gaugggcacuugaga

SEQ ID NO: 2874822 - RNA, 20 nt, Human
gaugggcauaugugucagug

SEQ ID NO: 2874823 - RNA, 23 nt, Human
gaugggcauaugugucagugggg

SEQ ID NO: 2874824 - RNA, 16 nt, Human
gauguucugggacaca

SEQ ID NO: 2874825 - RNA, 14 nt, Human
gauguucugggaca

SEQ ID NO: 2874826 - RNA, 12 nt, Human
gauguguuguga

SEQ ID NO: 2874827 - RNA, 14 nt, Human
gauguguugugaua

SEQ ID NO: 2874828 - RNA, 13 nt, Human
gaugugucuguau

SEQ ID NO: 2874829 - RNA, 18 nt, Human
gauguguggacuguggca

SEQ ID NO: 2874830 - RNA, 20 nt, Human
gaugugcuuguuaacugagu

SEQ ID NO: 2874831 - RNA, 13 nt, Human
gauguguccucag

SEQ ID NO: 2874832 - RNA, 18 nt, Human
gauguguccucagggagc

SEQ ID NO: 2874833 - RNA, 14 nt, Human
gaguuuucuuccuu

SEQ ID NO: 2874834 - RNA, 22 nt, Human
gaguuuuccucuauacaucucu

SEQ ID NO: 2874835 - RNA, 23 nt, Human
gaguuuuccucuauacaucucuc

SEQ ID NO: 2874836 - RNA, 21 nt, Human
gaguuuucucuuuguggggcu

SEQ ID NO: 2874837 - RNA, 21 nt, Human
gaguuccuugaucuguauaua

SEQ ID NO: 2874838 - RNA, 15 nt, Human
gaguucuugugccau

SEQ ID NO: 2874839 - RNA, 16 nt, Human
gaguuccacagauugu

SEQ ID NO: 2874840 - RNA, 19 nt, Human
gaguuccaguuccucuuug

SEQ ID NO: 2874841 - RNA, 18 nt, Human
gaguuccccaugcagaca

SEQ ID NO: 2874842 - RNA, 13 nt, Human
gagugugcaugga

SEQ ID NO: 2874843 - RNA, 15 nt, Human
gagugugcauggagg

SEQ ID NO: 2874844 - RNA, 20 nt, Human
gagugugcauggaggcccuc

SEQ ID NO: 2874845 - RNA, 11 nt, Human
gagugugaagg

SEQ ID NO: 2874846 - RNA, 11 nt, Human
gagugugacag

SEQ ID NO: 2874847 - RNA, 12 nt, Human
gagugugacagg

SEQ ID NO: 2874848 - RNA, 14 nt, Human
gagugugacagggc

SEQ ID NO: 2874849 - RNA, 15 nt, Human
gagugugacagggcc

SEQ ID NO: 2874850 - RNA, 16 nt, Human
gagugugacagggcca

SEQ ID NO: 2874851 - RNA, 17 nt, Human
gagugugacagggccag

SEQ ID NO: 2874852 - RNA, 22 nt, Human
gaguuaucuaagaauacagcuu

SEQ ID NO: 2874853 - RNA, 17 nt, Human
gaguuaugauguaaucu

SEQ ID NO: 2874854 - RNA, 22 nt, Human
gaguuaugauguaaucucucug

SEQ ID NO: 2874855 - RNA, 18 nt, Human
gaguuaguuucuuuggga

SEQ ID NO: 2874856 - RNA, 16 nt, Human
gaguggcucgccaggc

SEQ ID NO: 2874857 - RNA, 17 nt, Human
gaguuaggaaugagaag

SEQ ID NO: 2874858 - RNA, 13 nt, Human
gaguuagccaucc

SEQ ID NO: 2874859 - RNA, 12 nt, Human
gagucugaugau

SEQ ID NO: 2874860 - RNA, 14 nt, Human
gagucuggaguggg

SEQ ID NO: 2874861 - RNA, 17 nt, Human
gagucuggagugggcag

SEQ ID NO: 2874862 - RNA, 12 nt, Human
gaguggccuggc

SEQ ID NO: 2874863 - RNA, 10 nt, Human
gaguggccug

SEQ ID NO: 2874864 - RNA, 19 nt, Human
gagugggagaaggcaguga

SEQ ID NO: 2874865 - RNA, 13 nt, Human
gagugggcagagc

SEQ ID NO: 2874866 - RNA, 23 nt, Human
gagugggcagagcccccaggaag

SEQ ID NO: 2874867 - RNA, 15 nt, Human
gaguggcuccucccg

SEQ ID NO: 2874868 - RNA, 18 nt, Human
gaguggccuggccaggag

SEQ ID NO: 2874869 - RNA, 15 nt, Human
gaguggccuggccag

SEQ ID NO: 2874870 - RNA, 14 nt, Human
gaguggccuggcca

SEQ ID NO: 2874871 - RNA, 13 nt, Human
gaguggccuggcc

SEQ ID NO: 2874872 - RNA, 20 nt, Human
gaguggccuggccaggagcu

SEQ ID NO: 2874873 - RNA, 19 nt, Human
gaguggccuggccaggagc

SEQ ID NO: 2874874 - RNA, 13 nt, Human
gaguggcuccucc

SEQ ID NO: 2874875 - RNA, 13 nt, Human
gauagcauugcuu

SEQ ID NO: 2874876 - RNA, 17 nt, Human
gauagcauuuuugauuu

SEQ ID NO: 2874877 - RNA, 22 nt, Human
gauagcauuuuugauuuaugca

SEQ ID NO: 2874878 - RNA, 22 nt, Human
gaucaaccccuucgcuccugug

SEQ ID NO: 2874879 - RNA, 21 nt, Human
gaucaaccccuucgcuccugu

SEQ ID NO: 2874880 - RNA, 22 nt, Human
gauauauguauuaauaaauaga

SEQ ID NO: 2874881 - RNA, 16 nt, Human
gauauagaacagugcu

SEQ ID NO: 2874882 - RNA, 14 nt, Human
gauauacagaugaa

SEQ ID NO: 2874883 - RNA, 16 nt, Human
gauauacagaugaaaa

SEQ ID NO: 2874884 - RNA, 17 nt, Human
gauauacagaugaaaau

SEQ ID NO: 2874885 - RNA, 19 nt, Human
gauauacagaugaaaauuu

SEQ ID NO: 2874886 - RNA, 21 nt, Human
gauauacagaugaaaauuuga

SEQ ID NO: 2874887 - RNA, 14 nt, Human
gauauacaugaaaa

SEQ ID NO: 2874888 - RNA, 17 nt, Human
gauauacaugaaaauuu

SEQ ID NO: 2874889 - RNA, 23 nt, Human
gauagcauuuuugauuuaugcau

SEQ ID NO: 2874890 - RNA, 17 nt, Human
gauauacucuagaugaa

SEQ ID NO: 2874891 - RNA, 15 nt, Human
gauauacugugugcu

SEQ ID NO: 2874892 - RNA, 12 nt, Human
gauauagaacag

SEQ ID NO: 2874893 - RNA, 20 nt, Human
gauauagacaguccuuaaaa

SEQ ID NO: 2874894 - RNA, 14 nt, Human
gauauacuuugugg

SEQ ID NO: 2874895 - RNA, 16 nt, Human
gauauacuuuguggac

SEQ ID NO: 2874896 - RNA, 22 nt, Human
gauauacuuuguggaccaauua

SEQ ID NO: 2874897 - RNA, 22 nt, Human
gauacaauguauuuauuuaaaa

SEQ ID NO: 2874898 - RNA, 13 nt, Human
gauacacacacac

SEQ ID NO: 2874899 - RNA, 16 nt, Human
gauacaagauuagaag

SEQ ID NO: 2874900 - RNA, 12 nt, Human
gauaauguuaaa

SEQ ID NO: 2874901 - RNA, 13 nt, Human
gauaauguuaaau

SEQ ID NO: 2874902 - RNA, 14 nt, Human
gauaauguuaaauu

SEQ ID NO: 2874903 - RNA, 19 nt, Human
gauaauguuaaauuuguaa

SEQ ID NO: 2874904 - RNA, 21 nt, Human
gauaauguuaaauuuguaagu

SEQ ID NO: 2874905 - RNA, 19 nt, Human
gauacaaacacuacagaca

SEQ ID NO: 2874906 - RNA, 16 nt, Human
gauacaaaugucuauc

SEQ ID NO: 2874907 - RNA, 17 nt, Human
gauacaaaugucuauca

SEQ ID NO: 2874908 - RNA, 14 nt, Human
gauacaaccucccu

SEQ ID NO: 2874909 - RNA, 16 nt, Human
gauacaaccucccucu

SEQ ID NO: 2874910 - RNA, 19 nt, Human
gauacaaccucccucuugu

SEQ ID NO: 2874911 - RNA, 21 nt, Human
gauaaucagugugucuaaauu

SEQ ID NO: 2874912 - RNA, 15 nt, Human
gauaaugauaaaaca

SEQ ID NO: 2874913 - RNA, 22 nt, Human
gauaaaacugggccuguagcuc

SEQ ID NO: 2874914 - RNA, 21 nt, Human
gauaauguccaacuaaaaaca

SEQ ID NO: 2874915 - RNA, 11 nt, Human
gauaauguuaa

SEQ ID NO: 2874916 - RNA, 16 nt, Human
gauaaucagccucuua

SEQ ID NO: 2874917 - RNA, 15 nt, Human
gauaaucagccucuu

SEQ ID NO: 2874918 - RNA, 14 nt, Human
gauaaucagccucu

SEQ ID NO: 2874919 - RNA, 13 nt, Human
gauaaucagccuc

SEQ ID NO: 2874920 - RNA, 19 nt, Human
gaguuuuuguuuggagagc

SEQ ID NO: 2874921 - RNA, 16 nt, Human
gaguuuuuaauagaac

SEQ ID NO: 2874922 - RNA, 20 nt, Human
gauaaaaauaucaucauagu

SEQ ID NO: 2874923 - RNA, 22 nt, Human
gagguuaggaguucgagaccag

SEQ ID NO: 2874924 - RNA, 10 nt, Human
gaguaaagcu

SEQ ID NO: 2874925 - RNA, 16 nt, Human
gaguaaauacagguag

SEQ ID NO: 2874926 - RNA, 15 nt, Human
gaguaaauauugagg

SEQ ID NO: 2874927 - RNA, 19 nt, Human
gaguaaauauugaggcuuu

SEQ ID NO: 2874928 - RNA, 16 nt, Human
gaguaaaucagauguu

SEQ ID NO: 2874929 - RNA, 20 nt, Human
gaguaaaucagauguugaau

SEQ ID NO: 2874930 - RNA, 23 nt, Human
gagguuuuuuugucaacauugug

SEQ ID NO: 2874931 - RNA, 21 nt, Human
gaguaaaaaaaaaaacaauua

SEQ ID NO: 2874932 - RNA, 23 nt, Human
gagguuugucgggcaccagccag

SEQ ID NO: 2874933 - RNA, 17 nt, Human
gaguaaagcuccuaucu

SEQ ID NO: 2874934 - RNA, 13 nt, Human
gaguacaaaugcc

SEQ ID NO: 2874935 - RNA, 14 nt, Human
gaguacaaaugccu

SEQ ID NO: 2874936 - RNA, 23 nt, Human
gaguacaaaugccuuaaaaugga

SEQ ID NO: 2874937 - RNA, 16 nt, Human
gaguacaggugaagca

SEQ ID NO: 2874938 - RNA, 18 nt, Human
gaguacauugaaggccug

SEQ ID NO: 2874939 - RNA, 12 nt, Human
gaguagcuggau

SEQ ID NO: 2874940 - RNA, 20 nt, Human
gagguccucuggagcccuaa

SEQ ID NO: 2874941 - RNA, 12 nt, Human
gagguccagccc

SEQ ID NO: 2874942 - RNA, 13 nt, Human
gagguccagccca

SEQ ID NO: 2874943 - RNA, 14 nt, Human
gagguccagcccau

SEQ ID NO: 2874944 - RNA, 16 nt, Human
gagguccucuggagcc

SEQ ID NO: 2874945 - RNA, 14 nt, Human
gagguccucuggag

SEQ ID NO: 2874946 - RNA, 14 nt, Human
gaggucccaggcag

SEQ ID NO: 2874947 - RNA, 12 nt, Human
gaggucccaggc

SEQ ID NO: 2874948 - RNA, 22 nt, Human
gaggucaggaaacuuuuaacug

SEQ ID NO: 2874949 - RNA, 13 nt, Human
gaggucccaggaa

SEQ ID NO: 2874950 - RNA, 15 nt, Human
gaggggcuccuggaa

SEQ ID NO: 2874951 - RNA, 14 nt, Human
gaggggcuccugga

SEQ ID NO: 2874952 - RNA, 11 nt, Human
gaggggcucuc

SEQ ID NO: 2874953 - RNA, 12 nt, Human
gaggggcucuca

SEQ ID NO: 2874954 - RNA, 16 nt, Human
gaggggcucucagcuc

SEQ ID NO: 2874955 - RNA, 13 nt, Human
gaggggcuccugg

SEQ ID NO: 2874956 - RNA, 12 nt, Human
gaggggcuccug

SEQ ID NO: 2874957 - RNA, 16 nt, Human
gaggggcgcccaccuc

SEQ ID NO: 2874958 - RNA, 14 nt, Human
gaggucaggcccug

SEQ ID NO: 2874959 - RNA, 15 nt, Human
gaggucaggcccugg

SEQ ID NO: 2874960 - RNA, 11 nt, Human
gaggucaggga

SEQ ID NO: 2874961 - RNA, 14 nt, Human
gaggucagggagug

SEQ ID NO: 2874962 - RNA, 22 nt, Human
gaggucagggagugcuggcuca

SEQ ID NO: 2874963 - RNA, 23 nt, Human
gaggucagggagugcuggcucac

SEQ ID NO: 2874964 - RNA, 18 nt, Human
gagguccacaacacacag

SEQ ID NO: 2874965 - RNA, 19 nt, Human
gaggggcucucagcucagc

SEQ ID NO: 2874966 - RNA, 19 nt, Human
gaggggggauuuccagcca

SEQ ID NO: 2874967 - RNA, 23 nt, Human
gagucucacuguugcccaggcug

SEQ ID NO: 2874968 - RNA, 22 nt, Human
gagucucacuguugcccaggcu

SEQ ID NO: 2874969 - RNA, 12 nt, Human
gagucucuucuc

SEQ ID NO: 2874970 - RNA, 23 nt, Human
gagucucgcuauugucaccaggg

SEQ ID NO: 2874971 - RNA, 23 nt, Human
gagucgucaucacuuuucaguga

SEQ ID NO: 2874972 - RNA, 18 nt, Human
gagucucuucuccacugg

SEQ ID NO: 2874973 - RNA, 14 nt, Human
gagucucuucucca

SEQ ID NO: 2874974 - RNA, 15 nt, Human
gagucucuucuccac

SEQ ID NO: 2874975 - RNA, 16 nt, Human
gagucucuucuccacu

SEQ ID NO: 2874976 - RNA, 17 nt, Human
gagucucuucuccacug

SEQ ID NO: 2874977 - RNA, 21 nt, Human
gagucucacuguugcccaggc

SEQ ID NO: 2874978 - RNA, 20 nt, Human
gagucucacuguugcccagg

SEQ ID NO: 2874979 - RNA, 19 nt, Human
gagucucacuguugcccag

SEQ ID NO: 2874980 - RNA, 17 nt, Human
gagucgaggacagggag

SEQ ID NO: 2874981 - RNA, 19 nt, Human
gagucgucaucacuuuuca

SEQ ID NO: 2874982 - RNA, 20 nt, Human
gaguccccccucccaccucc

SEQ ID NO: 2874983 - RNA, 22 nt, Human
gaguccccccucccaccuccag

SEQ ID NO: 2874984 - RNA, 20 nt, Human
gaguccccgggcaucuuugg

SEQ ID NO: 2874985 - RNA, 16 nt, Human
gagucccccagagaug

SEQ ID NO: 2874986 - RNA, 11 nt, Human
gaguccccuca

SEQ ID NO: 2874987 - RNA, 16 nt, Human
gaguccccucaccucc

SEQ ID NO: 2874988 - RNA, 17 nt, Human
gaguccccucaccuccu

SEQ ID NO: 2874989 - RNA, 19 nt, Human
gagucccaggcugagccuc

SEQ ID NO: 2874990 - RNA, 18 nt, Human
gagucccaggcugagccu

SEQ ID NO: 2874991 - RNA, 18 nt, Human
gaguccccucaccuccuc

SEQ ID NO: 2874992 - RNA, 19 nt, Human
gaguccccucaccuccucu

SEQ ID NO: 2874993 - RNA, 19 nt, Human
gagucaaaugguaggcauu

SEQ ID NO: 2874994 - RNA, 19 nt, Human
gagucaaaacuacaaauca

SEQ ID NO: 2874995 - RNA, 14 nt, Human
gaguagcugggacu

SEQ ID NO: 2874996 - RNA, 12 nt, Human
gaguagcuggga

SEQ ID NO: 2874997 - RNA, 16 nt, Human
gccaugcugggaagac

SEQ ID NO: 2874998 - RNA, 21 nt, Human
gccaugggcacaaagggccca

SEQ ID NO: 2874999 - RNA, 13 nt, Human
gccauuuugugaa

SEQ ID NO: 2875000 - RNA, 14 nt, Human
gccauuuugugaau

SEQ ID NO: 2875001 - RNA, 18 nt, Human
gccauuuugugaauggau

SEQ ID NO: 2875002 - RNA, 19 nt, Human
gccauuuugugaauggauu

SEQ ID NO: 2875003 - RNA, 18 nt, Human
gcccaaaaauaugguuga

SEQ ID NO: 2875004 - RNA, 14 nt, Human
gcccaaauuuuucu

SEQ ID NO: 2875005 - RNA, 21 nt, Human
gcccaaagagcacaaacauuu

SEQ ID NO: 2875006 - RNA, 22 nt, Human
gcccaaagagcacaaacauuuu

SEQ ID NO: 2875007 - RNA, 15 nt, Human
gccaugccaggaacc

SEQ ID NO: 2875008 - RNA, 21 nt, Human
gccauccuugacuuugaacua

SEQ ID NO: 2875009 - RNA, 12 nt, Human
gccaucucugga

SEQ ID NO: 2875010 - RNA, 15 nt, Human
gccaucucuggaugc

SEQ ID NO: 2875011 - RNA, 16 nt, Human
gccaucucuggaugcc

SEQ ID NO: 2875012 - RNA, 19 nt, Human
gccaucucuggaugccuga

SEQ ID NO: 2875013 - RNA, 17 nt, Human
gccagugaugugcggug

SEQ ID NO: 2875014 - RNA, 17 nt, Human
gccagucaagaagaaaa

SEQ ID NO: 2875015 - RNA, 18 nt, Human
gccagucaagaagaaaaa

SEQ ID NO: 2875016 - RNA, 17 nt, Human
gccagguuuuuggucug

SEQ ID NO: 2875017 - RNA, 22 nt, Human
gccagguuucugcccacauugg

SEQ ID NO: 2875018 - RNA, 18 nt, Human
gccagguggccacuccag

SEQ ID NO: 2875019 - RNA, 11 nt, Human
gccagggagcu

SEQ ID NO: 2875020 - RNA, 20 nt, Human
gccagggcaaugaugaauga

SEQ ID NO: 2875021 - RNA, 15 nt, Human
gccagggcagugcua

SEQ ID NO: 2875022 - RNA, 18 nt, Human
gccagggcagugcuagug

SEQ ID NO: 2875023 - RNA, 19 nt, Human
gccagggggacuagccccu

SEQ ID NO: 2875024 - RNA, 20 nt, Human
gccagggggacuagccccug

SEQ ID NO: 2875025 - RNA, 15 nt, Human
gccagggggaugcca

SEQ ID NO: 2875026 - RNA, 16 nt, Human
gccagggucucucccu

SEQ ID NO: 2875027 - RNA, 17 nt, Human
gccagggucucucccuc

SEQ ID NO: 2875028 - RNA, 18 nt, Human
gccagggucucucccuca

SEQ ID NO: 2875029 - RNA, 19 nt, Human
gccagggucucucccucag

SEQ ID NO: 2875030 - RNA, 20 nt, Human
gccagggucucucccucagg

SEQ ID NO: 2875031 - RNA, 22 nt, Human
gccagggucucucccucaggug

SEQ ID NO: 2875032 - RNA, 23 nt, Human
gccagggucucucccucaggugu

SEQ ID NO: 2875033 - RNA, 16 nt, Human
gccagggucuguguga

SEQ ID NO: 2875034 - RNA, 18 nt, Human
gccagggucugugugaau

SEQ ID NO: 2875035 - RNA, 19 nt, Human
gccagggucugugugaaug

SEQ ID NO: 2875036 - RNA, 20 nt, Human
gccagggucugugugaaugu

SEQ ID NO: 2875037 - RNA, 21 nt, Human
gccagggucugugugaaugug

SEQ ID NO: 2875038 - RNA, 22 nt, Human
gccagggucugugugaaugugg

SEQ ID NO: 2875039 - RNA, 21 nt, Human
gccagggggacuagccccugu

SEQ ID NO: 2875040 - RNA, 22 nt, Human
gccaggcuggucucgaacuccu

SEQ ID NO: 2875041 - RNA, 15 nt, Human
gccaggcugaucucg

SEQ ID NO: 2875042 - RNA, 14 nt, Human
gccaggcugcucuu

SEQ ID NO: 2875043 - RNA, 13 nt, Human
gccaggcugcucu

SEQ ID NO: 2875044 - RNA, 14 nt, Human
gccaggcugccaag

SEQ ID NO: 2875045 - RNA, 22 nt, Human
gccaggcugcucuugaacuccu

SEQ ID NO: 2875046 - RNA, 21 nt, Human
gcccagagggcccaggcaggc

SEQ ID NO: 2875047 - RNA, 12 nt, Human
gcccagagguaa

SEQ ID NO: 2875048 - RNA, 16 nt, Human
gcccagagguaacaga

SEQ ID NO: 2875049 - RNA, 18 nt, Human
gcccagauugugccacug

SEQ ID NO: 2875050 - RNA, 17 nt, Human
gcccagccaaacccugu

SEQ ID NO: 2875051 - RNA, 22 nt, Human
gcccagauuaaagucuuuaucc

SEQ ID NO: 2875052 - RNA, 22 nt, Human
gcccagagguaacagaacagcu

SEQ ID NO: 2875053 - RNA, 18 nt, Human
gcccagagguaacagaac

SEQ ID NO: 2875054 - RNA, 20 nt, Human
gcccagagguaacagaacag

SEQ ID NO: 2875055 - RNA, 12 nt, Human
gcccagccccua

SEQ ID NO: 2875056 - RNA, 14 nt, Human
gcccagccccuaga

SEQ ID NO: 2875057 - RNA, 15 nt, Human
gcccagccccuagaa

SEQ ID NO: 2875058 - RNA, 23 nt, Human
gcccagccauuaccauggagaca

SEQ ID NO: 2875059 - RNA, 22 nt, Human
gcccagccauuaccauggagac

SEQ ID NO: 2875060 - RNA, 21 nt, Human
gcccagccauuaccauggaga

SEQ ID NO: 2875061 - RNA, 20 nt, Human
gcccagccauuaccauggag

SEQ ID NO: 2875062 - RNA, 21 nt, Human
gcccagccaaacccugucuga

SEQ ID NO: 2875063 - RNA, 20 nt, Human
gcccagccaaacccugucug

SEQ ID NO: 2875064 - RNA, 20 nt, Human
gcccagagggcccaggcagg

SEQ ID NO: 2875065 - RNA, 16 nt, Human
gcccagagggcccagg

SEQ ID NO: 2875066 - RNA, 15 nt, Human
gcccagagggcccag

SEQ ID NO: 2875067 - RNA, 13 nt, Human
gcccagagggccc

SEQ ID NO: 2875068 - RNA, 21 nt, Human
gcccagaggccaacacugugg

SEQ ID NO: 2875069 - RNA, 23 nt, Human
gcccagaggccaacacugugggu

SEQ ID NO: 2875070 - RNA, 13 nt, Human
gcccagaggcuga

SEQ ID NO: 2875071 - RNA, 22 nt, Human
gcccaauccagguacgcacaga

SEQ ID NO: 2875072 - RNA, 20 nt, Human
gcccaaguggcagagcuugg

SEQ ID NO: 2875073 - RNA, 14 nt, Human
gcccaauuggagga

SEQ ID NO: 2875074 - RNA, 20 nt, Human
gcccaaugagacucuagggu

SEQ ID NO: 2875075 - RNA, 15 nt, Human
gcccaauuggaggaa

SEQ ID NO: 2875076 - RNA, 20 nt, Human
gcccaauuggaggaaagcaa

SEQ ID NO: 2875077 - RNA, 13 nt, Human
gcccagagaacag

SEQ ID NO: 2875078 - RNA, 14 nt, Human
gcccagagaacagc

SEQ ID NO: 2875079 - RNA, 12 nt, Human
gcccagagacuu

SEQ ID NO: 2875080 - RNA, 20 nt, Human
gcccaggcuggcgugcagug

SEQ ID NO: 2875081 - RNA, 19 nt, Human
gcccaggcuggcgugcagu

SEQ ID NO: 2875082 - RNA, 22 nt, Human
gcccaggcuggcgugcaguggu

SEQ ID NO: 2875083 - RNA, 16 nt, Human
gcccaggcugguuucg

SEQ ID NO: 2875084 - RNA, 22 nt, Human
gcccaggcugugcagcgcagcu

SEQ ID NO: 2875085 - RNA, 12 nt, Human
gcccaggcuggu

SEQ ID NO: 2875086 - RNA, 24 nt, Human
gcccaggcuggucuugaaguccug

SEQ ID NO: 2875087 - RNA, 18 nt, Human
gcccaguccucucccaag

SEQ ID NO: 2875088 - RNA, 23 nt, Human
gcccaguccucucccaaguccac

SEQ ID NO: 2875089 - RNA, 19 nt, Human
gcccagucuggaaugcagu

SEQ ID NO: 2875090 - RNA, 14 nt, Human
gcccaguccuucca

SEQ ID NO: 2875091 - RNA, 15 nt, Human
gcccaguccuuccac

SEQ ID NO: 2875092 - RNA, 17 nt, Human
gcccaguccuuccaccu

SEQ ID NO: 2875093 - RNA, 15 nt, Human
gcccaguugggugga

SEQ ID NO: 2875094 - RNA, 18 nt, Human
gcccaguccuuccaccuc

SEQ ID NO: 2875095 - RNA, 19 nt, Human
gcccaguccuuccaccucg

SEQ ID NO: 2875096 - RNA, 12 nt, Human
gcccagcccucc

SEQ ID NO: 2875097 - RNA, 16 nt, Human
gcccagcccuccccau

SEQ ID NO: 2875098 - RNA, 18 nt, Human
gcccagcccggaccuugg

SEQ ID NO: 2875099 - RNA, 15 nt, Human
gcccagcgcucugcc

SEQ ID NO: 2875100 - RNA, 16 nt, Human
gcccagcgcucugccu

SEQ ID NO: 2875101 - RNA, 16 nt, Human
gcccagcccuguucug

SEQ ID NO: 2875102 - RNA, 15 nt, Human
gcccagcccuguucu

SEQ ID NO: 2875103 - RNA, 18 nt, Human
gcccagcuauaccugugc

SEQ ID NO: 2875104 - RNA, 21 nt, Human
gcccagcuugaaaccuucacu

SEQ ID NO: 2875105 - RNA, 15 nt, Human
gccacugaagcuggg

SEQ ID NO: 2875106 - RNA, 14 nt, Human
gccacugaagcugg

SEQ ID NO: 2875107 - RNA, 15 nt, Human
gccacugaaaucugu

SEQ ID NO: 2875108 - RNA, 20 nt, Human
gccacucuaccagugcaggc

SEQ ID NO: 2875109 - RNA, 22 nt, Human
gccacucuaccagugcaggcug

SEQ ID NO: 2875110 - RNA, 23 nt, Human
gccacucuaccagugcaggcugg

SEQ ID NO: 2875111 - RNA, 18 nt, Human
gccacucucuucccuuuc

SEQ ID NO: 2875112 - RNA, 19 nt, Human
gccacucucuucccuuucc

SEQ ID NO: 2875113 - RNA, 18 nt, Human
gccacucgcuucccccau

SEQ ID NO: 2875114 - RNA, 14 nt, Human
gccacucgcuuccc

SEQ ID NO: 2875115 - RNA, 15 nt, Human
gccacuccugaaccc

SEQ ID NO: 2875116 - RNA, 21 nt, Human
gccacuagacucuucacuguu

SEQ ID NO: 2875117 - RNA, 23 nt, Human
gccacuacacuccagccugagca

SEQ ID NO: 2875118 - RNA, 22 nt, Human
gccacuacacuccagccugagc

SEQ ID NO: 2875119 - RNA, 21 nt, Human
gccacuacacuccagccugag

SEQ ID NO: 2875120 - RNA, 20 nt, Human
gccacuacacuccagccuga

SEQ ID NO: 2875121 - RNA, 16 nt, Human
gccacuaguaaguaau

SEQ ID NO: 2875122 - RNA, 24 nt, Human
gccagaggaacuguccagagagca

SEQ ID NO: 2875123 - RNA, 24 nt, Human
gccagaggaauccuggcagcccag

SEQ ID NO: 2875124 - RNA, 23 nt, Human
gccagaggaauccuggcagccca

SEQ ID NO: 2875125 - RNA, 22 nt, Human
gccagaggaauccuggcagccc

SEQ ID NO: 2875126 - RNA, 21 nt, Human
gccagaggaauccuggcagcc

SEQ ID NO: 2875127 - RNA, 20 nt, Human
gccagaggaauccuggcagc

SEQ ID NO: 2875128 - RNA, 19 nt, Human
gccagaggaauccuggcag

SEQ ID NO: 2875129 - RNA, 18 nt, Human
gccagaggaauccuggca

SEQ ID NO: 2875130 - RNA, 17 nt, Human
gccagaggaauccuggc

SEQ ID NO: 2875131 - RNA, 18 nt, Human
gccagaugcaccagcccu

SEQ ID NO: 2875132 - RNA, 17 nt, Human
gccagaugcaccagccc

SEQ ID NO: 2875133 - RNA, 16 nt, Human
gccagaugcaccagcc

SEQ ID NO: 2875134 - RNA, 24 nt, Human
gccagaguggccuggccaggagcu

SEQ ID NO: 2875135 - RNA, 23 nt, Human
gccagaguggccuggccaggagc

SEQ ID NO: 2875136 - RNA, 23 nt, Human
gccagagggagugacagaggcag

SEQ ID NO: 2875137 - RNA, 15 nt, Human
gccagagggcuugug

SEQ ID NO: 2875138 - RNA, 19 nt, Human
gccagagggcuugugaaca

SEQ ID NO: 2875139 - RNA, 14 nt, Human
gccagaggggaagg

SEQ ID NO: 2875140 - RNA, 13 nt, Human
gccagaggugcuu

SEQ ID NO: 2875141 - RNA, 15 nt, Human
gccagaggugcuuca

SEQ ID NO: 2875142 - RNA, 16 nt, Human
gccagaggugcuucac

SEQ ID NO: 2875143 - RNA, 19 nt, Human
gccagaggugcuucacccu

SEQ ID NO: 2875144 - RNA, 22 nt, Human
gccagaguggccuggccaggag

SEQ ID NO: 2875145 - RNA, 19 nt, Human
gccagaguggccuggccag

SEQ ID NO: 2875146 - RNA, 18 nt, Human
gccagaguggccuggcca

SEQ ID NO: 2875147 - RNA, 17 nt, Human
gccagaguggccuggcc

SEQ ID NO: 2875148 - RNA, 15 nt, Human
gccagaguggccugg

SEQ ID NO: 2875149 - RNA, 14 nt, Human
gccagaguggccug

SEQ ID NO: 2875150 - RNA, 13 nt, Human
gccagaguggccu

SEQ ID NO: 2875151 - RNA, 17 nt, Human
gccagaguccuuuccaa

SEQ ID NO: 2875152 - RNA, 22 nt, Human
gccagagggagugacagaggca

SEQ ID NO: 2875153 - RNA, 21 nt, Human
gccagagggagugacagaggc

SEQ ID NO: 2875154 - RNA, 10 nt, Human
gccaccugcc

SEQ ID NO: 2875155 - RNA, 22 nt, Human
gccaccucugcggaccccagcu

SEQ ID NO: 2875156 - RNA, 20 nt, Human
gccaccucccugacccgucu

SEQ ID NO: 2875157 - RNA, 13 nt, Human
gccaccucucucc

SEQ ID NO: 2875158 - RNA, 16 nt, Human
gccaccucucuccuuu

SEQ ID NO: 2875159 - RNA, 11 nt, Human
gccaccucugc

SEQ ID NO: 2875160 - RNA, 14 nt, Human
gccaccucugcgga

SEQ ID NO: 2875161 - RNA, 20 nt, Human
gccaccucugcggaccccag

SEQ ID NO: 2875162 - RNA, 21 nt, Human
gccaccucugcggaccccagc

SEQ ID NO: 2875163 - RNA, 23 nt, Human
gccaccucugcggaccccagcug

SEQ ID NO: 2875164 - RNA, 16 nt, Human
gccaccucugucauuu

SEQ ID NO: 2875165 - RNA, 16 nt, Human
gccacauacuugcagc

SEQ ID NO: 2875166 - RNA, 17 nt, Human
gccacauacuugcagcu

SEQ ID NO: 2875167 - RNA, 18 nt, Human
gccacaguagucuugaug

SEQ ID NO: 2875168 - RNA, 18 nt, Human
gccacaguauggaugggu

SEQ ID NO: 2875169 - RNA, 22 nt, Human
gccacaguauggauggguggau

SEQ ID NO: 2875170 - RNA, 17 nt, Human
gccaccgcgcccagccu

SEQ ID NO: 2875171 - RNA, 12 nt, Human
gccacacaccuu

SEQ ID NO: 2875172 - RNA, 16 nt, Human
gccacaucuuaaacuu

SEQ ID NO: 2875173 - RNA, 22 nt, Human
gccaccgugccuggccacgccc

SEQ ID NO: 2875174 - RNA, 17 nt, Human
gccaccgugccuggcca

SEQ ID NO: 2875175 - RNA, 17 nt, Human
gccaccgcgccuggccg

SEQ ID NO: 2875176 - RNA, 11 nt, Human
gccaccugccu

SEQ ID NO: 2875177 - RNA, 12 nt, Human
gccaccugccug

SEQ ID NO: 2875178 - RNA, 13 nt, Human
gccaccugccugc

SEQ ID NO: 2875179 - RNA, 14 nt, Human
gccaccugccugcg

SEQ ID NO: 2875180 - RNA, 21 nt, Human
gccaccugccugcgucuuccg

SEQ ID NO: 2875181 - RNA, 22 nt, Human
gccaccugccugcgucuuccgc

SEQ ID NO: 2875182 - RNA, 23 nt, Human
gccaccugccugcgucuuccgcc

SEQ ID NO: 2875183 - RNA, 11 nt, Human
gccaccugggu

SEQ ID NO: 2875184 - RNA, 19 nt, Human
gccacggccaggccagagg

SEQ ID NO: 2875185 - RNA, 19 nt, Human
gccacuacacuccagccug

SEQ ID NO: 2875186 - RNA, 18 nt, Human
gccacuacacuccagccu

SEQ ID NO: 2875187 - RNA, 17 nt, Human
gccacuacacuccagcc

SEQ ID NO: 2875188 - RNA, 18 nt, Human
gccacuaauuuuaguauu

SEQ ID NO: 2875189 - RNA, 23 nt, Human
gccacuaauuuuaguauucauuc

SEQ ID NO: 2875190 - RNA, 17 nt, Human
gccacggccaggccaga

SEQ ID NO: 2875191 - RNA, 18 nt, Human
gccacggccaggccagag

SEQ ID NO: 2875192 - RNA, 20 nt, Human
gccacgcccaacuaauuuuu

SEQ ID NO: 2875193 - RNA, 13 nt, Human
gccaauauguauu

SEQ ID NO: 2875194 - RNA, 17 nt, Human
gccaauauguauuguaa

SEQ ID NO: 2875195 - RNA, 23 nt, Human
gccaauauguauuguaaacaugu

SEQ ID NO: 2875196 - RNA, 18 nt, Human
gccaauauuaaaucugcu

SEQ ID NO: 2875197 - RNA, 15 nt, Human
gccaaucaagggcaa

SEQ ID NO: 2875198 - RNA, 16 nt, Human
gccaaugcacggccuc

SEQ ID NO: 2875199 - RNA, 13 nt, Human
gccaauggaaacc

SEQ ID NO: 2875200 - RNA, 19 nt, Human
gccaauggaaaccucacgc

SEQ ID NO: 2875201 - RNA, 21 nt, Human
gccaaucccucaccuucugag

SEQ ID NO: 2875202 - RNA, 22 nt, Human
gccaaucccucaccuucugagu

SEQ ID NO: 2875203 - RNA, 16 nt, Human
gccaauggagacuguc

SEQ ID NO: 2875204 - RNA, 19 nt, Human
gccaauggagacugucuca

SEQ ID NO: 2875205 - RNA, 21 nt, Human
gccaauggagacugucucaag

SEQ ID NO: 2875206 - RNA, 22 nt, Human
gccaauguauugauaagagggc

SEQ ID NO: 2875207 - RNA, 20 nt, Human
gccaauaauaauaccucccu

SEQ ID NO: 2875208 - RNA, 21 nt, Human
gccaaguuccucuagugcccu

SEQ ID NO: 2875209 - RNA, 15 nt, Human
gccaaguuccucuag

SEQ ID NO: 2875210 - RNA, 17 nt, Human
gccaagugccaaaugcu

SEQ ID NO: 2875211 - RNA, 18 nt, Human
gccaagugccaaaugcuc

SEQ ID NO: 2875212 - RNA, 18 nt, Human
gccaagugcgugccgugu

SEQ ID NO: 2875213 - RNA, 19 nt, Human
gccaagugcgugccgugug

SEQ ID NO: 2875214 - RNA, 23 nt, Human
gccaagugcgugccgugugagug

SEQ ID NO: 2875215 - RNA, 21 nt, Human
gccaaguccgcagaagcccug

SEQ ID NO: 2875216 - RNA, 12 nt, Human
gcauuuguauuu

SEQ ID NO: 2875217 - RNA, 16 nt, Human
gcauuuguauuuugug

SEQ ID NO: 2875218 - RNA, 19 nt, Human
gcauuuguauuuuguguga

SEQ ID NO: 2875219 - RNA, 21 nt, Human
gcauuuguauuuugugugacc

SEQ ID NO: 2875220 - RNA, 21 nt, Human
gccaaggugggcugagcccug

SEQ ID NO: 2875221 - RNA, 19 nt, Human
gccaaggugggcugagccc

SEQ ID NO: 2875222 - RNA, 18 nt, Human
gccaaggugggcugagcc

SEQ ID NO: 2875223 - RNA, 16 nt, Human
gccaaggugggcugag

SEQ ID NO: 2875224 - RNA, 23 nt, Human
gccaaggugggcugagcccuggc

SEQ ID NO: 2875225 - RNA, 22 nt, Human
gccaaggugggcugagcccugg

SEQ ID NO: 2875226 - RNA, 16 nt, Human
gccaaguauaauuuuu

SEQ ID NO: 2875227 - RNA, 22 nt, Human
gccaaguauaauuuuuuguaau

SEQ ID NO: 2875228 - RNA, 21 nt, Human
gccaagggaugaaagagaagg

SEQ ID NO: 2875229 - RNA, 20 nt, Human
gccaagggaauuauagcugc

SEQ ID NO: 2875230 - RNA, 21 nt, Human
gccaaggggagucaccuuccc

SEQ ID NO: 2875231 - RNA, 22 nt, Human
gccaaggggagucaccuucccu

SEQ ID NO: 2875232 - RNA, 15 nt, Human
gccaaggucugagcc

SEQ ID NO: 2875233 - RNA, 16 nt, Human
gccaaggucugagcca

SEQ ID NO: 2875234 - RNA, 22 nt, Human
gccaaggucugagccacagcag

SEQ ID NO: 2875235 - RNA, 20 nt, Human
gccacagagaaaguacuucu

SEQ ID NO: 2875236 - RNA, 14 nt, Human
gccacagagaaagu

SEQ ID NO: 2875237 - RNA, 13 nt, Human
gccacagagaaag

SEQ ID NO: 2875238 - RNA, 23 nt, Human
gccacacuucaggcucuucuccu

SEQ ID NO: 2875239 - RNA, 18 nt, Human
gccacacucuccaucacc

SEQ ID NO: 2875240 - RNA, 17 nt, Human
gccacacucuccaucac

SEQ ID NO: 2875241 - RNA, 22 nt, Human
gccacacucugggcuccagagu

SEQ ID NO: 2875242 - RNA, 12 nt, Human
gccacacuguga

SEQ ID NO: 2875243 - RNA, 15 nt, Human
gccacacugugacac

SEQ ID NO: 2875244 - RNA, 16 nt, Human
gccacacugugacaca

SEQ ID NO: 2875245 - RNA, 17 nt, Human
gccacacugugacacac

SEQ ID NO: 2875246 - RNA, 18 nt, Human
gccacacugugacacacu

SEQ ID NO: 2875247 - RNA, 20 nt, Human
gccacacuucaggcucuucu

SEQ ID NO: 2875248 - RNA, 22 nt, Human
gccacacuucaggcucuucucc

SEQ ID NO: 2875249 - RNA, 22 nt, Human
gccacacccucccccgccacuc

SEQ ID NO: 2875250 - RNA, 13 nt, Human
gccacacccuccc

SEQ ID NO: 2875251 - RNA, 16 nt, Human
gccacacccucccccg

SEQ ID NO: 2875252 - RNA, 23 nt, Human
gccacagagaaaguacuucucca

SEQ ID NO: 2875253 - RNA, 18 nt, Human
gccacacuugaaccuaau

SEQ ID NO: 2875254 - RNA, 22 nt, Human
gccacagaguguagccaggucc

SEQ ID NO: 2875255 - RNA, 23 nt, Human
gccacagaguguagccagguccc

SEQ ID NO: 2875256 - RNA, 14 nt, Human
gccacagcagcauu

SEQ ID NO: 2875257 - RNA, 15 nt, Human
gccacagcagcauuu

SEQ ID NO: 2875258 - RNA, 16 nt, Human
gccacagcagcauuuu

SEQ ID NO: 2875259 - RNA, 19 nt, Human
gccacagcagcauuuuuau

SEQ ID NO: 2875260 - RNA, 21 nt, Human
gccacagcccauccauaguaa

SEQ ID NO: 2875261 - RNA, 15 nt, Human
gccacaaauaaaaug

SEQ ID NO: 2875262 - RNA, 22 nt, Human
gccacaaauucuuugacacuca

SEQ ID NO: 2875263 - RNA, 23 nt, Human
gccaauuuuugccuucauuaccu

SEQ ID NO: 2875264 - RNA, 20 nt, Human
gccacaacuccuacaugaug

SEQ ID NO: 2875265 - RNA, 14 nt, Human
gccacaagaaauuu

SEQ ID NO: 2875266 - RNA, 16 nt, Human
gccacaagaaauuuga

SEQ ID NO: 2875267 - RNA, 23 nt, Human
gccacaagaaauuugauuucuau

SEQ ID NO: 2875268 - RNA, 16 nt, Human
gccaaugucuccuccc

SEQ ID NO: 2875269 - RNA, 19 nt, Human
gccaauguuuuccacccau

SEQ ID NO: 2875270 - RNA, 22 nt, Human
gccaauuaggggguaaggcccc

SEQ ID NO: 2875271 - RNA, 19 nt, Human
gccaauuauuguuacacau

SEQ ID NO: 2875272 - RNA, 19 nt, Human
gccacaccaucuccuuuca

SEQ ID NO: 2875273 - RNA, 12 nt, Human
gccacacccagg

SEQ ID NO: 2875274 - RNA, 15 nt, Human
gccacacccaggcac

SEQ ID NO: 2875275 - RNA, 14 nt, Human
gccacacaugggca

SEQ ID NO: 2875276 - RNA, 18 nt, Human
gccacacaugggcaucua

SEQ ID NO: 2875277 - RNA, 14 nt, Human
gccacacagaccac

SEQ ID NO: 2875278 - RNA, 15 nt, Human
gccacacagaccacc

SEQ ID NO: 2875279 - RNA, 20 nt, Human
gccacacagaccaccaucca

SEQ ID NO: 2875280 - RNA, 15 nt, Human
gccacaagucuucca

SEQ ID NO: 2875281 - RNA, 16 nt, Human
gccacaagucuuccag

SEQ ID NO: 2875282 - RNA, 14 nt, Human
gcagaggucagacu

SEQ ID NO: 2875283 - RNA, 21 nt, Human
gcagagguccacaacacacag

SEQ ID NO: 2875284 - RNA, 21 nt, Human
gcagaggggcuuucuggagag

SEQ ID NO: 2875285 - RNA, 19 nt, Human
gcagagggguaagagagga

SEQ ID NO: 2875286 - RNA, 20 nt, Human
gcagaggggcuuucuggaga

SEQ ID NO: 2875287 - RNA, 19 nt, Human
gcagaggggcuuucuggag

SEQ ID NO: 2875288 - RNA, 18 nt, Human
gcagaggggcuuucugga

SEQ ID NO: 2875289 - RNA, 16 nt, Human
gcagaggggcuuucug

SEQ ID NO: 2875290 - RNA, 12 nt, Human
gcagaggggcuu

SEQ ID NO: 2875291 - RNA, 14 nt, Human
gcagagguggccag

SEQ ID NO: 2875292 - RNA, 15 nt, Human
gcagagguggccaga

SEQ ID NO: 2875293 - RNA, 22 nt, Human
gcagaucugugccccaugccug

SEQ ID NO: 2875294 - RNA, 20 nt, Human
gcagaucugugccccaugcc

SEQ ID NO: 2875295 - RNA, 14 nt, Human
gcagaucugugccc

SEQ ID NO: 2875296 - RNA, 13 nt, Human
gcagaucugugcc

SEQ ID NO: 2875297 - RNA, 23 nt, Human
gcagagguggccagagcugggag

SEQ ID NO: 2875298 - RNA, 18 nt, Human
gcagauguccuugaugcu

SEQ ID NO: 2875299 - RNA, 13 nt, Human
gcagauuagcagg

SEQ ID NO: 2875300 - RNA, 16 nt, Human
gcagauuagcaggcca

SEQ ID NO: 2875301 - RNA, 16 nt, Human
gcagaugugcagcaga

SEQ ID NO: 2875302 - RNA, 17 nt, Human
gcagaugugcagcagau

SEQ ID NO: 2875303 - RNA, 22 nt, Human
gcagaugugcagcagauuggaa

SEQ ID NO: 2875304 - RNA, 19 nt, Human
gcagcagauuggaaggaga

SEQ ID NO: 2875305 - RNA, 20 nt, Human
gcagcagauuggaaggagac

SEQ ID NO: 2875306 - RNA, 21 nt, Human
gcagcagauuggaaggagaca

SEQ ID NO: 2875307 - RNA, 23 nt, Human
gcagcagauuggaaggagacaca

SEQ ID NO: 2875308 - RNA, 16 nt, Human
gcagaucuuggacuca

SEQ ID NO: 2875309 - RNA, 12 nt, Human
gcagaugacaag

SEQ ID NO: 2875310 - RNA, 14 nt, Human
gcagaugacaagau

SEQ ID NO: 2875311 - RNA, 21 nt, Human
gcagaugacaagaugguacaa

SEQ ID NO: 2875312 - RNA, 14 nt, Human
gcagaugauccaug

SEQ ID NO: 2875313 - RNA, 13 nt, Human
gcagaugauccau

SEQ ID NO: 2875314 - RNA, 14 nt, Human
gcagaugagguugc

SEQ ID NO: 2875315 - RNA, 19 nt, Human
gcagaugagguugcuagag

SEQ ID NO: 2875316 - RNA, 22 nt, Human
gcagagaagggcauaaaacagc

SEQ ID NO: 2875317 - RNA, 20 nt, Human
gcagagaaagggacaaugau

SEQ ID NO: 2875318 - RNA, 23 nt, Human
gcagacuguguaaaauguaaugc

SEQ ID NO: 2875319 - RNA, 22 nt, Human
gcagacucuacagaggccaugg

SEQ ID NO: 2875320 - RNA, 19 nt, Human
gcagacucuacagaggcca

SEQ ID NO: 2875321 - RNA, 18 nt, Human
gcagacucuacagaggcc

SEQ ID NO: 2875322 - RNA, 17 nt, Human
gcagacucuacagaggc

SEQ ID NO: 2875323 - RNA, 16 nt, Human
gcacuugcagacucua

SEQ ID NO: 2875324 - RNA, 14 nt, Human
gcacuugcagacuc

SEQ ID NO: 2875325 - RNA, 21 nt, Human
gcacuuccuuuuaccugccca

SEQ ID NO: 2875326 - RNA, 14 nt, Human
gcacuguuuuucca

SEQ ID NO: 2875327 - RNA, 13 nt, Human
gcaggaaggagag

SEQ ID NO: 2875328 - RNA, 12 nt, Human
gcaggaaggaga

SEQ ID NO: 2875329 - RNA, 20 nt, Human
gcaggaagcauucagagagc

SEQ ID NO: 2875330 - RNA, 21 nt, Human
gcaggaagcauucagagagca

SEQ ID NO: 2875331 - RNA, 23 nt, Human
gcaggacucacagguuggaagag

SEQ ID NO: 2875332 - RNA, 19 nt, Human
gcaggacucagcuccccag

SEQ ID NO: 2875333 - RNA, 17 nt, Human
gcaggaacaaugacuac

SEQ ID NO: 2875334 - RNA, 16 nt, Human
gcagcucacuacccua

SEQ ID NO: 2875335 - RNA, 19 nt, Human
gcagcucagguuguagugg

SEQ ID NO: 2875336 - RNA, 23 nt, Human
gcagccucccucugaccugcagg

SEQ ID NO: 2875337 - RNA, 14 nt, Human
gcagcccugcuuug

SEQ ID NO: 2875338 - RNA, 24 nt, Human
gcagcccugcuuugggcugcccug

SEQ ID NO: 2875339 - RNA, 15 nt, Human
gcagcagcaggugau

SEQ ID NO: 2875340 - RNA, 16 nt, Human
gcagcaggaggccagg

SEQ ID NO: 2875341 - RNA, 22 nt, Human
gcagccucccucugaccugcag

SEQ ID NO: 2875342 - RNA, 16 nt, Human
gcagccucccucugac

SEQ ID NO: 2875343 - RNA, 14 nt, Human
gcagccucccucug

SEQ ID NO: 2875344 - RNA, 17 nt, Human
gcagccuccaacacaag

SEQ ID NO: 2875345 - RNA, 18 nt, Human
gcagccuccaacacaagg

SEQ ID NO: 2875346 - RNA, 19 nt, Human
gcagcccuggcagggggca

SEQ ID NO: 2875347 - RNA, 16 nt, Human
gcagcccuucccccag

SEQ ID NO: 2875348 - RNA, 20 nt, Human
gcagccgccuuaagcugauc

SEQ ID NO: 2875349 - RNA, 14 nt, Human
gcagccgccuuccu

SEQ ID NO: 2875350 - RNA, 16 nt, Human
gcagccgccuuccuug

SEQ ID NO: 2875351 - RNA, 18 nt, Human
gcagccgccuuccuugac

SEQ ID NO: 2875352 - RNA, 20 nt, Human
gcagccgccuuccuugaccu

SEQ ID NO: 2875353 - RNA, 14 nt, Human
gauuguuaaaauaa

SEQ ID NO: 2875354 - RNA, 12 nt, Human
gcacagcagccu

SEQ ID NO: 2875355 - RNA, 13 nt, Human
gcacagcagccug

SEQ ID NO: 2875356 - RNA, 14 nt, Human
gcacagcagccugc

SEQ ID NO: 2875357 - RNA, 17 nt, Human
gcacagcagccugcuuc

SEQ ID NO: 2875358 - RNA, 20 nt, Human
gcacagcagccugcuuccca

SEQ ID NO: 2875359 - RNA, 13 nt, Human
gcacagauuuuaa

SEQ ID NO: 2875360 - RNA, 14 nt, Human
gcacagauuuuaau

SEQ ID NO: 2875361 - RNA, 17 nt, Human
gcacagauuuuaauugu

SEQ ID NO: 2875362 - RNA, 21 nt, Human
gcacagauuuuaauugucaug

SEQ ID NO: 2875363 - RNA, 13 nt, Human
gcacagcaaacug

SEQ ID NO: 2875364 - RNA, 21 nt, Human
gcacagcuucauuuccugugu

SEQ ID NO: 2875365 - RNA, 23 nt, Human
gcacagcuucauuuccugugucu

SEQ ID NO: 2875366 - RNA, 15 nt, Human
gcacaggaaaaggua

SEQ ID NO: 2875367 - RNA, 18 nt, Human
gcacaggaaaagguagcu

SEQ ID NO: 2875368 - RNA, 16 nt, Human
gcacagggcaguggga

SEQ ID NO: 2875369 - RNA, 15 nt, Human
gcaccccucugcccu

SEQ ID NO: 2875370 - RNA, 18 nt, Human
gcaccccgauguggaccu

SEQ ID NO: 2875371 - RNA, 23 nt, Human
gcaccccgauguggaccucuacu

SEQ ID NO: 2875372 - RNA, 14 nt, Human
gcaccccgcugcgg

SEQ ID NO: 2875373 - RNA, 12 nt, Human
gcacagggagaa

SEQ ID NO: 2875374 - RNA, 18 nt, Human
gcaccagagcaaccucuc

SEQ ID NO: 2875375 - RNA, 19 nt, Human
gcaccagagcaaccucuca

SEQ ID NO: 2875376 - RNA, 19 nt, Human
gcaccaaagaugcagccgc

SEQ ID NO: 2875377 - RNA, 21 nt, Human
gcaccaaagaugcagccgccu

SEQ ID NO: 2875378 - RNA, 23 nt, Human
gcaccaaagaugcagccgccuuc

SEQ ID NO: 2875379 - RNA, 15 nt, Human
gcacaggucaggggu

SEQ ID NO: 2875380 - RNA, 21 nt, Human
gcacaggucaggggugacaca

SEQ ID NO: 2875381 - RNA, 22 nt, Human
gcacaggucaggggugacacag

SEQ ID NO: 2875382 - RNA, 23 nt, Human
gcacaggucaggggugacacaga

SEQ ID NO: 2875383 - RNA, 13 nt, Human
gcacaggucccac

SEQ ID NO: 2875384 - RNA, 14 nt, Human
gcacaggucccacc

SEQ ID NO: 2875385 - RNA, 17 nt, Human
gcacuguugauguaucu

SEQ ID NO: 2875386 - RNA, 18 nt, Human
gcacuguugauguaucug

SEQ ID NO: 2875387 - RNA, 19 nt, Human
gcacuguugauguaucuga

SEQ ID NO: 2875388 - RNA, 20 nt, Human
gcacuguugcaaacucagug

SEQ ID NO: 2875389 - RNA, 23 nt, Human
gcacugggaugagccgcugugag

SEQ ID NO: 2875390 - RNA, 15 nt, Human
gcacugggaucacag

SEQ ID NO: 2875391 - RNA, 21 nt, Human
gcacuacaugugguuuauaga

SEQ ID NO: 2875392 - RNA, 16 nt, Human
gcacuacauucauuua

SEQ ID NO: 2875393 - RNA, 12 nt, Human
gcacuacauuca

SEQ ID NO: 2875394 - RNA, 23 nt, Human
gcacgcggauuaauuugcaucug

SEQ ID NO: 2875395 - RNA, 13 nt, Human
gcacgccugcccc

SEQ ID NO: 2875396 - RNA, 18 nt, Human
gcacgcgcccuuucuacc

SEQ ID NO: 2875397 - RNA, 20 nt, Human
gcacgcgcccuuucuaccau

SEQ ID NO: 2875398 - RNA, 12 nt, Human
gcacgcaguggc

SEQ ID NO: 2875399 - RNA, 16 nt, Human
gcacgcacacacacaa

SEQ ID NO: 2875400 - RNA, 15 nt, Human
gcacuaaagccagcc

SEQ ID NO: 2875401 - RNA, 17 nt, Human
gcacuaaagccagccug

SEQ ID NO: 2875402 - RNA, 18 nt, Human
gcacuaaagccagccuga

SEQ ID NO: 2875403 - RNA, 19 nt, Human
gcacuaaagccagccugac

SEQ ID NO: 2875404 - RNA, 21 nt, Human
gcacuaaagccagccugaccu

SEQ ID NO: 2875405 - RNA, 23 nt, Human
gcacuaaagccagccugaccuuc

SEQ ID NO: 2875406 - RNA, 15 nt, Human
gcacguugcuucagg

SEQ ID NO: 2875407 - RNA, 14 nt, Human
gcacgugugugcac

SEQ ID NO: 2875408 - RNA, 12 nt, Human
gcacggacaaua

SEQ ID NO: 2875409 - RNA, 15 nt, Human
gcacggacaauaaac

SEQ ID NO: 2875410 - RNA, 16 nt, Human
gcacggacaauaaacc

SEQ ID NO: 2875411 - RNA, 17 nt, Human
gcacggacaauaaaccu

SEQ ID NO: 2875412 - RNA, 18 nt, Human
gcacggacaauaaaccuc

SEQ ID NO: 2875413 - RNA, 20 nt, Human
gcacuaaggugugcucugau

SEQ ID NO: 2875414 - RNA, 19 nt, Human
gcacuaaaguauguaaagu

SEQ ID NO: 2875415 - RNA, 20 nt, Human
gcacuaaaguauguaaagua

SEQ ID NO: 2875416 - RNA, 22 nt, Human
gcacuaaaguauguaaaguaug

SEQ ID NO: 2875417 - RNA, 14 nt, Human
gcacuaaauaugaa

SEQ ID NO: 2875418 - RNA, 15 nt, Human
gcacuaaauaugaac

SEQ ID NO: 2875419 - RNA, 19 nt, Human
gcacuaaggugugcucuga

SEQ ID NO: 2875420 - RNA, 19 nt, Human
gcacuaauuugauguuuac

SEQ ID NO: 2875421 - RNA, 13 nt, Human
gcacuacaugugg

SEQ ID NO: 2875422 - RNA, 22 nt, Human
gcauacugagccaaguauaauu

SEQ ID NO: 2875423 - RNA, 23 nt, Human
gcauacugagccaaguauaauuu

SEQ ID NO: 2875424 - RNA, 17 nt, Human
gcaucagcuggcgucau

SEQ ID NO: 2875425 - RNA, 21 nt, Human
gcaucagcuggcgucaugcaa

SEQ ID NO: 2875426 - RNA, 13 nt, Human
gcaucagggggaa

SEQ ID NO: 2875427 - RNA, 18 nt, Human
gcaucagggggaagaagc

SEQ ID NO: 2875428 - RNA, 20 nt, Human
gcaucagggggaagaagcag

SEQ ID NO: 2875429 - RNA, 21 nt, Human
gcaucagggggaagaagcaga

SEQ ID NO: 2875430 - RNA, 24 nt, Human
gcaucagggggaagaagcagagag

SEQ ID NO: 2875431 - RNA, 15 nt, Human
gcaucagugcccucc

SEQ ID NO: 2875432 - RNA, 15 nt, Human
gcauccaaucucaag

SEQ ID NO: 2875433 - RNA, 18 nt, Human
gcauccaaucucaaggaa

SEQ ID NO: 2875434 - RNA, 19 nt, Human
gcauccaaucucaaggaau

SEQ ID NO: 2875435 - RNA, 23 nt, Human
gcaucuaugggagagugucaacc

SEQ ID NO: 2875436 - RNA, 16 nt, Human
gcaucuagguaauuuu

SEQ ID NO: 2875437 - RNA, 12 nt, Human
gcaucucagccc

SEQ ID NO: 2875438 - RNA, 13 nt, Human
gcaucucagccca

SEQ ID NO: 2875439 - RNA, 14 nt, Human
gcaucucagcccac

SEQ ID NO: 2875440 - RNA, 11 nt, Human
gcaucauugca

SEQ ID NO: 2875441 - RNA, 14 nt, Human
gcaucauugcagau

SEQ ID NO: 2875442 - RNA, 15 nt, Human
gcaucauugcagaug

SEQ ID NO: 2875443 - RNA, 13 nt, Human
gcaucaugcaugu

SEQ ID NO: 2875444 - RNA, 19 nt, Human
gcaucagucccuauguauu

SEQ ID NO: 2875445 - RNA, 15 nt, Human
gcaucaguucuacgg

SEQ ID NO: 2875446 - RNA, 17 nt, Human
gcaucauaguaguuuuu

SEQ ID NO: 2875447 - RNA, 23 nt, Human
gcaucagugcccuccaggauaga

SEQ ID NO: 2875448 - RNA, 14 nt, Human
gcaucugugauggg

SEQ ID NO: 2875449 - RNA, 15 nt, Human
gcaucugugauggga

SEQ ID NO: 2875450 - RNA, 18 nt, Human
gcaucugugaugggagcg

SEQ ID NO: 2875451 - RNA, 12 nt, Human
gcaucuguacaa

SEQ ID NO: 2875452 - RNA, 15 nt, Human
gcaucuguacaaagg

SEQ ID NO: 2875453 - RNA, 15 nt, Human
gcaucucagcccaca

SEQ ID NO: 2875454 - RNA, 17 nt, Human
gcaucugccccuccccc

SEQ ID NO: 2875455 - RNA, 15 nt, Human
gcaucugccccuccc

SEQ ID NO: 2875456 - RNA, 14 nt, Human
gcaucugccccucc

SEQ ID NO: 2875457 - RNA, 12 nt, Human
gcaucugccccu

SEQ ID NO: 2875458 - RNA, 14 nt, Human
gcaucucuguacuu

SEQ ID NO: 2875459 - RNA, 17 nt, Human
gcaucucuguacuuugc

SEQ ID NO: 2875460 - RNA, 18 nt, Human
gcaucugccccuccccca

SEQ ID NO: 2875461 - RNA, 21 nt, Human
gcauuauguccacuguguaua

SEQ ID NO: 2875462 - RNA, 22 nt, Human
gcauuauguccacuguguauag

SEQ ID NO: 2875463 - RNA, 21 nt, Human
gcauugaacacaaacuguaaa

SEQ ID NO: 2875464 - RNA, 14 nt, Human
gcauuccuucuuug

SEQ ID NO: 2875465 - RNA, 15 nt, Human
gcauuccuucuuuga

SEQ ID NO: 2875466 - RNA, 19 nt, Human
gcauuccugauaugauuua

SEQ ID NO: 2875467 - RNA, 21 nt, Human
gcauuccugauaugauuuaaa

SEQ ID NO: 2875468 - RNA, 22 nt, Human
gcauuccugauaugauuuaaaa

SEQ ID NO: 2875469 - RNA, 13 nt, Human
gcauuccuucuuu

SEQ ID NO: 2875470 - RNA, 23 nt, Human
gcauugaacacaaacuguaaaua

SEQ ID NO: 2875471 - RNA, 22 nt, Human
gcauugaacacaaacuguaaau

SEQ ID NO: 2875472 - RNA, 15 nt, Human
gcauugacaaaucug

SEQ ID NO: 2875473 - RNA, 16 nt, Human
gcauugacaaaucugu

SEQ ID NO: 2875474 - RNA, 19 nt, Human
gcauugacaaaucugugua

SEQ ID NO: 2875475 - RNA, 20 nt, Human
gcauugacaaaucuguguau

SEQ ID NO: 2875476 - RNA, 13 nt, Human
gcauugacauuau

SEQ ID NO: 2875477 - RNA, 15 nt, Human
gcauugauauuguga

SEQ ID NO: 2875478 - RNA, 16 nt, Human
gcauugauauugugaa

SEQ ID NO: 2875479 - RNA, 15 nt, Human
gcauugagcugagau

SEQ ID NO: 2875480 - RNA, 18 nt, Human
gcauugaggaagagucuu

SEQ ID NO: 2875481 - RNA, 21 nt, Human
gcauugacuuucaguaaacau

SEQ ID NO: 2875482 - RNA, 22 nt, Human
gcauugacuuucaguaaacaua

SEQ ID NO: 2875483 - RNA, 19 nt, Human
gcauuccuucuuugauaau

SEQ ID NO: 2875484 - RNA, 22 nt, Human
gcauugaccgcgacuaauuuca

SEQ ID NO: 2875485 - RNA, 23 nt, Human
gcauugaccgcgacuaauuucaa

SEQ ID NO: 2875486 - RNA, 22 nt, Human
gcauugacugguuuacaggccc

SEQ ID NO: 2875487 - RNA, 23 nt, Human
gcauugacugguuuacaggcccu

SEQ ID NO: 2875488 - RNA, 14 nt, Human
gcauuaugcaauua

SEQ ID NO: 2875489 - RNA, 19 nt, Human
gcauuauguccacugugua

SEQ ID NO: 2875490 - RNA, 12 nt, Human
gcauuaaaccug

SEQ ID NO: 2875491 - RNA, 13 nt, Human
gcauuaaaccugu

SEQ ID NO: 2875492 - RNA, 14 nt, Human
gcauuaaaccuguc

SEQ ID NO: 2875493 - RNA, 15 nt, Human
gcauuaaaccugucu

SEQ ID NO: 2875494 - RNA, 22 nt, Human
gcauuaaaccugucuccacugu

SEQ ID NO: 2875495 - RNA, 22 nt, Human
gcauuaaauucacaaacuuuua

SEQ ID NO: 2875496 - RNA, 19 nt, Human
gcauuaaauuuuaagguag

SEQ ID NO: 2875497 - RNA, 20 nt, Human
gcauuaaauuuuaagguaga

SEQ ID NO: 2875498 - RNA, 18 nt, Human
gcauuaaauucacaaacu

SEQ ID NO: 2875499 - RNA, 13 nt, Human
gcauuaacacaaa

SEQ ID NO: 2875500 - RNA, 12 nt, Human
gcauuaauguuu

SEQ ID NO: 2875501 - RNA, 13 nt, Human
gcauuaauguuuc

SEQ ID NO: 2875502 - RNA, 14 nt, Human
gcauuaauguuucu

SEQ ID NO: 2875503 - RNA, 15 nt, Human
gcauuacccccaacc

SEQ ID NO: 2875504 - RNA, 21 nt, Human
gcauuacccccaaccucauuu

SEQ ID NO: 2875505 - RNA, 15 nt, Human
gcaugugucaugcau

SEQ ID NO: 2875506 - RNA, 18 nt, Human
gcaugugucaugcaugaa

SEQ ID NO: 2875507 - RNA, 13 nt, Human
gcaugugugugug

SEQ ID NO: 2875508 - RNA, 14 nt, Human
gcaugugugugugu

SEQ ID NO: 2875509 - RNA, 11 nt, Human
gcaugugugug

SEQ ID NO: 2875510 - RNA, 11 nt, Human
gcaugugugua

SEQ ID NO: 2875511 - RNA, 12 nt, Human
gcauguguguau

SEQ ID NO: 2875512 - RNA, 13 nt, Human
gcauguguguaua

SEQ ID NO: 2875513 - RNA, 15 nt, Human
gcauguguguauaag

SEQ ID NO: 2875514 - RNA, 11 nt, Human
gcaugccucug

SEQ ID NO: 2875515 - RNA, 19 nt, Human
gcaugccucugauauggga

SEQ ID NO: 2875516 - RNA, 21 nt, Human
gcaugccucugauaugggacu

SEQ ID NO: 2875517 - RNA, 13 nt, Human
gcaugccugagag

SEQ ID NO: 2875518 - RNA, 22 nt, Human
gcaugccugagagacauggcuu

SEQ ID NO: 2875519 - RNA, 22 nt, Human
gcaugccccggccaccucugcg

SEQ ID NO: 2875520 - RNA, 23 nt, Human
gcaugccccggccaccucugcgg

SEQ ID NO: 2875521 - RNA, 18 nt, Human
gcaugccccggccaccuc

SEQ ID NO: 2875522 - RNA, 19 nt, Human
gcaugccccggccaccucu

SEQ ID NO: 2875523 - RNA, 20 nt, Human
gcaugccccggccaccucug

SEQ ID NO: 2875524 - RNA, 21 nt, Human
gcaugccccggccaccucugc

SEQ ID NO: 2875525 - RNA, 15 nt, Human
gcaugaccagaugcg

SEQ ID NO: 2875526 - RNA, 20 nt, Human
gcaugacauaacagugcagg

SEQ ID NO: 2875527 - RNA, 13 nt, Human
gcaugacagccuc

SEQ ID NO: 2875528 - RNA, 14 nt, Human
gcaugacagccucu

SEQ ID NO: 2875529 - RNA, 15 nt, Human
gcaugacagccucua

SEQ ID NO: 2875530 - RNA, 14 nt, Human
gcaugccccggcca

SEQ ID NO: 2875531 - RNA, 16 nt, Human
gcaugccccggccacc

SEQ ID NO: 2875532 - RNA, 17 nt, Human
gcaugccccggccaccu

SEQ ID NO: 2875533 - RNA, 19 nt, Human
gcaguucagcaccacccua

SEQ ID NO: 2875534 - RNA, 17 nt, Human
gcaguucagcaccaccc

SEQ ID NO: 2875535 - RNA, 21 nt, Human
gcaguggugcgaucuggguuc

SEQ ID NO: 2875536 - RNA, 20 nt, Human
gcaguggugcgaucuggguu

SEQ ID NO: 2875537 - RNA, 22 nt, Human
gcaguggugcgaucuggguuca

SEQ ID NO: 2875538 - RNA, 16 nt, Human
gcaguggcucacgccu

SEQ ID NO: 2875539 - RNA, 19 nt, Human
gcaguggugcgaucugggu

SEQ ID NO: 2875540 - RNA, 18 nt, Human
gcaguggugcgaucuggg

SEQ ID NO: 2875541 - RNA, 14 nt, Human
gcaguggugcgauc

SEQ ID NO: 2875542 - RNA, 16 nt, Human
gcaguggugcgaucuc

SEQ ID NO: 2875543 - RNA, 21 nt, Human
gcagugggguuucgcagccug

SEQ ID NO: 2875544 - RNA, 16 nt, Human
gcagugggcuccuggc

SEQ ID NO: 2875545 - RNA, 18 nt, Human
gcagugggcuccuggcag

SEQ ID NO: 2875546 - RNA, 11 nt, Human
gcagugggagc

SEQ ID NO: 2875547 - RNA, 21 nt, Human
gcagugggacagggcauggcc

SEQ ID NO: 2875548 - RNA, 13 nt, Human
gcagggcuggccc

SEQ ID NO: 2875549 - RNA, 21 nt, Human
gcagggcuggccccagggcac

SEQ ID NO: 2875550 - RNA, 14 nt, Human
gcagggcugugcac

SEQ ID NO: 2875551 - RNA, 16 nt, Human
gcagggucucacucug

SEQ ID NO: 2875552 - RNA, 14 nt, Human
gcaggcggugggca

SEQ ID NO: 2875553 - RNA, 15 nt, Human
gcaggcggugggcac

SEQ ID NO: 2875554 - RNA, 16 nt, Human
gcaggcggugggcacc

SEQ ID NO: 2875555 - RNA, 23 nt, Human
gcaggcggugggcacccacccug

SEQ ID NO: 2875556 - RNA, 15 nt, Human
gcagggaggucaggc

SEQ ID NO: 2875557 - RNA, 16 nt, Human
gcagggaggucaggcc

SEQ ID NO: 2875558 - RNA, 18 nt, Human
gcagggaggucaggcccu

SEQ ID NO: 2875559 - RNA, 20 nt, Human
gcagggaggucaggcccugg

SEQ ID NO: 2875560 - RNA, 15 nt, Human
gcagggauugcugcc

SEQ ID NO: 2875561 - RNA, 19 nt, Human
gcagggauugcugccacuu

SEQ ID NO: 2875562 - RNA, 22 nt, Human
gcagggauugcugccacuuuuu

SEQ ID NO: 2875563 - RNA, 22 nt, Human
gcagggcaaaugacaugcacug

SEQ ID NO: 2875564 - RNA, 23 nt, Human
gcagggcaaaugacaugcacuga

SEQ ID NO: 2875565 - RNA, 12 nt, Human
gcagggcagccc

SEQ ID NO: 2875566 - RNA, 13 nt, Human
gcagggcagcccc

SEQ ID NO: 2875567 - RNA, 15 nt, Human
gcagggcagccccac

SEQ ID NO: 2875568 - RNA, 19 nt, Human
gcaggacuuugaggcaagu

SEQ ID NO: 2875569 - RNA, 13 nt, Human
gcaggcagcgcca

SEQ ID NO: 2875570 - RNA, 24 nt, Human
gcaggccaagagcagaggcagcga

SEQ ID NO: 2875571 - RNA, 22 nt, Human
gcaggccaagagcagaggcagc

SEQ ID NO: 2875572 - RNA, 20 nt, Human
gcaggccaagagcagaggca

SEQ ID NO: 2875573 - RNA, 16 nt, Human
gcaggcauguccugga

SEQ ID NO: 2875574 - RNA, 15 nt, Human
gcaggcauugaggaa

SEQ ID NO: 2875575 - RNA, 16 nt, Human
gcaggcauugaggaag

SEQ ID NO: 2875576 - RNA, 18 nt, Human
gcaggcauugaggaagag

SEQ ID NO: 2875577 - RNA, 20 nt, Human
gcaggccaagucaggcccuu

SEQ ID NO: 2875578 - RNA, 23 nt, Human
gcaggccaaggccuucuccuccc

SEQ ID NO: 2875579 - RNA, 15 nt, Human
gcaggccaaggucug

SEQ ID NO: 2875580 - RNA, 16 nt, Human
gcaggccaaggucuga

SEQ ID NO: 2875581 - RNA, 22 nt, Human
gcaggccaaggucugagccaca

SEQ ID NO: 2875582 - RNA, 19 nt, Human
gcaggccaaggccuucucc

SEQ ID NO: 2875583 - RNA, 14 nt, Human
gcaggcaucugauu

SEQ ID NO: 2875584 - RNA, 20 nt, Human
gcaggccaaggccuucuccu

SEQ ID NO: 2875585 - RNA, 21 nt, Human
gcaggccaaggccuucuccuc

SEQ ID NO: 2875586 - RNA, 19 nt, Human
gcaggcccuuugaagccuc

SEQ ID NO: 2875587 - RNA, 12 nt, Human
gcaggcccugca

SEQ ID NO: 2875588 - RNA, 11 nt, Human
gcaggcccugc

SEQ ID NO: 2875589 - RNA, 13 nt, Human
gcaggcccugcag

SEQ ID NO: 2875590 - RNA, 14 nt, Human
gcaggcccugcagu

SEQ ID NO: 2875591 - RNA, 16 nt, Human
gcaggccaggccagcu

SEQ ID NO: 2875592 - RNA, 15 nt, Human
gcaggccaggccagc

SEQ ID NO: 2875593 - RNA, 17 nt, Human
gcaggccaggccagcug

SEQ ID NO: 2875594 - RNA, 13 nt, Human
gcuugccugcagg

SEQ ID NO: 2875595 - RNA, 14 nt, Human
gcuugccugcaggc

SEQ ID NO: 2875596 - RNA, 14 nt, Human
gcuugccuggagac

SEQ ID NO: 2875597 - RNA, 16 nt, Human
gcuugcgaacuagaga

SEQ ID NO: 2875598 - RNA, 21 nt, Human
gcuugcgaacuagagaugugc

SEQ ID NO: 2875599 - RNA, 14 nt, Human
gcuugcucauuuuu

SEQ ID NO: 2875600 - RNA, 13 nt, Human
gcuugcucccugu

SEQ ID NO: 2875601 - RNA, 22 nt, Human
gcuugcuagcuaugugaccuug

SEQ ID NO: 2875602 - RNA, 16 nt, Human
gcuugcuagcuaugug

SEQ ID NO: 2875603 - RNA, 21 nt, Human
gcuuggaaagcaucaccucag

SEQ ID NO: 2875604 - RNA, 19 nt, Human
gcuuggaaagcaucaccuc

SEQ ID NO: 2875605 - RNA, 12 nt, Human
gcuuguguuaag

SEQ ID NO: 2875606 - RNA, 17 nt, Human
gcuuguuauauuaagca

SEQ ID NO: 2875607 - RNA, 17 nt, Human
gcuuguuaucagcuuuc

SEQ ID NO: 2875608 - RNA, 18 nt, Human
gcuuguuccaaugccaca

SEQ ID NO: 2875609 - RNA, 19 nt, Human
gcuuguuccaaugccacau

SEQ ID NO: 2875610 - RNA, 18 nt, Human
gcuuguucccucucccug

SEQ ID NO: 2875611 - RNA, 16 nt, Human
gcuuggacggcugggc

SEQ ID NO: 2875612 - RNA, 12 nt, Human
gcuuggacugga

SEQ ID NO: 2875613 - RNA, 12 nt, Human
gcuugugaacag

SEQ ID NO: 2875614 - RNA, 13 nt, Human
gcuugugaacaga

SEQ ID NO: 2875615 - RNA, 20 nt, Human
gcuugugaauguauuuuucu

SEQ ID NO: 2875616 - RNA, 15 nt, Human
gcuugugcaacaaua

SEQ ID NO: 2875617 - RNA, 14 nt, Human
gcuugugcacaauu

SEQ ID NO: 2875618 - RNA, 17 nt, Human
gcuuguggggacccagg

SEQ ID NO: 2875619 - RNA, 18 nt, Human
gcuuguggggacccaggc

SEQ ID NO: 2875620 - RNA, 19 nt, Human
gcuuguggggacccaggcu

SEQ ID NO: 2875621 - RNA, 21 nt, Human
gcuuguggggacccaggcucc

SEQ ID NO: 2875622 - RNA, 18 nt, Human
gcuuuggggugucuuuuu

SEQ ID NO: 2875623 - RNA, 15 nt, Human
gcuuugguuuauauu

SEQ ID NO: 2875624 - RNA, 18 nt, Human
gcuuugggcugcccuggu

SEQ ID NO: 2875625 - RNA, 19 nt, Human
gcuuugggcugcccuggug

SEQ ID NO: 2875626 - RNA, 20 nt, Human
gcuuguuuuauaaaauuuug

SEQ ID NO: 2875627 - RNA, 23 nt, Human
gcuuguuuuauaaaauuuugcuu

SEQ ID NO: 2875628 - RNA, 14 nt, Human
gcuuguuuuccagu

SEQ ID NO: 2875629 - RNA, 13 nt, Human
gcuuuaaacaaau

SEQ ID NO: 2875630 - RNA, 17 nt, Human
gcuuuaaacaaauucau

SEQ ID NO: 2875631 - RNA, 16 nt, Human
gcuuuaaacucaggga

SEQ ID NO: 2875632 - RNA, 14 nt, Human
gcuuguuguaaagc

SEQ ID NO: 2875633 - RNA, 22 nt, Human
gcuuucaucacaaauccaaagg

SEQ ID NO: 2875634 - RNA, 21 nt, Human
gcuuucagggccaugguucac

SEQ ID NO: 2875635 - RNA, 18 nt, Human
gcuuuaaacucagggaca

SEQ ID NO: 2875636 - RNA, 21 nt, Human
gcuuuaaacucagggacagag

SEQ ID NO: 2875637 - RNA, 22 nt, Human
gcuuuaaacucagggacagagc

SEQ ID NO: 2875638 - RNA, 18 nt, Human
gcuuuaaagggccugccu

SEQ ID NO: 2875639 - RNA, 15 nt, Human
gcuuuaaaguguaau

SEQ ID NO: 2875640 - RNA, 16 nt, Human
gcuuuaaaguguaaua

SEQ ID NO: 2875641 - RNA, 19 nt, Human
gcuucuguugcugccucau

SEQ ID NO: 2875642 - RNA, 18 nt, Human
gcuucuggagcccuuggg

SEQ ID NO: 2875643 - RNA, 17 nt, Human
gcuucuggagcccuugg

SEQ ID NO: 2875644 - RNA, 14 nt, Human
gcuucuggagcccu

SEQ ID NO: 2875645 - RNA, 13 nt, Human
gcuucuggagccc

SEQ ID NO: 2875646 - RNA, 18 nt, Human
gcuucuguugcugccuca

SEQ ID NO: 2875647 - RNA, 17 nt, Human
gcuucuguugcugccuc

SEQ ID NO: 2875648 - RNA, 17 nt, Human
gcuucuggaauuuguuc

SEQ ID NO: 2875649 - RNA, 20 nt, Human
gcuucuggaauuuguucaag

SEQ ID NO: 2875650 - RNA, 23 nt, Human
gcuucuggaauuuguucaaguuu

SEQ ID NO: 2875651 - RNA, 12 nt, Human
gcuucuggagcc

SEQ ID NO: 2875652 - RNA, 17 nt, Human
gcuucucauccugcagg

SEQ ID NO: 2875653 - RNA, 18 nt, Human
gcuucauuuccugugucu

SEQ ID NO: 2875654 - RNA, 15 nt, Human
gcuucauuagagcag

SEQ ID NO: 2875655 - RNA, 16 nt, Human
gcuucauuagagcagg

SEQ ID NO: 2875656 - RNA, 17 nt, Human
gcuucauuagagcaggc

SEQ ID NO: 2875657 - RNA, 18 nt, Human
gcuucauuagagcaggcg

SEQ ID NO: 2875658 - RNA, 17 nt, Human
gcuucauucaauauuga

SEQ ID NO: 2875659 - RNA, 18 nt, Human
gcuucauucaauauugac

SEQ ID NO: 2875660 - RNA, 22 nt, Human
gcuucauucaauauugacauuu

SEQ ID NO: 2875661 - RNA, 15 nt, Human
gcuucauucuccuug

SEQ ID NO: 2875662 - RNA, 15 nt, Human
gcuuccaaauauugu

SEQ ID NO: 2875663 - RNA, 22 nt, Human
gcuuccaaggggcaaauuuuua

SEQ ID NO: 2875664 - RNA, 12 nt, Human
gcuuccaauuuu

SEQ ID NO: 2875665 - RNA, 19 nt, Human
gcuuccagaaaaccccagc

SEQ ID NO: 2875666 - RNA, 12 nt, Human
gcuucucauccc

SEQ ID NO: 2875667 - RNA, 14 nt, Human
gcuucucaucccca

SEQ ID NO: 2875668 - RNA, 16 nt, Human
gcuucucauccugcag

SEQ ID NO: 2875669 - RNA, 11 nt, Human
gcuuacucugu

SEQ ID NO: 2875670 - RNA, 19 nt, Human
gcuuaccuugacuguugau

SEQ ID NO: 2875671 - RNA, 15 nt, Human
gcuuagacauaacaa

SEQ ID NO: 2875672 - RNA, 13 nt, Human
gcuuauauucaac

SEQ ID NO: 2875673 - RNA, 20 nt, Human
gcuuauauucaaccauggac

SEQ ID NO: 2875674 - RNA, 22 nt, Human
gcuuauauucaaccauggacuu

SEQ ID NO: 2875675 - RNA, 17 nt, Human
gcuuauagguggccucu

SEQ ID NO: 2875676 - RNA, 15 nt, Human
gcuuauagguggccu

SEQ ID NO: 2875677 - RNA, 20 nt, Human
gcuucaguggcagcugcuuu

SEQ ID NO: 2875678 - RNA, 14 nt, Human
gcuucauaaaugaa

SEQ ID NO: 2875679 - RNA, 19 nt, Human
gcuucaguggcagcugcuu

SEQ ID NO: 2875680 - RNA, 15 nt, Human
gcuuauccauaaaaa

SEQ ID NO: 2875681 - RNA, 16 nt, Human
gcuuauccauaaaaaa

SEQ ID NO: 2875682 - RNA, 17 nt, Human
gcuuaucaauaaaccug

SEQ ID NO: 2875683 - RNA, 13 nt, Human
gcuuacuauuucu

SEQ ID NO: 2875684 - RNA, 23 nt, Human
gcuuauauucaaccauggacuuu

SEQ ID NO: 2875685 - RNA, 13 nt, Human
gcuucaucuguca

SEQ ID NO: 2875686 - RNA, 18 nt, Human
gcuucaucugucaagugg

SEQ ID NO: 2875687 - RNA, 18 nt, Human
gcuucauaaaugaagcag

SEQ ID NO: 2875688 - RNA, 22 nt, Human
gcuucauaaaugaagcagcuuu

SEQ ID NO: 2875689 - RNA, 14 nt, Human
gcuucaugccagcu

SEQ ID NO: 2875690 - RNA, 20 nt, Human
gcuggucucaaacuccugac

SEQ ID NO: 2875691 - RNA, 19 nt, Human
gcuggucucaaacuccuga

SEQ ID NO: 2875692 - RNA, 13 nt, Human
gcuggugcccgga

SEQ ID NO: 2875693 - RNA, 18 nt, Human
gcuggugagugaugcggc

SEQ ID NO: 2875694 - RNA, 20 nt, Human
gcuggugagugaugcggcag

SEQ ID NO: 2875695 - RNA, 20 nt, Human
gcugguccucauucaaaggg

SEQ ID NO: 2875696 - RNA, 23 nt, Human
gcuggucucgaacuccugaccuu

SEQ ID NO: 2875697 - RNA, 22 nt, Human
gcuggucucgaacuccugaccu

SEQ ID NO: 2875698 - RNA, 19 nt, Human
gcuggucucgaacuccuga

SEQ ID NO: 2875699 - RNA, 13 nt, Human
gcugggggccuca

SEQ ID NO: 2875700 - RNA, 17 nt, Human
gcuggggcaagucccug

SEQ ID NO: 2875701 - RNA, 18 nt, Human
gcugggggccucagugcc

SEQ ID NO: 2875702 - RNA, 22 nt, Human
gcuggucaaacaaacucucuga

SEQ ID NO: 2875703 - RNA, 18 nt, Human
gcugguauugguggcuuu

SEQ ID NO: 2875704 - RNA, 13 nt, Human
gcuggucacagcc

SEQ ID NO: 2875705 - RNA, 15 nt, Human
gcuggucacagccuc

SEQ ID NO: 2875706 - RNA, 17 nt, Human
gcuggucacagccuccu

SEQ ID NO: 2875707 - RNA, 18 nt, Human
gcuggucacagccuccuc

SEQ ID NO: 2875708 - RNA, 20 nt, Human
gcuggucacagccuccucug

SEQ ID NO: 2875709 - RNA, 22 nt, Human
gcuggucacagccuccucuguc

SEQ ID NO: 2875710 - RNA, 15 nt, Human
gcugggggccucagu

SEQ ID NO: 2875711 - RNA, 14 nt, Human
gcugggggccucag

SEQ ID NO: 2875712 - RNA, 20 nt, Human
gcuggggaaguccucugggu

SEQ ID NO: 2875713 - RNA, 16 nt, Human
gcuggggaccugguac

SEQ ID NO: 2875714 - RNA, 23 nt, Human
gcuggggaccugguacccuccug

SEQ ID NO: 2875715 - RNA, 15 nt, Human
gcuggggagaggaaa

SEQ ID NO: 2875716 - RNA, 13 nt, Human
gcuggggaggagc

SEQ ID NO: 2875717 - RNA, 20 nt, Human
gcugggcuucaguggcagcu

SEQ ID NO: 2875718 - RNA, 13 nt, Human
gcugggcucugca

SEQ ID NO: 2875719 - RNA, 22 nt, Human
gcugggcuucaguggcagcugc

SEQ ID NO: 2875720 - RNA, 21 nt, Human
gcugggcuucaguggcagcug

SEQ ID NO: 2875721 - RNA, 20 nt, Human
gcugggaggcauggcccugg

SEQ ID NO: 2875722 - RNA, 18 nt, Human
gcugggaguaguugucuu

SEQ ID NO: 2875723 - RNA, 14 nt, Human
gcugggaggcaugg

SEQ ID NO: 2875724 - RNA, 15 nt, Human
gcugggaggcauggc

SEQ ID NO: 2875725 - RNA, 14 nt, Human
gcuggugcccggag

SEQ ID NO: 2875726 - RNA, 15 nt, Human
gcuggugucaccuga

SEQ ID NO: 2875727 - RNA, 14 nt, Human
gcuggugucaccug

SEQ ID NO: 2875728 - RNA, 15 nt, Human
gcugucaccucuccc

SEQ ID NO: 2875729 - RNA, 21 nt, Human
gcugucaccucucccacggga

SEQ ID NO: 2875730 - RNA, 22 nt, Human
gcugucaccucucccacgggac

SEQ ID NO: 2875731 - RNA, 13 nt, Human
gcugucaucucag

SEQ ID NO: 2875732 - RNA, 16 nt, Human
gcuguccuaggccaca

SEQ ID NO: 2875733 - RNA, 14 nt, Human
gcuguccuaggcca

SEQ ID NO: 2875734 - RNA, 13 nt, Human
gcuguccuaggcc

SEQ ID NO: 2875735 - RNA, 23 nt, Human
gcuguccccuuggcagguccugg

SEQ ID NO: 2875736 - RNA, 22 nt, Human
gcugucccaucuccacuguuau

SEQ ID NO: 2875737 - RNA, 16 nt, Human
gcuguccaugcuucuc

SEQ ID NO: 2875738 - RNA, 11 nt, Human
gcugucaucug

SEQ ID NO: 2875739 - RNA, 16 nt, Human
gcuguccagagaaaag

SEQ ID NO: 2875740 - RNA, 18 nt, Human
gcuguguuaaauaaaccu

SEQ ID NO: 2875741 - RNA, 19 nt, Human
gcuguguuggguagaauag

SEQ ID NO: 2875742 - RNA, 15 nt, Human
gcugugugccugggg

SEQ ID NO: 2875743 - RNA, 22 nt, Human
gcuguguuguugcuucuuguga

SEQ ID NO: 2875744 - RNA, 16 nt, Human
gcuguguuuaauuuga

SEQ ID NO: 2875745 - RNA, 12 nt, Human
gcuguuaaacug

SEQ ID NO: 2875746 - RNA, 13 nt, Human
gcuguuaaacugu

SEQ ID NO: 2875747 - RNA, 14 nt, Human
gcuguuaaacuguu

SEQ ID NO: 2875748 - RNA, 15 nt, Human
gcuguuaaacuguua

SEQ ID NO: 2875749 - RNA, 22 nt, Human
gcuguuaaacuguuagcacugu

SEQ ID NO: 2875750 - RNA, 18 nt, Human
gcuguuaauagaucuuag

SEQ ID NO: 2875751 - RNA, 12 nt, Human
gcuuaccugaca

SEQ ID NO: 2875752 - RNA, 14 nt, Human
gcuuaccugacaca

SEQ ID NO: 2875753 - RNA, 16 nt, Human
gcuuaccugacacaag

SEQ ID NO: 2875754 - RNA, 13 nt, Human
gcuuaccugaccu

SEQ ID NO: 2875755 - RNA, 21 nt, Human
gcuuaccugaccucuugcugu

SEQ ID NO: 2875756 - RNA, 22 nt, Human
gcuuaccugaccucuugcuguc

SEQ ID NO: 2875757 - RNA, 23 nt, Human
gcuuaccugaccucuugcugucu

SEQ ID NO: 2875758 - RNA, 15 nt, Human
gcuuacauaguuuua

SEQ ID NO: 2875759 - RNA, 15 nt, Human
gcuguuaccauucac

SEQ ID NO: 2875760 - RNA, 18 nt, Human
gcuguuaccauucacaau

SEQ ID NO: 2875761 - RNA, 17 nt, Human
gcuguuaccgccugucu

SEQ ID NO: 2875762 - RNA, 21 nt, Human
gcuguuaccgccugucucuuu

SEQ ID NO: 2875763 - RNA, 18 nt, Human
gcuguuacuguuaaccau

SEQ ID NO: 2875764 - RNA, 22 nt, Human
gcuuacaagccagcuggagaaa

SEQ ID NO: 2875765 - RNA, 19 nt, Human
gcuguuaugucuguuuaag

SEQ ID NO: 2875766 - RNA, 20 nt, Human
gcuguuaugucuguuuaaga

SEQ ID NO: 2875767 - RNA, 13 nt, Human
gcugugugaccuu

SEQ ID NO: 2875768 - RNA, 20 nt, Human
gcugucccuuggaacucuug

SEQ ID NO: 2875769 - RNA, 14 nt, Human
gcuguggccugggc

SEQ ID NO: 2875770 - RNA, 15 nt, Human
gcuguggccugggca

SEQ ID NO: 2875771 - RNA, 20 nt, Human
gcugcccuccuuguccaccc

SEQ ID NO: 2875772 - RNA, 21 nt, Human
gcugcccuccuuguccaccca

SEQ ID NO: 2875773 - RNA, 22 nt, Human
gcugcccuccuuguccacccac

SEQ ID NO: 2875774 - RNA, 16 nt, Human
gcugcccuccuugucc

SEQ ID NO: 2875775 - RNA, 20 nt, Human
gcugcaggggcucuggagag

SEQ ID NO: 2875776 - RNA, 21 nt, Human
gcugccacaaccagccaggca

SEQ ID NO: 2875777 - RNA, 23 nt, Human
gcugccacaccagucacaugacc

SEQ ID NO: 2875778 - RNA, 17 nt, Human
gcugccaaggccagagu

SEQ ID NO: 2875779 - RNA, 16 nt, Human
gcugccaaggccagag

SEQ ID NO: 2875780 - RNA, 15 nt, Human
gcugccacacuucag

SEQ ID NO: 2875781 - RNA, 17 nt, Human
gcugccacacuucaggc

SEQ ID NO: 2875782 - RNA, 18 nt, Human
gcugccacacuucaggcu

SEQ ID NO: 2875783 - RNA, 21 nt, Human
gcugccacacuucaggcucuu

SEQ ID NO: 2875784 - RNA, 22 nt, Human
gcugccacacuucaggcucuuc

SEQ ID NO: 2875785 - RNA, 23 nt, Human
gcugccacacuucaggcucuucu

SEQ ID NO: 2875786 - RNA, 15 nt, Human
gcugccaaggccaga

SEQ ID NO: 2875787 - RNA, 21 nt, Human
gcugcaggggcucuggagaga

SEQ ID NO: 2875788 - RNA, 20 nt, Human
gcugcagugacgugcaccug

SEQ ID NO: 2875789 - RNA, 23 nt, Human
gcugcaguccguguggauccaau

SEQ ID NO: 2875790 - RNA, 22 nt, Human
gcugcaggggcucuggagagaa

SEQ ID NO: 2875791 - RNA, 16 nt, Human
gcugcaguaggggagg

SEQ ID NO: 2875792 - RNA, 20 nt, Human
gcugcaguaggggaggagca

SEQ ID NO: 2875793 - RNA, 22 nt, Human
gcugaucugcggaucucagcuu

SEQ ID NO: 2875794 - RNA, 13 nt, Human
gcugauucucagg

SEQ ID NO: 2875795 - RNA, 21 nt, Human
gcugaugaacuuauucuguag

SEQ ID NO: 2875796 - RNA, 17 nt, Human
gcugaugaaucacuguu

SEQ ID NO: 2875797 - RNA, 18 nt, Human
gcugaugaaucacuguuu

SEQ ID NO: 2875798 - RNA, 21 nt, Human
gcugaugaaucacuguuuuua

SEQ ID NO: 2875799 - RNA, 20 nt, Human
gcugauguuggaagagaaag

SEQ ID NO: 2875800 - RNA, 20 nt, Human
gcugauucucagggucucug

SEQ ID NO: 2875801 - RNA, 23 nt, Human
gcugcaaaggguaucaggugcug

SEQ ID NO: 2875802 - RNA, 22 nt, Human
gcugcaaaggguaucaggugcu

SEQ ID NO: 2875803 - RNA, 17 nt, Human
gcugauuuggugaccaa

SEQ ID NO: 2875804 - RNA, 15 nt, Human
gcugauuuccccucu

SEQ ID NO: 2875805 - RNA, 21 nt, Human
gcugauucucagggucucugc

SEQ ID NO: 2875806 - RNA, 14 nt, Human
gcugauuuuaaugg

SEQ ID NO: 2875807 - RNA, 19 nt, Human
gcugagacaggagaaacac

SEQ ID NO: 2875808 - RNA, 14 nt, Human
gcugagacugcggg

SEQ ID NO: 2875809 - RNA, 18 nt, Human
gcugacuuugcucuuucu

SEQ ID NO: 2875810 - RNA, 14 nt, Human
gcugagaacacugu

SEQ ID NO: 2875811 - RNA, 16 nt, Human
gcugagaauguggaau

SEQ ID NO: 2875812 - RNA, 14 nt, Human
gcugagacaggaga

SEQ ID NO: 2875813 - RNA, 14 nt, Human
gcugagaacuccug

SEQ ID NO: 2875814 - RNA, 15 nt, Human
gcugagaacuccuga

SEQ ID NO: 2875815 - RNA, 16 nt, Human
gcugagaacuccugac

SEQ ID NO: 2875816 - RNA, 17 nt, Human
gcugagaacuccugacu

SEQ ID NO: 2875817 - RNA, 18 nt, Human
gcugaucaucgccagagg

SEQ ID NO: 2875818 - RNA, 20 nt, Human
gcugaucaucgccagaggug

SEQ ID NO: 2875819 - RNA, 22 nt, Human
gcugaucaucgccagaggugcu

SEQ ID NO: 2875820 - RNA, 14 nt, Human
gcugagagacuuuu

SEQ ID NO: 2875821 - RNA, 18 nt, Human
gcugauacauaacuaaau

SEQ ID NO: 2875822 - RNA, 19 nt, Human
gcugauacauaacuaaauu

SEQ ID NO: 2875823 - RNA, 21 nt, Human
gcugauacauaacuaaauuug

SEQ ID NO: 2875824 - RNA, 23 nt, Human
gcugauacauaacuaaauuugau

SEQ ID NO: 2875825 - RNA, 14 nt, Human
gcugauacuucauu

SEQ ID NO: 2875826 - RNA, 13 nt, Human
gcugauauaaauu

SEQ ID NO: 2875827 - RNA, 15 nt, Human
gcugauauaaauucu

SEQ ID NO: 2875828 - RNA, 17 nt, Human
gcugauauaaauucugu

SEQ ID NO: 2875829 - RNA, 15 nt, Human
gcugacgugugaggg

SEQ ID NO: 2875830 - RNA, 14 nt, Human
gcugacuaaauuug

SEQ ID NO: 2875831 - RNA, 18 nt, Human
gcugacuguccucucccc

SEQ ID NO: 2875832 - RNA, 23 nt, Human
gcugacuguccucuccccuccag

SEQ ID NO: 2875833 - RNA, 13 nt, Human
gcugacuucacuu

SEQ ID NO: 2875834 - RNA, 20 nt, Human
gcugacuucacuuauuaguc

SEQ ID NO: 2875835 - RNA, 21 nt, Human
gcugacuucacuuauuagucu

SEQ ID NO: 2875836 - RNA, 15 nt, Human
gcugaccugccucuc

SEQ ID NO: 2875837 - RNA, 16 nt, Human
gcugaccugccucuca

SEQ ID NO: 2875838 - RNA, 22 nt, Human
gcugaccugccucucacacaca

SEQ ID NO: 2875839 - RNA, 23 nt, Human
gcugaccugccucucacacacau

SEQ ID NO: 2875840 - RNA, 19 nt, Human
gcugacagacacaggcccg

SEQ ID NO: 2875841 - RNA, 18 nt, Human
gcugacagacacaggccc

SEQ ID NO: 2875842 - RNA, 17 nt, Human
gcugacagacacaggcc

SEQ ID NO: 2875843 - RNA, 18 nt, Human
gcucuuugguagaaaagg

SEQ ID NO: 2875844 - RNA, 13 nt, Human
gcucuuugguaga

SEQ ID NO: 2875845 - RNA, 22 nt, Human
gcucuuugguagaaaaggcuag

SEQ ID NO: 2875846 - RNA, 19 nt, Human
gcugacauggcucuggacu

SEQ ID NO: 2875847 - RNA, 15 nt, Human
gcugaccaauugugc

SEQ ID NO: 2875848 - RNA, 16 nt, Human
gcugaccaauugugcu

SEQ ID NO: 2875849 - RNA, 19 nt, Human
gcugaccaauugugcugcc

SEQ ID NO: 2875850 - RNA, 20 nt, Human
gcugaccaauugugcugcca

SEQ ID NO: 2875851 - RNA, 21 nt, Human
gcugaccaauugugcugccau

SEQ ID NO: 2875852 - RNA, 14 nt, Human
gcucucaucugagg

SEQ ID NO: 2875853 - RNA, 15 nt, Human
gcucucaucugaggc

SEQ ID NO: 2875854 - RNA, 17 nt, Human
gcucucaucugaggcau

SEQ ID NO: 2875855 - RNA, 22 nt, Human
gcucucaucugaggcauccagc

SEQ ID NO: 2875856 - RNA, 16 nt, Human
gcucgcaccccccugu

SEQ ID NO: 2875857 - RNA, 20 nt, Human
gcucgcaccccccuguucua

SEQ ID NO: 2875858 - RNA, 21 nt, Human
gcucgcaccccccuguucuaa

SEQ ID NO: 2875859 - RNA, 16 nt, Human
gcucgcccuccuuucu

SEQ ID NO: 2875860 - RNA, 19 nt, Human
gcucgcccuccuuucugug

SEQ ID NO: 2875861 - RNA, 20 nt, Human
gcucgcccuccuuucugugc

SEQ ID NO: 2875862 - RNA, 18 nt, Human
gcucuccaagucucagug

SEQ ID NO: 2875863 - RNA, 22 nt, Human
gcucuccaagucucaguggcuu

SEQ ID NO: 2875864 - RNA, 21 nt, Human
gcucuugaacuccugaccuca

SEQ ID NO: 2875865 - RNA, 19 nt, Human
gcucuugaacuccugaccu

SEQ ID NO: 2875866 - RNA, 16 nt, Human
gcucuugaacuccuga

SEQ ID NO: 2875867 - RNA, 14 nt, Human
gcucuugaacuccu

SEQ ID NO: 2875868 - RNA, 14 nt, Human
gcucuuuggagauc

SEQ ID NO: 2875869 - RNA, 23 nt, Human
gcucuuugaaauagucuguguga

SEQ ID NO: 2875870 - RNA, 21 nt, Human
gcucuuugaaauagucugugu

SEQ ID NO: 2875871 - RNA, 18 nt, Human
gcucuuucugggccaagu

SEQ ID NO: 2875872 - RNA, 14 nt, Human
gcucuuucugggcc

SEQ ID NO: 2875873 - RNA, 13 nt, Human
gcucuuucugggc

SEQ ID NO: 2875874 - RNA, 21 nt, Human
gcucuuguagcccaggcugga

SEQ ID NO: 2875875 - RNA, 14 nt, Human
gcucuugucccacg

SEQ ID NO: 2875876 - RNA, 17 nt, Human
gcucuugauaccccccu

SEQ ID NO: 2875877 - RNA, 19 nt, Human
gcucuugauaccccccucu

SEQ ID NO: 2875878 - RNA, 19 nt, Human
gcucuuggcagguacucag

SEQ ID NO: 2875879 - RNA, 13 nt, Human
gcuccuuuccccu

SEQ ID NO: 2875880 - RNA, 18 nt, Human
gcucuugaccuuguagag

SEQ ID NO: 2875881 - RNA, 14 nt, Human
gcugcccugaagaa

SEQ ID NO: 2875882 - RNA, 12 nt, Human
gcugcccugaga

SEQ ID NO: 2875883 - RNA, 13 nt, Human
gcugcccugagaa

SEQ ID NO: 2875884 - RNA, 16 nt, Human
gcugcccugagaagcu

SEQ ID NO: 2875885 - RNA, 18 nt, Human
gcugcccugagaagcugc

SEQ ID NO: 2875886 - RNA, 21 nt, Human
gcugcccugagaagcugcucc

SEQ ID NO: 2875887 - RNA, 22 nt, Human
gcugcccugagaagcugcucca

SEQ ID NO: 2875888 - RNA, 22 nt, Human
gcugcccugagcgccuggauuu

SEQ ID NO: 2875889 - RNA, 15 nt, Human
gcugcccugccacuu

SEQ ID NO: 2875890 - RNA, 19 nt, Human
gcugccuguucagcuccag

SEQ ID NO: 2875891 - RNA, 18 nt, Human
gcugccuguucagcucca

SEQ ID NO: 2875892 - RNA, 12 nt, Human
gcugcccuggug

SEQ ID NO: 2875893 - RNA, 13 nt, Human
gcugcccuggugc

SEQ ID NO: 2875894 - RNA, 14 nt, Human
gcugcccuggugcu

SEQ ID NO: 2875895 - RNA, 15 nt, Human
gcugcccuggugcug

SEQ ID NO: 2875896 - RNA, 22 nt, Human
gcugccuguucagcuccagcuc

SEQ ID NO: 2875897 - RNA, 20 nt, Human
gcugccuguucagcuccagc

SEQ ID NO: 2875898 - RNA, 20 nt, Human
gcugccuuagaaccuuucuu

SEQ ID NO: 2875899 - RNA, 17 nt, Human
gcugcccuggugcugcc

SEQ ID NO: 2875900 - RNA, 15 nt, Human
gcugccuuagaaccu

SEQ ID NO: 2875901 - RNA, 15 nt, Human
gcugcgguccaccca

SEQ ID NO: 2875902 - RNA, 14 nt, Human
gcugcgguccaccc

SEQ ID NO: 2875903 - RNA, 21 nt, Human
gcugccuucccaugaaucugu

SEQ ID NO: 2875904 - RNA, 19 nt, Human
gcugccuucugacggcccu

SEQ ID NO: 2875905 - RNA, 20 nt, Human
gcugccuucugacggcccug

SEQ ID NO: 2875906 - RNA, 21 nt, Human
gcugccuucugacggcccugc

SEQ ID NO: 2875907 - RNA, 22 nt, Human
gcugccuucugacggcccugca

SEQ ID NO: 2875908 - RNA, 23 nt, Human
gcugccuucugacggcccugcaa

SEQ ID NO: 2875909 - RNA, 21 nt, Human
gcugcgguccacccaggagcc

SEQ ID NO: 2875910 - RNA, 22 nt, Human
gcugcgguccacccaggagccc

SEQ ID NO: 2875911 - RNA, 20 nt, Human
gcuggaaacagacucgauuc

SEQ ID NO: 2875912 - RNA, 16 nt, Human
gcuggaacagauucac

SEQ ID NO: 2875913 - RNA, 21 nt, Human
gcuggaacagauucacacugu

SEQ ID NO: 2875914 - RNA, 21 nt, Human
gcuggaaccugcaaaaaauac

SEQ ID NO: 2875915 - RNA, 13 nt, Human
gcuggaaggguca

SEQ ID NO: 2875916 - RNA, 23 nt, Human
gcuggaaugauuucagcucacug

SEQ ID NO: 2875917 - RNA, 22 nt, Human
gcugcuuuugucuaugggacuc

SEQ ID NO: 2875918 - RNA, 14 nt, Human
gcugcuuuuauauc

SEQ ID NO: 2875919 - RNA, 18 nt, Human
gcugcuuuuauaucugua

SEQ ID NO: 2875920 - RNA, 19 nt, Human
gcugcuuuuauaucuguau

SEQ ID NO: 2875921 - RNA, 22 nt, Human
gcugcuaccguugacuuccagg

SEQ ID NO: 2875922 - RNA, 10 nt, Human
gcugcuagaa

SEQ ID NO: 2875923 - RNA, 12 nt, Human
gcugcuagaacu

SEQ ID NO: 2875924 - RNA, 13 nt, Human
gcugcuagaacuu

SEQ ID NO: 2875925 - RNA, 14 nt, Human
gcugcuagaacuuu

SEQ ID NO: 2875926 - RNA, 15 nt, Human
gcugcuagaacuuuu

SEQ ID NO: 2875927 - RNA, 16 nt, Human
gcugcuagaacuuuuu

SEQ ID NO: 2875928 - RNA, 14 nt, Human
gcugcuacccagaa

SEQ ID NO: 2875929 - RNA, 12 nt, Human
gcugcuacccag

SEQ ID NO: 2875930 - RNA, 16 nt, Human
gcugcgugccccugcu

SEQ ID NO: 2875931 - RNA, 18 nt, Human
gcugcgugccccugcugc

SEQ ID NO: 2875932 - RNA, 15 nt, Human
gcuggaccuugaacu

SEQ ID NO: 2875933 - RNA, 16 nt, Human
gcuggacaugcugacu

SEQ ID NO: 2875934 - RNA, 20 nt, Human
gcuggaccaguggugccuug

SEQ ID NO: 2875935 - RNA, 13 nt, Human
gcuggacagaggg

SEQ ID NO: 2875936 - RNA, 14 nt, Human
gcuggacagagggg

SEQ ID NO: 2875937 - RNA, 21 nt, Human
gcuggacagaggggacucugg

SEQ ID NO: 2875938 - RNA, 22 nt, Human
gcuggacagaggggacucuggg

SEQ ID NO: 2875939 - RNA, 23 nt, Human
gcuggcagaaagggaacagaaag

SEQ ID NO: 2875940 - RNA, 16 nt, Human
gcuggcauuugcaccu

SEQ ID NO: 2875941 - RNA, 14 nt, Human
gcuggcagggcugg

SEQ ID NO: 2875942 - RNA, 13 nt, Human
gcuggccagccgc

SEQ ID NO: 2875943 - RNA, 14 nt, Human
gcuggccagccgcu

SEQ ID NO: 2875944 - RNA, 21 nt, Human
gcuggccagccgcucuccugc

SEQ ID NO: 2875945 - RNA, 12 nt, Human
gcuggccagccu

SEQ ID NO: 2875946 - RNA, 13 nt, Human
gcuggccagccug

SEQ ID NO: 2875947 - RNA, 14 nt, Human
gcuggccagccugg

SEQ ID NO: 2875948 - RNA, 15 nt, Human
gcuggccagccuggg

SEQ ID NO: 2875949 - RNA, 16 nt, Human
gcuggccagccugggg

SEQ ID NO: 2875950 - RNA, 21 nt, Human
gcuggccagccuggggccugg

SEQ ID NO: 2875951 - RNA, 22 nt, Human
gcuggccagccuggggccuggc

SEQ ID NO: 2875952 - RNA, 23 nt, Human
gcuggccagccuggggccuggca

SEQ ID NO: 2875953 - RNA, 14 nt, Human
gcuggcccagccaa

SEQ ID NO: 2875954 - RNA, 19 nt, Human
gcuggccgaggguccuggc

SEQ ID NO: 2875955 - RNA, 15 nt, Human
gcuggccgagggucc

SEQ ID NO: 2875956 - RNA, 19 nt, Human
gcuggcccuggcucccaca

SEQ ID NO: 2875957 - RNA, 24 nt, Human
gcuggccgaggguccuggcuccug

SEQ ID NO: 2875958 - RNA, 20 nt, Human
gcuggccgaggguccuggcu

SEQ ID NO: 2875959 - RNA, 16 nt, Human
gcuggcccugcccugg

SEQ ID NO: 2875960 - RNA, 15 nt, Human
gcuggcccugcccug

SEQ ID NO: 2875961 - RNA, 14 nt, Human
gcuggcccugcccu

SEQ ID NO: 2875962 - RNA, 13 nt, Human
gcuggcccugccc

SEQ ID NO: 2875963 - RNA, 23 nt, Human
gcuccagggaauccaagccucca

SEQ ID NO: 2875964 - RNA, 18 nt, Human
gcuccagggagauuuuga

SEQ ID NO: 2875965 - RNA, 21 nt, Human
gcuccagguggcucugaggug

SEQ ID NO: 2875966 - RNA, 16 nt, Human
gcuccagguggcucug

SEQ ID NO: 2875967 - RNA, 18 nt, Human
gcuccagguggcucugag

SEQ ID NO: 2875968 - RNA, 22 nt, Human
gcuccagggaauccaagccucc

SEQ ID NO: 2875969 - RNA, 21 nt, Human
gcuccagggaauccaagccuc

SEQ ID NO: 2875970 - RNA, 20 nt, Human
gcuccagggaauccaagccu

SEQ ID NO: 2875971 - RNA, 21 nt, Human
gcuccaggcaggcuaaggcgu

SEQ ID NO: 2875972 - RNA, 15 nt, Human
gcuccagguggcucu

SEQ ID NO: 2875973 - RNA, 21 nt, Human
gcuccagguaccuugaccuuu

SEQ ID NO: 2875974 - RNA, 11 nt, Human
gcucccaaggg

SEQ ID NO: 2875975 - RNA, 12 nt, Human
gcucccaaggga

SEQ ID NO: 2875976 - RNA, 23 nt, Human
gcucccaagggauggugcccugu

SEQ ID NO: 2875977 - RNA, 15 nt, Human
gcucccacaggcccu

SEQ ID NO: 2875978 - RNA, 23 nt, Human
gcuccgcuuucuacccagcgagc

SEQ ID NO: 2875979 - RNA, 22 nt, Human
gcuccgcuuucuacccagcgag

SEQ ID NO: 2875980 - RNA, 21 nt, Human
gcuccgcuuucuacccagcga

SEQ ID NO: 2875981 - RNA, 18 nt, Human
gcuccgcuuucuacccag

SEQ ID NO: 2875982 - RNA, 12 nt, Human
gcuccgcccuua

SEQ ID NO: 2875983 - RNA, 16 nt, Human
gcuccgcccuuagucc

SEQ ID NO: 2875984 - RNA, 20 nt, Human
gcuccgcccuuaguccccca

SEQ ID NO: 2875985 - RNA, 24 nt, Human
gcuccaggcuccuuuagcgcccag

SEQ ID NO: 2875986 - RNA, 12 nt, Human
gcuccaggcucc

SEQ ID NO: 2875987 - RNA, 13 nt, Human
gcuccaggcaggc

SEQ ID NO: 2875988 - RNA, 15 nt, Human
gcuccaggccugcag

SEQ ID NO: 2875989 - RNA, 16 nt, Human
gcuccaggccugcagc

SEQ ID NO: 2875990 - RNA, 19 nt, Human
gcuccaggccugcagcagg

SEQ ID NO: 2875991 - RNA, 22 nt, Human
gcuccaggccugcagcaggagu

SEQ ID NO: 2875992 - RNA, 15 nt, Human
gcucaauaggaccag

SEQ ID NO: 2875993 - RNA, 15 nt, Human
gcuccaggcacccag

SEQ ID NO: 2875994 - RNA, 15 nt, Human
gcucauuuuuucuua

SEQ ID NO: 2875995 - RNA, 12 nt, Human
gcucauuucaug

SEQ ID NO: 2875996 - RNA, 11 nt, Human
gcucauuuaag

SEQ ID NO: 2875997 - RNA, 12 nt, Human
gcucauuuaagu

SEQ ID NO: 2875998 - RNA, 15 nt, Human
gcucauucauuuuau

SEQ ID NO: 2875999 - RNA, 17 nt, Human
gcucauucauuuuauau

SEQ ID NO: 2876000 - RNA, 18 nt, Human
gcucauucauuuuauauu

SEQ ID NO: 2876001 - RNA, 22 nt, Human
gcucauucauuuuauauugaaa

SEQ ID NO: 2876002 - RNA, 23 nt, Human
gcucauucauuuuauauugaaaa

SEQ ID NO: 2876003 - RNA, 15 nt, Human
gcuccuguccuccca

SEQ ID NO: 2876004 - RNA, 22 nt, Human
gcuccuguccucccauccccug

SEQ ID NO: 2876005 - RNA, 11 nt, Human
gcuccucccac

SEQ ID NO: 2876006 - RNA, 12 nt, Human
gcuccucccagc

SEQ ID NO: 2876007 - RNA, 13 nt, Human
gcuccucccagcu

SEQ ID NO: 2876008 - RNA, 23 nt, Human
gcuccucccagcuuguaggagcu

SEQ ID NO: 2876009 - RNA, 13 nt, Human
gcuccuguccucc

SEQ ID NO: 2876010 - RNA, 23 nt, Human
gcuccuggggguucuuucuuccu

SEQ ID NO: 2876011 - RNA, 14 nt, Human
gcuccucccggugc

SEQ ID NO: 2876012 - RNA, 24 nt, Human
gcuccgcuuucuacccagcgagcc

SEQ ID NO: 2876013 - RNA, 15 nt, Human
gcuccgcugccgugc

SEQ ID NO: 2876014 - RNA, 12 nt, Human
gcuccgcugcuc

SEQ ID NO: 2876015 - RNA, 14 nt, Human
gcuccgcugcuccu

SEQ ID NO: 2876016 - RNA, 19 nt, Human
gcuccgcugcuccuuggcu

SEQ ID NO: 2876017 - RNA, 22 nt, Human
gcuccgcugcuccuuggcuuac

SEQ ID NO: 2876018 - RNA, 23 nt, Human
gcuccguccaggagccugugccu

SEQ ID NO: 2876019 - RNA, 22 nt, Human
gcuccguccaggagccugugcc

SEQ ID NO: 2876020 - RNA, 21 nt, Human
gcuccucauccagggcucuga

SEQ ID NO: 2876021 - RNA, 19 nt, Human
gcuccucaugguggguuca

SEQ ID NO: 2876022 - RNA, 18 nt, Human
gcuccucauccagggcuc

SEQ ID NO: 2876023 - RNA, 14 nt, Human
gcuccucacauagc

SEQ ID NO: 2876024 - RNA, 14 nt, Human
gcuccucacugccc

SEQ ID NO: 2876025 - RNA, 16 nt, Human
gcuccucacugcccgc

SEQ ID NO: 2876026 - RNA, 18 nt, Human
gcuccucacugcccgcac

SEQ ID NO: 2876027 - RNA, 23 nt, Human
gcuccucacugcccgcacacccu

SEQ ID NO: 2876028 - RNA, 15 nt, Human
gcuccucacuguggu

SEQ ID NO: 2876029 - RNA, 15 nt, Human
gcuccuaagcuucaa

SEQ ID NO: 2876030 - RNA, 23 nt, Human
gcuccuuuacaaaagaaauaccu

SEQ ID NO: 2876031 - RNA, 20 nt, Human
gcucgauccaaauugugcuu

SEQ ID NO: 2876032 - RNA, 21 nt, Human
gcucgauccaaauugugcuuc

SEQ ID NO: 2876033 - RNA, 17 nt, Human
gcuccuuuagcgcccag

SEQ ID NO: 2876034 - RNA, 13 nt, Human
gcuccuucugucc

SEQ ID NO: 2876035 - RNA, 13 nt, Human
gcuccugugucuu

SEQ ID NO: 2876036 - RNA, 12 nt, Human
gcuccugugucu

SEQ ID NO: 2876037 - RNA, 17 nt, Human
gcuccuguuagcuccuc

SEQ ID NO: 2876038 - RNA, 18 nt, Human
gcuccuguuagcuccuca

SEQ ID NO: 2876039 - RNA, 22 nt, Human
gcuccuuccucugaggcugaaa

SEQ ID NO: 2876040 - RNA, 20 nt, Human
gcuccuuccucugaggcuga

SEQ ID NO: 2876041 - RNA, 13 nt, Human
gcuccuucccauc

SEQ ID NO: 2876042 - RNA, 18 nt, Human
gcuccuucccaucgcugu

SEQ ID NO: 2876043 - RNA, 18 nt, Human
gcuccuuccucugaggcu

SEQ ID NO: 2876044 - RNA, 20 nt, Human
gcuauaacuauguugauaaa

SEQ ID NO: 2876045 - RNA, 16 nt, Human
gcuauaccugugccuc

SEQ ID NO: 2876046 - RNA, 15 nt, Human
gcuauaccugugccu

SEQ ID NO: 2876047 - RNA, 17 nt, Human
gcuauaccugugccucg

SEQ ID NO: 2876048 - RNA, 11 nt, Human
gcuauauauau

SEQ ID NO: 2876049 - RNA, 13 nt, Human
gcuauauauauaa

SEQ ID NO: 2876050 - RNA, 14 nt, Human
gcuauauauauaaa

SEQ ID NO: 2876051 - RNA, 15 nt, Human
gcuauauauauaaau

SEQ ID NO: 2876052 - RNA, 16 nt, Human
gcuauauauauaaaua

SEQ ID NO: 2876053 - RNA, 19 nt, Human
gcuauauauauaaauauuu

SEQ ID NO: 2876054 - RNA, 13 nt, Human
gcuauaguauuug

SEQ ID NO: 2876055 - RNA, 14 nt, Human
gcuauaguauuuga

SEQ ID NO: 2876056 - RNA, 16 nt, Human
gcuauaguauuugauu

SEQ ID NO: 2876057 - RNA, 20 nt, Human
gcuauaguauuugauucaaa

SEQ ID NO: 2876058 - RNA, 19 nt, Human
gcuauauugcccaggcugg

SEQ ID NO: 2876059 - RNA, 20 nt, Human
gcuauccugccaaaaucauu

SEQ ID NO: 2876060 - RNA, 20 nt, Human
gcuaucaaagaauaagaaaa

SEQ ID NO: 2876061 - RNA, 13 nt, Human
gcuaucaagaggc

SEQ ID NO: 2876062 - RNA, 19 nt, Human
gcuaucaagaggcugagac

SEQ ID NO: 2876063 - RNA, 20 nt, Human
gcuaucaagaggcugagaca

SEQ ID NO: 2876064 - RNA, 18 nt, Human
gcuagaguccucacuccc

SEQ ID NO: 2876065 - RNA, 20 nt, Human
gcuagaguccucacucccag

SEQ ID NO: 2876066 - RNA, 13 nt, Human
gcuagauaaaagc

SEQ ID NO: 2876067 - RNA, 19 nt, Human
gcuagaucauuuguucugg

SEQ ID NO: 2876068 - RNA, 21 nt, Human
gcuaguugggcuuccucauag

SEQ ID NO: 2876069 - RNA, 17 nt, Human
gcggguuccgcaggcag

SEQ ID NO: 2876070 - RNA, 22 nt, Human
gcucaaguccucuuuucugaga

SEQ ID NO: 2876071 - RNA, 19 nt, Human
gcucaaguccucuuuucug

SEQ ID NO: 2876072 - RNA, 15 nt, Human
gcucaagggacaagg

SEQ ID NO: 2876073 - RNA, 19 nt, Human
gcucaagggacaaggacac

SEQ ID NO: 2876074 - RNA, 20 nt, Human
gcucaaggaaaggccugaaa

SEQ ID NO: 2876075 - RNA, 19 nt, Human
gcucaaggaaaggccugaa

SEQ ID NO: 2876076 - RNA, 21 nt, Human
gcucaaguguucacaaccugg

SEQ ID NO: 2876077 - RNA, 12 nt, Human
gcucaaguucau

SEQ ID NO: 2876078 - RNA, 14 nt, Human
gcucaauaaagauu

SEQ ID NO: 2876079 - RNA, 16 nt, Human
gcucaaucaagaaaau

SEQ ID NO: 2876080 - RNA, 15 nt, Human
gcucacaccaaauuu

SEQ ID NO: 2876081 - RNA, 14 nt, Human
gcucacaccuguaa

SEQ ID NO: 2876082 - RNA, 16 nt, Human
gcucaauccucuaagc

SEQ ID NO: 2876083 - RNA, 14 nt, Human
gcucaauccucuaa

SEQ ID NO: 2876084 - RNA, 14 nt, Human
gcucacaaaccaug

SEQ ID NO: 2876085 - RNA, 17 nt, Human
gcucaauggacuggaag

SEQ ID NO: 2876086 - RNA, 18 nt, Human
gcucaaguccucuuuucu

SEQ ID NO: 2876087 - RNA, 18 nt, Human
gcucaagcgauucuccug

SEQ ID NO: 2876088 - RNA, 17 nt, Human
gcucaaggaaaggccug

SEQ ID NO: 2876089 - RNA, 19 nt, Human
gcucaagcaggaaguucaa

SEQ ID NO: 2876090 - RNA, 14 nt, Human
gcuaucuaaaguuu

SEQ ID NO: 2876091 - RNA, 15 nt, Human
gcuauccuggcucuu

SEQ ID NO: 2876092 - RNA, 19 nt, Human
gcuaucggggaagccagac

SEQ ID NO: 2876093 - RNA, 15 nt, Human
gcucaccagccccag

SEQ ID NO: 2876094 - RNA, 14 nt, Human
gcucaccagcccca

SEQ ID NO: 2876095 - RNA, 13 nt, Human
gcucaccagcccc

SEQ ID NO: 2876096 - RNA, 12 nt, Human
gcucaccagccc

SEQ ID NO: 2876097 - RNA, 16 nt, Human
gcucacauaucuguca

SEQ ID NO: 2876098 - RNA, 13 nt, Human
gcucacagcugug

SEQ ID NO: 2876099 - RNA, 15 nt, Human
gcucacaguacagca

SEQ ID NO: 2876100 - RNA, 20 nt, Human
gcucacaguacagcaugugc

SEQ ID NO: 2876101 - RNA, 22 nt, Human
gcucacaguacagcaugugccu

SEQ ID NO: 2876102 - RNA, 22 nt, Human
gcucacagaacccuuggagcca

SEQ ID NO: 2876103 - RNA, 13 nt, Human
gcucacaccugua

SEQ ID NO: 2876104 - RNA, 15 nt, Human
gcucagcccucccug

SEQ ID NO: 2876105 - RNA, 16 nt, Human
gcucagcccucccugc

SEQ ID NO: 2876106 - RNA, 12 nt, Human
gcucagcccucc

SEQ ID NO: 2876107 - RNA, 18 nt, Human
gcucagccccgagcuguc

SEQ ID NO: 2876108 - RNA, 19 nt, Human
gcucagccccgagcugucc

SEQ ID NO: 2876109 - RNA, 20 nt, Human
gcucagccccgagcuguccc

SEQ ID NO: 2876110 - RNA, 23 nt, Human
gcucagcggggacagcuccuucu

SEQ ID NO: 2876111 - RNA, 19 nt, Human
gcucagcggggacagcucc

SEQ ID NO: 2876112 - RNA, 18 nt, Human
gcucagcggggacagcuc

SEQ ID NO: 2876113 - RNA, 17 nt, Human
gcucagcggggacagcu

SEQ ID NO: 2876114 - RNA, 16 nt, Human
gcucagcggggacagc

SEQ ID NO: 2876115 - RNA, 17 nt, Human
gcucagcccucccugcc

SEQ ID NO: 2876116 - RNA, 18 nt, Human
gcucagcccucccugccc

SEQ ID NO: 2876117 - RNA, 19 nt, Human
gcucagcccucccugcccc

SEQ ID NO: 2876118 - RNA, 21 nt, Human
gcucagcccucccugccccuc

SEQ ID NO: 2876119 - RNA, 16 nt, Human
gcucaucucuguccca

SEQ ID NO: 2876120 - RNA, 13 nt, Human
gcucaucuguugu

SEQ ID NO: 2876121 - RNA, 22 nt, Human
gcucaucucugucccacuuggc

SEQ ID NO: 2876122 - RNA, 19 nt, Human
gcucagcucggggagccuu

SEQ ID NO: 2876123 - RNA, 20 nt, Human
gcucagcuacugauuuuugu

SEQ ID NO: 2876124 - RNA, 21 nt, Human
gcucagcuuuuugucuuuucu

SEQ ID NO: 2876125 - RNA, 14 nt, Human
gcucauauuuugua

SEQ ID NO: 2876126 - RNA, 18 nt, Human
gcucauauuuuguauaua

SEQ ID NO: 2876127 - RNA, 18 nt, Human
gccugaagucacacagug

SEQ ID NO: 2876128 - RNA, 17 nt, Human
gccugaagucacacagu

SEQ ID NO: 2876129 - RNA, 16 nt, Human
gccugaagucacacag

SEQ ID NO: 2876130 - RNA, 15 nt, Human
gccugaagucacaca

SEQ ID NO: 2876131 - RNA, 21 nt, Human
gcccaguuggguggaugccug

SEQ ID NO: 2876132 - RNA, 19 nt, Human
gcccaguuggguggaugcc

SEQ ID NO: 2876133 - RNA, 17 nt, Human
gccugagccuggccagc

SEQ ID NO: 2876134 - RNA, 16 nt, Human
gccugagccuggccag

SEQ ID NO: 2876135 - RNA, 14 nt, Human
gccugagccuggcc

SEQ ID NO: 2876136 - RNA, 23 nt, Human
gccugagcucacucggcacccug

SEQ ID NO: 2876137 - RNA, 14 nt, Human
gccugagcucacuc

SEQ ID NO: 2876138 - RNA, 17 nt, Human
gccugagcucacucggc

SEQ ID NO: 2876139 - RNA, 14 nt, Human
gccugaggcugaga

SEQ ID NO: 2876140 - RNA, 13 nt, Human
gccugaggcugag

SEQ ID NO: 2876141 - RNA, 13 nt, Human
gccugaggcuggg

SEQ ID NO: 2876142 - RNA, 18 nt, Human
gccugaggcugagacugc

SEQ ID NO: 2876143 - RNA, 17 nt, Human
gccugaggcugagacug

SEQ ID NO: 2876144 - RNA, 15 nt, Human
gccugaggcugagac

SEQ ID NO: 2876145 - RNA, 14 nt, Human
gccugaggcuggga

SEQ ID NO: 2876146 - RNA, 22 nt, Human
gccugcaggaccugccuguagc

SEQ ID NO: 2876147 - RNA, 16 nt, Human
gccuggauuucugguu

SEQ ID NO: 2876148 - RNA, 22 nt, Human
gccuggauuucugguucugaug

SEQ ID NO: 2876149 - RNA, 23 nt, Human
gccuggauuucugguucugaugc

SEQ ID NO: 2876150 - RNA, 13 nt, Human
gccuggcacaggg

SEQ ID NO: 2876151 - RNA, 14 nt, Human
gccuggcacagggc

SEQ ID NO: 2876152 - RNA, 13 nt, Human
gccuggcacacau

SEQ ID NO: 2876153 - RNA, 16 nt, Human
gccuggcacacaucag

SEQ ID NO: 2876154 - RNA, 13 nt, Human
gccuggcacagga

SEQ ID NO: 2876155 - RNA, 15 nt, Human
gccuggcacaggacu

SEQ ID NO: 2876156 - RNA, 16 nt, Human
gccuggcacaggacug

SEQ ID NO: 2876157 - RNA, 17 nt, Human
gccuggcacaggacuga

SEQ ID NO: 2876158 - RNA, 21 nt, Human
gccuggacaguaucccacauc

SEQ ID NO: 2876159 - RNA, 22 nt, Human
gccuggacaguaucccacaucc

SEQ ID NO: 2876160 - RNA, 20 nt, Human
gccuggacauuugccuugcu

SEQ ID NO: 2876161 - RNA, 11 nt, Human
gccugcugcau

SEQ ID NO: 2876162 - RNA, 10 nt, Human
gccugcugca

SEQ ID NO: 2876163 - RNA, 18 nt, Human
gccugcugcauggggugg

SEQ ID NO: 2876164 - RNA, 13 nt, Human
gccugcugcccag

SEQ ID NO: 2876165 - RNA, 18 nt, Human
gccugcugcccaggcugu

SEQ ID NO: 2876166 - RNA, 14 nt, Human
gccuggaagacaga

SEQ ID NO: 2876167 - RNA, 15 nt, Human
gccuggaagacagag

SEQ ID NO: 2876168 - RNA, 22 nt, Human
gccuggaagacagagaccuccu

SEQ ID NO: 2876169 - RNA, 23 nt, Human
gccuggaagacagagaccuccug

SEQ ID NO: 2876170 - RNA, 16 nt, Human
gccuggaagcuuuguc

SEQ ID NO: 2876171 - RNA, 22 nt, Human
gccuggaagcuuuguccccugc

SEQ ID NO: 2876172 - RNA, 13 nt, Human
gccuggaagacag

SEQ ID NO: 2876173 - RNA, 16 nt, Human
gccugcauguaaacac

SEQ ID NO: 2876174 - RNA, 23 nt, Human
gccugcaucccaggaugcugggu

SEQ ID NO: 2876175 - RNA, 17 nt, Human
gccugcaguccuggaag

SEQ ID NO: 2876176 - RNA, 24 nt, Human
gccugcaguuaauuagcauucugg

SEQ ID NO: 2876177 - RNA, 13 nt, Human
gccugguccaugc

SEQ ID NO: 2876178 - RNA, 20 nt, Human
gccugguccaugcagggggc

SEQ ID NO: 2876179 - RNA, 17 nt, Human
gccuggucacagggcau

SEQ ID NO: 2876180 - RNA, 18 nt, Human
gccuggucaggcccuggu

SEQ ID NO: 2876181 - RNA, 20 nt, Human
gccuguaauucaguguauuu

SEQ ID NO: 2876182 - RNA, 11 nt, Human
gccuguacagu

SEQ ID NO: 2876183 - RNA, 12 nt, Human
gccuguacaguc

SEQ ID NO: 2876184 - RNA, 13 nt, Human
gccuguacagucu

SEQ ID NO: 2876185 - RNA, 15 nt, Human
gccuguacagucugu

SEQ ID NO: 2876186 - RNA, 17 nt, Human
gccuguacagucugucu

SEQ ID NO: 2876187 - RNA, 20 nt, Human
gccuguacagucugucuucu

SEQ ID NO: 2876188 - RNA, 21 nt, Human
gccuguacagucugucuucug

SEQ ID NO: 2876189 - RNA, 22 nt, Human
gccuguacagucugucuucugu

SEQ ID NO: 2876190 - RNA, 18 nt, Human
gccugucucauccccagg

SEQ ID NO: 2876191 - RNA, 17 nt, Human
gccugucucauccccag

SEQ ID NO: 2876192 - RNA, 22 nt, Human
gccugucucauccccagggguc

SEQ ID NO: 2876193 - RNA, 19 nt, Human
gccugucucauccccaggg

SEQ ID NO: 2876194 - RNA, 19 nt, Human
gccugucucuuuaagggca

SEQ ID NO: 2876195 - RNA, 15 nt, Human
gccugucugagacuc

SEQ ID NO: 2876196 - RNA, 23 nt, Human
gccugucugagacucacaggaag

SEQ ID NO: 2876197 - RNA, 21 nt, Human
gccugggccuccucacaacau

SEQ ID NO: 2876198 - RNA, 20 nt, Human
gccugggcgacagagcgaga

SEQ ID NO: 2876199 - RNA, 21 nt, Human
gccugggcugaccccgguggc

SEQ ID NO: 2876200 - RNA, 12 nt, Human
gccugggcuagg

SEQ ID NO: 2876201 - RNA, 20 nt, Human
gccuggguuuaaggggagag

SEQ ID NO: 2876202 - RNA, 13 nt, Human
gccuggggccuga

SEQ ID NO: 2876203 - RNA, 14 nt, Human
gccuggggccugag

SEQ ID NO: 2876204 - RNA, 15 nt, Human
gccuggggccugaga

SEQ ID NO: 2876205 - RNA, 16 nt, Human
gccuggggccugagag

SEQ ID NO: 2876206 - RNA, 17 nt, Human
gccuggggccugagaga

SEQ ID NO: 2876207 - RNA, 18 nt, Human
gccuggggccugagagaa

SEQ ID NO: 2876208 - RNA, 13 nt, Human
gccuggggccugg

SEQ ID NO: 2876209 - RNA, 14 nt, Human
gccuggggccuggc

SEQ ID NO: 2876210 - RNA, 15 nt, Human
gccuggggccuggca

SEQ ID NO: 2876211 - RNA, 17 nt, Human
gccuggggccuggcagg

SEQ ID NO: 2876212 - RNA, 17 nt, Human
gccugguauggcugcag

SEQ ID NO: 2876213 - RNA, 23 nt, Human
gccugguaggaaagggcaagucu

SEQ ID NO: 2876214 - RNA, 22 nt, Human
gccuggccagaugcaccagccc

SEQ ID NO: 2876215 - RNA, 21 nt, Human
gccuggccagaugcaccagcc

SEQ ID NO: 2876216 - RNA, 16 nt, Human
gccuggccagaugcac

SEQ ID NO: 2876217 - RNA, 22 nt, Human
gccuggcagccgugccuucagc

SEQ ID NO: 2876218 - RNA, 20 nt, Human
gccuggccagaugcaccagc

SEQ ID NO: 2876219 - RNA, 18 nt, Human
gccuggcacagggcagug

SEQ ID NO: 2876220 - RNA, 19 nt, Human
gccuggcacagggcagugg

SEQ ID NO: 2876221 - RNA, 14 nt, Human
gccuggcacacauc

SEQ ID NO: 2876222 - RNA, 12 nt, Human
gccuggcagccg

SEQ ID NO: 2876223 - RNA, 20 nt, Human
gccuggcagccgugccuuca

SEQ ID NO: 2876224 - RNA, 21 nt, Human
gccuggcagccgugccuucag

SEQ ID NO: 2876225 - RNA, 14 nt, Human
gccuggcccauaga

SEQ ID NO: 2876226 - RNA, 19 nt, Human
gccuggcccauagaaacau

SEQ ID NO: 2876227 - RNA, 20 nt, Human
gccugggccccagcucgcgg

SEQ ID NO: 2876228 - RNA, 15 nt, Human
gccugggccccagcu

SEQ ID NO: 2876229 - RNA, 13 nt, Human
gccugggccagag

SEQ ID NO: 2876230 - RNA, 23 nt, Human
gccugggcagccaggcugccaag

SEQ ID NO: 2876231 - RNA, 20 nt, Human
gccugggcagccaggcugcc

SEQ ID NO: 2876232 - RNA, 18 nt, Human
gccugggcagccaggcug

SEQ ID NO: 2876233 - RNA, 17 nt, Human
gccugggcagccaggcu

SEQ ID NO: 2876234 - RNA, 19 nt, Human
gccugggcagcauagcaag

SEQ ID NO: 2876235 - RNA, 13 nt, Human
gccugggcagcau

SEQ ID NO: 2876236 - RNA, 13 nt, Human
gccuuccucucuc

SEQ ID NO: 2876237 - RNA, 16 nt, Human
gccuuccucucuccag

SEQ ID NO: 2876238 - RNA, 17 nt, Human
gccuuccucucuccaga

SEQ ID NO: 2876239 - RNA, 18 nt, Human
gccuuccucucuccagau

SEQ ID NO: 2876240 - RNA, 18 nt, Human
gccuugguucccuugugu

SEQ ID NO: 2876241 - RNA, 14 nt, Human
gccuugucuccuac

SEQ ID NO: 2876242 - RNA, 19 nt, Human
gccuugucuccuacuccug

SEQ ID NO: 2876243 - RNA, 20 nt, Human
gccuugucuccuacuccuga

SEQ ID NO: 2876244 - RNA, 23 nt, Human
gccuugucuccuacuccugacuc

SEQ ID NO: 2876245 - RNA, 13 nt, Human
gccuuguguauau

SEQ ID NO: 2876246 - RNA, 17 nt, Human
gccuugugcuguuaaua

SEQ ID NO: 2876247 - RNA, 20 nt, Human
gccuuccgccccuucccuuc

SEQ ID NO: 2876248 - RNA, 15 nt, Human
gccuuaauacuuuuu

SEQ ID NO: 2876249 - RNA, 23 nt, Human
gccuuaauacuuuuuuauuuugu

SEQ ID NO: 2876250 - RNA, 15 nt, Human
gccuuccuaagccug

SEQ ID NO: 2876251 - RNA, 17 nt, Human
gccuuccuaagccugug

SEQ ID NO: 2876252 - RNA, 18 nt, Human
gccuuccuaagccugugg

SEQ ID NO: 2876253 - RNA, 19 nt, Human
gccuuccuaagccuguggc

SEQ ID NO: 2876254 - RNA, 20 nt, Human
gccuuccuaagccuguggcu

SEQ ID NO: 2876255 - RNA, 21 nt, Human
gccuuccuaagccuguggcug

SEQ ID NO: 2876256 - RNA, 22 nt, Human
gccuuccuaagccuguggcugu

SEQ ID NO: 2876257 - RNA, 14 nt, Human
gccuuaagcugauc

SEQ ID NO: 2876258 - RNA, 16 nt, Human
gccuuaagcugauccu

SEQ ID NO: 2876259 - RNA, 18 nt, Human
gccuuaagcugauccugc

SEQ ID NO: 2876260 - RNA, 16 nt, Human
gccuuaaagaaagucg

SEQ ID NO: 2876261 - RNA, 13 nt, Human
gccuuaaaaugga

SEQ ID NO: 2876262 - RNA, 14 nt, Human
gccuuaaaauggaa

SEQ ID NO: 2876263 - RNA, 19 nt, Human
gccuuaaaauggaauugaa

SEQ ID NO: 2876264 - RNA, 22 nt, Human
gccuuaaaauggaauugaaaaa

SEQ ID NO: 2876265 - RNA, 15 nt, Human
gccugucugugaccu

SEQ ID NO: 2876266 - RNA, 16 nt, Human
gccugucugugaccug

SEQ ID NO: 2876267 - RNA, 22 nt, Human
gcgcaggcuggcccugcccugg

SEQ ID NO: 2876268 - RNA, 21 nt, Human
gcgcaggcuggcccugcccug

SEQ ID NO: 2876269 - RNA, 20 nt, Human
gcgcaggcuggcccugcccu

SEQ ID NO: 2876270 - RNA, 17 nt, Human
gcgcaggcuggcccugc

SEQ ID NO: 2876271 - RNA, 19 nt, Human
gcgcaggcuggcccugccc

SEQ ID NO: 2876272 - RNA, 18 nt, Human
gcgcaggcuggcccugcc

SEQ ID NO: 2876273 - RNA, 13 nt, Human
gccuuuccucucu

SEQ ID NO: 2876274 - RNA, 18 nt, Human
gccuuuccucucuccugu

SEQ ID NO: 2876275 - RNA, 21 nt, Human
gccuuucccaccgcccucccu

SEQ ID NO: 2876276 - RNA, 14 nt, Human
gccuuucugcaguu

SEQ ID NO: 2876277 - RNA, 19 nt, Human
gccuuucugcaguuuuuca

SEQ ID NO: 2876278 - RNA, 16 nt, Human
gcgaaggggcccuggu

SEQ ID NO: 2876279 - RNA, 16 nt, Human
gcgaaguagcuugcuc

SEQ ID NO: 2876280 - RNA, 20 nt, Human
gcgaaguagcuugcucccug

SEQ ID NO: 2876281 - RNA, 20 nt, Human
gcgaaguauauaaauuggcu

SEQ ID NO: 2876282 - RNA, 14 nt, Human
gcgaaguccuaugg

SEQ ID NO: 2876283 - RNA, 17 nt, Human
gcgaaguccuauggaaa

SEQ ID NO: 2876284 - RNA, 15 nt, Human
gcgaaggggcccugg

SEQ ID NO: 2876285 - RNA, 14 nt, Human
gcgaaggggcccug

SEQ ID NO: 2876286 - RNA, 13 nt, Human
gcgaauccaagcu

SEQ ID NO: 2876287 - RNA, 15 nt, Human
gcgaauccaagcucc

SEQ ID NO: 2876288 - RNA, 18 nt, Human
gcgaauccaagcucccug

SEQ ID NO: 2876289 - RNA, 21 nt, Human
gcgaauccaagcucccugccc

SEQ ID NO: 2876290 - RNA, 22 nt, Human
gcgaauccaagcucccugcccc

SEQ ID NO: 2876291 - RNA, 22 nt, Human
gcgaauggacuuuggaagcagg

SEQ ID NO: 2876292 - RNA, 23 nt, Human
gcgcccaguuggguggaugccug

SEQ ID NO: 2876293 - RNA, 22 nt, Human
gcgcccaguccuuccaccucga

SEQ ID NO: 2876294 - RNA, 19 nt, Human
gcgcccaguccuuccaccu

SEQ ID NO: 2876295 - RNA, 14 nt, Human
gcgccccccuccca

SEQ ID NO: 2876296 - RNA, 15 nt, Human
gcgccccccucccag

SEQ ID NO: 2876297 - RNA, 16 nt, Human
gcgccccccucccaga

SEQ ID NO: 2876298 - RNA, 17 nt, Human
gcgccccccucccagag

SEQ ID NO: 2876299 - RNA, 18 nt, Human
gcgccccccucccagagg

SEQ ID NO: 2876300 - RNA, 16 nt, Human
gcgcccgccccugcag

SEQ ID NO: 2876301 - RNA, 17 nt, Human
gcgcccgccccugcagc

SEQ ID NO: 2876302 - RNA, 22 nt, Human
gcgcccgccccugcagcacgga

SEQ ID NO: 2876303 - RNA, 13 nt, Human
gcgccccuucccc

SEQ ID NO: 2876304 - RNA, 20 nt, Human
gcgcauccaaucucaaggaa

SEQ ID NO: 2876305 - RNA, 21 nt, Human
gcgcauccaaucucaaggaau

SEQ ID NO: 2876306 - RNA, 15 nt, Human
gcgccaccagcucug

SEQ ID NO: 2876307 - RNA, 22 nt, Human
gcgccacuacacuccagccuga

SEQ ID NO: 2876308 - RNA, 21 nt, Human
gcgccacuacacuccagccug

SEQ ID NO: 2876309 - RNA, 18 nt, Human
gcgccacucgcuuccccc

SEQ ID NO: 2876310 - RNA, 16 nt, Human
gcgccacucgcuuccc

SEQ ID NO: 2876311 - RNA, 24 nt, Human
gcgccacuacacuccagccugagc

SEQ ID NO: 2876312 - RNA, 16 nt, Human
gcgccuggccuccagg

SEQ ID NO: 2876313 - RNA, 17 nt, Human
gcgccuggccuccaggc

SEQ ID NO: 2876314 - RNA, 22 nt, Human
gcgccuggccuccaggcccguc

SEQ ID NO: 2876315 - RNA, 12 nt, Human
gcgccugugacc

SEQ ID NO: 2876316 - RNA, 16 nt, Human
gcgccugugaugcugg

SEQ ID NO: 2876317 - RNA, 15 nt, Human
gcgccugugcacaca

SEQ ID NO: 2876318 - RNA, 16 nt, Human
gcgccugugcacacac

SEQ ID NO: 2876319 - RNA, 17 nt, Human
gcgccugugcacacaca

SEQ ID NO: 2876320 - RNA, 22 nt, Human
gcgccuccuuccuugcuguccu

SEQ ID NO: 2876321 - RNA, 15 nt, Human
gcgccuccuuccuug

SEQ ID NO: 2876322 - RNA, 17 nt, Human
gcgccgcaaaccacacu

SEQ ID NO: 2876323 - RNA, 18 nt, Human
gcgcccuuuccccgacgc

SEQ ID NO: 2876324 - RNA, 12 nt, Human
gcgcccuuuccc

SEQ ID NO: 2876325 - RNA, 23 nt, Human
gcgcccuuuccccgacgcccacc

SEQ ID NO: 2876326 - RNA, 20 nt, Human
gcgcccuuggcuucugugau

SEQ ID NO: 2876327 - RNA, 16 nt, Human
gcgcccuuggcuucug

SEQ ID NO: 2876328 - RNA, 14 nt, Human
gcggggacagcucc

SEQ ID NO: 2876329 - RNA, 19 nt, Human
gcggagacggagucccacc

SEQ ID NO: 2876330 - RNA, 21 nt, Human
gcggaccccagcugugagccu

SEQ ID NO: 2876331 - RNA, 14 nt, Human
gcggaccccagcug

SEQ ID NO: 2876332 - RNA, 20 nt, Human
gcggaccccagcugugagcc

SEQ ID NO: 2876333 - RNA, 13 nt, Human
gcggaccccagcu

SEQ ID NO: 2876334 - RNA, 16 nt, Human
gcggacaucagcuggu

SEQ ID NO: 2876335 - RNA, 21 nt, Human
gcgccuugucuccuacuccug

SEQ ID NO: 2876336 - RNA, 22 nt, Human
gcgccuugucuccuacuccuga

SEQ ID NO: 2876337 - RNA, 14 nt, Human
gcgguccacccagg

SEQ ID NO: 2876338 - RNA, 13 nt, Human
gcgguccacccag

SEQ ID NO: 2876339 - RNA, 19 nt, Human
gcggugagaggggaacaga

SEQ ID NO: 2876340 - RNA, 17 nt, Human
gcggggacagcuccuuc

SEQ ID NO: 2876341 - RNA, 15 nt, Human
gcggggacagcuccu

SEQ ID NO: 2876342 - RNA, 19 nt, Human
gcggguggaucaccugagg

SEQ ID NO: 2876343 - RNA, 17 nt, Human
gcggacuccuccuuucu

SEQ ID NO: 2876344 - RNA, 19 nt, Human
gcggacuccuccuuucucc

SEQ ID NO: 2876345 - RNA, 23 nt, Human
ggcucacgccuaugaucccagca

SEQ ID NO: 2876346 - RNA, 21 nt, Human
ggcucacgccuaugaucccag

SEQ ID NO: 2876347 - RNA, 20 nt, Human
ggcucacgccuaugauccca

SEQ ID NO: 2876348 - RNA, 21 nt, Human
ggcuaucaaagaauaagaaaa

SEQ ID NO: 2876349 - RNA, 23 nt, Human
ggcucacaguacagcaugugccu

SEQ ID NO: 2876350 - RNA, 13 nt, Human
ggcuccaggcucc

SEQ ID NO: 2876351 - RNA, 12 nt, Human
ggcuccaggcuc

SEQ ID NO: 2876352 - RNA, 20 nt, Human
ggcuauagcuacaggaagca

SEQ ID NO: 2876353 - RNA, 22 nt, Human
ggcgggugccuguaaucccagc

SEQ ID NO: 2876354 - RNA, 13 nt, Human
ggcuagguacaca

SEQ ID NO: 2876355 - RNA, 15 nt, Human
ggcuagguagaaaaa

SEQ ID NO: 2876356 - RNA, 20 nt, Human
ggcuagguagaaaaaggguc

SEQ ID NO: 2876357 - RNA, 21 nt, Human
ggcuagguagaaaaaggguca

SEQ ID NO: 2876358 - RNA, 22 nt, Human
ggcgggcaccuauagucccagc

SEQ ID NO: 2876359 - RNA, 16 nt, Human
ggcgcuauuacaaaua

SEQ ID NO: 2876360 - RNA, 16 nt, Human
ggcgggagcaucucuu

SEQ ID NO: 2876361 - RNA, 18 nt, Human
ggcgcccuuggcuucugu

SEQ ID NO: 2876362 - RNA, 13 nt, Human
ggcgcccaccucc

SEQ ID NO: 2876363 - RNA, 14 nt, Human
ggcgcccaccuccc

SEQ ID NO: 2876364 - RNA, 15 nt, Human
ggcgcccaccucccc

SEQ ID NO: 2876365 - RNA, 24 nt, Human
ggcgcccaccuccccacgcccucc

SEQ ID NO: 2876366 - RNA, 13 nt, Human
ggcgccccugcca

SEQ ID NO: 2876367 - RNA, 15 nt, Human
ggcgccccugccacc

SEQ ID NO: 2876368 - RNA, 20 nt, Human
ggcgccccgcaccuguacag

SEQ ID NO: 2876369 - RNA, 21 nt, Human
ggcgccccgcaccuguacagu

SEQ ID NO: 2876370 - RNA, 22 nt, Human
ggcgccccugccaccucccuga

SEQ ID NO: 2876371 - RNA, 22 nt, Human
ggcuccccauguguccugguuc

SEQ ID NO: 2876372 - RNA, 17 nt, Human
ggcuccccauguguccu

SEQ ID NO: 2876373 - RNA, 21 nt, Human
ggcuccccauguguccugguu

SEQ ID NO: 2876374 - RNA, 14 nt, Human
ggcuccaggcuccu

SEQ ID NO: 2876375 - RNA, 14 nt, Human
ggcuccagaaaugu

SEQ ID NO: 2876376 - RNA, 19 nt, Human
ggcucccaugaccauacug

SEQ ID NO: 2876377 - RNA, 21 nt, Human
ggcucugccccagcucuggcu

SEQ ID NO: 2876378 - RNA, 20 nt, Human
ggcucugccccagcucuggc

SEQ ID NO: 2876379 - RNA, 14 nt, Human
ggcucugccccagc

SEQ ID NO: 2876380 - RNA, 16 nt, Human
ggcucugcaccccucu

SEQ ID NO: 2876381 - RNA, 19 nt, Human
ggcucugcaauuccccucu

SEQ ID NO: 2876382 - RNA, 20 nt, Human
ggcucugcaauuccccucug

SEQ ID NO: 2876383 - RNA, 12 nt, Human
ggcucugcccca

SEQ ID NO: 2876384 - RNA, 13 nt, Human
ggcucugccccag

SEQ ID NO: 2876385 - RNA, 17 nt, Human
ggcucugaggugccugu

SEQ ID NO: 2876386 - RNA, 19 nt, Human
ggcucugaggugccugucc

SEQ ID NO: 2876387 - RNA, 20 nt, Human
ggcucugaggugccuguccc

SEQ ID NO: 2876388 - RNA, 23 nt, Human
ggcucugaggugccugucccacc

SEQ ID NO: 2876389 - RNA, 20 nt, Human
ggcucugcaaugggcacugg

SEQ ID NO: 2876390 - RNA, 13 nt, Human
ggcucugaccagu

SEQ ID NO: 2876391 - RNA, 15 nt, Human
ggcucugagagucua

SEQ ID NO: 2876392 - RNA, 18 nt, Human
ggcucugagagucuagau

SEQ ID NO: 2876393 - RNA, 20 nt, Human
ggcucugagagucuagauuc

SEQ ID NO: 2876394 - RNA, 22 nt, Human
ggcucugagagucuagauucuc

SEQ ID NO: 2876395 - RNA, 16 nt, Human
ggcucugaagcaaggc

SEQ ID NO: 2876396 - RNA, 22 nt, Human
ggcucugaagcaaggcggugga

SEQ ID NO: 2876397 - RNA, 23 nt, Human
ggcucugaagcaaggcgguggac

SEQ ID NO: 2876398 - RNA, 12 nt, Human
ggcucucugagu

SEQ ID NO: 2876399 - RNA, 20 nt, Human
ggcucucugaguccuggccc

SEQ ID NO: 2876400 - RNA, 14 nt, Human
ggccuccucuucac

SEQ ID NO: 2876401 - RNA, 21 nt, Human
ggccuccucuucaccccggca

SEQ ID NO: 2876402 - RNA, 22 nt, Human
ggccuccucuucaccccggcag

SEQ ID NO: 2876403 - RNA, 23 nt, Human
ggccuccucuucaccccggcagg

SEQ ID NO: 2876404 - RNA, 14 nt, Human
ggccuccugugugu

SEQ ID NO: 2876405 - RNA, 16 nt, Human
ggccuccuugcuuguu

SEQ ID NO: 2876406 - RNA, 17 nt, Human
ggccuccuugcuuguua

SEQ ID NO: 2876407 - RNA, 13 nt, Human
ggccucucuagca

SEQ ID NO: 2876408 - RNA, 14 nt, Human
ggccucucucccuc

SEQ ID NO: 2876409 - RNA, 19 nt, Human
ggccucuccuuguggccug

SEQ ID NO: 2876410 - RNA, 19 nt, Human
ggccucuaccacaagggcu

SEQ ID NO: 2876411 - RNA, 23 nt, Human
ggccucucaccucugugccucug

SEQ ID NO: 2876412 - RNA, 22 nt, Human
ggccuccucacaacaugguguc

SEQ ID NO: 2876413 - RNA, 21 nt, Human
ggccuccguccaggagccugg

SEQ ID NO: 2876414 - RNA, 22 nt, Human
ggccucaagugauucuccugcc

SEQ ID NO: 2876415 - RNA, 14 nt, Human
ggccucaagugauu

SEQ ID NO: 2876416 - RNA, 13 nt, Human
ggcccagaggcug

SEQ ID NO: 2876417 - RNA, 14 nt, Human
ggcccagaggcuga

SEQ ID NO: 2876418 - RNA, 23 nt, Human
ggcccagaggcugaguuuucucu

SEQ ID NO: 2876419 - RNA, 14 nt, Human
ggcccagagcagga

SEQ ID NO: 2876420 - RNA, 16 nt, Human
ggcccagagcaggaag

SEQ ID NO: 2876421 - RNA, 15 nt, Human
ggccggcgagcccug

SEQ ID NO: 2876422 - RNA, 22 nt, Human
ggcccagaucuggucccuugca

SEQ ID NO: 2876423 - RNA, 18 nt, Human
ggccuaaaacuggccuga

SEQ ID NO: 2876424 - RNA, 20 nt, Human
ggccuaaaacuggccugacu

SEQ ID NO: 2876425 - RNA, 17 nt, Human
ggccgugggccuggggu

SEQ ID NO: 2876426 - RNA, 16 nt, Human
ggccguggggguugag

SEQ ID NO: 2876427 - RNA, 19 nt, Human
ggccguugauguuggcugg

SEQ ID NO: 2876428 - RNA, 21 nt, Human
ggccguugauguuggcuggga

SEQ ID NO: 2876429 - RNA, 14 nt, Human
ggccgugggccugg

SEQ ID NO: 2876430 - RNA, 14 nt, Human
ggccuaaaaucuug

SEQ ID NO: 2876431 - RNA, 15 nt, Human
ggccgggagccugau

SEQ ID NO: 2876432 - RNA, 22 nt, Human
ggccgggccuguacagucuguc

SEQ ID NO: 2876433 - RNA, 23 nt, Human
ggccgggccuguacagucugucu

SEQ ID NO: 2876434 - RNA, 22 nt, Human
ggccggcuucaugccagcuacu

SEQ ID NO: 2876435 - RNA, 19 nt, Human
ggccggcugugcucagaga

SEQ ID NO: 2876436 - RNA, 18 nt, Human
ggccggcgagcccugugg

SEQ ID NO: 2876437 - RNA, 17 nt, Human
ggccggcgagcccugug

SEQ ID NO: 2876438 - RNA, 16 nt, Human
ggccugagccuggcca

SEQ ID NO: 2876439 - RNA, 15 nt, Human
ggccugagccuggcc

SEQ ID NO: 2876440 - RNA, 18 nt, Human
ggccugagaggggaagcg

SEQ ID NO: 2876441 - RNA, 15 nt, Human
ggccugagacccagg

SEQ ID NO: 2876442 - RNA, 16 nt, Human
ggccugagacccagga

SEQ ID NO: 2876443 - RNA, 17 nt, Human
ggccugagacccaggac

SEQ ID NO: 2876444 - RNA, 18 nt, Human
ggccugagacccaggacu

SEQ ID NO: 2876445 - RNA, 20 nt, Human
ggccugagacccaggacucc

SEQ ID NO: 2876446 - RNA, 13 nt, Human
ggccugagagaau

SEQ ID NO: 2876447 - RNA, 21 nt, Human
ggccugagagaauuggcucaa

SEQ ID NO: 2876448 - RNA, 23 nt, Human
ggccugaaugcuuauagguggcc

SEQ ID NO: 2876449 - RNA, 18 nt, Human
ggcgccaccagcucugcc

SEQ ID NO: 2876450 - RNA, 17 nt, Human
ggcgccaccagcucugc

SEQ ID NO: 2876451 - RNA, 12 nt, Human
ggcgcccaccuc

SEQ ID NO: 2876452 - RNA, 16 nt, Human
ggcgccaccagcucug

SEQ ID NO: 2876453 - RNA, 11 nt, Human
ggcgcaggagg

SEQ ID NO: 2876454 - RNA, 16 nt, Human
ggccuguacagucugu

SEQ ID NO: 2876455 - RNA, 18 nt, Human
ggccuguacagucugucu

SEQ ID NO: 2876456 - RNA, 17 nt, Human
ggccugguugaagaaga

SEQ ID NO: 2876457 - RNA, 19 nt, Human
ggccugguugaagaagaug

SEQ ID NO: 2876458 - RNA, 23 nt, Human
ggccuggguggaucggccuccuc

SEQ ID NO: 2876459 - RNA, 21 nt, Human
ggccugagcguccagaaaugg

SEQ ID NO: 2876460 - RNA, 12 nt, Human
ggccuggcccug

SEQ ID NO: 2876461 - RNA, 13 nt, Human
ggccuggcccugc

SEQ ID NO: 2876462 - RNA, 14 nt, Human
ggccuggcccugcc

SEQ ID NO: 2876463 - RNA, 18 nt, Human
ggccuggcccugcccuga

SEQ ID NO: 2876464 - RNA, 19 nt, Human
ggccuggcccugcccugag

SEQ ID NO: 2876465 - RNA, 18 nt, Human
ggccugggguaccaagag

SEQ ID NO: 2876466 - RNA, 13 nt, Human
ggccugggcuagg

SEQ ID NO: 2876467 - RNA, 17 nt, Human
ggccugggcuaggggac

SEQ ID NO: 2876468 - RNA, 14 nt, Human
ggccugggccagag

SEQ ID NO: 2876469 - RNA, 11 nt, Human
ggccugggccc

SEQ ID NO: 2876470 - RNA, 23 nt, Human
gggacucaaugcacugacauugu

SEQ ID NO: 2876471 - RNA, 16 nt, Human
gggagccccagggucu

SEQ ID NO: 2876472 - RNA, 14 nt, Human
gggagccccagggu

SEQ ID NO: 2876473 - RNA, 21 nt, Human
gggagccccagggucuucccu

SEQ ID NO: 2876474 - RNA, 13 nt, Human
gggagccccaggg

SEQ ID NO: 2876475 - RNA, 12 nt, Human
gggagccccagg

SEQ ID NO: 2876476 - RNA, 19 nt, Human
gggacucaaugcacugaca

SEQ ID NO: 2876477 - RNA, 17 nt, Human
gggacucaaugcacuga

SEQ ID NO: 2876478 - RNA, 20 nt, Human
gggacgcuccgcugccgugc

SEQ ID NO: 2876479 - RNA, 20 nt, Human
gggacggucaguuugguguc

SEQ ID NO: 2876480 - RNA, 21 nt, Human
gggacgaagaagagccacagu

SEQ ID NO: 2876481 - RNA, 17 nt, Human
gggacgaagaagagcca

SEQ ID NO: 2876482 - RNA, 19 nt, Human
gggacgaagaagagccaca

SEQ ID NO: 2876483 - RNA, 20 nt, Human
gggacgaagaagagccacag

SEQ ID NO: 2876484 - RNA, 13 nt, Human
gggacccccgccc

SEQ ID NO: 2876485 - RNA, 20 nt, Human
gggacccauagaucuucuga

SEQ ID NO: 2876486 - RNA, 15 nt, Human
gggaccccaggccca

SEQ ID NO: 2876487 - RNA, 21 nt, Human
gggaccccaggcccacucagg

SEQ ID NO: 2876488 - RNA, 14 nt, Human
gggacccccgcccc

SEQ ID NO: 2876489 - RNA, 17 nt, Human
gggacccccgcccccug

SEQ ID NO: 2876490 - RNA, 18 nt, Human
gggacccccgcccccugc

SEQ ID NO: 2876491 - RNA, 19 nt, Human
gggacccccgcccccugcc

SEQ ID NO: 2876492 - RNA, 18 nt, Human
gggaccugguacccuccu

SEQ ID NO: 2876493 - RNA, 21 nt, Human
gggaccugguacccuccuggc

SEQ ID NO: 2876494 - RNA, 23 nt, Human
gggaccucucccagggucccugg

SEQ ID NO: 2876495 - RNA, 21 nt, Human
gggacccccgcccccugcccu

SEQ ID NO: 2876496 - RNA, 24 nt, Human
gggacccccgcccccugcccuccc

SEQ ID NO: 2876497 - RNA, 21 nt, Human
ggcuuuggagacuuucuuuaa

SEQ ID NO: 2876498 - RNA, 12 nt, Human
ggcuuuggauuu

SEQ ID NO: 2876499 - RNA, 22 nt, Human
ggcuuugauuaguuuucuuguu

SEQ ID NO: 2876500 - RNA, 23 nt, Human
gggaagugaagacuggaagcuaa

SEQ ID NO: 2876501 - RNA, 11 nt, Human
ggcuuuguguu

SEQ ID NO: 2876502 - RNA, 13 nt, Human
ggcuuuguguugu

SEQ ID NO: 2876503 - RNA, 15 nt, Human
gggaauccaagccuc

SEQ ID NO: 2876504 - RNA, 12 nt, Human
gggaaucacauc

SEQ ID NO: 2876505 - RNA, 12 nt, Human
gggaauauuuua

SEQ ID NO: 2876506 - RNA, 22 nt, Human
gggaauccaagccuccacagcg

SEQ ID NO: 2876507 - RNA, 21 nt, Human
gggaauccaagccuccacagc

SEQ ID NO: 2876508 - RNA, 18 nt, Human
gggaauccaagccuccac

SEQ ID NO: 2876509 - RNA, 19 nt, Human
gggaauccccgaaggugcu

SEQ ID NO: 2876510 - RNA, 22 nt, Human
gggaauccccgaaggugcugga

SEQ ID NO: 2876511 - RNA, 22 nt, Human
gggaaguugcauuccuuugucu

SEQ ID NO: 2876512 - RNA, 24 nt, Human
gggaauaaaauccuaagacacaaa

SEQ ID NO: 2876513 - RNA, 14 nt, Human
gggaauaaccuucc

SEQ ID NO: 2876514 - RNA, 16 nt, Human
gggaauauuguuucuu

SEQ ID NO: 2876515 - RNA, 21 nt, Human
gggacccaauguaggagcugc

SEQ ID NO: 2876516 - RNA, 12 nt, Human
gggacccaggcu

SEQ ID NO: 2876517 - RNA, 13 nt, Human
gggacccaggcuc

SEQ ID NO: 2876518 - RNA, 17 nt, Human
gggacccaggcuccgcc

SEQ ID NO: 2876519 - RNA, 19 nt, Human
gggacccaggcuccgcccu

SEQ ID NO: 2876520 - RNA, 22 nt, Human
gggacccaggcuccgcccuuag

SEQ ID NO: 2876521 - RNA, 13 nt, Human
gggaccauguguc

SEQ ID NO: 2876522 - RNA, 17 nt, Human
gggaccaugugucacuu

SEQ ID NO: 2876523 - RNA, 21 nt, Human
gggaauguuugccucugccuc

SEQ ID NO: 2876524 - RNA, 19 nt, Human
gggaauguuugccucugcc

SEQ ID NO: 2876525 - RNA, 22 nt, Human
gggaaucuaagagagcugccau

SEQ ID NO: 2876526 - RNA, 20 nt, Human
gggaauucucagugccaacu

SEQ ID NO: 2876527 - RNA, 18 nt, Human
gggacacaaaacuccgcc

SEQ ID NO: 2876528 - RNA, 19 nt, Human
gggacacaaaacuccgccc

SEQ ID NO: 2876529 - RNA, 20 nt, Human
gggacacaaaacuccgcccc

SEQ ID NO: 2876530 - RNA, 23 nt, Human
gggacacaaaacuccgcccccag

SEQ ID NO: 2876531 - RNA, 14 nt, Human
gggaggagaaugag

SEQ ID NO: 2876532 - RNA, 17 nt, Human
gggaggaucacuggagc

SEQ ID NO: 2876533 - RNA, 20 nt, Human
gggaggagguggcagcccug

SEQ ID NO: 2876534 - RNA, 22 nt, Human
gggaggauguucugggacacag

SEQ ID NO: 2876535 - RNA, 17 nt, Human
gggagugacagaggcag

SEQ ID NO: 2876536 - RNA, 15 nt, Human
gggaguccaggcaca

SEQ ID NO: 2876537 - RNA, 16 nt, Human
gggaguccaggcacag

SEQ ID NO: 2876538 - RNA, 17 nt, Human
gggaguccaggcacagg

SEQ ID NO: 2876539 - RNA, 19 nt, Human
gggaguccaggcacaggau

SEQ ID NO: 2876540 - RNA, 16 nt, Human
gggagucaccuucccu

SEQ ID NO: 2876541 - RNA, 15 nt, Human
gggagugcuggcuca

SEQ ID NO: 2876542 - RNA, 16 nt, Human
gggagugcuggcucac

SEQ ID NO: 2876543 - RNA, 19 nt, Human
gggagugcuggcucacagu

SEQ ID NO: 2876544 - RNA, 23 nt, Human
gggagugcuggcucacaguacag

SEQ ID NO: 2876545 - RNA, 23 nt, Human
gggaggaucacuggagcccagga

SEQ ID NO: 2876546 - RNA, 22 nt, Human
gggaggaucacuggagcccagg

SEQ ID NO: 2876547 - RNA, 19 nt, Human
gggaggaucacuggagccc

SEQ ID NO: 2876548 - RNA, 13 nt, Human
gggagguguucac

SEQ ID NO: 2876549 - RNA, 18 nt, Human
gggaggcaaguguggggg

SEQ ID NO: 2876550 - RNA, 22 nt, Human
gggagcugccuguucagcucca

SEQ ID NO: 2876551 - RNA, 21 nt, Human
gggagcugccuguucagcucc

SEQ ID NO: 2876552 - RNA, 13 nt, Human
gggagcugccugu

SEQ ID NO: 2876553 - RNA, 22 nt, Human
gggagcuccucuccuggaggau

SEQ ID NO: 2876554 - RNA, 20 nt, Human
gggagcuccucuccuggagg

SEQ ID NO: 2876555 - RNA, 21 nt, Human
gggagcuccucuccuggagga

SEQ ID NO: 2876556 - RNA, 16 nt, Human
gggaggaaagagagca

SEQ ID NO: 2876557 - RNA, 19 nt, Human
gggagcugguuagaaaugc

SEQ ID NO: 2876558 - RNA, 16 nt, Human
gggaggacaaaacuuc

SEQ ID NO: 2876559 - RNA, 23 nt, Human
gggaggacaaaacuucuugucag

SEQ ID NO: 2876560 - RNA, 12 nt, Human
gggaggacaggc

SEQ ID NO: 2876561 - RNA, 20 nt, Human
gggaggaccacaggugugag

SEQ ID NO: 2876562 - RNA, 23 nt, Human
gggaggaagcagguugaggggcu

SEQ ID NO: 2876563 - RNA, 19 nt, Human
gggaggaccugacccuacu

SEQ ID NO: 2876564 - RNA, 20 nt, Human
gggaggaccugacccuacuc

SEQ ID NO: 2876565 - RNA, 12 nt, Human
gggaggaccugg

SEQ ID NO: 2876566 - RNA, 13 nt, Human
gggaggaccuggg

SEQ ID NO: 2876567 - RNA, 16 nt, Human
gggaggaccuggggca

SEQ ID NO: 2876568 - RNA, 17 nt, Human
gggaggaccuggggcac

SEQ ID NO: 2876569 - RNA, 19 nt, Human
gggaggaccuggggcacag

SEQ ID NO: 2876570 - RNA, 22 nt, Human
gggagccuuugguucuggccag

SEQ ID NO: 2876571 - RNA, 18 nt, Human
gggagccuuagccgccca

SEQ ID NO: 2876572 - RNA, 18 nt, Human
gggagcuccucuccugga

SEQ ID NO: 2876573 - RNA, 12 nt, Human
gggagcucugca

SEQ ID NO: 2876574 - RNA, 16 nt, Human
gggagccuaggaccac

SEQ ID NO: 2876575 - RNA, 20 nt, Human
gggagccuaggaccacucag

SEQ ID NO: 2876576 - RNA, 23 nt, Human
gggagcccucaggcaccugcacu

SEQ ID NO: 2876577 - RNA, 21 nt, Human
gggagccuuugguucuggcca

SEQ ID NO: 2876578 - RNA, 21 nt, Human
gggagccugaucaccugcccu

SEQ ID NO: 2876579 - RNA, 18 nt, Human
ggcuuagcuuugcucugc

SEQ ID NO: 2876580 - RNA, 12 nt, Human
ggcuucacagau

SEQ ID NO: 2876581 - RNA, 15 nt, Human
ggcuucacuguauaa

SEQ ID NO: 2876582 - RNA, 18 nt, Human
ggcuucacuguauaaaua

SEQ ID NO: 2876583 - RNA, 19 nt, Human
ggcuucacuguauaaauag

SEQ ID NO: 2876584 - RNA, 21 nt, Human
ggcuucacuguauaaauagga

SEQ ID NO: 2876585 - RNA, 22 nt, Human
ggcuucacuguauaaauaggag

SEQ ID NO: 2876586 - RNA, 13 nt, Human
ggcuugccugcag

SEQ ID NO: 2876587 - RNA, 14 nt, Human
ggcuuucuggagag

SEQ ID NO: 2876588 - RNA, 13 nt, Human
ggcuuucuggaga

SEQ ID NO: 2876589 - RNA, 12 nt, Human
ggcuuucuggag

SEQ ID NO: 2876590 - RNA, 18 nt, Human
ggcuuggcguggagcagg

SEQ ID NO: 2876591 - RNA, 16 nt, Human
ggcuuggccuaucucc

SEQ ID NO: 2876592 - RNA, 17 nt, Human
ggcuuggccuaucuccu

SEQ ID NO: 2876593 - RNA, 14 nt, Human
ggcuugccugcagg

SEQ ID NO: 2876594 - RNA, 15 nt, Human
ggcuugccugcaggc

SEQ ID NO: 2876595 - RNA, 11 nt, Human
ggcuugcugcc

SEQ ID NO: 2876596 - RNA, 15 nt, Human
ggcuguuggcaguga

SEQ ID NO: 2876597 - RNA, 17 nt, Human
ggcuguuggcagugagu

SEQ ID NO: 2876598 - RNA, 20 nt, Human
ggcuguuggcugggggccuc

SEQ ID NO: 2876599 - RNA, 16 nt, Human
ggcuguuggcuggggg

SEQ ID NO: 2876600 - RNA, 15 nt, Human
ggcuguuggcugggg

SEQ ID NO: 2876601 - RNA, 14 nt, Human
ggcuguuggcuggg

SEQ ID NO: 2876602 - RNA, 17 nt, Human
ggcuguugaagucaccu

SEQ ID NO: 2876603 - RNA, 13 nt, Human
ggcuguucugcac

SEQ ID NO: 2876604 - RNA, 15 nt, Human
ggcuguucugcacug

SEQ ID NO: 2876605 - RNA, 17 nt, Human
ggcuguucugcacugaa

SEQ ID NO: 2876606 - RNA, 18 nt, Human
ggcuguucugcacugaaa

SEQ ID NO: 2876607 - RNA, 19 nt, Human
ggcuguucugcacugaaaa

SEQ ID NO: 2876608 - RNA, 21 nt, Human
ggcuguucugcacugaaaagg

SEQ ID NO: 2876609 - RNA, 20 nt, Human
ggcuggagaauguggagaac

SEQ ID NO: 2876610 - RNA, 16 nt, Human
ggcugugcugcccuga

SEQ ID NO: 2876611 - RNA, 13 nt, Human
ggcuguggagaca

SEQ ID NO: 2876612 - RNA, 21 nt, Human
ggcuguggagacaaugucugc

SEQ ID NO: 2876613 - RNA, 23 nt, Human
ggcuguggagacaaugucugcag

SEQ ID NO: 2876614 - RNA, 12 nt, Human
ggcuguggaagg

SEQ ID NO: 2876615 - RNA, 15 nt, Human
ggcugugcugcccug

SEQ ID NO: 2876616 - RNA, 14 nt, Human
ggcugugcugcccu

SEQ ID NO: 2876617 - RNA, 20 nt, Human
ggcugugcucccugguucug

SEQ ID NO: 2876618 - RNA, 13 nt, Human
ggcugugcucaga

SEQ ID NO: 2876619 - RNA, 14 nt, Human
ggcugugcucagag

SEQ ID NO: 2876620 - RNA, 15 nt, Human
ggcugugcucagaga

SEQ ID NO: 2876621 - RNA, 17 nt, Human
ggcugggggcaggaggg

SEQ ID NO: 2876622 - RNA, 16 nt, Human
ggcugggggcaggagg

SEQ ID NO: 2876623 - RNA, 18 nt, Human
ggcugggggcaggagggc

SEQ ID NO: 2876624 - RNA, 13 nt, Human
ggcugugccucug

SEQ ID NO: 2876625 - RNA, 16 nt, Human
ggcugugccucugccu

SEQ ID NO: 2876626 - RNA, 13 nt, Human
ggcugugaggccc

SEQ ID NO: 2876627 - RNA, 13 nt, Human
ggcuggaguacag

SEQ ID NO: 2876628 - RNA, 20 nt, Human
ggcuggaguacaguggugcc

SEQ ID NO: 2876629 - RNA, 15 nt, Human
ggcuggacguggugg

SEQ ID NO: 2876630 - RNA, 14 nt, Human
ggcugaggcaggag

SEQ ID NO: 2876631 - RNA, 20 nt, Human
ggcugaggaggccuccaucu

SEQ ID NO: 2876632 - RNA, 15 nt, Human
ggcugaggaggccuc

SEQ ID NO: 2876633 - RNA, 16 nt, Human
ggcugaggaggccucc

SEQ ID NO: 2876634 - RNA, 19 nt, Human
ggcugaggaggccuccauc

SEQ ID NO: 2876635 - RNA, 23 nt, Human
ggcucugccccagcucuggcuuc

SEQ ID NO: 2876636 - RNA, 21 nt, Human
ggcucugccccagucguuaga

SEQ ID NO: 2876637 - RNA, 17 nt, Human
ggcugggcaaggaggcc

SEQ ID NO: 2876638 - RNA, 23 nt, Human
ggcugggaguaguugucuuuccu

SEQ ID NO: 2876639 - RNA, 19 nt, Human
ggcugggcaaggaaaaaga

SEQ ID NO: 2876640 - RNA, 23 nt, Human
ggcugggcaaggaaaaagaaaau

SEQ ID NO: 2876641 - RNA, 19 nt, Human
ggcuggaguggaguggcgu

SEQ ID NO: 2876642 - RNA, 20 nt, Human
ggcuggagugcaguggugug

SEQ ID NO: 2876643 - RNA, 19 nt, Human
ggcuggagugcaguggcgu

SEQ ID NO: 2876644 - RNA, 20 nt, Human
ggcuggagugcaguggugca

SEQ ID NO: 2876645 - RNA, 15 nt, Human
ggcugggagcucugc

SEQ ID NO: 2876646 - RNA, 18 nt, Human
ggcugggcuucaguggca

SEQ ID NO: 2876647 - RNA, 17 nt, Human
ggcuggggaaguccucu

SEQ ID NO: 2876648 - RNA, 22 nt, Human
ggcugggcuucaguggcagcug

SEQ ID NO: 2876649 - RNA, 21 nt, Human
ggcugggcuucaguggcagcu

SEQ ID NO: 2876650 - RNA, 11 nt, Human
ggcugggcuuc

SEQ ID NO: 2876651 - RNA, 14 nt, Human
ggcugggggccuca

SEQ ID NO: 2876652 - RNA, 14 nt, Human
ggcugggggcagga

SEQ ID NO: 2876653 - RNA, 18 nt, Human
ggcuggggaaguccucug

SEQ ID NO: 2876654 - RNA, 21 nt, Human
ggcuggggaaguccucugggu

SEQ ID NO: 2876655 - RNA, 15 nt, Human
ggcuggggaggaccu

SEQ ID NO: 2876656 - RNA, 16 nt, Human
ggcuggggaggaccug

SEQ ID NO: 2876657 - RNA, 19 nt, Human
ggauucugggaggaagcag

SEQ ID NO: 2876658 - RNA, 21 nt, Human
ggauucugaggcccugcccaa

SEQ ID NO: 2876659 - RNA, 20 nt, Human
ggauugaacuucuuugaauu

SEQ ID NO: 2876660 - RNA, 22 nt, Human
ggauugaucuucagggcuguuu

SEQ ID NO: 2876661 - RNA, 22 nt, Human
ggcaacuuuccuuguuccccau

SEQ ID NO: 2876662 - RNA, 17 nt, Human
ggcaagcaccuccugcc

SEQ ID NO: 2876663 - RNA, 22 nt, Human
ggcaagagcccccuugacaccg

SEQ ID NO: 2876664 - RNA, 19 nt, Human
ggcaagagcccccuugaca

SEQ ID NO: 2876665 - RNA, 23 nt, Human
ggcaagagaaucgcuugaaccca

SEQ ID NO: 2876666 - RNA, 21 nt, Human
ggcaagcaggcgcugugcuau

SEQ ID NO: 2876667 - RNA, 13 nt, Human
ggcaccagccagc

SEQ ID NO: 2876668 - RNA, 14 nt, Human
ggcaccagccagcg

SEQ ID NO: 2876669 - RNA, 14 nt, Human
ggcaccagucccug

SEQ ID NO: 2876670 - RNA, 14 nt, Human
ggcaccaucucccu

SEQ ID NO: 2876671 - RNA, 18 nt, Human
ggcaccagucccuguccg

SEQ ID NO: 2876672 - RNA, 17 nt, Human
ggcaccagucccugucc

SEQ ID NO: 2876673 - RNA, 15 nt, Human
ggcaccagucccugu

SEQ ID NO: 2876674 - RNA, 19 nt, Human
ggcaagcaccuccugccuc

SEQ ID NO: 2876675 - RNA, 18 nt, Human
ggcaagcaccuccugccu

SEQ ID NO: 2876676 - RNA, 22 nt, Human
ggcaagcugugacuucuccagg

SEQ ID NO: 2876677 - RNA, 10 nt, Human
ggcaaggaaa

SEQ ID NO: 2876678 - RNA, 12 nt, Human
ggcaaggaaaaa

SEQ ID NO: 2876679 - RNA, 14 nt, Human
ggcaaggaaaaaga

SEQ ID NO: 2876680 - RNA, 17 nt, Human
ggcaaggaaaaagaaaa

SEQ ID NO: 2876681 - RNA, 19 nt, Human
ggcaaggaaaaagaaaaua

SEQ ID NO: 2876682 - RNA, 11 nt, Human
ggcaaggaaag

SEQ ID NO: 2876683 - RNA, 22 nt, Human
ggcaaggaaaggggagaaggga

SEQ ID NO: 2876684 - RNA, 16 nt, Human
ggcaaggacacagaug

SEQ ID NO: 2876685 - RNA, 23 nt, Human
ggcaagcugugacuucuccaggu

SEQ ID NO: 2876686 - RNA, 14 nt, Human
ggcaaggacacaga

SEQ ID NO: 2876687 - RNA, 21 nt, Human
ggcagagguugcagugagccg

SEQ ID NO: 2876688 - RNA, 15 nt, Human
ggcagagguuguagu

SEQ ID NO: 2876689 - RNA, 20 nt, Human
ggcagagguuguagugagcc

SEQ ID NO: 2876690 - RNA, 22 nt, Human
ggcagagguuguagugagccca

SEQ ID NO: 2876691 - RNA, 16 nt, Human
ggcagagccgggaagc

SEQ ID NO: 2876692 - RNA, 12 nt, Human
ggcagagcauuu

SEQ ID NO: 2876693 - RNA, 19 nt, Human
ggcacucagaagacacuga

SEQ ID NO: 2876694 - RNA, 18 nt, Human
ggcacucagaagacacug

SEQ ID NO: 2876695 - RNA, 17 nt, Human
ggcacccggccccugcu

SEQ ID NO: 2876696 - RNA, 20 nt, Human
ggcacccggccccugcuggu

SEQ ID NO: 2876697 - RNA, 19 nt, Human
ggcacccggccccugcugg

SEQ ID NO: 2876698 - RNA, 18 nt, Human
ggcacccggccccugcug

SEQ ID NO: 2876699 - RNA, 20 nt, Human
ggcacccaccaucaugucug

SEQ ID NO: 2876700 - RNA, 11 nt, Human
ggaugccuccu

SEQ ID NO: 2876701 - RNA, 13 nt, Human
ggauuauccugag

SEQ ID NO: 2876702 - RNA, 21 nt, Human
ggaugccugguggcagcugcg

SEQ ID NO: 2876703 - RNA, 20 nt, Human
ggaugccugguggcagcugc

SEQ ID NO: 2876704 - RNA, 19 nt, Human
ggaugccugguggcagcug

SEQ ID NO: 2876705 - RNA, 18 nt, Human
ggaugccugguggcagcu

SEQ ID NO: 2876706 - RNA, 21 nt, Human
ggauucaggaauguguggccu

SEQ ID NO: 2876707 - RNA, 13 nt, Human
ggauucaggcugc

SEQ ID NO: 2876708 - RNA, 15 nt, Human
ggauucaggcugcuu

SEQ ID NO: 2876709 - RNA, 14 nt, Human
ggauucaggcugcu

SEQ ID NO: 2876710 - RNA, 22 nt, Human
ggauucauucucauaauuccua

SEQ ID NO: 2876711 - RNA, 22 nt, Human
ggauucauugucucucacagau

SEQ ID NO: 2876712 - RNA, 17 nt, Human
ggauuauuuaauaacau

SEQ ID NO: 2876713 - RNA, 19 nt, Human
ggauuauuuaauaacauua

SEQ ID NO: 2876714 - RNA, 22 nt, Human
ggauuauuuaauaacauuaccu

SEQ ID NO: 2876715 - RNA, 15 nt, Human
ggauucgcuugaguu

SEQ ID NO: 2876716 - RNA, 13 nt, Human
ggauucugggagg

SEQ ID NO: 2876717 - RNA, 20 nt, Human
ggauucugaggcccugccca

SEQ ID NO: 2876718 - RNA, 12 nt, Human
ggauuccaugcu

SEQ ID NO: 2876719 - RNA, 13 nt, Human
ggauuccaugcua

SEQ ID NO: 2876720 - RNA, 23 nt, Human
ggagucccaccuuggcugcaggg

SEQ ID NO: 2876721 - RNA, 13 nt, Human
ggaguccccucac

SEQ ID NO: 2876722 - RNA, 15 nt, Human
ggaguccccucaccu

SEQ ID NO: 2876723 - RNA, 17 nt, Human
ggaugagcauggagcug

SEQ ID NO: 2876724 - RNA, 19 nt, Human
ggaugagcauggagcuggc

SEQ ID NO: 2876725 - RNA, 20 nt, Human
ggaugagcauggagcuggcc

SEQ ID NO: 2876726 - RNA, 23 nt, Human
ggaugagagcccagagguaacag

SEQ ID NO: 2876727 - RNA, 20 nt, Human
ggaugaggugguggagugga

SEQ ID NO: 2876728 - RNA, 17 nt, Human
ggaugccugguggcagc

SEQ ID NO: 2876729 - RNA, 13 nt, Human
ggaugccuggugg

SEQ ID NO: 2876730 - RNA, 17 nt, Human
ggaugccccgucccccu

SEQ ID NO: 2876731 - RNA, 17 nt, Human
ggaugccagggccgacc

SEQ ID NO: 2876732 - RNA, 22 nt, Human
ggaugccaauauuaaaucugcu

SEQ ID NO: 2876733 - RNA, 18 nt, Human
ggaugccacuccucccuc

SEQ ID NO: 2876734 - RNA, 19 nt, Human
ggaugccacuccucccucc

SEQ ID NO: 2876735 - RNA, 20 nt, Human
ggaugccacuccucccuccg

SEQ ID NO: 2876736 - RNA, 16 nt, Human
ggaugauucagaaauu

SEQ ID NO: 2876737 - RNA, 20 nt, Human
ggaugauucagaaauuggaa

SEQ ID NO: 2876738 - RNA, 21 nt, Human
ggaugauucagaaauuggaac

SEQ ID NO: 2876739 - RNA, 21 nt, Human
ggcagcugaacuauuggaggg

SEQ ID NO: 2876740 - RNA, 12 nt, Human
ggcagcugccac

SEQ ID NO: 2876741 - RNA, 21 nt, Human
ggcagcugcgguccacccagg

SEQ ID NO: 2876742 - RNA, 22 nt, Human
ggcagcugcuauuuauuuuccu

SEQ ID NO: 2876743 - RNA, 11 nt, Human
ggcagcugcua

SEQ ID NO: 2876744 - RNA, 24 nt, Human
ggcagcugcgguccacccaggagc

SEQ ID NO: 2876745 - RNA, 23 nt, Human
ggcagcugcgguccacccaggag

SEQ ID NO: 2876746 - RNA, 18 nt, Human
ggcagggucucacucugu

SEQ ID NO: 2876747 - RNA, 17 nt, Human
ggcagggucucacucug

SEQ ID NO: 2876748 - RNA, 11 nt, Human
ggcagucccuu

SEQ ID NO: 2876749 - RNA, 14 nt, Human
ggcaguaggccggu

SEQ ID NO: 2876750 - RNA, 13 nt, Human
ggcaugaccagau

SEQ ID NO: 2876751 - RNA, 12 nt, Human
ggcaguggaggu

SEQ ID NO: 2876752 - RNA, 16 nt, Human
ggcauguaggacccug

SEQ ID NO: 2876753 - RNA, 12 nt, Human
ggcaugagauag

SEQ ID NO: 2876754 - RNA, 21 nt, Human
ggcaugaguuacugugcauug

SEQ ID NO: 2876755 - RNA, 14 nt, Human
ggcaugcaccugca

SEQ ID NO: 2876756 - RNA, 16 nt, Human
ggcaugcaccugcaau

SEQ ID NO: 2876757 - RNA, 21 nt, Human
ggcaugcaccugcaaucccag

SEQ ID NO: 2876758 - RNA, 22 nt, Human
ggcaugccccggccaccucugc

SEQ ID NO: 2876759 - RNA, 23 nt, Human
ggcaugccucugauaugggacug

SEQ ID NO: 2876760 - RNA, 15 nt, Human
ggcaugccccggcca

SEQ ID NO: 2876761 - RNA, 18 nt, Human
ggcaugccccggccaccu

SEQ ID NO: 2876762 - RNA, 19 nt, Human
ggcaugccccggccaccuc

SEQ ID NO: 2876763 - RNA, 20 nt, Human
ggcaugccccggccaccucu

SEQ ID NO: 2876764 - RNA, 19 nt, Human
ggcaugguacggagauguu

SEQ ID NO: 2876765 - RNA, 21 nt, Human
ggcaugccccggccaccucug

SEQ ID NO: 2876766 - RNA, 16 nt, Human
ggcaugguaccagccc

SEQ ID NO: 2876767 - RNA, 17 nt, Human
ggcaugguaccagcccu

SEQ ID NO: 2876768 - RNA, 18 nt, Human
ggcaugguaccagcccug

SEQ ID NO: 2876769 - RNA, 19 nt, Human
ggcaugguaccagcccugg

SEQ ID NO: 2876770 - RNA, 20 nt, Human
ggcaugguaccagcccuggg

SEQ ID NO: 2876771 - RNA, 18 nt, Human
ggcccacaggaggcaagc

SEQ ID NO: 2876772 - RNA, 23 nt, Human
ggcccacaggaggcaagcaagcu

SEQ ID NO: 2876773 - RNA, 12 nt, Human
ggcccagagagg

SEQ ID NO: 2876774 - RNA, 16 nt, Human
ggccauggagagcugg

SEQ ID NO: 2876775 - RNA, 17 nt, Human
ggccauggagagcugga

SEQ ID NO: 2876776 - RNA, 13 nt, Human
ggcccacacacag

SEQ ID NO: 2876777 - RNA, 14 nt, Human
ggcccacacacagg

SEQ ID NO: 2876778 - RNA, 15 nt, Human
ggcccacacacaggu

SEQ ID NO: 2876779 - RNA, 14 nt, Human
ggccauggagagcu

SEQ ID NO: 2876780 - RNA, 13 nt, Human
ggccaugccugcc

SEQ ID NO: 2876781 - RNA, 14 nt, Human
ggccaugccugccc

SEQ ID NO: 2876782 - RNA, 15 nt, Human
ggccaggacugagcc

SEQ ID NO: 2876783 - RNA, 20 nt, Human
ggccaggacugagccccgca

SEQ ID NO: 2876784 - RNA, 13 nt, Human
ggccaggacugag

SEQ ID NO: 2876785 - RNA, 11 nt, Human
ggccaccugcc

SEQ ID NO: 2876786 - RNA, 12 nt, Human
ggccaccucugc

SEQ ID NO: 2876787 - RNA, 23 nt, Human
ggccaccucugcggaccccagcu

SEQ ID NO: 2876788 - RNA, 15 nt, Human
ggccacuuuugacua

SEQ ID NO: 2876789 - RNA, 13 nt, Human
ggccacuucuguc

SEQ ID NO: 2876790 - RNA, 14 nt, Human
ggccacuucugucc

SEQ ID NO: 2876791 - RNA, 15 nt, Human
ggccacuucugucca

SEQ ID NO: 2876792 - RNA, 21 nt, Human
ggccacuuuaagagagaaauc

SEQ ID NO: 2876793 - RNA, 15 nt, Human
ggccacacugugaca

SEQ ID NO: 2876794 - RNA, 17 nt, Human
ggccacacugugacaca

SEQ ID NO: 2876795 - RNA, 14 nt, Human
ggcauguuccucug

SEQ ID NO: 2876796 - RNA, 20 nt, Human
ggcauguucucugaggacac

SEQ ID NO: 2876797 - RNA, 14 nt, Human
ggcaugugggcuuc

SEQ ID NO: 2876798 - RNA, 20 nt, Human
ggccacaguagucuugauga

SEQ ID NO: 2876799 - RNA, 17 nt, Human
ggacagcuccuucuguc

SEQ ID NO: 2876800 - RNA, 16 nt, Human
ggacagcuccuucugu

SEQ ID NO: 2876801 - RNA, 15 nt, Human
ggacagcuccuucug

SEQ ID NO: 2876802 - RNA, 11 nt, Human
ggacagcuccu

SEQ ID NO: 2876803 - RNA, 22 nt, Human
ggacagccacggccaggccaga

SEQ ID NO: 2876804 - RNA, 17 nt, Human
ggacagaggccugcccg

SEQ ID NO: 2876805 - RNA, 12 nt, Human
ggacagagggga

SEQ ID NO: 2876806 - RNA, 13 nt, Human
ggacagaggggac

SEQ ID NO: 2876807 - RNA, 16 nt, Human
ggacagaggggacucu

SEQ ID NO: 2876808 - RNA, 18 nt, Human
ggacagaggggacucugg

SEQ ID NO: 2876809 - RNA, 19 nt, Human
ggacagaggggacucuggg

SEQ ID NO: 2876810 - RNA, 20 nt, Human
ggacagaggggacucugggc

SEQ ID NO: 2876811 - RNA, 23 nt, Human
ggacagaggggacucugggcuau

SEQ ID NO: 2876812 - RNA, 16 nt, Human
ggacagccccuccucc

SEQ ID NO: 2876813 - RNA, 15 nt, Human
ggacagccccuccuc

SEQ ID NO: 2876814 - RNA, 14 nt, Human
ggacagagccaugc

SEQ ID NO: 2876815 - RNA, 14 nt, Human
ggacagaggccugc

SEQ ID NO: 2876816 - RNA, 15 nt, Human
ggacagaggccugcc

SEQ ID NO: 2876817 - RNA, 16 nt, Human
ggacagaggccugccc

SEQ ID NO: 2876818 - RNA, 22 nt, Human
ggacagaaaggagaguggccau

SEQ ID NO: 2876819 - RNA, 15 nt, Human
gcuuuuauuaaauuu

SEQ ID NO: 2876820 - RNA, 17 nt, Human
gcuuuuauuaaauuugu

SEQ ID NO: 2876821 - RNA, 16 nt, Human
gcuuuuauaucuguau

SEQ ID NO: 2876822 - RNA, 18 nt, Human
gcuuuuauaucuguaugu

SEQ ID NO: 2876823 - RNA, 15 nt, Human
gcuuuuauuguauaa

SEQ ID NO: 2876824 - RNA, 15 nt, Human
gcuuuuauuuugaaa

SEQ ID NO: 2876825 - RNA, 16 nt, Human
gcuuuuauuuugaaaa

SEQ ID NO: 2876826 - RNA, 22 nt, Human
gcuuuuauuuugaaaagcuucu

SEQ ID NO: 2876827 - RNA, 18 nt, Human
gcuuuucaaacaagaaug

SEQ ID NO: 2876828 - RNA, 12 nt, Human
gcuuuucacugc

SEQ ID NO: 2876829 - RNA, 14 nt, Human
ggacacucagaccu

SEQ ID NO: 2876830 - RNA, 14 nt, Human
ggacacuccagugc

SEQ ID NO: 2876831 - RNA, 15 nt, Human
ggacacuccagugcc

SEQ ID NO: 2876832 - RNA, 16 nt, Human
ggacacuccagugcca

SEQ ID NO: 2876833 - RNA, 18 nt, Human
ggacacuccagugccagc

SEQ ID NO: 2876834 - RNA, 16 nt, Human
ggacacuuaauacuac

SEQ ID NO: 2876835 - RNA, 15 nt, Human
ggacacuccuagaga

SEQ ID NO: 2876836 - RNA, 21 nt, Human
ggacacuccagugccagcaau

SEQ ID NO: 2876837 - RNA, 14 nt, Human
ggacacuccuagag

SEQ ID NO: 2876838 - RNA, 13 nt, Human
ggagaagagagga

SEQ ID NO: 2876839 - RNA, 14 nt, Human
ggagaagagaggag

SEQ ID NO: 2876840 - RNA, 15 nt, Human
ggagaagagaggaga

SEQ ID NO: 2876841 - RNA, 16 nt, Human
ggagaagagaggagag

SEQ ID NO: 2876842 - RNA, 22 nt, Human
ggagaagagaggagaggagaga

SEQ ID NO: 2876843 - RNA, 12 nt, Human
ggacugagcccc

SEQ ID NO: 2876844 - RNA, 13 nt, Human
ggagaacuagaga

SEQ ID NO: 2876845 - RNA, 17 nt, Human
ggacugagggacucuga

SEQ ID NO: 2876846 - RNA, 15 nt, Human
ggacugagccccgca

SEQ ID NO: 2876847 - RNA, 13 nt, Human
ggacugagccugg

SEQ ID NO: 2876848 - RNA, 17 nt, Human
ggacugagccuggccca

SEQ ID NO: 2876849 - RNA, 21 nt, Human
ggacugagggacucugaagcc

SEQ ID NO: 2876850 - RNA, 19 nt, Human
ggagaagaguugaggaacu

SEQ ID NO: 2876851 - RNA, 20 nt, Human
ggagaagaguugaggaacug

SEQ ID NO: 2876852 - RNA, 17 nt, Human
ggagaagggaaguugaa

SEQ ID NO: 2876853 - RNA, 14 nt, Human
ggagaagggaugga

SEQ ID NO: 2876854 - RNA, 21 nt, Human
ggagaagggauggaggucaca

SEQ ID NO: 2876855 - RNA, 22 nt, Human
ggagacagccccagagcagggu

SEQ ID NO: 2876856 - RNA, 23 nt, Human
ggagacagccccagagcagggug

SEQ ID NO: 2876857 - RNA, 21 nt, Human
ggagacagccccagagcaggg

SEQ ID NO: 2876858 - RNA, 20 nt, Human
ggagacagccccagagcagg

SEQ ID NO: 2876859 - RNA, 23 nt, Human
ggacgcagcaggaggccaggccg

SEQ ID NO: 2876860 - RNA, 20 nt, Human
ggacgaagaagagccacagu

SEQ ID NO: 2876861 - RNA, 15 nt, Human
ggacgcuuugucugu

SEQ ID NO: 2876862 - RNA, 17 nt, Human
ggacugaaaaccucucc

SEQ ID NO: 2876863 - RNA, 16 nt, Human
ggacugaaaaccucuc

SEQ ID NO: 2876864 - RNA, 18 nt, Human
ggacugaaaaccucuccu

SEQ ID NO: 2876865 - RNA, 13 nt, Human
ggacugacagcau

SEQ ID NO: 2876866 - RNA, 20 nt, Human
ggacugacagcaugugcccu

SEQ ID NO: 2876867 - RNA, 21 nt, Human
ggacugacagcaugugcccuc

SEQ ID NO: 2876868 - RNA, 18 nt, Human
ggaccuugaacuggguac

SEQ ID NO: 2876869 - RNA, 19 nt, Human
ggacccaauguaggagcug

SEQ ID NO: 2876870 - RNA, 17 nt, Human
ggaccagguauagagaa

SEQ ID NO: 2876871 - RNA, 13 nt, Human
ggaccuuuuaaag

SEQ ID NO: 2876872 - RNA, 15 nt, Human
ggaccuuuuaaagug

SEQ ID NO: 2876873 - RNA, 21 nt, Human
ggaccuuuuaaaguguuucag

SEQ ID NO: 2876874 - RNA, 22 nt, Human
ggaccuuuuaaaguguuucagc

SEQ ID NO: 2876875 - RNA, 19 nt, Human
ggacgaagaagagccacag

SEQ ID NO: 2876876 - RNA, 22 nt, Human
ggacgcagcaggaggccaggcc

SEQ ID NO: 2876877 - RNA, 21 nt, Human
ggacgagaugggaaggcacag

SEQ ID NO: 2876878 - RNA, 13 nt, Human
ggaccaggcaaug

SEQ ID NO: 2876879 - RNA, 23 nt, Human
ggaccaggcaaugugacuuugca

SEQ ID NO: 2876880 - RNA, 14 nt, Human
ggaccauccuauuu

SEQ ID NO: 2876881 - RNA, 20 nt, Human
ggaccagugguuuccaguca

SEQ ID NO: 2876882 - RNA, 22 nt, Human
ggaccagugguuuccagucaug

SEQ ID NO: 2876883 - RNA, 19 nt, Human
ggacccaaggaaaacugca

SEQ ID NO: 2876884 - RNA, 22 nt, Human
ggacccaaggaaaacugcaugg

SEQ ID NO: 2876885 - RNA, 16 nt, Human
ggaccaugugucacuu

SEQ ID NO: 2876886 - RNA, 21 nt, Human
ggaccaugugucacuugugcu

SEQ ID NO: 2876887 - RNA, 22 nt, Human
ggaccaugugucacuugugcuu

SEQ ID NO: 2876888 - RNA, 22 nt, Human
ggagggcguucuuaggcugcug

SEQ ID NO: 2876889 - RNA, 16 nt, Human
ggagggcccuaccuga

SEQ ID NO: 2876890 - RNA, 13 nt, Human
ggagggccugggc

SEQ ID NO: 2876891 - RNA, 13 nt, Human
ggaggggccuggc

SEQ ID NO: 2876892 - RNA, 22 nt, Human
ggagucccaccuuggcugcagg

SEQ ID NO: 2876893 - RNA, 15 nt, Human
ggagucagccaggag

SEQ ID NO: 2876894 - RNA, 18 nt, Human
ggagucagccaggagcug

SEQ ID NO: 2876895 - RNA, 19 nt, Human
ggagucagccaggagcugu

SEQ ID NO: 2876896 - RNA, 17 nt, Human
ggaguaugucugaugga

SEQ ID NO: 2876897 - RNA, 22 nt, Human
ggagucaccuucccuugccacu

SEQ ID NO: 2876898 - RNA, 17 nt, Human
ggaguacaggugaagca

SEQ ID NO: 2876899 - RNA, 17 nt, Human
ggaguaaccgcuccagg

SEQ ID NO: 2876900 - RNA, 21 nt, Human
ggaguaauaguaaacacaggg

SEQ ID NO: 2876901 - RNA, 14 nt, Human
ggagguuugucggg

SEQ ID NO: 2876902 - RNA, 15 nt, Human
ggagguugggugggc

SEQ ID NO: 2876903 - RNA, 17 nt, Human
ggagguugcauugagcu

SEQ ID NO: 2876904 - RNA, 17 nt, Human
ggagggcggcacagguc

SEQ ID NO: 2876905 - RNA, 14 nt, Human
ggaggggccuggca

SEQ ID NO: 2876906 - RNA, 18 nt, Human
ggaggggccuggcagccg

SEQ ID NO: 2876907 - RNA, 21 nt, Human
ggaggggccuggcagccgugc

SEQ ID NO: 2876908 - RNA, 17 nt, Human
ggaggggcgcccaccuc

SEQ ID NO: 2876909 - RNA, 22 nt, Human
ggaggggcgcccaccuccccac

SEQ ID NO: 2876910 - RNA, 16 nt, Human
ggagccuagaagcugg

SEQ ID NO: 2876911 - RNA, 22 nt, Human
ggaggaccugacccuacucccu

SEQ ID NO: 2876912 - RNA, 21 nt, Human
ggaggauguucugggacacag

SEQ ID NO: 2876913 - RNA, 18 nt, Human
ggaggauguucugggaca

SEQ ID NO: 2876914 - RNA, 20 nt, Human
ggaggcaaagcuggcucacc

SEQ ID NO: 2876915 - RNA, 17 nt, Human
ggaggcaaagcuggcuc

SEQ ID NO: 2876916 - RNA, 21 nt, Human
ggaggcaaagcuggcucaccu

SEQ ID NO: 2876917 - RNA, 12 nt, Human
ggaggcaagcaa

SEQ ID NO: 2876918 - RNA, 22 nt, Human
ggaggauugcuugagcccagga

SEQ ID NO: 2876919 - RNA, 20 nt, Human
ggaggauugcuugagcccag

SEQ ID NO: 2876920 - RNA, 12 nt, Human
ggaggaccuggg

SEQ ID NO: 2876921 - RNA, 13 nt, Human
ggaggaccugggg

SEQ ID NO: 2876922 - RNA, 18 nt, Human
ggaggaccuggggcacag

SEQ ID NO: 2876923 - RNA, 19 nt, Human
ggaggaccuggggcacagu

SEQ ID NO: 2876924 - RNA, 21 nt, Human
ggagggaugcugccugaguca

SEQ ID NO: 2876925 - RNA, 11 nt, Human
ggaggcagccu

SEQ ID NO: 2876926 - RNA, 17 nt, Human
ggaggcagccagggcuu

SEQ ID NO: 2876927 - RNA, 20 nt, Human
ggaggcagagguugcaguga

SEQ ID NO: 2876928 - RNA, 20 nt, Human
ggaggcagagguuguaguga

SEQ ID NO: 2876929 - RNA, 12 nt, Human
ggaggcagaguu

SEQ ID NO: 2876930 - RNA, 21 nt, Human
ggaggcagaguuugccuuccu

SEQ ID NO: 2876931 - RNA, 21 nt, Human
ggaggcacagcaaacuguccc

SEQ ID NO: 2876932 - RNA, 20 nt, Human
ggagccuccacugccucugg

SEQ ID NO: 2876933 - RNA, 14 nt, Human
ggagccuaggacca

SEQ ID NO: 2876934 - RNA, 21 nt, Human
ggagccuaggaccacucagcc

SEQ ID NO: 2876935 - RNA, 22 nt, Human
ggagccuaggaccacucagccc

SEQ ID NO: 2876936 - RNA, 14 nt, Human
ggagcacagguccc

SEQ ID NO: 2876937 - RNA, 15 nt, Human
ggagcacagguccca

SEQ ID NO: 2876938 - RNA, 17 nt, Human
ggagcacaggucccacc

SEQ ID NO: 2876939 - RNA, 18 nt, Human
ggagcacaggucccaccu

SEQ ID NO: 2876940 - RNA, 21 nt, Human
ggagcaauuacggggugaccu

SEQ ID NO: 2876941 - RNA, 14 nt, Human
ggagcaaaggcuga

SEQ ID NO: 2876942 - RNA, 21 nt, Human
ggagaagucuuucaagaauga

SEQ ID NO: 2876943 - RNA, 19 nt, Human
ggagacccaccccaccugc

SEQ ID NO: 2876944 - RNA, 20 nt, Human
ggagacccaccccaccugca

SEQ ID NO: 2876945 - RNA, 17 nt, Human
ggagaccaaggcgggag

SEQ ID NO: 2876946 - RNA, 15 nt, Human
ggagcuaucaggaac

SEQ ID NO: 2876947 - RNA, 22 nt, Human
ggagcuaucaggaacagcuaug

SEQ ID NO: 2876948 - RNA, 14 nt, Human
ggagcucagagagg

SEQ ID NO: 2876949 - RNA, 17 nt, Human
ggagcucagagagggca

SEQ ID NO: 2876950 - RNA, 20 nt, Human
ggagcucagagagggcaggc

SEQ ID NO: 2876951 - RNA, 12 nt, Human
ggagcucagccc

SEQ ID NO: 2876952 - RNA, 23 nt, Human
ggagcgcaccugcccccuggugg

SEQ ID NO: 2876953 - RNA, 21 nt, Human
ggagcgcaccugcccccuggu

SEQ ID NO: 2876954 - RNA, 19 nt, Human
ggagcgcaccugcccccug

SEQ ID NO: 2876955 - RNA, 12 nt, Human
ggagcuaaggcu

SEQ ID NO: 2876956 - RNA, 15 nt, Human
ggagcuaaggcucua

SEQ ID NO: 2876957 - RNA, 20 nt, Human
ggagcuaaggcucuaugagu

SEQ ID NO: 2876958 - RNA, 15 nt, Human
ggagcgguggcccug

SEQ ID NO: 2876959 - RNA, 22 nt, Human
ggagcgguggcccugucccucc

SEQ ID NO: 2876960 - RNA, 16 nt, Human
ggagcgucaggguugg

SEQ ID NO: 2876961 - RNA, 20 nt, Human
ggagccugagucagggccca

SEQ ID NO: 2876962 - RNA, 21 nt, Human
ggagccugagucagggcccag

SEQ ID NO: 2876963 - RNA, 22 nt, Human
ggagccugagucagggcccaga

SEQ ID NO: 2876964 - RNA, 23 nt, Human
ggagccugagucagggcccagag

SEQ ID NO: 2876965 - RNA, 13 nt, Human
ggagccugcuggu

SEQ ID NO: 2876966 - RNA, 12 nt, Human
ggagccuggugc

SEQ ID NO: 2876967 - RNA, 22 nt, Human
ggagccugcuggucacagccuc

SEQ ID NO: 2876968 - RNA, 13 nt, Human
ggagccuggcaca

SEQ ID NO: 2876969 - RNA, 14 nt, Human
ggagccuggcacag

SEQ ID NO: 2876970 - RNA, 16 nt, Human
ggagccuggcacagga

SEQ ID NO: 2876971 - RNA, 19 nt, Human
ggagccuggcacaggacug

SEQ ID NO: 2876972 - RNA, 20 nt, Human
ggagccuggcacaggacuga

SEQ ID NO: 2876973 - RNA, 20 nt, Human
ggagccuuugguucuggcca

SEQ ID NO: 2876974 - RNA, 16 nt, Human
ggagccuuuuaacugu

SEQ ID NO: 2876975 - RNA, 19 nt, Human
ggagccuuuuuaaaacaca

SEQ ID NO: 2876976 - RNA, 15 nt, Human
ggagcgcaccugccc

SEQ ID NO: 2876977 - RNA, 14 nt, Human
ucagacuuuuguac

SEQ ID NO: 2876978 - RNA, 15 nt, Human
ucagacuuuuguaca

SEQ ID NO: 2876979 - RNA, 16 nt, Human
ucagacuuuuguacau

SEQ ID NO: 2876980 - RNA, 12 nt, Human
ucagagaauuuc

SEQ ID NO: 2876981 - RNA, 21 nt, Human
ucagaggggaauaaacuguug

SEQ ID NO: 2876982 - RNA, 15 nt, Human
ucagacagaacuuga

SEQ ID NO: 2876983 - RNA, 16 nt, Human
ucagaaacuagaaaug

SEQ ID NO: 2876984 - RNA, 16 nt, Human
ucagacagaacuugaa

SEQ ID NO: 2876985 - RNA, 23 nt, Human
ucagacagaacuugaauguguca

SEQ ID NO: 2876986 - RNA, 21 nt, Human
ucagaccuuggaucagaugaa

SEQ ID NO: 2876987 - RNA, 19 nt, Human
ucagacuaagaaauauucc

SEQ ID NO: 2876988 - RNA, 21 nt, Human
ucagacuaagaaauauuccaa

SEQ ID NO: 2876989 - RNA, 21 nt, Human
ucagacugcugggacuggcca

SEQ ID NO: 2876990 - RNA, 20 nt, Human
ucagaccuuggaucagauga

SEQ ID NO: 2876991 - RNA, 21 nt, Human
ucagacuggcuggcugcagug

SEQ ID NO: 2876992 - RNA, 20 nt, Human
ucagacuggcuggcugcagu

SEQ ID NO: 2876993 - RNA, 23 nt, Human
ucagacuugccaugugacucugg

SEQ ID NO: 2876994 - RNA, 13 nt, Human
ucagacuugucaa

SEQ ID NO: 2876995 - RNA, 14 nt, Human
ucagacuugucaag

SEQ ID NO: 2876996 - RNA, 15 nt, Human
ucagacuugucaagc

SEQ ID NO: 2876997 - RNA, 14 nt, Human
ucagacuggcuggc

SEQ ID NO: 2876998 - RNA, 13 nt, Human
ucagacuggcugg

SEQ ID NO: 2876999 - RNA, 23 nt, Human
ucagacugcugggacuggccagg

SEQ ID NO: 2877000 - RNA, 13 nt, Human
ucacuuuaaaccu

SEQ ID NO: 2877001 - RNA, 18 nt, Human
ucagaaaccaaacaguuu

SEQ ID NO: 2877002 - RNA, 12 nt, Human
ucagaaacuguu

SEQ ID NO: 2877003 - RNA, 21 nt, Human
ucagaaauuggaacagaaugu

SEQ ID NO: 2877004 - RNA, 17 nt, Human
ucagaaauuuuuaucag

SEQ ID NO: 2877005 - RNA, 19 nt, Human
ucagaaauuuuuaucaguu

SEQ ID NO: 2877006 - RNA, 22 nt, Human
ucagaaauuuuuaucaguuucc

SEQ ID NO: 2877007 - RNA, 16 nt, Human
ucagaaauuggaacag

SEQ ID NO: 2877008 - RNA, 18 nt, Human
ucagaaauuggaacagaa

SEQ ID NO: 2877009 - RNA, 21 nt, Human
ucagaauugaucauuuucccc

SEQ ID NO: 2877010 - RNA, 16 nt, Human
ucagaauugaaacacu

SEQ ID NO: 2877011 - RNA, 17 nt, Human
ucagaauugaaacacuu

SEQ ID NO: 2877012 - RNA, 18 nt, Human
ucagaauugaaacacuuu

SEQ ID NO: 2877013 - RNA, 23 nt, Human
ucagacacccucaaccucuucug

SEQ ID NO: 2877014 - RNA, 18 nt, Human
ucagacagaaccccuaca

SEQ ID NO: 2877015 - RNA, 17 nt, Human
ucagacacccucaaccu

SEQ ID NO: 2877016 - RNA, 22 nt, Human
ucagacacccucaaccucuucu

SEQ ID NO: 2877017 - RNA, 15 nt, Human
ucagacacccucaac

SEQ ID NO: 2877018 - RNA, 19 nt, Human
ucacuugugccaacacuca

SEQ ID NO: 2877019 - RNA, 21 nt, Human
ucacuugugccaacacucaag

SEQ ID NO: 2877020 - RNA, 13 nt, Human
ucacuugugcuuu

SEQ ID NO: 2877021 - RNA, 15 nt, Human
ucacuugugcuuugc

SEQ ID NO: 2877022 - RNA, 16 nt, Human
ucacuugugcuuugcu

SEQ ID NO: 2877023 - RNA, 18 nt, Human
ucacuugugcuuugcucu

SEQ ID NO: 2877024 - RNA, 19 nt, Human
ucacuugugcuuugcucuu

SEQ ID NO: 2877025 - RNA, 20 nt, Human
ucacuugugcuuugcucuug

SEQ ID NO: 2877026 - RNA, 23 nt, Human
ucacuugugcuuugcucuugucc

SEQ ID NO: 2877027 - RNA, 23 nt, Human
ucacuguaagacucauucccuag

SEQ ID NO: 2877028 - RNA, 20 nt, Human
ucacugguagaccaaaauaa

SEQ ID NO: 2877029 - RNA, 19 nt, Human
ucacugguagaccaaaaua

SEQ ID NO: 2877030 - RNA, 18 nt, Human
ucacugguagaccaaaau

SEQ ID NO: 2877031 - RNA, 18 nt, Human
ucacuggaccacugggca

SEQ ID NO: 2877032 - RNA, 17 nt, Human
ucacuggggccuacagc

SEQ ID NO: 2877033 - RNA, 20 nt, Human
ucacugggccaauucaauac

SEQ ID NO: 2877034 - RNA, 15 nt, Human
ucacuggagcccagg

SEQ ID NO: 2877035 - RNA, 14 nt, Human
ucacuggagcccag

SEQ ID NO: 2877036 - RNA, 13 nt, Human
ucacuggagccca

SEQ ID NO: 2877037 - RNA, 12 nt, Human
ucacuggagccc

SEQ ID NO: 2877038 - RNA, 11 nt, Human
ucacuggagcc

SEQ ID NO: 2877039 - RNA, 15 nt, Human
ucacugcuugaugaa

SEQ ID NO: 2877040 - RNA, 21 nt, Human
ucacugcuugaugaagcaagg

SEQ ID NO: 2877041 - RNA, 16 nt, Human
ucacugcuuuuggccu

SEQ ID NO: 2877042 - RNA, 17 nt, Human
ucacugcuuuuggccug

SEQ ID NO: 2877043 - RNA, 18 nt, Human
ucacugcuuuuggccugg

SEQ ID NO: 2877044 - RNA, 19 nt, Human
ucacugcuuuuggccugga

SEQ ID NO: 2877045 - RNA, 23 nt, Human
ucacugcuuuuggccuggaguuu

SEQ ID NO: 2877046 - RNA, 17 nt, Human
ucacugcuggcugccuu

SEQ ID NO: 2877047 - RNA, 18 nt, Human
ucacugcuggcugccuua

SEQ ID NO: 2877048 - RNA, 22 nt, Human
ucacugcuggcugccuuagaac

SEQ ID NO: 2877049 - RNA, 13 nt, Human
ucacugcuggcug

SEQ ID NO: 2877050 - RNA, 14 nt, Human
ucacugcuggcugc

SEQ ID NO: 2877051 - RNA, 15 nt, Human
ucacugcuggcugcc

SEQ ID NO: 2877052 - RNA, 16 nt, Human
ucacugcuggcugccu

SEQ ID NO: 2877053 - RNA, 14 nt, Human
ucacugcucccuga

SEQ ID NO: 2877054 - RNA, 18 nt, Human
ucacugcucccugaagcc

SEQ ID NO: 2877055 - RNA, 19 nt, Human
ucacugcucccugaagcca

SEQ ID NO: 2877056 - RNA, 20 nt, Human
ucacugcucccugaagccag

SEQ ID NO: 2877057 - RNA, 21 nt, Human
ucacugcucccugaagccagc

SEQ ID NO: 2877058 - RNA, 23 nt, Human
ucacugcucccugaagccagccu

SEQ ID NO: 2877059 - RNA, 24 nt, Human
ucacugcucccugaagccagccuu

SEQ ID NO: 2877060 - RNA, 12 nt, Human
ucacugcuggcu

SEQ ID NO: 2877061 - RNA, 20 nt, Human
ucacucuuauugcccacgcu

SEQ ID NO: 2877062 - RNA, 18 nt, Human
ucacugcauccuccgccu

SEQ ID NO: 2877063 - RNA, 12 nt, Human
ucacucuuaggc

SEQ ID NO: 2877064 - RNA, 20 nt, Human
ucacugccacacucuccauc

SEQ ID NO: 2877065 - RNA, 15 nt, Human
ucacugccacuuugc

SEQ ID NO: 2877066 - RNA, 16 nt, Human
ucacugccacuuugca

SEQ ID NO: 2877067 - RNA, 17 nt, Human
ucacugccacuuugcac

SEQ ID NO: 2877068 - RNA, 19 nt, Human
ucacugccacuuugcacau

SEQ ID NO: 2877069 - RNA, 20 nt, Human
ucacugccacuuugcacauu

SEQ ID NO: 2877070 - RNA, 22 nt, Human
ucacugccacuuugcacauuuu

SEQ ID NO: 2877071 - RNA, 23 nt, Human
ucacugccacuuugcacauuuug

SEQ ID NO: 2877072 - RNA, 20 nt, Human
ucacugccagagauaaacua

SEQ ID NO: 2877073 - RNA, 19 nt, Human
ucacugccacacucuccau

SEQ ID NO: 2877074 - RNA, 15 nt, Human
ucacugccacacucu

SEQ ID NO: 2877075 - RNA, 19 nt, Human
ucacugcauccuccgccuc

SEQ ID NO: 2877076 - RNA, 13 nt, Human
ucacugcauccuc

SEQ ID NO: 2877077 - RNA, 17 nt, Human
ucacugcauuauucucu

SEQ ID NO: 2877078 - RNA, 18 nt, Human
ucacugcauuauucucuu

SEQ ID NO: 2877079 - RNA, 18 nt, Human
ucacugccaucaaacugu

SEQ ID NO: 2877080 - RNA, 12 nt, Human
ucacugcccgca

SEQ ID NO: 2877081 - RNA, 18 nt, Human
ucacugcccgcacacccu

SEQ ID NO: 2877082 - RNA, 19 nt, Human
ucacugcccgcacacccuc

SEQ ID NO: 2877083 - RNA, 20 nt, Human
ucacugcccgcacacccuca

SEQ ID NO: 2877084 - RNA, 22 nt, Human
ucacugcccgcacacccucacu

SEQ ID NO: 2877085 - RNA, 22 nt, Human
ucacucugucgcccagucugga

SEQ ID NO: 2877086 - RNA, 17 nt, Human
ucacucuuauugcccac

SEQ ID NO: 2877087 - RNA, 24 nt, Human
ucaccagccccacugccagcagca

SEQ ID NO: 2877088 - RNA, 23 nt, Human
ucaccagccccacugccagcagc

SEQ ID NO: 2877089 - RNA, 17 nt, Human
ucaccccguuacagcuc

SEQ ID NO: 2877090 - RNA, 13 nt, Human
ucaccccuccagg

SEQ ID NO: 2877091 - RNA, 14 nt, Human
ucaccccuccagga

SEQ ID NO: 2877092 - RNA, 13 nt, Human
ucaccagccccag

SEQ ID NO: 2877093 - RNA, 22 nt, Human
ucaccagccccacugccagcag

SEQ ID NO: 2877094 - RNA, 21 nt, Human
ucaccagccccacugccagca

SEQ ID NO: 2877095 - RNA, 19 nt, Human
ucaccagccccacugccag

SEQ ID NO: 2877096 - RNA, 15 nt, Human
ucaccagccccacug

SEQ ID NO: 2877097 - RNA, 13 nt, Human
ucagcuccccaga

SEQ ID NO: 2877098 - RNA, 15 nt, Human
ucagcuccccagagu

SEQ ID NO: 2877099 - RNA, 17 nt, Human
ucagcuccccagagucc

SEQ ID NO: 2877100 - RNA, 16 nt, Human
ucagccugcugcccag

SEQ ID NO: 2877101 - RNA, 21 nt, Human
ucagccugcugcccaggcugu

SEQ ID NO: 2877102 - RNA, 22 nt, Human
ucagccugcugcccaggcugug

SEQ ID NO: 2877103 - RNA, 19 nt, Human
ucagcucuuggcuccacug

SEQ ID NO: 2877104 - RNA, 13 nt, Human
ucagcucuuuuug

SEQ ID NO: 2877105 - RNA, 22 nt, Human
ucagccucccgaguagcuggga

SEQ ID NO: 2877106 - RNA, 21 nt, Human
ucagccucccgaguagcuggg

SEQ ID NO: 2877107 - RNA, 20 nt, Human
ucagccuccugaguagcugg

SEQ ID NO: 2877108 - RNA, 20 nt, Human
ucagccuccggaguagcugg

SEQ ID NO: 2877109 - RNA, 16 nt, Human
ucagccucccaaagug

SEQ ID NO: 2877110 - RNA, 13 nt, Human
ucagccuccugag

SEQ ID NO: 2877111 - RNA, 21 nt, Human
ucagccuccugaguagcugga

SEQ ID NO: 2877112 - RNA, 22 nt, Human
ucagccuccugaguagcuggga

SEQ ID NO: 2877113 - RNA, 21 nt, Human
ucagccucccaaagugcuggg

SEQ ID NO: 2877114 - RNA, 19 nt, Human
ucagccucccaaagugcug

SEQ ID NO: 2877115 - RNA, 14 nt, Human
ucagccucccaaag

SEQ ID NO: 2877116 - RNA, 22 nt, Human
ucagccucccgaauagcuggga

SEQ ID NO: 2877117 - RNA, 21 nt, Human
ucagccucccgaauagcuggg

SEQ ID NO: 2877118 - RNA, 18 nt, Human
ucagccucccgaguagcu

SEQ ID NO: 2877119 - RNA, 20 nt, Human
ucagccucccgaguagcugg

SEQ ID NO: 2877120 - RNA, 17 nt, Human
ucagcauucucacuccu

SEQ ID NO: 2877121 - RNA, 20 nt, Human
ucagcauucucacuccuacc

SEQ ID NO: 2877122 - RNA, 15 nt, Human
ucagaguauggagcu

SEQ ID NO: 2877123 - RNA, 18 nt, Human
ucagauauauaucauauu

SEQ ID NO: 2877124 - RNA, 18 nt, Human
ucagagguagggcugcca

SEQ ID NO: 2877125 - RNA, 17 nt, Human
ucagagggggacugcug

SEQ ID NO: 2877126 - RNA, 18 nt, Human
ucagagggggacugcugc

SEQ ID NO: 2877127 - RNA, 22 nt, Human
ucagagggggacugcugcugcc

SEQ ID NO: 2877128 - RNA, 17 nt, Human
ucagagguucuuugagg

SEQ ID NO: 2877129 - RNA, 23 nt, Human
ucagagguuuaccuagagaacag

SEQ ID NO: 2877130 - RNA, 13 nt, Human
ucagaguagaaau

SEQ ID NO: 2877131 - RNA, 14 nt, Human
ucagaguagaaaua

SEQ ID NO: 2877132 - RNA, 15 nt, Human
ucagaguagaaauaa

SEQ ID NO: 2877133 - RNA, 19 nt, Human
ucaggcaauucuccugccu

SEQ ID NO: 2877134 - RNA, 18 nt, Human
ucaggcaccagucccugu

SEQ ID NO: 2877135 - RNA, 12 nt, Human
ucaggcaccagu

SEQ ID NO: 2877136 - RNA, 13 nt, Human
ucaggcacagguc

SEQ ID NO: 2877137 - RNA, 14 nt, Human
ucaggcacagguca

SEQ ID NO: 2877138 - RNA, 15 nt, Human
ucaggcacaggucag

SEQ ID NO: 2877139 - RNA, 16 nt, Human
ucaggauuuaaaaacu

SEQ ID NO: 2877140 - RNA, 20 nt, Human
ucaggauuuaaaaacuggaa

SEQ ID NO: 2877141 - RNA, 21 nt, Human
ucaggauuuaaaaacuggaac

SEQ ID NO: 2877142 - RNA, 13 nt, Human
ucaggcuccccag

SEQ ID NO: 2877143 - RNA, 15 nt, Human
ucaggcacuagccuu

SEQ ID NO: 2877144 - RNA, 19 nt, Human
ucaggcaccagucccuguc

SEQ ID NO: 2877145 - RNA, 16 nt, Human
ucaggcacuagccuuu

SEQ ID NO: 2877146 - RNA, 21 nt, Human
ucaggcacuagccuuuggcuc

SEQ ID NO: 2877147 - RNA, 22 nt, Human
ucaggcacuagccuuuggcucu

SEQ ID NO: 2877148 - RNA, 23 nt, Human
ucaggcuuccuuggcaucacagg

SEQ ID NO: 2877149 - RNA, 15 nt, Human
ucaggcuuccuuggc

SEQ ID NO: 2877150 - RNA, 14 nt, Human
ucaggcuuccuugg

SEQ ID NO: 2877151 - RNA, 16 nt, Human
ucaggcuggugggagg

SEQ ID NO: 2877152 - RNA, 17 nt, Human
ucaggcuggugggaggg

SEQ ID NO: 2877153 - RNA, 15 nt, Human
ucaggcugcuuggga

SEQ ID NO: 2877154 - RNA, 24 nt, Human
ucaggcugcuggggccucagacga

SEQ ID NO: 2877155 - RNA, 14 nt, Human
ucaggcugguggga

SEQ ID NO: 2877156 - RNA, 21 nt, Human
ucagcugaaugccuccugugg

SEQ ID NO: 2877157 - RNA, 22 nt, Human
ucagcugaaugccuccuguggg

SEQ ID NO: 2877158 - RNA, 23 nt, Human
ucagcugaaugccuccugugggg

SEQ ID NO: 2877159 - RNA, 14 nt, Human
ucagcauucccucc

SEQ ID NO: 2877160 - RNA, 18 nt, Human
ucagggccuggggccuga

SEQ ID NO: 2877161 - RNA, 20 nt, Human
ucagggccuggggccugaga

SEQ ID NO: 2877162 - RNA, 21 nt, Human
ucagggccuggggccugagag

SEQ ID NO: 2877163 - RNA, 22 nt, Human
ucagggccuggggccugagaga

SEQ ID NO: 2877164 - RNA, 23 nt, Human
ucagggccuggggccugagagaa

SEQ ID NO: 2877165 - RNA, 15 nt, Human
ucagggccugguuga

SEQ ID NO: 2877166 - RNA, 13 nt, Human
ucagggcuccucc

SEQ ID NO: 2877167 - RNA, 15 nt, Human
ucagggcuccuccca

SEQ ID NO: 2877168 - RNA, 16 nt, Human
ucagggcuccucccag

SEQ ID NO: 2877169 - RNA, 17 nt, Human
ucagggcuccucccagc

SEQ ID NO: 2877170 - RNA, 18 nt, Human
ucagggcuccucccagcu

SEQ ID NO: 2877171 - RNA, 23 nt, Human
ucagggcuaaacgggcauugccu

SEQ ID NO: 2877172 - RNA, 17 nt, Human
ucagggccaugccugcc

SEQ ID NO: 2877173 - RNA, 12 nt, Human
ucagggcccaga

SEQ ID NO: 2877174 - RNA, 13 nt, Human
ucagggcccagag

SEQ ID NO: 2877175 - RNA, 14 nt, Human
ucagggcccagagg

SEQ ID NO: 2877176 - RNA, 17 nt, Human
ucagggcccagaggcug

SEQ ID NO: 2877177 - RNA, 18 nt, Human
ucagggcccagaggcuga

SEQ ID NO: 2877178 - RNA, 19 nt, Human
ucagggcccagaggcugag

SEQ ID NO: 2877179 - RNA, 14 nt, Human
ucagggccaugccu

SEQ ID NO: 2877180 - RNA, 14 nt, Human
ucagggcagguggg

SEQ ID NO: 2877181 - RNA, 20 nt, Human
ucagggauuuuuuuuuuaaa

SEQ ID NO: 2877182 - RNA, 23 nt, Human
ucagggaaaagcagcucuccccu

SEQ ID NO: 2877183 - RNA, 19 nt, Human
ucagggaaaagcagcucuc

SEQ ID NO: 2877184 - RNA, 18 nt, Human
ucagggaaaagcagcucu

SEQ ID NO: 2877185 - RNA, 16 nt, Human
ucagggaaaagcagcu

SEQ ID NO: 2877186 - RNA, 13 nt, Human
ucagggagugcug

SEQ ID NO: 2877187 - RNA, 17 nt, Human
ucagggagugcuggcuc

SEQ ID NO: 2877188 - RNA, 19 nt, Human
ucagggagugcuggcucac

SEQ ID NO: 2877189 - RNA, 22 nt, Human
ucagggagugcuggcucacagu

SEQ ID NO: 2877190 - RNA, 23 nt, Human
ucagggagcagggaaggccugac

SEQ ID NO: 2877191 - RNA, 21 nt, Human
ucagggagcagggaaggccug

SEQ ID NO: 2877192 - RNA, 22 nt, Human
uccacagagagggagagcagag

SEQ ID NO: 2877193 - RNA, 23 nt, Human
uccacagagagggagagcagaga

SEQ ID NO: 2877194 - RNA, 17 nt, Human
uccacagaguaagacau

SEQ ID NO: 2877195 - RNA, 18 nt, Human
uccacagaguaagacauu

SEQ ID NO: 2877196 - RNA, 19 nt, Human
uccacagaguaagacauug

SEQ ID NO: 2877197 - RNA, 11 nt, Human
uccacagauug

SEQ ID NO: 2877198 - RNA, 15 nt, Human
uccacagauuguuuc

SEQ ID NO: 2877199 - RNA, 16 nt, Human
uccacagauuguuucu

SEQ ID NO: 2877200 - RNA, 17 nt, Human
uccacagauuguuucua

SEQ ID NO: 2877201 - RNA, 22 nt, Human
uccacagauuguuucuauacaa

SEQ ID NO: 2877202 - RNA, 12 nt, Human
uccacccugcuc

SEQ ID NO: 2877203 - RNA, 23 nt, Human
uccaccugggcauauccaccacc

SEQ ID NO: 2877204 - RNA, 20 nt, Human
uccaccugguacucccucuc

SEQ ID NO: 2877205 - RNA, 21 nt, Human
uccaccugguacucccucuca

SEQ ID NO: 2877206 - RNA, 23 nt, Human
uccaccugguacucccucucagg

SEQ ID NO: 2877207 - RNA, 19 nt, Human
uccaaaauaauuuuaagaa

SEQ ID NO: 2877208 - RNA, 15 nt, Human
uccaaaauaauuuua

SEQ ID NO: 2877209 - RNA, 17 nt, Human
ucauuucucacugugua

SEQ ID NO: 2877210 - RNA, 15 nt, Human
uccaauuuuaauuua

SEQ ID NO: 2877211 - RNA, 17 nt, Human
uccaauuuuaauuuagu

SEQ ID NO: 2877212 - RNA, 23 nt, Human
uccaauuuuaauuuaguaaaugu

SEQ ID NO: 2877213 - RNA, 16 nt, Human
uccaauuguugacagu

SEQ ID NO: 2877214 - RNA, 19 nt, Human
uccaaaauguguauuucuu

SEQ ID NO: 2877215 - RNA, 21 nt, Human
uccaauuguugacaguucuga

SEQ ID NO: 2877216 - RNA, 22 nt, Human
uccaauuguugacaguucugaa

SEQ ID NO: 2877217 - RNA, 14 nt, Human
uccaauuuucugga

SEQ ID NO: 2877218 - RNA, 21 nt, Human
uccacaagugccgcaaauugu

SEQ ID NO: 2877219 - RNA, 15 nt, Human
uccacacaagggaag

SEQ ID NO: 2877220 - RNA, 18 nt, Human
uccacacaagggaaggac

SEQ ID NO: 2877221 - RNA, 19 nt, Human
uccacacaagggaaggaca

SEQ ID NO: 2877222 - RNA, 23 nt, Human
uccacacaagggaaggacagaaa

SEQ ID NO: 2877223 - RNA, 20 nt, Human
uccaccugucucagccuccc

SEQ ID NO: 2877224 - RNA, 12 nt, Human
uccaccuguggg

SEQ ID NO: 2877225 - RNA, 13 nt, Human
uccaccugugggu

SEQ ID NO: 2877226 - RNA, 17 nt, Human
uccaccugucucagccu

SEQ ID NO: 2877227 - RNA, 16 nt, Human
uccaccugucucagcc

SEQ ID NO: 2877228 - RNA, 13 nt, Human
uccaccugucuca

SEQ ID NO: 2877229 - RNA, 12 nt, Human
uccaccuuccca

SEQ ID NO: 2877230 - RNA, 15 nt, Human
uccaccuucccacuu

SEQ ID NO: 2877231 - RNA, 13 nt, Human
uccagccagggcu

SEQ ID NO: 2877232 - RNA, 14 nt, Human
uccagccagggcug

SEQ ID NO: 2877233 - RNA, 15 nt, Human
uccagccagggcugc

SEQ ID NO: 2877234 - RNA, 17 nt, Human
uccagccagggcugcua

SEQ ID NO: 2877235 - RNA, 17 nt, Human
uccagcucaccagcccc

SEQ ID NO: 2877236 - RNA, 16 nt, Human
uccagcucaccagccc

SEQ ID NO: 2877237 - RNA, 18 nt, Human
uccagcucaccagcccca

SEQ ID NO: 2877238 - RNA, 15 nt, Human
uccagcucaccagcc

SEQ ID NO: 2877239 - RNA, 13 nt, Human
uccagcuggugag

SEQ ID NO: 2877240 - RNA, 15 nt, Human
uccagcccacauugg

SEQ ID NO: 2877241 - RNA, 11 nt, Human
uccagcccauc

SEQ ID NO: 2877242 - RNA, 18 nt, Human
uccagcccaucucggagc

SEQ ID NO: 2877243 - RNA, 19 nt, Human
uccagcccaucucggagca

SEQ ID NO: 2877244 - RNA, 13 nt, Human
uccagcuugccag

SEQ ID NO: 2877245 - RNA, 23 nt, Human
uccagcuugccagaugcugcaga

SEQ ID NO: 2877246 - RNA, 16 nt, Human
uccagguucagcuugu

SEQ ID NO: 2877247 - RNA, 15 nt, Human
uccagguucagcuug

SEQ ID NO: 2877248 - RNA, 13 nt, Human
uccaggugcccag

SEQ ID NO: 2877249 - RNA, 11 nt, Human
uccaggguggu

SEQ ID NO: 2877250 - RNA, 16 nt, Human
uccagguguuacugua

SEQ ID NO: 2877251 - RNA, 19 nt, Human
uccagcuuucuccccgcua

SEQ ID NO: 2877252 - RNA, 21 nt, Human
ucaggugacaugugaaaccuu

SEQ ID NO: 2877253 - RNA, 15 nt, Human
ucauaccuaaguacu

SEQ ID NO: 2877254 - RNA, 16 nt, Human
ucauaccuaaguacug

SEQ ID NO: 2877255 - RNA, 17 nt, Human
ucauaccuaaguacugu

SEQ ID NO: 2877256 - RNA, 18 nt, Human
ucauaccuaaguacugua

SEQ ID NO: 2877257 - RNA, 19 nt, Human
ucauaccuaaguacuguaa

SEQ ID NO: 2877258 - RNA, 20 nt, Human
ucauaccuaaguacuguaau

SEQ ID NO: 2877259 - RNA, 21 nt, Human
ucauaccuaaguacuguaaua

SEQ ID NO: 2877260 - RNA, 17 nt, Human
ucaggugacaugugaaa

SEQ ID NO: 2877261 - RNA, 15 nt, Human
ucaggugcugccauc

SEQ ID NO: 2877262 - RNA, 14 nt, Human
ucaggugcugccau

SEQ ID NO: 2877263 - RNA, 13 nt, Human
ucaggugcugcca

SEQ ID NO: 2877264 - RNA, 21 nt, Human
ucauagcccucacccuggggc

SEQ ID NO: 2877265 - RNA, 13 nt, Human
ucauagcauucac

SEQ ID NO: 2877266 - RNA, 14 nt, Human
ucauaccucagaau

SEQ ID NO: 2877267 - RNA, 18 nt, Human
ucauaccucagaauguaa

SEQ ID NO: 2877268 - RNA, 14 nt, Human
ucauaccucugacc

SEQ ID NO: 2877269 - RNA, 21 nt, Human
ucauacuacauugaguagaca

SEQ ID NO: 2877270 - RNA, 20 nt, Human
ucauacuacugaaacagauu

SEQ ID NO: 2877271 - RNA, 21 nt, Human
ucauacuacugaaacagauuu

SEQ ID NO: 2877272 - RNA, 18 nt, Human
ucaugcucugcaaaagga

SEQ ID NO: 2877273 - RNA, 16 nt, Human
ucaucuucuucuuuaa

SEQ ID NO: 2877274 - RNA, 18 nt, Human
ucaucuugaagggcccag

SEQ ID NO: 2877275 - RNA, 12 nt, Human
ucaucuuacugu

SEQ ID NO: 2877276 - RNA, 16 nt, Human
ucaucuuacuguaccu

SEQ ID NO: 2877277 - RNA, 12 nt, Human
ucaucagggccu

SEQ ID NO: 2877278 - RNA, 13 nt, Human
ucaucagggccug

SEQ ID NO: 2877279 - RNA, 14 nt, Human
ucaucagggccugg

SEQ ID NO: 2877280 - RNA, 16 nt, Human
ucaucagggccugggg

SEQ ID NO: 2877281 - RNA, 21 nt, Human
ucaucagggccuggggccuga

SEQ ID NO: 2877282 - RNA, 23 nt, Human
ucaucagggccuggggccugaga

SEQ ID NO: 2877283 - RNA, 16 nt, Human
ucaucugcacccuucu

SEQ ID NO: 2877284 - RNA, 20 nt, Human
ucaucugcacccuucuuuuc

SEQ ID NO: 2877285 - RNA, 21 nt, Human
ucaucugcacccuucuuuucu

SEQ ID NO: 2877286 - RNA, 22 nt, Human
ucaucugcacccuucuuuucuc

SEQ ID NO: 2877287 - RNA, 23 nt, Human
ucaucugcacccuucuuuucuca

SEQ ID NO: 2877288 - RNA, 21 nt, Human
ucaucugcccaacuguguagc

SEQ ID NO: 2877289 - RNA, 18 nt, Human
ucaucugaggcauccagc

SEQ ID NO: 2877290 - RNA, 21 nt, Human
ucaucugauuggacaggcaug

SEQ ID NO: 2877291 - RNA, 22 nt, Human
ucaucugaauuugcccugggaa

SEQ ID NO: 2877292 - RNA, 23 nt, Human
ucaucugaauuugcccugggaaa

SEQ ID NO: 2877293 - RNA, 16 nt, Human
ucaucacacacaugga

SEQ ID NO: 2877294 - RNA, 15 nt, Human
ucaucacagggauuu

SEQ ID NO: 2877295 - RNA, 14 nt, Human
ucaucacuguggcu

SEQ ID NO: 2877296 - RNA, 15 nt, Human
ucaucacuguggcug

SEQ ID NO: 2877297 - RNA, 17 nt, Human
ucaucacuguggcuguc

SEQ ID NO: 2877298 - RNA, 15 nt, Human
ucaucacuuuucagu

SEQ ID NO: 2877299 - RNA, 17 nt, Human
ucaucacuuuucaguga

SEQ ID NO: 2877300 - RNA, 15 nt, Human
ucaucagauggaaau

SEQ ID NO: 2877301 - RNA, 18 nt, Human
ucaucagauggaaauauu

SEQ ID NO: 2877302 - RNA, 20 nt, Human
ucaucagauggaaauauuuu

SEQ ID NO: 2877303 - RNA, 22 nt, Human
ucaucagauggaaauauuuuga

SEQ ID NO: 2877304 - RNA, 18 nt, Human
ucaucagccaccauccua

SEQ ID NO: 2877305 - RNA, 12 nt, Human
ucaucagcauuu

SEQ ID NO: 2877306 - RNA, 16 nt, Human
ucaucagccaccaucc

SEQ ID NO: 2877307 - RNA, 13 nt, Human
ucaucagaagugg

SEQ ID NO: 2877308 - RNA, 22 nt, Human
ucaucagaagugguaggaaagc

SEQ ID NO: 2877309 - RNA, 17 nt, Human
ucaucagagcuccucug

SEQ ID NO: 2877310 - RNA, 21 nt, Human
ucaucagagcuccucuguccu

SEQ ID NO: 2877311 - RNA, 19 nt, Human
ucaugcuggaaccugcaaa

SEQ ID NO: 2877312 - RNA, 20 nt, Human
ucaugcuggaaccugcaaaa

SEQ ID NO: 2877313 - RNA, 22 nt, Human
ucaugcuggaaccugcaaaaaa

SEQ ID NO: 2877314 - RNA, 13 nt, Human
ucauuauguaaaa

SEQ ID NO: 2877315 - RNA, 20 nt, Human
ucauuauguaaaauguuuua

SEQ ID NO: 2877316 - RNA, 20 nt, Human
ucauuauaucauuggaacaa

SEQ ID NO: 2877317 - RNA, 21 nt, Human
ucauuccaacuucccaguuca

SEQ ID NO: 2877318 - RNA, 15 nt, Human
ucauucaauauugac

SEQ ID NO: 2877319 - RNA, 16 nt, Human
ucauucaauauugaca

SEQ ID NO: 2877320 - RNA, 20 nt, Human
ucauucaauauugacauuug

SEQ ID NO: 2877321 - RNA, 21 nt, Human
ucauucaauauugacauuugu

SEQ ID NO: 2877322 - RNA, 23 nt, Human
ucauuccaccuucccaugcccug

SEQ ID NO: 2877323 - RNA, 17 nt, Human
ucauuccaacagugagu

SEQ ID NO: 2877324 - RNA, 20 nt, Human
ucauucauuuuauauugaaa

SEQ ID NO: 2877325 - RNA, 22 nt, Human
ucauucauuuuauauugaaaaa

SEQ ID NO: 2877326 - RNA, 12 nt, Human
ucauuccaaaua

SEQ ID NO: 2877327 - RNA, 14 nt, Human
ucauuucauuguau

SEQ ID NO: 2877328 - RNA, 13 nt, Human
ucauuucauucca

SEQ ID NO: 2877329 - RNA, 14 nt, Human
ucauuucauuccau

SEQ ID NO: 2877330 - RNA, 15 nt, Human
ucauuucauuccauu

SEQ ID NO: 2877331 - RNA, 16 nt, Human
ucauuucauuccauug

SEQ ID NO: 2877332 - RNA, 19 nt, Human
ucauuucauuguaugaugu

SEQ ID NO: 2877333 - RNA, 18 nt, Human
ucauuuccccauaacuca

SEQ ID NO: 2877334 - RNA, 22 nt, Human
ucauuuccccauaacucaaugg

SEQ ID NO: 2877335 - RNA, 16 nt, Human
ucauuuccugugucuu

SEQ ID NO: 2877336 - RNA, 21 nt, Human
ucauuuccuucaaggcaucau

SEQ ID NO: 2877337 - RNA, 13 nt, Human
ucauuucuaaaag

SEQ ID NO: 2877338 - RNA, 15 nt, Human
ucauuucuaaaagaa

SEQ ID NO: 2877339 - RNA, 17 nt, Human
ucauuucuaaaagaaua

SEQ ID NO: 2877340 - RNA, 13 nt, Human
ucauuuccugugu

SEQ ID NO: 2877341 - RNA, 15 nt, Human
ucauuucaugcucug

SEQ ID NO: 2877342 - RNA, 15 nt, Human
ucauuucaggagcag

SEQ ID NO: 2877343 - RNA, 16 nt, Human
ucauuucaggagcagc

SEQ ID NO: 2877344 - RNA, 15 nt, Human
ucauuguuauuuaua

SEQ ID NO: 2877345 - RNA, 22 nt, Human
ucauuguuauuuauacaagauu

SEQ ID NO: 2877346 - RNA, 20 nt, Human
uauguacuccucuuuacacu

SEQ ID NO: 2877347 - RNA, 17 nt, Human
uauguacuaguacugug

SEQ ID NO: 2877348 - RNA, 18 nt, Human
uauguacuaguacugugu

SEQ ID NO: 2877349 - RNA, 19 nt, Human
uauguacuaguacugugua

SEQ ID NO: 2877350 - RNA, 23 nt, Human
uauguacuaguacuguguacugu

SEQ ID NO: 2877351 - RNA, 14 nt, Human
uauguacuaguguu

SEQ ID NO: 2877352 - RNA, 18 nt, Human
uauguacguuuguaugug

SEQ ID NO: 2877353 - RNA, 19 nt, Human
uauguacguuuguaugugu

SEQ ID NO: 2877354 - RNA, 21 nt, Human
uauguacguuuguaugugugu

SEQ ID NO: 2877355 - RNA, 22 nt, Human
uauguacguuuguaugugugua

SEQ ID NO: 2877356 - RNA, 16 nt, Human
uauguacguuuguaug

SEQ ID NO: 2877357 - RNA, 16 nt, Human
uauguaaugaaguaaa

SEQ ID NO: 2877358 - RNA, 23 nt, Human
uauguaaugaaguaaagccauua

SEQ ID NO: 2877359 - RNA, 14 nt, Human
uauguaaugcaaaa

SEQ ID NO: 2877360 - RNA, 15 nt, Human
uauguaaugcaaaau

SEQ ID NO: 2877361 - RNA, 17 nt, Human
uauguaaugcaaaauuu

SEQ ID NO: 2877362 - RNA, 23 nt, Human
uauguaaugugugguggccucag

SEQ ID NO: 2877363 - RNA, 14 nt, Human
uauguacaaguguu

SEQ ID NO: 2877364 - RNA, 14 nt, Human
uauguacaauugug

SEQ ID NO: 2877365 - RNA, 15 nt, Human
uauguacaugagaag

SEQ ID NO: 2877366 - RNA, 21 nt, Human
uauguaccauaugaucuguuu

SEQ ID NO: 2877367 - RNA, 22 nt, Human
uauguaccauaugaucuguuuu

SEQ ID NO: 2877368 - RNA, 21 nt, Human
uauguacuuuuauuuuacaca

SEQ ID NO: 2877369 - RNA, 21 nt, Human
uauguacuccucuuuacacug

SEQ ID NO: 2877370 - RNA, 14 nt, Human
uauguacuguacua

SEQ ID NO: 2877371 - RNA, 17 nt, Human
uauguagacuauauaca

SEQ ID NO: 2877372 - RNA, 18 nt, Human
uauguagacuauauacau

SEQ ID NO: 2877373 - RNA, 19 nt, Human
uauguagacuauauacaug

SEQ ID NO: 2877374 - RNA, 22 nt, Human
uauguagacuauauacaugugu

SEQ ID NO: 2877375 - RNA, 15 nt, Human
uauguagauauuugg

SEQ ID NO: 2877376 - RNA, 16 nt, Human
uauguagauauuuggc

SEQ ID NO: 2877377 - RNA, 17 nt, Human
uauguagauauuuggcu

SEQ ID NO: 2877378 - RNA, 18 nt, Human
uauguagauauuuggcuu

SEQ ID NO: 2877379 - RNA, 22 nt, Human
uauguagauauuuggcuuaaau

SEQ ID NO: 2877380 - RNA, 23 nt, Human
uauguagauauuuggcuuaaaua

SEQ ID NO: 2877381 - RNA, 18 nt, Human
uauguaggaaaaaaauag

SEQ ID NO: 2877382 - RNA, 14 nt, Human
uauguaguaauuga

SEQ ID NO: 2877383 - RNA, 20 nt, Human
uauguaguaauugacaugug

SEQ ID NO: 2877384 - RNA, 17 nt, Human
uauguaguaauugacau

SEQ ID NO: 2877385 - RNA, 21 nt, Human
uauguagcaggaaauaaagua

SEQ ID NO: 2877386 - RNA, 21 nt, Human
uauguaagaauucagaagacc

SEQ ID NO: 2877387 - RNA, 16 nt, Human
uauguaucagaagaga

SEQ ID NO: 2877388 - RNA, 19 nt, Human
uauguauauuuuuuuaauu

SEQ ID NO: 2877389 - RNA, 23 nt, Human
uauguauauuuuuuuaauuuaac

SEQ ID NO: 2877390 - RNA, 14 nt, Human
uauguaaaguaugu

SEQ ID NO: 2877391 - RNA, 17 nt, Human
uauguaaaguauguaaa

SEQ ID NO: 2877392 - RNA, 18 nt, Human
uauguaaaguauguaaac

SEQ ID NO: 2877393 - RNA, 19 nt, Human
uauguaaaguauguaaaca

SEQ ID NO: 2877394 - RNA, 20 nt, Human
uauguaaaguauguaaacag

SEQ ID NO: 2877395 - RNA, 19 nt, Human
uauguaaaauaaaauuaug

SEQ ID NO: 2877396 - RNA, 12 nt, Human
uauguaaaauaa

SEQ ID NO: 2877397 - RNA, 15 nt, Human
uauguaaacaggaga

SEQ ID NO: 2877398 - RNA, 15 nt, Human
uauguaaaauguuuu

SEQ ID NO: 2877399 - RNA, 17 nt, Human
uauguaaaauguuuuag

SEQ ID NO: 2877400 - RNA, 20 nt, Human
uauggaugauucagaaauug

SEQ ID NO: 2877401 - RNA, 22 nt, Human
uauggauucauuuauaagaaga

SEQ ID NO: 2877402 - RNA, 19 nt, Human
uauggaugauucagaaauu

SEQ ID NO: 2877403 - RNA, 22 nt, Human
uauggcagaaaaaaugucugua

SEQ ID NO: 2877404 - RNA, 14 nt, Human
uauggcaaaaaugg

SEQ ID NO: 2877405 - RNA, 12 nt, Human
uauggcagaaga

SEQ ID NO: 2877406 - RNA, 23 nt, Human
uauggauugggggggccaaaagg

SEQ ID NO: 2877407 - RNA, 15 nt, Human
uauggauuuguuaca

SEQ ID NO: 2877408 - RNA, 13 nt, Human
uauggcagaagac

SEQ ID NO: 2877409 - RNA, 14 nt, Human
uauggcagaagaca

SEQ ID NO: 2877410 - RNA, 15 nt, Human
uauggcagaagacac

SEQ ID NO: 2877411 - RNA, 16 nt, Human
uauggcagaagacacc

SEQ ID NO: 2877412 - RNA, 22 nt, Human
uauggcagaagacaccagagca

SEQ ID NO: 2877413 - RNA, 23 nt, Human
uauggcagaagacaccagagcag

SEQ ID NO: 2877414 - RNA, 13 nt, Human
uaugguuaugaaa

SEQ ID NO: 2877415 - RNA, 20 nt, Human
uaugguugauaguuuaccug

SEQ ID NO: 2877416 - RNA, 21 nt, Human
uaugguugauaguuuaccuga

SEQ ID NO: 2877417 - RNA, 22 nt, Human
uaugguugauaguuuaccugaa

SEQ ID NO: 2877418 - RNA, 11 nt, Human
uauuaaucuug

SEQ ID NO: 2877419 - RNA, 16 nt, Human
uauuaaucuuggauag

SEQ ID NO: 2877420 - RNA, 21 nt, Human
uauuaaucuuggauagcuaau

SEQ ID NO: 2877421 - RNA, 22 nt, Human
uauuaaucuuggauagcuaaua

SEQ ID NO: 2877422 - RNA, 13 nt, Human
uauuaauauuuaa

SEQ ID NO: 2877423 - RNA, 14 nt, Human
uauuaauauaugua

SEQ ID NO: 2877424 - RNA, 15 nt, Human
uauuaauacugguau

SEQ ID NO: 2877425 - RNA, 22 nt, Human
uauuaaauuuguugacaaaauu

SEQ ID NO: 2877426 - RNA, 12 nt, Human
uauguuugaaua

SEQ ID NO: 2877427 - RNA, 14 nt, Human
uauguuugaauaug

SEQ ID NO: 2877428 - RNA, 16 nt, Human
uauguuugaauaugga

SEQ ID NO: 2877429 - RNA, 17 nt, Human
uauguuugaauauggac

SEQ ID NO: 2877430 - RNA, 19 nt, Human
uauguuuaaucuguuaugu

SEQ ID NO: 2877431 - RNA, 22 nt, Human
uauuaagaggcagaaaauugca

SEQ ID NO: 2877432 - RNA, 19 nt, Human
uauguugcccaggcagguc

SEQ ID NO: 2877433 - RNA, 16 nt, Human
uauguugcccaggcag

SEQ ID NO: 2877434 - RNA, 13 nt, Human
uauguugcccagg

SEQ ID NO: 2877435 - RNA, 22 nt, Human
uauguuuagauagggcugggca

SEQ ID NO: 2877436 - RNA, 18 nt, Human
uauguuuauuuacuaauu

SEQ ID NO: 2877437 - RNA, 12 nt, Human
uauguuuccuug

SEQ ID NO: 2877438 - RNA, 14 nt, Human
uauguuuccuuguu

SEQ ID NO: 2877439 - RNA, 20 nt, Human
uauguugcccaggcaggucu

SEQ ID NO: 2877440 - RNA, 15 nt, Human
uaugucacuagaaug

SEQ ID NO: 2877441 - RNA, 23 nt, Human
uaugucauuuccuucaaggcauc

SEQ ID NO: 2877442 - RNA, 18 nt, Human
uauguugaauacuuuuua

SEQ ID NO: 2877443 - RNA, 14 nt, Human
uauguugauaaaag

SEQ ID NO: 2877444 - RNA, 18 nt, Human
uauguugauccauccagc

SEQ ID NO: 2877445 - RNA, 12 nt, Human
uauguauucuuu

SEQ ID NO: 2877446 - RNA, 18 nt, Human
uauguauuguaaacaugu

SEQ ID NO: 2877447 - RNA, 20 nt, Human
uauguauuguaaacaugugu

SEQ ID NO: 2877448 - RNA, 22 nt, Human
uauguauuguaaacauguguuu

SEQ ID NO: 2877449 - RNA, 16 nt, Human
uaugucaagaggcuga

SEQ ID NO: 2877450 - RNA, 11 nt, Human
uauguauuucc

SEQ ID NO: 2877451 - RNA, 10 nt, Human
uauguauuuu

SEQ ID NO: 2877452 - RNA, 21 nt, Human
uauguauuauuuauaauuccu

SEQ ID NO: 2877453 - RNA, 13 nt, Human
uauguauuauuua

SEQ ID NO: 2877454 - RNA, 18 nt, Human
uauguauuaauaaauaga

SEQ ID NO: 2877455 - RNA, 22 nt, Human
uauguauuaauaaauagagcaa

SEQ ID NO: 2877456 - RNA, 17 nt, Human
uauguauuagugauauu

SEQ ID NO: 2877457 - RNA, 20 nt, Human
uauguauuagugauauuucu

SEQ ID NO: 2877458 - RNA, 21 nt, Human
uauguauuagugauauuucuc

SEQ ID NO: 2877459 - RNA, 22 nt, Human
uauguauuagugauauuucucu

SEQ ID NO: 2877460 - RNA, 23 nt, Human
uauguauuagugauauuucucua

SEQ ID NO: 2877461 - RNA, 12 nt, Human
uauuauuaucuu

SEQ ID NO: 2877462 - RNA, 15 nt, Human
uauuauuaucuuuaa

SEQ ID NO: 2877463 - RNA, 15 nt, Human
uauuauuauuuuggg

SEQ ID NO: 2877464 - RNA, 19 nt, Human
uauuauuacuuauuuuuga

SEQ ID NO: 2877465 - RNA, 13 nt, Human
uauuauuagaaau

SEQ ID NO: 2877466 - RNA, 18 nt, Human
uauuauuagaaauuagaa

SEQ ID NO: 2877467 - RNA, 19 nt, Human
uauuauuagaaauuagaaa

SEQ ID NO: 2877468 - RNA, 21 nt, Human
uauuacacuguauuuguaucu

SEQ ID NO: 2877469 - RNA, 18 nt, Human
uauuacacauuuguacag

SEQ ID NO: 2877470 - RNA, 13 nt, Human
uauuacacuguau

SEQ ID NO: 2877471 - RNA, 17 nt, Human
uauuacacuguauuugu

SEQ ID NO: 2877472 - RNA, 19 nt, Human
uauuacacuguauuuguau

SEQ ID NO: 2877473 - RNA, 11 nt, Human
uauuacaaaua

SEQ ID NO: 2877474 - RNA, 21 nt, Human
uauuaauuguuuugcacuuuu

SEQ ID NO: 2877475 - RNA, 19 nt, Human
uauuaauuuucuacaaaua

SEQ ID NO: 2877476 - RNA, 13 nt, Human
uauuccagcucau

SEQ ID NO: 2877477 - RNA, 18 nt, Human
uauuccagcucauucauu

SEQ ID NO: 2877478 - RNA, 23 nt, Human
uauuccagcucauucauuuuaua

SEQ ID NO: 2877479 - RNA, 23 nt, Human
uauuccagaaugcuguacaucua

SEQ ID NO: 2877480 - RNA, 21 nt, Human
uauuccagaaugcuguacauc

SEQ ID NO: 2877481 - RNA, 14 nt, Human
uauuauugaaauug

SEQ ID NO: 2877482 - RNA, 15 nt, Human
uauuauugaaauugu

SEQ ID NO: 2877483 - RNA, 16 nt, Human
uauuccagaaugcugu

SEQ ID NO: 2877484 - RNA, 20 nt, Human
uauuccagaaugcuguacau

SEQ ID NO: 2877485 - RNA, 17 nt, Human
uauuccagaaugcugua

SEQ ID NO: 2877486 - RNA, 17 nt, Human
uauuccccauucuuccu

SEQ ID NO: 2877487 - RNA, 20 nt, Human
uauucccaagcccaugaguc

SEQ ID NO: 2877488 - RNA, 22 nt, Human
uauucccaagcccaugaguccu

SEQ ID NO: 2877489 - RNA, 15 nt, Human
uauuccauauuuauu

SEQ ID NO: 2877490 - RNA, 17 nt, Human
uauuccauauuuauuca

SEQ ID NO: 2877491 - RNA, 16 nt, Human
uauucgaaugaaaaga

SEQ ID NO: 2877492 - RNA, 17 nt, Human
uauucgaaugaaaagac

SEQ ID NO: 2877493 - RNA, 14 nt, Human
uauuccuucuggcc

SEQ ID NO: 2877494 - RNA, 15 nt, Human
uauuccuucuggccu

SEQ ID NO: 2877495 - RNA, 16 nt, Human
uauuccuucuggccuu

SEQ ID NO: 2877496 - RNA, 19 nt, Human
uauuccuucuggccuuucc

SEQ ID NO: 2877497 - RNA, 21 nt, Human
uauuccuucuggccuuuccuc

SEQ ID NO: 2877498 - RNA, 22 nt, Human
uauuccuugauacuaaaaguuc

SEQ ID NO: 2877499 - RNA, 16 nt, Human
uauuccuugaucauuu

SEQ ID NO: 2877500 - RNA, 12 nt, Human
uauuccuuuccc

SEQ ID NO: 2877501 - RNA, 13 nt, Human
uauuccuuucccu

SEQ ID NO: 2877502 - RNA, 15 nt, Human
uauuccuuucccuuc

SEQ ID NO: 2877503 - RNA, 16 nt, Human
uauuccuuucccuucc

SEQ ID NO: 2877504 - RNA, 17 nt, Human
uauuccuuucccuuccu

SEQ ID NO: 2877505 - RNA, 19 nt, Human
uauuccuuucccuuccucu

SEQ ID NO: 2877506 - RNA, 11 nt, Human
uauuccugccu

SEQ ID NO: 2877507 - RNA, 14 nt, Human
uauuccuguauguu

SEQ ID NO: 2877508 - RNA, 17 nt, Human
uauuccuguauguuguc

SEQ ID NO: 2877509 - RNA, 21 nt, Human
uauuccuuugggccucugcuu

SEQ ID NO: 2877510 - RNA, 17 nt, Human
uauuccugcauuuguga

SEQ ID NO: 2877511 - RNA, 19 nt, Human
uauuccugcauuugugaaa

SEQ ID NO: 2877512 - RNA, 20 nt, Human
uauuccugcauuugugaaau

SEQ ID NO: 2877513 - RNA, 21 nt, Human
uauuccugcauuugugaaaug

SEQ ID NO: 2877514 - RNA, 21 nt, Human
uauuccuauauaguuuauuga

SEQ ID NO: 2877515 - RNA, 20 nt, Human
uauuccuauauaguuuauug

SEQ ID NO: 2877516 - RNA, 14 nt, Human
uauuccuaguuggu

SEQ ID NO: 2877517 - RNA, 23 nt, Human
uauuccuaguuggugagaaaccu

SEQ ID NO: 2877518 - RNA, 24 nt, Human
uauuccuaguuggugagaaaccug

SEQ ID NO: 2877519 - RNA, 22 nt, Human
uauuccuauauaguuuauugac

SEQ ID NO: 2877520 - RNA, 15 nt, Human
uauucuaaaaccauu

SEQ ID NO: 2877521 - RNA, 19 nt, Human
uauucuagcuaauguaaua

SEQ ID NO: 2877522 - RNA, 22 nt, Human
uauucuaagacuuacucuaaga

SEQ ID NO: 2877523 - RNA, 23 nt, Human
uauucuaagacuuacucuaagau

SEQ ID NO: 2877524 - RNA, 11 nt, Human
uauucuaagac

SEQ ID NO: 2877525 - RNA, 12 nt, Human
uauucuaagacu

SEQ ID NO: 2877526 - RNA, 13 nt, Human
uauucuaagacuu

SEQ ID NO: 2877527 - RNA, 21 nt, Human
uauucuaagacuuacucuaag

SEQ ID NO: 2877528 - RNA, 13 nt, Human
uauucuacuauac

SEQ ID NO: 2877529 - RNA, 14 nt, Human
uauucuauaugaau

SEQ ID NO: 2877530 - RNA, 15 nt, Human
uauucuauaugaauu

SEQ ID NO: 2877531 - RNA, 17 nt, Human
uauucuauaugaauuua

SEQ ID NO: 2877532 - RNA, 19 nt, Human
uauucuauaugaauuuaaa

SEQ ID NO: 2877533 - RNA, 13 nt, Human
uauucuauuaacu

SEQ ID NO: 2877534 - RNA, 19 nt, Human
uauucuauuaacuuuaauu

SEQ ID NO: 2877535 - RNA, 17 nt, Human
uauuguuucuuuaucac

SEQ ID NO: 2877536 - RNA, 13 nt, Human
uauuguuucuuua

SEQ ID NO: 2877537 - RNA, 14 nt, Human
uauuguucaaacaa

SEQ ID NO: 2877538 - RNA, 16 nt, Human
uauuguucaaacaaua

SEQ ID NO: 2877539 - RNA, 20 nt, Human
uauuguucaaacaauaucau

SEQ ID NO: 2877540 - RNA, 17 nt, Human
uauuguuaacucuuguc

SEQ ID NO: 2877541 - RNA, 21 nt, Human
uauuguuaacucuugucuauu

SEQ ID NO: 2877542 - RNA, 14 nt, Human
uauuguuacucuua

SEQ ID NO: 2877543 - RNA, 18 nt, Human
uauuguuacucuuacgaa

SEQ ID NO: 2877544 - RNA, 20 nt, Human
uauuuaguuauaguuucaga

SEQ ID NO: 2877545 - RNA, 16 nt, Human
uauuuauaaagaaugu

SEQ ID NO: 2877546 - RNA, 12 nt, Human
uauuuaaacuau

SEQ ID NO: 2877547 - RNA, 15 nt, Human
uauuuaaacuaucuu

SEQ ID NO: 2877548 - RNA, 17 nt, Human
uauuuaaacucaagaca

SEQ ID NO: 2877549 - RNA, 16 nt, Human
uauuuaaacuuauaaa

SEQ ID NO: 2877550 - RNA, 20 nt, Human
uauuuaaacuuauaaaucau

SEQ ID NO: 2877551 - RNA, 21 nt, Human
uauuuaaacuuauaaaucaua

SEQ ID NO: 2877552 - RNA, 12 nt, Human
uauuuaaaaaug

SEQ ID NO: 2877553 - RNA, 13 nt, Human
uauuuaaaaaugu

SEQ ID NO: 2877554 - RNA, 15 nt, Human
uauuuaaaaaugucu

SEQ ID NO: 2877555 - RNA, 16 nt, Human
uauuuaaaaaugucuu

SEQ ID NO: 2877556 - RNA, 17 nt, Human
uauuuaaaaaugucuug

SEQ ID NO: 2877557 - RNA, 18 nt, Human
uauuuaaaaaugucuugc

SEQ ID NO: 2877558 - RNA, 12 nt, Human
uauuuaaaagau

SEQ ID NO: 2877559 - RNA, 13 nt, Human
uauuuaaaagauu

SEQ ID NO: 2877560 - RNA, 15 nt, Human
uauuuaaaagauuca

SEQ ID NO: 2877561 - RNA, 16 nt, Human
uauuuaaaagauucau

SEQ ID NO: 2877562 - RNA, 14 nt, Human
uauuguguugugaa

SEQ ID NO: 2877563 - RNA, 16 nt, Human
uauuguguuuguguau

SEQ ID NO: 2877564 - RNA, 15 nt, Human
uauuggaaaaaucac

SEQ ID NO: 2877565 - RNA, 18 nt, Human
uauuggaaauggaugcaa

SEQ ID NO: 2877566 - RNA, 19 nt, Human
uauuggaaauggaugcaaa

SEQ ID NO: 2877567 - RNA, 19 nt, Human
uauugauucugcuugagaa

SEQ ID NO: 2877568 - RNA, 14 nt, Human
uauugcuaguauuu

SEQ ID NO: 2877569 - RNA, 15 nt, Human
uauugcuaguauuug

SEQ ID NO: 2877570 - RNA, 16 nt, Human
uauugcuaguauuuga

SEQ ID NO: 2877571 - RNA, 17 nt, Human
uauugcuaguauuugaa

SEQ ID NO: 2877572 - RNA, 18 nt, Human
uauugcuaguauuugaau

SEQ ID NO: 2877573 - RNA, 20 nt, Human
uauugcuaguauuugaauua

SEQ ID NO: 2877574 - RNA, 13 nt, Human
uauugaugaaaag

SEQ ID NO: 2877575 - RNA, 17 nt, Human
uauugaugaaaagauuu

SEQ ID NO: 2877576 - RNA, 18 nt, Human
uauugaugaaaagauuua

SEQ ID NO: 2877577 - RNA, 23 nt, Human
uauugaugaaaagauuuaagcac

SEQ ID NO: 2877578 - RNA, 14 nt, Human
uauugcgcugcuac

SEQ ID NO: 2877579 - RNA, 22 nt, Human
uauugcaaagguuccaacugua

SEQ ID NO: 2877580 - RNA, 15 nt, Human
uauugccuucuuuga

SEQ ID NO: 2877581 - RNA, 16 nt, Human
uauugccuucuuugaa

SEQ ID NO: 2877582 - RNA, 17 nt, Human
uauugccuucuuugaag

SEQ ID NO: 2877583 - RNA, 18 nt, Human
uauugccuucuuugaaga

SEQ ID NO: 2877584 - RNA, 19 nt, Human
uauugccuucuuugaagaa

SEQ ID NO: 2877585 - RNA, 20 nt, Human
uauugcaaaauagcauuugu

SEQ ID NO: 2877586 - RNA, 21 nt, Human
uauugcaaagguuccaacugu

SEQ ID NO: 2877587 - RNA, 23 nt, Human
uauugcaaagguuccaacuguau

SEQ ID NO: 2877588 - RNA, 20 nt, Human
ucaaauuggacuuucaaaau

SEQ ID NO: 2877589 - RNA, 23 nt, Human
ucaaccccuucgcuccugugucu

SEQ ID NO: 2877590 - RNA, 20 nt, Human
ucaaauugucagcaauuuaa

SEQ ID NO: 2877591 - RNA, 19 nt, Human
ucaacccucaggggaaaac

SEQ ID NO: 2877592 - RNA, 19 nt, Human
ucaaaugcucagaccagcu

SEQ ID NO: 2877593 - RNA, 14 nt, Human
ucaaaugcucagac

SEQ ID NO: 2877594 - RNA, 16 nt, Human
ucaaaugcaguauauu

SEQ ID NO: 2877595 - RNA, 19 nt, Human
ucaaaugcaguauauuucu

SEQ ID NO: 2877596 - RNA, 20 nt, Human
ucaaaugcaguauauuucuu

SEQ ID NO: 2877597 - RNA, 16 nt, Human
ucaaauccuuccaaaa

SEQ ID NO: 2877598 - RNA, 19 nt, Human
ucaaauccuuccaaaaauu

SEQ ID NO: 2877599 - RNA, 21 nt, Human
ucaaauccuuccaaaaauuau

SEQ ID NO: 2877600 - RNA, 22 nt, Human
ucaaauccuuccaaaaauuauu

SEQ ID NO: 2877601 - RNA, 20 nt, Human
ucaaauuaaaacagcugcau

SEQ ID NO: 2877602 - RNA, 21 nt, Human
ucaaaugcucagaccagcucu

SEQ ID NO: 2877603 - RNA, 20 nt, Human
ucaaauggaagacacauuga

SEQ ID NO: 2877604 - RNA, 18 nt, Human
ucaaaugggcugcugcuu

SEQ ID NO: 2877605 - RNA, 17 nt, Human
ucaaauggaagacacau

SEQ ID NO: 2877606 - RNA, 16 nt, Human
ucaaagagaaaacuua

SEQ ID NO: 2877607 - RNA, 15 nt, Human
ucaaaucagucagug

SEQ ID NO: 2877608 - RNA, 24 nt, Human
ucaaaucagucagugcaaauguca

SEQ ID NO: 2877609 - RNA, 16 nt, Human
ucaaauccacccauau

SEQ ID NO: 2877610 - RNA, 22 nt, Human
ucaaauccacccauauguuaaa

SEQ ID NO: 2877611 - RNA, 23 nt, Human
ucaaaucaggcuacuagaauucu

SEQ ID NO: 2877612 - RNA, 14 nt, Human
ucaaaucagucagu

SEQ ID NO: 2877613 - RNA, 22 nt, Human
ucaaagaaggauggcaccuaaa

SEQ ID NO: 2877614 - RNA, 16 nt, Human
ucaaagaaggauggca

SEQ ID NO: 2877615 - RNA, 16 nt, Human
ucaaagaauaagaaaa

SEQ ID NO: 2877616 - RNA, 12 nt, Human
ucaaagaaaugc

SEQ ID NO: 2877617 - RNA, 16 nt, Human
ucaaagaaaugcugau

SEQ ID NO: 2877618 - RNA, 19 nt, Human
ucaaagaaaugcugaugga

SEQ ID NO: 2877619 - RNA, 21 nt, Human
ucaaaacacaucuuuccuguc

SEQ ID NO: 2877620 - RNA, 12 nt, Human
ucaaaacacugu

SEQ ID NO: 2877621 - RNA, 13 nt, Human
ucaaaacacugug

SEQ ID NO: 2877622 - RNA, 14 nt, Human
ucaaaacacugugg

SEQ ID NO: 2877623 - RNA, 15 nt, Human
ucaaaacacugugga

SEQ ID NO: 2877624 - RNA, 16 nt, Human
ucaaaacacuguggaa

SEQ ID NO: 2877625 - RNA, 17 nt, Human
ucaaaacacuguggaac

SEQ ID NO: 2877626 - RNA, 14 nt, Human
ucaaaaauauaacu

SEQ ID NO: 2877627 - RNA, 15 nt, Human
ucaaaaauauaacuu

SEQ ID NO: 2877628 - RNA, 16 nt, Human
ucaaaaauauaacuua

SEQ ID NO: 2877629 - RNA, 20 nt, Human
ucaaaaauuaucuauagcua

SEQ ID NO: 2877630 - RNA, 16 nt, Human
ucaaaaauugaagaga

SEQ ID NO: 2877631 - RNA, 18 nt, Human
ucaaaaauugaagagaga

SEQ ID NO: 2877632 - RNA, 21 nt, Human
ucaaaaauugaagagagauau

SEQ ID NO: 2877633 - RNA, 20 nt, Human
uauuuuauuauccuagauua

SEQ ID NO: 2877634 - RNA, 22 nt, Human
uauuuauaauagcaacuuuugu

SEQ ID NO: 2877635 - RNA, 16 nt, Human
uauuuauagucauuua

SEQ ID NO: 2877636 - RNA, 15 nt, Human
uauuuauaauuccua

SEQ ID NO: 2877637 - RNA, 19 nt, Human
uauuuauacaagauugaaa

SEQ ID NO: 2877638 - RNA, 20 nt, Human
uauuuauacaagauugaaaa

SEQ ID NO: 2877639 - RNA, 20 nt, Human
uauuuauaacucaucauaaa

SEQ ID NO: 2877640 - RNA, 13 nt, Human
uauuuauaacuca

SEQ ID NO: 2877641 - RNA, 22 nt, Human
uauuuauaacucaucauaaaau

SEQ ID NO: 2877642 - RNA, 21 nt, Human
uauuuauaacucaucauaaaa

SEQ ID NO: 2877643 - RNA, 23 nt, Human
uauuuauaacucaucauaaaaua

SEQ ID NO: 2877644 - RNA, 16 nt, Human
uauuuuccccuaucau

SEQ ID NO: 2877645 - RNA, 19 nt, Human
uauuuuccccuaucauuua

SEQ ID NO: 2877646 - RNA, 20 nt, Human
uauuuuccccuaucauuuau

SEQ ID NO: 2877647 - RNA, 21 nt, Human
uauuuuccccuaucauuuauu

SEQ ID NO: 2877648 - RNA, 13 nt, Human
uauuuuauguuua

SEQ ID NO: 2877649 - RNA, 20 nt, Human
uauuuuauuuccaucauguc

SEQ ID NO: 2877650 - RNA, 19 nt, Human
uauuuuauucccuuucaca

SEQ ID NO: 2877651 - RNA, 13 nt, Human
uauuuuauucccu

SEQ ID NO: 2877652 - RNA, 15 nt, Human
uauuuuuucuugcau

SEQ ID NO: 2877653 - RNA, 18 nt, Human
uauuuuuucuugcauuga

SEQ ID NO: 2877654 - RNA, 19 nt, Human
uauuuuuucuugcauugac

SEQ ID NO: 2877655 - RNA, 12 nt, Human
uauuuucuguca

SEQ ID NO: 2877656 - RNA, 13 nt, Human
uauuuucugucag

SEQ ID NO: 2877657 - RNA, 14 nt, Human
uauuuucugucaga

SEQ ID NO: 2877658 - RNA, 17 nt, Human
uauuuucugucagauga

SEQ ID NO: 2877659 - RNA, 20 nt, Human
uauuuucugucagaugagaa

SEQ ID NO: 2877660 - RNA, 21 nt, Human
uauuuucugucagaugagaac

SEQ ID NO: 2877661 - RNA, 22 nt, Human
uauuuucugucagaugagaaca

SEQ ID NO: 2877662 - RNA, 16 nt, Human
uauuuuccuaaagaga

SEQ ID NO: 2877663 - RNA, 12 nt, Human
uauuuuccuaaa

SEQ ID NO: 2877664 - RNA, 14 nt, Human
uauuuucuauguac

SEQ ID NO: 2877665 - RNA, 15 nt, Human
uauuuucuauguacu

SEQ ID NO: 2877666 - RNA, 16 nt, Human
uauuuucuauguacua

SEQ ID NO: 2877667 - RNA, 17 nt, Human
uauuuucuauguacuag

SEQ ID NO: 2877668 - RNA, 21 nt, Human
uauuuucuauguacuaguacu

SEQ ID NO: 2877669 - RNA, 16 nt, Human
uauuuucguaugaaaa

SEQ ID NO: 2877670 - RNA, 17 nt, Human
uauuuucguaugaaaau

SEQ ID NO: 2877671 - RNA, 20 nt, Human
uauuuuuuuuuuuugaaaaa

SEQ ID NO: 2877672 - RNA, 15 nt, Human
uauuuuuuuuuuccu

SEQ ID NO: 2877673 - RNA, 19 nt, Human
uauuuuuuuguaauugcuu

SEQ ID NO: 2877674 - RNA, 16 nt, Human
uauuuuuuuaauuuaa

SEQ ID NO: 2877675 - RNA, 18 nt, Human
uauuuuuuuaauuuaaca

SEQ ID NO: 2877676 - RNA, 20 nt, Human
uauuuuuuuaauuuaacaug

SEQ ID NO: 2877677 - RNA, 17 nt, Human
uauuuuuuuuaaguauu

SEQ ID NO: 2877678 - RNA, 18 nt, Human
uauuuuuuuuaauauuau

SEQ ID NO: 2877679 - RNA, 19 nt, Human
uauuuuuuuuaauauuauu

SEQ ID NO: 2877680 - RNA, 21 nt, Human
ucaaguuuuaagugaaaguga

SEQ ID NO: 2877681 - RNA, 19 nt, Human
ucaaguuuuggguauguuu

SEQ ID NO: 2877682 - RNA, 21 nt, Human
ucaaguuuuggguauguuuaa

SEQ ID NO: 2877683 - RNA, 12 nt, Human
ucaauaaacuua

SEQ ID NO: 2877684 - RNA, 14 nt, Human
ucaauaaagaaaac

SEQ ID NO: 2877685 - RNA, 15 nt, Human
ucaauaaagaaaacu

SEQ ID NO: 2877686 - RNA, 16 nt, Human
ucaauaaagaaaacuu

SEQ ID NO: 2877687 - RNA, 21 nt, Human
ucaauaaagaaaacuuccaua

SEQ ID NO: 2877688 - RNA, 20 nt, Human
ucaaguuugggucugugcug

SEQ ID NO: 2877689 - RNA, 21 nt, Human
ucaaguuguaacuuauauuga

SEQ ID NO: 2877690 - RNA, 16 nt, Human
ucaaguucuaagauuc

SEQ ID NO: 2877691 - RNA, 17 nt, Human
ucaaguucuaagauucu

SEQ ID NO: 2877692 - RNA, 18 nt, Human
ucaaguucuaagauucua

SEQ ID NO: 2877693 - RNA, 19 nt, Human
ucaaguucuaagauucuaa

SEQ ID NO: 2877694 - RNA, 14 nt, Human
ucaaguuccuuugg

SEQ ID NO: 2877695 - RNA, 16 nt, Human
ucaaguuccuuugggu

SEQ ID NO: 2877696 - RNA, 13 nt, Human
ucaaguucuaaga

SEQ ID NO: 2877697 - RNA, 14 nt, Human
ucaaguucuaagau

SEQ ID NO: 2877698 - RNA, 15 nt, Human
ucaaguucuaagauu

SEQ ID NO: 2877699 - RNA, 20 nt, Human
ucaagugauucuccugccuc

SEQ ID NO: 2877700 - RNA, 18 nt, Human
ucaagugauucuccugcc

SEQ ID NO: 2877701 - RNA, 21 nt, Human
ucaagugauucuccugccuca

SEQ ID NO: 2877702 - RNA, 19 nt, Human
ucaagugauucuccugccu

SEQ ID NO: 2877703 - RNA, 21 nt, Human
ucaaauaugaguacaaaugcc

SEQ ID NO: 2877704 - RNA, 13 nt, Human
ucaaguuauugua

SEQ ID NO: 2877705 - RNA, 17 nt, Human
ucaaguuauuguacagc

SEQ ID NO: 2877706 - RNA, 18 nt, Human
ucaacgcagcccugcuuu

SEQ ID NO: 2877707 - RNA, 14 nt, Human
ucaacgcagcccug

SEQ ID NO: 2877708 - RNA, 15 nt, Human
ucaacgcagcccugc

SEQ ID NO: 2877709 - RNA, 23 nt, Human
ucaaccuuaagaccuacuguucu

SEQ ID NO: 2877710 - RNA, 15 nt, Human
ucaaccuuaagaccu

SEQ ID NO: 2877711 - RNA, 16 nt, Human
ucaacccuucuggaaa

SEQ ID NO: 2877712 - RNA, 12 nt, Human
ucaauaauaaaa

SEQ ID NO: 2877713 - RNA, 13 nt, Human
ucaauaagaaggu

SEQ ID NO: 2877714 - RNA, 22 nt, Human
ucaauaagaagguagaaugagu

SEQ ID NO: 2877715 - RNA, 16 nt, Human
ucaauaaaugucuguu

SEQ ID NO: 2877716 - RNA, 12 nt, Human
ucaauaaaucuu

SEQ ID NO: 2877717 - RNA, 15 nt, Human
ucaauaaaugucugu

SEQ ID NO: 2877718 - RNA, 12 nt, Human
ucaaugugaaaa

SEQ ID NO: 2877719 - RNA, 15 nt, Human
ucaaugugauucuaa

SEQ ID NO: 2877720 - RNA, 16 nt, Human
ucaaugugauucuaau

SEQ ID NO: 2877721 - RNA, 17 nt, Human
ucaaugugauucuaaug

SEQ ID NO: 2877722 - RNA, 18 nt, Human
ucaaugugauucuaaugu

SEQ ID NO: 2877723 - RNA, 21 nt, Human
ucaaugugauucuaaugucuu

SEQ ID NO: 2877724 - RNA, 20 nt, Human
ucaauguucacgcaacuuga

SEQ ID NO: 2877725 - RNA, 21 nt, Human
ucaauguucacgcaacuugaa

SEQ ID NO: 2877726 - RNA, 22 nt, Human
ucaauguucacgcaacuugaaa

SEQ ID NO: 2877727 - RNA, 22 nt, Human
ucaaugugauucuaaugucuuc

SEQ ID NO: 2877728 - RNA, 15 nt, Human
ucacaccucacucuu

SEQ ID NO: 2877729 - RNA, 22 nt, Human
ucacaccucacucuuuauagug

SEQ ID NO: 2877730 - RNA, 12 nt, Human
ucacacccugca

SEQ ID NO: 2877731 - RNA, 13 nt, Human
ucacacccugcaa

SEQ ID NO: 2877732 - RNA, 14 nt, Human
ucacacccugcaag

SEQ ID NO: 2877733 - RNA, 15 nt, Human
ucacacccugcaagg

SEQ ID NO: 2877734 - RNA, 17 nt, Human
ucacacccugcaaggcc

SEQ ID NO: 2877735 - RNA, 20 nt, Human
ucacacccugcaaggcccac

SEQ ID NO: 2877736 - RNA, 21 nt, Human
ucacacccugcaaggcccaca

SEQ ID NO: 2877737 - RNA, 23 nt, Human
ucacacccugcaaggcccacagg

SEQ ID NO: 2877738 - RNA, 23 nt, Human
ucacaccaggcuugccugcaggc

SEQ ID NO: 2877739 - RNA, 18 nt, Human
ucacaggcagguccaggg

SEQ ID NO: 2877740 - RNA, 17 nt, Human
ucacaggcagguccagg

SEQ ID NO: 2877741 - RNA, 16 nt, Human
ucacaggcagguccag

SEQ ID NO: 2877742 - RNA, 17 nt, Human
ucacauuuuuuaugggc

SEQ ID NO: 2877743 - RNA, 20 nt, Human
ucaccacaugcggagaacaa

SEQ ID NO: 2877744 - RNA, 21 nt, Human
ucaccagauuugcuaauuuau

SEQ ID NO: 2877745 - RNA, 13 nt, Human
ucaccagcaccaa

SEQ ID NO: 2877746 - RNA, 19 nt, Human
ucaccagcaccaacaccac

SEQ ID NO: 2877747 - RNA, 15 nt, Human
ucaccagauuugcua

SEQ ID NO: 2877748 - RNA, 12 nt, Human
ucaccaaggaaa

SEQ ID NO: 2877749 - RNA, 13 nt, Human
ucaccaaggaaac

SEQ ID NO: 2877750 - RNA, 16 nt, Human
ucacagugacccuucc

SEQ ID NO: 2877751 - RNA, 17 nt, Human
ucacagugacccuuccc

SEQ ID NO: 2877752 - RNA, 18 nt, Human
ucacagugacccuuccca

SEQ ID NO: 2877753 - RNA, 15 nt, Human
ucacagucccacugu

SEQ ID NO: 2877754 - RNA, 17 nt, Human
ucacagucccacugugc

SEQ ID NO: 2877755 - RNA, 18 nt, Human
ucacagucccacugugca

SEQ ID NO: 2877756 - RNA, 22 nt, Human
ucacagucccacugugcaggug

SEQ ID NO: 2877757 - RNA, 14 nt, Human
ucacagugcugugu

SEQ ID NO: 2877758 - RNA, 17 nt, Human
ucacagugcugugugcc

SEQ ID NO: 2877759 - RNA, 17 nt, Human
ucacauuuauucugcuc

SEQ ID NO: 2877760 - RNA, 19 nt, Human
ucacauuuauucugcucac

SEQ ID NO: 2877761 - RNA, 18 nt, Human
ucacauuuauucugcuca

SEQ ID NO: 2877762 - RNA, 16 nt, Human
uccuuggaaguuucau

SEQ ID NO: 2877763 - RNA, 12 nt, Human
uccuuggcacca

SEQ ID NO: 2877764 - RNA, 14 nt, Human
uccuuggcaccaaa

SEQ ID NO: 2877765 - RNA, 15 nt, Human
uccuuggcaccaaag

SEQ ID NO: 2877766 - RNA, 16 nt, Human
uccuuggcaccaaaga

SEQ ID NO: 2877767 - RNA, 10 nt, Human
uccuuuguuc

SEQ ID NO: 2877768 - RNA, 20 nt, Human
uccuuggcaucacagggcag

SEQ ID NO: 2877769 - RNA, 22 nt, Human
uccuuuguuuucugacuaauua

SEQ ID NO: 2877770 - RNA, 18 nt, Human
uccuuuguuuucugacua

SEQ ID NO: 2877771 - RNA, 20 nt, Human
uccuuuguuuucugacuaau

SEQ ID NO: 2877772 - RNA, 24 nt, Human
uccuuuguucuuaccuguaugucu

SEQ ID NO: 2877773 - RNA, 16 nt, Human
uccuuuguucuuaccu

SEQ ID NO: 2877774 - RNA, 19 nt, Human
uccuuuuaaaacacuucca

SEQ ID NO: 2877775 - RNA, 19 nt, Human
ucgaaaccugggauucagg

SEQ ID NO: 2877776 - RNA, 14 nt, Human
ucgaaagcucuaga

SEQ ID NO: 2877777 - RNA, 16 nt, Human
ucgaaagcucuagaau

SEQ ID NO: 2877778 - RNA, 13 nt, Human
ucgaaacacagaa

SEQ ID NO: 2877779 - RNA, 18 nt, Human
ucgaaacacagaaaccuu

SEQ ID NO: 2877780 - RNA, 15 nt, Human
uccuuuuccucucuc

SEQ ID NO: 2877781 - RNA, 15 nt, Human
uccuuuuauagguga

SEQ ID NO: 2877782 - RNA, 12 nt, Human
uccuuuuaugug

SEQ ID NO: 2877783 - RNA, 20 nt, Human
ucgaggcugcagucagucau

SEQ ID NO: 2877784 - RNA, 16 nt, Human
ucgaggcugcagucag

SEQ ID NO: 2877785 - RNA, 12 nt, Human
ucgaaauaacaa

SEQ ID NO: 2877786 - RNA, 14 nt, Human
ucgaaauaacaaug

SEQ ID NO: 2877787 - RNA, 19 nt, Human
ucgaaagcucuagaaucug

SEQ ID NO: 2877788 - RNA, 16 nt, Human
ucgaaauaacaauguu

SEQ ID NO: 2877789 - RNA, 18 nt, Human
ucgaaauaacaauguuaa

SEQ ID NO: 2877790 - RNA, 19 nt, Human
ucgaaauaacaauguuaag

SEQ ID NO: 2877791 - RNA, 20 nt, Human
ucgaaauaacaauguuaagg

SEQ ID NO: 2877792 - RNA, 15 nt, Human
ucgaacuccugaccu

SEQ ID NO: 2877793 - RNA, 18 nt, Human
ucgaaccguuuugaagcu

SEQ ID NO: 2877794 - RNA, 15 nt, Human
ucgaaccguuuugaa

SEQ ID NO: 2877795 - RNA, 12 nt, Human
uccuucagacac

SEQ ID NO: 2877796 - RNA, 13 nt, Human
uccuucagacacc

SEQ ID NO: 2877797 - RNA, 13 nt, Human
uccuugaucauuu

SEQ ID NO: 2877798 - RNA, 22 nt, Human
uccuugcuuaugacaucacuug

SEQ ID NO: 2877799 - RNA, 15 nt, Human
uccuugcuuguuaca

SEQ ID NO: 2877800 - RNA, 16 nt, Human
uccuugagagaccagg

SEQ ID NO: 2877801 - RNA, 20 nt, Human
uccuugagagaccaggcaaa

SEQ ID NO: 2877802 - RNA, 17 nt, Human
uccuugagacacggagc

SEQ ID NO: 2877803 - RNA, 14 nt, Human
uccuugaccuuccu

SEQ ID NO: 2877804 - RNA, 17 nt, Human
uccuugaccuuccucug

SEQ ID NO: 2877805 - RNA, 19 nt, Human
uccuugaccuuccucuggg

SEQ ID NO: 2877806 - RNA, 21 nt, Human
uccuugaccuuccucuggggc

SEQ ID NO: 2877807 - RNA, 22 nt, Human
uccuugaccuuccucuggggcu

SEQ ID NO: 2877808 - RNA, 21 nt, Human
uccuugagacacggagcccag

SEQ ID NO: 2877809 - RNA, 23 nt, Human
uccuugagacacggagcccagcc

SEQ ID NO: 2877810 - RNA, 19 nt, Human
uccuugaauaucuuucgau

SEQ ID NO: 2877811 - RNA, 14 nt, Human
uccugccucagccu

SEQ ID NO: 2877812 - RNA, 13 nt, Human
uccucuucuuuau

SEQ ID NO: 2877813 - RNA, 20 nt, Human
uccugagauuuccuccuggc

SEQ ID NO: 2877814 - RNA, 14 nt, Human
uccuggcacccggc

SEQ ID NO: 2877815 - RNA, 19 nt, Human
uccuggcacccggccccug

SEQ ID NO: 2877816 - RNA, 16 nt, Human
uccuggcacccggccc

SEQ ID NO: 2877817 - RNA, 15 nt, Human
uccugccucagccuc

SEQ ID NO: 2877818 - RNA, 13 nt, Human
uccugccucagcc

SEQ ID NO: 2877819 - RNA, 16 nt, Human
uccugccucagccucc

SEQ ID NO: 2877820 - RNA, 17 nt, Human
uccugccucagccuccc

SEQ ID NO: 2877821 - RNA, 11 nt, Human
uccuguccucc

SEQ ID NO: 2877822 - RNA, 21 nt, Human
uccuguccucccauccccugg

SEQ ID NO: 2877823 - RNA, 16 nt, Human
uccuguaagccaaaga

SEQ ID NO: 2877824 - RNA, 17 nt, Human
uccuguaagccaaagaa

SEQ ID NO: 2877825 - RNA, 21 nt, Human
uccuguaagccaaagaaauga

SEQ ID NO: 2877826 - RNA, 23 nt, Human
uccuguaagccaaagaaaugaac

SEQ ID NO: 2877827 - RNA, 15 nt, Human
uccuggcagcccaga

SEQ ID NO: 2877828 - RNA, 14 nt, Human
uccuggcagcccag

SEQ ID NO: 2877829 - RNA, 13 nt, Human
uccuggcagccca

SEQ ID NO: 2877830 - RNA, 14 nt, Human
uccuggcagaaggg

SEQ ID NO: 2877831 - RNA, 11 nt, Human
uccuggcagcc

SEQ ID NO: 2877832 - RNA, 22 nt, Human
uccuggcacccggccccugcug

SEQ ID NO: 2877833 - RNA, 21 nt, Human
uccuggcacccggccccugcu

SEQ ID NO: 2877834 - RNA, 20 nt, Human
uccuggcacccggccccugc

SEQ ID NO: 2877835 - RNA, 16 nt, Human
ucguuaaaaaguuguu

SEQ ID NO: 2877836 - RNA, 17 nt, Human
ucguuaaaaaguuguuu

SEQ ID NO: 2877837 - RNA, 19 nt, Human
ucgugugcaacagacaagu

SEQ ID NO: 2877838 - RNA, 15 nt, Human
ucguguguagaaaaa

SEQ ID NO: 2877839 - RNA, 17 nt, Human
ucgugugcaacagacaa

SEQ ID NO: 2877840 - RNA, 14 nt, Human
ucuaaaucuauuua

SEQ ID NO: 2877841 - RNA, 16 nt, Human
ucuaaaucuauuuauu

SEQ ID NO: 2877842 - RNA, 17 nt, Human
ucuaaaucuauuuauua

SEQ ID NO: 2877843 - RNA, 19 nt, Human
ucuaaaucuauuuauuaau

SEQ ID NO: 2877844 - RNA, 20 nt, Human
ucuaaaucuauuuauuaaua

SEQ ID NO: 2877845 - RNA, 21 nt, Human
ucuaaaucuauuuauuaauau

SEQ ID NO: 2877846 - RNA, 17 nt, Human
ucuaaauauucagaauc

SEQ ID NO: 2877847 - RNA, 15 nt, Human
ucguuagaccgcucu

SEQ ID NO: 2877848 - RNA, 23 nt, Human
ucguuagaccgcucucuuuucug

SEQ ID NO: 2877849 - RNA, 19 nt, Human
ucuaacacuggcauguuca

SEQ ID NO: 2877850 - RNA, 15 nt, Human
ucuaauauauaugaa

SEQ ID NO: 2877851 - RNA, 19 nt, Human
ucuaauauauaugaauaaa

SEQ ID NO: 2877852 - RNA, 15 nt, Human
ucuaauauauuuuua

SEQ ID NO: 2877853 - RNA, 14 nt, Human
ucuaauaucauuca

SEQ ID NO: 2877854 - RNA, 17 nt, Human
ucuaauaucauucacua

SEQ ID NO: 2877855 - RNA, 14 nt, Human
ucuaauauggccac

SEQ ID NO: 2877856 - RNA, 20 nt, Human
ucuaauauggcaaaaauggc

SEQ ID NO: 2877857 - RNA, 19 nt, Human
ucuaauauccccaaauuag

SEQ ID NO: 2877858 - RNA, 20 nt, Human
ucuaauauccccaaauuagg

SEQ ID NO: 2877859 - RNA, 21 nt, Human
ucuaauagcggguuacuuuca

SEQ ID NO: 2877860 - RNA, 15 nt, Human
ucgaggucagaggag

SEQ ID NO: 2877861 - RNA, 14 nt, Human
ucgaggugccuucu

SEQ ID NO: 2877862 - RNA, 17 nt, Human
ucgaggugccuucuuca

SEQ ID NO: 2877863 - RNA, 20 nt, Human
ucgaggugccuucuucaggg

SEQ ID NO: 2877864 - RNA, 23 nt, Human
ucgaggugccuucuucagggccu

SEQ ID NO: 2877865 - RNA, 14 nt, Human
ucgaggggcucuca

SEQ ID NO: 2877866 - RNA, 16 nt, Human
ucgaggggcucucagc

SEQ ID NO: 2877867 - RNA, 18 nt, Human
ucgaggggcucucagcuc

SEQ ID NO: 2877868 - RNA, 20 nt, Human
ucgaggggcucucagcucag

SEQ ID NO: 2877869 - RNA, 14 nt, Human
ucgugagucauuua

SEQ ID NO: 2877870 - RNA, 19 nt, Human
ucgugagucauuuaaaugu

SEQ ID NO: 2877871 - RNA, 22 nt, Human
ucggccucccaaagugcuggga

SEQ ID NO: 2877872 - RNA, 23 nt, Human
ucguggcagauaaucagccucuu

SEQ ID NO: 2877873 - RNA, 22 nt, Human
ucguggcagauaaucagccucu

SEQ ID NO: 2877874 - RNA, 18 nt, Human
ucgugcggaaucagcuuc

SEQ ID NO: 2877875 - RNA, 20 nt, Human
ucgugcccccccuucccccu

SEQ ID NO: 2877876 - RNA, 15 nt, Human
ucgugauaaacuuug

SEQ ID NO: 2877877 - RNA, 13 nt, Human
ucgugauggggca

SEQ ID NO: 2877878 - RNA, 16 nt, Human
ucuaugagucuagaug

SEQ ID NO: 2877879 - RNA, 20 nt, Human
ucuaucaacuuuaaucaagu

SEQ ID NO: 2877880 - RNA, 23 nt, Human
ucuaucaacuuuaaucaaguugu

SEQ ID NO: 2877881 - RNA, 14 nt, Human
ucuaucaagcccag

SEQ ID NO: 2877882 - RNA, 18 nt, Human
ucuaugagucuagauguu

SEQ ID NO: 2877883 - RNA, 11 nt, Human
ucuaugauaua

SEQ ID NO: 2877884 - RNA, 16 nt, Human
ucucaaaguuuugaaa

SEQ ID NO: 2877885 - RNA, 22 nt, Human
ucucaaaguuuccuaaucagaa

SEQ ID NO: 2877886 - RNA, 12 nt, Human
ucuaugcucucg

SEQ ID NO: 2877887 - RNA, 15 nt, Human
ucuaugcugcuuuua

SEQ ID NO: 2877888 - RNA, 22 nt, Human
ucuaugcugcuuuuauaucugu

SEQ ID NO: 2877889 - RNA, 21 nt, Human
ucuaugcuguuuguagugaaa

SEQ ID NO: 2877890 - RNA, 22 nt, Human
ucuaugauucguguaauuacuu

SEQ ID NO: 2877891 - RNA, 14 nt, Human
ucuaugccagcuca

SEQ ID NO: 2877892 - RNA, 18 nt, Human
ucuaugccccaaauauag

SEQ ID NO: 2877893 - RNA, 19 nt, Human
ucuaggagggagacacugg

SEQ ID NO: 2877894 - RNA, 13 nt, Human
ucuagaacacagg

SEQ ID NO: 2877895 - RNA, 16 nt, Human
ucuagaacacaggcaa

SEQ ID NO: 2877896 - RNA, 15 nt, Human
ucuagaacacaggca

SEQ ID NO: 2877897 - RNA, 18 nt, Human
ucuaggacgccacccagc

SEQ ID NO: 2877898 - RNA, 23 nt, Human
ucuaggaccaugguuaagagucc

SEQ ID NO: 2877899 - RNA, 20 nt, Human
ucgugauuuucaagcagcau

SEQ ID NO: 2877900 - RNA, 21 nt, Human
ucuaauuccauccauaaaucc

SEQ ID NO: 2877901 - RNA, 16 nt, Human
ucuaauuaaaacacuu

SEQ ID NO: 2877902 - RNA, 14 nt, Human
ucuaauauguaaca

SEQ ID NO: 2877903 - RNA, 14 nt, Human
ucuaaugugugaau

SEQ ID NO: 2877904 - RNA, 22 nt, Human
ucuagaaacgaguuggugucuu

SEQ ID NO: 2877905 - RNA, 12 nt, Human
ucuagaaaacca

SEQ ID NO: 2877906 - RNA, 14 nt, Human
ucuacuuuauuaau

SEQ ID NO: 2877907 - RNA, 21 nt, Human
ucuacuuuauuaauuguuuug

SEQ ID NO: 2877908 - RNA, 22 nt, Human
ucuacuugcugucccuuggaac

SEQ ID NO: 2877909 - RNA, 19 nt, Human
ucuaauucuauuaaagugc

SEQ ID NO: 2877910 - RNA, 15 nt, Human
uccucuagcuguggg

SEQ ID NO: 2877911 - RNA, 14 nt, Human
uccucggaaccgcu

SEQ ID NO: 2877912 - RNA, 19 nt, Human
uccucugcuugccuggaga

SEQ ID NO: 2877913 - RNA, 21 nt, Human
uccucuagcugugggggugag

SEQ ID NO: 2877914 - RNA, 21 nt, Human
uccucuuccugaauuuuauuu

SEQ ID NO: 2877915 - RNA, 16 nt, Human
uccucuucggcccuca

SEQ ID NO: 2877916 - RNA, 18 nt, Human
uccucuucggcccucaga

SEQ ID NO: 2877917 - RNA, 21 nt, Human
uccucuucggcccucagaugu

SEQ ID NO: 2877918 - RNA, 19 nt, Human
uccucuucuauuuuguaaa

SEQ ID NO: 2877919 - RNA, 13 nt, Human
uccuccuuucucc

SEQ ID NO: 2877920 - RNA, 15 nt, Human
uccucguuccuuucu

SEQ ID NO: 2877921 - RNA, 17 nt, Human
uccucguuccuuucucc

SEQ ID NO: 2877922 - RNA, 17 nt, Human
uccucauguucugcuuu

SEQ ID NO: 2877923 - RNA, 18 nt, Human
uccuccagaagccucugg

SEQ ID NO: 2877924 - RNA, 16 nt, Human
uccuccagaagccucu

SEQ ID NO: 2877925 - RNA, 14 nt, Human
uccuccagaagccu

SEQ ID NO: 2877926 - RNA, 22 nt, Human
uccuccagaagccucuggcuag

SEQ ID NO: 2877927 - RNA, 21 nt, Human
uccuccagaagccucuggcua

SEQ ID NO: 2877928 - RNA, 20 nt, Human
uccuccagaagccucuggcu

SEQ ID NO: 2877929 - RNA, 19 nt, Human
uccuccagaagccucuggc

SEQ ID NO: 2877930 - RNA, 16 nt, Human
uccuccuuggugccug

SEQ ID NO: 2877931 - RNA, 17 nt, Human
uccuccuuggugccugg

SEQ ID NO: 2877932 - RNA, 19 nt, Human
uccuccuuggugccuggcc

SEQ ID NO: 2877933 - RNA, 17 nt, Human
uccgaccagacaccuug

SEQ ID NO: 2877934 - RNA, 13 nt, Human
uccgaccagacac

SEQ ID NO: 2877935 - RNA, 18 nt, Human
uccuacccacccuccuuu

SEQ ID NO: 2877936 - RNA, 15 nt, Human
uccuacaagacacag

SEQ ID NO: 2877937 - RNA, 18 nt, Human
uccuaauuaccagucuuu

SEQ ID NO: 2877938 - RNA, 18 nt, Human
uccuaauucuucuguccu

SEQ ID NO: 2877939 - RNA, 14 nt, Human
uccuaauuucccuu

SEQ ID NO: 2877940 - RNA, 18 nt, Human
uccuaauuucccuucuug

SEQ ID NO: 2877941 - RNA, 19 nt, Human
uccuaauuucccuucuugc

SEQ ID NO: 2877942 - RNA, 18 nt, Human
uccuaauuccacagcugc

SEQ ID NO: 2877943 - RNA, 17 nt, Human
uccuaauuccacagcug

SEQ ID NO: 2877944 - RNA, 16 nt, Human
uccuaauuccacagcu

SEQ ID NO: 2877945 - RNA, 15 nt, Human
uccuaauuccacagc

SEQ ID NO: 2877946 - RNA, 22 nt, Human
uccuaaugaaugcauaaaaugu

SEQ ID NO: 2877947 - RNA, 14 nt, Human
uccuaauaucaaau

SEQ ID NO: 2877948 - RNA, 22 nt, Human
uccuaaucagaaauuuuuauca

SEQ ID NO: 2877949 - RNA, 15 nt, Human
uccuauauaguuuau

SEQ ID NO: 2877950 - RNA, 15 nt, Human
uccuauaaucuguca

SEQ ID NO: 2877951 - RNA, 16 nt, Human
uccuauaaucugucaa

SEQ ID NO: 2877952 - RNA, 17 nt, Human
uccuauaaucugucaaa

SEQ ID NO: 2877953 - RNA, 22 nt, Human
uccuauaaucugucaaaacacu

SEQ ID NO: 2877954 - RNA, 23 nt, Human
uccuauaaucugucaaaacacug

SEQ ID NO: 2877955 - RNA, 13 nt, Human
uccuaguuuucuc

SEQ ID NO: 2877956 - RNA, 20 nt, Human
uccuaguuuucuccucccag

SEQ ID NO: 2877957 - RNA, 13 nt, Human
uccuauaacuuga

SEQ ID NO: 2877958 - RNA, 14 nt, Human
uccuauaacuugau

SEQ ID NO: 2877959 - RNA, 18 nt, Human
uccuauaacuugaugcau

SEQ ID NO: 2877960 - RNA, 20 nt, Human
uccuauaacuugaugcaugu

SEQ ID NO: 2877961 - RNA, 21 nt, Human
uccuacccacaccucugccag

SEQ ID NO: 2877962 - RNA, 22 nt, Human
uccuacccacaccucugccaga

SEQ ID NO: 2877963 - RNA, 15 nt, Human
uccuacccacaccuc

SEQ ID NO: 2877964 - RNA, 16 nt, Human
uccuacccacaccucu

SEQ ID NO: 2877965 - RNA, 20 nt, Human
uccuacccacaccucugcca

SEQ ID NO: 2877966 - RNA, 14 nt, Human
uccuaguuggugag

SEQ ID NO: 2877967 - RNA, 21 nt, Human
uccuaguuggugagaaaccug

SEQ ID NO: 2877968 - RNA, 17 nt, Human
uccuaguuuccucuccu

SEQ ID NO: 2877969 - RNA, 15 nt, Human
uccuaguuugaccuc

SEQ ID NO: 2877970 - RNA, 16 nt, Human
uccuaguuugaccuca

SEQ ID NO: 2877971 - RNA, 18 nt, Human
uccuaguuugaccucaca

SEQ ID NO: 2877972 - RNA, 21 nt, Human
uccuaguuugaccucacagug

SEQ ID NO: 2877973 - RNA, 23 nt, Human
uccuaguuugaccucacagugac

SEQ ID NO: 2877974 - RNA, 14 nt, Human
uccuauugcaaagg

SEQ ID NO: 2877975 - RNA, 22 nt, Human
uccucaucccguguucuccuuu

SEQ ID NO: 2877976 - RNA, 17 nt, Human
uccucauccucagaugc

SEQ ID NO: 2877977 - RNA, 20 nt, Human
uccucauccucagaugcuca

SEQ ID NO: 2877978 - RNA, 14 nt, Human
uccucaucccgugu

SEQ ID NO: 2877979 - RNA, 18 nt, Human
uccucauccagggcucug

SEQ ID NO: 2877980 - RNA, 16 nt, Human
uccucauccagggcuc

SEQ ID NO: 2877981 - RNA, 23 nt, Human
uccuauaucauuaaaagaacaua

SEQ ID NO: 2877982 - RNA, 18 nt, Human
uccuauauaguuuauuga

SEQ ID NO: 2877983 - RNA, 18 nt, Human
uccuauauccugugacug

SEQ ID NO: 2877984 - RNA, 12 nt, Human
uccuauguguga

SEQ ID NO: 2877985 - RNA, 20 nt, Human
ucccuucgguggaagagcuc

SEQ ID NO: 2877986 - RNA, 22 nt, Human
ucccuucgguggaagagcucaa

SEQ ID NO: 2877987 - RNA, 15 nt, Human
ucccuucucacagca

SEQ ID NO: 2877988 - RNA, 16 nt, Human
ucccuucucacagcac

SEQ ID NO: 2877989 - RNA, 15 nt, Human
ucccuugaugcacag

SEQ ID NO: 2877990 - RNA, 16 nt, Human
ucccuugaugcacaga

SEQ ID NO: 2877991 - RNA, 18 nt, Human
ucccuugaugcacagaga

SEQ ID NO: 2877992 - RNA, 22 nt, Human
ucccuugaugcacagagaagcu

SEQ ID NO: 2877993 - RNA, 13 nt, Human
ucccuugccacuu

SEQ ID NO: 2877994 - RNA, 17 nt, Human
ucccuugccacuuugca

SEQ ID NO: 2877995 - RNA, 21 nt, Human
ucccuugccauccuaaaagcc

SEQ ID NO: 2877996 - RNA, 23 nt, Human
ucccuugaggaaacaacagcuuu

SEQ ID NO: 2877997 - RNA, 18 nt, Human
uccgaagcuacuucucca

SEQ ID NO: 2877998 - RNA, 21 nt, Human
uccgaaguaugagggaaaaug

SEQ ID NO: 2877999 - RNA, 20 nt, Human
uccgaccacuaauugccaag

SEQ ID NO: 2878000 - RNA, 18 nt, Human
uccgaccacuuccagggg

SEQ ID NO: 2878001 - RNA, 13 nt, Human
ucccuuccacugc

SEQ ID NO: 2878002 - RNA, 14 nt, Human
ucccuuccacugcc

SEQ ID NO: 2878003 - RNA, 17 nt, Human
ucccuuccacugccucu

SEQ ID NO: 2878004 - RNA, 18 nt, Human
ucccuuccacugccucug

SEQ ID NO: 2878005 - RNA, 19 nt, Human
ucccuuccacugccucugc

SEQ ID NO: 2878006 - RNA, 20 nt, Human
ucccuuccacugccucugcc

SEQ ID NO: 2878007 - RNA, 22 nt, Human
ucccuuccacugccucugccuu

SEQ ID NO: 2878008 - RNA, 10 nt, Human
ucccuggagu

SEQ ID NO: 2878009 - RNA, 21 nt, Human
ucccuggagccuccacugccu

SEQ ID NO: 2878010 - RNA, 11 nt, Human
ucccuggagug

SEQ ID NO: 2878011 - RNA, 21 nt, Human
ucccuggaguguggcugagga

SEQ ID NO: 2878012 - RNA, 22 nt, Human
ucccuggaguguggcugaggag

SEQ ID NO: 2878013 - RNA, 13 nt, Human
ucccugcacuugc

SEQ ID NO: 2878014 - RNA, 14 nt, Human
ucccugcacuugca

SEQ ID NO: 2878015 - RNA, 19 nt, Human
ucccugccccucccuucaa

SEQ ID NO: 2878016 - RNA, 20 nt, Human
ucccugcacuaaagccagcc

SEQ ID NO: 2878017 - RNA, 21 nt, Human
ucccugcacuaaagccagccu

SEQ ID NO: 2878018 - RNA, 22 nt, Human
ucccugcacuaaagccagccug

SEQ ID NO: 2878019 - RNA, 23 nt, Human
ucccugcacuaaagccagccuga

SEQ ID NO: 2878020 - RNA, 12 nt, Human
ucccucucccug

SEQ ID NO: 2878021 - RNA, 14 nt, Human
ucccucucccuguc

SEQ ID NO: 2878022 - RNA, 12 nt, Human
ucccucucggaa

SEQ ID NO: 2878023 - RNA, 23 nt, Human
ucccucucggaaggcuggcuggg

SEQ ID NO: 2878024 - RNA, 22 nt, Human
ucccucucggaaggcuggcugg

SEQ ID NO: 2878025 - RNA, 19 nt, Human
ucccucucucuucugcucc

SEQ ID NO: 2878026 - RNA, 18 nt, Human
ucccucucucuucugcuc

SEQ ID NO: 2878027 - RNA, 16 nt, Human
ucccucucucuucugc

SEQ ID NO: 2878028 - RNA, 12 nt, Human
ucccucucucuu

SEQ ID NO: 2878029 - RNA, 15 nt, Human
ucccugccuggucac

SEQ ID NO: 2878030 - RNA, 15 nt, Human
ucccugcuaaucucc

SEQ ID NO: 2878031 - RNA, 11 nt, Human
ucccugccugg

SEQ ID NO: 2878032 - RNA, 20 nt, Human
ucccugccuuaggccuaccu

SEQ ID NO: 2878033 - RNA, 16 nt, Human
ucccugcgccugugau

SEQ ID NO: 2878034 - RNA, 17 nt, Human
ucccugcgccugugaug

SEQ ID NO: 2878035 - RNA, 21 nt, Human
ucccugcgccugugaugcugg

SEQ ID NO: 2878036 - RNA, 20 nt, Human
ucccugccccucccuucaac

SEQ ID NO: 2878037 - RNA, 19 nt, Human
uccccuuaauuaggaugca

SEQ ID NO: 2878038 - RNA, 17 nt, Human
uccccuuacccuuagaa

SEQ ID NO: 2878039 - RNA, 18 nt, Human
uccccuuacccuuagaau

SEQ ID NO: 2878040 - RNA, 15 nt, Human
ucccgggacgcagca

SEQ ID NO: 2878041 - RNA, 18 nt, Human
uccagguguuacuguaau

SEQ ID NO: 2878042 - RNA, 20 nt, Human
uccagguucaacccacagcu

SEQ ID NO: 2878043 - RNA, 23 nt, Human
uccagguucaacccacagcuacu

SEQ ID NO: 2878044 - RNA, 15 nt, Human
ucccguguucuccuu

SEQ ID NO: 2878045 - RNA, 20 nt, Human
ucccguuucuccaccuagac

SEQ ID NO: 2878046 - RNA, 14 nt, Human
ucccggggcuccac

SEQ ID NO: 2878047 - RNA, 18 nt, Human
ucccuccucaccucugga

SEQ ID NO: 2878048 - RNA, 17 nt, Human
ucccuccucaccucugg

SEQ ID NO: 2878049 - RNA, 16 nt, Human
ucccuccucaccucug

SEQ ID NO: 2878050 - RNA, 14 nt, Human
ucccuccucaccuc

SEQ ID NO: 2878051 - RNA, 13 nt, Human
ucccuauguauuu

SEQ ID NO: 2878052 - RNA, 15 nt, Human
ucccuauguauuugc

SEQ ID NO: 2878053 - RNA, 14 nt, Human
ucccuaaugcugca

SEQ ID NO: 2878054 - RNA, 20 nt, Human
ucccuaaugcugcagauuug

SEQ ID NO: 2878055 - RNA, 16 nt, Human
ucccuaaaauacauuu

SEQ ID NO: 2878056 - RNA, 14 nt, Human
ucccggucccgagu

SEQ ID NO: 2878057 - RNA, 15 nt, Human
ucccuaggagaccaa

SEQ ID NO: 2878058 - RNA, 21 nt, Human
ucccuagggcuggcagaaagg

SEQ ID NO: 2878059 - RNA, 16 nt, Human
ucccuaguaaaaauac

SEQ ID NO: 2878060 - RNA, 22 nt, Human
ucccuccugcccgccacacaga

SEQ ID NO: 2878061 - RNA, 18 nt, Human
ucccuauguauuugcagu

SEQ ID NO: 2878062 - RNA, 20 nt, Human
ucccuccuggugucacccca

SEQ ID NO: 2878063 - RNA, 21 nt, Human
ucccuccuggugucaccccag

SEQ ID NO: 2878064 - RNA, 22 nt, Human
ucccuccuggugucaccccaga

SEQ ID NO: 2878065 - RNA, 19 nt, Human
ucccucuaaugagacugac

SEQ ID NO: 2878066 - RNA, 22 nt, Human
ucccucucccccuuaccccaca

SEQ ID NO: 2878067 - RNA, 15 nt, Human
ucccucuacauggac

SEQ ID NO: 2878068 - RNA, 22 nt, Human
ucccucuacuaaggcuuuccua

SEQ ID NO: 2878069 - RNA, 17 nt, Human
ucccucuaaugagacug

SEQ ID NO: 2878070 - RNA, 16 nt, Human
ucccucuaaugagacu

SEQ ID NO: 2878071 - RNA, 19 nt, Human
ucccucgcugcacaaauac

SEQ ID NO: 2878072 - RNA, 22 nt, Human
ucccucgcugcacaaauacucc

SEQ ID NO: 2878073 - RNA, 15 nt, Human
ucccuccuuuaguga

SEQ ID NO: 2878074 - RNA, 19 nt, Human
ucucuggcuguaaggcucu

SEQ ID NO: 2878075 - RNA, 20 nt, Human
ucucuggcuguaaggcucua

SEQ ID NO: 2878076 - RNA, 22 nt, Human
ucucuggcuguaaggcucuaga

SEQ ID NO: 2878077 - RNA, 15 nt, Human
ucucugggccucaga

SEQ ID NO: 2878078 - RNA, 17 nt, Human
ucucugggccucagagg

SEQ ID NO: 2878079 - RNA, 16 nt, Human
ucucuggggcaggcug

SEQ ID NO: 2878080 - RNA, 20 nt, Human
ucucuggggcaggcugcuuc

SEQ ID NO: 2878081 - RNA, 23 nt, Human
ucucuggcuguaaggcucuagau

SEQ ID NO: 2878082 - RNA, 13 nt, Human
ucucugguccgga

SEQ ID NO: 2878083 - RNA, 20 nt, Human
ucucugguccggacacuccu

SEQ ID NO: 2878084 - RNA, 22 nt, Human
ucucuguccagcagucacuucg

SEQ ID NO: 2878085 - RNA, 15 nt, Human
ucucuguauaaacau

SEQ ID NO: 2878086 - RNA, 16 nt, Human
ucucuguauaaacauu

SEQ ID NO: 2878087 - RNA, 21 nt, Human
ucucuguauaaacauuaaaug

SEQ ID NO: 2878088 - RNA, 22 nt, Human
ucucuguauaaacauuaaaugu

SEQ ID NO: 2878089 - RNA, 14 nt, Human
ucucugucccuugc

SEQ ID NO: 2878090 - RNA, 15 nt, Human
ucucugucccuugcu

SEQ ID NO: 2878091 - RNA, 16 nt, Human
ucucugucccuugcug

SEQ ID NO: 2878092 - RNA, 17 nt, Human
ucucugucccuugcugu

SEQ ID NO: 2878093 - RNA, 18 nt, Human
ucucugucccuugcugua

SEQ ID NO: 2878094 - RNA, 19 nt, Human
ucucugucccuugcuguau

SEQ ID NO: 2878095 - RNA, 20 nt, Human
ucucugucccuugcuguaug

SEQ ID NO: 2878096 - RNA, 19 nt, Human
ucucugugcuucaauuaau

SEQ ID NO: 2878097 - RNA, 15 nt, Human
ucucugugcugugga

SEQ ID NO: 2878098 - RNA, 11 nt, Human
ucucugugcuu

SEQ ID NO: 2878099 - RNA, 18 nt, Human
ucucugugaccugccccg

SEQ ID NO: 2878100 - RNA, 13 nt, Human
ucucugugaccca

SEQ ID NO: 2878101 - RNA, 18 nt, Human
ucucugugacccacuucu

SEQ ID NO: 2878102 - RNA, 14 nt, Human
ucucuaggcugggg

SEQ ID NO: 2878103 - RNA, 15 nt, Human
ucucuaggcugggga

SEQ ID NO: 2878104 - RNA, 11 nt, Human
ucucuaguagu

SEQ ID NO: 2878105 - RNA, 12 nt, Human
ucucuaguaguu

SEQ ID NO: 2878106 - RNA, 15 nt, Human
ucucuaguaguuaaa

SEQ ID NO: 2878107 - RNA, 18 nt, Human
ucucuaguaguuaaaaaa

SEQ ID NO: 2878108 - RNA, 13 nt, Human
ucucucucuacaa

SEQ ID NO: 2878109 - RNA, 14 nt, Human
ucucucucuacaaa

SEQ ID NO: 2878110 - RNA, 12 nt, Human
ucucucugcagc

SEQ ID NO: 2878111 - RNA, 14 nt, Human
ucucucugcagcug

SEQ ID NO: 2878112 - RNA, 15 nt, Human
ucucucugcagcugc

SEQ ID NO: 2878113 - RNA, 16 nt, Human
ucucucugcagcugcc

SEQ ID NO: 2878114 - RNA, 18 nt, Human
ucucucugcagcugccgg

SEQ ID NO: 2878115 - RNA, 11 nt, Human
ucucugaaccc

SEQ ID NO: 2878116 - RNA, 17 nt, Human
ucucugaggacacuaac

SEQ ID NO: 2878117 - RNA, 14 nt, Human
ucucugaggacacu

SEQ ID NO: 2878118 - RNA, 22 nt, Human
ucucugaagcauguuucauguu

SEQ ID NO: 2878119 - RNA, 19 nt, Human
ucucugaagcauguuucau

SEQ ID NO: 2878120 - RNA, 21 nt, Human
ucucugaagcauguuucaugu

SEQ ID NO: 2878121 - RNA, 12 nt, Human
ucucugaagcau

SEQ ID NO: 2878122 - RNA, 13 nt, Human
ucucugaagcaug

SEQ ID NO: 2878123 - RNA, 14 nt, Human
ucucugaagcaugu

SEQ ID NO: 2878124 - RNA, 16 nt, Human
ucucugaagcauguuu

SEQ ID NO: 2878125 - RNA, 18 nt, Human
ucuccugccucagccucc

SEQ ID NO: 2878126 - RNA, 22 nt, Human
ucucuaggaccaugguuaagag

SEQ ID NO: 2878127 - RNA, 15 nt, Human
ucucuaauaagaaaa

SEQ ID NO: 2878128 - RNA, 16 nt, Human
ucucuaauaagaaaac

SEQ ID NO: 2878129 - RNA, 11 nt, Human
ucucuaauaug

SEQ ID NO: 2878130 - RNA, 15 nt, Human
ucucuaaucgaaaga

SEQ ID NO: 2878131 - RNA, 13 nt, Human
ucucuaacuuauu

SEQ ID NO: 2878132 - RNA, 18 nt, Human
ucucuaacuuauuuuauu

SEQ ID NO: 2878133 - RNA, 22 nt, Human
ucucuaacuucaaggcccauau

SEQ ID NO: 2878134 - RNA, 19 nt, Human
ucucuaaagaguuuauuuu

SEQ ID NO: 2878135 - RNA, 21 nt, Human
ucucuaaagaguuuauuuuaa

SEQ ID NO: 2878136 - RNA, 14 nt, Human
ucucguuugugauu

SEQ ID NO: 2878137 - RNA, 17 nt, Human
ucucguuugugauucuu

SEQ ID NO: 2878138 - RNA, 12 nt, Human
ucucguuuuucu

SEQ ID NO: 2878139 - RNA, 22 nt, Human
ucucuaaagaguuuauuuuaag

SEQ ID NO: 2878140 - RNA, 13 nt, Human
ucucuaaagcacu

SEQ ID NO: 2878141 - RNA, 23 nt, Human
ucucuaaagcacuaccgauucuu

SEQ ID NO: 2878142 - RNA, 19 nt, Human
ucucgguugaaaccuguau

SEQ ID NO: 2878143 - RNA, 21 nt, Human
ucucggcuccccauguguccu

SEQ ID NO: 2878144 - RNA, 14 nt, Human
ucucgggagaggau

SEQ ID NO: 2878145 - RNA, 23 nt, Human
ucucggcucagugcaaccucugc

SEQ ID NO: 2878146 - RNA, 15 nt, Human
ucucgugagucauuu

SEQ ID NO: 2878147 - RNA, 20 nt, Human
ucucgugagucauuuaaaug

SEQ ID NO: 2878148 - RNA, 17 nt, Human
ucuccuggaggauugca

SEQ ID NO: 2878149 - RNA, 19 nt, Human
ucuccuggaguugcauuga

SEQ ID NO: 2878150 - RNA, 12 nt, Human
ucuccuggagga

SEQ ID NO: 2878151 - RNA, 13 nt, Human
ucuccuggaggau

SEQ ID NO: 2878152 - RNA, 15 nt, Human
ucuccugccucagcc

SEQ ID NO: 2878153 - RNA, 17 nt, Human
ucuccugccucagccuc

SEQ ID NO: 2878154 - RNA, 13 nt, Human
ucucaaugaaaaa

SEQ ID NO: 2878155 - RNA, 14 nt, Human
ucuccugccucagc

SEQ ID NO: 2878156 - RNA, 14 nt, Human
ucucaaugaaaaau

SEQ ID NO: 2878157 - RNA, 12 nt, Human
ucucaaugaaaa

SEQ ID NO: 2878158 - RNA, 18 nt, Human
ucucaauccugcaguggg

SEQ ID NO: 2878159 - RNA, 19 nt, Human
ucucaauccugcagugggg

SEQ ID NO: 2878160 - RNA, 16 nt, Human
ucucaaugaagccagc

SEQ ID NO: 2878161 - RNA, 17 nt, Human
ucucaaugaagccagcu

SEQ ID NO: 2878162 - RNA, 12 nt, Human
ucucaaugugaa

SEQ ID NO: 2878163 - RNA, 12 nt, Human
ucuccugccuca

SEQ ID NO: 2878164 - RNA, 14 nt, Human
ucucaauaugcuua

SEQ ID NO: 2878165 - RNA, 21 nt, Human
ucucaaguucuaagauucuaa

SEQ ID NO: 2878166 - RNA, 22 nt, Human
ucucaaguucuaagauucuaau

SEQ ID NO: 2878167 - RNA, 16 nt, Human
ucucaaguucuaagau

SEQ ID NO: 2878168 - RNA, 17 nt, Human
ucucaaguucuaagauu

SEQ ID NO: 2878169 - RNA, 18 nt, Human
ucucaaguucuaagauuc

SEQ ID NO: 2878170 - RNA, 20 nt, Human
ucucaaguucuaagauucua

SEQ ID NO: 2878171 - RNA, 23 nt, Human
ucucaagggcuagcaucccugag

SEQ ID NO: 2878172 - RNA, 12 nt, Human
ucucaaguucua

SEQ ID NO: 2878173 - RNA, 13 nt, Human
ucucaaguucuaa

SEQ ID NO: 2878174 - RNA, 14 nt, Human
ucucaaguucuaag

SEQ ID NO: 2878175 - RNA, 15 nt, Human
ucucaaguucuaaga

SEQ ID NO: 2878176 - RNA, 19 nt, Human
ucucaagagggcacuggug

SEQ ID NO: 2878177 - RNA, 17 nt, Human
ucucaagagggcacugg

SEQ ID NO: 2878178 - RNA, 18 nt, Human
ucucaagagggcacuggu

SEQ ID NO: 2878179 - RNA, 17 nt, Human
ucucaaaguuuugaaaa

SEQ ID NO: 2878180 - RNA, 18 nt, Human
ucucaaaguuuugaaaag

SEQ ID NO: 2878181 - RNA, 20 nt, Human
ucucaaaguuuugaaaagcu

SEQ ID NO: 2878182 - RNA, 23 nt, Human
ucucaaaguuuugaaaagcuauu

SEQ ID NO: 2878183 - RNA, 12 nt, Human
ucugcacauguc

SEQ ID NO: 2878184 - RNA, 15 nt, Human
ucugcacaugucuug

SEQ ID NO: 2878185 - RNA, 16 nt, Human
ucugcacaugucuugu

SEQ ID NO: 2878186 - RNA, 17 nt, Human
ucugcacaugucuugua

SEQ ID NO: 2878187 - RNA, 14 nt, Human
ucugcaucccagca

SEQ ID NO: 2878188 - RNA, 18 nt, Human
ucugcaucccagcaccug

SEQ ID NO: 2878189 - RNA, 19 nt, Human
ucugcaucccagcaccugc

SEQ ID NO: 2878190 - RNA, 21 nt, Human
ucugcaucccagcaccugccu

SEQ ID NO: 2878191 - RNA, 22 nt, Human
ucugcaucccagcaccugccuc

SEQ ID NO: 2878192 - RNA, 23 nt, Human
ucugcaucccagcaccugccucc

SEQ ID NO: 2878193 - RNA, 24 nt, Human
ucugcaucccagcaccugccuccu

SEQ ID NO: 2878194 - RNA, 17 nt, Human
ucugcaucuccugucuu

SEQ ID NO: 2878195 - RNA, 18 nt, Human
ucugcaucuccugucuuu

SEQ ID NO: 2878196 - RNA, 20 nt, Human
ucugccagaagauccccuca

SEQ ID NO: 2878197 - RNA, 21 nt, Human
ucugccagaagauccccucag

SEQ ID NO: 2878198 - RNA, 22 nt, Human
ucugccagaagauccccucagg

SEQ ID NO: 2878199 - RNA, 23 nt, Human
ucugccagaagauccccucagga

SEQ ID NO: 2878200 - RNA, 22 nt, Human
ucugccaauuuuugccuucauu

SEQ ID NO: 2878201 - RNA, 15 nt, Human
ucugccacacucuga

SEQ ID NO: 2878202 - RNA, 19 nt, Human
ucugccaauuuuugccuuc

SEQ ID NO: 2878203 - RNA, 15 nt, Human
ucugccaccagagac

SEQ ID NO: 2878204 - RNA, 17 nt, Human
ucugcauucaggaucaa

SEQ ID NO: 2878205 - RNA, 14 nt, Human
ucugcauugcccag

SEQ ID NO: 2878206 - RNA, 18 nt, Human
ucugcauugcccagucuu

SEQ ID NO: 2878207 - RNA, 18 nt, Human
ucugcauugcuagauaaa

SEQ ID NO: 2878208 - RNA, 21 nt, Human
ucugcauugcuagauaaaagc

SEQ ID NO: 2878209 - RNA, 15 nt, Human
ucugcauuuuucugc

SEQ ID NO: 2878210 - RNA, 18 nt, Human
ucugcauuuuucugcaga

SEQ ID NO: 2878211 - RNA, 20 nt, Human
ucugcauuuuucugcagaag

SEQ ID NO: 2878212 - RNA, 21 nt, Human
ucugcauuuucaccccacccu

SEQ ID NO: 2878213 - RNA, 17 nt, Human
ucugcauuuucacccca

SEQ ID NO: 2878214 - RNA, 22 nt, Human
ucugaggagaaacaaauaagac

SEQ ID NO: 2878215 - RNA, 14 nt, Human
ucugaggcccugcc

SEQ ID NO: 2878216 - RNA, 23 nt, Human
ucugaccaguuuaaccugaugca

SEQ ID NO: 2878217 - RNA, 23 nt, Human
ucugaggaauccagacccggcug

SEQ ID NO: 2878218 - RNA, 15 nt, Human
ucugacccacugcuu

SEQ ID NO: 2878219 - RNA, 14 nt, Human
ucugacccacugcu

SEQ ID NO: 2878220 - RNA, 21 nt, Human
ucugaggcucuuucugggcca

SEQ ID NO: 2878221 - RNA, 19 nt, Human
ucugaggcucuuucugggc

SEQ ID NO: 2878222 - RNA, 23 nt, Human
ucugaggcugaaauucagaauau

SEQ ID NO: 2878223 - RNA, 11 nt, Human
ucugaggcuga

SEQ ID NO: 2878224 - RNA, 12 nt, Human
ucugcacaugaa

SEQ ID NO: 2878225 - RNA, 23 nt, Human
ucugcacaugaaucccacccaca

SEQ ID NO: 2878226 - RNA, 14 nt, Human
ucugcacacagcac

SEQ ID NO: 2878227 - RNA, 13 nt, Human
ucugacccacugc

SEQ ID NO: 2878228 - RNA, 17 nt, Human
ucugacaguuuuucugu

SEQ ID NO: 2878229 - RNA, 20 nt, Human
ucugacaguuuuucuguuuu

SEQ ID NO: 2878230 - RNA, 22 nt, Human
ucugacaggcaaugcuggcugu

SEQ ID NO: 2878231 - RNA, 21 nt, Human
ucugacaggcaaugcuggcug

SEQ ID NO: 2878232 - RNA, 12 nt, Human
ucugacaggcaa

SEQ ID NO: 2878233 - RNA, 16 nt, Human
ucugacagaaagcaga

SEQ ID NO: 2878234 - RNA, 19 nt, Human
ucugacacacagcucuguc

SEQ ID NO: 2878235 - RNA, 18 nt, Human
ucugacacacagcucugu

SEQ ID NO: 2878236 - RNA, 17 nt, Human
ucugacacacagcucug

SEQ ID NO: 2878237 - RNA, 16 nt, Human
ucugacacacagcucu

SEQ ID NO: 2878238 - RNA, 15 nt, Human
ucugaacacaggcag

SEQ ID NO: 2878239 - RNA, 16 nt, Human
ucugaacacaggcagc

SEQ ID NO: 2878240 - RNA, 17 nt, Human
ucugaacacaggcagcu

SEQ ID NO: 2878241 - RNA, 18 nt, Human
ucugaacacaggcagcuu

SEQ ID NO: 2878242 - RNA, 12 nt, Human
ucugaaaacugg

SEQ ID NO: 2878243 - RNA, 14 nt, Human
ucugaaaacuggaa

SEQ ID NO: 2878244 - RNA, 12 nt, Human
ucugaaaagaaa

SEQ ID NO: 2878245 - RNA, 13 nt, Human
ucugaaaagaaau

SEQ ID NO: 2878246 - RNA, 15 nt, Human
ucugaaaagaaauaa

SEQ ID NO: 2878247 - RNA, 23 nt, Human
ucugaaaaauuccuuuguguuuc

SEQ ID NO: 2878248 - RNA, 22 nt, Human
ucugaaaaccccauuugcuuuc

SEQ ID NO: 2878249 - RNA, 18 nt, Human
ucugaaacacacugaaag

SEQ ID NO: 2878250 - RNA, 20 nt, Human
ucugaaacacacugaaagcu

SEQ ID NO: 2878251 - RNA, 21 nt, Human
ucugaaacacacugaaagcuc

SEQ ID NO: 2878252 - RNA, 23 nt, Human
ucugaaacccuggaccagugguc

SEQ ID NO: 2878253 - RNA, 12 nt, Human
ucugaaagcaca

SEQ ID NO: 2878254 - RNA, 13 nt, Human
ucugaaagcacag

SEQ ID NO: 2878255 - RNA, 23 nt, Human
ucugaaagcacaggagacacugu

SEQ ID NO: 2878256 - RNA, 22 nt, Human
ucucuguucuacccguuccaaa

SEQ ID NO: 2878257 - RNA, 23 nt, Human
ucucuguucuacccguuccaaaa

SEQ ID NO: 2878258 - RNA, 18 nt, Human
ucucuguugacuggcugu

SEQ ID NO: 2878259 - RNA, 18 nt, Human
ucucuuaaacuugugaau

SEQ ID NO: 2878260 - RNA, 13 nt, Human
ucucuuaaaguug

SEQ ID NO: 2878261 - RNA, 14 nt, Human
ucucuguuccaugu

SEQ ID NO: 2878262 - RNA, 22 nt, Human
ucucuguuccaugucuccuuua

SEQ ID NO: 2878263 - RNA, 10 nt, Human
ucucuguguu

SEQ ID NO: 2878264 - RNA, 23 nt, Human
ucucugugucuaagauucuagau

SEQ ID NO: 2878265 - RNA, 18 nt, Human
ucucugugugcacaaaua

SEQ ID NO: 2878266 - RNA, 21 nt, Human
ucucugugucuaagauucuag

SEQ ID NO: 2878267 - RNA, 22 nt, Human
ucucugugucuaagauucuaga

SEQ ID NO: 2878268 - RNA, 15 nt, Human
ucucugugucuaaga

SEQ ID NO: 2878269 - RNA, 16 nt, Human
ucucugugucuaagau

SEQ ID NO: 2878270 - RNA, 17 nt, Human
ucucugugucuaagauu

SEQ ID NO: 2878271 - RNA, 20 nt, Human
ucucugugucuaagauucua

SEQ ID NO: 2878272 - RNA, 22 nt, Human
ucugucuucacagcucuguguu

SEQ ID NO: 2878273 - RNA, 15 nt, Human
ucugucuucacagcu

SEQ ID NO: 2878274 - RNA, 14 nt, Human
ucugucuucacagc

SEQ ID NO: 2878275 - RNA, 12 nt, Human
ucugucuucaca

SEQ ID NO: 2878276 - RNA, 17 nt, Human
ucuguuuugaaggcaaa

SEQ ID NO: 2878277 - RNA, 13 nt, Human
ucugucuucugua

SEQ ID NO: 2878278 - RNA, 14 nt, Human
ucugucuucuguau

SEQ ID NO: 2878279 - RNA, 15 nt, Human
ucugucuucuguaua

SEQ ID NO: 2878280 - RNA, 18 nt, Human
ucugucuucuguauauaa

SEQ ID NO: 2878281 - RNA, 12 nt, Human
ucugucuuguaa

SEQ ID NO: 2878282 - RNA, 13 nt, Human
ucugucuuguaau

SEQ ID NO: 2878283 - RNA, 18 nt, Human
ucugucuggagugacaga

SEQ ID NO: 2878284 - RNA, 22 nt, Human
ucugucugcccuucaccccagu

SEQ ID NO: 2878285 - RNA, 13 nt, Human
ucugucugcccuu

SEQ ID NO: 2878286 - RNA, 18 nt, Human
ucuuaaagugcaguucuu

SEQ ID NO: 2878287 - RNA, 23 nt, Human
ucuuaaagcugccuguaguuagg

SEQ ID NO: 2878288 - RNA, 21 nt, Human
ucuuaaagcugccuguaguua

SEQ ID NO: 2878289 - RNA, 20 nt, Human
ucuuaaagcugccuguaguu

SEQ ID NO: 2878290 - RNA, 19 nt, Human
ucuuaaagcugccuguagu

SEQ ID NO: 2878291 - RNA, 16 nt, Human
ucuuaaagcugccugu

SEQ ID NO: 2878292 - RNA, 16 nt, Human
ucuuaaagaaacagcu

SEQ ID NO: 2878293 - RNA, 17 nt, Human
ucuuaaagaaacagcuu

SEQ ID NO: 2878294 - RNA, 18 nt, Human
ucuuaaagaaacagcuuu

SEQ ID NO: 2878295 - RNA, 22 nt, Human
ucuuaaagaaacagcuuucaag

SEQ ID NO: 2878296 - RNA, 23 nt, Human
ucuuaaagaaacagcuuucaagu

SEQ ID NO: 2878297 - RNA, 19 nt, Human
ucuuaaagcaaaaaaugaa

SEQ ID NO: 2878298 - RNA, 23 nt, Human
ucuguuuuguuuggcaaggaaag

SEQ ID NO: 2878299 - RNA, 14 nt, Human
ucuguuuuucuuuu

SEQ ID NO: 2878300 - RNA, 17 nt, Human
ucuguuuuguaucuuaa

SEQ ID NO: 2878301 - RNA, 18 nt, Human
ucuguuuuguaucuuaaa

SEQ ID NO: 2878302 - RNA, 14 nt, Human
ucuuaaacuuguga

SEQ ID NO: 2878303 - RNA, 15 nt, Human
ucuuaaacuugugaa

SEQ ID NO: 2878304 - RNA, 16 nt, Human
ucuuaaacuugugaau

SEQ ID NO: 2878305 - RNA, 15 nt, Human
ucuuaagacuuuugg

SEQ ID NO: 2878306 - RNA, 16 nt, Human
ucuuaagaggcugaca

SEQ ID NO: 2878307 - RNA, 18 nt, Human
ucuuaagccuaaaugccu

SEQ ID NO: 2878308 - RNA, 20 nt, Human
ucuuaagccuaaaugccuua

SEQ ID NO: 2878309 - RNA, 23 nt, Human
ucuuagcugucugcucagacaga

SEQ ID NO: 2878310 - RNA, 14 nt, Human
ucuuagcuuuuuaa

SEQ ID NO: 2878311 - RNA, 18 nt, Human
ucuuagcugucugcucag

SEQ ID NO: 2878312 - RNA, 15 nt, Human
ucuuagcugucugcu

SEQ ID NO: 2878313 - RNA, 23 nt, Human
ucuuaaauuggguucaugaugca

SEQ ID NO: 2878314 - RNA, 19 nt, Human
ucuuaaauaaugcuucaga

SEQ ID NO: 2878315 - RNA, 22 nt, Human
ucuuaaauaaugcuucagauau

SEQ ID NO: 2878316 - RNA, 13 nt, Human
ucuuaaauaucuu

SEQ ID NO: 2878317 - RNA, 14 nt, Human
ucuuaaauaucuuu

SEQ ID NO: 2878318 - RNA, 15 nt, Human
ucuuaaauaucuuuu

SEQ ID NO: 2878319 - RNA, 17 nt, Human
ucuuaaauaucuuuuau

SEQ ID NO: 2878320 - RNA, 16 nt, Human
ucuucagccaccucuc

SEQ ID NO: 2878321 - RNA, 19 nt, Human
ucuucagcauucccuccca

SEQ ID NO: 2878322 - RNA, 19 nt, Human
ucuucagccaccucucuuu

SEQ ID NO: 2878323 - RNA, 14 nt, Human
ucuuaggcacuuug

SEQ ID NO: 2878324 - RNA, 22 nt, Human
ucuuagcuuuuuaauuguuguu

SEQ ID NO: 2878325 - RNA, 16 nt, Human
ucuuagcuuuuuaauu

SEQ ID NO: 2878326 - RNA, 17 nt, Human
ucuuagcuuuuuaauug

SEQ ID NO: 2878327 - RNA, 18 nt, Human
ucuuagcuuuuuaauugu

SEQ ID NO: 2878328 - RNA, 21 nt, Human
ucuuagcuuuuuaauuguugu

SEQ ID NO: 2878329 - RNA, 22 nt, Human
ucuucagccucuuucugucccu

SEQ ID NO: 2878330 - RNA, 16 nt, Human
ucuucagcguaaaaug

SEQ ID NO: 2878331 - RNA, 18 nt, Human
ucuucagcguaaaauggu

SEQ ID NO: 2878332 - RNA, 19 nt, Human
ucuucagcguaaaauggug

SEQ ID NO: 2878333 - RNA, 15 nt, Human
ucuucaggccucccu

SEQ ID NO: 2878334 - RNA, 14 nt, Human
ucuucaggccuccc

SEQ ID NO: 2878335 - RNA, 13 nt, Human
ucuucaggccucc

SEQ ID NO: 2878336 - RNA, 21 nt, Human
ucuucauauucuaaaaccauu

SEQ ID NO: 2878337 - RNA, 22 nt, Human
ucuucauacuuuuuuucacagu

SEQ ID NO: 2878338 - RNA, 13 nt, Human
ucuucauacuuuu

SEQ ID NO: 2878339 - RNA, 15 nt, Human
ucuucauacuuuuuu

SEQ ID NO: 2878340 - RNA, 18 nt, Human
ucuucaggccucccucuc

SEQ ID NO: 2878341 - RNA, 20 nt, Human
ucuucagcuugugcacaauu

SEQ ID NO: 2878342 - RNA, 14 nt, Human
ucuucaucugccca

SEQ ID NO: 2878343 - RNA, 16 nt, Human
ucuucaucugcccaac

SEQ ID NO: 2878344 - RNA, 13 nt, Human
ucuuccugugauc

SEQ ID NO: 2878345 - RNA, 13 nt, Human
ucuuccuggcuuu

SEQ ID NO: 2878346 - RNA, 22 nt, Human
ucuuccuggcuuuuuaacuccc

SEQ ID NO: 2878347 - RNA, 17 nt, Human
ucuuccuggauuauuca

SEQ ID NO: 2878348 - RNA, 22 nt, Human
ucuuccugccccucuuucucuu

SEQ ID NO: 2878349 - RNA, 12 nt, Human
ucuugaacuccu

SEQ ID NO: 2878350 - RNA, 19 nt, Human
ucuugaacuccugaccuca

SEQ ID NO: 2878351 - RNA, 17 nt, Human
ucuugaacuccugaccu

SEQ ID NO: 2878352 - RNA, 22 nt, Human
ucuugaaauuaagaaggcaaaa

SEQ ID NO: 2878353 - RNA, 23 nt, Human
ucuugaaagauucagguauguug

SEQ ID NO: 2878354 - RNA, 17 nt, Human
ucuugaaagaagaaugu

SEQ ID NO: 2878355 - RNA, 18 nt, Human
ucuugaaagaagaaugug

SEQ ID NO: 2878356 - RNA, 19 nt, Human
ucuucuuuuugcuucaaaa

SEQ ID NO: 2878357 - RNA, 16 nt, Human
ucuucuuuuuuuguga

SEQ ID NO: 2878358 - RNA, 17 nt, Human
ucuucuuuuuuugugau

SEQ ID NO: 2878359 - RNA, 18 nt, Human
ucuucuuuuuuugugaug

SEQ ID NO: 2878360 - RNA, 14 nt, Human
ucuucuccuuucac

SEQ ID NO: 2878361 - RNA, 21 nt, Human
ucuucuccuggaguugcauug

SEQ ID NO: 2878362 - RNA, 13 nt, Human
ucuucuccuuuca

SEQ ID NO: 2878363 - RNA, 17 nt, Human
ucuuccuguuaauguau

SEQ ID NO: 2878364 - RNA, 19 nt, Human
ucuuccuguuaauguauuu

SEQ ID NO: 2878365 - RNA, 18 nt, Human
ucuuccuguuuuguacau

SEQ ID NO: 2878366 - RNA, 21 nt, Human
ucuuccuguuuuguacauaga

SEQ ID NO: 2878367 - RNA, 12 nt, Human
ucuucuccacug

SEQ ID NO: 2878368 - RNA, 12 nt, Human
ucuucuccacca

SEQ ID NO: 2878369 - RNA, 12 nt, Human
ucuucucccaga

SEQ ID NO: 2878370 - RNA, 13 nt, Human
ucuucucccagaa

SEQ ID NO: 2878371 - RNA, 16 nt, Human
ucuucucccagaaucc

SEQ ID NO: 2878372 - RNA, 21 nt, Human
ucuucucccagaaucccagcc

SEQ ID NO: 2878373 - RNA, 22 nt, Human
ucuucucccagaaucccagccg

SEQ ID NO: 2878374 - RNA, 12 nt, Human
ucuucuccccag

SEQ ID NO: 2878375 - RNA, 15 nt, Human
ucuggcuccagcugg

SEQ ID NO: 2878376 - RNA, 17 nt, Human
ucuggcuccuuuacaaa

SEQ ID NO: 2878377 - RNA, 20 nt, Human
ucuggcucccucuucuuuca

SEQ ID NO: 2878378 - RNA, 14 nt, Human
ucuggcugaaaaag

SEQ ID NO: 2878379 - RNA, 18 nt, Human
ucuggcugacuaaauuug

SEQ ID NO: 2878380 - RNA, 22 nt, Human
ucuggcugacuaaauuugggga

SEQ ID NO: 2878381 - RNA, 14 nt, Human
ucugggacacaguu

SEQ ID NO: 2878382 - RNA, 13 nt, Human
ucuggugccucca

SEQ ID NO: 2878383 - RNA, 16 nt, Human
ucuggugauaaggaca

SEQ ID NO: 2878384 - RNA, 17 nt, Human
ucuggugauaaggacau

SEQ ID NO: 2878385 - RNA, 17 nt, Human
ucuggugaucucccaag

SEQ ID NO: 2878386 - RNA, 15 nt, Human
ucuggugccuccaga

SEQ ID NO: 2878387 - RNA, 16 nt, Human
ucuggugccuccagag

SEQ ID NO: 2878388 - RNA, 14 nt, Human
ucuguccuacucug

SEQ ID NO: 2878389 - RNA, 21 nt, Human
ucugguuccuccccuccuccu

SEQ ID NO: 2878390 - RNA, 20 nt, Human
ucugguuccuccccuccucc

SEQ ID NO: 2878391 - RNA, 13 nt, Human
ucugguuccuccc

SEQ ID NO: 2878392 - RNA, 19 nt, Human
ucuguccuacucuguguca

SEQ ID NO: 2878393 - RNA, 15 nt, Human
ucuguccuacucugu

SEQ ID NO: 2878394 - RNA, 21 nt, Human
ucuguccugggagugagcugg

SEQ ID NO: 2878395 - RNA, 13 nt, Human
ucuguccugugac

SEQ ID NO: 2878396 - RNA, 21 nt, Human
ucuguccugugagguuuccca

SEQ ID NO: 2878397 - RNA, 22 nt, Human
ucuguccugugagguuucccaa

SEQ ID NO: 2878398 - RNA, 11 nt, Human
ucugguucuaa

SEQ ID NO: 2878399 - RNA, 13 nt, Human
ucugguucuaaca

SEQ ID NO: 2878400 - RNA, 14 nt, Human
ucugucgcccaguc

SEQ ID NO: 2878401 - RNA, 22 nt, Human
ucugucuccuuaacacugagcu

SEQ ID NO: 2878402 - RNA, 12 nt, Human
ucugucucucuc

SEQ ID NO: 2878403 - RNA, 13 nt, Human
ucugucucugaag

SEQ ID NO: 2878404 - RNA, 17 nt, Human
ucugccagcaaagagga

SEQ ID NO: 2878405 - RNA, 12 nt, Human
ucugccagggag

SEQ ID NO: 2878406 - RNA, 20 nt, Human
ucugccaggcccccaccaca

SEQ ID NO: 2878407 - RNA, 23 nt, Human
ucugccaggcccccaccacacau

SEQ ID NO: 2878408 - RNA, 19 nt, Human
ucugccagggagcuugaaa

SEQ ID NO: 2878409 - RNA, 11 nt, Human
ucugccagggc

SEQ ID NO: 2878410 - RNA, 12 nt, Human
ucugccagggca

SEQ ID NO: 2878411 - RNA, 13 nt, Human
ucugccagggcag

SEQ ID NO: 2878412 - RNA, 16 nt, Human
ucugccagggcagugc

SEQ ID NO: 2878413 - RNA, 17 nt, Human
ucugccagggcagugcu

SEQ ID NO: 2878414 - RNA, 14 nt, Human
ucugccagggagcu

SEQ ID NO: 2878415 - RNA, 13 nt, Human
ucugccagggagc

SEQ ID NO: 2878416 - RNA, 13 nt, Human
ucugccagccaca

SEQ ID NO: 2878417 - RNA, 13 nt, Human
ucugccugcccag

SEQ ID NO: 2878418 - RNA, 14 nt, Human
ucugccugcccagg

SEQ ID NO: 2878419 - RNA, 17 nt, Human
ucugcugacagacacag

SEQ ID NO: 2878420 - RNA, 18 nt, Human
ucugcugacagacacagg

SEQ ID NO: 2878421 - RNA, 18 nt, Human
ucugcuccucuccccagc

SEQ ID NO: 2878422 - RNA, 16 nt, Human
ucugccugcccaggcc

SEQ ID NO: 2878423 - RNA, 15 nt, Human
ucugccugcccaggc

SEQ ID NO: 2878424 - RNA, 16 nt, Human
ucugcuccccagggga

SEQ ID NO: 2878425 - RNA, 22 nt, Human
ucugcugacagacacaggcccg

SEQ ID NO: 2878426 - RNA, 21 nt, Human
ucugcugacagacacaggccc

SEQ ID NO: 2878427 - RNA, 20 nt, Human
ucugcugacagacacaggcc

SEQ ID NO: 2878428 - RNA, 19 nt, Human
ucugcugacagacacaggc

SEQ ID NO: 2878429 - RNA, 14 nt, Human
ucugcuggcccagc

SEQ ID NO: 2878430 - RNA, 12 nt, Human
ucugcuggccca

SEQ ID NO: 2878431 - RNA, 23 nt, Human
ucugcuggaguuucauguacaag

SEQ ID NO: 2878432 - RNA, 20 nt, Human
ucugcuggcccagccaaacc

SEQ ID NO: 2878433 - RNA, 23 nt, Human
ucugcuggcaucaagagguggga

SEQ ID NO: 2878434 - RNA, 15 nt, Human
ucuggaaugcagugg

SEQ ID NO: 2878435 - RNA, 22 nt, Human
ucuggaauacaugaaauauaga

SEQ ID NO: 2878436 - RNA, 14 nt, Human
ucuggaauacauga

SEQ ID NO: 2878437 - RNA, 14 nt, Human
ucuggacaggcaug

SEQ ID NO: 2878438 - RNA, 16 nt, Human
ucuggaaugcaguggu

SEQ ID NO: 2878439 - RNA, 21 nt, Human
ucuggacaggcauguucucug

SEQ ID NO: 2878440 - RNA, 14 nt, Human
ucuggacaggcucu

SEQ ID NO: 2878441 - RNA, 18 nt, Human
ucuggacaggcucugcuu

SEQ ID NO: 2878442 - RNA, 20 nt, Human
ucuggacaggcucugcuucu

SEQ ID NO: 2878443 - RNA, 17 nt, Human
ucuggacagucagcucu

SEQ ID NO: 2878444 - RNA, 18 nt, Human
ucuggacagucagcucuu

SEQ ID NO: 2878445 - RNA, 19 nt, Human
ucuggaaucuggagaccag

SEQ ID NO: 2878446 - RNA, 14 nt, Human
ucuggaaugagccu

SEQ ID NO: 2878447 - RNA, 14 nt, Human
uguaaaauguaaug

SEQ ID NO: 2878448 - RNA, 12 nt, Human
uguaaacugcca

SEQ ID NO: 2878449 - RNA, 13 nt, Human
uguaaacugccau

SEQ ID NO: 2878450 - RNA, 14 nt, Human
uguaaacugccaua

SEQ ID NO: 2878451 - RNA, 22 nt, Human
uguaaacugccauauauaacag

SEQ ID NO: 2878452 - RNA, 20 nt, Human
uguaaacuggaauuaaaagg

SEQ ID NO: 2878453 - RNA, 20 nt, Human
uguaaacucaaaauauuugu

SEQ ID NO: 2878454 - RNA, 15 nt, Human
uguaaacucaaaaua

SEQ ID NO: 2878455 - RNA, 14 nt, Human
uguaaaccgcuuug

SEQ ID NO: 2878456 - RNA, 19 nt, Human
uguaaaccgcuuuggccug

SEQ ID NO: 2878457 - RNA, 19 nt, Human
uguaaacgacaagaauaau

SEQ ID NO: 2878458 - RNA, 16 nt, Human
uguaaacucaaaacuu

SEQ ID NO: 2878459 - RNA, 21 nt, Human
uguaaacucaaaacuuaacau

SEQ ID NO: 2878460 - RNA, 18 nt, Human
uguaaaauauacuuaaau

SEQ ID NO: 2878461 - RNA, 18 nt, Human
uguaaaauaagaaugauu

SEQ ID NO: 2878462 - RNA, 12 nt, Human
uguaaaauagcu

SEQ ID NO: 2878463 - RNA, 14 nt, Human
uguaaaauagcuug

SEQ ID NO: 2878464 - RNA, 17 nt, Human
uguaaaauagcuuguau

SEQ ID NO: 2878465 - RNA, 20 nt, Human
uguaaaauagcuuguauagu

SEQ ID NO: 2878466 - RNA, 21 nt, Human
uguaaaauagcuuguauagug

SEQ ID NO: 2878467 - RNA, 18 nt, Human
uguaaaagauuaaacugc

SEQ ID NO: 2878468 - RNA, 14 nt, Human
uguaaaauaaaauu

SEQ ID NO: 2878469 - RNA, 18 nt, Human
uguaaaaccugucaauga

SEQ ID NO: 2878470 - RNA, 12 nt, Human
uguaaaacgcug

SEQ ID NO: 2878471 - RNA, 16 nt, Human
uguaaaacgcugucaa

SEQ ID NO: 2878472 - RNA, 16 nt, Human
uguaaaaccugucaau

SEQ ID NO: 2878473 - RNA, 12 nt, Human
uguaaaaagaaa

SEQ ID NO: 2878474 - RNA, 13 nt, Human
uguaaaaagaaaa

SEQ ID NO: 2878475 - RNA, 19 nt, Human
uguaaaaaaaaaugccuuu

SEQ ID NO: 2878476 - RNA, 15 nt, Human
ugguuuuuaaauuuu

SEQ ID NO: 2878477 - RNA, 20 nt, Human
ugguuuuuaaauuuuguaau

SEQ ID NO: 2878478 - RNA, 21 nt, Human
ugguuuuuaaauuuuguaaug

SEQ ID NO: 2878479 - RNA, 17 nt, Human
uguaaaaaagaaaaaca

SEQ ID NO: 2878480 - RNA, 17 nt, Human
uguaaaaaaugugugua

SEQ ID NO: 2878481 - RNA, 14 nt, Human
uguaaaaacacuga

SEQ ID NO: 2878482 - RNA, 16 nt, Human
uguaaaaacacugaaa

SEQ ID NO: 2878483 - RNA, 18 nt, Human
uguaaaaaaaaaugccuu

SEQ ID NO: 2878484 - RNA, 22 nt, Human
ugguuuuuuuuuuuuuuuuggc

SEQ ID NO: 2878485 - RNA, 23 nt, Human
ugguuuuuuuuuuuuuuuuggcu

SEQ ID NO: 2878486 - RNA, 10 nt, Human
ugguuuuuuu

SEQ ID NO: 2878487 - RNA, 14 nt, Human
ugguuuucuuaagg

SEQ ID NO: 2878488 - RNA, 21 nt, Human
ugguuguuaguuauagauguc

SEQ ID NO: 2878489 - RNA, 15 nt, Human
ugguugugucugcuu

SEQ ID NO: 2878490 - RNA, 14 nt, Human
ugguugugucuuuu

SEQ ID NO: 2878491 - RNA, 22 nt, Human
ugguuguuaguuauagaugucu

SEQ ID NO: 2878492 - RNA, 16 nt, Human
ugguuggcuggccuuc

SEQ ID NO: 2878493 - RNA, 19 nt, Human
ugguuggggcccugcccug

SEQ ID NO: 2878494 - RNA, 19 nt, Human
ugguuggguggcaauucca

SEQ ID NO: 2878495 - RNA, 22 nt, Human
ugguugguaacacaaauuuuca

SEQ ID NO: 2878496 - RNA, 13 nt, Human
ugguugcauccua

SEQ ID NO: 2878497 - RNA, 16 nt, Human
ugguugcacuuuguag

SEQ ID NO: 2878498 - RNA, 17 nt, Human
ugguugccuuaaagaaa

SEQ ID NO: 2878499 - RNA, 18 nt, Human
ugguugccuuaaagaaag

SEQ ID NO: 2878500 - RNA, 21 nt, Human
uguaaugaaaaugaauaucua

SEQ ID NO: 2878501 - RNA, 17 nt, Human
uguacacugacuugaga

SEQ ID NO: 2878502 - RNA, 17 nt, Human
uguacacguguccugua

SEQ ID NO: 2878503 - RNA, 16 nt, Human
uguacacguguccugu

SEQ ID NO: 2878504 - RNA, 21 nt, Human
uguacagaaaagggcggcuuc

SEQ ID NO: 2878505 - RNA, 15 nt, Human
uguacagacagagaa

SEQ ID NO: 2878506 - RNA, 14 nt, Human
uguacagacauauu

SEQ ID NO: 2878507 - RNA, 17 nt, Human
uguacagacauauuuaa

SEQ ID NO: 2878508 - RNA, 19 nt, Human
uguacagacauauuuaacu

SEQ ID NO: 2878509 - RNA, 20 nt, Human
uguacagacauauuuaacug

SEQ ID NO: 2878510 - RNA, 22 nt, Human
uguacagacauauuuaacuggu

SEQ ID NO: 2878511 - RNA, 15 nt, Human
uguaaugaaaaugaa

SEQ ID NO: 2878512 - RNA, 18 nt, Human
uguaaugaaaaugaauau

SEQ ID NO: 2878513 - RNA, 15 nt, Human
uguaauaagacauaa

SEQ ID NO: 2878514 - RNA, 14 nt, Human
uguaauaauugcuc

SEQ ID NO: 2878515 - RNA, 13 nt, Human
uguaauaauaccu

SEQ ID NO: 2878516 - RNA, 14 nt, Human
uguaauaauaccuc

SEQ ID NO: 2878517 - RNA, 16 nt, Human
uguaauaauaccucaa

SEQ ID NO: 2878518 - RNA, 17 nt, Human
uguaauaauaccucaau

SEQ ID NO: 2878519 - RNA, 20 nt, Human
uguaauaauaccucaauguu

SEQ ID NO: 2878520 - RNA, 21 nt, Human
uguaauaauaccucaauguuu

SEQ ID NO: 2878521 - RNA, 23 nt, Human
uguaauaauaccucaauguuuga

SEQ ID NO: 2878522 - RNA, 22 nt, Human
uguaauaacugugaaguuuaca

SEQ ID NO: 2878523 - RNA, 14 nt, Human
uguaauaacuguga

SEQ ID NO: 2878524 - RNA, 12 nt, Human
uguaauaagaca

SEQ ID NO: 2878525 - RNA, 13 nt, Human
uguaauaagacau

SEQ ID NO: 2878526 - RNA, 14 nt, Human
uguaauaagacaua

SEQ ID NO: 2878527 - RNA, 18 nt, Human
uguaauaagacauaacgu

SEQ ID NO: 2878528 - RNA, 21 nt, Human
uguaauaagacuuagauugug

SEQ ID NO: 2878529 - RNA, 12 nt, Human
uguaaccauuuu

SEQ ID NO: 2878530 - RNA, 13 nt, Human
uguaaccauuuua

SEQ ID NO: 2878531 - RNA, 19 nt, Human
uguaaccauuuuauaaagu

SEQ ID NO: 2878532 - RNA, 22 nt, Human
uguaaccauuuuauaaagugcu

SEQ ID NO: 2878533 - RNA, 17 nt, Human
uguaacauacuggccug

SEQ ID NO: 2878534 - RNA, 22 nt, Human
uguaacaucacuauccaugcac

SEQ ID NO: 2878535 - RNA, 14 nt, Human
uguaacaagccacc

SEQ ID NO: 2878536 - RNA, 22 nt, Human
uguaaacucaaaacuuaacaua

SEQ ID NO: 2878537 - RNA, 23 nt, Human
uguaaacucaaaauauuuguaca

SEQ ID NO: 2878538 - RNA, 17 nt, Human
uguaacaagccacccca

SEQ ID NO: 2878539 - RNA, 23 nt, Human
uguaacacagcugagagacuuuu

SEQ ID NO: 2878540 - RNA, 20 nt, Human
uguaacacagcugagagacu

SEQ ID NO: 2878541 - RNA, 21 nt, Human
uguaacacagcugagagacuu

SEQ ID NO: 2878542 - RNA, 23 nt, Human
ugguuccccuguucacucuacuu

SEQ ID NO: 2878543 - RNA, 18 nt, Human
ugguucccguuucuccac

SEQ ID NO: 2878544 - RNA, 20 nt, Human
ugguucccguuucuccaccu

SEQ ID NO: 2878545 - RNA, 15 nt, Human
ugguuccucucuggu

SEQ ID NO: 2878546 - RNA, 17 nt, Human
ugguuccuuucucagcc

SEQ ID NO: 2878547 - RNA, 11 nt, Human
ugguucucaau

SEQ ID NO: 2878548 - RNA, 12 nt, Human
ugguucucaaug

SEQ ID NO: 2878549 - RNA, 17 nt, Human
ugguucuaaggaccuga

SEQ ID NO: 2878550 - RNA, 22 nt, Human
ugguucuaaggaccugaaauuc

SEQ ID NO: 2878551 - RNA, 12 nt, Human
ugguuccucccc

SEQ ID NO: 2878552 - RNA, 23 nt, Human
ugguuccuccccuccuccuggac

SEQ ID NO: 2878553 - RNA, 18 nt, Human
ugguuccuccccuccucc

SEQ ID NO: 2878554 - RNA, 18 nt, Human
ugguugaugaucuuugca

SEQ ID NO: 2878555 - RNA, 15 nt, Human
ugguugacuggguuu

SEQ ID NO: 2878556 - RNA, 12 nt, Human
ugguugaagaag

SEQ ID NO: 2878557 - RNA, 15 nt, Human
ugguucucaaugaaa

SEQ ID NO: 2878558 - RNA, 14 nt, Human
ugguucucaaugaa

SEQ ID NO: 2878559 - RNA, 16 nt, Human
ugguucucaaugaaaa

SEQ ID NO: 2878560 - RNA, 12 nt, Human
ugguucuggcca

SEQ ID NO: 2878561 - RNA, 20 nt, Human
ugguucugaugaugugccug

SEQ ID NO: 2878562 - RNA, 13 nt, Human
ugguucugaugcc

SEQ ID NO: 2878563 - RNA, 15 nt, Human
ugguucugcuucaau

SEQ ID NO: 2878564 - RNA, 13 nt, Human
ugguucugugcca

SEQ ID NO: 2878565 - RNA, 15 nt, Human
ugguucuucauuuau

SEQ ID NO: 2878566 - RNA, 12 nt, Human
ugguucuucuca

SEQ ID NO: 2878567 - RNA, 19 nt, Human
ugguucuucucaaaagaac

SEQ ID NO: 2878568 - RNA, 16 nt, Human
ugguucauuaauucua

SEQ ID NO: 2878569 - RNA, 11 nt, Human
ugguuccccug

SEQ ID NO: 2878570 - RNA, 18 nt, Human
ugguuccccuguucacuc

SEQ ID NO: 2878571 - RNA, 19 nt, Human
ugguuccccuguucacucu

SEQ ID NO: 2878572 - RNA, 20 nt, Human
ugguuccccuguucacucua

SEQ ID NO: 2878573 - RNA, 23 nt, Human
ugguguauagaaguuuguccauu

SEQ ID NO: 2878574 - RNA, 18 nt, Human
uggugucaguauccaggc

SEQ ID NO: 2878575 - RNA, 16 nt, Human
uggugucaccugaaga

SEQ ID NO: 2878576 - RNA, 12 nt, Human
uggugucacugu

SEQ ID NO: 2878577 - RNA, 14 nt, Human
uggugucacugucc

SEQ ID NO: 2878578 - RNA, 15 nt, Human
uggugucacuguccc

SEQ ID NO: 2878579 - RNA, 19 nt, Human
uggugucacugucccuccu

SEQ ID NO: 2878580 - RNA, 20 nt, Human
uggugucacugucccuccug

SEQ ID NO: 2878581 - RNA, 21 nt, Human
uggugucacugucccuccugg

SEQ ID NO: 2878582 - RNA, 22 nt, Human
uggugucacugucccuccuggu

SEQ ID NO: 2878583 - RNA, 23 nt, Human
ugguguauccccccccuguauag

SEQ ID NO: 2878584 - RNA, 19 nt, Human
uggugucaacaugaaacac

SEQ ID NO: 2878585 - RNA, 14 nt, Human
uggugucaccccag

SEQ ID NO: 2878586 - RNA, 15 nt, Human
uggugucaccccaga

SEQ ID NO: 2878587 - RNA, 16 nt, Human
uggugucaccccagag

SEQ ID NO: 2878588 - RNA, 17 nt, Human
uggugucaccccagagc

SEQ ID NO: 2878589 - RNA, 18 nt, Human
uggugucaccccagagcc

SEQ ID NO: 2878590 - RNA, 19 nt, Human
uggugucaccccagagcca

SEQ ID NO: 2878591 - RNA, 21 nt, Human
uggugucaccccagagccaca

SEQ ID NO: 2878592 - RNA, 19 nt, Human
ugguguaauaagacauaac

SEQ ID NO: 2878593 - RNA, 13 nt, Human
ugguguaauuuau

SEQ ID NO: 2878594 - RNA, 14 nt, Human
ugguguaauaagac

SEQ ID NO: 2878595 - RNA, 15 nt, Human
ugguguaauaagaca

SEQ ID NO: 2878596 - RNA, 16 nt, Human
ugguguaauaagacau

SEQ ID NO: 2878597 - RNA, 17 nt, Human
ugguguaauaagacaua

SEQ ID NO: 2878598 - RNA, 23 nt, Human
uggguacuuguggacacagcucu

SEQ ID NO: 2878599 - RNA, 20 nt, Human
uggguacuuguggacacagc

SEQ ID NO: 2878600 - RNA, 14 nt, Human
uggugagaaaccug

SEQ ID NO: 2878601 - RNA, 20 nt, Human
uggugagaaaccuguaucuu

SEQ ID NO: 2878602 - RNA, 19 nt, Human
uggugagaaauuucuguga

SEQ ID NO: 2878603 - RNA, 22 nt, Human
uggugagaaauuucugugaaac

SEQ ID NO: 2878604 - RNA, 18 nt, Human
ugguggcagugggagcug

SEQ ID NO: 2878605 - RNA, 13 nt, Human
ugguggcaguggg

SEQ ID NO: 2878606 - RNA, 20 nt, Human
ugguggcagugggagcugcc

SEQ ID NO: 2878607 - RNA, 19 nt, Human
ugguggcccgacagccugg

SEQ ID NO: 2878608 - RNA, 17 nt, Human
ugguggcaguggaggug

SEQ ID NO: 2878609 - RNA, 19 nt, Human
ugguggcaguggagguggg

SEQ ID NO: 2878610 - RNA, 12 nt, Human
ugguggcagugg

SEQ ID NO: 2878611 - RNA, 13 nt, Human
ugguggcuggguu

SEQ ID NO: 2878612 - RNA, 12 nt, Human
uggugggagggg

SEQ ID NO: 2878613 - RNA, 14 nt, Human
ugguggcuguggaa

SEQ ID NO: 2878614 - RNA, 14 nt, Human
ugguggcuucagcu

SEQ ID NO: 2878615 - RNA, 15 nt, Human
ugguggcuucagcuc

SEQ ID NO: 2878616 - RNA, 16 nt, Human
ugguggcuucagcucc

SEQ ID NO: 2878617 - RNA, 17 nt, Human
ugguggcuucagcucca

SEQ ID NO: 2878618 - RNA, 21 nt, Human
ugguggcuucagcuccagccc

SEQ ID NO: 2878619 - RNA, 13 nt, Human
ugguggcuuuccu

SEQ ID NO: 2878620 - RNA, 10 nt, Human
ugguggccuc

SEQ ID NO: 2878621 - RNA, 12 nt, Human
ugguggccucag

SEQ ID NO: 2878622 - RNA, 13 nt, Human
ugguggccucagc

SEQ ID NO: 2878623 - RNA, 21 nt, Human
ugguggcccgacagccuggca

SEQ ID NO: 2878624 - RNA, 23 nt, Human
uggugggaggggcgcccaccucc

SEQ ID NO: 2878625 - RNA, 19 nt, Human
uggugggaugugguuuucu

SEQ ID NO: 2878626 - RNA, 21 nt, Human
uggugggaggggcgcccaccu

SEQ ID NO: 2878627 - RNA, 22 nt, Human
uggugggaggggcgcccaccuc

SEQ ID NO: 2878628 - RNA, 14 nt, Human
uggugggcuucagg

SEQ ID NO: 2878629 - RNA, 18 nt, Human
uggugggcuucagggcag

SEQ ID NO: 2878630 - RNA, 13 nt, Human
ugguguaauaaga

SEQ ID NO: 2878631 - RNA, 21 nt, Human
ugguggguucaggggacucag

SEQ ID NO: 2878632 - RNA, 19 nt, Human
ugguggguucaggggacuc

SEQ ID NO: 2878633 - RNA, 13 nt, Human
ugucuaauuaaaa

SEQ ID NO: 2878634 - RNA, 18 nt, Human
ugucuaauuaaaacacuu

SEQ ID NO: 2878635 - RNA, 18 nt, Human
ugucuaauugcaucucaa

SEQ ID NO: 2878636 - RNA, 19 nt, Human
ugucuaauugcaucucaaa

SEQ ID NO: 2878637 - RNA, 12 nt, Human
ugucuacaaaua

SEQ ID NO: 2878638 - RNA, 13 nt, Human
ugucuacaaauau

SEQ ID NO: 2878639 - RNA, 15 nt, Human
ugucuacaaauauaa

SEQ ID NO: 2878640 - RNA, 21 nt, Human
ugucuacaaauauaagauuuu

SEQ ID NO: 2878641 - RNA, 18 nt, Human
ugucuaagauucuagauc

SEQ ID NO: 2878642 - RNA, 17 nt, Human
ugucuaagauucuagau

SEQ ID NO: 2878643 - RNA, 22 nt, Human
uguccugccuaaggcugaacuu

SEQ ID NO: 2878644 - RNA, 22 nt, Human
uguccugccugcaauauuugaa

SEQ ID NO: 2878645 - RNA, 15 nt, Human
uguccugaugcuuuu

SEQ ID NO: 2878646 - RNA, 18 nt, Human
uguccugaugcuuuuguc

SEQ ID NO: 2878647 - RNA, 20 nt, Human
uguccugggagugagcuggu

SEQ ID NO: 2878648 - RNA, 19 nt, Human
uguccugggagugagcugg

SEQ ID NO: 2878649 - RNA, 12 nt, Human
uguccugggagu

SEQ ID NO: 2878650 - RNA, 12 nt, Human
uguccugcuggu

SEQ ID NO: 2878651 - RNA, 15 nt, Human
uguccugcuucugaa

SEQ ID NO: 2878652 - RNA, 20 nt, Human
ugucauccuuggucuuugua

SEQ ID NO: 2878653 - RNA, 23 nt, Human
ugucauccuuggucuuuguaucu

SEQ ID NO: 2878654 - RNA, 13 nt, Human
ugucaucucagcu

SEQ ID NO: 2878655 - RNA, 13 nt, Human
uguccuaugugug

SEQ ID NO: 2878656 - RNA, 14 nt, Human
uguccuauguguga

SEQ ID NO: 2878657 - RNA, 22 nt, Human
uguccuaugugugacucuaaau

SEQ ID NO: 2878658 - RNA, 13 nt, Human
uguccuaugaaug

SEQ ID NO: 2878659 - RNA, 21 nt, Human
uguccuaugaaugcuuugcau

SEQ ID NO: 2878660 - RNA, 12 nt, Human
uguccuaugcaa

SEQ ID NO: 2878661 - RNA, 14 nt, Human
uguccuaugcaaua

SEQ ID NO: 2878662 - RNA, 15 nt, Human
uguccuaugcaauaa

SEQ ID NO: 2878663 - RNA, 16 nt, Human
uguccuaugcaauaaa

SEQ ID NO: 2878664 - RNA, 19 nt, Human
uguccuaucuaucuuccaa

SEQ ID NO: 2878665 - RNA, 20 nt, Human
uguccuaucuaucuuccaaa

SEQ ID NO: 2878666 - RNA, 18 nt, Human
uguccccuccacugucac

SEQ ID NO: 2878667 - RNA, 12 nt, Human
uguccccuccca

SEQ ID NO: 2878668 - RNA, 16 nt, Human
uguccccgcagcccug

SEQ ID NO: 2878669 - RNA, 20 nt, Human
ugucaucugaauuugcccug

SEQ ID NO: 2878670 - RNA, 15 nt, Human
ugucacaucagauaa

SEQ ID NO: 2878671 - RNA, 16 nt, Human
uguccccggggcccag

SEQ ID NO: 2878672 - RNA, 18 nt, Human
uguccccggggcccaggg

SEQ ID NO: 2878673 - RNA, 17 nt, Human
uguccccguguugcaug

SEQ ID NO: 2878674 - RNA, 13 nt, Human
uguccccuauccu

SEQ ID NO: 2878675 - RNA, 17 nt, Human
uguccuccaagccagcg

SEQ ID NO: 2878676 - RNA, 17 nt, Human
uguccuccagaagccuc

SEQ ID NO: 2878677 - RNA, 16 nt, Human
uguccuccagaagccu

SEQ ID NO: 2878678 - RNA, 21 nt, Human
uguccuccagaagccucuggc

SEQ ID NO: 2878679 - RNA, 20 nt, Human
uguccuccagaagccucugg

SEQ ID NO: 2878680 - RNA, 19 nt, Human
uguccuccagaagccucug

SEQ ID NO: 2878681 - RNA, 18 nt, Human
uguccuccagaagccucu

SEQ ID NO: 2878682 - RNA, 14 nt, Human
uguccucaccacau

SEQ ID NO: 2878683 - RNA, 13 nt, Human
uguccucaccaug

SEQ ID NO: 2878684 - RNA, 20 nt, Human
uguccucaccaugauggggc

SEQ ID NO: 2878685 - RNA, 14 nt, Human
uguccucacugcuc

SEQ ID NO: 2878686 - RNA, 15 nt, Human
uguccucacugcucc

SEQ ID NO: 2878687 - RNA, 15 nt, Human
uguccucagcauuuc

SEQ ID NO: 2878688 - RNA, 19 nt, Human
uguccucacugcucccuga

SEQ ID NO: 2878689 - RNA, 22 nt, Human
uguccucacugcucccugaagc

SEQ ID NO: 2878690 - RNA, 13 nt, Human
uguccucccaucc

SEQ ID NO: 2878691 - RNA, 23 nt, Human
uguccuccagaagccucuggcua

SEQ ID NO: 2878692 - RNA, 22 nt, Human
uguccuccagaagccucuggcu

SEQ ID NO: 2878693 - RNA, 23 nt, Human
uguccucccauccccuggacugg

SEQ ID NO: 2878694 - RNA, 17 nt, Human
uguccucccauccccug

SEQ ID NO: 2878695 - RNA, 18 nt, Human
uguccucccauccccugg

SEQ ID NO: 2878696 - RNA, 19 nt, Human
uguccucccauccccugga

SEQ ID NO: 2878697 - RNA, 22 nt, Human
uguccucccauccccuggacug

SEQ ID NO: 2878698 - RNA, 21 nt, Human
ugucucaaacuucagauggga

SEQ ID NO: 2878699 - RNA, 17 nt, Human
ugucucacugaaacauu

SEQ ID NO: 2878700 - RNA, 13 nt, Human
ugucucagccucc

SEQ ID NO: 2878701 - RNA, 14 nt, Human
ugucucagacuuuu

SEQ ID NO: 2878702 - RNA, 15 nt, Human
ugucucagacuuuug

SEQ ID NO: 2878703 - RNA, 20 nt, Human
ugucucagacuuuuguacau

SEQ ID NO: 2878704 - RNA, 22 nt, Human
ugucucagacuuuuguacaucu

SEQ ID NO: 2878705 - RNA, 15 nt, Human
ugucucagccuccca

SEQ ID NO: 2878706 - RNA, 14 nt, Human
ugucucagccuccc

SEQ ID NO: 2878707 - RNA, 17 nt, Human
ugucucaagagggcacu

SEQ ID NO: 2878708 - RNA, 18 nt, Human
ugucucaagagggcacug

SEQ ID NO: 2878709 - RNA, 11 nt, Human
ugucuauuuua

SEQ ID NO: 2878710 - RNA, 12 nt, Human
ugucuauuuuaa

SEQ ID NO: 2878711 - RNA, 15 nt, Human
ugucuauuuuaaaau

SEQ ID NO: 2878712 - RNA, 16 nt, Human
ugucuauuuuaaaaua

SEQ ID NO: 2878713 - RNA, 22 nt, Human
ugucuauuuuaaaauaaauuag

SEQ ID NO: 2878714 - RNA, 14 nt, Human
ugucuagaguagcu

SEQ ID NO: 2878715 - RNA, 16 nt, Human
ugucuaugggacucaa

SEQ ID NO: 2878716 - RNA, 15 nt, Human
ugucuaugggacuca

SEQ ID NO: 2878717 - RNA, 14 nt, Human
ugucuaugggacuc

SEQ ID NO: 2878718 - RNA, 17 nt, Human
ugucuagcaugccaaca

SEQ ID NO: 2878719 - RNA, 20 nt, Human
ugucuagcaugccaacaaga

SEQ ID NO: 2878720 - RNA, 21 nt, Human
ugucuagcaugccaacaagaa

SEQ ID NO: 2878721 - RNA, 22 nt, Human
ugucuauaaucccagcacuuug

SEQ ID NO: 2878722 - RNA, 17 nt, Human
ugucuauaguugucagu

SEQ ID NO: 2878723 - RNA, 18 nt, Human
ugucuauaguugucagua

SEQ ID NO: 2878724 - RNA, 11 nt, Human
ugucuuuguaa

SEQ ID NO: 2878725 - RNA, 12 nt, Human
ugucuuuguaag

SEQ ID NO: 2878726 - RNA, 13 nt, Human
ugucuuuguaagu

SEQ ID NO: 2878727 - RNA, 17 nt, Human
ugucuuuguaagucagu

SEQ ID NO: 2878728 - RNA, 14 nt, Human
ugucuuuuaaugcu

SEQ ID NO: 2878729 - RNA, 18 nt, Human
ugucuuuuaaugcuucau

SEQ ID NO: 2878730 - RNA, 20 nt, Human
ugucuuuuaaugcuucauuc

SEQ ID NO: 2878731 - RNA, 20 nt, Human
ugucuuuuauaguggaaaaa

SEQ ID NO: 2878732 - RNA, 22 nt, Human
ugucuuuuauaguggaaaaaca

SEQ ID NO: 2878733 - RNA, 15 nt, Human
ugucuuuuauauuug

SEQ ID NO: 2878734 - RNA, 16 nt, Human
ugucuuuuauauuugu

SEQ ID NO: 2878735 - RNA, 18 nt, Human
ugucuuuuauauuuguau

SEQ ID NO: 2878736 - RNA, 17 nt, Human
ugucuuuuaugcagaua

SEQ ID NO: 2878737 - RNA, 19 nt, Human
ugucuuuuaugcagauaga

SEQ ID NO: 2878738 - RNA, 20 nt, Human
ugucuuuuaugcagauagaa

SEQ ID NO: 2878739 - RNA, 13 nt, Human
ugucuguuuguuu

SEQ ID NO: 2878740 - RNA, 15 nt, Human
ugucuguuuguuuca

SEQ ID NO: 2878741 - RNA, 16 nt, Human
ugucuguuuguuucaa

SEQ ID NO: 2878742 - RNA, 19 nt, Human
ugucuguuuguuucaagaa

SEQ ID NO: 2878743 - RNA, 20 nt, Human
ugucuguuuguuucaagaac

SEQ ID NO: 2878744 - RNA, 22 nt, Human
ugucuguuuguuucaagaaccu

SEQ ID NO: 2878745 - RNA, 23 nt, Human
ugucuguuuguuucaagaaccug

SEQ ID NO: 2878746 - RNA, 15 nt, Human
ugucuguuuaagaaa

SEQ ID NO: 2878747 - RNA, 16 nt, Human
ugucuguuuaagaaaa

SEQ ID NO: 2878748 - RNA, 17 nt, Human
ugucuguuuaagaaaag

SEQ ID NO: 2878749 - RNA, 21 nt, Human
ugucuguuuaagaaaaguauu

SEQ ID NO: 2878750 - RNA, 17 nt, Human
ugucuguggauggucau

SEQ ID NO: 2878751 - RNA, 20 nt, Human
ugucuguggauggucauugc

SEQ ID NO: 2878752 - RNA, 21 nt, Human
ugucuguggauggucauugca

SEQ ID NO: 2878753 - RNA, 15 nt, Human
ugucugauuggcuug

SEQ ID NO: 2878754 - RNA, 16 nt, Human
ugucugauuggcuugu

SEQ ID NO: 2878755 - RNA, 21 nt, Human
ugucugauuggcuuguagaau

SEQ ID NO: 2878756 - RNA, 23 nt, Human
ugucugauuggcuuguagaauug

SEQ ID NO: 2878757 - RNA, 12 nt, Human
ugucugcagccc

SEQ ID NO: 2878758 - RNA, 13 nt, Human
ugucugcagcccu

SEQ ID NO: 2878759 - RNA, 16 nt, Human
ugucugcagcccugag

SEQ ID NO: 2878760 - RNA, 17 nt, Human
ugucugcagcccugaga

SEQ ID NO: 2878761 - RNA, 18 nt, Human
ugucugcagcccugagaa

SEQ ID NO: 2878762 - RNA, 12 nt, Human
ugucugcagccu

SEQ ID NO: 2878763 - RNA, 13 nt, Human
ugucugcagccuu

SEQ ID NO: 2878764 - RNA, 20 nt, Human
ugucugaagucacugcacag

SEQ ID NO: 2878765 - RNA, 22 nt, Human
ugucugaaucgagugagacaaa

SEQ ID NO: 2878766 - RNA, 23 nt, Human
ugucugaaucgagugagacaaaa

SEQ ID NO: 2878767 - RNA, 19 nt, Human
uguaggaaggucucauucu

SEQ ID NO: 2878768 - RNA, 20 nt, Human
uguaggaaggucucauucuu

SEQ ID NO: 2878769 - RNA, 21 nt, Human
uguaggaaggucucauucuuc

SEQ ID NO: 2878770 - RNA, 19 nt, Human
uguacagagugcuuuucug

SEQ ID NO: 2878771 - RNA, 15 nt, Human
uguagcuuugcucuu

SEQ ID NO: 2878772 - RNA, 13 nt, Human
uguagcuuuucac

SEQ ID NO: 2878773 - RNA, 15 nt, Human
uguagcuuuucaccu

SEQ ID NO: 2878774 - RNA, 16 nt, Human
uguagcuuuucaccuu

SEQ ID NO: 2878775 - RNA, 13 nt, Human
uguagcuuugcuc

SEQ ID NO: 2878776 - RNA, 12 nt, Human
uguagcuuugcu

SEQ ID NO: 2878777 - RNA, 19 nt, Human
uguacagaauuuuggaaga

SEQ ID NO: 2878778 - RNA, 12 nt, Human
uguacagcccag

SEQ ID NO: 2878779 - RNA, 17 nt, Human
uguacagcguuuuaaaa

SEQ ID NO: 2878780 - RNA, 16 nt, Human
uguacaggaacugcau

SEQ ID NO: 2878781 - RNA, 17 nt, Human
uguauagacaguuugua

SEQ ID NO: 2878782 - RNA, 21 nt, Human
uguauagacaguuuguaaaug

SEQ ID NO: 2878783 - RNA, 22 nt, Human
uguauagacaguuuguaaaugu

SEQ ID NO: 2878784 - RNA, 18 nt, Human
uguauaacccuguuacaa

SEQ ID NO: 2878785 - RNA, 23 nt, Human
uguauaguaaagugauaauuucu

SEQ ID NO: 2878786 - RNA, 15 nt, Human
uguauaguacuggca

SEQ ID NO: 2878787 - RNA, 18 nt, Human
uguauaaauaggagagga

SEQ ID NO: 2878788 - RNA, 21 nt, Human
uguauaaaucuuucuuuugau

SEQ ID NO: 2878789 - RNA, 11 nt, Human
uguauaaaugu

SEQ ID NO: 2878790 - RNA, 12 nt, Human
uguauaaaugua

SEQ ID NO: 2878791 - RNA, 14 nt, Human
uguauaaauguaua

SEQ ID NO: 2878792 - RNA, 15 nt, Human
uguauaaauguauau

SEQ ID NO: 2878793 - RNA, 16 nt, Human
uguauaaauguauaua

SEQ ID NO: 2878794 - RNA, 18 nt, Human
uguauaaauguauauaca

SEQ ID NO: 2878795 - RNA, 20 nt, Human
uguauaaauguauauacaca

SEQ ID NO: 2878796 - RNA, 21 nt, Human
uguauaaauguauauacacau

SEQ ID NO: 2878797 - RNA, 20 nt, Human
uguauaaacauuaaaugucu

SEQ ID NO: 2878798 - RNA, 14 nt, Human
uguauaaauaggag

SEQ ID NO: 2878799 - RNA, 19 nt, Human
uguauaaagcaacuguuau

SEQ ID NO: 2878800 - RNA, 23 nt, Human
uguauaaagcaacuguuaugaaa

SEQ ID NO: 2878801 - RNA, 14 nt, Human
uguauaaaugugau

SEQ ID NO: 2878802 - RNA, 18 nt, Human
uguauaacuucuuaaaag

SEQ ID NO: 2878803 - RNA, 21 nt, Human
uguauaacuucuuaaaaguug

SEQ ID NO: 2878804 - RNA, 16 nt, Human
uguauaagcacugaaa

SEQ ID NO: 2878805 - RNA, 18 nt, Human
uguauaagcacugaaaaa

SEQ ID NO: 2878806 - RNA, 17 nt, Human
uguauaagauccuagau

SEQ ID NO: 2878807 - RNA, 21 nt, Human
uguauaguacuggcaugguac

SEQ ID NO: 2878808 - RNA, 17 nt, Human
uguaucucugaagcaug

SEQ ID NO: 2878809 - RNA, 18 nt, Human
uguaucucugaagcaugu

SEQ ID NO: 2878810 - RNA, 19 nt, Human
uguaucucugaagcauguu

SEQ ID NO: 2878811 - RNA, 21 nt, Human
uguaucucugaagcauguuuc

SEQ ID NO: 2878812 - RNA, 22 nt, Human
uguaucucugaagcauguuuca

SEQ ID NO: 2878813 - RNA, 13 nt, Human
uguaucugugaag

SEQ ID NO: 2878814 - RNA, 23 nt, Human
uguaucucugaagcauguuucau

SEQ ID NO: 2878815 - RNA, 16 nt, Human
uguaucucuuucacau

SEQ ID NO: 2878816 - RNA, 12 nt, Human
uguaucugaguu

SEQ ID NO: 2878817 - RNA, 15 nt, Human
uguaucugaguugcc

SEQ ID NO: 2878818 - RNA, 16 nt, Human
uguaucugaguugcca

SEQ ID NO: 2878819 - RNA, 19 nt, Human
uguaucugaguugccaaga

SEQ ID NO: 2878820 - RNA, 23 nt, Human
uguaucugaguugccaagacaaa

SEQ ID NO: 2878821 - RNA, 14 nt, Human
uguaucuuucuaug

SEQ ID NO: 2878822 - RNA, 21 nt, Human
uguaucuuucuaugcugcuuu

SEQ ID NO: 2878823 - RNA, 20 nt, Human
uguaugaacuuuaucuaaag

SEQ ID NO: 2878824 - RNA, 14 nt, Human
uguaugaaggcuuu

SEQ ID NO: 2878825 - RNA, 19 nt, Human
uguaugaauacagcagcaa

SEQ ID NO: 2878826 - RNA, 13 nt, Human
uguaucuguguag

SEQ ID NO: 2878827 - RNA, 16 nt, Human
uguaucuguguagacu

SEQ ID NO: 2878828 - RNA, 15 nt, Human
uguaucuuaaauuug

SEQ ID NO: 2878829 - RNA, 16 nt, Human
uguaucuuccauauuu

SEQ ID NO: 2878830 - RNA, 18 nt, Human
uguaucuuccauauuugg

SEQ ID NO: 2878831 - RNA, 21 nt, Human
uguaucuuccauauuuggaag

SEQ ID NO: 2878832 - RNA, 12 nt, Human
uguaucugugua

SEQ ID NO: 2878833 - RNA, 11 nt, Human
uguaucugugu

SEQ ID NO: 2878834 - RNA, 22 nt, Human
uguaugaaagauggcugugccu

SEQ ID NO: 2878835 - RNA, 14 nt, Human
ugucacaggcaggu

SEQ ID NO: 2878836 - RNA, 12 nt, Human
ugucacaaagaa

SEQ ID NO: 2878837 - RNA, 13 nt, Human
uguaugcgugugu

SEQ ID NO: 2878838 - RNA, 14 nt, Human
uguaugcugaucau

SEQ ID NO: 2878839 - RNA, 15 nt, Human
uguaugcugaucauc

SEQ ID NO: 2878840 - RNA, 23 nt, Human
uguaugcugaucaucgccagagg

SEQ ID NO: 2878841 - RNA, 17 nt, Human
uguauggggaaucuaag

SEQ ID NO: 2878842 - RNA, 13 nt, Human
uguauggggaggc

SEQ ID NO: 2878843 - RNA, 15 nt, Human
uguaugguucugugc

SEQ ID NO: 2878844 - RNA, 12 nt, Human
uguaugcuggac

SEQ ID NO: 2878845 - RNA, 18 nt, Human
uguauggaaauaaaugua

SEQ ID NO: 2878846 - RNA, 23 nt, Human
uguauggaaauaaauguaucaua

SEQ ID NO: 2878847 - RNA, 19 nt, Human
uguauggaaucccacugua

SEQ ID NO: 2878848 - RNA, 21 nt, Human
ugucaucagccaccauccuau

SEQ ID NO: 2878849 - RNA, 15 nt, Human
ugucaucagccacca

SEQ ID NO: 2878850 - RNA, 18 nt, Human
ugucaucagccaccaucc

SEQ ID NO: 2878851 - RNA, 18 nt, Human
ugucaucagagcuccucu

SEQ ID NO: 2878852 - RNA, 19 nt, Human
ugucaucagagcuccucug

SEQ ID NO: 2878853 - RNA, 20 nt, Human
ugucaucagagcuccucugu

SEQ ID NO: 2878854 - RNA, 14 nt, Human
ugucaucagaugga

SEQ ID NO: 2878855 - RNA, 22 nt, Human
ugucacuucgcgugcccucgcu

SEQ ID NO: 2878856 - RNA, 13 nt, Human
ugucacuugcaug

SEQ ID NO: 2878857 - RNA, 14 nt, Human
ugucacuugcaugu

SEQ ID NO: 2878858 - RNA, 15 nt, Human
ugucacuugcauguc

SEQ ID NO: 2878859 - RNA, 14 nt, Human
ugucacuugugcuu

SEQ ID NO: 2878860 - RNA, 15 nt, Human
ugucacuugugcuuu

SEQ ID NO: 2878861 - RNA, 17 nt, Human
ugucacuugugcuuugc

SEQ ID NO: 2878862 - RNA, 18 nt, Human
ugucacuugugcuuugcu

SEQ ID NO: 2878863 - RNA, 20 nt, Human
ugucacuugugcuuugcucu

SEQ ID NO: 2878864 - RNA, 21 nt, Human
ugucacaggcagguccagggu

SEQ ID NO: 2878865 - RNA, 17 nt, Human
ugucacaggcaggucca

SEQ ID NO: 2878866 - RNA, 16 nt, Human
ugucacaggcaggucc

SEQ ID NO: 2878867 - RNA, 15 nt, Human
ugucacaggcagguc

SEQ ID NO: 2878868 - RNA, 13 nt, Human
ugucacaggcagg

SEQ ID NO: 2878869 - RNA, 17 nt, Human
ugucacagggacugaaa

SEQ ID NO: 2878870 - RNA, 20 nt, Human
ugucacaugaaacauuugca

SEQ ID NO: 2878871 - RNA, 16 nt, Human
ugucacugcuuuuggc

SEQ ID NO: 2878872 - RNA, 19 nt, Human
ugucacugcuuuuggccug

SEQ ID NO: 2878873 - RNA, 21 nt, Human
ugucacugcuuuuggccugga

SEQ ID NO: 2878874 - RNA, 11 nt, Human
ugucacagggc

SEQ ID NO: 2878875 - RNA, 12 nt, Human
ugucacagggcc

SEQ ID NO: 2878876 - RNA, 13 nt, Human
ugucacagggcca

SEQ ID NO: 2878877 - RNA, 14 nt, Human
ugucacagggccaa

SEQ ID NO: 2878878 - RNA, 21 nt, Human
ugucacugguagaccaaaaua

SEQ ID NO: 2878879 - RNA, 23 nt, Human
ugucacugguagaccaaaauaaa

SEQ ID NO: 2878880 - RNA, 18 nt, Human
ugucacugucccuccugg

SEQ ID NO: 2878881 - RNA, 19 nt, Human
ugucacugucccuccuggu

SEQ ID NO: 2878882 - RNA, 22 nt, Human
ugucacugucccuccugguguc

SEQ ID NO: 2878883 - RNA, 15 nt, Human
ugcuucucacuuuuu

SEQ ID NO: 2878884 - RNA, 23 nt, Human
ugcuuccucccaacaagcagcug

SEQ ID NO: 2878885 - RNA, 14 nt, Human
ugcuucucaucccc

SEQ ID NO: 2878886 - RNA, 17 nt, Human
ugcuucucaucuuguga

SEQ ID NO: 2878887 - RNA, 18 nt, Human
ugcuucucaucuugugaa

SEQ ID NO: 2878888 - RNA, 19 nt, Human
ugcuucucaucuugugaaa

SEQ ID NO: 2878889 - RNA, 13 nt, Human
ugcuucuccccag

SEQ ID NO: 2878890 - RNA, 14 nt, Human
ugcuucuccccaga

SEQ ID NO: 2878891 - RNA, 15 nt, Human
ugcuucuccccagaa

SEQ ID NO: 2878892 - RNA, 16 nt, Human
ugcuucuccccagaau

SEQ ID NO: 2878893 - RNA, 19 nt, Human
ugcuucuccccagaauuca

SEQ ID NO: 2878894 - RNA, 15 nt, Human
ugcuuccucccaaca

SEQ ID NO: 2878895 - RNA, 21 nt, Human
ugcuuccgguagggaggcagc

SEQ ID NO: 2878896 - RNA, 22 nt, Human
ugcuuccgguagggaggcagcc

SEQ ID NO: 2878897 - RNA, 16 nt, Human
ugcuuaccuugacugu

SEQ ID NO: 2878898 - RNA, 19 nt, Human
ugcuuaccuugacuguuga

SEQ ID NO: 2878899 - RNA, 23 nt, Human
ugcuuaccuugacuguugaugua

SEQ ID NO: 2878900 - RNA, 14 nt, Human
ugcuuaauuucuaa

SEQ ID NO: 2878901 - RNA, 15 nt, Human
ugcuuaauuucuaaa

SEQ ID NO: 2878902 - RNA, 19 nt, Human
ugcuuaauuucuaaagaua

SEQ ID NO: 2878903 - RNA, 20 nt, Human
ugcuuaauuucuaaagauaa

SEQ ID NO: 2878904 - RNA, 14 nt, Human
ugcuucccaccucc

SEQ ID NO: 2878905 - RNA, 17 nt, Human
ugcuucccaccucccug

SEQ ID NO: 2878906 - RNA, 19 nt, Human
ugcuucccaccucccugcc

SEQ ID NO: 2878907 - RNA, 20 nt, Human
ugcuucccaccucccugccc

SEQ ID NO: 2878908 - RNA, 21 nt, Human
ugcuucccaccucccugccca

SEQ ID NO: 2878909 - RNA, 23 nt, Human
ugcuucccaccucccugcccagg

SEQ ID NO: 2878910 - RNA, 14 nt, Human
ugcuucccagguuc

SEQ ID NO: 2878911 - RNA, 15 nt, Human
ugcuuccccuuuugc

SEQ ID NO: 2878912 - RNA, 18 nt, Human
ugcuuccccuuuugccaa

SEQ ID NO: 2878913 - RNA, 18 nt, Human
ugcuuaagggaguuuaau

SEQ ID NO: 2878914 - RNA, 19 nt, Human
ugcuuaagggaguuuaaua

SEQ ID NO: 2878915 - RNA, 13 nt, Human
ugcuuaaguucca

SEQ ID NO: 2878916 - RNA, 14 nt, Human
ugcuuaaguuccag

SEQ ID NO: 2878917 - RNA, 15 nt, Human
ugcuuaaguuccagc

SEQ ID NO: 2878918 - RNA, 16 nt, Human
ugcuuaaguuccagca

SEQ ID NO: 2878919 - RNA, 18 nt, Human
ugcuuaaaagguugcaua

SEQ ID NO: 2878920 - RNA, 18 nt, Human
ugccuguccagccugggc

SEQ ID NO: 2878921 - RNA, 16 nt, Human
ugccuguccagccugg

SEQ ID NO: 2878922 - RNA, 15 nt, Human
ugccuguccagccug

SEQ ID NO: 2878923 - RNA, 23 nt, Human
ugccuguaguuaggaaauaaaac

SEQ ID NO: 2878924 - RNA, 16 nt, Human
ugccuguauacuuuag

SEQ ID NO: 2878925 - RNA, 20 nt, Human
ugccuguccagccugggcag

SEQ ID NO: 2878926 - RNA, 19 nt, Human
ugccuguccagccugggca

SEQ ID NO: 2878927 - RNA, 16 nt, Human
ugccugucccaccccc

SEQ ID NO: 2878928 - RNA, 19 nt, Human
ugccugucccacccccacc

SEQ ID NO: 2878929 - RNA, 21 nt, Human
ugcuguuuguagugaaauaau

SEQ ID NO: 2878930 - RNA, 20 nt, Human
ugccugucgcuuucccuugg

SEQ ID NO: 2878931 - RNA, 18 nt, Human
ugcuguuuugauuuguac

SEQ ID NO: 2878932 - RNA, 12 nt, Human
ugcuuguguuaa

SEQ ID NO: 2878933 - RNA, 16 nt, Human
ugcuugugaaaaugug

SEQ ID NO: 2878934 - RNA, 15 nt, Human
ugcuucuuacugaua

SEQ ID NO: 2878935 - RNA, 17 nt, Human
ugcuucuuacugauaau

SEQ ID NO: 2878936 - RNA, 15 nt, Human
ugcuuguguuaagua

SEQ ID NO: 2878937 - RNA, 14 nt, Human
ugcuuguuaacuga

SEQ ID NO: 2878938 - RNA, 20 nt, Human
ugcuugugaaaauguguucu

SEQ ID NO: 2878939 - RNA, 20 nt, Human
ugcuuguguaauuuauguga

SEQ ID NO: 2878940 - RNA, 16 nt, Human
ugcuuguuaacugagu

SEQ ID NO: 2878941 - RNA, 19 nt, Human
ugcuuucguguaaauuaug

SEQ ID NO: 2878942 - RNA, 19 nt, Human
ugcuuucuaugcuguuugu

SEQ ID NO: 2878943 - RNA, 21 nt, Human
ugcuuucuaugcuguuuguag

SEQ ID NO: 2878944 - RNA, 12 nt, Human
ugcuuucucccc

SEQ ID NO: 2878945 - RNA, 13 nt, Human
ugcuuugcccagc

SEQ ID NO: 2878946 - RNA, 17 nt, Human
ugcuuugauuuacagca

SEQ ID NO: 2878947 - RNA, 18 nt, Human
ugcuuugauuuacagcaa

SEQ ID NO: 2878948 - RNA, 22 nt, Human
ugcuuugauuuacagcaaguag

SEQ ID NO: 2878949 - RNA, 12 nt, Human
ugcuuugcauuu

SEQ ID NO: 2878950 - RNA, 18 nt, Human
ugcuuugcuuugucugga

SEQ ID NO: 2878951 - RNA, 15 nt, Human
uggaaaagaacuguu

SEQ ID NO: 2878952 - RNA, 12 nt, Human
ugcuuugcucuu

SEQ ID NO: 2878953 - RNA, 13 nt, Human
ugcuuugcucuug

SEQ ID NO: 2878954 - RNA, 14 nt, Human
ugcuuugcucuugu

SEQ ID NO: 2878955 - RNA, 14 nt, Human
ugcuuugcccagca

SEQ ID NO: 2878956 - RNA, 21 nt, Human
uggaacuucuaauauauuuuu

SEQ ID NO: 2878957 - RNA, 16 nt, Human
uggaacuuuuauuaga

SEQ ID NO: 2878958 - RNA, 21 nt, Human
uggaacuuuuauuagauaaca

SEQ ID NO: 2878959 - RNA, 21 nt, Human
uggaagaaaaaaaccacacaa

SEQ ID NO: 2878960 - RNA, 18 nt, Human
uggaagaaaaaaaucuuc

SEQ ID NO: 2878961 - RNA, 22 nt, Human
uggaagaaaaaaaucuucucca

SEQ ID NO: 2878962 - RNA, 15 nt, Human
uggaagaaaaugguu

SEQ ID NO: 2878963 - RNA, 22 nt, Human
uggaagaaaaugguuuauuuug

SEQ ID NO: 2878964 - RNA, 13 nt, Human
uggaacuucuaau

SEQ ID NO: 2878965 - RNA, 14 nt, Human
uggaacuucuaaua

SEQ ID NO: 2878966 - RNA, 15 nt, Human
uggaacuucuaauau

SEQ ID NO: 2878967 - RNA, 16 nt, Human
uggaacuucuaauaua

SEQ ID NO: 2878968 - RNA, 18 nt, Human
uggaacuucuaauauauu

SEQ ID NO: 2878969 - RNA, 16 nt, Human
uggaacagaauguuuu

SEQ ID NO: 2878970 - RNA, 23 nt, Human
uggaacagauucacacugucugg

SEQ ID NO: 2878971 - RNA, 18 nt, Human
uggaacauaaaaaggaca

SEQ ID NO: 2878972 - RNA, 21 nt, Human
uggaacagaauguuuuacugu

SEQ ID NO: 2878973 - RNA, 19 nt, Human
uggaacagauucacacugu

SEQ ID NO: 2878974 - RNA, 20 nt, Human
uggaacagauucacacuguc

SEQ ID NO: 2878975 - RNA, 13 nt, Human
uggaaccucuguc

SEQ ID NO: 2878976 - RNA, 16 nt, Human
uggaaccucugucuca

SEQ ID NO: 2878977 - RNA, 20 nt, Human
uggaaccucugucucauccu

SEQ ID NO: 2878978 - RNA, 16 nt, Human
uggaaccugcaaaaaa

SEQ ID NO: 2878979 - RNA, 19 nt, Human
uggaaccugcaaaaaauac

SEQ ID NO: 2878980 - RNA, 13 nt, Human
uggaaccuugcug

SEQ ID NO: 2878981 - RNA, 14 nt, Human
uggaaccuugcugu

SEQ ID NO: 2878982 - RNA, 15 nt, Human
uggaaccuugcuguc

SEQ ID NO: 2878983 - RNA, 16 nt, Human
uggaaccuugcugucc

SEQ ID NO: 2878984 - RNA, 18 nt, Human
uggaaccuugcuguccug

SEQ ID NO: 2878985 - RNA, 22 nt, Human
uggaaccuugcuguccugaucu

SEQ ID NO: 2878986 - RNA, 23 nt, Human
uggaaccuugcuguccugaucug

SEQ ID NO: 2878987 - RNA, 15 nt, Human
uggaaaccugaaaaa

SEQ ID NO: 2878988 - RNA, 20 nt, Human
uggaaacauuuauauuuuua

SEQ ID NO: 2878989 - RNA, 18 nt, Human
uggaaacauuuuuuaaaa

SEQ ID NO: 2878990 - RNA, 17 nt, Human
uggaaaccucuacauau

SEQ ID NO: 2878991 - RNA, 19 nt, Human
uggaaaccucuacauauuu

SEQ ID NO: 2878992 - RNA, 17 nt, Human
uggaaacccauaggccc

SEQ ID NO: 2878993 - RNA, 21 nt, Human
uggaaacccauaggcccacac

SEQ ID NO: 2878994 - RNA, 18 nt, Human
uggaaacccgaggguuga

SEQ ID NO: 2878995 - RNA, 17 nt, Human
uggaaaccugaaaaaaa

SEQ ID NO: 2878996 - RNA, 17 nt, Human
uggacauuugccuugcu

SEQ ID NO: 2878997 - RNA, 18 nt, Human
uggacauuugccuugcug

SEQ ID NO: 2878998 - RNA, 19 nt, Human
uggacauuugccuugcugg

SEQ ID NO: 2878999 - RNA, 22 nt, Human
uggacauuugccuugcuggacg

SEQ ID NO: 2879000 - RNA, 17 nt, Human
uggacaggcauguucuc

SEQ ID NO: 2879001 - RNA, 15 nt, Human
uggacauugucugcg

SEQ ID NO: 2879002 - RNA, 12 nt, Human
uggacauggccc

SEQ ID NO: 2879003 - RNA, 17 nt, Human
uggacauggccccugug

SEQ ID NO: 2879004 - RNA, 22 nt, Human
uggacaggcauguucucugagg

SEQ ID NO: 2879005 - RNA, 18 nt, Human
uggacaggcauguucucu

SEQ ID NO: 2879006 - RNA, 18 nt, Human
uggaagacaaaauguuuu

SEQ ID NO: 2879007 - RNA, 11 nt, Human
uggaagacaca

SEQ ID NO: 2879008 - RNA, 17 nt, Human
uggacguucggggcaug

SEQ ID NO: 2879009 - RNA, 14 nt, Human
uggacuaaaugccu

SEQ ID NO: 2879010 - RNA, 16 nt, Human
uggacuaaaugccuag

SEQ ID NO: 2879011 - RNA, 22 nt, Human
uggacuaaaugccuaguuuuua

SEQ ID NO: 2879012 - RNA, 21 nt, Human
uggacuaaccccaacgcacag

SEQ ID NO: 2879013 - RNA, 22 nt, Human
uggacuaaccccaacgcacagg

SEQ ID NO: 2879014 - RNA, 15 nt, Human
uggacggcugggcac

SEQ ID NO: 2879015 - RNA, 16 nt, Human
uggacggggacugggg

SEQ ID NO: 2879016 - RNA, 14 nt, Human
uggacggugcucca

SEQ ID NO: 2879017 - RNA, 16 nt, Human
uggacggugcuccagg

SEQ ID NO: 2879018 - RNA, 17 nt, Human
uggacggugcuccaggc

SEQ ID NO: 2879019 - RNA, 18 nt, Human
uggacggugcuccaggca

SEQ ID NO: 2879020 - RNA, 19 nt, Human
uggacggugcuccaggcag

SEQ ID NO: 2879021 - RNA, 22 nt, Human
uggacggugcuccaggcaggcu

SEQ ID NO: 2879022 - RNA, 14 nt, Human
uggacgucuuucuu

SEQ ID NO: 2879023 - RNA, 17 nt, Human
uggagacacaacuauuu

SEQ ID NO: 2879024 - RNA, 21 nt, Human
uggacuguggcacuugccugg

SEQ ID NO: 2879025 - RNA, 12 nt, Human
uggagacagccc

SEQ ID NO: 2879026 - RNA, 13 nt, Human
uggagacagcccc

SEQ ID NO: 2879027 - RNA, 17 nt, Human
uggagacagccccagag

SEQ ID NO: 2879028 - RNA, 19 nt, Human
uggagacagccccagagca

SEQ ID NO: 2879029 - RNA, 20 nt, Human
uggagacagccccagagcag

SEQ ID NO: 2879030 - RNA, 21 nt, Human
uggagacagccccagagcagg

SEQ ID NO: 2879031 - RNA, 22 nt, Human
uggagacagccccagagcaggg

SEQ ID NO: 2879032 - RNA, 18 nt, Human
uggagaccagggagccuu

SEQ ID NO: 2879033 - RNA, 19 nt, Human
uggagaccagggagccuuu

SEQ ID NO: 2879034 - RNA, 22 nt, Human
uggagacccaccccaccugcag

SEQ ID NO: 2879035 - RNA, 19 nt, Human
uggagacccugcaaacaga

SEQ ID NO: 2879036 - RNA, 19 nt, Human
uggagaccucuccuuccua

SEQ ID NO: 2879037 - RNA, 14 nt, Human
uggagaccuuaccc

SEQ ID NO: 2879038 - RNA, 12 nt, Human
uggagacgugga

SEQ ID NO: 2879039 - RNA, 20 nt, Human
uggagacguggaaccucugu

SEQ ID NO: 2879040 - RNA, 21 nt, Human
uggagagcccggcgccccugc

SEQ ID NO: 2879041 - RNA, 11 nt, Human
uggagagcugg

SEQ ID NO: 2879042 - RNA, 13 nt, Human
uggagagcuggag

SEQ ID NO: 2879043 - RNA, 15 nt, Human
uggagagcuggagcc

SEQ ID NO: 2879044 - RNA, 17 nt, Human
uggagagcuggagccug

SEQ ID NO: 2879045 - RNA, 19 nt, Human
uggagagcuggugcccgga

SEQ ID NO: 2879046 - RNA, 11 nt, Human
uggagaggaac

SEQ ID NO: 2879047 - RNA, 12 nt, Human
uggagaggaaca

SEQ ID NO: 2879048 - RNA, 16 nt, Human
uggagagcuggugccc

SEQ ID NO: 2879049 - RNA, 14 nt, Human
uggagagcuggugc

SEQ ID NO: 2879050 - RNA, 18 nt, Human
uggagagcuggagccugg

SEQ ID NO: 2879051 - RNA, 20 nt, Human
uggagagcuggagccuggug

SEQ ID NO: 2879052 - RNA, 22 nt, Human
uggacuguggcacuugccuggg

SEQ ID NO: 2879053 - RNA, 18 nt, Human
uggagacaaugucugcag

SEQ ID NO: 2879054 - RNA, 19 nt, Human
uggagacaaugucugcagc

SEQ ID NO: 2879055 - RNA, 21 nt, Human
uggagacaaugucugcagccc

SEQ ID NO: 2879056 - RNA, 22 nt, Human
uggagacaaugucugcagcccu

SEQ ID NO: 2879057 - RNA, 24 nt, Human
uggagacaaugucugcagcccuga

SEQ ID NO: 2879058 - RNA, 20 nt, Human
uggacuguggcacuugccug

SEQ ID NO: 2879059 - RNA, 18 nt, Human
uggacuguggcacuugcc

SEQ ID NO: 2879060 - RNA, 12 nt, Human
uggacuguggca

SEQ ID NO: 2879061 - RNA, 13 nt, Human
uggacuguggcac

SEQ ID NO: 2879062 - RNA, 15 nt, Human
uggacugucauagaa

SEQ ID NO: 2879063 - RNA, 21 nt, Human
uggacugucauagaaauuaca

SEQ ID NO: 2879064 - RNA, 13 nt, Human
uggacugggaggu

SEQ ID NO: 2879065 - RNA, 22 nt, Human
uggacuggcuagaguccucacu

SEQ ID NO: 2879066 - RNA, 20 nt, Human
uggacuggcuagaguccuca

SEQ ID NO: 2879067 - RNA, 19 nt, Human
uggacuggcuagaguccuc

SEQ ID NO: 2879068 - RNA, 13 nt, Human
uggacuggcuaga

SEQ ID NO: 2879069 - RNA, 17 nt, Human
uggacuggccccugggu

SEQ ID NO: 2879070 - RNA, 20 nt, Human
uggacuggccccugggucag

SEQ ID NO: 2879071 - RNA, 14 nt, Human
uggacuggccccug

SEQ ID NO: 2879072 - RNA, 15 nt, Human
uggacuggccccugg

SEQ ID NO: 2879073 - RNA, 16 nt, Human
uggacuggccccuggg

SEQ ID NO: 2879074 - RNA, 13 nt, Human
uggacucuucaaa

SEQ ID NO: 2879075 - RNA, 20 nt, Human
uggacucuucaaaaacuguu

SEQ ID NO: 2879076 - RNA, 21 nt, Human
uggacucuucaaaaacuguuu

SEQ ID NO: 2879077 - RNA, 19 nt, Human
uggacucugcacaugucuu

SEQ ID NO: 2879078 - RNA, 21 nt, Human
uggacucuggugccuccagag

SEQ ID NO: 2879079 - RNA, 22 nt, Human
uggacucuggugccuccagagg

SEQ ID NO: 2879080 - RNA, 15 nt, Human
uggacucugcacaug

SEQ ID NO: 2879081 - RNA, 14 nt, Human
uggacucugcacau

SEQ ID NO: 2879082 - RNA, 20 nt, Human
uggacggugcuccaggcagg

SEQ ID NO: 2879083 - RNA, 16 nt, Human
uggacucugcacauga

SEQ ID NO: 2879084 - RNA, 17 nt, Human
uggacucugcacaugaa

SEQ ID NO: 2879085 - RNA, 17 nt, Human
uggacucugcacauguc

SEQ ID NO: 2879086 - RNA, 18 nt, Human
uggacucugcacaugucu

SEQ ID NO: 2879087 - RNA, 22 nt, Human
uggacucugcacaugucuugua

SEQ ID NO: 2879088 - RNA, 13 nt, Human
uggacucugcauc

SEQ ID NO: 2879089 - RNA, 14 nt, Human
uggacucugcaucc

SEQ ID NO: 2879090 - RNA, 16 nt, Human
uggacucugcauccca

SEQ ID NO: 2879091 - RNA, 18 nt, Human
uggacucugcaucccagc

SEQ ID NO: 2879092 - RNA, 20 nt, Human
uggacucugcaucccagcac

SEQ ID NO: 2879093 - RNA, 13 nt, Human
uggaugcaaagua

SEQ ID NO: 2879094 - RNA, 20 nt, Human
uggaugcaaaguacaaugug

SEQ ID NO: 2879095 - RNA, 16 nt, Human
uggagauacuggugga

SEQ ID NO: 2879096 - RNA, 16 nt, Human
uggauauuauuagaaa

SEQ ID NO: 2879097 - RNA, 17 nt, Human
uggauauuauuagaaau

SEQ ID NO: 2879098 - RNA, 21 nt, Human
uggauauuuguacuguuuaau

SEQ ID NO: 2879099 - RNA, 16 nt, Human
uggaggggaguguugg

SEQ ID NO: 2879100 - RNA, 16 nt, Human
uggagauagggaaaga

SEQ ID NO: 2879101 - RNA, 12 nt, Human
uggcaaggcugu

SEQ ID NO: 2879102 - RNA, 19 nt, Human
uggcaaggacacagaugaa

SEQ ID NO: 2879103 - RNA, 17 nt, Human
uggcaagaguguggagg

SEQ ID NO: 2879104 - RNA, 19 nt, Human
uggcaagaguguggaggcu

SEQ ID NO: 2879105 - RNA, 19 nt, Human
uggcaagaaagcugguaaa

SEQ ID NO: 2879106 - RNA, 13 nt, Human
uggcaagagcccc

SEQ ID NO: 2879107 - RNA, 15 nt, Human
uggcaagaaagcugg

SEQ ID NO: 2879108 - RNA, 22 nt, Human
uggcaaccuugucucuaugcca

SEQ ID NO: 2879109 - RNA, 16 nt, Human
uggcaaggaaaaacag

SEQ ID NO: 2879110 - RNA, 12 nt, Human
uggcaaggaaag

SEQ ID NO: 2879111 - RNA, 13 nt, Human
uggcaagcuguga

SEQ ID NO: 2879112 - RNA, 11 nt, Human
uggcaaggaaa

SEQ ID NO: 2879113 - RNA, 16 nt, Human
uggcaacauuccaaga

SEQ ID NO: 2879114 - RNA, 18 nt, Human
uggauuguuaauuucagu

SEQ ID NO: 2879115 - RNA, 21 nt, Human
uggauuguuaauuucaguccu

SEQ ID NO: 2879116 - RNA, 14 nt, Human
uggcaaggcugugc

SEQ ID NO: 2879117 - RNA, 15 nt, Human
uggcaaggcugugcu

SEQ ID NO: 2879118 - RNA, 16 nt, Human
uggcaaggcugugcuc

SEQ ID NO: 2879119 - RNA, 15 nt, Human
uggcacucccuccag

SEQ ID NO: 2879120 - RNA, 16 nt, Human
uggcacucccuccagc

SEQ ID NO: 2879121 - RNA, 17 nt, Human
uggcacucccuccagca

SEQ ID NO: 2879122 - RNA, 19 nt, Human
uggcacucccuccagcaca

SEQ ID NO: 2879123 - RNA, 20 nt, Human
uggcacucccuccagcacaa

SEQ ID NO: 2879124 - RNA, 21 nt, Human
uggcacucccuccagcacaaa

SEQ ID NO: 2879125 - RNA, 15 nt, Human
uggcuccaugcuccu

SEQ ID NO: 2879126 - RNA, 20 nt, Human
uggcucccaugaccauacug

SEQ ID NO: 2879127 - RNA, 17 nt, Human
uggcuccagcuggccgg

SEQ ID NO: 2879128 - RNA, 15 nt, Human
uggcuccagaaaugu

SEQ ID NO: 2879129 - RNA, 20 nt, Human
uggcuccagaaaugucuaaa

SEQ ID NO: 2879130 - RNA, 17 nt, Human
uggcucccucuucuuuc

SEQ ID NO: 2879131 - RNA, 19 nt, Human
uggcuccgaacacccucga

SEQ ID NO: 2879132 - RNA, 23 nt, Human
uggcucccaugaccauacugagg

SEQ ID NO: 2879133 - RNA, 16 nt, Human
uggcuuguuguaaagc

SEQ ID NO: 2879134 - RNA, 18 nt, Human
uggcuuguuguaaagcaa

SEQ ID NO: 2879135 - RNA, 16 nt, Human
uggcuuuucacugcug

SEQ ID NO: 2879136 - RNA, 24 nt, Human
uggcuuguaucaacacuguuacuu

SEQ ID NO: 2879137 - RNA, 14 nt, Human
uggcuuguccucac

SEQ ID NO: 2879138 - RNA, 17 nt, Human
uggcuugggcagggucu

SEQ ID NO: 2879139 - RNA, 12 nt, Human
uggcuuguagaa

SEQ ID NO: 2879140 - RNA, 14 nt, Human
uggcuuguagaauu

SEQ ID NO: 2879141 - RNA, 16 nt, Human
uggcuuguagaauugu

SEQ ID NO: 2879142 - RNA, 17 nt, Human
uggcuuguagaauuguu

SEQ ID NO: 2879143 - RNA, 18 nt, Human
uggcuuguagaauuguua

SEQ ID NO: 2879144 - RNA, 19 nt, Human
uggcuuguagaauuguuau

SEQ ID NO: 2879145 - RNA, 22 nt, Human
uggcuuggccuaucuccuaggg

SEQ ID NO: 2879146 - RNA, 15 nt, Human
uggcuuuucacugcu

SEQ ID NO: 2879147 - RNA, 21 nt, Human
uggcuuuucaugcgugugugu

SEQ ID NO: 2879148 - RNA, 18 nt, Human
uggcuuuucacugcuggc

SEQ ID NO: 2879149 - RNA, 19 nt, Human
uggcuuuucacugcuggcu

SEQ ID NO: 2879150 - RNA, 21 nt, Human
uggcuuuucacugcuggcugc

SEQ ID NO: 2879151 - RNA, 22 nt, Human
uggcuuuucacugcuggcugcc

SEQ ID NO: 2879152 - RNA, 14 nt, Human
uggcuggcugcagu

SEQ ID NO: 2879153 - RNA, 13 nt, Human
uggcuggcugcag

SEQ ID NO: 2879154 - RNA, 22 nt, Human
uggcuggaugaaauuuucuaga

SEQ ID NO: 2879155 - RNA, 21 nt, Human
uggcuggccuuccacuuggcu

SEQ ID NO: 2879156 - RNA, 12 nt, Human
uggcugggcaug

SEQ ID NO: 2879157 - RNA, 15 nt, Human
uggcugggaacucac

SEQ ID NO: 2879158 - RNA, 23 nt, Human
uggcugggaacucaccuggggcu

SEQ ID NO: 2879159 - RNA, 22 nt, Human
uggcuucccgcucagcccuccc

SEQ ID NO: 2879160 - RNA, 18 nt, Human
uggcuucccgcucagccc

SEQ ID NO: 2879161 - RNA, 19 nt, Human
uggcuucccgcucagcccu

SEQ ID NO: 2879162 - RNA, 20 nt, Human
uggcuucccgcucagcccuc

SEQ ID NO: 2879163 - RNA, 21 nt, Human
uggcuucccgcucagcccucc

SEQ ID NO: 2879164 - RNA, 20 nt, Human
uggccccugaacaagaauug

SEQ ID NO: 2879165 - RNA, 14 nt, Human
uggccccugaacaa

SEQ ID NO: 2879166 - RNA, 16 nt, Human
uggccccucugaccug

SEQ ID NO: 2879167 - RNA, 18 nt, Human
uggccccucugaccugca

SEQ ID NO: 2879168 - RNA, 13 nt, Human
uggccccucgccu

SEQ ID NO: 2879169 - RNA, 17 nt, Human
uggccccucgccugugg

SEQ ID NO: 2879170 - RNA, 10 nt, Human
uggccccucu

SEQ ID NO: 2879171 - RNA, 12 nt, Human
uggccccucuga

SEQ ID NO: 2879172 - RNA, 13 nt, Human
uggccccucugac

SEQ ID NO: 2879173 - RNA, 14 nt, Human
uggccccucugacc

SEQ ID NO: 2879174 - RNA, 14 nt, Human
uggccccagggcac

SEQ ID NO: 2879175 - RNA, 18 nt, Human
uggccccagggcacccug

SEQ ID NO: 2879176 - RNA, 17 nt, Human
uggcagcugcgguccac

SEQ ID NO: 2879177 - RNA, 16 nt, Human
uggcagcugccacgcc

SEQ ID NO: 2879178 - RNA, 14 nt, Human
uggccuagcccacc

SEQ ID NO: 2879179 - RNA, 17 nt, Human
uggccuagcccacccug

SEQ ID NO: 2879180 - RNA, 18 nt, Human
uggccuagcccacccugc

SEQ ID NO: 2879181 - RNA, 19 nt, Human
uggccuagcccacccugcu

SEQ ID NO: 2879182 - RNA, 20 nt, Human
uggccuagcccacccugcug

SEQ ID NO: 2879183 - RNA, 22 nt, Human
uggccuagcccacccugcugcc

SEQ ID NO: 2879184 - RNA, 23 nt, Human
uggccuagcccacccugcugccu

SEQ ID NO: 2879185 - RNA, 23 nt, Human
uggccucaagugauucuccugcc

SEQ ID NO: 2879186 - RNA, 18 nt, Human
uggccucaagugauucuc

SEQ ID NO: 2879187 - RNA, 14 nt, Human
uggccuccaggccc

SEQ ID NO: 2879188 - RNA, 15 nt, Human
uggccuccaggcccg

SEQ ID NO: 2879189 - RNA, 21 nt, Human
uggccuccaggcccgucuguc

SEQ ID NO: 2879190 - RNA, 22 nt, Human
uggccuccaggcccgucugucc

SEQ ID NO: 2879191 - RNA, 23 nt, Human
uggccuccaggcccgucugucca

SEQ ID NO: 2879192 - RNA, 13 nt, Human
uggccucucuagc

SEQ ID NO: 2879193 - RNA, 21 nt, Human
uggccucuccuuguggccugg

SEQ ID NO: 2879194 - RNA, 19 nt, Human
uggccucgggacaccugcc

SEQ ID NO: 2879195 - RNA, 15 nt, Human
uggccuccuugcuug

SEQ ID NO: 2879196 - RNA, 23 nt, Human
uggccucgggacaccugcccugc

SEQ ID NO: 2879197 - RNA, 17 nt, Human
uggccucuaccacaagg

SEQ ID NO: 2879198 - RNA, 23 nt, Human
ugggauaaagaugcaaggaccag

SEQ ID NO: 2879199 - RNA, 16 nt, Human
ugggaugagccgcugu

SEQ ID NO: 2879200 - RNA, 20 nt, Human
ugggaucacaggugucagcc

SEQ ID NO: 2879201 - RNA, 16 nt, Human
ugggauacugcagggc

SEQ ID NO: 2879202 - RNA, 12 nt, Human
ugggauacaacc

SEQ ID NO: 2879203 - RNA, 15 nt, Human
ugggauacaaccucc

SEQ ID NO: 2879204 - RNA, 20 nt, Human
ugggauacaaccucccucuu

SEQ ID NO: 2879205 - RNA, 10 nt, Human
ugggcagcuc

SEQ ID NO: 2879206 - RNA, 19 nt, Human
ugggcagcucaucucuguc

SEQ ID NO: 2879207 - RNA, 17 nt, Human
ugggcaggacucagcuc

SEQ ID NO: 2879208 - RNA, 18 nt, Human
ugggcaggacucagcucc

SEQ ID NO: 2879209 - RNA, 21 nt, Human
ugggcaggacucagcucccca

SEQ ID NO: 2879210 - RNA, 12 nt, Human
ugggaugcuccu

SEQ ID NO: 2879211 - RNA, 22 nt, Human
ugggcaggacucagcuccccag

SEQ ID NO: 2879212 - RNA, 21 nt, Human
ugggccggcuucaugccagcu

SEQ ID NO: 2879213 - RNA, 15 nt, Human
ugggauggaggggag

SEQ ID NO: 2879214 - RNA, 12 nt, Human
ugggcagcaauu

SEQ ID NO: 2879215 - RNA, 17 nt, Human
ugggcagcaauuuaaau

SEQ ID NO: 2879216 - RNA, 19 nt, Human
ugggcagcaauuuaaaugu

SEQ ID NO: 2879217 - RNA, 18 nt, Human
ugggcagcaauuuaaaug

SEQ ID NO: 2879218 - RNA, 16 nt, Human
ugggcagccaggcugc

SEQ ID NO: 2879219 - RNA, 15 nt, Human
ugggcagccaggcug

SEQ ID NO: 2879220 - RNA, 14 nt, Human
ugggcagccaggcu

SEQ ID NO: 2879221 - RNA, 18 nt, Human
ugggcagcauagcaagac

SEQ ID NO: 2879222 - RNA, 16 nt, Human
ugggcagcauagcaag

SEQ ID NO: 2879223 - RNA, 21 nt, Human
ugggcagcaauuuaaauguua

SEQ ID NO: 2879224 - RNA, 16 nt, Human
ugggguguuugggagg

SEQ ID NO: 2879225 - RNA, 19 nt, Human
ugggguuaucucuguguua

SEQ ID NO: 2879226 - RNA, 20 nt, Human
ugggggggccaaaaggaaaa

SEQ ID NO: 2879227 - RNA, 21 nt, Human
ugggggggccaaaaggaaaaa

SEQ ID NO: 2879228 - RNA, 23 nt, Human
ugggggggcucccguggccugua

SEQ ID NO: 2879229 - RNA, 18 nt, Human
ugggguuaucucuguguu

SEQ ID NO: 2879230 - RNA, 16 nt, Human
ugggggccucagugcc

SEQ ID NO: 2879231 - RNA, 22 nt, Human
ugggggcaggagggcccuaccu

SEQ ID NO: 2879232 - RNA, 13 nt, Human
uggggccaggccg

SEQ ID NO: 2879233 - RNA, 22 nt, Human
uggggccaggccgggccuguac

SEQ ID NO: 2879234 - RNA, 14 nt, Human
ugggggccaccugc

SEQ ID NO: 2879235 - RNA, 16 nt, Human
ugggggccaccugccu

SEQ ID NO: 2879236 - RNA, 17 nt, Human
ugggggccaccugccug

SEQ ID NO: 2879237 - RNA, 18 nt, Human
ugggggccaccugccugc

SEQ ID NO: 2879238 - RNA, 19 nt, Human
ugggggccaccugccugcg

SEQ ID NO: 2879239 - RNA, 21 nt, Human
uggggccaccaaagcugccca

SEQ ID NO: 2879240 - RNA, 20 nt, Human
uggggccaccaaagcugccc

SEQ ID NO: 2879241 - RNA, 13 nt, Human
uggggcagcuuga

SEQ ID NO: 2879242 - RNA, 13 nt, Human
uggggcagagccu

SEQ ID NO: 2879243 - RNA, 14 nt, Human
uggggcagagccuc

SEQ ID NO: 2879244 - RNA, 15 nt, Human
uggggcagagccucc

SEQ ID NO: 2879245 - RNA, 19 nt, Human
uggggcaagucccugacuc

SEQ ID NO: 2879246 - RNA, 15 nt, Human
uggggcaagucaugu

SEQ ID NO: 2879247 - RNA, 11 nt, Human
uggggcacagu

SEQ ID NO: 2879248 - RNA, 15 nt, Human
uggggcacaguccag

SEQ ID NO: 2879249 - RNA, 17 nt, Human
uggggcacaguccagga

SEQ ID NO: 2879250 - RNA, 18 nt, Human
uggggcacaguccaggaa

SEQ ID NO: 2879251 - RNA, 12 nt, Human
ugggccuggcau

SEQ ID NO: 2879252 - RNA, 17 nt, Human
ugggccuggcauucuug

SEQ ID NO: 2879253 - RNA, 21 nt, Human
ugggcuucaguggcagcugcu

SEQ ID NO: 2879254 - RNA, 22 nt, Human
ugggcuucaguggcagcugcuu

SEQ ID NO: 2879255 - RNA, 20 nt, Human
ugggccucugcuucucucac

SEQ ID NO: 2879256 - RNA, 13 nt, Human
ugggccuccucac

SEQ ID NO: 2879257 - RNA, 16 nt, Human
ugacucuggcuuggcc

SEQ ID NO: 2879258 - RNA, 14 nt, Human
ugacucugcccccu

SEQ ID NO: 2879259 - RNA, 15 nt, Human
ugacucugcccccug

SEQ ID NO: 2879260 - RNA, 18 nt, Human
ugacucugcccccugcug

SEQ ID NO: 2879261 - RNA, 19 nt, Human
ugacucugcccccugcugg

SEQ ID NO: 2879262 - RNA, 19 nt, Human
ugacgugcaccuguacuca

SEQ ID NO: 2879263 - RNA, 18 nt, Human
ugacgugcaccuguacuc

SEQ ID NO: 2879264 - RNA, 23 nt, Human
ugacgugcaccuguacucaggag

SEQ ID NO: 2879265 - RNA, 13 nt, Human
ugacucugccccc

SEQ ID NO: 2879266 - RNA, 16 nt, Human
ugacugguuaucacac

SEQ ID NO: 2879267 - RNA, 20 nt, Human
ugacugguuaucacaccauc

SEQ ID NO: 2879268 - RNA, 19 nt, Human
ugacugguuuacaggcccu

SEQ ID NO: 2879269 - RNA, 20 nt, Human
ugacugguuuacaggcccug

SEQ ID NO: 2879270 - RNA, 21 nt, Human
ugacugguuuacaggcccugc

SEQ ID NO: 2879271 - RNA, 23 nt, Human
ugacugguuuacaggcccugcuc

SEQ ID NO: 2879272 - RNA, 14 nt, Human
ugacugcccagcau

SEQ ID NO: 2879273 - RNA, 17 nt, Human
ugacugaggcaggcaug

SEQ ID NO: 2879274 - RNA, 20 nt, Human
ugacugaugcugagauucuu

SEQ ID NO: 2879275 - RNA, 14 nt, Human
ugacgucugaagcu

SEQ ID NO: 2879276 - RNA, 19 nt, Human
ugacugaagaugcagcuca

SEQ ID NO: 2879277 - RNA, 18 nt, Human
ugacgaaacuggccccgg

SEQ ID NO: 2879278 - RNA, 19 nt, Human
ugacgaaacuggccccgga

SEQ ID NO: 2879279 - RNA, 19 nt, Human
ugaccuccucccuguuauu

SEQ ID NO: 2879280 - RNA, 23 nt, Human
ugaccuuuuauguaguaauugac

SEQ ID NO: 2879281 - RNA, 18 nt, Human
ugaccuuuuauguaguaa

SEQ ID NO: 2879282 - RNA, 17 nt, Human
ugaccuuuuauguagua

SEQ ID NO: 2879283 - RNA, 14 nt, Human
ugaccuuuguacag

SEQ ID NO: 2879284 - RNA, 15 nt, Human
ugaccuuuguacagc

SEQ ID NO: 2879285 - RNA, 19 nt, Human
ugaccuuuguacagcccag

SEQ ID NO: 2879286 - RNA, 20 nt, Human
ugaccuuuguacagcccaga

SEQ ID NO: 2879287 - RNA, 21 nt, Human
ugaccuuuguacagcccagag

SEQ ID NO: 2879288 - RNA, 16 nt, Human
ugacgauuccuucucu

SEQ ID NO: 2879289 - RNA, 17 nt, Human
ugacgauuccuucucug

SEQ ID NO: 2879290 - RNA, 21 nt, Human
ugacgauuccuucucugaaca

SEQ ID NO: 2879291 - RNA, 14 nt, Human
ugacgcaaugaaaa

SEQ ID NO: 2879292 - RNA, 14 nt, Human
ugacgcugauacau

SEQ ID NO: 2879293 - RNA, 15 nt, Human
ugacgcugauacaua

SEQ ID NO: 2879294 - RNA, 21 nt, Human
ugacgcugauacauaacuaaa

SEQ ID NO: 2879295 - RNA, 23 nt, Human
ugacgcugauacauaacuaaauu

SEQ ID NO: 2879296 - RNA, 15 nt, Human
ugacggugacaaaga

SEQ ID NO: 2879297 - RNA, 14 nt, Human
ugacggcccucauc

SEQ ID NO: 2879298 - RNA, 20 nt, Human
ugacggcccucaucuaugag

SEQ ID NO: 2879299 - RNA, 12 nt, Human
ugacggcccugc

SEQ ID NO: 2879300 - RNA, 13 nt, Human
ugacggcccugca

SEQ ID NO: 2879301 - RNA, 14 nt, Human
ugacggcccugcaa

SEQ ID NO: 2879302 - RNA, 15 nt, Human
ugacggcccugcaau

SEQ ID NO: 2879303 - RNA, 12 nt, Human
ugaccucugccu

SEQ ID NO: 2879304 - RNA, 21 nt, Human
ugaccucucauaaauuuacuu

SEQ ID NO: 2879305 - RNA, 22 nt, Human
ugaccucaggugauccacccac

SEQ ID NO: 2879306 - RNA, 14 nt, Human
ugaccucacuguga

SEQ ID NO: 2879307 - RNA, 15 nt, Human
ugaccucacagugac

SEQ ID NO: 2879308 - RNA, 18 nt, Human
ugaccucacagugacccu

SEQ ID NO: 2879309 - RNA, 21 nt, Human
ugaccucauuaaccgaugcuu

SEQ ID NO: 2879310 - RNA, 22 nt, Human
ugaccucauuaaccgaugcuuu

SEQ ID NO: 2879311 - RNA, 18 nt, Human
ugaccucgugauccaccc

SEQ ID NO: 2879312 - RNA, 15 nt, Human
ucuugaacuccuggc

SEQ ID NO: 2879313 - RNA, 12 nt, Human
ucuugaaguccu

SEQ ID NO: 2879314 - RNA, 13 nt, Human
ucuugaaguccug

SEQ ID NO: 2879315 - RNA, 16 nt, Human
ucuugaaguccuggcu

SEQ ID NO: 2879316 - RNA, 18 nt, Human
ucuugaaguccuggcuuc

SEQ ID NO: 2879317 - RNA, 19 nt, Human
ucuugaaguccuggcuuca

SEQ ID NO: 2879318 - RNA, 22 nt, Human
ucuugaaguccuggcuucaggc

SEQ ID NO: 2879319 - RNA, 23 nt, Human
ucuugaaguccuggcuucaggca

SEQ ID NO: 2879320 - RNA, 15 nt, Human
ucuugaagggcccag

SEQ ID NO: 2879321 - RNA, 16 nt, Human
ucuugaagggcccagg

SEQ ID NO: 2879322 - RNA, 19 nt, Human
ucuugaaggaaaaugauac

SEQ ID NO: 2879323 - RNA, 16 nt, Human
ucuugaaugucuuuug

SEQ ID NO: 2879324 - RNA, 11 nt, Human
ucuugaaugug

SEQ ID NO: 2879325 - RNA, 12 nt, Human
ucuugaaugugg

SEQ ID NO: 2879326 - RNA, 18 nt, Human
ucuugaauguggucucag

SEQ ID NO: 2879327 - RNA, 19 nt, Human
ucuugaauguggucucagg

SEQ ID NO: 2879328 - RNA, 20 nt, Human
ugacccugcgaaggggcccu

SEQ ID NO: 2879329 - RNA, 20 nt, Human
ugaccucaagugaucugccc

SEQ ID NO: 2879330 - RNA, 21 nt, Human
ugacccucugcugaagacuug

SEQ ID NO: 2879331 - RNA, 15 nt, Human
ugacccugaugaaaa

SEQ ID NO: 2879332 - RNA, 15 nt, Human
ugacccugaagugag

SEQ ID NO: 2879333 - RNA, 14 nt, Human
ucuugaaugucuuu

SEQ ID NO: 2879334 - RNA, 16 nt, Human
ugacuguacuccuccc

SEQ ID NO: 2879335 - RNA, 17 nt, Human
ugacuguacuccuccca

SEQ ID NO: 2879336 - RNA, 18 nt, Human
ugacuguacuccucccag

SEQ ID NO: 2879337 - RNA, 22 nt, Human
ugacuguacuccucccaggcgc

SEQ ID NO: 2879338 - RNA, 23 nt, Human
ugacuggguuucucuguauagua

SEQ ID NO: 2879339 - RNA, 21 nt, Human
ugacuggguuucucuguauag

SEQ ID NO: 2879340 - RNA, 15 nt, Human
ugacuguaucugugu

SEQ ID NO: 2879341 - RNA, 14 nt, Human
ugagaaauguaaug

SEQ ID NO: 2879342 - RNA, 23 nt, Human
ugagaaauguaaugcgauuuuau

SEQ ID NO: 2879343 - RNA, 14 nt, Human
ugagaaauguuaaa

SEQ ID NO: 2879344 - RNA, 12 nt, Human
ugagacccuguc

SEQ ID NO: 2879345 - RNA, 15 nt, Human
ugagacccugucucu

SEQ ID NO: 2879346 - RNA, 14 nt, Human
ugagacccugucuc

SEQ ID NO: 2879347 - RNA, 13 nt, Human
ugagacccuggug

SEQ ID NO: 2879348 - RNA, 16 nt, Human
ugagacaguccagccu

SEQ ID NO: 2879349 - RNA, 18 nt, Human
ugagacaguccagccugg

SEQ ID NO: 2879350 - RNA, 22 nt, Human
ugagacaggagaaacacuugaa

SEQ ID NO: 2879351 - RNA, 22 nt, Human
ugagacccccacaccucaguuc

SEQ ID NO: 2879352 - RNA, 19 nt, Human
ugagacaguccagccugga

SEQ ID NO: 2879353 - RNA, 14 nt, Human
ugagacagugcaca

SEQ ID NO: 2879354 - RNA, 16 nt, Human
ugagacagugcacaug

SEQ ID NO: 2879355 - RNA, 17 nt, Human
ugagacccccacaccuc

SEQ ID NO: 2879356 - RNA, 14 nt, Human
ugagagguuugacu

SEQ ID NO: 2879357 - RNA, 18 nt, Human
ugagagguggcuuuugcg

SEQ ID NO: 2879358 - RNA, 21 nt, Human
ugagagguggcuuuugcggcc

SEQ ID NO: 2879359 - RNA, 19 nt, Human
ugagaggggaacagacugg

SEQ ID NO: 2879360 - RNA, 16 nt, Human
ugagaggggaagcggc

SEQ ID NO: 2879361 - RNA, 12 nt, Human
ugagaggggaag

SEQ ID NO: 2879362 - RNA, 21 nt, Human
ugagaggcgacaggaguauuu

SEQ ID NO: 2879363 - RNA, 12 nt, Human
ugagauccccug

SEQ ID NO: 2879364 - RNA, 16 nt, Human
ugagauccccugagcc

SEQ ID NO: 2879365 - RNA, 16 nt, Human
ugagaugauuaaaaug

SEQ ID NO: 2879366 - RNA, 18 nt, Human
ugagaucgugccacugca

SEQ ID NO: 2879367 - RNA, 20 nt, Human
ugagaucgugccacugcacu

SEQ ID NO: 2879368 - RNA, 17 nt, Human
ugagaguaucaggucuc

SEQ ID NO: 2879369 - RNA, 19 nt, Human
ugagaguaucaggucuccc

SEQ ID NO: 2879370 - RNA, 22 nt, Human
ugagagguuugacuagaugaug

SEQ ID NO: 2879371 - RNA, 18 nt, Human
ugagaggcagacuucccu

SEQ ID NO: 2879372 - RNA, 22 nt, Human
ugagacucuaggguccagugga

SEQ ID NO: 2879373 - RNA, 21 nt, Human
ugagacucuaggguccagugg

SEQ ID NO: 2879374 - RNA, 14 nt, Human
ugagacucugucuc

SEQ ID NO: 2879375 - RNA, 13 nt, Human
ugagacucugucu

SEQ ID NO: 2879376 - RNA, 12 nt, Human
ugagacucuguc

SEQ ID NO: 2879377 - RNA, 21 nt, Human
ugagaugagggaugggccugg

SEQ ID NO: 2879378 - RNA, 22 nt, Human
ugagaugagggaugggccuggc

SEQ ID NO: 2879379 - RNA, 23 nt, Human
ugagaugagggaugggccuggca

SEQ ID NO: 2879380 - RNA, 22 nt, Human
ugagaugcguuguuacaggaag

SEQ ID NO: 2879381 - RNA, 13 nt, Human
ugagcccaggagu

SEQ ID NO: 2879382 - RNA, 12 nt, Human
ugagcccaggag

SEQ ID NO: 2879383 - RNA, 18 nt, Human
ugagcccagcccuguucu

SEQ ID NO: 2879384 - RNA, 13 nt, Human
ugagcccagagaa

SEQ ID NO: 2879385 - RNA, 15 nt, Human
ugagcccagagaaca

SEQ ID NO: 2879386 - RNA, 16 nt, Human
ugagcccagagaacag

SEQ ID NO: 2879387 - RNA, 17 nt, Human
ugagcccagagaacagc

SEQ ID NO: 2879388 - RNA, 17 nt, Human
ugagcccauggcccucc

SEQ ID NO: 2879389 - RNA, 18 nt, Human
ugagcccauguucugccc

SEQ ID NO: 2879390 - RNA, 21 nt, Human
ugagcccauguucugccccca

SEQ ID NO: 2879391 - RNA, 22 nt, Human
ugagcccauguucugcccccag

SEQ ID NO: 2879392 - RNA, 23 nt, Human
ugagcccauguucugcccccagc

SEQ ID NO: 2879393 - RNA, 15 nt, Human
ugagccccuggaggc

SEQ ID NO: 2879394 - RNA, 15 nt, Human
ugagccucagcaucc

SEQ ID NO: 2879395 - RNA, 13 nt, Human
ugagccucagcau

SEQ ID NO: 2879396 - RNA, 14 nt, Human
ugagccgugaacug

SEQ ID NO: 2879397 - RNA, 19 nt, Human
ugagccgugaacugugcau

SEQ ID NO: 2879398 - RNA, 21 nt, Human
ugagccgcugugagccccugg

SEQ ID NO: 2879399 - RNA, 20 nt, Human
ugagcccuacucccugcaga

SEQ ID NO: 2879400 - RNA, 19 nt, Human
ugagcccuacucccugcag

SEQ ID NO: 2879401 - RNA, 23 nt, Human
ugagcccuacucccugcagaugc

SEQ ID NO: 2879402 - RNA, 12 nt, Human
ugagcccucaga

SEQ ID NO: 2879403 - RNA, 17 nt, Human
ugagcccucagaacccu

SEQ ID NO: 2879404 - RNA, 14 nt, Human
ugagcccucagaac

SEQ ID NO: 2879405 - RNA, 15 nt, Human
ugagccccugguccu

SEQ ID NO: 2879406 - RNA, 18 nt, Human
ugauaguugauuuucaaa

SEQ ID NO: 2879407 - RNA, 12 nt, Human
ugauauaaauuc

SEQ ID NO: 2879408 - RNA, 13 nt, Human
ugauauaaauucu

SEQ ID NO: 2879409 - RNA, 14 nt, Human
ugauauaaauucug

SEQ ID NO: 2879410 - RNA, 15 nt, Human
ugauauaaauucugu

SEQ ID NO: 2879411 - RNA, 16 nt, Human
ugauauaaauucugug

SEQ ID NO: 2879412 - RNA, 17 nt, Human
ugauauaaauucugugg

SEQ ID NO: 2879413 - RNA, 22 nt, Human
ugauauagaacagugcuugcca

SEQ ID NO: 2879414 - RNA, 11 nt, Human
ugauauagaau

SEQ ID NO: 2879415 - RNA, 14 nt, Human
ugauauagaauuag

SEQ ID NO: 2879416 - RNA, 17 nt, Human
ugauauagaauuagcuu

SEQ ID NO: 2879417 - RNA, 18 nt, Human
ugauauagaauuagcuuu

SEQ ID NO: 2879418 - RNA, 22 nt, Human
ugauauagaauuagcuuuuuca

SEQ ID NO: 2879419 - RNA, 18 nt, Human
ugauauauguauuaauaa

SEQ ID NO: 2879420 - RNA, 16 nt, Human
ugauauauauuauaaa

SEQ ID NO: 2879421 - RNA, 22 nt, Human
ugaucacggcucacugcagccu

SEQ ID NO: 2879422 - RNA, 15 nt, Human
ugauauggcagaaga

SEQ ID NO: 2879423 - RNA, 15 nt, Human
ugaucacuagccugu

SEQ ID NO: 2879424 - RNA, 16 nt, Human
ugaucacuagccuguc

SEQ ID NO: 2879425 - RNA, 22 nt, Human
ugaucacuccagguaguuuggg

SEQ ID NO: 2879426 - RNA, 18 nt, Human
ugauaucuauaguagaca

SEQ ID NO: 2879427 - RNA, 12 nt, Human
ugauaucccuga

SEQ ID NO: 2879428 - RNA, 18 nt, Human
ugauaucccugauccuaa

SEQ ID NO: 2879429 - RNA, 14 nt, Human
ugauauauuuucca

SEQ ID NO: 2879430 - RNA, 19 nt, Human
ugauaugcaguuuuccuua

SEQ ID NO: 2879431 - RNA, 16 nt, Human
ugauauggagcaagag

SEQ ID NO: 2879432 - RNA, 15 nt, Human
ugauaugauuuaaaa

SEQ ID NO: 2879433 - RNA, 19 nt, Human
ugauaugauuuaaaacaug

SEQ ID NO: 2879434 - RNA, 12 nt, Human
ugauaugaguau

SEQ ID NO: 2879435 - RNA, 15 nt, Human
ugauaugaguauaca

SEQ ID NO: 2879436 - RNA, 16 nt, Human
ugauaugaguauacaa

SEQ ID NO: 2879437 - RNA, 17 nt, Human
ugauaugaguauacaau

SEQ ID NO: 2879438 - RNA, 18 nt, Human
ugauaugaguauacaaua

SEQ ID NO: 2879439 - RNA, 19 nt, Human
ugauaugaguauacaauau

SEQ ID NO: 2879440 - RNA, 20 nt, Human
ugauccacccaccucagccu

SEQ ID NO: 2879441 - RNA, 15 nt, Human
ugauccacccaccuc

SEQ ID NO: 2879442 - RNA, 21 nt, Human
ugauccaagcuggucccacuc

SEQ ID NO: 2879443 - RNA, 17 nt, Human
ugauccaagcugguccc

SEQ ID NO: 2879444 - RNA, 17 nt, Human
ugaucauaagugaauuu

SEQ ID NO: 2879445 - RNA, 18 nt, Human
ugaucauaagugaauuua

SEQ ID NO: 2879446 - RNA, 19 nt, Human
ugaucauagguauuucaaa

SEQ ID NO: 2879447 - RNA, 24 nt, Human
ugaucauccacugugccaugugcc

SEQ ID NO: 2879448 - RNA, 13 nt, Human
ugaucauccacug

SEQ ID NO: 2879449 - RNA, 15 nt, Human
ugaucaguggacagu

SEQ ID NO: 2879450 - RNA, 19 nt, Human
ugaucaguggacagucugc

SEQ ID NO: 2879451 - RNA, 11 nt, Human
ugaucaguguu

SEQ ID NO: 2879452 - RNA, 12 nt, Human
ugaucaguguug

SEQ ID NO: 2879453 - RNA, 18 nt, Human
ugaucaguguuguugcuc

SEQ ID NO: 2879454 - RNA, 20 nt, Human
ugaucauaaacugacuauca

SEQ ID NO: 2879455 - RNA, 22 nt, Human
ugauccacccaccucagccucc

SEQ ID NO: 2879456 - RNA, 21 nt, Human
ugauccacccaccucagccuc

SEQ ID NO: 2879457 - RNA, 16 nt, Human
ugauccacccaacccu

SEQ ID NO: 2879458 - RNA, 15 nt, Human
ugauccacccaaccc

SEQ ID NO: 2879459 - RNA, 20 nt, Human
ugaucauagguauuucaaaa

SEQ ID NO: 2879460 - RNA, 23 nt, Human
ugaucaucccaucuaagcugcag

SEQ ID NO: 2879461 - RNA, 15 nt, Human
ugaucaucgccagag

SEQ ID NO: 2879462 - RNA, 21 nt, Human
ugauccacccaacccuaucuc

SEQ ID NO: 2879463 - RNA, 23 nt, Human
ugaucucuucuuuuggcuuccau

SEQ ID NO: 2879464 - RNA, 20 nt, Human
ugaucugaugcaagcaagaa

SEQ ID NO: 2879465 - RNA, 16 nt, Human
ugaucucaaacuauga

SEQ ID NO: 2879466 - RNA, 12 nt, Human
ugaucucuuccu

SEQ ID NO: 2879467 - RNA, 13 nt, Human
ugaucucuuccug

SEQ ID NO: 2879468 - RNA, 14 nt, Human
ugaucucuuccugu

SEQ ID NO: 2879469 - RNA, 14 nt, Human
ugaugccaggacac

SEQ ID NO: 2879470 - RNA, 14 nt, Human
ugaugcucccuccc

SEQ ID NO: 2879471 - RNA, 16 nt, Human
ugaugcucccuccccu

SEQ ID NO: 2879472 - RNA, 15 nt, Human
ugaugcucccucccc

SEQ ID NO: 2879473 - RNA, 22 nt, Human
ugaugcucccuccccugcccug

SEQ ID NO: 2879474 - RNA, 21 nt, Human
ugaugcucccuccccugcccu

SEQ ID NO: 2879475 - RNA, 20 nt, Human
ugaugcucccuccccugccc

SEQ ID NO: 2879476 - RNA, 17 nt, Human
ugaugcucccuccccug

SEQ ID NO: 2879477 - RNA, 23 nt, Human
ugaugcucccuccccugcccugg

SEQ ID NO: 2879478 - RNA, 14 nt, Human
ugaugcugagauuc

SEQ ID NO: 2879479 - RNA, 21 nt, Human
ugaugcugagauucuucaggc

SEQ ID NO: 2879480 - RNA, 20 nt, Human
ugauguauucuagcuaaugu

SEQ ID NO: 2879481 - RNA, 14 nt, Human
ugauguauucuagc

SEQ ID NO: 2879482 - RNA, 21 nt, Human
ugauguauucuagcuaaugua

SEQ ID NO: 2879483 - RNA, 18 nt, Human
ugauguaucugaguugcc

SEQ ID NO: 2879484 - RNA, 13 nt, Human
ugauguauucuag

SEQ ID NO: 2879485 - RNA, 19 nt, Human
ugauguacugauugagaag

SEQ ID NO: 2879486 - RNA, 21 nt, Human
ugauguacugauugagaaguu

SEQ ID NO: 2879487 - RNA, 18 nt, Human
ugauguaccaugaaacaa

SEQ ID NO: 2879488 - RNA, 20 nt, Human
ugauguaccaugaaacaaag

SEQ ID NO: 2879489 - RNA, 17 nt, Human
ugauguaaucucucugc

SEQ ID NO: 2879490 - RNA, 22 nt, Human
ugauguaaucucucugcagcug

SEQ ID NO: 2879491 - RNA, 23 nt, Human
ugauguaaucucucugcagcugc

SEQ ID NO: 2879492 - RNA, 11 nt, Human
ugauguaauug

SEQ ID NO: 2879493 - RNA, 20 nt, Human
ugaucuuugcagacaggcaa

SEQ ID NO: 2879494 - RNA, 19 nt, Human
ugaucuuugcagacaggca

SEQ ID NO: 2879495 - RNA, 21 nt, Human
ugaucugaugcaagcaagaaa

SEQ ID NO: 2879496 - RNA, 23 nt, Human
ugaucuuugcagacaggcaagca

SEQ ID NO: 2879497 - RNA, 21 nt, Human
ugaucuuugcagacaggcaag

SEQ ID NO: 2879498 - RNA, 18 nt, Human
ugaucuuugcagacaggc

SEQ ID NO: 2879499 - RNA, 14 nt, Human
ugaucuuuuaaagu

SEQ ID NO: 2879500 - RNA, 15 nt, Human
ugaucuuuuaaagug

SEQ ID NO: 2879501 - RNA, 17 nt, Human
ugaucuuuuaaaguguu

SEQ ID NO: 2879502 - RNA, 18 nt, Human
ugaucuuuuaaaguguua

SEQ ID NO: 2879503 - RNA, 19 nt, Human
ugaucuuuuaaaguguuac

SEQ ID NO: 2879504 - RNA, 21 nt, Human
ugaucuuuuaaaguguuacuu

SEQ ID NO: 2879505 - RNA, 14 nt, Human
ugaugaaaagauuu

SEQ ID NO: 2879506 - RNA, 15 nt, Human
ugaugaaaagauuua

SEQ ID NO: 2879507 - RNA, 20 nt, Human
ugaugaugaaaugaggucag

SEQ ID NO: 2879508 - RNA, 23 nt, Human
ugaugaucuuugcagacaggcaa

SEQ ID NO: 2879509 - RNA, 22 nt, Human
ugaugaucuuugcagacaggca

SEQ ID NO: 2879510 - RNA, 14 nt, Human
ugaugaugaaaauu

SEQ ID NO: 2879511 - RNA, 13 nt, Human
ugaugauguaauu

SEQ ID NO: 2879512 - RNA, 14 nt, Human
ugaugauguaauug

SEQ ID NO: 2879513 - RNA, 22 nt, Human
ugaugccaauacuagucacccc

SEQ ID NO: 2879514 - RNA, 12 nt, Human
ugaggcugggaa

SEQ ID NO: 2879515 - RNA, 17 nt, Human
ugaggagagaaaauaua

SEQ ID NO: 2879516 - RNA, 21 nt, Human
ugaggagagaaaauauaugua

SEQ ID NO: 2879517 - RNA, 23 nt, Human
ugaggacuuaaaauauuccugca

SEQ ID NO: 2879518 - RNA, 21 nt, Human
ugaggacauguuuuuguuuuc

SEQ ID NO: 2879519 - RNA, 13 nt, Human
ugaggcugcagcg

SEQ ID NO: 2879520 - RNA, 12 nt, Human
ugaggagcugcu

SEQ ID NO: 2879521 - RNA, 18 nt, Human
ugaggcugagacugcggg

SEQ ID NO: 2879522 - RNA, 11 nt, Human
ugaggagcugc

SEQ ID NO: 2879523 - RNA, 16 nt, Human
ugaggagccccagcua

SEQ ID NO: 2879524 - RNA, 20 nt, Human
ugaggagccccaucugucua

SEQ ID NO: 2879525 - RNA, 11 nt, Human
ugaggagcccc

SEQ ID NO: 2879526 - RNA, 14 nt, Human
ugaggagccccagc

SEQ ID NO: 2879527 - RNA, 15 nt, Human
ugaggagcauguuuu

SEQ ID NO: 2879528 - RNA, 19 nt, Human
ugaggagcauguuuuguau

SEQ ID NO: 2879529 - RNA, 23 nt, Human
ugaggagcauguuuuguauacaa

SEQ ID NO: 2879530 - RNA, 15 nt, Human
ugaggagccaggccg

SEQ ID NO: 2879531 - RNA, 20 nt, Human
ugaggagcccauacucagcc

SEQ ID NO: 2879532 - RNA, 21 nt, Human
ugaggagcccauacucagccu

SEQ ID NO: 2879533 - RNA, 22 nt, Human
ugaggagcccauacucagccug

SEQ ID NO: 2879534 - RNA, 23 nt, Human
ugaggagcccauacucagccugc

SEQ ID NO: 2879535 - RNA, 14 nt, Human
ugaggucuguuuaa

SEQ ID NO: 2879536 - RNA, 17 nt, Human
ugaggucuguuuaaagu

SEQ ID NO: 2879537 - RNA, 21 nt, Human
ugagggaaagugcauaugaaa

SEQ ID NO: 2879538 - RNA, 23 nt, Human
ugaggcuuuggauuugacauugc

SEQ ID NO: 2879539 - RNA, 14 nt, Human
ugaggcuuuguguu

SEQ ID NO: 2879540 - RNA, 17 nt, Human
ugaggcuuuguguugua

SEQ ID NO: 2879541 - RNA, 18 nt, Human
ugaggcuuuguguuguaa

SEQ ID NO: 2879542 - RNA, 18 nt, Human
ugaggcuuuggauuugac

SEQ ID NO: 2879543 - RNA, 13 nt, Human
ugaggcuuuggau

SEQ ID NO: 2879544 - RNA, 23 nt, Human
ugaggcuuagcuuugcucugcca

SEQ ID NO: 2879545 - RNA, 14 nt, Human
ugagucgaggacag

SEQ ID NO: 2879546 - RNA, 13 nt, Human
ugaguccuggccc

SEQ ID NO: 2879547 - RNA, 14 nt, Human
ugaguccuggccca

SEQ ID NO: 2879548 - RNA, 15 nt, Human
ugaguccuggcccaa

SEQ ID NO: 2879549 - RNA, 15 nt, Human
ugaguccuugaaaau

SEQ ID NO: 2879550 - RNA, 15 nt, Human
ugagguuucacccuu

SEQ ID NO: 2879551 - RNA, 13 nt, Human
ugagguuucccaa

SEQ ID NO: 2879552 - RNA, 14 nt, Human
ugagguuucccaau

SEQ ID NO: 2879553 - RNA, 16 nt, Human
ugagguugcuagagaa

SEQ ID NO: 2879554 - RNA, 12 nt, Human
ugagguuaggag

SEQ ID NO: 2879555 - RNA, 16 nt, Human
ugagucgaggacaggg

SEQ ID NO: 2879556 - RNA, 15 nt, Human
ugagucgaggacagg

SEQ ID NO: 2879557 - RNA, 16 nt, Human
ugaguccuugaaaaua

SEQ ID NO: 2879558 - RNA, 18 nt, Human
ugaguccuugaaaauauu

SEQ ID NO: 2879559 - RNA, 16 nt, Human
ugaguugauugagaag

SEQ ID NO: 2879560 - RNA, 17 nt, Human
ugaguugccaagacaaa

SEQ ID NO: 2879561 - RNA, 18 nt, Human
ugaguugccaagacaaau

SEQ ID NO: 2879562 - RNA, 19 nt, Human
ugaguugccaagacaaauc

SEQ ID NO: 2879563 - RNA, 23 nt, Human
ugaguugccaagacaaaucaaca

SEQ ID NO: 2879564 - RNA, 18 nt, Human
ugaguuucauucuccugc

SEQ ID NO: 2879565 - RNA, 19 nt, Human
ugaguuucauucuccugcc

SEQ ID NO: 2879566 - RNA, 14 nt, Human
ugauaaacuuugcu

SEQ ID NO: 2879567 - RNA, 18 nt, Human
ugauaaaacaacagcucg

SEQ ID NO: 2879568 - RNA, 18 nt, Human
ugauaaaagggcaaaucu

SEQ ID NO: 2879569 - RNA, 20 nt, Human
ugauaaaagggcaaaucugc

SEQ ID NO: 2879570 - RNA, 20 nt, Human
ugauaaagccucaagguuuu

SEQ ID NO: 2879571 - RNA, 13 nt, Human
ugauaaaguuucu

SEQ ID NO: 2879572 - RNA, 16 nt, Human
ugauaaaguuucucag

SEQ ID NO: 2879573 - RNA, 13 nt, Human
ugauaaagccuca

SEQ ID NO: 2879574 - RNA, 14 nt, Human
ugaguuuaaagcaa

SEQ ID NO: 2879575 - RNA, 18 nt, Human
ugaguugugaaaguuuug

SEQ ID NO: 2879576 - RNA, 16 nt, Human
ugaguuguuguggguu

SEQ ID NO: 2879577 - RNA, 16 nt, Human
ugauagcuaacauuuu

SEQ ID NO: 2879578 - RNA, 18 nt, Human
ugauagcuaacauuuuaa

SEQ ID NO: 2879579 - RNA, 21 nt, Human
ugauagcuaacauuuuaaaua

SEQ ID NO: 2879580 - RNA, 13 nt, Human
ugauagcauugcu

SEQ ID NO: 2879581 - RNA, 21 nt, Human
ugauaggaaugugaaagcacg

SEQ ID NO: 2879582 - RNA, 16 nt, Human
ugauaggaauucaucu

SEQ ID NO: 2879583 - RNA, 18 nt, Human
ugauagguauaaguggug

SEQ ID NO: 2879584 - RNA, 23 nt, Human
ugauagcuuuauuuuuuaaguau

SEQ ID NO: 2879585 - RNA, 14 nt, Human
ugauagcuuuauuu

SEQ ID NO: 2879586 - RNA, 13 nt, Human
ugauagcuuuauu

SEQ ID NO: 2879587 - RNA, 11 nt, Human
ugauagcuuua

SEQ ID NO: 2879588 - RNA, 19 nt, Human
ugauaaauuccacuggacu

SEQ ID NO: 2879589 - RNA, 22 nt, Human
ugauaaaguuucucagauccuu

SEQ ID NO: 2879590 - RNA, 18 nt, Human
ugauaaaguuucucagau

SEQ ID NO: 2879591 - RNA, 21 nt, Human
ugauaaaguuucucagauccu

SEQ ID NO: 2879592 - RNA, 21 nt, Human
ugcauuagagcccauuucaau

SEQ ID NO: 2879593 - RNA, 14 nt, Human
ugcauuagcacaga

SEQ ID NO: 2879594 - RNA, 16 nt, Human
ugcauuagcacagauu

SEQ ID NO: 2879595 - RNA, 17 nt, Human
ugcauuagcacagauuu

SEQ ID NO: 2879596 - RNA, 18 nt, Human
ugcauuagcacagauuuu

SEQ ID NO: 2879597 - RNA, 19 nt, Human
ugcauuagcacagauuuua

SEQ ID NO: 2879598 - RNA, 23 nt, Human
ugcauuagcacagauuuuaauug

SEQ ID NO: 2879599 - RNA, 21 nt, Human
ugcauguuuuccagcuccuca

SEQ ID NO: 2879600 - RNA, 16 nt, Human
ugcauguuugaaauga

SEQ ID NO: 2879601 - RNA, 14 nt, Human
ugcauguuaccauc

SEQ ID NO: 2879602 - RNA, 19 nt, Human
ugcauuagggaugccuccu

SEQ ID NO: 2879603 - RNA, 22 nt, Human
ugcauuagggaugccuccuuuc

SEQ ID NO: 2879604 - RNA, 17 nt, Human
ugcauuuucaccccacc

SEQ ID NO: 2879605 - RNA, 16 nt, Human
ugccacaucuuaaacu

SEQ ID NO: 2879606 - RNA, 15 nt, Human
ugccacauuagaacu

SEQ ID NO: 2879607 - RNA, 17 nt, Human
ugccacauuagaacuuc

SEQ ID NO: 2879608 - RNA, 18 nt, Human
ugccacauuagaacuucu

SEQ ID NO: 2879609 - RNA, 15 nt, Human
ugccaccacgcccgg

SEQ ID NO: 2879610 - RNA, 17 nt, Human
ugcagauaacuuugacu

SEQ ID NO: 2879611 - RNA, 16 nt, Human
ugcagauagaaagcau

SEQ ID NO: 2879612 - RNA, 20 nt, Human
ugcagaugccacccuagcca

SEQ ID NO: 2879613 - RNA, 17 nt, Human
ugcagaugccacccuag

SEQ ID NO: 2879614 - RNA, 15 nt, Human
ugcagaugcaauugu

SEQ ID NO: 2879615 - RNA, 17 nt, Human
ugcagaugcaauuguuu

SEQ ID NO: 2879616 - RNA, 16 nt, Human
ugcagauuugggcugg

SEQ ID NO: 2879617 - RNA, 12 nt, Human
ugcaucccagca

SEQ ID NO: 2879618 - RNA, 14 nt, Human
ugcaucccagcacc

SEQ ID NO: 2879619 - RNA, 19 nt, Human
ugcaucccagcaccugccu

SEQ ID NO: 2879620 - RNA, 20 nt, Human
ugcaucccagcaccugccuc

SEQ ID NO: 2879621 - RNA, 16 nt, Human
ugcauccccuuggcug

SEQ ID NO: 2879622 - RNA, 14 nt, Human
ugcauccuccgccu

SEQ ID NO: 2879623 - RNA, 20 nt, Human
ugcauguaaacacgccugca

SEQ ID NO: 2879624 - RNA, 19 nt, Human
ugcauguuuuccagcuccu

SEQ ID NO: 2879625 - RNA, 18 nt, Human
ugcauguugaccaugucu

SEQ ID NO: 2879626 - RNA, 22 nt, Human
ugcauguuaggaaaauuucaca

SEQ ID NO: 2879627 - RNA, 13 nt, Human
ugcauguaugucu

SEQ ID NO: 2879628 - RNA, 14 nt, Human
ugcauguaugucuu

SEQ ID NO: 2879629 - RNA, 15 nt, Human
ugcauguaugucuug

SEQ ID NO: 2879630 - RNA, 12 nt, Human
ugccauguaccu

SEQ ID NO: 2879631 - RNA, 14 nt, Human
ugccauguaccucc

SEQ ID NO: 2879632 - RNA, 17 nt, Human
ugccauguaccuccccu

SEQ ID NO: 2879633 - RNA, 18 nt, Human
ugccauguaccuccccug

SEQ ID NO: 2879634 - RNA, 19 nt, Human
ugccauguaccuccccugc

SEQ ID NO: 2879635 - RNA, 21 nt, Human
ugccauguaccuccccugccu

SEQ ID NO: 2879636 - RNA, 22 nt, Human
ugccauguaccuccccugccuu

SEQ ID NO: 2879637 - RNA, 23 nt, Human
ugccauguaccuccccugccuug

SEQ ID NO: 2879638 - RNA, 14 nt, Human
ugccaugugccagg

SEQ ID NO: 2879639 - RNA, 15 nt, Human
ugccaugugccaggu

SEQ ID NO: 2879640 - RNA, 17 nt, Human
ugccaugugugcugaac

SEQ ID NO: 2879641 - RNA, 16 nt, Human
ugccaugugacucugg

SEQ ID NO: 2879642 - RNA, 19 nt, Human
ugccaugugacucuggcuu

SEQ ID NO: 2879643 - RNA, 21 nt, Human
ugccaugugacucuggcuugg

SEQ ID NO: 2879644 - RNA, 12 nt, Human
ugcccacuguuu

SEQ ID NO: 2879645 - RNA, 16 nt, Human
ugcccagaacuucccu

SEQ ID NO: 2879646 - RNA, 17 nt, Human
ugcccagaacuucccug

SEQ ID NO: 2879647 - RNA, 18 nt, Human
ugcccagaacuucccuga

SEQ ID NO: 2879648 - RNA, 18 nt, Human
ugcccacgcuggagugca

SEQ ID NO: 2879649 - RNA, 16 nt, Human
ugccauguuggccagg

SEQ ID NO: 2879650 - RNA, 12 nt, Human
ugccauguuggc

SEQ ID NO: 2879651 - RNA, 15 nt, Human
ugccauguuggccag

SEQ ID NO: 2879652 - RNA, 12 nt, Human
ugccauccaggu

SEQ ID NO: 2879653 - RNA, 15 nt, Human
ugccauccagguuca

SEQ ID NO: 2879654 - RNA, 14 nt, Human
ugccaucauugcug

SEQ ID NO: 2879655 - RNA, 15 nt, Human
ugccaucauugcugu

SEQ ID NO: 2879656 - RNA, 16 nt, Human
ugccaucauugcuguc

SEQ ID NO: 2879657 - RNA, 18 nt, Human
ugccaucauugcugucug

SEQ ID NO: 2879658 - RNA, 21 nt, Human
ugccaucauugcugucugcag

SEQ ID NO: 2879659 - RNA, 22 nt, Human
ugccaucauugcugucugcagc

SEQ ID NO: 2879660 - RNA, 17 nt, Human
ugccagguuuuuggucu

SEQ ID NO: 2879661 - RNA, 16 nt, Human
ugccagggccgaccag

SEQ ID NO: 2879662 - RNA, 19 nt, Human
ugccagggcagugcuagug

SEQ ID NO: 2879663 - RNA, 14 nt, Human
ugccaccagagacc

SEQ ID NO: 2879664 - RNA, 13 nt, Human
ugccaccagagac

SEQ ID NO: 2879665 - RNA, 18 nt, Human
ugccaccacuauaaaaug

SEQ ID NO: 2879666 - RNA, 22 nt, Human
ugccaccacuauaaaaugucuu

SEQ ID NO: 2879667 - RNA, 15 nt, Human
ugccaccaccucugu

SEQ ID NO: 2879668 - RNA, 16 nt, Human
ugccaccaccucugug

SEQ ID NO: 2879669 - RNA, 18 nt, Human
ugccaccaccucuguggc

SEQ ID NO: 2879670 - RNA, 19 nt, Human
ugccaccaccucuguggca

SEQ ID NO: 2879671 - RNA, 22 nt, Human
ugccaccaccucuguggcauug

SEQ ID NO: 2879672 - RNA, 16 nt, Human
ugccacugcacuccag

SEQ ID NO: 2879673 - RNA, 19 nt, Human
ugccacugauauucagaau

SEQ ID NO: 2879674 - RNA, 17 nt, Human
ugccacucauuccugua

SEQ ID NO: 2879675 - RNA, 18 nt, Human
ugccacucauuccuguag

SEQ ID NO: 2879676 - RNA, 14 nt, Human
ugccacuccucccu

SEQ ID NO: 2879677 - RNA, 15 nt, Human
ugccacuccucccuc

SEQ ID NO: 2879678 - RNA, 16 nt, Human
ugccacuccucccucc

SEQ ID NO: 2879679 - RNA, 17 nt, Human
ugccacuccucccuccg

SEQ ID NO: 2879680 - RNA, 23 nt, Human
ugcccugcugccgccucccagcc

SEQ ID NO: 2879681 - RNA, 11 nt, Human
ugcccugcugc

SEQ ID NO: 2879682 - RNA, 21 nt, Human
ugcccugcugccgccucccag

SEQ ID NO: 2879683 - RNA, 12 nt, Human
ugcccugcuccc

SEQ ID NO: 2879684 - RNA, 13 nt, Human
ugcccugcucccu

SEQ ID NO: 2879685 - RNA, 18 nt, Human
ugcccuggauccaucagg

SEQ ID NO: 2879686 - RNA, 20 nt, Human
ugcccuggugcugccacacu

SEQ ID NO: 2879687 - RNA, 18 nt, Human
ugcccuggugcugccaca

SEQ ID NO: 2879688 - RNA, 22 nt, Human
ugcccuggcagggucauccugu

SEQ ID NO: 2879689 - RNA, 23 nt, Human
ugcccuggcagggucauccugug

SEQ ID NO: 2879690 - RNA, 17 nt, Human
ugcccugguuucacugg

SEQ ID NO: 2879691 - RNA, 15 nt, Human
ugcccugguuucacu

SEQ ID NO: 2879692 - RNA, 21 nt, Human
ugcccuggugcugccacacuu

SEQ ID NO: 2879693 - RNA, 18 nt, Human
ugccggguuuuauauuuu

SEQ ID NO: 2879694 - RNA, 20 nt, Human
ugccgguaaacacgccugca

SEQ ID NO: 2879695 - RNA, 14 nt, Human
ugccggguuuuaua

SEQ ID NO: 2879696 - RNA, 22 nt, Human
ugcccugguuucacuggcccaa

SEQ ID NO: 2879697 - RNA, 16 nt, Human
ugccgugugaguguga

SEQ ID NO: 2879698 - RNA, 19 nt, Human
ugccgugugagugugacag

SEQ ID NO: 2879699 - RNA, 20 nt, Human
ugccgugugagugugacagg

SEQ ID NO: 2879700 - RNA, 21 nt, Human
ugccgugugagugugacaggg

SEQ ID NO: 2879701 - RNA, 22 nt, Human
ugccgugugagugugacagggc

SEQ ID NO: 2879702 - RNA, 23 nt, Human
ugccgugugagugugacagggcc

SEQ ID NO: 2879703 - RNA, 14 nt, Human
ugccgucucuggag

SEQ ID NO: 2879704 - RNA, 13 nt, Human
ugccgucucugga

SEQ ID NO: 2879705 - RNA, 12 nt, Human
ugccgucucugg

SEQ ID NO: 2879706 - RNA, 22 nt, Human
ugcccacugcugcaguagggga

SEQ ID NO: 2879707 - RNA, 14 nt, Human
ugcccguguacaua

SEQ ID NO: 2879708 - RNA, 22 nt, Human
ugcccgggcgcggccagccccg

SEQ ID NO: 2879709 - RNA, 19 nt, Human
ugcccgggcgcggccagcc

SEQ ID NO: 2879710 - RNA, 20 nt, Human
ugcccgggcgcggccagccc

SEQ ID NO: 2879711 - RNA, 14 nt, Human
ugcccggucccacc

SEQ ID NO: 2879712 - RNA, 20 nt, Human
ugcccguaaacacgccugca

SEQ ID NO: 2879713 - RNA, 23 nt, Human
ugcccguaaacacgccugcaaac

SEQ ID NO: 2879714 - RNA, 21 nt, Human
ugcccacuguuucucuugagc

SEQ ID NO: 2879715 - RNA, 11 nt, Human
ugcccagaacu

SEQ ID NO: 2879716 - RNA, 17 nt, Human
ugcccguucuugaaaug

SEQ ID NO: 2879717 - RNA, 14 nt, Human
ugcccguucuugaa

SEQ ID NO: 2879718 - RNA, 16 nt, Human
ugcccugcccccacga

SEQ ID NO: 2879719 - RNA, 23 nt, Human
ugcccugcugagucccaggcuga

SEQ ID NO: 2879720 - RNA, 22 nt, Human
ugcccugcugagucccaggcug

SEQ ID NO: 2879721 - RNA, 18 nt, Human
ugcccugcugagucccag

SEQ ID NO: 2879722 - RNA, 19 nt, Human
ugcccugcgggucacagga

SEQ ID NO: 2879723 - RNA, 13 nt, Human
ugccuaagacaug

SEQ ID NO: 2879724 - RNA, 18 nt, Human
ugccuaagcauugccugg

SEQ ID NO: 2879725 - RNA, 19 nt, Human
ugccuaagcauugccuggc

SEQ ID NO: 2879726 - RNA, 22 nt, Human
ugccuaagcauugccuggccuu

SEQ ID NO: 2879727 - RNA, 19 nt, Human
ugccuccgccucaguaaga

SEQ ID NO: 2879728 - RNA, 22 nt, Human
ugccuccgcgugaucaaagcca

SEQ ID NO: 2879729 - RNA, 12 nt, Human
ugccuccucacc

SEQ ID NO: 2879730 - RNA, 17 nt, Human
ugccucgaaacacagaa

SEQ ID NO: 2879731 - RNA, 13 nt, Human
ugccucgaaacac

SEQ ID NO: 2879732 - RNA, 24 nt, Human
ugccuccucacccccagcuuugcu

SEQ ID NO: 2879733 - RNA, 19 nt, Human
ugccuccucacccccagcu

SEQ ID NO: 2879734 - RNA, 13 nt, Human
ugccucugccuua

SEQ ID NO: 2879735 - RNA, 14 nt, Human
ugccucugccuuag

SEQ ID NO: 2879736 - RNA, 22 nt, Human
ugccucugccuuagaggagccc

SEQ ID NO: 2879737 - RNA, 12 nt, Human
ugccucugccug

SEQ ID NO: 2879738 - RNA, 18 nt, Human
ugccucugccugucuccc

SEQ ID NO: 2879739 - RNA, 13 nt, Human
ugccucugccugu

SEQ ID NO: 2879740 - RNA, 14 nt, Human
ugccucugccuguc

SEQ ID NO: 2879741 - RNA, 11 nt, Human
ugccugcagcc

SEQ ID NO: 2879742 - RNA, 13 nt, Human
ugccucuuccucc

SEQ ID NO: 2879743 - RNA, 17 nt, Human
ugccucuuacgguaguu

SEQ ID NO: 2879744 - RNA, 22 nt, Human
ugccugcagccccgcgccuccu

SEQ ID NO: 2879745 - RNA, 15 nt, Human
ugccugcagccccgc

SEQ ID NO: 2879746 - RNA, 15 nt, Human
ugccugcagaguuug

SEQ ID NO: 2879747 - RNA, 12 nt, Human
ugccugccaugu

SEQ ID NO: 2879748 - RNA, 21 nt, Human
ugccugccauguaccuccccu

SEQ ID NO: 2879749 - RNA, 23 nt, Human
ugccugccauguaccuccccugc

SEQ ID NO: 2879750 - RNA, 14 nt, Human
ugccugggggaguu

SEQ ID NO: 2879751 - RNA, 19 nt, Human
ugccugggggaguuuuccu

SEQ ID NO: 2879752 - RNA, 20 nt, Human
ugccugggggaguuuuccuc

SEQ ID NO: 2879753 - RNA, 21 nt, Human
ugccugggggaguuuuccucu

SEQ ID NO: 2879754 - RNA, 21 nt, Human
ugccuggguggacauggcccc

SEQ ID NO: 2879755 - RNA, 19 nt, Human
ugccugguggcagcugcgg

SEQ ID NO: 2879756 - RNA, 16 nt, Human
ugccuggucacagggc

SEQ ID NO: 2879757 - RNA, 17 nt, Human
ugccuggucacagggca

SEQ ID NO: 2879758 - RNA, 22 nt, Human
ugccuggucacagggcaugccc

SEQ ID NO: 2879759 - RNA, 22 nt, Human
ugccuguaguuaggaaauaaaa

SEQ ID NO: 2879760 - RNA, 21 nt, Human
ugccuguaguuaggaaauaaa

SEQ ID NO: 2879761 - RNA, 20 nt, Human
ugccuguaguuaggaaauaa

SEQ ID NO: 2879762 - RNA, 19 nt, Human
ugccuguaguuaggaaaua

SEQ ID NO: 2879763 - RNA, 18 nt, Human
ugccuguaguuaggaaau

SEQ ID NO: 2879764 - RNA, 17 nt, Human
ugccuguaguuaggaaa

SEQ ID NO: 2879765 - RNA, 16 nt, Human
ugccuguaguuaggaa

SEQ ID NO: 2879766 - RNA, 15 nt, Human
ugccuguaguuagga

SEQ ID NO: 2879767 - RNA, 18 nt, Human
ugccugguggcagcugcg

SEQ ID NO: 2879768 - RNA, 17 nt, Human
ugccugguggcagcugc

SEQ ID NO: 2879769 - RNA, 22 nt, Human
ugccuggguuuaaggggagagg

SEQ ID NO: 2879770 - RNA, 22 nt, Human
ugccuggguuccaauccuggcu

SEQ ID NO: 2879771 - RNA, 12 nt, Human
ugcacugacccu

SEQ ID NO: 2879772 - RNA, 15 nt, Human
ugcacugacccuucc

SEQ ID NO: 2879773 - RNA, 21 nt, Human
ugcacugacauuguuggccaa

SEQ ID NO: 2879774 - RNA, 18 nt, Human
ugcacugacauuguuggc

SEQ ID NO: 2879775 - RNA, 15 nt, Human
ugcagaggucagacu

SEQ ID NO: 2879776 - RNA, 22 nt, Human
ugcagaggggcuuucuggagag

SEQ ID NO: 2879777 - RNA, 21 nt, Human
ugcagaggggcuuucuggaga

SEQ ID NO: 2879778 - RNA, 19 nt, Human
ugcagagguccacaacaca

SEQ ID NO: 2879779 - RNA, 20 nt, Human
ugcagaggggcuuucuggag

SEQ ID NO: 2879780 - RNA, 21 nt, Human
ugcacuuauaagguguuuucu

SEQ ID NO: 2879781 - RNA, 21 nt, Human
ugcacuuaaggcacucuguua

SEQ ID NO: 2879782 - RNA, 16 nt, Human
ugcacuuaaggcacuc

SEQ ID NO: 2879783 - RNA, 15 nt, Human
ugcacgacgcccucu

SEQ ID NO: 2879784 - RNA, 19 nt, Human
ugcacgacgcccucucccc

SEQ ID NO: 2879785 - RNA, 20 nt, Human
ugcacgacgcccucucccca

SEQ ID NO: 2879786 - RNA, 14 nt, Human
ugcaccuugugucu

SEQ ID NO: 2879787 - RNA, 20 nt, Human
ugcaccuuaccaacuuucug

SEQ ID NO: 2879788 - RNA, 21 nt, Human
ugcaccuuaccaacuuucugu

SEQ ID NO: 2879789 - RNA, 15 nt, Human
ugcaccuugugucug

SEQ ID NO: 2879790 - RNA, 16 nt, Human
ugcaccuugugucugu

SEQ ID NO: 2879791 - RNA, 20 nt, Human
ugcaccuguacucaggaggc

SEQ ID NO: 2879792 - RNA, 13 nt, Human
ugcaccuuaccaa

SEQ ID NO: 2879793 - RNA, 18 nt, Human
ugcaccuuaccaacuuuc

SEQ ID NO: 2879794 - RNA, 19 nt, Human
ugcaccuuaccaacuuucu

SEQ ID NO: 2879795 - RNA, 17 nt, Human
ugcaccuguacucagga

SEQ ID NO: 2879796 - RNA, 16 nt, Human
ugcaccuguacucagg

SEQ ID NO: 2879797 - RNA, 23 nt, Human
ugcaauuuucuaagcaauuucuu

SEQ ID NO: 2879798 - RNA, 22 nt, Human
ugcaccugccagccuggcuucu

SEQ ID NO: 2879799 - RNA, 16 nt, Human
ugcacagugcaucuca

SEQ ID NO: 2879800 - RNA, 17 nt, Human
ugcacagugcaucucag

SEQ ID NO: 2879801 - RNA, 21 nt, Human
ugcacaaauauuuauuuucuu

SEQ ID NO: 2879802 - RNA, 15 nt, Human
ugcacagugcaucuc

SEQ ID NO: 2879803 - RNA, 20 nt, Human
ugcaauuucauaugcuguau

SEQ ID NO: 2879804 - RNA, 14 nt, Human
ugcaauuucauaug

SEQ ID NO: 2879805 - RNA, 23 nt, Human
ugcaauuugauugacugcccauu

SEQ ID NO: 2879806 - RNA, 14 nt, Human
ugcaauuuauuaaa

SEQ ID NO: 2879807 - RNA, 15 nt, Human
ugcaauuuauuaaaa

SEQ ID NO: 2879808 - RNA, 18 nt, Human
ugcaauuuauuaaaauga

SEQ ID NO: 2879809 - RNA, 22 nt, Human
ugcaauuuauuaaaaugauugu

SEQ ID NO: 2879810 - RNA, 12 nt, Human
ugcaauuucaag

SEQ ID NO: 2879811 - RNA, 13 nt, Human
ugcaauuucaagg

SEQ ID NO: 2879812 - RNA, 17 nt, Human
ugcaauuucaagguucu

SEQ ID NO: 2879813 - RNA, 18 nt, Human
ugcaauuucaagguucua

SEQ ID NO: 2879814 - RNA, 19 nt, Human
ugcaauuucaagguucuaa

SEQ ID NO: 2879815 - RNA, 20 nt, Human
ugcaauuucaagguucuaac

SEQ ID NO: 2879816 - RNA, 19 nt, Human
ugcaauuagccucauaguu

SEQ ID NO: 2879817 - RNA, 17 nt, Human
ugcaauuaggauuuuga

SEQ ID NO: 2879818 - RNA, 20 nt, Human
ugcaauuagguuuuuccuua

SEQ ID NO: 2879819 - RNA, 23 nt, Human
ugcaauuagguuuuuccuuauuu

SEQ ID NO: 2879820 - RNA, 14 nt, Human
ugcaauucaaaagu

SEQ ID NO: 2879821 - RNA, 16 nt, Human
ugcaauucaaaaguuc

SEQ ID NO: 2879822 - RNA, 17 nt, Human
ugcaauucaaaaguucc

SEQ ID NO: 2879823 - RNA, 18 nt, Human
ugcaauucaaaaguucca

SEQ ID NO: 2879824 - RNA, 13 nt, Human
ugcaauuccccuc

SEQ ID NO: 2879825 - RNA, 19 nt, Human
ugcaauucaaaaguuccaa

SEQ ID NO: 2879826 - RNA, 21 nt, Human
ugcaauucaaaaguuccaaga

SEQ ID NO: 2879827 - RNA, 14 nt, Human
ugcaauuccccucu

SEQ ID NO: 2879828 - RNA, 18 nt, Human
ugcaauuccccucugcug

SEQ ID NO: 2879829 - RNA, 16 nt, Human
ugcaauugauuucuuu

SEQ ID NO: 2879830 - RNA, 23 nt, Human
ugcacaaaaugaaugaggucugg

SEQ ID NO: 2879831 - RNA, 15 nt, Human
ugcacaaacucacca

SEQ ID NO: 2879832 - RNA, 15 nt, Human
ugcacaaagcccuuc

SEQ ID NO: 2879833 - RNA, 17 nt, Human
ugcacaaagcccuucca

SEQ ID NO: 2879834 - RNA, 21 nt, Human
ugcaaugacacagucuuggcu

SEQ ID NO: 2879835 - RNA, 18 nt, Human
ugcaagaacucaucacug

SEQ ID NO: 2879836 - RNA, 21 nt, Human
ugcaagaacucaucacugugg

SEQ ID NO: 2879837 - RNA, 22 nt, Human
ugcaagaacucaucacuguggc

SEQ ID NO: 2879838 - RNA, 23 nt, Human
ugcaagaacucaucacuguggcu

SEQ ID NO: 2879839 - RNA, 16 nt, Human
ugcaauggcagccuug

SEQ ID NO: 2879840 - RNA, 15 nt, Human
ugcaauggcagccuu

SEQ ID NO: 2879841 - RNA, 14 nt, Human
ugcaauggcagccu

SEQ ID NO: 2879842 - RNA, 13 nt, Human
ugcaauggcagcc

SEQ ID NO: 2879843 - RNA, 16 nt, Human
ugcaaugacucaggac

SEQ ID NO: 2879844 - RNA, 13 nt, Human
ugcaauggauuuu

SEQ ID NO: 2879845 - RNA, 18 nt, Human
ugcaauggcuauauggca

SEQ ID NO: 2879846 - RNA, 17 nt, Human
ugcaaugggauguauga

SEQ ID NO: 2879847 - RNA, 18 nt, Human
ugcaaugggauguaugaa

SEQ ID NO: 2879848 - RNA, 22 nt, Human
ugcaaugggauguaugaauaca

SEQ ID NO: 2879849 - RNA, 15 nt, Human
ugcaaugggcacugg

SEQ ID NO: 2879850 - RNA, 19 nt, Human
ugcaauguaucccuucuca

SEQ ID NO: 2879851 - RNA, 24 nt, Human
ugcaauguaucccuucucacagca

SEQ ID NO: 2879852 - RNA, 18 nt, Human
ugcaaugugaucuauguu

SEQ ID NO: 2879853 - RNA, 13 nt, Human
ugauuuuugucuc

SEQ ID NO: 2879854 - RNA, 14 nt, Human
ugauuuuuguugau

SEQ ID NO: 2879855 - RNA, 19 nt, Human
ugauuuuuguugauuaaaa

SEQ ID NO: 2879856 - RNA, 13 nt, Human
ugauuuuuuaaaa

SEQ ID NO: 2879857 - RNA, 16 nt, Human
ugauuuuuuaaaagaa

SEQ ID NO: 2879858 - RNA, 17 nt, Human
ugauuuuuuaaaagaaa

SEQ ID NO: 2879859 - RNA, 20 nt, Human
ugauuuuuagaugagauugu

SEQ ID NO: 2879860 - RNA, 14 nt, Human
ugauuuucccucua

SEQ ID NO: 2879861 - RNA, 22 nt, Human
ugauuuuucuaaccuugaaugc

SEQ ID NO: 2879862 - RNA, 20 nt, Human
ugauuuuuaugaugaugaaa

SEQ ID NO: 2879863 - RNA, 18 nt, Human
ugcaaaaaaauuaaaaug

SEQ ID NO: 2879864 - RNA, 22 nt, Human
ugcaaaaaauacuuuuucuaau

SEQ ID NO: 2879865 - RNA, 16 nt, Human
ugauuuuuuuuuuuca

SEQ ID NO: 2879866 - RNA, 15 nt, Human
ugcaaaaagaaauga

SEQ ID NO: 2879867 - RNA, 22 nt, Human
ugcaaaaagaaaugacuaauua

SEQ ID NO: 2879868 - RNA, 13 nt, Human
ugcaaaacauuuc

SEQ ID NO: 2879869 - RNA, 14 nt, Human
ugcaaaaccuuuga

SEQ ID NO: 2879870 - RNA, 23 nt, Human
ugcaaaagacuaauuuaaaaaau

SEQ ID NO: 2879871 - RNA, 13 nt, Human
ugcaaaagcagug

SEQ ID NO: 2879872 - RNA, 15 nt, Human
ugcaaaagcuucaaa

SEQ ID NO: 2879873 - RNA, 22 nt, Human
ugauuuuaggagcuaaggcucu

SEQ ID NO: 2879874 - RNA, 12 nt, Human
ugauuuuaugau

SEQ ID NO: 2879875 - RNA, 18 nt, Human
ugauuuuaugaucagugu

SEQ ID NO: 2879876 - RNA, 20 nt, Human
ugauuuucaaagcuuuuucc

SEQ ID NO: 2879877 - RNA, 17 nt, Human
ugauuuucaagcagcau

SEQ ID NO: 2879878 - RNA, 19 nt, Human
ugauuuucaagcagcaucu

SEQ ID NO: 2879879 - RNA, 15 nt, Human
ugauuuucauaacuu

SEQ ID NO: 2879880 - RNA, 13 nt, Human
ugauuuuuacugu

SEQ ID NO: 2879881 - RNA, 13 nt, Human
ugaugugccuggg

SEQ ID NO: 2879882 - RNA, 18 nt, Human
ugaugucuuuucuuggca

SEQ ID NO: 2879883 - RNA, 23 nt, Human
ugaugucuuuucuuggcaaaagc

SEQ ID NO: 2879884 - RNA, 16 nt, Human
ugaugugacaauaaua

SEQ ID NO: 2879885 - RNA, 17 nt, Human
ugaugugacaauaauau

SEQ ID NO: 2879886 - RNA, 18 nt, Human
ugaugugacaauaauauu

SEQ ID NO: 2879887 - RNA, 20 nt, Human
ugauuuuaggagcuaaggcu

SEQ ID NO: 2879888 - RNA, 12 nt, Human
ugauuuuaaugg

SEQ ID NO: 2879889 - RNA, 21 nt, Human
ugauuuuaauggauuguuaau

SEQ ID NO: 2879890 - RNA, 14 nt, Human
ugcaaccuccgccu

SEQ ID NO: 2879891 - RNA, 13 nt, Human
ugcaaccuccgcc

SEQ ID NO: 2879892 - RNA, 16 nt, Human
ugcaacccaaggacug

SEQ ID NO: 2879893 - RNA, 20 nt, Human
ugcaacccaaggacugaggg

SEQ ID NO: 2879894 - RNA, 17 nt, Human
ugcaacccuuaccccuu

SEQ ID NO: 2879895 - RNA, 15 nt, Human
ugcaacccuuacccc

SEQ ID NO: 2879896 - RNA, 20 nt, Human
ugcaacaggcugggcuucag

SEQ ID NO: 2879897 - RNA, 19 nt, Human
ugcaacaggcugggcuuca

SEQ ID NO: 2879898 - RNA, 14 nt, Human
ugcaaccacacacc

SEQ ID NO: 2879899 - RNA, 14 nt, Human
ugcaacaggcuugu

SEQ ID NO: 2879900 - RNA, 15 nt, Human
ugcaacauuuacagu

SEQ ID NO: 2879901 - RNA, 23 nt, Human
ugcaacauuuacaguccuucaaa

SEQ ID NO: 2879902 - RNA, 17 nt, Human
ugcaacaggcugggcuu

SEQ ID NO: 2879903 - RNA, 16 nt, Human
ugcaacaggcugggcu

SEQ ID NO: 2879904 - RNA, 15 nt, Human
ugcaacaggcugggc

SEQ ID NO: 2879905 - RNA, 14 nt, Human
ugcaacaggcuggg

SEQ ID NO: 2879906 - RNA, 23 nt, Human
ugcaaaagguucacuaaagcagu

SEQ ID NO: 2879907 - RNA, 22 nt, Human
ugcaaaagguucacuaaagcag

SEQ ID NO: 2879908 - RNA, 12 nt, Human
ugcaaaauggaa

SEQ ID NO: 2879909 - RNA, 20 nt, Human
ugcaaaagacuaauuuaaaa

SEQ ID NO: 2879910 - RNA, 21 nt, Human
ugcaaaauuugaugccaggac

SEQ ID NO: 2879911 - RNA, 22 nt, Human
ugcaaaauuugaugccaggaca

SEQ ID NO: 2879912 - RNA, 19 nt, Human
ugcaaaauuuuuuuaaucu

SEQ ID NO: 2879913 - RNA, 14 nt, Human
ugcaaacagaacag

SEQ ID NO: 2879914 - RNA, 15 nt, Human
ugcaaacagaacagg

SEQ ID NO: 2879915 - RNA, 17 nt, Human
ugcaaacagaacagggu

SEQ ID NO: 2879916 - RNA, 18 nt, Human
ugcaaacagaacaggguc

SEQ ID NO: 2879917 - RNA, 19 nt, Human
ugcaaacagaacaggguca

SEQ ID NO: 2879918 - RNA, 21 nt, Human
ugcaaccuucgccaccugggu

SEQ ID NO: 2879919 - RNA, 18 nt, Human
ugcaaccuucgccaccug

SEQ ID NO: 2879920 - RNA, 14 nt, Human
ugcaaccuucaccu

SEQ ID NO: 2879921 - RNA, 12 nt, Human
ugcaaccucugc

SEQ ID NO: 2879922 - RNA, 18 nt, Human
ugcaacugacacucccac

SEQ ID NO: 2879923 - RNA, 19 nt, Human
ugcaacucaucaucgguga

SEQ ID NO: 2879924 - RNA, 13 nt, Human
ugcaacuucugcc

SEQ ID NO: 2879925 - RNA, 14 nt, Human
ugcaacuucugccu

SEQ ID NO: 2879926 - RNA, 21 nt, Human
ugcaacuucuuuuuauuuucu

SEQ ID NO: 2879927 - RNA, 17 nt, Human
ugcaacuucuuuuuauu

SEQ ID NO: 2879928 - RNA, 16 nt, Human
ugcaacuuguaaaugu

SEQ ID NO: 2879929 - RNA, 18 nt, Human
ugcaacuuguaaaugugg

SEQ ID NO: 2879930 - RNA, 21 nt, Human
ugcaaccuccgccucuugggu

SEQ ID NO: 2879931 - RNA, 20 nt, Human
ugcaaccuccgccucuuggg

SEQ ID NO: 2879932 - RNA, 18 nt, Human
ugcaaccuccgccucuug

SEQ ID NO: 2879933 - RNA, 21 nt, Human
ugcaacccaaggacugaggga

SEQ ID NO: 2879934 - RNA, 12 nt, Human
ugcaaaaaugga

SEQ ID NO: 2879935 - RNA, 21 nt, Human
ugcaaccucugccuccugggu

SEQ ID NO: 2879936 - RNA, 18 nt, Human
ugcaaccucugcuuccca

SEQ ID NO: 2879937 - RNA, 19 nt, Human
ugcaaccucugcuucccag

SEQ ID NO: 2879938 - RNA, 20 nt, Human
ugcaaccucugcuucccagg

SEQ ID NO: 2879939 - RNA, 21 nt, Human
ugcaaccucugcuucccaggu

SEQ ID NO: 2879940 - RNA, 17 nt, Human
uuuucaccuccuucaau

SEQ ID NO: 2879941 - RNA, 17 nt, Human
uuuuccuacaggcaguc

SEQ ID NO: 2879942 - RNA, 19 nt, Human
uuuuccccucuuuuguuaa

SEQ ID NO: 2879943 - RNA, 22 nt, Human
uuuucccucuuuggcuccccug

SEQ ID NO: 2879944 - RNA, 15 nt, Human
uuuucccucuuuucu

SEQ ID NO: 2879945 - RNA, 17 nt, Human
uuuuccuaaagagagua

SEQ ID NO: 2879946 - RNA, 11 nt, Human
uuuucuuccuu

SEQ ID NO: 2879947 - RNA, 15 nt, Human
uuuucuucacugucc

SEQ ID NO: 2879948 - RNA, 13 nt, Human
uuuucuuacauaa

SEQ ID NO: 2879949 - RNA, 16 nt, Human
uuuucuuacuccuccu

SEQ ID NO: 2879950 - RNA, 17 nt, Human
uuuucuuacuccuccuc

SEQ ID NO: 2879951 - RNA, 14 nt, Human
uuuucuugugacag

SEQ ID NO: 2879952 - RNA, 18 nt, Human
uuuucuuuaaagaaguug

SEQ ID NO: 2879953 - RNA, 15 nt, Human
uuuucuuuaaagaug

SEQ ID NO: 2879954 - RNA, 20 nt, Human
uuuugaaauuaugugacauu

SEQ ID NO: 2879955 - RNA, 18 nt, Human
uuuugaacuaagaaacuu

SEQ ID NO: 2879956 - RNA, 23 nt, Human
uuuugaacuaagaaacuuuugua

SEQ ID NO: 2879957 - RNA, 15 nt, Human
uuuucuuuagagaac

SEQ ID NO: 2879958 - RNA, 17 nt, Human
uuuucuuuagagaacug

SEQ ID NO: 2879959 - RNA, 18 nt, Human
uuuucuuuagagaacuga

SEQ ID NO: 2879960 - RNA, 19 nt, Human
uuuucuuuagagaacugaa

SEQ ID NO: 2879961 - RNA, 21 nt, Human
uuuucuuuagagaacugaaaa

SEQ ID NO: 2879962 - RNA, 17 nt, Human
uuuucuuaaccaguugu

SEQ ID NO: 2879963 - RNA, 22 nt, Human
uuuugaaaugugguuuuccuga

SEQ ID NO: 2879964 - RNA, 23 nt, Human
uuuucagaaaauauuauguguuu

SEQ ID NO: 2879965 - RNA, 18 nt, Human
uuuucagaaccucuuccc

SEQ ID NO: 2879966 - RNA, 17 nt, Human
uuuucagaaccucuucc

SEQ ID NO: 2879967 - RNA, 22 nt, Human
uuuucagaaccucuuccccaga

SEQ ID NO: 2879968 - RNA, 23 nt, Human
uuuucccagacuacuauuuucuu

SEQ ID NO: 2879969 - RNA, 16 nt, Human
uuuucagacuugucaa

SEQ ID NO: 2879970 - RNA, 22 nt, Human
uuuucagagauuuauauaaaug

SEQ ID NO: 2879971 - RNA, 19 nt, Human
uuuuccccccacucucccc

SEQ ID NO: 2879972 - RNA, 18 nt, Human
uuuuccccccacucuccc

SEQ ID NO: 2879973 - RNA, 15 nt, Human
uuuucccauuuguaa

SEQ ID NO: 2879974 - RNA, 22 nt, Human
uuuucagaaaauauuauguguu

SEQ ID NO: 2879975 - RNA, 20 nt, Human
uuuucaccccacccuucccc

SEQ ID NO: 2879976 - RNA, 13 nt, Human
uuuucaccccacc

SEQ ID NO: 2879977 - RNA, 19 nt, Human
uuuucaccagauuugcuaa

SEQ ID NO: 2879978 - RNA, 19 nt, Human
uuuucaaaauagaaaaguu

SEQ ID NO: 2879979 - RNA, 20 nt, Human
uuuucaaaauagaaaaguua

SEQ ID NO: 2879980 - RNA, 20 nt, Human
uuuucaaaauccaaaaagaa

SEQ ID NO: 2879981 - RNA, 20 nt, Human
uuuucaacaaauaucuugug

SEQ ID NO: 2879982 - RNA, 22 nt, Human
uuuucaacaaauaucuuguguu

SEQ ID NO: 2879983 - RNA, 23 nt, Human
uuuucaaccagauaacauaccuu

SEQ ID NO: 2879984 - RNA, 12 nt, Human
uuuucaacccca

SEQ ID NO: 2879985 - RNA, 19 nt, Human
uuuucaaccccacccuguu

SEQ ID NO: 2879986 - RNA, 22 nt, Human
uuuuauauaauaucuaaaguua

SEQ ID NO: 2879987 - RNA, 22 nt, Human
uuuuauauacagaggaaaucug

SEQ ID NO: 2879988 - RNA, 13 nt, Human
uuuuauauuuagu

SEQ ID NO: 2879989 - RNA, 23 nt, Human
uuuuauauuuaguuauaguuuca

SEQ ID NO: 2879990 - RNA, 13 nt, Human
uuuuauaguggaa

SEQ ID NO: 2879991 - RNA, 14 nt, Human
uuuuauaguggaaa

SEQ ID NO: 2879992 - RNA, 15 nt, Human
uuuuauaguggaaaa

SEQ ID NO: 2879993 - RNA, 19 nt, Human
uuuuauacucuuucuguau

SEQ ID NO: 2879994 - RNA, 18 nt, Human
uuuuauacucuuucugua

SEQ ID NO: 2879995 - RNA, 13 nt, Human
uuuuauacucuuu

SEQ ID NO: 2879996 - RNA, 18 nt, Human
uuuuauuuuuagacagag

SEQ ID NO: 2879997 - RNA, 14 nt, Human
uuuuauuuuguuuu

SEQ ID NO: 2879998 - RNA, 14 nt, Human
uuuuauuuuuuagu

SEQ ID NO: 2879999 - RNA, 22 nt, Human
uuuuaucuauucugagaaaaca

SEQ ID NO: 2880000 - RNA, 14 nt, Human
uuuuaucuguuuaa

SEQ ID NO: 2880001 - RNA, 21 nt, Human
uuuuaugaagugcgugaaugu

SEQ ID NO: 2880002 - RNA, 19 nt, Human
uuuuaucuuucgugauaaa

SEQ ID NO: 2880003 - RNA, 11 nt, Human
uuuuaugagaa

SEQ ID NO: 2880004 - RNA, 12 nt, Human
uuuuaugagaaa

SEQ ID NO: 2880005 - RNA, 12 nt, Human
uuuuauuuugaa

SEQ ID NO: 2880006 - RNA, 20 nt, Human
uuuuauuuugaaaagcuucu

SEQ ID NO: 2880007 - RNA, 13 nt, Human
uuuuaugagaaau

SEQ ID NO: 2880008 - RNA, 14 nt, Human
uuuuaugagaaaug

SEQ ID NO: 2880009 - RNA, 15 nt, Human
uuuuaugagaaaugu

SEQ ID NO: 2880010 - RNA, 16 nt, Human
uuuuaugagaaaugua

SEQ ID NO: 2880011 - RNA, 12 nt, Human
uuuuaugagaug

SEQ ID NO: 2880012 - RNA, 16 nt, Human
uuuuaaagguggauuu

SEQ ID NO: 2880013 - RNA, 16 nt, Human
uuuuaaaggcuuuuug

SEQ ID NO: 2880014 - RNA, 20 nt, Human
uuuuaaagaucuguaaguaa

SEQ ID NO: 2880015 - RNA, 18 nt, Human
uuuuaaagguggauuuug

SEQ ID NO: 2880016 - RNA, 13 nt, Human
uuuuaaaguguuu

SEQ ID NO: 2880017 - RNA, 18 nt, Human
uuuuaaaguguuucagcu

SEQ ID NO: 2880018 - RNA, 11 nt, Human
uuuuaaauaaa

SEQ ID NO: 2880019 - RNA, 13 nt, Human
uuuuaaauaaacu

SEQ ID NO: 2880020 - RNA, 14 nt, Human
uuuuaaauaaacuu

SEQ ID NO: 2880021 - RNA, 19 nt, Human
uuuuacaaaaaagaaaaga

SEQ ID NO: 2880022 - RNA, 11 nt, Human
uuuuacaaagg

SEQ ID NO: 2880023 - RNA, 17 nt, Human
uuuuacaauaaaaucuu

SEQ ID NO: 2880024 - RNA, 17 nt, Human
uuuuacaagaaguuuau

SEQ ID NO: 2880025 - RNA, 14 nt, Human
uuuuauacaaaccu

SEQ ID NO: 2880026 - RNA, 14 nt, Human
uuuuauacaaaaua

SEQ ID NO: 2880027 - RNA, 22 nt, Human
uuuuacuaccaaugccaagaua

SEQ ID NO: 2880028 - RNA, 22 nt, Human
uuuuacacagaaacacugccuu

SEQ ID NO: 2880029 - RNA, 19 nt, Human
uuuuacacauuagauuuua

SEQ ID NO: 2880030 - RNA, 21 nt, Human
uuuuacacagaaacacugccu

SEQ ID NO: 2880031 - RNA, 18 nt, Human
uuuuacacagaaacacug

SEQ ID NO: 2880032 - RNA, 17 nt, Human
uuuuacacagaaacacu

SEQ ID NO: 2880033 - RNA, 15 nt, Human
uuuuacacagaaaca

SEQ ID NO: 2880034 - RNA, 22 nt, Human
uuuuacccuaaugucuucauaa

SEQ ID NO: 2880035 - RNA, 19 nt, Human
uuuuaccugucacauugca

SEQ ID NO: 2880036 - RNA, 20 nt, Human
uuuuaccugucacauugcau

SEQ ID NO: 2880037 - RNA, 21 nt, Human
uuuuaccugucacauugcauu

SEQ ID NO: 2880038 - RNA, 23 nt, Human
uuuuaccugucacauugcauucu

SEQ ID NO: 2880039 - RNA, 17 nt, Human
uuuccaacguuuggaag

SEQ ID NO: 2880040 - RNA, 19 nt, Human
uuuccacaaaaucugucca

SEQ ID NO: 2880041 - RNA, 15 nt, Human
uuuccacaugcucug

SEQ ID NO: 2880042 - RNA, 17 nt, Human
uuucccuugcuuccccu

SEQ ID NO: 2880043 - RNA, 19 nt, Human
uuucccuugcuuuucccuc

SEQ ID NO: 2880044 - RNA, 20 nt, Human
uuucccuugcuuuucccucu

SEQ ID NO: 2880045 - RNA, 22 nt, Human
uuuccguaauaacacccuuccu

SEQ ID NO: 2880046 - RNA, 16 nt, Human
uuuccaauuauuugac

SEQ ID NO: 2880047 - RNA, 16 nt, Human
uuuccguuugcuuuug

SEQ ID NO: 2880048 - RNA, 12 nt, Human
uuugaguucuac

SEQ ID NO: 2880049 - RNA, 21 nt, Human
uuugcacuaaaucagagacaa

SEQ ID NO: 2880050 - RNA, 20 nt, Human
uuugcacuaaaucagagaca

SEQ ID NO: 2880051 - RNA, 19 nt, Human
uuugcacuaaaucagagac

SEQ ID NO: 2880052 - RNA, 14 nt, Human
uuugcacuaaauca

SEQ ID NO: 2880053 - RNA, 17 nt, Human
uuugcacgacgcccucu

SEQ ID NO: 2880054 - RNA, 19 nt, Human
uuugcacgacgcccucucc

SEQ ID NO: 2880055 - RNA, 20 nt, Human
uuugcacgacgcccucuccc

SEQ ID NO: 2880056 - RNA, 21 nt, Human
uuugcacgacgcccucucccc

SEQ ID NO: 2880057 - RNA, 18 nt, Human
uuugagugugugugugca

SEQ ID NO: 2880058 - RNA, 20 nt, Human
uuugcacccacugaaaggaa

SEQ ID NO: 2880059 - RNA, 11 nt, Human
uuuggaaaucc

SEQ ID NO: 2880060 - RNA, 19 nt, Human
uuugcauugaacacaaacu

SEQ ID NO: 2880061 - RNA, 22 nt, Human
uuugcauuaaauucacaaacuu

SEQ ID NO: 2880062 - RNA, 21 nt, Human
uuugcauuaaauucacaaacu

SEQ ID NO: 2880063 - RNA, 18 nt, Human
uuugcauuaaauucacaa

SEQ ID NO: 2880064 - RNA, 17 nt, Human
uuugcauuaaauucaca

SEQ ID NO: 2880065 - RNA, 14 nt, Human
uuugcagggcagcc

SEQ ID NO: 2880066 - RNA, 16 nt, Human
uuugcagggcagcccc

SEQ ID NO: 2880067 - RNA, 20 nt, Human
uuugcacuggaguucuaugc

SEQ ID NO: 2880068 - RNA, 16 nt, Human
uuugcaggucuuuaaa

SEQ ID NO: 2880069 - RNA, 22 nt, Human
uuugcaggucuuuaaaucauuu

SEQ ID NO: 2880070 - RNA, 22 nt, Human
uuugguauuacacuguauuugu

SEQ ID NO: 2880071 - RNA, 20 nt, Human
uuuggaccaauagcccacag

SEQ ID NO: 2880072 - RNA, 12 nt, Human
uuugguauuugc

SEQ ID NO: 2880073 - RNA, 16 nt, Human
uuuguauuuuguguga

SEQ ID NO: 2880074 - RNA, 23 nt, Human
uuuguauuuugugugaccaacug

SEQ ID NO: 2880075 - RNA, 13 nt, Human
uuuguguauuuaa

SEQ ID NO: 2880076 - RNA, 14 nt, Human
uuuguauuuuuagu

SEQ ID NO: 2880077 - RNA, 20 nt, Human
uuuguguauuuaacagggag

SEQ ID NO: 2880078 - RNA, 20 nt, Human
uuugugugaccaacuguguu

SEQ ID NO: 2880079 - RNA, 21 nt, Human
uuugugugaccaacuguguug

SEQ ID NO: 2880080 - RNA, 13 nt, Human
uuugugugucuua

SEQ ID NO: 2880081 - RNA, 14 nt, Human
uuuguguguuauac

SEQ ID NO: 2880082 - RNA, 22 nt, Human
uuugugucaaugggcaaugaca

SEQ ID NO: 2880083 - RNA, 9 nt, Human
uuuguuacu

SEQ ID NO: 2880084 - RNA, 15 nt, Human
uuuguuaguuccugu

SEQ ID NO: 2880085 - RNA, 21 nt, Human
uuuguuaguuccuguaugaaa

SEQ ID NO: 2880086 - RNA, 17 nt, Human
uuuguuauaccauuucc

SEQ ID NO: 2880087 - RNA, 16 nt, Human
uuuguuauuguuuugu

SEQ ID NO: 2880088 - RNA, 18 nt, Human
uuuguguguugucuugaa

SEQ ID NO: 2880089 - RNA, 15 nt, Human
uuuguguguugucuu

SEQ ID NO: 2880090 - RNA, 17 nt, Human
uuuguguguugucuuga

SEQ ID NO: 2880091 - RNA, 24 nt, Human
uuuguuaccuccaacagaacuaaa

SEQ ID NO: 2880092 - RNA, 12 nt, Human
uuuguuacuguu

SEQ ID NO: 2880093 - RNA, 13 nt, Human
uuuguuacuguuc

SEQ ID NO: 2880094 - RNA, 14 nt, Human
uuuguuacuguucu

SEQ ID NO: 2880095 - RNA, 15 nt, Human
uuuguuacuguucuu

SEQ ID NO: 2880096 - RNA, 16 nt, Human
uuuguuacuguucuug

SEQ ID NO: 2880097 - RNA, 17 nt, Human
uuuguuacuguucuugc

SEQ ID NO: 2880098 - RNA, 18 nt, Human
uuuguuacuguucuugcu

SEQ ID NO: 2880099 - RNA, 19 nt, Human
uuuguuacuguucuugcug

SEQ ID NO: 2880100 - RNA, 20 nt, Human
uuuguuacuguucuugcugc

SEQ ID NO: 2880101 - RNA, 21 nt, Human
uuuguuacuguucuugcugcu

SEQ ID NO: 2880102 - RNA, 22 nt, Human
uuuguuacuguucuugcugcua

SEQ ID NO: 2880103 - RNA, 23 nt, Human
uuuguuacuguucuugcugcuag

SEQ ID NO: 2880104 - RNA, 15 nt, Human
uuuguuagauagcug

SEQ ID NO: 2880105 - RNA, 21 nt, Human
uuuguuagauagcugcaugug

SEQ ID NO: 2880106 - RNA, 14 nt, Human
uuuguugcuguuuu

SEQ ID NO: 2880107 - RNA, 20 nt, Human
uuuguuauuuucaguauuuu

SEQ ID NO: 2880108 - RNA, 12 nt, Human
uuuguuauuuug

SEQ ID NO: 2880109 - RNA, 23 nt, Human
uuuuaaacaaaauagaagcugua

SEQ ID NO: 2880110 - RNA, 13 nt, Human
uuuuaaacaaaca

SEQ ID NO: 2880111 - RNA, 13 nt, Human
uuuuaaacaguga

SEQ ID NO: 2880112 - RNA, 20 nt, Human
uuuuaaacaaaauagaagcu

SEQ ID NO: 2880113 - RNA, 20 nt, Human
uuuuaaacccuauugguaaa

SEQ ID NO: 2880114 - RNA, 19 nt, Human
uuuuaaacagugagccuga

SEQ ID NO: 2880115 - RNA, 19 nt, Human
uuuuaaacuacagguaguu

SEQ ID NO: 2880116 - RNA, 12 nt, Human
uuuuaaacuaga

SEQ ID NO: 2880117 - RNA, 13 nt, Human
uuuuaaacuagau

SEQ ID NO: 2880118 - RNA, 15 nt, Human
uuuuaaacuagauga

SEQ ID NO: 2880119 - RNA, 17 nt, Human
uuuuaaacuagaugacc

SEQ ID NO: 2880120 - RNA, 20 nt, Human
uuuuaaacuagaugaccuca

SEQ ID NO: 2880121 - RNA, 12 nt, Human
uuuuaaacucau

SEQ ID NO: 2880122 - RNA, 19 nt, Human
uuuuaaaaguuucaaugug

SEQ ID NO: 2880123 - RNA, 21 nt, Human
uuuuaaaaguuucaaugugau

SEQ ID NO: 2880124 - RNA, 22 nt, Human
uuuuaaaaguuucaaugugauu

SEQ ID NO: 2880125 - RNA, 15 nt, Human
uuuguuguaaaaaga

SEQ ID NO: 2880126 - RNA, 18 nt, Human
uuuuaaaaguuucaaugu

SEQ ID NO: 2880127 - RNA, 16 nt, Human
uuuuaaaaucaacuua

SEQ ID NO: 2880128 - RNA, 14 nt, Human
uuuuucauuuucca

SEQ ID NO: 2880129 - RNA, 16 nt, Human
uuuuucauuuuccaau

SEQ ID NO: 2880130 - RNA, 17 nt, Human
uuuuucauuuuccaaua

SEQ ID NO: 2880131 - RNA, 22 nt, Human
uuuuucauuuauuguuuaugua

SEQ ID NO: 2880132 - RNA, 23 nt, Human
uuuuucauucaucccauuaauca

SEQ ID NO: 2880133 - RNA, 14 nt, Human
uuuuuccauaguuu

SEQ ID NO: 2880134 - RNA, 20 nt, Human
uuuuuccauaguuuugauga

SEQ ID NO: 2880135 - RNA, 14 nt, Human
uuuuuccaacugug

SEQ ID NO: 2880136 - RNA, 20 nt, Human
uuuuuccaauuuuagaaaau

SEQ ID NO: 2880137 - RNA, 14 nt, Human
uuuuucaguuccaa

SEQ ID NO: 2880138 - RNA, 17 nt, Human
uuuuucaguuccaagaa

SEQ ID NO: 2880139 - RNA, 21 nt, Human
uuuuucaguuccaagaaagau

SEQ ID NO: 2880140 - RNA, 13 nt, Human
uuuuucauauugu

SEQ ID NO: 2880141 - RNA, 19 nt, Human
uuuuucauauuuucuaaag

SEQ ID NO: 2880142 - RNA, 12 nt, Human
uuuuucaucccc

SEQ ID NO: 2880143 - RNA, 18 nt, Human
uuuuuaaguuaauagauu

SEQ ID NO: 2880144 - RNA, 12 nt, Human
uuuuuaauagaa

SEQ ID NO: 2880145 - RNA, 13 nt, Human
uuuuuaauagaac

SEQ ID NO: 2880146 - RNA, 23 nt, Human
uuuuuaauagucauuccaaauau

SEQ ID NO: 2880147 - RNA, 13 nt, Human
uuuuuaaucauga

SEQ ID NO: 2880148 - RNA, 17 nt, Human
uuuuuaaucaugaaauu

SEQ ID NO: 2880149 - RNA, 12 nt, Human
uuuuuaauaaac

SEQ ID NO: 2880150 - RNA, 15 nt, Human
uuuuuaauaaacuac

SEQ ID NO: 2880151 - RNA, 17 nt, Human
uuuuuaauaaagacagg

SEQ ID NO: 2880152 - RNA, 20 nt, Human
uuuuuaauaaagacaggguu

SEQ ID NO: 2880153 - RNA, 20 nt, Human
uuuuucaggagcgcaagaua

SEQ ID NO: 2880154 - RNA, 22 nt, Human
uuuuucacauaaagggaacaaa

SEQ ID NO: 2880155 - RNA, 10 nt, Human
uuuuuaaugg

SEQ ID NO: 2880156 - RNA, 19 nt, Human
uuuuuaauggcagcagaaa

SEQ ID NO: 2880157 - RNA, 22 nt, Human
uuuuuaauggcagcagaaaacu

SEQ ID NO: 2880158 - RNA, 15 nt, Human
uuuuuaaucaugaaa

SEQ ID NO: 2880159 - RNA, 16 nt, Human
uuuuuaaucuagacaa

SEQ ID NO: 2880160 - RNA, 22 nt, Human
uuuuuaaucuagacaauauaca

SEQ ID NO: 2880161 - RNA, 22 nt, Human
uuuuuaacucuacuguguaaua

SEQ ID NO: 2880162 - RNA, 16 nt, Human
uuuuuaaauuuuguaa

SEQ ID NO: 2880163 - RNA, 19 nt, Human
uuuuuaaauuuuguaauga

SEQ ID NO: 2880164 - RNA, 23 nt, Human
uuuuuaaauguauacuauaguac

SEQ ID NO: 2880165 - RNA, 13 nt, Human
uuuuuaaauuguu

SEQ ID NO: 2880166 - RNA, 15 nt, Human
uuuuuaaauguauac

SEQ ID NO: 2880167 - RNA, 22 nt, Human
uuuugacuagggauucaggcug

SEQ ID NO: 2880168 - RNA, 14 nt, Human
uuuugacuuaaugu

SEQ ID NO: 2880169 - RNA, 15 nt, Human
uuuugacuuaaugug

SEQ ID NO: 2880170 - RNA, 17 nt, Human
uuuugacuuaaugugau

SEQ ID NO: 2880171 - RNA, 18 nt, Human
uuuugacuuaaugugauu

SEQ ID NO: 2880172 - RNA, 20 nt, Human
uuuugaccuucauuucaugu

SEQ ID NO: 2880173 - RNA, 21 nt, Human
uuuugaccuucauuucaugua

SEQ ID NO: 2880174 - RNA, 24 nt, Human
uuuugacaguguugaaaauguuca

SEQ ID NO: 2880175 - RNA, 23 nt, Human
uuuugacaguguugaaaauguuc

SEQ ID NO: 2880176 - RNA, 19 nt, Human
uuuugacaguguugaaaau

SEQ ID NO: 2880177 - RNA, 21 nt, Human
uuuugaauaccauuaaaacug

SEQ ID NO: 2880178 - RNA, 14 nt, Human
uuuugaaggaauac

SEQ ID NO: 2880179 - RNA, 14 nt, Human
uuuugaaggcaaaa

SEQ ID NO: 2880180 - RNA, 13 nt, Human
uuuugaagggagg

SEQ ID NO: 2880181 - RNA, 13 nt, Human
uuuugaaggcaaa

SEQ ID NO: 2880182 - RNA, 11 nt, Human
uuuugaaguuu

SEQ ID NO: 2880183 - RNA, 15 nt, Human
uuuugaaguuuacau

SEQ ID NO: 2880184 - RNA, 16 nt, Human
uuuugaaguuuacauu

SEQ ID NO: 2880185 - RNA, 17 nt, Human
uuuugaaguuuacauuu

SEQ ID NO: 2880186 - RNA, 18 nt, Human
uuuugaaguuuacauuuu

SEQ ID NO: 2880187 - RNA, 19 nt, Human
uuuugaaguaguuuguaua

SEQ ID NO: 2880188 - RNA, 13 nt, Human
uuuugaagucuug

SEQ ID NO: 2880189 - RNA, 15 nt, Human
uuuugaagucuugua

SEQ ID NO: 2880190 - RNA, 16 nt, Human
uuuugaagucuuguau

SEQ ID NO: 2880191 - RNA, 21 nt, Human
uuuuuuuaauagucauuccaa

SEQ ID NO: 2880192 - RNA, 18 nt, Human
uuuuuuguuuuacaaugu

SEQ ID NO: 2880193 - RNA, 16 nt, Human
uuuuuuguuuguuucu

SEQ ID NO: 2880194 - RNA, 13 nt, Human
uuuuuuguuuguu

SEQ ID NO: 2880195 - RNA, 15 nt, Human
uuuuuuccuguuucu

SEQ ID NO: 2880196 - RNA, 19 nt, Human
uuuuuuccuguuucugaaa

SEQ ID NO: 2880197 - RNA, 13 nt, Human
uuuuuuccacuua

SEQ ID NO: 2880198 - RNA, 22 nt, Human
uuuuuuccaucuuuacaaaacu

SEQ ID NO: 2880199 - RNA, 13 nt, Human
uuuuuuccaucuu

SEQ ID NO: 2880200 - RNA, 11 nt, Human
uuuuuuugcca

SEQ ID NO: 2880201 - RNA, 10 nt, Human
uuuuuuuggc

SEQ ID NO: 2880202 - RNA, 13 nt, Human
uuuuuuuccuuuu

SEQ ID NO: 2880203 - RNA, 12 nt, Human
uuuuuuucuuua

SEQ ID NO: 2880204 - RNA, 10 nt, Human
uuuuuuucca

SEQ ID NO: 2880205 - RNA, 12 nt, Human
uuuuuuuacauu

SEQ ID NO: 2880206 - RNA, 10 nt, Human
uuuuuuuccu

SEQ ID NO: 2880207 - RNA, 13 nt, Human
uuuuuuuccagca

SEQ ID NO: 2880208 - RNA, 12 nt, Human
uuuuuuuccauu

SEQ ID NO: 2880209 - RNA, 12 nt, Human
uuuuuuucaaug

SEQ ID NO: 2880210 - RNA, 13 nt, Human
uuuuuuucaaugu

SEQ ID NO: 2880211 - RNA, 14 nt, Human
uuuuuuucaaugug

SEQ ID NO: 2880212 - RNA, 12 nt, Human
uuuuuuaaucua

SEQ ID NO: 2880213 - RNA, 12 nt, Human
uuuuuuaauuua

SEQ ID NO: 2880214 - RNA, 13 nt, Human
uuuuuuacagauu

SEQ ID NO: 2880215 - RNA, 12 nt, Human
uuuuuuacauuu

SEQ ID NO: 2880216 - RNA, 11 nt, Human
uuuuuuacauu

SEQ ID NO: 2880217 - RNA, 18 nt, Human
uuuuuucaaaauagaaaa

SEQ ID NO: 2880218 - RNA, 19 nt, Human
uuuuuuauugcuaguauuu

SEQ ID NO: 2880219 - RNA, 12 nt, Human
uuuuuucaaugu

SEQ ID NO: 2880220 - RNA, 13 nt, Human
uuuuuucaaugug

SEQ ID NO: 2880221 - RNA, 13 nt, Human
uuuuuucauuuau

SEQ ID NO: 2880222 - RNA, 12 nt, Human
uuuuuuaagauu

SEQ ID NO: 2880223 - RNA, 17 nt, Human
uuuuuuaaguauuuaua

SEQ ID NO: 2880224 - RNA, 11 nt, Human
uuuuuuaagau

SEQ ID NO: 2880225 - RNA, 16 nt, Human
uuuuuuaaacaaacau

SEQ ID NO: 2880226 - RNA, 13 nt, Human
uuuuuuaaaagaa

SEQ ID NO: 2880227 - RNA, 15 nt, Human
uuuuuuaaauaaacu

SEQ ID NO: 2880228 - RNA, 16 nt, Human
uuuuuuaaauaaacuu

SEQ ID NO: 2880229 - RNA, 13 nt, Human
uuuuuccaucuuu

SEQ ID NO: 2880230 - RNA, 14 nt, Human
uuuuuuuuaaacaa

SEQ ID NO: 2880231 - RNA, 13 nt, Human
uuuuuuuugaaaa

SEQ ID NO: 2880232 - RNA, 14 nt, Human
uuuuuuuuguuugu

SEQ ID NO: 2880233 - RNA, 13 nt, Human
uuuuuuuuuaaac

SEQ ID NO: 2880234 - RNA, 12 nt, Human
uuuaacauuauu

SEQ ID NO: 2880235 - RNA, 23 nt, Human
uuuaacaugaacacccuuagaaa

SEQ ID NO: 2880236 - RNA, 21 nt, Human
uuuaacgugggauucagagaa

SEQ ID NO: 2880237 - RNA, 17 nt, Human
uuuaaccucuuuaagua

SEQ ID NO: 2880238 - RNA, 14 nt, Human
uuuaacuacccuua

SEQ ID NO: 2880239 - RNA, 17 nt, Human
uuuaacuacccuuaauu

SEQ ID NO: 2880240 - RNA, 18 nt, Human
uuuaacuacccuuaauua

SEQ ID NO: 2880241 - RNA, 17 nt, Human
uuuaacucuacugugua

SEQ ID NO: 2880242 - RNA, 18 nt, Human
uuuaacucuacuguguaa

SEQ ID NO: 2880243 - RNA, 21 nt, Human
uuuaacucuacuguguaauau

SEQ ID NO: 2880244 - RNA, 18 nt, Human
uuuaacuccccuguuuca

SEQ ID NO: 2880245 - RNA, 16 nt, Human
uuuaacuaugaacuga

SEQ ID NO: 2880246 - RNA, 20 nt, Human
uuuaacuaugaacugaaggc

SEQ ID NO: 2880247 - RNA, 13 nt, Human
uuuaacuggugca

SEQ ID NO: 2880248 - RNA, 19 nt, Human
uuuaacuggugcacuuugu

SEQ ID NO: 2880249 - RNA, 22 nt, Human
uuuaacuggugcacuuuguaaa

SEQ ID NO: 2880250 - RNA, 23 nt, Human
uuuaacuggugcacuuuguaaau

SEQ ID NO: 2880251 - RNA, 19 nt, Human
uuuaacugaagauguugag

SEQ ID NO: 2880252 - RNA, 14 nt, Human
uuuaacugagaaau

SEQ ID NO: 2880253 - RNA, 22 nt, Human
uuuaaauuuuacccuuuagacu

SEQ ID NO: 2880254 - RNA, 23 nt, Human
uuuaacaacuaugauuuggaaaa

SEQ ID NO: 2880255 - RNA, 12 nt, Human
uuuaacaagaag

SEQ ID NO: 2880256 - RNA, 13 nt, Human
uuuaacaagaaga

SEQ ID NO: 2880257 - RNA, 15 nt, Human
uuuaacaagaagaug

SEQ ID NO: 2880258 - RNA, 20 nt, Human
uuuaacaagaagaugaaugg

SEQ ID NO: 2880259 - RNA, 21 nt, Human
uuuaacaagaagaugaauggc

SEQ ID NO: 2880260 - RNA, 18 nt, Human
uuguuuggagacagaguc

SEQ ID NO: 2880261 - RNA, 18 nt, Human
uuuaaauuuuacccuuua

SEQ ID NO: 2880262 - RNA, 15 nt, Human
uuuaaauuuuguaau

SEQ ID NO: 2880263 - RNA, 15 nt, Human
uuuaauaauaaucua

SEQ ID NO: 2880264 - RNA, 16 nt, Human
uuuaauaauaaucuag

SEQ ID NO: 2880265 - RNA, 23 nt, Human
uuuaauaacauuaccuuacugug

SEQ ID NO: 2880266 - RNA, 15 nt, Human
uuuaauaacauuacc

SEQ ID NO: 2880267 - RNA, 18 nt, Human
uuuaauaacauuaccuua

SEQ ID NO: 2880268 - RNA, 20 nt, Human
uuuaauaacauuaccuuacu

SEQ ID NO: 2880269 - RNA, 22 nt, Human
uuuaauaacauuaccuuacugu

SEQ ID NO: 2880270 - RNA, 12 nt, Human
uuuaauaacauu

SEQ ID NO: 2880271 - RNA, 14 nt, Human
uuuaauaacaauug

SEQ ID NO: 2880272 - RNA, 20 nt, Human
uuuaauaaaauaauucuaaa

SEQ ID NO: 2880273 - RNA, 17 nt, Human
uuuaaguuaauagauuu

SEQ ID NO: 2880274 - RNA, 16 nt, Human
uuuaauaaaauaauuc

SEQ ID NO: 2880275 - RNA, 17 nt, Human
uuuaauaaaauaauucu

SEQ ID NO: 2880276 - RNA, 19 nt, Human
uuuaauaaacuacucuuug

SEQ ID NO: 2880277 - RNA, 20 nt, Human
uuuaauaaacuacucuuuga

SEQ ID NO: 2880278 - RNA, 21 nt, Human
uuuaauaaacuacucuuugau

SEQ ID NO: 2880279 - RNA, 15 nt, Human
uuuaaguuguuugca

SEQ ID NO: 2880280 - RNA, 14 nt, Human
uuuaaguuguuugc

SEQ ID NO: 2880281 - RNA, 21 nt, Human
uuuaaguuguuugcaugugaa

SEQ ID NO: 2880282 - RNA, 22 nt, Human
uuuaaguuucaaacuuacuauu

SEQ ID NO: 2880283 - RNA, 19 nt, Human
uuuaagaaaagcccugaga

SEQ ID NO: 2880284 - RNA, 12 nt, Human
uuuaagaaaagu

SEQ ID NO: 2880285 - RNA, 15 nt, Human
uuuaagaaaaguauu

SEQ ID NO: 2880286 - RNA, 16 nt, Human
uuuaagaaaaguauuu

SEQ ID NO: 2880287 - RNA, 17 nt, Human
uuuaagaaaaguauuuu

SEQ ID NO: 2880288 - RNA, 19 nt, Human
uuuaagaaaaguauuuuga

SEQ ID NO: 2880289 - RNA, 20 nt, Human
uuuaagaaaaguauuuugaa

SEQ ID NO: 2880290 - RNA, 21 nt, Human
uuuaagaaaaguauuuugaag

SEQ ID NO: 2880291 - RNA, 22 nt, Human
uuuaagaaaaguauuuugaagu

SEQ ID NO: 2880292 - RNA, 23 nt, Human
uuuaagaaaaguauuuugaaguu

SEQ ID NO: 2880293 - RNA, 22 nt, Human
uuuaagacagucccaucaaaac

SEQ ID NO: 2880294 - RNA, 19 nt, Human
uuuaagacauuuuuggaag

SEQ ID NO: 2880295 - RNA, 19 nt, Human
uuuaacuuuuuuucuucua

SEQ ID NO: 2880296 - RNA, 18 nt, Human
uuuaagaaaaaauaacac

SEQ ID NO: 2880297 - RNA, 22 nt, Human
uuuaagaaaaaauaacacacau

SEQ ID NO: 2880298 - RNA, 14 nt, Human
uuuaacuucuuucu

SEQ ID NO: 2880299 - RNA, 16 nt, Human
uuuaccaaacagcaaa

SEQ ID NO: 2880300 - RNA, 13 nt, Human
uuuacauuuuuau

SEQ ID NO: 2880301 - RNA, 19 nt, Human
uuuacauuuuuauuuauga

SEQ ID NO: 2880302 - RNA, 20 nt, Human
uuuacauuuuuauuuaugaa

SEQ ID NO: 2880303 - RNA, 22 nt, Human
uuuacauuuuuauuuaugaagu

SEQ ID NO: 2880304 - RNA, 16 nt, Human
uuuacauuguugagcu

SEQ ID NO: 2880305 - RNA, 10 nt, Human
uuuacauuua

SEQ ID NO: 2880306 - RNA, 12 nt, Human
uuuacauuuaaa

SEQ ID NO: 2880307 - RNA, 16 nt, Human
uuuacauuuaaagcau

SEQ ID NO: 2880308 - RNA, 17 nt, Human
uuuacauuuaaagcauu

SEQ ID NO: 2880309 - RNA, 18 nt, Human
uuuacauuuaaagcauug

SEQ ID NO: 2880310 - RNA, 20 nt, Human
uuuacauuuaaagcauugcu

SEQ ID NO: 2880311 - RNA, 20 nt, Human
uuuacauuguaaauaguauu

SEQ ID NO: 2880312 - RNA, 15 nt, Human
uuuacagcuguguua

SEQ ID NO: 2880313 - RNA, 16 nt, Human
uuuacagcuuuacaca

SEQ ID NO: 2880314 - RNA, 18 nt, Human
uuuacagcuuuacacaca

SEQ ID NO: 2880315 - RNA, 19 nt, Human
uuuacagcuuuacacacac

SEQ ID NO: 2880316 - RNA, 16 nt, Human
uuuacagcugccugca

SEQ ID NO: 2880317 - RNA, 13 nt, Human
uuuacagaaaaag

SEQ ID NO: 2880318 - RNA, 16 nt, Human
uuuacagaaaaaucuu

SEQ ID NO: 2880319 - RNA, 17 nt, Human
uuuacagaaaaaucuug

SEQ ID NO: 2880320 - RNA, 15 nt, Human
uuuacagcugccugc

SEQ ID NO: 2880321 - RNA, 15 nt, Human
uuuacaguccuucaa

SEQ ID NO: 2880322 - RNA, 16 nt, Human
uuuacaguccuucaaa

SEQ ID NO: 2880323 - RNA, 13 nt, Human
uuuacaggcccug

SEQ ID NO: 2880324 - RNA, 19 nt, Human
uuuacaggcccugcuccug

SEQ ID NO: 2880325 - RNA, 22 nt, Human
uuuacaggcccugcuccugcag

SEQ ID NO: 2880326 - RNA, 19 nt, Human
uuuaauagcuauggaauca

SEQ ID NO: 2880327 - RNA, 17 nt, Human
uuuaauacaguuuauuu

SEQ ID NO: 2880328 - RNA, 17 nt, Human
uuuaauagaaccauguu

SEQ ID NO: 2880329 - RNA, 20 nt, Human
uuuacacagaaacacugccu

SEQ ID NO: 2880330 - RNA, 19 nt, Human
uuuacacagaaacacugcc

SEQ ID NO: 2880331 - RNA, 15 nt, Human
uuuacacagaaacac

SEQ ID NO: 2880332 - RNA, 14 nt, Human
uuuacacagaaaca

SEQ ID NO: 2880333 - RNA, 12 nt, Human
uuuacacagaaa

SEQ ID NO: 2880334 - RNA, 14 nt, Human
uuuacacaauucuu

SEQ ID NO: 2880335 - RNA, 15 nt, Human
uuuacacaauucuua

SEQ ID NO: 2880336 - RNA, 17 nt, Human
uuuaauagucauuccaa

SEQ ID NO: 2880337 - RNA, 20 nt, Human
uuuaauagucauuccaaaua

SEQ ID NO: 2880338 - RNA, 11 nt, Human
uuuacagaaaa

SEQ ID NO: 2880339 - RNA, 12 nt, Human
uuuacagaaaaa

SEQ ID NO: 2880340 - RNA, 18 nt, Human
uuuacacucggcuuugga

SEQ ID NO: 2880341 - RNA, 11 nt, Human
uuuacacugua

SEQ ID NO: 2880342 - RNA, 13 nt, Human
uuuacacuguacc

SEQ ID NO: 2880343 - RNA, 14 nt, Human
uuuacacuguacca

SEQ ID NO: 2880344 - RNA, 20 nt, Human
uuuacaccgacuagccagga

SEQ ID NO: 2880345 - RNA, 12 nt, Human
uuuagacagagu

SEQ ID NO: 2880346 - RNA, 14 nt, Human
uuuagacaccuuca

SEQ ID NO: 2880347 - RNA, 16 nt, Human
uuuagacaccuucauu

SEQ ID NO: 2880348 - RNA, 19 nt, Human
uuuagacaccuucauuuug

SEQ ID NO: 2880349 - RNA, 14 nt, Human
uuuaguuuacucaa

SEQ ID NO: 2880350 - RNA, 13 nt, Human
uuuaguuuucucu

SEQ ID NO: 2880351 - RNA, 15 nt, Human
uuuaguuuucucuua

SEQ ID NO: 2880352 - RNA, 16 nt, Human
uuuagaaagcugacau

SEQ ID NO: 2880353 - RNA, 16 nt, Human
uuuacuuuaaacuugu

SEQ ID NO: 2880354 - RNA, 18 nt, Human
uuuacuuuaaacuugucu

SEQ ID NO: 2880355 - RNA, 20 nt, Human
uuuacuuuagaagcacagua

SEQ ID NO: 2880356 - RNA, 13 nt, Human
uuuauggccucag

SEQ ID NO: 2880357 - RNA, 12 nt, Human
uuuauggccuca

SEQ ID NO: 2880358 - RNA, 22 nt, Human
uuuauggccacauuuaauaucu

SEQ ID NO: 2880359 - RNA, 22 nt, Human
uuuauggccucagcugccucac

SEQ ID NO: 2880360 - RNA, 12 nt, Human
uuuauacaaaau

SEQ ID NO: 2880361 - RNA, 16 nt, Human
uuuauaauuuucugaa

SEQ ID NO: 2880362 - RNA, 13 nt, Human
uuuauacaaaaua

SEQ ID NO: 2880363 - RNA, 13 nt, Human
uuuauaagguuuu

SEQ ID NO: 2880364 - RNA, 17 nt, Human
uuuauaagucauuguau

SEQ ID NO: 2880365 - RNA, 19 nt, Human
uuuauaagucauuguaugu

SEQ ID NO: 2880366 - RNA, 16 nt, Human
uuuauaaguucacaaa

SEQ ID NO: 2880367 - RNA, 18 nt, Human
uuuauaaguucacaaaau

SEQ ID NO: 2880368 - RNA, 18 nt, Human
uuuauaauagcaacuuuu

SEQ ID NO: 2880369 - RNA, 14 nt, Human
uuuauaauucagua

SEQ ID NO: 2880370 - RNA, 18 nt, Human
uuuauaauucaguauguu

SEQ ID NO: 2880371 - RNA, 19 nt, Human
uuuauaauucaguauguuu

SEQ ID NO: 2880372 - RNA, 22 nt, Human
uuuauaagccaguguugccuaa

SEQ ID NO: 2880373 - RNA, 22 nt, Human
uuuauaacucaucauaaaauaa

SEQ ID NO: 2880374 - RNA, 20 nt, Human
uuuauaacucaucauaaaau

SEQ ID NO: 2880375 - RNA, 19 nt, Human
uuuauaacucaucauaaaa

SEQ ID NO: 2880376 - RNA, 18 nt, Human
uuuauaacucaucauaaa

SEQ ID NO: 2880377 - RNA, 16 nt, Human
uuuauaacucaucaua

SEQ ID NO: 2880378 - RNA, 19 nt, Human
uuuauaacuaguccuuuac

SEQ ID NO: 2880379 - RNA, 16 nt, Human
uuuauaacuauucagu

SEQ ID NO: 2880380 - RNA, 20 nt, Human
uuuauaacuauucaguugug

SEQ ID NO: 2880381 - RNA, 21 nt, Human
uuuauaacuauucaguugugu

SEQ ID NO: 2880382 - RNA, 19 nt, Human
uuuauaaaaauaaauagaa

SEQ ID NO: 2880383 - RNA, 22 nt, Human
uuuauaaaaauaaauagaaaag

SEQ ID NO: 2880384 - RNA, 23 nt, Human
uuuauaaaaauaaauagaaaagu

SEQ ID NO: 2880385 - RNA, 16 nt, Human
uuuauaagcaaauuuc

SEQ ID NO: 2880386 - RNA, 17 nt, Human
uuuauaagcaaauuuca

SEQ ID NO: 2880387 - RNA, 23 nt, Human
uuuauaagcaaauuucaaaagac

SEQ ID NO: 2880388 - RNA, 21 nt, Human
uuuauaacucaucauaaaaua

SEQ ID NO: 2880389 - RNA, 22 nt, Human
uuuauuguuuucuauuuaugcc

SEQ ID NO: 2880390 - RNA, 14 nt, Human
uuuauuuaaaagau

SEQ ID NO: 2880391 - RNA, 15 nt, Human
uuuauuuaaaagauu

SEQ ID NO: 2880392 - RNA, 17 nt, Human
uuuauuuaaaagauuca

SEQ ID NO: 2880393 - RNA, 20 nt, Human
uuuauuuacagaugaaugua

SEQ ID NO: 2880394 - RNA, 22 nt, Human
uuuauuuaaaagauucauuuuu

SEQ ID NO: 2880395 - RNA, 14 nt, Human
uuuauuuaaagcau

SEQ ID NO: 2880396 - RNA, 15 nt, Human
uuuauuuaaagcauu

SEQ ID NO: 2880397 - RNA, 15 nt, Human
uuuauugacacagaa

SEQ ID NO: 2880398 - RNA, 14 nt, Human
uuuauugacacaga

SEQ ID NO: 2880399 - RNA, 12 nt, Human
uuuauugacaau

SEQ ID NO: 2880400 - RNA, 13 nt, Human
uuuauugacacag

SEQ ID NO: 2880401 - RNA, 12 nt, Human
uuuauugacaca

SEQ ID NO: 2880402 - RNA, 22 nt, Human
uuuauuccuauauaguuuauug

SEQ ID NO: 2880403 - RNA, 14 nt, Human
uuuauuccuuguga

SEQ ID NO: 2880404 - RNA, 14 nt, Human
uuuauucucauuug

SEQ ID NO: 2880405 - RNA, 16 nt, Human
uuuauuccuguauguu

SEQ ID NO: 2880406 - RNA, 14 nt, Human
uuuauucuucuaga

SEQ ID NO: 2880407 - RNA, 18 nt, Human
uuuauucuucuagaguuc

SEQ ID NO: 2880408 - RNA, 15 nt, Human
uuuauucuucuagag

SEQ ID NO: 2880409 - RNA, 16 nt, Human
uuuauucuucuagagu

SEQ ID NO: 2880410 - RNA, 17 nt, Human
uuucaagaaacugagga

SEQ ID NO: 2880411 - RNA, 12 nt, Human
uuucaagaauga

SEQ ID NO: 2880412 - RNA, 17 nt, Human
uuucaaggaagguucau

SEQ ID NO: 2880413 - RNA, 20 nt, Human
uuucaaggaagguucaugua

SEQ ID NO: 2880414 - RNA, 22 nt, Human
uuucaaggcacucuagauucca

SEQ ID NO: 2880415 - RNA, 20 nt, Human
uuucaaggcacucuagauuc

SEQ ID NO: 2880416 - RNA, 21 nt, Human
uuucaaggcacucuagauucc

SEQ ID NO: 2880417 - RNA, 15 nt, Human
uuucaaggcacucua

SEQ ID NO: 2880418 - RNA, 17 nt, Human
uuucaaggcacucuaga

SEQ ID NO: 2880419 - RNA, 18 nt, Human
uuucaaggcacucuagau

SEQ ID NO: 2880420 - RNA, 19 nt, Human
uuucaaggcacucuagauu

SEQ ID NO: 2880421 - RNA, 11 nt, Human
uuuauuuacua

SEQ ID NO: 2880422 - RNA, 15 nt, Human
uuucaacgcagcccu

SEQ ID NO: 2880423 - RNA, 16 nt, Human
uuucaacgcagcccug

SEQ ID NO: 2880424 - RNA, 20 nt, Human
uuucaacgcagcccugcuuu

SEQ ID NO: 2880425 - RNA, 21 nt, Human
uuucaacgcagcccugcuuug

SEQ ID NO: 2880426 - RNA, 18 nt, Human
uuucaagaaaaaauaaau

SEQ ID NO: 2880427 - RNA, 21 nt, Human
uuucaagaaaaaauaaaugga

SEQ ID NO: 2880428 - RNA, 22 nt, Human
uuucaagaaaaaauaaauggaa

SEQ ID NO: 2880429 - RNA, 19 nt, Human
uuucaagaaacugaggaau

SEQ ID NO: 2880430 - RNA, 14 nt, Human
uuucaagaaccugg

SEQ ID NO: 2880431 - RNA, 15 nt, Human
uuucaagaaccugga

SEQ ID NO: 2880432 - RNA, 16 nt, Human
uuucaagaaccuggaa

SEQ ID NO: 2880433 - RNA, 17 nt, Human
uuucaagaaccuggaaa

SEQ ID NO: 2880434 - RNA, 15 nt, Human
uuucagauauauauc

SEQ ID NO: 2880435 - RNA, 16 nt, Human
uuucagauauauauca

SEQ ID NO: 2880436 - RNA, 15 nt, Human
uuucagauguaaugu

SEQ ID NO: 2880437 - RNA, 16 nt, Human
uuucagauguaauguu

SEQ ID NO: 2880438 - RNA, 17 nt, Human
uuucagauguaauguuu

SEQ ID NO: 2880439 - RNA, 18 nt, Human
uuucagauguaauguuuu

SEQ ID NO: 2880440 - RNA, 19 nt, Human
uuucagauguaauguuuuc

SEQ ID NO: 2880441 - RNA, 22 nt, Human
uuucacaaccuucuguggcuca

SEQ ID NO: 2880442 - RNA, 16 nt, Human
uuucacaaccuucugu

SEQ ID NO: 2880443 - RNA, 14 nt, Human
uuucacaaauuugu

SEQ ID NO: 2880444 - RNA, 13 nt, Human
uuucacaacauuu

SEQ ID NO: 2880445 - RNA, 23 nt, Human
uuucaagugccuuucugcaguuu

SEQ ID NO: 2880446 - RNA, 13 nt, Human
uuucaagguucua

SEQ ID NO: 2880447 - RNA, 11 nt, Human
uuucaaguagc

SEQ ID NO: 2880448 - RNA, 16 nt, Human
uuucaaguagcuggga

SEQ ID NO: 2880449 - RNA, 14 nt, Human
uuucaagguucuaa

SEQ ID NO: 2880450 - RNA, 16 nt, Human
uuucaagguucuaacc

SEQ ID NO: 2880451 - RNA, 22 nt, Human
uuuccaacaccacagacacaca

SEQ ID NO: 2880452 - RNA, 23 nt, Human
uuuccaacaccacagacacacac

SEQ ID NO: 2880453 - RNA, 15 nt, Human
uuuccaacaccacag

SEQ ID NO: 2880454 - RNA, 18 nt, Human
uuuccaacaccacagaca

SEQ ID NO: 2880455 - RNA, 20 nt, Human
uuuccaacaccacagacaca

SEQ ID NO: 2880456 - RNA, 21 nt, Human
uuuccaacaccacagacacac

SEQ ID NO: 2880457 - RNA, 14 nt, Human
uuuccaaguaauau

SEQ ID NO: 2880458 - RNA, 18 nt, Human
uuuccaaguaauauaaug

SEQ ID NO: 2880459 - RNA, 21 nt, Human
uuuccaaguaauauaauggaa

SEQ ID NO: 2880460 - RNA, 18 nt, Human
uuucauuguaugaugugu

SEQ ID NO: 2880461 - RNA, 20 nt, Human
uuucauuguaugauguguug

SEQ ID NO: 2880462 - RNA, 23 nt, Human
uuucauuguaugauguguuguga

SEQ ID NO: 2880463 - RNA, 12 nt, Human
uuucaguuccaa

SEQ ID NO: 2880464 - RNA, 13 nt, Human
uuucaguuccaag

SEQ ID NO: 2880465 - RNA, 20 nt, Human
uuucaagcagcaucuucugg

SEQ ID NO: 2880466 - RNA, 19 nt, Human
uuucaguguaguuaauuua

SEQ ID NO: 2880467 - RNA, 19 nt, Human
uuucagugaauaugccugu

SEQ ID NO: 2880468 - RNA, 15 nt, Human
uuucagauuuugaua

SEQ ID NO: 2880469 - RNA, 18 nt, Human
uuucagauuuugauaacu

SEQ ID NO: 2880470 - RNA, 20 nt, Human
uuucagauuuuuuauuugaa

SEQ ID NO: 2880471 - RNA, 20 nt, Human
uuucagauucccagagcaaa

SEQ ID NO: 2880472 - RNA, 18 nt, Human
uuguuucaaacacaaaug

SEQ ID NO: 2880473 - RNA, 14 nt, Human
uuguuucaagaacc

SEQ ID NO: 2880474 - RNA, 18 nt, Human
uuguuucaagaaccugga

SEQ ID NO: 2880475 - RNA, 20 nt, Human
uuguuucaagaaccuggaaa

SEQ ID NO: 2880476 - RNA, 13 nt, Human
uuguuuauuucau

SEQ ID NO: 2880477 - RNA, 23 nt, Human
uuguuguuugccauacuuugucu

SEQ ID NO: 2880478 - RNA, 19 nt, Human
uuguuuauugaguuuguag

SEQ ID NO: 2880479 - RNA, 24 nt, Human
uuguuuauugaguuuguagguaaa

SEQ ID NO: 2880480 - RNA, 16 nt, Human
uuguuuccucuuccaa

SEQ ID NO: 2880481 - RNA, 19 nt, Human
uuguuuccucuuccaaagu

SEQ ID NO: 2880482 - RNA, 21 nt, Human
uuguuuccucuuccaaaguaa

SEQ ID NO: 2880483 - RNA, 11 nt, Human
uuguuucagug

SEQ ID NO: 2880484 - RNA, 12 nt, Human
uuguuucaguga

SEQ ID NO: 2880485 - RNA, 22 nt, Human
uuguuucagugaauaugccugu

SEQ ID NO: 2880486 - RNA, 15 nt, Human
uuguuugccauacuu

SEQ ID NO: 2880487 - RNA, 16 nt, Human
uuguuugccauacuuu

SEQ ID NO: 2880488 - RNA, 12 nt, Human
uuguuugcugcu

SEQ ID NO: 2880489 - RNA, 14 nt, Human
uuguuugcugcuau

SEQ ID NO: 2880490 - RNA, 13 nt, Human
uuguuucuuugug

SEQ ID NO: 2880491 - RNA, 13 nt, Human
uuguuucuuuuaa

SEQ ID NO: 2880492 - RNA, 16 nt, Human
uuguuucucccccugg

SEQ ID NO: 2880493 - RNA, 15 nt, Human
uuguuucuauacaaa

SEQ ID NO: 2880494 - RNA, 23 nt, Human
uuguuucucaaaucuuggcaaua

SEQ ID NO: 2880495 - RNA, 21 nt, Human
uuguuguuugccauacuuugu

SEQ ID NO: 2880496 - RNA, 14 nt, Human
uuguuguuugccau

SEQ ID NO: 2880497 - RNA, 14 nt, Human
uuguuguuucagug

SEQ ID NO: 2880498 - RNA, 12 nt, Human
uuguuaugcuau

SEQ ID NO: 2880499 - RNA, 14 nt, Human
uuguuaugcuauua

SEQ ID NO: 2880500 - RNA, 15 nt, Human
uuguugugugugcag

SEQ ID NO: 2880501 - RNA, 11 nt, Human
uuguugugggu

SEQ ID NO: 2880502 - RNA, 22 nt, Human
uuguuguggguucuauguuuac

SEQ ID NO: 2880503 - RNA, 17 nt, Human
uuguuguguacagacuu

SEQ ID NO: 2880504 - RNA, 20 nt, Human
uuguuagcuuccuuaaguau

SEQ ID NO: 2880505 - RNA, 16 nt, Human
uuguuaucagucaaua

SEQ ID NO: 2880506 - RNA, 13 nt, Human
uuguuaucaguaa

SEQ ID NO: 2880507 - RNA, 22 nt, Human
uuguuaucagucaauauuuuua

SEQ ID NO: 2880508 - RNA, 16 nt, Human
uuguguuugguuuaca

SEQ ID NO: 2880509 - RNA, 17 nt, Human
uuguguuugguuuacau

SEQ ID NO: 2880510 - RNA, 18 nt, Human
uuguguuugguuuacauu

SEQ ID NO: 2880511 - RNA, 19 nt, Human
uuguguuugguuuacauuu

SEQ ID NO: 2880512 - RNA, 22 nt, Human
uuguuaaaaaaaaaaagauugu

SEQ ID NO: 2880513 - RNA, 23 nt, Human
uuguuaaaaaaaaaaagauugua

SEQ ID NO: 2880514 - RNA, 13 nt, Human
uuguuaaaaauaa

SEQ ID NO: 2880515 - RNA, 21 nt, Human
uuguuaaaaauaaaucccaug

SEQ ID NO: 2880516 - RNA, 16 nt, Human
uuguuaaaauaacuag

SEQ ID NO: 2880517 - RNA, 16 nt, Human
uuguuaaaauuaugaa

SEQ ID NO: 2880518 - RNA, 20 nt, Human
uuguuaaaauuaugaaucug

SEQ ID NO: 2880519 - RNA, 22 nt, Human
uuguuaaaauuaugaaucugau

SEQ ID NO: 2880520 - RNA, 17 nt, Human
uuguguuuguguauuua

SEQ ID NO: 2880521 - RNA, 20 nt, Human
uuguuaaucucuguuaugua

SEQ ID NO: 2880522 - RNA, 22 nt, Human
uuguuaaucucuguuauguacu

SEQ ID NO: 2880523 - RNA, 22 nt, Human
uuguuaacucuugucuauuuuu

SEQ ID NO: 2880524 - RNA, 18 nt, Human
uuguuaacucuugucuau

SEQ ID NO: 2880525 - RNA, 15 nt, Human
uuguuacucuuacga

SEQ ID NO: 2880526 - RNA, 19 nt, Human
uuguuacucuuacgaauau

SEQ ID NO: 2880527 - RNA, 22 nt, Human
uuguuagaaaacaaaauuuuau

SEQ ID NO: 2880528 - RNA, 19 nt, Human
uuguuagagaaaaaugcuu

SEQ ID NO: 2880529 - RNA, 16 nt, Human
uuguuagauagcugca

SEQ ID NO: 2880530 - RNA, 17 nt, Human
uuguuaauuucaguccu

SEQ ID NO: 2880531 - RNA, 12 nt, Human
uuguuacccaug

SEQ ID NO: 2880532 - RNA, 18 nt, Human
uuguuacccaugaaaaac

SEQ ID NO: 2880533 - RNA, 21 nt, Human
uuguuaccuccaacagaacua

SEQ ID NO: 2880534 - RNA, 23 nt, Human
uuguuaccuccaacagaacuaaa

SEQ ID NO: 2880535 - RNA, 22 nt, Human
uuguuacacauuaaguaaucaa

SEQ ID NO: 2880536 - RNA, 15 nt, Human
uuguuacaggaaguc

SEQ ID NO: 2880537 - RNA, 9 nt, Human
uuguuacug

SEQ ID NO: 2880538 - RNA, 10 nt, Human
uuguuacugu

SEQ ID NO: 2880539 - RNA, 11 nt, Human
uuguuacuguu

SEQ ID NO: 2880540 - RNA, 12 nt, Human
uuguuacuguuc

SEQ ID NO: 2880541 - RNA, 13 nt, Human
uuguuacuguucu

SEQ ID NO: 2880542 - RNA, 14 nt, Human
uuguuacuguucuu

SEQ ID NO: 2880543 - RNA, 15 nt, Human
uuguuacuguucuug

SEQ ID NO: 2880544 - RNA, 16 nt, Human
uuguuacuguucuugc

SEQ ID NO: 2880545 - RNA, 17 nt, Human
uuguuacuguucuugcu

SEQ ID NO: 2880546 - RNA, 18 nt, Human
uuguuacuguucuugcug

SEQ ID NO: 2880547 - RNA, 19 nt, Human
uuguuacuguucuugcugc

SEQ ID NO: 2880548 - RNA, 20 nt, Human
uuguuacuguucuugcugcu

SEQ ID NO: 2880549 - RNA, 21 nt, Human
uuguuacuguucuugcugcua

SEQ ID NO: 2880550 - RNA, 22 nt, Human
uuguuacuguucuugcugcuag

SEQ ID NO: 2880551 - RNA, 23 nt, Human
uuguuacuguucuugcugcuaga

SEQ ID NO: 2880552 - RNA, 24 nt, Human
uuguuacuguucuugcugcuagaa

SEQ ID NO: 2880553 - RNA, 13 nt, Human
uugugccagagga

SEQ ID NO: 2880554 - RNA, 22 nt, Human
uugugccaauauguauuguaaa

SEQ ID NO: 2880555 - RNA, 17 nt, Human
uugugccaauauguauu

SEQ ID NO: 2880556 - RNA, 15 nt, Human
uugugcauuuguaaa

SEQ ID NO: 2880557 - RNA, 19 nt, Human
uugugcauuuguaaaugcu

SEQ ID NO: 2880558 - RNA, 21 nt, Human
uugugccagaggaauccuggc

SEQ ID NO: 2880559 - RNA, 22 nt, Human
uugugccauagucacauggccu

SEQ ID NO: 2880560 - RNA, 21 nt, Human
uugugccagaaugcuuuagga

SEQ ID NO: 2880561 - RNA, 16 nt, Human
uugugccagaaugcuu

SEQ ID NO: 2880562 - RNA, 21 nt, Human
uugugcuucacaguagagcca

SEQ ID NO: 2880563 - RNA, 16 nt, Human
uugugcuucacaguag

SEQ ID NO: 2880564 - RNA, 18 nt, Human
uugugcuggauggagccc

SEQ ID NO: 2880565 - RNA, 15 nt, Human
uugugcuuugcucuu

SEQ ID NO: 2880566 - RNA, 19 nt, Human
uugugcuuugcucuugucc

SEQ ID NO: 2880567 - RNA, 11 nt, Human
uugugcuucuc

SEQ ID NO: 2880568 - RNA, 12 nt, Human
uugugcuucucc

SEQ ID NO: 2880569 - RNA, 14 nt, Human
uugugcuucucccc

SEQ ID NO: 2880570 - RNA, 16 nt, Human
uugugcuucuccccag

SEQ ID NO: 2880571 - RNA, 17 nt, Human
uugugcuucuccccaga

SEQ ID NO: 2880572 - RNA, 18 nt, Human
uugugcuucuccccagaa

SEQ ID NO: 2880573 - RNA, 19 nt, Human
uugugcuucuccccagaau

SEQ ID NO: 2880574 - RNA, 14 nt, Human
uugugcuagaauac

SEQ ID NO: 2880575 - RNA, 13 nt, Human
uugugcuauaaag

SEQ ID NO: 2880576 - RNA, 14 nt, Human
uugugcuauaguau

SEQ ID NO: 2880577 - RNA, 19 nt, Human
uugugcuauaguauuugau

SEQ ID NO: 2880578 - RNA, 14 nt, Human
uugugcugaugaga

SEQ ID NO: 2880579 - RNA, 11 nt, Human
uugugcugcca

SEQ ID NO: 2880580 - RNA, 12 nt, Human
uugugcugccau

SEQ ID NO: 2880581 - RNA, 14 nt, Human
uugugcugccauuu

SEQ ID NO: 2880582 - RNA, 16 nt, Human
uugugccuuuuauagc

SEQ ID NO: 2880583 - RNA, 16 nt, Human
uugugcagucaucaga

SEQ ID NO: 2880584 - RNA, 14 nt, Human
uugugcuacagaug

SEQ ID NO: 2880585 - RNA, 16 nt, Human
uugugccaauauguau

SEQ ID NO: 2880586 - RNA, 13 nt, Human
uugugcagcuuuu

SEQ ID NO: 2880587 - RNA, 17 nt, Human
uugugcagcuuuugguc

SEQ ID NO: 2880588 - RNA, 20 nt, Human
uugugaaaguuuugaguaga

SEQ ID NO: 2880589 - RNA, 23 nt, Human
uugugaaauggccaggauccucu

SEQ ID NO: 2880590 - RNA, 21 nt, Human
uugugcaaaagcuucaaauua

SEQ ID NO: 2880591 - RNA, 22 nt, Human
uugugcaaaagcuucaaauuaa

SEQ ID NO: 2880592 - RNA, 21 nt, Human
uugugcaaaauauuugacuau

SEQ ID NO: 2880593 - RNA, 16 nt, Human
uuguggacacagcucu

SEQ ID NO: 2880594 - RNA, 18 nt, Human
uuguggaaagccucugcu

SEQ ID NO: 2880595 - RNA, 16 nt, Human
uugugcuuuuccuauu

SEQ ID NO: 2880596 - RNA, 14 nt, Human
uugugcuuuuccug

SEQ ID NO: 2880597 - RNA, 15 nt, Human
uugugcuuuuccuga

SEQ ID NO: 2880598 - RNA, 21 nt, Human
uuguggaaaaugaaaauuagg

SEQ ID NO: 2880599 - RNA, 17 nt, Human
uuguggacacagcucuu

SEQ ID NO: 2880600 - RNA, 22 nt, Human
uuguggaauggagauucaguuu

SEQ ID NO: 2880601 - RNA, 21 nt, Human
uuguggaauugggagcuuggg

SEQ ID NO: 2880602 - RNA, 17 nt, Human
uuguggaccaauuauug

SEQ ID NO: 2880603 - RNA, 18 nt, Human
uuguggaccaauuauuga

SEQ ID NO: 2880604 - RNA, 15 nt, Human
uuguggauaacaaag

SEQ ID NO: 2880605 - RNA, 16 nt, Human
uuguggauaacaaaga

SEQ ID NO: 2880606 - RNA, 18 nt, Human
uuguggauaacaaagaua

SEQ ID NO: 2880607 - RNA, 18 nt, Human
uuguggauauaaaaugug

SEQ ID NO: 2880608 - RNA, 11 nt, Human
uuguguuguca

SEQ ID NO: 2880609 - RNA, 13 nt, Human
uuguguuguccuu

SEQ ID NO: 2880610 - RNA, 13 nt, Human
uuguguugugaau

SEQ ID NO: 2880611 - RNA, 12 nt, Human
uuguguugacau

SEQ ID NO: 2880612 - RNA, 13 nt, Human
uuguguugacauu

SEQ ID NO: 2880613 - RNA, 16 nt, Human
uuguguugacauuaag

SEQ ID NO: 2880614 - RNA, 12 nt, Human
uuguguuguaau

SEQ ID NO: 2880615 - RNA, 13 nt, Human
uuguguuguaauu

SEQ ID NO: 2880616 - RNA, 14 nt, Human
uuguguuguaauuc

SEQ ID NO: 2880617 - RNA, 21 nt, Human
uuguguuguaauucuucaguu

SEQ ID NO: 2880618 - RNA, 13 nt, Human
uuguguucaccuu

SEQ ID NO: 2880619 - RNA, 15 nt, Human
uuguggauuucaguu

SEQ ID NO: 2880620 - RNA, 16 nt, Human
uuguggauuucaguuu

SEQ ID NO: 2880621 - RNA, 19 nt, Human
uuguggauuucaguuuuaa

SEQ ID NO: 2880622 - RNA, 16 nt, Human
uuguguuccuuuuuau

SEQ ID NO: 2880623 - RNA, 19 nt, Human
uuguguucuucuucauauu

SEQ ID NO: 2880624 - RNA, 11 nt, Human
uugucucagaa

SEQ ID NO: 2880625 - RNA, 12 nt, Human
uugucucagaag

SEQ ID NO: 2880626 - RNA, 18 nt, Human
uugucucauuuuaaugua

SEQ ID NO: 2880627 - RNA, 20 nt, Human
uugucugaagucacugcaca

SEQ ID NO: 2880628 - RNA, 21 nt, Human
uugucugaagucacugcacag

SEQ ID NO: 2880629 - RNA, 15 nt, Human
uugucucaguuggaa

SEQ ID NO: 2880630 - RNA, 16 nt, Human
uugugaaacacagcug

SEQ ID NO: 2880631 - RNA, 17 nt, Human
uugugaaacacagcugu

SEQ ID NO: 2880632 - RNA, 18 nt, Human
uugugaaacacagcuguu

SEQ ID NO: 2880633 - RNA, 15 nt, Human
uugucuggaagaaag

SEQ ID NO: 2880634 - RNA, 16 nt, Human
uugucuguuuguuuca

SEQ ID NO: 2880635 - RNA, 17 nt, Human
uugucuguuuguuucaa

SEQ ID NO: 2880636 - RNA, 20 nt, Human
uugucuguuuguuucaagaa

SEQ ID NO: 2880637 - RNA, 19 nt, Human
uugucuuuuaaugcuucau

SEQ ID NO: 2880638 - RNA, 18 nt, Human
uugucuuuucaaaauauu

SEQ ID NO: 2880639 - RNA, 14 nt, Human
uugugaaaugaugg

SEQ ID NO: 2880640 - RNA, 15 nt, Human
uugucuaacucagaa

SEQ ID NO: 2880641 - RNA, 19 nt, Human
uugucuaacucagaauuau

SEQ ID NO: 2880642 - RNA, 20 nt, Human
uugucgggcaccagccagcg

SEQ ID NO: 2880643 - RNA, 14 nt, Human
uuguauuaacaaaa

SEQ ID NO: 2880644 - RNA, 15 nt, Human
uuguauguaucuauu

SEQ ID NO: 2880645 - RNA, 17 nt, Human
uuguauguguguagaca

SEQ ID NO: 2880646 - RNA, 20 nt, Human
uuguauggggaggcaagugu

SEQ ID NO: 2880647 - RNA, 20 nt, Human
uuguacauguaacauuaaag

SEQ ID NO: 2880648 - RNA, 17 nt, Human
uuguacauuuaugauuu

SEQ ID NO: 2880649 - RNA, 16 nt, Human
uuguacauaguuauuu

SEQ ID NO: 2880650 - RNA, 21 nt, Human
uuguacauauuuguggaauaa

SEQ ID NO: 2880651 - RNA, 16 nt, Human
uuguacaucuggcuua

SEQ ID NO: 2880652 - RNA, 17 nt, Human
uuguacaucuggcuuau

SEQ ID NO: 2880653 - RNA, 20 nt, Human
uuguacaucuggcuuauuuu

SEQ ID NO: 2880654 - RNA, 23 nt, Human
uuguacaucuggcuuauuuuaau

SEQ ID NO: 2880655 - RNA, 12 nt, Human
uuguacaugaaa

SEQ ID NO: 2880656 - RNA, 13 nt, Human
uuguacaugaaau

SEQ ID NO: 2880657 - RNA, 22 nt, Human
uuguacaugaaauuuuuguaaa

SEQ ID NO: 2880658 - RNA, 18 nt, Human
uuguacauauguaaaaua

SEQ ID NO: 2880659 - RNA, 15 nt, Human
uuguacauauuugug

SEQ ID NO: 2880660 - RNA, 20 nt, Human
uuguacauguguagccugug

SEQ ID NO: 2880661 - RNA, 21 nt, Human
uuguacauguguagccugugc

SEQ ID NO: 2880662 - RNA, 15 nt, Human
uugguccaagauucc

SEQ ID NO: 2880663 - RNA, 14 nt, Human
uuggucaggcuggu

SEQ ID NO: 2880664 - RNA, 19 nt, Human
uuggucaugugggucuucc

SEQ ID NO: 2880665 - RNA, 23 nt, Human
uuggucaugugggucuuccaggg

SEQ ID NO: 2880666 - RNA, 13 nt, Human
uugguagauuaaa

SEQ ID NO: 2880667 - RNA, 15 nt, Human
uugguagauuaaaua

SEQ ID NO: 2880668 - RNA, 18 nt, Human
uugguagauuaaauauag

SEQ ID NO: 2880669 - RNA, 13 nt, Human
uuggucuguguga

SEQ ID NO: 2880670 - RNA, 12 nt, Human
uugguccagagc

SEQ ID NO: 2880671 - RNA, 22 nt, Human
uugguccagagcggaggcugug

SEQ ID NO: 2880672 - RNA, 13 nt, Human
uuggucuuuguau

SEQ ID NO: 2880673 - RNA, 14 nt, Human
uuggucuuuguauc

SEQ ID NO: 2880674 - RNA, 22 nt, Human
uuguaaaaauuaaaaguuaugg

SEQ ID NO: 2880675 - RNA, 22 nt, Human
uuggguucaagcgauucuucug

SEQ ID NO: 2880676 - RNA, 17 nt, Human
uuggguucaugaugcag

SEQ ID NO: 2880677 - RNA, 21 nt, Human
uuggguucaugaugcagucuc

SEQ ID NO: 2880678 - RNA, 22 nt, Human
uuggguucaugaugcagucucc

SEQ ID NO: 2880679 - RNA, 15 nt, Human
uugcacuaaaguaug

SEQ ID NO: 2880680 - RNA, 19 nt, Human
uugcacuaaaguauguaaa

SEQ ID NO: 2880681 - RNA, 18 nt, Human
uugcacgcgcccuuucua

SEQ ID NO: 2880682 - RNA, 20 nt, Human
uugcacgcgcccuuucuacc

SEQ ID NO: 2880683 - RNA, 14 nt, Human
uugcacggcugcug

SEQ ID NO: 2880684 - RNA, 15 nt, Human
uugcacggcugcuga

SEQ ID NO: 2880685 - RNA, 17 nt, Human
uuguaaauagcucaggu

SEQ ID NO: 2880686 - RNA, 17 nt, Human
uuguaaauaguauuuga

SEQ ID NO: 2880687 - RNA, 16 nt, Human
uuguaaaugugguaaa

SEQ ID NO: 2880688 - RNA, 21 nt, Human
uuguaaaugugguaaagaguu

SEQ ID NO: 2880689 - RNA, 15 nt, Human
uuguaaauaccagga

SEQ ID NO: 2880690 - RNA, 21 nt, Human
uuguaaaauagcuuguauagu

SEQ ID NO: 2880691 - RNA, 15 nt, Human
uuguaaaauagcuug

SEQ ID NO: 2880692 - RNA, 14 nt, Human
uuguaaaacuacac

SEQ ID NO: 2880693 - RNA, 21 nt, Human
uuguaaaaccugucaaugaua

SEQ ID NO: 2880694 - RNA, 23 nt, Human
uuguaaaaccugucaaugauaca

SEQ ID NO: 2880695 - RNA, 20 nt, Human
uuguaaaaccugucaaugau

SEQ ID NO: 2880696 - RNA, 20 nt, Human
uuguaaauuaggaggcucaa

SEQ ID NO: 2880697 - RNA, 12 nt, Human
uuguaaauuaua

SEQ ID NO: 2880698 - RNA, 14 nt, Human
uuguaaauuauauu

SEQ ID NO: 2880699 - RNA, 15 nt, Human
uuguaaauuauauuu

SEQ ID NO: 2880700 - RNA, 16 nt, Human
uuguaaauuauauuug

SEQ ID NO: 2880701 - RNA, 17 nt, Human
uuguaaauuauauuugu

SEQ ID NO: 2880702 - RNA, 20 nt, Human
uuguaaauuauauuugugcu

SEQ ID NO: 2880703 - RNA, 20 nt, Human
uuguaaauguguuggacaaa

SEQ ID NO: 2880704 - RNA, 22 nt, Human
uuguaaauguguuggacaaaug

SEQ ID NO: 2880705 - RNA, 12 nt, Human
uuguaaauguua

SEQ ID NO: 2880706 - RNA, 13 nt, Human
uuguaaauguuau

SEQ ID NO: 2880707 - RNA, 14 nt, Human
uuguaaauguuauu

SEQ ID NO: 2880708 - RNA, 17 nt, Human
uuguaaauguuauuucu

SEQ ID NO: 2880709 - RNA, 18 nt, Human
uuguaaauguuauuucug

SEQ ID NO: 2880710 - RNA, 19 nt, Human
uuguaaauguuauuucugc

SEQ ID NO: 2880711 - RNA, 21 nt, Human
uuguaaauuaaacauaaaaca

SEQ ID NO: 2880712 - RNA, 22 nt, Human
uuguaaauuaaacauaaaacaa

SEQ ID NO: 2880713 - RNA, 23 nt, Human
uuauggaauugauuugcauugaa

SEQ ID NO: 2880714 - RNA, 14 nt, Human
uuauggagaccucu

SEQ ID NO: 2880715 - RNA, 19 nt, Human
uuauggagaccucuccuuc

SEQ ID NO: 2880716 - RNA, 21 nt, Human
uuauggagaccucuccuuccu

SEQ ID NO: 2880717 - RNA, 21 nt, Human
uuauggaauugauuugcauug

SEQ ID NO: 2880718 - RNA, 20 nt, Human
uuauggaauugauuugcauu

SEQ ID NO: 2880719 - RNA, 11 nt, Human
uuauggaugca

SEQ ID NO: 2880720 - RNA, 15 nt, Human
uuauguuguuagaga

SEQ ID NO: 2880721 - RNA, 16 nt, Human
uuauguuguuagagaa

SEQ ID NO: 2880722 - RNA, 23 nt, Human
uuauggaagauaguuuucuccuu

SEQ ID NO: 2880723 - RNA, 12 nt, Human
uuauguuugaau

SEQ ID NO: 2880724 - RNA, 13 nt, Human
uuauguuugaaua

SEQ ID NO: 2880725 - RNA, 14 nt, Human
uuauguuugaauau

SEQ ID NO: 2880726 - RNA, 15 nt, Human
uuauguuugaauaug

SEQ ID NO: 2880727 - RNA, 19 nt, Human
uuauggaauugauuugcau

SEQ ID NO: 2880728 - RNA, 14 nt, Human
uuauggaauugauu

SEQ ID NO: 2880729 - RNA, 17 nt, Human
uuaugauuuaauaaaau

SEQ ID NO: 2880730 - RNA, 14 nt, Human
uuaugcaaaaugga

SEQ ID NO: 2880731 - RNA, 13 nt, Human
uuaugauuuaaua

SEQ ID NO: 2880732 - RNA, 15 nt, Human
uuaugauuuaauaaa

SEQ ID NO: 2880733 - RNA, 20 nt, Human
uuaugauuuaauaaaauaau

SEQ ID NO: 2880734 - RNA, 13 nt, Human
uuaugauuugggu

SEQ ID NO: 2880735 - RNA, 14 nt, Human
uuaugauuuucaua

SEQ ID NO: 2880736 - RNA, 18 nt, Human
uuaugauuuucauaacuu

SEQ ID NO: 2880737 - RNA, 19 nt, Human
uuaugauuuucauaacuua

SEQ ID NO: 2880738 - RNA, 18 nt, Human
uuauuaauauuuaacauu

SEQ ID NO: 2880739 - RNA, 11 nt, Human
uuauuaauauu

SEQ ID NO: 2880740 - RNA, 22 nt, Human
uuauuaaguucucaaugugaaa

SEQ ID NO: 2880741 - RNA, 19 nt, Human
uuauuacccccuccuucag

SEQ ID NO: 2880742 - RNA, 20 nt, Human
uuauuacccccuccuucaga

SEQ ID NO: 2880743 - RNA, 22 nt, Human
uuauuacccccuccuucagaca

SEQ ID NO: 2880744 - RNA, 20 nt, Human
uuauuacuuguugcaaaggu

SEQ ID NO: 2880745 - RNA, 15 nt, Human
uuauuaacuacauuu

SEQ ID NO: 2880746 - RNA, 16 nt, Human
uuauuaacuacauuua

SEQ ID NO: 2880747 - RNA, 18 nt, Human
uuauuaacuacauuuaug

SEQ ID NO: 2880748 - RNA, 22 nt, Human
uuauguuuuuuaaaauauuuau

SEQ ID NO: 2880749 - RNA, 18 nt, Human
uuaucuucucaaguucua

SEQ ID NO: 2880750 - RNA, 19 nt, Human
uuaucuucucaaguucuaa

SEQ ID NO: 2880751 - RNA, 22 nt, Human
uuaucuucucaaguucuaagau

SEQ ID NO: 2880752 - RNA, 20 nt, Human
uuaucuauucugagaaaaca

SEQ ID NO: 2880753 - RNA, 16 nt, Human
uuaucucacuugugcc

SEQ ID NO: 2880754 - RNA, 17 nt, Human
uuaucucagucaugcau

SEQ ID NO: 2880755 - RNA, 19 nt, Human
uuaucucagucaugcauaa

SEQ ID NO: 2880756 - RNA, 20 nt, Human
uuaucucagucaugcauaaa

SEQ ID NO: 2880757 - RNA, 18 nt, Human
uuaucuuauacuguacaa

SEQ ID NO: 2880758 - RNA, 20 nt, Human
uuaucuuauacuguacaaua

SEQ ID NO: 2880759 - RNA, 21 nt, Human
uuaucuuauacuguacaauaa

SEQ ID NO: 2880760 - RNA, 22 nt, Human
uuaucuuauacuguacaauaaa

SEQ ID NO: 2880761 - RNA, 15 nt, Human
uuaucuguucuuuug

SEQ ID NO: 2880762 - RNA, 19 nt, Human
uuaucuguuuaaagcauau

SEQ ID NO: 2880763 - RNA, 14 nt, Human
uuaucucuauuuaa

SEQ ID NO: 2880764 - RNA, 15 nt, Human
uuaucucuauuuaau

SEQ ID NO: 2880765 - RNA, 21 nt, Human
uuaucucagucaugcauaaau

SEQ ID NO: 2880766 - RNA, 22 nt, Human
uuaucucagucaugcauaaaua

SEQ ID NO: 2880767 - RNA, 14 nt, Human
uuaucuaaauuaaa

SEQ ID NO: 2880768 - RNA, 15 nt, Human
uuaucuaaauuaaag

SEQ ID NO: 2880769 - RNA, 15 nt, Human
uuaucuaagaauaca

SEQ ID NO: 2880770 - RNA, 17 nt, Human
uuaucuaagaauacagc

SEQ ID NO: 2880771 - RNA, 19 nt, Human
uuaucuaagaauacagcuu

SEQ ID NO: 2880772 - RNA, 19 nt, Human
uuaucuaauaccucugugu

SEQ ID NO: 2880773 - RNA, 22 nt, Human
uuaucgaaauaacaauguuaag

SEQ ID NO: 2880774 - RNA, 19 nt, Human
uuaucgaaauaacaauguu

SEQ ID NO: 2880775 - RNA, 21 nt, Human
uuaucgaaauaacaauguuaa

SEQ ID NO: 2880776 - RNA, 20 nt, Human
uuaucuaauaccucugugug

SEQ ID NO: 2880777 - RNA, 21 nt, Human
uuaucuacccaagggcagaaa

SEQ ID NO: 2880778 - RNA, 23 nt, Human
uuaucuacccaagggcagaaagu

SEQ ID NO: 2880779 - RNA, 18 nt, Human
uuaucuauagcuaaguac

SEQ ID NO: 2880780 - RNA, 12 nt, Human
uuauauugaaaa

SEQ ID NO: 2880781 - RNA, 14 nt, Human
uuauauugaaaaaa

SEQ ID NO: 2880782 - RNA, 15 nt, Human
uuauauugaagacaa

SEQ ID NO: 2880783 - RNA, 16 nt, Human
uuauauugaagacaau

SEQ ID NO: 2880784 - RNA, 20 nt, Human
uuauauugaagacaauuuga

SEQ ID NO: 2880785 - RNA, 22 nt, Human
uuauauugaagacaauuugaua

SEQ ID NO: 2880786 - RNA, 13 nt, Human
uuauauuuaucca

SEQ ID NO: 2880787 - RNA, 19 nt, Human
uuauauuuaguuauaguuu

SEQ ID NO: 2880788 - RNA, 22 nt, Human
uuauauuuaguuauaguuucag

SEQ ID NO: 2880789 - RNA, 17 nt, Human
uuauauuuaguuauagu

SEQ ID NO: 2880790 - RNA, 18 nt, Human
uuauauuuaguuauaguu

SEQ ID NO: 2880791 - RNA, 11 nt, Human
uuauauuuaau

SEQ ID NO: 2880792 - RNA, 16 nt, Human
uuauauuuaauuauua

SEQ ID NO: 2880793 - RNA, 20 nt, Human
uuauauuucccuaaaauaca

SEQ ID NO: 2880794 - RNA, 22 nt, Human
uuauauuucccuaaaauacauu

SEQ ID NO: 2880795 - RNA, 23 nt, Human
uuauauuucccuaaaauacauuu

SEQ ID NO: 2880796 - RNA, 11 nt, Human
uuauauuucag

SEQ ID NO: 2880797 - RNA, 15 nt, Human
uuauauuucagaugu

SEQ ID NO: 2880798 - RNA, 21 nt, Human
uuauauuucagauguaauguu

SEQ ID NO: 2880799 - RNA, 22 nt, Human
uuauauuucagauguaauguuu

SEQ ID NO: 2880800 - RNA, 13 nt, Human
uuaucccugccca

SEQ ID NO: 2880801 - RNA, 19 nt, Human
uuauccuaaaacaaauagu

SEQ ID NO: 2880802 - RNA, 20 nt, Human
uuauccuagauuauaucaaa

SEQ ID NO: 2880803 - RNA, 22 nt, Human
uuauccuagauuauaucaaagu

SEQ ID NO: 2880804 - RNA, 18 nt, Human
uuauccuagcacaugcuu

SEQ ID NO: 2880805 - RNA, 20 nt, Human
uuauccuagcacaugcuuca

SEQ ID NO: 2880806 - RNA, 21 nt, Human
uuauccuagcacaugcuucaa

SEQ ID NO: 2880807 - RNA, 13 nt, Human
uuauccuauuuca

SEQ ID NO: 2880808 - RNA, 16 nt, Human
uuauccugaaauuuca

SEQ ID NO: 2880809 - RNA, 13 nt, Human
uuaucgaaauaac

SEQ ID NO: 2880810 - RNA, 14 nt, Human
uuaucgaaauaaca

SEQ ID NO: 2880811 - RNA, 15 nt, Human
uuaucgaaauaacaa

SEQ ID NO: 2880812 - RNA, 17 nt, Human
uuauccugaaauuucag

SEQ ID NO: 2880813 - RNA, 22 nt, Human
uuauccugaacucuucugcaaa

SEQ ID NO: 2880814 - RNA, 13 nt, Human
uuauccugcauug

SEQ ID NO: 2880815 - RNA, 16 nt, Human
uuauccugcauuguua

SEQ ID NO: 2880816 - RNA, 14 nt, Human
uuauaauucaguau

SEQ ID NO: 2880817 - RNA, 22 nt, Human
uuauaauucaguauguuuuaca

SEQ ID NO: 2880818 - RNA, 19 nt, Human
uuauaauaaaggacuguaa

SEQ ID NO: 2880819 - RNA, 18 nt, Human
uuauaauaaaggacugua

SEQ ID NO: 2880820 - RNA, 14 nt, Human
uuauaauacucugu

SEQ ID NO: 2880821 - RNA, 15 nt, Human
uuauaauacucuguu

SEQ ID NO: 2880822 - RNA, 21 nt, Human
uuauaauaaaggacuguaauc

SEQ ID NO: 2880823 - RNA, 11 nt, Human
uuauaauagca

SEQ ID NO: 2880824 - RNA, 12 nt, Human
uuaguggcuuca

SEQ ID NO: 2880825 - RNA, 15 nt, Human
uuagugggccagggc

SEQ ID NO: 2880826 - RNA, 16 nt, Human
uuagugggccagggcu

SEQ ID NO: 2880827 - RNA, 19 nt, Human
uuagugguuuaucagcaaa

SEQ ID NO: 2880828 - RNA, 15 nt, Human
uuaguguaauaagac

SEQ ID NO: 2880829 - RNA, 12 nt, Human
uuauaagacucu

SEQ ID NO: 2880830 - RNA, 13 nt, Human
uuauaagacucuc

SEQ ID NO: 2880831 - RNA, 14 nt, Human
uuauaagacucuca

SEQ ID NO: 2880832 - RNA, 20 nt, Human
uuauaagacucucacacuca

SEQ ID NO: 2880833 - RNA, 23 nt, Human
uuauaagcaaauuucaaaagaca

SEQ ID NO: 2880834 - RNA, 14 nt, Human
uuagugccagaauu

SEQ ID NO: 2880835 - RNA, 12 nt, Human
uuauaagcauug

SEQ ID NO: 2880836 - RNA, 13 nt, Human
uuauaagcauuga

SEQ ID NO: 2880837 - RNA, 15 nt, Human
uuauaagcauugaaa

SEQ ID NO: 2880838 - RNA, 17 nt, Human
uuauaagcauugaaauu

SEQ ID NO: 2880839 - RNA, 18 nt, Human
uuauaagcauugaaauua

SEQ ID NO: 2880840 - RNA, 14 nt, Human
uuauaagguguuuu

SEQ ID NO: 2880841 - RNA, 20 nt, Human
uuauaagguguuuucugugu

SEQ ID NO: 2880842 - RNA, 21 nt, Human
uuauaagguguuuucugugua

SEQ ID NO: 2880843 - RNA, 22 nt, Human
uuauaagguguuuucuguguaa

SEQ ID NO: 2880844 - RNA, 23 nt, Human
uuauaagguguuuucuguguaac

SEQ ID NO: 2880845 - RNA, 17 nt, Human
uuauaagugaagugaua

SEQ ID NO: 2880846 - RNA, 15 nt, Human
uuauaaguucacaaa

SEQ ID NO: 2880847 - RNA, 17 nt, Human
uuauaaguucacaaaau

SEQ ID NO: 2880848 - RNA, 16 nt, Human
uuauaagucacaaaga

SEQ ID NO: 2880849 - RNA, 18 nt, Human
uuauaagucauuguaugu

SEQ ID NO: 2880850 - RNA, 18 nt, Human
uuauaaguagcaggccaa

SEQ ID NO: 2880851 - RNA, 14 nt, Human
uuagugcauccagu

SEQ ID NO: 2880852 - RNA, 14 nt, Human
uuagugcaucuuug

SEQ ID NO: 2880853 - RNA, 20 nt, Human
uuagugcaucuuugccucuc

SEQ ID NO: 2880854 - RNA, 14 nt, Human
uuagugccugugug

SEQ ID NO: 2880855 - RNA, 15 nt, Human
uuagugacaaaauag

SEQ ID NO: 2880856 - RNA, 14 nt, Human
uuagugaguuauuc

SEQ ID NO: 2880857 - RNA, 14 nt, Human
uuagugauauuucu

SEQ ID NO: 2880858 - RNA, 16 nt, Human
uuagugauauuucucu

SEQ ID NO: 2880859 - RNA, 17 nt, Human
uuagugauauuucucua

SEQ ID NO: 2880860 - RNA, 18 nt, Human
uuagugauauuucucuag

SEQ ID NO: 2880861 - RNA, 19 nt, Human
uuagugauauuucucuagu

SEQ ID NO: 2880862 - RNA, 23 nt, Human
uuagugauauuucucuaguaguu

SEQ ID NO: 2880863 - RNA, 17 nt, Human
uuagugaucuuagcaua

SEQ ID NO: 2880864 - RNA, 22 nt, Human
uuagucuuagggauuuauuuuc

SEQ ID NO: 2880865 - RNA, 19 nt, Human
uuagugaccucagcuuuga

SEQ ID NO: 2880866 - RNA, 17 nt, Human
uuagucucuuuauuccu

SEQ ID NO: 2880867 - RNA, 20 nt, Human
uuagucucuuuauuccuagu

SEQ ID NO: 2880868 - RNA, 19 nt, Human
uuauacaaaauaagaacga

SEQ ID NO: 2880869 - RNA, 12 nt, Human
uuauaauuuucu

SEQ ID NO: 2880870 - RNA, 15 nt, Human
uuauaauuuucugaa

SEQ ID NO: 2880871 - RNA, 18 nt, Human
uuauacagcucagcuuuu

SEQ ID NO: 2880872 - RNA, 20 nt, Human
uuauacagauagaguuccau

SEQ ID NO: 2880873 - RNA, 22 nt, Human
uuauacagauagaguuccauau

SEQ ID NO: 2880874 - RNA, 21 nt, Human
uuauacaaaccuaccaaaaug

SEQ ID NO: 2880875 - RNA, 20 nt, Human
uuauacaaaccuaccaaaau

SEQ ID NO: 2880876 - RNA, 18 nt, Human
uuauacaaauuaaaaaga

SEQ ID NO: 2880877 - RNA, 19 nt, Human
uuauacaaauuaaaaagau

SEQ ID NO: 2880878 - RNA, 15 nt, Human
uuauacaauaucauc

SEQ ID NO: 2880879 - RNA, 15 nt, Human
uuauaucauauguau

SEQ ID NO: 2880880 - RNA, 16 nt, Human
uuauaucauauguaua

SEQ ID NO: 2880881 - RNA, 20 nt, Human
uuauauauuuauaacucauc

SEQ ID NO: 2880882 - RNA, 15 nt, Human
uuauauauuuauaac

SEQ ID NO: 2880883 - RNA, 14 nt, Human
uuauauauuuauaa

SEQ ID NO: 2880884 - RNA, 13 nt, Human
uuauauauuuaua

SEQ ID NO: 2880885 - RNA, 23 nt, Human
uuauauauuuauaacucaucaua

SEQ ID NO: 2880886 - RNA, 12 nt, Human
uuauaucaaagu

SEQ ID NO: 2880887 - RNA, 13 nt, Human
uuauaucaaagua

SEQ ID NO: 2880888 - RNA, 14 nt, Human
uuauaucaaaguau

SEQ ID NO: 2880889 - RNA, 15 nt, Human
uuauaucaaaguauu

SEQ ID NO: 2880890 - RNA, 14 nt, Human
uuauauccccugcu

SEQ ID NO: 2880891 - RNA, 11 nt, Human
uuauaucugua

SEQ ID NO: 2880892 - RNA, 17 nt, Human
uuauaucuguacaauga

SEQ ID NO: 2880893 - RNA, 13 nt, Human
uuauaucuguaug

SEQ ID NO: 2880894 - RNA, 14 nt, Human
uuauaucuguaugu

SEQ ID NO: 2880895 - RNA, 22 nt, Human
uuauaucuguggucuucaaauu

SEQ ID NO: 2880896 - RNA, 20 nt, Human
uuauauuaguugcuuuguua

SEQ ID NO: 2880897 - RNA, 19 nt, Human
uuauauuaauguacuuguu

SEQ ID NO: 2880898 - RNA, 11 nt, Human
uuauauucaac

SEQ ID NO: 2880899 - RNA, 14 nt, Human
uuauauucaaccau

SEQ ID NO: 2880900 - RNA, 15 nt, Human
uuauauucaaccaug

SEQ ID NO: 2880901 - RNA, 16 nt, Human
uuauauucaaccaugg

SEQ ID NO: 2880902 - RNA, 17 nt, Human
uuauauucaaccaugga

SEQ ID NO: 2880903 - RNA, 23 nt, Human
uuauauucaaccauggacuuuau

SEQ ID NO: 2880904 - RNA, 14 nt, Human
uuauauguacuguu

SEQ ID NO: 2880905 - RNA, 13 nt, Human
uuauauguguuga

SEQ ID NO: 2880906 - RNA, 14 nt, Human
uuauauguguugaa

SEQ ID NO: 2880907 - RNA, 19 nt, Human
uuauauguguugaaaacca

SEQ ID NO: 2880908 - RNA, 19 nt, Human
uuauauguacaugagaagg

SEQ ID NO: 2880909 - RNA, 16 nt, Human
uuauauguacaugaga

SEQ ID NO: 2880910 - RNA, 20 nt, Human
uuauauggaugauucagaaa

SEQ ID NO: 2880911 - RNA, 22 nt, Human
uuauauggaugauucagaaauu

SEQ ID NO: 2880912 - RNA, 16 nt, Human
uuauauguaccguagg

SEQ ID NO: 2880913 - RNA, 14 nt, Human
uuauauguaccgua

SEQ ID NO: 2880914 - RNA, 17 nt, Human
uucagauacaaacugca

SEQ ID NO: 2880915 - RNA, 14 nt, Human
uucagcucacugca

SEQ ID NO: 2880916 - RNA, 14 nt, Human
uucacgcaacuuga

SEQ ID NO: 2880917 - RNA, 16 nt, Human
uucacgcaacuugaaa

SEQ ID NO: 2880918 - RNA, 22 nt, Human
uucacgcaacuugaaauuauau

SEQ ID NO: 2880919 - RNA, 13 nt, Human
uucaccuccucgc

SEQ ID NO: 2880920 - RNA, 13 nt, Human
uucaccuccuuca

SEQ ID NO: 2880921 - RNA, 15 nt, Human
uucaccuccuucaau

SEQ ID NO: 2880922 - RNA, 14 nt, Human
uucaccuuuguagc

SEQ ID NO: 2880923 - RNA, 13 nt, Human
uucaauaaaucuu

SEQ ID NO: 2880924 - RNA, 19 nt, Human
uucaauaaaucuuuggaaa

SEQ ID NO: 2880925 - RNA, 13 nt, Human
uucaauacaaaca

SEQ ID NO: 2880926 - RNA, 22 nt, Human
uucaauacaaacaaucucuuaa

SEQ ID NO: 2880927 - RNA, 23 nt, Human
uucaauacaaacaaucucuuaaa

SEQ ID NO: 2880928 - RNA, 18 nt, Human
uucaauaguucaaggaac

SEQ ID NO: 2880929 - RNA, 14 nt, Human
uucaauauugacau

SEQ ID NO: 2880930 - RNA, 15 nt, Human
uucaauauugacauu

SEQ ID NO: 2880931 - RNA, 16 nt, Human
uucaauauugacauuu

SEQ ID NO: 2880932 - RNA, 17 nt, Human
uucaauauugacauuug

SEQ ID NO: 2880933 - RNA, 18 nt, Human
uucaauauugacauuugu

SEQ ID NO: 2880934 - RNA, 19 nt, Human
uucaauauugacauuugua

SEQ ID NO: 2880935 - RNA, 21 nt, Human
uucaauauugacauuuguagu

SEQ ID NO: 2880936 - RNA, 22 nt, Human
uucaauauugacauuuguaguu

SEQ ID NO: 2880937 - RNA, 17 nt, Human
uucacaaacuuuuauac

SEQ ID NO: 2880938 - RNA, 16 nt, Human
uucacaaacuuuuaua

SEQ ID NO: 2880939 - RNA, 13 nt, Human
uucacaaauaaua

SEQ ID NO: 2880940 - RNA, 22 nt, Human
uucacaaacuuuuauacucuuu

SEQ ID NO: 2880941 - RNA, 12 nt, Human
uucacaaccugg

SEQ ID NO: 2880942 - RNA, 18 nt, Human
uucacccuuaacccaagg

SEQ ID NO: 2880943 - RNA, 22 nt, Human
uucacccuuaacccaaggagca

SEQ ID NO: 2880944 - RNA, 14 nt, Human
uucaccgaggacau

SEQ ID NO: 2880945 - RNA, 16 nt, Human
uucaccuaagagauuc

SEQ ID NO: 2880946 - RNA, 19 nt, Human
uucaccuaagagauucuga

SEQ ID NO: 2880947 - RNA, 20 nt, Human
uucaccuaagagauucugau

SEQ ID NO: 2880948 - RNA, 19 nt, Human
uucaccuaagucucuguga

SEQ ID NO: 2880949 - RNA, 17 nt, Human
uucaccuaagucucugu

SEQ ID NO: 2880950 - RNA, 21 nt, Human
uucaccuaagucucugugaau

SEQ ID NO: 2880951 - RNA, 18 nt, Human
uucaccuaccgaguucaa

SEQ ID NO: 2880952 - RNA, 13 nt, Human
uucacccucugua

SEQ ID NO: 2880953 - RNA, 21 nt, Human
uucacaaccuucuguggcuca

SEQ ID NO: 2880954 - RNA, 19 nt, Human
uuauuuguuuuucauucau

SEQ ID NO: 2880955 - RNA, 17 nt, Human
uuauuuuaaaaaaugaa

SEQ ID NO: 2880956 - RNA, 14 nt, Human
uuauuuuaaacaaa

SEQ ID NO: 2880957 - RNA, 16 nt, Human
uuauuuuaaacaaaau

SEQ ID NO: 2880958 - RNA, 22 nt, Human
uuauuuguguuuuaauuuaaac

SEQ ID NO: 2880959 - RNA, 13 nt, Human
uuauuuguguaau

SEQ ID NO: 2880960 - RNA, 16 nt, Human
uuauuuguguaauaga

SEQ ID NO: 2880961 - RNA, 21 nt, Human
uuauuuguguaauagaaaacu

SEQ ID NO: 2880962 - RNA, 18 nt, Human
uuauuuguuauuuucagu

SEQ ID NO: 2880963 - RNA, 22 nt, Human
uuauuuggcaguuugguauuug

SEQ ID NO: 2880964 - RNA, 11 nt, Human
uuauuagauga

SEQ ID NO: 2880965 - RNA, 12 nt, Human
uuauuagaugaa

SEQ ID NO: 2880966 - RNA, 13 nt, Human
uuauuagaugaau

SEQ ID NO: 2880967 - RNA, 22 nt, Human
uuauuucugcauauguugaaua

SEQ ID NO: 2880968 - RNA, 12 nt, Human
uuauuucuguca

SEQ ID NO: 2880969 - RNA, 16 nt, Human
uuauuucugucauuca

SEQ ID NO: 2880970 - RNA, 15 nt, Human
uuauuugacuuuaau

SEQ ID NO: 2880971 - RNA, 12 nt, Human
uuauuucuucaa

SEQ ID NO: 2880972 - RNA, 20 nt, Human
uuauuaguaaaugcuuauca

SEQ ID NO: 2880973 - RNA, 19 nt, Human
uucaaaucguuuauuucac

SEQ ID NO: 2880974 - RNA, 22 nt, Human
uucaaaugauuuuuacaaguuu

SEQ ID NO: 2880975 - RNA, 19 nt, Human
uucaaaugggcugcugcuu

SEQ ID NO: 2880976 - RNA, 16 nt, Human
uucaaauggguuuucc

SEQ ID NO: 2880977 - RNA, 21 nt, Human
uucaaauggguuuuccacgcu

SEQ ID NO: 2880978 - RNA, 19 nt, Human
uuauuuugugcucauuuaa

SEQ ID NO: 2880979 - RNA, 12 nt, Human
uuauuuuguaau

SEQ ID NO: 2880980 - RNA, 13 nt, Human
uuauuuuguaauu

SEQ ID NO: 2880981 - RNA, 14 nt, Human
uuauuuuguaauua

SEQ ID NO: 2880982 - RNA, 17 nt, Human
uuauuuuguaauuauga

SEQ ID NO: 2880983 - RNA, 17 nt, Human
uuauuuuaaacaaaaua

SEQ ID NO: 2880984 - RNA, 13 nt, Human
uuauuuuauuugu

SEQ ID NO: 2880985 - RNA, 13 nt, Human
uuauuuuaaugug

SEQ ID NO: 2880986 - RNA, 14 nt, Human
uuauuuuaauguga

SEQ ID NO: 2880987 - RNA, 16 nt, Human
uuauuuuaaugugaug

SEQ ID NO: 2880988 - RNA, 17 nt, Human
uuauuuuaaugugauga

SEQ ID NO: 2880989 - RNA, 18 nt, Human
uuauuuuaaugugaugau

SEQ ID NO: 2880990 - RNA, 23 nt, Human
uuauuuuaaugugaugauguaau

SEQ ID NO: 2880991 - RNA, 18 nt, Human
uuauuuucaagaaacuga

SEQ ID NO: 2880992 - RNA, 15 nt, Human
uuauuuucaaguagc

SEQ ID NO: 2880993 - RNA, 16 nt, Human
uuauuuucaaguagcu

SEQ ID NO: 2880994 - RNA, 15 nt, Human
uuauuuucacccucu

SEQ ID NO: 2880995 - RNA, 15 nt, Human
uuauuuuggggucuc

SEQ ID NO: 2880996 - RNA, 19 nt, Human
uuauuuuggaaagaagaaa

SEQ ID NO: 2880997 - RNA, 14 nt, Human
uucaaaugugcugu

SEQ ID NO: 2880998 - RNA, 18 nt, Human
uucaaauuggacuuucaa

SEQ ID NO: 2880999 - RNA, 19 nt, Human
uucaaauuggacuuucaaa

SEQ ID NO: 2881000 - RNA, 14 nt, Human
uucaacauccugcc

SEQ ID NO: 2881001 - RNA, 15 nt, Human
uucaacauccugcca

SEQ ID NO: 2881002 - RNA, 17 nt, Human
uucaacauccugccagc

SEQ ID NO: 2881003 - RNA, 21 nt, Human
uucaacauccugccagcccca

SEQ ID NO: 2881004 - RNA, 16 nt, Human
uucaauaauaaauauu

SEQ ID NO: 2881005 - RNA, 18 nt, Human
uucaauaaaugucuguug

SEQ ID NO: 2881006 - RNA, 19 nt, Human
uucaauaaaugucuguuga

SEQ ID NO: 2881007 - RNA, 14 nt, Human
uucaaccagauaac

SEQ ID NO: 2881008 - RNA, 14 nt, Human
uucaaccauggacu

SEQ ID NO: 2881009 - RNA, 15 nt, Human
uucaaccauggacuu

SEQ ID NO: 2881010 - RNA, 21 nt, Human
uucaaccauggacuuuauaag

SEQ ID NO: 2881011 - RNA, 19 nt, Human
uuccagaggcuauuauuuu

SEQ ID NO: 2881012 - RNA, 20 nt, Human
uuccagaggcuauuauuuuc

SEQ ID NO: 2881013 - RNA, 18 nt, Human
uuccagauaaccagcugu

SEQ ID NO: 2881014 - RNA, 20 nt, Human
uuccagacuuccuugagaca

SEQ ID NO: 2881015 - RNA, 23 nt, Human
uuccagacugcuuccaauuuucu

SEQ ID NO: 2881016 - RNA, 22 nt, Human
uuccaacguuuggaagauccug

SEQ ID NO: 2881017 - RNA, 23 nt, Human
uuccagaagaagagaagcugcug

SEQ ID NO: 2881018 - RNA, 15 nt, Human
uuccagaaugcugua

SEQ ID NO: 2881019 - RNA, 14 nt, Human
uuccagaaugcugu

SEQ ID NO: 2881020 - RNA, 18 nt, Human
uuccagaaugcuguacau

SEQ ID NO: 2881021 - RNA, 16 nt, Human
uuccagaaugcuguac

SEQ ID NO: 2881022 - RNA, 19 nt, Human
uuccagaaugcuguacauc

SEQ ID NO: 2881023 - RNA, 16 nt, Human
uuccaugcuaagcaag

SEQ ID NO: 2881024 - RNA, 17 nt, Human
uuccauccauaaaucca

SEQ ID NO: 2881025 - RNA, 23 nt, Human
uuccauccauaaauccaguucua

SEQ ID NO: 2881026 - RNA, 18 nt, Human
uuccaucccaaccagugc

SEQ ID NO: 2881027 - RNA, 20 nt, Human
uuccaucccaaccagugcca

SEQ ID NO: 2881028 - RNA, 23 nt, Human
uuccaucccaaccagugccaagg

SEQ ID NO: 2881029 - RNA, 18 nt, Human
uuccagaucacugccaca

SEQ ID NO: 2881030 - RNA, 23 nt, Human
uuccagauaaccagcuguaacac

SEQ ID NO: 2881031 - RNA, 13 nt, Human
uuccauaguuuug

SEQ ID NO: 2881032 - RNA, 22 nt, Human
uuccauaguuuugaugacuggc

SEQ ID NO: 2881033 - RNA, 23 nt, Human
uuccauaguuuugaugacuggca

SEQ ID NO: 2881034 - RNA, 15 nt, Human
uuccauauauccuuu

SEQ ID NO: 2881035 - RNA, 18 nt, Human
uuccauauauccuuuucu

SEQ ID NO: 2881036 - RNA, 15 nt, Human
uuccauaucuugcga

SEQ ID NO: 2881037 - RNA, 21 nt, Human
uuccauaucuugcgaauccaa

SEQ ID NO: 2881038 - RNA, 12 nt, Human
uuccauauuugg

SEQ ID NO: 2881039 - RNA, 14 nt, Human
uuccauauuuggaa

SEQ ID NO: 2881040 - RNA, 21 nt, Human
uuccaaaaagauuuucagaaa

SEQ ID NO: 2881041 - RNA, 15 nt, Human
uuccaaaaauuauua

SEQ ID NO: 2881042 - RNA, 12 nt, Human
uucaucugccca

SEQ ID NO: 2881043 - RNA, 18 nt, Human
uuccaaaaagguugcugu

SEQ ID NO: 2881044 - RNA, 15 nt, Human
uuccaaaagccaaug

SEQ ID NO: 2881045 - RNA, 16 nt, Human
uuccaaaagccaaugg

SEQ ID NO: 2881046 - RNA, 22 nt, Human
uuccaaagaguagaauugcauu

SEQ ID NO: 2881047 - RNA, 16 nt, Human
uuccaaagcuuuauua

SEQ ID NO: 2881048 - RNA, 22 nt, Human
uuccaaagcuuuauuaccagug

SEQ ID NO: 2881049 - RNA, 14 nt, Human
uuccaaaguuaaca

SEQ ID NO: 2881050 - RNA, 15 nt, Human
uuccaaauaaaauga

SEQ ID NO: 2881051 - RNA, 23 nt, Human
uuccaaaggccauggagagcugg

SEQ ID NO: 2881052 - RNA, 14 nt, Human
uuccaaagucucua

SEQ ID NO: 2881053 - RNA, 16 nt, Human
uuccaaagucucuaau

SEQ ID NO: 2881054 - RNA, 17 nt, Human
uuccaaagucucuaauu

SEQ ID NO: 2881055 - RNA, 23 nt, Human
uuccaacaccacagacacacaca

SEQ ID NO: 2881056 - RNA, 14 nt, Human
uuccaacagugagu

SEQ ID NO: 2881057 - RNA, 12 nt, Human
uuccaacaccac

SEQ ID NO: 2881058 - RNA, 17 nt, Human
uuccaacaccacagaca

SEQ ID NO: 2881059 - RNA, 18 nt, Human
uuccaacaccacagacac

SEQ ID NO: 2881060 - RNA, 19 nt, Human
uuccaacaccacagacaca

SEQ ID NO: 2881061 - RNA, 20 nt, Human
uuccaacaccacagacacac

SEQ ID NO: 2881062 - RNA, 21 nt, Human
uuccaacaccacagacacaca

SEQ ID NO: 2881063 - RNA, 22 nt, Human
uuccaacaccacagacacacac

SEQ ID NO: 2881064 - RNA, 18 nt, Human
uucaucuguuguuuuguu

SEQ ID NO: 2881065 - RNA, 19 nt, Human
uucaugccaccauggccag

SEQ ID NO: 2881066 - RNA, 21 nt, Human
uucaugccaauuagcaauuga

SEQ ID NO: 2881067 - RNA, 17 nt, Human
uucauuuuuaaucauga

SEQ ID NO: 2881068 - RNA, 18 nt, Human
uucauuuuuaaucaugaa

SEQ ID NO: 2881069 - RNA, 14 nt, Human
uucauuuuuaauca

SEQ ID NO: 2881070 - RNA, 22 nt, Human
uucaugccagcuacuuccuccu

SEQ ID NO: 2881071 - RNA, 22 nt, Human
uucaugccaccauggccagcca

SEQ ID NO: 2881072 - RNA, 21 nt, Human
uucaugccagcuacuuccucc

SEQ ID NO: 2881073 - RNA, 18 nt, Human
uucaugcuaucucugugu

SEQ ID NO: 2881074 - RNA, 17 nt, Human
uucaugcuaucucugug

SEQ ID NO: 2881075 - RNA, 16 nt, Human
uucaugccuggcuucg

SEQ ID NO: 2881076 - RNA, 14 nt, Human
uucaugcucugcaa

SEQ ID NO: 2881077 - RNA, 15 nt, Human
uucaugcucugcaaa

SEQ ID NO: 2881078 - RNA, 10 nt, Human
uucaguucca

SEQ ID NO: 2881079 - RNA, 14 nt, Human
uucaguuccaagaa

SEQ ID NO: 2881080 - RNA, 21 nt, Human
uucaguuccgucagaaagugu

SEQ ID NO: 2881081 - RNA, 15 nt, Human
uucauaaccuagccu

SEQ ID NO: 2881082 - RNA, 12 nt, Human
uucauaaaugaa

SEQ ID NO: 2881083 - RNA, 14 nt, Human
uucauaaagauuca

SEQ ID NO: 2881084 - RNA, 22 nt, Human
uucauaaagauucaccuaagag

SEQ ID NO: 2881085 - RNA, 16 nt, Human
uucauaaaguacuuga

SEQ ID NO: 2881086 - RNA, 20 nt, Human
uucauaaaguacuugagugu

SEQ ID NO: 2881087 - RNA, 18 nt, Human
uucaucgaaucuacuaau

SEQ ID NO: 2881088 - RNA, 16 nt, Human
uucauccuauuguuga

SEQ ID NO: 2881089 - RNA, 18 nt, Human
uucauccugacucugccc

SEQ ID NO: 2881090 - RNA, 11 nt, Human
uucauccuggc

SEQ ID NO: 2881091 - RNA, 13 nt, Human
uucauaacuuauu

SEQ ID NO: 2881092 - RNA, 18 nt, Human
uucauaacuuauugcuga

SEQ ID NO: 2881093 - RNA, 19 nt, Human
uucauaacuuauugcugau

SEQ ID NO: 2881094 - RNA, 21 nt, Human
uucauaacuuauugcugauuu

SEQ ID NO: 2881095 - RNA, 22 nt, Human
uucauaacuuauugcugauuuu

SEQ ID NO: 2881096 - RNA, 16 nt, Human
uucauaacuuccugua

SEQ ID NO: 2881097 - RNA, 20 nt, Human
uucaucgaaucuacuaauuc

SEQ ID NO: 2881098 - RNA, 16 nt, Human
uucaguggcagcugcu

SEQ ID NO: 2881099 - RNA, 15 nt, Human
uucaguggcagcugc

SEQ ID NO: 2881100 - RNA, 17 nt, Human
uucaguggcagcugcuu

SEQ ID NO: 2881101 - RNA, 20 nt, Human
uucaguguauggaaauaaau

SEQ ID NO: 2881102 - RNA, 15 nt, Human
uucaguguauuucag

SEQ ID NO: 2881103 - RNA, 14 nt, Human
uucaguguaguuaa

SEQ ID NO: 2881104 - RNA, 16 nt, Human
uucaguguaguuaauu

SEQ ID NO: 2881105 - RNA, 18 nt, Human
uucaguguaguuaauuua

SEQ ID NO: 2881106 - RNA, 19 nt, Human
uucaguguaguuaauuuau

SEQ ID NO: 2881107 - RNA, 20 nt, Human
uucaguguaguuaauuuauc

SEQ ID NO: 2881108 - RNA, 24 nt, Human
uucaguguaguuaauuuaucuaaa

SEQ ID NO: 2881109 - RNA, 13 nt, Human
uucaguggcagcu

SEQ ID NO: 2881110 - RNA, 14 nt, Human
uucaguggcagcug

SEQ ID NO: 2881111 - RNA, 22 nt, Human
uucagcuuguaaauagcucagg

SEQ ID NO: 2881112 - RNA, 16 nt, Human
uucagcuuaaaauaaa

SEQ ID NO: 2881113 - RNA, 14 nt, Human
uucagcuucauuug

SEQ ID NO: 2881114 - RNA, 15 nt, Human
uucagcuccagcuca

SEQ ID NO: 2881115 - RNA, 12 nt, Human
uucagcuccagc

SEQ ID NO: 2881116 - RNA, 13 nt, Human
uucagcucacugu

SEQ ID NO: 2881117 - RNA, 14 nt, Human
uucagcuccagccc

SEQ ID NO: 2881118 - RNA, 15 nt, Human
uucagcuccagcccc

SEQ ID NO: 2881119 - RNA, 21 nt, Human
uucagcuccagccccuuucca

SEQ ID NO: 2881120 - RNA, 22 nt, Human
uucagcuccagccccuuuccaa

SEQ ID NO: 2881121 - RNA, 23 nt, Human
uucagcuccagccccuuuccaaa

SEQ ID NO: 2881122 - RNA, 15 nt, Human
uucagcuguccuccc

SEQ ID NO: 2881123 - RNA, 16 nt, Human
uucagcuguccucccu

SEQ ID NO: 2881124 - RNA, 18 nt, Human
uucagcuguccucccucc

SEQ ID NO: 2881125 - RNA, 19 nt, Human
uucagcuguccucccucca

SEQ ID NO: 2881126 - RNA, 21 nt, Human
uucagcuguccucccuccacc

SEQ ID NO: 2881127 - RNA, 14 nt, Human
uuccuuuauauuua

SEQ ID NO: 2881128 - RNA, 16 nt, Human
uuccuugucacuggua

SEQ ID NO: 2881129 - RNA, 20 nt, Human
uuccuugcuguccuaggcca

SEQ ID NO: 2881130 - RNA, 18 nt, Human
uuccuugcuguccuaggc

SEQ ID NO: 2881131 - RNA, 17 nt, Human
uuccuuuaaaaaaauuu

SEQ ID NO: 2881132 - RNA, 23 nt, Human
uuccuuuaaaaaaauuuaagugc

SEQ ID NO: 2881133 - RNA, 15 nt, Human
uuccuuuaaaaaacu

SEQ ID NO: 2881134 - RNA, 13 nt, Human
uuccuuuacuuuc

SEQ ID NO: 2881135 - RNA, 15 nt, Human
uuccuuuacuuuccc

SEQ ID NO: 2881136 - RNA, 16 nt, Human
uuccuuuacuuucccu

SEQ ID NO: 2881137 - RNA, 17 nt, Human
uuccuuuacuuucccuu

SEQ ID NO: 2881138 - RNA, 20 nt, Human
uuccuuuacuuucccuugcu

SEQ ID NO: 2881139 - RNA, 22 nt, Human
uuccuuuacuuucccuugcuuu

SEQ ID NO: 2881140 - RNA, 13 nt, Human
uuccuugugcaaa

SEQ ID NO: 2881141 - RNA, 19 nt, Human
uuccuuguuacccaugaaa

SEQ ID NO: 2881142 - RNA, 20 nt, Human
uuccuuguuacccaugaaaa

SEQ ID NO: 2881143 - RNA, 21 nt, Human
uuccuuguuacccaugaaaaa

SEQ ID NO: 2881144 - RNA, 14 nt, Human
uuccuuguuuauca

SEQ ID NO: 2881145 - RNA, 21 nt, Human
uuccuuguuuaucagauacau

SEQ ID NO: 2881146 - RNA, 13 nt, Human
uuccuuuaaaaaa

SEQ ID NO: 2881147 - RNA, 16 nt, Human
uuccuuuaaaaaaauu

SEQ ID NO: 2881148 - RNA, 15 nt, Human
uuccuggacacucag

SEQ ID NO: 2881149 - RNA, 13 nt, Human
uuccuugccugca

SEQ ID NO: 2881150 - RNA, 13 nt, Human
uuccuugaucauu

SEQ ID NO: 2881151 - RNA, 14 nt, Human
uuccuugaucauuu

SEQ ID NO: 2881152 - RNA, 16 nt, Human
uuccuugaucauuuug

SEQ ID NO: 2881153 - RNA, 19 nt, Human
uuccuugccugcacaaacu

SEQ ID NO: 2881154 - RNA, 21 nt, Human
uuccugccuuggccucccaag

SEQ ID NO: 2881155 - RNA, 21 nt, Human
uuccugauggcaggauggccu

SEQ ID NO: 2881156 - RNA, 19 nt, Human
uuccugaugguacaggaaa

SEQ ID NO: 2881157 - RNA, 22 nt, Human
uuccugaugguacaggaaagcu

SEQ ID NO: 2881158 - RNA, 21 nt, Human
uuccugcaggccaggccagcu

SEQ ID NO: 2881159 - RNA, 17 nt, Human
uuccugcaauuuucuaa

SEQ ID NO: 2881160 - RNA, 14 nt, Human
uuccugagcuuuau

SEQ ID NO: 2881161 - RNA, 23 nt, Human
uuccugacgaaacuggccccgga

SEQ ID NO: 2881162 - RNA, 17 nt, Human
uuccugagacaaauuuu

SEQ ID NO: 2881163 - RNA, 16 nt, Human
uuccugagauuuccuc

SEQ ID NO: 2881164 - RNA, 18 nt, Human
uuccugagauuuccuccu

SEQ ID NO: 2881165 - RNA, 21 nt, Human
uuccugagauuuccuccuggc

SEQ ID NO: 2881166 - RNA, 19 nt, Human
uuccaugggauacaaccuc

SEQ ID NO: 2881167 - RNA, 17 nt, Human
uuccauguaucuuuuga

SEQ ID NO: 2881168 - RNA, 22 nt, Human
uuccaucacccguacaggcaau

SEQ ID NO: 2881169 - RNA, 16 nt, Human
uuccugacaucacagc

SEQ ID NO: 2881170 - RNA, 17 nt, Human
uuccugacaucacagca

SEQ ID NO: 2881171 - RNA, 19 nt, Human
uuccugacaucacagcagc

SEQ ID NO: 2881172 - RNA, 20 nt, Human
uuccugacaucacagcagcc

SEQ ID NO: 2881173 - RNA, 20 nt, Human
uuccauguccccucccagag

SEQ ID NO: 2881174 - RNA, 23 nt, Human
uucuacacugggugcugauccuu

SEQ ID NO: 2881175 - RNA, 14 nt, Human
uucuacaaagcacu

SEQ ID NO: 2881176 - RNA, 21 nt, Human
uucuacaaagcacuagagaau

SEQ ID NO: 2881177 - RNA, 21 nt, Human
uucuaauuucaaaaauauaac

SEQ ID NO: 2881178 - RNA, 12 nt, Human
uucuacaauuaa

SEQ ID NO: 2881179 - RNA, 17 nt, Human
uucuacaauuaauaguu

SEQ ID NO: 2881180 - RNA, 19 nt, Human
uucuacacagugggaacuc

SEQ ID NO: 2881181 - RNA, 22 nt, Human
uucuacacagugggaacucuga

SEQ ID NO: 2881182 - RNA, 19 nt, Human
uucuacccagcgagcccug

SEQ ID NO: 2881183 - RNA, 12 nt, Human
uucuacccagcg

SEQ ID NO: 2881184 - RNA, 22 nt, Human
uucuacauaaguaauucaagaa

SEQ ID NO: 2881185 - RNA, 16 nt, Human
uucuacauuucuuaga

SEQ ID NO: 2881186 - RNA, 18 nt, Human
uucuacauuauugcuuau

SEQ ID NO: 2881187 - RNA, 17 nt, Human
uucuacauuucuuagac

SEQ ID NO: 2881188 - RNA, 16 nt, Human
uucuaccaaggcauau

SEQ ID NO: 2881189 - RNA, 21 nt, Human
uucuaccacacagcagcaguu

SEQ ID NO: 2881190 - RNA, 14 nt, Human
uucuaccauuucag

SEQ ID NO: 2881191 - RNA, 13 nt, Human
uucuaauguuucu

SEQ ID NO: 2881192 - RNA, 16 nt, Human
uucuaaugucuucauu

SEQ ID NO: 2881193 - RNA, 17 nt, Human
uucuaaugucuucauuu

SEQ ID NO: 2881194 - RNA, 20 nt, Human
uucgugcggaaucagcuucu

SEQ ID NO: 2881195 - RNA, 15 nt, Human
uucgugagccccauc

SEQ ID NO: 2881196 - RNA, 20 nt, Human
uucgugagccccaucuucac

SEQ ID NO: 2881197 - RNA, 23 nt, Human
uucgugagccccaucuucaccca

SEQ ID NO: 2881198 - RNA, 14 nt, Human
uucuaaugucuuca

SEQ ID NO: 2881199 - RNA, 16 nt, Human
uucguuagaccgcucu

SEQ ID NO: 2881200 - RNA, 13 nt, Human
uucuaaugucuuc

SEQ ID NO: 2881201 - RNA, 23 nt, Human
uucuaaugugugaaucagagcac

SEQ ID NO: 2881202 - RNA, 19 nt, Human
uucguagcuuucccaaaua

SEQ ID NO: 2881203 - RNA, 13 nt, Human
uucguaugaaaau

SEQ ID NO: 2881204 - RNA, 15 nt, Human
uucguaugaaaauga

SEQ ID NO: 2881205 - RNA, 16 nt, Human
uucguccacagcuucc

SEQ ID NO: 2881206 - RNA, 17 nt, Human
uucguccacagcuuccu

SEQ ID NO: 2881207 - RNA, 18 nt, Human
uucguccacagcuuccug

SEQ ID NO: 2881208 - RNA, 19 nt, Human
uucguccacagcuuccugu

SEQ ID NO: 2881209 - RNA, 20 nt, Human
uucgguuuuuuuccuguuuc

SEQ ID NO: 2881210 - RNA, 18 nt, Human
uucgguugagaauggaaa

SEQ ID NO: 2881211 - RNA, 14 nt, Human
uucgucuucuaauu

SEQ ID NO: 2881212 - RNA, 14 nt, Human
uucgucuucacucu

SEQ ID NO: 2881213 - RNA, 15 nt, Human
uucguagcaugaguu

SEQ ID NO: 2881214 - RNA, 13 nt, Human
uucgucuucuaau

SEQ ID NO: 2881215 - RNA, 16 nt, Human
uucgucuucuaauuuc

SEQ ID NO: 2881216 - RNA, 17 nt, Human
uucgugaacauccccuc

SEQ ID NO: 2881217 - RNA, 13 nt, Human
uucuauacaaaua

SEQ ID NO: 2881218 - RNA, 14 nt, Human
uucuauacaaauau

SEQ ID NO: 2881219 - RNA, 21 nt, Human
uucuauacaaauauaaaucuu

SEQ ID NO: 2881220 - RNA, 14 nt, Human
uucuauaguucuag

SEQ ID NO: 2881221 - RNA, 15 nt, Human
uucuauaguucuaga

SEQ ID NO: 2881222 - RNA, 12 nt, Human
uucuauaugaau

SEQ ID NO: 2881223 - RNA, 16 nt, Human
uucuauaguucuagac

SEQ ID NO: 2881224 - RNA, 17 nt, Human
uucuauaguucuagaca

SEQ ID NO: 2881225 - RNA, 18 nt, Human
uucuaccauuucagagag

SEQ ID NO: 2881226 - RNA, 18 nt, Human
uucuacccaacggcccug

SEQ ID NO: 2881227 - RNA, 15 nt, Human
uucuaccauuucaga

SEQ ID NO: 2881228 - RNA, 22 nt, Human
uucuaccaugaacagaaaacau

SEQ ID NO: 2881229 - RNA, 16 nt, Human
uucuacccguuccaaa

SEQ ID NO: 2881230 - RNA, 17 nt, Human
uucuacccguuccaaaa

SEQ ID NO: 2881231 - RNA, 21 nt, Human
uucuacccagcgagcccuggu

SEQ ID NO: 2881232 - RNA, 20 nt, Human
uucuacccagcgagcccugg

SEQ ID NO: 2881233 - RNA, 14 nt, Human
uucuacggaucauc

SEQ ID NO: 2881234 - RNA, 19 nt, Human
uucuacggaucaucaacaa

SEQ ID NO: 2881235 - RNA, 20 nt, Human
uucuacggaucaucaacaag

SEQ ID NO: 2881236 - RNA, 22 nt, Human
uucuacggaucaucaacaagau

SEQ ID NO: 2881237 - RNA, 13 nt, Human
uucuacuauuuau

SEQ ID NO: 2881238 - RNA, 16 nt, Human
uucugaguuucauucu

SEQ ID NO: 2881239 - RNA, 19 nt, Human
uucugaguuucauucuccu

SEQ ID NO: 2881240 - RNA, 20 nt, Human
uucugaguuucauucuccug

SEQ ID NO: 2881241 - RNA, 23 nt, Human
uucugaguuucauucuccugccu

SEQ ID NO: 2881242 - RNA, 20 nt, Human
uucugagacaugugucaaca

SEQ ID NO: 2881243 - RNA, 13 nt, Human
uucugagaccaaa

SEQ ID NO: 2881244 - RNA, 13 nt, Human
uucugaguacaga

SEQ ID NO: 2881245 - RNA, 16 nt, Human
uucugaggcuuuauga

SEQ ID NO: 2881246 - RNA, 14 nt, Human
uucugcgccucagg

SEQ ID NO: 2881247 - RNA, 12 nt, Human
uucugccuuuuc

SEQ ID NO: 2881248 - RNA, 16 nt, Human
uucugccuuuucacug

SEQ ID NO: 2881249 - RNA, 19 nt, Human
uucugcucacauaucuguc

SEQ ID NO: 2881250 - RNA, 20 nt, Human
uucugcuccacccuuggccu

SEQ ID NO: 2881251 - RNA, 18 nt, Human
uucugcuccacccuuggc

SEQ ID NO: 2881252 - RNA, 17 nt, Human
uucugcuccacccuugg

SEQ ID NO: 2881253 - RNA, 16 nt, Human
uucugcuccacccuug

SEQ ID NO: 2881254 - RNA, 15 nt, Human
uucugcuccacccuu

SEQ ID NO: 2881255 - RNA, 13 nt, Human
uucugcuccaccc

SEQ ID NO: 2881256 - RNA, 9 nt, Human
uucugcucc

SEQ ID NO: 2881257 - RNA, 22 nt, Human
uucugauaugcaguuuuccuua

SEQ ID NO: 2881258 - RNA, 13 nt, Human
uucugauuagcuu

SEQ ID NO: 2881259 - RNA, 15 nt, Human
uucugauuagcuuug

SEQ ID NO: 2881260 - RNA, 18 nt, Human
uucugauuagcuuugugu

SEQ ID NO: 2881261 - RNA, 20 nt, Human
uucugauuagcuuuguguuu

SEQ ID NO: 2881262 - RNA, 18 nt, Human
uucugaugaugugccugg

SEQ ID NO: 2881263 - RNA, 13 nt, Human
uucugaugagcaa

SEQ ID NO: 2881264 - RNA, 14 nt, Human
uucugaugagcaac

SEQ ID NO: 2881265 - RNA, 16 nt, Human
uucugaugucucuaaa

SEQ ID NO: 2881266 - RNA, 21 nt, Human
uucugaugucucuaaagcacu

SEQ ID NO: 2881267 - RNA, 15 nt, Human
uucugauguugccuu

SEQ ID NO: 2881268 - RNA, 21 nt, Human
uucugauuugccacugauauu

SEQ ID NO: 2881269 - RNA, 23 nt, Human
uucugauuugccacugauauuca

SEQ ID NO: 2881270 - RNA, 13 nt, Human
uucugcaaaauag

SEQ ID NO: 2881271 - RNA, 12 nt, Human
uucugcaaacaa

SEQ ID NO: 2881272 - RNA, 14 nt, Human
uucugcaaacaaac

SEQ ID NO: 2881273 - RNA, 24 nt, Human
uucugauuuuaggagcuaaggcuc

SEQ ID NO: 2881274 - RNA, 17 nt, Human
uucugauuuuaggagcu

SEQ ID NO: 2881275 - RNA, 23 nt, Human
uucugauuuuaggagcuaaggcu

SEQ ID NO: 2881276 - RNA, 21 nt, Human
uucugcaagcacaucugcauu

SEQ ID NO: 2881277 - RNA, 10 nt, Human
uucugccuuu

SEQ ID NO: 2881278 - RNA, 15 nt, Human
uucugccuuugaugu

SEQ ID NO: 2881279 - RNA, 16 nt, Human
uucugccuuugauguu

SEQ ID NO: 2881280 - RNA, 23 nt, Human
uucugccuuugauguuacagauu

SEQ ID NO: 2881281 - RNA, 20 nt, Human
uucuccagcugggcucugca

SEQ ID NO: 2881282 - RNA, 20 nt, Human
uucucugaggacacuaacca

SEQ ID NO: 2881283 - RNA, 14 nt, Human
uucucugaggacac

SEQ ID NO: 2881284 - RNA, 17 nt, Human
uucuccagauuuuuaau

SEQ ID NO: 2881285 - RNA, 23 nt, Human
uucuccagauuuuucggaggccc

SEQ ID NO: 2881286 - RNA, 12 nt, Human
uucuccagcugg

SEQ ID NO: 2881287 - RNA, 13 nt, Human
uucuccagcucag

SEQ ID NO: 2881288 - RNA, 14 nt, Human
uucuccagcucaga

SEQ ID NO: 2881289 - RNA, 19 nt, Human
uucuccagcucagaaccca

SEQ ID NO: 2881290 - RNA, 20 nt, Human
uucuccagcucagaacccag

SEQ ID NO: 2881291 - RNA, 14 nt, Human
uucuccagcugggc

SEQ ID NO: 2881292 - RNA, 15 nt, Human
uucuccagcugggcu

SEQ ID NO: 2881293 - RNA, 21 nt, Human
uucucaugccucagccuccug

SEQ ID NO: 2881294 - RNA, 20 nt, Human
uucuaucuuguuccaaggcc

SEQ ID NO: 2881295 - RNA, 13 nt, Human
uucucauguguuu

SEQ ID NO: 2881296 - RNA, 23 nt, Human
uucuauccuacaacaagaguuua

SEQ ID NO: 2881297 - RNA, 17 nt, Human
uucuauccaaacaugua

SEQ ID NO: 2881298 - RNA, 20 nt, Human
uucuauccaaacauguauuu

SEQ ID NO: 2881299 - RNA, 16 nt, Human
uucuccacccugcucu

SEQ ID NO: 2881300 - RNA, 19 nt, Human
uucucauuuguuuuucuca

SEQ ID NO: 2881301 - RNA, 13 nt, Human
uucucauuuucuu

SEQ ID NO: 2881302 - RNA, 16 nt, Human
uucucauuuucuuuuc

SEQ ID NO: 2881303 - RNA, 21 nt, Human
uucuccaccuagacuguaaac

SEQ ID NO: 2881304 - RNA, 18 nt, Human
uucucauuccaacaguga

SEQ ID NO: 2881305 - RNA, 20 nt, Human
uucucauuccaacagugagu

SEQ ID NO: 2881306 - RNA, 11 nt, Human
uucucauucuu

SEQ ID NO: 2881307 - RNA, 20 nt, Human
uucucauuugccaauaauaa

SEQ ID NO: 2881308 - RNA, 12 nt, Human
uucuccagaacc

SEQ ID NO: 2881309 - RNA, 14 nt, Human
uucuccagaaccca

SEQ ID NO: 2881310 - RNA, 12 nt, Human
uucuccacugga

SEQ ID NO: 2881311 - RNA, 16 nt, Human
uugacaacugugacug

SEQ ID NO: 2881312 - RNA, 21 nt, Human
uugaccucaggugauccaccc

SEQ ID NO: 2881313 - RNA, 20 nt, Human
uugaccgcgacuaauuucaa

SEQ ID NO: 2881314 - RNA, 19 nt, Human
uugaccuccucccuguuau

SEQ ID NO: 2881315 - RNA, 21 nt, Human
uugaccuccucccuguuauuu

SEQ ID NO: 2881316 - RNA, 24 nt, Human
uugaccuccucccuguuauuuuca

SEQ ID NO: 2881317 - RNA, 20 nt, Human
uugacugaagaugcagcuca

SEQ ID NO: 2881318 - RNA, 21 nt, Human
uugacugaugcugagauucuu

SEQ ID NO: 2881319 - RNA, 19 nt, Human
uugacuggcugugugaccu

SEQ ID NO: 2881320 - RNA, 16 nt, Human
uugacucccaaguuuc

SEQ ID NO: 2881321 - RNA, 19 nt, Human
uugacucccaaguuuccau

SEQ ID NO: 2881322 - RNA, 15 nt, Human
uugacucaggauuua

SEQ ID NO: 2881323 - RNA, 23 nt, Human
uugacucaggauuuaaaaacugg

SEQ ID NO: 2881324 - RNA, 22 nt, Human
uugaacuuuccuggaugucuga

SEQ ID NO: 2881325 - RNA, 13 nt, Human
uugaauuguuaca

SEQ ID NO: 2881326 - RNA, 14 nt, Human
uugaauuguuacau

SEQ ID NO: 2881327 - RNA, 16 nt, Human
uugaacuucaccugca

SEQ ID NO: 2881328 - RNA, 18 nt, Human
uugaauuuacuggacaua

SEQ ID NO: 2881329 - RNA, 18 nt, Human
uugaacuggguacuugug

SEQ ID NO: 2881330 - RNA, 14 nt, Human
uugaacucugggcu

SEQ ID NO: 2881331 - RNA, 16 nt, Human
uugaacucugggcuca

SEQ ID NO: 2881332 - RNA, 17 nt, Human
uugaacuccugaccuca

SEQ ID NO: 2881333 - RNA, 20 nt, Human
uugaacuggcaauugucuau

SEQ ID NO: 2881334 - RNA, 23 nt, Human
uugaacuggcaauugucuauuua

SEQ ID NO: 2881335 - RNA, 16 nt, Human
uugaauuuuaaaucua

SEQ ID NO: 2881336 - RNA, 15 nt, Human
uugaauuuuaaaucu

SEQ ID NO: 2881337 - RNA, 21 nt, Human
uugacaaaaccuaacuugcgc

SEQ ID NO: 2881338 - RNA, 17 nt, Human
uugacaaaauuuucuca

SEQ ID NO: 2881339 - RNA, 18 nt, Human
uugacaaaauuuucucau

SEQ ID NO: 2881340 - RNA, 12 nt, Human
uugacaaaauuu

SEQ ID NO: 2881341 - RNA, 14 nt, Human
uugacaacugugac

SEQ ID NO: 2881342 - RNA, 13 nt, Human
uugacaaaucugu

SEQ ID NO: 2881343 - RNA, 14 nt, Human
uugacaaaucugug

SEQ ID NO: 2881344 - RNA, 17 nt, Human
uugacaaaucuguguau

SEQ ID NO: 2881345 - RNA, 20 nt, Human
uugacaaaucuguguauauu

SEQ ID NO: 2881346 - RNA, 22 nt, Human
uugacaaaucuguguauauuau

SEQ ID NO: 2881347 - RNA, 23 nt, Human
uugacaaaucuguguauauuauu

SEQ ID NO: 2881348 - RNA, 20 nt, Human
uugaugaccaaaguccuuuu

SEQ ID NO: 2881349 - RNA, 16 nt, Human
uugaugaagcaaggaa

SEQ ID NO: 2881350 - RNA, 18 nt, Human
uugaugaagcaaggaaga

SEQ ID NO: 2881351 - RNA, 21 nt, Human
uugaugaagcaaggaagauau

SEQ ID NO: 2881352 - RNA, 23 nt, Human
uugaugaagcaaggaagauauac

SEQ ID NO: 2881353 - RNA, 13 nt, Human
uugauauauauua

SEQ ID NO: 2881354 - RNA, 14 nt, Human
uugauauauauuau

SEQ ID NO: 2881355 - RNA, 23 nt, Human
uugauauauauuauaaauauaua

SEQ ID NO: 2881356 - RNA, 17 nt, Human
uugauauagaacagugc

SEQ ID NO: 2881357 - RNA, 22 nt, Human
uugauauagaacagugcuugcc

SEQ ID NO: 2881358 - RNA, 19 nt, Human
uugauagcuuuauuuuuua

SEQ ID NO: 2881359 - RNA, 14 nt, Human
uugauagcuuuauu

SEQ ID NO: 2881360 - RNA, 16 nt, Human
uugaggguugggcugg

SEQ ID NO: 2881361 - RNA, 17 nt, Human
uugagggugggguaagg

SEQ ID NO: 2881362 - RNA, 16 nt, Human
uugagguaaagauaug

SEQ ID NO: 2881363 - RNA, 21 nt, Human
uugagguagaccaggauuucu

SEQ ID NO: 2881364 - RNA, 23 nt, Human
uugagguagaccaggauuucuaa

SEQ ID NO: 2881365 - RNA, 13 nt, Human
uugaggguugggc

SEQ ID NO: 2881366 - RNA, 14 nt, Human
uugagcccucccca

SEQ ID NO: 2881367 - RNA, 15 nt, Human
uugagcccuccccag

SEQ ID NO: 2881368 - RNA, 22 nt, Human
uugagcccuccccaggaauuug

SEQ ID NO: 2881369 - RNA, 23 nt, Human
uugacuggguuucucuguauagu

SEQ ID NO: 2881370 - RNA, 21 nt, Human
uugacugguuuacaggcccug

SEQ ID NO: 2881371 - RNA, 17 nt, Human
uugacuggguuucucug

SEQ ID NO: 2881372 - RNA, 13 nt, Human
uugagcccaggag

SEQ ID NO: 2881373 - RNA, 16 nt, Human
uugaugaucuuugcag

SEQ ID NO: 2881374 - RNA, 16 nt, Human
uugaugacuggcauuu

SEQ ID NO: 2881375 - RNA, 19 nt, Human
uugaugacuggcauuuuau

SEQ ID NO: 2881376 - RNA, 22 nt, Human
uugaugacuggcauuuuauaga

SEQ ID NO: 2881377 - RNA, 17 nt, Human
uugaugacccccaacca

SEQ ID NO: 2881378 - RNA, 21 nt, Human
uugaugauacaaugaacacuu

SEQ ID NO: 2881379 - RNA, 12 nt, Human
uugaugcacaga

SEQ ID NO: 2881380 - RNA, 14 nt, Human
uugaugcacagaga

SEQ ID NO: 2881381 - RNA, 18 nt, Human
uugaugcacagagaagcu

SEQ ID NO: 2881382 - RNA, 21 nt, Human
uugaugcacagagaagcuggg

SEQ ID NO: 2881383 - RNA, 14 nt, Human
uugaugcagcauuu

SEQ ID NO: 2881384 - RNA, 15 nt, Human
uugaugcagcauuug

SEQ ID NO: 2881385 - RNA, 18 nt, Human
uugaugcagcauuugaua

SEQ ID NO: 2881386 - RNA, 18 nt, Human
uugaugcaggcacuuauu

SEQ ID NO: 2881387 - RNA, 20 nt, Human
uugauucuccuuuuaugugu

SEQ ID NO: 2881388 - RNA, 23 nt, Human
uugauucuccuuuuauguguagu

SEQ ID NO: 2881389 - RNA, 11 nt, Human
uugaugcaugu

SEQ ID NO: 2881390 - RNA, 12 nt, Human
uugaugcaugug

SEQ ID NO: 2881391 - RNA, 14 nt, Human
uugauuugaagaac

SEQ ID NO: 2881392 - RNA, 13 nt, Human
uugauuugaagaa

SEQ ID NO: 2881393 - RNA, 12 nt, Human
uugauucuuccu

SEQ ID NO: 2881394 - RNA, 19 nt, Human
uugauugacugcccauuca

SEQ ID NO: 2881395 - RNA, 20 nt, Human
uugauucugcaguaaaucuu

SEQ ID NO: 2881396 - RNA, 18 nt, Human
uugauucugcuugagaau

SEQ ID NO: 2881397 - RNA, 12 nt, Human
uugauucugcag

SEQ ID NO: 2881398 - RNA, 14 nt, Human
uugauugauuugaa

SEQ ID NO: 2881399 - RNA, 13 nt, Human
uugauugauuuga

SEQ ID NO: 2881400 - RNA, 12 nt, Human
uugcaaauaguc

SEQ ID NO: 2881401 - RNA, 12 nt, Human
uugcaaauauaa

SEQ ID NO: 2881402 - RNA, 16 nt, Human
uugcaaauauaaacau

SEQ ID NO: 2881403 - RNA, 17 nt, Human
uugcaaauauaaacauc

SEQ ID NO: 2881404 - RNA, 16 nt, Human
uugcaaaucaguguuu

SEQ ID NO: 2881405 - RNA, 17 nt, Human
uugcaaaguauuguaaa

SEQ ID NO: 2881406 - RNA, 18 nt, Human
uugcaaaguauuguaaau

SEQ ID NO: 2881407 - RNA, 20 nt, Human
uugcaaaguauuguaaauua

SEQ ID NO: 2881408 - RNA, 21 nt, Human
uugcaaaguauuguaaauuau

SEQ ID NO: 2881409 - RNA, 12 nt, Human
uugcaaaucuug

SEQ ID NO: 2881410 - RNA, 16 nt, Human
uugcaaaucuugaaau

SEQ ID NO: 2881411 - RNA, 15 nt, Human
uugcaaaucuugaaa

SEQ ID NO: 2881412 - RNA, 17 nt, Human
uugcaaaucuugaaauu

SEQ ID NO: 2881413 - RNA, 16 nt, Human
uugcacgacgcccucu

SEQ ID NO: 2881414 - RNA, 17 nt, Human
uugcacgacgcccucuc

SEQ ID NO: 2881415 - RNA, 19 nt, Human
uugcacgacgcccucuccc

SEQ ID NO: 2881416 - RNA, 20 nt, Human
uugcacgacgcccucucccc

SEQ ID NO: 2881417 - RNA, 21 nt, Human
uugcacgacgcccucucccca

SEQ ID NO: 2881418 - RNA, 18 nt, Human
uugauuugaagaacaugu

SEQ ID NO: 2881419 - RNA, 14 nt, Human
uugauuugcauuga

SEQ ID NO: 2881420 - RNA, 13 nt, Human
uugauuugcauug

SEQ ID NO: 2881421 - RNA, 19 nt, Human
uugauuugcauugaacaca

SEQ ID NO: 2881422 - RNA, 17 nt, Human
uugauuugcauugaaca

SEQ ID NO: 2881423 - RNA, 15 nt, Human
uugauuugcauugaa

SEQ ID NO: 2881424 - RNA, 23 nt, Human
uucugugucuuucacagcuccuc

SEQ ID NO: 2881425 - RNA, 12 nt, Human
uucugugucuuu

SEQ ID NO: 2881426 - RNA, 22 nt, Human
uucugugucuuucacagcuccu

SEQ ID NO: 2881427 - RNA, 15 nt, Human
uucuguguaaccauu

SEQ ID NO: 2881428 - RNA, 17 nt, Human
uucuguguaaccauuuu

SEQ ID NO: 2881429 - RNA, 18 nt, Human
uucuguguaaccauuuua

SEQ ID NO: 2881430 - RNA, 14 nt, Human
uucuguguaucucu

SEQ ID NO: 2881431 - RNA, 21 nt, Human
uucuguguaucucuuucacau

SEQ ID NO: 2881432 - RNA, 18 nt, Human
uucuguguuuauaaaaua

SEQ ID NO: 2881433 - RNA, 12 nt, Human
uucuguguuuau

SEQ ID NO: 2881434 - RNA, 17 nt, Human
uucuguguuuaauuucu

SEQ ID NO: 2881435 - RNA, 20 nt, Human
uucuguguuuaauuucuuca

SEQ ID NO: 2881436 - RNA, 23 nt, Human
uucugugugcaccuuaccaacuu

SEQ ID NO: 2881437 - RNA, 20 nt, Human
uucuggauuuugucaagcag

SEQ ID NO: 2881438 - RNA, 19 nt, Human
uucuguccuacucuguguc

SEQ ID NO: 2881439 - RNA, 14 nt, Human
uucugucccuucug

SEQ ID NO: 2881440 - RNA, 15 nt, Human
uucugucccucacag

SEQ ID NO: 2881441 - RNA, 14 nt, Human
uucugucaagaaga

SEQ ID NO: 2881442 - RNA, 13 nt, Human
uucugucacucag

SEQ ID NO: 2881443 - RNA, 16 nt, Human
uucugucacucaggcu

SEQ ID NO: 2881444 - RNA, 19 nt, Human
uucugucacucaggcugga

SEQ ID NO: 2881445 - RNA, 16 nt, Human
uucugucagaugagaa

SEQ ID NO: 2881446 - RNA, 18 nt, Human
uucugucagaugagaaca

SEQ ID NO: 2881447 - RNA, 19 nt, Human
uucugucagaugagaacaa

SEQ ID NO: 2881448 - RNA, 22 nt, Human
uucugucagaugagaacaaagc

SEQ ID NO: 2881449 - RNA, 23 nt, Human
uucugucagaugagaacaaagcu

SEQ ID NO: 2881450 - RNA, 24 nt, Human
uucugucagaugagaacaaagcug

SEQ ID NO: 2881451 - RNA, 13 nt, Human
uucuguccugcug

SEQ ID NO: 2881452 - RNA, 15 nt, Human
uucuguccugugagg

SEQ ID NO: 2881453 - RNA, 23 nt, Human
uucuguccugugagguuucccaa

SEQ ID NO: 2881454 - RNA, 15 nt, Human
uucugucucucucuu

SEQ ID NO: 2881455 - RNA, 14 nt, Human
uucugcuucagccu

SEQ ID NO: 2881456 - RNA, 18 nt, Human
uucugcuggaaacagacu

SEQ ID NO: 2881457 - RNA, 17 nt, Human
uucugcuggcaucaaga

SEQ ID NO: 2881458 - RNA, 16 nt, Human
uucugcuucagccucc

SEQ ID NO: 2881459 - RNA, 15 nt, Human
uucugcuucagccuc

SEQ ID NO: 2881460 - RNA, 19 nt, Human
uucugcuucagccucccga

SEQ ID NO: 2881461 - RNA, 18 nt, Human
uucugcuuguguuaagua

SEQ ID NO: 2881462 - RNA, 17 nt, Human
uucuggaauacaugaaa

SEQ ID NO: 2881463 - RNA, 16 nt, Human
uucugcuucaauaaau

SEQ ID NO: 2881464 - RNA, 19 nt, Human
uucugcuucaauaaaucuu

SEQ ID NO: 2881465 - RNA, 13 nt, Human
uucugcuugagaa

SEQ ID NO: 2881466 - RNA, 17 nt, Human
uucugcuugagaauauu

SEQ ID NO: 2881467 - RNA, 18 nt, Human
uucugcuuuccucuuccu

SEQ ID NO: 2881468 - RNA, 14 nt, Human
uucugcuuucuccc

SEQ ID NO: 2881469 - RNA, 22 nt, Human
uucugcuuucuccccaaugaga

SEQ ID NO: 2881470 - RNA, 15 nt, Human
uucugcuuucuuuga

SEQ ID NO: 2881471 - RNA, 19 nt, Human
uucugcuuucuuugauucu

SEQ ID NO: 2881472 - RNA, 14 nt, Human
uucuggaauuuguu

SEQ ID NO: 2881473 - RNA, 17 nt, Human
uucuggaauuuguucaa

SEQ ID NO: 2881474 - RNA, 18 nt, Human
uucuggaauuuguucaag

SEQ ID NO: 2881475 - RNA, 19 nt, Human
uucuggaauuuguucaagu

SEQ ID NO: 2881476 - RNA, 20 nt, Human
uucuggaauuuguucaaguu

SEQ ID NO: 2881477 - RNA, 21 nt, Human
uucuggaauuuguucaaguuu

SEQ ID NO: 2881478 - RNA, 22 nt, Human
uucuggaauuuguucaaguuuu

SEQ ID NO: 2881479 - RNA, 19 nt, Human
uucuggacagucagcucuu

SEQ ID NO: 2881480 - RNA, 22 nt, Human
uucuggacagucagcucuucau

SEQ ID NO: 2881481 - RNA, 19 nt, Human
uucuggaauacaugaaaua

SEQ ID NO: 2881482 - RNA, 15 nt, Human
uucuggagcccuugg

SEQ ID NO: 2881483 - RNA, 13 nt, Human
uucuggagcccuu

SEQ ID NO: 2881484 - RNA, 10 nt, Human
uucuggaguu

SEQ ID NO: 2881485 - RNA, 10 nt, Human
uucuggagcc

SEQ ID NO: 2881486 - RNA, 16 nt, Human
uucuuauacgcuuuuc

SEQ ID NO: 2881487 - RNA, 22 nt, Human
uucuucauucuaucaagcccag

SEQ ID NO: 2881488 - RNA, 20 nt, Human
uucuuccaggugcccagcua

SEQ ID NO: 2881489 - RNA, 19 nt, Human
uucuuccaggugcccagcu

SEQ ID NO: 2881490 - RNA, 17 nt, Human
uucuuccaaaaagauuu

SEQ ID NO: 2881491 - RNA, 12 nt, Human
uucuuauaauac

SEQ ID NO: 2881492 - RNA, 13 nt, Human
uucuuauaauacu

SEQ ID NO: 2881493 - RNA, 17 nt, Human
uucuuauaauacucugu

SEQ ID NO: 2881494 - RNA, 19 nt, Human
uucuuauaauacucuguug

SEQ ID NO: 2881495 - RNA, 14 nt, Human
uucuuauacacauu

SEQ ID NO: 2881496 - RNA, 11 nt, Human
uucuuccagga

SEQ ID NO: 2881497 - RNA, 22 nt, Human
uucuucccuuuuaaacacauuu

SEQ ID NO: 2881498 - RNA, 21 nt, Human
uucuuccuauuugccaugggc

SEQ ID NO: 2881499 - RNA, 13 nt, Human
uucuuccauccca

SEQ ID NO: 2881500 - RNA, 14 nt, Human
uucuuccaucccag

SEQ ID NO: 2881501 - RNA, 16 nt, Human
uucuuccaucccagga

SEQ ID NO: 2881502 - RNA, 17 nt, Human
uucuuccaucccaggac

SEQ ID NO: 2881503 - RNA, 12 nt, Human
uucuuguugcuu

SEQ ID NO: 2881504 - RNA, 15 nt, Human
uucuuguuuauugag

SEQ ID NO: 2881505 - RNA, 13 nt, Human
uucuuguuucucc

SEQ ID NO: 2881506 - RNA, 16 nt, Human
uucuuccuccagcugc

SEQ ID NO: 2881507 - RNA, 14 nt, Human
uucuuuaaagaagu

SEQ ID NO: 2881508 - RNA, 15 nt, Human
uucuuucaauucugu

SEQ ID NO: 2881509 - RNA, 18 nt, Human
uucuuucagcuaucagua

SEQ ID NO: 2881510 - RNA, 23 nt, Human
uucuuuaaaaaacaacuauggau

SEQ ID NO: 2881511 - RNA, 14 nt, Human
uugaaaaacucuuu

SEQ ID NO: 2881512 - RNA, 21 nt, Human
uugaaaaacucuuuauuuucc

SEQ ID NO: 2881513 - RNA, 18 nt, Human
uugaaaaaguuaaugcuu

SEQ ID NO: 2881514 - RNA, 14 nt, Human
uugaaaaaucacuu

SEQ ID NO: 2881515 - RNA, 16 nt, Human
uugaaaaccugacaaa

SEQ ID NO: 2881516 - RNA, 18 nt, Human
uugaaaacauaaucugca

SEQ ID NO: 2881517 - RNA, 16 nt, Human
uugaaaaccaaaauga

SEQ ID NO: 2881518 - RNA, 17 nt, Human
uugaaaaccaaaaugac

SEQ ID NO: 2881519 - RNA, 18 nt, Human
uugaaaaccaaaaugaca

SEQ ID NO: 2881520 - RNA, 19 nt, Human
uugaaaaccaaaaugacau

SEQ ID NO: 2881521 - RNA, 20 nt, Human
uugaaaaccaaaaugacauc

SEQ ID NO: 2881522 - RNA, 21 nt, Human
uugaaaaccaaaaugacaucu

SEQ ID NO: 2881523 - RNA, 22 nt, Human
uugaaaaccaaaaugacaucuu

SEQ ID NO: 2881524 - RNA, 23 nt, Human
uugaaaaccaaaaugacaucuuu

SEQ ID NO: 2881525 - RNA, 15 nt, Human
uugaaaaaaacuuca

SEQ ID NO: 2881526 - RNA, 20 nt, Human
uugaaaaaaacuucauucuc

SEQ ID NO: 2881527 - RNA, 12 nt, Human
uugaaaaaaaua

SEQ ID NO: 2881528 - RNA, 11 nt, Human
uugaaaaaagc

SEQ ID NO: 2881529 - RNA, 13 nt, Human
uugaaaaaagcuc

SEQ ID NO: 2881530 - RNA, 14 nt, Human
uugaaaaaagcuca

SEQ ID NO: 2881531 - RNA, 15 nt, Human
uugaaaaaagcucau

SEQ ID NO: 2881532 - RNA, 17 nt, Human
uugaaaaaagcucauuu

SEQ ID NO: 2881533 - RNA, 18 nt, Human
uugaaaaaagcucauuuc

SEQ ID NO: 2881534 - RNA, 20 nt, Human
uugaaaaaagcucauuucau

SEQ ID NO: 2881535 - RNA, 18 nt, Human
uucuuuuuuuucauuaua

SEQ ID NO: 2881536 - RNA, 16 nt, Human
uugaacuccuggccuc

SEQ ID NO: 2881537 - RNA, 15 nt, Human
uugaacuccuggccu

SEQ ID NO: 2881538 - RNA, 13 nt, Human
uugaaaagcuauu

SEQ ID NO: 2881539 - RNA, 18 nt, Human
uugaaaaccuaaaagaca

SEQ ID NO: 2881540 - RNA, 23 nt, Human
uugaaaagauguaccugguggau

SEQ ID NO: 2881541 - RNA, 22 nt, Human
uugaaaagcuauuagccaggau

SEQ ID NO: 2881542 - RNA, 17 nt, Human
uugaaaagcuucuuaau

SEQ ID NO: 2881543 - RNA, 19 nt, Human
uugaaaagcuucuuaauua

SEQ ID NO: 2881544 - RNA, 21 nt, Human
uugaaaagcuucuuaauuaau

SEQ ID NO: 2881545 - RNA, 22 nt, Human
uugaaaagcuucuuaauuaauu

SEQ ID NO: 2881546 - RNA, 14 nt, Human
uugaaaagcuauua

SEQ ID NO: 2881547 - RNA, 14 nt, Human
uugaacuaagaaac

SEQ ID NO: 2881548 - RNA, 16 nt, Human
uugaacuaagaaacuu

SEQ ID NO: 2881549 - RNA, 18 nt, Human
uugaacuaagaaacuuuu

SEQ ID NO: 2881550 - RNA, 19 nt, Human
uugaacuaagaaacuuuug

SEQ ID NO: 2881551 - RNA, 22 nt, Human
uugaacuaagaaacuuuuguaa

SEQ ID NO: 2881552 - RNA, 15 nt, Human
uugaacucagaucug

SEQ ID NO: 2881553 - RNA, 20 nt, Human
uugaacucagaucugucuga

SEQ ID NO: 2881554 - RNA, 13 nt, Human
uugaacuccaaga

SEQ ID NO: 2881555 - RNA, 13 nt, Human
uugaaaacuuuuc

SEQ ID NO: 2881556 - RNA, 14 nt, Human
uugaaaacuuuucu

SEQ ID NO: 2881557 - RNA, 16 nt, Human
uugaaaacuuuucuca

SEQ ID NO: 2881558 - RNA, 17 nt, Human
uugaaaacuuuucucag

SEQ ID NO: 2881559 - RNA, 12 nt, Human
uugaaaagcuau

SEQ ID NO: 2881560 - RNA, 14 nt, Human
caaugaagccagcu

SEQ ID NO: 2881561 - RNA, 21 nt, Human
caaugaagccagcucacagug

SEQ ID NO: 2881562 - RNA, 14 nt, Human
caaugacacagucu

SEQ ID NO: 2881563 - RNA, 14 nt, Human
caaugaauauugaa

SEQ ID NO: 2881564 - RNA, 19 nt, Human
caaugacacagucuuggcu

SEQ ID NO: 2881565 - RNA, 21 nt, Human
caaugacacagucuuggcuca

SEQ ID NO: 2881566 - RNA, 20 nt, Human
caaugauaguaagaaaagug

SEQ ID NO: 2881567 - RNA, 14 nt, Human
caaugaugaaugag

SEQ ID NO: 2881568 - RNA, 16 nt, Human
caaugacaucucaggg

SEQ ID NO: 2881569 - RNA, 17 nt, Human
caaugacaucucagggg

SEQ ID NO: 2881570 - RNA, 19 nt, Human
caaugacaucucaggggcc

SEQ ID NO: 2881571 - RNA, 22 nt, Human
caaugacaucucaggggccaga

SEQ ID NO: 2881572 - RNA, 18 nt, Human
caaugauaguaagaaaag

SEQ ID NO: 2881573 - RNA, 13 nt, Human
caaugcagcaagg

SEQ ID NO: 2881574 - RNA, 18 nt, Human
caaugcagcaaggcccug

SEQ ID NO: 2881575 - RNA, 20 nt, Human
caaugcagcaaggcccugcu

SEQ ID NO: 2881576 - RNA, 22 nt, Human
caaugcagcaaggcccugcugc

SEQ ID NO: 2881577 - RNA, 21 nt, Human
caaugaugaaugagaaucuac

SEQ ID NO: 2881578 - RNA, 16 nt, Human
caaugauggcaauuuu

SEQ ID NO: 2881579 - RNA, 13 nt, Human
caaugauggcaau

SEQ ID NO: 2881580 - RNA, 15 nt, Human
caauaggcuguuccc

SEQ ID NO: 2881581 - RNA, 15 nt, Human
caauagguaaagcua

SEQ ID NO: 2881582 - RNA, 15 nt, Human
caauauguaaauagu

SEQ ID NO: 2881583 - RNA, 12 nt, Human
caauaugcuuac

SEQ ID NO: 2881584 - RNA, 21 nt, Human
caauauguaaauagugcagaa

SEQ ID NO: 2881585 - RNA, 18 nt, Human
caauaguaauucucaggc

SEQ ID NO: 2881586 - RNA, 13 nt, Human
caauaugaaguua

SEQ ID NO: 2881587 - RNA, 22 nt, Human
caauaugaaguuacuuucuuaa

SEQ ID NO: 2881588 - RNA, 23 nt, Human
caauaugaaguuacuuucuuaau

SEQ ID NO: 2881589 - RNA, 11 nt, Human
caauaugcuua

SEQ ID NO: 2881590 - RNA, 19 nt, Human
caaguguuguuuuuuaagu

SEQ ID NO: 2881591 - RNA, 16 nt, Human
caaguguucacaaccu

SEQ ID NO: 2881592 - RNA, 18 nt, Human
caagugugggggguccuu

SEQ ID NO: 2881593 - RNA, 13 nt, Human
caauauguauugu

SEQ ID NO: 2881594 - RNA, 14 nt, Human
caauauguauugua

SEQ ID NO: 2881595 - RNA, 15 nt, Human
caauauguauuguaa

SEQ ID NO: 2881596 - RNA, 16 nt, Human
caauauguauuguaaa

SEQ ID NO: 2881597 - RNA, 21 nt, Human
caauauguauuguaaacaugu

SEQ ID NO: 2881598 - RNA, 22 nt, Human
caauauguauuguaaacaugug

SEQ ID NO: 2881599 - RNA, 23 nt, Human
caauauguauuguaaacaugugu

SEQ ID NO: 2881600 - RNA, 16 nt, Human
caauaugugagugccu

SEQ ID NO: 2881601 - RNA, 17 nt, Human
caauaugugagugccuu

SEQ ID NO: 2881602 - RNA, 20 nt, Human
caauaugugagugccuuuug

SEQ ID NO: 2881603 - RNA, 22 nt, Human
caauaugugagugccuuuugca

SEQ ID NO: 2881604 - RNA, 17 nt, Human
caauauguguuuacuuu

SEQ ID NO: 2881605 - RNA, 18 nt, Human
caauauguguuuacuuua

SEQ ID NO: 2881606 - RNA, 13 nt, Human
caauccucuaagc

SEQ ID NO: 2881607 - RNA, 19 nt, Human
caauccucucaccucagcc

SEQ ID NO: 2881608 - RNA, 18 nt, Human
caaugaacacuuauaagu

SEQ ID NO: 2881609 - RNA, 21 nt, Human
caaugaaaugcucuccuuucc

SEQ ID NO: 2881610 - RNA, 19 nt, Human
caaugaaaugcucuccuuu

SEQ ID NO: 2881611 - RNA, 12 nt, Human
caauccuggcuc

SEQ ID NO: 2881612 - RNA, 16 nt, Human
cacaacacacacacuc

SEQ ID NO: 2881613 - RNA, 17 nt, Human
cacaaccuucuguggcu

SEQ ID NO: 2881614 - RNA, 18 nt, Human
cacaaccuucuguggcuc

SEQ ID NO: 2881615 - RNA, 19 nt, Human
cacaaccuucuguggcuca

SEQ ID NO: 2881616 - RNA, 23 nt, Human
cacaaccuucuguggcucacaga

SEQ ID NO: 2881617 - RNA, 20 nt, Human
cacaaauuucacuuauaccu

SEQ ID NO: 2881618 - RNA, 21 nt, Human
cacaacagccaacagcuacaa

SEQ ID NO: 2881619 - RNA, 22 nt, Human
cacaacacacagauuugagcuc

SEQ ID NO: 2881620 - RNA, 15 nt, Human
cacaacauuugcaga

SEQ ID NO: 2881621 - RNA, 19 nt, Human
cacaacauuugcagauguu

SEQ ID NO: 2881622 - RNA, 20 nt, Human
cacaaccaacgcgaaaccaa

SEQ ID NO: 2881623 - RNA, 23 nt, Human
cacaaccaccguuacaaguauac

SEQ ID NO: 2881624 - RNA, 16 nt, Human
cacaaccagccaggca

SEQ ID NO: 2881625 - RNA, 18 nt, Human
cacaaaaguuucucuuuu

SEQ ID NO: 2881626 - RNA, 16 nt, Human
cacaaaaguuucucuu

SEQ ID NO: 2881627 - RNA, 14 nt, Human
cacaaaaauguuga

SEQ ID NO: 2881628 - RNA, 16 nt, Human
cacaaaaauguugaac

SEQ ID NO: 2881629 - RNA, 19 nt, Human
cacaaaaauguugaaccaa

SEQ ID NO: 2881630 - RNA, 20 nt, Human
cacaaaaauuugaacacugg

SEQ ID NO: 2881631 - RNA, 19 nt, Human
caauuuucuggaauacaug

SEQ ID NO: 2881632 - RNA, 16 nt, Human
caauuuucuaagcaau

SEQ ID NO: 2881633 - RNA, 22 nt, Human
caauuuucuaagcaauuucuug

SEQ ID NO: 2881634 - RNA, 19 nt, Human
cacaaacuuuuauacucuu

SEQ ID NO: 2881635 - RNA, 18 nt, Human
cacaaagcacaguuugaa

SEQ ID NO: 2881636 - RNA, 15 nt, Human
cacaaagaguucugg

SEQ ID NO: 2881637 - RNA, 21 nt, Human
cacaaagaguucuggaaaaga

SEQ ID NO: 2881638 - RNA, 22 nt, Human
cacaaagcacaguuugaacaaa

SEQ ID NO: 2881639 - RNA, 13 nt, Human
cacaaaacagccu

SEQ ID NO: 2881640 - RNA, 14 nt, Human
cacaaacuguaaau

SEQ ID NO: 2881641 - RNA, 17 nt, Human
cacaaaaccuguccuau

SEQ ID NO: 2881642 - RNA, 20 nt, Human
cacaaaacuccgcccccagc

SEQ ID NO: 2881643 - RNA, 21 nt, Human
cacaaaacuccgcccccagcc

SEQ ID NO: 2881644 - RNA, 22 nt, Human
cacaaaacuccgcccccagccu

SEQ ID NO: 2881645 - RNA, 23 nt, Human
cacaaaacuccgcccccagccua

SEQ ID NO: 2881646 - RNA, 23 nt, Human
cacaaacuguaaauaaaaagaaa

SEQ ID NO: 2881647 - RNA, 15 nt, Human
cacaaacuguaaaua

SEQ ID NO: 2881648 - RNA, 18 nt, Human
caauuuuaauuuaguaaa

SEQ ID NO: 2881649 - RNA, 19 nt, Human
caauuuuaauuuaguaaau

SEQ ID NO: 2881650 - RNA, 21 nt, Human
caauuuuaauuuaguaaaugu

SEQ ID NO: 2881651 - RNA, 22 nt, Human
caauuuuaauuuaguaaauguu

SEQ ID NO: 2881652 - RNA, 23 nt, Human
caauuuuaauuuaguaaauguua

SEQ ID NO: 2881653 - RNA, 13 nt, Human
caauuuuaaagac

SEQ ID NO: 2881654 - RNA, 10 nt, Human
caauuccaau

SEQ ID NO: 2881655 - RNA, 16 nt, Human
caauuccaauauuucu

SEQ ID NO: 2881656 - RNA, 17 nt, Human
caauuccaauauuucug

SEQ ID NO: 2881657 - RNA, 21 nt, Human
caauuccaauauuucugcuuu

SEQ ID NO: 2881658 - RNA, 12 nt, Human
caauuuuaaaga

SEQ ID NO: 2881659 - RNA, 12 nt, Human
caauuuucaggu

SEQ ID NO: 2881660 - RNA, 15 nt, Human
caauucaaaaguucc

SEQ ID NO: 2881661 - RNA, 17 nt, Human
caauucaaaaguuccaa

SEQ ID NO: 2881662 - RNA, 17 nt, Human
caauucaauacaaacaa

SEQ ID NO: 2881663 - RNA, 22 nt, Human
caauucaauacaaacaaucucu

SEQ ID NO: 2881664 - RNA, 14 nt, Human
caauucaacacucc

SEQ ID NO: 2881665 - RNA, 18 nt, Human
caaugugaaaaauguguc

SEQ ID NO: 2881666 - RNA, 21 nt, Human
caauucagugcuguacuugau

SEQ ID NO: 2881667 - RNA, 22 nt, Human
caaugccaaaaaaagacagggc

SEQ ID NO: 2881668 - RNA, 14 nt, Human
caaugccaagauaa

SEQ ID NO: 2881669 - RNA, 19 nt, Human
caaugucaggaacagaagg

SEQ ID NO: 2881670 - RNA, 21 nt, Human
caaugucaggaacagaaggau

SEQ ID NO: 2881671 - RNA, 14 nt, Human
caaugucaguauuu

SEQ ID NO: 2881672 - RNA, 21 nt, Human
caaugucaguauuucagugua

SEQ ID NO: 2881673 - RNA, 21 nt, Human
caaugucauauacugccaugu

SEQ ID NO: 2881674 - RNA, 13 nt, Human
caaugucugcagc

SEQ ID NO: 2881675 - RNA, 15 nt, Human
caaugucugcagccc

SEQ ID NO: 2881676 - RNA, 16 nt, Human
caaugucugcagcccu

SEQ ID NO: 2881677 - RNA, 17 nt, Human
caaugucugcagcccug

SEQ ID NO: 2881678 - RNA, 18 nt, Human
caaugucugcagcccuga

SEQ ID NO: 2881679 - RNA, 19 nt, Human
caaugucugcagcccugag

SEQ ID NO: 2881680 - RNA, 22 nt, Human
caaugucugcagcccugagaaa

SEQ ID NO: 2881681 - RNA, 11 nt, Human
caaugugaaaa

SEQ ID NO: 2881682 - RNA, 18 nt, Human
cacacuaucauaguuaac

SEQ ID NO: 2881683 - RNA, 19 nt, Human
cacacuaucauaguuaaca

SEQ ID NO: 2881684 - RNA, 12 nt, Human
cacacuauuuua

SEQ ID NO: 2881685 - RNA, 14 nt, Human
cacacuauuuuaga

SEQ ID NO: 2881686 - RNA, 14 nt, Human
cacacucauccccu

SEQ ID NO: 2881687 - RNA, 13 nt, Human
cacacucagugca

SEQ ID NO: 2881688 - RNA, 18 nt, Human
cacacugaugcuuagaug

SEQ ID NO: 2881689 - RNA, 14 nt, Human
cacacugaugcuua

SEQ ID NO: 2881690 - RNA, 13 nt, Human
cacacuggacucc

SEQ ID NO: 2881691 - RNA, 19 nt, Human
cacacuggacuccggcccu

SEQ ID NO: 2881692 - RNA, 20 nt, Human
cacacuggacuccggcccuc

SEQ ID NO: 2881693 - RNA, 18 nt, Human
cacacugcacuguuuuca

SEQ ID NO: 2881694 - RNA, 19 nt, Human
cacacugguucucaaugaa

SEQ ID NO: 2881695 - RNA, 18 nt, Human
cacacugguucucaauga

SEQ ID NO: 2881696 - RNA, 18 nt, Human
cacacugucaugcuucau

SEQ ID NO: 2881697 - RNA, 20 nt, Human
cacacugucaugcuucauca

SEQ ID NO: 2881698 - RNA, 21 nt, Human
cacacugucaugcuucaucau

SEQ ID NO: 2881699 - RNA, 22 nt, Human
cacacugucaugcuucaucauu

SEQ ID NO: 2881700 - RNA, 12 nt, Human
cacacugugaca

SEQ ID NO: 2881701 - RNA, 14 nt, Human
cacacugugacaca

SEQ ID NO: 2881702 - RNA, 17 nt, Human
cacacugugacacacua

SEQ ID NO: 2881703 - RNA, 19 nt, Human
cacacugugacacacuaca

SEQ ID NO: 2881704 - RNA, 22 nt, Human
cacacugugacacacuacacca

SEQ ID NO: 2881705 - RNA, 20 nt, Human
cacacugguucucaaugaaa

SEQ ID NO: 2881706 - RNA, 15 nt, Human
cacacuguaaauaug

SEQ ID NO: 2881707 - RNA, 16 nt, Human
cacacugguucucaau

SEQ ID NO: 2881708 - RNA, 15 nt, Human
cacacugguucucaa

SEQ ID NO: 2881709 - RNA, 14 nt, Human
cacacugguucuca

SEQ ID NO: 2881710 - RNA, 16 nt, Human
cacacugguacuuaga

SEQ ID NO: 2881711 - RNA, 18 nt, Human
cacacugguacuuagagu

SEQ ID NO: 2881712 - RNA, 19 nt, Human
cacacugguacuuagaguu

SEQ ID NO: 2881713 - RNA, 22 nt, Human
cacacugguacuuagaguuucu

SEQ ID NO: 2881714 - RNA, 18 nt, Human
cacacuucaggcucuucu

SEQ ID NO: 2881715 - RNA, 20 nt, Human
cacacuucaggcucuucucc

SEQ ID NO: 2881716 - RNA, 21 nt, Human
cacacuucaggcucuucuccu

SEQ ID NO: 2881717 - RNA, 22 nt, Human
cacacuucaggcucuucuccuu

SEQ ID NO: 2881718 - RNA, 14 nt, Human
cacacuucaggcuc

SEQ ID NO: 2881719 - RNA, 17 nt, Human
cacacuucaggcucuuc

SEQ ID NO: 2881720 - RNA, 22 nt, Human
cacacuuacuguaagacauuag

SEQ ID NO: 2881721 - RNA, 21 nt, Human
cacagagcacuagguucaauu

SEQ ID NO: 2881722 - RNA, 18 nt, Human
cacagagagggagagcag

SEQ ID NO: 2881723 - RNA, 19 nt, Human
cacagagagggagagcaga

SEQ ID NO: 2881724 - RNA, 22 nt, Human
cacagagagggagagcagagaa

SEQ ID NO: 2881725 - RNA, 23 nt, Human
cacagagagggagagcagagaaa

SEQ ID NO: 2881726 - RNA, 18 nt, Human
cacagacucaaaugcuca

SEQ ID NO: 2881727 - RNA, 19 nt, Human
cacagacugguuuugcaac

SEQ ID NO: 2881728 - RNA, 15 nt, Human
cacagacucauccug

SEQ ID NO: 2881729 - RNA, 16 nt, Human
cacagacucauccuga

SEQ ID NO: 2881730 - RNA, 21 nt, Human
cacagacucauccugaacagc

SEQ ID NO: 2881731 - RNA, 22 nt, Human
cacagacucauccugaacagca

SEQ ID NO: 2881732 - RNA, 23 nt, Human
cacagacucauccugaacagcau

SEQ ID NO: 2881733 - RNA, 13 nt, Human
cacagagaagcug

SEQ ID NO: 2881734 - RNA, 14 nt, Human
cacagagaagcugg

SEQ ID NO: 2881735 - RNA, 15 nt, Human
cacagagaagcuggg

SEQ ID NO: 2881736 - RNA, 20 nt, Human
cacagagaagcuggggagga

SEQ ID NO: 2881737 - RNA, 17 nt, Human
cacacuuguuccagcuc

SEQ ID NO: 2881738 - RNA, 16 nt, Human
cacacuuguuccagcu

SEQ ID NO: 2881739 - RNA, 22 nt, Human
cacacuuguaggauaagugaaa

SEQ ID NO: 2881740 - RNA, 21 nt, Human
cacacuuggcccaaguggcag

SEQ ID NO: 2881741 - RNA, 15 nt, Human
cacacuuguuccagc

SEQ ID NO: 2881742 - RNA, 22 nt, Human
cacacuucugugagacccccac

SEQ ID NO: 2881743 - RNA, 15 nt, Human
cacacuucugugaga

SEQ ID NO: 2881744 - RNA, 14 nt, Human
cacacuuccagaca

SEQ ID NO: 2881745 - RNA, 15 nt, Human
cacaaccugcaucuu

SEQ ID NO: 2881746 - RNA, 19 nt, Human
cacaacuauuuuuccaaaa

SEQ ID NO: 2881747 - RNA, 14 nt, Human
cacaacuauuuuuc

SEQ ID NO: 2881748 - RNA, 18 nt, Human
cacaacuaguuuuguuua

SEQ ID NO: 2881749 - RNA, 12 nt, Human
cacacacaggug

SEQ ID NO: 2881750 - RNA, 12 nt, Human
cacacacauaca

SEQ ID NO: 2881751 - RNA, 13 nt, Human
cacacacauagau

SEQ ID NO: 2881752 - RNA, 13 nt, Human
cacacacauacac

SEQ ID NO: 2881753 - RNA, 14 nt, Human
cacacaccagagcc

SEQ ID NO: 2881754 - RNA, 13 nt, Human
cacacacaugcac

SEQ ID NO: 2881755 - RNA, 14 nt, Human
cacacacaugcaca

SEQ ID NO: 2881756 - RNA, 16 nt, Human
cacaacgugcaacuga

SEQ ID NO: 2881757 - RNA, 18 nt, Human
cacacacaugcuaggaug

SEQ ID NO: 2881758 - RNA, 14 nt, Human
cacacagaccacca

SEQ ID NO: 2881759 - RNA, 12 nt, Human
cacacagaaaua

SEQ ID NO: 2881760 - RNA, 14 nt, Human
cacacagaaauaua

SEQ ID NO: 2881761 - RNA, 16 nt, Human
cacacagaaauauaua

SEQ ID NO: 2881762 - RNA, 18 nt, Human
cacacagaaauauauaua

SEQ ID NO: 2881763 - RNA, 21 nt, Human
cacacagaaauauauauacau

SEQ ID NO: 2881764 - RNA, 22 nt, Human
cacacagaaauauauauacaua

SEQ ID NO: 2881765 - RNA, 12 nt, Human
cacacagcucug

SEQ ID NO: 2881766 - RNA, 21 nt, Human
cacacccucccccgccacucc

SEQ ID NO: 2881767 - RNA, 21 nt, Human
cacacccuguacuguucugug

SEQ ID NO: 2881768 - RNA, 14 nt, Human
cacacccuguuuua

SEQ ID NO: 2881769 - RNA, 12 nt, Human
cacacccugagg

SEQ ID NO: 2881770 - RNA, 13 nt, Human
cacacccugaggu

SEQ ID NO: 2881771 - RNA, 21 nt, Human
cacacccugaggucagggagu

SEQ ID NO: 2881772 - RNA, 22 nt, Human
cacacccugaggucagggagug

SEQ ID NO: 2881773 - RNA, 11 nt, Human
cacacccugca

SEQ ID NO: 2881774 - RNA, 12 nt, Human
cacacccugcaa

SEQ ID NO: 2881775 - RNA, 13 nt, Human
cacacccugcaag

SEQ ID NO: 2881776 - RNA, 15 nt, Human
cacacccugcaaggc

SEQ ID NO: 2881777 - RNA, 16 nt, Human
cacacccugcaaggcc

SEQ ID NO: 2881778 - RNA, 18 nt, Human
cacacccucacucugcca

SEQ ID NO: 2881779 - RNA, 19 nt, Human
cacacccucacucugccag

SEQ ID NO: 2881780 - RNA, 20 nt, Human
cacacccucacucugccagg

SEQ ID NO: 2881781 - RNA, 22 nt, Human
cacaccuuuuauugacacagaa

SEQ ID NO: 2881782 - RNA, 20 nt, Human
cacacuacaccacacacaac

SEQ ID NO: 2881783 - RNA, 22 nt, Human
cacacuacaccacacacaacag

SEQ ID NO: 2881784 - RNA, 23 nt, Human
cacacuacaccacacacaacagc

SEQ ID NO: 2881785 - RNA, 23 nt, Human
cacaccuuuuauugacacagaaa

SEQ ID NO: 2881786 - RNA, 20 nt, Human
cacacgaccggggccagcac

SEQ ID NO: 2881787 - RNA, 22 nt, Human
cacaccuguaaucccagcacuu

SEQ ID NO: 2881788 - RNA, 17 nt, Human
cacaccuguaaucccag

SEQ ID NO: 2881789 - RNA, 20 nt, Human
cacaccuguaaucccagcac

SEQ ID NO: 2881790 - RNA, 12 nt, Human
cacaccucugcc

SEQ ID NO: 2881791 - RNA, 13 nt, Human
cacaccucugcca

SEQ ID NO: 2881792 - RNA, 14 nt, Human
cacaccucugccag

SEQ ID NO: 2881793 - RNA, 16 nt, Human
cacacccacucagcuc

SEQ ID NO: 2881794 - RNA, 23 nt, Human
cacacccaggcacuuaagcacaa

SEQ ID NO: 2881795 - RNA, 15 nt, Human
cacacccacucagcu

SEQ ID NO: 2881796 - RNA, 14 nt, Human
cacacccacucagc

SEQ ID NO: 2881797 - RNA, 21 nt, Human
cacaccaggcuugccugcagg

SEQ ID NO: 2881798 - RNA, 22 nt, Human
cacaccaggcuugccugcaggc

SEQ ID NO: 2881799 - RNA, 16 nt, Human
cacaccagucacauga

SEQ ID NO: 2881800 - RNA, 13 nt, Human
cacaccagagccc

SEQ ID NO: 2881801 - RNA, 12 nt, Human
cacaccagagcc

SEQ ID NO: 2881802 - RNA, 15 nt, Human
cacaccagagcccac

SEQ ID NO: 2881803 - RNA, 13 nt, Human
cacacagcuccca

SEQ ID NO: 2881804 - RNA, 12 nt, Human
cacaacugacac

SEQ ID NO: 2881805 - RNA, 13 nt, Human
cacaacugacaca

SEQ ID NO: 2881806 - RNA, 15 nt, Human
cacaacugacacagg

SEQ ID NO: 2881807 - RNA, 16 nt, Human
cacaacugacacagga

SEQ ID NO: 2881808 - RNA, 17 nt, Human
cacaacugacacaggaa

SEQ ID NO: 2881809 - RNA, 13 nt, Human
cacagcagcuuca

SEQ ID NO: 2881810 - RNA, 21 nt, Human
cacagcagccuccaacacaag

SEQ ID NO: 2881811 - RNA, 12 nt, Human
cacagcagcauu

SEQ ID NO: 2881812 - RNA, 13 nt, Human
cacagcagcauuu

SEQ ID NO: 2881813 - RNA, 14 nt, Human
cacagcagcauuuu

SEQ ID NO: 2881814 - RNA, 15 nt, Human
cacagcagcauuuuu

SEQ ID NO: 2881815 - RNA, 13 nt, Human
cacagcaucugua

SEQ ID NO: 2881816 - RNA, 15 nt, Human
cacagcagcuucacc

SEQ ID NO: 2881817 - RNA, 18 nt, Human
cacagcagcuucaccaga

SEQ ID NO: 2881818 - RNA, 19 nt, Human
cacagcagcuucaccagag

SEQ ID NO: 2881819 - RNA, 21 nt, Human
cacagccuauaggccaaugca

SEQ ID NO: 2881820 - RNA, 22 nt, Human
cacagccgcagccucccucuga

SEQ ID NO: 2881821 - RNA, 21 nt, Human
cacagccgcagccucccucug

SEQ ID NO: 2881822 - RNA, 23 nt, Human
cacagccgcagccucccucugac

SEQ ID NO: 2881823 - RNA, 14 nt, Human
cacagccgcagccu

SEQ ID NO: 2881824 - RNA, 14 nt, Human
cacagcacaugcug

SEQ ID NO: 2881825 - RNA, 19 nt, Human
cacagcacaugcuggccag

SEQ ID NO: 2881826 - RNA, 20 nt, Human
cacagcacaugcuggccagc

SEQ ID NO: 2881827 - RNA, 21 nt, Human
cacagcacaugcuggccagcc

SEQ ID NO: 2881828 - RNA, 23 nt, Human
cacagcacaugcuggccagccug

SEQ ID NO: 2881829 - RNA, 16 nt, Human
cacagcagccccugca

SEQ ID NO: 2881830 - RNA, 12 nt, Human
cacagcagccug

SEQ ID NO: 2881831 - RNA, 14 nt, Human
cacagcagccugcu

SEQ ID NO: 2881832 - RNA, 19 nt, Human
cacagcagccugcuuccca

SEQ ID NO: 2881833 - RNA, 20 nt, Human
cacagcacgggggccaagga

SEQ ID NO: 2881834 - RNA, 15 nt, Human
cacagaguguagcca

SEQ ID NO: 2881835 - RNA, 21 nt, Human
cacagaguguagccagguccc

SEQ ID NO: 2881836 - RNA, 13 nt, Human
cacagagcgggga

SEQ ID NO: 2881837 - RNA, 14 nt, Human
cacagccuccucug

SEQ ID NO: 2881838 - RNA, 15 nt, Human
cacagccuccucugu

SEQ ID NO: 2881839 - RNA, 16 nt, Human
cacaggaucagucuga

SEQ ID NO: 2881840 - RNA, 15 nt, Human
cacaggaucagucug

SEQ ID NO: 2881841 - RNA, 12 nt, Human
cacaggaucagu

SEQ ID NO: 2881842 - RNA, 22 nt, Human
cacaggaagccugcaguccugg

SEQ ID NO: 2881843 - RNA, 10 nt, Human
cacagccucu

SEQ ID NO: 2881844 - RNA, 19 nt, Human
cacagccuccucugucugc

SEQ ID NO: 2881845 - RNA, 20 nt, Human
cacagccuccucugucugcc

SEQ ID NO: 2881846 - RNA, 21 nt, Human
cacagccuccucugucugccc

SEQ ID NO: 2881847 - RNA, 23 nt, Human
cacagccuccucugucugcccuu

SEQ ID NO: 2881848 - RNA, 10 nt, Human
cacaggcagg

SEQ ID NO: 2881849 - RNA, 11 nt, Human
cacaggcagcu

SEQ ID NO: 2881850 - RNA, 13 nt, Human
cacaggcagcuuu

SEQ ID NO: 2881851 - RNA, 15 nt, Human
cacaggcagcuuucu

SEQ ID NO: 2881852 - RNA, 16 nt, Human
cacaggcagcuuucua

SEQ ID NO: 2881853 - RNA, 18 nt, Human
cacaggcagcuuucuaga

SEQ ID NO: 2881854 - RNA, 19 nt, Human
cacaggcagcuuucuagaa

SEQ ID NO: 2881855 - RNA, 19 nt, Human
cacaggcccggcuccaggc

SEQ ID NO: 2881856 - RNA, 18 nt, Human
cacaggcccggcuccagg

SEQ ID NO: 2881857 - RNA, 17 nt, Human
cacaggcccggcuccag

SEQ ID NO: 2881858 - RNA, 16 nt, Human
cacaggcccggcucca

SEQ ID NO: 2881859 - RNA, 22 nt, Human
cacaguuggcuggaugaaauuu

SEQ ID NO: 2881860 - RNA, 21 nt, Human
cacaguuggugggguccugcc

SEQ ID NO: 2881861 - RNA, 12 nt, Human
cacauaaaacuu

SEQ ID NO: 2881862 - RNA, 12 nt, Human
cacaguuugaac

SEQ ID NO: 2881863 - RNA, 20 nt, Human
cacaguuugaugucauuaau

SEQ ID NO: 2881864 - RNA, 15 nt, Human
cacauaaaugcagcc

SEQ ID NO: 2881865 - RNA, 16 nt, Human
cacauaaaugcagccc

SEQ ID NO: 2881866 - RNA, 17 nt, Human
cacauaaaugcagccca

SEQ ID NO: 2881867 - RNA, 18 nt, Human
cacauaaaugcagcccau

SEQ ID NO: 2881868 - RNA, 22 nt, Human
cacauaauucaggaagcagcuu

SEQ ID NO: 2881869 - RNA, 21 nt, Human
cacauaagggguuugccauuu

SEQ ID NO: 2881870 - RNA, 17 nt, Human
cacauacacacacacgc

SEQ ID NO: 2881871 - RNA, 15 nt, Human
cacauacacgaaaga

SEQ ID NO: 2881872 - RNA, 20 nt, Human
cacauacacgaaagagagag

SEQ ID NO: 2881873 - RNA, 13 nt, Human
cacauacaguuuu

SEQ ID NO: 2881874 - RNA, 14 nt, Human
cacauacaguuuua

SEQ ID NO: 2881875 - RNA, 14 nt, Human
cacauauaccuaua

SEQ ID NO: 2881876 - RNA, 18 nt, Human
cacauauaccuauaaugu

SEQ ID NO: 2881877 - RNA, 22 nt, Human
cacauauaccuauaaugugugu

SEQ ID NO: 2881878 - RNA, 23 nt, Human
cacauauaccuauaaugugugua

SEQ ID NO: 2881879 - RNA, 14 nt, Human
cacauauauauuac

SEQ ID NO: 2881880 - RNA, 20 nt, Human
cacauaguucuccaguugua

SEQ ID NO: 2881881 - RNA, 14 nt, Human
cacauauacacaca

SEQ ID NO: 2881882 - RNA, 15 nt, Human
cacauauacacacac

SEQ ID NO: 2881883 - RNA, 16 nt, Human
cacauauacacacaca

SEQ ID NO: 2881884 - RNA, 21 nt, Human
cacauagugaugguuccccug

SEQ ID NO: 2881885 - RNA, 21 nt, Human
cacauauaaacaucacacaca

SEQ ID NO: 2881886 - RNA, 23 nt, Human
cacaggcccggcuccaggcuccu

SEQ ID NO: 2881887 - RNA, 20 nt, Human
cacaggcccggcuccaggcu

SEQ ID NO: 2881888 - RNA, 18 nt, Human
cacagugagucgaggaca

SEQ ID NO: 2881889 - RNA, 20 nt, Human
cacagugagucgaggacagg

SEQ ID NO: 2881890 - RNA, 19 nt, Human
cacagugagucgaggacag

SEQ ID NO: 2881891 - RNA, 12 nt, Human
cacaguuggccu

SEQ ID NO: 2881892 - RNA, 15 nt, Human
cacaguuggccuuca

SEQ ID NO: 2881893 - RNA, 23 nt, Human
cacaguuggccuucagaaccauc

SEQ ID NO: 2881894 - RNA, 17 nt, Human
cacaguuggcuggauga

SEQ ID NO: 2881895 - RNA, 12 nt, Human
cacaguugccac

SEQ ID NO: 2881896 - RNA, 14 nt, Human
cacaguugccacca

SEQ ID NO: 2881897 - RNA, 17 nt, Human
cacaguugccaccaccu

SEQ ID NO: 2881898 - RNA, 20 nt, Human
cacaguugccaccaccucug

SEQ ID NO: 2881899 - RNA, 22 nt, Human
cacaguugccaccaccucugug

SEQ ID NO: 2881900 - RNA, 23 nt, Human
cacaguugccaccaccucugugg

SEQ ID NO: 2881901 - RNA, 16 nt, Human
cacauuggaaagcaca

SEQ ID NO: 2881902 - RNA, 15 nt, Human
caccaagcccaguua

SEQ ID NO: 2881903 - RNA, 16 nt, Human
cacauuguuauuuuca

SEQ ID NO: 2881904 - RNA, 17 nt, Human
cacauuguuauuuucag

SEQ ID NO: 2881905 - RNA, 20 nt, Human
cacauuguuauuuucaguga

SEQ ID NO: 2881906 - RNA, 17 nt, Human
cacauuguuguuuuuuu

SEQ ID NO: 2881907 - RNA, 21 nt, Human
cacauuguuguuuuuuuaaua

SEQ ID NO: 2881908 - RNA, 22 nt, Human
cacauuguuguuuuuuuaauag

SEQ ID NO: 2881909 - RNA, 18 nt, Human
cacauuguuugcugcuau

SEQ ID NO: 2881910 - RNA, 19 nt, Human
cacauuguuugcugcuauu

SEQ ID NO: 2881911 - RNA, 17 nt, Human
cacauugagcugugcaa

SEQ ID NO: 2881912 - RNA, 14 nt, Human
cacauugcauucua

SEQ ID NO: 2881913 - RNA, 15 nt, Human
cacauugcauucuau

SEQ ID NO: 2881914 - RNA, 16 nt, Human
cacauugcauucuauu

SEQ ID NO: 2881915 - RNA, 18 nt, Human
cacauugcauucuauugc

SEQ ID NO: 2881916 - RNA, 19 nt, Human
cacauugcauucuauugcc

SEQ ID NO: 2881917 - RNA, 23 nt, Human
cacauugcauucuauugccuucu

SEQ ID NO: 2881918 - RNA, 22 nt, Human
cacauugagcugauauaaauuc

SEQ ID NO: 2881919 - RNA, 23 nt, Human
cacauugagcugauauaaauucu

SEQ ID NO: 2881920 - RNA, 15 nt, Human
caccacacccagccc

SEQ ID NO: 2881921 - RNA, 13 nt, Human
caccacacccagc

SEQ ID NO: 2881922 - RNA, 24 nt, Human
caccaauugguuaaucuuuccuga

SEQ ID NO: 2881923 - RNA, 16 nt, Human
caccaagcucaaagcg

SEQ ID NO: 2881924 - RNA, 13 nt, Human
caccaagcucaaa

SEQ ID NO: 2881925 - RNA, 17 nt, Human
caccacacccagcccac

SEQ ID NO: 2881926 - RNA, 14 nt, Human
caccacacccagcc

SEQ ID NO: 2881927 - RNA, 16 nt, Human
caccacagacacacac

SEQ ID NO: 2881928 - RNA, 19 nt, Human
caccacagacacacacacg

SEQ ID NO: 2881929 - RNA, 12 nt, Human
caccacacacaa

SEQ ID NO: 2881930 - RNA, 13 nt, Human
caccacacacaac

SEQ ID NO: 2881931 - RNA, 15 nt, Human
caccacacacaacag

SEQ ID NO: 2881932 - RNA, 17 nt, Human
caccacacacaacagcc

SEQ ID NO: 2881933 - RNA, 18 nt, Human
caccacacacaacagcca

SEQ ID NO: 2881934 - RNA, 14 nt, Human
caccacacauccca

SEQ ID NO: 2881935 - RNA, 15 nt, Human
caccacacaucccag

SEQ ID NO: 2881936 - RNA, 16 nt, Human
caccacacaucccagc

SEQ ID NO: 2881937 - RNA, 19 nt, Human
caccacacaucccagccca

SEQ ID NO: 2881938 - RNA, 20 nt, Human
caccacagacacacacacgc

SEQ ID NO: 2881939 - RNA, 21 nt, Human
caccacagacacacacacgca

SEQ ID NO: 2881940 - RNA, 21 nt, Human
caccacauccuccguccagcc

SEQ ID NO: 2881941 - RNA, 18 nt, Human
caccacauccuccgucca

SEQ ID NO: 2881942 - RNA, 20 nt, Human
caccacuaggacucugaggc

SEQ ID NO: 2881943 - RNA, 13 nt, Human
caccacuauaaaa

SEQ ID NO: 2881944 - RNA, 14 nt, Human
caccacuauaaaau

SEQ ID NO: 2881945 - RNA, 21 nt, Human
caccacuauaaaaugucuuca

SEQ ID NO: 2881946 - RNA, 13 nt, Human
caccacuccauuc

SEQ ID NO: 2881947 - RNA, 14 nt, Human
caccacuccauucc

SEQ ID NO: 2881948 - RNA, 15 nt, Human
caccacuccauuccc

SEQ ID NO: 2881949 - RNA, 16 nt, Human
caccacuccauuccca

SEQ ID NO: 2881950 - RNA, 22 nt, Human
caccacggcguuguaccuguag

SEQ ID NO: 2881951 - RNA, 17 nt, Human
caccacgguagugccug

SEQ ID NO: 2881952 - RNA, 15 nt, Human
caccacguccagcug

SEQ ID NO: 2881953 - RNA, 18 nt, Human
caccacaugugcacaugc

SEQ ID NO: 2881954 - RNA, 15 nt, Human
caccacaugugcaca

SEQ ID NO: 2881955 - RNA, 19 nt, Human
caccacaugugcacaugca

SEQ ID NO: 2881956 - RNA, 13 nt, Human
caccaccacaccc

SEQ ID NO: 2881957 - RNA, 15 nt, Human
caccacagacacaca

SEQ ID NO: 2881958 - RNA, 21 nt, Human
caccaccaaaugccaagaaaa

SEQ ID NO: 2881959 - RNA, 16 nt, Human
caccaccccaacaaac

SEQ ID NO: 2881960 - RNA, 18 nt, Human
caccaccccaacaaacca

SEQ ID NO: 2881961 - RNA, 13 nt, Human
caccaccucugug

SEQ ID NO: 2881962 - RNA, 14 nt, Human
caccaccucugugg

SEQ ID NO: 2881963 - RNA, 13 nt, Human
caccaccucccuc

SEQ ID NO: 2881964 - RNA, 14 nt, Human
caccaccucccuca

SEQ ID NO: 2881965 - RNA, 13 nt, Human
caccaccucagag

SEQ ID NO: 2881966 - RNA, 14 nt, Human
caccaccucagagu

SEQ ID NO: 2881967 - RNA, 22 nt, Human
caccacccuagucccuuccccu

SEQ ID NO: 2881968 - RNA, 14 nt, Human
cacauggaaaccca

SEQ ID NO: 2881969 - RNA, 17 nt, Human
cacauggaaacccauag

SEQ ID NO: 2881970 - RNA, 15 nt, Human
cacauggccuaugca

SEQ ID NO: 2881971 - RNA, 10 nt, Human
cacaucagau

SEQ ID NO: 2881972 - RNA, 21 nt, Human
cacaugggagcaguccaugca

SEQ ID NO: 2881973 - RNA, 22 nt, Human
cacaugggagcaguccaugcau

SEQ ID NO: 2881974 - RNA, 23 nt, Human
cacaugggagcaguccaugcaug

SEQ ID NO: 2881975 - RNA, 17 nt, Human
cacauggggaaaaaaau

SEQ ID NO: 2881976 - RNA, 18 nt, Human
cacauggugccccuagcu

SEQ ID NO: 2881977 - RNA, 20 nt, Human
cacauggugcuacgccugca

SEQ ID NO: 2881978 - RNA, 22 nt, Human
cacauggugcuacgccugcaug

SEQ ID NO: 2881979 - RNA, 12 nt, Human
cacauaucuguc

SEQ ID NO: 2881980 - RNA, 18 nt, Human
cacauuccuugccugcac

SEQ ID NO: 2881981 - RNA, 19 nt, Human
cacauuccuugccugcaca

SEQ ID NO: 2881982 - RNA, 13 nt, Human
cacauuauuucua

SEQ ID NO: 2881983 - RNA, 23 nt, Human
cacauucagggcuauuuuuuccc

SEQ ID NO: 2881984 - RNA, 11 nt, Human
cacauuccccu

SEQ ID NO: 2881985 - RNA, 15 nt, Human
cacauuccccugggg

SEQ ID NO: 2881986 - RNA, 17 nt, Human
cacauuccccuggggac

SEQ ID NO: 2881987 - RNA, 13 nt, Human
cacauguuuuuau

SEQ ID NO: 2881988 - RNA, 13 nt, Human
cacauuaaaaaau

SEQ ID NO: 2881989 - RNA, 16 nt, Human
cacauuaaaaaaugaa

SEQ ID NO: 2881990 - RNA, 19 nt, Human
cacauuaaaaaaugaaaua

SEQ ID NO: 2881991 - RNA, 20 nt, Human
cacauuaaaaaaugaaauau

SEQ ID NO: 2881992 - RNA, 22 nt, Human
cacauuaaaaaaugaaauauuu

SEQ ID NO: 2881993 - RNA, 22 nt, Human
cacauuaaguaaucaauaaaga

SEQ ID NO: 2881994 - RNA, 18 nt, Human
cacauuaauauuugcuga

SEQ ID NO: 2881995 - RNA, 19 nt, Human
cacauuaauauuugcugac

SEQ ID NO: 2881996 - RNA, 18 nt, Human
cacauuaauggucuaaaa

SEQ ID NO: 2881997 - RNA, 22 nt, Human
cacauuaauggucuaaaaauaa

SEQ ID NO: 2881998 - RNA, 13 nt, Human
cacauuagaacuu

SEQ ID NO: 2881999 - RNA, 14 nt, Human
cacauuagaacuuc

SEQ ID NO: 2882000 - RNA, 20 nt, Human
cacauuagauuuuauuuuac

SEQ ID NO: 2882001 - RNA, 21 nt, Human
cacauuagauuuuauuuuacu

SEQ ID NO: 2882002 - RNA, 23 nt, Human
cacauuagauuuuauuuuacuau

SEQ ID NO: 2882003 - RNA, 15 nt, Human
cacauuagaauuagu

SEQ ID NO: 2882004 - RNA, 15 nt, Human
cacaugugcacaugc

SEQ ID NO: 2882005 - RNA, 14 nt, Human
cacaugugcacaug

SEQ ID NO: 2882006 - RNA, 15 nt, Human
cacaugucuuguaca

SEQ ID NO: 2882007 - RNA, 20 nt, Human
cacaugucuuguacaugugu

SEQ ID NO: 2882008 - RNA, 13 nt, Human
cacaugugacaca

SEQ ID NO: 2882009 - RNA, 17 nt, Human
cacaugugcacaugcac

SEQ ID NO: 2882010 - RNA, 13 nt, Human
cacauguggacuu

SEQ ID NO: 2882011 - RNA, 15 nt, Human
cacaugugacacaua

SEQ ID NO: 2882012 - RNA, 15 nt, Human
caaauauaagauuuu

SEQ ID NO: 2882013 - RNA, 18 nt, Human
caaauauaagauuuucug

SEQ ID NO: 2882014 - RNA, 13 nt, Human
caaauauagagau

SEQ ID NO: 2882015 - RNA, 19 nt, Human
caaauauagcguucccaac

SEQ ID NO: 2882016 - RNA, 18 nt, Human
caaaugucuuccuggauu

SEQ ID NO: 2882017 - RNA, 15 nt, Human
caaaugucuuccugg

SEQ ID NO: 2882018 - RNA, 24 nt, Human
caaaugucuuuuagaagauagaug

SEQ ID NO: 2882019 - RNA, 11 nt, Human
caaaugugaag

SEQ ID NO: 2882020 - RNA, 14 nt, Human
caaaugugaagaug

SEQ ID NO: 2882021 - RNA, 15 nt, Human
caaaugugaagaugc

SEQ ID NO: 2882022 - RNA, 17 nt, Human
caaaugugaagaugcau

SEQ ID NO: 2882023 - RNA, 18 nt, Human
caaaugugaagaugcauu

SEQ ID NO: 2882024 - RNA, 20 nt, Human
caaauguguaucggaugcuu

SEQ ID NO: 2882025 - RNA, 20 nt, Human
caaauguguacauggcagag

SEQ ID NO: 2882026 - RNA, 23 nt, Human
caaauguguacauggcagaguuu

SEQ ID NO: 2882027 - RNA, 14 nt, Human
caaauguggcuccu

SEQ ID NO: 2882028 - RNA, 16 nt, Human
caaauucauauucugu

SEQ ID NO: 2882029 - RNA, 17 nt, Human
caaauucauauucuuuu

SEQ ID NO: 2882030 - RNA, 12 nt, Human
caaauguucuaa

SEQ ID NO: 2882031 - RNA, 22 nt, Human
caaauguucuaaguuucuaaga

SEQ ID NO: 2882032 - RNA, 23 nt, Human
caaauguucuaaguuucuaagau

SEQ ID NO: 2882033 - RNA, 10 nt, Human
caaauguuga

SEQ ID NO: 2882034 - RNA, 16 nt, Human
caaauguuuaaacauu

SEQ ID NO: 2882035 - RNA, 18 nt, Human
caaauguuuaaacauuuu

SEQ ID NO: 2882036 - RNA, 14 nt, Human
caaauguucuaagu

SEQ ID NO: 2882037 - RNA, 15 nt, Human
caaauguucuaaguu

SEQ ID NO: 2882038 - RNA, 19 nt, Human
caaauguucuaaguuucua

SEQ ID NO: 2882039 - RNA, 21 nt, Human
caaauguucuaaguuucuaag

SEQ ID NO: 2882040 - RNA, 20 nt, Human
caaauaguuuauaaauguga

SEQ ID NO: 2882041 - RNA, 17 nt, Human
caaauauaaaacuuaca

SEQ ID NO: 2882042 - RNA, 13 nt, Human
caaauauaaacau

SEQ ID NO: 2882043 - RNA, 16 nt, Human
caaauauaaaucuuaa

SEQ ID NO: 2882044 - RNA, 13 nt, Human
caaauaaucacau

SEQ ID NO: 2882045 - RNA, 15 nt, Human
caaauacuuagcaaa

SEQ ID NO: 2882046 - RNA, 19 nt, Human
caaauacuuagcaaaaagu

SEQ ID NO: 2882047 - RNA, 22 nt, Human
caaauacuuagcaaaaaguggg

SEQ ID NO: 2882048 - RNA, 14 nt, Human
caaauaauaagcaa

SEQ ID NO: 2882049 - RNA, 16 nt, Human
caaauaauuuuagugu

SEQ ID NO: 2882050 - RNA, 14 nt, Human
caaaggcaaguuaa

SEQ ID NO: 2882051 - RNA, 19 nt, Human
caaaggauuaauugcugca

SEQ ID NO: 2882052 - RNA, 20 nt, Human
caaaggauuaauugcugcaa

SEQ ID NO: 2882053 - RNA, 14 nt, Human
caaaguuuuaucaa

SEQ ID NO: 2882054 - RNA, 22 nt, Human
caaaguuuccuaaucagaaauu

SEQ ID NO: 2882055 - RNA, 13 nt, Human
caaaguuuugaaa

SEQ ID NO: 2882056 - RNA, 14 nt, Human
caaaguuuugaaaa

SEQ ID NO: 2882057 - RNA, 17 nt, Human
caaaguuuugaaaagcu

SEQ ID NO: 2882058 - RNA, 18 nt, Human
caaaguuuugaaaagcua

SEQ ID NO: 2882059 - RNA, 19 nt, Human
caaaguuuugaaaagcuau

SEQ ID NO: 2882060 - RNA, 20 nt, Human
caaaguuuugaaaagcuauu

SEQ ID NO: 2882061 - RNA, 21 nt, Human
caaaguuuugaaaagcuauua

SEQ ID NO: 2882062 - RNA, 16 nt, Human
caaauaaguauuuaua

SEQ ID NO: 2882063 - RNA, 18 nt, Human
caaauaaguauuuauaau

SEQ ID NO: 2882064 - RNA, 17 nt, Human
caaauaaguauuuauaa

SEQ ID NO: 2882065 - RNA, 15 nt, Human
caaauaacuucaguc

SEQ ID NO: 2882066 - RNA, 16 nt, Human
caaauaacuucagucc

SEQ ID NO: 2882067 - RNA, 17 nt, Human
caaauaacuucaguccu

SEQ ID NO: 2882068 - RNA, 23 nt, Human
caaauaacuucaguccugcucca

SEQ ID NO: 2882069 - RNA, 19 nt, Human
caaagaaagaaaguuuaga

SEQ ID NO: 2882070 - RNA, 23 nt, Human
caaagaggacucgcuuguaaaua

SEQ ID NO: 2882071 - RNA, 20 nt, Human
caaacuuuucaaggcuuaua

SEQ ID NO: 2882072 - RNA, 21 nt, Human
caaacuuuucaaggcuuauau

SEQ ID NO: 2882073 - RNA, 21 nt, Human
caaacuuggguagaguuuaca

SEQ ID NO: 2882074 - RNA, 23 nt, Human
caaacuuggguagaguuuacagc

SEQ ID NO: 2882075 - RNA, 18 nt, Human
caaacuuuuauacucuuu

SEQ ID NO: 2882076 - RNA, 17 nt, Human
caaacuuuucaaggcuu

SEQ ID NO: 2882077 - RNA, 19 nt, Human
caaacuuuucaaggcuuau

SEQ ID NO: 2882078 - RNA, 16 nt, Human
caaagaggcugccccu

SEQ ID NO: 2882079 - RNA, 15 nt, Human
caaagaggcugcccc

SEQ ID NO: 2882080 - RNA, 13 nt, Human
caaagaggcugcc

SEQ ID NO: 2882081 - RNA, 12 nt, Human
caaagaggcugc

SEQ ID NO: 2882082 - RNA, 13 nt, Human
caaagagguauuu

SEQ ID NO: 2882083 - RNA, 22 nt, Human
caaagaggcugccccucucacc

SEQ ID NO: 2882084 - RNA, 21 nt, Human
caaagaggcugccccucucac

SEQ ID NO: 2882085 - RNA, 23 nt, Human
caaagaggcugccccucucacca

SEQ ID NO: 2882086 - RNA, 23 nt, Human
caaaaaaauauauuuaaugauaa

SEQ ID NO: 2882087 - RNA, 21 nt, Human
caaaaaaauuaaaauggaugc

SEQ ID NO: 2882088 - RNA, 15 nt, Human
caaacuuacuauuuu

SEQ ID NO: 2882089 - RNA, 16 nt, Human
caaacuuacuauuuug

SEQ ID NO: 2882090 - RNA, 18 nt, Human
caaacuuacuauuuugac

SEQ ID NO: 2882091 - RNA, 17 nt, Human
caaacuucacucugggc

SEQ ID NO: 2882092 - RNA, 13 nt, Human
caaacuugcuuua

SEQ ID NO: 2882093 - RNA, 17 nt, Human
caaaaaaguccaauuuu

SEQ ID NO: 2882094 - RNA, 18 nt, Human
caaaaaaguccaauuuua

SEQ ID NO: 2882095 - RNA, 22 nt, Human
caaaaaaguccaauuuuaauuu

SEQ ID NO: 2882096 - RNA, 19 nt, Human
caaaaaauacuuuuucuaa

SEQ ID NO: 2882097 - RNA, 17 nt, Human
caaaggaggcuggcagg

SEQ ID NO: 2882098 - RNA, 16 nt, Human
caaagcuuuuuccaga

SEQ ID NO: 2882099 - RNA, 15 nt, Human
caaagcuaggccugg

SEQ ID NO: 2882100 - RNA, 21 nt, Human
caaagccaaagcuaggccugg

SEQ ID NO: 2882101 - RNA, 20 nt, Human
caaagccaaagcuaggccug

SEQ ID NO: 2882102 - RNA, 22 nt, Human
caaagccaaacucugccagcca

SEQ ID NO: 2882103 - RNA, 18 nt, Human
caaagccaaacucugcca

SEQ ID NO: 2882104 - RNA, 17 nt, Human
caaagccaaacucugcc

SEQ ID NO: 2882105 - RNA, 17 nt, Human
caaagcuaggccuggcc

SEQ ID NO: 2882106 - RNA, 16 nt, Human
caaagcuaggccuggc

SEQ ID NO: 2882107 - RNA, 18 nt, Human
caaagcuaggccuggcca

SEQ ID NO: 2882108 - RNA, 17 nt, Human
caaagcuggcucaccuu

SEQ ID NO: 2882109 - RNA, 12 nt, Human
caaagcuguuaa

SEQ ID NO: 2882110 - RNA, 13 nt, Human
caaagcuguuaaa

SEQ ID NO: 2882111 - RNA, 16 nt, Human
caaagcuguuaaacug

SEQ ID NO: 2882112 - RNA, 17 nt, Human
caaagcuguuaaacugu

SEQ ID NO: 2882113 - RNA, 18 nt, Human
caaagcuguuaaacuguu

SEQ ID NO: 2882114 - RNA, 19 nt, Human
caaagcuguuaaacuguua

SEQ ID NO: 2882115 - RNA, 20 nt, Human
caaagcuguuaaacuguuag

SEQ ID NO: 2882116 - RNA, 22 nt, Human
caaagcuguuaaacuguuagca

SEQ ID NO: 2882117 - RNA, 16 nt, Human
caaagcuggcucaccu

SEQ ID NO: 2882118 - RNA, 15 nt, Human
caaauucucaccaaa

SEQ ID NO: 2882119 - RNA, 16 nt, Human
caaauucugaauauuu

SEQ ID NO: 2882120 - RNA, 23 nt, Human
caacaggcugggcuucaguggca

SEQ ID NO: 2882121 - RNA, 24 nt, Human
caacaggcugggcuucaguggcag

SEQ ID NO: 2882122 - RNA, 19 nt, Human
caacaggcuguucugcacu

SEQ ID NO: 2882123 - RNA, 20 nt, Human
caacaggcuguucugcacug

SEQ ID NO: 2882124 - RNA, 21 nt, Human
caacaggcuguucugcacuga

SEQ ID NO: 2882125 - RNA, 22 nt, Human
caacaggcuguucugcacugaa

SEQ ID NO: 2882126 - RNA, 23 nt, Human
caacaggcuguucugcacugaaa

SEQ ID NO: 2882127 - RNA, 24 nt, Human
caacaggcuguucugcacugaaaa

SEQ ID NO: 2882128 - RNA, 20 nt, Human
caacaggcuuaugaauauau

SEQ ID NO: 2882129 - RNA, 21 nt, Human
caacauccauguccuaugugu

SEQ ID NO: 2882130 - RNA, 23 nt, Human
caacauccauguccuauguguga

SEQ ID NO: 2882131 - RNA, 12 nt, Human
caacagucaugu

SEQ ID NO: 2882132 - RNA, 14 nt, Human
caacagucauguuu

SEQ ID NO: 2882133 - RNA, 16 nt, Human
caacagucauguuuua

SEQ ID NO: 2882134 - RNA, 19 nt, Human
caaccccuucgcuccugug

SEQ ID NO: 2882135 - RNA, 18 nt, Human
caaccccuucgcuccugu

SEQ ID NO: 2882136 - RNA, 21 nt, Human
caaccccuucgcuccuguguc

SEQ ID NO: 2882137 - RNA, 21 nt, Human
caacccucagagccaccccua

SEQ ID NO: 2882138 - RNA, 18 nt, Human
caacccucagagccaccc

SEQ ID NO: 2882139 - RNA, 14 nt, Human
caaccacacaccuc

SEQ ID NO: 2882140 - RNA, 20 nt, Human
caaccacacaccucaccaga

SEQ ID NO: 2882141 - RNA, 20 nt, Human
caaccaauuuacacugccau

SEQ ID NO: 2882142 - RNA, 18 nt, Human
caaccaagucaugugcau

SEQ ID NO: 2882143 - RNA, 20 nt, Human
caaccaagucaugugcauuu

SEQ ID NO: 2882144 - RNA, 23 nt, Human
caacauuuacaguccuucaaaau

SEQ ID NO: 2882145 - RNA, 22 nt, Human
caacauuuuagcucuauugaua

SEQ ID NO: 2882146 - RNA, 19 nt, Human
caacauuuugagaacaaag

SEQ ID NO: 2882147 - RNA, 20 nt, Human
caacauuuugagaacaaaga

SEQ ID NO: 2882148 - RNA, 21 nt, Human
caacauuuugagaacaaagau

SEQ ID NO: 2882149 - RNA, 10 nt, Human
caacauugug

SEQ ID NO: 2882150 - RNA, 16 nt, Human
caacauugugauguau

SEQ ID NO: 2882151 - RNA, 20 nt, Human
caacauuguucaccuuugua

SEQ ID NO: 2882152 - RNA, 23 nt, Human
caacauuguucaccuuuguagca

SEQ ID NO: 2882153 - RNA, 21 nt, Human
caacauuacagggaaugccug

SEQ ID NO: 2882154 - RNA, 17 nt, Human
caacauugcuugugcca

SEQ ID NO: 2882155 - RNA, 20 nt, Human
caacauguagcugaguuuaa

SEQ ID NO: 2882156 - RNA, 15 nt, Human
caacauggugucugg

SEQ ID NO: 2882157 - RNA, 16 nt, Human
caacauggugucugga

SEQ ID NO: 2882158 - RNA, 23 nt, Human
caacaugccugccccaaacaaau

SEQ ID NO: 2882159 - RNA, 15 nt, Human
caacauccugccagc

SEQ ID NO: 2882160 - RNA, 16 nt, Human
caacauccugccagcc

SEQ ID NO: 2882161 - RNA, 17 nt, Human
caacauccugccagccc

SEQ ID NO: 2882162 - RNA, 18 nt, Human
caacauccugccagcccc

SEQ ID NO: 2882163 - RNA, 13 nt, Human
caacaucuuuuua

SEQ ID NO: 2882164 - RNA, 14 nt, Human
caacucugagccca

SEQ ID NO: 2882165 - RNA, 14 nt, Human
caacuuaacauggg

SEQ ID NO: 2882166 - RNA, 15 nt, Human
caacuuaacaugggc

SEQ ID NO: 2882167 - RNA, 16 nt, Human
caacuuaacaugggcu

SEQ ID NO: 2882168 - RNA, 15 nt, Human
caacuuaauaaaaac

SEQ ID NO: 2882169 - RNA, 19 nt, Human
caacuguuguaacuaggcu

SEQ ID NO: 2882170 - RNA, 19 nt, Human
caacuguuaugaaauaaag

SEQ ID NO: 2882171 - RNA, 22 nt, Human
caacuguguuguauuaacaaaa

SEQ ID NO: 2882172 - RNA, 18 nt, Human
caacugcucuuuuauacu

SEQ ID NO: 2882173 - RNA, 23 nt, Human
caacugccucgaaacacagaaac

SEQ ID NO: 2882174 - RNA, 13 nt, Human
caacugccugccu

SEQ ID NO: 2882175 - RNA, 21 nt, Human
caacugccucgaaacacagaa

SEQ ID NO: 2882176 - RNA, 13 nt, Human
caacucugucccc

SEQ ID NO: 2882177 - RNA, 19 nt, Human
caacucuucgaagccuugc

SEQ ID NO: 2882178 - RNA, 23 nt, Human
caacuucccaguucaggaguccc

SEQ ID NO: 2882179 - RNA, 14 nt, Human
caacuucaguccug

SEQ ID NO: 2882180 - RNA, 17 nt, Human
caacuucaguccuggga

SEQ ID NO: 2882181 - RNA, 18 nt, Human
caagaaaacaacuucaau

SEQ ID NO: 2882182 - RNA, 23 nt, Human
caacuuucuguaaacucaaaacu

SEQ ID NO: 2882183 - RNA, 11 nt, Human
caacuuucugu

SEQ ID NO: 2882184 - RNA, 12 nt, Human
caacuuucugua

SEQ ID NO: 2882185 - RNA, 16 nt, Human
caacuuucuguaaacu

SEQ ID NO: 2882186 - RNA, 18 nt, Human
caacccucaggggaaaac

SEQ ID NO: 2882187 - RNA, 16 nt, Human
caaccucuucuggcuc

SEQ ID NO: 2882188 - RNA, 18 nt, Human
caaccgacaggcccuggc

SEQ ID NO: 2882189 - RNA, 20 nt, Human
caacccuuaccccuuagccu

SEQ ID NO: 2882190 - RNA, 19 nt, Human
caacccuuaccccuuagcc

SEQ ID NO: 2882191 - RNA, 15 nt, Human
caacccuuaccccuu

SEQ ID NO: 2882192 - RNA, 22 nt, Human
caacccuuaccccuuagccucc

SEQ ID NO: 2882193 - RNA, 16 nt, Human
caaccugauuguaaac

SEQ ID NO: 2882194 - RNA, 17 nt, Human
caaccucuucuggcuca

SEQ ID NO: 2882195 - RNA, 18 nt, Human
caaccucuucuggcucaa

SEQ ID NO: 2882196 - RNA, 14 nt, Human
caacgccgugggcu

SEQ ID NO: 2882197 - RNA, 14 nt, Human
caacgcacaggaaa

SEQ ID NO: 2882198 - RNA, 18 nt, Human
caacgcagcccugcuuug

SEQ ID NO: 2882199 - RNA, 12 nt, Human
caacgcagcccu

SEQ ID NO: 2882200 - RNA, 13 nt, Human
caacgcagcccug

SEQ ID NO: 2882201 - RNA, 15 nt, Human
caacgcagcccugcu

SEQ ID NO: 2882202 - RNA, 17 nt, Human
caagcacugugcucagg

SEQ ID NO: 2882203 - RNA, 11 nt, Human
caagcacugau

SEQ ID NO: 2882204 - RNA, 12 nt, Human
caagcacugaua

SEQ ID NO: 2882205 - RNA, 15 nt, Human
caagcacugauaucu

SEQ ID NO: 2882206 - RNA, 12 nt, Human
caagcacugugc

SEQ ID NO: 2882207 - RNA, 13 nt, Human
caagcacugugcu

SEQ ID NO: 2882208 - RNA, 18 nt, Human
caagcaccuccugccucg

SEQ ID NO: 2882209 - RNA, 16 nt, Human
caagaaagcugguaaa

SEQ ID NO: 2882210 - RNA, 14 nt, Human
caagaaagauguau

SEQ ID NO: 2882211 - RNA, 19 nt, Human
caagaaacugaggaauuuu

SEQ ID NO: 2882212 - RNA, 18 nt, Human
caagaaacugaggaauuu

SEQ ID NO: 2882213 - RNA, 12 nt, Human
caagaaaaucag

SEQ ID NO: 2882214 - RNA, 18 nt, Human
caagaaaaucagguauua

SEQ ID NO: 2882215 - RNA, 18 nt, Human
caagcccccccuuccacu

SEQ ID NO: 2882216 - RNA, 17 nt, Human
caagcccccccuuccac

SEQ ID NO: 2882217 - RNA, 21 nt, Human
caagccccugcuccagaagau

SEQ ID NO: 2882218 - RNA, 19 nt, Human
caagccacaagucuuccag

SEQ ID NO: 2882219 - RNA, 20 nt, Human
caagccacaagucuuccaga

SEQ ID NO: 2882220 - RNA, 16 nt, Human
caagcgugagccacug

SEQ ID NO: 2882221 - RNA, 21 nt, Human
caagcccuccccaucccaugu

SEQ ID NO: 2882222 - RNA, 17 nt, Human
caagcccuacagagcug

SEQ ID NO: 2882223 - RNA, 18 nt, Human
caagcccuacagagcugu

SEQ ID NO: 2882224 - RNA, 14 nt, Human
caagccguggcuuc

SEQ ID NO: 2882225 - RNA, 15 nt, Human
caagccguggcuucc

SEQ ID NO: 2882226 - RNA, 16 nt, Human
caagccguggcuuccc

SEQ ID NO: 2882227 - RNA, 19 nt, Human
caaggaugccccguccccc

SEQ ID NO: 2882228 - RNA, 19 nt, Human
caaggaccuccucuucccc

SEQ ID NO: 2882229 - RNA, 20 nt, Human
caaggaccuccucuuccccc

SEQ ID NO: 2882230 - RNA, 16 nt, Human
caaggacauucuugua

SEQ ID NO: 2882231 - RNA, 16 nt, Human
caaggagucagacauu

SEQ ID NO: 2882232 - RNA, 18 nt, Human
caagcgugagccacugca

SEQ ID NO: 2882233 - RNA, 17 nt, Human
caagcgugagccacugc

SEQ ID NO: 2882234 - RNA, 17 nt, Human
caaggaaagccccagca

SEQ ID NO: 2882235 - RNA, 22 nt, Human
caaggaaaccacagcugcugga

SEQ ID NO: 2882236 - RNA, 22 nt, Human
caaggaaaccgccuaguuuacu

SEQ ID NO: 2882237 - RNA, 20 nt, Human
caaggaaacgcuaccucucu

SEQ ID NO: 2882238 - RNA, 17 nt, Human
caaggaaaccacagcug

SEQ ID NO: 2882239 - RNA, 18 nt, Human
caaggaaaccacagcugc

SEQ ID NO: 2882240 - RNA, 20 nt, Human
caaggaaaccacagcugcug

SEQ ID NO: 2882241 - RNA, 21 nt, Human
caaggaaaccacagcugcugg

SEQ ID NO: 2882242 - RNA, 15 nt, Human
caaggaaaaacaggu

SEQ ID NO: 2882243 - RNA, 12 nt, Human
caaggaaaaaga

SEQ ID NO: 2882244 - RNA, 13 nt, Human
caaggaaaaagaa

SEQ ID NO: 2882245 - RNA, 16 nt, Human
caaggaaaaagaaaau

SEQ ID NO: 2882246 - RNA, 17 nt, Human
caaggaaaaagaaaaua

SEQ ID NO: 2882247 - RNA, 14 nt, Human
caaggaaaacugca

SEQ ID NO: 2882248 - RNA, 16 nt, Human
caaggaaaacugcaug

SEQ ID NO: 2882249 - RNA, 14 nt, Human
caaggaaaccacag

SEQ ID NO: 2882250 - RNA, 18 nt, Human
caaggacagccccuccuc

SEQ ID NO: 2882251 - RNA, 11 nt, Human
caaggaagagc

SEQ ID NO: 2882252 - RNA, 16 nt, Human
caaggaagauauacau

SEQ ID NO: 2882253 - RNA, 17 nt, Human
caaggaagauauacaug

SEQ ID NO: 2882254 - RNA, 20 nt, Human
caaggaaagccccagcacua

SEQ ID NO: 2882255 - RNA, 14 nt, Human
caaggaaaggccug

SEQ ID NO: 2882256 - RNA, 19 nt, Human
caaggaaaggggagaaggg

SEQ ID NO: 2882257 - RNA, 15 nt, Human
caaggaaaggcaaau

SEQ ID NO: 2882258 - RNA, 20 nt, Human
caaggaaauacccuucuuuu

SEQ ID NO: 2882259 - RNA, 16 nt, Human
caaggaacaaaaaaac

SEQ ID NO: 2882260 - RNA, 18 nt, Human
caaggaacaaaaaaacca

SEQ ID NO: 2882261 - RNA, 22 nt, Human
caaggaacuaauuucuucuccu

SEQ ID NO: 2882262 - RNA, 18 nt, Human
caaggaacuugaaaaaua

SEQ ID NO: 2882263 - RNA, 21 nt, Human
caaggaccaggacucccuccu

SEQ ID NO: 2882264 - RNA, 20 nt, Human
caaggaccaggacucccucc

SEQ ID NO: 2882265 - RNA, 18 nt, Human
caaggaccaggacucccu

SEQ ID NO: 2882266 - RNA, 16 nt, Human
caaggaccaggacucc

SEQ ID NO: 2882267 - RNA, 15 nt, Human
caaggaccaggacuc

SEQ ID NO: 2882268 - RNA, 14 nt, Human
caaggaccaggacu

SEQ ID NO: 2882269 - RNA, 13 nt, Human
caaggaccaggac

SEQ ID NO: 2882270 - RNA, 17 nt, Human
caagugauucuccugcc

SEQ ID NO: 2882271 - RNA, 16 nt, Human
caagugauucuccugc

SEQ ID NO: 2882272 - RNA, 22 nt, Human
caagugauucucaugccucagc

SEQ ID NO: 2882273 - RNA, 22 nt, Human
caagucucugcuggcccagcca

SEQ ID NO: 2882274 - RNA, 19 nt, Human
caagucucugcuggcccag

SEQ ID NO: 2882275 - RNA, 18 nt, Human
caagucucugcuggccca

SEQ ID NO: 2882276 - RNA, 16 nt, Human
caagucucaguggcuu

SEQ ID NO: 2882277 - RNA, 23 nt, Human
caagucucaguggcuucaucugu

SEQ ID NO: 2882278 - RNA, 23 nt, Human
caagucucugcuggcccagccaa

SEQ ID NO: 2882279 - RNA, 20 nt, Human
caagucuuuaggucuuugua

SEQ ID NO: 2882280 - RNA, 21 nt, Human
caagucuuuaggucuuuguaa

SEQ ID NO: 2882281 - RNA, 22 nt, Human
caagucuuuaggucuuuguaag

SEQ ID NO: 2882282 - RNA, 21 nt, Human
caagugauucuccugccucag

SEQ ID NO: 2882283 - RNA, 22 nt, Human
caagugauucuccugccucagc

SEQ ID NO: 2882284 - RNA, 14 nt, Human
caagugauucuccu

SEQ ID NO: 2882285 - RNA, 18 nt, Human
caagugauugggacagag

SEQ ID NO: 2882286 - RNA, 19 nt, Human
caagugauugggacagagg

SEQ ID NO: 2882287 - RNA, 14 nt, Human
caagugcacggggc

SEQ ID NO: 2882288 - RNA, 20 nt, Human
caagugcacggggcacagcg

SEQ ID NO: 2882289 - RNA, 20 nt, Human
caagugcacuuucuaauguu

SEQ ID NO: 2882290 - RNA, 17 nt, Human
caagugggaucugucac

SEQ ID NO: 2882291 - RNA, 19 nt, Human
caagugguuuccacaugcu

SEQ ID NO: 2882292 - RNA, 21 nt, Human
caagugguuuccacaugcucu

SEQ ID NO: 2882293 - RNA, 22 nt, Human
caagugguuuccacaugcucug

SEQ ID NO: 2882294 - RNA, 20 nt, Human
caagugggaucugucacacc

SEQ ID NO: 2882295 - RNA, 22 nt, Human
caagugggaucugucacaccag

SEQ ID NO: 2882296 - RNA, 17 nt, Human
caaggugggcugagccc

SEQ ID NO: 2882297 - RNA, 16 nt, Human
caaggugggcugagcc

SEQ ID NO: 2882298 - RNA, 12 nt, Human
caaggugggcug

SEQ ID NO: 2882299 - RNA, 17 nt, Human
caagguggccaaauuau

SEQ ID NO: 2882300 - RNA, 19 nt, Human
caagguggccaaauuauuu

SEQ ID NO: 2882301 - RNA, 24 nt, Human
caaggugggcugagcccuggcagg

SEQ ID NO: 2882302 - RNA, 23 nt, Human
caaggugggcugagcccuggcag

SEQ ID NO: 2882303 - RNA, 17 nt, Human
caagguggucaguaaau

SEQ ID NO: 2882304 - RNA, 17 nt, Human
caagguggugugaucuu

SEQ ID NO: 2882305 - RNA, 18 nt, Human
caagguggugugaucuua

SEQ ID NO: 2882306 - RNA, 17 nt, Human
caaggugucauuuaugu

SEQ ID NO: 2882307 - RNA, 21 nt, Human
caaggugggcugagcccuggc

SEQ ID NO: 2882308 - RNA, 20 nt, Human
caaggugggcugagcccugg

SEQ ID NO: 2882309 - RNA, 19 nt, Human
caaggugggcugagcccug

SEQ ID NO: 2882310 - RNA, 18 nt, Human
caaggugggcugagcccu

SEQ ID NO: 2882311 - RNA, 16 nt, Human
caagucggaacagcag

SEQ ID NO: 2882312 - RNA, 17 nt, Human
caagucggaacagcaga

SEQ ID NO: 2882313 - RNA, 18 nt, Human
caagucggaacagcagau

SEQ ID NO: 2882314 - RNA, 15 nt, Human
caaguccuuuuguaa

SEQ ID NO: 2882315 - RNA, 16 nt, Human
caaguccuuuuguaaa

SEQ ID NO: 2882316 - RNA, 17 nt, Human
caaguccuuuuguaaag

SEQ ID NO: 2882317 - RNA, 18 nt, Human
caaguccuuuuguaaagu

SEQ ID NO: 2882318 - RNA, 19 nt, Human
caaguccuggauguugugu

SEQ ID NO: 2882319 - RNA, 15 nt, Human
caaguccugugaauu

SEQ ID NO: 2882320 - RNA, 17 nt, Human
caaguccugugaauuuc

SEQ ID NO: 2882321 - RNA, 18 nt, Human
caaguccugugaauuucu

SEQ ID NO: 2882322 - RNA, 14 nt, Human
caaggauugaaaau

SEQ ID NO: 2882323 - RNA, 15 nt, Human
caaggauugaaaauu

SEQ ID NO: 2882324 - RNA, 15 nt, Human
caaggauugcuacug

SEQ ID NO: 2882325 - RNA, 15 nt, Human
caaggugcaaaucaa

SEQ ID NO: 2882326 - RNA, 14 nt, Human
caaggucuuugguu

SEQ ID NO: 2882327 - RNA, 23 nt, Human
caaggugaagaugggaacgcaga

SEQ ID NO: 2882328 - RNA, 13 nt, Human
caaggugacagaa

SEQ ID NO: 2882329 - RNA, 14 nt, Human
caaggugacagaag

SEQ ID NO: 2882330 - RNA, 20 nt, Human
caaggugacagaaggaccag

SEQ ID NO: 2882331 - RNA, 21 nt, Human
caaggugacagaaggaccagc

SEQ ID NO: 2882332 - RNA, 13 nt, Human
cacccacccuggg

SEQ ID NO: 2882333 - RNA, 14 nt, Human
cacccacccuggga

SEQ ID NO: 2882334 - RNA, 22 nt, Human
cacccaccaucaugucuggcua

SEQ ID NO: 2882335 - RNA, 20 nt, Human
cacccaccaucaugucuggc

SEQ ID NO: 2882336 - RNA, 16 nt, Human
cacccaccucagccuc

SEQ ID NO: 2882337 - RNA, 14 nt, Human
cacccaccucagcc

SEQ ID NO: 2882338 - RNA, 13 nt, Human
cacccaccucagc

SEQ ID NO: 2882339 - RNA, 12 nt, Human
cacccaccucag

SEQ ID NO: 2882340 - RNA, 13 nt, Human
caccccaggacuc

SEQ ID NO: 2882341 - RNA, 15 nt, Human
caccccagggccuga

SEQ ID NO: 2882342 - RNA, 21 nt, Human
caccccaucccacacccugga

SEQ ID NO: 2882343 - RNA, 15 nt, Human
caccccaucccacac

SEQ ID NO: 2882344 - RNA, 12 nt, Human
caccccauccca

SEQ ID NO: 2882345 - RNA, 22 nt, Human
caccccagggccugagccuggc

SEQ ID NO: 2882346 - RNA, 17 nt, Human
caccccagggccugagc

SEQ ID NO: 2882347 - RNA, 16 nt, Human
caccccagggccugag

SEQ ID NO: 2882348 - RNA, 17 nt, Human
caccccaugccaaagcu

SEQ ID NO: 2882349 - RNA, 15 nt, Human
caccccaugccaaag

SEQ ID NO: 2882350 - RNA, 12 nt, Human
caccccaugcca

SEQ ID NO: 2882351 - RNA, 18 nt, Human
caccacugcacuccagcc

SEQ ID NO: 2882352 - RNA, 13 nt, Human
caccacugcacuc

SEQ ID NO: 2882353 - RNA, 16 nt, Human
caccacuucuuuuaua

SEQ ID NO: 2882354 - RNA, 18 nt, Human
caccagaauugugcaaau

SEQ ID NO: 2882355 - RNA, 14 nt, Human
cacccaauuccacu

SEQ ID NO: 2882356 - RNA, 17 nt, Human
cacccaauuccacucug

SEQ ID NO: 2882357 - RNA, 21 nt, Human
cacccacaugugacacauaug

SEQ ID NO: 2882358 - RNA, 12 nt, Human
cacccacaugug

SEQ ID NO: 2882359 - RNA, 13 nt, Human
cacccacauguga

SEQ ID NO: 2882360 - RNA, 19 nt, Human
cacccacaugugacacaua

SEQ ID NO: 2882361 - RNA, 17 nt, Human
cacccccacccccagcu

SEQ ID NO: 2882362 - RNA, 11 nt, Human
cacccccaccc

SEQ ID NO: 2882363 - RNA, 14 nt, Human
cacccccaccccca

SEQ ID NO: 2882364 - RNA, 16 nt, Human
caccccccuguucuaa

SEQ ID NO: 2882365 - RNA, 15 nt, Human
caccccccaagcugu

SEQ ID NO: 2882366 - RNA, 13 nt, Human
cacccccaucucu

SEQ ID NO: 2882367 - RNA, 12 nt, Human
cacccccagcuu

SEQ ID NO: 2882368 - RNA, 17 nt, Human
cacccccaucucucccu

SEQ ID NO: 2882369 - RNA, 14 nt, Human
caccccccaagcug

SEQ ID NO: 2882370 - RNA, 12 nt, Human
cacccccagcuc

SEQ ID NO: 2882371 - RNA, 13 nt, Human
cacccccagcuca

SEQ ID NO: 2882372 - RNA, 14 nt, Human
cacccccagcucaa

SEQ ID NO: 2882373 - RNA, 13 nt, Human
cacccccuucucu

SEQ ID NO: 2882374 - RNA, 22 nt, Human
cacccccuucucugcuccacca

SEQ ID NO: 2882375 - RNA, 18 nt, Human
cacccccuucucugcucc

SEQ ID NO: 2882376 - RNA, 17 nt, Human
cacccccuucucugcuc

SEQ ID NO: 2882377 - RNA, 16 nt, Human
cacccccuucucugcu

SEQ ID NO: 2882378 - RNA, 16 nt, Human
caccccgccugcccuc

SEQ ID NO: 2882379 - RNA, 15 nt, Human
caccccgaggcccug

SEQ ID NO: 2882380 - RNA, 16 nt, Human
caccccgaggcccugc

SEQ ID NO: 2882381 - RNA, 17 nt, Human
caccccgaggcccugca

SEQ ID NO: 2882382 - RNA, 18 nt, Human
caccccgaggcccugcau

SEQ ID NO: 2882383 - RNA, 19 nt, Human
caccccgaggcccugcaug

SEQ ID NO: 2882384 - RNA, 20 nt, Human
caccccgaggcccugcaugg

SEQ ID NO: 2882385 - RNA, 22 nt, Human
caccccgaggcccugcaugggc

SEQ ID NO: 2882386 - RNA, 12 nt, Human
cacccccuuucc

SEQ ID NO: 2882387 - RNA, 14 nt, Human
cacccccuuuccug

SEQ ID NO: 2882388 - RNA, 20 nt, Human
caccccguuacagcucccca

SEQ ID NO: 2882389 - RNA, 14 nt, Human
caccccuaaagaga

SEQ ID NO: 2882390 - RNA, 23 nt, Human
caccccggcccccugcccguucu

SEQ ID NO: 2882391 - RNA, 18 nt, Human
caccccggcccccugccc

SEQ ID NO: 2882392 - RNA, 15 nt, Human
caccccgggcucucu

SEQ ID NO: 2882393 - RNA, 19 nt, Human
caccccgcuguaagcuccu

SEQ ID NO: 2882394 - RNA, 22 nt, Human
caccccgcuguaagcuccuuug

SEQ ID NO: 2882395 - RNA, 13 nt, Human
caccccggcaggc

SEQ ID NO: 2882396 - RNA, 14 nt, Human
caccccggcaggcc

SEQ ID NO: 2882397 - RNA, 15 nt, Human
caccccggcaggccc

SEQ ID NO: 2882398 - RNA, 16 nt, Human
caccccggcaggcccu

SEQ ID NO: 2882399 - RNA, 18 nt, Human
caccccggcaggcccugc

SEQ ID NO: 2882400 - RNA, 19 nt, Human
caccccggcaggcccugca

SEQ ID NO: 2882401 - RNA, 20 nt, Human
caccccggcaggcccugcag

SEQ ID NO: 2882402 - RNA, 22 nt, Human
caccccggcaggcccugcagug

SEQ ID NO: 2882403 - RNA, 18 nt, Human
caccccgggcucucugcu

SEQ ID NO: 2882404 - RNA, 22 nt, Human
aaaaaauuagaaauuggcugga

SEQ ID NO: 2882405 - RNA, 15 nt, Human
aaaaacaccuagcuu

SEQ ID NO: 2882406 - RNA, 17 nt, Human
aaaaacaccuagcuuua

SEQ ID NO: 2882407 - RNA, 18 nt, Human
aaaaacaccuagcuuuau

SEQ ID NO: 2882408 - RNA, 14 nt, Human
aaaaacagaggcca

SEQ ID NO: 2882409 - RNA, 15 nt, Human
aaaaacuaguaguuc

SEQ ID NO: 2882410 - RNA, 12 nt, Human
aaaaacuauuaa

SEQ ID NO: 2882411 - RNA, 23 nt, Human
aaaaacuauuaaggauguagcuu

SEQ ID NO: 2882412 - RNA, 21 nt, Human
aaaaacuauucgaaugaaaag

SEQ ID NO: 2882413 - RNA, 20 nt, Human
aaaaacuaaaucucuaauau

SEQ ID NO: 2882414 - RNA, 15 nt, Human
aaaaacgaaaacagu

SEQ ID NO: 2882415 - RNA, 11 nt, Human
aaaaaaucuuc

SEQ ID NO: 2882416 - RNA, 13 nt, Human
aaaaaauauuuau

SEQ ID NO: 2882417 - RNA, 21 nt, Human
aaaaaauagaugucuuuuaua

SEQ ID NO: 2882418 - RNA, 19 nt, Human
aaaaaauauagccuuuaca

SEQ ID NO: 2882419 - RNA, 12 nt, Human
aaaaaaucaucu

SEQ ID NO: 2882420 - RNA, 14 nt, Human
aaaaaaucaucuau

SEQ ID NO: 2882421 - RNA, 17 nt, Human
aaaaaaucaucuauuuu

SEQ ID NO: 2882422 - RNA, 13 nt, Human
aaaaaaucuaucc

SEQ ID NO: 2882423 - RNA, 11 nt, Human
aaaaaauguug

SEQ ID NO: 2882424 - RNA, 13 nt, Human
aaaaaauguuguu

SEQ ID NO: 2882425 - RNA, 11 nt, Human
aaaaaauuaag

SEQ ID NO: 2882426 - RNA, 15 nt, Human
acucuaucugggccu

SEQ ID NO: 2882427 - RNA, 16 nt, Human
acucuaucugggccug

SEQ ID NO: 2882428 - RNA, 17 nt, Human
acucuaucugggccugg

SEQ ID NO: 2882429 - RNA, 18 nt, Human
acucuaucugggccuggg

SEQ ID NO: 2882430 - RNA, 16 nt, Human
acucuaugccccaaau

SEQ ID NO: 2882431 - RNA, 17 nt, Human
acucuaugccccaaaua

SEQ ID NO: 2882432 - RNA, 19 nt, Human
acucuaugccccaaauaua

SEQ ID NO: 2882433 - RNA, 20 nt, Human
acucuaugccccaaauauag

SEQ ID NO: 2882434 - RNA, 21 nt, Human
acucuaugccccaaauauagc

SEQ ID NO: 2882435 - RNA, 17 nt, Human
acucuggucuuggaauu

SEQ ID NO: 2882436 - RNA, 14 nt, Human
acucuauucucaaa

SEQ ID NO: 2882437 - RNA, 15 nt, Human
acucugguuucucau

SEQ ID NO: 2882438 - RNA, 17 nt, Human
acucugguuucucauuc

SEQ ID NO: 2882439 - RNA, 15 nt, Human
acucuguaaaaacac

SEQ ID NO: 2882440 - RNA, 16 nt, Human
acucuguaacaucacu

SEQ ID NO: 2882441 - RNA, 14 nt, Human
acucuggugccucc

SEQ ID NO: 2882442 - RNA, 16 nt, Human
acucuggugccuccag

SEQ ID NO: 2882443 - RNA, 17 nt, Human
acucuggugccuccaga

SEQ ID NO: 2882444 - RNA, 19 nt, Human
acucugucgcccagucugg

SEQ ID NO: 2882445 - RNA, 20 nt, Human
acucaucaaucaaauaagua

SEQ ID NO: 2882446 - RNA, 13 nt, Human
acucaucacugug

SEQ ID NO: 2882447 - RNA, 18 nt, Human
acucauagauguuaugca

SEQ ID NO: 2882448 - RNA, 14 nt, Human
acucauacaucugg

SEQ ID NO: 2882449 - RNA, 15 nt, Human
acucauacaucuggc

SEQ ID NO: 2882450 - RNA, 19 nt, Human
acuagcaccugccagggag

SEQ ID NO: 2882451 - RNA, 14 nt, Human
acuagugacagcuu

SEQ ID NO: 2882452 - RNA, 15 nt, Human
acuagugacagcuug

SEQ ID NO: 2882453 - RNA, 16 nt, Human
acuagugacagcuugu

SEQ ID NO: 2882454 - RNA, 19 nt, Human
acuagugaccccuucccug

SEQ ID NO: 2882455 - RNA, 13 nt, Human
acuagucacccca

SEQ ID NO: 2882456 - RNA, 22 nt, Human
acuagucaccccaaguagucug

SEQ ID NO: 2882457 - RNA, 13 nt, Human
acuaguguucugu

SEQ ID NO: 2882458 - RNA, 22 nt, Human
acuauucaggagaguagaacag

SEQ ID NO: 2882459 - RNA, 15 nt, Human
acuaguguugcuugg

SEQ ID NO: 2882460 - RNA, 16 nt, Human
acuauucgaaugaaaa

SEQ ID NO: 2882461 - RNA, 18 nt, Human
acuauucgaaugaaaaga

SEQ ID NO: 2882462 - RNA, 19 nt, Human
acuauucgaaugaaaagac

SEQ ID NO: 2882463 - RNA, 14 nt, Human
acuauucaguugug

SEQ ID NO: 2882464 - RNA, 15 nt, Human
acuauucaguugugu

SEQ ID NO: 2882465 - RNA, 18 nt, Human
acuauucauuaaauguuu

SEQ ID NO: 2882466 - RNA, 19 nt, Human
acuauucauuaaauguuug

SEQ ID NO: 2882467 - RNA, 20 nt, Human
acuauucauuaaauguuuga

SEQ ID NO: 2882468 - RNA, 12 nt, Human
acuauuuaucug

SEQ ID NO: 2882469 - RNA, 23 nt, Human
acuauuuaguuuuuguaauuuau

SEQ ID NO: 2882470 - RNA, 21 nt, Human
acuauuuaguuuuuguaauuu

SEQ ID NO: 2882471 - RNA, 20 nt, Human
acuauuuaguuuuuguaauu

SEQ ID NO: 2882472 - RNA, 17 nt, Human
acuauucuguaucuuuc

SEQ ID NO: 2882473 - RNA, 20 nt, Human
acuauuuaaagccuccucau

SEQ ID NO: 2882474 - RNA, 11 nt, Human
acuauuuaaag

SEQ ID NO: 2882475 - RNA, 13 nt, Human
acuauuuaaacuu

SEQ ID NO: 2882476 - RNA, 14 nt, Human
acuauuuaaacuua

SEQ ID NO: 2882477 - RNA, 16 nt, Human
acuauuuaaacuuaua

SEQ ID NO: 2882478 - RNA, 18 nt, Human
acuauuuaaacuuauaaa

SEQ ID NO: 2882479 - RNA, 21 nt, Human
acuauuuaaacuuauaaauca

SEQ ID NO: 2882480 - RNA, 17 nt, Human
acucaggauuuaaaaac

SEQ ID NO: 2882481 - RNA, 22 nt, Human
acucaggauuuaaaaacuggaa

SEQ ID NO: 2882482 - RNA, 18 nt, Human
acucaggaggcugagggg

SEQ ID NO: 2882483 - RNA, 17 nt, Human
acucaggaggcugaggg

SEQ ID NO: 2882484 - RNA, 17 nt, Human
acucagcuuccuaccca

SEQ ID NO: 2882485 - RNA, 19 nt, Human
acucaggaggcugaggcag

SEQ ID NO: 2882486 - RNA, 18 nt, Human
acucaggaggcugaggca

SEQ ID NO: 2882487 - RNA, 17 nt, Human
acucaggaggcugaggc

SEQ ID NO: 2882488 - RNA, 16 nt, Human
acucaggaggcugagg

SEQ ID NO: 2882489 - RNA, 14 nt, Human
acucaggaggcuga

SEQ ID NO: 2882490 - RNA, 14 nt, Human
acucagggcuccuc

SEQ ID NO: 2882491 - RNA, 16 nt, Human
acucagggcuccuccc

SEQ ID NO: 2882492 - RNA, 17 nt, Human
acucagggcuccuccca

SEQ ID NO: 2882493 - RNA, 18 nt, Human
acucagggcuccucccag

SEQ ID NO: 2882494 - RNA, 19 nt, Human
acucagggcuccucccagc

SEQ ID NO: 2882495 - RNA, 20 nt, Human
acucagggcuccucccagcu

SEQ ID NO: 2882496 - RNA, 22 nt, Human
acucagggcuccucccagcuug

SEQ ID NO: 2882497 - RNA, 15 nt, Human
acucaggggucacug

SEQ ID NO: 2882498 - RNA, 19 nt, Human
acucaggggucacugaggc

SEQ ID NO: 2882499 - RNA, 23 nt, Human
acucauaaucuauaaacaaugaa

SEQ ID NO: 2882500 - RNA, 19 nt, Human
acucaguccauagcagaga

SEQ ID NO: 2882501 - RNA, 18 nt, Human
acucagcugucuguggcu

SEQ ID NO: 2882502 - RNA, 12 nt, Human
acucagccccua

SEQ ID NO: 2882503 - RNA, 14 nt, Human
acucagccccuagg

SEQ ID NO: 2882504 - RNA, 15 nt, Human
acucagccccuagga

SEQ ID NO: 2882505 - RNA, 16 nt, Human
acucagccccuaggag

SEQ ID NO: 2882506 - RNA, 17 nt, Human
acucagccccuaggagu

SEQ ID NO: 2882507 - RNA, 17 nt, Human
acucaaauguucuaagu

SEQ ID NO: 2882508 - RNA, 16 nt, Human
acucaaauguucuaag

SEQ ID NO: 2882509 - RNA, 23 nt, Human
acucaaaugcucagaccagcucu

SEQ ID NO: 2882510 - RNA, 21 nt, Human
acucaaaugcucagaccagcu

SEQ ID NO: 2882511 - RNA, 18 nt, Human
acucaaaugcucagacca

SEQ ID NO: 2882512 - RNA, 15 nt, Human
acucaaaacuuaaca

SEQ ID NO: 2882513 - RNA, 20 nt, Human
acucaaaacccaucugggcu

SEQ ID NO: 2882514 - RNA, 13 nt, Human
acuagaugaugga

SEQ ID NO: 2882515 - RNA, 18 nt, Human
acgcauggucaacccuca

SEQ ID NO: 2882516 - RNA, 19 nt, Human
acgcauggucaacccucag

SEQ ID NO: 2882517 - RNA, 14 nt, Human
acgcaguggccuuc

SEQ ID NO: 2882518 - RNA, 14 nt, Human
acgcauccagcaag

SEQ ID NO: 2882519 - RNA, 15 nt, Human
acgcauccagcaaga

SEQ ID NO: 2882520 - RNA, 12 nt, Human
acgccacccagc

SEQ ID NO: 2882521 - RNA, 14 nt, Human
acgucugacaggca

SEQ ID NO: 2882522 - RNA, 19 nt, Human
acgucgucuucuguauacu

SEQ ID NO: 2882523 - RNA, 13 nt, Human
acgucugacaggc

SEQ ID NO: 2882524 - RNA, 11 nt, Human
acgcuuuguca

SEQ ID NO: 2882525 - RNA, 14 nt, Human
acgcuuuucuuugu

SEQ ID NO: 2882526 - RNA, 16 nt, Human
acgcuuugauucauag

SEQ ID NO: 2882527 - RNA, 14 nt, Human
acgcuuugauucau

SEQ ID NO: 2882528 - RNA, 13 nt, Human
acgcuuugauuca

SEQ ID NO: 2882529 - RNA, 12 nt, Human
acgcuuugauuc

SEQ ID NO: 2882530 - RNA, 12 nt, Human
acgcuugugaau

SEQ ID NO: 2882531 - RNA, 11 nt, Human
acgcuuugauu

SEQ ID NO: 2882532 - RNA, 12 nt, Human
acuaagcauuuc

SEQ ID NO: 2882533 - RNA, 16 nt, Human
acuaagaauucaaacu

SEQ ID NO: 2882534 - RNA, 18 nt, Human
acuaagaauucaaacugg

SEQ ID NO: 2882535 - RNA, 12 nt, Human
acuaagaaacuu

SEQ ID NO: 2882536 - RNA, 13 nt, Human
acuaagaaacuuu

SEQ ID NO: 2882537 - RNA, 14 nt, Human
acuaagaaacuuuu

SEQ ID NO: 2882538 - RNA, 15 nt, Human
acuaagaaacuuuug

SEQ ID NO: 2882539 - RNA, 17 nt, Human
acuaagaaacuuuugua

SEQ ID NO: 2882540 - RNA, 19 nt, Human
acuaagaaacuuuuguaaa

SEQ ID NO: 2882541 - RNA, 17 nt, Human
acuaagaaauauuccaa

SEQ ID NO: 2882542 - RNA, 23 nt, Human
acuaagaaauauuccaaaugucu

SEQ ID NO: 2882543 - RNA, 16 nt, Human
acgugagaucauucac

SEQ ID NO: 2882544 - RNA, 15 nt, Human
acgugacccucugcu

SEQ ID NO: 2882545 - RNA, 20 nt, Human
acgucugaagcuugacuccc

SEQ ID NO: 2882546 - RNA, 22 nt, Human
acgucugaagcuugacucccaa

SEQ ID NO: 2882547 - RNA, 15 nt, Human
acuaauuuaaaaaau

SEQ ID NO: 2882548 - RNA, 20 nt, Human
acuaauuucaaaaugcuuuu

SEQ ID NO: 2882549 - RNA, 12 nt, Human
acuaauuucuuc

SEQ ID NO: 2882550 - RNA, 19 nt, Human
acuaauuucaaaaugcuuu

SEQ ID NO: 2882551 - RNA, 16 nt, Human
acuaauuucaaaaugc

SEQ ID NO: 2882552 - RNA, 23 nt, Human
acuaauuccacaccuuuuauuga

SEQ ID NO: 2882553 - RNA, 20 nt, Human
acuaauuggccucuuuaaga

SEQ ID NO: 2882554 - RNA, 14 nt, Human
acuaauuucaaaau

SEQ ID NO: 2882555 - RNA, 17 nt, Human
acuaaggugcuaaaucu

SEQ ID NO: 2882556 - RNA, 13 nt, Human
acuaaguucacau

SEQ ID NO: 2882557 - RNA, 15 nt, Human
acuaauuccacaccu

SEQ ID NO: 2882558 - RNA, 13 nt, Human
acuaauuccacac

SEQ ID NO: 2882559 - RNA, 14 nt, Human
acuaagccuaccug

SEQ ID NO: 2882560 - RNA, 18 nt, Human
acuaagccuaccugcucu

SEQ ID NO: 2882561 - RNA, 19 nt, Human
acuaagccuaccugcucuc

SEQ ID NO: 2882562 - RNA, 15 nt, Human
acuaagccacaagaa

SEQ ID NO: 2882563 - RNA, 16 nt, Human
acuaagccacaagaaa

SEQ ID NO: 2882564 - RNA, 18 nt, Human
acuaagccacaagaaauu

SEQ ID NO: 2882565 - RNA, 14 nt, Human
accugucucagccu

SEQ ID NO: 2882566 - RNA, 16 nt, Human
accugucuccacugug

SEQ ID NO: 2882567 - RNA, 17 nt, Human
accugucuccacugugc

SEQ ID NO: 2882568 - RNA, 12 nt, Human
accugucuccuu

SEQ ID NO: 2882569 - RNA, 22 nt, Human
accugucuccuuucaccccagg

SEQ ID NO: 2882570 - RNA, 17 nt, Human
accugucuccuuucuca

SEQ ID NO: 2882571 - RNA, 18 nt, Human
accugucugaacuguuaa

SEQ ID NO: 2882572 - RNA, 18 nt, Human
accugucugacuguagcu

SEQ ID NO: 2882573 - RNA, 22 nt, Human
accugugugguacucugaaaca

SEQ ID NO: 2882574 - RNA, 22 nt, Human
accuguccuaaggaaccuuccu

SEQ ID NO: 2882575 - RNA, 12 nt, Human
accugcccugga

SEQ ID NO: 2882576 - RNA, 13 nt, Human
accugcccuggaa

SEQ ID NO: 2882577 - RNA, 14 nt, Human
accugcccuggaac

SEQ ID NO: 2882578 - RNA, 15 nt, Human
accugcccuggaaca

SEQ ID NO: 2882579 - RNA, 23 nt, Human
accugucacgauugucaucagga

SEQ ID NO: 2882580 - RNA, 13 nt, Human
accugucacauug

SEQ ID NO: 2882581 - RNA, 15 nt, Human
accugucacauugca

SEQ ID NO: 2882582 - RNA, 16 nt, Human
accugucacauugcau

SEQ ID NO: 2882583 - RNA, 17 nt, Human
accugucacauugcauu

SEQ ID NO: 2882584 - RNA, 20 nt, Human
accugucacauugcauucua

SEQ ID NO: 2882585 - RNA, 22 nt, Human
accugucacauugcauucuauu

SEQ ID NO: 2882586 - RNA, 19 nt, Human
accucuggacuggcuagag

SEQ ID NO: 2882587 - RNA, 16 nt, Human
accucuggacuggcua

SEQ ID NO: 2882588 - RNA, 15 nt, Human
accucuggacuggcu

SEQ ID NO: 2882589 - RNA, 14 nt, Human
accucuggacuggc

SEQ ID NO: 2882590 - RNA, 20 nt, Human
accucugcggaccccagcug

SEQ ID NO: 2882591 - RNA, 14 nt, Human
accucugcuuccca

SEQ ID NO: 2882592 - RNA, 15 nt, Human
accucugcuucccag

SEQ ID NO: 2882593 - RNA, 17 nt, Human
accucugcuucccaggu

SEQ ID NO: 2882594 - RNA, 19 nt, Human
accucugcuucccagguuc

SEQ ID NO: 2882595 - RNA, 20 nt, Human
accucugcuuucugauguug

SEQ ID NO: 2882596 - RNA, 23 nt, Human
accucuggacuggcuagaguccu

SEQ ID NO: 2882597 - RNA, 21 nt, Human
accucuggauuaggucucugu

SEQ ID NO: 2882598 - RNA, 18 nt, Human
accucuggauucauuguc

SEQ ID NO: 2882599 - RNA, 13 nt, Human
accucuggcugac

SEQ ID NO: 2882600 - RNA, 16 nt, Human
accucuggcugacuaa

SEQ ID NO: 2882601 - RNA, 13 nt, Human
accucuguaauuu

SEQ ID NO: 2882602 - RNA, 23 nt, Human
accucuguaauuuuucagcucuc

SEQ ID NO: 2882603 - RNA, 20 nt, Human
accugcccugcugaguccca

SEQ ID NO: 2882604 - RNA, 21 nt, Human
accuuuagaaacucaaaaacu

SEQ ID NO: 2882605 - RNA, 18 nt, Human
accuuuaccccaucccug

SEQ ID NO: 2882606 - RNA, 13 nt, Human
accuuuacuuuag

SEQ ID NO: 2882607 - RNA, 14 nt, Human
accuuuacuuuaga

SEQ ID NO: 2882608 - RNA, 13 nt, Human
accuuuaagaaaa

SEQ ID NO: 2882609 - RNA, 21 nt, Human
accuuuaaguagauaagcaga

SEQ ID NO: 2882610 - RNA, 14 nt, Human
accuuuagguucuu

SEQ ID NO: 2882611 - RNA, 23 nt, Human
accuuuccaaaguuaacagauuu

SEQ ID NO: 2882612 - RNA, 17 nt, Human
accuuggcugcagggag

SEQ ID NO: 2882613 - RNA, 15 nt, Human
accuguugcuguguu

SEQ ID NO: 2882614 - RNA, 18 nt, Human
accuguugcuguguuuaa

SEQ ID NO: 2882615 - RNA, 19 nt, Human
accuguugcuguguuuaau

SEQ ID NO: 2882616 - RNA, 22 nt, Human
accuguugcuguguuuaauuug

SEQ ID NO: 2882617 - RNA, 18 nt, Human
accuuggcugcagggagu

SEQ ID NO: 2882618 - RNA, 12 nt, Human
accuugggccaa

SEQ ID NO: 2882619 - RNA, 14 nt, Human
accucugcggaccc

SEQ ID NO: 2882620 - RNA, 17 nt, Human
accucugcggaccccag

SEQ ID NO: 2882621 - RNA, 18 nt, Human
accucugcggaccccagc

SEQ ID NO: 2882622 - RNA, 19 nt, Human
accucugcggaccccagcu

SEQ ID NO: 2882623 - RNA, 14 nt, Human
acuuuucuuugugg

SEQ ID NO: 2882624 - RNA, 12 nt, Human
acuuuugagugu

SEQ ID NO: 2882625 - RNA, 16 nt, Human
acuuuugagugugugu

SEQ ID NO: 2882626 - RNA, 20 nt, Human
acuuuugagugugugugugc

SEQ ID NO: 2882627 - RNA, 21 nt, Human
acuuuugagugugugugugca

SEQ ID NO: 2882628 - RNA, 11 nt, Human
acuuuugcaag

SEQ ID NO: 2882629 - RNA, 22 nt, Human
acuuuucaccuccuucaauucc

SEQ ID NO: 2882630 - RNA, 17 nt, Human
acuuuuccauucccaau

SEQ ID NO: 2882631 - RNA, 12 nt, Human
acuuuucaguga

SEQ ID NO: 2882632 - RNA, 23 nt, Human
acuuuucaaggcuuauauucaac

SEQ ID NO: 2882633 - RNA, 20 nt, Human
acuuuucauaaccuagccuu

SEQ ID NO: 2882634 - RNA, 22 nt, Human
acuuuuauuuuacacagaaaca

SEQ ID NO: 2882635 - RNA, 22 nt, Human
acuuuucaaggcuuauauucaa

SEQ ID NO: 2882636 - RNA, 20 nt, Human
acuuuuauuuuacacagaaa

SEQ ID NO: 2882637 - RNA, 18 nt, Human
acuuuuauuuuacacaga

SEQ ID NO: 2882638 - RNA, 14 nt, Human
acuuuuauuugcaa

SEQ ID NO: 2882639 - RNA, 15 nt, Human
acuuuuauuugcaac

SEQ ID NO: 2882640 - RNA, 18 nt, Human
acuuuuauuugcaacauu

SEQ ID NO: 2882641 - RNA, 22 nt, Human
acuuuuauuugcaacauuuaca

SEQ ID NO: 2882642 - RNA, 23 nt, Human
acuuuuauuuccagugaaaucag

SEQ ID NO: 2882643 - RNA, 15 nt, Human
acuuuuaugagcuuc

SEQ ID NO: 2882644 - RNA, 20 nt, Human
acuuuuaugagcuuccaagg

SEQ ID NO: 2882645 - RNA, 14 nt, Human
acuuuaucaauuaa

SEQ ID NO: 2882646 - RNA, 19 nt, Human
acuuuauucuugaaagaag

SEQ ID NO: 2882647 - RNA, 21 nt, Human
acuuuauucuugaaagaagaa

SEQ ID NO: 2882648 - RNA, 23 nt, Human
acuuuaucuaauaccucugugug

SEQ ID NO: 2882649 - RNA, 13 nt, Human
acuuuaucuaaag

SEQ ID NO: 2882650 - RNA, 13 nt, Human
acuuuaucacuuu

SEQ ID NO: 2882651 - RNA, 17 nt, Human
acuuuaucacuuuuuga

SEQ ID NO: 2882652 - RNA, 20 nt, Human
acuuuaucacuuuuugaacu

SEQ ID NO: 2882653 - RNA, 14 nt, Human
acuuuuaaggcagu

SEQ ID NO: 2882654 - RNA, 20 nt, Human
acuuuuaaccaaacaauuau

SEQ ID NO: 2882655 - RNA, 21 nt, Human
agaaagugggugagaugcugg

SEQ ID NO: 2882656 - RNA, 20 nt, Human
agaaagugggugagaugcug

SEQ ID NO: 2882657 - RNA, 13 nt, Human
agaaaguguaaau

SEQ ID NO: 2882658 - RNA, 17 nt, Human
agaaaguugcacggcug

SEQ ID NO: 2882659 - RNA, 19 nt, Human
agaaaguugcacggcugcu

SEQ ID NO: 2882660 - RNA, 20 nt, Human
agaaaguugcacggcugcug

SEQ ID NO: 2882661 - RNA, 21 nt, Human
agaaaguugcacggcugcuga

SEQ ID NO: 2882662 - RNA, 13 nt, Human
agaaaguuuagaa

SEQ ID NO: 2882663 - RNA, 21 nt, Human
agaaauaaaguuugcuuagaa

SEQ ID NO: 2882664 - RNA, 18 nt, Human
agaaauaaaguuugcuua

SEQ ID NO: 2882665 - RNA, 13 nt, Human
agaaauaauaaua

SEQ ID NO: 2882666 - RNA, 15 nt, Human
agaaauaauaugcau

SEQ ID NO: 2882667 - RNA, 16 nt, Human
agaaauaauaugcauu

SEQ ID NO: 2882668 - RNA, 14 nt, Human
agaaauaauaugca

SEQ ID NO: 2882669 - RNA, 22 nt, Human
agaaauaagugguuauuucuca

SEQ ID NO: 2882670 - RNA, 17 nt, Human
agaaauaagugguuauu

SEQ ID NO: 2882671 - RNA, 21 nt, Human
agaaauaagugguuauuucuc

SEQ ID NO: 2882672 - RNA, 23 nt, Human
agaaaguacuucuccacccugcu

SEQ ID NO: 2882673 - RNA, 20 nt, Human
agaaagucgaauuaauagcu

SEQ ID NO: 2882674 - RNA, 17 nt, Human
agaaagucauuccuucu

SEQ ID NO: 2882675 - RNA, 20 nt, Human
agaaagucauuccuucuuuu

SEQ ID NO: 2882676 - RNA, 16 nt, Human
agaaagguucugcccg

SEQ ID NO: 2882677 - RNA, 22 nt, Human
agaaaguacuucuccacccugc

SEQ ID NO: 2882678 - RNA, 21 nt, Human
agaaagucgaauuaauagcuu

SEQ ID NO: 2882679 - RNA, 22 nt, Human
agaaagucuaucuaaugacaug

SEQ ID NO: 2882680 - RNA, 16 nt, Human
agaaagugggagguca

SEQ ID NO: 2882681 - RNA, 18 nt, Human
agaaagugggaggucagg

SEQ ID NO: 2882682 - RNA, 19 nt, Human
agaaagugggaggucagga

SEQ ID NO: 2882683 - RNA, 22 nt, Human
agaaagugggaggucaggaaac

SEQ ID NO: 2882684 - RNA, 16 nt, Human
agaaaaugaaaaacaa

SEQ ID NO: 2882685 - RNA, 23 nt, Human
agaaaaucaagcagguuagagaa

SEQ ID NO: 2882686 - RNA, 16 nt, Human
agaaaaugcuagaaga

SEQ ID NO: 2882687 - RNA, 15 nt, Human
agaaaggccugcaca

SEQ ID NO: 2882688 - RNA, 16 nt, Human
agaaaggccugcacac

SEQ ID NO: 2882689 - RNA, 17 nt, Human
agaaaggccugcacaca

SEQ ID NO: 2882690 - RNA, 19 nt, Human
acugucucaagagggcacu

SEQ ID NO: 2882691 - RNA, 18 nt, Human
acugguuaucacaccauc

SEQ ID NO: 2882692 - RNA, 17 nt, Human
acugguucucaaugaaa

SEQ ID NO: 2882693 - RNA, 14 nt, Human
acugguucucaaug

SEQ ID NO: 2882694 - RNA, 12 nt, Human
acugguucucaa

SEQ ID NO: 2882695 - RNA, 16 nt, Human
acugguuccuucuucc

SEQ ID NO: 2882696 - RNA, 18 nt, Human
acugguucucaaugaaaa

SEQ ID NO: 2882697 - RNA, 17 nt, Human
acugguuuacaggcccu

SEQ ID NO: 2882698 - RNA, 18 nt, Human
acugguuuacaggcccug

SEQ ID NO: 2882699 - RNA, 22 nt, Human
acugguuuacaggcccugcucc

SEQ ID NO: 2882700 - RNA, 20 nt, Human
acugguuguugccaaacagc

SEQ ID NO: 2882701 - RNA, 14 nt, Human
acugguuugagauu

SEQ ID NO: 2882702 - RNA, 22 nt, Human
acugugaaguuuacauuguaaa

SEQ ID NO: 2882703 - RNA, 23 nt, Human
acugugacaacugucuaacuuua

SEQ ID NO: 2882704 - RNA, 13 nt, Human
acugugacacacu

SEQ ID NO: 2882705 - RNA, 23 nt, Human
acugugacacacuacaccacaca

SEQ ID NO: 2882706 - RNA, 14 nt, Human
acugugccuuugca

SEQ ID NO: 2882707 - RNA, 19 nt, Human
acugugccuuugcaaauca

SEQ ID NO: 2882708 - RNA, 22 nt, Human
acugugccuuugcaaaucagug

SEQ ID NO: 2882709 - RNA, 23 nt, Human
acugugccuuugcaaaucagugu

SEQ ID NO: 2882710 - RNA, 23 nt, Human
acugugacucuuuuuagggccag

SEQ ID NO: 2882711 - RNA, 12 nt, Human
acugucucacug

SEQ ID NO: 2882712 - RNA, 23 nt, Human
acugucucaagagggcacuggug

SEQ ID NO: 2882713 - RNA, 20 nt, Human
acugucucaagagggcacug

SEQ ID NO: 2882714 - RNA, 21 nt, Human
acugucucaagagggcacugg

SEQ ID NO: 2882715 - RNA, 19 nt, Human
acuggaagcuaauuugcau

SEQ ID NO: 2882716 - RNA, 15 nt, Human
acuggagccaugggc

SEQ ID NO: 2882717 - RNA, 12 nt, Human
acuggagcccag

SEQ ID NO: 2882718 - RNA, 14 nt, Human
acuggagcccagga

SEQ ID NO: 2882719 - RNA, 13 nt, Human
acuggagcccagg

SEQ ID NO: 2882720 - RNA, 14 nt, Human
acugguccugugug

SEQ ID NO: 2882721 - RNA, 15 nt, Human
acugguccugugugc

SEQ ID NO: 2882722 - RNA, 20 nt, Human
acugguccugugugcaguga

SEQ ID NO: 2882723 - RNA, 18 nt, Human
acugguauuccugccucc

SEQ ID NO: 2882724 - RNA, 17 nt, Human
acuggaagcacagcuuc

SEQ ID NO: 2882725 - RNA, 17 nt, Human
acugcccccucugcccu

SEQ ID NO: 2882726 - RNA, 16 nt, Human
acugcccccucugccc

SEQ ID NO: 2882727 - RNA, 19 nt, Human
acuggaagcacagcuucau

SEQ ID NO: 2882728 - RNA, 16 nt, Human
acuggaagcuaauuug

SEQ ID NO: 2882729 - RNA, 16 nt, Human
acuggaagcacagcuu

SEQ ID NO: 2882730 - RNA, 19 nt, Human
acugccagcagcagcaggu

SEQ ID NO: 2882731 - RNA, 18 nt, Human
acugccagcagcagcagg

SEQ ID NO: 2882732 - RNA, 22 nt, Human
acugccccccaugaggaaggaa

SEQ ID NO: 2882733 - RNA, 19 nt, Human
acugccccccaugaggaag

SEQ ID NO: 2882734 - RNA, 15 nt, Human
acugcccccucugcc

SEQ ID NO: 2882735 - RNA, 14 nt, Human
acugcccccucugc

SEQ ID NO: 2882736 - RNA, 16 nt, Human
acugccagcagcagca

SEQ ID NO: 2882737 - RNA, 14 nt, Human
acugccagcagcag

SEQ ID NO: 2882738 - RNA, 13 nt, Human
acugccagcagca

SEQ ID NO: 2882739 - RNA, 12 nt, Human
acugccagcagc

SEQ ID NO: 2882740 - RNA, 14 nt, Human
acuucuguccugug

SEQ ID NO: 2882741 - RNA, 15 nt, Human
acuucuggucaauca

SEQ ID NO: 2882742 - RNA, 18 nt, Human
acuucacauuaaaaaaug

SEQ ID NO: 2882743 - RNA, 15 nt, Human
acuucagaauuccau

SEQ ID NO: 2882744 - RNA, 15 nt, Human
acuucacugaaagac

SEQ ID NO: 2882745 - RNA, 20 nt, Human
acuguuucucuugagcuggc

SEQ ID NO: 2882746 - RNA, 19 nt, Human
acuguuucucuugagcugg

SEQ ID NO: 2882747 - RNA, 18 nt, Human
acuguuucucuugagcug

SEQ ID NO: 2882748 - RNA, 17 nt, Human
acuguuucucuugagcu

SEQ ID NO: 2882749 - RNA, 22 nt, Human
acuguuucucuugagcuggccu

SEQ ID NO: 2882750 - RNA, 21 nt, Human
acuguuucucuugagcuggcc

SEQ ID NO: 2882751 - RNA, 23 nt, Human
acuguuucucuugagcuggccuc

SEQ ID NO: 2882752 - RNA, 13 nt, Human
acuguuucuugcu

SEQ ID NO: 2882753 - RNA, 14 nt, Human
acuguuucuugcuu

SEQ ID NO: 2882754 - RNA, 16 nt, Human
acuguuucuugcuugu

SEQ ID NO: 2882755 - RNA, 19 nt, Human
acuguuucuugcuuguacc

SEQ ID NO: 2882756 - RNA, 20 nt, Human
acuguuucuugcuuguaccu

SEQ ID NO: 2882757 - RNA, 21 nt, Human
acuguuucuugcuuguaccuc

SEQ ID NO: 2882758 - RNA, 16 nt, Human
acuguuucucuugagc

SEQ ID NO: 2882759 - RNA, 15 nt, Human
acuuauuucuucaaa

SEQ ID NO: 2882760 - RNA, 16 nt, Human
acuuauuucuucaaau

SEQ ID NO: 2882761 - RNA, 16 nt, Human
acuuauuuuauuucca

SEQ ID NO: 2882762 - RNA, 17 nt, Human
acuuauuuuauuuccau

SEQ ID NO: 2882763 - RNA, 16 nt, Human
acuuauuuuugacagu

SEQ ID NO: 2882764 - RNA, 14 nt, Human
acuuauuuuugaca

SEQ ID NO: 2882765 - RNA, 22 nt, Human
acuuauuuuugacaguguugaa

SEQ ID NO: 2882766 - RNA, 19 nt, Human
acuuauuuuugacaguguu

SEQ ID NO: 2882767 - RNA, 20 nt, Human
acuucuuauggaauugauuu

SEQ ID NO: 2882768 - RNA, 17 nt, Human
acuucuuauggaauuga

SEQ ID NO: 2882769 - RNA, 16 nt, Human
acuucuuauggaauug

SEQ ID NO: 2882770 - RNA, 17 nt, Human
acuucuucuccaucccu

SEQ ID NO: 2882771 - RNA, 14 nt, Human
acuucuucuccauc

SEQ ID NO: 2882772 - RNA, 20 nt, Human
acuucuucagagcugacaca

SEQ ID NO: 2882773 - RNA, 23 nt, Human
acuucuuauggaauugauuugca

SEQ ID NO: 2882774 - RNA, 21 nt, Human
acuucuuauggaauugauuug

SEQ ID NO: 2882775 - RNA, 13 nt, Human
acuucuucagagc

SEQ ID NO: 2882776 - RNA, 16 nt, Human
acuucuucagagcuga

SEQ ID NO: 2882777 - RNA, 21 nt, Human
acuucuucagagcugacacag

SEQ ID NO: 2882778 - RNA, 17 nt, Human
acuucuuccuuucucuu

SEQ ID NO: 2882779 - RNA, 20 nt, Human
acuuggggagauggaguucu

SEQ ID NO: 2882780 - RNA, 18 nt, Human
acuuggggagauuugcca

SEQ ID NO: 2882781 - RNA, 15 nt, Human
acuugguucugcuuc

SEQ ID NO: 2882782 - RNA, 16 nt, Human
acuugguucugcuuca

SEQ ID NO: 2882783 - RNA, 17 nt, Human
acuugguucugcuucaa

SEQ ID NO: 2882784 - RNA, 13 nt, Human
acuuggugcuggg

SEQ ID NO: 2882785 - RNA, 12 nt, Human
acuugguuugug

SEQ ID NO: 2882786 - RNA, 15 nt, Human
acugugcuacugucu

SEQ ID NO: 2882787 - RNA, 22 nt, Human
acugugcuacugucuuuggaaa

SEQ ID NO: 2882788 - RNA, 23 nt, Human
acugugcuacugucuuuggaaaa

SEQ ID NO: 2882789 - RNA, 14 nt, Human
acugugcucagggc

SEQ ID NO: 2882790 - RNA, 13 nt, Human
acugugcugaaug

SEQ ID NO: 2882791 - RNA, 15 nt, Human
acccaccucagccuc

SEQ ID NO: 2882792 - RNA, 14 nt, Human
acccaccucagccu

SEQ ID NO: 2882793 - RNA, 13 nt, Human
acccaccucagcc

SEQ ID NO: 2882794 - RNA, 16 nt, Human
acccacaccucugcca

SEQ ID NO: 2882795 - RNA, 15 nt, Human
acccacaccucugcc

SEQ ID NO: 2882796 - RNA, 17 nt, Human
acccacaccucugccag

SEQ ID NO: 2882797 - RNA, 13 nt, Human
accaucuaauagc

SEQ ID NO: 2882798 - RNA, 19 nt, Human
accauauucagugcugugg

SEQ ID NO: 2882799 - RNA, 13 nt, Human
accauaugauacu

SEQ ID NO: 2882800 - RNA, 19 nt, Human
accauaugaucuguuuugu

SEQ ID NO: 2882801 - RNA, 16 nt, Human
accauaugcccacauu

SEQ ID NO: 2882802 - RNA, 19 nt, Human
accauaugcccacauuuag

SEQ ID NO: 2882803 - RNA, 23 nt, Human
accauauaaagggggagggaaau

SEQ ID NO: 2882804 - RNA, 23 nt, Human
accauauacuguucuucauuuua

SEQ ID NO: 2882805 - RNA, 14 nt, Human
accauauagcaaaa

SEQ ID NO: 2882806 - RNA, 17 nt, Human
accauauagcaaaacuu

SEQ ID NO: 2882807 - RNA, 21 nt, Human
accauauagcaaaacuuuuaa

SEQ ID NO: 2882808 - RNA, 15 nt, Human
accaucgcuggcccc

SEQ ID NO: 2882809 - RNA, 16 nt, Human
accaucgcuggccccu

SEQ ID NO: 2882810 - RNA, 17 nt, Human
accaucgcuggccccuu

SEQ ID NO: 2882811 - RNA, 20 nt, Human
accaucgcuggccccuuugg

SEQ ID NO: 2882812 - RNA, 13 nt, Human
accauccuggcug

SEQ ID NO: 2882813 - RNA, 14 nt, Human
accauccuggcugc

SEQ ID NO: 2882814 - RNA, 16 nt, Human
accauccuauuuaacu

SEQ ID NO: 2882815 - RNA, 13 nt, Human
accauccuauuua

SEQ ID NO: 2882816 - RNA, 16 nt, Human
acccaccucagccucc

SEQ ID NO: 2882817 - RNA, 13 nt, Human
acccaccuagaac

SEQ ID NO: 2882818 - RNA, 14 nt, Human
acccaccucacccc

SEQ ID NO: 2882819 - RNA, 17 nt, Human
acccccugcaaagccca

SEQ ID NO: 2882820 - RNA, 14 nt, Human
acccccugcaaagc

SEQ ID NO: 2882821 - RNA, 20 nt, Human
acccccugcaaagcccagcu

SEQ ID NO: 2882822 - RNA, 18 nt, Human
acccccugcaaagcccag

SEQ ID NO: 2882823 - RNA, 22 nt, Human
acccccugcaaagcccagcuug

SEQ ID NO: 2882824 - RNA, 22 nt, Human
acccccucuucugagcacagau

SEQ ID NO: 2882825 - RNA, 20 nt, Human
acccccugagauccccugag

SEQ ID NO: 2882826 - RNA, 22 nt, Human
acccccugagauccccugagcc

SEQ ID NO: 2882827 - RNA, 23 nt, Human
acccccugagauccccugagccc

SEQ ID NO: 2882828 - RNA, 16 nt, Human
acccaugggcucugac

SEQ ID NO: 2882829 - RNA, 14 nt, Human
acccaugggcucug

SEQ ID NO: 2882830 - RNA, 17 nt, Human
acccaugggcucugaca

SEQ ID NO: 2882831 - RNA, 24 nt, Human
acccauguaaauaccagacugcag

SEQ ID NO: 2882832 - RNA, 13 nt, Human
acccauuccuauu

SEQ ID NO: 2882833 - RNA, 21 nt, Human
acccauucagagacugucccu

SEQ ID NO: 2882834 - RNA, 13 nt, Human
acccauucagaga

SEQ ID NO: 2882835 - RNA, 21 nt, Human
acccccucuucugagcacaga

SEQ ID NO: 2882836 - RNA, 17 nt, Human
acccauuccuauuucuu

SEQ ID NO: 2882837 - RNA, 16 nt, Human
accagcaacuugaacu

SEQ ID NO: 2882838 - RNA, 19 nt, Human
accccuccaugugggcuag

SEQ ID NO: 2882839 - RNA, 16 nt, Human
accccuccaugugggc

SEQ ID NO: 2882840 - RNA, 15 nt, Human
accccucacucuggc

SEQ ID NO: 2882841 - RNA, 18 nt, Human
accccucacucuggccuc

SEQ ID NO: 2882842 - RNA, 20 nt, Human
accccucaguugugcagcuu

SEQ ID NO: 2882843 - RNA, 17 nt, Human
accccucauagcccuca

SEQ ID NO: 2882844 - RNA, 12 nt, Human
accccuccagga

SEQ ID NO: 2882845 - RNA, 20 nt, Human
accccucacaggagcuuacu

SEQ ID NO: 2882846 - RNA, 13 nt, Human
acccccuucucug

SEQ ID NO: 2882847 - RNA, 19 nt, Human
acccccuucuacugagccu

SEQ ID NO: 2882848 - RNA, 18 nt, Human
acccccuucuacugagcc

SEQ ID NO: 2882849 - RNA, 17 nt, Human
accccucacucuggccu

SEQ ID NO: 2882850 - RNA, 12 nt, Human
acaggcaauucc

SEQ ID NO: 2882851 - RNA, 13 nt, Human
acaggcaauuccg

SEQ ID NO: 2882852 - RNA, 23 nt, Human
acaggcaaugcuggcuguuggcu

SEQ ID NO: 2882853 - RNA, 19 nt, Human
acaggcaaugcuggcuguu

SEQ ID NO: 2882854 - RNA, 19 nt, Human
acaggguuuugccauguug

SEQ ID NO: 2882855 - RNA, 14 nt, Human
acaggguugggccc

SEQ ID NO: 2882856 - RNA, 15 nt, Human
acaggguuucaccau

SEQ ID NO: 2882857 - RNA, 14 nt, Human
acaggguuuuuacc

SEQ ID NO: 2882858 - RNA, 18 nt, Human
acaggguuuuuaccuguc

SEQ ID NO: 2882859 - RNA, 20 nt, Human
acaggguuuuuaccugucac

SEQ ID NO: 2882860 - RNA, 23 nt, Human
acaggguuuuuaccugucacauu

SEQ ID NO: 2882861 - RNA, 18 nt, Human
acauaaugcuuaauuucu

SEQ ID NO: 2882862 - RNA, 19 nt, Human
acauaaugcuuaauuucua

SEQ ID NO: 2882863 - RNA, 20 nt, Human
acauaaugcuuaauuucuaa

SEQ ID NO: 2882864 - RNA, 19 nt, Human
acauaaugggccacugaaa

SEQ ID NO: 2882865 - RNA, 20 nt, Human
acauaaugggccacugaaau

SEQ ID NO: 2882866 - RNA, 21 nt, Human
acauaaugggccacugaaauc

SEQ ID NO: 2882867 - RNA, 22 nt, Human
acauaaugggccacugaaaucu

SEQ ID NO: 2882868 - RNA, 23 nt, Human
acauaaugggccacugaaaucug

SEQ ID NO: 2882869 - RNA, 12 nt, Human
acaucagcaaac

SEQ ID NO: 2882870 - RNA, 13 nt, Human
acaucagcaaaca

SEQ ID NO: 2882871 - RNA, 12 nt, Human
acaugaugcuuu

SEQ ID NO: 2882872 - RNA, 18 nt, Human
acaugaugcuuuuacuga

SEQ ID NO: 2882873 - RNA, 23 nt, Human
acaugaugcuuuuacugaacuuu

SEQ ID NO: 2882874 - RNA, 14 nt, Human
acaugauguuaugu

SEQ ID NO: 2882875 - RNA, 22 nt, Human
acaugauguuauguaccauaug

SEQ ID NO: 2882876 - RNA, 13 nt, Human
acaugauuuccuu

SEQ ID NO: 2882877 - RNA, 18 nt, Human
acaugugcacaugcacgu

SEQ ID NO: 2882878 - RNA, 16 nt, Human
acaugugcacaugcac

SEQ ID NO: 2882879 - RNA, 15 nt, Human
acaugugacacauau

SEQ ID NO: 2882880 - RNA, 21 nt, Human
acaugugacacauaugcaccu

SEQ ID NO: 2882881 - RNA, 22 nt, Human
acaugcagcccaugcccaccug

SEQ ID NO: 2882882 - RNA, 20 nt, Human
acaugcagcccaugcccacc

SEQ ID NO: 2882883 - RNA, 16 nt, Human
acaugauuuccuugaa

SEQ ID NO: 2882884 - RNA, 14 nt, Human
acauuuauucugcu

SEQ ID NO: 2882885 - RNA, 19 nt, Human
accagauaacugaggaggg

SEQ ID NO: 2882886 - RNA, 17 nt, Human
accagaggagccuuuuu

SEQ ID NO: 2882887 - RNA, 16 nt, Human
accagaggagccuuuu

SEQ ID NO: 2882888 - RNA, 15 nt, Human
accagaggagccuuu

SEQ ID NO: 2882889 - RNA, 14 nt, Human
accagaggagccuu

SEQ ID NO: 2882890 - RNA, 14 nt, Human
accaccucccucac

SEQ ID NO: 2882891 - RNA, 15 nt, Human
accagccagauccuc

SEQ ID NO: 2882892 - RNA, 11 nt, Human
accagccagcg

SEQ ID NO: 2882893 - RNA, 14 nt, Human
accagccagauccu

SEQ ID NO: 2882894 - RNA, 18 nt, Human
accagcccauggcccugu

SEQ ID NO: 2882895 - RNA, 19 nt, Human
accagcccauggcccugug

SEQ ID NO: 2882896 - RNA, 20 nt, Human
accagcccauggcccugugc

SEQ ID NO: 2882897 - RNA, 22 nt, Human
accagccauacuuaucucucug

SEQ ID NO: 2882898 - RNA, 22 nt, Human
accagaugcgucccaagauguu

SEQ ID NO: 2882899 - RNA, 21 nt, Human
accagaugcgucccaagaugu

SEQ ID NO: 2882900 - RNA, 17 nt, Human
accagcaauauguaaau

SEQ ID NO: 2882901 - RNA, 12 nt, Human
accaagcccagu

SEQ ID NO: 2882902 - RNA, 15 nt, Human
accaagcaggagacg

SEQ ID NO: 2882903 - RNA, 16 nt, Human
accaagcaucaggggg

SEQ ID NO: 2882904 - RNA, 15 nt, Human
accaaguauuuauua

SEQ ID NO: 2882905 - RNA, 19 nt, Human
accaagucggaacagcaga

SEQ ID NO: 2882906 - RNA, 15 nt, Human
accaauaaaauuucu

SEQ ID NO: 2882907 - RNA, 16 nt, Human
accaauagcccacagc

SEQ ID NO: 2882908 - RNA, 16 nt, Human
accaccgcccgucugu

SEQ ID NO: 2882909 - RNA, 18 nt, Human
accaccgcccgucugugu

SEQ ID NO: 2882910 - RNA, 15 nt, Human
acauuuauucugcuc

SEQ ID NO: 2882911 - RNA, 14 nt, Human
acauuuauuuuaug

SEQ ID NO: 2882912 - RNA, 15 nt, Human
acauuuauuuuauga

SEQ ID NO: 2882913 - RNA, 16 nt, Human
acauuuauuuuaugag

SEQ ID NO: 2882914 - RNA, 17 nt, Human
acauuuauuuuaugaga

SEQ ID NO: 2882915 - RNA, 18 nt, Human
acauuuauuuuaugagaa

SEQ ID NO: 2882916 - RNA, 20 nt, Human
acauuuauuuuaugagaaau

SEQ ID NO: 2882917 - RNA, 22 nt, Human
acauuuauuuuaugagaaaugu

SEQ ID NO: 2882918 - RNA, 21 nt, Human
acauuucacaggcuaauggga

SEQ ID NO: 2882919 - RNA, 18 nt, Human
acauuuuaaaaacauaga

SEQ ID NO: 2882920 - RNA, 23 nt, Human
acauuuuaaaaacauagaaaaau

SEQ ID NO: 2882921 - RNA, 14 nt, Human
acauuuuaaauaaa

SEQ ID NO: 2882922 - RNA, 16 nt, Human
accaagaugccaucug

SEQ ID NO: 2882923 - RNA, 22 nt, Human
accaagaugccaucuguguccu

SEQ ID NO: 2882924 - RNA, 15 nt, Human
acauuuuaaauaaaa

SEQ ID NO: 2882925 - RNA, 17 nt, Human
acauuuuaaauaaaaga

SEQ ID NO: 2882926 - RNA, 20 nt, Human
acauuuuaaauaaaagaaaa

SEQ ID NO: 2882927 - RNA, 14 nt, Human
acauuuguguguua

SEQ ID NO: 2882928 - RNA, 12 nt, Human
acauuugugaga

SEQ ID NO: 2882929 - RNA, 19 nt, Human
acauuugugauauauguau

SEQ ID NO: 2882930 - RNA, 21 nt, Human
acauuugugauauauguauua

SEQ ID NO: 2882931 - RNA, 19 nt, Human
acauuugugccgacacugu

SEQ ID NO: 2882932 - RNA, 20 nt, Human
acauuugugccgacacuguu

SEQ ID NO: 2882933 - RNA, 21 nt, Human
acauuugugccgacacuguuc

SEQ ID NO: 2882934 - RNA, 19 nt, Human
acagagugagacucugucu

SEQ ID NO: 2882935 - RNA, 15 nt, Human
acagagugagacucu

SEQ ID NO: 2882936 - RNA, 23 nt, Human
acagagucucacuguugcccagg

SEQ ID NO: 2882937 - RNA, 17 nt, Human
acagaggcuauuguccc

SEQ ID NO: 2882938 - RNA, 13 nt, Human
acagaggccugcc

SEQ ID NO: 2882939 - RNA, 15 nt, Human
acagaggggacucug

SEQ ID NO: 2882940 - RNA, 16 nt, Human
acagaggggacucugg

SEQ ID NO: 2882941 - RNA, 20 nt, Human
acagaggggacucugggcua

SEQ ID NO: 2882942 - RNA, 14 nt, Human
acagaggccugccc

SEQ ID NO: 2882943 - RNA, 13 nt, Human
acagccaagugcc

SEQ ID NO: 2882944 - RNA, 15 nt, Human
acagccaagugccaa

SEQ ID NO: 2882945 - RNA, 18 nt, Human
acagccaagugccaaaug

SEQ ID NO: 2882946 - RNA, 21 nt, Human
acagccaacagcuacaacagc

SEQ ID NO: 2882947 - RNA, 23 nt, Human
acagccaacagcuacaacagccu

SEQ ID NO: 2882948 - RNA, 20 nt, Human
acagaauguuuuacugugaa

SEQ ID NO: 2882949 - RNA, 14 nt, Human
acagaauuuuggaa

SEQ ID NO: 2882950 - RNA, 15 nt, Human
acagaauuuuuuuug

SEQ ID NO: 2882951 - RNA, 13 nt, Human
acagaauguaucu

SEQ ID NO: 2882952 - RNA, 14 nt, Human
acagaauguaucug

SEQ ID NO: 2882953 - RNA, 15 nt, Human
acagaauguaucugu

SEQ ID NO: 2882954 - RNA, 17 nt, Human
acagaauguaucuguga

SEQ ID NO: 2882955 - RNA, 18 nt, Human
acagaauguaucugugaa

SEQ ID NO: 2882956 - RNA, 20 nt, Human
acagaauguaucugugaagu

SEQ ID NO: 2882957 - RNA, 11 nt, Human
acagacacagg

SEQ ID NO: 2882958 - RNA, 21 nt, Human
acagaauguuuuacugugaaa

SEQ ID NO: 2882959 - RNA, 21 nt, Human
acacugguauuccugccucca

SEQ ID NO: 2882960 - RNA, 16 nt, Human
acacuggugugaccug

SEQ ID NO: 2882961 - RNA, 20 nt, Human
acacuggugugaccugaggg

SEQ ID NO: 2882962 - RNA, 21 nt, Human
acacuggugugaccugagggc

SEQ ID NO: 2882963 - RNA, 17 nt, Human
acacugguucucaauga

SEQ ID NO: 2882964 - RNA, 15 nt, Human
acacugguucucaau

SEQ ID NO: 2882965 - RNA, 14 nt, Human
acacugguucucaa

SEQ ID NO: 2882966 - RNA, 13 nt, Human
acacugguucuca

SEQ ID NO: 2882967 - RNA, 19 nt, Human
acacugguucucaaugaaa

SEQ ID NO: 2882968 - RNA, 18 nt, Human
acacugguucucaaugaa

SEQ ID NO: 2882969 - RNA, 21 nt, Human
acacugguucucaaugaaaaa

SEQ ID NO: 2882970 - RNA, 14 nt, Human
acagaaugaaaaau

SEQ ID NO: 2882971 - RNA, 15 nt, Human
acagaaugaaaaaug

SEQ ID NO: 2882972 - RNA, 16 nt, Human
acagaaugaaaaauga

SEQ ID NO: 2882973 - RNA, 17 nt, Human
acagaaugaaaaaugaa

SEQ ID NO: 2882974 - RNA, 18 nt, Human
acagaaugaaaaaugaaa

SEQ ID NO: 2882975 - RNA, 20 nt, Human
acagaaugaaaaaugaaaga

SEQ ID NO: 2882976 - RNA, 21 nt, Human
acagaaugaaaaaugaaagau

SEQ ID NO: 2882977 - RNA, 22 nt, Human
acagaaugaaaaaugaaagaug

SEQ ID NO: 2882978 - RNA, 24 nt, Human
acagaaugaaaaaugaaagaugau

SEQ ID NO: 2882979 - RNA, 15 nt, Human
acagaggcagcccca

SEQ ID NO: 2882980 - RNA, 14 nt, Human
acagaggcagcccc

SEQ ID NO: 2882981 - RNA, 14 nt, Human
acagacacaggccc

SEQ ID NO: 2882982 - RNA, 13 nt, Human
acagacacaggcc

SEQ ID NO: 2882983 - RNA, 19 nt, Human
acagaggcagccccauucu

SEQ ID NO: 2882984 - RNA, 12 nt, Human
acagaggccugc

SEQ ID NO: 2882985 - RNA, 21 nt, Human
acacugcaggcaucacagcua

SEQ ID NO: 2882986 - RNA, 16 nt, Human
acacuggacuccggcc

SEQ ID NO: 2882987 - RNA, 16 nt, Human
acacugcaggcaucac

SEQ ID NO: 2882988 - RNA, 20 nt, Human
acacugcaggcaucacagcu

SEQ ID NO: 2882989 - RNA, 15 nt, Human
acacuggcagacugu

SEQ ID NO: 2882990 - RNA, 18 nt, Human
acacuggcagacugugua

SEQ ID NO: 2882991 - RNA, 13 nt, Human
acacuggccccuc

SEQ ID NO: 2882992 - RNA, 14 nt, Human
acacuggccccuca

SEQ ID NO: 2882993 - RNA, 17 nt, Human
acacuggcuaaagauaa

SEQ ID NO: 2882994 - RNA, 22 nt, Human
acacuggcuaaagauaauugcu

SEQ ID NO: 2882995 - RNA, 18 nt, Human
acacugguauuccugccu

SEQ ID NO: 2882996 - RNA, 19 nt, Human
acacugguauuccugccuc

SEQ ID NO: 2882997 - RNA, 22 nt, Human
acacugcacucuuaagcuuccg

SEQ ID NO: 2882998 - RNA, 15 nt, Human
acacugcaaucauau

SEQ ID NO: 2882999 - RNA, 16 nt, Human
acacugcaaucauaug

SEQ ID NO: 2883000 - RNA, 19 nt, Human
acacugcaaucauauguga

SEQ ID NO: 2883001 - RNA, 20 nt, Human
acacugcaaucauaugugau

SEQ ID NO: 2883002 - RNA, 20 nt, Human
acaggauuugaacucagauc

SEQ ID NO: 2883003 - RNA, 14 nt, Human
acaggaugcugugu

SEQ ID NO: 2883004 - RNA, 19 nt, Human
acaggcaaaauccuugcuu

SEQ ID NO: 2883005 - RNA, 12 nt, Human
acaggcaagcac

SEQ ID NO: 2883006 - RNA, 18 nt, Human
acaggcaaugcuggcugu

SEQ ID NO: 2883007 - RNA, 19 nt, Human
acaggaugggggcuggccu

SEQ ID NO: 2883008 - RNA, 18 nt, Human
acaggaugaccuggauaa

SEQ ID NO: 2883009 - RNA, 21 nt, Human
acaggaugaggugguggagug

SEQ ID NO: 2883010 - RNA, 14 nt, Human
acaggaugaaggca

SEQ ID NO: 2883011 - RNA, 20 nt, Human
acagcucuguguugccaugu

SEQ ID NO: 2883012 - RNA, 16 nt, Human
acagcucuuaaaugua

SEQ ID NO: 2883013 - RNA, 19 nt, Human
acaggaucaguuaacuauu

SEQ ID NO: 2883014 - RNA, 15 nt, Human
acaggaucagucuga

SEQ ID NO: 2883015 - RNA, 19 nt, Human
acagcucuguguugccaug

SEQ ID NO: 2883016 - RNA, 17 nt, Human
acagcucuguguugcca

SEQ ID NO: 2883017 - RNA, 17 nt, Human
acagcucuucuccaggc

SEQ ID NO: 2883018 - RNA, 16 nt, Human
acagcucuucuccagg

SEQ ID NO: 2883019 - RNA, 17 nt, Human
acagccacggccaggcc

SEQ ID NO: 2883020 - RNA, 16 nt, Human
acagccacggccaggc

SEQ ID NO: 2883021 - RNA, 15 nt, Human
acagccacggccagg

SEQ ID NO: 2883022 - RNA, 18 nt, Human
acagccacggccaggcca

SEQ ID NO: 2883023 - RNA, 21 nt, Human
acacgcacauauacacacaca

SEQ ID NO: 2883024 - RNA, 17 nt, Human
acacgcgcgcacacaca

SEQ ID NO: 2883025 - RNA, 17 nt, Human
acacgcgugcacacacc

SEQ ID NO: 2883026 - RNA, 15 nt, Human
acacgcgugcacaca

SEQ ID NO: 2883027 - RNA, 15 nt, Human
acacauuuuuaaauu

SEQ ID NO: 2883028 - RNA, 19 nt, Human
acacauuuuuaaauuguua

SEQ ID NO: 2883029 - RNA, 14 nt, Human
acaccaaauaaaua

SEQ ID NO: 2883030 - RNA, 16 nt, Human
acaccaagaugucugu

SEQ ID NO: 2883031 - RNA, 14 nt, Human
acaccaaaguucua

SEQ ID NO: 2883032 - RNA, 15 nt, Human
acaccaaaguucuaa

SEQ ID NO: 2883033 - RNA, 22 nt, Human
acacgcgcgcacacacacacau

SEQ ID NO: 2883034 - RNA, 21 nt, Human
acacgcgggcgcgaucccaca

SEQ ID NO: 2883035 - RNA, 23 nt, Human
acacgcgggcgcgaucccacaca

SEQ ID NO: 2883036 - RNA, 14 nt, Human
acacgcuccuuccu

SEQ ID NO: 2883037 - RNA, 16 nt, Human
acacagauacacacac

SEQ ID NO: 2883038 - RNA, 17 nt, Human
acacagauacacacaca

SEQ ID NO: 2883039 - RNA, 14 nt, Human
acacagaugaaaca

SEQ ID NO: 2883040 - RNA, 21 nt, Human
acacagaugaaacacaaacaa

SEQ ID NO: 2883041 - RNA, 11 nt, Human
acacagauguu

SEQ ID NO: 2883042 - RNA, 16 nt, Human
acacagauguucgguu

SEQ ID NO: 2883043 - RNA, 14 nt, Human
acacagcucugucc

SEQ ID NO: 2883044 - RNA, 17 nt, Human
acacagauuugagcuca

SEQ ID NO: 2883045 - RNA, 20 nt, Human
acacagcucuguccugggag

SEQ ID NO: 2883046 - RNA, 22 nt, Human
acaauugagguaaguuuuuuga

SEQ ID NO: 2883047 - RNA, 22 nt, Human
acacagagaagcggauuuccag

SEQ ID NO: 2883048 - RNA, 20 nt, Human
acacagaggaauuuauaccu

SEQ ID NO: 2883049 - RNA, 19 nt, Human
acaauuguccauggucuca

SEQ ID NO: 2883050 - RNA, 21 nt, Human
acaauugucgaaaagagucuu

SEQ ID NO: 2883051 - RNA, 19 nt, Human
acaauugugggcauaaacu

SEQ ID NO: 2883052 - RNA, 22 nt, Human
acaauugugggcauaaacuguu

SEQ ID NO: 2883053 - RNA, 13 nt, Human
acacagcucuucu

SEQ ID NO: 2883054 - RNA, 11 nt, Human
acacagcucuu

SEQ ID NO: 2883055 - RNA, 21 nt, Human
acacauuuugguucuucucaa

SEQ ID NO: 2883056 - RNA, 16 nt, Human
acacagaugaaacaca

SEQ ID NO: 2883057 - RNA, 22 nt, Human
acaauucuguuuuagguuaaaa

SEQ ID NO: 2883058 - RNA, 15 nt, Human
acaauucuacauugu

SEQ ID NO: 2883059 - RNA, 15 nt, Human
acaaaauuuuauuuu

SEQ ID NO: 2883060 - RNA, 22 nt, Human
acaaaauuuuauuuugugcuca

SEQ ID NO: 2883061 - RNA, 16 nt, Human
acaaaauuuucucauu

SEQ ID NO: 2883062 - RNA, 22 nt, Human
acaaaauuuucucauuuucuuu

SEQ ID NO: 2883063 - RNA, 18 nt, Human
acaaccuucuguggcuca

SEQ ID NO: 2883064 - RNA, 22 nt, Human
acaacgugcaacugacacuccc

SEQ ID NO: 2883065 - RNA, 17 nt, Human
acaaggauugcuacugu

SEQ ID NO: 2883066 - RNA, 15 nt, Human
acaagaaaucccugu

SEQ ID NO: 2883067 - RNA, 16 nt, Human
acaagaaaucccuguu

SEQ ID NO: 2883068 - RNA, 15 nt, Human
acaacuuuuaaccaa

SEQ ID NO: 2883069 - RNA, 20 nt, Human
acaacuuuuaaccaaacaau

SEQ ID NO: 2883070 - RNA, 13 nt, Human
acaagaaaaucag

SEQ ID NO: 2883071 - RNA, 20 nt, Human
acaagaaacucaaugcacaa

SEQ ID NO: 2883072 - RNA, 21 nt, Human
acaagaaaucccuguuuaaua

SEQ ID NO: 2883073 - RNA, 23 nt, Human
acaagaaaucccuguuuaauauu

SEQ ID NO: 2883074 - RNA, 16 nt, Human
acaagggaaggacaga

SEQ ID NO: 2883075 - RNA, 13 nt, Human
aauuuuguugcug

SEQ ID NO: 2883076 - RNA, 13 nt, Human
aauuuuguaauga

SEQ ID NO: 2883077 - RNA, 15 nt, Human
aauuuuguaacgaag

SEQ ID NO: 2883078 - RNA, 22 nt, Human
aauuuucuggaauacaugaaau

SEQ ID NO: 2883079 - RNA, 18 nt, Human
aauuuucuagacuuucug

SEQ ID NO: 2883080 - RNA, 12 nt, Human
aauuuucuagac

SEQ ID NO: 2883081 - RNA, 11 nt, Human
aauuuucuaag

SEQ ID NO: 2883082 - RNA, 20 nt, Human
aauuuucuacaaauaauuuu

SEQ ID NO: 2883083 - RNA, 15 nt, Human
aauuuucuagacuuu

SEQ ID NO: 2883084 - RNA, 17 nt, Human
aauuuucuagacuuucu

SEQ ID NO: 2883085 - RNA, 20 nt, Human
aauuuucuagacuuucuguu

SEQ ID NO: 2883086 - RNA, 17 nt, Human
aauuuucucaaaagcau

SEQ ID NO: 2883087 - RNA, 23 nt, Human
aauuuucucaaaagcauuuauca

SEQ ID NO: 2883088 - RNA, 17 nt, Human
aauuuucucauuuucuu

SEQ ID NO: 2883089 - RNA, 17 nt, Human
aaaggcaccaucuaaua

SEQ ID NO: 2883090 - RNA, 17 nt, Human
aaaggcaaauguguaca

SEQ ID NO: 2883091 - RNA, 14 nt, Human
aaaggccauggaga

SEQ ID NO: 2883092 - RNA, 19 nt, Human
aaaggccauggagagcugg

SEQ ID NO: 2883093 - RNA, 13 nt, Human
aaaggccaaacug

SEQ ID NO: 2883094 - RNA, 15 nt, Human
aaaggccaaacugcu

SEQ ID NO: 2883095 - RNA, 18 nt, Human
aaaggccaaacugcugga

SEQ ID NO: 2883096 - RNA, 15 nt, Human
aaaggccugcacaca

SEQ ID NO: 2883097 - RNA, 12 nt, Human
aaaggcccccua

SEQ ID NO: 2883098 - RNA, 14 nt, Human
aaaggccucugucc

SEQ ID NO: 2883099 - RNA, 13 nt, Human
aaaggcccagccc

SEQ ID NO: 2883100 - RNA, 14 nt, Human
aaaggcccagcccc

SEQ ID NO: 2883101 - RNA, 16 nt, Human
aaaggcccagccccua

SEQ ID NO: 2883102 - RNA, 17 nt, Human
aaaggcccagccccuag

SEQ ID NO: 2883103 - RNA, 22 nt, Human
aaagcccuuccaugucgccucu

SEQ ID NO: 2883104 - RNA, 23 nt, Human
aaagcccuuccaugucgccucug

SEQ ID NO: 2883105 - RNA, 13 nt, Human
aaagccucaacca

SEQ ID NO: 2883106 - RNA, 23 nt, Human
aaagccguuguuuacuuaaagau

SEQ ID NO: 2883107 - RNA, 20 nt, Human
aaagccucaagguuuuaggu

SEQ ID NO: 2883108 - RNA, 21 nt, Human
aaagccguuguuuacuuaaag

SEQ ID NO: 2883109 - RNA, 22 nt, Human
aaaggcaaguuaagagaaacuu

SEQ ID NO: 2883110 - RNA, 23 nt, Human
aaaggcaaguuaagagaaacuuu

SEQ ID NO: 2883111 - RNA, 16 nt, Human
aaaggcaaauguguac

SEQ ID NO: 2883112 - RNA, 19 nt, Human
aaagccaauaacacacagc

SEQ ID NO: 2883113 - RNA, 17 nt, Human
aaagccacauuauuucu

SEQ ID NO: 2883114 - RNA, 18 nt, Human
aaagccacauuauuucua

SEQ ID NO: 2883115 - RNA, 20 nt, Human
aaagccacauuauuucuagu

SEQ ID NO: 2883116 - RNA, 21 nt, Human
aaagccacauuauuucuaguc

SEQ ID NO: 2883117 - RNA, 12 nt, Human
aaagccacccca

SEQ ID NO: 2883118 - RNA, 16 nt, Human
aaagccacuagacucu

SEQ ID NO: 2883119 - RNA, 17 nt, Human
aaagccacuagacucuu

SEQ ID NO: 2883120 - RNA, 18 nt, Human
aaagccaccucugucauu

SEQ ID NO: 2883121 - RNA, 19 nt, Human
aaagccaccucugucauuu

SEQ ID NO: 2883122 - RNA, 20 nt, Human
aaagccaccucugucauuug

SEQ ID NO: 2883123 - RNA, 22 nt, Human
aaagcccugucgggcuuugugu

SEQ ID NO: 2883124 - RNA, 13 nt, Human
aaagccagggucu

SEQ ID NO: 2883125 - RNA, 14 nt, Human
aaagccagggucuc

SEQ ID NO: 2883126 - RNA, 19 nt, Human
aaagccagggucucucccu

SEQ ID NO: 2883127 - RNA, 22 nt, Human
aaagccagggucucucccucag

SEQ ID NO: 2883128 - RNA, 17 nt, Human
aaagccaaggugucauu

SEQ ID NO: 2883129 - RNA, 20 nt, Human
aaauaaaguuugcuuagaaa

SEQ ID NO: 2883130 - RNA, 20 nt, Human
aaauaaaguauauauagaau

SEQ ID NO: 2883131 - RNA, 16 nt, Human
aaauaaaguauauaua

SEQ ID NO: 2883132 - RNA, 17 nt, Human
aaauaaaaccuuucaaa

SEQ ID NO: 2883133 - RNA, 15 nt, Human
aaauaaaguauauau

SEQ ID NO: 2883134 - RNA, 15 nt, Human
aaaguggaauuucuu

SEQ ID NO: 2883135 - RNA, 18 nt, Human
aaaguggaauuucuuguu

SEQ ID NO: 2883136 - RNA, 19 nt, Human
aaaguggaauuucuuguuu

SEQ ID NO: 2883137 - RNA, 22 nt, Human
aaaguggaauuucuuguuucuc

SEQ ID NO: 2883138 - RNA, 17 nt, Human
aaaguggagaagcacac

SEQ ID NO: 2883139 - RNA, 13 nt, Human
aaagugcuugugu

SEQ ID NO: 2883140 - RNA, 15 nt, Human
aaagugcuuguguaa

SEQ ID NO: 2883141 - RNA, 16 nt, Human
aaagugcuuguguaau

SEQ ID NO: 2883142 - RNA, 17 nt, Human
aaagugcuuguguaauu

SEQ ID NO: 2883143 - RNA, 23 nt, Human
aaagugcuuguguaauuuaugug

SEQ ID NO: 2883144 - RNA, 21 nt, Human
aaagugcuuuccagaauaaua

SEQ ID NO: 2883145 - RNA, 19 nt, Human
aaaguccaauuuuaauuua

SEQ ID NO: 2883146 - RNA, 20 nt, Human
aaaguccaauuuuaauuuag

SEQ ID NO: 2883147 - RNA, 13 nt, Human
aaaguccuuuucu

SEQ ID NO: 2883148 - RNA, 14 nt, Human
aaaguccuuuucuu

SEQ ID NO: 2883149 - RNA, 18 nt, Human
aaaguccuuuucuugcuu

SEQ ID NO: 2883150 - RNA, 18 nt, Human
aaaguccuuuuuuuccau

SEQ ID NO: 2883151 - RNA, 16 nt, Human
aaaguccuuuuuuucc

SEQ ID NO: 2883152 - RNA, 22 nt, Human
aaaguccuuuuuuuccaucuuu

SEQ ID NO: 2883153 - RNA, 15 nt, Human
aaagucgaauuaaua

SEQ ID NO: 2883154 - RNA, 15 nt, Human
aaagucguuuuccaa

SEQ ID NO: 2883155 - RNA, 16 nt, Human
aaagucguuuuccaaa

SEQ ID NO: 2883156 - RNA, 18 nt, Human
aaagucguuuuccaaacu

SEQ ID NO: 2883157 - RNA, 16 nt, Human
aaagucuaucuaauga

SEQ ID NO: 2883158 - RNA, 21 nt, Human
aaagucaugcaaaggcuggga

SEQ ID NO: 2883159 - RNA, 20 nt, Human
aaagucaugcaaaggcuggg

SEQ ID NO: 2883160 - RNA, 19 nt, Human
aaagucaugcaaaggcugg

SEQ ID NO: 2883161 - RNA, 15 nt, Human
aaauaaauagaaaag

SEQ ID NO: 2883162 - RNA, 14 nt, Human
aaauaaauaaaagc

SEQ ID NO: 2883163 - RNA, 16 nt, Human
aaauaaauaaaagccu

SEQ ID NO: 2883164 - RNA, 13 nt, Human
aaauaaauagcuu

SEQ ID NO: 2883165 - RNA, 14 nt, Human
aaauaaauggaaau

SEQ ID NO: 2883166 - RNA, 12 nt, Human
aaauaaauauca

SEQ ID NO: 2883167 - RNA, 13 nt, Human
aaauauuuauuuu

SEQ ID NO: 2883168 - RNA, 16 nt, Human
aaauaguuguccauau

SEQ ID NO: 2883169 - RNA, 23 nt, Human
aaauaguuguccauauuuucaca

SEQ ID NO: 2883170 - RNA, 15 nt, Human
aaaucuggucuuguu

SEQ ID NO: 2883171 - RNA, 20 nt, Human
aaaucuggucuuguuagaaa

SEQ ID NO: 2883172 - RNA, 22 nt, Human
aaaucuggucuuguuagaaaac

SEQ ID NO: 2883173 - RNA, 17 nt, Human
aaaucuguaacagguau

SEQ ID NO: 2883174 - RNA, 18 nt, Human
aaaucuguaacagguauu

SEQ ID NO: 2883175 - RNA, 19 nt, Human
aaaucuguaacagguauuu

SEQ ID NO: 2883176 - RNA, 22 nt, Human
aaaucuguaacagguauuuugu

SEQ ID NO: 2883177 - RNA, 23 nt, Human
aaaucuguaacagguauuuuguu

SEQ ID NO: 2883178 - RNA, 21 nt, Human
aaaucuguccaaaggaggcug

SEQ ID NO: 2883179 - RNA, 16 nt, Human
aaaucugucaagagua

SEQ ID NO: 2883180 - RNA, 20 nt, Human
aaaucugucaagaguaguua

SEQ ID NO: 2883181 - RNA, 22 nt, Human
aaaucuguccaaaggaggcugg

SEQ ID NO: 2883182 - RNA, 18 nt, Human
aaaucaaguauuugggaa

SEQ ID NO: 2883183 - RNA, 12 nt, Human
aaaucaaguuuu

SEQ ID NO: 2883184 - RNA, 17 nt, Human
aaaucaauaaaugaaua

SEQ ID NO: 2883185 - RNA, 13 nt, Human
aaaucaauaagaa

SEQ ID NO: 2883186 - RNA, 23 nt, Human
aaaucaaguauuugggaagugaa

SEQ ID NO: 2883187 - RNA, 16 nt, Human
aaaucaaguauuuugu

SEQ ID NO: 2883188 - RNA, 16 nt, Human
aaaucaaguccuuuaa

SEQ ID NO: 2883189 - RNA, 19 nt, Human
aaaucaaugcuauaacuau

SEQ ID NO: 2883190 - RNA, 14 nt, Human
aaaucaauuuuuag

SEQ ID NO: 2883191 - RNA, 17 nt, Human
aaaucaauuuuuaggaa

SEQ ID NO: 2883192 - RNA, 22 nt, Human
aaaucacaaaaauuugaacacu

SEQ ID NO: 2883193 - RNA, 16 nt, Human
aaaucacaauuuuuaa

SEQ ID NO: 2883194 - RNA, 24 nt, Human
aaauagcucaggugucccugcacu

SEQ ID NO: 2883195 - RNA, 18 nt, Human
aaauagcgcuguuuuugu

SEQ ID NO: 2883196 - RNA, 13 nt, Human
aaauagcauuugu

SEQ ID NO: 2883197 - RNA, 15 nt, Human
aaauagcuuguauag

SEQ ID NO: 2883198 - RNA, 18 nt, Human
aaauagcuaauaauguua

SEQ ID NO: 2883199 - RNA, 19 nt, Human
aaauagcuaauaauguuaa

SEQ ID NO: 2883200 - RNA, 14 nt, Human
aaauaggaaacaag

SEQ ID NO: 2883201 - RNA, 13 nt, Human
aaauaggaaacaa

SEQ ID NO: 2883202 - RNA, 16 nt, Human
aaauagcuuguauagu

SEQ ID NO: 2883203 - RNA, 23 nt, Human
aaauaggagaggaugagagccca

SEQ ID NO: 2883204 - RNA, 24 nt, Human
aaauaggagaggaugagagcccag

SEQ ID NO: 2883205 - RNA, 16 nt, Human
aaauaggaaacaagug

SEQ ID NO: 2883206 - RNA, 14 nt, Human
aaauaggagaggau

SEQ ID NO: 2883207 - RNA, 16 nt, Human
aaauaggagaggauga

SEQ ID NO: 2883208 - RNA, 15 nt, Human
aaauagugucuuugu

SEQ ID NO: 2883209 - RNA, 17 nt, Human
aaauaggggauauuuaa

SEQ ID NO: 2883210 - RNA, 22 nt, Human
aaauaguuaagacaugauuucc

SEQ ID NO: 2883211 - RNA, 17 nt, Human
aaauaguuaagacauga

SEQ ID NO: 2883212 - RNA, 13 nt, Human
aaagaaaugaaca

SEQ ID NO: 2883213 - RNA, 14 nt, Human
aaagaaaugaacau

SEQ ID NO: 2883214 - RNA, 15 nt, Human
aaagaaaugaacauu

SEQ ID NO: 2883215 - RNA, 16 nt, Human
aaagaaaugaacauuc

SEQ ID NO: 2883216 - RNA, 16 nt, Human
aaagaaaugacuaauu

SEQ ID NO: 2883217 - RNA, 11 nt, Human
aaagaagaccg

SEQ ID NO: 2883218 - RNA, 14 nt, Human
aaagaagaucugua

SEQ ID NO: 2883219 - RNA, 15 nt, Human
aaagaagaucuguaa

SEQ ID NO: 2883220 - RNA, 12 nt, Human
aaagaagauguu

SEQ ID NO: 2883221 - RNA, 15 nt, Human
aaagaagauguugaa

SEQ ID NO: 2883222 - RNA, 12 nt, Human
aaagaaggaagu

SEQ ID NO: 2883223 - RNA, 20 nt, Human
aaagaagguuucagaaagaa

SEQ ID NO: 2883224 - RNA, 14 nt, Human
aaagagucuagauu

SEQ ID NO: 2883225 - RNA, 13 nt, Human
aaagagucuagau

SEQ ID NO: 2883226 - RNA, 12 nt, Human
aaagaguuagaa

SEQ ID NO: 2883227 - RNA, 15 nt, Human
aaagagucuagauuc

SEQ ID NO: 2883228 - RNA, 21 nt, Human
aaagagucuagauucaaaggu

SEQ ID NO: 2883229 - RNA, 14 nt, Human
aaagagucuuccaa

SEQ ID NO: 2883230 - RNA, 14 nt, Human
aaacucugccagcc

SEQ ID NO: 2883231 - RNA, 23 nt, Human
aaagaaauccauaucuuaaagaa

SEQ ID NO: 2883232 - RNA, 14 nt, Human
aaacugaggaauuu

SEQ ID NO: 2883233 - RNA, 18 nt, Human
aaacugaggaauuuucuu

SEQ ID NO: 2883234 - RNA, 15 nt, Human
aaagauauuguucaa

SEQ ID NO: 2883235 - RNA, 22 nt, Human
aaagauauuguucaaacaauau

SEQ ID NO: 2883236 - RNA, 15 nt, Human
aaagauauggagaau

SEQ ID NO: 2883237 - RNA, 19 nt, Human
aaagauauggagaauugcu

SEQ ID NO: 2883238 - RNA, 23 nt, Human
aaagauauggagaauugcugaag

SEQ ID NO: 2883239 - RNA, 23 nt, Human
aaagaguucuggaaaagaacugu

SEQ ID NO: 2883240 - RNA, 24 nt, Human
aaagaguucuggaaaagaacuguu

SEQ ID NO: 2883241 - RNA, 15 nt, Human
aaagauaaaauagug

SEQ ID NO: 2883242 - RNA, 14 nt, Human
aaaccaucuggccu

SEQ ID NO: 2883243 - RNA, 15 nt, Human
aaaccaucuggccug

SEQ ID NO: 2883244 - RNA, 18 nt, Human
aaaccaucuggccuggcc

SEQ ID NO: 2883245 - RNA, 23 nt, Human
aaaccauccagugacaaaccauc

SEQ ID NO: 2883246 - RNA, 15 nt, Human
aaaccaugcaaaugc

SEQ ID NO: 2883247 - RNA, 13 nt, Human
aaaccccuguccc

SEQ ID NO: 2883248 - RNA, 18 nt, Human
aaaccccuucucugugac

SEQ ID NO: 2883249 - RNA, 15 nt, Human
aaacccgaggguuga

SEQ ID NO: 2883250 - RNA, 23 nt, Human
aaacccgaggguugauuaaggca

SEQ ID NO: 2883251 - RNA, 16 nt, Human
aaacccuauugguaaa

SEQ ID NO: 2883252 - RNA, 11 nt, Human
aaacccuaggu

SEQ ID NO: 2883253 - RNA, 21 nt, Human
aaacccuagguucccgguccc

SEQ ID NO: 2883254 - RNA, 13 nt, Human
aaacucucugaac

SEQ ID NO: 2883255 - RNA, 12 nt, Human
aaacucucugaa

SEQ ID NO: 2883256 - RNA, 14 nt, Human
aaaauugauguguu

SEQ ID NO: 2883257 - RNA, 12 nt, Human
aaaauugaugug

SEQ ID NO: 2883258 - RNA, 21 nt, Human
aaaauugauguguuuauuuau

SEQ ID NO: 2883259 - RNA, 23 nt, Human
aaaaucuaauauuaaaaauaugg

SEQ ID NO: 2883260 - RNA, 15 nt, Human
aaaauugcaaaucuu

SEQ ID NO: 2883261 - RNA, 22 nt, Human
aaacaccuuccagcuccuguaa

SEQ ID NO: 2883262 - RNA, 23 nt, Human
aaacaccuucuuauuauauauau

SEQ ID NO: 2883263 - RNA, 13 nt, Human
aaacacgaaacuu

SEQ ID NO: 2883264 - RNA, 14 nt, Human
aaacacgaaacuug

SEQ ID NO: 2883265 - RNA, 15 nt, Human
aaacacgaaacuugu

SEQ ID NO: 2883266 - RNA, 16 nt, Human
aaacacgaaacuuguu

SEQ ID NO: 2883267 - RNA, 17 nt, Human
aaacacgaaacuuguua

SEQ ID NO: 2883268 - RNA, 18 nt, Human
aaacacgaaacuuguuau

SEQ ID NO: 2883269 - RNA, 23 nt, Human
aaacacgaaacuuguuauuguga

SEQ ID NO: 2883270 - RNA, 24 nt, Human
aaacacucaguuguucaauaauaa

SEQ ID NO: 2883271 - RNA, 13 nt, Human
aaacacuccuugc

SEQ ID NO: 2883272 - RNA, 14 nt, Human
aaacacuccuugca

SEQ ID NO: 2883273 - RNA, 15 nt, Human
aaacacuccuugcau

SEQ ID NO: 2883274 - RNA, 16 nt, Human
aaacacuccuugcauc

SEQ ID NO: 2883275 - RNA, 21 nt, Human
aaacacgcacuuagucucuaa

SEQ ID NO: 2883276 - RNA, 13 nt, Human
aaacacuguggaa

SEQ ID NO: 2883277 - RNA, 22 nt, Human
aaacacuguggaacuaauaaau

SEQ ID NO: 2883278 - RNA, 23 nt, Human
aaacacuguggaacuaauaaaua

SEQ ID NO: 2883279 - RNA, 22 nt, Human
aaacacugccuuuuuauuuaua

SEQ ID NO: 2883280 - RNA, 14 nt, Human
aaacacugcgcuuu

SEQ ID NO: 2883281 - RNA, 21 nt, Human
aaacacugcgcuuuauuuucu

SEQ ID NO: 2883282 - RNA, 18 nt, Human
aaacacugccuuuuuauu

SEQ ID NO: 2883283 - RNA, 21 nt, Human
aaacagaaacaaaaacacuaa

SEQ ID NO: 2883284 - RNA, 19 nt, Human
aaacagaaacaaaaacacu

SEQ ID NO: 2883285 - RNA, 13 nt, Human
aaacagaaacaaa

SEQ ID NO: 2883286 - RNA, 13 nt, Human
aaacacuuucaaa

SEQ ID NO: 2883287 - RNA, 14 nt, Human
aaacacuuucaaaa

SEQ ID NO: 2883288 - RNA, 13 nt, Human
aaacacuuucucu

SEQ ID NO: 2883289 - RNA, 14 nt, Human
aaacacuuucucuu

SEQ ID NO: 2883290 - RNA, 21 nt, Human
aaacacuuucucuucuuguuu

SEQ ID NO: 2883291 - RNA, 17 nt, Human
aaacacuuugccuccug

SEQ ID NO: 2883292 - RNA, 13 nt, Human
aaacacuuuuuug

SEQ ID NO: 2883293 - RNA, 14 nt, Human
aaacacuuuuuugg

SEQ ID NO: 2883294 - RNA, 14 nt, Human
aaacagacaauaug

SEQ ID NO: 2883295 - RNA, 16 nt, Human
aaacagacaauaugug

SEQ ID NO: 2883296 - RNA, 22 nt, Human
aaacagacaauaugugagugcc

SEQ ID NO: 2883297 - RNA, 13 nt, Human
aaacagaacauca

SEQ ID NO: 2883298 - RNA, 12 nt, Human
aaacagaacagg

SEQ ID NO: 2883299 - RNA, 15 nt, Human
aaacagaacaggguc

SEQ ID NO: 2883300 - RNA, 21 nt, Human
aaacagaacaucauuagaaca

SEQ ID NO: 2883301 - RNA, 15 nt, Human
aaaaucuaauauuaa

SEQ ID NO: 2883302 - RNA, 20 nt, Human
aaaauccuugcuuaugacau

SEQ ID NO: 2883303 - RNA, 13 nt, Human
aaaauccuugcuu

SEQ ID NO: 2883304 - RNA, 16 nt, Human
aaaauccuaagacaca

SEQ ID NO: 2883305 - RNA, 21 nt, Human
aaaauccuaagacacaaaugc

SEQ ID NO: 2883306 - RNA, 22 nt, Human
aaaauccuaagacacaaaugca

SEQ ID NO: 2883307 - RNA, 21 nt, Human
aaaauccuuccaaagaauucu

SEQ ID NO: 2883308 - RNA, 19 nt, Human
aaaaucagguauuaaucuu

SEQ ID NO: 2883309 - RNA, 20 nt, Human
aaaauaaaccaaaggacauu

SEQ ID NO: 2883310 - RNA, 12 nt, Human
aaaaucaugaga

SEQ ID NO: 2883311 - RNA, 14 nt, Human
aaaaucaucuauuu

SEQ ID NO: 2883312 - RNA, 15 nt, Human
aaaaucaucuauuuu

SEQ ID NO: 2883313 - RNA, 16 nt, Human
aaaaucaucuauuuug

SEQ ID NO: 2883314 - RNA, 18 nt, Human
aaaaucaucuauuuugau

SEQ ID NO: 2883315 - RNA, 19 nt, Human
aaaaucaucuauuuugaug

SEQ ID NO: 2883316 - RNA, 13 nt, Human
aaaaguuccaaga

SEQ ID NO: 2883317 - RNA, 15 nt, Human
aaaaguuccaagagu

SEQ ID NO: 2883318 - RNA, 22 nt, Human
aaaaguuccaagagucuaaaga

SEQ ID NO: 2883319 - RNA, 23 nt, Human
aaaaguuccaagagucuaaagau

SEQ ID NO: 2883320 - RNA, 17 nt, Human
aaaaguucccugaaaca

SEQ ID NO: 2883321 - RNA, 13 nt, Human
aaaaguguuuauu

SEQ ID NO: 2883322 - RNA, 21 nt, Human
aaaaguguuuauuuuucauau

SEQ ID NO: 2883323 - RNA, 16 nt, Human
aaaaguuaaugcuuaa

SEQ ID NO: 2883324 - RNA, 18 nt, Human
aaaaguuaaugcuuaaga

SEQ ID NO: 2883325 - RNA, 23 nt, Human
aaaaguuaaugcuuaagagggaa

SEQ ID NO: 2883326 - RNA, 15 nt, Human
aaaaguuacagaaau

SEQ ID NO: 2883327 - RNA, 19 nt, Human
aaaauaaaauuaaagcuga

SEQ ID NO: 2883328 - RNA, 14 nt, Human
aaaauaaacaaaua

SEQ ID NO: 2883329 - RNA, 12 nt, Human
aaaauaaacaaa

SEQ ID NO: 2883330 - RNA, 15 nt, Human
aaaaagaaaggaggg

SEQ ID NO: 2883331 - RNA, 14 nt, Human
aaaaacucuuuauu

SEQ ID NO: 2883332 - RNA, 15 nt, Human
aaaaacucuuuauuu

SEQ ID NO: 2883333 - RNA, 14 nt, Human
aaaaagaaaaugaa

SEQ ID NO: 2883334 - RNA, 14 nt, Human
aaaaagaaacaaga

SEQ ID NO: 2883335 - RNA, 15 nt, Human
aaaaagaaaugacua

SEQ ID NO: 2883336 - RNA, 11 nt, Human
aaaaagaagaa

SEQ ID NO: 2883337 - RNA, 12 nt, Human
aaaaagaagaag

SEQ ID NO: 2883338 - RNA, 16 nt, Human
aaaaguggaagugaca

SEQ ID NO: 2883339 - RNA, 23 nt, Human
aaaaguggaauuucuuguuucuc

SEQ ID NO: 2883340 - RNA, 18 nt, Human
aaaagugggcuugauucu

SEQ ID NO: 2883341 - RNA, 13 nt, Human
aaaaguggggcag

SEQ ID NO: 2883342 - RNA, 14 nt, Human
aaaaguggggcaga

SEQ ID NO: 2883343 - RNA, 15 nt, Human
aaaaguggggcagag

SEQ ID NO: 2883344 - RNA, 18 nt, Human
aaaaguggggcagagccu

SEQ ID NO: 2883345 - RNA, 17 nt, Human
aaaagugggcuugauuc

SEQ ID NO: 2883346 - RNA, 18 nt, Human
aaaagugucaccuuuucu

SEQ ID NO: 2883347 - RNA, 17 nt, Human
aacuuuauguguaaaua

SEQ ID NO: 2883348 - RNA, 13 nt, Human
aacuuuaugugua

SEQ ID NO: 2883349 - RNA, 14 nt, Human
aacuuuauguguaa

SEQ ID NO: 2883350 - RNA, 13 nt, Human
aacuuuauacauu

SEQ ID NO: 2883351 - RNA, 15 nt, Human
aacuuuauacauuag

SEQ ID NO: 2883352 - RNA, 16 nt, Human
aacuuuauacauuagu

SEQ ID NO: 2883353 - RNA, 18 nt, Human
aacuuuauacauuaguaa

SEQ ID NO: 2883354 - RNA, 21 nt, Human
aacuuuauacauuaguaaaug

SEQ ID NO: 2883355 - RNA, 19 nt, Human
aacugaccagccuccaugc

SEQ ID NO: 2883356 - RNA, 15 nt, Human
aacugacuaucauaa

SEQ ID NO: 2883357 - RNA, 18 nt, Human
aacugacuaucauaaaau

SEQ ID NO: 2883358 - RNA, 22 nt, Human
aacugacuaucauaaaaucaaa

SEQ ID NO: 2883359 - RNA, 13 nt, Human
aacucagaucugu

SEQ ID NO: 2883360 - RNA, 16 nt, Human
aacugagugccuuuug

SEQ ID NO: 2883361 - RNA, 20 nt, Human
aacugaggaauuuucuuugu

SEQ ID NO: 2883362 - RNA, 18 nt, Human
aacugaggaauuuucuuu

SEQ ID NO: 2883363 - RNA, 19 nt, Human
aacuuaaauuuuaauuuau

SEQ ID NO: 2883364 - RNA, 16 nt, Human
aacuuaaauuuuaauu

SEQ ID NO: 2883365 - RNA, 14 nt, Human
aacuuaacauauuu

SEQ ID NO: 2883366 - RNA, 16 nt, Human
aacuuaacauauuuac

SEQ ID NO: 2883367 - RNA, 18 nt, Human
aacuuaaguggcuaaaga

SEQ ID NO: 2883368 - RNA, 13 nt, Human
aacuuaacuuuaa

SEQ ID NO: 2883369 - RNA, 15 nt, Human
aacuuaacaugggcu

SEQ ID NO: 2883370 - RNA, 22 nt, Human
aacuuaauguucuuaugcaaaa

SEQ ID NO: 2883371 - RNA, 23 nt, Human
aacuuaauguucuuaugcaaaau

SEQ ID NO: 2883372 - RNA, 20 nt, Human
aacggagccccaggccucug

SEQ ID NO: 2883373 - RNA, 15 nt, Human
aacgcugccugcccg

SEQ ID NO: 2883374 - RNA, 16 nt, Human
aacgcugucaaaaguu

SEQ ID NO: 2883375 - RNA, 17 nt, Human
aacgcuuaaaggaaguc

SEQ ID NO: 2883376 - RNA, 15 nt, Human
aacgcugccugccca

SEQ ID NO: 2883377 - RNA, 14 nt, Human
aacgcugccugccc

SEQ ID NO: 2883378 - RNA, 11 nt, Human
aacgcugccug

SEQ ID NO: 2883379 - RNA, 13 nt, Human
aacgcugccugcc

SEQ ID NO: 2883380 - RNA, 12 nt, Human
aacgcugccugc

SEQ ID NO: 2883381 - RNA, 23 nt, Human
aacgcagcccuagagccugccug

SEQ ID NO: 2883382 - RNA, 13 nt, Human
aacgcagcccuag

SEQ ID NO: 2883383 - RNA, 21 nt, Human
aacgcagcccuagagccugcc

SEQ ID NO: 2883384 - RNA, 22 nt, Human
aacgcagcccuagagccugccu

SEQ ID NO: 2883385 - RNA, 18 nt, Human
aacgcagaugauccauga

SEQ ID NO: 2883386 - RNA, 12 nt, Human
aacgcacaggaa

SEQ ID NO: 2883387 - RNA, 11 nt, Human
aacgcagcccu

SEQ ID NO: 2883388 - RNA, 15 nt, Human
aacggauuccaaaga

SEQ ID NO: 2883389 - RNA, 14 nt, Human
aacuauugcccagg

SEQ ID NO: 2883390 - RNA, 21 nt, Human
aacuauugcauuuauauguac

SEQ ID NO: 2883391 - RNA, 15 nt, Human
aacuauugcauuuau

SEQ ID NO: 2883392 - RNA, 16 nt, Human
aacuauugcauuuaua

SEQ ID NO: 2883393 - RNA, 16 nt, Human
aacuauuucuacacag

SEQ ID NO: 2883394 - RNA, 19 nt, Human
aacuauuugucuuucagga

SEQ ID NO: 2883395 - RNA, 18 nt, Human
aacuauuugucuuucagg

SEQ ID NO: 2883396 - RNA, 19 nt, Human
aacucaaaacuuaacauau

SEQ ID NO: 2883397 - RNA, 23 nt, Human
aacucagaacugucggaggaaag

SEQ ID NO: 2883398 - RNA, 18 nt, Human
aacucagaauuauuuuua

SEQ ID NO: 2883399 - RNA, 21 nt, Human
aacucagaauuauuuuuaaaa

SEQ ID NO: 2883400 - RNA, 19 nt, Human
aacggcccugcagccagcu

SEQ ID NO: 2883401 - RNA, 14 nt, Human
aacucacuuuccuc

SEQ ID NO: 2883402 - RNA, 13 nt, Human
aacgaugugucug

SEQ ID NO: 2883403 - RNA, 16 nt, Human
aacgaugugucuguau

SEQ ID NO: 2883404 - RNA, 20 nt, Human
aacgaugugucuguauuuca

SEQ ID NO: 2883405 - RNA, 14 nt, Human
aaccuagagaagau

SEQ ID NO: 2883406 - RNA, 15 nt, Human
aaccuagagaagaua

SEQ ID NO: 2883407 - RNA, 17 nt, Human
aaccgacaggcccuggc

SEQ ID NO: 2883408 - RNA, 21 nt, Human
aaccgagagaaugcugaccug

SEQ ID NO: 2883409 - RNA, 11 nt, Human
aaccuaaccug

SEQ ID NO: 2883410 - RNA, 14 nt, Human
aaccuaaccugugu

SEQ ID NO: 2883411 - RNA, 15 nt, Human
aaccuaaccuguguc

SEQ ID NO: 2883412 - RNA, 16 nt, Human
aaccuaaccugugucu

SEQ ID NO: 2883413 - RNA, 18 nt, Human
aaccuaaccugugucugc

SEQ ID NO: 2883414 - RNA, 13 nt, Human
aaccuaacuguau

SEQ ID NO: 2883415 - RNA, 15 nt, Human
aaccuaacuguaucu

SEQ ID NO: 2883416 - RNA, 17 nt, Human
aaccuaacuguaucuug

SEQ ID NO: 2883417 - RNA, 18 nt, Human
aaccuaacuugcgcagaa

SEQ ID NO: 2883418 - RNA, 15 nt, Human
aaccgagcaaagauc

SEQ ID NO: 2883419 - RNA, 15 nt, Human
aaccuacauauucca

SEQ ID NO: 2883420 - RNA, 13 nt, Human
aaccagacagagg

SEQ ID NO: 2883421 - RNA, 18 nt, Human
aaccuacacacugucaug

SEQ ID NO: 2883422 - RNA, 19 nt, Human
aacccuaucuccugacaga

SEQ ID NO: 2883423 - RNA, 16 nt, Human
aacccuaucuccugac

SEQ ID NO: 2883424 - RNA, 15 nt, Human
aacccuaucuccuga

SEQ ID NO: 2883425 - RNA, 21 nt, Human
aacccuauacuguaguauucu

SEQ ID NO: 2883426 - RNA, 20 nt, Human
aacccuagguucccgguccc

SEQ ID NO: 2883427 - RNA, 17 nt, Human
aacccuagguucccugu

SEQ ID NO: 2883428 - RNA, 17 nt, Human
aacccuacacccagacc

SEQ ID NO: 2883429 - RNA, 21 nt, Human
aacccuuuucauccuggcugg

SEQ ID NO: 2883430 - RNA, 23 nt, Human
aacccuaucuccugacagaaggu

SEQ ID NO: 2883431 - RNA, 22 nt, Human
aacccuaucuccugacagaagg

SEQ ID NO: 2883432 - RNA, 15 nt, Human
aacccuauugguaaa

SEQ ID NO: 2883433 - RNA, 21 nt, Human
aacccuuggagccaauggaga

SEQ ID NO: 2883434 - RNA, 16 nt, Human
aaccacggccacauuu

SEQ ID NO: 2883435 - RNA, 14 nt, Human
aaccacggaaaaga

SEQ ID NO: 2883436 - RNA, 13 nt, Human
aaccacuucauuc

SEQ ID NO: 2883437 - RNA, 14 nt, Human
aaccacuucauucu

SEQ ID NO: 2883438 - RNA, 16 nt, Human
aaccacuucauucugc

SEQ ID NO: 2883439 - RNA, 22 nt, Human
aacagcauccccaaaacaaagu

SEQ ID NO: 2883440 - RNA, 13 nt, Human
aaccacuuuccuu

SEQ ID NO: 2883441 - RNA, 13 nt, Human
aaccagauaacau

SEQ ID NO: 2883442 - RNA, 16 nt, Human
aaccagaaucccucua

SEQ ID NO: 2883443 - RNA, 16 nt, Human
aaccagacaaggaaau

SEQ ID NO: 2883444 - RNA, 13 nt, Human
aaccacgcuggac

SEQ ID NO: 2883445 - RNA, 22 nt, Human
aaccaccccggcccccugcccg

SEQ ID NO: 2883446 - RNA, 21 nt, Human
aaccaccccggcccccugccc

SEQ ID NO: 2883447 - RNA, 17 nt, Human
aacauccauguccuaug

SEQ ID NO: 2883448 - RNA, 22 nt, Human
aacauccauguccuauguguga

SEQ ID NO: 2883449 - RNA, 15 nt, Human
aacaucccaagauuu

SEQ ID NO: 2883450 - RNA, 22 nt, Human
aacaucccaagauuuuuucauu

SEQ ID NO: 2883451 - RNA, 16 nt, Human
aacagcuuucaagugc

SEQ ID NO: 2883452 - RNA, 22 nt, Human
aacagcuuuggggugucuuuuu

SEQ ID NO: 2883453 - RNA, 14 nt, Human
aacagcuucagguu

SEQ ID NO: 2883454 - RNA, 15 nt, Human
aacagcuucagguua

SEQ ID NO: 2883455 - RNA, 16 nt, Human
aacagcuucagguuau

SEQ ID NO: 2883456 - RNA, 16 nt, Human
aacauccaaccuuccc

SEQ ID NO: 2883457 - RNA, 11 nt, Human
aacauccaaaa

SEQ ID NO: 2883458 - RNA, 17 nt, Human
aacauccaaccuuccca

SEQ ID NO: 2883459 - RNA, 17 nt, Human
aacaucauuuuguuuuc

SEQ ID NO: 2883460 - RNA, 18 nt, Human
aacaucauuuuguuuucc

SEQ ID NO: 2883461 - RNA, 15 nt, Human
aacagcaguguuccc

SEQ ID NO: 2883462 - RNA, 18 nt, Human
aacagcugucacaacuug

SEQ ID NO: 2883463 - RNA, 11 nt, Human
aacagcagugu

SEQ ID NO: 2883464 - RNA, 13 nt, Human
aacagcaguguuc

SEQ ID NO: 2883465 - RNA, 12 nt, Human
aacaacauuuug

SEQ ID NO: 2883466 - RNA, 14 nt, Human
aacaacauuuugag

SEQ ID NO: 2883467 - RNA, 21 nt, Human
aacaacauuuugagaacaaag

SEQ ID NO: 2883468 - RNA, 15 nt, Human
aacaaccacaggaau

SEQ ID NO: 2883469 - RNA, 18 nt, Human
aacaaauucauauucugu

SEQ ID NO: 2883470 - RNA, 22 nt, Human
aacaaauucaucaaauggaaga

SEQ ID NO: 2883471 - RNA, 23 nt, Human
aacaaauucugaauauuuuuuga

SEQ ID NO: 2883472 - RNA, 14 nt, Human
aacaaaaaagcuaa

SEQ ID NO: 2883473 - RNA, 19 nt, Human
aacaaaaacacuaaaaaua

SEQ ID NO: 2883474 - RNA, 17 nt, Human
aaauuuuuuuuuuaaua

SEQ ID NO: 2883475 - RNA, 18 nt, Human
aaauuuuuuuuacauuuu

SEQ ID NO: 2883476 - RNA, 17 nt, Human
aaauuuuuuuuacauuu

SEQ ID NO: 2883477 - RNA, 16 nt, Human
aaauuuuuuuuacauu

SEQ ID NO: 2883478 - RNA, 14 nt, Human
aacaccacagaaau

SEQ ID NO: 2883479 - RNA, 13 nt, Human
aacaccacagaca

SEQ ID NO: 2883480 - RNA, 14 nt, Human
aacaccacagacac

SEQ ID NO: 2883481 - RNA, 15 nt, Human
aacaccacagacaca

SEQ ID NO: 2883482 - RNA, 16 nt, Human
aacaccacagacacac

SEQ ID NO: 2883483 - RNA, 17 nt, Human
aacaccacagacacaca

SEQ ID NO: 2883484 - RNA, 18 nt, Human
aacaccacagacacacac

SEQ ID NO: 2883485 - RNA, 17 nt, Human
aacacauguuuuuauac

SEQ ID NO: 2883486 - RNA, 17 nt, Human
aacacaucuuuccuguc

SEQ ID NO: 2883487 - RNA, 18 nt, Human
aacacauggggaaaaaaa

SEQ ID NO: 2883488 - RNA, 21 nt, Human
aacacauggggaaaaaaauca

SEQ ID NO: 2883489 - RNA, 22 nt, Human
aacacauggggaaaaaaaucau

SEQ ID NO: 2883490 - RNA, 14 nt, Human
aacacauugccuaa

SEQ ID NO: 2883491 - RNA, 16 nt, Human
aacacauuguuauuuu

SEQ ID NO: 2883492 - RNA, 17 nt, Human
aacacauuguuauuuuc

SEQ ID NO: 2883493 - RNA, 19 nt, Human
aacacauuguuauuuucag

SEQ ID NO: 2883494 - RNA, 20 nt, Human
aacacauuguuauuuucagu

SEQ ID NO: 2883495 - RNA, 22 nt, Human
aacacauuguuauuuucaguga

SEQ ID NO: 2883496 - RNA, 20 nt, Human
aacacgccugcaaacgcugc

SEQ ID NO: 2883497 - RNA, 16 nt, Human
aacacgcguauuuaca

SEQ ID NO: 2883498 - RNA, 15 nt, Human
aacacgccugcaaac

SEQ ID NO: 2883499 - RNA, 19 nt, Human
aacacgcauggucaacccu

SEQ ID NO: 2883500 - RNA, 19 nt, Human
aacaccacagacacacaca

SEQ ID NO: 2883501 - RNA, 23 nt, Human
aacaccacagacacacacacgca

SEQ ID NO: 2883502 - RNA, 15 nt, Human
aacacgugaugugau

SEQ ID NO: 2883503 - RNA, 16 nt, Human
aacacgugaugugaua

SEQ ID NO: 2883504 - RNA, 20 nt, Human
aacacuaaagauccaagaag

SEQ ID NO: 2883505 - RNA, 15 nt, Human
aacacuaaaaauaaa

SEQ ID NO: 2883506 - RNA, 13 nt, Human
aacacuaaaauuu

SEQ ID NO: 2883507 - RNA, 14 nt, Human
aacacuaaaaauaa

SEQ ID NO: 2883508 - RNA, 17 nt, Human
aaauguuuaaacauuuu

SEQ ID NO: 2883509 - RNA, 20 nt, Human
aaaucuuauaguucuaggca

SEQ ID NO: 2883510 - RNA, 13 nt, Human
aaaucuuacaaca

SEQ ID NO: 2883511 - RNA, 22 nt, Human
aaaucuuaaugaaugagucugu

SEQ ID NO: 2883512 - RNA, 16 nt, Human
aaaucuuauaguucua

SEQ ID NO: 2883513 - RNA, 17 nt, Human
aaaucuuauaguucuag

SEQ ID NO: 2883514 - RNA, 18 nt, Human
aaaucuuauaguucuagg

SEQ ID NO: 2883515 - RNA, 19 nt, Human
aaaucuuauaguucuaggc

SEQ ID NO: 2883516 - RNA, 13 nt, Human
aaaugccuuugag

SEQ ID NO: 2883517 - RNA, 14 nt, Human
aaaugccuuugaga

SEQ ID NO: 2883518 - RNA, 17 nt, Human
aaaugccuuagaaaugu

SEQ ID NO: 2883519 - RNA, 22 nt, Human
aaaugccuuagaaauguaaacu

SEQ ID NO: 2883520 - RNA, 23 nt, Human
aaaugccuuagaaauguaaacug

SEQ ID NO: 2883521 - RNA, 20 nt, Human
aaaugccuuugagacaguuu

SEQ ID NO: 2883522 - RNA, 16 nt, Human
aaaugccuuugagaca

SEQ ID NO: 2883523 - RNA, 17 nt, Human
aaaugccuuugagacag

SEQ ID NO: 2883524 - RNA, 18 nt, Human
aaaugccuuugagacagu

SEQ ID NO: 2883525 - RNA, 19 nt, Human
aaaugccuuugagacaguu

SEQ ID NO: 2883526 - RNA, 15 nt, Human
aaaugcuaauauuaa

SEQ ID NO: 2883527 - RNA, 18 nt, Human
aaaugcuaauauuaaaag

SEQ ID NO: 2883528 - RNA, 21 nt, Human
aaaugcuaauauuaaaaguca

SEQ ID NO: 2883529 - RNA, 23 nt, Human
aaaugcuaauauuaaaagucaca

SEQ ID NO: 2883530 - RNA, 20 nt, Human
aaauugacacaaguggaccu

SEQ ID NO: 2883531 - RNA, 13 nt, Human
aaauugcuccuug

SEQ ID NO: 2883532 - RNA, 22 nt, Human
aaauugcuccuaagcuucaaau

SEQ ID NO: 2883533 - RNA, 14 nt, Human
aaauugcuccuuga

SEQ ID NO: 2883534 - RNA, 15 nt, Human
aaauuuuuuuuacau

SEQ ID NO: 2883535 - RNA, 21 nt, Human
aaauugccauuggacaguugu

SEQ ID NO: 2883536 - RNA, 20 nt, Human
aaauugccuauccugcuguu

SEQ ID NO: 2883537 - RNA, 13 nt, Human
aaauugcuauguu

SEQ ID NO: 2883538 - RNA, 17 nt, Human
aaauugcuauguuacua

SEQ ID NO: 2883539 - RNA, 21 nt, Human
aaauugcuauguuacuauuuu

SEQ ID NO: 2883540 - RNA, 22 nt, Human
aaauugcuauguuacuauuuuc

SEQ ID NO: 2883541 - RNA, 17 nt, Human
aaauuaacaguccuaac

SEQ ID NO: 2883542 - RNA, 13 nt, Human
aaauuaaaucugu

SEQ ID NO: 2883543 - RNA, 23 nt, Human
aaauuaaaucugucccugagagu

SEQ ID NO: 2883544 - RNA, 16 nt, Human
aaauuaaacacaaagu

SEQ ID NO: 2883545 - RNA, 18 nt, Human
aaauuaaacauaaaacaa

SEQ ID NO: 2883546 - RNA, 21 nt, Human
aaauuaaagccuuuaguauca

SEQ ID NO: 2883547 - RNA, 22 nt, Human
aaauuaaagccuuuaguaucag

SEQ ID NO: 2883548 - RNA, 23 nt, Human
aaauuaaagccuuuaguaucagu

SEQ ID NO: 2883549 - RNA, 13 nt, Human
aaauuaaagcuga

SEQ ID NO: 2883550 - RNA, 17 nt, Human
aaauuaaagcugaaaac

SEQ ID NO: 2883551 - RNA, 16 nt, Human
aaauuaaaguuugcuu

SEQ ID NO: 2883552 - RNA, 18 nt, Human
aaauuaacaguccuaacu

SEQ ID NO: 2883553 - RNA, 15 nt, Human
aaauucuuuauuucu

SEQ ID NO: 2883554 - RNA, 17 nt, Human
aaauucuuuauuucugu

SEQ ID NO: 2883555 - RNA, 20 nt, Human
aaauucuuucagcuaucagu

SEQ ID NO: 2883556 - RNA, 12 nt, Human
aaauugaaauug

SEQ ID NO: 2883557 - RNA, 13 nt, Human
aaauugaaauugu

SEQ ID NO: 2883558 - RNA, 12 nt, Human
aaauugaagaga

SEQ ID NO: 2883559 - RNA, 17 nt, Human
aaauugaagagagauau

SEQ ID NO: 2883560 - RNA, 21 nt, Human
aaauugaagagagauauaucu

SEQ ID NO: 2883561 - RNA, 22 nt, Human
aagggaaagcuucauucuccuu

SEQ ID NO: 2883562 - RNA, 13 nt, Human
aagggaaauauca

SEQ ID NO: 2883563 - RNA, 14 nt, Human
aagggaaauaucau

SEQ ID NO: 2883564 - RNA, 15 nt, Human
aagggaaauaucauu

SEQ ID NO: 2883565 - RNA, 16 nt, Human
aagggaaauaucauuu

SEQ ID NO: 2883566 - RNA, 14 nt, Human
aagggaacagaaag

SEQ ID NO: 2883567 - RNA, 13 nt, Human
aagggaagacauu

SEQ ID NO: 2883568 - RNA, 14 nt, Human
aagggaagacauuu

SEQ ID NO: 2883569 - RNA, 15 nt, Human
aagggaagacauuuc

SEQ ID NO: 2883570 - RNA, 16 nt, Human
aagggaagacauuucu

SEQ ID NO: 2883571 - RNA, 18 nt, Human
aagggaagacauuucuuu

SEQ ID NO: 2883572 - RNA, 14 nt, Human
aagggaaggacaga

SEQ ID NO: 2883573 - RNA, 17 nt, Human
aagggaaguugugccuu

SEQ ID NO: 2883574 - RNA, 20 nt, Human
aagggaaucacaucuuuuaa

SEQ ID NO: 2883575 - RNA, 12 nt, Human
aagggaauccuc

SEQ ID NO: 2883576 - RNA, 17 nt, Human
aagggaauccuccucca

SEQ ID NO: 2883577 - RNA, 24 nt, Human
aagggagcacuggguugacuuuca

SEQ ID NO: 2883578 - RNA, 18 nt, Human
aagggagcuaucaggaac

SEQ ID NO: 2883579 - RNA, 18 nt, Human
aagggaggacgggagcug

SEQ ID NO: 2883580 - RNA, 22 nt, Human
aagggaggacgggagcugggga

SEQ ID NO: 2883581 - RNA, 11 nt, Human
aagggaggagg

SEQ ID NO: 2883582 - RNA, 21 nt, Human
aagggaggaggagcuucuggg

SEQ ID NO: 2883583 - RNA, 16 nt, Human
aagggccaguccugcc

SEQ ID NO: 2883584 - RNA, 14 nt, Human
aagggccaguccug

SEQ ID NO: 2883585 - RNA, 22 nt, Human
aagggccaguccugccuggcca

SEQ ID NO: 2883586 - RNA, 22 nt, Human
aagggccaccuacaauacaucu

SEQ ID NO: 2883587 - RNA, 17 nt, Human
aagggcaugccuugugc

SEQ ID NO: 2883588 - RNA, 19 nt, Human
aagggcaugccuugugcug

SEQ ID NO: 2883589 - RNA, 12 nt, Human
aaguagaagagg

SEQ ID NO: 2883590 - RNA, 17 nt, Human
aaguaguccuuggcaua

SEQ ID NO: 2883591 - RNA, 14 nt, Human
aaguagucugcuca

SEQ ID NO: 2883592 - RNA, 15 nt, Human
aaguagucugcucac

SEQ ID NO: 2883593 - RNA, 13 nt, Human
aaggugccacuuu

SEQ ID NO: 2883594 - RNA, 15 nt, Human
aaggugcuaaaucug

SEQ ID NO: 2883595 - RNA, 19 nt, Human
aaggugcuaaaucugcgau

SEQ ID NO: 2883596 - RNA, 13 nt, Human
aaggugaggccug

SEQ ID NO: 2883597 - RNA, 14 nt, Human
aaggugaggccugu

SEQ ID NO: 2883598 - RNA, 17 nt, Human
aaggugaggccugucug

SEQ ID NO: 2883599 - RNA, 18 nt, Human
aaggugaggccugucugu

SEQ ID NO: 2883600 - RNA, 19 nt, Human
aaggugaggccugucugug

SEQ ID NO: 2883601 - RNA, 21 nt, Human
aaggugaggccugucugugac

SEQ ID NO: 2883602 - RNA, 22 nt, Human
aaggugaggccugucugugacc

SEQ ID NO: 2883603 - RNA, 13 nt, Human
aaggucuaugcag

SEQ ID NO: 2883604 - RNA, 15 nt, Human
aaggucucauucuuc

SEQ ID NO: 2883605 - RNA, 18 nt, Human
aagguccugaaaguaacu

SEQ ID NO: 2883606 - RNA, 19 nt, Human
aagguccacaggucuagac

SEQ ID NO: 2883607 - RNA, 19 nt, Human
aagguccgguguucuaaga

SEQ ID NO: 2883608 - RNA, 21 nt, Human
aagguccgguguucuaagaug

SEQ ID NO: 2883609 - RNA, 18 nt, Human
aaguauccugcuucugau

SEQ ID NO: 2883610 - RNA, 18 nt, Human
aaguaucuaaaaguguca

SEQ ID NO: 2883611 - RNA, 12 nt, Human
aaguccaaugug

SEQ ID NO: 2883612 - RNA, 18 nt, Human
aaguccaauuuuaauuua

SEQ ID NO: 2883613 - RNA, 19 nt, Human
aaguccaauuuuaauuuag

SEQ ID NO: 2883614 - RNA, 18 nt, Human
aaguccucuuuucugaga

SEQ ID NO: 2883615 - RNA, 19 nt, Human
aaguccgcagaagcccuga

SEQ ID NO: 2883616 - RNA, 18 nt, Human
aaguccgcagaagcccug

SEQ ID NO: 2883617 - RNA, 14 nt, Human
aaguccuauggaaa

SEQ ID NO: 2883618 - RNA, 15 nt, Human
aaguccuauggaaac

SEQ ID NO: 2883619 - RNA, 16 nt, Human
aaguccuauggaaacc

SEQ ID NO: 2883620 - RNA, 14 nt, Human
aaguccaauaagac

SEQ ID NO: 2883621 - RNA, 15 nt, Human
aaguccaauaagaca

SEQ ID NO: 2883622 - RNA, 22 nt, Human
aaguccucuuuucugagaggac

SEQ ID NO: 2883623 - RNA, 12 nt, Human
aaguccuggcuu

SEQ ID NO: 2883624 - RNA, 15 nt, Human
aaguccuggcuucag

SEQ ID NO: 2883625 - RNA, 17 nt, Human
aaguccuggcuucaggc

SEQ ID NO: 2883626 - RNA, 17 nt, Human
aaguccuguaugucugu

SEQ ID NO: 2883627 - RNA, 19 nt, Human
aaguccuguaugucuguca

SEQ ID NO: 2883628 - RNA, 20 nt, Human
aaguccuguaugucugucau

SEQ ID NO: 2883629 - RNA, 15 nt, Human
aagucgaauuaauag

SEQ ID NO: 2883630 - RNA, 16 nt, Human
aagucggaacagcaga

SEQ ID NO: 2883631 - RNA, 16 nt, Human
aaguccuuuaugugga

SEQ ID NO: 2883632 - RNA, 13 nt, Human
aaguccuuuaugu

SEQ ID NO: 2883633 - RNA, 21 nt, Human
aaguccuuuuuuuccaucuuu

SEQ ID NO: 2883634 - RNA, 15 nt, Human
aaguccuuuuguaaa

SEQ ID NO: 2883635 - RNA, 16 nt, Human
aaguccuuuuguaaag

SEQ ID NO: 2883636 - RNA, 17 nt, Human
aaguccuuuuguaaagu

SEQ ID NO: 2883637 - RNA, 22 nt, Human
aagucuaucuaaugacaugccu

SEQ ID NO: 2883638 - RNA, 15 nt, Human
aagucguuuuccaaa

SEQ ID NO: 2883639 - RNA, 17 nt, Human
aagucguuuuccaaacu

SEQ ID NO: 2883640 - RNA, 19 nt, Human
aagucguuuuccaaacuga

SEQ ID NO: 2883641 - RNA, 19 nt, Human
aaguugcauuccuuugucu

SEQ ID NO: 2883642 - RNA, 20 nt, Human
aaguugauauagaacagugc

SEQ ID NO: 2883643 - RNA, 17 nt, Human
aaguugaggauuguuga

SEQ ID NO: 2883644 - RNA, 18 nt, Human
aaguugaggauuguugaa

SEQ ID NO: 2883645 - RNA, 17 nt, Human
aaguugauauagaacag

SEQ ID NO: 2883646 - RNA, 23 nt, Human
aaguugacuuauaguacaugaua

SEQ ID NO: 2883647 - RNA, 21 nt, Human
aaguugacuuauaguacauga

SEQ ID NO: 2883648 - RNA, 20 nt, Human
aaguugacuuauaguacaug

SEQ ID NO: 2883649 - RNA, 19 nt, Human
aaguugacuuauaguacau

SEQ ID NO: 2883650 - RNA, 16 nt, Human
aaguugacuuauagua

SEQ ID NO: 2883651 - RNA, 18 nt, Human
aaguguaaguucacaacu

SEQ ID NO: 2883652 - RNA, 15 nt, Human
aaguguaauaauaug

SEQ ID NO: 2883653 - RNA, 16 nt, Human
aaguguaauaauauga

SEQ ID NO: 2883654 - RNA, 13 nt, Human
aagugcuugugua

SEQ ID NO: 2883655 - RNA, 14 nt, Human
aagugcuuguguaa

SEQ ID NO: 2883656 - RNA, 15 nt, Human
aagugcuuguguaau

SEQ ID NO: 2883657 - RNA, 17 nt, Human
aaguggaauuucuuguu

SEQ ID NO: 2883658 - RNA, 21 nt, Human
aaguggaauuucuuguuucuc

SEQ ID NO: 2883659 - RNA, 22 nt, Human
aagucugccuauccuggccagg

SEQ ID NO: 2883660 - RNA, 12 nt, Human
aagucugaauca

SEQ ID NO: 2883661 - RNA, 22 nt, Human
aagucugugugaugaacuuucu

SEQ ID NO: 2883662 - RNA, 23 nt, Human
aagucugugugaugaacuuucuc

SEQ ID NO: 2883663 - RNA, 23 nt, Human
aaggauuguaaaaaaaaaugccu

SEQ ID NO: 2883664 - RNA, 12 nt, Human
aaggcagggagg

SEQ ID NO: 2883665 - RNA, 15 nt, Human
aaggauugcuacugu

SEQ ID NO: 2883666 - RNA, 12 nt, Human
aaggauuguaaa

SEQ ID NO: 2883667 - RNA, 13 nt, Human
aaggauuguaaaa

SEQ ID NO: 2883668 - RNA, 14 nt, Human
aaggauuguaaaaa

SEQ ID NO: 2883669 - RNA, 21 nt, Human
aaggauuguaaaaaaaaaugc

SEQ ID NO: 2883670 - RNA, 13 nt, Human
aaggauugaaaau

SEQ ID NO: 2883671 - RNA, 14 nt, Human
aaggauugaaaauu

SEQ ID NO: 2883672 - RNA, 16 nt, Human
aaggauucauguggaa

SEQ ID NO: 2883673 - RNA, 15 nt, Human
aaggauguugguguu

SEQ ID NO: 2883674 - RNA, 22 nt, Human
aaggauuaauugcugcaaggac

SEQ ID NO: 2883675 - RNA, 16 nt, Human
aaggaugugggggaag

SEQ ID NO: 2883676 - RNA, 14 nt, Human
aaggacugugcuuu

SEQ ID NO: 2883677 - RNA, 17 nt, Human
aaggacaucagcaaaca

SEQ ID NO: 2883678 - RNA, 16 nt, Human
aaggacaugaugcuuu

SEQ ID NO: 2883679 - RNA, 18 nt, Human
aaggacaugaugcuuuua

SEQ ID NO: 2883680 - RNA, 16 nt, Human
aaggacauuaugugug

SEQ ID NO: 2883681 - RNA, 17 nt, Human
aaggacauuaugugugc

SEQ ID NO: 2883682 - RNA, 17 nt, Human
aaggacagaguaugaac

SEQ ID NO: 2883683 - RNA, 15 nt, Human
aaggacaucagcaaa

SEQ ID NO: 2883684 - RNA, 14 nt, Human
aaggacaucagcaa

SEQ ID NO: 2883685 - RNA, 19 nt, Human
aaggacagccccuccucca

SEQ ID NO: 2883686 - RNA, 13 nt, Human
aaggacagccccu

SEQ ID NO: 2883687 - RNA, 21 nt, Human
aagcuggucccacucagucca

SEQ ID NO: 2883688 - RNA, 18 nt, Human
aagcuggucccacucagu

SEQ ID NO: 2883689 - RNA, 13 nt, Human
aagcuggggagga

SEQ ID NO: 2883690 - RNA, 17 nt, Human
aagcugguaaacuauuu

SEQ ID NO: 2883691 - RNA, 17 nt, Human
aagcugguggccuuggc

SEQ ID NO: 2883692 - RNA, 22 nt, Human
aagcuguaguagcccuuucugu

SEQ ID NO: 2883693 - RNA, 19 nt, Human
aagcugugacuucuccagg

SEQ ID NO: 2883694 - RNA, 16 nt, Human
aagcugugaacaggcu

SEQ ID NO: 2883695 - RNA, 23 nt, Human
aagcuguaguagcccuuucugug

SEQ ID NO: 2883696 - RNA, 17 nt, Human
aagcgauucuucugcuu

SEQ ID NO: 2883697 - RNA, 22 nt, Human
aagcgcauccaaucucaaggaa

SEQ ID NO: 2883698 - RNA, 23 nt, Human
aagcgcauccaaucucaaggaau

SEQ ID NO: 2883699 - RNA, 21 nt, Human
aagcgauucuucugcuucagc

SEQ ID NO: 2883700 - RNA, 14 nt, Human
aagcuaauuugcau

SEQ ID NO: 2883701 - RNA, 20 nt, Human
aagcuaauugggaguccagg

SEQ ID NO: 2883702 - RNA, 21 nt, Human
aagcggagguugcagggagcc

SEQ ID NO: 2883703 - RNA, 18 nt, Human
aagcuaauaauucuucac

SEQ ID NO: 2883704 - RNA, 23 nt, Human
aagcuaauuugcauuaaauucac

SEQ ID NO: 2883705 - RNA, 22 nt, Human
aagcuaauuugcauuaaauuca

SEQ ID NO: 2883706 - RNA, 15 nt, Human
aagcuaauuugcauu

SEQ ID NO: 2883707 - RNA, 21 nt, Human
aagauuccggauccuaagcau

SEQ ID NO: 2883708 - RNA, 24 nt, Human
aagauuccggauccuaagcaucua

SEQ ID NO: 2883709 - RNA, 11 nt, Human
aagauucuaaa

SEQ ID NO: 2883710 - RNA, 12 nt, Human
aagauucuaaag

SEQ ID NO: 2883711 - RNA, 13 nt, Human
aagauucuaaagg

SEQ ID NO: 2883712 - RNA, 14 nt, Human
aagauucuaaugau

SEQ ID NO: 2883713 - RNA, 16 nt, Human
aagauucuaaugauga

SEQ ID NO: 2883714 - RNA, 11 nt, Human
aagauucuaga

SEQ ID NO: 2883715 - RNA, 12 nt, Human
aagauucuagau

SEQ ID NO: 2883716 - RNA, 13 nt, Human
aagauucuagauc

SEQ ID NO: 2883717 - RNA, 20 nt, Human
aagauucuagaucagaugcu

SEQ ID NO: 2883718 - RNA, 13 nt, Human
aagauucuagaug

SEQ ID NO: 2883719 - RNA, 14 nt, Human
aagauucuagauga

SEQ ID NO: 2883720 - RNA, 15 nt, Human
aagauucuagaugau

SEQ ID NO: 2883721 - RNA, 17 nt, Human
aagauucuauaguucua

SEQ ID NO: 2883722 - RNA, 19 nt, Human
aagauucuauaguucuaga

SEQ ID NO: 2883723 - RNA, 17 nt, Human
aagauuaaacagaugau

SEQ ID NO: 2883724 - RNA, 22 nt, Human
aagauguugauuuuuacugugu

SEQ ID NO: 2883725 - RNA, 21 nt, Human
aagauguugauuuuuacugug

SEQ ID NO: 2883726 - RNA, 16 nt, Human
aagauguugauuuuua

SEQ ID NO: 2883727 - RNA, 15 nt, Human
aagauguugaagaau

SEQ ID NO: 2883728 - RNA, 21 nt, Human
aagauguugaagaauacaguu

SEQ ID NO: 2883729 - RNA, 19 nt, Human
aagauacauaaaagugcuu

SEQ ID NO: 2883730 - RNA, 21 nt, Human
aagaugugauauucuaagacu

SEQ ID NO: 2883731 - RNA, 20 nt, Human
aagaugugauauucuaagac

SEQ ID NO: 2883732 - RNA, 14 nt, Human
aagagucuagauuc

SEQ ID NO: 2883733 - RNA, 20 nt, Human
aagagucuagauucaaaggu

SEQ ID NO: 2883734 - RNA, 23 nt, Human
aagagucuagauucaaagguucu

SEQ ID NO: 2883735 - RNA, 13 nt, Human
aagagugauugca

SEQ ID NO: 2883736 - RNA, 14 nt, Human
aagagugauugcag

SEQ ID NO: 2883737 - RNA, 17 nt, Human
aagagugauugcagcuu

SEQ ID NO: 2883738 - RNA, 20 nt, Human
aagagugauugcagcuuuau

SEQ ID NO: 2883739 - RNA, 21 nt, Human
aagagugauugcagcuuuaug

SEQ ID NO: 2883740 - RNA, 22 nt, Human
aagagugacaguggauugcauu

SEQ ID NO: 2883741 - RNA, 18 nt, Human
aagagugacuaguacaaa

SEQ ID NO: 2883742 - RNA, 20 nt, Human
aagagugacuaguacaaauu

SEQ ID NO: 2883743 - RNA, 14 nt, Human
aagagucuucaaca

SEQ ID NO: 2883744 - RNA, 14 nt, Human
aagagucuuccaau

SEQ ID NO: 2883745 - RNA, 12 nt, Human
aacuuuauucuu

SEQ ID NO: 2883746 - RNA, 23 nt, Human
aacuuuauucuugaaagaagaau

SEQ ID NO: 2883747 - RNA, 15 nt, Human
aacuuuccuggaugu

SEQ ID NO: 2883748 - RNA, 18 nt, Human
aacuuuccuggaugucug

SEQ ID NO: 2883749 - RNA, 19 nt, Human
aacuuuccuggaugucuga

SEQ ID NO: 2883750 - RNA, 23 nt, Human
aacuuucccagguucuguuuaug

SEQ ID NO: 2883751 - RNA, 13 nt, Human
aagccacauagag

SEQ ID NO: 2883752 - RNA, 18 nt, Human
aagccacauuauuucuag

SEQ ID NO: 2883753 - RNA, 19 nt, Human
aagccacauuauuucuagu

SEQ ID NO: 2883754 - RNA, 16 nt, Human
aagccacaagaaauuu

SEQ ID NO: 2883755 - RNA, 15 nt, Human
aagccacaagaaauu

SEQ ID NO: 2883756 - RNA, 18 nt, Human
aagccacaagaaauuuga

SEQ ID NO: 2883757 - RNA, 18 nt, Human
aagccacaagucuuccag

SEQ ID NO: 2883758 - RNA, 16 nt, Human
aagcagcaucuucugg

SEQ ID NO: 2883759 - RNA, 16 nt, Human
aagcagcuaaauuuuc

SEQ ID NO: 2883760 - RNA, 19 nt, Human
aagcagcgaccgcccccuc

SEQ ID NO: 2883761 - RNA, 20 nt, Human
aagcagcgaccgcccccucc

SEQ ID NO: 2883762 - RNA, 19 nt, Human
aagcagauggaaugcugug

SEQ ID NO: 2883763 - RNA, 17 nt, Human
aagcagauggaaugcug

SEQ ID NO: 2883764 - RNA, 20 nt, Human
aagauucuauaguucuagac

SEQ ID NO: 2883765 - RNA, 20 nt, Human
aagcagauggaaugcugugu

SEQ ID NO: 2883766 - RNA, 16 nt, Human
aagccagcccggccgc

SEQ ID NO: 2883767 - RNA, 19 nt, Human
aagccagccugaccuuccu

SEQ ID NO: 2883768 - RNA, 13 nt, Human
aagccagccuggu

SEQ ID NO: 2883769 - RNA, 21 nt, Human
aagccagccugguccaugcag

SEQ ID NO: 2883770 - RNA, 11 nt, Human
aagccagccuu

SEQ ID NO: 2883771 - RNA, 21 nt, Human
aaugaaauccugcuucagugu

SEQ ID NO: 2883772 - RNA, 17 nt, Human
aaugaaauccuuuuccu

SEQ ID NO: 2883773 - RNA, 18 nt, Human
aaugaaaugcucuccuuu

SEQ ID NO: 2883774 - RNA, 17 nt, Human
aaugaaaugcucuccuu

SEQ ID NO: 2883775 - RNA, 19 nt, Human
aaugaaaugcucuccuuuc

SEQ ID NO: 2883776 - RNA, 21 nt, Human
aaugaaauaauguacaucugg

SEQ ID NO: 2883777 - RNA, 15 nt, Human
aaugaaaguuugcac

SEQ ID NO: 2883778 - RNA, 17 nt, Human
aaugaaagugaugacau

SEQ ID NO: 2883779 - RNA, 14 nt, Human
aaugaaauauugcu

SEQ ID NO: 2883780 - RNA, 18 nt, Human
aaugaaauauugcuguau

SEQ ID NO: 2883781 - RNA, 14 nt, Human
aaugaaguuggggu

SEQ ID NO: 2883782 - RNA, 17 nt, Human
aaugaaguuguagguaa

SEQ ID NO: 2883783 - RNA, 20 nt, Human
aaugauccccaagugugaac

SEQ ID NO: 2883784 - RNA, 13 nt, Human
aaucucuauacug

SEQ ID NO: 2883785 - RNA, 19 nt, Human
aaucucucaaaucuguuau

SEQ ID NO: 2883786 - RNA, 18 nt, Human
aaucucucccuccucagu

SEQ ID NO: 2883787 - RNA, 16 nt, Human
aauccaggcacagcug

SEQ ID NO: 2883788 - RNA, 17 nt, Human
aauccaggcacagcuga

SEQ ID NO: 2883789 - RNA, 18 nt, Human
aauccaggcacagcugag

SEQ ID NO: 2883790 - RNA, 13 nt, Human
aaucucuguuaug

SEQ ID NO: 2883791 - RNA, 14 nt, Human
aaucucuguuaugu

SEQ ID NO: 2883792 - RNA, 19 nt, Human
aaucucuguuauguacugu

SEQ ID NO: 2883793 - RNA, 20 nt, Human
aaucucuguuauguacugua

SEQ ID NO: 2883794 - RNA, 21 nt, Human
aaucucuguuauguacuguac

SEQ ID NO: 2883795 - RNA, 15 nt, Human
aaucucucugcagcu

SEQ ID NO: 2883796 - RNA, 16 nt, Human
aaucucucugcagcug

SEQ ID NO: 2883797 - RNA, 17 nt, Human
aaucucucugcagcugc

SEQ ID NO: 2883798 - RNA, 18 nt, Human
aaucucucugcagcugcc

SEQ ID NO: 2883799 - RNA, 19 nt, Human
aaucucucugcagcugccg

SEQ ID NO: 2883800 - RNA, 15 nt, Human
aaucucaaggaaucu

SEQ ID NO: 2883801 - RNA, 14 nt, Human
aaucugaaauucua

SEQ ID NO: 2883802 - RNA, 15 nt, Human
aaucugaaauucuaa

SEQ ID NO: 2883803 - RNA, 16 nt, Human
aaucugaaauucuaaa

SEQ ID NO: 2883804 - RNA, 17 nt, Human
aaugaaagguacuauau

SEQ ID NO: 2883805 - RNA, 20 nt, Human
aaugaaagguacuauauuug

SEQ ID NO: 2883806 - RNA, 23 nt, Human
aaugaaagguacuauauuugcua

SEQ ID NO: 2883807 - RNA, 23 nt, Human
aauccaagccuccacagcgaggg

SEQ ID NO: 2883808 - RNA, 23 nt, Human
aauccaaucagagaccaggcccu

SEQ ID NO: 2883809 - RNA, 21 nt, Human
aauccagauggugggaugugg

SEQ ID NO: 2883810 - RNA, 13 nt, Human
aauccaagcuccc

SEQ ID NO: 2883811 - RNA, 14 nt, Human
aauccaagcucccu

SEQ ID NO: 2883812 - RNA, 17 nt, Human
aauccaagcucccugcc

SEQ ID NO: 2883813 - RNA, 18 nt, Human
aauccaagcucccugccc

SEQ ID NO: 2883814 - RNA, 19 nt, Human
aauccaagcucccugcccc

SEQ ID NO: 2883815 - RNA, 20 nt, Human
aauccaagcucccugcccca

SEQ ID NO: 2883816 - RNA, 22 nt, Human
aauccaagcucccugccccaaa

SEQ ID NO: 2883817 - RNA, 17 nt, Human
aauccagacccggcugc

SEQ ID NO: 2883818 - RNA, 19 nt, Human
aauccagacccggcugcgu

SEQ ID NO: 2883819 - RNA, 22 nt, Human
aauccaagccuccacagcgagg

SEQ ID NO: 2883820 - RNA, 18 nt, Human
aauccaagccuccacagc

SEQ ID NO: 2883821 - RNA, 17 nt, Human
aauccaagccuccacag

SEQ ID NO: 2883822 - RNA, 16 nt, Human
aauacuaccuugaaaa

SEQ ID NO: 2883823 - RNA, 14 nt, Human
aauacucuguugua

SEQ ID NO: 2883824 - RNA, 22 nt, Human
aauacucuguuguacuauggaa

SEQ ID NO: 2883825 - RNA, 16 nt, Human
aauacuagucacccca

SEQ ID NO: 2883826 - RNA, 17 nt, Human
aauacuagucaccccaa

SEQ ID NO: 2883827 - RNA, 21 nt, Human
aauacuaccuugaaaauaaga

SEQ ID NO: 2883828 - RNA, 18 nt, Human
aauacuaccuugaaaaua

SEQ ID NO: 2883829 - RNA, 17 nt, Human
aauacuaccuugaaaau

SEQ ID NO: 2883830 - RNA, 14 nt, Human
aauacuguguggaa

SEQ ID NO: 2883831 - RNA, 15 nt, Human
aauacuguguggaac

SEQ ID NO: 2883832 - RNA, 16 nt, Human
aauacuguguggaacu

SEQ ID NO: 2883833 - RNA, 11 nt, Human
aauacugcacu

SEQ ID NO: 2883834 - RNA, 13 nt, Human
aauagaaaacuga

SEQ ID NO: 2883835 - RNA, 10 nt, Human
aauacuuuuu

SEQ ID NO: 2883836 - RNA, 19 nt, Human
aauagaaaacugaaaaucu

SEQ ID NO: 2883837 - RNA, 17 nt, Human
aauagaaaacugaaaau

SEQ ID NO: 2883838 - RNA, 18 nt, Human
aauagaaaacugaaaauc

SEQ ID NO: 2883839 - RNA, 15 nt, Human
aauacuuuuuacaau

SEQ ID NO: 2883840 - RNA, 16 nt, Human
aauacuuuuucuaaug

SEQ ID NO: 2883841 - RNA, 17 nt, Human
aauacuuuuucuaauga

SEQ ID NO: 2883842 - RNA, 13 nt, Human
aauacuuuuccuu

SEQ ID NO: 2883843 - RNA, 14 nt, Human
aauacuuuuccuua

SEQ ID NO: 2883844 - RNA, 15 nt, Human
aauacuuuuccuuac

SEQ ID NO: 2883845 - RNA, 20 nt, Human
aauacuuuuccuuaccuuua

SEQ ID NO: 2883846 - RNA, 18 nt, Human
aauagaagugcuccccuc

SEQ ID NO: 2883847 - RNA, 19 nt, Human
aauagaagugcuccccucu

SEQ ID NO: 2883848 - RNA, 16 nt, Human
aauauaugaacauuag

SEQ ID NO: 2883849 - RNA, 13 nt, Human
aauauguuuccuu

SEQ ID NO: 2883850 - RNA, 14 nt, Human
aauauguuuccuug

SEQ ID NO: 2883851 - RNA, 18 nt, Human
aauauguuuccuuguuua

SEQ ID NO: 2883852 - RNA, 19 nt, Human
aauauguuuccuuguuuau

SEQ ID NO: 2883853 - RNA, 13 nt, Human
aauauauaugaau

SEQ ID NO: 2883854 - RNA, 16 nt, Human
aauauaucccagaaau

SEQ ID NO: 2883855 - RNA, 22 nt, Human
aauauaucccagaaauuagaaa

SEQ ID NO: 2883856 - RNA, 15 nt, Human
aaucaccaaaggcuc

SEQ ID NO: 2883857 - RNA, 14 nt, Human
aaucaaguauuuug

SEQ ID NO: 2883858 - RNA, 15 nt, Human
aaucaaguauuuugu

SEQ ID NO: 2883859 - RNA, 19 nt, Human
aaucacauucgaguguuuc

SEQ ID NO: 2883860 - RNA, 14 nt, Human
aauauuaguuaaug

SEQ ID NO: 2883861 - RNA, 18 nt, Human
aauauuaguuaauggauu

SEQ ID NO: 2883862 - RNA, 13 nt, Human
aaucaagagcugc

SEQ ID NO: 2883863 - RNA, 14 nt, Human
aaucaagagcugcc

SEQ ID NO: 2883864 - RNA, 16 nt, Human
aaucaagagcugcccu

SEQ ID NO: 2883865 - RNA, 17 nt, Human
aaucaagagcugcccuc

SEQ ID NO: 2883866 - RNA, 17 nt, Human
aaucaagauuaugauga

SEQ ID NO: 2883867 - RNA, 16 nt, Human
aaucaagcaagccucu

SEQ ID NO: 2883868 - RNA, 16 nt, Human
aaucaagcagguuaga

SEQ ID NO: 2883869 - RNA, 18 nt, Human
aaucaagcagguuagaga

SEQ ID NO: 2883870 - RNA, 22 nt, Human
aaucaagccauguauaaaugug

SEQ ID NO: 2883871 - RNA, 23 nt, Human
aaucaagggcaaaaagucuacau

SEQ ID NO: 2883872 - RNA, 21 nt, Human
aauauuagugaccucagcuuu

SEQ ID NO: 2883873 - RNA, 12 nt, Human
aauauuaaaagu

SEQ ID NO: 2883874 - RNA, 19 nt, Human
aauauuaaaagucacaaug

SEQ ID NO: 2883875 - RNA, 12 nt, Human
aauguuuccuuu

SEQ ID NO: 2883876 - RNA, 23 nt, Human
aauguuuaugcaaggaaggaaag

SEQ ID NO: 2883877 - RNA, 22 nt, Human
aauguuuaugcaaggaaggaaa

SEQ ID NO: 2883878 - RNA, 21 nt, Human
aauguuuaugcaaggaaggaa

SEQ ID NO: 2883879 - RNA, 22 nt, Human
aauguuuacagauccccaagcc

SEQ ID NO: 2883880 - RNA, 16 nt, Human
aauguuugccucugcc

SEQ ID NO: 2883881 - RNA, 15 nt, Human
aauguuugccucugc

SEQ ID NO: 2883882 - RNA, 20 nt, Human
aauguuugacacaauuggaa

SEQ ID NO: 2883883 - RNA, 20 nt, Human
aauguuugaggagcauguuu

SEQ ID NO: 2883884 - RNA, 21 nt, Human
aauguuugaggagcauguuuu

SEQ ID NO: 2883885 - RNA, 22 nt, Human
aauguuugaggagcauguuuug

SEQ ID NO: 2883886 - RNA, 23 nt, Human
aauguuugaggagcauguuuugu

SEQ ID NO: 2883887 - RNA, 12 nt, Human
aauguuucuauc

SEQ ID NO: 2883888 - RNA, 13 nt, Human
aauguuuccuuua

SEQ ID NO: 2883889 - RNA, 20 nt, Human
aauguuuccaaccuggagua

SEQ ID NO: 2883890 - RNA, 15 nt, Human
aauguuuauuccuug

SEQ ID NO: 2883891 - RNA, 16 nt, Human
aauguuuauuccuuga

SEQ ID NO: 2883892 - RNA, 16 nt, Human
aauguuuaaacauuuu

SEQ ID NO: 2883893 - RNA, 17 nt, Human
aaugucuuuugaauauu

SEQ ID NO: 2883894 - RNA, 14 nt, Human
aauguuuaaugcug

SEQ ID NO: 2883895 - RNA, 18 nt, Human
aauguccuccagaagccu

SEQ ID NO: 2883896 - RNA, 17 nt, Human
aauguccuccagaagcc

SEQ ID NO: 2883897 - RNA, 17 nt, Human
aaugucuaaaugcugaa

SEQ ID NO: 2883898 - RNA, 12 nt, Human
aaugucuaaaug

SEQ ID NO: 2883899 - RNA, 15 nt, Human
aaugucuaaaugcug

SEQ ID NO: 2883900 - RNA, 23 nt, Human
aauguccuccagaagccucuggc

SEQ ID NO: 2883901 - RNA, 16 nt, Human
aauguccugccuuuua

SEQ ID NO: 2883902 - RNA, 15 nt, Human
aaugucuaaaauugu

SEQ ID NO: 2883903 - RNA, 21 nt, Human
aauguccuccagaagccucug

SEQ ID NO: 2883904 - RNA, 13 nt, Human
aaugucuuuugaa

SEQ ID NO: 2883905 - RNA, 15 nt, Human
aaugucuuuugaaua

SEQ ID NO: 2883906 - RNA, 13 nt, Human
aaugucuuuguaa

SEQ ID NO: 2883907 - RNA, 15 nt, Human
aaugucuuuguaagu

SEQ ID NO: 2883908 - RNA, 16 nt, Human
aaugucuuuguaaguc

SEQ ID NO: 2883909 - RNA, 19 nt, Human
aaugucuuuguaagucagu

SEQ ID NO: 2883910 - RNA, 22 nt, Human
aaugucuuuguaagucaguguu

SEQ ID NO: 2883911 - RNA, 21 nt, Human
aaugcuagguuaauuccaauu

SEQ ID NO: 2883912 - RNA, 23 nt, Human
aaugcuauaacuauguugauaaa

SEQ ID NO: 2883913 - RNA, 18 nt, Human
aaugcuauuuuuguuuuu

SEQ ID NO: 2883914 - RNA, 19 nt, Human
aaugcuauuuuuguuuuua

SEQ ID NO: 2883915 - RNA, 20 nt, Human
aaugcuauuuuuguuuuuag

SEQ ID NO: 2883916 - RNA, 14 nt, Human
aaugcuauugaaaa

SEQ ID NO: 2883917 - RNA, 15 nt, Human
aaugcuauugaaaau

SEQ ID NO: 2883918 - RNA, 16 nt, Human
aaugcuauugaaaaug

SEQ ID NO: 2883919 - RNA, 18 nt, Human
aaugcugaaaaaacaccu

SEQ ID NO: 2883920 - RNA, 18 nt, Human
aaugcugaugaaucacug

SEQ ID NO: 2883921 - RNA, 13 nt, Human
aaugcugcacuaa

SEQ ID NO: 2883922 - RNA, 12 nt, Human
aaugcugcacuu

SEQ ID NO: 2883923 - RNA, 13 nt, Human
aaugcugcacuuc

SEQ ID NO: 2883924 - RNA, 17 nt, Human
aaugcugcacuuccugu

SEQ ID NO: 2883925 - RNA, 17 nt, Human
aaugguguuauuugaaa

SEQ ID NO: 2883926 - RNA, 19 nt, Human
aaugguguuuuucuuguaa

SEQ ID NO: 2883927 - RNA, 20 nt, Human
aaugguguuuuucuuguaaa

SEQ ID NO: 2883928 - RNA, 17 nt, Human
aaugcugcaaacuuaau

SEQ ID NO: 2883929 - RNA, 20 nt, Human
aauggugucaguauccaggc

SEQ ID NO: 2883930 - RNA, 22 nt, Human
aaugcugccuucccaugaaucu

SEQ ID NO: 2883931 - RNA, 23 nt, Human
aaugcugccuuuucuuuaacuuu

SEQ ID NO: 2883932 - RNA, 12 nt, Human
aaugcugcagau

SEQ ID NO: 2883933 - RNA, 20 nt, Human
aaugcugcagauuugggcug

SEQ ID NO: 2883934 - RNA, 11 nt, Human
aaugcugccag

SEQ ID NO: 2883935 - RNA, 17 nt, Human
aaugcugccagugugga

SEQ ID NO: 2883936 - RNA, 23 nt, Human
aauguccaacuaaaaacaaaccc

SEQ ID NO: 2883937 - RNA, 15 nt, Human
aaugucauauacugc

SEQ ID NO: 2883938 - RNA, 18 nt, Human
aaugucauauacugccau

SEQ ID NO: 2883939 - RNA, 19 nt, Human
aaugucauauacugccaug

SEQ ID NO: 2883940 - RNA, 20 nt, Human
aaugucaggaacagaaggau

SEQ ID NO: 2883941 - RNA, 18 nt, Human
aaugucaggaacagaagg

SEQ ID NO: 2883942 - RNA, 16 nt, Human
aaugucagauacaaug

SEQ ID NO: 2883943 - RNA, 17 nt, Human
aaugucagauacaaugu

SEQ ID NO: 2883944 - RNA, 18 nt, Human
aaugucagauacaaugua

SEQ ID NO: 2883945 - RNA, 21 nt, Human
aaugucagauacaauguauuu

SEQ ID NO: 2883946 - RNA, 19 nt, Human
aaugucacguacugucuga

SEQ ID NO: 2883947 - RNA, 20 nt, Human
aaugucacguacugucugau

SEQ ID NO: 2883948 - RNA, 22 nt, Human
aaugucacguacugucugauug

SEQ ID NO: 2883949 - RNA, 18 nt, Human
aaugguugccuuaaagaa

SEQ ID NO: 2883950 - RNA, 15 nt, Human
aaugucagauacaau

SEQ ID NO: 2883951 - RNA, 17 nt, Human
aaugguugacuggguuu

SEQ ID NO: 2883952 - RNA, 15 nt, Human
aaugguucugaaaua

SEQ ID NO: 2883953 - RNA, 15 nt, Human
aaugguugccuuaaa

SEQ ID NO: 2883954 - RNA, 19 nt, Human
aaugcuagguuaauuccaa

SEQ ID NO: 2883955 - RNA, 18 nt, Human
aaugcuagguuaauucca

SEQ ID NO: 2883956 - RNA, 12 nt, Human
aaugccuuugag

SEQ ID NO: 2883957 - RNA, 13 nt, Human
aaugccuuugaga

SEQ ID NO: 2883958 - RNA, 14 nt, Human
aaugccuuugagac

SEQ ID NO: 2883959 - RNA, 16 nt, Human
aaugccuuugagacag

SEQ ID NO: 2883960 - RNA, 17 nt, Human
aaugccuuugagacagu

SEQ ID NO: 2883961 - RNA, 18 nt, Human
aaugccuuugagacaguu

SEQ ID NO: 2883962 - RNA, 19 nt, Human
aaugccuuugagacaguuu

SEQ ID NO: 2883963 - RNA, 22 nt, Human
aaugccuuagaaauguaaacug

SEQ ID NO: 2883964 - RNA, 17 nt, Human
aaugccuuaaaauggaa

SEQ ID NO: 2883965 - RNA, 20 nt, Human
aaugccuuaaaauggaauug

SEQ ID NO: 2883966 - RNA, 20 nt, Human
aaugccuuugagacaguuuc

SEQ ID NO: 2883967 - RNA, 22 nt, Human
aaugccuuugagacaguuucuu

SEQ ID NO: 2883968 - RNA, 23 nt, Human
aaugccuuugagacaguuucuua

SEQ ID NO: 2883969 - RNA, 13 nt, Human
aaugcgauuuuau

SEQ ID NO: 2883970 - RNA, 14 nt, Human
aaugcgauuuuauu

SEQ ID NO: 2883971 - RNA, 16 nt, Human
aaugcgauuuuauuac

SEQ ID NO: 2883972 - RNA, 22 nt, Human
aaugcgauuuuauuacuggcgu

SEQ ID NO: 2883973 - RNA, 21 nt, Human
aaugcgcaggcuggcccugcc

SEQ ID NO: 2883974 - RNA, 22 nt, Human
aaugcgcaggcuggcccugccc

SEQ ID NO: 2883975 - RNA, 21 nt, Human
aauuaaaaaaaaagaucuguu

SEQ ID NO: 2883976 - RNA, 12 nt, Human
agcaguucuguu

SEQ ID NO: 2883977 - RNA, 21 nt, Human
agcaguucuguuauauccccu

SEQ ID NO: 2883978 - RNA, 21 nt, Human
agcaguuacaaaaaccuuccc

SEQ ID NO: 2883979 - RNA, 21 nt, Human
agcaguguuccccaucugggu

SEQ ID NO: 2883980 - RNA, 19 nt, Human
agcagugugaaguacaaua

SEQ ID NO: 2883981 - RNA, 17 nt, Human
agcagugggcuccuggc

SEQ ID NO: 2883982 - RNA, 22 nt, Human
agcaugaaugguauggaacucu

SEQ ID NO: 2883983 - RNA, 21 nt, Human
agcauccuuuucugcagaggg

SEQ ID NO: 2883984 - RNA, 19 nt, Human
agcauccuuuucugcagag

SEQ ID NO: 2883985 - RNA, 16 nt, Human
agcaugacauaacagu

SEQ ID NO: 2883986 - RNA, 20 nt, Human
agcaugacauaacagugcag

SEQ ID NO: 2883987 - RNA, 23 nt, Human
agcauccuggcacccggccccug

SEQ ID NO: 2883988 - RNA, 22 nt, Human
agcauccuggcacccggccccu

SEQ ID NO: 2883989 - RNA, 18 nt, Human
agcauccuggcacccggc

SEQ ID NO: 2883990 - RNA, 18 nt, Human
agccaauaacacacagcu

SEQ ID NO: 2883991 - RNA, 18 nt, Human
agccaagugccaaaugcu

SEQ ID NO: 2883992 - RNA, 19 nt, Human
agccaagugccaaaugcuc

SEQ ID NO: 2883993 - RNA, 16 nt, Human
agccaaccuaagcaag

SEQ ID NO: 2883994 - RNA, 18 nt, Human
agccagcaccuguaagaa

SEQ ID NO: 2883995 - RNA, 15 nt, Human
agccagcacuuguau

SEQ ID NO: 2883996 - RNA, 23 nt, Human
agcaugcuugugaaaauguguuc

SEQ ID NO: 2883997 - RNA, 22 nt, Human
agcaugcuugugaaaauguguu

SEQ ID NO: 2883998 - RNA, 17 nt, Human
agcaugcuugugaaaau

SEQ ID NO: 2883999 - RNA, 23 nt, Human
agcauggacuaaccccaacgcac

SEQ ID NO: 2884000 - RNA, 21 nt, Human
agcaugcugugauugugccua

SEQ ID NO: 2884001 - RNA, 16 nt, Human
agccaaauuuaucaaa

SEQ ID NO: 2884002 - RNA, 19 nt, Human
agccaaagggaaauaugcu

SEQ ID NO: 2884003 - RNA, 14 nt, Human
agcauggagcuggc

SEQ ID NO: 2884004 - RNA, 13 nt, Human
agcauggagcugg

SEQ ID NO: 2884005 - RNA, 16 nt, Human
agcauggagcuggccg

SEQ ID NO: 2884006 - RNA, 16 nt, Human
agcauggcacucccuc

SEQ ID NO: 2884007 - RNA, 17 nt, Human
agcauggcacucccucc

SEQ ID NO: 2884008 - RNA, 18 nt, Human
agcauggcacucccucca

SEQ ID NO: 2884009 - RNA, 20 nt, Human
agcauggcacucccuccagc

SEQ ID NO: 2884010 - RNA, 21 nt, Human
agcauggcacucccuccagca

SEQ ID NO: 2884011 - RNA, 12 nt, Human
agccaacagcua

SEQ ID NO: 2884012 - RNA, 14 nt, Human
agccaacagcuaca

SEQ ID NO: 2884013 - RNA, 19 nt, Human
agccaacagcuacaacagc

SEQ ID NO: 2884014 - RNA, 20 nt, Human
agccaacagcuacaacagcc

SEQ ID NO: 2884015 - RNA, 23 nt, Human
agccaacacccugucuaaaaaac

SEQ ID NO: 2884016 - RNA, 17 nt, Human
agcacuggguugacuuu

SEQ ID NO: 2884017 - RNA, 16 nt, Human
agcacucuuaaagcaa

SEQ ID NO: 2884018 - RNA, 10 nt, Human
agcacugaaa

SEQ ID NO: 2884019 - RNA, 11 nt, Human
agcacugaaaa

SEQ ID NO: 2884020 - RNA, 22 nt, Human
agcacugaaaauaccaucaggc

SEQ ID NO: 2884021 - RNA, 14 nt, Human
agcacucgugugca

SEQ ID NO: 2884022 - RNA, 14 nt, Human
agcacacucauccc

SEQ ID NO: 2884023 - RNA, 20 nt, Human
agcacacucauccccucacu

SEQ ID NO: 2884024 - RNA, 17 nt, Human
agcacacucuggucuug

SEQ ID NO: 2884025 - RNA, 14 nt, Human
agcagcucuccccu

SEQ ID NO: 2884026 - RNA, 12 nt, Human
agcagcucuccc

SEQ ID NO: 2884027 - RNA, 18 nt, Human
agcagcgaccgcccccuc

SEQ ID NO: 2884028 - RNA, 23 nt, Human
agcagcgaccgcccccuccucua

SEQ ID NO: 2884029 - RNA, 15 nt, Human
agcacuguugaugua

SEQ ID NO: 2884030 - RNA, 17 nt, Human
agcacuguugauguauc

SEQ ID NO: 2884031 - RNA, 18 nt, Human
agcacuguugauguaucu

SEQ ID NO: 2884032 - RNA, 20 nt, Human
agcacuguugauguaucuga

SEQ ID NO: 2884033 - RNA, 21 nt, Human
agcacuguugauguaucugag

SEQ ID NO: 2884034 - RNA, 14 nt, Human
agcacugugcucag

SEQ ID NO: 2884035 - RNA, 15 nt, Human
agcacugugcucagg

SEQ ID NO: 2884036 - RNA, 18 nt, Human
agcacugugcucagggcu

SEQ ID NO: 2884037 - RNA, 19 nt, Human
agcacugugcucagggcua

SEQ ID NO: 2884038 - RNA, 17 nt, Human
agauggggauaaaauga

SEQ ID NO: 2884039 - RNA, 19 nt, Human
agauggggauaaaaugacu

SEQ ID NO: 2884040 - RNA, 20 nt, Human
agauggggauaaaaugacua

SEQ ID NO: 2884041 - RNA, 15 nt, Human
agaugggggaaagca

SEQ ID NO: 2884042 - RNA, 18 nt, Human
agaugggggaaagcacag

SEQ ID NO: 2884043 - RNA, 18 nt, Human
agaucuugcagaaguucu

SEQ ID NO: 2884044 - RNA, 15 nt, Human
agccgccuuccuuga

SEQ ID NO: 2884045 - RNA, 16 nt, Human
agccgccuuccuugac

SEQ ID NO: 2884046 - RNA, 17 nt, Human
agccgccuuccuugacc

SEQ ID NO: 2884047 - RNA, 22 nt, Human
agccgccauugccaccaggaga

SEQ ID NO: 2884048 - RNA, 21 nt, Human
agccgccauugccaccaggag

SEQ ID NO: 2884049 - RNA, 20 nt, Human
agccgccauugccaccagga

SEQ ID NO: 2884050 - RNA, 13 nt, Human
agccgcucuccug

SEQ ID NO: 2884051 - RNA, 15 nt, Human
agccgcucuccugcc

SEQ ID NO: 2884052 - RNA, 17 nt, Human
agccgcucuccugccac

SEQ ID NO: 2884053 - RNA, 23 nt, Human
agccgggaacagacaacagaagu

SEQ ID NO: 2884054 - RNA, 19 nt, Human
agccggcguggcaaauaua

SEQ ID NO: 2884055 - RNA, 21 nt, Human
agccggcguggcaaauauaaa

SEQ ID NO: 2884056 - RNA, 12 nt, Human
agcccucucccu

SEQ ID NO: 2884057 - RNA, 13 nt, Human
agcccucucccuc

SEQ ID NO: 2884058 - RNA, 19 nt, Human
agccgccauugccaccagg

SEQ ID NO: 2884059 - RNA, 18 nt, Human
agccgccauugccaccag

SEQ ID NO: 2884060 - RNA, 17 nt, Human
agccgccauugccacca

SEQ ID NO: 2884061 - RNA, 17 nt, Human
agccgccaucagcccaa

SEQ ID NO: 2884062 - RNA, 15 nt, Human
agcccuccgccuuca

SEQ ID NO: 2884063 - RNA, 16 nt, Human
agcccuccgccuucac

SEQ ID NO: 2884064 - RNA, 14 nt, Human
agcccucagaaccc

SEQ ID NO: 2884065 - RNA, 18 nt, Human
agcccucagaacccuugg

SEQ ID NO: 2884066 - RNA, 15 nt, Human
agcccucagaacccu

SEQ ID NO: 2884067 - RNA, 24 nt, Human
agcccucagaacccuuggcuugcc

SEQ ID NO: 2884068 - RNA, 19 nt, Human
agcccucagaacccuuggc

SEQ ID NO: 2884069 - RNA, 23 nt, Human
agcccucaucuugaagggcccag

SEQ ID NO: 2884070 - RNA, 19 nt, Human
agccucccgaguagcuggg

SEQ ID NO: 2884071 - RNA, 18 nt, Human
agccucccgaguagcugg

SEQ ID NO: 2884072 - RNA, 20 nt, Human
agccucccgaguagcuggga

SEQ ID NO: 2884073 - RNA, 13 nt, Human
agccucccacccc

SEQ ID NO: 2884074 - RNA, 20 nt, Human
agccuccucaucccguguuc

SEQ ID NO: 2884075 - RNA, 23 nt, Human
agccuccggaguagcugggacca

SEQ ID NO: 2884076 - RNA, 13 nt, Human
agccuccggaagc

SEQ ID NO: 2884077 - RNA, 15 nt, Human
agccuccggaagcug

SEQ ID NO: 2884078 - RNA, 21 nt, Human
agccucccaaagugcugggau

SEQ ID NO: 2884079 - RNA, 17 nt, Human
agccgugccuucagcuc

SEQ ID NO: 2884080 - RNA, 16 nt, Human
agccucccaaggagaa

SEQ ID NO: 2884081 - RNA, 19 nt, Human
agccucccaaggagaacaa

SEQ ID NO: 2884082 - RNA, 20 nt, Human
agccucccaaggagaacaaa

SEQ ID NO: 2884083 - RNA, 21 nt, Human
agccucccaaggagaacaaau

SEQ ID NO: 2884084 - RNA, 22 nt, Human
agccgggcgugguggcgggcac

SEQ ID NO: 2884085 - RNA, 17 nt, Human
agccgugaacugugcau

SEQ ID NO: 2884086 - RNA, 15 nt, Human
agccgugccuucagc

SEQ ID NO: 2884087 - RNA, 16 nt, Human
agccgugccuucagcu

SEQ ID NO: 2884088 - RNA, 17 nt, Human
agccgccuuaagcugau

SEQ ID NO: 2884089 - RNA, 16 nt, Human
agccccauucugccug

SEQ ID NO: 2884090 - RNA, 13 nt, Human
agccccauucugc

SEQ ID NO: 2884091 - RNA, 15 nt, Human
agcccgucucagugu

SEQ ID NO: 2884092 - RNA, 14 nt, Human
agcccgucucagug

SEQ ID NO: 2884093 - RNA, 19 nt, Human
agcccuaaaaauccagacu

SEQ ID NO: 2884094 - RNA, 17 nt, Human
agcccucacccuggggc

SEQ ID NO: 2884095 - RNA, 15 nt, Human
agccccagugcccac

SEQ ID NO: 2884096 - RNA, 14 nt, Human
agccccagugccca

SEQ ID NO: 2884097 - RNA, 13 nt, Human
agccccagugccc

SEQ ID NO: 2884098 - RNA, 22 nt, Human
agacugcgggaugguccugggg

SEQ ID NO: 2884099 - RNA, 20 nt, Human
agacugcgggaugguccugg

SEQ ID NO: 2884100 - RNA, 23 nt, Human
agacugcgauuugucccaggucc

SEQ ID NO: 2884101 - RNA, 23 nt, Human
agacugcgggaugguccuggggc

SEQ ID NO: 2884102 - RNA, 17 nt, Human
agacugcguucugcaag

SEQ ID NO: 2884103 - RNA, 18 nt, Human
agacugcuaguguucugu

SEQ ID NO: 2884104 - RNA, 16 nt, Human
agacuggaagcacagc

SEQ ID NO: 2884105 - RNA, 17 nt, Human
agacuggaagcacagcu

SEQ ID NO: 2884106 - RNA, 19 nt, Human
agacuggaagcacagcuuc

SEQ ID NO: 2884107 - RNA, 15 nt, Human
agacugcugggacug

SEQ ID NO: 2884108 - RNA, 14 nt, Human
agacugcugggacu

SEQ ID NO: 2884109 - RNA, 19 nt, Human
agacuggaagcuaauuugc

SEQ ID NO: 2884110 - RNA, 14 nt, Human
agacuggaagcuaa

SEQ ID NO: 2884111 - RNA, 21 nt, Human
agagaaaaaugcuuugcuuug

SEQ ID NO: 2884112 - RNA, 12 nt, Human
agagaacugaaa

SEQ ID NO: 2884113 - RNA, 14 nt, Human
agagaacugaaaag

SEQ ID NO: 2884114 - RNA, 15 nt, Human
agagaacugaaaaga

SEQ ID NO: 2884115 - RNA, 17 nt, Human
agagaacugaaaagaga

SEQ ID NO: 2884116 - RNA, 14 nt, Human
agagaacgcagccc

SEQ ID NO: 2884117 - RNA, 15 nt, Human
agagaacgcagcccu

SEQ ID NO: 2884118 - RNA, 14 nt, Human
agagaacuguggcc

SEQ ID NO: 2884119 - RNA, 10 nt, Human
agagaagaag

SEQ ID NO: 2884120 - RNA, 11 nt, Human
agagaagaaga

SEQ ID NO: 2884121 - RNA, 12 nt, Human
agagaagaagaa

SEQ ID NO: 2884122 - RNA, 13 nt, Human
agagaagaagaaa

SEQ ID NO: 2884123 - RNA, 15 nt, Human
agagaagaagaaaaa

SEQ ID NO: 2884124 - RNA, 16 nt, Human
agagaagaagaaaaaa

SEQ ID NO: 2884125 - RNA, 18 nt, Human
agagagcugccaucgcug

SEQ ID NO: 2884126 - RNA, 21 nt, Human
agagagcggucucaggcuggu

SEQ ID NO: 2884127 - RNA, 16 nt, Human
agagagcggucucagg

SEQ ID NO: 2884128 - RNA, 18 nt, Human
agagagcgagcgcuaccc

SEQ ID NO: 2884129 - RNA, 18 nt, Human
agagagccauuuugugaa

SEQ ID NO: 2884130 - RNA, 19 nt, Human
agagagccauuuugugaau

SEQ ID NO: 2884131 - RNA, 19 nt, Human
agagagcagagaauauaac

SEQ ID NO: 2884132 - RNA, 13 nt, Human
agagagccauuuu

SEQ ID NO: 2884133 - RNA, 15 nt, Human
agagagccauuuugu

SEQ ID NO: 2884134 - RNA, 17 nt, Human
agagagccauuuuguga

SEQ ID NO: 2884135 - RNA, 21 nt, Human
agagaggguggugaccucugc

SEQ ID NO: 2884136 - RNA, 20 nt, Human
agagaggguggugaccucug

SEQ ID NO: 2884137 - RNA, 22 nt, Human
agagaggguggugaccucugcc

SEQ ID NO: 2884138 - RNA, 19 nt, Human
agagcccaccuuggcucaa

SEQ ID NO: 2884139 - RNA, 18 nt, Human
agacguggaaccucuguc

SEQ ID NO: 2884140 - RNA, 20 nt, Human
agacguggaaccucugucuc

SEQ ID NO: 2884141 - RNA, 21 nt, Human
agacguggaaccucugucuca

SEQ ID NO: 2884142 - RNA, 21 nt, Human
agacggaggccuacucuucca

SEQ ID NO: 2884143 - RNA, 18 nt, Human
agacggagucccaccuug

SEQ ID NO: 2884144 - RNA, 21 nt, Human
agacggugucuuguucuguca

SEQ ID NO: 2884145 - RNA, 15 nt, Human
agacccccacaccuc

SEQ ID NO: 2884146 - RNA, 14 nt, Human
agacccccacaccu

SEQ ID NO: 2884147 - RNA, 13 nt, Human
agacccccacacc

SEQ ID NO: 2884148 - RNA, 17 nt, Human
agaccccaccuccuugg

SEQ ID NO: 2884149 - RNA, 13 nt, Human
agaccccaggcug

SEQ ID NO: 2884150 - RNA, 15 nt, Human
agacccauuccuauu

SEQ ID NO: 2884151 - RNA, 19 nt, Human
agacagcugauacuucauu

SEQ ID NO: 2884152 - RNA, 20 nt, Human
agacagcugauacuucauuu

SEQ ID NO: 2884153 - RNA, 16 nt, Human
agacccauuccuauuu

SEQ ID NO: 2884154 - RNA, 13 nt, Human
agacccaggacuc

SEQ ID NO: 2884155 - RNA, 14 nt, Human
agacccaggacucc

SEQ ID NO: 2884156 - RNA, 23 nt, Human
agacagagucucacuguugccca

SEQ ID NO: 2884157 - RNA, 15 nt, Human
agacaagauauugua

SEQ ID NO: 2884158 - RNA, 16 nt, Human
agacaagauauuguac

SEQ ID NO: 2884159 - RNA, 17 nt, Human
agacaagauauuguaca

SEQ ID NO: 2884160 - RNA, 18 nt, Human
agacaagauauuguacau

SEQ ID NO: 2884161 - RNA, 19 nt, Human
agacaagauauuguacaua

SEQ ID NO: 2884162 - RNA, 18 nt, Human
agacaagaaaucccuguu

SEQ ID NO: 2884163 - RNA, 13 nt, Human
agacaagaaaucc

SEQ ID NO: 2884164 - RNA, 17 nt, Human
agacaagaaaucccugu

SEQ ID NO: 2884165 - RNA, 14 nt, Human
agacaacagaaguc

SEQ ID NO: 2884166 - RNA, 13 nt, Human
agacaacagaagu

SEQ ID NO: 2884167 - RNA, 15 nt, Human
agacaacagaaguca

SEQ ID NO: 2884168 - RNA, 19 nt, Human
agacagccccagagcaggg

SEQ ID NO: 2884169 - RNA, 20 nt, Human
agacagccccagagcagggu

SEQ ID NO: 2884170 - RNA, 13 nt, Human
agacagccccaga

SEQ ID NO: 2884171 - RNA, 15 nt, Human
agacagccccagagc

SEQ ID NO: 2884172 - RNA, 17 nt, Human
agacagccccagagcag

SEQ ID NO: 2884173 - RNA, 18 nt, Human
agacagccccagagcagg

SEQ ID NO: 2884174 - RNA, 12 nt, Human
agacagccccag

SEQ ID NO: 2884175 - RNA, 11 nt, Human
agagugugugu

SEQ ID NO: 2884176 - RNA, 14 nt, Human
agagugucucugau

SEQ ID NO: 2884177 - RNA, 15 nt, Human
agaguguggaggcug

SEQ ID NO: 2884178 - RNA, 23 nt, Human
agaguggcuccucccggugccca

SEQ ID NO: 2884179 - RNA, 15 nt, Human
agaguggcuccuccc

SEQ ID NO: 2884180 - RNA, 19 nt, Human
agaguggcuccucccggug

SEQ ID NO: 2884181 - RNA, 11 nt, Human
agaggagagag

SEQ ID NO: 2884182 - RNA, 12 nt, Human
agaggagagagg

SEQ ID NO: 2884183 - RNA, 13 nt, Human
agaggagagaggc

SEQ ID NO: 2884184 - RNA, 15 nt, Human
agaggagagaggcag

SEQ ID NO: 2884185 - RNA, 16 nt, Human
agagggcacacacugu

SEQ ID NO: 2884186 - RNA, 18 nt, Human
agagggccaagacuuggc

SEQ ID NO: 2884187 - RNA, 19 nt, Human
agagggccaugcaauucau

SEQ ID NO: 2884188 - RNA, 17 nt, Human
agaggagagaggcagag

SEQ ID NO: 2884189 - RNA, 17 nt, Human
agagggcccaggcaggc

SEQ ID NO: 2884190 - RNA, 16 nt, Human
agagggcccaggcagg

SEQ ID NO: 2884191 - RNA, 14 nt, Human
agagggcccaggca

SEQ ID NO: 2884192 - RNA, 22 nt, Human
agaggguggugaccucugccug

SEQ ID NO: 2884193 - RNA, 20 nt, Human
agaggguggugaccucugcc

SEQ ID NO: 2884194 - RNA, 19 nt, Human
agaggguggugaccucugc

SEQ ID NO: 2884195 - RNA, 21 nt, Human
agagggcccaggcaggccacc

SEQ ID NO: 2884196 - RNA, 10 nt, Human
agaggagaga

SEQ ID NO: 2884197 - RNA, 15 nt, Human
agaggaccagugagu

SEQ ID NO: 2884198 - RNA, 19 nt, Human
agaggacaguggauuguuu

SEQ ID NO: 2884199 - RNA, 19 nt, Human
agaggaccuguauuuaagc

SEQ ID NO: 2884200 - RNA, 22 nt, Human
agaggaccuguauuuaagcaaa

SEQ ID NO: 2884201 - RNA, 23 nt, Human
agaggaccuguauuuaagcaaau

SEQ ID NO: 2884202 - RNA, 17 nt, Human
agaggacucgcuuguaa

SEQ ID NO: 2884203 - RNA, 18 nt, Human
agaggacucgcuuguaaa

SEQ ID NO: 2884204 - RNA, 19 nt, Human
agaggacucgcuuguaaau

SEQ ID NO: 2884205 - RNA, 23 nt, Human
agaggacucgcuuguaaauacca

SEQ ID NO: 2884206 - RNA, 16 nt, Human
agaggacaagggaaau

SEQ ID NO: 2884207 - RNA, 20 nt, Human
agaggaacuguccagagagc

SEQ ID NO: 2884208 - RNA, 21 nt, Human
agaggaacuguccagagagca

SEQ ID NO: 2884209 - RNA, 22 nt, Human
agaggaagaauuuguuaucagu

SEQ ID NO: 2884210 - RNA, 13 nt, Human
agaggaagagaca

SEQ ID NO: 2884211 - RNA, 16 nt, Human
agaggaagagacacuc

SEQ ID NO: 2884212 - RNA, 12 nt, Human
agaggaacuguc

SEQ ID NO: 2884213 - RNA, 13 nt, Human
agaggaacugggc

SEQ ID NO: 2884214 - RNA, 21 nt, Human
agaggaacagcacuggggagu

SEQ ID NO: 2884215 - RNA, 17 nt, Human
agaggaacuccuuggcc

SEQ ID NO: 2884216 - RNA, 19 nt, Human
agaggaacuccuuggccua

SEQ ID NO: 2884217 - RNA, 21 nt, Human
agaggaacuccuuggccuagc

SEQ ID NO: 2884218 - RNA, 15 nt, Human
agaggaacuguccag

SEQ ID NO: 2884219 - RNA, 17 nt, Human
agaggaacuguccagag

SEQ ID NO: 2884220 - RNA, 18 nt, Human
agaggaacuguccagaga

SEQ ID NO: 2884221 - RNA, 19 nt, Human
agaggaacuguccagagag

SEQ ID NO: 2884222 - RNA, 14 nt, Human
agaggaaaucugua

SEQ ID NO: 2884223 - RNA, 21 nt, Human
agaggaaaucuguaacaggua

SEQ ID NO: 2884224 - RNA, 22 nt, Human
agauggccucuuacuaauguaa

SEQ ID NO: 2884225 - RNA, 21 nt, Human
agauggcccggaugcugcuuc

SEQ ID NO: 2884226 - RNA, 21 nt, Human
agaugaaauaaagacccaggg

SEQ ID NO: 2884227 - RNA, 22 nt, Human
agaugaaagcagggaauuucua

SEQ ID NO: 2884228 - RNA, 23 nt, Human
agaugaaagcagggaauuucuau

SEQ ID NO: 2884229 - RNA, 14 nt, Human
agauggcacuuuga

SEQ ID NO: 2884230 - RNA, 20 nt, Human
agaugaaaucuuacagcugg

SEQ ID NO: 2884231 - RNA, 23 nt, Human
agaugaaaucuuacagcugggug

SEQ ID NO: 2884232 - RNA, 17 nt, Human
agaugaaacacaaacaa

SEQ ID NO: 2884233 - RNA, 14 nt, Human
agaugaaacacaaa

SEQ ID NO: 2884234 - RNA, 16 nt, Human
agauggcucagagggg

SEQ ID NO: 2884235 - RNA, 21 nt, Human
agauggcucagagggggacug

SEQ ID NO: 2884236 - RNA, 22 nt, Human
agauggcugacuuugcucuuuc

SEQ ID NO: 2884237 - RNA, 13 nt, Human
agaugggagcucc

SEQ ID NO: 2884238 - RNA, 14 nt, Human
agauggcugugccu

SEQ ID NO: 2884239 - RNA, 22 nt, Human
agaugggcauaugugucagugg

SEQ ID NO: 2884240 - RNA, 18 nt, Human
agaugggagcuccucucc

SEQ ID NO: 2884241 - RNA, 21 nt, Human
agauggcuggaagggguccag

SEQ ID NO: 2884242 - RNA, 23 nt, Human
agaugggagcuccucuccuggag

SEQ ID NO: 2884243 - RNA, 19 nt, Human
agaugggaggaaagagagc

SEQ ID NO: 2884244 - RNA, 20 nt, Human
agaugggaggaaagagagca

SEQ ID NO: 2884245 - RNA, 22 nt, Human
agaugggaggggaaaggggaga

SEQ ID NO: 2884246 - RNA, 16 nt, Human
agaucuuucuccuuga

SEQ ID NO: 2884247 - RNA, 15 nt, Human
agauauaucugaaaa

SEQ ID NO: 2884248 - RNA, 17 nt, Human
agauauaucugaaaacu

SEQ ID NO: 2884249 - RNA, 18 nt, Human
agauauaucugaaaacug

SEQ ID NO: 2884250 - RNA, 20 nt, Human
agauauaucugaaaacugga

SEQ ID NO: 2884251 - RNA, 21 nt, Human
agauauaucugaaaacuggaa

SEQ ID NO: 2884252 - RNA, 14 nt, Human
agauauaugccuuc

SEQ ID NO: 2884253 - RNA, 19 nt, Human
agaguucuauacuguaaag

SEQ ID NO: 2884254 - RNA, 20 nt, Human
agaguucuauacuguaaagc

SEQ ID NO: 2884255 - RNA, 20 nt, Human
agauauauuaagugacuguu

SEQ ID NO: 2884256 - RNA, 19 nt, Human
agaguuaguuucuuuggga

SEQ ID NO: 2884257 - RNA, 19 nt, Human
agaguuccccaugcagaca

SEQ ID NO: 2884258 - RNA, 14 nt, Human
agaguucaucccag

SEQ ID NO: 2884259 - RNA, 13 nt, Human
agaguuccagagg

SEQ ID NO: 2884260 - RNA, 22 nt, Human
aggauguacaaggacagccccu

SEQ ID NO: 2884261 - RNA, 14 nt, Human
aggauguagcuuuu

SEQ ID NO: 2884262 - RNA, 15 nt, Human
aggauguagcuuuuc

SEQ ID NO: 2884263 - RNA, 16 nt, Human
aggauguagcuuuuca

SEQ ID NO: 2884264 - RNA, 18 nt, Human
aggauguagcuuuucacc

SEQ ID NO: 2884265 - RNA, 19 nt, Human
aggauguagcuuuucaccu

SEQ ID NO: 2884266 - RNA, 16 nt, Human
aggauguucugggaca

SEQ ID NO: 2884267 - RNA, 15 nt, Human
aggauguucugggac

SEQ ID NO: 2884268 - RNA, 20 nt, Human
aggauguaucgggaagauuu

SEQ ID NO: 2884269 - RNA, 15 nt, Human
aggaugucacagggc

SEQ ID NO: 2884270 - RNA, 16 nt, Human
aggaugucacagggcc

SEQ ID NO: 2884271 - RNA, 17 nt, Human
aggaugucacagggcca

SEQ ID NO: 2884272 - RNA, 14 nt, Human
aggauuaaauaaug

SEQ ID NO: 2884273 - RNA, 16 nt, Human
aggauuacaugcaugu

SEQ ID NO: 2884274 - RNA, 20 nt, Human
aggauuaaauaauguaaaua

SEQ ID NO: 2884275 - RNA, 13 nt, Human
aggauuauugaua

SEQ ID NO: 2884276 - RNA, 18 nt, Human
aggauuauugauaguacu

SEQ ID NO: 2884277 - RNA, 17 nt, Human
aggagucccaaggaaag

SEQ ID NO: 2884278 - RNA, 16 nt, Human
aggagucccaaggaaa

SEQ ID NO: 2884279 - RNA, 14 nt, Human
aggaguggugcaga

SEQ ID NO: 2884280 - RNA, 18 nt, Human
aggaguggugcagacaga

SEQ ID NO: 2884281 - RNA, 21 nt, Human
aggagugggaaaacacugcca

SEQ ID NO: 2884282 - RNA, 20 nt, Human
aggagugggugacaagagcc

SEQ ID NO: 2884283 - RNA, 21 nt, Human
aggagugggugacaagagccu

SEQ ID NO: 2884284 - RNA, 23 nt, Human
aggagugggugacaagagccuga

SEQ ID NO: 2884285 - RNA, 20 nt, Human
aggagugugugacauuccag

SEQ ID NO: 2884286 - RNA, 17 nt, Human
aggaccguggcccugcc

SEQ ID NO: 2884287 - RNA, 19 nt, Human
aggaccguggcccugcccu

SEQ ID NO: 2884288 - RNA, 23 nt, Human
aggaccguggcccugcccucucc

SEQ ID NO: 2884289 - RNA, 17 nt, Human
aggagaagcugcaucca

SEQ ID NO: 2884290 - RNA, 14 nt, Human
aggagaagcugcau

SEQ ID NO: 2884291 - RNA, 20 nt, Human
aggagaauggcgugaacccg

SEQ ID NO: 2884292 - RNA, 12 nt, Human
aggagacacaga

SEQ ID NO: 2884293 - RNA, 13 nt, Human
aggagacacagau

SEQ ID NO: 2884294 - RNA, 14 nt, Human
aggagacacagaug

SEQ ID NO: 2884295 - RNA, 15 nt, Human
aggagacacagaugu

SEQ ID NO: 2884296 - RNA, 16 nt, Human
aggagacacagauguu

SEQ ID NO: 2884297 - RNA, 13 nt, Human
aggagacacaggg

SEQ ID NO: 2884298 - RNA, 20 nt, Human
aggagacacguguggcgggc

SEQ ID NO: 2884299 - RNA, 15 nt, Human
aggagaaugagccuc

SEQ ID NO: 2884300 - RNA, 14 nt, Human
aggagucccaagga

SEQ ID NO: 2884301 - RNA, 11 nt, Human
aggagacacaa

SEQ ID NO: 2884302 - RNA, 19 nt, Human
aggagacacaacaacuccu

SEQ ID NO: 2884303 - RNA, 17 nt, Human
aggaauccagacccggc

SEQ ID NO: 2884304 - RNA, 20 nt, Human
aggaauccagacccggcugc

SEQ ID NO: 2884305 - RNA, 22 nt, Human
agcuuuuuaauuguuguuucuu

SEQ ID NO: 2884306 - RNA, 23 nt, Human
aggaaucaugucaggccugugug

SEQ ID NO: 2884307 - RNA, 21 nt, Human
aggaauccacucccaggcagc

SEQ ID NO: 2884308 - RNA, 16 nt, Human
aggaauccacucccag

SEQ ID NO: 2884309 - RNA, 17 nt, Human
aggaauccacucccagg

SEQ ID NO: 2884310 - RNA, 14 nt, Human
agcuuuuuaauugu

SEQ ID NO: 2884311 - RNA, 15 nt, Human
agcuuuuuaauuguu

SEQ ID NO: 2884312 - RNA, 15 nt, Human
agcuuuuuaaaacau

SEQ ID NO: 2884313 - RNA, 17 nt, Human
agcuuuuuaaaacauua

SEQ ID NO: 2884314 - RNA, 19 nt, Human
agcuuuuuccagaggcuau

SEQ ID NO: 2884315 - RNA, 15 nt, Human
agcuuuuuccuccug

SEQ ID NO: 2884316 - RNA, 17 nt, Human
agcuuuuuccuccugga

SEQ ID NO: 2884317 - RNA, 17 nt, Human
agcuuuuuaauuguugu

SEQ ID NO: 2884318 - RNA, 21 nt, Human
agcuuuuuaauuguuguuucu

SEQ ID NO: 2884319 - RNA, 15 nt, Human
agcucccuaggagac

SEQ ID NO: 2884320 - RNA, 17 nt, Human
agcucccuaggagacca

SEQ ID NO: 2884321 - RNA, 11 nt, Human
agcucccugcc

SEQ ID NO: 2884322 - RNA, 12 nt, Human
agcucccugcca

SEQ ID NO: 2884323 - RNA, 13 nt, Human
agcucccugccaa

SEQ ID NO: 2884324 - RNA, 13 nt, Human
agcucccugcccc

SEQ ID NO: 2884325 - RNA, 14 nt, Human
agcucccugcccca

SEQ ID NO: 2884326 - RNA, 21 nt, Human
agcugcgguccacccaggagc

SEQ ID NO: 2884327 - RNA, 14 nt, Human
agcugagagacuuu

SEQ ID NO: 2884328 - RNA, 16 nt, Human
agcugagaacuccuga

SEQ ID NO: 2884329 - RNA, 17 nt, Human
agcugagaacuccugac

SEQ ID NO: 2884330 - RNA, 18 nt, Human
agcugagaacuccugacu

SEQ ID NO: 2884331 - RNA, 19 nt, Human
agcugagaacuccugacug

SEQ ID NO: 2884332 - RNA, 23 nt, Human
agcugagauuauaggcaccuacc

SEQ ID NO: 2884333 - RNA, 15 nt, Human
agcugagagacuuuu

SEQ ID NO: 2884334 - RNA, 20 nt, Human
agcugagaucgugccacugc

SEQ ID NO: 2884335 - RNA, 21 nt, Human
agcugagaucgugccacugca

SEQ ID NO: 2884336 - RNA, 22 nt, Human
agcugagaucgugccacugcac

SEQ ID NO: 2884337 - RNA, 21 nt, Human
agcugaacaauaggcuguucc

SEQ ID NO: 2884338 - RNA, 22 nt, Human
agcugaacaauaggcuguuccc

SEQ ID NO: 2884339 - RNA, 17 nt, Human
agcucuuuuugugaagu

SEQ ID NO: 2884340 - RNA, 18 nt, Human
agcucuuuuuuguuuguu

SEQ ID NO: 2884341 - RNA, 21 nt, Human
agcucuuuuuuguuuguuucu

SEQ ID NO: 2884342 - RNA, 22 nt, Human
agcucuuuuuuguuuguuucuu

SEQ ID NO: 2884343 - RNA, 23 nt, Human
agcucuuuuuuguuuguuucuuu

SEQ ID NO: 2884344 - RNA, 20 nt, Human
agcugaaaauauaaaacaaa

SEQ ID NO: 2884345 - RNA, 22 nt, Human
agcugaaaaccuaaguccuuua

SEQ ID NO: 2884346 - RNA, 13 nt, Human
agcuccuucuguc

SEQ ID NO: 2884347 - RNA, 12 nt, Human
agcuccuucugu

SEQ ID NO: 2884348 - RNA, 21 nt, Human
agcuccgcuuucuacccagcg

SEQ ID NO: 2884349 - RNA, 20 nt, Human
agcuccgcuuucuacccagc

SEQ ID NO: 2884350 - RNA, 23 nt, Human
agcuccgcuuucuacccagcgag

SEQ ID NO: 2884351 - RNA, 17 nt, Human
agcuccgccucccgggu

SEQ ID NO: 2884352 - RNA, 16 nt, Human
agcuccgccucugucc

SEQ ID NO: 2884353 - RNA, 23 nt, Human
agcugcgguccacccaggagccc

SEQ ID NO: 2884354 - RNA, 19 nt, Human
agcugcuauuuauuuuccu

SEQ ID NO: 2884355 - RNA, 21 nt, Human
agcugcuauuuauuuuccuaa

SEQ ID NO: 2884356 - RNA, 20 nt, Human
agcugcuauuuauuuuccua

SEQ ID NO: 2884357 - RNA, 21 nt, Human
agcugcucagggaaaagcagc

SEQ ID NO: 2884358 - RNA, 15 nt, Human
agcugcuccaggccu

SEQ ID NO: 2884359 - RNA, 16 nt, Human
agcugcuccaggccug

SEQ ID NO: 2884360 - RNA, 17 nt, Human
agcugcuccaggccugc

SEQ ID NO: 2884361 - RNA, 18 nt, Human
agcugcuccaggccugca

SEQ ID NO: 2884362 - RNA, 19 nt, Human
agcugcuccaggccugcag

SEQ ID NO: 2884363 - RNA, 16 nt, Human
agcugcucagggaaaa

SEQ ID NO: 2884364 - RNA, 14 nt, Human
agcucccucccgca

SEQ ID NO: 2884365 - RNA, 18 nt, Human
agcuucugggguccccag

SEQ ID NO: 2884366 - RNA, 19 nt, Human
agcuucugggguccccagg

SEQ ID NO: 2884367 - RNA, 21 nt, Human
agcuucugggguccccagggc

SEQ ID NO: 2884368 - RNA, 22 nt, Human
agcuucugggguccccagggcu

SEQ ID NO: 2884369 - RNA, 21 nt, Human
agcuucuggaauuuguucaag

SEQ ID NO: 2884370 - RNA, 19 nt, Human
agcuucuguugcugccuca

SEQ ID NO: 2884371 - RNA, 22 nt, Human
agcuuccuacccacaccucugc

SEQ ID NO: 2884372 - RNA, 15 nt, Human
agcuuccugucaaca

SEQ ID NO: 2884373 - RNA, 20 nt, Human
agcuuccuguccccaucugu

SEQ ID NO: 2884374 - RNA, 21 nt, Human
agcuuccuguccccaucuguc

SEQ ID NO: 2884375 - RNA, 22 nt, Human
agcuuccuuaaguauaucaugu

SEQ ID NO: 2884376 - RNA, 15 nt, Human
agcuuccagcucuaa

SEQ ID NO: 2884377 - RNA, 16 nt, Human
agcuuccgagaauagc

SEQ ID NO: 2884378 - RNA, 22 nt, Human
agcuuccaugauucuauuuaua

SEQ ID NO: 2884379 - RNA, 12 nt, Human
aggucuguuuaa

SEQ ID NO: 2884380 - RNA, 20 nt, Human
aggucuguuuaaaguggcaa

SEQ ID NO: 2884381 - RNA, 22 nt, Human
aggucugagcacuggaguggcu

SEQ ID NO: 2884382 - RNA, 18 nt, Human
aggucugagccacagcag

SEQ ID NO: 2884383 - RNA, 23 nt, Human
aggucugagccacagcagcauuu

SEQ ID NO: 2884384 - RNA, 21 nt, Human
aggucucuguugacuggcugu

SEQ ID NO: 2884385 - RNA, 16 nt, Human
aggucucuucucccag

SEQ ID NO: 2884386 - RNA, 17 nt, Human
aggucucuucucccaga

SEQ ID NO: 2884387 - RNA, 18 nt, Human
aggucucuucucccagaa

SEQ ID NO: 2884388 - RNA, 19 nt, Human
aggucucuucucccagaau

SEQ ID NO: 2884389 - RNA, 22 nt, Human
aggucucuucucccagaauccc

SEQ ID NO: 2884390 - RNA, 23 nt, Human
aggucucuucucccagaauccca

SEQ ID NO: 2884391 - RNA, 12 nt, Human
agguacacucuu

SEQ ID NO: 2884392 - RNA, 16 nt, Human
agguacacagcucuag

SEQ ID NO: 2884393 - RNA, 21 nt, Human
aggucucggacuaagccuacc

SEQ ID NO: 2884394 - RNA, 13 nt, Human
agguaaaacaaaa

SEQ ID NO: 2884395 - RNA, 14 nt, Human
agguaaaacaaaac

SEQ ID NO: 2884396 - RNA, 22 nt, Human
agguaaaacaaaacaaaacaac

SEQ ID NO: 2884397 - RNA, 14 nt, Human
agguaaaauguauu

SEQ ID NO: 2884398 - RNA, 15 nt, Human
agguaaaauguauuu

SEQ ID NO: 2884399 - RNA, 16 nt, Human
agguaaaauguauuuu

SEQ ID NO: 2884400 - RNA, 17 nt, Human
agguaaaauguauuuuu

SEQ ID NO: 2884401 - RNA, 19 nt, Human
agguaaaauguauuuuucu

SEQ ID NO: 2884402 - RNA, 13 nt, Human
aggguuuuuaccu

SEQ ID NO: 2884403 - RNA, 22 nt, Human
aggguuuuuaccugucacauug

SEQ ID NO: 2884404 - RNA, 12 nt, Human
agguaaagauau

SEQ ID NO: 2884405 - RNA, 21 nt, Human
agguaaucgaccugccucggc

SEQ ID NO: 2884406 - RNA, 18 nt, Human
agguaacagaacagcuuc

SEQ ID NO: 2884407 - RNA, 19 nt, Human
agguaacagaacagcuuca

SEQ ID NO: 2884408 - RNA, 21 nt, Human
agguaacagaacagcuucagg

SEQ ID NO: 2884409 - RNA, 19 nt, Human
agguaaucgaccugccucg

SEQ ID NO: 2884410 - RNA, 13 nt, Human
agguaacagaaca

SEQ ID NO: 2884411 - RNA, 14 nt, Human
agguaacagaacag

SEQ ID NO: 2884412 - RNA, 15 nt, Human
agguaacagaacagc

SEQ ID NO: 2884413 - RNA, 17 nt, Human
agguaacagaacagcuu

SEQ ID NO: 2884414 - RNA, 14 nt, Human
agguaauggcauga

SEQ ID NO: 2884415 - RNA, 17 nt, Human
agguacaaccuguucug

SEQ ID NO: 2884416 - RNA, 14 nt, Human
agguaauuuuuacc

SEQ ID NO: 2884417 - RNA, 21 nt, Human
agguaauuuuuacccuaaugu

SEQ ID NO: 2884418 - RNA, 23 nt, Human
agguaauuuuuacccuaaugucu

SEQ ID NO: 2884419 - RNA, 17 nt, Human
agguaauuuuuuucacc

SEQ ID NO: 2884420 - RNA, 17 nt, Human
aggugcuauuguuacuc

SEQ ID NO: 2884421 - RNA, 16 nt, Human
agguggaaggcagaca

SEQ ID NO: 2884422 - RNA, 17 nt, Human
agguggaaggcagacag

SEQ ID NO: 2884423 - RNA, 18 nt, Human
agguggaaggcagacagc

SEQ ID NO: 2884424 - RNA, 13 nt, Human
agguguuuucugu

SEQ ID NO: 2884425 - RNA, 15 nt, Human
agguguuuucugugu

SEQ ID NO: 2884426 - RNA, 16 nt, Human
agguguuuucugugua

SEQ ID NO: 2884427 - RNA, 17 nt, Human
agguguuuucuguguaa

SEQ ID NO: 2884428 - RNA, 18 nt, Human
agguguuuucuguguaac

SEQ ID NO: 2884429 - RNA, 19 nt, Human
agguguuuucuguguaacc

SEQ ID NO: 2884430 - RNA, 14 nt, Human
agguguuuauacag

SEQ ID NO: 2884431 - RNA, 12 nt, Human
agguguuuauac

SEQ ID NO: 2884432 - RNA, 20 nt, Human
agguggaggcugcagugagc

SEQ ID NO: 2884433 - RNA, 15 nt, Human
agguggagguugcau

SEQ ID NO: 2884434 - RNA, 14 nt, Human
agguggacacacaa

SEQ ID NO: 2884435 - RNA, 14 nt, Human
agguggaccuuuua

SEQ ID NO: 2884436 - RNA, 15 nt, Human
agguggaccuuuuaa

SEQ ID NO: 2884437 - RNA, 16 nt, Human
agguggaccuuuuaaa

SEQ ID NO: 2884438 - RNA, 18 nt, Human
agguggaccuuuuaaagu

SEQ ID NO: 2884439 - RNA, 22 nt, Human
agguggaccuuuuaaaguguuu

SEQ ID NO: 2884440 - RNA, 23 nt, Human
agguggaccuuuuaaaguguuuc

SEQ ID NO: 2884441 - RNA, 22 nt, Human
agguuaaaaaaaggcauuguuu

SEQ ID NO: 2884442 - RNA, 15 nt, Human
agguuaaaaaaaugg

SEQ ID NO: 2884443 - RNA, 21 nt, Human
agguuaaaaaaauggcaguga

SEQ ID NO: 2884444 - RNA, 23 nt, Human
agguuaaaaaaauggcagugaug

SEQ ID NO: 2884445 - RNA, 19 nt, Human
agguguuuuuuaugaagug

SEQ ID NO: 2884446 - RNA, 22 nt, Human
agguguuuuuuaugaagugcgu

SEQ ID NO: 2884447 - RNA, 23 nt, Human
agguguuuuuuaugaagugcgug

SEQ ID NO: 2884448 - RNA, 12 nt, Human
agguuaaaaaaa

SEQ ID NO: 2884449 - RNA, 17 nt, Human
agguuaucugucccagg

SEQ ID NO: 2884450 - RNA, 14 nt, Human
agguuaucgaaaua

SEQ ID NO: 2884451 - RNA, 16 nt, Human
agguuaucugucccag

SEQ ID NO: 2884452 - RNA, 17 nt, Human
agguuaucgaaauaaca

SEQ ID NO: 2884453 - RNA, 18 nt, Human
agguuaucgaaauaacaa

SEQ ID NO: 2884454 - RNA, 19 nt, Human
agguuaucgaaauaacaau

SEQ ID NO: 2884455 - RNA, 20 nt, Human
agguuaucgaaauaacaaug

SEQ ID NO: 2884456 - RNA, 17 nt, Human
agguuacccuguaacau

SEQ ID NO: 2884457 - RNA, 21 nt, Human
agguuacccuguaacaugcaa

SEQ ID NO: 2884458 - RNA, 21 nt, Human
agguuaggaguucgagaccag

SEQ ID NO: 2884459 - RNA, 16 nt, Human
agggucauguuugcag

SEQ ID NO: 2884460 - RNA, 20 nt, Human
agggucagaggaccuguauu

SEQ ID NO: 2884461 - RNA, 21 nt, Human
agggucagaggaccuguauuu

SEQ ID NO: 2884462 - RNA, 21 nt, Human
aggguaucaggugcugccauc

SEQ ID NO: 2884463 - RNA, 18 nt, Human
aggguaucaggugcugcc

SEQ ID NO: 2884464 - RNA, 19 nt, Human
aggguaucaggugcugcca

SEQ ID NO: 2884465 - RNA, 18 nt, Human
aggguccccaccugggac

SEQ ID NO: 2884466 - RNA, 15 nt, Human
aggguccccaccugg

SEQ ID NO: 2884467 - RNA, 23 nt, Human
aggguccacaggaagugaagaau

SEQ ID NO: 2884468 - RNA, 20 nt, Human
aggguccauuuuucuuccag

SEQ ID NO: 2884469 - RNA, 12 nt, Human
agggucccuggg

SEQ ID NO: 2884470 - RNA, 17 nt, Human
aggguccuggcuccuga

SEQ ID NO: 2884471 - RNA, 20 nt, Human
aggguccuggcuccugaggg

SEQ ID NO: 2884472 - RNA, 19 nt, Human
aggguccuggcuccugagg

SEQ ID NO: 2884473 - RNA, 15 nt, Human
aggguccuggggaac

SEQ ID NO: 2884474 - RNA, 12 nt, Human
aggguccugggg

SEQ ID NO: 2884475 - RNA, 21 nt, Human
aggguccuggcuccugagggg

SEQ ID NO: 2884476 - RNA, 23 nt, Human
aggguccuggggaaccugacccc

SEQ ID NO: 2884477 - RNA, 21 nt, Human
aggguccuggggaaccugacc

SEQ ID NO: 2884478 - RNA, 18 nt, Human
aggcuacuagaauucugu

SEQ ID NO: 2884479 - RNA, 22 nt, Human
aggcuacuagaauucuguauug

SEQ ID NO: 2884480 - RNA, 21 nt, Human
aggcgugagccaccgugccug

SEQ ID NO: 2884481 - RNA, 15 nt, Human
aggcguugcuuucac

SEQ ID NO: 2884482 - RNA, 17 nt, Human
aggcguugcuuucacuc

SEQ ID NO: 2884483 - RNA, 15 nt, Human
aggcguggagcugcc

SEQ ID NO: 2884484 - RNA, 16 nt, Human
aggcguggagcugccu

SEQ ID NO: 2884485 - RNA, 17 nt, Human
aggcguggagcugccug

SEQ ID NO: 2884486 - RNA, 18 nt, Human
aggcguggagcugccuga

SEQ ID NO: 2884487 - RNA, 13 nt, Human
aggcccuuccucu

SEQ ID NO: 2884488 - RNA, 15 nt, Human
aggcccuuccucucc

SEQ ID NO: 2884489 - RNA, 17 nt, Human
aggcccuuccucuccac

SEQ ID NO: 2884490 - RNA, 18 nt, Human
aggcccuuccucuccacu

SEQ ID NO: 2884491 - RNA, 22 nt, Human
aggcccuuauuuucaagaaacu

SEQ ID NO: 2884492 - RNA, 20 nt, Human
aggcccuuauuuucaagaaa

SEQ ID NO: 2884493 - RNA, 16 nt, Human
aggcccuuauuuucaa

SEQ ID NO: 2884494 - RNA, 21 nt, Human
aggcccuuugaagccucagcu

SEQ ID NO: 2884495 - RNA, 24 nt, Human
aggcccuuugaagccucagcuacc

SEQ ID NO: 2884496 - RNA, 19 nt, Human
aggccgauuugggaaccaa

SEQ ID NO: 2884497 - RNA, 20 nt, Human
aggccgcagcuccauuuucu

SEQ ID NO: 2884498 - RNA, 12 nt, Human
aggcugguggga

SEQ ID NO: 2884499 - RNA, 14 nt, Human
aggcuggugggagg

SEQ ID NO: 2884500 - RNA, 17 nt, Human
aggcuggugggaggggc

SEQ ID NO: 2884501 - RNA, 18 nt, Human
aggcuguaucccaugagc

SEQ ID NO: 2884502 - RNA, 13 nt, Human
aggcuguauccca

SEQ ID NO: 2884503 - RNA, 18 nt, Human
aggcuggugggaggggcg

SEQ ID NO: 2884504 - RNA, 15 nt, Human
agggaccucucccag

SEQ ID NO: 2884505 - RNA, 13 nt, Human
agggaccucuccc

SEQ ID NO: 2884506 - RNA, 16 nt, Human
agggaccucucccagg

SEQ ID NO: 2884507 - RNA, 17 nt, Human
agggacgaagaagagcc

SEQ ID NO: 2884508 - RNA, 21 nt, Human
agggacgaagaagagccacag

SEQ ID NO: 2884509 - RNA, 22 nt, Human
agggacgaagaagagccacagu

SEQ ID NO: 2884510 - RNA, 23 nt, Human
auaguauuugagaguucuaaauu

SEQ ID NO: 2884511 - RNA, 16 nt, Human
auaguauuuuuaucca

SEQ ID NO: 2884512 - RNA, 12 nt, Human
auaguauuugau

SEQ ID NO: 2884513 - RNA, 20 nt, Human
auaguauuugauucaaaaua

SEQ ID NO: 2884514 - RNA, 21 nt, Human
auaguauuugauucaaaauau

SEQ ID NO: 2884515 - RNA, 22 nt, Human
auaguauuugauucaaaauauu

SEQ ID NO: 2884516 - RNA, 22 nt, Human
auauacucuagaugaaguuuua

SEQ ID NO: 2884517 - RNA, 14 nt, Human
auagucaaagagag

SEQ ID NO: 2884518 - RNA, 20 nt, Human
auagucaaagagaguuuuua

SEQ ID NO: 2884519 - RNA, 22 nt, Human
auauacuugugguuuucaaauu

SEQ ID NO: 2884520 - RNA, 14 nt, Human
auauacuuugugga

SEQ ID NO: 2884521 - RNA, 21 nt, Human
auauacuuuguggaccaauua

SEQ ID NO: 2884522 - RNA, 15 nt, Human
auauacuuaaaugga

SEQ ID NO: 2884523 - RNA, 13 nt, Human
auauacugugugc

SEQ ID NO: 2884524 - RNA, 18 nt, Human
auauacuguucuucauuu

SEQ ID NO: 2884525 - RNA, 13 nt, Human
auauagagauguu

SEQ ID NO: 2884526 - RNA, 14 nt, Human
auauagagauguuu

SEQ ID NO: 2884527 - RNA, 20 nt, Human
auauagacaguccuuaaaaa

SEQ ID NO: 2884528 - RNA, 15 nt, Human
auauagaacagugcu

SEQ ID NO: 2884529 - RNA, 15 nt, Human
auauagaaugcugca

SEQ ID NO: 2884530 - RNA, 17 nt, Human
auauagaauuagcuuuu

SEQ ID NO: 2884531 - RNA, 11 nt, Human
auauacuuuuu

SEQ ID NO: 2884532 - RNA, 20 nt, Human
auauacuuuuuuuucuuuaa

SEQ ID NO: 2884533 - RNA, 14 nt, Human
auauagaaauauau

SEQ ID NO: 2884534 - RNA, 22 nt, Human
auauagagauguuuuuaaaagu

SEQ ID NO: 2884535 - RNA, 15 nt, Human
auauagagauguuuu

SEQ ID NO: 2884536 - RNA, 16 nt, Human
auauagagauguuuuu

SEQ ID NO: 2884537 - RNA, 23 nt, Human
auauagaucaguuauaaguagca

SEQ ID NO: 2884538 - RNA, 13 nt, Human
auauagauuagaa

SEQ ID NO: 2884539 - RNA, 14 nt, Human
auauagauuagaaa

SEQ ID NO: 2884540 - RNA, 15 nt, Human
auauagauuagaaaa

SEQ ID NO: 2884541 - RNA, 16 nt, Human
auauagauuagaaaaa

SEQ ID NO: 2884542 - RNA, 17 nt, Human
auauagauuagaaaaau

SEQ ID NO: 2884543 - RNA, 20 nt, Human
auagguugccaauaauacac

SEQ ID NO: 2884544 - RNA, 21 nt, Human
auaguauuugagaguucuaaa

SEQ ID NO: 2884545 - RNA, 20 nt, Human
auaguauuugagaguucuaa

SEQ ID NO: 2884546 - RNA, 18 nt, Human
auaguaugguggcugggu

SEQ ID NO: 2884547 - RNA, 17 nt, Human
auaguaugguggcuggg

SEQ ID NO: 2884548 - RNA, 13 nt, Human
auaggucucuucu

SEQ ID NO: 2884549 - RNA, 14 nt, Human
auaggucucuucuc

SEQ ID NO: 2884550 - RNA, 15 nt, Human
auaggucucuucucc

SEQ ID NO: 2884551 - RNA, 17 nt, Human
auaggucucuucuccca

SEQ ID NO: 2884552 - RNA, 18 nt, Human
auaggucucuucucccag

SEQ ID NO: 2884553 - RNA, 19 nt, Human
auaggucucuucucccaga

SEQ ID NO: 2884554 - RNA, 20 nt, Human
auaggucucuucucccagaa

SEQ ID NO: 2884555 - RNA, 17 nt, Human
auagcccaucccugccu

SEQ ID NO: 2884556 - RNA, 18 nt, Human
auagcccaucccugccug

SEQ ID NO: 2884557 - RNA, 19 nt, Human
auagguagggagauauuua

SEQ ID NO: 2884558 - RNA, 21 nt, Human
auagguauaaguggugugugu

SEQ ID NO: 2884559 - RNA, 13 nt, Human
auagguggccucu

SEQ ID NO: 2884560 - RNA, 18 nt, Human
auaggugagaaaaaaaca

SEQ ID NO: 2884561 - RNA, 19 nt, Human
auaggugauguuugcucuu

SEQ ID NO: 2884562 - RNA, 17 nt, Human
auagcauccaaguggca

SEQ ID NO: 2884563 - RNA, 14 nt, Human
auagcaucuguaca

SEQ ID NO: 2884564 - RNA, 19 nt, Human
auagcaucuguacaaaggg

SEQ ID NO: 2884565 - RNA, 23 nt, Human
auagcaucucaggagauuucaug

SEQ ID NO: 2884566 - RNA, 22 nt, Human
auagccacauuuggaauacuuu

SEQ ID NO: 2884567 - RNA, 21 nt, Human
auagccacauuuggaauacuu

SEQ ID NO: 2884568 - RNA, 16 nt, Human
auagccacauuuggaa

SEQ ID NO: 2884569 - RNA, 13 nt, Human
auagccacauuug

SEQ ID NO: 2884570 - RNA, 16 nt, Human
auagccaccccagaaa

SEQ ID NO: 2884571 - RNA, 23 nt, Human
auagccacauuuggaauacuuuu

SEQ ID NO: 2884572 - RNA, 16 nt, Human
auagcccaucccugcc

SEQ ID NO: 2884573 - RNA, 21 nt, Human
auagccauugaucauaaacug

SEQ ID NO: 2884574 - RNA, 21 nt, Human
auauuacuccuauuuuuguaa

SEQ ID NO: 2884575 - RNA, 22 nt, Human
auauuacuccuauuuuuguaaa

SEQ ID NO: 2884576 - RNA, 21 nt, Human
auauuacuacuuaccauuugc

SEQ ID NO: 2884577 - RNA, 15 nt, Human
auauuaccagcaaga

SEQ ID NO: 2884578 - RNA, 17 nt, Human
auauuaccuaaugaaag

SEQ ID NO: 2884579 - RNA, 21 nt, Human
auauuaccuaaugaaagugau

SEQ ID NO: 2884580 - RNA, 12 nt, Human
auauuacuuuau

SEQ ID NO: 2884581 - RNA, 13 nt, Human
auauuacuuuauc

SEQ ID NO: 2884582 - RNA, 14 nt, Human
auauuacuuuauca

SEQ ID NO: 2884583 - RNA, 16 nt, Human
auauuacuuuaucacu

SEQ ID NO: 2884584 - RNA, 17 nt, Human
auauuacuuuaucacuu

SEQ ID NO: 2884585 - RNA, 18 nt, Human
auauuacuuuaucacuuu

SEQ ID NO: 2884586 - RNA, 19 nt, Human
auauuacuuuaucacuuuu

SEQ ID NO: 2884587 - RNA, 18 nt, Human
auauuacuguuuauuucu

SEQ ID NO: 2884588 - RNA, 20 nt, Human
auauuacuguuuauuucugu

SEQ ID NO: 2884589 - RNA, 21 nt, Human
auauuacuguuuauuucuguu

SEQ ID NO: 2884590 - RNA, 11 nt, Human
auauuacuuua

SEQ ID NO: 2884591 - RNA, 21 nt, Human
auaucauuuauuuuuuacauu

SEQ ID NO: 2884592 - RNA, 23 nt, Human
auaucauuuauuuuuuacauuau

SEQ ID NO: 2884593 - RNA, 13 nt, Human
auauuauguguuu

SEQ ID NO: 2884594 - RNA, 13 nt, Human
auauuauuagaaa

SEQ ID NO: 2884595 - RNA, 19 nt, Human
auauuauuagaaauuagaa

SEQ ID NO: 2884596 - RNA, 23 nt, Human
auauuuacuaagccacaagaaau

SEQ ID NO: 2884597 - RNA, 23 nt, Human
auauuauuugcuaauuaaaaagu

SEQ ID NO: 2884598 - RNA, 12 nt, Human
auauuauuuggc

SEQ ID NO: 2884599 - RNA, 13 nt, Human
auauuauuuggca

SEQ ID NO: 2884600 - RNA, 14 nt, Human
auauuauuuggcag

SEQ ID NO: 2884601 - RNA, 16 nt, Human
auauuauuuggcaguu

SEQ ID NO: 2884602 - RNA, 18 nt, Human
auauuauuuggcaguuug

SEQ ID NO: 2884603 - RNA, 19 nt, Human
auauuauuuggcaguuugg

SEQ ID NO: 2884604 - RNA, 21 nt, Human
auauuauuuggcaguuuggua

SEQ ID NO: 2884605 - RNA, 12 nt, Human
auaucaaaugca

SEQ ID NO: 2884606 - RNA, 13 nt, Human
auaucaaaugcag

SEQ ID NO: 2884607 - RNA, 21 nt, Human
auaucaaaugcaguauauuuc

SEQ ID NO: 2884608 - RNA, 13 nt, Human
auaucaaaguauu

SEQ ID NO: 2884609 - RNA, 14 nt, Human
auaucaaaguauuu

SEQ ID NO: 2884610 - RNA, 21 nt, Human
auaucaacagauaguuguguu

SEQ ID NO: 2884611 - RNA, 15 nt, Human
auaucaagaugauuc

SEQ ID NO: 2884612 - RNA, 16 nt, Human
auaucaagaugauucu

SEQ ID NO: 2884613 - RNA, 21 nt, Human
auaucaaucaagccauguaua

SEQ ID NO: 2884614 - RNA, 20 nt, Human
auaucaugcuuuaaagugua

SEQ ID NO: 2884615 - RNA, 22 nt, Human
auaucaugcuuuaaaguguaau

SEQ ID NO: 2884616 - RNA, 13 nt, Human
auaucauguaaag

SEQ ID NO: 2884617 - RNA, 18 nt, Human
auaucauguaaagaaaug

SEQ ID NO: 2884618 - RNA, 19 nt, Human
auaucauguaaagaaaugu

SEQ ID NO: 2884619 - RNA, 21 nt, Human
auaucauguaaagaaaugucu

SEQ ID NO: 2884620 - RNA, 22 nt, Human
auaucauguaaagaaaugucuu

SEQ ID NO: 2884621 - RNA, 12 nt, Human
auaacagugcag

SEQ ID NO: 2884622 - RNA, 18 nt, Human
auaacagugcagggcaaa

SEQ ID NO: 2884623 - RNA, 12 nt, Human
auaacaagaaaa

SEQ ID NO: 2884624 - RNA, 13 nt, Human
auaacaagaaaau

SEQ ID NO: 2884625 - RNA, 13 nt, Human
auaacaaaaugga

SEQ ID NO: 2884626 - RNA, 14 nt, Human
auaacaaaauggac

SEQ ID NO: 2884627 - RNA, 14 nt, Human
auaacaaagauauc

SEQ ID NO: 2884628 - RNA, 15 nt, Human
auaacaaagauaucu

SEQ ID NO: 2884629 - RNA, 17 nt, Human
auaacaaagauaucuuu

SEQ ID NO: 2884630 - RNA, 19 nt, Human
auaacaaagauaucuuuuc

SEQ ID NO: 2884631 - RNA, 20 nt, Human
auaacaaagauaucuuuucu

SEQ ID NO: 2884632 - RNA, 23 nt, Human
auaacaaagauaucuuuucuuua

SEQ ID NO: 2884633 - RNA, 14 nt, Human
auaacaacuucaua

SEQ ID NO: 2884634 - RNA, 13 nt, Human
auaacaaauucug

SEQ ID NO: 2884635 - RNA, 14 nt, Human
auaacaugaaauga

SEQ ID NO: 2884636 - RNA, 16 nt, Human
auaacaugaaaugaua

SEQ ID NO: 2884637 - RNA, 23 nt, Human
auaacaugaaaugauagauuuga

SEQ ID NO: 2884638 - RNA, 14 nt, Human
auaaagacaaccau

SEQ ID NO: 2884639 - RNA, 19 nt, Human
auaaagacaaccauauuua

SEQ ID NO: 2884640 - RNA, 22 nt, Human
auaaagacaaccauauuuagca

SEQ ID NO: 2884641 - RNA, 12 nt, Human
auaaagaauaua

SEQ ID NO: 2884642 - RNA, 15 nt, Human
auaaagaauauauau

SEQ ID NO: 2884643 - RNA, 12 nt, Human
auaaagacaccu

SEQ ID NO: 2884644 - RNA, 17 nt, Human
auaaagaaauugcaaua

SEQ ID NO: 2884645 - RNA, 21 nt, Human
auaaagcugccccaucugggg

SEQ ID NO: 2884646 - RNA, 17 nt, Human
auaaagcgauauacaga

SEQ ID NO: 2884647 - RNA, 19 nt, Human
auaaagcgauauacagaug

SEQ ID NO: 2884648 - RNA, 21 nt, Human
auaaagcgauauacagaugaa

SEQ ID NO: 2884649 - RNA, 22 nt, Human
auaaagcgauauacagaugaaa

SEQ ID NO: 2884650 - RNA, 13 nt, Human
auaaaggauguga

SEQ ID NO: 2884651 - RNA, 14 nt, Human
auaaaggacuguaa

SEQ ID NO: 2884652 - RNA, 22 nt, Human
auaaaggaugugauuguggaau

SEQ ID NO: 2884653 - RNA, 21 nt, Human
auaaaggaugugauuguggaa

SEQ ID NO: 2884654 - RNA, 17 nt, Human
auaaaggaugugauugu

SEQ ID NO: 2884655 - RNA, 14 nt, Human
auaaaggaugugau

SEQ ID NO: 2884656 - RNA, 14 nt, Human
auaaagcauaagua

SEQ ID NO: 2884657 - RNA, 20 nt, Human
auaaagcauaaguauacagu

SEQ ID NO: 2884658 - RNA, 21 nt, Human
auaaagcauaaguauacaguu

SEQ ID NO: 2884659 - RNA, 14 nt, Human
auaaagcacagcug

SEQ ID NO: 2884660 - RNA, 14 nt, Human
auaaagccugcuuu

SEQ ID NO: 2884661 - RNA, 20 nt, Human
auaaagccuguuuugucuuu

SEQ ID NO: 2884662 - RNA, 18 nt, Human
auaaagccucaagguuuu

SEQ ID NO: 2884663 - RNA, 21 nt, Human
auaaagccucaagguuuuagg

SEQ ID NO: 2884664 - RNA, 22 nt, Human
auaaagccucaagguuuuaggu

SEQ ID NO: 2884665 - RNA, 14 nt, Human
auaaaaauauugug

SEQ ID NO: 2884666 - RNA, 23 nt, Human
auaaaaauauauauagugcuaua

SEQ ID NO: 2884667 - RNA, 15 nt, Human
auaaaaauaaauaga

SEQ ID NO: 2884668 - RNA, 17 nt, Human
auaaaaagugacacagc

SEQ ID NO: 2884669 - RNA, 19 nt, Human
auaaaaagugacacagcag

SEQ ID NO: 2884670 - RNA, 20 nt, Human
auaaaaagugacacagcagc

SEQ ID NO: 2884671 - RNA, 20 nt, Human
auaaaaaguggaauuucuug

SEQ ID NO: 2884672 - RNA, 19 nt, Human
auaaagaaaacuuccauag

SEQ ID NO: 2884673 - RNA, 15 nt, Human
auaaacuuuuuuuca

SEQ ID NO: 2884674 - RNA, 16 nt, Human
auaaacuuuuuuucaa

SEQ ID NO: 2884675 - RNA, 17 nt, Human
auaaacuuuuuuucaau

SEQ ID NO: 2884676 - RNA, 18 nt, Human
auaaacuuuuuuucaaug

SEQ ID NO: 2884677 - RNA, 19 nt, Human
auaaacuuuuuuucaaugu

SEQ ID NO: 2884678 - RNA, 20 nt, Human
auaaacuuuuuuucaaugug

SEQ ID NO: 2884679 - RNA, 16 nt, Human
auaaaaauauguacaa

SEQ ID NO: 2884680 - RNA, 15 nt, Human
auaaaagaaaaaaua

SEQ ID NO: 2884681 - RNA, 22 nt, Human
auaccauucagaucacugaauu

SEQ ID NO: 2884682 - RNA, 15 nt, Human
auaccauugacacau

SEQ ID NO: 2884683 - RNA, 18 nt, Human
auaaugggcuuagagcag

SEQ ID NO: 2884684 - RNA, 14 nt, Human
auaauguaauugua

SEQ ID NO: 2884685 - RNA, 15 nt, Human
auaauguaauuguaa

SEQ ID NO: 2884686 - RNA, 17 nt, Human
auaauguaauuguaauu

SEQ ID NO: 2884687 - RNA, 20 nt, Human
auaauuaaauuuugaguucu

SEQ ID NO: 2884688 - RNA, 12 nt, Human
auaaggaagaaa

SEQ ID NO: 2884689 - RNA, 13 nt, Human
auaaggaagaaac

SEQ ID NO: 2884690 - RNA, 14 nt, Human
auaaggaagaaaca

SEQ ID NO: 2884691 - RNA, 19 nt, Human
auaaggacaugaugcuuuu

SEQ ID NO: 2884692 - RNA, 13 nt, Human
auaaggcaggcau

SEQ ID NO: 2884693 - RNA, 19 nt, Human
auaaggccauaaaacaggu

SEQ ID NO: 2884694 - RNA, 17 nt, Human
auaaugggccacugaaa

SEQ ID NO: 2884695 - RNA, 21 nt, Human
auaaugggccacugaaaucug

SEQ ID NO: 2884696 - RNA, 22 nt, Human
auaaugggccacugaaaucugu

SEQ ID NO: 2884697 - RNA, 23 nt, Human
auaaugggccacugaaaucuguc

SEQ ID NO: 2884698 - RNA, 15 nt, Human
auaaugcuuaauuuc

SEQ ID NO: 2884699 - RNA, 17 nt, Human
auaaugcuuaauuucua

SEQ ID NO: 2884700 - RNA, 18 nt, Human
auaaugcuuaauuucuaa

SEQ ID NO: 2884701 - RNA, 14 nt, Human
auaaugcuucagau

SEQ ID NO: 2884702 - RNA, 15 nt, Human
auaaugcuucagaua

SEQ ID NO: 2884703 - RNA, 13 nt, Human
auaauggaaaaaa

SEQ ID NO: 2884704 - RNA, 14 nt, Human
auaauggaaaaaaa

SEQ ID NO: 2884705 - RNA, 21 nt, Human
auaauggaaaaaaaaaaaaga

SEQ ID NO: 2884706 - RNA, 22 nt, Human
auaauggaaaaaaaaaaaagag

SEQ ID NO: 2884707 - RNA, 23 nt, Human
auaauggaaaaaaaaaaaagagg

SEQ ID NO: 2884708 - RNA, 15 nt, Human
auaaugcuacugucu

SEQ ID NO: 2884709 - RNA, 17 nt, Human
auaaugcuaauuuaaag

SEQ ID NO: 2884710 - RNA, 21 nt, Human
auaaugcuaauuuaaagagac

SEQ ID NO: 2884711 - RNA, 16 nt, Human
auaauggaagagaaau

SEQ ID NO: 2884712 - RNA, 17 nt, Human
auaauggaagagaaauc

SEQ ID NO: 2884713 - RNA, 18 nt, Human
auaauggaagagaaaucu

SEQ ID NO: 2884714 - RNA, 20 nt, Human
auaauggaagagaaaucuca

SEQ ID NO: 2884715 - RNA, 21 nt, Human
auaauggaagagaaaucucau

SEQ ID NO: 2884716 - RNA, 13 nt, Human
auaccuauaaugu

SEQ ID NO: 2884717 - RNA, 14 nt, Human
auaccuauaaugug

SEQ ID NO: 2884718 - RNA, 15 nt, Human
auaccuauaaugugu

SEQ ID NO: 2884719 - RNA, 16 nt, Human
auaccuauaaugugug

SEQ ID NO: 2884720 - RNA, 17 nt, Human
auaccuauaaugugugu

SEQ ID NO: 2884721 - RNA, 18 nt, Human
auaccuauaaugugugua

SEQ ID NO: 2884722 - RNA, 19 nt, Human
auaccuauaauguguguau

SEQ ID NO: 2884723 - RNA, 16 nt, Human
auaccucaaacuaucu

SEQ ID NO: 2884724 - RNA, 20 nt, Human
auaccauuuuuuaaggaaac

SEQ ID NO: 2884725 - RNA, 19 nt, Human
auaccauuaaaacugcuuu

SEQ ID NO: 2884726 - RNA, 17 nt, Human
auaccauuuccucagcu

SEQ ID NO: 2884727 - RNA, 22 nt, Human
auaccauuuuuuaaggaaacaa

SEQ ID NO: 2884728 - RNA, 12 nt, Human
auaccucugugu

SEQ ID NO: 2884729 - RNA, 13 nt, Human
auaccucugugug

SEQ ID NO: 2884730 - RNA, 15 nt, Human
auaccucacccugcu

SEQ ID NO: 2884731 - RNA, 13 nt, Human
auaccucugacca

SEQ ID NO: 2884732 - RNA, 14 nt, Human
auaccucugaccaa

SEQ ID NO: 2884733 - RNA, 15 nt, Human
auaccucugaccaac

SEQ ID NO: 2884734 - RNA, 18 nt, Human
auaccucaaccuauggua

SEQ ID NO: 2884735 - RNA, 14 nt, Human
auaccucaauguuu

SEQ ID NO: 2884736 - RNA, 16 nt, Human
auaccucaauguuuga

SEQ ID NO: 2884737 - RNA, 15 nt, Human
auaccucaaccuaug

SEQ ID NO: 2884738 - RNA, 15 nt, Human
auaccucaggaaaga

SEQ ID NO: 2884739 - RNA, 17 nt, Human
auaccucaggaaagaau

SEQ ID NO: 2884740 - RNA, 18 nt, Human
auaccucaggaaagaaua

SEQ ID NO: 2884741 - RNA, 19 nt, Human
auaccucaggaaagaauag

SEQ ID NO: 2884742 - RNA, 21 nt, Human
auaccucaggaaagaauagaa

SEQ ID NO: 2884743 - RNA, 13 nt, Human
auaccucauguuu

SEQ ID NO: 2884744 - RNA, 17 nt, Human
auaccucauguuuauga

SEQ ID NO: 2884745 - RNA, 20 nt, Human
auaccucauguuuaugaaaa

SEQ ID NO: 2884746 - RNA, 21 nt, Human
auaccucauguuuaugaaaau

SEQ ID NO: 2884747 - RNA, 22 nt, Human
auaccucauguuuaugaaaaua

SEQ ID NO: 2884748 - RNA, 20 nt, Human
auaccuucgggguacaaguc

SEQ ID NO: 2884749 - RNA, 18 nt, Human
auaccuuucacagcuuuu

SEQ ID NO: 2884750 - RNA, 22 nt, Human
auaccuuucacagcuuuuauca

SEQ ID NO: 2884751 - RNA, 16 nt, Human
auaccugugccucggc

SEQ ID NO: 2884752 - RNA, 21 nt, Human
aguguccccuccacugucaca

SEQ ID NO: 2884753 - RNA, 16 nt, Human
aguguccuaugcaaua

SEQ ID NO: 2884754 - RNA, 19 nt, Human
aguguccuaugcaauaaaa

SEQ ID NO: 2884755 - RNA, 23 nt, Human
aguguccuaugcaauaaaauuau

SEQ ID NO: 2884756 - RNA, 22 nt, Human
agugucccccagguuccgaaga

SEQ ID NO: 2884757 - RNA, 13 nt, Human
aguguccccucca

SEQ ID NO: 2884758 - RNA, 14 nt, Human
agugucccccaggu

SEQ ID NO: 2884759 - RNA, 14 nt, Human
aguguccccuccac

SEQ ID NO: 2884760 - RNA, 15 nt, Human
aguguccccuccacu

SEQ ID NO: 2884761 - RNA, 17 nt, Human
aguguccccuccacugu

SEQ ID NO: 2884762 - RNA, 19 nt, Human
aguguccccuccacuguca

SEQ ID NO: 2884763 - RNA, 21 nt, Human
aguguccaaagcagggucugg

SEQ ID NO: 2884764 - RNA, 13 nt, Human
aguguccauuuug

SEQ ID NO: 2884765 - RNA, 17 nt, Human
aguguccauuuugugaa

SEQ ID NO: 2884766 - RNA, 18 nt, Human
aguguccauuuugugaag

SEQ ID NO: 2884767 - RNA, 19 nt, Human
aguguccauuuugugaagc

SEQ ID NO: 2884768 - RNA, 20 nt, Human
aguguccauuuugugaagcc

SEQ ID NO: 2884769 - RNA, 21 nt, Human
aguguccauuuugugaagccc

SEQ ID NO: 2884770 - RNA, 22 nt, Human
aguguccauuuugugaagcccu

SEQ ID NO: 2884771 - RNA, 23 nt, Human
aguguccauuuugugaagcccug

SEQ ID NO: 2884772 - RNA, 13 nt, Human
agugucaaccaga

SEQ ID NO: 2884773 - RNA, 15 nt, Human
agugucaaccagaca

SEQ ID NO: 2884774 - RNA, 16 nt, Human
agugucaaccagacag

SEQ ID NO: 2884775 - RNA, 17 nt, Human
agugucaaccagacaga

SEQ ID NO: 2884776 - RNA, 14 nt, Human
aguguccaaagcag

SEQ ID NO: 2884777 - RNA, 17 nt, Human
aguguccaaagcagggu

SEQ ID NO: 2884778 - RNA, 20 nt, Human
aguguccaaagcagggucug

SEQ ID NO: 2884779 - RNA, 13 nt, Human
aguguauuucagu

SEQ ID NO: 2884780 - RNA, 14 nt, Human
aguguauuucaguu

SEQ ID NO: 2884781 - RNA, 15 nt, Human
aguguauuucaguuc

SEQ ID NO: 2884782 - RNA, 13 nt, Human
aguguaugucuug

SEQ ID NO: 2884783 - RNA, 16 nt, Human
aguguaugucuuguau

SEQ ID NO: 2884784 - RNA, 22 nt, Human
aguguauggaaauaaauguauc

SEQ ID NO: 2884785 - RNA, 21 nt, Human
aguguauggaaauaaauguau

SEQ ID NO: 2884786 - RNA, 20 nt, Human
aguguauggaaauaaaugua

SEQ ID NO: 2884787 - RNA, 16 nt, Human
aguguauggaaauaaa

SEQ ID NO: 2884788 - RNA, 14 nt, Human
agugggagcugccu

SEQ ID NO: 2884789 - RNA, 14 nt, Human
agugggagaaggca

SEQ ID NO: 2884790 - RNA, 15 nt, Human
agugggagaaggcag

SEQ ID NO: 2884791 - RNA, 19 nt, Human
agugggagaaggcagugau

SEQ ID NO: 2884792 - RNA, 20 nt, Human
aguggcuucauuagagcagg

SEQ ID NO: 2884793 - RNA, 21 nt, Human
aguggcuucauuagagcaggc

SEQ ID NO: 2884794 - RNA, 22 nt, Human
aguggcuucauuagagcaggcg

SEQ ID NO: 2884795 - RNA, 14 nt, Human
aguggcuuguccuc

SEQ ID NO: 2884796 - RNA, 15 nt, Human
agugggagcugccug

SEQ ID NO: 2884797 - RNA, 14 nt, Human
aguguauaucagaa

SEQ ID NO: 2884798 - RNA, 23 nt, Human
aguggcuuaaaacaacacucaca

SEQ ID NO: 2884799 - RNA, 17 nt, Human
aguggcugucaucagcc

SEQ ID NO: 2884800 - RNA, 16 nt, Human
aguggcugucaucagc

SEQ ID NO: 2884801 - RNA, 17 nt, Human
aguggcuucaucuguca

SEQ ID NO: 2884802 - RNA, 19 nt, Human
aguggcuucauuagagcag

SEQ ID NO: 2884803 - RNA, 13 nt, Human
aguggcuccuccc

SEQ ID NO: 2884804 - RNA, 17 nt, Human
aguggcuccucccggug

SEQ ID NO: 2884805 - RNA, 12 nt, Human
aguggcugcugc

SEQ ID NO: 2884806 - RNA, 15 nt, Human
aguggcucgccaggc

SEQ ID NO: 2884807 - RNA, 16 nt, Human
aguggcucgccaggcc

SEQ ID NO: 2884808 - RNA, 21 nt, Human
aguggcuccucccggugccca

SEQ ID NO: 2884809 - RNA, 13 nt, Human
aguggcugcugcc

SEQ ID NO: 2884810 - RNA, 14 nt, Human
aguggcugcugccc

SEQ ID NO: 2884811 - RNA, 16 nt, Human
aguggcugcugcccag

SEQ ID NO: 2884812 - RNA, 17 nt, Human
aguggcugcugcccagg

SEQ ID NO: 2884813 - RNA, 19 nt, Human
aguggcugcugcccaggcc

SEQ ID NO: 2884814 - RNA, 22 nt, Human
aguggcugcugcccaggcccag

SEQ ID NO: 2884815 - RNA, 15 nt, Human
aguggcguugggagg

SEQ ID NO: 2884816 - RNA, 23 nt, Human
aguggcguugggagggggagaaa

SEQ ID NO: 2884817 - RNA, 15 nt, Human
aguggcguuguugca

SEQ ID NO: 2884818 - RNA, 18 nt, Human
aguggcuaaagagaugag

SEQ ID NO: 2884819 - RNA, 22 nt, Human
aguggcuauuucuuuauauuua

SEQ ID NO: 2884820 - RNA, 14 nt, Human
aguggcucacgccu

SEQ ID NO: 2884821 - RNA, 15 nt, Human
aguugaaagggcaau

SEQ ID NO: 2884822 - RNA, 21 nt, Human
aguuguggaaagccucugcug

SEQ ID NO: 2884823 - RNA, 20 nt, Human
aguuguggaaagccucugcu

SEQ ID NO: 2884824 - RNA, 19 nt, Human
aguuguggaaagccucugc

SEQ ID NO: 2884825 - RNA, 18 nt, Human
aguuguggaaagccucug

SEQ ID NO: 2884826 - RNA, 14 nt, Human
aguugugugacccu

SEQ ID NO: 2884827 - RNA, 15 nt, Human
aguuguggugugagu

SEQ ID NO: 2884828 - RNA, 20 nt, Human
aguuguggugugaguaucag

SEQ ID NO: 2884829 - RNA, 16 nt, Human
aguuguggauuucagu

SEQ ID NO: 2884830 - RNA, 17 nt, Human
aguuguggauuucaguu

SEQ ID NO: 2884831 - RNA, 18 nt, Human
aguuguggauuucaguuu

SEQ ID NO: 2884832 - RNA, 18 nt, Human
aguuguuguggguucuau

SEQ ID NO: 2884833 - RNA, 19 nt, Human
aguuguuguggguucuaug

SEQ ID NO: 2884834 - RNA, 22 nt, Human
aguuguuguggguucuauguuu

SEQ ID NO: 2884835 - RNA, 16 nt, Human
aguuguuguguacaga

SEQ ID NO: 2884836 - RNA, 20 nt, Human
aguuguguuuguugcuggcu

SEQ ID NO: 2884837 - RNA, 22 nt, Human
aguuguguuuguugcuggcuug

SEQ ID NO: 2884838 - RNA, 13 nt, Human
aguuccaagaguc

SEQ ID NO: 2884839 - RNA, 14 nt, Human
aguuccaagagucu

SEQ ID NO: 2884840 - RNA, 19 nt, Human
aguuccaagagucuaaaga

SEQ ID NO: 2884841 - RNA, 21 nt, Human
aguucaugagaaucuauauuu

SEQ ID NO: 2884842 - RNA, 13 nt, Human
aguucaugagaau

SEQ ID NO: 2884843 - RNA, 17 nt, Human
aguucauguuugcuuca

SEQ ID NO: 2884844 - RNA, 23 nt, Human
aguucauguuugcuucauaaaug

SEQ ID NO: 2884845 - RNA, 19 nt, Human
aguucagguaacaggcaga

SEQ ID NO: 2884846 - RNA, 20 nt, Human
aguucagguaacaggcagau

SEQ ID NO: 2884847 - RNA, 16 nt, Human
aguuaaugcuuaagag

SEQ ID NO: 2884848 - RNA, 20 nt, Human
aguuaaugcuuaagagggaa

SEQ ID NO: 2884849 - RNA, 13 nt, Human
aguuaagccuuug

SEQ ID NO: 2884850 - RNA, 16 nt, Human
aguuaauaagcaaaau

SEQ ID NO: 2884851 - RNA, 20 nt, Human
aguuaauaagcaaaauccug

SEQ ID NO: 2884852 - RNA, 15 nt, Human
aguuaauauugugaa

SEQ ID NO: 2884853 - RNA, 20 nt, Human
aguuaauauaucccagaaau

SEQ ID NO: 2884854 - RNA, 21 nt, Human
aguuaauauaucccagaaauu

SEQ ID NO: 2884855 - RNA, 14 nt, Human
aguuaagccuuugg

SEQ ID NO: 2884856 - RNA, 19 nt, Human
aguuaaggaccguggcccu

SEQ ID NO: 2884857 - RNA, 13 nt, Human
aguuaaaaaaaaa

SEQ ID NO: 2884858 - RNA, 22 nt, Human
aguuaaaaaaaaaaaaaggaaa

SEQ ID NO: 2884859 - RNA, 23 nt, Human
aguuaaaaaaaaaaaaaggaaaa

SEQ ID NO: 2884860 - RNA, 17 nt, Human
aguuaaaggcugacuac

SEQ ID NO: 2884861 - RNA, 22 nt, Human
agucaaaugguaggcauuuccu

SEQ ID NO: 2884862 - RNA, 21 nt, Human
agucaaaguaaaacuugcugc

SEQ ID NO: 2884863 - RNA, 12 nt, Human
agucaaaguaaa

SEQ ID NO: 2884864 - RNA, 23 nt, Human
agucaaaugguaggcauuuccua

SEQ ID NO: 2884865 - RNA, 20 nt, Human
aguaugggacuggccucugc

SEQ ID NO: 2884866 - RNA, 17 nt, Human
aguaugggacuggccuc

SEQ ID NO: 2884867 - RNA, 14 nt, Human
agucaaaauaauuc

SEQ ID NO: 2884868 - RNA, 19 nt, Human
agucaaaauauuuuuaaaa

SEQ ID NO: 2884869 - RNA, 21 nt, Human
agucaaaauauuuuuaaaaga

SEQ ID NO: 2884870 - RNA, 22 nt, Human
agucaaaauauuuuuaaaagau

SEQ ID NO: 2884871 - RNA, 16 nt, Human
agucaaagagaguuuu

SEQ ID NO: 2884872 - RNA, 22 nt, Human
agucaaagagaguuuuuaauag

SEQ ID NO: 2884873 - RNA, 23 nt, Human
agucaaagagaguuuuuaauaga

SEQ ID NO: 2884874 - RNA, 14 nt, Human
agucaacaagccug

SEQ ID NO: 2884875 - RNA, 10 nt, Human
aguaucucau

SEQ ID NO: 2884876 - RNA, 21 nt, Human
aguaucucaucaacaaagaaa

SEQ ID NO: 2884877 - RNA, 22 nt, Human
aguaucucaucaacaaagaaau

SEQ ID NO: 2884878 - RNA, 14 nt, Human
aguauggagcucag

SEQ ID NO: 2884879 - RNA, 19 nt, Human
aguauggagcucagagagg

SEQ ID NO: 2884880 - RNA, 15 nt, Human
aguauggaugggugg

SEQ ID NO: 2884881 - RNA, 16 nt, Human
aguaugcuugcucuaa

SEQ ID NO: 2884882 - RNA, 18 nt, Human
aguaugacgcugauacau

SEQ ID NO: 2884883 - RNA, 20 nt, Human
aguaugacgcugauacauaa

SEQ ID NO: 2884884 - RNA, 22 nt, Human
aguaugacgcugauacauaacu

SEQ ID NO: 2884885 - RNA, 14 nt, Human
aguaugagcccuaa

SEQ ID NO: 2884886 - RNA, 17 nt, Human
aguaucuuugcacucca

SEQ ID NO: 2884887 - RNA, 16 nt, Human
aguaugaauaaagaca

SEQ ID NO: 2884888 - RNA, 17 nt, Human
aguaucuuuuuucaaaa

SEQ ID NO: 2884889 - RNA, 22 nt, Human
aguccugggagaaccucaggcu

SEQ ID NO: 2884890 - RNA, 16 nt, Human
aguccugggagaccca

SEQ ID NO: 2884891 - RNA, 21 nt, Human
aguccuguaguuuuauuuuau

SEQ ID NO: 2884892 - RNA, 23 nt, Human
aguccuguaguuuuauuuuaugu

SEQ ID NO: 2884893 - RNA, 15 nt, Human
aguccuguaugucug

SEQ ID NO: 2884894 - RNA, 16 nt, Human
aguccuguaugucugu

SEQ ID NO: 2884895 - RNA, 17 nt, Human
aguccuguaugucuguc

SEQ ID NO: 2884896 - RNA, 19 nt, Human
aguccuguaugucugucau

SEQ ID NO: 2884897 - RNA, 20 nt, Human
aguccuguaugucugucauu

SEQ ID NO: 2884898 - RNA, 21 nt, Human
aguccuguaugucugucauug

SEQ ID NO: 2884899 - RNA, 23 nt, Human
aguccuguaugucugucauugua

SEQ ID NO: 2884900 - RNA, 21 nt, Human
aguccugggagaaccucaggc

SEQ ID NO: 2884901 - RNA, 15 nt, Human
aguccuggcuucagg

SEQ ID NO: 2884902 - RNA, 13 nt, Human
aguccuggcccaa

SEQ ID NO: 2884903 - RNA, 17 nt, Human
agugaagaauccuuuug

SEQ ID NO: 2884904 - RNA, 21 nt, Human
agugaagucaugaccuccagg

SEQ ID NO: 2884905 - RNA, 22 nt, Human
agugaagccagcugcaggaauc

SEQ ID NO: 2884906 - RNA, 12 nt, Human
agugaauaaacu

SEQ ID NO: 2884907 - RNA, 13 nt, Human
agugaauaaacuu

SEQ ID NO: 2884908 - RNA, 19 nt, Human
agugaagagggagaaggga

SEQ ID NO: 2884909 - RNA, 16 nt, Human
agugaagacuggaagc

SEQ ID NO: 2884910 - RNA, 18 nt, Human
agucugauucccaagcuc

SEQ ID NO: 2884911 - RNA, 16 nt, Human
agucugauucccaagc

SEQ ID NO: 2884912 - RNA, 19 nt, Human
agucugaugauuucuugaa

SEQ ID NO: 2884913 - RNA, 17 nt, Human
agucuggaaugcagugg

SEQ ID NO: 2884914 - RNA, 23 nt, Human
agucugcucuagaugagcugggc

SEQ ID NO: 2884915 - RNA, 19 nt, Human
agucugccuauccuggcca

SEQ ID NO: 2884916 - RNA, 19 nt, Human
agugacaguugcagcccuu

SEQ ID NO: 2884917 - RNA, 20 nt, Human
agugacauaauauauucuau

SEQ ID NO: 2884918 - RNA, 22 nt, Human
agugacauaauauauucuauuu

SEQ ID NO: 2884919 - RNA, 22 nt, Human
agugacaucucuuugaugucau

SEQ ID NO: 2884920 - RNA, 18 nt, Human
agugaccauacuaauuau

SEQ ID NO: 2884921 - RNA, 19 nt, Human
agugacaguggauugcauu

SEQ ID NO: 2884922 - RNA, 20 nt, Human
agugacaguggauugcauuu

SEQ ID NO: 2884923 - RNA, 14 nt, Human
agugaccccugccu

SEQ ID NO: 2884924 - RNA, 17 nt, Human
auguaaugaaguaaagc

SEQ ID NO: 2884925 - RNA, 22 nt, Human
auguaaugaaguaaagccauua

SEQ ID NO: 2884926 - RNA, 15 nt, Human
auguaaugcaacuac

SEQ ID NO: 2884927 - RNA, 18 nt, Human
auguaaugcgauuuuauu

SEQ ID NO: 2884928 - RNA, 21 nt, Human
auguaaugcgauuuuauuacu

SEQ ID NO: 2884929 - RNA, 22 nt, Human
auguaaugcgauuuuauuacug

SEQ ID NO: 2884930 - RNA, 14 nt, Human
auguaaugucccuu

SEQ ID NO: 2884931 - RNA, 20 nt, Human
auguaaugugugguggccuc

SEQ ID NO: 2884932 - RNA, 21 nt, Human
auguaaugugugguggccuca

SEQ ID NO: 2884933 - RNA, 22 nt, Human
auguaaugugugguggccucag

SEQ ID NO: 2884934 - RNA, 23 nt, Human
auguaaugugugguggccucagc

SEQ ID NO: 2884935 - RNA, 18 nt, Human
auguaauguuaauguuau

SEQ ID NO: 2884936 - RNA, 12 nt, Human
auguaauguuuu

SEQ ID NO: 2884937 - RNA, 21 nt, Human
auguaauguuuucuuugcaaa

SEQ ID NO: 2884938 - RNA, 23 nt, Human
auguaauguuuucuuugcaaagu

SEQ ID NO: 2884939 - RNA, 16 nt, Human
auggucgcccaggaga

SEQ ID NO: 2884940 - RNA, 15 nt, Human
auggucgcccaggag

SEQ ID NO: 2884941 - RNA, 20 nt, Human
auguauucuagcuaauguaa

SEQ ID NO: 2884942 - RNA, 14 nt, Human
auguauugauaaga

SEQ ID NO: 2884943 - RNA, 19 nt, Human
auguauucuagcuaaugua

SEQ ID NO: 2884944 - RNA, 16 nt, Human
auguauuauuuauaau

SEQ ID NO: 2884945 - RNA, 17 nt, Human
auguauuauuuauaauu

SEQ ID NO: 2884946 - RNA, 15 nt, Human
auguauuauuucauu

SEQ ID NO: 2884947 - RNA, 22 nt, Human
auguauuauuucauuauguaaa

SEQ ID NO: 2884948 - RNA, 15 nt, Human
auguauuauuuauaa

SEQ ID NO: 2884949 - RNA, 19 nt, Human
auguauuuguucauguuug

SEQ ID NO: 2884950 - RNA, 15 nt, Human
auguauuuuucuaca

SEQ ID NO: 2884951 - RNA, 16 nt, Human
auguauuuuucuacau

SEQ ID NO: 2884952 - RNA, 19 nt, Human
auguauuuuucuacauuau

SEQ ID NO: 2884953 - RNA, 23 nt, Human
auguauuuuucuacauuauugcu

SEQ ID NO: 2884954 - RNA, 14 nt, Human
auggucgcccagga

SEQ ID NO: 2884955 - RNA, 20 nt, Human
augguccuggggcucugugc

SEQ ID NO: 2884956 - RNA, 19 nt, Human
augguccuggggcucugug

SEQ ID NO: 2884957 - RNA, 17 nt, Human
augguccuggggcucug

SEQ ID NO: 2884958 - RNA, 14 nt, Human
augguccuggggcu

SEQ ID NO: 2884959 - RNA, 12 nt, Human
augguccugggg

SEQ ID NO: 2884960 - RNA, 17 nt, Human
auggucauugcaguuua

SEQ ID NO: 2884961 - RNA, 22 nt, Human
auggucaucuuggagggaccaa

SEQ ID NO: 2884962 - RNA, 18 nt, Human
augguccuaaaagcaaaa

SEQ ID NO: 2884963 - RNA, 20 nt, Human
augguccuaaaagcaaaaua

SEQ ID NO: 2884964 - RNA, 19 nt, Human
auggucacacacugaugcu

SEQ ID NO: 2884965 - RNA, 18 nt, Human
auggucacacacugaugc

SEQ ID NO: 2884966 - RNA, 16 nt, Human
auggucacacacugau

SEQ ID NO: 2884967 - RNA, 15 nt, Human
auggucacacacuga

SEQ ID NO: 2884968 - RNA, 20 nt, Human
auggucacacacugaugcuu

SEQ ID NO: 2884969 - RNA, 17 nt, Human
auggucacgcaccuggg

SEQ ID NO: 2884970 - RNA, 22 nt, Human
auggucacuuaaaaugugcagu

SEQ ID NO: 2884971 - RNA, 17 nt, Human
augguauaaguaacuuu

SEQ ID NO: 2884972 - RNA, 14 nt, Human
auggucacacacug

SEQ ID NO: 2884973 - RNA, 19 nt, Human
augguauaaugguugacug

SEQ ID NO: 2884974 - RNA, 20 nt, Human
augugaaaccuuuuuuaaga

SEQ ID NO: 2884975 - RNA, 21 nt, Human
augugaaaccuuuuuuaagau

SEQ ID NO: 2884976 - RNA, 22 nt, Human
augugaaaccuuuuuuaagauu

SEQ ID NO: 2884977 - RNA, 23 nt, Human
augugaaaccuuuuuuaagauuu

SEQ ID NO: 2884978 - RNA, 18 nt, Human
augucuuucuccaaaguu

SEQ ID NO: 2884979 - RNA, 22 nt, Human
augucuuucuccaaaguuaucc

SEQ ID NO: 2884980 - RNA, 12 nt, Human
augugaaaccuu

SEQ ID NO: 2884981 - RNA, 15 nt, Human
augucuuuucuuggc

SEQ ID NO: 2884982 - RNA, 16 nt, Human
augucuuuucuuggca

SEQ ID NO: 2884983 - RNA, 13 nt, Human
augugaaaccuuu

SEQ ID NO: 2884984 - RNA, 15 nt, Human
augugaaaccuuuuu

SEQ ID NO: 2884985 - RNA, 18 nt, Human
augugaaaccuuuuuuaa

SEQ ID NO: 2884986 - RNA, 19 nt, Human
augugaaaccuuuuuuaag

SEQ ID NO: 2884987 - RNA, 12 nt, Human
augugaaagcac

SEQ ID NO: 2884988 - RNA, 14 nt, Human
augugaagaugcau

SEQ ID NO: 2884989 - RNA, 21 nt, Human
augugaagaugcauuguaguu

SEQ ID NO: 2884990 - RNA, 23 nt, Human
augugaagaugcauuguaguuua

SEQ ID NO: 2884991 - RNA, 12 nt, Human
augugaacuugu

SEQ ID NO: 2884992 - RNA, 13 nt, Human
augugaacuugua

SEQ ID NO: 2884993 - RNA, 14 nt, Human
augugaacuuguag

SEQ ID NO: 2884994 - RNA, 16 nt, Human
augugaacuuguagcu

SEQ ID NO: 2884995 - RNA, 17 nt, Human
augugaacuuguagcug

SEQ ID NO: 2884996 - RNA, 18 nt, Human
augugaacuuguagcugu

SEQ ID NO: 2884997 - RNA, 20 nt, Human
augugaacuuguagcuguaa

SEQ ID NO: 2884998 - RNA, 22 nt, Human
augugaacuuguagcuguaaaa

SEQ ID NO: 2884999 - RNA, 23 nt, Human
augugaacuuguagcuguaaaac

SEQ ID NO: 2885000 - RNA, 18 nt, Human
augucuuuuagaagauag

SEQ ID NO: 2885001 - RNA, 14 nt, Human
augucuuuuauagu

SEQ ID NO: 2885002 - RNA, 18 nt, Human
augucuuuuauaguggaa

SEQ ID NO: 2885003 - RNA, 19 nt, Human
augucuuuuauaguggaaa

SEQ ID NO: 2885004 - RNA, 20 nt, Human
augucuuuuauaguggaaaa

SEQ ID NO: 2885005 - RNA, 21 nt, Human
augucuuuuauaguggaaaaa

SEQ ID NO: 2885006 - RNA, 16 nt, Human
augucuuuuauauuug

SEQ ID NO: 2885007 - RNA, 17 nt, Human
augucuuuuauauuugu

SEQ ID NO: 2885008 - RNA, 20 nt, Human
augucuuuuauauuuguauc

SEQ ID NO: 2885009 - RNA, 21 nt, Human
augucuuuuauauuuguaucg

SEQ ID NO: 2885010 - RNA, 22 nt, Human
augucuuuuauauuuguaucga

SEQ ID NO: 2885011 - RNA, 12 nt, Human
augucuuuguaa

SEQ ID NO: 2885012 - RNA, 13 nt, Human
augucuuuguaag

SEQ ID NO: 2885013 - RNA, 15 nt, Human
augucuuuguaaguc

SEQ ID NO: 2885014 - RNA, 21 nt, Human
augucuuuguaagucaguguu

SEQ ID NO: 2885015 - RNA, 22 nt, Human
augucuuuguaagucaguguug

SEQ ID NO: 2885016 - RNA, 16 nt, Human
augucuucaaggcuuc

SEQ ID NO: 2885017 - RNA, 17 nt, Human
augucuucaaggcuuca

SEQ ID NO: 2885018 - RNA, 19 nt, Human
augucuucaaggcuucagu

SEQ ID NO: 2885019 - RNA, 20 nt, Human
augucuucaaggcuucaguc

SEQ ID NO: 2885020 - RNA, 15 nt, Human
augucuucauaaagu

SEQ ID NO: 2885021 - RNA, 19 nt, Human
augucuucauaaaguacuu

SEQ ID NO: 2885022 - RNA, 13 nt, Human
augucuuccugga

SEQ ID NO: 2885023 - RNA, 20 nt, Human
augucuucauuucauuguau

SEQ ID NO: 2885024 - RNA, 18 nt, Human
augucuuccauguaucuu

SEQ ID NO: 2885025 - RNA, 22 nt, Human
augucuuccauguaucuuuuga

SEQ ID NO: 2885026 - RNA, 19 nt, Human
augucuucauuucauugua

SEQ ID NO: 2885027 - RNA, 17 nt, Human
augucuuaauuuuugaa

SEQ ID NO: 2885028 - RNA, 17 nt, Human
augucuucauuucauug

SEQ ID NO: 2885029 - RNA, 18 nt, Human
augucuucauuucauugu

SEQ ID NO: 2885030 - RNA, 17 nt, Human
augucaaaauuguuuaa

SEQ ID NO: 2885031 - RNA, 21 nt, Human
augugaagucaccaguggccu

SEQ ID NO: 2885032 - RNA, 21 nt, Human
auguucgguuuuuuuccuguu

SEQ ID NO: 2885033 - RNA, 23 nt, Human
auguucgguuuuuuuccuguuuc

SEQ ID NO: 2885034 - RNA, 12 nt, Human
auguucuaaggc

SEQ ID NO: 2885035 - RNA, 16 nt, Human
augugugcaugugugu

SEQ ID NO: 2885036 - RNA, 17 nt, Human
augugugcaugugugua

SEQ ID NO: 2885037 - RNA, 18 nt, Human
augugugcauguguguau

SEQ ID NO: 2885038 - RNA, 20 nt, Human
augugugcauguguguauaa

SEQ ID NO: 2885039 - RNA, 15 nt, Human
augugugccaaggcu

SEQ ID NO: 2885040 - RNA, 11 nt, Human
augugugccau

SEQ ID NO: 2885041 - RNA, 18 nt, Human
augugugccauagaguuu

SEQ ID NO: 2885042 - RNA, 20 nt, Human
augugugccauagaguuuaa

SEQ ID NO: 2885043 - RNA, 22 nt, Human
augugugccauagaguuuaaca

SEQ ID NO: 2885044 - RNA, 13 nt, Human
augugggcacugg

SEQ ID NO: 2885045 - RNA, 18 nt, Human
augugggcacuggcccag

SEQ ID NO: 2885046 - RNA, 19 nt, Human
augugugaggagcugcugg

SEQ ID NO: 2885047 - RNA, 15 nt, Human
augugugaggagcug

SEQ ID NO: 2885048 - RNA, 22 nt, Human
augugugaggagcugcuggcuu

SEQ ID NO: 2885049 - RNA, 12 nt, Human
auguucugggac

SEQ ID NO: 2885050 - RNA, 11 nt, Human
auguucuggga

SEQ ID NO: 2885051 - RNA, 13 nt, Human
auguucugcuuuc

SEQ ID NO: 2885052 - RNA, 12 nt, Human
auguucugcccc

SEQ ID NO: 2885053 - RNA, 14 nt, Human
auguucugccccca

SEQ ID NO: 2885054 - RNA, 16 nt, Human
auguucugcccccagc

SEQ ID NO: 2885055 - RNA, 17 nt, Human
auguucugcccccagcc

SEQ ID NO: 2885056 - RNA, 18 nt, Human
auguucugcccccagccc

SEQ ID NO: 2885057 - RNA, 20 nt, Human
auguucugcccccagcccaa

SEQ ID NO: 2885058 - RNA, 19 nt, Human
auguucuaugguuaugaaa

SEQ ID NO: 2885059 - RNA, 20 nt, Human
auguucuaugguuaugaaag

SEQ ID NO: 2885060 - RNA, 21 nt, Human
auguucuaugguuaugaaaga

SEQ ID NO: 2885061 - RNA, 14 nt, Human
auguucuauugugg

SEQ ID NO: 2885062 - RNA, 23 nt, Human
auguucuaaguuucuaagauucu

SEQ ID NO: 2885063 - RNA, 16 nt, Human
auguucuaaguuucua

SEQ ID NO: 2885064 - RNA, 19 nt, Human
auguucuaaguuucuaaga

SEQ ID NO: 2885065 - RNA, 20 nt, Human
auguucuaaguuucuaagau

SEQ ID NO: 2885066 - RNA, 21 nt, Human
auguucuaaguuucuaagauu

SEQ ID NO: 2885067 - RNA, 22 nt, Human
auguucuaaggcucugagaguc

SEQ ID NO: 2885068 - RNA, 12 nt, Human
auguucuaaguu

SEQ ID NO: 2885069 - RNA, 13 nt, Human
auguucuaaguuu

SEQ ID NO: 2885070 - RNA, 15 nt, Human
auguucuaaguuucu

SEQ ID NO: 2885071 - RNA, 13 nt, Human
auguucuaaggcu

SEQ ID NO: 2885072 - RNA, 14 nt, Human
auguucuaaggcuc

SEQ ID NO: 2885073 - RNA, 15 nt, Human
auguucuaaggcucu

SEQ ID NO: 2885074 - RNA, 16 nt, Human
auguucuaaggcucug

SEQ ID NO: 2885075 - RNA, 17 nt, Human
auguucuaaggcucuga

SEQ ID NO: 2885076 - RNA, 18 nt, Human
auguucuaaggcucugag

SEQ ID NO: 2885077 - RNA, 19 nt, Human
auguucuaaggcucugaga

SEQ ID NO: 2885078 - RNA, 20 nt, Human
auguucuaaggcucugagag

SEQ ID NO: 2885079 - RNA, 11 nt, Human
auuaaaucugu

SEQ ID NO: 2885080 - RNA, 13 nt, Human
auuaaaugaauau

SEQ ID NO: 2885081 - RNA, 18 nt, Human
auuaaaugaauauuuuga

SEQ ID NO: 2885082 - RNA, 19 nt, Human
auuaaaugaauauuuugau

SEQ ID NO: 2885083 - RNA, 22 nt, Human
auuaaaugaauauuuugauaau

SEQ ID NO: 2885084 - RNA, 17 nt, Human
auuaaauaguuauauaa

SEQ ID NO: 2885085 - RNA, 14 nt, Human
auuaaauauagauu

SEQ ID NO: 2885086 - RNA, 22 nt, Human
auuaaauauagauuagaaaaau

SEQ ID NO: 2885087 - RNA, 18 nt, Human
auguuuuauuauuucuau

SEQ ID NO: 2885088 - RNA, 20 nt, Human
auguuuuauuauuucuauua

SEQ ID NO: 2885089 - RNA, 15 nt, Human
auguuuuauuucauu

SEQ ID NO: 2885090 - RNA, 23 nt, Human
auguuuuauuucauugguuaauu

SEQ ID NO: 2885091 - RNA, 16 nt, Human
auguuuuauaaguuca

SEQ ID NO: 2885092 - RNA, 18 nt, Human
auguuugcuucauaaaug

SEQ ID NO: 2885093 - RNA, 20 nt, Human
auguuugcuucauaaaugaa

SEQ ID NO: 2885094 - RNA, 14 nt, Human
auguuuuacacugu

SEQ ID NO: 2885095 - RNA, 16 nt, Human
auguuuuacacuguac

SEQ ID NO: 2885096 - RNA, 23 nt, Human
auguuugcucuuguuuuuauuaa

SEQ ID NO: 2885097 - RNA, 20 nt, Human
auguuuuaccguaauaauua

SEQ ID NO: 2885098 - RNA, 16 nt, Human
auguuuuacugugaaa

SEQ ID NO: 2885099 - RNA, 21 nt, Human
auguuucacaccggaagguuu

SEQ ID NO: 2885100 - RNA, 13 nt, Human
auguucugggaca

SEQ ID NO: 2885101 - RNA, 18 nt, Human
auguuugccucugccucu

SEQ ID NO: 2885102 - RNA, 13 nt, Human
auguuuccagcag

SEQ ID NO: 2885103 - RNA, 19 nt, Human
auguuuccagcagaagaca

SEQ ID NO: 2885104 - RNA, 22 nt, Human
auguuugccucugccucugaca

SEQ ID NO: 2885105 - RNA, 19 nt, Human
auguuugccucugccucug

SEQ ID NO: 2885106 - RNA, 15 nt, Human
auguuuccagacuuc

SEQ ID NO: 2885107 - RNA, 21 nt, Human
auguuucacauaaaaccucau

SEQ ID NO: 2885108 - RNA, 13 nt, Human
auguuuccaaccu

SEQ ID NO: 2885109 - RNA, 22 nt, Human
auguuucauguuuugugacuau

SEQ ID NO: 2885110 - RNA, 19 nt, Human
auguuucacgaaguuuguu

SEQ ID NO: 2885111 - RNA, 11 nt, Human
augugggaggg

SEQ ID NO: 2885112 - RNA, 10 nt, Human
augugggagg

SEQ ID NO: 2885113 - RNA, 20 nt, Human
augugggaauuaagcaaaau

SEQ ID NO: 2885114 - RNA, 21 nt, Human
auguggcuugagaaauaugga

SEQ ID NO: 2885115 - RNA, 22 nt, Human
auguggcuuuuuuaaaaaagca

SEQ ID NO: 2885116 - RNA, 16 nt, Human
auguggcuugagaaau

SEQ ID NO: 2885117 - RNA, 19 nt, Human
augcugcaggacuugagaa

SEQ ID NO: 2885118 - RNA, 18 nt, Human
augcugcaggacuugaga

SEQ ID NO: 2885119 - RNA, 20 nt, Human
augcugcagauuugggcugg

SEQ ID NO: 2885120 - RNA, 12 nt, Human
augcugccagug

SEQ ID NO: 2885121 - RNA, 13 nt, Human
augcugccagugu

SEQ ID NO: 2885122 - RNA, 14 nt, Human
augcucuucugugg

SEQ ID NO: 2885123 - RNA, 16 nt, Human
augcucuuuuguuugg

SEQ ID NO: 2885124 - RNA, 15 nt, Human
augcucuuuuuuacu

SEQ ID NO: 2885125 - RNA, 18 nt, Human
augcucuuuuuuacucau

SEQ ID NO: 2885126 - RNA, 19 nt, Human
augcucuuuuuuacucauu

SEQ ID NO: 2885127 - RNA, 20 nt, Human
augcucuuuuuuacucauug

SEQ ID NO: 2885128 - RNA, 21 nt, Human
augcucuuuuuuacucauuga

SEQ ID NO: 2885129 - RNA, 22 nt, Human
augcucuuuuuuacucauugaa

SEQ ID NO: 2885130 - RNA, 23 nt, Human
augcucuuuuuuacucauugaaa

SEQ ID NO: 2885131 - RNA, 24 nt, Human
augcucuuuuuuacucauugaaau

SEQ ID NO: 2885132 - RNA, 17 nt, Human
augcugaaaaaacaccu

SEQ ID NO: 2885133 - RNA, 19 nt, Human
augcugaagccaaagccaa

SEQ ID NO: 2885134 - RNA, 15 nt, Human
augcucuucugugga

SEQ ID NO: 2885135 - RNA, 21 nt, Human
augcucuugaccuuguagaga

SEQ ID NO: 2885136 - RNA, 18 nt, Human
auggcugugccucugccu

SEQ ID NO: 2885137 - RNA, 20 nt, Human
auggauuggauuauuuaaua

SEQ ID NO: 2885138 - RNA, 22 nt, Human
auggauuggauuauuuaauaac

SEQ ID NO: 2885139 - RNA, 16 nt, Human
auggauuguuaauuuc

SEQ ID NO: 2885140 - RNA, 22 nt, Human
auggauuguuaauuucaguccu

SEQ ID NO: 2885141 - RNA, 16 nt, Human
auggauucuauuuauu

SEQ ID NO: 2885142 - RNA, 18 nt, Human
auggauugauaauugcau

SEQ ID NO: 2885143 - RNA, 20 nt, Human
auggauugauaauugcauuc

SEQ ID NO: 2885144 - RNA, 15 nt, Human
auggauuggauuauu

SEQ ID NO: 2885145 - RNA, 22 nt, Human
auggaggaaaaccaagccgugg

SEQ ID NO: 2885146 - RNA, 16 nt, Human
auggaaaguaacucau

SEQ ID NO: 2885147 - RNA, 16 nt, Human
auggaggaaaaccaag

SEQ ID NO: 2885148 - RNA, 17 nt, Human
auggaaaaucagcugcu

SEQ ID NO: 2885149 - RNA, 16 nt, Human
auggaaaccugaaaaa

SEQ ID NO: 2885150 - RNA, 22 nt, Human
auggaaacccauaggcccacac

SEQ ID NO: 2885151 - RNA, 21 nt, Human
auggaaacccgaggguugauu

SEQ ID NO: 2885152 - RNA, 13 nt, Human
auggaaaccucac

SEQ ID NO: 2885153 - RNA, 17 nt, Human
auggaaaccucacgcug

SEQ ID NO: 2885154 - RNA, 17 nt, Human
auggaaagaaucuaaua

SEQ ID NO: 2885155 - RNA, 11 nt, Human
auggaaagaau

SEQ ID NO: 2885156 - RNA, 23 nt, Human
auggaaaccugaaaaaaaguuua

SEQ ID NO: 2885157 - RNA, 17 nt, Human
auggcuuauccagcugg

SEQ ID NO: 2885158 - RNA, 18 nt, Human
auggcuuauccagcuggu

SEQ ID NO: 2885159 - RNA, 19 nt, Human
auggcuuauccagcuggug

SEQ ID NO: 2885160 - RNA, 19 nt, Human
auggcugugccucugccug

SEQ ID NO: 2885161 - RNA, 20 nt, Human
auggcugugccucugccugu

SEQ ID NO: 2885162 - RNA, 14 nt, Human
augaugcagucucc

SEQ ID NO: 2885163 - RNA, 15 nt, Human
augaugcagucuccu

SEQ ID NO: 2885164 - RNA, 21 nt, Human
augaugcagucuccucuuuaa

SEQ ID NO: 2885165 - RNA, 22 nt, Human
augaugcagucuccucuuuaaa

SEQ ID NO: 2885166 - RNA, 14 nt, Human
augauguguuguga

SEQ ID NO: 2885167 - RNA, 15 nt, Human
augauguguugugau

SEQ ID NO: 2885168 - RNA, 17 nt, Human
augauggagcgcaccug

SEQ ID NO: 2885169 - RNA, 16 nt, Human
augaugcuuuuacuga

SEQ ID NO: 2885170 - RNA, 21 nt, Human
augaugcuuuuacugaacuuu

SEQ ID NO: 2885171 - RNA, 15 nt, Human
augauggaauuucau

SEQ ID NO: 2885172 - RNA, 16 nt, Human
augaugcccugcucca

SEQ ID NO: 2885173 - RNA, 19 nt, Human
augaugcccugcuccaggg

SEQ ID NO: 2885174 - RNA, 20 nt, Human
augcaauuuugcauuugaau

SEQ ID NO: 2885175 - RNA, 17 nt, Human
augcaauuuccuuuuuu

SEQ ID NO: 2885176 - RNA, 12 nt, Human
augcaauuugau

SEQ ID NO: 2885177 - RNA, 17 nt, Human
augcaauuugauugacu

SEQ ID NO: 2885178 - RNA, 18 nt, Human
augauuaaauaagauucu

SEQ ID NO: 2885179 - RNA, 17 nt, Human
augauuaaauaagauuc

SEQ ID NO: 2885180 - RNA, 15 nt, Human
augauguuucacaua

SEQ ID NO: 2885181 - RNA, 11 nt, Human
augcacagaga

SEQ ID NO: 2885182 - RNA, 16 nt, Human
augcacagagaagcug

SEQ ID NO: 2885183 - RNA, 17 nt, Human
augcacagagaagcugg

SEQ ID NO: 2885184 - RNA, 18 nt, Human
augcacagagaagcuggg

SEQ ID NO: 2885185 - RNA, 12 nt, Human
augcaugaacaa

SEQ ID NO: 2885186 - RNA, 13 nt, Human
augcaugaacaag

SEQ ID NO: 2885187 - RNA, 21 nt, Human
augcaugaacaaguuuuaaug

SEQ ID NO: 2885188 - RNA, 18 nt, Human
augcauaugucacuagaa

SEQ ID NO: 2885189 - RNA, 20 nt, Human
augcauaugucacuagaaug

SEQ ID NO: 2885190 - RNA, 22 nt, Human
augcauaugucacuagaaugga

SEQ ID NO: 2885191 - RNA, 23 nt, Human
augcauaugucacuagaauggau

SEQ ID NO: 2885192 - RNA, 22 nt, Human
augcaucucacuggaugcaaag

SEQ ID NO: 2885193 - RNA, 21 nt, Human
augccugagagacauggcuuu

SEQ ID NO: 2885194 - RNA, 13 nt, Human
augccucugucua

SEQ ID NO: 2885195 - RNA, 14 nt, Human
augccucugucuag

SEQ ID NO: 2885196 - RNA, 17 nt, Human
augccucugucuagcau

SEQ ID NO: 2885197 - RNA, 22 nt, Human
augccucugucuagcaugccaa

SEQ ID NO: 2885198 - RNA, 21 nt, Human
augccucugauaugggacuga

SEQ ID NO: 2885199 - RNA, 22 nt, Human
augccucugauaugggacugag

SEQ ID NO: 2885200 - RNA, 16 nt, Human
augauuaaaaugguga

SEQ ID NO: 2885201 - RNA, 22 nt, Human
aucagcuggucaaacaaacucu

SEQ ID NO: 2885202 - RNA, 13 nt, Human
auauuuauuuaaa

SEQ ID NO: 2885203 - RNA, 16 nt, Human
auauuuauuuaaagca

SEQ ID NO: 2885204 - RNA, 17 nt, Human
auauuuauuuaaagcau

SEQ ID NO: 2885205 - RNA, 17 nt, Human
auauuuauuuauuuauu

SEQ ID NO: 2885206 - RNA, 19 nt, Human
aucacagggcagagccggg

SEQ ID NO: 2885207 - RNA, 15 nt, Human
aucacauguggacuu

SEQ ID NO: 2885208 - RNA, 15 nt, Human
aucacagggcagagc

SEQ ID NO: 2885209 - RNA, 12 nt, Human
aucacagggcag

SEQ ID NO: 2885210 - RNA, 14 nt, Human
aucagcuauuuacu

SEQ ID NO: 2885211 - RNA, 15 nt, Human
aucagcuauuuacug

SEQ ID NO: 2885212 - RNA, 18 nt, Human
aucagcuacuuaagagaa

SEQ ID NO: 2885213 - RNA, 19 nt, Human
aucagcuacuuaagagaaa

SEQ ID NO: 2885214 - RNA, 20 nt, Human
aucagcuacuuaagagaaau

SEQ ID NO: 2885215 - RNA, 21 nt, Human
aucagcuacuuaagagaaaug

SEQ ID NO: 2885216 - RNA, 22 nt, Human
aucagcuacuuaagagaaaugg

SEQ ID NO: 2885217 - RNA, 15 nt, Human
aucacccucuuccug

SEQ ID NO: 2885218 - RNA, 22 nt, Human
aucacauugagcugauauaaau

SEQ ID NO: 2885219 - RNA, 24 nt, Human
aucacauugagcugauauaaauuc

SEQ ID NO: 2885220 - RNA, 16 nt, Human
aucacccucuuccugu

SEQ ID NO: 2885221 - RNA, 12 nt, Human
aucagcacugaa

SEQ ID NO: 2885222 - RNA, 13 nt, Human
aucagcacugaaa

SEQ ID NO: 2885223 - RNA, 14 nt, Human
aucagcacugaaaa

SEQ ID NO: 2885224 - RNA, 15 nt, Human
aucagcacugaaaau

SEQ ID NO: 2885225 - RNA, 18 nt, Human
aucagcaucugugauggg

SEQ ID NO: 2885226 - RNA, 17 nt, Human
auccuccacuuguucag

SEQ ID NO: 2885227 - RNA, 18 nt, Human
auccuccacuuguucagg

SEQ ID NO: 2885228 - RNA, 21 nt, Human
auccucaaacacugcaggcau

SEQ ID NO: 2885229 - RNA, 15 nt, Human
auccucccaccucag

SEQ ID NO: 2885230 - RNA, 16 nt, Human
auccuauuguugaugg

SEQ ID NO: 2885231 - RNA, 22 nt, Human
auccuauuucaguacuucagca

SEQ ID NO: 2885232 - RNA, 15 nt, Human
auccucaaacacugc

SEQ ID NO: 2885233 - RNA, 16 nt, Human
auccucaaacacugca

SEQ ID NO: 2885234 - RNA, 17 nt, Human
auccucaaacacugcag

SEQ ID NO: 2885235 - RNA, 19 nt, Human
auccucaaacacugcaggc

SEQ ID NO: 2885236 - RNA, 18 nt, Human
auccccuggacugggagg

SEQ ID NO: 2885237 - RNA, 13 nt, Human
auccccuuacccu

SEQ ID NO: 2885238 - RNA, 23 nt, Human
auccccuuacccuuagaauccac

SEQ ID NO: 2885239 - RNA, 20 nt, Human
auccccucugucuacaaaua

SEQ ID NO: 2885240 - RNA, 12 nt, Human
auccccugagcc

SEQ ID NO: 2885241 - RNA, 14 nt, Human
auccccugagcccc

SEQ ID NO: 2885242 - RNA, 12 nt, Human
auccccugcuac

SEQ ID NO: 2885243 - RNA, 19 nt, Human
auccccucccugucaaagc

SEQ ID NO: 2885244 - RNA, 20 nt, Human
auccccaaaacaaagucuuu

SEQ ID NO: 2885245 - RNA, 19 nt, Human
auccccguuccugacauca

SEQ ID NO: 2885246 - RNA, 22 nt, Human
auccccguuccugacaucacag

SEQ ID NO: 2885247 - RNA, 13 nt, Human
auccccucaggac

SEQ ID NO: 2885248 - RNA, 15 nt, Human
auccccucccuguca

SEQ ID NO: 2885249 - RNA, 15 nt, Human
auccagacccggcug

SEQ ID NO: 2885250 - RNA, 13 nt, Human
auccccaagccug

SEQ ID NO: 2885251 - RNA, 15 nt, Human
auccaggcacagcug

SEQ ID NO: 2885252 - RNA, 16 nt, Human
auccaggcacagcuga

SEQ ID NO: 2885253 - RNA, 17 nt, Human
auccaggcacagcugag

SEQ ID NO: 2885254 - RNA, 16 nt, Human
auccagacaucaugaa

SEQ ID NO: 2885255 - RNA, 18 nt, Human
auccagacaucaugaauu

SEQ ID NO: 2885256 - RNA, 21 nt, Human
auccagacaucaugaauuuua

SEQ ID NO: 2885257 - RNA, 22 nt, Human
auccagacaucaugaauuuuac

SEQ ID NO: 2885258 - RNA, 22 nt, Human
auccagcucuaagucucaacug

SEQ ID NO: 2885259 - RNA, 14 nt, Human
auccagcuggugag

SEQ ID NO: 2885260 - RNA, 19 nt, Human
auccagcuugccagaugcu

SEQ ID NO: 2885261 - RNA, 20 nt, Human
auccagcuugccagaugcug

SEQ ID NO: 2885262 - RNA, 19 nt, Human
auccucccaccucagccuc

SEQ ID NO: 2885263 - RNA, 18 nt, Human
auccucccaccucagccu

SEQ ID NO: 2885264 - RNA, 20 nt, Human
auccucccaccucagccucc

SEQ ID NO: 2885265 - RNA, 19 nt, Human
auccuccaguaccuugcuu

SEQ ID NO: 2885266 - RNA, 20 nt, Human
auccuccaguaccuugcuuc

SEQ ID NO: 2885267 - RNA, 21 nt, Human
auccuccaguaccuugcuucu

SEQ ID NO: 2885268 - RNA, 16 nt, Human
aucgcucguguguucu

SEQ ID NO: 2885269 - RNA, 21 nt, Human
aucgcucguguguucuaucca

SEQ ID NO: 2885270 - RNA, 23 nt, Human
aucgcucguguguucuauccaaa

SEQ ID NO: 2885271 - RNA, 15 nt, Human
aucgcugacuucaug

SEQ ID NO: 2885272 - RNA, 12 nt, Human
aucgcuggcccc

SEQ ID NO: 2885273 - RNA, 14 nt, Human
aucgcuggccccuu

SEQ ID NO: 2885274 - RNA, 18 nt, Human
aucggagucagccaggag

SEQ ID NO: 2885275 - RNA, 16 nt, Human
aucgcugugaugcugg

SEQ ID NO: 2885276 - RNA, 22 nt, Human
aucuauucugagaaaacaagca

SEQ ID NO: 2885277 - RNA, 13 nt, Human
aucuauucugugu

SEQ ID NO: 2885278 - RNA, 18 nt, Human
aucuauucugagaaaaca

SEQ ID NO: 2885279 - RNA, 17 nt, Human
aucuauucugagaaaac

SEQ ID NO: 2885280 - RNA, 23 nt, Human
aucuccccuugcacuaaaguaug

SEQ ID NO: 2885281 - RNA, 15 nt, Human
aucucccgcugcugc

SEQ ID NO: 2885282 - RNA, 16 nt, Human
aucuauguuucaucuu

SEQ ID NO: 2885283 - RNA, 20 nt, Human
aucuauguuucaucuuguuu

SEQ ID NO: 2885284 - RNA, 13 nt, Human
aucuaucuuccaa

SEQ ID NO: 2885285 - RNA, 13 nt, Human
aucuaugaggaaa

SEQ ID NO: 2885286 - RNA, 13 nt, Human
aucuaugauauaa

SEQ ID NO: 2885287 - RNA, 15 nt, Human
aucuaugauauaacc

SEQ ID NO: 2885288 - RNA, 14 nt, Human
aucuauuaauauau

SEQ ID NO: 2885289 - RNA, 23 nt, Human
aucuaugggagagugucaaccag

SEQ ID NO: 2885290 - RNA, 12 nt, Human
aucuauuaauau

SEQ ID NO: 2885291 - RNA, 15 nt, Human
aucuauuaauauaug

SEQ ID NO: 2885292 - RNA, 18 nt, Human
aucuauuaauauauguau

SEQ ID NO: 2885293 - RNA, 14 nt, Human
aucugcuucagugg

SEQ ID NO: 2885294 - RNA, 14 nt, Human
aucugcuuuuauua

SEQ ID NO: 2885295 - RNA, 16 nt, Human
aucugcuuuuauuaaa

SEQ ID NO: 2885296 - RNA, 12 nt, Human
aucugcuucagu

SEQ ID NO: 2885297 - RNA, 21 nt, Human
aucuggaaaccucuacauauu

SEQ ID NO: 2885298 - RNA, 23 nt, Human
aucuggaaaccucuacauauuua

SEQ ID NO: 2885299 - RNA, 21 nt, Human
aucuggccccagguagaaacu

SEQ ID NO: 2885300 - RNA, 20 nt, Human
aucuggcccucgacacucac

SEQ ID NO: 2885301 - RNA, 21 nt, Human
aucuggcccucgacacucacc

SEQ ID NO: 2885302 - RNA, 23 nt, Human
aucuggccguugauguuggcugg

SEQ ID NO: 2885303 - RNA, 17 nt, Human
aucuggccuaaaaucuu

SEQ ID NO: 2885304 - RNA, 18 nt, Human
aucuggccuaaaaucuug

SEQ ID NO: 2885305 - RNA, 19 nt, Human
aucuggccuaaaaucuugg

SEQ ID NO: 2885306 - RNA, 20 nt, Human
aucuggccuaaaaucuugga

SEQ ID NO: 2885307 - RNA, 21 nt, Human
aucuggccuaaaaucuuggaa

SEQ ID NO: 2885308 - RNA, 22 nt, Human
aucuggccuaaaaucuuggaag

SEQ ID NO: 2885309 - RNA, 23 nt, Human
aucuggccuaaaaucuuggaagu

SEQ ID NO: 2885310 - RNA, 12 nt, Human
aucuggccuggc

SEQ ID NO: 2885311 - RNA, 13 nt, Human
aucuggccuggcc

SEQ ID NO: 2885312 - RNA, 19 nt, Human
aucuggacuccucugucca

SEQ ID NO: 2885313 - RNA, 15 nt, Human
aucuggacuccucug

SEQ ID NO: 2885314 - RNA, 16 nt, Human
aucuggacuccucugu

SEQ ID NO: 2885315 - RNA, 17 nt, Human
aucuggacuccucuguc

SEQ ID NO: 2885316 - RNA, 18 nt, Human
aucuggacuccucugucc

SEQ ID NO: 2885317 - RNA, 19 nt, Human
aucucugugugcacaaaua

SEQ ID NO: 2885318 - RNA, 13 nt, Human
aucucuguuaugu

SEQ ID NO: 2885319 - RNA, 16 nt, Human
aucucuguuauguacu

SEQ ID NO: 2885320 - RNA, 18 nt, Human
aucucuguuauguacugu

SEQ ID NO: 2885321 - RNA, 19 nt, Human
aucucuguuauguacugua

SEQ ID NO: 2885322 - RNA, 20 nt, Human
aucucuguuauguacuguac

SEQ ID NO: 2885323 - RNA, 15 nt, Human
aucucuuaaauuggg

SEQ ID NO: 2885324 - RNA, 23 nt, Human
aucucuuaaauuggguucaugau

SEQ ID NO: 2885325 - RNA, 17 nt, Human
aucucugugugcacaaa

SEQ ID NO: 2885326 - RNA, 15 nt, Human
aucucugugugcaca

SEQ ID NO: 2885327 - RNA, 17 nt, Human
aucucugcuuuggaaau

SEQ ID NO: 2885328 - RNA, 18 nt, Human
aucucuguacuuugcuug

SEQ ID NO: 2885329 - RNA, 12 nt, Human
aucucccuuccu

SEQ ID NO: 2885330 - RNA, 17 nt, Human
aucucgcucccucccag

SEQ ID NO: 2885331 - RNA, 15 nt, Human
aucuccuuucaggga

SEQ ID NO: 2885332 - RNA, 15 nt, Human
aucucggcucacugc

SEQ ID NO: 2885333 - RNA, 14 nt, Human
aucucggcucacug

SEQ ID NO: 2885334 - RNA, 19 nt, Human
aucucgcucccucccagga

SEQ ID NO: 2885335 - RNA, 19 nt, Human
aucucggagcaucccggag

SEQ ID NO: 2885336 - RNA, 16 nt, Human
aucucggcucacugca

SEQ ID NO: 2885337 - RNA, 16 nt, Human
aucugggaagauuucu

SEQ ID NO: 2885338 - RNA, 21 nt, Human
aucuucugccuuagucucagu

SEQ ID NO: 2885339 - RNA, 16 nt, Human
aucuggcugccuuugc

SEQ ID NO: 2885340 - RNA, 16 nt, Human
aucuggcuuauuuuaa

SEQ ID NO: 2885341 - RNA, 17 nt, Human
aucuggcuuauuuuaau

SEQ ID NO: 2885342 - RNA, 18 nt, Human
aucuggcuuauuuuaaug

SEQ ID NO: 2885343 - RNA, 19 nt, Human
aucuggcuuauuuuaaugu

SEQ ID NO: 2885344 - RNA, 21 nt, Human
aucuggcuuauuuuaauguga

SEQ ID NO: 2885345 - RNA, 22 nt, Human
aucuggcuuauuuuaaugugau

SEQ ID NO: 2885346 - RNA, 17 nt, Human
aucuggcuccuuuacaa

SEQ ID NO: 2885347 - RNA, 19 nt, Human
aucuggcuccuuuacaaaa

SEQ ID NO: 2885348 - RNA, 21 nt, Human
aucuggcuccuuuacaaaaga

SEQ ID NO: 2885349 - RNA, 15 nt, Human
aucuggccuggccug

SEQ ID NO: 2885350 - RNA, 16 nt, Human
aucuggccuggccugg

SEQ ID NO: 2885351 - RNA, 17 nt, Human
aucuggccuggccuggc

SEQ ID NO: 2885352 - RNA, 18 nt, Human
aucuggccuggccuggcc

SEQ ID NO: 2885353 - RNA, 22 nt, Human
aucuggccuggccuggcccugc

SEQ ID NO: 2885354 - RNA, 23 nt, Human
aucuggccuggccuggcccugcc

SEQ ID NO: 2885355 - RNA, 20 nt, Human
aucuucuuaugcaauuuccu

SEQ ID NO: 2885356 - RNA, 17 nt, Human
aucuucuuaugcaauuu

SEQ ID NO: 2885357 - RNA, 22 nt, Human
aucuucugguuuaaacuuguuu

SEQ ID NO: 2885358 - RNA, 15 nt, Human
aucucggcucagugc

SEQ ID NO: 2885359 - RNA, 12 nt, Human
aucuugaaugug

SEQ ID NO: 2885360 - RNA, 13 nt, Human
aucuugaaugugg

SEQ ID NO: 2885361 - RNA, 14 nt, Human
aucuugaauguggu

SEQ ID NO: 2885362 - RNA, 19 nt, Human
aucuugaauguggucucag

SEQ ID NO: 2885363 - RNA, 20 nt, Human
aucuugaauguggucucagg

SEQ ID NO: 2885364 - RNA, 21 nt, Human
aucuugaauguggucucagga

SEQ ID NO: 2885365 - RNA, 14 nt, Human
aucuugaagggccc

SEQ ID NO: 2885366 - RNA, 15 nt, Human
aucuugaagggccca

SEQ ID NO: 2885367 - RNA, 16 nt, Human
aucuugaagggcccag

SEQ ID NO: 2885368 - RNA, 17 nt, Human
aucuugaagggcccagg

SEQ ID NO: 2885369 - RNA, 19 nt, Human
augaaaaauagugucuuug

SEQ ID NO: 2885370 - RNA, 20 nt, Human
augaaaaauagugucuuugu

SEQ ID NO: 2885371 - RNA, 15 nt, Human
augaaaaaugaaaga

SEQ ID NO: 2885372 - RNA, 16 nt, Human
augaaaaaugaaagau

SEQ ID NO: 2885373 - RNA, 17 nt, Human
augaaaaaugaaagaug

SEQ ID NO: 2885374 - RNA, 19 nt, Human
augaaaaaugaaagaugau

SEQ ID NO: 2885375 - RNA, 13 nt, Human
augaaaaacaacc

SEQ ID NO: 2885376 - RNA, 22 nt, Human
augaaggcagaaaaaugucauu

SEQ ID NO: 2885377 - RNA, 17 nt, Human
augaaggcuuuuggucu

SEQ ID NO: 2885378 - RNA, 21 nt, Human
augaaggagaggcaacaucca

SEQ ID NO: 2885379 - RNA, 23 nt, Human
augaaguuuccuuggcuggugca

SEQ ID NO: 2885380 - RNA, 19 nt, Human
augaaguuuccuuggcugg

SEQ ID NO: 2885381 - RNA, 13 nt, Human
augaaguaaagaa

SEQ ID NO: 2885382 - RNA, 21 nt, Human
augaaguaaagaacugcacau

SEQ ID NO: 2885383 - RNA, 22 nt, Human
augaaguaaagccauuaaauga

SEQ ID NO: 2885384 - RNA, 18 nt, Human
augaaguuugaacuucau

SEQ ID NO: 2885385 - RNA, 19 nt, Human
augaaguuugaacuucaua

SEQ ID NO: 2885386 - RNA, 16 nt, Human
augaaguuuuacauug

SEQ ID NO: 2885387 - RNA, 14 nt, Human
augaaguuuuacau

SEQ ID NO: 2885388 - RNA, 22 nt, Human
augaaguuuguaguuguuuuaa

SEQ ID NO: 2885389 - RNA, 19 nt, Human
augagcucuacccagggcc

SEQ ID NO: 2885390 - RNA, 18 nt, Human
augagcucuacccagggc

SEQ ID NO: 2885391 - RNA, 16 nt, Human
augagcucuacccagg

SEQ ID NO: 2885392 - RNA, 15 nt, Human
augagcucuacccag

SEQ ID NO: 2885393 - RNA, 17 nt, Human
augacgcugauacauaa

SEQ ID NO: 2885394 - RNA, 22 nt, Human
augagcuccucuuccuggcuuc

SEQ ID NO: 2885395 - RNA, 14 nt, Human
augagcuccucuuc

SEQ ID NO: 2885396 - RNA, 13 nt, Human
augaggacauguu

SEQ ID NO: 2885397 - RNA, 21 nt, Human
augaggaggggccccccugcc

SEQ ID NO: 2885398 - RNA, 18 nt, Human
augaggcaaugucaggaa

SEQ ID NO: 2885399 - RNA, 18 nt, Human
augaggcaaccugauugu

SEQ ID NO: 2885400 - RNA, 19 nt, Human
augaggcaaccugauugua

SEQ ID NO: 2885401 - RNA, 20 nt, Human
augaggcaaccugauuguaa

SEQ ID NO: 2885402 - RNA, 21 nt, Human
augaggcaaugucaggaacag

SEQ ID NO: 2885403 - RNA, 22 nt, Human
augaggaacuguagaugaugua

SEQ ID NO: 2885404 - RNA, 14 nt, Human
augaggaauaauua

SEQ ID NO: 2885405 - RNA, 23 nt, Human
augaggaauaauuauuuauuuaa

SEQ ID NO: 2885406 - RNA, 21 nt, Human
augaggaacuguagaugaugu

SEQ ID NO: 2885407 - RNA, 22 nt, Human
augagcucuacccagggccugc

SEQ ID NO: 2885408 - RNA, 16 nt, Human
augaggaacuguagau

SEQ ID NO: 2885409 - RNA, 21 nt, Human
augaggaggaugucccugggc

SEQ ID NO: 2885410 - RNA, 24 nt, Human
augaggaggaugucccugggccag

SEQ ID NO: 2885411 - RNA, 21 nt, Human
augaggagaaaaaaagcaugu

SEQ ID NO: 2885412 - RNA, 17 nt, Human
augaggagagaaaauau

SEQ ID NO: 2885413 - RNA, 18 nt, Human
augaggagagaaaauaua

SEQ ID NO: 2885414 - RNA, 19 nt, Human
augaggagagaaaauauau

SEQ ID NO: 2885415 - RNA, 22 nt, Human
uaaauaacaggcauuuguucac

SEQ ID NO: 2885416 - RNA, 19 nt, Human
uaaauauaauucuguaaau

SEQ ID NO: 2885417 - RNA, 16 nt, Human
uaaauauaauucugua

SEQ ID NO: 2885418 - RNA, 18 nt, Human
uaaauauaauucuguaaa

SEQ ID NO: 2885419 - RNA, 13 nt, Human
uaaauauaauucu

SEQ ID NO: 2885420 - RNA, 15 nt, Human
uaaauauaauucugu

SEQ ID NO: 2885421 - RNA, 14 nt, Human
uaaauauaagccuu

SEQ ID NO: 2885422 - RNA, 22 nt, Human
uaaauauaagccuuuuauacug

SEQ ID NO: 2885423 - RNA, 18 nt, Human
uaaauaguauuugagagu

SEQ ID NO: 2885424 - RNA, 15 nt, Human
uaaaucuaaaucuau

SEQ ID NO: 2885425 - RNA, 19 nt, Human
uaaaucuaaaucuauuuau

SEQ ID NO: 2885426 - RNA, 17 nt, Human
uaaauccugccauuuaa

SEQ ID NO: 2885427 - RNA, 18 nt, Human
uaaauccugccauuuaaa

SEQ ID NO: 2885428 - RNA, 14 nt, Human
uaaaucuaaaucua

SEQ ID NO: 2885429 - RNA, 21 nt, Human
uaaauaggagaggaugagagc

SEQ ID NO: 2885430 - RNA, 16 nt, Human
uaaauaggagaggaug

SEQ ID NO: 2885431 - RNA, 19 nt, Human
uaaauaguaaaaauaaaau

SEQ ID NO: 2885432 - RNA, 20 nt, Human
uaaauaguaaaaauaaaauu

SEQ ID NO: 2885433 - RNA, 18 nt, Human
uaaauacacaacacacac

SEQ ID NO: 2885434 - RNA, 14 nt, Human
uaaauaauuuaacu

SEQ ID NO: 2885435 - RNA, 16 nt, Human
uaaauaauuuaacuac

SEQ ID NO: 2885436 - RNA, 17 nt, Human
uaaauaauuuaacuacc

SEQ ID NO: 2885437 - RNA, 16 nt, Human
uaacaaguaccaaagu

SEQ ID NO: 2885438 - RNA, 21 nt, Human
uaacaaguaccaaaguuuuau

SEQ ID NO: 2885439 - RNA, 13 nt, Human
uaacaagccaccc

SEQ ID NO: 2885440 - RNA, 13 nt, Human
uaacaagaagaug

SEQ ID NO: 2885441 - RNA, 14 nt, Human
uaacaagaagauga

SEQ ID NO: 2885442 - RNA, 15 nt, Human
uaacaagaagaugaa

SEQ ID NO: 2885443 - RNA, 16 nt, Human
uaacaagaagaugaau

SEQ ID NO: 2885444 - RNA, 18 nt, Human
uaacaagaagaugaaugg

SEQ ID NO: 2885445 - RNA, 19 nt, Human
uaacaagaagaugaauggc

SEQ ID NO: 2885446 - RNA, 15 nt, Human
uaacaagaaaaucaa

SEQ ID NO: 2885447 - RNA, 16 nt, Human
uaacaacuaugauuug

SEQ ID NO: 2885448 - RNA, 21 nt, Human
uaacaacuaugauuuggaaaa

SEQ ID NO: 2885449 - RNA, 22 nt, Human
uaacaacuaugauuuggaaaau

SEQ ID NO: 2885450 - RNA, 13 nt, Human
uaacaaccuggcc

SEQ ID NO: 2885451 - RNA, 13 nt, Human
uaacaaauucuga

SEQ ID NO: 2885452 - RNA, 19 nt, Human
uaacaaaugcuauuaaagu

SEQ ID NO: 2885453 - RNA, 20 nt, Human
uaacaaaugcuauuaaagug

SEQ ID NO: 2885454 - RNA, 17 nt, Human
uaacaaauaugcuaauu

SEQ ID NO: 2885455 - RNA, 18 nt, Human
uaacaaauaugcuaauuu

SEQ ID NO: 2885456 - RNA, 23 nt, Human
uaacaaaaaaauauauuuaauga

SEQ ID NO: 2885457 - RNA, 20 nt, Human
uaacaaaaaaauauauuuaa

SEQ ID NO: 2885458 - RNA, 15 nt, Human
uaacaaaaaagcuaa

SEQ ID NO: 2885459 - RNA, 22 nt, Human
uaacaaaacacucggcauuuca

SEQ ID NO: 2885460 - RNA, 12 nt, Human
uaacaaaagaug

SEQ ID NO: 2885461 - RNA, 14 nt, Human
uaacaaaagaugaa

SEQ ID NO: 2885462 - RNA, 15 nt, Human
uaacaaaagaugaaa

SEQ ID NO: 2885463 - RNA, 18 nt, Human
uaacaaaagaugaaagca

SEQ ID NO: 2885464 - RNA, 20 nt, Human
uaacaaaagaugaaagcagg

SEQ ID NO: 2885465 - RNA, 21 nt, Human
uaacaaaaguucccugaaaca

SEQ ID NO: 2885466 - RNA, 16 nt, Human
uaaauuuugaguucua

SEQ ID NO: 2885467 - RNA, 15 nt, Human
uaaauuuuaauuuau

SEQ ID NO: 2885468 - RNA, 16 nt, Human
uaaauuuuacccuuua

SEQ ID NO: 2885469 - RNA, 15 nt, Human
uaaauuuucugaaac

SEQ ID NO: 2885470 - RNA, 18 nt, Human
uaaauuuuacccuuuaga

SEQ ID NO: 2885471 - RNA, 14 nt, Human
uaaaugaucugccu

SEQ ID NO: 2885472 - RNA, 17 nt, Human
uaaaugauucuuaguga

SEQ ID NO: 2885473 - RNA, 16 nt, Human
uaaaugcaaaguucug

SEQ ID NO: 2885474 - RNA, 19 nt, Human
uaaaugcaaaguucugugu

SEQ ID NO: 2885475 - RNA, 21 nt, Human
uaaaugcaaaguucuguguuu

SEQ ID NO: 2885476 - RNA, 10 nt, Human
uaaauguuug

SEQ ID NO: 2885477 - RNA, 11 nt, Human
uaaauguuuga

SEQ ID NO: 2885478 - RNA, 17 nt, Human
uaaauguuugacacaau

SEQ ID NO: 2885479 - RNA, 22 nt, Human
uaaauguuugacacaauuggaa

SEQ ID NO: 2885480 - RNA, 14 nt, Human
uaaauguuuuauaa

SEQ ID NO: 2885481 - RNA, 16 nt, Human
uaaauguuuuauaagu

SEQ ID NO: 2885482 - RNA, 17 nt, Human
uaaauguuuuauaaguu

SEQ ID NO: 2885483 - RNA, 19 nt, Human
uaaauguuuuauaaguuca

SEQ ID NO: 2885484 - RNA, 22 nt, Human
uaaauguuuuauaaguucacaa

SEQ ID NO: 2885485 - RNA, 22 nt, Human
uaaaugagcaaauaucauacug

SEQ ID NO: 2885486 - RNA, 12 nt, Human
uaaauuaagaca

SEQ ID NO: 2885487 - RNA, 15 nt, Human
uaaauuaagacaugc

SEQ ID NO: 2885488 - RNA, 13 nt, Human
uaaauuaagacau

SEQ ID NO: 2885489 - RNA, 22 nt, Human
uaaauuaggaggcucaacaaua

SEQ ID NO: 2885490 - RNA, 23 nt, Human
uaaauuaggaggcucaacaauaa

SEQ ID NO: 2885491 - RNA, 22 nt, Human
aauaaaaauauuguguugugaa

SEQ ID NO: 2885492 - RNA, 17 nt, Human
aauaaaaacuuacacuc

SEQ ID NO: 2885493 - RNA, 18 nt, Human
aauaaaaacccacaaaaa

SEQ ID NO: 2885494 - RNA, 21 nt, Human
aauaaaaacccacaaaaaugu

SEQ ID NO: 2885495 - RNA, 12 nt, Human
aauaaaaacuau

SEQ ID NO: 2885496 - RNA, 19 nt, Human
aauaaaaacuauucgaaug

SEQ ID NO: 2885497 - RNA, 23 nt, Human
aauaaaaacauugccuuugaaug

SEQ ID NO: 2885498 - RNA, 19 nt, Human
aauaaaaaauuaugacaau

SEQ ID NO: 2885499 - RNA, 21 nt, Human
aauaaaaaauuaugacaaugu

SEQ ID NO: 2885500 - RNA, 13 nt, Human
aauaaaaaugaua

SEQ ID NO: 2885501 - RNA, 11 nt, Human
aauaaaagccu

SEQ ID NO: 2885502 - RNA, 14 nt, Human
aauaaaagugcaca

SEQ ID NO: 2885503 - RNA, 19 nt, Human
aauaaaagugcacaccuua

SEQ ID NO: 2885504 - RNA, 19 nt, Human
aauaaaaguuuuacaaagg

SEQ ID NO: 2885505 - RNA, 20 nt, Human
aauaaaaguuuuacaaaggg

SEQ ID NO: 2885506 - RNA, 16 nt, Human
aauaaaaucuugaaaa

SEQ ID NO: 2885507 - RNA, 13 nt, Human
aauaaaaucaauu

SEQ ID NO: 2885508 - RNA, 16 nt, Human
aauaaaaucaauuuuu

SEQ ID NO: 2885509 - RNA, 17 nt, Human
aauaaaauaauucuaaa

SEQ ID NO: 2885510 - RNA, 15 nt, Human
aauaaaauaauucua

SEQ ID NO: 2885511 - RNA, 16 nt, Human
aauaaaauaauucuaa

SEQ ID NO: 2885512 - RNA, 18 nt, Human
aauaaaggaugugauugu

SEQ ID NO: 2885513 - RNA, 15 nt, Human
aauaaaguauauaua

SEQ ID NO: 2885514 - RNA, 16 nt, Human
aauaaaguacaagagc

SEQ ID NO: 2885515 - RNA, 13 nt, Human
aauaaaaaaugga

SEQ ID NO: 2885516 - RNA, 18 nt, Human
uaaaguguaaguucacaa

SEQ ID NO: 2885517 - RNA, 12 nt, Human
uaaaguguaaua

SEQ ID NO: 2885518 - RNA, 16 nt, Human
uaaaguguaauaauau

SEQ ID NO: 2885519 - RNA, 18 nt, Human
uaaaguguaauaauauga

SEQ ID NO: 2885520 - RNA, 21 nt, Human
uaaaguggguuauucuggagu

SEQ ID NO: 2885521 - RNA, 22 nt, Human
uaaaguggguuauucuggaguu

SEQ ID NO: 2885522 - RNA, 20 nt, Human
uaaagugcuaagguucuaag

SEQ ID NO: 2885523 - RNA, 21 nt, Human
uaaagugcuaagguucuaagg

SEQ ID NO: 2885524 - RNA, 22 nt, Human
uaaagugcuaagguucuaaggc

SEQ ID NO: 2885525 - RNA, 11 nt, Human
uaaagugcuug

SEQ ID NO: 2885526 - RNA, 15 nt, Human
uaaagugcuugugua

SEQ ID NO: 2885527 - RNA, 16 nt, Human
uaaagugcuuguguaa

SEQ ID NO: 2885528 - RNA, 17 nt, Human
uaaagugcuuguguaau

SEQ ID NO: 2885529 - RNA, 19 nt, Human
uaaaguccuuuucuugcuu

SEQ ID NO: 2885530 - RNA, 21 nt, Human
uaaaguccuuuucuugcuuac

SEQ ID NO: 2885531 - RNA, 16 nt, Human
uaaagucuauggacag

SEQ ID NO: 2885532 - RNA, 14 nt, Human
uaaagucugaauca

SEQ ID NO: 2885533 - RNA, 21 nt, Human
uaaagggaaaggauucaugug

SEQ ID NO: 2885534 - RNA, 16 nt, Human
uaaagugauaauuucu

SEQ ID NO: 2885535 - RNA, 16 nt, Human
uaaagugaagaauccu

SEQ ID NO: 2885536 - RNA, 14 nt, Human
uaaagugaauuguu

SEQ ID NO: 2885537 - RNA, 22 nt, Human
uaaagugaauuguugacaaaug

SEQ ID NO: 2885538 - RNA, 15 nt, Human
uaaagugcuaagguu

SEQ ID NO: 2885539 - RNA, 16 nt, Human
uaaagugcuaagguuc

SEQ ID NO: 2885540 - RNA, 17 nt, Human
uaaagugcuaagguucu

SEQ ID NO: 2885541 - RNA, 18 nt, Human
uaaagugcuaagguucua

SEQ ID NO: 2885542 - RNA, 19 nt, Human
uaaagugcuaagguucuaa

SEQ ID NO: 2885543 - RNA, 20 nt, Human
aauaacacacauauaaacau

SEQ ID NO: 2885544 - RNA, 19 nt, Human
aauaacacuaaaauuuuag

SEQ ID NO: 2885545 - RNA, 21 nt, Human
aauaaauucccaacuucucuu

SEQ ID NO: 2885546 - RNA, 14 nt, Human
aauaaauugaaauu

SEQ ID NO: 2885547 - RNA, 15 nt, Human
aauaacaaagcccuu

SEQ ID NO: 2885548 - RNA, 14 nt, Human
aauaacaaaaugga

SEQ ID NO: 2885549 - RNA, 15 nt, Human
aauaacaaaauggac

SEQ ID NO: 2885550 - RNA, 14 nt, Human
aauaaauuaguugu

SEQ ID NO: 2885551 - RNA, 16 nt, Human
aauaaauuaguuguua

SEQ ID NO: 2885552 - RNA, 14 nt, Human
aauaaauaaaagcc

SEQ ID NO: 2885553 - RNA, 19 nt, Human
aauaaaguuugcuuagaaa

SEQ ID NO: 2885554 - RNA, 14 nt, Human
aauaaauagagcaa

SEQ ID NO: 2885555 - RNA, 21 nt, Human
aauaaauagagcaauuacaag

SEQ ID NO: 2885556 - RNA, 20 nt, Human
aauaauuagguuaacauugu

SEQ ID NO: 2885557 - RNA, 22 nt, Human
aauaauuagguuaacauuguug

SEQ ID NO: 2885558 - RNA, 16 nt, Human
aauaaguauuuauaau

SEQ ID NO: 2885559 - RNA, 21 nt, Human
aauaaggcaggcauugaggaa

SEQ ID NO: 2885560 - RNA, 14 nt, Human
aauaagcucuaguu

SEQ ID NO: 2885561 - RNA, 15 nt, Human
aauaagcucuaguuc

SEQ ID NO: 2885562 - RNA, 22 nt, Human
aauaagcucuaguucuuaacaa

SEQ ID NO: 2885563 - RNA, 14 nt, Human
aauaagcaggaugu

SEQ ID NO: 2885564 - RNA, 12 nt, Human
aauaagauucua

SEQ ID NO: 2885565 - RNA, 13 nt, Human
aauaagauucuaa

SEQ ID NO: 2885566 - RNA, 14 nt, Human
aauaagauucuaac

SEQ ID NO: 2885567 - RNA, 15 nt, Human
aauaagcaaaauccu

SEQ ID NO: 2885568 - RNA, 21 nt, Human
aauaacaggcauuuguucacu

SEQ ID NO: 2885569 - RNA, 20 nt, Human
aauaacauaauuuguacaua

SEQ ID NO: 2885570 - RNA, 19 nt, Human
aauaacuaguguugcuugg

SEQ ID NO: 2885571 - RNA, 13 nt, Human
uaaacaaacauug

SEQ ID NO: 2885572 - RNA, 15 nt, Human
uaaacaaacauugug

SEQ ID NO: 2885573 - RNA, 22 nt, Human
uaaacaaacauuguguugacau

SEQ ID NO: 2885574 - RNA, 14 nt, Human
uaaacaaaccagaa

SEQ ID NO: 2885575 - RNA, 13 nt, Human
uaaacaaacucuu

SEQ ID NO: 2885576 - RNA, 17 nt, Human
uaaacaaacucuugaag

SEQ ID NO: 2885577 - RNA, 16 nt, Human
uaaacaaagauucaug

SEQ ID NO: 2885578 - RNA, 13 nt, Human
uaaacaaagguug

SEQ ID NO: 2885579 - RNA, 18 nt, Human
uaaaccaguuuagauuuc

SEQ ID NO: 2885580 - RNA, 19 nt, Human
uaaaccaguuuagauuuca

SEQ ID NO: 2885581 - RNA, 18 nt, Human
uaaacaaagauucaugau

SEQ ID NO: 2885582 - RNA, 22 nt, Human
uaaaccaccagugcccaaaguc

SEQ ID NO: 2885583 - RNA, 12 nt, Human
uaaaccaauuuu

SEQ ID NO: 2885584 - RNA, 18 nt, Human
uaaacaaaauagaagcug

SEQ ID NO: 2885585 - RNA, 23 nt, Human
uaaacaaaauagaagcuguagua

SEQ ID NO: 2885586 - RNA, 16 nt, Human
uaaaauuuuuuugguc

SEQ ID NO: 2885587 - RNA, 22 nt, Human
uaaaauuuuuuuggucuuuuug

SEQ ID NO: 2885588 - RNA, 22 nt, Human
uaaaauuuuaggcacucuuaaa

SEQ ID NO: 2885589 - RNA, 19 nt, Human
uaaaauuuugcuuuuaauu

SEQ ID NO: 2885590 - RNA, 21 nt, Human
uaaaauuuugcuuuuaauuaa

SEQ ID NO: 2885591 - RNA, 17 nt, Human
uaaaauuaugaaucuga

SEQ ID NO: 2885592 - RNA, 20 nt, Human
uaaaauuaugaaucugauuu

SEQ ID NO: 2885593 - RNA, 22 nt, Human
uaaaauuaucaauaucuaauau

SEQ ID NO: 2885594 - RNA, 16 nt, Human
uaaaauuaaagcugaa

SEQ ID NO: 2885595 - RNA, 18 nt, Human
uaaaauuaaagcugaaaa

SEQ ID NO: 2885596 - RNA, 19 nt, Human
uaaaauuaaagcugaaaac

SEQ ID NO: 2885597 - RNA, 11 nt, Human
uaaaauuagau

SEQ ID NO: 2885598 - RNA, 16 nt, Human
uaaaauuagaugcaug

SEQ ID NO: 2885599 - RNA, 18 nt, Human
aaguuuugaaaagcuauu

SEQ ID NO: 2885600 - RNA, 12 nt, Human
aaguuuugaaaa

SEQ ID NO: 2885601 - RNA, 13 nt, Human
aaguuuugaaaag

SEQ ID NO: 2885602 - RNA, 15 nt, Human
aaguuuugaaaagcu

SEQ ID NO: 2885603 - RNA, 16 nt, Human
aaguuuugaaaagcua

SEQ ID NO: 2885604 - RNA, 20 nt, Human
aaguuuugaguagauauuac

SEQ ID NO: 2885605 - RNA, 23 nt, Human
aaguuuugaguagauauuacuuu

SEQ ID NO: 2885606 - RNA, 23 nt, Human
aaguuuuggguauguuuaaucug

SEQ ID NO: 2885607 - RNA, 14 nt, Human
uaaaauguugaaua

SEQ ID NO: 2885608 - RNA, 13 nt, Human
aaguuuuaucaag

SEQ ID NO: 2885609 - RNA, 23 nt, Human
aaguuuucagaaccucuucccca

SEQ ID NO: 2885610 - RNA, 22 nt, Human
aaguuuucccuugaggaaacaa

SEQ ID NO: 2885611 - RNA, 13 nt, Human
aaguuuuccugag

SEQ ID NO: 2885612 - RNA, 13 nt, Human
aaguuuucuguag

SEQ ID NO: 2885613 - RNA, 21 nt, Human
aaguuuucuguagucauuuac

SEQ ID NO: 2885614 - RNA, 22 nt, Human
aaguuuucuguagucauuuacu

SEQ ID NO: 2885615 - RNA, 21 nt, Human
aaguuuucccuugaggaaaca

SEQ ID NO: 2885616 - RNA, 23 nt, Human
aaguuuguuagauagcugcaugu

SEQ ID NO: 2885617 - RNA, 13 nt, Human
aaguuuuaaugua

SEQ ID NO: 2885618 - RNA, 14 nt, Human
aaguuuuaauguau

SEQ ID NO: 2885619 - RNA, 12 nt, Human
aaguuuauucuc

SEQ ID NO: 2885620 - RNA, 16 nt, Human
aaguuuauucucauuu

SEQ ID NO: 2885621 - RNA, 12 nt, Human
aaguuucaggug

SEQ ID NO: 2885622 - RNA, 14 nt, Human
aaguuucaggugac

SEQ ID NO: 2885623 - RNA, 15 nt, Human
aaguuucaggugaca

SEQ ID NO: 2885624 - RNA, 16 nt, Human
aaguuucaggugacau

SEQ ID NO: 2885625 - RNA, 16 nt, Human
aaguuucaaugugauu

SEQ ID NO: 2885626 - RNA, 22 nt, Human
aaguuucaaugugauucuaaug

SEQ ID NO: 2885627 - RNA, 20 nt, Human
aaguuucaaacuuacuauuu

SEQ ID NO: 2885628 - RNA, 22 nt, Human
aaguuucaaacuuacuauuuug

SEQ ID NO: 2885629 - RNA, 16 nt, Human
aaguuugcuuagaaaa

SEQ ID NO: 2885630 - RNA, 15 nt, Human
aaguuugcuuguuuc

SEQ ID NO: 2885631 - RNA, 16 nt, Human
aaguuugcuuguuucu

SEQ ID NO: 2885632 - RNA, 19 nt, Human
aaguuugcuuguuucuugg

SEQ ID NO: 2885633 - RNA, 15 nt, Human
aaguuugcuuagaaa

SEQ ID NO: 2885634 - RNA, 19 nt, Human
aaguuuggcaauaguuugc

SEQ ID NO: 2885635 - RNA, 19 nt, Human
aaguuuguaguuguuuuaa

SEQ ID NO: 2885636 - RNA, 20 nt, Human
aaguuuguccauuuguaaaa

SEQ ID NO: 2885637 - RNA, 13 nt, Human
aaguuugcuuaga

SEQ ID NO: 2885638 - RNA, 21 nt, Human
aaguuugcacuguaugcugga

SEQ ID NO: 2885639 - RNA, 20 nt, Human
aaguuugccuuuguaccaua

SEQ ID NO: 2885640 - RNA, 14 nt, Human
aaguuugcacugua

SEQ ID NO: 2885641 - RNA, 17 nt, Human
aaguuucaggugacaug

SEQ ID NO: 2885642 - RNA, 19 nt, Human
aaguuucaggugacaugug

SEQ ID NO: 2885643 - RNA, 21 nt, Human
aaguuucaggugacaugugaa

SEQ ID NO: 2885644 - RNA, 22 nt, Human
aaguuucaggugacaugugaaa

SEQ ID NO: 2885645 - RNA, 16 nt, Human
aaguucucaaugugaa

SEQ ID NO: 2885646 - RNA, 13 nt, Human
aaguucucauugu

SEQ ID NO: 2885647 - RNA, 19 nt, Human
aaguuuacauuguaaauag

SEQ ID NO: 2885648 - RNA, 12 nt, Human
aaguuuacauuu

SEQ ID NO: 2885649 - RNA, 13 nt, Human
aaguuuacauuuu

SEQ ID NO: 2885650 - RNA, 16 nt, Human
aaguuuacauuuuuau

SEQ ID NO: 2885651 - RNA, 22 nt, Human
aaguuuacauuuuuauuuauga

SEQ ID NO: 2885652 - RNA, 23 nt, Human
aaguuuacauuuuuauuuaugaa

SEQ ID NO: 2885653 - RNA, 18 nt, Human
aaguuuacauuguaaaua

SEQ ID NO: 2885654 - RNA, 23 nt, Human
aaguuuacaaguguauaucagaa

SEQ ID NO: 2885655 - RNA, 18 nt, Human
aaguuuacaaguguauau

SEQ ID NO: 2885656 - RNA, 21 nt, Human
aaguuuacaaguguauaucag

SEQ ID NO: 2885657 - RNA, 17 nt, Human
aaguucagaguuuucug

SEQ ID NO: 2885658 - RNA, 19 nt, Human
aaguucagaguuuucuggg

SEQ ID NO: 2885659 - RNA, 22 nt, Human
aaguucagcacuugucucauuu

SEQ ID NO: 2885660 - RNA, 19 nt, Human
aaguucauaccuaaguacu

SEQ ID NO: 2885661 - RNA, 21 nt, Human
aaguucauaccuaaguacugu

SEQ ID NO: 2885662 - RNA, 22 nt, Human
aaguucauaccuaaguacugua

SEQ ID NO: 2885663 - RNA, 23 nt, Human
aaguucauaccuaaguacuguaa

SEQ ID NO: 2885664 - RNA, 22 nt, Human
aaguucauauuccauauuuauu

SEQ ID NO: 2885665 - RNA, 23 nt, Human
aaguucauauuccauauuuauuc

SEQ ID NO: 2885666 - RNA, 15 nt, Human
aaguucauauuccau

SEQ ID NO: 2885667 - RNA, 21 nt, Human
aaguucauauuccauauuuau

SEQ ID NO: 2885668 - RNA, 15 nt, Human
aaguuccaagagucu

SEQ ID NO: 2885669 - RNA, 16 nt, Human
aaguuccaagagucua

SEQ ID NO: 2885670 - RNA, 17 nt, Human
aaguuccaagagucuaa

SEQ ID NO: 2885671 - RNA, 20 nt, Human
aaguuccaagagucuaaaga

SEQ ID NO: 2885672 - RNA, 21 nt, Human
aaguuccaagagucuaaagau

SEQ ID NO: 2885673 - RNA, 14 nt, Human
aaguuccaagucca

SEQ ID NO: 2885674 - RNA, 12 nt, Human
aaguucuaagau

SEQ ID NO: 2885675 - RNA, 11 nt, Human
aaguucuaaga

SEQ ID NO: 2885676 - RNA, 21 nt, Human
aaguucuaauaauuucuaaug

SEQ ID NO: 2885677 - RNA, 17 nt, Human
aaguucuaagauucuga

SEQ ID NO: 2885678 - RNA, 17 nt, Human
aaguucuaauaauuucu

SEQ ID NO: 2885679 - RNA, 18 nt, Human
aaguucuaauaauuucua

SEQ ID NO: 2885680 - RNA, 19 nt, Human
aaguucuaauaauuucuaa

SEQ ID NO: 2885681 - RNA, 14 nt, Human
aaguucuaagauuc

SEQ ID NO: 2885682 - RNA, 15 nt, Human
aaguucuaagauucu

SEQ ID NO: 2885683 - RNA, 16 nt, Human
aaguucuaagauucua

SEQ ID NO: 2885684 - RNA, 18 nt, Human
aaguucuaagauucuaau

SEQ ID NO: 2885685 - RNA, 19 nt, Human
aaguucuaagauucuaaug

SEQ ID NO: 2885686 - RNA, 20 nt, Human
aaguucuaagauucuaauga

SEQ ID NO: 2885687 - RNA, 21 nt, Human
aaguucuaagauucuaaugau

SEQ ID NO: 2885688 - RNA, 16 nt, Human
aaguucuaagauucug

SEQ ID NO: 2885689 - RNA, 17 nt, Human
aaguuauuagugguuua

SEQ ID NO: 2885690 - RNA, 20 nt, Human
aaguuauuagugguuuauca

SEQ ID NO: 2885691 - RNA, 14 nt, Human
aaguuagaaucuau

SEQ ID NO: 2885692 - RNA, 15 nt, Human
aaguuagaaucuauu

SEQ ID NO: 2885693 - RNA, 16 nt, Human
aaguuagaaucuauuu

SEQ ID NO: 2885694 - RNA, 17 nt, Human
aaguuagaaucuauuuu

SEQ ID NO: 2885695 - RNA, 19 nt, Human
aaguuagaaucuauuuucu

SEQ ID NO: 2885696 - RNA, 13 nt, Human
aaguuacuuucuu

SEQ ID NO: 2885697 - RNA, 16 nt, Human
aaguuacuuucuuaau

SEQ ID NO: 2885698 - RNA, 13 nt, Human
aaguuacagaaau

SEQ ID NO: 2885699 - RNA, 19 nt, Human
aaguuacagaaauacuaua

SEQ ID NO: 2885700 - RNA, 23 nt, Human
aaguguuuuguucuuucuggagu

SEQ ID NO: 2885701 - RNA, 14 nt, Human
aaguguuucuguua

SEQ ID NO: 2885702 - RNA, 21 nt, Human
aaguguuuauuuuucauauug

SEQ ID NO: 2885703 - RNA, 15 nt, Human
aaguguuucagcuaa

SEQ ID NO: 2885704 - RNA, 21 nt, Human
aaguguuucuguuauuaacaa

SEQ ID NO: 2885705 - RNA, 23 nt, Human
aaguguuucuguuauuaacaaac

SEQ ID NO: 2885706 - RNA, 15 nt, Human
aaguguuuauuuuuc

SEQ ID NO: 2885707 - RNA, 16 nt, Human
aaguguuuauuuuuca

SEQ ID NO: 2885708 - RNA, 19 nt, Human
aaguguuuauuuuucauau

SEQ ID NO: 2885709 - RNA, 18 nt, Human
aaguguugaagggaggug

SEQ ID NO: 2885710 - RNA, 21 nt, Human
aaguguuauuuuucaaggaag

SEQ ID NO: 2885711 - RNA, 22 nt, Human
aaguguuauuuuucaaggaagg

SEQ ID NO: 2885712 - RNA, 15 nt, Human
aaguguuagauagaa

SEQ ID NO: 2885713 - RNA, 16 nt, Human
guuuuuuuuuuuaaaa

SEQ ID NO: 2885714 - RNA, 21 nt, Human
guuuuuuuuuuuaaaaaaaga

SEQ ID NO: 2885715 - RNA, 22 nt, Human
guuuuuuuuuuuaaaaaaagaa

SEQ ID NO: 2885716 - RNA, 23 nt, Human
guuuuuuuuuuuaaaaaaagaaa

SEQ ID NO: 2885717 - RNA, 20 nt, Human
guuuuuuuuuuuuuuaugug

SEQ ID NO: 2885718 - RNA, 23 nt, Human
guuuuuuuuuuuuuuaugugauc

SEQ ID NO: 2885719 - RNA, 19 nt, Human
guuuuuuuuuuuuuuuugg

SEQ ID NO: 2885720 - RNA, 21 nt, Human
guuuuuuuuuuuuuuuuggcu

SEQ ID NO: 2885721 - RNA, 18 nt, Human
uaaaaaaaaaaaaaagcu

SEQ ID NO: 2885722 - RNA, 19 nt, Human
uaaaaaaaaaaaaaagcuu

SEQ ID NO: 2885723 - RNA, 20 nt, Human
uaaaaaaaaaaaaaagcuuu

SEQ ID NO: 2885724 - RNA, 14 nt, Human
guuuuuuuuucauu

SEQ ID NO: 2885725 - RNA, 14 nt, Human
uaaaccccuguccc

SEQ ID NO: 2885726 - RNA, 15 nt, Human
uaaaccccuguccca

SEQ ID NO: 2885727 - RNA, 19 nt, Human
uaaaccucaaaaugucuaa

SEQ ID NO: 2885728 - RNA, 18 nt, Human
uaaaccucaaaaugucua

SEQ ID NO: 2885729 - RNA, 20 nt, Human
uaaaccgcuuuggccugagu

SEQ ID NO: 2885730 - RNA, 15 nt, Human
uaaaccuccgccaau

SEQ ID NO: 2885731 - RNA, 20 nt, Human
uaaaccugucuccacugugc

SEQ ID NO: 2885732 - RNA, 19 nt, Human
uaaaccuguuuuuuuuuca

SEQ ID NO: 2885733 - RNA, 20 nt, Human
uaaaccuguuuuuuuuucau

SEQ ID NO: 2885734 - RNA, 21 nt, Human
uaaaccuguuuuuuuuucauu

SEQ ID NO: 2885735 - RNA, 15 nt, Human
uaaacggauuccaaa

SEQ ID NO: 2885736 - RNA, 16 nt, Human
uaaacgguucaguuuc

SEQ ID NO: 2885737 - RNA, 20 nt, Human
uaaacgguucaguuucuucu

SEQ ID NO: 2885738 - RNA, 21 nt, Human
uaaacgguucaguuucuucug

SEQ ID NO: 2885739 - RNA, 17 nt, Human
uaaacguaagcacuguu

SEQ ID NO: 2885740 - RNA, 18 nt, Human
uaaacguaagcacuguuu

SEQ ID NO: 2885741 - RNA, 19 nt, Human
uaaacgcaagcugagcugg

SEQ ID NO: 2885742 - RNA, 16 nt, Human
uaaacgcauuaucagc

SEQ ID NO: 2885743 - RNA, 11 nt, Human
uaaagaaaguc

SEQ ID NO: 2885744 - RNA, 17 nt, Human
uaaagaaagucgaauua

SEQ ID NO: 2885745 - RNA, 21 nt, Human
uaaagaaagucgaauuaauag

SEQ ID NO: 2885746 - RNA, 16 nt, Human
uaaagaaagcaacuuu

SEQ ID NO: 2885747 - RNA, 11 nt, Human
uaaacugccau

SEQ ID NO: 2885748 - RNA, 13 nt, Human
uaaacugccauau

SEQ ID NO: 2885749 - RNA, 12 nt, Human
uaaacugccccc

SEQ ID NO: 2885750 - RNA, 22 nt, Human
uaaacugaaaacucccauuuac

SEQ ID NO: 2885751 - RNA, 14 nt, Human
uaaacugacuauca

SEQ ID NO: 2885752 - RNA, 15 nt, Human
uaaacugacuaucau

SEQ ID NO: 2885753 - RNA, 18 nt, Human
uaaacugacuaucauaaa

SEQ ID NO: 2885754 - RNA, 14 nt, Human
uaaacucuaaacau

SEQ ID NO: 2885755 - RNA, 15 nt, Human
uaaacucuaaacauu

SEQ ID NO: 2885756 - RNA, 22 nt, Human
uaaacucuaaacauuaaucaau

SEQ ID NO: 2885757 - RNA, 23 nt, Human
uaaacucaaaauauuuguacaua

SEQ ID NO: 2885758 - RNA, 15 nt, Human
uaaacucaagacaau

SEQ ID NO: 2885759 - RNA, 22 nt, Human
uaaacucaaaauauuuguacau

SEQ ID NO: 2885760 - RNA, 20 nt, Human
uaaacucaaaacuuaacaua

SEQ ID NO: 2885761 - RNA, 11 nt, Human
uaaacucaggg

SEQ ID NO: 2885762 - RNA, 19 nt, Human
uaaacucagggacagagcc

SEQ ID NO: 2885763 - RNA, 20 nt, Human
uaaacucagggacagagcca

SEQ ID NO: 2885764 - RNA, 21 nt, Human
uaaacucaaaauauuuguaca

SEQ ID NO: 2885765 - RNA, 19 nt, Human
uaaacucaaaauauuugua

SEQ ID NO: 2885766 - RNA, 16 nt, Human
uaaacucaaaauauuu

SEQ ID NO: 2885767 - RNA, 14 nt, Human
uaaacucaaaauau

SEQ ID NO: 2885768 - RNA, 14 nt, Human
uaaacuacucuuug

SEQ ID NO: 2885769 - RNA, 15 nt, Human
uaaacuacucuuuga

SEQ ID NO: 2885770 - RNA, 16 nt, Human
uaaacuacucuuugau

SEQ ID NO: 2885771 - RNA, 18 nt, Human
uaaacuacucuuugauuu

SEQ ID NO: 2885772 - RNA, 11 nt, Human
uaaacuagaug

SEQ ID NO: 2885773 - RNA, 14 nt, Human
uaaacuagaugacc

SEQ ID NO: 2885774 - RNA, 15 nt, Human
uaaacuagaugaccu

SEQ ID NO: 2885775 - RNA, 16 nt, Human
uaaacuagaugaccuc

SEQ ID NO: 2885776 - RNA, 17 nt, Human
uaaacuagaugaccuca

SEQ ID NO: 2885777 - RNA, 15 nt, Human
uaaacuauuugucuu

SEQ ID NO: 2885778 - RNA, 15 nt, Human
uaaacucaaaacuua

SEQ ID NO: 2885779 - RNA, 19 nt, Human
uaaacucaaaacuuaacau

SEQ ID NO: 2885780 - RNA, 22 nt, Human
uaaacuaucuuggugaauuuuu

SEQ ID NO: 2885781 - RNA, 17 nt, Human
uaaacuaucaguuuguc

SEQ ID NO: 2885782 - RNA, 21 nt, Human
uaaacuaucuuggugaauuuu

SEQ ID NO: 2885783 - RNA, 20 nt, Human
uaaacuaucuuggugaauuu

SEQ ID NO: 2885784 - RNA, 13 nt, Human
uaaacuaucaguu

SEQ ID NO: 2885785 - RNA, 14 nt, Human
uaaacuauauuuuc

SEQ ID NO: 2885786 - RNA, 16 nt, Human
uaaagaaauugcaaua

SEQ ID NO: 2885787 - RNA, 15 nt, Human
uaaagaaaugucuua

SEQ ID NO: 2885788 - RNA, 17 nt, Human
uaaagaaaugucuuaau

SEQ ID NO: 2885789 - RNA, 17 nt, Human
uaaagaaauugcaauaa

SEQ ID NO: 2885790 - RNA, 15 nt, Human
uaaagaaauuuacua

SEQ ID NO: 2885791 - RNA, 16 nt, Human
uaaagaaauuuacuau

SEQ ID NO: 2885792 - RNA, 17 nt, Human
uaaagaaauuuacuaua

SEQ ID NO: 2885793 - RNA, 18 nt, Human
uaaagaaauuuacuauau

SEQ ID NO: 2885794 - RNA, 19 nt, Human
uaaagaaauuuacuauaua

SEQ ID NO: 2885795 - RNA, 20 nt, Human
uaaagaaauuuacuauauau

SEQ ID NO: 2885796 - RNA, 22 nt, Human
uaaagaaauuuacuauauauau

SEQ ID NO: 2885797 - RNA, 14 nt, Human
uaaagaagaucugu

SEQ ID NO: 2885798 - RNA, 14 nt, Human
uaaagaacugcaca

SEQ ID NO: 2885799 - RNA, 19 nt, Human
uaaagaacugcacaugaag

SEQ ID NO: 2885800 - RNA, 20 nt, Human
uaaagaacugcacaugaaga

SEQ ID NO: 2885801 - RNA, 23 nt, Human
uaaagaacugcacaugaagaaau

SEQ ID NO: 2885802 - RNA, 17 nt, Human
uaaagaaguugaaguuu

SEQ ID NO: 2885803 - RNA, 14 nt, Human
uaaagaagguuuca

SEQ ID NO: 2885804 - RNA, 17 nt, Human
uaaagacgauuugucag

SEQ ID NO: 2885805 - RNA, 12 nt, Human
uaaagagaagac

SEQ ID NO: 2885806 - RNA, 14 nt, Human
uaaagaauauauau

SEQ ID NO: 2885807 - RNA, 20 nt, Human
uaaagacaaccauauuuagc

SEQ ID NO: 2885808 - RNA, 21 nt, Human
uaaagacaaccauauuuagca

SEQ ID NO: 2885809 - RNA, 9 nt, Human
uaaagacag

SEQ ID NO: 2885810 - RNA, 15 nt, Human
uaaagacaccuacug

SEQ ID NO: 2885811 - RNA, 10 nt, Human
uaaagacaga

SEQ ID NO: 2885812 - RNA, 21 nt, Human
uaaagacagggaagagcagaa

SEQ ID NO: 2885813 - RNA, 21 nt, Human
uaaagacccagggggagaaug

SEQ ID NO: 2885814 - RNA, 19 nt, Human
uaaagacccagggggagaa

SEQ ID NO: 2885815 - RNA, 11 nt, Human
uaaagaccaaa

SEQ ID NO: 2885816 - RNA, 13 nt, Human
uaaagaccaaacu

SEQ ID NO: 2885817 - RNA, 14 nt, Human
uaaagaccaaacuu

SEQ ID NO: 2885818 - RNA, 16 nt, Human
uaaagcaaaaaaugaa

SEQ ID NO: 2885819 - RNA, 19 nt, Human
uaaagcaaaaaaugaaugu

SEQ ID NO: 2885820 - RNA, 21 nt, Human
uaaagcaaaaaaugaaugucu

SEQ ID NO: 2885821 - RNA, 13 nt, Human
uaaagauuugcuu

SEQ ID NO: 2885822 - RNA, 15 nt, Human
uaaagauuuaucaaa

SEQ ID NO: 2885823 - RNA, 22 nt, Human
uaaagauuuaucaaaucaguca

SEQ ID NO: 2885824 - RNA, 21 nt, Human
uaaagauucuauaguucuaga

SEQ ID NO: 2885825 - RNA, 24 nt, Human
uaaagauucuauaguucuagacau

SEQ ID NO: 2885826 - RNA, 15 nt, Human
uaaagauguuaaaaa

SEQ ID NO: 2885827 - RNA, 19 nt, Human
uaaagauucuauaguucua

SEQ ID NO: 2885828 - RNA, 20 nt, Human
uaaagauucuauaguucuag

SEQ ID NO: 2885829 - RNA, 22 nt, Human
uaaagauggaguuucuaagguc

SEQ ID NO: 2885830 - RNA, 19 nt, Human
uaaagauggaguuucuaag

SEQ ID NO: 2885831 - RNA, 21 nt, Human
uaaagauggaguuucuaaggu

SEQ ID NO: 2885832 - RNA, 18 nt, Human
uaaagagauucacacaca

SEQ ID NO: 2885833 - RNA, 19 nt, Human
uaaagaggcguugcuuuca

SEQ ID NO: 2885834 - RNA, 20 nt, Human
uaaagaggcguugcuuucac

SEQ ID NO: 2885835 - RNA, 18 nt, Human
uaaagaguuaguuugagu

SEQ ID NO: 2885836 - RNA, 12 nt, Human
uaaagauaauau

SEQ ID NO: 2885837 - RNA, 15 nt, Human
uaaagauaauauuac

SEQ ID NO: 2885838 - RNA, 19 nt, Human
uaaagauaauauuacuguu

SEQ ID NO: 2885839 - RNA, 14 nt, Human
uaaagauaauugcu

SEQ ID NO: 2885840 - RNA, 17 nt, Human
uaaagauaauugcuauu

SEQ ID NO: 2885841 - RNA, 18 nt, Human
uaaagauaauugcuauuu

SEQ ID NO: 2885842 - RNA, 13 nt, Human
uaaagagucuaga

SEQ ID NO: 2885843 - RNA, 15 nt, Human
uaaagagucuagauu

SEQ ID NO: 2885844 - RNA, 18 nt, Human
uaaagagucuagauucaa

SEQ ID NO: 2885845 - RNA, 19 nt, Human
uaaagagucuagauucaaa

SEQ ID NO: 2885846 - RNA, 21 nt, Human
uaaagagucuagauucaaagg

SEQ ID NO: 2885847 - RNA, 13 nt, Human
uaaagauggaaaa

SEQ ID NO: 2885848 - RNA, 22 nt, Human
uaaagaugcaaggaccaggacu

SEQ ID NO: 2885849 - RNA, 17 nt, Human
uaaagauggaguuucua

SEQ ID NO: 2885850 - RNA, 18 nt, Human
uaaagauggaguuucuaa

SEQ ID NO: 2885851 - RNA, 21 nt, Human
uaaagaugcaaggaccaggac

SEQ ID NO: 2885852 - RNA, 23 nt, Human
uaaagagucuagauucaaagguu

SEQ ID NO: 2885853 - RNA, 17 nt, Human
uaaagauauuguucaaa

SEQ ID NO: 2885854 - RNA, 16 nt, Human
uaaagauauggagaau

SEQ ID NO: 2885855 - RNA, 17 nt, Human
uaaagauauggagaauu

SEQ ID NO: 2885856 - RNA, 20 nt, Human
uaaagauauggagaauugcu

SEQ ID NO: 2885857 - RNA, 24 nt, Human
uaaagauauggagaauugcugaag

SEQ ID NO: 2885858 - RNA, 16 nt, Human
uaaagaucuacaugaa

SEQ ID NO: 2885859 - RNA, 17 nt, Human
uaaagaucuacaugaau

SEQ ID NO: 2885860 - RNA, 16 nt, Human
uaaagaugaacucuga

SEQ ID NO: 2885861 - RNA, 17 nt, Human
uaaagaugaacucugaa

SEQ ID NO: 2885862 - RNA, 14 nt, Human
aaggaaaaaaagac

SEQ ID NO: 2885863 - RNA, 15 nt, Human
aaggaaaaaaagacu

SEQ ID NO: 2885864 - RNA, 21 nt, Human
aaggaaaaaaagacucuuuuu

SEQ ID NO: 2885865 - RNA, 15 nt, Human
guuccccuguucacu

SEQ ID NO: 2885866 - RNA, 17 nt, Human
guuccccuguucacucu

SEQ ID NO: 2885867 - RNA, 13 nt, Human
aagcucugcuccu

SEQ ID NO: 2885868 - RNA, 14 nt, Human
aagcuguuaaacug

SEQ ID NO: 2885869 - RNA, 15 nt, Human
aagcuguuaaacugu

SEQ ID NO: 2885870 - RNA, 16 nt, Human
aagcuguuaaacuguu

SEQ ID NO: 2885871 - RNA, 17 nt, Human
aagcuguuaaacuguua

SEQ ID NO: 2885872 - RNA, 18 nt, Human
aagcuguuaaacuguuag

SEQ ID NO: 2885873 - RNA, 20 nt, Human
aagcuguuaaacuguuagca

SEQ ID NO: 2885874 - RNA, 12 nt, Human
aagcuguuguac

SEQ ID NO: 2885875 - RNA, 13 nt, Human
aagcuguuguaca

SEQ ID NO: 2885876 - RNA, 15 nt, Human
aagcuuucugucucc

SEQ ID NO: 2885877 - RNA, 21 nt, Human
aagcuuuggacccaaggaaaa

SEQ ID NO: 2885878 - RNA, 15 nt, Human
aagcuuuguccccug

SEQ ID NO: 2885879 - RNA, 18 nt, Human
aagcuuuguccccugcuu

SEQ ID NO: 2885880 - RNA, 19 nt, Human
aagcuuuguccccugcuuc

SEQ ID NO: 2885881 - RNA, 20 nt, Human
aagcuuuguccccugcuuca

SEQ ID NO: 2885882 - RNA, 22 nt, Human
aagcuuuguccccugcuucaga

SEQ ID NO: 2885883 - RNA, 14 nt, Human
aagcuguuguacau

SEQ ID NO: 2885884 - RNA, 17 nt, Human
aagcuguuguacauuua

SEQ ID NO: 2885885 - RNA, 18 nt, Human
aagcuguuguacauuuau

SEQ ID NO: 2885886 - RNA, 20 nt, Human
aagcuguuguacauuuauga

SEQ ID NO: 2885887 - RNA, 21 nt, Human
aagcuguuguacauuuaugau

SEQ ID NO: 2885888 - RNA, 11 nt, Human
aagcucccugc

SEQ ID NO: 2885889 - RNA, 15 nt, Human
aagcucccugcccca

SEQ ID NO: 2885890 - RNA, 16 nt, Human
aagcucccugccccaa

SEQ ID NO: 2885891 - RNA, 17 nt, Human
aagcucccugccccaaa

SEQ ID NO: 2885892 - RNA, 17 nt, Human
aagcuccuaucuguuuu

SEQ ID NO: 2885893 - RNA, 14 nt, Human
aagcuccuccucgg

SEQ ID NO: 2885894 - RNA, 17 nt, Human
aagcuccuccucggaac

SEQ ID NO: 2885895 - RNA, 20 nt, Human
aagcucuaguucuuaacaac

SEQ ID NO: 2885896 - RNA, 15 nt, Human
aagcucuagaaucug

SEQ ID NO: 2885897 - RNA, 22 nt, Human
aagcucugaagucacaucacag

SEQ ID NO: 2885898 - RNA, 12 nt, Human
aagcucugacau

SEQ ID NO: 2885899 - RNA, 16 nt, Human
aagcucugaagucaca

SEQ ID NO: 2885900 - RNA, 12 nt, Human
aagcucugaagu

SEQ ID NO: 2885901 - RNA, 22 nt, Human
aagcucucuugccgaggagcca

SEQ ID NO: 2885902 - RNA, 23 nt, Human
aagcucucuugccgaggagccag

SEQ ID NO: 2885903 - RNA, 17 nt, Human
aagcucccaagggaugg

SEQ ID NO: 2885904 - RNA, 19 nt, Human
aagcucccaagggauggug

SEQ ID NO: 2885905 - RNA, 16 nt, Human
aagcuccaugugccuc

SEQ ID NO: 2885906 - RNA, 18 nt, Human
aagcuccaugugccucuu

SEQ ID NO: 2885907 - RNA, 21 nt, Human
aagcucccaagggauggugcc

SEQ ID NO: 2885908 - RNA, 13 nt, Human
guguuuauuuaua

SEQ ID NO: 2885909 - RNA, 20 nt, Human
aagcuccaucuccacuccag

SEQ ID NO: 2885910 - RNA, 10 nt, Human
guguuuauuu

SEQ ID NO: 2885911 - RNA, 22 nt, Human
guguuuauaaaauauaaacaaa

SEQ ID NO: 2885912 - RNA, 14 nt, Human
guguuuauaaaaua

SEQ ID NO: 2885913 - RNA, 13 nt, Human
guguuuauaaaau

SEQ ID NO: 2885914 - RNA, 16 nt, Human
guguuuaauuucuuca

SEQ ID NO: 2885915 - RNA, 17 nt, Human
guguuuaauuucuucaa

SEQ ID NO: 2885916 - RNA, 22 nt, Human
guguuuaagacauuuuuggaag

SEQ ID NO: 2885917 - RNA, 15 nt, Human
guucucaaugaaaaa

SEQ ID NO: 2885918 - RNA, 16 nt, Human
guucucaaugugaaaa

SEQ ID NO: 2885919 - RNA, 23 nt, Human
guucucaaugugaaaaauguguc

SEQ ID NO: 2885920 - RNA, 14 nt, Human
guucucaaugaaaa

SEQ ID NO: 2885921 - RNA, 13 nt, Human
guucucaaugaaa

SEQ ID NO: 2885922 - RNA, 12 nt, Human
guucucaaugaa

SEQ ID NO: 2885923 - RNA, 18 nt, Human
guuccccuguucacucua

SEQ ID NO: 2885924 - RNA, 14 nt, Human
guucuaguuugcau

SEQ ID NO: 2885925 - RNA, 15 nt, Human
guucuaguuugcauu

SEQ ID NO: 2885926 - RNA, 12 nt, Human
guucuauccaaa

SEQ ID NO: 2885927 - RNA, 14 nt, Human
guucuauccaaaca

SEQ ID NO: 2885928 - RNA, 21 nt, Human
guucuauccaaacauguauuu

SEQ ID NO: 2885929 - RNA, 22 nt, Human
guucuauccaaacauguauuua

SEQ ID NO: 2885930 - RNA, 14 nt, Human
guucuaugaacaac

SEQ ID NO: 2885931 - RNA, 16 nt, Human
guucuaugguuaugaa

SEQ ID NO: 2885932 - RNA, 17 nt, Human
guucuaugguuaugaaa

SEQ ID NO: 2885933 - RNA, 20 nt, Human
guucuaugguuaugaaagaa

SEQ ID NO: 2885934 - RNA, 12 nt, Human
guucuauguuua

SEQ ID NO: 2885935 - RNA, 16 nt, Human
guucucugaggacacu

SEQ ID NO: 2885936 - RNA, 14 nt, Human
guucucugaggaca

SEQ ID NO: 2885937 - RNA, 13 nt, Human
guucugugucuuu

SEQ ID NO: 2885938 - RNA, 22 nt, Human
guucugugucuuucacagcucc

SEQ ID NO: 2885939 - RNA, 23 nt, Human
guucugugucuuucacagcuccu

SEQ ID NO: 2885940 - RNA, 15 nt, Human
guucuguguuuaauu

SEQ ID NO: 2885941 - RNA, 21 nt, Human
guucuguguuuaauuucuuca

SEQ ID NO: 2885942 - RNA, 22 nt, Human
guucuguguuuaauuucuucaa

SEQ ID NO: 2885943 - RNA, 16 nt, Human
guugacaacugugacu

SEQ ID NO: 2885944 - RNA, 16 nt, Human
guugacaccugagaaa

SEQ ID NO: 2885945 - RNA, 19 nt, Human
guugacacaguuguagggu

SEQ ID NO: 2885946 - RNA, 14 nt, Human
guugacaacuguga

SEQ ID NO: 2885947 - RNA, 15 nt, Human
guugacaacugugac

SEQ ID NO: 2885948 - RNA, 15 nt, Human
guugacaaaauuuuc

SEQ ID NO: 2885949 - RNA, 18 nt, Human
guucuguuucaaggcacu

SEQ ID NO: 2885950 - RNA, 14 nt, Human
guucuguuuguuau

SEQ ID NO: 2885951 - RNA, 18 nt, Human
guucuguuuguuauuguu

SEQ ID NO: 2885952 - RNA, 22 nt, Human
guucuguuuguuauuguuuugu

SEQ ID NO: 2885953 - RNA, 23 nt, Human
guucuguuuguuauuguuuuguu

SEQ ID NO: 2885954 - RNA, 21 nt, Human
guucuguuauauccccugcua

SEQ ID NO: 2885955 - RNA, 23 nt, Human
guucuguuauauccccugcuacc

SEQ ID NO: 2885956 - RNA, 13 nt, Human
guucuguuucaag

SEQ ID NO: 2885957 - RNA, 14 nt, Human
guucuguuucaagg

SEQ ID NO: 2885958 - RNA, 20 nt, Human
guugauauuucgaaagcugc

SEQ ID NO: 2885959 - RNA, 12 nt, Human
guugauaguuua

SEQ ID NO: 2885960 - RNA, 15 nt, Human
guugagccccuggag

SEQ ID NO: 2885961 - RNA, 14 nt, Human
guugagccuuuucc

SEQ ID NO: 2885962 - RNA, 14 nt, Human
guugagcaagcagu

SEQ ID NO: 2885963 - RNA, 20 nt, Human
guucucccucccaccuuaaa

SEQ ID NO: 2885964 - RNA, 17 nt, Human
guugacaguucugaaga

SEQ ID NO: 2885965 - RNA, 22 nt, Human
guugacauaccuuuuauuuuuu

SEQ ID NO: 2885966 - RNA, 14 nt, Human
guugacauauuuaa

SEQ ID NO: 2885967 - RNA, 17 nt, Human
guugacauauuuaaugu

SEQ ID NO: 2885968 - RNA, 18 nt, Human
guugacauauuuaauguu

SEQ ID NO: 2885969 - RNA, 19 nt, Human
guugacauauuuaauguuu

SEQ ID NO: 2885970 - RNA, 20 nt, Human
guugacauauuuaauguuuu

SEQ ID NO: 2885971 - RNA, 22 nt, Human
guugacauauuuaauguuuuaa

SEQ ID NO: 2885972 - RNA, 23 nt, Human
guugacauauuuaauguuuuaaa

SEQ ID NO: 2885973 - RNA, 16 nt, Human
guugacaguucugaag

SEQ ID NO: 2885974 - RNA, 23 nt, Human
aaggaggauuccauuuggcagag

SEQ ID NO: 2885975 - RNA, 16 nt, Human
aaggaggcaugccucu

SEQ ID NO: 2885976 - RNA, 18 nt, Human
aaggaggcaugccucuga

SEQ ID NO: 2885977 - RNA, 20 nt, Human
aaggaggcaugccucugaua

SEQ ID NO: 2885978 - RNA, 17 nt, Human
aaggauaguauuuuuau

SEQ ID NO: 2885979 - RNA, 13 nt, Human
aaggaucaucuga

SEQ ID NO: 2885980 - RNA, 14 nt, Human
aaggagagccugcu

SEQ ID NO: 2885981 - RNA, 13 nt, Human
aaggagcacaagc

SEQ ID NO: 2885982 - RNA, 12 nt, Human
aaggagcacagg

SEQ ID NO: 2885983 - RNA, 21 nt, Human
aaggagcacaggucccaccuc

SEQ ID NO: 2885984 - RNA, 16 nt, Human
aaggagagaaaguggg

SEQ ID NO: 2885985 - RNA, 13 nt, Human
aaggagagccugc

SEQ ID NO: 2885986 - RNA, 18 nt, Human
aaggagagacucccauga

SEQ ID NO: 2885987 - RNA, 20 nt, Human
aaggagagacucccaugaag

SEQ ID NO: 2885988 - RNA, 21 nt, Human
aaggagagacucccaugaagc

SEQ ID NO: 2885989 - RNA, 22 nt, Human
aaggagagacucccaugaagcc

SEQ ID NO: 2885990 - RNA, 23 nt, Human
aaggagagacucccaugaagccu

SEQ ID NO: 2885991 - RNA, 15 nt, Human
aaggaagguucaugu

SEQ ID NO: 2885992 - RNA, 12 nt, Human
aaggagacacaa

SEQ ID NO: 2885993 - RNA, 13 nt, Human
aaggagacacaga

SEQ ID NO: 2885994 - RNA, 14 nt, Human
aaggagacacagau

SEQ ID NO: 2885995 - RNA, 15 nt, Human
aaggagacacagaug

SEQ ID NO: 2885996 - RNA, 16 nt, Human
aaggagacacagaugu

SEQ ID NO: 2885997 - RNA, 17 nt, Human
aaggagacacagauguu

SEQ ID NO: 2885998 - RNA, 18 nt, Human
aaggagacacagauguuc

SEQ ID NO: 2885999 - RNA, 14 nt, Human
aaggagacaaguuc

SEQ ID NO: 2886000 - RNA, 11 nt, Human
aaggagagaaa

SEQ ID NO: 2886001 - RNA, 12 nt, Human
aaggagagaaag

SEQ ID NO: 2886002 - RNA, 14 nt, Human
aaggagagaaagug

SEQ ID NO: 2886003 - RNA, 16 nt, Human
aaggaaaccacagcug

SEQ ID NO: 2886004 - RNA, 17 nt, Human
aaggaaaccacagcugc

SEQ ID NO: 2886005 - RNA, 18 nt, Human
aaggaaaccacagcugcu

SEQ ID NO: 2886006 - RNA, 12 nt, Human
aaggaaaaugau

SEQ ID NO: 2886007 - RNA, 14 nt, Human
aaggaaaaugauac

SEQ ID NO: 2886008 - RNA, 15 nt, Human
guugauccauccagc

SEQ ID NO: 2886009 - RNA, 21 nt, Human
aaggaaggcucuucuccccag

SEQ ID NO: 2886010 - RNA, 16 nt, Human
aaggaaggaaagaaag

SEQ ID NO: 2886011 - RNA, 13 nt, Human
aaggaaggaaaga

SEQ ID NO: 2886012 - RNA, 12 nt, Human
aaggaaggaaag

SEQ ID NO: 2886013 - RNA, 20 nt, Human
aaggaaaccacagcugcugg

SEQ ID NO: 2886014 - RNA, 11 nt, Human
aaggaaggaaa

SEQ ID NO: 2886015 - RNA, 18 nt, Human
aaggaagcuccacuguca

SEQ ID NO: 2886016 - RNA, 17 nt, Human
guugggcuggugucacc

SEQ ID NO: 2886017 - RNA, 22 nt, Human
guuggggggacucugagcggga

SEQ ID NO: 2886018 - RNA, 13 nt, Human
guuggggugacag

SEQ ID NO: 2886019 - RNA, 14 nt, Human
guuggggugacagu

SEQ ID NO: 2886020 - RNA, 15 nt, Human
guuggggugacaguc

SEQ ID NO: 2886021 - RNA, 19 nt, Human
guuggggugacagucauca

SEQ ID NO: 2886022 - RNA, 15 nt, Human
guugggcugguguca

SEQ ID NO: 2886023 - RNA, 15 nt, Human
guugguugugucuuu

SEQ ID NO: 2886024 - RNA, 16 nt, Human
guugguugugucuuuu

SEQ ID NO: 2886025 - RNA, 14 nt, Human
guugguuuacuuuc

SEQ ID NO: 2886026 - RNA, 15 nt, Human
guugguuuacuuuca

SEQ ID NO: 2886027 - RNA, 18 nt, Human
guugguugcacuuuguag

SEQ ID NO: 2886028 - RNA, 12 nt, Human
guuguaaaaaga

SEQ ID NO: 2886029 - RNA, 13 nt, Human
guuguaaaaagaa

SEQ ID NO: 2886030 - RNA, 16 nt, Human
guugcccaggcuggcg

SEQ ID NO: 2886031 - RNA, 14 nt, Human
guugcuaacugaac

SEQ ID NO: 2886032 - RNA, 17 nt, Human
guugcuaacugaacuuu

SEQ ID NO: 2886033 - RNA, 21 nt, Human
guugcuaacugaacuuugaag

SEQ ID NO: 2886034 - RNA, 22 nt, Human
guugcuaacugaacuuugaaga

SEQ ID NO: 2886035 - RNA, 15 nt, Human
guugcccaggcuggc

SEQ ID NO: 2886036 - RNA, 19 nt, Human
aaggcguggagcugccuga

SEQ ID NO: 2886037 - RNA, 13 nt, Human
aaggcuaaaaagu

SEQ ID NO: 2886038 - RNA, 16 nt, Human
aaggcguggagcugcc

SEQ ID NO: 2886039 - RNA, 18 nt, Human
aaggcguggagcugccug

SEQ ID NO: 2886040 - RNA, 23 nt, Human
guuggcugggggccucagugcca

SEQ ID NO: 2886041 - RNA, 19 nt, Human
guugcugaaacuugcugag

SEQ ID NO: 2886042 - RNA, 20 nt, Human
guugcucuaggaagacauuu

SEQ ID NO: 2886043 - RNA, 14 nt, Human
aaggcccccuacgc

SEQ ID NO: 2886044 - RNA, 21 nt, Human
aaggcccccucucaggagcca

SEQ ID NO: 2886045 - RNA, 22 nt, Human
aaggcccccucucaggagccau

SEQ ID NO: 2886046 - RNA, 14 nt, Human
guugcccaggcugg

SEQ ID NO: 2886047 - RNA, 18 nt, Human
aaggcgggagcaucucuu

SEQ ID NO: 2886048 - RNA, 21 nt, Human
aaggcgguggacuugaacuuu

SEQ ID NO: 2886049 - RNA, 22 nt, Human
aaggcgguggacuugaacuuuc

SEQ ID NO: 2886050 - RNA, 22 nt, Human
aaggcguagcaucauccugcag

SEQ ID NO: 2886051 - RNA, 13 nt, Human
aaggcggccccuc

SEQ ID NO: 2886052 - RNA, 14 nt, Human
aaggcguggagcug

SEQ ID NO: 2886053 - RNA, 13 nt, Human
aaggccucugucc

SEQ ID NO: 2886054 - RNA, 14 nt, Human
aaggccugcacaca

SEQ ID NO: 2886055 - RNA, 15 nt, Human
aaggccugcacacaa

SEQ ID NO: 2886056 - RNA, 12 nt, Human
aaggccucuugg

SEQ ID NO: 2886057 - RNA, 16 nt, Human
aaggccucuuggagac

SEQ ID NO: 2886058 - RNA, 20 nt, Human
aaggccucuuggagaccuua

SEQ ID NO: 2886059 - RNA, 23 nt, Human
aaggccucuuggagaccuuaccc

SEQ ID NO: 2886060 - RNA, 19 nt, Human
aaggccucccuagccagca

SEQ ID NO: 2886061 - RNA, 20 nt, Human
aaggccuucauggccccagc

SEQ ID NO: 2886062 - RNA, 11 nt, Human
aaggccuuaag

SEQ ID NO: 2886063 - RNA, 12 nt, Human
aaggccugggug

SEQ ID NO: 2886064 - RNA, 12 nt, Human
aaggccuucucc

SEQ ID NO: 2886065 - RNA, 15 nt, Human
aaggccuucuccucc

SEQ ID NO: 2886066 - RNA, 23 nt, Human
aaggcgaucccaucuugauaaga

SEQ ID NO: 2886067 - RNA, 16 nt, Human
guuuuuuuccuguuuc

SEQ ID NO: 2886068 - RNA, 10 nt, Human
guuuuuuugc

SEQ ID NO: 2886069 - RNA, 11 nt, Human
guuuuuuugcc

SEQ ID NO: 2886070 - RNA, 19 nt, Human
guuuuuuuguauaguaaag

SEQ ID NO: 2886071 - RNA, 20 nt, Human
guuuuuuugucaacauugug

SEQ ID NO: 2886072 - RNA, 13 nt, Human
guuuuuuccuuug

SEQ ID NO: 2886073 - RNA, 16 nt, Human
guuuuuuccuuugcuc

SEQ ID NO: 2886074 - RNA, 21 nt, Human
guuuuuuaaaauauuuaucug

SEQ ID NO: 2886075 - RNA, 16 nt, Human
guuuuuuaugaagugc

SEQ ID NO: 2886076 - RNA, 16 nt, Human
guuuuuuauuauugug

SEQ ID NO: 2886077 - RNA, 14 nt, Human
guuuuuucaaaaua

SEQ ID NO: 2886078 - RNA, 15 nt, Human
guuuuuucaaaauag

SEQ ID NO: 2886079 - RNA, 18 nt, Human
guuuuuucaaaauagaaa

SEQ ID NO: 2886080 - RNA, 17 nt, Human
guuuuuguuuggagagc

SEQ ID NO: 2886081 - RNA, 17 nt, Human
guuuuucugccagggag

SEQ ID NO: 2886082 - RNA, 14 nt, Human
guuuuucugccagg

SEQ ID NO: 2886083 - RNA, 11 nt, Human
guuuuucucac

SEQ ID NO: 2886084 - RNA, 16 nt, Human
guuuuucuccagugcu

SEQ ID NO: 2886085 - RNA, 18 nt, Human
guuuuugauagcuuuauu

SEQ ID NO: 2886086 - RNA, 21 nt, Human
aagucaucuauaguugauaug

SEQ ID NO: 2886087 - RNA, 23 nt, Human
aagucaugaagcccaagugaaau

SEQ ID NO: 2886088 - RNA, 17 nt, Human
aagucaugaagcccaag

SEQ ID NO: 2886089 - RNA, 15 nt, Human
aagucaugaagccca

SEQ ID NO: 2886090 - RNA, 17 nt, Human
aagucaugcaaaggcug

SEQ ID NO: 2886091 - RNA, 12 nt, Human
aagugaauaaac

SEQ ID NO: 2886092 - RNA, 13 nt, Human
aagugaauaaacu

SEQ ID NO: 2886093 - RNA, 14 nt, Human
aagugaauaaacuu

SEQ ID NO: 2886094 - RNA, 15 nt, Human
aagugaauaaacuuc

SEQ ID NO: 2886095 - RNA, 16 nt, Human
aagugaauaaacuuca

SEQ ID NO: 2886096 - RNA, 17 nt, Human
aagugaauaaacuucag

SEQ ID NO: 2886097 - RNA, 18 nt, Human
aagugaauaaacuucagc

SEQ ID NO: 2886098 - RNA, 20 nt, Human
aagugaauaaacuucagcac

SEQ ID NO: 2886099 - RNA, 16 nt, Human
aagugaaugaaagauu

SEQ ID NO: 2886100 - RNA, 19 nt, Human
aagugaaugaaagauuaaa

SEQ ID NO: 2886101 - RNA, 14 nt, Human
aagugaagugauac

SEQ ID NO: 2886102 - RNA, 18 nt, Human
aagugagaauaggcagcc

SEQ ID NO: 2886103 - RNA, 13 nt, Human
aagugaauuuaua

SEQ ID NO: 2886104 - RNA, 19 nt, Human
aagugacuguucaagagca

SEQ ID NO: 2886105 - RNA, 18 nt, Human
aagugacuguaucugugu

SEQ ID NO: 2886106 - RNA, 17 nt, Human
aagugacuguaucugug

SEQ ID NO: 2886107 - RNA, 16 nt, Human
aagugacuguaucugu

SEQ ID NO: 2886108 - RNA, 24 nt, Human
aagugacacagcagcuucaccaga

SEQ ID NO: 2886109 - RNA, 23 nt, Human
aaguacuucuccacccugcucuc

SEQ ID NO: 2886110 - RNA, 22 nt, Human
aaguacuucuccacccugcucu

SEQ ID NO: 2886111 - RNA, 14 nt, Human
aaguauuaaaacau

SEQ ID NO: 2886112 - RNA, 15 nt, Human
aaguauuaaaacauu

SEQ ID NO: 2886113 - RNA, 17 nt, Human
aaguauuaaaacauugg

SEQ ID NO: 2886114 - RNA, 13 nt, Human
aaguauuaaaaca

SEQ ID NO: 2886115 - RNA, 21 nt, Human
aaguauuaaaacauuggauua

SEQ ID NO: 2886116 - RNA, 21 nt, Human
aaguacuucuccacccugcuc

SEQ ID NO: 2886117 - RNA, 24 nt, Human
aagucacacaguauuacuucugcu

SEQ ID NO: 2886118 - RNA, 16 nt, Human
aagucaaucauuucuc

SEQ ID NO: 2886119 - RNA, 17 nt, Human
aagucaaucauuucuca

SEQ ID NO: 2886120 - RNA, 18 nt, Human
aagucaaucauuucucac

SEQ ID NO: 2886121 - RNA, 22 nt, Human
aagucaaucauuucucacugug

SEQ ID NO: 2886122 - RNA, 19 nt, Human
aagucaaggguaggguggg

SEQ ID NO: 2886123 - RNA, 11 nt, Human
aaguacuguaa

SEQ ID NO: 2886124 - RNA, 13 nt, Human
aagucacacagug

SEQ ID NO: 2886125 - RNA, 15 nt, Human
aagucacaauguucu

SEQ ID NO: 2886126 - RNA, 18 nt, Human
aagucacaauguucuuua

SEQ ID NO: 2886127 - RNA, 19 nt, Human
aagucacaucacaggacac

SEQ ID NO: 2886128 - RNA, 15 nt, Human
aagucacaugcguaa

SEQ ID NO: 2886129 - RNA, 17 nt, Human
aagucacaucacaggac

SEQ ID NO: 2886130 - RNA, 16 nt, Human
aagucacaucacagga

SEQ ID NO: 2886131 - RNA, 15 nt, Human
aagucaguuucuaca

SEQ ID NO: 2886132 - RNA, 15 nt, Human
aagucaguguugaga

SEQ ID NO: 2886133 - RNA, 16 nt, Human
aagucaguguugagau

SEQ ID NO: 2886134 - RNA, 17 nt, Human
aagucaguguugagaug

SEQ ID NO: 2886135 - RNA, 12 nt, Human
aagucacugcac

SEQ ID NO: 2886136 - RNA, 19 nt, Human
aagucaccuuguguguucc

SEQ ID NO: 2886137 - RNA, 16 nt, Human
aagucacccuagcccu

SEQ ID NO: 2886138 - RNA, 20 nt, Human
aagucacccuagcccucucc

SEQ ID NO: 2886139 - RNA, 22 nt, Human
aagucacccuagcccucucccu

SEQ ID NO: 2886140 - RNA, 23 nt, Human
aagucacccuagcccucucccuc

SEQ ID NO: 2886141 - RNA, 19 nt, Human
aagucaccacuccauuccc

SEQ ID NO: 2886142 - RNA, 20 nt, Human
aagucaccacuccauuccca

SEQ ID NO: 2886143 - RNA, 22 nt, Human
aagggucagaggaccuguauuu

SEQ ID NO: 2886144 - RNA, 16 nt, Human
aagggugggugcucag

SEQ ID NO: 2886145 - RNA, 17 nt, Human
aagggugggugcucaga

SEQ ID NO: 2886146 - RNA, 18 nt, Human
aagggugggugcucagaa

SEQ ID NO: 2886147 - RNA, 19 nt, Human
aagggugggugcucagaau

SEQ ID NO: 2886148 - RNA, 16 nt, Human
aagggucauagaaagg

SEQ ID NO: 2886149 - RNA, 17 nt, Human
aagggucauagaaaggg

SEQ ID NO: 2886150 - RNA, 17 nt, Human
aaggguuuguggcuggg

SEQ ID NO: 2886151 - RNA, 17 nt, Human
aaggguucuggcugccc

SEQ ID NO: 2886152 - RNA, 20 nt, Human
aaggguuuguggcugggggc

SEQ ID NO: 2886153 - RNA, 12 nt, Human
aaguaaaacuug

SEQ ID NO: 2886154 - RNA, 13 nt, Human
aaguaaaagaaac

SEQ ID NO: 2886155 - RNA, 16 nt, Human
aaguaaagaacugcac

SEQ ID NO: 2886156 - RNA, 17 nt, Human
aaguaaagccauuaaau

SEQ ID NO: 2886157 - RNA, 21 nt, Human
aaguaaagccauuaaaugaau

SEQ ID NO: 2886158 - RNA, 22 nt, Human
guuucuaagguccgguguucua

SEQ ID NO: 2886159 - RNA, 11 nt, Human
guuucuaaggu

SEQ ID NO: 2886160 - RNA, 20 nt, Human
guuucuaagauucuaaaggu

SEQ ID NO: 2886161 - RNA, 21 nt, Human
guuucuaagauucuaaagguc

SEQ ID NO: 2886162 - RNA, 13 nt, Human
aaguaaaauugcu

SEQ ID NO: 2886163 - RNA, 16 nt, Human
guuucuaagauucuaa

SEQ ID NO: 2886164 - RNA, 17 nt, Human
guuucuaagauucuaaa

SEQ ID NO: 2886165 - RNA, 18 nt, Human
guuucuaagauucuaaag

SEQ ID NO: 2886166 - RNA, 19 nt, Human
guuucuaagauucuaaagg

SEQ ID NO: 2886167 - RNA, 19 nt, Human
aaggguaucaggugcugcc

SEQ ID NO: 2886168 - RNA, 17 nt, Human
aaggguaucaggugcug

SEQ ID NO: 2886169 - RNA, 16 nt, Human
aagggcccagauucua

SEQ ID NO: 2886170 - RNA, 11 nt, Human
aagggcccagg

SEQ ID NO: 2886171 - RNA, 14 nt, Human
aagggcccccacau

SEQ ID NO: 2886172 - RNA, 16 nt, Human
aaggcuggcugggcau

SEQ ID NO: 2886173 - RNA, 19 nt, Human
aagggccugccuggccccu

SEQ ID NO: 2886174 - RNA, 19 nt, Human
aaggggagucaccuucccu

SEQ ID NO: 2886175 - RNA, 21 nt, Human
aaggggagucaccuucccuug

SEQ ID NO: 2886176 - RNA, 18 nt, Human
aaggggaucauaaaguua

SEQ ID NO: 2886177 - RNA, 21 nt, Human
aaggggaucauaaaguuagaa

SEQ ID NO: 2886178 - RNA, 12 nt, Human
aaggggcaaauu

SEQ ID NO: 2886179 - RNA, 14 nt, Human
aaggggcaaauuuu

SEQ ID NO: 2886180 - RNA, 18 nt, Human
aaggggcaaauuuuuauu

SEQ ID NO: 2886181 - RNA, 13 nt, Human
aagggcccagaga

SEQ ID NO: 2886182 - RNA, 15 nt, Human
aagggcccagagagg

SEQ ID NO: 2886183 - RNA, 18 nt, Human
aaggcugcagauaacaga

SEQ ID NO: 2886184 - RNA, 20 nt, Human
aaggcugccaacggggagcg

SEQ ID NO: 2886185 - RNA, 14 nt, Human
guuguaaagcaaua

SEQ ID NO: 2886186 - RNA, 17 nt, Human
guuguaaagcaauaaaa

SEQ ID NO: 2886187 - RNA, 18 nt, Human
aaggcugacuacauuuuu

SEQ ID NO: 2886188 - RNA, 21 nt, Human
guuguaacuaggcucagagau

SEQ ID NO: 2886189 - RNA, 12 nt, Human
guuguaacuuau

SEQ ID NO: 2886190 - RNA, 19 nt, Human
aaggcugagaggagagaga

SEQ ID NO: 2886191 - RNA, 13 nt, Human
guuguaacuaggc

SEQ ID NO: 2886192 - RNA, 18 nt, Human
guuguaacuaggcucaga

SEQ ID NO: 2886193 - RNA, 19 nt, Human
guuguaacuaggcucagag

SEQ ID NO: 2886194 - RNA, 14 nt, Human
guuuuacugugaaa

SEQ ID NO: 2886195 - RNA, 16 nt, Human
guuuuauaaugaaccc

SEQ ID NO: 2886196 - RNA, 15 nt, Human
guuuggccaucucug

SEQ ID NO: 2886197 - RNA, 15 nt, Human
guuuggcaauaguuu

SEQ ID NO: 2886198 - RNA, 17 nt, Human
guuuggcaauaguuugc

SEQ ID NO: 2886199 - RNA, 19 nt, Human
guuuggcaauaguuugcau

SEQ ID NO: 2886200 - RNA, 17 nt, Human
guuugcuauuagagcau

SEQ ID NO: 2886201 - RNA, 20 nt, Human
guuuggauucuuauguagca

SEQ ID NO: 2886202 - RNA, 16 nt, Human
guuuggauuuuuaauu

SEQ ID NO: 2886203 - RNA, 21 nt, Human
guuuggauuuuuaauuaaaaa

SEQ ID NO: 2886204 - RNA, 14 nt, Human
guuuggcaaggaaa

SEQ ID NO: 2886205 - RNA, 15 nt, Human
guuuggcaaggaaag

SEQ ID NO: 2886206 - RNA, 16 nt, Human
guuuuaagaggcaggg

SEQ ID NO: 2886207 - RNA, 14 nt, Human
guuuuaagaaaugu

SEQ ID NO: 2886208 - RNA, 15 nt, Human
guuuuaagaaaugua

SEQ ID NO: 2886209 - RNA, 16 nt, Human
guuuuaagaaauguag

SEQ ID NO: 2886210 - RNA, 14 nt, Human
guuuuaagaggcag

SEQ ID NO: 2886211 - RNA, 14 nt, Human
guuucuggucucua

SEQ ID NO: 2886212 - RNA, 16 nt, Human
guuucuggguccugaa

SEQ ID NO: 2886213 - RNA, 19 nt, Human
guuucuggguccugaagaa

SEQ ID NO: 2886214 - RNA, 22 nt, Human
guuucuggguccugaagaauua

SEQ ID NO: 2886215 - RNA, 23 nt, Human
guuucuggguccugaagaauuaa

SEQ ID NO: 2886216 - RNA, 16 nt, Human
guuucucucuacagug

SEQ ID NO: 2886217 - RNA, 19 nt, Human
guuucucucuacagugcca

SEQ ID NO: 2886218 - RNA, 23 nt, Human
guuucucugccgcuaccucccuc

SEQ ID NO: 2886219 - RNA, 13 nt, Human
guuucucauucuu

SEQ ID NO: 2886220 - RNA, 14 nt, Human
guuucucauucuug

SEQ ID NO: 2886221 - RNA, 14 nt, Human
guuucucauuuguu

SEQ ID NO: 2886222 - RNA, 15 nt, Human
guuucucauuuguuu

SEQ ID NO: 2886223 - RNA, 14 nt, Human
guuucucccccugg

SEQ ID NO: 2886224 - RNA, 23 nt, Human
guuucucccccugggcucugccc

SEQ ID NO: 2886225 - RNA, 22 nt, Human
guuucucccccugggcucugcc

SEQ ID NO: 2886226 - RNA, 17 nt, Human
guuucucccccugggcu

SEQ ID NO: 2886227 - RNA, 15 nt, Human
guuucucccccuggg

SEQ ID NO: 2886228 - RNA, 19 nt, Human
guuucucagauccuuguuu

SEQ ID NO: 2886229 - RNA, 21 nt, Human
guuucucagauccuuguuuca

SEQ ID NO: 2886230 - RNA, 13 nt, Human
guuucuauacaaa

SEQ ID NO: 2886231 - RNA, 15 nt, Human
guuucuauacaaaua

SEQ ID NO: 2886232 - RNA, 23 nt, Human
guuucuauacaaauauaaaucuu

SEQ ID NO: 2886233 - RNA, 14 nt, Human
guuucucagcuccc

SEQ ID NO: 2886234 - RNA, 20 nt, Human
guuucuggucucuaggcugg

SEQ ID NO: 2886235 - RNA, 20 nt, Human
guuugcacuguaugcuggac

SEQ ID NO: 2886236 - RNA, 19 nt, Human
guuugcacuguaugcugga

SEQ ID NO: 2886237 - RNA, 15 nt, Human
guuugcaggggugac

SEQ ID NO: 2886238 - RNA, 16 nt, Human
guuugcaggggugacg

SEQ ID NO: 2886239 - RNA, 19 nt, Human
guuugcauaaacauucuuu

SEQ ID NO: 2886240 - RNA, 22 nt, Human
guuugcacuguaugcuggacgg

SEQ ID NO: 2886241 - RNA, 18 nt, Human
guuugccuuccuuucucc

SEQ ID NO: 2886242 - RNA, 17 nt, Human
guuugccucugccucug

SEQ ID NO: 2886243 - RNA, 14 nt, Human
aagaauguugguuu

SEQ ID NO: 2886244 - RNA, 17 nt, Human
aagaauguugguuuacu

SEQ ID NO: 2886245 - RNA, 18 nt, Human
aagaauguugguuuacuu

SEQ ID NO: 2886246 - RNA, 19 nt, Human
aagaauguugguuuacuuu

SEQ ID NO: 2886247 - RNA, 20 nt, Human
aagaauguugguuuacuuuc

SEQ ID NO: 2886248 - RNA, 21 nt, Human
aagaauguugguuuacuuuca

SEQ ID NO: 2886249 - RNA, 18 nt, Human
aagaauuaagauacaaau

SEQ ID NO: 2886250 - RNA, 19 nt, Human
aagaauuaagauacaaauu

SEQ ID NO: 2886251 - RNA, 14 nt, Human
aagaaucagaguag

SEQ ID NO: 2886252 - RNA, 16 nt, Human
aagaaucagaguagaa

SEQ ID NO: 2886253 - RNA, 16 nt, Human
aagaauguguuucaaa

SEQ ID NO: 2886254 - RNA, 16 nt, Human
aagaauguuagagcac

SEQ ID NO: 2886255 - RNA, 17 nt, Human
guggcagcugcggucca

SEQ ID NO: 2886256 - RNA, 19 nt, Human
guggcagagcuuggacugg

SEQ ID NO: 2886257 - RNA, 18 nt, Human
aagaauauguuuccuugu

SEQ ID NO: 2886258 - RNA, 21 nt, Human
aagaauauguuuccuuguuua

SEQ ID NO: 2886259 - RNA, 16 nt, Human
aagaauauucagagaa

SEQ ID NO: 2886260 - RNA, 17 nt, Human
aagaauauucagagaau

SEQ ID NO: 2886261 - RNA, 21 nt, Human
aagaauauucagagaauauca

SEQ ID NO: 2886262 - RNA, 22 nt, Human
aagaauauucagagaauaucaa

SEQ ID NO: 2886263 - RNA, 23 nt, Human
aagaccagagauaguggggagac

SEQ ID NO: 2886264 - RNA, 13 nt, Human
aagaauuuuuuug

SEQ ID NO: 2886265 - RNA, 14 nt, Human
aagaauuuuuuugu

SEQ ID NO: 2886266 - RNA, 15 nt, Human
aagaauuuuuuuguc

SEQ ID NO: 2886267 - RNA, 22 nt, Human
aagaauuuuccugagacaaauu

SEQ ID NO: 2886268 - RNA, 13 nt, Human
aagaauuuuuaaa

SEQ ID NO: 2886269 - RNA, 23 nt, Human
aagaauuucuugguaagaagccg

SEQ ID NO: 2886270 - RNA, 22 nt, Human
aagaauuucuugguaagaagcc

SEQ ID NO: 2886271 - RNA, 20 nt, Human
aagaauuucuugguaagaag

SEQ ID NO: 2886272 - RNA, 12 nt, Human
aagaauucuuau

SEQ ID NO: 2886273 - RNA, 19 nt, Human
aagaauucuuauacacauu

SEQ ID NO: 2886274 - RNA, 19 nt, Human
aagaauucaaacuggggcc

SEQ ID NO: 2886275 - RNA, 20 nt, Human
guggcagauaaucagccucu

SEQ ID NO: 2886276 - RNA, 23 nt, Human
guggcagauaaucagccucuuaa

SEQ ID NO: 2886277 - RNA, 21 nt, Human
guggcagauaaucagccucuu

SEQ ID NO: 2886278 - RNA, 19 nt, Human
guggcacuugccuggguca

SEQ ID NO: 2886279 - RNA, 9 nt, Human
guggcagag

SEQ ID NO: 2886280 - RNA, 13 nt, Human
guggcagagagag

SEQ ID NO: 2886281 - RNA, 17 nt, Human
guggcagagagagagaa

SEQ ID NO: 2886282 - RNA, 15 nt, Human
guggcagagcuugga

SEQ ID NO: 2886283 - RNA, 23 nt, Human
guggcagagcuuggacuggaugc

SEQ ID NO: 2886284 - RNA, 11 nt, Human
guggcagagga

SEQ ID NO: 2886285 - RNA, 14 nt, Human
guggcagcugcggu

SEQ ID NO: 2886286 - RNA, 17 nt, Human
guggcacuugccugggu

SEQ ID NO: 2886287 - RNA, 16 nt, Human
guggcacaggcccccu

SEQ ID NO: 2886288 - RNA, 18 nt, Human
guggauuuuguuuaaaaa

SEQ ID NO: 2886289 - RNA, 15 nt, Human
guggacuggccccug

SEQ ID NO: 2886290 - RNA, 13 nt, Human
guggcaaggcugu

SEQ ID NO: 2886291 - RNA, 15 nt, Human
guggcaaggcugugc

SEQ ID NO: 2886292 - RNA, 16 nt, Human
guggcaaggcugugcu

SEQ ID NO: 2886293 - RNA, 12 nt, Human
guggcacaggcc

SEQ ID NO: 2886294 - RNA, 21 nt, Human
guggcaagcugugacuucucc

SEQ ID NO: 2886295 - RNA, 17 nt, Human
guggcaagaguguggag

SEQ ID NO: 2886296 - RNA, 13 nt, Human
guggcaaauauaa

SEQ ID NO: 2886297 - RNA, 15 nt, Human
guggcaaauauaaaa

SEQ ID NO: 2886298 - RNA, 16 nt, Human
guggcaaauauaaaac

SEQ ID NO: 2886299 - RNA, 13 nt, Human
guggauuucaguu

SEQ ID NO: 2886300 - RNA, 14 nt, Human
guggauuucaguuu

SEQ ID NO: 2886301 - RNA, 14 nt, Human
guggacucugcaca

SEQ ID NO: 2886302 - RNA, 17 nt, Human
guggacucugcacaugu

SEQ ID NO: 2886303 - RNA, 12 nt, Human
guggacucuggu

SEQ ID NO: 2886304 - RNA, 12 nt, Human
gugcuguaauuu

SEQ ID NO: 2886305 - RNA, 20 nt, Human
gugcuggauggagcccaggc

SEQ ID NO: 2886306 - RNA, 21 nt, Human
gugcugggggaaugagcccag

SEQ ID NO: 2886307 - RNA, 23 nt, Human
gugcugggggaaugagcccagag

SEQ ID NO: 2886308 - RNA, 21 nt, Human
gugcuggauauuuuacuacca

SEQ ID NO: 2886309 - RNA, 18 nt, Human
gugcuggauggagcccag

SEQ ID NO: 2886310 - RNA, 19 nt, Human
gugcuggauggagcccagg

SEQ ID NO: 2886311 - RNA, 15 nt, Human
gugcuggcaaccacu

SEQ ID NO: 2886312 - RNA, 16 nt, Human
gugcuggaggugggag

SEQ ID NO: 2886313 - RNA, 17 nt, Human
gugcuggaggugggagc

SEQ ID NO: 2886314 - RNA, 19 nt, Human
gugcuggaggugggagcag

SEQ ID NO: 2886315 - RNA, 21 nt, Human
gugcuggaggugggagcagga

SEQ ID NO: 2886316 - RNA, 24 nt, Human
gugcuggaggugggagcaggagau

SEQ ID NO: 2886317 - RNA, 16 nt, Human
aagaagguggaccuuu

SEQ ID NO: 2886318 - RNA, 18 nt, Human
aagaagguggaccuuuua

SEQ ID NO: 2886319 - RNA, 20 nt, Human
aagaagguggaccuuuuaaa

SEQ ID NO: 2886320 - RNA, 22 nt, Human
aagaagguggaccuuuuaaagu

SEQ ID NO: 2886321 - RNA, 21 nt, Human
aagaaggggacaauggcagaa

SEQ ID NO: 2886322 - RNA, 23 nt, Human
aagaagguuucagaaagaagugg

SEQ ID NO: 2886323 - RNA, 20 nt, Human
guggaaggcaucagucccua

SEQ ID NO: 2886324 - RNA, 15 nt, Human
guggaauuucuuguu

SEQ ID NO: 2886325 - RNA, 18 nt, Human
guggaauuucuuguuucu

SEQ ID NO: 2886326 - RNA, 23 nt, Human
guggaauuucuuguuucuccaga

SEQ ID NO: 2886327 - RNA, 17 nt, Human
guggacaaacuggaguc

SEQ ID NO: 2886328 - RNA, 20 nt, Human
guggacaaacuggagucugg

SEQ ID NO: 2886329 - RNA, 24 nt, Human
guggacacagcucuucuccaggcu

SEQ ID NO: 2886330 - RNA, 15 nt, Human
guggacacagcucuu

SEQ ID NO: 2886331 - RNA, 14 nt, Human
guggacacagcucu

SEQ ID NO: 2886332 - RNA, 15 nt, Human
guggaaggcagacag

SEQ ID NO: 2886333 - RNA, 20 nt, Human
guggaaggcagacagcaggc

SEQ ID NO: 2886334 - RNA, 15 nt, Human
guggaagagugugug

SEQ ID NO: 2886335 - RNA, 13 nt, Human
gugcuguggaagc

SEQ ID NO: 2886336 - RNA, 18 nt, Human
gugcuguccaugcuucuc

SEQ ID NO: 2886337 - RNA, 11 nt, Human
gugcuguggcc

SEQ ID NO: 2886338 - RNA, 14 nt, Human
gugcuguggaagca

SEQ ID NO: 2886339 - RNA, 17 nt, Human
gugcuguggccugggca

SEQ ID NO: 2886340 - RNA, 16 nt, Human
gugcuguggccugggc

SEQ ID NO: 2886341 - RNA, 20 nt, Human
guggaagaaaaugguuuauu

SEQ ID NO: 2886342 - RNA, 12 nt, Human
aagaaaaugguu

SEQ ID NO: 2886343 - RNA, 23 nt, Human
aagaaaaucagauggagcaugaa

SEQ ID NO: 2886344 - RNA, 20 nt, Human
aagaaaguugcacggcugcu

SEQ ID NO: 2886345 - RNA, 22 nt, Human
aagaaaguugcacggcugcuga

SEQ ID NO: 2886346 - RNA, 13 nt, Human
aagaaauaaccac

SEQ ID NO: 2886347 - RNA, 12 nt, Human
aagaaauaauaa

SEQ ID NO: 2886348 - RNA, 13 nt, Human
aagaaauaauaau

SEQ ID NO: 2886349 - RNA, 15 nt, Human
aagaaauaauaauau

SEQ ID NO: 2886350 - RNA, 19 nt, Human
aagaaagucuaucuaauga

SEQ ID NO: 2886351 - RNA, 22 nt, Human
aagaaagucuaucuaaugacau

SEQ ID NO: 2886352 - RNA, 23 nt, Human
aagaaagucuaucuaaugacaug

SEQ ID NO: 2886353 - RNA, 20 nt, Human
aagaaaaccaccccuuagau

SEQ ID NO: 2886354 - RNA, 17 nt, Human
aagaaagugggagguca

SEQ ID NO: 2886355 - RNA, 23 nt, Human
aagaaagugggaggucaggaaac

SEQ ID NO: 2886356 - RNA, 19 nt, Human
aagaaaauuuuuguaguag

SEQ ID NO: 2886357 - RNA, 19 nt, Human
aagaagcaggcuacacuga

SEQ ID NO: 2886358 - RNA, 12 nt, Human
aagaagcaggcu

SEQ ID NO: 2886359 - RNA, 14 nt, Human
aagaagcaggcuac

SEQ ID NO: 2886360 - RNA, 12 nt, Human
aagaagcagaga

SEQ ID NO: 2886361 - RNA, 13 nt, Human
aagaagcagagag

SEQ ID NO: 2886362 - RNA, 17 nt, Human
aagaagccgggaacaga

SEQ ID NO: 2886363 - RNA, 14 nt, Human
aacuugucuuuuca

SEQ ID NO: 2886364 - RNA, 11 nt, Human
aacuugugaau

SEQ ID NO: 2886365 - RNA, 12 nt, Human
aacuugugaaug

SEQ ID NO: 2886366 - RNA, 13 nt, Human
aacuugugaaugc

SEQ ID NO: 2886367 - RNA, 17 nt, Human
aacuugugaaugcuucu

SEQ ID NO: 2886368 - RNA, 18 nt, Human
aacuuguuacuaaagaaa

SEQ ID NO: 2886369 - RNA, 15 nt, Human
aacuuguuauuguga

SEQ ID NO: 2886370 - RNA, 17 nt, Human
aacuuguuauugugaau

SEQ ID NO: 2886371 - RNA, 18 nt, Human
aacuuguuauugugaaug

SEQ ID NO: 2886372 - RNA, 19 nt, Human
aacuuguuauugugaauga

SEQ ID NO: 2886373 - RNA, 20 nt, Human
aacuuguuauugugaaugau

SEQ ID NO: 2886374 - RNA, 16 nt, Human
aacuuguuugcuguga

SEQ ID NO: 2886375 - RNA, 17 nt, Human
aacuuguuugcugugaa

SEQ ID NO: 2886376 - RNA, 20 nt, Human
aacuuguuugcugugaacaa

SEQ ID NO: 2886377 - RNA, 13 nt, Human
aagaaaagaccuu

SEQ ID NO: 2886378 - RNA, 18 nt, Human
aagaaaagacuuguaaua

SEQ ID NO: 2886379 - RNA, 15 nt, Human
aagaaaagagaagaa

SEQ ID NO: 2886380 - RNA, 16 nt, Human
aagaaaagagaagaag

SEQ ID NO: 2886381 - RNA, 15 nt, Human
aagaaaagugcauau

SEQ ID NO: 2886382 - RNA, 20 nt, Human
aagaaaagugcauauuuauc

SEQ ID NO: 2886383 - RNA, 22 nt, Human
aagaaaagugcauauuuaucca

SEQ ID NO: 2886384 - RNA, 22 nt, Human
aagaaaaguagguuuacauuca

SEQ ID NO: 2886385 - RNA, 13 nt, Human
aagaaaaguauuu

SEQ ID NO: 2886386 - RNA, 14 nt, Human
aagaaaaguauuuu

SEQ ID NO: 2886387 - RNA, 15 nt, Human
aagaaaaguauuuug

SEQ ID NO: 2886388 - RNA, 16 nt, Human
aagaaaaguauuuuga

SEQ ID NO: 2886389 - RNA, 17 nt, Human
aagaaaaguauuuugaa

SEQ ID NO: 2886390 - RNA, 21 nt, Human
aagaaaaguauuuugaaguuu

SEQ ID NO: 2886391 - RNA, 22 nt, Human
aagaaaaguauuuugaaguuua

SEQ ID NO: 2886392 - RNA, 23 nt, Human
aagaaaaguauuuugaaguuuac

SEQ ID NO: 2886393 - RNA, 19 nt, Human
aagaaaagggucaaacauc

SEQ ID NO: 2886394 - RNA, 16 nt, Human
aagaaaagugguuguu

SEQ ID NO: 2886395 - RNA, 16 nt, Human
aacuugguucugcuuc

SEQ ID NO: 2886396 - RNA, 17 nt, Human
aacuugguucugcuuca

SEQ ID NO: 2886397 - RNA, 15 nt, Human
aacuuguaaaugugg

SEQ ID NO: 2886398 - RNA, 13 nt, Human
aacuuguagcugu

SEQ ID NO: 2886399 - RNA, 14 nt, Human
aacuuguagcugua

SEQ ID NO: 2886400 - RNA, 16 nt, Human
aacuuguagcuguaaa

SEQ ID NO: 2886401 - RNA, 17 nt, Human
aacuuguagcuguaaaa

SEQ ID NO: 2886402 - RNA, 18 nt, Human
aacuuguagcuguaaaac

SEQ ID NO: 2886403 - RNA, 23 nt, Human
aacuuguagcuguaaaacgcugu

SEQ ID NO: 2886404 - RNA, 22 nt, Human
gugccuggguggacauggcccc

SEQ ID NO: 2886405 - RNA, 15 nt, Human
gugccaauauguauu

SEQ ID NO: 2886406 - RNA, 17 nt, Human
gugccaauauguauugu

SEQ ID NO: 2886407 - RNA, 19 nt, Human
gugccaauauguauuguaa

SEQ ID NO: 2886408 - RNA, 16 nt, Human
gugccugacugcccag

SEQ ID NO: 2886409 - RNA, 20 nt, Human
gugccaauauguauuguaaa

SEQ ID NO: 2886410 - RNA, 21 nt, Human
gugccaauauguauuguaaac

SEQ ID NO: 2886411 - RNA, 14 nt, Human
gugccugggggagu

SEQ ID NO: 2886412 - RNA, 16 nt, Human
gugccugggggaguuu

SEQ ID NO: 2886413 - RNA, 12 nt, Human
gugccuggccug

SEQ ID NO: 2886414 - RNA, 15 nt, Human
gugccuggccuggca

SEQ ID NO: 2886415 - RNA, 19 nt, Human
gugccuggccuggcacaca

SEQ ID NO: 2886416 - RNA, 22 nt, Human
gugccuggacauuugccuugcu

SEQ ID NO: 2886417 - RNA, 16 nt, Human
gugccuggccacgccc

SEQ ID NO: 2886418 - RNA, 11 nt, Human
gugccugcagc

SEQ ID NO: 2886419 - RNA, 21 nt, Human
gugcacguggagagcuggugc

SEQ ID NO: 2886420 - RNA, 12 nt, Human
gugcacguugcu

SEQ ID NO: 2886421 - RNA, 18 nt, Human
gugcacguugcuucaggc

SEQ ID NO: 2886422 - RNA, 15 nt, Human
gugccaacuccucac

SEQ ID NO: 2886423 - RNA, 15 nt, Human
gugccaacuguggcu

SEQ ID NO: 2886424 - RNA, 16 nt, Human
gugccaacuguggcug

SEQ ID NO: 2886425 - RNA, 18 nt, Human
gugccaacuguggcuggu

SEQ ID NO: 2886426 - RNA, 22 nt, Human
gugccaacacucaagaagcagg

SEQ ID NO: 2886427 - RNA, 23 nt, Human
gugccaacacucaagaagcaggc

SEQ ID NO: 2886428 - RNA, 11 nt, Human
gugccaaggac

SEQ ID NO: 2886429 - RNA, 20 nt, Human
gugccaaggaccuccucuuc

SEQ ID NO: 2886430 - RNA, 17 nt, Human
gugcacacaccagagcc

SEQ ID NO: 2886431 - RNA, 18 nt, Human
gugcacgcaguggccuuc

SEQ ID NO: 2886432 - RNA, 13 nt, Human
gugcacaaggauu

SEQ ID NO: 2886433 - RNA, 13 nt, Human
gugcacacacaca

SEQ ID NO: 2886434 - RNA, 18 nt, Human
gugcacguacacacacau

SEQ ID NO: 2886435 - RNA, 18 nt, Human
gugcacguggagagcugg

SEQ ID NO: 2886436 - RNA, 16 nt, Human
gugcacguggagagcu

SEQ ID NO: 2886437 - RNA, 15 nt, Human
gugcacguggagagc

SEQ ID NO: 2886438 - RNA, 18 nt, Human
gugcacgcagauuagcag

SEQ ID NO: 2886439 - RNA, 14 nt, Human
gugcacacaccaga

SEQ ID NO: 2886440 - RNA, 12 nt, Human
gugcacacacca

SEQ ID NO: 2886441 - RNA, 20 nt, Human
aagaugcaaggaccaggacu

SEQ ID NO: 2886442 - RNA, 15 nt, Human
aagaugcaaggacca

SEQ ID NO: 2886443 - RNA, 15 nt, Human
aagaugaucagaccu

SEQ ID NO: 2886444 - RNA, 15 nt, Human
aagaugauuugcaau

SEQ ID NO: 2886445 - RNA, 16 nt, Human
aagaugauuugcaaug

SEQ ID NO: 2886446 - RNA, 18 nt, Human
aagaugagagaacuggag

SEQ ID NO: 2886447 - RNA, 20 nt, Human
aagaugagauuggcauggcu

SEQ ID NO: 2886448 - RNA, 21 nt, Human
aagaugagauuggcauggcuu

SEQ ID NO: 2886449 - RNA, 22 nt, Human
aagaugagauuggcauggcuuu

SEQ ID NO: 2886450 - RNA, 17 nt, Human
aagaugagagaacugga

SEQ ID NO: 2886451 - RNA, 14 nt, Human
aagauguauauagg

SEQ ID NO: 2886452 - RNA, 13 nt, Human
aagcaaauacuua

SEQ ID NO: 2886453 - RNA, 18 nt, Human
aagcaaauacuuagcaaa

SEQ ID NO: 2886454 - RNA, 23 nt, Human
aagcaaauacuuagcaaaaagug

SEQ ID NO: 2886455 - RNA, 12 nt, Human
aagcaaaugucu

SEQ ID NO: 2886456 - RNA, 14 nt, Human
gugguuauuucuca

SEQ ID NO: 2886457 - RNA, 22 nt, Human
gugguuauuucucaacaaagca

SEQ ID NO: 2886458 - RNA, 15 nt, Human
aagaucaaaauaaaa

SEQ ID NO: 2886459 - RNA, 17 nt, Human
aagaucaaaauaaaaag

SEQ ID NO: 2886460 - RNA, 21 nt, Human
aagaucaaaauaaaaagugac

SEQ ID NO: 2886461 - RNA, 20 nt, Human
aagaucacugccagagauaa

SEQ ID NO: 2886462 - RNA, 22 nt, Human
aagaucaaaauaaaaagugaca

SEQ ID NO: 2886463 - RNA, 14 nt, Human
aagauccaagaagg

SEQ ID NO: 2886464 - RNA, 15 nt, Human
aagauccccucagga

SEQ ID NO: 2886465 - RNA, 16 nt, Human
aagauccccucaggac

SEQ ID NO: 2886466 - RNA, 22 nt, Human
aagauccuaaaacaaaagcuca

SEQ ID NO: 2886467 - RNA, 21 nt, Human
aagauccugucuuuaaggaaa

SEQ ID NO: 2886468 - RNA, 22 nt, Human
aagauccuagauccuaaggguc

SEQ ID NO: 2886469 - RNA, 15 nt, Human
guguccaccuguggg

SEQ ID NO: 2886470 - RNA, 16 nt, Human
guguccaccugugggu

SEQ ID NO: 2886471 - RNA, 17 nt, Human
guguccaccugugggug

SEQ ID NO: 2886472 - RNA, 14 nt, Human
aagcaaggcggugg

SEQ ID NO: 2886473 - RNA, 15 nt, Human
aagcaagggggugau

SEQ ID NO: 2886474 - RNA, 16 nt, Human
aagcaaggaaaacuua

SEQ ID NO: 2886475 - RNA, 20 nt, Human
aagcaaggaagauauacaug

SEQ ID NO: 2886476 - RNA, 15 nt, Human
aagcaagcuaaccuu

SEQ ID NO: 2886477 - RNA, 12 nt, Human
aagcaagcucuc

SEQ ID NO: 2886478 - RNA, 16 nt, Human
aagcaagcucucuugc

SEQ ID NO: 2886479 - RNA, 16 nt, Human
aagcaagcaacacaga

SEQ ID NO: 2886480 - RNA, 20 nt, Human
gugucccaaaaagaaaggag

SEQ ID NO: 2886481 - RNA, 19 nt, Human
gugucuugcaauggcagcc

SEQ ID NO: 2886482 - RNA, 17 nt, Human
guguccauuuugugaag

SEQ ID NO: 2886483 - RNA, 19 nt, Human
guguccauuuugugaagcc

SEQ ID NO: 2886484 - RNA, 20 nt, Human
guguccauuuugugaagccc

SEQ ID NO: 2886485 - RNA, 21 nt, Human
guguccauuuugugaagcccu

SEQ ID NO: 2886486 - RNA, 22 nt, Human
guguccauuuugugaagcccug

SEQ ID NO: 2886487 - RNA, 12 nt, Human
gugugguggccu

SEQ ID NO: 2886488 - RNA, 13 nt, Human
gugugguggccuc

SEQ ID NO: 2886489 - RNA, 15 nt, Human
gugugguggccucag

SEQ ID NO: 2886490 - RNA, 16 nt, Human
gugugguggccucagc

SEQ ID NO: 2886491 - RNA, 23 nt, Human
gugugguggccucagcugaaugc

SEQ ID NO: 2886492 - RNA, 18 nt, Human
gugugagucaccaagccc

SEQ ID NO: 2886493 - RNA, 13 nt, Human
gugugagucacca

SEQ ID NO: 2886494 - RNA, 21 nt, Human
gugucuugcaauggcagccuu

SEQ ID NO: 2886495 - RNA, 14 nt, Human
gugucuuguucugu

SEQ ID NO: 2886496 - RNA, 18 nt, Human
gugucuuguucugucacu

SEQ ID NO: 2886497 - RNA, 17 nt, Human
guguugaaaauguucag

SEQ ID NO: 2886498 - RNA, 11 nt, Human
guguugacauu

SEQ ID NO: 2886499 - RNA, 19 nt, Human
guguugagccuuuucccuc

SEQ ID NO: 2886500 - RNA, 14 nt, Human
guguuuaagacauu

SEQ ID NO: 2886501 - RNA, 13 nt, Human
guguuuaagacau

SEQ ID NO: 2886502 - RNA, 17 nt, Human
guguuguugcucuagga

SEQ ID NO: 2886503 - RNA, 15 nt, Human
guguuguugcuucuu

SEQ ID NO: 2886504 - RNA, 21 nt, Human
guguuguugcuucuugugaag

SEQ ID NO: 2886505 - RNA, 12 nt, Human
guguuuaaaaaa

SEQ ID NO: 2886506 - RNA, 16 nt, Human
guguguuccaaguuuc

SEQ ID NO: 2886507 - RNA, 16 nt, Human
guguugaaaauguuca

SEQ ID NO: 2886508 - RNA, 23 nt, Human
guguucuguuuguuauuguuuug

SEQ ID NO: 2886509 - RNA, 12 nt, Human
guguugaaaacc

SEQ ID NO: 2886510 - RNA, 13 nt, Human
guguugaaaacca

SEQ ID NO: 2886511 - RNA, 15 nt, Human
guguugaaaaccaaa

SEQ ID NO: 2886512 - RNA, 21 nt, Human
guguugaaaaccaaaaugaca

SEQ ID NO: 2886513 - RNA, 14 nt, Human
guguucuguuuguu

SEQ ID NO: 2886514 - RNA, 21 nt, Human
gugugguguuagggugcagcc

SEQ ID NO: 2886515 - RNA, 13 nt, Human
guguguaauuguu

SEQ ID NO: 2886516 - RNA, 16 nt, Human
guguguaauuguuccu

SEQ ID NO: 2886517 - RNA, 13 nt, Human
guguguguaugug

SEQ ID NO: 2886518 - RNA, 15 nt, Human
gugugugugugugug

SEQ ID NO: 2886519 - RNA, 14 nt, Human
gugugugugugugu

SEQ ID NO: 2886520 - RNA, 15 nt, Human
gugugugugugugua

SEQ ID NO: 2886521 - RNA, 16 nt, Human
guguguguguguaugu

SEQ ID NO: 2886522 - RNA, 13 nt, Human
guguguguguggc

SEQ ID NO: 2886523 - RNA, 12 nt, Human
gugugugugugu

SEQ ID NO: 2886524 - RNA, 11 nt, Human
gugugugugug

SEQ ID NO: 2886525 - RNA, 12 nt, Human
guguguguguga

SEQ ID NO: 2886526 - RNA, 13 nt, Human
gugugugugugca

SEQ ID NO: 2886527 - RNA, 10 nt, Human
gugugugugu

SEQ ID NO: 2886528 - RNA, 12 nt, Human
guguguguguau

SEQ ID NO: 2886529 - RNA, 12 nt, Human
guguguguaugu

SEQ ID NO: 2886530 - RNA, 13 nt, Human
gugugugugaaug

SEQ ID NO: 2886531 - RNA, 9 nt, Human
gugugugug

SEQ ID NO: 2886532 - RNA, 19 nt, Human
guguguguaugcgugugug

SEQ ID NO: 2886533 - RNA, 19 nt, Human
aagacucaaauguucuaag

SEQ ID NO: 2886534 - RNA, 17 nt, Human
aagacucaaauguucua

SEQ ID NO: 2886535 - RNA, 18 nt, Human
aagacucaaauguucuaa

SEQ ID NO: 2886536 - RNA, 15 nt, Human
aagaccccugacuca

SEQ ID NO: 2886537 - RNA, 19 nt, Human
aagacggcacggucuuccc

SEQ ID NO: 2886538 - RNA, 21 nt, Human
aagacggcacggucuucccuc

SEQ ID NO: 2886539 - RNA, 14 nt, Human
aagacucaaauguu

SEQ ID NO: 2886540 - RNA, 16 nt, Human
aagacucaaauguucu

SEQ ID NO: 2886541 - RNA, 12 nt, Human
aagaccagucca

SEQ ID NO: 2886542 - RNA, 17 nt, Human
aagacucauucuucugu

SEQ ID NO: 2886543 - RNA, 21 nt, Human
aagacuggaagguggggacag

SEQ ID NO: 2886544 - RNA, 23 nt, Human
aagacuggaagcuaauuugcauu

SEQ ID NO: 2886545 - RNA, 22 nt, Human
aagacuggaagcuaauuugcau

SEQ ID NO: 2886546 - RNA, 20 nt, Human
aagacuggaagcuaauuugc

SEQ ID NO: 2886547 - RNA, 17 nt, Human
aagacucauucccuaga

SEQ ID NO: 2886548 - RNA, 12 nt, Human
aagagcucuggu

SEQ ID NO: 2886549 - RNA, 13 nt, Human
aagagcucuggug

SEQ ID NO: 2886550 - RNA, 21 nt, Human
aagagccauguagaagcugca

SEQ ID NO: 2886551 - RNA, 16 nt, Human
guggcccgacagccug

SEQ ID NO: 2886552 - RNA, 13 nt, Human
aagagcugcccuc

SEQ ID NO: 2886553 - RNA, 15 nt, Human
aagagauuccugagc

SEQ ID NO: 2886554 - RNA, 14 nt, Human
aagagauugcuaau

SEQ ID NO: 2886555 - RNA, 15 nt, Human
aagagauugcuaauu

SEQ ID NO: 2886556 - RNA, 19 nt, Human
aagagauugcuaauugcug

SEQ ID NO: 2886557 - RNA, 23 nt, Human
gugggggugcagaugagguugcu

SEQ ID NO: 2886558 - RNA, 15 nt, Human
gugggauucagagaa

SEQ ID NO: 2886559 - RNA, 13 nt, Human
gugggggguccuu

SEQ ID NO: 2886560 - RNA, 20 nt, Human
gugguguuuccugcaggcca

SEQ ID NO: 2886561 - RNA, 22 nt, Human
guggugucugccuguugcguga

SEQ ID NO: 2886562 - RNA, 14 nt, Human
guggugugaucuua

SEQ ID NO: 2886563 - RNA, 12 nt, Human
gugguguaauuu

SEQ ID NO: 2886564 - RNA, 11 nt, Human
guggugucacu

SEQ ID NO: 2886565 - RNA, 18 nt, Human
guggugucacugucccuc

SEQ ID NO: 2886566 - RNA, 19 nt, Human
guggugucacugucccucc

SEQ ID NO: 2886567 - RNA, 22 nt, Human
guggugucacugucccuccugg

SEQ ID NO: 2886568 - RNA, 23 nt, Human
guggugucacugucccuccuggu

SEQ ID NO: 2886569 - RNA, 12 nt, Human
gugguggagcca

SEQ ID NO: 2886570 - RNA, 22 nt, Human
gugguggagccaguaaacagag

SEQ ID NO: 2886571 - RNA, 17 nt, Human
gugguggaguggaguga

SEQ ID NO: 2886572 - RNA, 16 nt, Human
gugguggcacaggccc

SEQ ID NO: 2886573 - RNA, 14 nt, Human
gugguggagccagu

SEQ ID NO: 2886574 - RNA, 18 nt, Human
gugguggcccacgccugu

SEQ ID NO: 2886575 - RNA, 13 nt, Human
gugguggccucag

SEQ ID NO: 2886576 - RNA, 14 nt, Human
gugguggccucagc

SEQ ID NO: 2886577 - RNA, 18 nt, Human
gugguggcucacgccugu

SEQ ID NO: 2886578 - RNA, 23 nt, Human
gugguggcauacgccuguagucc

SEQ ID NO: 2886579 - RNA, 17 nt, Human
gugguggcaguggaggu

SEQ ID NO: 2886580 - RNA, 20 nt, Human
guggcuucuuuucuuuguau

SEQ ID NO: 2886581 - RNA, 21 nt, Human
guggcuucccgcucagcccuc

SEQ ID NO: 2886582 - RNA, 22 nt, Human
guggcuugagaaauauggacac

SEQ ID NO: 2886583 - RNA, 20 nt, Human
guggcuuuccuuguggcaga

SEQ ID NO: 2886584 - RNA, 21 nt, Human
guggcuuuccuuguggcagag

SEQ ID NO: 2886585 - RNA, 23 nt, Human
guggcuuuccuuguggcagagga

SEQ ID NO: 2886586 - RNA, 12 nt, Human
guggccucagaa

SEQ ID NO: 2886587 - RNA, 11 nt, Human
guggccucaga

SEQ ID NO: 2886588 - RNA, 13 nt, Human
guggccucagaau

SEQ ID NO: 2886589 - RNA, 11 nt, Human
guggccucagc

SEQ ID NO: 2886590 - RNA, 18 nt, Human
guggccucagcugaaugc

SEQ ID NO: 2886591 - RNA, 23 nt, Human
guggccucagcugaaugccuccu

SEQ ID NO: 2886592 - RNA, 20 nt, Human
gugggaugugguuuucuuaa

SEQ ID NO: 2886593 - RNA, 12 nt, Human
gugggagcagga

SEQ ID NO: 2886594 - RNA, 13 nt, Human
gugggagcaggag

SEQ ID NO: 2886595 - RNA, 14 nt, Human
gugggagcaggaga

SEQ ID NO: 2886596 - RNA, 15 nt, Human
gugggagcaggagau

SEQ ID NO: 2886597 - RNA, 22 nt, Human
gugggagcaggagauugagaag

SEQ ID NO: 2886598 - RNA, 12 nt, Human
gugggaaaacac

SEQ ID NO: 2886599 - RNA, 15 nt, Human
gugggagagcccagc

SEQ ID NO: 2886600 - RNA, 14 nt, Human
gugggagagcccag

SEQ ID NO: 2886601 - RNA, 13 nt, Human
gugggagagccca

SEQ ID NO: 2886602 - RNA, 17 nt, Human
aacagucuucaggcaaa

SEQ ID NO: 2886603 - RNA, 14 nt, Human
aacagguggagaaa

SEQ ID NO: 2886604 - RNA, 18 nt, Human
aacagguguuggugacaa

SEQ ID NO: 2886605 - RNA, 13 nt, Human
aacagguauuuug

SEQ ID NO: 2886606 - RNA, 14 nt, Human
aacagguauuuugu

SEQ ID NO: 2886607 - RNA, 18 nt, Human
aacagguauuuuguuucu

SEQ ID NO: 2886608 - RNA, 21 nt, Human
aacagguauuuuguuucuuuu

SEQ ID NO: 2886609 - RNA, 22 nt, Human
aacagguauuuuguuucuuuua

SEQ ID NO: 2886610 - RNA, 18 nt, Human
aacagauucacacugucu

SEQ ID NO: 2886611 - RNA, 17 nt, Human
aacagauuauuuuggaa

SEQ ID NO: 2886612 - RNA, 20 nt, Human
aacagauuauuuuggaaagu

SEQ ID NO: 2886613 - RNA, 22 nt, Human
aacagauuauuuuggaaaguuu

SEQ ID NO: 2886614 - RNA, 15 nt, Human
aacagauucacacug

SEQ ID NO: 2886615 - RNA, 16 nt, Human
aacagauucacacugu

SEQ ID NO: 2886616 - RNA, 19 nt, Human
guccuaauucuucuguccu

SEQ ID NO: 2886617 - RNA, 21 nt, Human
aacagaugaugagaauuucua

SEQ ID NO: 2886618 - RNA, 19 nt, Human
aacagagugagacccuguc

SEQ ID NO: 2886619 - RNA, 16 nt, Human
aacagaugaauaaacu

SEQ ID NO: 2886620 - RNA, 21 nt, Human
aacagaggccauggcagaaua

SEQ ID NO: 2886621 - RNA, 17 nt, Human
aacagaggccauggcag

SEQ ID NO: 2886622 - RNA, 20 nt, Human
aacagacuggaagcacagcu

SEQ ID NO: 2886623 - RNA, 13 nt, Human
guccuacccaccc

SEQ ID NO: 2886624 - RNA, 20 nt, Human
aacagaggaagaauuuguua

SEQ ID NO: 2886625 - RNA, 16 nt, Human
aacauauguacauaaa

SEQ ID NO: 2886626 - RNA, 19 nt, Human
aacauauguacauaaauug

SEQ ID NO: 2886627 - RNA, 21 nt, Human
aacauauguacauaaauugca

SEQ ID NO: 2886628 - RNA, 19 nt, Human
aacauauucuguaugaacu

SEQ ID NO: 2886629 - RNA, 23 nt, Human
aacauauucuguaugaacuuuau

SEQ ID NO: 2886630 - RNA, 12 nt, Human
aacauaugauuu

SEQ ID NO: 2886631 - RNA, 14 nt, Human
aacauaugauuuca

SEQ ID NO: 2886632 - RNA, 21 nt, Human
aacauaugauuucacuagaaa

SEQ ID NO: 2886633 - RNA, 17 nt, Human
aacauaacccacuuguc

SEQ ID NO: 2886634 - RNA, 20 nt, Human
aacauaacccacuugucacu

SEQ ID NO: 2886635 - RNA, 21 nt, Human
aacauaacccacuugucacug

SEQ ID NO: 2886636 - RNA, 14 nt, Human
aacauaaucuaguu

SEQ ID NO: 2886637 - RNA, 16 nt, Human
aacauaaucuaguuua

SEQ ID NO: 2886638 - RNA, 13 nt, Human
aacagugagccug

SEQ ID NO: 2886639 - RNA, 21 nt, Human
aacagugagccugaauuuugu

SEQ ID NO: 2886640 - RNA, 12 nt, Human
aacauaauuaaa

SEQ ID NO: 2886641 - RNA, 13 nt, Human
aacauagaaaaau

SEQ ID NO: 2886642 - RNA, 12 nt, Human
aacauaaugaaa

SEQ ID NO: 2886643 - RNA, 15 nt, Human
aacauaaugaaaaua

SEQ ID NO: 2886644 - RNA, 14 nt, Human
guccaugcuucuca

SEQ ID NO: 2886645 - RNA, 21 nt, Human
guccaugcagggggcuccugg

SEQ ID NO: 2886646 - RNA, 22 nt, Human
guccaugcagggggcuccuggg

SEQ ID NO: 2886647 - RNA, 22 nt, Human
guccaugcaugacagccucuau

SEQ ID NO: 2886648 - RNA, 18 nt, Human
guagcggaugauucuuca

SEQ ID NO: 2886649 - RNA, 23 nt, Human
guagccuugcccggauucuggga

SEQ ID NO: 2886650 - RNA, 15 nt, Human
guagccuugcccgga

SEQ ID NO: 2886651 - RNA, 21 nt, Human
guagccucgccgucugugaau

SEQ ID NO: 2886652 - RNA, 12 nt, Human
guagccugugca

SEQ ID NO: 2886653 - RNA, 22 nt, Human
guagccuggauauuauucuugu

SEQ ID NO: 2886654 - RNA, 22 nt, Human
guagcguuuuuuaaauguauac

SEQ ID NO: 2886655 - RNA, 18 nt, Human
guagcguuuuuuaaaugu

SEQ ID NO: 2886656 - RNA, 17 nt, Human
guagcguuuuuuaaaug

SEQ ID NO: 2886657 - RNA, 13 nt, Human
guagcguuuuuua

SEQ ID NO: 2886658 - RNA, 18 nt, Human
gucccaccuuggcugcag

SEQ ID NO: 2886659 - RNA, 17 nt, Human
gucccaccuuggcugca

SEQ ID NO: 2886660 - RNA, 19 nt, Human
guccaugugguucuucaaa

SEQ ID NO: 2886661 - RNA, 19 nt, Human
gucccaccuuggcugcagg

SEQ ID NO: 2886662 - RNA, 17 nt, Human
gucccccuauccuuggc

SEQ ID NO: 2886663 - RNA, 18 nt, Human
gucccccuauccuuggca

SEQ ID NO: 2886664 - RNA, 13 nt, Human
gucccccucagca

SEQ ID NO: 2886665 - RNA, 14 nt, Human
gucccccucuggcu

SEQ ID NO: 2886666 - RNA, 12 nt, Human
gucccccucugg

SEQ ID NO: 2886667 - RNA, 21 nt, Human
guccgaaagggacuuggaagc

SEQ ID NO: 2886668 - RNA, 22 nt, Human
guccgaaagggacuuggaagcu

SEQ ID NO: 2886669 - RNA, 15 nt, Human
gucccgaauccacag

SEQ ID NO: 2886670 - RNA, 17 nt, Human
guccguggguugcuaac

SEQ ID NO: 2886671 - RNA, 18 nt, Human
guccguggguugcuaacu

SEQ ID NO: 2886672 - RNA, 20 nt, Human
guccguggguugcuaacuga

SEQ ID NO: 2886673 - RNA, 22 nt, Human
guccguggguugcuaacugaac

SEQ ID NO: 2886674 - RNA, 18 nt, Human
guccuaaggaaccuuccu

SEQ ID NO: 2886675 - RNA, 15 nt, Human
guccuaaggaaccuu

SEQ ID NO: 2886676 - RNA, 16 nt, Human
guccuaacugguauag

SEQ ID NO: 2886677 - RNA, 15 nt, Human
guccuaaaagcaaaa

SEQ ID NO: 2886678 - RNA, 13 nt, Human
guccccgcagccc

SEQ ID NO: 2886679 - RNA, 18 nt, Human
guccccguggccaucccu

SEQ ID NO: 2886680 - RNA, 15 nt, Human
guccccggggcccag

SEQ ID NO: 2886681 - RNA, 16 nt, Human
guccccggggcccagg

SEQ ID NO: 2886682 - RNA, 22 nt, Human
guccccucccagagcuggugga

SEQ ID NO: 2886683 - RNA, 12 nt, Human
guccccucaccu

SEQ ID NO: 2886684 - RNA, 16 nt, Human
gucucaggucccugca

SEQ ID NO: 2886685 - RNA, 23 nt, Human
gucucacaguguugcccaggcug

SEQ ID NO: 2886686 - RNA, 19 nt, Human
gucucacaguguugcccag

SEQ ID NO: 2886687 - RNA, 15 nt, Human
gucucaggucccugc

SEQ ID NO: 2886688 - RNA, 13 nt, Human
gucucaggcuggu

SEQ ID NO: 2886689 - RNA, 17 nt, Human
gucucaggcugguggga

SEQ ID NO: 2886690 - RNA, 19 nt, Human
gucucauuccguugucugu

SEQ ID NO: 2886691 - RNA, 20 nt, Human
gucucauuccguugucugug

SEQ ID NO: 2886692 - RNA, 15 nt, Human
gucucauuuuaaugu

SEQ ID NO: 2886693 - RNA, 16 nt, Human
gucucauuuuaaugua

SEQ ID NO: 2886694 - RNA, 20 nt, Human
gucucauuuuaauguaaaga

SEQ ID NO: 2886695 - RNA, 22 nt, Human
gucucauuuuaauguaaagauu

SEQ ID NO: 2886696 - RNA, 18 nt, Human
gucucaggcuggugggag

SEQ ID NO: 2886697 - RNA, 22 nt, Human
gucucaggcuggugggaggggc

SEQ ID NO: 2886698 - RNA, 17 nt, Human
gucucagggugcagagg

SEQ ID NO: 2886699 - RNA, 18 nt, Human
gucucagggugcagaggu

SEQ ID NO: 2886700 - RNA, 12 nt, Human
gucuccacugug

SEQ ID NO: 2886701 - RNA, 19 nt, Human
gucuccacugugccuuugc

SEQ ID NO: 2886702 - RNA, 17 nt, Human
gucuaucuaaugacaug

SEQ ID NO: 2886703 - RNA, 14 nt, Human
gucuaugggacuca

SEQ ID NO: 2886704 - RNA, 22 nt, Human
gucucaaacucuugaccucagg

SEQ ID NO: 2886705 - RNA, 16 nt, Human
gucucaaacuccugac

SEQ ID NO: 2886706 - RNA, 20 nt, Human
gucucaagagggcacuggug

SEQ ID NO: 2886707 - RNA, 22 nt, Human
gucucaagagggcacugguggc

SEQ ID NO: 2886708 - RNA, 21 nt, Human
gucucaacucuguccccagga

SEQ ID NO: 2886709 - RNA, 23 nt, Human
gucucaacugcucuuuuauacug

SEQ ID NO: 2886710 - RNA, 19 nt, Human
gucucaagggcuagcaucc

SEQ ID NO: 2886711 - RNA, 15 nt, Human
gucucaagagggcac

SEQ ID NO: 2886712 - RNA, 17 nt, Human
gucucaagagggcacug

SEQ ID NO: 2886713 - RNA, 16 nt, Human
gucucaaacuccuggg

SEQ ID NO: 2886714 - RNA, 16 nt, Human
gucucaaaaauacaaa

SEQ ID NO: 2886715 - RNA, 17 nt, Human
gucucaaaaauacaaaa

SEQ ID NO: 2886716 - RNA, 13 nt, Human
gucucaaacaagg

SEQ ID NO: 2886717 - RNA, 20 nt, Human
gucucaaacuccugggcuca

SEQ ID NO: 2886718 - RNA, 21 nt, Human
gucuccaguauccacuuugca

SEQ ID NO: 2886719 - RNA, 17 nt, Human
aacauuuuacccacaca

SEQ ID NO: 2886720 - RNA, 23 nt, Human
aacauuuuagcucuauugauacu

SEQ ID NO: 2886721 - RNA, 15 nt, Human
aacauuuuacccaca

SEQ ID NO: 2886722 - RNA, 18 nt, Human
aaccaaaggacauuaugu

SEQ ID NO: 2886723 - RNA, 15 nt, Human
aacauuuuaaauaaa

SEQ ID NO: 2886724 - RNA, 19 nt, Human
aacauuuuaaauaaaagaa

SEQ ID NO: 2886725 - RNA, 20 nt, Human
aacauuuuaaauaaaagaaa

SEQ ID NO: 2886726 - RNA, 13 nt, Human
aaccacaucuugc

SEQ ID NO: 2886727 - RNA, 21 nt, Human
aaccauccacuuacauauauu

SEQ ID NO: 2886728 - RNA, 20 nt, Human
aaccauccagugacaaacca

SEQ ID NO: 2886729 - RNA, 22 nt, Human
aaccauccagugacaaaccauc

SEQ ID NO: 2886730 - RNA, 18 nt, Human
aaccacagcugcuggaga

SEQ ID NO: 2886731 - RNA, 13 nt, Human
aaccacagcugcu

SEQ ID NO: 2886732 - RNA, 14 nt, Human
aaccacagcugcug

SEQ ID NO: 2886733 - RNA, 15 nt, Human
aaccacagcugcugg

SEQ ID NO: 2886734 - RNA, 16 nt, Human
aaccacagcugcugga

SEQ ID NO: 2886735 - RNA, 21 nt, Human
aaccaacuugguucugcuuca

SEQ ID NO: 2886736 - RNA, 14 nt, Human
aaccaagagauugc

SEQ ID NO: 2886737 - RNA, 15 nt, Human
aaccaagagauugcu

SEQ ID NO: 2886738 - RNA, 16 nt, Human
aaccaagagauugcua

SEQ ID NO: 2886739 - RNA, 18 nt, Human
aaccaagagauugcuaau

SEQ ID NO: 2886740 - RNA, 22 nt, Human
aaccaagagauugcuaauugcu

SEQ ID NO: 2886741 - RNA, 22 nt, Human
aacauuuuaaaaacauagaaaa

SEQ ID NO: 2886742 - RNA, 13 nt, Human
aaccaacacccaa

SEQ ID NO: 2886743 - RNA, 21 nt, Human
aaccaagaucuauaaagcgau

SEQ ID NO: 2886744 - RNA, 19 nt, Human
aaccaagcaggagacgaca

SEQ ID NO: 2886745 - RNA, 22 nt, Human
aaccaagcaucagggggaagaa

SEQ ID NO: 2886746 - RNA, 16 nt, Human
aacauuuugagaacaa

SEQ ID NO: 2886747 - RNA, 20 nt, Human
aacauuuugagaacaaagau

SEQ ID NO: 2886748 - RNA, 11 nt, Human
guccugcucca

SEQ ID NO: 2886749 - RNA, 12 nt, Human
guccugcuccag

SEQ ID NO: 2886750 - RNA, 22 nt, Human
guccugcuccagaauuuggaaa

SEQ ID NO: 2886751 - RNA, 16 nt, Human
guccuugcaccccuca

SEQ ID NO: 2886752 - RNA, 18 nt, Human
guccuugcaccccucacu

SEQ ID NO: 2886753 - RNA, 19 nt, Human
guccuugcaccccucacuc

SEQ ID NO: 2886754 - RNA, 17 nt, Human
guccuuggaaguuucau

SEQ ID NO: 2886755 - RNA, 14 nt, Human
guccuuuaguaccu

SEQ ID NO: 2886756 - RNA, 13 nt, Human
guccuuuaugugg

SEQ ID NO: 2886757 - RNA, 16 nt, Human
guccuuuauguggaaa

SEQ ID NO: 2886758 - RNA, 15 nt, Human
guccugaucugugau

SEQ ID NO: 2886759 - RNA, 21 nt, Human
aacauuauagauuuucauguu

SEQ ID NO: 2886760 - RNA, 17 nt, Human
aacauuaccuuacugug

SEQ ID NO: 2886761 - RNA, 19 nt, Human
aacauuaccuuacugugga

SEQ ID NO: 2886762 - RNA, 15 nt, Human
aacauuaaaaaugga

SEQ ID NO: 2886763 - RNA, 16 nt, Human
aacauuaaaaauggaa

SEQ ID NO: 2886764 - RNA, 19 nt, Human
aacauuaaaaauggaacug

SEQ ID NO: 2886765 - RNA, 21 nt, Human
aacauuaaaaauggaacugug

SEQ ID NO: 2886766 - RNA, 12 nt, Human
aacauuaaaugu

SEQ ID NO: 2886767 - RNA, 14 nt, Human
aacauuaaaugucu

SEQ ID NO: 2886768 - RNA, 15 nt, Human
aacauuaaaugucuu

SEQ ID NO: 2886769 - RNA, 18 nt, Human
aacauuaaaugucuuaua

SEQ ID NO: 2886770 - RNA, 23 nt, Human
aacauuaaaugucuuauauagca

SEQ ID NO: 2886771 - RNA, 20 nt, Human
aacauuacagggaaugccug

SEQ ID NO: 2886772 - RNA, 22 nt, Human
aacauuacagggaaugccugag

SEQ ID NO: 2886773 - RNA, 16 nt, Human
aacauuaccuuacugu

SEQ ID NO: 2886774 - RNA, 23 nt, Human
gucgcccagucuggaaugcagug

SEQ ID NO: 2886775 - RNA, 15 nt, Human
gucgcccucccaggc

SEQ ID NO: 2886776 - RNA, 18 nt, Human
gucuaucaagucaaucau

SEQ ID NO: 2886777 - RNA, 21 nt, Human
gucuauaaucccagcacuuug

SEQ ID NO: 2886778 - RNA, 20 nt, Human
gucuauaaucccagcacuuu

SEQ ID NO: 2886779 - RNA, 17 nt, Human
gucuagaaguuguuugu

SEQ ID NO: 2886780 - RNA, 21 nt, Human
gucuagaaguuguuugucauc

SEQ ID NO: 2886781 - RNA, 14 nt, Human
gucgcccagucugg

SEQ ID NO: 2886782 - RNA, 13 nt, Human
gucgcccagucug

SEQ ID NO: 2886783 - RNA, 13 nt, Human
gucgcccaggaga

SEQ ID NO: 2886784 - RNA, 12 nt, Human
gucgcccaggag

SEQ ID NO: 2886785 - RNA, 14 nt, Human
gucgcccaggcugg

SEQ ID NO: 2886786 - RNA, 15 nt, Human
gucgcccaggcugga

SEQ ID NO: 2886787 - RNA, 20 nt, Human
gucgcccaggcuggagugca

SEQ ID NO: 2886788 - RNA, 14 nt, Human
gucgaggacaggga

SEQ ID NO: 2886789 - RNA, 17 nt, Human
guccuuuuguaccaugg

SEQ ID NO: 2886790 - RNA, 20 nt, Human
guccuuuauguggaaaacag

SEQ ID NO: 2886791 - RNA, 22 nt, Human
guccuuuuguaccaugguguga

SEQ ID NO: 2886792 - RNA, 13 nt, Human
guccuuuugucuu

SEQ ID NO: 2886793 - RNA, 15 nt, Human
guccuuuugucuucu

SEQ ID NO: 2886794 - RNA, 22 nt, Human
guccuuuugucuucucugucuc

SEQ ID NO: 2886795 - RNA, 12 nt, Human
guccuuuuguaa

SEQ ID NO: 2886796 - RNA, 13 nt, Human
guccuuuuguaaa

SEQ ID NO: 2886797 - RNA, 17 nt, Human
gucgaauuaauagcuuu

SEQ ID NO: 2886798 - RNA, 16 nt, Human
gucgaaagcucuagaa

SEQ ID NO: 2886799 - RNA, 19 nt, Human
guccuuuuuuuccaucuuu

SEQ ID NO: 2886800 - RNA, 16 nt, Human
guccuuuuuuuccauc

SEQ ID NO: 2886801 - RNA, 16 nt, Human
gucuucacagcucugu

SEQ ID NO: 2886802 - RNA, 22 nt, Human
gucugguuucaccgaggacaug

SEQ ID NO: 2886803 - RNA, 17 nt, Human
gucugguuucaccgagg

SEQ ID NO: 2886804 - RNA, 13 nt, Human
gucuggugggagg

SEQ ID NO: 2886805 - RNA, 14 nt, Human
gucuucagccucuu

SEQ ID NO: 2886806 - RNA, 12 nt, Human
gucuucacucuu

SEQ ID NO: 2886807 - RNA, 15 nt, Human
gucuucacucuuagg

SEQ ID NO: 2886808 - RNA, 16 nt, Human
gucuucacucuuaggc

SEQ ID NO: 2886809 - RNA, 17 nt, Human
gucuucacagcucugug

SEQ ID NO: 2886810 - RNA, 20 nt, Human
gucuggucacacacaggugu

SEQ ID NO: 2886811 - RNA, 14 nt, Human
gucuggucuauguu

SEQ ID NO: 2886812 - RNA, 23 nt, Human
gucugacaggcaaugcuggcugu

SEQ ID NO: 2886813 - RNA, 22 nt, Human
gucugacaggcaaugcuggcug

SEQ ID NO: 2886814 - RNA, 21 nt, Human
gucugacaggcaaugcuggcu

SEQ ID NO: 2886815 - RNA, 17 nt, Human
gucugaagucacugcac

SEQ ID NO: 2886816 - RNA, 19 nt, Human
gucugaagucacugcacag

SEQ ID NO: 2886817 - RNA, 14 nt, Human
gucuggacugacag

SEQ ID NO: 2886818 - RNA, 15 nt, Human
gucuggacugacagc

SEQ ID NO: 2886819 - RNA, 17 nt, Human
gucuggacugacagcau

SEQ ID NO: 2886820 - RNA, 18 nt, Human
gucuggacugacagcaug

SEQ ID NO: 2886821 - RNA, 16 nt, Human
aaccauggacuuuaua

SEQ ID NO: 2886822 - RNA, 16 nt, Human
gucugaagugguuguu

SEQ ID NO: 2886823 - RNA, 18 nt, Human
gucuggaaugcaguggua

SEQ ID NO: 2886824 - RNA, 12 nt, Human
gucuggaguggg

SEQ ID NO: 2886825 - RNA, 14 nt, Human
gucuggagugggca

SEQ ID NO: 2886826 - RNA, 18 nt, Human
gucuggagugggcagagc

SEQ ID NO: 2886827 - RNA, 19 nt, Human
gucuggagugggcagagcc

SEQ ID NO: 2886828 - RNA, 19 nt, Human
aaccaugcaaaugcuauga

SEQ ID NO: 2886829 - RNA, 13 nt, Human
aaccauggacuuu

SEQ ID NO: 2886830 - RNA, 15 nt, Human
aaccaugaagacagg

SEQ ID NO: 2886831 - RNA, 16 nt, Human
aaccaugaagacagga

SEQ ID NO: 2886832 - RNA, 17 nt, Human
aaccaugaagacaggau

SEQ ID NO: 2886833 - RNA, 13 nt, Human
aaccaucuggccu

SEQ ID NO: 2886834 - RNA, 15 nt, Human
aaccaucuggccugg

SEQ ID NO: 2886835 - RNA, 16 nt, Human
aaccaucuggccuggc

SEQ ID NO: 2886836 - RNA, 17 nt, Human
aaccaucuggccuggcc

SEQ ID NO: 2886837 - RNA, 23 nt, Human
gucucuuuaaugucacaggcagg

SEQ ID NO: 2886838 - RNA, 22 nt, Human
gucucuuuaaugucacaggcag

SEQ ID NO: 2886839 - RNA, 16 nt, Human
gucugaagucacugca

SEQ ID NO: 2886840 - RNA, 20 nt, Human
gucucuuuaaugucacaggc

SEQ ID NO: 2886841 - RNA, 19 nt, Human
gucucuuuaaugucacagg

SEQ ID NO: 2886842 - RNA, 18 nt, Human
gucucuuuaaugucacag

SEQ ID NO: 2886843 - RNA, 17 nt, Human
gucucuuuaagggcaug

SEQ ID NO: 2886844 - RNA, 23 nt, Human
gucucuuuaagggcaugccuugu

SEQ ID NO: 2886845 - RNA, 15 nt, Human
aaccauggacuuuau

SEQ ID NO: 2886846 - RNA, 18 nt, Human
aacuaagaaacuuuugua

SEQ ID NO: 2886847 - RNA, 19 nt, Human
aacuaagaaacuuuuguaa

SEQ ID NO: 2886848 - RNA, 18 nt, Human
aacuaagcagucccugag

SEQ ID NO: 2886849 - RNA, 23 nt, Human
aacuaagcagucccugagaccau

SEQ ID NO: 2886850 - RNA, 20 nt, Human
aacuaacacgugaugugaua

SEQ ID NO: 2886851 - RNA, 22 nt, Human
aacuacuucucuuguuagguaa

SEQ ID NO: 2886852 - RNA, 14 nt, Human
aacuacuugauuuu

SEQ ID NO: 2886853 - RNA, 15 nt, Human
aacuaaggugcuaaa

SEQ ID NO: 2886854 - RNA, 18 nt, Human
aacuaaggugcuaaaucu

SEQ ID NO: 2886855 - RNA, 22 nt, Human
aacuaaggugcuaaaucugcga

SEQ ID NO: 2886856 - RNA, 16 nt, Human
aacuagaaaucugcca

SEQ ID NO: 2886857 - RNA, 18 nt, Human
aacgugggauucagagaa

SEQ ID NO: 2886858 - RNA, 17 nt, Human
aacguuacucagggcuc

SEQ ID NO: 2886859 - RNA, 20 nt, Human
aacguuacucagggcuccuc

SEQ ID NO: 2886860 - RNA, 16 nt, Human
aaccuuagcucccucc

SEQ ID NO: 2886861 - RNA, 16 nt, Human
aaccuuauccugcauu

SEQ ID NO: 2886862 - RNA, 23 nt, Human
aaccuugucucuaugccagcuca

SEQ ID NO: 2886863 - RNA, 19 nt, Human
aaccuugucucuaugccag

SEQ ID NO: 2886864 - RNA, 14 nt, Human
aaccuuucaaauuu

SEQ ID NO: 2886865 - RNA, 15 nt, Human
aaccuuuauucuuuu

SEQ ID NO: 2886866 - RNA, 18 nt, Human
aaccuuucaaauuucaca

SEQ ID NO: 2886867 - RNA, 20 nt, Human
aaccuuucaccuuuguguau

SEQ ID NO: 2886868 - RNA, 14 nt, Human
aaccuuuaagaaaa

SEQ ID NO: 2886869 - RNA, 23 nt, Human
aaccuuuaagaaaagcccugaga

SEQ ID NO: 2886870 - RNA, 12 nt, Human
aaccugauugua

SEQ ID NO: 2886871 - RNA, 15 nt, Human
aaccugauuguaaac

SEQ ID NO: 2886872 - RNA, 16 nt, Human
aaccugauuguaaacu

SEQ ID NO: 2886873 - RNA, 18 nt, Human
aaccugauuguaaacuuc

SEQ ID NO: 2886874 - RNA, 14 nt, Human
aaccugcaaaaaau

SEQ ID NO: 2886875 - RNA, 21 nt, Human
aaccugcaaaaaauacuuuuu

SEQ ID NO: 2886876 - RNA, 16 nt, Human
aaccugcaaaaucugu

SEQ ID NO: 2886877 - RNA, 17 nt, Human
aaccugaugcagucacg

SEQ ID NO: 2886878 - RNA, 17 nt, Human
gucuuuuaaugcuucau

SEQ ID NO: 2886879 - RNA, 22 nt, Human
gucuuuuauaguggaaaaacac

SEQ ID NO: 2886880 - RNA, 23 nt, Human
gucuuuuauaguggaaaaacaca

SEQ ID NO: 2886881 - RNA, 13 nt, Human
gucuuuuauauuu

SEQ ID NO: 2886882 - RNA, 18 nt, Human
gucuuuuauauuuguauc

SEQ ID NO: 2886883 - RNA, 19 nt, Human
gucuuuuauauuuguaucg

SEQ ID NO: 2886884 - RNA, 16 nt, Human
gucuuuucagguuugu

SEQ ID NO: 2886885 - RNA, 18 nt, Human
aaccuguuuuuuuuucau

SEQ ID NO: 2886886 - RNA, 19 nt, Human
aaccuguuuuuuuuucauu

SEQ ID NO: 2886887 - RNA, 17 nt, Human
aaccuuaaacaccccuc

SEQ ID NO: 2886888 - RNA, 13 nt, Human
aaccuuaagaccu

SEQ ID NO: 2886889 - RNA, 21 nt, Human
aaccuguugcuguguuuaauu

SEQ ID NO: 2886890 - RNA, 23 nt, Human
aaccuguugcuguguuuaauuug

SEQ ID NO: 2886891 - RNA, 17 nt, Human
aaccuguucugcuuucc

SEQ ID NO: 2886892 - RNA, 13 nt, Human
aaccuguucugcu

SEQ ID NO: 2886893 - RNA, 12 nt, Human
aaccugugucug

SEQ ID NO: 2886894 - RNA, 15 nt, Human
aaccugugucugcga

SEQ ID NO: 2886895 - RNA, 16 nt, Human
aaccugugucugcgaa

SEQ ID NO: 2886896 - RNA, 21 nt, Human
aaccugugucugcgaaguccu

SEQ ID NO: 2886897 - RNA, 22 nt, Human
aaccugugucugcgaaguccua

SEQ ID NO: 2886898 - RNA, 15 nt, Human
aaccugcaucuuuag

SEQ ID NO: 2886899 - RNA, 11 nt, Human
gucuucauaaa

SEQ ID NO: 2886900 - RNA, 17 nt, Human
gucuuuguaucuuccau

SEQ ID NO: 2886901 - RNA, 23 nt, Human
gucuucagccucuuucugucccu

SEQ ID NO: 2886902 - RNA, 22 nt, Human
gucuucagccucuuucuguccc

SEQ ID NO: 2886903 - RNA, 23 nt, Human
gucuuccagggggaaggccaagg

SEQ ID NO: 2886904 - RNA, 16 nt, Human
gucuucauuucauugu

SEQ ID NO: 2886905 - RNA, 17 nt, Human
gucuucauuucauugua

SEQ ID NO: 2886906 - RNA, 18 nt, Human
gucuucagcauucccucc

SEQ ID NO: 2886907 - RNA, 19 nt, Human
gucuucagcauucccuccc

SEQ ID NO: 2886908 - RNA, 22 nt, Human
aacucugggcugcuacccagaa

SEQ ID NO: 2886909 - RNA, 21 nt, Human
aacucugggcugcuacccaga

SEQ ID NO: 2886910 - RNA, 16 nt, Human
aacucuguggcauuau

SEQ ID NO: 2886911 - RNA, 17 nt, Human
aacugaaauuaaaacua

SEQ ID NO: 2886912 - RNA, 18 nt, Human
aacugaaauuaaaacuau

SEQ ID NO: 2886913 - RNA, 14 nt, Human
gugagucauuuaaa

SEQ ID NO: 2886914 - RNA, 17 nt, Human
gugagucauuuaaaugu

SEQ ID NO: 2886915 - RNA, 22 nt, Human
gugagucauuuaaauguguaca

SEQ ID NO: 2886916 - RNA, 12 nt, Human
aacucugggcuc

SEQ ID NO: 2886917 - RNA, 14 nt, Human
aacucugccagcca

SEQ ID NO: 2886918 - RNA, 16 nt, Human
gugagaggggaacaga

SEQ ID NO: 2886919 - RNA, 13 nt, Human
gugagagcugggu

SEQ ID NO: 2886920 - RNA, 12 nt, Human
gugagaugaggg

SEQ ID NO: 2886921 - RNA, 19 nt, Human
gugagaugagggaugggcc

SEQ ID NO: 2886922 - RNA, 21 nt, Human
gugagaugagggaugggccug

SEQ ID NO: 2886923 - RNA, 14 nt, Human
gugagcacagccua

SEQ ID NO: 2886924 - RNA, 18 nt, Human
gugagacaguccagccug

SEQ ID NO: 2886925 - RNA, 19 nt, Human
gugagacaguccagccugg

SEQ ID NO: 2886926 - RNA, 21 nt, Human
gugagcacuaaggugugcucu

SEQ ID NO: 2886927 - RNA, 20 nt, Human
gugagcagaaguggagcugg

SEQ ID NO: 2886928 - RNA, 17 nt, Human
gugagcaggaaggccug

SEQ ID NO: 2886929 - RNA, 18 nt, Human
gugagcaggaaggccugg

SEQ ID NO: 2886930 - RNA, 19 nt, Human
gugagcaggaaggccuggg

SEQ ID NO: 2886931 - RNA, 20 nt, Human
gugagcaggaaggccugggu

SEQ ID NO: 2886932 - RNA, 19 nt, Human
gugagcagaaguggagcug

SEQ ID NO: 2886933 - RNA, 14 nt, Human
gugagguuucccaa

SEQ ID NO: 2886934 - RNA, 15 nt, Human
gugagguuucccaau

SEQ ID NO: 2886935 - RNA, 17 nt, Human
gugagguuucccaaugg

SEQ ID NO: 2886936 - RNA, 20 nt, Human
gugagguuucccaauggugu

SEQ ID NO: 2886937 - RNA, 22 nt, Human
gugagguuucccaaugguguuu

SEQ ID NO: 2886938 - RNA, 13 nt, Human
gugaguaaauauu

SEQ ID NO: 2886939 - RNA, 15 nt, Human
gugagcaggcuguga

SEQ ID NO: 2886940 - RNA, 12 nt, Human
gugaccccaggu

SEQ ID NO: 2886941 - RNA, 13 nt, Human
gugaccccuccug

SEQ ID NO: 2886942 - RNA, 14 nt, Human
gugaccccuccugg

SEQ ID NO: 2886943 - RNA, 15 nt, Human
gugaccccuccuggg

SEQ ID NO: 2886944 - RNA, 17 nt, Human
gugaccccuccuggggc

SEQ ID NO: 2886945 - RNA, 18 nt, Human
gugaccccuccuggggcc

SEQ ID NO: 2886946 - RNA, 20 nt, Human
gugaccccuccuggggccag

SEQ ID NO: 2886947 - RNA, 21 nt, Human
gugaccccuccuggggccagg

SEQ ID NO: 2886948 - RNA, 23 nt, Human
gugaccccuccuggggccaggcc

SEQ ID NO: 2886949 - RNA, 12 nt, Human
gugagagcuggg

SEQ ID NO: 2886950 - RNA, 17 nt, Human
gugagaauaggcagccc

SEQ ID NO: 2886951 - RNA, 11 nt, Human
gugagaaaccu

SEQ ID NO: 2886952 - RNA, 15 nt, Human
gugagaaaccuguau

SEQ ID NO: 2886953 - RNA, 17 nt, Human
gugagaaaccuguaucu

SEQ ID NO: 2886954 - RNA, 20 nt, Human
gugagaaaccuguaucuuuc

SEQ ID NO: 2886955 - RNA, 23 nt, Human
gugagaaaccuguaucuuucuau

SEQ ID NO: 2886956 - RNA, 20 nt, Human
gugagaaauuucugugaaac

SEQ ID NO: 2886957 - RNA, 22 nt, Human
gugagaaaaagcuccuguccuc

SEQ ID NO: 2886958 - RNA, 17 nt, Human
gugagaaaaagcuccug

SEQ ID NO: 2886959 - RNA, 17 nt, Human
aacuagacaccaaaguu

SEQ ID NO: 2886960 - RNA, 20 nt, Human
aacuagacaccaaaguucua

SEQ ID NO: 2886961 - RNA, 18 nt, Human
aacuauccugacuucuaa

SEQ ID NO: 2886962 - RNA, 23 nt, Human
gugaagaauccuuuuguagaaug

SEQ ID NO: 2886963 - RNA, 13 nt, Human
aacuauauuuucu

SEQ ID NO: 2886964 - RNA, 16 nt, Human
aacuauauuuucuuua

SEQ ID NO: 2886965 - RNA, 21 nt, Human
gugaagagugacuaguacaaa

SEQ ID NO: 2886966 - RNA, 16 nt, Human
gugaagugaaugaaac

SEQ ID NO: 2886967 - RNA, 18 nt, Human
gugaaggcuucucuguuc

SEQ ID NO: 2886968 - RNA, 16 nt, Human
gugaaggugacagcag

SEQ ID NO: 2886969 - RNA, 17 nt, Human
gugaaggugacagcagu

SEQ ID NO: 2886970 - RNA, 19 nt, Human
gugaaguacaauaauucau

SEQ ID NO: 2886971 - RNA, 23 nt, Human
gugaaguacaauaauucauauuc

SEQ ID NO: 2886972 - RNA, 17 nt, Human
gugaagcaccaagcuca

SEQ ID NO: 2886973 - RNA, 18 nt, Human
gugaagcaccaagcucaa

SEQ ID NO: 2886974 - RNA, 19 nt, Human
gugaagaucucacucugcc

SEQ ID NO: 2886975 - RNA, 19 nt, Human
gugaagaugcauuguaguu

SEQ ID NO: 2886976 - RNA, 19 nt, Human
gugacagaggcagccccau

SEQ ID NO: 2886977 - RNA, 18 nt, Human
gugacagaggcagcccca

SEQ ID NO: 2886978 - RNA, 16 nt, Human
gugacagaggcagccc

SEQ ID NO: 2886979 - RNA, 12 nt, Human
gugaagcccugu

SEQ ID NO: 2886980 - RNA, 21 nt, Human
gugaagucaugaccuccaggg

SEQ ID NO: 2886981 - RNA, 12 nt, Human
gugaaguuaggu

SEQ ID NO: 2886982 - RNA, 16 nt, Human
gugaaguuagguucuu

SEQ ID NO: 2886983 - RNA, 20 nt, Human
gugaaguuagguucuuaaaa

SEQ ID NO: 2886984 - RNA, 13 nt, Human
gugaccaacugug

SEQ ID NO: 2886985 - RNA, 15 nt, Human
gugaccaacuguguu

SEQ ID NO: 2886986 - RNA, 19 nt, Human
gugaccaacuguguuguau

SEQ ID NO: 2886987 - RNA, 20 nt, Human
gugaccaacuguguuguauu

SEQ ID NO: 2886988 - RNA, 22 nt, Human
gugaccaacuguguuguauuaa

SEQ ID NO: 2886989 - RNA, 19 nt, Human
gugacauuuuacauuaaau

SEQ ID NO: 2886990 - RNA, 17 nt, Human
gugacauuuuacauuaa

SEQ ID NO: 2886991 - RNA, 21 nt, Human
gugacauuuuacauuaaauuu

SEQ ID NO: 2886992 - RNA, 20 nt, Human
gugacauuuuacauuaaauu

SEQ ID NO: 2886993 - RNA, 15 nt, Human
gugacccacuucuca

SEQ ID NO: 2886994 - RNA, 18 nt, Human
gugacccacuucucauca

SEQ ID NO: 2886995 - RNA, 21 nt, Human
aaugaaaaauagugucuuugu

SEQ ID NO: 2886996 - RNA, 12 nt, Human
aaugaaaaauga

SEQ ID NO: 2886997 - RNA, 13 nt, Human
aaugaaaaaugaa

SEQ ID NO: 2886998 - RNA, 14 nt, Human
aaugaaaaaugaaa

SEQ ID NO: 2886999 - RNA, 16 nt, Human
aaugaaaaaugaaaga

SEQ ID NO: 2887000 - RNA, 18 nt, Human
aaugaaaaaugaaagaug

SEQ ID NO: 2887001 - RNA, 15 nt, Human
aaugaaaaacaacca

SEQ ID NO: 2887002 - RNA, 16 nt, Human
aaugaaaaacaaccaa

SEQ ID NO: 2887003 - RNA, 18 nt, Human
aaucuuuugggggaaacu

SEQ ID NO: 2887004 - RNA, 14 nt, Human
aaugaauaucuauu

SEQ ID NO: 2887005 - RNA, 15 nt, Human
aaugaauaucuauua

SEQ ID NO: 2887006 - RNA, 18 nt, Human
aaugaauaucuauuaaua

SEQ ID NO: 2887007 - RNA, 19 nt, Human
aaugaauaucuauuaauau

SEQ ID NO: 2887008 - RNA, 19 nt, Human
uaaugugaugauguaauug

SEQ ID NO: 2887009 - RNA, 20 nt, Human
uaaugugaugauguaauuga

SEQ ID NO: 2887010 - RNA, 21 nt, Human
uaaugugaugauguaauugac

SEQ ID NO: 2887011 - RNA, 16 nt, Human
uaaugugaccuagcaa

SEQ ID NO: 2887012 - RNA, 22 nt, Human
uaaugugaccuagcaauaggca

SEQ ID NO: 2887013 - RNA, 20 nt, Human
uaaugugaguuuggucugga

SEQ ID NO: 2887014 - RNA, 12 nt, Human
uaaugugaacuu

SEQ ID NO: 2887015 - RNA, 18 nt, Human
uaaugugaacuuguagcu

SEQ ID NO: 2887016 - RNA, 22 nt, Human
uaaugugaacuuguagcuguaa

SEQ ID NO: 2887017 - RNA, 12 nt, Human
aaucuuggaagu

SEQ ID NO: 2887018 - RNA, 23 nt, Human
aaucuuggaaguacaugaauaca

SEQ ID NO: 2887019 - RNA, 23 nt, Human
aaucuuuuacaacugccucgaaa

SEQ ID NO: 2887020 - RNA, 13 nt, Human
aaucuugaaaaug

SEQ ID NO: 2887021 - RNA, 15 nt, Human
uaauguggaagaaaa

SEQ ID NO: 2887022 - RNA, 16 nt, Human
uaauguggaagaaaau

SEQ ID NO: 2887023 - RNA, 17 nt, Human
uaauguggaagaaaaug

SEQ ID NO: 2887024 - RNA, 19 nt, Human
uaauguggaagaaaauggu

SEQ ID NO: 2887025 - RNA, 22 nt, Human
uaauguggaagaaaaugguuua

SEQ ID NO: 2887026 - RNA, 14 nt, Human
aaucuugaaauuaa

SEQ ID NO: 2887027 - RNA, 17 nt, Human
aaucuugaaauuaagaa

SEQ ID NO: 2887028 - RNA, 17 nt, Human
uaauguaauaacuguga

SEQ ID NO: 2887029 - RNA, 20 nt, Human
uaauguauuuguucauguuu

SEQ ID NO: 2887030 - RNA, 21 nt, Human
uaauguauuuguucauguuug

SEQ ID NO: 2887031 - RNA, 15 nt, Human
uaaugucacaggcag

SEQ ID NO: 2887032 - RNA, 17 nt, Human
uaaugucacaggcaggu

SEQ ID NO: 2887033 - RNA, 16 nt, Human
uaaugucacaggcagg

SEQ ID NO: 2887034 - RNA, 16 nt, Human
uaaugaaguaaagcca

SEQ ID NO: 2887035 - RNA, 19 nt, Human
uaauagaaaacugaaaauc

SEQ ID NO: 2887036 - RNA, 20 nt, Human
uaauacuuuuuuauuuuguu

SEQ ID NO: 2887037 - RNA, 15 nt, Human
uaauagaaaacugaa

SEQ ID NO: 2887038 - RNA, 16 nt, Human
uaauagaaaacugaaa

SEQ ID NO: 2887039 - RNA, 18 nt, Human
uaauagaaaacugaaaau

SEQ ID NO: 2887040 - RNA, 18 nt, Human
uaauaccucugugugcuc

SEQ ID NO: 2887041 - RNA, 20 nt, Human
uaauacacuaauuccuuucu

SEQ ID NO: 2887042 - RNA, 13 nt, Human
uaauaccucccuu

SEQ ID NO: 2887043 - RNA, 22 nt, Human
uaauaccauuuuuuaaggaaac

SEQ ID NO: 2887044 - RNA, 11 nt, Human
uaauaccucaa

SEQ ID NO: 2887045 - RNA, 18 nt, Human
uaauaccucaauguuuga

SEQ ID NO: 2887046 - RNA, 13 nt, Human
uaauaccucugug

SEQ ID NO: 2887047 - RNA, 14 nt, Human
uaauaccucugugu

SEQ ID NO: 2887048 - RNA, 15 nt, Human
uaauaccucugugug

SEQ ID NO: 2887049 - RNA, 19 nt, Human
aauacaguuugucacauga

SEQ ID NO: 2887050 - RNA, 22 nt, Human
uaauacacuaauuccuuucuau

SEQ ID NO: 2887051 - RNA, 16 nt, Human
uaauacacuugcccug

SEQ ID NO: 2887052 - RNA, 18 nt, Human
uaauacacuugcccugcu

SEQ ID NO: 2887053 - RNA, 17 nt, Human
aauacaguucugucaua

SEQ ID NO: 2887054 - RNA, 14 nt, Human
aauacauacgguca

SEQ ID NO: 2887055 - RNA, 15 nt, Human
aauacauacggucag

SEQ ID NO: 2887056 - RNA, 21 nt, Human
aauacauacggucagguuuaa

SEQ ID NO: 2887057 - RNA, 23 nt, Human
aauacauacggucagguuuaaca

SEQ ID NO: 2887058 - RNA, 23 nt, Human
uaauauuauuacuguugauaauu

SEQ ID NO: 2887059 - RNA, 14 nt, Human
uaauauucugcuau

SEQ ID NO: 2887060 - RNA, 16 nt, Human
uaauauuguggugcca

SEQ ID NO: 2887061 - RNA, 18 nt, Human
uaauauuguuguauaauu

SEQ ID NO: 2887062 - RNA, 19 nt, Human
uaauauuguuguauaauuu

SEQ ID NO: 2887063 - RNA, 21 nt, Human
uaauauuguuguauaauuucg

SEQ ID NO: 2887064 - RNA, 18 nt, Human
uaaucagugugucuaaau

SEQ ID NO: 2887065 - RNA, 17 nt, Human
uaaucagugugucuaaa

SEQ ID NO: 2887066 - RNA, 22 nt, Human
uaaucagguccucagagaauuu

SEQ ID NO: 2887067 - RNA, 19 nt, Human
uaaucagguccucagagaa

SEQ ID NO: 2887068 - RNA, 15 nt, Human
uaauauuguuuuucu

SEQ ID NO: 2887069 - RNA, 19 nt, Human
uaauauuguuuuucuuucu

SEQ ID NO: 2887070 - RNA, 20 nt, Human
uaauauuguuuuucuuucua

SEQ ID NO: 2887071 - RNA, 23 nt, Human
uaauauuguuuuucuuucuacaa

SEQ ID NO: 2887072 - RNA, 13 nt, Human
uaauauuuaaaca

SEQ ID NO: 2887073 - RNA, 13 nt, Human
uaaucagccucuu

SEQ ID NO: 2887074 - RNA, 12 nt, Human
uaaucagccucu

SEQ ID NO: 2887075 - RNA, 15 nt, Human
uaaucagccucuuaa

SEQ ID NO: 2887076 - RNA, 14 nt, Human
uaaucagccucuua

SEQ ID NO: 2887077 - RNA, 21 nt, Human
uaauauuuaaacagcaguguu

SEQ ID NO: 2887078 - RNA, 17 nt, Human
uaaucaugaaauuacuu

SEQ ID NO: 2887079 - RNA, 21 nt, Human
uaaucaugaaauuacuuauca

SEQ ID NO: 2887080 - RNA, 18 nt, Human
uaaucaugaaauuacuua

SEQ ID NO: 2887081 - RNA, 16 nt, Human
uaaucauuuccccaua

SEQ ID NO: 2887082 - RNA, 17 nt, Human
uaauuuuuuauucaagu

SEQ ID NO: 2887083 - RNA, 15 nt, Human
uaauuuuuugguaca

SEQ ID NO: 2887084 - RNA, 16 nt, Human
uaauuuuuugguacaa

SEQ ID NO: 2887085 - RNA, 17 nt, Human
uaauuuuuugguacaaa

SEQ ID NO: 2887086 - RNA, 18 nt, Human
uaauuuuuugguacaaaa

SEQ ID NO: 2887087 - RNA, 16 nt, Human
uaauuuuuuguaaugu

SEQ ID NO: 2887088 - RNA, 14 nt, Human
uacaagcccccccu

SEQ ID NO: 2887089 - RNA, 15 nt, Human
uacaagcccccccuu

SEQ ID NO: 2887090 - RNA, 21 nt, Human
uacaagccauucuaaggaaau

SEQ ID NO: 2887091 - RNA, 22 nt, Human
uacaagccaaaguggcauguuu

SEQ ID NO: 2887092 - RNA, 18 nt, Human
uacaagccagcuggagaa

SEQ ID NO: 2887093 - RNA, 20 nt, Human
uacaagcgugagccacugca

SEQ ID NO: 2887094 - RNA, 19 nt, Human
uacaagcgugagccacugc

SEQ ID NO: 2887095 - RNA, 18 nt, Human
uacaagcgugagccacug

SEQ ID NO: 2887096 - RNA, 16 nt, Human
uacaagcgugagccac

SEQ ID NO: 2887097 - RNA, 21 nt, Human
uacaagcgugagccacugcac

SEQ ID NO: 2887098 - RNA, 16 nt, Human
uacaagucaguuucua

SEQ ID NO: 2887099 - RNA, 18 nt, Human
uacaagucaguuucuaca

SEQ ID NO: 2887100 - RNA, 18 nt, Human
uaauuucugucagaaugc

SEQ ID NO: 2887101 - RNA, 13 nt, Human
uacaaguguauau

SEQ ID NO: 2887102 - RNA, 19 nt, Human
uacaagcccccccuuccac

SEQ ID NO: 2887103 - RNA, 14 nt, Human
uacaaguguauauc

SEQ ID NO: 2887104 - RNA, 15 nt, Human
uacaaguguauauca

SEQ ID NO: 2887105 - RNA, 20 nt, Human
uacaauaaaaucuugaaaau

SEQ ID NO: 2887106 - RNA, 21 nt, Human
uacaaguguauaucagaaaag

SEQ ID NO: 2887107 - RNA, 13 nt, Human
uacaauaaaaaca

SEQ ID NO: 2887108 - RNA, 17 nt, Human
uaauuucgagauuugua

SEQ ID NO: 2887109 - RNA, 17 nt, Human
uaauuucuaaagauaau

SEQ ID NO: 2887110 - RNA, 22 nt, Human
uaauuucuaaagauaauauuac

SEQ ID NO: 2887111 - RNA, 17 nt, Human
uaauuucccuucuugca

SEQ ID NO: 2887112 - RNA, 13 nt, Human
uaauuucuaaugu

SEQ ID NO: 2887113 - RNA, 14 nt, Human
uaauuuaaugcaug

SEQ ID NO: 2887114 - RNA, 21 nt, Human
uaauuuaaugcauguuaggaa

SEQ ID NO: 2887115 - RNA, 22 nt, Human
uaauucaggggcugacacuuca

SEQ ID NO: 2887116 - RNA, 18 nt, Human
uaauucaguauguuuuac

SEQ ID NO: 2887117 - RNA, 21 nt, Human
uaauucaguauguuuuacacu

SEQ ID NO: 2887118 - RNA, 22 nt, Human
uaauucaguauguuuuacacug

SEQ ID NO: 2887119 - RNA, 20 nt, Human
uaauucaguguauuucaguu

SEQ ID NO: 2887120 - RNA, 15 nt, Human
uaauucauauucuuc

SEQ ID NO: 2887121 - RNA, 22 nt, Human
uaauuugaaaacauaaucugca

SEQ ID NO: 2887122 - RNA, 11 nt, Human
uaauuucuuca

SEQ ID NO: 2887123 - RNA, 15 nt, Human
uaauuucuucaaaau

SEQ ID NO: 2887124 - RNA, 17 nt, Human
uaauuucuucaaaaugu

SEQ ID NO: 2887125 - RNA, 20 nt, Human
uaauuucuucaaaauguaua

SEQ ID NO: 2887126 - RNA, 21 nt, Human
uaauuucuucaaaauguauau

SEQ ID NO: 2887127 - RNA, 22 nt, Human
uaauuucuucaaaauguauaua

SEQ ID NO: 2887128 - RNA, 23 nt, Human
uaauuucuucaaaauguauauau

SEQ ID NO: 2887129 - RNA, 22 nt, Human
uaauuugaggacaaccauucca

SEQ ID NO: 2887130 - RNA, 18 nt, Human
uaauuugaggacaaccau

SEQ ID NO: 2887131 - RNA, 22 nt, Human
uaauuuuuguguuuuuaauaaa

SEQ ID NO: 2887132 - RNA, 21 nt, Human
uaauuuuuguauuuuuaguag

SEQ ID NO: 2887133 - RNA, 13 nt, Human
uaauuuuuuacua

SEQ ID NO: 2887134 - RNA, 12 nt, Human
uaauuugaucuu

SEQ ID NO: 2887135 - RNA, 20 nt, Human
uaauuugcauuaaauucaca

SEQ ID NO: 2887136 - RNA, 14 nt, Human
uaauuugauguuua

SEQ ID NO: 2887137 - RNA, 14 nt, Human
uaauuugauuaaca

SEQ ID NO: 2887138 - RNA, 15 nt, Human
uaauuugauuaacaa

SEQ ID NO: 2887139 - RNA, 16 nt, Human
uaauuugauuaacaaa

SEQ ID NO: 2887140 - RNA, 17 nt, Human
uaauuugauuaacaaau

SEQ ID NO: 2887141 - RNA, 18 nt, Human
uaauuugauuaacaaaua

SEQ ID NO: 2887142 - RNA, 12 nt, Human
uaauuugcauua

SEQ ID NO: 2887143 - RNA, 17 nt, Human
uaauuugcauuaaauuc

SEQ ID NO: 2887144 - RNA, 16 nt, Human
uaauuugcauuaaauu

SEQ ID NO: 2887145 - RNA, 12 nt, Human
uaauucacucaa

SEQ ID NO: 2887146 - RNA, 21 nt, Human
uaauucacucaagcacugaua

SEQ ID NO: 2887147 - RNA, 18 nt, Human
uaauucagccauguacag

SEQ ID NO: 2887148 - RNA, 19 nt, Human
uaauucagccauguacaga

SEQ ID NO: 2887149 - RNA, 22 nt, Human
uaauuaugggaauaauugcuuu

SEQ ID NO: 2887150 - RNA, 14 nt, Human
uaauuaugauuugg

SEQ ID NO: 2887151 - RNA, 16 nt, Human
aaugcaauuugauuga

SEQ ID NO: 2887152 - RNA, 20 nt, Human
uaauuauacccccugcaaag

SEQ ID NO: 2887153 - RNA, 20 nt, Human
aaugaaucguaaugaaguug

SEQ ID NO: 2887154 - RNA, 20 nt, Human
aaugaauaucuauuaauaua

SEQ ID NO: 2887155 - RNA, 13 nt, Human
aaugaauauugaa

SEQ ID NO: 2887156 - RNA, 15 nt, Human
aaugaauauugaagu

SEQ ID NO: 2887157 - RNA, 19 nt, Human
aaugaauauugaaguuuca

SEQ ID NO: 2887158 - RNA, 17 nt, Human
aaugaauauuuugauaa

SEQ ID NO: 2887159 - RNA, 18 nt, Human
aaugaauauuuugauaau

SEQ ID NO: 2887160 - RNA, 22 nt, Human
aaugaccuucauucugagacca

SEQ ID NO: 2887161 - RNA, 14 nt, Human
aaugcaauauuugu

SEQ ID NO: 2887162 - RNA, 24 nt, Human
aaugcaaucuccccuugauuuaaa

SEQ ID NO: 2887163 - RNA, 16 nt, Human
aaugcaauagaagugc

SEQ ID NO: 2887164 - RNA, 17 nt, Human
aaugcaauagaagugcu

SEQ ID NO: 2887165 - RNA, 22 nt, Human
aaugcaauagaagugcuccccu

SEQ ID NO: 2887166 - RNA, 23 nt, Human
aaugcaauagaagugcuccccuc

SEQ ID NO: 2887167 - RNA, 20 nt, Human
aaugcaacuacccaaaacaa

SEQ ID NO: 2887168 - RNA, 19 nt, Human
aaugcaagagugauugcag

SEQ ID NO: 2887169 - RNA, 21 nt, Human
aaugcaagagugauugcagcu

SEQ ID NO: 2887170 - RNA, 22 nt, Human
aaugcaagagugauugcagcuu

SEQ ID NO: 2887171 - RNA, 13 nt, Human
aaugcaaagaauc

SEQ ID NO: 2887172 - RNA, 17 nt, Human
aaugcaaagaaucccua

SEQ ID NO: 2887173 - RNA, 16 nt, Human
aaugcaaaguucugug

SEQ ID NO: 2887174 - RNA, 20 nt, Human
aaugcaaaguucuguguuua

SEQ ID NO: 2887175 - RNA, 23 nt, Human
aaugcaaaguucuguguuuaauu

SEQ ID NO: 2887176 - RNA, 16 nt, Human
aaugguuuauuuugua

SEQ ID NO: 2887177 - RNA, 21 nt, Human
aaugguuuauuuuguauugug

SEQ ID NO: 2887178 - RNA, 22 nt, Human
aaugguuuauuuuguauugugg

SEQ ID NO: 2887179 - RNA, 22 nt, Human
uacaaucgagacugcaauguga

SEQ ID NO: 2887180 - RNA, 15 nt, Human
uacaaucgcaaauca

SEQ ID NO: 2887181 - RNA, 18 nt, Human
uacaaucgcaaaucaaaa

SEQ ID NO: 2887182 - RNA, 14 nt, Human
uacaauacaucuga

SEQ ID NO: 2887183 - RNA, 13 nt, Human
uacaauauauaaa

SEQ ID NO: 2887184 - RNA, 14 nt, Human
uacaauauauaaaa

SEQ ID NO: 2887185 - RNA, 17 nt, Human
uacaauauauaaaaaua

SEQ ID NO: 2887186 - RNA, 18 nt, Human
uacaauauauaaaaauau

SEQ ID NO: 2887187 - RNA, 20 nt, Human
uacaauauauaaaaauauau

SEQ ID NO: 2887188 - RNA, 23 nt, Human
uacaauauauagcuggcaagaau

SEQ ID NO: 2887189 - RNA, 21 nt, Human
uacaauaaaacuuugcugcca

SEQ ID NO: 2887190 - RNA, 13 nt, Human
uacaauaaaagua

SEQ ID NO: 2887191 - RNA, 13 nt, Human
uacaauaacauaa

SEQ ID NO: 2887192 - RNA, 12 nt, Human
uacaauaaugga

SEQ ID NO: 2887193 - RNA, 14 nt, Human
uacaauaauggaaa

SEQ ID NO: 2887194 - RNA, 15 nt, Human
uacaauaauggaaaa

SEQ ID NO: 2887195 - RNA, 16 nt, Human
uacaauaauggaaaaa

SEQ ID NO: 2887196 - RNA, 18 nt, Human
uacaauaauucauauucu

SEQ ID NO: 2887197 - RNA, 12 nt, Human
aauguaaaauga

SEQ ID NO: 2887198 - RNA, 14 nt, Human
aauguaaaaugauu

SEQ ID NO: 2887199 - RNA, 16 nt, Human
aauguaagauuauaga

SEQ ID NO: 2887200 - RNA, 19 nt, Human
aauguaagauuauagauuc

SEQ ID NO: 2887201 - RNA, 20 nt, Human
aauguaagauuauagauucu

SEQ ID NO: 2887202 - RNA, 21 nt, Human
aauguaagauuauagauucua

SEQ ID NO: 2887203 - RNA, 22 nt, Human
aauguaagauuauagauucuaa

SEQ ID NO: 2887204 - RNA, 23 nt, Human
aauguaagauuauagauucuaaa

SEQ ID NO: 2887205 - RNA, 16 nt, Human
aaugguuuuuaaauuu

SEQ ID NO: 2887206 - RNA, 17 nt, Human
aaugguuuuuaaauuuu

SEQ ID NO: 2887207 - RNA, 21 nt, Human
aaugguuuuuaaauuuuguaa

SEQ ID NO: 2887208 - RNA, 12 nt, Human
aauguaaaaaag

SEQ ID NO: 2887209 - RNA, 17 nt, Human
aauguaaaaaagaaaaa

SEQ ID NO: 2887210 - RNA, 19 nt, Human
aauguaaaaaagaaaaaca

SEQ ID NO: 2887211 - RNA, 22 nt, Human
uacagacuuguugugacuuuga

SEQ ID NO: 2887212 - RNA, 17 nt, Human
aauguacaucuggccuu

SEQ ID NO: 2887213 - RNA, 22 nt, Human
aauguacacacugguacuuaga

SEQ ID NO: 2887214 - RNA, 15 nt, Human
aauguacagacauau

SEQ ID NO: 2887215 - RNA, 16 nt, Human
aauguacagacauauu

SEQ ID NO: 2887216 - RNA, 17 nt, Human
aauguacagacauauuu

SEQ ID NO: 2887217 - RNA, 21 nt, Human
aauguacagacauauuuaacu

SEQ ID NO: 2887218 - RNA, 15 nt, Human
uacacgaaagagaga

SEQ ID NO: 2887219 - RNA, 16 nt, Human
uacacgaaagagagag

SEQ ID NO: 2887220 - RNA, 14 nt, Human
uacacgaaagagag

SEQ ID NO: 2887221 - RNA, 14 nt, Human
aaugucacaggcag

SEQ ID NO: 2887222 - RNA, 13 nt, Human
aaugucacaggca

SEQ ID NO: 2887223 - RNA, 13 nt, Human
aauguaucuguga

SEQ ID NO: 2887224 - RNA, 14 nt, Human
aauguaucugugaa

SEQ ID NO: 2887225 - RNA, 17 nt, Human
aauguaucugugaagua

SEQ ID NO: 2887226 - RNA, 22 nt, Human
aauguaucauagaaauguaacu

SEQ ID NO: 2887227 - RNA, 21 nt, Human
aauguaucccuucucacagca

SEQ ID NO: 2887228 - RNA, 22 nt, Human
aauguaucccuucucacagcac

SEQ ID NO: 2887229 - RNA, 16 nt, Human
aauguaucauagaaau

SEQ ID NO: 2887230 - RNA, 19 nt, Human
aauguaucauagaaaugua

SEQ ID NO: 2887231 - RNA, 18 nt, Human
aauguaucauagaaaugu

SEQ ID NO: 2887232 - RNA, 13 nt, Human
uacauacggucag

SEQ ID NO: 2887233 - RNA, 15 nt, Human
uacauacggucaggu

SEQ ID NO: 2887234 - RNA, 17 nt, Human
uacauacggucagguuu

SEQ ID NO: 2887235 - RNA, 22 nt, Human
uacauacggucagguuuaacau

SEQ ID NO: 2887236 - RNA, 23 nt, Human
uacauacggucagguuuaacauu

SEQ ID NO: 2887237 - RNA, 22 nt, Human
uacauacccuggccgcccccug

SEQ ID NO: 2887238 - RNA, 14 nt, Human
uacauacacuugua

SEQ ID NO: 2887239 - RNA, 21 nt, Human
uacauacacuuguauaaaugu

SEQ ID NO: 2887240 - RNA, 22 nt, Human
uacauacacuuguauaaaugua

SEQ ID NO: 2887241 - RNA, 23 nt, Human
uacauacuuucauccugacucug

SEQ ID NO: 2887242 - RNA, 19 nt, Human
aauguacuuguuucucugu

SEQ ID NO: 2887243 - RNA, 18 nt, Human
aauguagcguguuuacau

SEQ ID NO: 2887244 - RNA, 21 nt, Human
aauguagcguguuuacaugug

SEQ ID NO: 2887245 - RNA, 15 nt, Human
aauguaguugaugua

SEQ ID NO: 2887246 - RNA, 16 nt, Human
aauguaguugauguau

SEQ ID NO: 2887247 - RNA, 18 nt, Human
aauguaguugauguaucc

SEQ ID NO: 2887248 - RNA, 19 nt, Human
aauguaguugauguaucca

SEQ ID NO: 2887249 - RNA, 12 nt, Human
uacagucugucu

SEQ ID NO: 2887250 - RNA, 13 nt, Human
uacagucugucuu

SEQ ID NO: 2887251 - RNA, 17 nt, Human
uacagucugucuucugu

SEQ ID NO: 2887252 - RNA, 18 nt, Human
uacagucugucuucugua

SEQ ID NO: 2887253 - RNA, 19 nt, Human
uacagucugucuucuguau

SEQ ID NO: 2887254 - RNA, 20 nt, Human
uacagucugucuucuguaua

SEQ ID NO: 2887255 - RNA, 21 nt, Human
uacagucugucuucuguauau

SEQ ID NO: 2887256 - RNA, 22 nt, Human
uacagucugucuucuguauaua

SEQ ID NO: 2887257 - RNA, 15 nt, Human
uacaguccuucaaaa

SEQ ID NO: 2887258 - RNA, 19 nt, Human
uacaguccuucaaaauccu

SEQ ID NO: 2887259 - RNA, 15 nt, Human
uacaguaugcuugcu

SEQ ID NO: 2887260 - RNA, 16 nt, Human
uacaguaugcuugcuc

SEQ ID NO: 2887261 - RNA, 17 nt, Human
uacauaaguaauucaag

SEQ ID NO: 2887262 - RNA, 16 nt, Human
uacauaaguaauucaa

SEQ ID NO: 2887263 - RNA, 15 nt, Human
uacauaaguaauuca

SEQ ID NO: 2887264 - RNA, 19 nt, Human
uacauaaguaauucaagaa

SEQ ID NO: 2887265 - RNA, 18 nt, Human
uacaguggugccaucauu

SEQ ID NO: 2887266 - RNA, 22 nt, Human
uacaguggugccaucauugcug

SEQ ID NO: 2887267 - RNA, 22 nt, Human
uacauaauacacuugcccugcu

SEQ ID NO: 2887268 - RNA, 23 nt, Human
uacaguggaaccguugccaaccg

SEQ ID NO: 2887269 - RNA, 17 nt, Human
uacagucuugcagcagg

SEQ ID NO: 2887270 - RNA, 18 nt, Human
aauguugagaaucccaaa

SEQ ID NO: 2887271 - RNA, 12 nt, Human
aaugugaagaug

SEQ ID NO: 2887272 - RNA, 15 nt, Human
aaugugaagaugcau

SEQ ID NO: 2887273 - RNA, 16 nt, Human
aaugugaagaugcauu

SEQ ID NO: 2887274 - RNA, 22 nt, Human
aaugugaagaugcauuguaguu

SEQ ID NO: 2887275 - RNA, 15 nt, Human
aaugugaacuuguag

SEQ ID NO: 2887276 - RNA, 17 nt, Human
aaugugaacuuguagcu

SEQ ID NO: 2887277 - RNA, 22 nt, Human
aaugugaacuuguagcuguaaa

SEQ ID NO: 2887278 - RNA, 13 nt, Human
aaugugaaagcac

SEQ ID NO: 2887279 - RNA, 14 nt, Human
aauguauuuuucua

SEQ ID NO: 2887280 - RNA, 15 nt, Human
aaugucaaaauuguu

SEQ ID NO: 2887281 - RNA, 22 nt, Human
aauuaagauacaaauuaauuuu

SEQ ID NO: 2887282 - RNA, 19 nt, Human
aauguugaaccaaaccucc

SEQ ID NO: 2887283 - RNA, 19 nt, Human
uacauguaaaacauuaucu

SEQ ID NO: 2887284 - RNA, 23 nt, Human
uacauuguugagcuauugcuguu

SEQ ID NO: 2887285 - RNA, 13 nt, Human
uacauuguugagc

SEQ ID NO: 2887286 - RNA, 12 nt, Human
uacauguauuau

SEQ ID NO: 2887287 - RNA, 22 nt, Human
uacauguauuauuucauuaugu

SEQ ID NO: 2887288 - RNA, 19 nt, Human
uacauuagcaguuugcuuu

SEQ ID NO: 2887289 - RNA, 20 nt, Human
uacauuagcaguuugcuuug

SEQ ID NO: 2887290 - RNA, 13 nt, Human
uaccccaucccug

SEQ ID NO: 2887291 - RNA, 21 nt, Human
uacccccagguggaaggcaga

SEQ ID NO: 2887292 - RNA, 12 nt, Human
uacccccaaccu

SEQ ID NO: 2887293 - RNA, 16 nt, Human
uacccccaaccucauu

SEQ ID NO: 2887294 - RNA, 15 nt, Human
uaccccccucugucu

SEQ ID NO: 2887295 - RNA, 16 nt, Human
uaccccaguuuuuuga

SEQ ID NO: 2887296 - RNA, 13 nt, Human
uaccauacauuua

SEQ ID NO: 2887297 - RNA, 16 nt, Human
uaccauacucauuucu

SEQ ID NO: 2887298 - RNA, 22 nt, Human
uaccauacucauuucuaaaaga

SEQ ID NO: 2887299 - RNA, 14 nt, Human
uaccauaugaucug

SEQ ID NO: 2887300 - RNA, 15 nt, Human
uaccauauuuaucca

SEQ ID NO: 2887301 - RNA, 22 nt, Human
uaccauauuuauccauuuguaa

SEQ ID NO: 2887302 - RNA, 15 nt, Human
uaccaugaaacaaag

SEQ ID NO: 2887303 - RNA, 17 nt, Human
uaccaucuuacuugagc

SEQ ID NO: 2887304 - RNA, 14 nt, Human
uaccaguuugcuga

SEQ ID NO: 2887305 - RNA, 18 nt, Human
uaccaucagggacaggau

SEQ ID NO: 2887306 - RNA, 14 nt, Human
uaccaugaacagaa

SEQ ID NO: 2887307 - RNA, 20 nt, Human
uaccaugaacagaaaacauu

SEQ ID NO: 2887308 - RNA, 14 nt, Human
uaccagacugcagg

SEQ ID NO: 2887309 - RNA, 15 nt, Human
uaccagacugcaggu

SEQ ID NO: 2887310 - RNA, 21 nt, Human
uaccagacugcagguuggacc

SEQ ID NO: 2887311 - RNA, 23 nt, Human
uaccagacugcagguuggacccc

SEQ ID NO: 2887312 - RNA, 13 nt, Human
uaccagaagggaa

SEQ ID NO: 2887313 - RNA, 12 nt, Human
uacauuuauaau

SEQ ID NO: 2887314 - RNA, 12 nt, Human
uacauuuaugau

SEQ ID NO: 2887315 - RNA, 14 nt, Human
uacauuuaugauuu

SEQ ID NO: 2887316 - RNA, 14 nt, Human
uacauuuauaauug

SEQ ID NO: 2887317 - RNA, 16 nt, Human
uacauuuauaauugca

SEQ ID NO: 2887318 - RNA, 15 nt, Human
uacauuuaaaacuua

SEQ ID NO: 2887319 - RNA, 13 nt, Human
uacauuuaaaauu

SEQ ID NO: 2887320 - RNA, 17 nt, Human
uacauuuaaaauugcua

SEQ ID NO: 2887321 - RNA, 18 nt, Human
uacauuuaaaauugcuau

SEQ ID NO: 2887322 - RNA, 21 nt, Human
uacauuuaaaauugcuauguu

SEQ ID NO: 2887323 - RNA, 11 nt, Human
uacauuuaaag

SEQ ID NO: 2887324 - RNA, 14 nt, Human
uacauuuaaagcau

SEQ ID NO: 2887325 - RNA, 16 nt, Human
uacauuuaaagcauug

SEQ ID NO: 2887326 - RNA, 17 nt, Human
uacauuuaaagcauugc

SEQ ID NO: 2887327 - RNA, 18 nt, Human
uacauuuaaagcauugcu

SEQ ID NO: 2887328 - RNA, 19 nt, Human
uacauuuaaagcauugcug

SEQ ID NO: 2887329 - RNA, 20 nt, Human
uacauuuaaagcauugcugu

SEQ ID NO: 2887330 - RNA, 22 nt, Human
uacauuuaaagcauugcuguua

SEQ ID NO: 2887331 - RNA, 20 nt, Human
uacccugcgauuuugccugu

SEQ ID NO: 2887332 - RNA, 17 nt, Human
uacccugaguucaucca

SEQ ID NO: 2887333 - RNA, 18 nt, Human
uacccuccugcacuguuu

SEQ ID NO: 2887334 - RNA, 13 nt, Human
uacccucucagcu

SEQ ID NO: 2887335 - RNA, 15 nt, Human
uacccucucagcucc

SEQ ID NO: 2887336 - RNA, 16 nt, Human
uacccucucagcucca

SEQ ID NO: 2887337 - RNA, 17 nt, Human
uacccucucagcuccag

SEQ ID NO: 2887338 - RNA, 20 nt, Human
uacccucucagcuccaggug

SEQ ID NO: 2887339 - RNA, 21 nt, Human
uacccucucagcuccaggugg

SEQ ID NO: 2887340 - RNA, 12 nt, Human
uacccucuggag

SEQ ID NO: 2887341 - RNA, 14 nt, Human
uacccucuggaggg

SEQ ID NO: 2887342 - RNA, 22 nt, Human
uacccucuggagggguguggcu

SEQ ID NO: 2887343 - RNA, 14 nt, Human
uacccucccacccc

SEQ ID NO: 2887344 - RNA, 13 nt, Human
uacccucccaccc

SEQ ID NO: 2887345 - RNA, 15 nt, Human
uacccucccaccccc

SEQ ID NO: 2887346 - RNA, 12 nt, Human
uacccuccuggc

SEQ ID NO: 2887347 - RNA, 15 nt, Human
uacccuccuggcucu

SEQ ID NO: 2887348 - RNA, 18 nt, Human
uaccccuuucuggcucuc

SEQ ID NO: 2887349 - RNA, 19 nt, Human
uaccccuuagccucccuga

SEQ ID NO: 2887350 - RNA, 21 nt, Human
uaccccugccuuugggagcag

SEQ ID NO: 2887351 - RNA, 22 nt, Human
uaccccugccuuugggagcagg

SEQ ID NO: 2887352 - RNA, 12 nt, Human
uaccccuggcug

SEQ ID NO: 2887353 - RNA, 13 nt, Human
uaccccuggcugu

SEQ ID NO: 2887354 - RNA, 17 nt, Human
uaccccuggcuguacug

SEQ ID NO: 2887355 - RNA, 18 nt, Human
uaccccuggcuguacugc

SEQ ID NO: 2887356 - RNA, 17 nt, Human
aauugaagagagauaua

SEQ ID NO: 2887357 - RNA, 23 nt, Human
aauugaagagagauauaucugaa

SEQ ID NO: 2887358 - RNA, 14 nt, Human
aauucuuuugaauu

SEQ ID NO: 2887359 - RNA, 17 nt, Human
aauucuuuugaauuguu

SEQ ID NO: 2887360 - RNA, 13 nt, Human
aauucuuuugcca

SEQ ID NO: 2887361 - RNA, 12 nt, Human
aauugaaacacu

SEQ ID NO: 2887362 - RNA, 13 nt, Human
aauugaaacacuu

SEQ ID NO: 2887363 - RNA, 15 nt, Human
aauugaaacacuuuu

SEQ ID NO: 2887364 - RNA, 17 nt, Human
aauugaaaaacucuuua

SEQ ID NO: 2887365 - RNA, 15 nt, Human
aauucuucuguccug

SEQ ID NO: 2887366 - RNA, 21 nt, Human
aauucuugaaagaauuuuccu

SEQ ID NO: 2887367 - RNA, 15 nt, Human
aauucuuggaauacu

SEQ ID NO: 2887368 - RNA, 13 nt, Human
aauucuuggaaua

SEQ ID NO: 2887369 - RNA, 18 nt, Human
aauucuuguaauuuuuau

SEQ ID NO: 2887370 - RNA, 16 nt, Human
aauucuuuauuucugu

SEQ ID NO: 2887371 - RNA, 20 nt, Human
aauucuuuauuucugucauu

SEQ ID NO: 2887372 - RNA, 21 nt, Human
aauucuugaaggaaaaugaua

SEQ ID NO: 2887373 - RNA, 16 nt, Human
aauucuugaaggaaaa

SEQ ID NO: 2887374 - RNA, 15 nt, Human
aauucuugaaggaaa

SEQ ID NO: 2887375 - RNA, 11 nt, Human
aauucuucagu

SEQ ID NO: 2887376 - RNA, 20 nt, Human
aauucuucaguugguugugu

SEQ ID NO: 2887377 - RNA, 22 nt, Human
aauucuuacacugccuguauac

SEQ ID NO: 2887378 - RNA, 23 nt, Human
aauucuuacacugccuguauacu

SEQ ID NO: 2887379 - RNA, 18 nt, Human
aauucuuacccuguacau

SEQ ID NO: 2887380 - RNA, 15 nt, Human
aauucuuaugcuuau

SEQ ID NO: 2887381 - RNA, 12 nt, Human
aauucuuauuuu

SEQ ID NO: 2887382 - RNA, 13 nt, Human
aauucuuauuuug

SEQ ID NO: 2887383 - RNA, 17 nt, Human
aauucuuauuuugugga

SEQ ID NO: 2887384 - RNA, 22 nt, Human
aauucuucaccuaagucucugu

SEQ ID NO: 2887385 - RNA, 23 nt, Human
aauucuucaccuaagucucugug

SEQ ID NO: 2887386 - RNA, 19 nt, Human
aauucuucagcguaaaaug

SEQ ID NO: 2887387 - RNA, 20 nt, Human
aauucuucagcguaaaaugg

SEQ ID NO: 2887388 - RNA, 21 nt, Human
aauucuucagcguaaaauggu

SEQ ID NO: 2887389 - RNA, 15 nt, Human
uacccuuuucugggg

SEQ ID NO: 2887390 - RNA, 17 nt, Human
uacccuuuuucuccagc

SEQ ID NO: 2887391 - RNA, 18 nt, Human
uacccuuuuucuccagcu

SEQ ID NO: 2887392 - RNA, 19 nt, Human
uacccuuuuucuccagcug

SEQ ID NO: 2887393 - RNA, 20 nt, Human
uacccuuggcucaauccucu

SEQ ID NO: 2887394 - RNA, 20 nt, Human
uacccuuuagacuguagccu

SEQ ID NO: 2887395 - RNA, 22 nt, Human
uacccuuuccuccuuuaucaca

SEQ ID NO: 2887396 - RNA, 16 nt, Human
uacccuuuuccuuugu

SEQ ID NO: 2887397 - RNA, 21 nt, Human
uacccuuuuccuuugugguuu

SEQ ID NO: 2887398 - RNA, 14 nt, Human
uacccuucuuuuau

SEQ ID NO: 2887399 - RNA, 20 nt, Human
uacccuucuuuuaugagcag

SEQ ID NO: 2887400 - RNA, 16 nt, Human
uacccuugagcccucc

SEQ ID NO: 2887401 - RNA, 19 nt, Human
uacccuugagcccucccca

SEQ ID NO: 2887402 - RNA, 17 nt, Human
uacccuguacauaugua

SEQ ID NO: 2887403 - RNA, 13 nt, Human
uacccuuaauuac

SEQ ID NO: 2887404 - RNA, 17 nt, Human
uacccuuaauuacuuaa

SEQ ID NO: 2887405 - RNA, 16 nt, Human
uacccuuagaauccac

SEQ ID NO: 2887406 - RNA, 15 nt, Human
uacccuucccugcac

SEQ ID NO: 2887407 - RNA, 16 nt, Human
uacccuucccugcacu

SEQ ID NO: 2887408 - RNA, 17 nt, Human
uacccuucccugcacua

SEQ ID NO: 2887409 - RNA, 18 nt, Human
uacccuggccgcccccug

SEQ ID NO: 2887410 - RNA, 18 nt, Human
uacccugggaaggccucu

SEQ ID NO: 2887411 - RNA, 21 nt, Human
uacccugggaaggccucuugg

SEQ ID NO: 2887412 - RNA, 21 nt, Human
uacccugcgcccaguccuucc

SEQ ID NO: 2887413 - RNA, 23 nt, Human
uacccugcgcccaguccuuccac

SEQ ID NO: 2887414 - RNA, 14 nt, Human
uacucaauggauuu

SEQ ID NO: 2887415 - RNA, 21 nt, Human
uacucugugucagguggggca

SEQ ID NO: 2887416 - RNA, 18 nt, Human
uacucuuauagacaacau

SEQ ID NO: 2887417 - RNA, 22 nt, Human
uacucuucaguuaagccuuugg

SEQ ID NO: 2887418 - RNA, 22 nt, Human
uacugaacuguguguaauuguu

SEQ ID NO: 2887419 - RNA, 15 nt, Human
uacugaacuuucuua

SEQ ID NO: 2887420 - RNA, 16 nt, Human
uacucuugguuuuuau

SEQ ID NO: 2887421 - RNA, 17 nt, Human
uacucuuguugaguucu

SEQ ID NO: 2887422 - RNA, 19 nt, Human
uacucuuuacccuugagcc

SEQ ID NO: 2887423 - RNA, 21 nt, Human
uacucuuuacccuugagcccu

SEQ ID NO: 2887424 - RNA, 18 nt, Human
uacuggucuuguggaauu

SEQ ID NO: 2887425 - RNA, 14 nt, Human
uacgucugacaggc

SEQ ID NO: 2887426 - RNA, 14 nt, Human
uacguuaccaggca

SEQ ID NO: 2887427 - RNA, 18 nt, Human
uacgucaaacaugaagug

SEQ ID NO: 2887428 - RNA, 14 nt, Human
uacuaguacugugu

SEQ ID NO: 2887429 - RNA, 16 nt, Human
uacuaguacuguguac

SEQ ID NO: 2887430 - RNA, 17 nt, Human
uacuaguacuguguacu

SEQ ID NO: 2887431 - RNA, 18 nt, Human
uacuaguacuguguacug

SEQ ID NO: 2887432 - RNA, 21 nt, Human
uacuaguacuguguacuguau

SEQ ID NO: 2887433 - RNA, 13 nt, Human
uacuauaacauau

SEQ ID NO: 2887434 - RNA, 14 nt, Human
uacuauaacauaug

SEQ ID NO: 2887435 - RNA, 14 nt, Human
uacuaguguucugu

SEQ ID NO: 2887436 - RNA, 15 nt, Human
uacuaguguucuguu

SEQ ID NO: 2887437 - RNA, 16 nt, Human
uacuaguguucuguuu

SEQ ID NO: 2887438 - RNA, 19 nt, Human
uacuaguuuuaguuuucuc

SEQ ID NO: 2887439 - RNA, 13 nt, Human
uacuauaaagaga

SEQ ID NO: 2887440 - RNA, 14 nt, Human
uacuauaaagagaa

SEQ ID NO: 2887441 - RNA, 22 nt, Human
uacuauucaguggcgagaaaua

SEQ ID NO: 2887442 - RNA, 22 nt, Human
uacuauuguugcugaaacuugc

SEQ ID NO: 2887443 - RNA, 23 nt, Human
uacuauuguugcugaaacuugcu

SEQ ID NO: 2887444 - RNA, 15 nt, Human
uacucaagcccgcgg

SEQ ID NO: 2887445 - RNA, 23 nt, Human
uacucaauggaguaugucugaug

SEQ ID NO: 2887446 - RNA, 11 nt, Human
uacuauuuaaa

SEQ ID NO: 2887447 - RNA, 18 nt, Human
aauugcucauaagcaaua

SEQ ID NO: 2887448 - RNA, 21 nt, Human
aauugcugaagggcauucuuu

SEQ ID NO: 2887449 - RNA, 23 nt, Human
aauugcugaagggcauucuuucc

SEQ ID NO: 2887450 - RNA, 16 nt, Human
aauugcuguugaaagc

SEQ ID NO: 2887451 - RNA, 18 nt, Human
aauugcuguugaaagcaa

SEQ ID NO: 2887452 - RNA, 19 nt, Human
aauugcuguugaaagcaaa

SEQ ID NO: 2887453 - RNA, 20 nt, Human
aauugcuguugaaagcaaaa

SEQ ID NO: 2887454 - RNA, 21 nt, Human
aauugcuguugaaagcaaaaa

SEQ ID NO: 2887455 - RNA, 14 nt, Human
aauugcguuggucu

SEQ ID NO: 2887456 - RNA, 16 nt, Human
aauugcguuggucucu

SEQ ID NO: 2887457 - RNA, 18 nt, Human
aauugcguuggucucugc

SEQ ID NO: 2887458 - RNA, 20 nt, Human
aauugcguuggucucugcau

SEQ ID NO: 2887459 - RNA, 22 nt, Human
aauugcguuggucucugcauuu

SEQ ID NO: 2887460 - RNA, 19 nt, Human
uacuguaaccuguugcugu

SEQ ID NO: 2887461 - RNA, 13 nt, Human
aauugcuauguua

SEQ ID NO: 2887462 - RNA, 14 nt, Human
aauugcuauguuac

SEQ ID NO: 2887463 - RNA, 19 nt, Human
aauugcuauguuacuauuu

SEQ ID NO: 2887464 - RNA, 20 nt, Human
aauugcuauguuacuauuuu

SEQ ID NO: 2887465 - RNA, 21 nt, Human
aauugcuauguuacuauuuuc

SEQ ID NO: 2887466 - RNA, 14 nt, Human
aauugcuauugugu

SEQ ID NO: 2887467 - RNA, 14 nt, Human
aauugcucaaguuc

SEQ ID NO: 2887468 - RNA, 12 nt, Human
aauugcuccuug

SEQ ID NO: 2887469 - RNA, 20 nt, Human
aauugcuccuaagcuucaaa

SEQ ID NO: 2887470 - RNA, 22 nt, Human
aauuguuuggggaugagaaagg

SEQ ID NO: 2887471 - RNA, 23 nt, Human
aauuguuguuucuuucuaguggu

SEQ ID NO: 2887472 - RNA, 20 nt, Human
aauuguuguuucuuucuagu

SEQ ID NO: 2887473 - RNA, 21 nt, Human
aauuguuguuucuuucuagug

SEQ ID NO: 2887474 - RNA, 23 nt, Human
aauuguugcuaaucuucuuaugc

SEQ ID NO: 2887475 - RNA, 12 nt, Human
aauuguuguuuc

SEQ ID NO: 2887476 - RNA, 13 nt, Human
aauuguuguuucu

SEQ ID NO: 2887477 - RNA, 15 nt, Human
aauuguuguuucuuu

SEQ ID NO: 2887478 - RNA, 17 nt, Human
aauuguuguuucuuucu

SEQ ID NO: 2887479 - RNA, 18 nt, Human
aauuguuguuucuuucua

SEQ ID NO: 2887480 - RNA, 19 nt, Human
aauuguuguuucuuucuag

SEQ ID NO: 2887481 - RNA, 22 nt, Human
aauuuaaaaaugagugugaagg

SEQ ID NO: 2887482 - RNA, 14 nt, Human
aauuuaaaaaauaa

SEQ ID NO: 2887483 - RNA, 18 nt, Human
aauuguuuuaaucugaaa

SEQ ID NO: 2887484 - RNA, 19 nt, Human
aauuguuuuaaucugaaau

SEQ ID NO: 2887485 - RNA, 17 nt, Human
aauuguuuggcuuccuc

SEQ ID NO: 2887486 - RNA, 19 nt, Human
aauuguuuggcuuccuccu

SEQ ID NO: 2887487 - RNA, 20 nt, Human
aauuguuuggcuuccuccug

SEQ ID NO: 2887488 - RNA, 21 nt, Human
aauuguuuggcuuccuccuga

SEQ ID NO: 2887489 - RNA, 15 nt, Human
aauuguuuguccuca

SEQ ID NO: 2887490 - RNA, 14 nt, Human
aauuguuuucuuua

SEQ ID NO: 2887491 - RNA, 15 nt, Human
aauuguuuucuuuaa

SEQ ID NO: 2887492 - RNA, 19 nt, Human
aauuguuuucuuuaaagau

SEQ ID NO: 2887493 - RNA, 13 nt, Human
aauuuaaaaaaua

SEQ ID NO: 2887494 - RNA, 16 nt, Human
aauuguuuugcacuuu

SEQ ID NO: 2887495 - RNA, 17 nt, Human
aauuguuuugcacuuuu

SEQ ID NO: 2887496 - RNA, 20 nt, Human
aauuguuuugcacuuuuuua

SEQ ID NO: 2887497 - RNA, 20 nt, Human
aauuguuuuuauuguuuucu

SEQ ID NO: 2887498 - RNA, 9 nt, Human
aauuuaaac

SEQ ID NO: 2887499 - RNA, 10 nt, Human
aauuuaaaca

SEQ ID NO: 2887500 - RNA, 15 nt, Human
aauuuaaacaccucc

SEQ ID NO: 2887501 - RNA, 19 nt, Human
aauuuaaacaccuccucau

SEQ ID NO: 2887502 - RNA, 13 nt, Human
aauuuaaacauua

SEQ ID NO: 2887503 - RNA, 14 nt, Human
aauuuaaacauuaa

SEQ ID NO: 2887504 - RNA, 22 nt, Human
aauuuaaacauuaaaaauggaa

SEQ ID NO: 2887505 - RNA, 12 nt, Human
aauuuaaagaua

SEQ ID NO: 2887506 - RNA, 13 nt, Human
aauuuaaagauau

SEQ ID NO: 2887507 - RNA, 17 nt, Human
aauuuaaagauauuguu

SEQ ID NO: 2887508 - RNA, 16 nt, Human
aauuuaagugcgugug

SEQ ID NO: 2887509 - RNA, 23 nt, Human
aauuuaagugcguguguagaguu

SEQ ID NO: 2887510 - RNA, 17 nt, Human
aauuuaauaacuuuuua

SEQ ID NO: 2887511 - RNA, 20 nt, Human
aauuuaagugcguguguaga

SEQ ID NO: 2887512 - RNA, 14 nt, Human
aauuuaaugcaugu

SEQ ID NO: 2887513 - RNA, 14 nt, Human
aauuuaaugcugcc

SEQ ID NO: 2887514 - RNA, 15 nt, Human
aauuuaaugcugccu

SEQ ID NO: 2887515 - RNA, 17 nt, Human
aauuuaaugcugccuuu

SEQ ID NO: 2887516 - RNA, 22 nt, Human
aauuucuaaaaaacagaggcca

SEQ ID NO: 2887517 - RNA, 17 nt, Human
aauuucuaaaaagauua

SEQ ID NO: 2887518 - RNA, 22 nt, Human
aauuucuaaaaagauuagcaag

SEQ ID NO: 2887519 - RNA, 13 nt, Human
aauuucuaaagau

SEQ ID NO: 2887520 - RNA, 15 nt, Human
aauuucuaaagauaa

SEQ ID NO: 2887521 - RNA, 16 nt, Human
aauuucuaaagauaau

SEQ ID NO: 2887522 - RNA, 23 nt, Human
aauuucuaaagauaauauuacug

SEQ ID NO: 2887523 - RNA, 18 nt, Human
aauuucuaccauuucaga

SEQ ID NO: 2887524 - RNA, 16 nt, Human
aauuucuaccauuuca

SEQ ID NO: 2887525 - RNA, 20 nt, Human
aauuuaugaguuuuugauag

SEQ ID NO: 2887526 - RNA, 19 nt, Human
aauuuaugcacuuauaagg

SEQ ID NO: 2887527 - RNA, 22 nt, Human
aauuuaugcacuuauaaggugu

SEQ ID NO: 2887528 - RNA, 19 nt, Human
aauuuaugaguuuuugaua

SEQ ID NO: 2887529 - RNA, 16 nt, Human
aauuuaugaguuuuug

SEQ ID NO: 2887530 - RNA, 13 nt, Human
aauuuagaaacua

SEQ ID NO: 2887531 - RNA, 18 nt, Human
aauuuagaaacuaauuga

SEQ ID NO: 2887532 - RNA, 19 nt, Human
aauuuagaaacuaauugac

SEQ ID NO: 2887533 - RNA, 21 nt, Human
aauuuagaaacuaauugacuu

SEQ ID NO: 2887534 - RNA, 22 nt, Human
aauuuagaaacuaauugacuuu

SEQ ID NO: 2887535 - RNA, 23 nt, Human
aauuuauccugaaauuucagauu

SEQ ID NO: 2887536 - RNA, 12 nt, Human
aauuuaucuaaa

SEQ ID NO: 2887537 - RNA, 21 nt, Human
aauuuaucuaaauuaaagccu

SEQ ID NO: 2887538 - RNA, 19 nt, Human
aauuuauccugaaauuuca

SEQ ID NO: 2887539 - RNA, 18 nt, Human
aauuuauccugaaauuuc

SEQ ID NO: 2887540 - RNA, 16 nt, Human
aauuuaggguacuaaa

SEQ ID NO: 2887541 - RNA, 17 nt, Human
aauuuaggguacuaaau

SEQ ID NO: 2887542 - RNA, 18 nt, Human
aauuuaggguacuaaauu

SEQ ID NO: 2887543 - RNA, 21 nt, Human
aauuuaggguacuaaauuuaa

SEQ ID NO: 2887544 - RNA, 22 nt, Human
aauuuaggguacuaaauuuaaa

SEQ ID NO: 2887545 - RNA, 14 nt, Human
aauuuaguaaaugu

SEQ ID NO: 2887546 - RNA, 15 nt, Human
aauuuaguaaauguu

SEQ ID NO: 2887547 - RNA, 16 nt, Human
aauuuaguaaauguua

SEQ ID NO: 2887548 - RNA, 15 nt, Human
aauuuagauuguaaa

SEQ ID NO: 2887549 - RNA, 16 nt, Human
aauuuagauuguaaac

SEQ ID NO: 2887550 - RNA, 20 nt, Human
uacuuauuuuugacaguguu

SEQ ID NO: 2887551 - RNA, 13 nt, Human
aauuugauuaaca

SEQ ID NO: 2887552 - RNA, 15 nt, Human
aauuugauuaacaaa

SEQ ID NO: 2887553 - RNA, 17 nt, Human
aauuugauuaacaaaua

SEQ ID NO: 2887554 - RNA, 14 nt, Human
aauuugaggacaac

SEQ ID NO: 2887555 - RNA, 13 nt, Human
aauuugauacaua

SEQ ID NO: 2887556 - RNA, 14 nt, Human
aauuugauacauaa

SEQ ID NO: 2887557 - RNA, 15 nt, Human
aauuugauacauaau

SEQ ID NO: 2887558 - RNA, 17 nt, Human
aauuugauacauaauaa

SEQ ID NO: 2887559 - RNA, 18 nt, Human
aauuugauacauaauaaa

SEQ ID NO: 2887560 - RNA, 21 nt, Human
aauuugauacauaugugaaua

SEQ ID NO: 2887561 - RNA, 12 nt, Human
aauuugauacuu

SEQ ID NO: 2887562 - RNA, 13 nt, Human
aauuugauacuua

SEQ ID NO: 2887563 - RNA, 15 nt, Human
aauuugauacuuaua

SEQ ID NO: 2887564 - RNA, 16 nt, Human
aauuugauacuuauau

SEQ ID NO: 2887565 - RNA, 18 nt, Human
aauuugauacuuauauuu

SEQ ID NO: 2887566 - RNA, 20 nt, Human
aauuugauacuuauauuuuc

SEQ ID NO: 2887567 - RNA, 20 nt, Human
aauuugauacauaugugaau

SEQ ID NO: 2887568 - RNA, 13 nt, Human
aauuugaggacaa

SEQ ID NO: 2887569 - RNA, 14 nt, Human
aauuucugugaaac

SEQ ID NO: 2887570 - RNA, 16 nt, Human
aauuucugucagaaug

SEQ ID NO: 2887571 - RNA, 18 nt, Human
aauuucugucagaaugcu

SEQ ID NO: 2887572 - RNA, 11 nt, Human
aauuuuuuccu

SEQ ID NO: 2887573 - RNA, 13 nt, Human
aauuuuuuucacc

SEQ ID NO: 2887574 - RNA, 20 nt, Human
aauuuuucagcucucuguau

SEQ ID NO: 2887575 - RNA, 21 nt, Human
aauuuuucagcucucuguaua

SEQ ID NO: 2887576 - RNA, 23 nt, Human
aauuuuucagcucucuguauaaa

SEQ ID NO: 2887577 - RNA, 20 nt, Human
aauuuuucucaguuuguaua

SEQ ID NO: 2887578 - RNA, 15 nt, Human
aauuuuugucucaga

SEQ ID NO: 2887579 - RNA, 17 nt, Human
aauuuuugucucagaag

SEQ ID NO: 2887580 - RNA, 17 nt, Human
aauuuuuuaaaagagac

SEQ ID NO: 2887581 - RNA, 14 nt, Human
aauuuuuguauuuu

SEQ ID NO: 2887582 - RNA, 13 nt, Human
aauuuuuguagua

SEQ ID NO: 2887583 - RNA, 20 nt, Human
acaaaaaaauauauuuaaug

SEQ ID NO: 2887584 - RNA, 21 nt, Human
acaaaaaaauaccucaggaaa

SEQ ID NO: 2887585 - RNA, 23 nt, Human
acaaaaaaauaccucaggaaaga

SEQ ID NO: 2887586 - RNA, 19 nt, Human
acaaaaaaaccacaaaggc

SEQ ID NO: 2887587 - RNA, 17 nt, Human
aauuuuuuugagacaga

SEQ ID NO: 2887588 - RNA, 20 nt, Human
aauuuuuuucaccuagauuu

SEQ ID NO: 2887589 - RNA, 17 nt, Human
acaaaaaaauauauuua

SEQ ID NO: 2887590 - RNA, 13 nt, Human
acaaaaaaauaua

SEQ ID NO: 2887591 - RNA, 23 nt, Human
acaaaaaaaaaaaaagaagaccg

SEQ ID NO: 2887592 - RNA, 22 nt, Human
aauuuuaagguagaaccucacc

SEQ ID NO: 2887593 - RNA, 14 nt, Human
aauuuuaaacaaag

SEQ ID NO: 2887594 - RNA, 17 nt, Human
aauuuuaaacaaagguu

SEQ ID NO: 2887595 - RNA, 20 nt, Human
aauuuuuacccuaaugucuu

SEQ ID NO: 2887596 - RNA, 22 nt, Human
aauuuuuacccuaaugucuuca

SEQ ID NO: 2887597 - RNA, 16 nt, Human
aauuuuuaggaaguuu

SEQ ID NO: 2887598 - RNA, 22 nt, Human
aauuuuuaggaaguuuucugua

SEQ ID NO: 2887599 - RNA, 22 nt, Human
aauuuuuauauuuaauuauuaa

SEQ ID NO: 2887600 - RNA, 20 nt, Human
aauuuguaaaauguucucuu

SEQ ID NO: 2887601 - RNA, 13 nt, Human
aauuuguaaguuu

SEQ ID NO: 2887602 - RNA, 14 nt, Human
aauuuguaaguuuc

SEQ ID NO: 2887603 - RNA, 16 nt, Human
aauuuguaaguuucag

SEQ ID NO: 2887604 - RNA, 18 nt, Human
aauuuguaaguuucaggu

SEQ ID NO: 2887605 - RNA, 19 nt, Human
aauuuguaaguuucaggug

SEQ ID NO: 2887606 - RNA, 23 nt, Human
aauuuguaaguuucaggugacau

SEQ ID NO: 2887607 - RNA, 14 nt, Human
aauuuuaaaaaugg

SEQ ID NO: 2887608 - RNA, 20 nt, Human
aauuuuaaaaaugguggcuu

SEQ ID NO: 2887609 - RNA, 14 nt, Human
aauuuuaaaaauac

SEQ ID NO: 2887610 - RNA, 18 nt, Human
aauuuuaaaaauacauau

SEQ ID NO: 2887611 - RNA, 20 nt, Human
aauuuguacauauguaaaau

SEQ ID NO: 2887612 - RNA, 23 nt, Human
uagaacucuccaucuuauuuuca

SEQ ID NO: 2887613 - RNA, 15 nt, Human
uagaacuuacuauuc

SEQ ID NO: 2887614 - RNA, 18 nt, Human
uagaacuuacuauucauu

SEQ ID NO: 2887615 - RNA, 19 nt, Human
uagaacuguaugucagaca

SEQ ID NO: 2887616 - RNA, 13 nt, Human
uagaacuggguaa

SEQ ID NO: 2887617 - RNA, 18 nt, Human
uagaacuggguaaaugca

SEQ ID NO: 2887618 - RNA, 20 nt, Human
uagaacuggguaaaugcaaa

SEQ ID NO: 2887619 - RNA, 16 nt, Human
uagaacuugacccccu

SEQ ID NO: 2887620 - RNA, 20 nt, Human
uagaacuguaugucagacau

SEQ ID NO: 2887621 - RNA, 23 nt, Human
uagaacuucuccguccucgaugg

SEQ ID NO: 2887622 - RNA, 15 nt, Human
uagaagucacacagu

SEQ ID NO: 2887623 - RNA, 22 nt, Human
uagaagcauuccuucuuugaua

SEQ ID NO: 2887624 - RNA, 23 nt, Human
uagaagcauuccuucuuugauaa

SEQ ID NO: 2887625 - RNA, 14 nt, Human
uagaagcauuccuu

SEQ ID NO: 2887626 - RNA, 20 nt, Human
uagaagcauuccuucuuuga

SEQ ID NO: 2887627 - RNA, 21 nt, Human
uagaagcauuccuucuuugau

SEQ ID NO: 2887628 - RNA, 19 nt, Human
uagaagaggguuuuaggua

SEQ ID NO: 2887629 - RNA, 21 nt, Human
uagaacuugcagcugauguug

SEQ ID NO: 2887630 - RNA, 23 nt, Human
uagaagcaaauuaaacgguaaca

SEQ ID NO: 2887631 - RNA, 20 nt, Human
uacuucacuauacaaacaaa

SEQ ID NO: 2887632 - RNA, 19 nt, Human
uacuucaggggcacuucau

SEQ ID NO: 2887633 - RNA, 22 nt, Human
uacuucaggggcacuucauuga

SEQ ID NO: 2887634 - RNA, 13 nt, Human
uacuucagcaaga

SEQ ID NO: 2887635 - RNA, 14 nt, Human
uacuucagcaagag

SEQ ID NO: 2887636 - RNA, 15 nt, Human
uacuucagcaagaga

SEQ ID NO: 2887637 - RNA, 17 nt, Human
uacuucagcaagagaga

SEQ ID NO: 2887638 - RNA, 21 nt, Human
uacuucagcaagagagaaccu

SEQ ID NO: 2887639 - RNA, 22 nt, Human
uacuucagcaagagagaaccua

SEQ ID NO: 2887640 - RNA, 16 nt, Human
uagaagucacacagua

SEQ ID NO: 2887641 - RNA, 22 nt, Human
uagacaaguccagccuggcaag

SEQ ID NO: 2887642 - RNA, 21 nt, Human
uagacagagucucacuguugc

SEQ ID NO: 2887643 - RNA, 15 nt, Human
uagacaauugaggua

SEQ ID NO: 2887644 - RNA, 14 nt, Human
uagacaauauacaa

SEQ ID NO: 2887645 - RNA, 16 nt, Human
uagacaaucauuguuu

SEQ ID NO: 2887646 - RNA, 17 nt, Human
uagacaaucauuguuuu

SEQ ID NO: 2887647 - RNA, 20 nt, Human
uagacaaucauuguuuugaa

SEQ ID NO: 2887648 - RNA, 23 nt, Human
uagacaaucauuguuuugaauau

SEQ ID NO: 2887649 - RNA, 19 nt, Human
uagacagcuuugacuggag

SEQ ID NO: 2887650 - RNA, 18 nt, Human
uagacaauugagguaagu

SEQ ID NO: 2887651 - RNA, 19 nt, Human
uagaauuggcugaacucau

SEQ ID NO: 2887652 - RNA, 12 nt, Human
uagaauuguuau

SEQ ID NO: 2887653 - RNA, 13 nt, Human
uagaauuguuaua

SEQ ID NO: 2887654 - RNA, 14 nt, Human
uagaauuguuauag

SEQ ID NO: 2887655 - RNA, 13 nt, Human
uagaauugcauug

SEQ ID NO: 2887656 - RNA, 15 nt, Human
uagaauugcauugac

SEQ ID NO: 2887657 - RNA, 14 nt, Human
uagaauugcauuga

SEQ ID NO: 2887658 - RNA, 14 nt, Human
uagacaagauauug

SEQ ID NO: 2887659 - RNA, 17 nt, Human
uagacaagauauuguac

SEQ ID NO: 2887660 - RNA, 19 nt, Human
uagacaagauauuguacau

SEQ ID NO: 2887661 - RNA, 20 nt, Human
uagacaagauauuguacaua

SEQ ID NO: 2887662 - RNA, 21 nt, Human
uagacaagauauuguacauaa

SEQ ID NO: 2887663 - RNA, 19 nt, Human
uagacaaauauuuggaggg

SEQ ID NO: 2887664 - RNA, 18 nt, Human
acaagaaauuugauuucu

SEQ ID NO: 2887665 - RNA, 14 nt, Human
acaagaagaagggc

SEQ ID NO: 2887666 - RNA, 12 nt, Human
acaagaagauga

SEQ ID NO: 2887667 - RNA, 13 nt, Human
acaagaagaugaa

SEQ ID NO: 2887668 - RNA, 23 nt, Human
acaagaaggguuuuccacccugg

SEQ ID NO: 2887669 - RNA, 14 nt, Human
acaagaaguuuauu

SEQ ID NO: 2887670 - RNA, 21 nt, Human
acaagaaguuuauucucauuu

SEQ ID NO: 2887671 - RNA, 15 nt, Human
acaagaacugaaacc

SEQ ID NO: 2887672 - RNA, 17 nt, Human
acaagaaucacuugaac

SEQ ID NO: 2887673 - RNA, 12 nt, Human
acaagaaugcau

SEQ ID NO: 2887674 - RNA, 15 nt, Human
acaagaaugcauuga

SEQ ID NO: 2887675 - RNA, 15 nt, Human
acaacaaccugguca

SEQ ID NO: 2887676 - RNA, 12 nt, Human
acaacacucaca

SEQ ID NO: 2887677 - RNA, 18 nt, Human
acaacaaaggcaaguuaa

SEQ ID NO: 2887678 - RNA, 23 nt, Human
acaacaaaggcaaguuaagagaa

SEQ ID NO: 2887679 - RNA, 13 nt, Human
acaacaagaguuu

SEQ ID NO: 2887680 - RNA, 15 nt, Human
acaacacaaccaacg

SEQ ID NO: 2887681 - RNA, 14 nt, Human
acaacacacacacu

SEQ ID NO: 2887682 - RNA, 22 nt, Human
uagcauuacccccaaccucauu

SEQ ID NO: 2887683 - RNA, 15 nt, Human
uagcauuaugcaauu

SEQ ID NO: 2887684 - RNA, 16 nt, Human
uagcauuaugcaauua

SEQ ID NO: 2887685 - RNA, 22 nt, Human
uagcauuaugcaauuagguuuu

SEQ ID NO: 2887686 - RNA, 15 nt, Human
uagcauucuggcagu

SEQ ID NO: 2887687 - RNA, 17 nt, Human
acaaauucauauucugu

SEQ ID NO: 2887688 - RNA, 21 nt, Human
acaaauucugaauauuuuuug

SEQ ID NO: 2887689 - RNA, 22 nt, Human
acaaauguguaucggaugcuuu

SEQ ID NO: 2887690 - RNA, 14 nt, Human
acaaaugugaagau

SEQ ID NO: 2887691 - RNA, 15 nt, Human
acaaaugugaagaug

SEQ ID NO: 2887692 - RNA, 16 nt, Human
acaaaugugaagaugc

SEQ ID NO: 2887693 - RNA, 17 nt, Human
acaaaugugaagaugca

SEQ ID NO: 2887694 - RNA, 18 nt, Human
acaaaugugaagaugcau

SEQ ID NO: 2887695 - RNA, 21 nt, Human
acaaaugugaagaugcauugu

SEQ ID NO: 2887696 - RNA, 23 nt, Human
acaaaugugaagaugcauuguag

SEQ ID NO: 2887697 - RNA, 14 nt, Human
acaaauuaaaaaga

SEQ ID NO: 2887698 - RNA, 16 nt, Human
acaaauuaaaaagauu

SEQ ID NO: 2887699 - RNA, 17 nt, Human
acaaauuaaaaagauuc

SEQ ID NO: 2887700 - RNA, 21 nt, Human
acaaauuaaaaagauucuuuu

SEQ ID NO: 2887701 - RNA, 13 nt, Human
acaaauuaauuuu

SEQ ID NO: 2887702 - RNA, 16 nt, Human
acaagcaaguucugag

SEQ ID NO: 2887703 - RNA, 15 nt, Human
acaagcaagcuccca

SEQ ID NO: 2887704 - RNA, 13 nt, Human
acaagcaagcucc

SEQ ID NO: 2887705 - RNA, 22 nt, Human
acaagcaauuagacaagaacuu

SEQ ID NO: 2887706 - RNA, 11 nt, Human
acaagcagagg

SEQ ID NO: 2887707 - RNA, 20 nt, Human
acaagcagagugcacagcug

SEQ ID NO: 2887708 - RNA, 21 nt, Human
acaagcagagugcacagcugu

SEQ ID NO: 2887709 - RNA, 22 nt, Human
acaagcagagugcacagcuguc

SEQ ID NO: 2887710 - RNA, 19 nt, Human
acaagcagauacugcugug

SEQ ID NO: 2887711 - RNA, 20 nt, Human
acaagagcagccuguggcau

SEQ ID NO: 2887712 - RNA, 19 nt, Human
acaagagcagccuguggca

SEQ ID NO: 2887713 - RNA, 18 nt, Human
acaagagcagccuguggc

SEQ ID NO: 2887714 - RNA, 16 nt, Human
acaagagcagccugug

SEQ ID NO: 2887715 - RNA, 15 nt, Human
acaagagcagccugu

SEQ ID NO: 2887716 - RNA, 14 nt, Human
acaagagcagccug

SEQ ID NO: 2887717 - RNA, 21 nt, Human
acaagagcacuacauucauuu

SEQ ID NO: 2887718 - RNA, 15 nt, Human
acaagagcacuacau

SEQ ID NO: 2887719 - RNA, 12 nt, Human
acaagccacccc

SEQ ID NO: 2887720 - RNA, 12 nt, Human
acaagccaagaa

SEQ ID NO: 2887721 - RNA, 18 nt, Human
acaagccacaagucuucc

SEQ ID NO: 2887722 - RNA, 20 nt, Human
acaagccacaagucuuccag

SEQ ID NO: 2887723 - RNA, 13 nt, Human
acaagccagcugg

SEQ ID NO: 2887724 - RNA, 15 nt, Human
acaagccagcuggag

SEQ ID NO: 2887725 - RNA, 13 nt, Human
acaagcccacagc

SEQ ID NO: 2887726 - RNA, 15 nt, Human
acaagcccacagcac

SEQ ID NO: 2887727 - RNA, 16 nt, Human
acaagcccacagcaca

SEQ ID NO: 2887728 - RNA, 21 nt, Human
acaagcgugagccacugcacc

SEQ ID NO: 2887729 - RNA, 20 nt, Human
acaagcgugagccacugcac

SEQ ID NO: 2887730 - RNA, 18 nt, Human
acaagcgugagccacugc

SEQ ID NO: 2887731 - RNA, 22 nt, Human
acaagcuaauugggaguccagg

SEQ ID NO: 2887732 - RNA, 23 nt, Human
acaagcuaauugggaguccaggc

SEQ ID NO: 2887733 - RNA, 17 nt, Human
uagcacauaaacuuugg

SEQ ID NO: 2887734 - RNA, 18 nt, Human
uagcacauaaacuuuggg

SEQ ID NO: 2887735 - RNA, 15 nt, Human
uagcacaugcuucaa

SEQ ID NO: 2887736 - RNA, 16 nt, Human
uagcacaugcuucaau

SEQ ID NO: 2887737 - RNA, 19 nt, Human
uagcacaugcuucaauagu

SEQ ID NO: 2887738 - RNA, 16 nt, Human
uagcaccagggaaggg

SEQ ID NO: 2887739 - RNA, 14 nt, Human
uagcacagauuuua

SEQ ID NO: 2887740 - RNA, 15 nt, Human
uagcacagauuuuaa

SEQ ID NO: 2887741 - RNA, 16 nt, Human
uagcacagauuuuaau

SEQ ID NO: 2887742 - RNA, 18 nt, Human
uagcacagauuuuaauug

SEQ ID NO: 2887743 - RNA, 19 nt, Human
uagcacagauuuuaauugu

SEQ ID NO: 2887744 - RNA, 22 nt, Human
uagcacagauuuuaauugucau

SEQ ID NO: 2887745 - RNA, 23 nt, Human
uagcacagauuuuaauugucaug

SEQ ID NO: 2887746 - RNA, 14 nt, Human
uagcaccagggaag

SEQ ID NO: 2887747 - RNA, 13 nt, Human
uagcaccagggaa

SEQ ID NO: 2887748 - RNA, 16 nt, Human
uagauuuuauuuuacu

SEQ ID NO: 2887749 - RNA, 17 nt, Human
uagauuuuauuuuacua

SEQ ID NO: 2887750 - RNA, 14 nt, Human
uagauuuucauguu

SEQ ID NO: 2887751 - RNA, 17 nt, Human
uagauuuucauguucuu

SEQ ID NO: 2887752 - RNA, 14 nt, Human
uagauuuucugguu

SEQ ID NO: 2887753 - RNA, 17 nt, Human
uagauuuucugguucua

SEQ ID NO: 2887754 - RNA, 19 nt, Human
uagauuuucugguucuaac

SEQ ID NO: 2887755 - RNA, 21 nt, Human
uagauuuucugguucuaacau

SEQ ID NO: 2887756 - RNA, 22 nt, Human
uagauuuucugguucuaacauu

SEQ ID NO: 2887757 - RNA, 21 nt, Human
uagaucauaaggcuucaaaau

SEQ ID NO: 2887758 - RNA, 14 nt, Human
uagaucauaaggcu

SEQ ID NO: 2887759 - RNA, 15 nt, Human
uagaucauaaggcuu

SEQ ID NO: 2887760 - RNA, 18 nt, Human
uagaucagaugcuccaag

SEQ ID NO: 2887761 - RNA, 19 nt, Human
uagaucagaugcuccaaga

SEQ ID NO: 2887762 - RNA, 20 nt, Human
uagaucagaugcuccaagau

SEQ ID NO: 2887763 - RNA, 23 nt, Human
uagaucagaugcuccaagauucu

SEQ ID NO: 2887764 - RNA, 12 nt, Human
uagauauuuggc

SEQ ID NO: 2887765 - RNA, 13 nt, Human
uagauauuuggcu

SEQ ID NO: 2887766 - RNA, 14 nt, Human
uagauauuuggcuu

SEQ ID NO: 2887767 - RNA, 17 nt, Human
uagauauuuggcuuaaa

SEQ ID NO: 2887768 - RNA, 18 nt, Human
uagauauuuggcuuaaau

SEQ ID NO: 2887769 - RNA, 19 nt, Human
uagauauuuggcuuaaaua

SEQ ID NO: 2887770 - RNA, 21 nt, Human
uagauauuuggcuuaaauaua

SEQ ID NO: 2887771 - RNA, 12 nt, Human
uagauauuuuca

SEQ ID NO: 2887772 - RNA, 15 nt, Human
uagauauuuucacaa

SEQ ID NO: 2887773 - RNA, 20 nt, Human
uagauauuuucacaauguca

SEQ ID NO: 2887774 - RNA, 24 nt, Human
uagauauuuucacaaugucaguau

SEQ ID NO: 2887775 - RNA, 14 nt, Human
uagaucagaugcuc

SEQ ID NO: 2887776 - RNA, 14 nt, Human
acaaaaagaaaaga

SEQ ID NO: 2887777 - RNA, 15 nt, Human
acaaaaagacaaaca

SEQ ID NO: 2887778 - RNA, 18 nt, Human
acaaaaagaaaagaaaau

SEQ ID NO: 2887779 - RNA, 12 nt, Human
uagagcagccca

SEQ ID NO: 2887780 - RNA, 14 nt, Human
uagagcagcccaaa

SEQ ID NO: 2887781 - RNA, 11 nt, Human
uagagcaggcg

SEQ ID NO: 2887782 - RNA, 20 nt, Human
uagagcaggcguucagcuca

SEQ ID NO: 2887783 - RNA, 22 nt, Human
uagagcaggcguucagcucacu

SEQ ID NO: 2887784 - RNA, 13 nt, Human
uagagccagcuug

SEQ ID NO: 2887785 - RNA, 23 nt, Human
uagagcugacacaaaccugccug

SEQ ID NO: 2887786 - RNA, 17 nt, Human
uagagcaguuucugucc

SEQ ID NO: 2887787 - RNA, 22 nt, Human
uagagcaguuucuguccugcug

SEQ ID NO: 2887788 - RNA, 19 nt, Human
uagagcauugaauuggaga

SEQ ID NO: 2887789 - RNA, 17 nt, Human
uagagcuguucaacauc

SEQ ID NO: 2887790 - RNA, 22 nt, Human
uagagcuguucaacaucacuga

SEQ ID NO: 2887791 - RNA, 15 nt, Human
uagagcuucuggcac

SEQ ID NO: 2887792 - RNA, 18 nt, Human
aauuuuuauuuucacccu

SEQ ID NO: 2887793 - RNA, 20 nt, Human
uauuuauuuuccuaaagaga

SEQ ID NO: 2887794 - RNA, 16 nt, Human
uauuuauuuuccuaaa

SEQ ID NO: 2887795 - RNA, 14 nt, Human
uauuuauuuauuua

SEQ ID NO: 2887796 - RNA, 21 nt, Human
uauuuauuuuccuaaagagag

SEQ ID NO: 2887797 - RNA, 20 nt, Human
uauuuauuuuuuuuaaguau

SEQ ID NO: 2887798 - RNA, 13 nt, Human
uauuuauuuucuu

SEQ ID NO: 2887799 - RNA, 21 nt, Human
uauuuauuuucuuuugaauug

SEQ ID NO: 2887800 - RNA, 12 nt, Human
uauuuauuuugu

SEQ ID NO: 2887801 - RNA, 13 nt, Human
uauuuauuuugua

SEQ ID NO: 2887802 - RNA, 14 nt, Human
uauuuauuuuguaa

SEQ ID NO: 2887803 - RNA, 15 nt, Human
uauuuauuuuguaau

SEQ ID NO: 2887804 - RNA, 16 nt, Human
uauuuauuuuguaauu

SEQ ID NO: 2887805 - RNA, 19 nt, Human
uauuuauuuuguaauuaug

SEQ ID NO: 2887806 - RNA, 20 nt, Human
uauuuauuuuguaauuauga

SEQ ID NO: 2887807 - RNA, 18 nt, Human
uauuuauuuuuacaagaa

SEQ ID NO: 2887808 - RNA, 16 nt, Human
uauuucacuugaugau

SEQ ID NO: 2887809 - RNA, 22 nt, Human
uauuucacacgcuguucuaaug

SEQ ID NO: 2887810 - RNA, 20 nt, Human
uauuucacaaauaauaggug

SEQ ID NO: 2887811 - RNA, 14 nt, Human
uauuuagugcugca

SEQ ID NO: 2887812 - RNA, 20 nt, Human
uauuuagugcugcaucuuau

SEQ ID NO: 2887813 - RNA, 15 nt, Human
uauuuaguuauaguu

SEQ ID NO: 2887814 - RNA, 17 nt, Human
uauuuaguuauaguuuc

SEQ ID NO: 2887815 - RNA, 15 nt, Human
uauuuaggaaguguu

SEQ ID NO: 2887816 - RNA, 22 nt, Human
uauuuagauuguuaaaauaacu

SEQ ID NO: 2887817 - RNA, 11 nt, Human
uauuuauuuac

SEQ ID NO: 2887818 - RNA, 12 nt, Human
uauuuauuuaau

SEQ ID NO: 2887819 - RNA, 19 nt, Human
uauuuauuuaaaagauuca

SEQ ID NO: 2887820 - RNA, 16 nt, Human
uauuuauuuaaagcau

SEQ ID NO: 2887821 - RNA, 17 nt, Human
uauuuauuuaaagcauu

SEQ ID NO: 2887822 - RNA, 11 nt, Human
uauuuauuuau

SEQ ID NO: 2887823 - RNA, 18 nt, Human
uauuuauuuauguacuuu

SEQ ID NO: 2887824 - RNA, 14 nt, Human
uauuuauuuaugua

SEQ ID NO: 2887825 - RNA, 13 nt, Human
uauuuauuuaugu

SEQ ID NO: 2887826 - RNA, 21 nt, Human
uauuuauuuaauaacaauugu

SEQ ID NO: 2887827 - RNA, 14 nt, Human
uauuuauuuaguau

SEQ ID NO: 2887828 - RNA, 19 nt, Human
uauuuacgcuuugauucau

SEQ ID NO: 2887829 - RNA, 15 nt, Human
uauuuacgcuuugau

SEQ ID NO: 2887830 - RNA, 22 nt, Human
uauuuacgcuuugauucauagu

SEQ ID NO: 2887831 - RNA, 14 nt, Human
uauuuacgcuuuga

SEQ ID NO: 2887832 - RNA, 14 nt, Human
uauuuacuaccuua

SEQ ID NO: 2887833 - RNA, 17 nt, Human
uauuuaccugcaggcug

SEQ ID NO: 2887834 - RNA, 21 nt, Human
uauuuagacucaucuuacugu

SEQ ID NO: 2887835 - RNA, 18 nt, Human
uauuuagauauaacacua

SEQ ID NO: 2887836 - RNA, 19 nt, Human
uauuuagauuguuaaaaua

SEQ ID NO: 2887837 - RNA, 17 nt, Human
uauuuagauuguuaaaa

SEQ ID NO: 2887838 - RNA, 20 nt, Human
uauuuagcaccagggaaggg

SEQ ID NO: 2887839 - RNA, 23 nt, Human
uauuuaauuuuuuugagacagag

SEQ ID NO: 2887840 - RNA, 19 nt, Human
uauuuaaugauaaguaaau

SEQ ID NO: 2887841 - RNA, 21 nt, Human
uauuuaaugccgauauacucu

SEQ ID NO: 2887842 - RNA, 17 nt, Human
uauuuaaugcauuaaac

SEQ ID NO: 2887843 - RNA, 21 nt, Human
uauuuaaugcauuaaaccugu

SEQ ID NO: 2887844 - RNA, 22 nt, Human
uauuuaaugcauuaaaccuguc

SEQ ID NO: 2887845 - RNA, 12 nt, Human
uauuuaauguuu

SEQ ID NO: 2887846 - RNA, 13 nt, Human
uauuuaauguuuu

SEQ ID NO: 2887847 - RNA, 15 nt, Human
uauuuaauguuuuaa

SEQ ID NO: 2887848 - RNA, 16 nt, Human
uauuuaauguuuuaaa

SEQ ID NO: 2887849 - RNA, 17 nt, Human
uauuuaauguuuuaaau

SEQ ID NO: 2887850 - RNA, 18 nt, Human
uauuuaauguuuuaaaug

SEQ ID NO: 2887851 - RNA, 20 nt, Human
uauuuaauguuuuaaaugua

SEQ ID NO: 2887852 - RNA, 21 nt, Human
uauuuaauguuuuaaauguac

SEQ ID NO: 2887853 - RNA, 22 nt, Human
uauuuaauguuuuaaauguaca

SEQ ID NO: 2887854 - RNA, 14 nt, Human
uauuuaauuauuaa

SEQ ID NO: 2887855 - RNA, 23 nt, Human
uauuuaauuauuaacuacauuua

SEQ ID NO: 2887856 - RNA, 14 nt, Human
uauugugaacauuu

SEQ ID NO: 2887857 - RNA, 13 nt, Human
uauugugaaugau

SEQ ID NO: 2887858 - RNA, 15 nt, Human
uauuuaacuggugca

SEQ ID NO: 2887859 - RNA, 16 nt, Human
uauuuaacuggugcac

SEQ ID NO: 2887860 - RNA, 22 nt, Human
uauuuaacuggugcacuuugua

SEQ ID NO: 2887861 - RNA, 23 nt, Human
uauuuaacuggugcacuuuguaa

SEQ ID NO: 2887862 - RNA, 15 nt, Human
uauuuaacauuauuu

SEQ ID NO: 2887863 - RNA, 12 nt, Human
uauuuaagcaaa

SEQ ID NO: 2887864 - RNA, 13 nt, Human
uauuuaagcaaau

SEQ ID NO: 2887865 - RNA, 14 nt, Human
uauuuaagcaaaua

SEQ ID NO: 2887866 - RNA, 16 nt, Human
uauuuaagcaaauacu

SEQ ID NO: 2887867 - RNA, 17 nt, Human
uauuuaagcaaauacuu

SEQ ID NO: 2887868 - RNA, 17 nt, Human
uauuuaagcaacaucuu

SEQ ID NO: 2887869 - RNA, 18 nt, Human
uauuuaagcaacaucuuu

SEQ ID NO: 2887870 - RNA, 20 nt, Human
uauuuaagcaacaucuuuuu

SEQ ID NO: 2887871 - RNA, 21 nt, Human
uauuuaagcaacaucuuuuua

SEQ ID NO: 2887872 - RNA, 18 nt, Human
uauuuaagguagcuucag

SEQ ID NO: 2887873 - RNA, 21 nt, Human
uauuuaagguagcuucagcua

SEQ ID NO: 2887874 - RNA, 18 nt, Human
uauuuaagccucauauuu

SEQ ID NO: 2887875 - RNA, 20 nt, Human
uauuuaagccucauauuuaa

SEQ ID NO: 2887876 - RNA, 21 nt, Human
uauuuaagccucauauuuaaa

SEQ ID NO: 2887877 - RNA, 10 nt, Human
uauuuaauaa

SEQ ID NO: 2887878 - RNA, 11 nt, Human
uauuuaauaac

SEQ ID NO: 2887879 - RNA, 17 nt, Human
uauuuaauaacaauugu

SEQ ID NO: 2887880 - RNA, 15 nt, Human
uauuuaauaacauua

SEQ ID NO: 2887881 - RNA, 13 nt, Human
uauuuaauaacau

SEQ ID NO: 2887882 - RNA, 14 nt, Human
uauuuaauaacauu

SEQ ID NO: 2887883 - RNA, 11 nt, Human
uauuguacaua

SEQ ID NO: 2887884 - RNA, 13 nt, Human
uauuguacauaaa

SEQ ID NO: 2887885 - RNA, 14 nt, Human
uauuguacauaaaa

SEQ ID NO: 2887886 - RNA, 15 nt, Human
uauuguacauaaaag

SEQ ID NO: 2887887 - RNA, 16 nt, Human
uauuguacauaaaaga

SEQ ID NO: 2887888 - RNA, 17 nt, Human
uauuguacauaaaagaa

SEQ ID NO: 2887889 - RNA, 22 nt, Human
uauuguacauaaaagaauuuuu

SEQ ID NO: 2887890 - RNA, 20 nt, Human
uauuguacagcuguuuaaga

SEQ ID NO: 2887891 - RNA, 16 nt, Human
uauuguauaaacuauc

SEQ ID NO: 2887892 - RNA, 21 nt, Human
uauuguauaaacuaucaguuu

SEQ ID NO: 2887893 - RNA, 20 nt, Human
acaguucaauucucauuugu

SEQ ID NO: 2887894 - RNA, 20 nt, Human
acaguucaagaaagcuucaa

SEQ ID NO: 2887895 - RNA, 21 nt, Human
acaguucaauaaacuuaacuu

SEQ ID NO: 2887896 - RNA, 23 nt, Human
acaguucaauaaacuuaacuuua

SEQ ID NO: 2887897 - RNA, 12 nt, Human
acaguucaagaa

SEQ ID NO: 2887898 - RNA, 14 nt, Human
acaguuauuuauag

SEQ ID NO: 2887899 - RNA, 18 nt, Human
acaguuauuuauagucau

SEQ ID NO: 2887900 - RNA, 23 nt, Human
acaguuauuuauagucauuuauu

SEQ ID NO: 2887901 - RNA, 15 nt, Human
acaguuauuuugaua

SEQ ID NO: 2887902 - RNA, 20 nt, Human
acaguucauguuugcuucau

SEQ ID NO: 2887903 - RNA, 16 nt, Human
acaguucaagaaagcu

SEQ ID NO: 2887904 - RNA, 14 nt, Human
acaguucacacccu

SEQ ID NO: 2887905 - RNA, 15 nt, Human
acaguucacacccug

SEQ ID NO: 2887906 - RNA, 17 nt, Human
acaguucacacccugca

SEQ ID NO: 2887907 - RNA, 18 nt, Human
acaguucacacccugcaa

SEQ ID NO: 2887908 - RNA, 19 nt, Human
acaguucacacccugcaag

SEQ ID NO: 2887909 - RNA, 20 nt, Human
acaguucacacccugcaagg

SEQ ID NO: 2887910 - RNA, 23 nt, Human
acaguuagcaaacuuuguauguc

SEQ ID NO: 2887911 - RNA, 13 nt, Human
acaguucugucau

SEQ ID NO: 2887912 - RNA, 13 nt, Human
acaguuccuucag

SEQ ID NO: 2887913 - RNA, 13 nt, Human
acaguucugaaga

SEQ ID NO: 2887914 - RNA, 15 nt, Human
acaguucugaagaau

SEQ ID NO: 2887915 - RNA, 16 nt, Human
uauucuguuggccagu

SEQ ID NO: 2887916 - RNA, 22 nt, Human
uauucuuaagggaacuuccaca

SEQ ID NO: 2887917 - RNA, 15 nt, Human
uauucuuauaaaaau

SEQ ID NO: 2887918 - RNA, 21 nt, Human
uauucuguguugcauuauuca

SEQ ID NO: 2887919 - RNA, 22 nt, Human
uauucuguguugcauuauucau

SEQ ID NO: 2887920 - RNA, 15 nt, Human
uauucuguuggaagc

SEQ ID NO: 2887921 - RNA, 13 nt, Human
uauucuuaaaaug

SEQ ID NO: 2887922 - RNA, 15 nt, Human
uauucuuaaaaugca

SEQ ID NO: 2887923 - RNA, 17 nt, Human
uauucuuaaaaugcaau

SEQ ID NO: 2887924 - RNA, 18 nt, Human
uauucuuaaaaugcaaua

SEQ ID NO: 2887925 - RNA, 19 nt, Human
uauucuuaaaaugcaauau

SEQ ID NO: 2887926 - RNA, 21 nt, Human
uauucuuaaaaugcaauauuu

SEQ ID NO: 2887927 - RNA, 17 nt, Human
uauucuucuagaguuca

SEQ ID NO: 2887928 - RNA, 18 nt, Human
uauucuucuagaguucag

SEQ ID NO: 2887929 - RNA, 15 nt, Human
uauucuucauauccu

SEQ ID NO: 2887930 - RNA, 13 nt, Human
uauucuucuagag

SEQ ID NO: 2887931 - RNA, 14 nt, Human
uauucuucuagagu

SEQ ID NO: 2887932 - RNA, 17 nt, Human
uauucugagaaaacaag

SEQ ID NO: 2887933 - RNA, 14 nt, Human
uauucucuuuuauc

SEQ ID NO: 2887934 - RNA, 18 nt, Human
uauucucuuuuaucuguu

SEQ ID NO: 2887935 - RNA, 15 nt, Human
uauucugagaaaaca

SEQ ID NO: 2887936 - RNA, 16 nt, Human
uauucugaagcaacau

SEQ ID NO: 2887937 - RNA, 23 nt, Human
uauucugagcauacucaacaaaa

SEQ ID NO: 2887938 - RNA, 12 nt, Human
uauucuggaguu

SEQ ID NO: 2887939 - RNA, 19 nt, Human
uauucuguagauucugugg

SEQ ID NO: 2887940 - RNA, 22 nt, Human
uauucuguagauucuguggaac

SEQ ID NO: 2887941 - RNA, 16 nt, Human
uauuggggucugaccc

SEQ ID NO: 2887942 - RNA, 17 nt, Human
uauuggggucugacccc

SEQ ID NO: 2887943 - RNA, 13 nt, Human
uauugguggaauc

SEQ ID NO: 2887944 - RNA, 16 nt, Human
uauugguggcuuuccu

SEQ ID NO: 2887945 - RNA, 17 nt, Human
uauugguggcuuuccuu

SEQ ID NO: 2887946 - RNA, 18 nt, Human
uauugguggcuuuccuug

SEQ ID NO: 2887947 - RNA, 18 nt, Human
uauuggugguucucagca

SEQ ID NO: 2887948 - RNA, 15 nt, Human
uauuguaaacaugug

SEQ ID NO: 2887949 - RNA, 16 nt, Human
uauuguaaacaugugu

SEQ ID NO: 2887950 - RNA, 17 nt, Human
uauuguaaacauguguu

SEQ ID NO: 2887951 - RNA, 18 nt, Human
uauuguaaacauguguuu

SEQ ID NO: 2887952 - RNA, 13 nt, Human
uauuguaaauuau

SEQ ID NO: 2887953 - RNA, 17 nt, Human
uauuguaaauuuuagaa

SEQ ID NO: 2887954 - RNA, 14 nt, Human
uauugaguuuguag

SEQ ID NO: 2887955 - RNA, 19 nt, Human
uauugaguuuguagguaaa

SEQ ID NO: 2887956 - RNA, 21 nt, Human
uauugaguuuguagguaaaau

SEQ ID NO: 2887957 - RNA, 14 nt, Human
uauugagucaaaug

SEQ ID NO: 2887958 - RNA, 15 nt, Human
uauugaggcuuugug

SEQ ID NO: 2887959 - RNA, 16 nt, Human
uauugaggcuuugugu

SEQ ID NO: 2887960 - RNA, 19 nt, Human
uauugaggcuuuguguugu

SEQ ID NO: 2887961 - RNA, 20 nt, Human
uauugaggcuuuguguugua

SEQ ID NO: 2887962 - RNA, 23 nt, Human
uauugaggcuuuguguuguaauu

SEQ ID NO: 2887963 - RNA, 17 nt, Human
uauugagauuguccuca

SEQ ID NO: 2887964 - RNA, 14 nt, Human
uauugagauuucuu

SEQ ID NO: 2887965 - RNA, 15 nt, Human
uauugagauuucuua

SEQ ID NO: 2887966 - RNA, 18 nt, Human
uauugagauuucuuaaau

SEQ ID NO: 2887967 - RNA, 19 nt, Human
uauugagauuucuuaaaua

SEQ ID NO: 2887968 - RNA, 19 nt, Human
uauugacuucaaugauagu

SEQ ID NO: 2887969 - RNA, 23 nt, Human
uauugacacagaaaauguugaga

SEQ ID NO: 2887970 - RNA, 14 nt, Human
uauugacauuugua

SEQ ID NO: 2887971 - RNA, 15 nt, Human
uauugacauuuguag

SEQ ID NO: 2887972 - RNA, 16 nt, Human
uauugacauuuguagu

SEQ ID NO: 2887973 - RNA, 17 nt, Human
uauugacauuuguaguu

SEQ ID NO: 2887974 - RNA, 20 nt, Human
uauugacacagaaaauguug

SEQ ID NO: 2887975 - RNA, 18 nt, Human
uauugacacagaaaaugu

SEQ ID NO: 2887976 - RNA, 16 nt, Human
uauugacacagaaaau

SEQ ID NO: 2887977 - RNA, 13 nt, Human
uauugacacagaa

SEQ ID NO: 2887978 - RNA, 15 nt, Human
uauugaauugagaug

SEQ ID NO: 2887979 - RNA, 18 nt, Human
uauugacaauaauuucag

SEQ ID NO: 2887980 - RNA, 17 nt, Human
uauugacaauaauuuca

SEQ ID NO: 2887981 - RNA, 13 nt, Human
uauugacaauaau

SEQ ID NO: 2887982 - RNA, 16 nt, Human
uauugaaucuauuuaa

SEQ ID NO: 2887983 - RNA, 17 nt, Human
uauugaaucuauuuaag

SEQ ID NO: 2887984 - RNA, 12 nt, Human
uauugaauguuu

SEQ ID NO: 2887985 - RNA, 11 nt, Human
uauugaaucua

SEQ ID NO: 2887986 - RNA, 20 nt, Human
uauugaaucaguuuccaauu

SEQ ID NO: 2887987 - RNA, 22 nt, Human
uauugaauauaauauauuugug

SEQ ID NO: 2887988 - RNA, 13 nt, Human
uauugaauauugu

SEQ ID NO: 2887989 - RNA, 14 nt, Human
uauugaauauugug

SEQ ID NO: 2887990 - RNA, 15 nt, Human
uauugaauauugugu

SEQ ID NO: 2887991 - RNA, 20 nt, Human
uauugaauauaauauauuug

SEQ ID NO: 2887992 - RNA, 21 nt, Human
uauugaauauaauauauuugu

SEQ ID NO: 2887993 - RNA, 20 nt, Human
uauugaaggaagccaaauuu

SEQ ID NO: 2887994 - RNA, 21 nt, Human
uauugaaggaagccaaauuua

SEQ ID NO: 2887995 - RNA, 22 nt, Human
uauugaaggaagccaaauuuau

SEQ ID NO: 2887996 - RNA, 16 nt, Human
uauugaaguuucagcu

SEQ ID NO: 2887997 - RNA, 17 nt, Human
uauugaauacuuacauu

SEQ ID NO: 2887998 - RNA, 20 nt, Human
uauugaauacuuacauucuc

SEQ ID NO: 2887999 - RNA, 12 nt, Human
uauucuuuucca

SEQ ID NO: 2888000 - RNA, 13 nt, Human
uauugaacuuuuu

SEQ ID NO: 2888001 - RNA, 14 nt, Human
uauugaacuuuuuu

SEQ ID NO: 2888002 - RNA, 13 nt, Human
uauugaagaaaca

SEQ ID NO: 2888003 - RNA, 14 nt, Human
uauugaagaaacag

SEQ ID NO: 2888004 - RNA, 22 nt, Human
uauugaagaaacagauaccaua

SEQ ID NO: 2888005 - RNA, 14 nt, Human
uauugaagacaauu

SEQ ID NO: 2888006 - RNA, 17 nt, Human
uauugaagacaauuuga

SEQ ID NO: 2888007 - RNA, 20 nt, Human
uauugaagacaauuugauac

SEQ ID NO: 2888008 - RNA, 21 nt, Human
uauugaagacaauuugauaca

SEQ ID NO: 2888009 - RNA, 22 nt, Human
uauugaagacaauuugauacau

SEQ ID NO: 2888010 - RNA, 18 nt, Human
uauucuuuucugcaaaau

SEQ ID NO: 2888011 - RNA, 13 nt, Human
uauucuuuuucca

SEQ ID NO: 2888012 - RNA, 18 nt, Human
uauugaacuuggaaagaa

SEQ ID NO: 2888013 - RNA, 20 nt, Human
uauugaaauuguacauauuu

SEQ ID NO: 2888014 - RNA, 14 nt, Human
uauugaaaaaaaua

SEQ ID NO: 2888015 - RNA, 14 nt, Human
uauucuugaaagaa

SEQ ID NO: 2888016 - RNA, 15 nt, Human
uauucuugaaagaag

SEQ ID NO: 2888017 - RNA, 18 nt, Human
uauucuugaaagaagaau

SEQ ID NO: 2888018 - RNA, 23 nt, Human
uauucuugaaagaagaauguguu

SEQ ID NO: 2888019 - RNA, 13 nt, Human
uauucuugugcuu

SEQ ID NO: 2888020 - RNA, 21 nt, Human
uauucuuucaauucuguaggu

SEQ ID NO: 2888021 - RNA, 16 nt, Human
uauucauauuggaaaa

SEQ ID NO: 2888022 - RNA, 17 nt, Human
uauucauauuggaaaaa

SEQ ID NO: 2888023 - RNA, 16 nt, Human
uauucaggagaguaga

SEQ ID NO: 2888024 - RNA, 14 nt, Human
uauuauaaacugua

SEQ ID NO: 2888025 - RNA, 17 nt, Human
uauucagagaauaucaa

SEQ ID NO: 2888026 - RNA, 19 nt, Human
uauuauaacaagugugucu

SEQ ID NO: 2888027 - RNA, 14 nt, Human
uauucaaccaugga

SEQ ID NO: 2888028 - RNA, 16 nt, Human
uauucaaccauggacu

SEQ ID NO: 2888029 - RNA, 17 nt, Human
uauucaaccauggacuu

SEQ ID NO: 2888030 - RNA, 20 nt, Human
uauucaaguuauuguacagc

SEQ ID NO: 2888031 - RNA, 16 nt, Human
uauucaaguuauugua

SEQ ID NO: 2888032 - RNA, 21 nt, Human
uauucacugaaguucuccuga

SEQ ID NO: 2888033 - RNA, 12 nt, Human
uauucacugggc

SEQ ID NO: 2888034 - RNA, 14 nt, Human
uauucacugggcca

SEQ ID NO: 2888035 - RNA, 12 nt, Human
uauucagaauau

SEQ ID NO: 2888036 - RNA, 15 nt, Human
uauucagaauauuca

SEQ ID NO: 2888037 - RNA, 16 nt, Human
uauucagaaucuuugu

SEQ ID NO: 2888038 - RNA, 18 nt, Human
uauucagaaucuuuguua

SEQ ID NO: 2888039 - RNA, 15 nt, Human
uauucagaauuauga

SEQ ID NO: 2888040 - RNA, 19 nt, Human
uauucagaauuaugaugga

SEQ ID NO: 2888041 - RNA, 20 nt, Human
uauucagaauuaugauggaa

SEQ ID NO: 2888042 - RNA, 22 nt, Human
uauuacccccuccuucagacac

SEQ ID NO: 2888043 - RNA, 21 nt, Human
uauuacccccuccuucagaca

SEQ ID NO: 2888044 - RNA, 22 nt, Human
uauuacccaagaaguaaagaug

SEQ ID NO: 2888045 - RNA, 13 nt, Human
uauuaccagcaag

SEQ ID NO: 2888046 - RNA, 16 nt, Human
uauuaccagcaagaau

SEQ ID NO: 2888047 - RNA, 19 nt, Human
uauuaccagcaagaauaaa

SEQ ID NO: 2888048 - RNA, 20 nt, Human
uauuaccagcaagaauaaaa

SEQ ID NO: 2888049 - RNA, 21 nt, Human
uauuaccagcaagaauaaaaa

SEQ ID NO: 2888050 - RNA, 22 nt, Human
uauuaccaguggcguuguugca

SEQ ID NO: 2888051 - RNA, 16 nt, Human
uauuagagcauugaau

SEQ ID NO: 2888052 - RNA, 17 nt, Human
uauuaccuaaugaaagu

SEQ ID NO: 2888053 - RNA, 11 nt, Human
uauuagaugaa

SEQ ID NO: 2888054 - RNA, 12 nt, Human
uauuagaugaau

SEQ ID NO: 2888055 - RNA, 14 nt, Human
uauuagaugaauua

SEQ ID NO: 2888056 - RNA, 23 nt, Human
uauuagccaggaucaugguguaa

SEQ ID NO: 2888057 - RNA, 13 nt, Human
uauuagccaggau

SEQ ID NO: 2888058 - RNA, 17 nt, Human
uauuagccaggaucaug

SEQ ID NO: 2888059 - RNA, 18 nt, Human
uauuagccaggaucaugg

SEQ ID NO: 2888060 - RNA, 19 nt, Human
uauuagccaggaucauggu

SEQ ID NO: 2888061 - RNA, 13 nt, Human
uauuaguuaauau

SEQ ID NO: 2888062 - RNA, 19 nt, Human
uauuaguuaauggauuaaa

SEQ ID NO: 2888063 - RNA, 22 nt, Human
uauuagugguuuaucagcaaaa

SEQ ID NO: 2888064 - RNA, 21 nt, Human
uauuagugaccucagcuuuga

SEQ ID NO: 2888065 - RNA, 14 nt, Human
uauuagugauauuu

SEQ ID NO: 2888066 - RNA, 18 nt, Human
uauuagugauauuucucu

SEQ ID NO: 2888067 - RNA, 19 nt, Human
uauuagugauauuucucua

SEQ ID NO: 2888068 - RNA, 20 nt, Human
uauuagugauauuucucuag

SEQ ID NO: 2888069 - RNA, 21 nt, Human
uauuagugauauuucucuagu

SEQ ID NO: 2888070 - RNA, 13 nt, Human
uauuauaaauaua

SEQ ID NO: 2888071 - RNA, 15 nt, Human
uauuauaaauauaua

SEQ ID NO: 2888072 - RNA, 20 nt, Human
uauuauaaauauauauaaag

SEQ ID NO: 2888073 - RNA, 22 nt, Human
uauuauaaauauauauaaagaa

SEQ ID NO: 2888074 - RNA, 23 nt, Human
uauuauaaauauauauaaagaau

SEQ ID NO: 2888075 - RNA, 24 nt, Human
uauuauaaaaggggguccguggaa

SEQ ID NO: 2888076 - RNA, 22 nt, Human
uauuaguucccugucucuugaa

SEQ ID NO: 2888077 - RNA, 23 nt, Human
uauuaguucccugucucuugaaa

SEQ ID NO: 2888078 - RNA, 12 nt, Human
uauuaguugcuu

SEQ ID NO: 2888079 - RNA, 13 nt, Human
uauuaguugcuuu

SEQ ID NO: 2888080 - RNA, 14 nt, Human
uauuaguugcuuug

SEQ ID NO: 2888081 - RNA, 19 nt, Human
uauuaaaacauuggauuau

SEQ ID NO: 2888082 - RNA, 16 nt, Human
uauuaaaacucagccu

SEQ ID NO: 2888083 - RNA, 22 nt, Human
uauuaaaacucagccugggaca

SEQ ID NO: 2888084 - RNA, 17 nt, Human
uauuaaaacauuggauu

SEQ ID NO: 2888085 - RNA, 18 nt, Human
uauuaaaacauuggauua

SEQ ID NO: 2888086 - RNA, 20 nt, Human
uauuaaaaauauggaacuuc

SEQ ID NO: 2888087 - RNA, 22 nt, Human
uauuaaaaauauggaacuucua

SEQ ID NO: 2888088 - RNA, 12 nt, Human
uauuaaaacauu

SEQ ID NO: 2888089 - RNA, 17 nt, Human
uauuacauauaucauua

SEQ ID NO: 2888090 - RNA, 22 nt, Human
uauuacauaaaggcuaacuaug

SEQ ID NO: 2888091 - RNA, 14 nt, Human
uauuaaagugcuaa

SEQ ID NO: 2888092 - RNA, 18 nt, Human
uauuaaagugcuaagguu

SEQ ID NO: 2888093 - RNA, 14 nt, Human
uauuaaauaaaauc

SEQ ID NO: 2888094 - RNA, 15 nt, Human
uauuaaauaaaauca

SEQ ID NO: 2888095 - RNA, 22 nt, Human
uauuaaagugcuaagguucuaa

SEQ ID NO: 2888096 - RNA, 24 nt, Human
uauuaaagugcuaagguucuaagg

SEQ ID NO: 2888097 - RNA, 16 nt, Human
uauuaaaguggagaag

SEQ ID NO: 2888098 - RNA, 18 nt, Human
acagcuggguggcacugc

SEQ ID NO: 2888099 - RNA, 19 nt, Human
acagcuggguggcacugcc

SEQ ID NO: 2888100 - RNA, 20 nt, Human
acagcuggguggcacugcca

SEQ ID NO: 2888101 - RNA, 23 nt, Human
acagcuggguggcacugccaugc

SEQ ID NO: 2888102 - RNA, 12 nt, Human
acagcuccuccc

SEQ ID NO: 2888103 - RNA, 14 nt, Human
acagcuccccaagu

SEQ ID NO: 2888104 - RNA, 14 nt, Human
acagcucccugcca

SEQ ID NO: 2888105 - RNA, 15 nt, Human
acagcuggagcucuc

SEQ ID NO: 2888106 - RNA, 11 nt, Human
acagcugcugg

SEQ ID NO: 2888107 - RNA, 16 nt, Human
acagcuggguggcacu

SEQ ID NO: 2888108 - RNA, 19 nt, Human
uauguuuuaagaggcaggg

SEQ ID NO: 2888109 - RNA, 17 nt, Human
uauguuuuaagaggcag

SEQ ID NO: 2888110 - RNA, 20 nt, Human
uauguuugucuuuuaaugcu

SEQ ID NO: 2888111 - RNA, 12 nt, Human
uauguuuuacac

SEQ ID NO: 2888112 - RNA, 15 nt, Human
uauguuuuacacugu

SEQ ID NO: 2888113 - RNA, 17 nt, Human
uauguuuuacacuguac

SEQ ID NO: 2888114 - RNA, 22 nt, Human
acaguccugggagaaccucagg

SEQ ID NO: 2888115 - RNA, 21 nt, Human
acaguccugggagaaccucag

SEQ ID NO: 2888116 - RNA, 23 nt, Human
acaguccugggagaaccucaggc

SEQ ID NO: 2888117 - RNA, 18 nt, Human
acaguccuuaaaaaucac

SEQ ID NO: 2888118 - RNA, 15 nt, Human
acagucuugcagcag

SEQ ID NO: 2888119 - RNA, 23 nt, Human
acaguccuucaaaauccuuccaa

SEQ ID NO: 2888120 - RNA, 11 nt, Human
acagucugucu

SEQ ID NO: 2888121 - RNA, 12 nt, Human
acagucugucuu

SEQ ID NO: 2888122 - RNA, 13 nt, Human
acagucugucuuc

SEQ ID NO: 2888123 - RNA, 15 nt, Human
acagucugucuucug

SEQ ID NO: 2888124 - RNA, 16 nt, Human
acagucugucuucugu

SEQ ID NO: 2888125 - RNA, 17 nt, Human
acagucugucuucugua

SEQ ID NO: 2888126 - RNA, 18 nt, Human
acagucugucuucuguau

SEQ ID NO: 2888127 - RNA, 19 nt, Human
acagucugucuucuguaua

SEQ ID NO: 2888128 - RNA, 20 nt, Human
acagucugucuucuguauau

SEQ ID NO: 2888129 - RNA, 23 nt, Human
acagucugucuucuguauauaaa

SEQ ID NO: 2888130 - RNA, 14 nt, Human
acagugacccuucc

SEQ ID NO: 2888131 - RNA, 16 nt, Human
acagugacccuuccca

SEQ ID NO: 2888132 - RNA, 14 nt, Human
acaguguuaaauga

SEQ ID NO: 2888133 - RNA, 14 nt, Human
acagugagccugaa

SEQ ID NO: 2888134 - RNA, 12 nt, Human
acagugagccug

SEQ ID NO: 2888135 - RNA, 20 nt, Human
acaguguuuacacuuuggac

SEQ ID NO: 2888136 - RNA, 21 nt, Human
acaguguugaaaauguucaga

SEQ ID NO: 2888137 - RNA, 19 nt, Human
acaguguugaaaauguuca

SEQ ID NO: 2888138 - RNA, 17 nt, Human
acaguaugucccauagg

SEQ ID NO: 2888139 - RNA, 18 nt, Human
acaguaugcuugcucuaa

SEQ ID NO: 2888140 - RNA, 22 nt, Human
acaguauaucccaagugcacuu

SEQ ID NO: 2888141 - RNA, 21 nt, Human
acaguaucccacauccaacuc

SEQ ID NO: 2888142 - RNA, 15 nt, Human
acaguaucccacauc

SEQ ID NO: 2888143 - RNA, 10 nt, Human
acaguaacuu

SEQ ID NO: 2888144 - RNA, 17 nt, Human
acaguaacgcaggggaa

SEQ ID NO: 2888145 - RNA, 19 nt, Human
acaguaacgcaggggaaac

SEQ ID NO: 2888146 - RNA, 21 nt, Human
acaguaaauaucccaaacugu

SEQ ID NO: 2888147 - RNA, 23 nt, Human
acaguaaauaucccaaacuguga

SEQ ID NO: 2888148 - RNA, 22 nt, Human
acagggcaugccccggccaccu

SEQ ID NO: 2888149 - RNA, 23 nt, Human
acagggcaugccccggccaccuc

SEQ ID NO: 2888150 - RNA, 24 nt, Human
acagggcaugccccggccaccucu

SEQ ID NO: 2888151 - RNA, 17 nt, Human
acaggcugggcuucagu

SEQ ID NO: 2888152 - RNA, 14 nt, Human
acaggcugggcuuc

SEQ ID NO: 2888153 - RNA, 21 nt, Human
acaggcugggcuucaguggca

SEQ ID NO: 2888154 - RNA, 22 nt, Human
acagggcacaccgggcacucag

SEQ ID NO: 2888155 - RNA, 16 nt, Human
acagggcagagccggg

SEQ ID NO: 2888156 - RNA, 18 nt, Human
acaguccuaacugguaua

SEQ ID NO: 2888157 - RNA, 12 nt, Human
acaguccuggga

SEQ ID NO: 2888158 - RNA, 19 nt, Human
acaguccuaacugguauag

SEQ ID NO: 2888159 - RNA, 19 nt, Human
acaguauuacuucugcuac

SEQ ID NO: 2888160 - RNA, 17 nt, Human
acaguauuacuucugcu

SEQ ID NO: 2888161 - RNA, 16 nt, Human
acaguauuacuucugc

SEQ ID NO: 2888162 - RNA, 15 nt, Human
acaguauuacuucug

SEQ ID NO: 2888163 - RNA, 19 nt, Human
acaguaacccaaaccucaa

SEQ ID NO: 2888164 - RNA, 16 nt, Human
acaguauuuauuuugu

SEQ ID NO: 2888165 - RNA, 18 nt, Human
acaguauuuauuuuguaa

SEQ ID NO: 2888166 - RNA, 15 nt, Human
acaguauuucauugc

SEQ ID NO: 2888167 - RNA, 12 nt, Human
acaguauuucca

SEQ ID NO: 2888168 - RNA, 13 nt, Human
acagucaaaauaa

SEQ ID NO: 2888169 - RNA, 14 nt, Human
acagucaaaauaau

SEQ ID NO: 2888170 - RNA, 16 nt, Human
acagucaaaauaauuc

SEQ ID NO: 2888171 - RNA, 19 nt, Human
acagucaaaauaauucuaa

SEQ ID NO: 2888172 - RNA, 15 nt, Human
acagucaacaagccu

SEQ ID NO: 2888173 - RNA, 17 nt, Human
acagucaaccaacccca

SEQ ID NO: 2888174 - RNA, 12 nt, Human
uaucaccuggcu

SEQ ID NO: 2888175 - RNA, 18 nt, Human
uaucaccuggcuuguuua

SEQ ID NO: 2888176 - RNA, 19 nt, Human
uaucaccuggcuuguuuau

SEQ ID NO: 2888177 - RNA, 22 nt, Human
uaucaauaucuaauauauauga

SEQ ID NO: 2888178 - RNA, 18 nt, Human
uaucaauaucuaauauau

SEQ ID NO: 2888179 - RNA, 21 nt, Human
uaucaauaucuaauauauaug

SEQ ID NO: 2888180 - RNA, 17 nt, Human
uaucaauaucuaauaua

SEQ ID NO: 2888181 - RNA, 14 nt, Human
uaucaauaucuaau

SEQ ID NO: 2888182 - RNA, 17 nt, Human
uaucaagucaaucauuu

SEQ ID NO: 2888183 - RNA, 20 nt, Human
uaucaagucaaucauuucuc

SEQ ID NO: 2888184 - RNA, 17 nt, Human
uaucacacuucugugag

SEQ ID NO: 2888185 - RNA, 13 nt, Human
uaucacacuucug

SEQ ID NO: 2888186 - RNA, 20 nt, Human
acagacucaaaugcucagac

SEQ ID NO: 2888187 - RNA, 16 nt, Human
acagacagacacacac

SEQ ID NO: 2888188 - RNA, 22 nt, Human
acagacucgauucauauugaau

SEQ ID NO: 2888189 - RNA, 15 nt, Human
acagacucauccuga

SEQ ID NO: 2888190 - RNA, 18 nt, Human
acagacucauccugaaca

SEQ ID NO: 2888191 - RNA, 23 nt, Human
acagacucauccugaacagcaug

SEQ ID NO: 2888192 - RNA, 14 nt, Human
acagacuggaagca

SEQ ID NO: 2888193 - RNA, 23 nt, Human
acagacugcgauuugucccaggu

SEQ ID NO: 2888194 - RNA, 11 nt, Human
acagacugcaa

SEQ ID NO: 2888195 - RNA, 23 nt, Human
acagacugcaagaggcuccuguc

SEQ ID NO: 2888196 - RNA, 17 nt, Human
uauauugaagacaauuu

SEQ ID NO: 2888197 - RNA, 18 nt, Human
uauauugaagacaauuug

SEQ ID NO: 2888198 - RNA, 20 nt, Human
uauauugaagacaauuugau

SEQ ID NO: 2888199 - RNA, 14 nt, Human
uauauugaaaaaaa

SEQ ID NO: 2888200 - RNA, 18 nt, Human
uauauugaaauuuauuua

SEQ ID NO: 2888201 - RNA, 22 nt, Human
uauauucuggccagacucgaug

SEQ ID NO: 2888202 - RNA, 15 nt, Human
acacuccccgaaguc

SEQ ID NO: 2888203 - RNA, 23 nt, Human
acagacacaggcccggcuccagg

SEQ ID NO: 2888204 - RNA, 23 nt, Human
acacuccuagagaacgcagcccu

SEQ ID NO: 2888205 - RNA, 14 nt, Human
acacuccuagagaa

SEQ ID NO: 2888206 - RNA, 20 nt, Human
acacuccuagagaacgcagc

SEQ ID NO: 2888207 - RNA, 13 nt, Human
acagacagcccuc

SEQ ID NO: 2888208 - RNA, 18 nt, Human
acagagccgagcaauauu

SEQ ID NO: 2888209 - RNA, 17 nt, Human
acagagccucgcucugu

SEQ ID NO: 2888210 - RNA, 24 nt, Human
acagagagggagagcagagaaaga

SEQ ID NO: 2888211 - RNA, 21 nt, Human
acagagagggcaccaucacaa

SEQ ID NO: 2888212 - RNA, 21 nt, Human
acagagugagacucugucuca

SEQ ID NO: 2888213 - RNA, 21 nt, Human
acagagcgagagucugucuca

SEQ ID NO: 2888214 - RNA, 22 nt, Human
acagagcguggcugugcucuca

SEQ ID NO: 2888215 - RNA, 13 nt, Human
acagaguguagcc

SEQ ID NO: 2888216 - RNA, 20 nt, Human
acagaguguagccagguccc

SEQ ID NO: 2888217 - RNA, 16 nt, Human
acagagugcuuuucug

SEQ ID NO: 2888218 - RNA, 22 nt, Human
acagacuggaagcacagcuuca

SEQ ID NO: 2888219 - RNA, 15 nt, Human
acagacuguuaauua

SEQ ID NO: 2888220 - RNA, 21 nt, Human
uaucuccugacagaaggugcc

SEQ ID NO: 2888221 - RNA, 14 nt, Human
uaucuccugacaga

SEQ ID NO: 2888222 - RNA, 13 nt, Human
uaucuccugacag

SEQ ID NO: 2888223 - RNA, 16 nt, Human
uaucuccuagggcuau

SEQ ID NO: 2888224 - RNA, 11 nt, Human
uaucuccugac

SEQ ID NO: 2888225 - RNA, 13 nt, Human
acagacuucugaa

SEQ ID NO: 2888226 - RNA, 14 nt, Human
acagacuucugaaa

SEQ ID NO: 2888227 - RNA, 14 nt, Human
acagagaccuccug

SEQ ID NO: 2888228 - RNA, 11 nt, Human
acagagaccua

SEQ ID NO: 2888229 - RNA, 19 nt, Human
acagagaccucccuguuca

SEQ ID NO: 2888230 - RNA, 17 nt, Human
uaucccaacagucaugu

SEQ ID NO: 2888231 - RNA, 19 nt, Human
uaucccaacagucauguuu

SEQ ID NO: 2888232 - RNA, 22 nt, Human
uauccauauugagucaaauggu

SEQ ID NO: 2888233 - RNA, 23 nt, Human
uaucagaagaccacaaaaauuga

SEQ ID NO: 2888234 - RNA, 15 nt, Human
uaucagaagagaggg

SEQ ID NO: 2888235 - RNA, 16 nt, Human
uaucagaagagagggg

SEQ ID NO: 2888236 - RNA, 14 nt, Human
uaucagaagaccac

SEQ ID NO: 2888237 - RNA, 14 nt, Human
uaucacuuuuugaa

SEQ ID NO: 2888238 - RNA, 15 nt, Human
uaucacuuuuugaac

SEQ ID NO: 2888239 - RNA, 16 nt, Human
uaucacuuuuugaacu

SEQ ID NO: 2888240 - RNA, 17 nt, Human
uaucacuuuuugaacua

SEQ ID NO: 2888241 - RNA, 18 nt, Human
uaucacuuuuugaacuaa

SEQ ID NO: 2888242 - RNA, 20 nt, Human
uaucacuuuuugaacuaaga

SEQ ID NO: 2888243 - RNA, 22 nt, Human
uaucacuuuuugaacuaagaaa

SEQ ID NO: 2888244 - RNA, 22 nt, Human
uauccaugacaggccugaagau

SEQ ID NO: 2888245 - RNA, 16 nt, Human
uauccaugcaccaaac

SEQ ID NO: 2888246 - RNA, 21 nt, Human
uaucagaagaccacaaaaauu

SEQ ID NO: 2888247 - RNA, 15 nt, Human
uauccauguacuugu

SEQ ID NO: 2888248 - RNA, 20 nt, Human
uauccauguacuuguuugca

SEQ ID NO: 2888249 - RNA, 22 nt, Human
uauggcucugcaccccucugcc

SEQ ID NO: 2888250 - RNA, 16 nt, Human
uauggcugcaguccuc

SEQ ID NO: 2888251 - RNA, 15 nt, Human
uaugggagccccagg

SEQ ID NO: 2888252 - RNA, 15 nt, Human
uaugggcauugacaa

SEQ ID NO: 2888253 - RNA, 16 nt, Human
uaugggcauugacaaa

SEQ ID NO: 2888254 - RNA, 16 nt, Human
uaugggagccccaggg

SEQ ID NO: 2888255 - RNA, 16 nt, Human
uaugggagagugucaa

SEQ ID NO: 2888256 - RNA, 22 nt, Human
uaugggagagugucaaccagac

SEQ ID NO: 2888257 - RNA, 14 nt, Human
acagccuggcacag

SEQ ID NO: 2888258 - RNA, 15 nt, Human
acagccuggcacagg

SEQ ID NO: 2888259 - RNA, 18 nt, Human
acagccugggccccagcu

SEQ ID NO: 2888260 - RNA, 15 nt, Human
acagccugggcccca

SEQ ID NO: 2888261 - RNA, 12 nt, Human
acagccugggcc

SEQ ID NO: 2888262 - RNA, 12 nt, Human
acagccuggcac

SEQ ID NO: 2888263 - RNA, 23 nt, Human
uauggggagaggaacuccuuggc

SEQ ID NO: 2888264 - RNA, 19 nt, Human
acagcgaaguagcuugcuc

SEQ ID NO: 2888265 - RNA, 21 nt, Human
acagcucagcuuuuugucuuu

SEQ ID NO: 2888266 - RNA, 20 nt, Human
acagcuaaucagcauucuca

SEQ ID NO: 2888267 - RNA, 19 nt, Human
acagcucaggaggcgcccu

SEQ ID NO: 2888268 - RNA, 14 nt, Human
acagcucaggaggc

SEQ ID NO: 2888269 - RNA, 23 nt, Human
uauggccucagcugccucacuuc

SEQ ID NO: 2888270 - RNA, 19 nt, Human
uauggccucagcugccuca

SEQ ID NO: 2888271 - RNA, 12 nt, Human
uauggccucagc

SEQ ID NO: 2888272 - RNA, 14 nt, Human
uaugcucuuuuguu

SEQ ID NO: 2888273 - RNA, 16 nt, Human
uaugcucuuuuuuacu

SEQ ID NO: 2888274 - RNA, 20 nt, Human
uaugcucuuuuuuacucauu

SEQ ID NO: 2888275 - RNA, 15 nt, Human
uaugaucgcgccacu

SEQ ID NO: 2888276 - RNA, 15 nt, Human
uaugaucccagcacu

SEQ ID NO: 2888277 - RNA, 17 nt, Human
uaugauguaaucucucu

SEQ ID NO: 2888278 - RNA, 22 nt, Human
uaugauguaaucucucugcagc

SEQ ID NO: 2888279 - RNA, 13 nt, Human
uaugaucaguguu

SEQ ID NO: 2888280 - RNA, 14 nt, Human
uaugaucaguguug

SEQ ID NO: 2888281 - RNA, 17 nt, Human
uaugaucaguguuguug

SEQ ID NO: 2888282 - RNA, 15 nt, Human
uaugaucuguuuugu

SEQ ID NO: 2888283 - RNA, 20 nt, Human
uaugaucuguuuuguaucuu

SEQ ID NO: 2888284 - RNA, 22 nt, Human
uaugaucuugaguauaagaaau

SEQ ID NO: 2888285 - RNA, 21 nt, Human
uaugaugaaaaccuacauauu

SEQ ID NO: 2888286 - RNA, 21 nt, Human
uaugaugacucccuuaaaaua

SEQ ID NO: 2888287 - RNA, 15 nt, Human
uaugauguguuguga

SEQ ID NO: 2888288 - RNA, 17 nt, Human
uaugauguguugugaua

SEQ ID NO: 2888289 - RNA, 18 nt, Human
uaugauguguugugauag

SEQ ID NO: 2888290 - RNA, 21 nt, Human
uaugauggaagacaggaaagu

SEQ ID NO: 2888291 - RNA, 22 nt, Human
uaugaugauacaagauuagaag

SEQ ID NO: 2888292 - RNA, 22 nt, Human
uaugaugaugaaaauuuuacca

SEQ ID NO: 2888293 - RNA, 15 nt, Human
uaugauaauagauuc

SEQ ID NO: 2888294 - RNA, 23 nt, Human
uaugaucacggcucacugcagcc

SEQ ID NO: 2888295 - RNA, 21 nt, Human
uaugaucacggcucacugcag

SEQ ID NO: 2888296 - RNA, 14 nt, Human
uaugaucacggcuc

SEQ ID NO: 2888297 - RNA, 23 nt, Human
uaugaguuuuugauagcuuuauu

SEQ ID NO: 2888298 - RNA, 22 nt, Human
uaugaguuuuugauagcuuuau

SEQ ID NO: 2888299 - RNA, 21 nt, Human
uaugaguuuuugauagcuuua

SEQ ID NO: 2888300 - RNA, 14 nt, Human
uaugaguauacaau

SEQ ID NO: 2888301 - RNA, 15 nt, Human
uaugaguauacaaua

SEQ ID NO: 2888302 - RNA, 16 nt, Human
uaugaguauacaauau

SEQ ID NO: 2888303 - RNA, 20 nt, Human
uaugaguauacaauauauaa

SEQ ID NO: 2888304 - RNA, 23 nt, Human
uaugaguauacaauauauaaaaa

SEQ ID NO: 2888305 - RNA, 18 nt, Human
uaugaguaacuauuauua

SEQ ID NO: 2888306 - RNA, 16 nt, Human
uaugaguacaaaugcc

SEQ ID NO: 2888307 - RNA, 17 nt, Human
uaugaguacaaaugccu

SEQ ID NO: 2888308 - RNA, 20 nt, Human
uaugaguacaaaugccuuaa

SEQ ID NO: 2888309 - RNA, 15 nt, Human
uaugagggaaaauga

SEQ ID NO: 2888310 - RNA, 16 nt, Human
uaugagucuagauguu

SEQ ID NO: 2888311 - RNA, 18 nt, Human
uaugaguggaaaaagcca

SEQ ID NO: 2888312 - RNA, 14 nt, Human
uaugagucuagaug

SEQ ID NO: 2888313 - RNA, 18 nt, Human
uaugagcuuccuucugug

SEQ ID NO: 2888314 - RNA, 19 nt, Human
uaugaggcaaccugauugu

SEQ ID NO: 2888315 - RNA, 22 nt, Human
uaugaggcaaccugauuguaaa

SEQ ID NO: 2888316 - RNA, 21 nt, Human
uaugagcuuccuucugugaaa

SEQ ID NO: 2888317 - RNA, 15 nt, Human
uaugagcuuccaagg

SEQ ID NO: 2888318 - RNA, 22 nt, Human
uaucuugaggugguaguaaaac

SEQ ID NO: 2888319 - RNA, 18 nt, Human
uaugagcuugcucauuaa

SEQ ID NO: 2888320 - RNA, 17 nt, Human
uaugaggaauaauuauu

SEQ ID NO: 2888321 - RNA, 23 nt, Human
uaugaggacuugugucucugugc

SEQ ID NO: 2888322 - RNA, 13 nt, Human
uaugaggaaaggu

SEQ ID NO: 2888323 - RNA, 17 nt, Human
uaugaggacuugugucu

SEQ ID NO: 2888324 - RNA, 11 nt, Human
acagcagccug

SEQ ID NO: 2888325 - RNA, 13 nt, Human
acagcagccugcu

SEQ ID NO: 2888326 - RNA, 18 nt, Human
acagcagccugcuuccca

SEQ ID NO: 2888327 - RNA, 19 nt, Human
acagcagccugcuucccac

SEQ ID NO: 2888328 - RNA, 22 nt, Human
acagauaacauuagguuguccu

SEQ ID NO: 2888329 - RNA, 15 nt, Human
acagcagccuccaac

SEQ ID NO: 2888330 - RNA, 18 nt, Human
acagcagccccugcacaa

SEQ ID NO: 2888331 - RNA, 12 nt, Human
acagcagcuuca

SEQ ID NO: 2888332 - RNA, 22 nt, Human
acagcagcuucaccagagcauu

SEQ ID NO: 2888333 - RNA, 12 nt, Human
acagcaggcagc

SEQ ID NO: 2888334 - RNA, 16 nt, Human
acagcaggcagcgcca

SEQ ID NO: 2888335 - RNA, 13 nt, Human
acagcagcuucac

SEQ ID NO: 2888336 - RNA, 16 nt, Human
acagcagcuucaccag

SEQ ID NO: 2888337 - RNA, 17 nt, Human
acagcagcuucaccaga

SEQ ID NO: 2888338 - RNA, 18 nt, Human
acagcagcuucaccagag

SEQ ID NO: 2888339 - RNA, 18 nt, Human
acagaguuuucacucuua

SEQ ID NO: 2888340 - RNA, 18 nt, Human
acagaguguggacucugg

SEQ ID NO: 2888341 - RNA, 20 nt, Human
acagaguuuucacucuuauu

SEQ ID NO: 2888342 - RNA, 13 nt, Human
acagauaaaaagu

SEQ ID NO: 2888343 - RNA, 22 nt, Human
acagauaaaaaguggaauuucu

SEQ ID NO: 2888344 - RNA, 23 nt, Human
acagccuccucugucugcccuuc

SEQ ID NO: 2888345 - RNA, 12 nt, Human
acagccucuauc

SEQ ID NO: 2888346 - RNA, 12 nt, Human
acagccucugac

SEQ ID NO: 2888347 - RNA, 16 nt, Human
acagccucugaccccu

SEQ ID NO: 2888348 - RNA, 16 nt, Human
acagccccagagcagg

SEQ ID NO: 2888349 - RNA, 12 nt, Human
acagccuccucu

SEQ ID NO: 2888350 - RNA, 13 nt, Human
acagccuccucug

SEQ ID NO: 2888351 - RNA, 15 nt, Human
acagccuccucuguc

SEQ ID NO: 2888352 - RNA, 17 nt, Human
acagccuccucugucug

SEQ ID NO: 2888353 - RNA, 19 nt, Human
acagccuccucugucugcc

SEQ ID NO: 2888354 - RNA, 20 nt, Human
acagccuccucugucugccc

SEQ ID NO: 2888355 - RNA, 22 nt, Human
acagccuccucugucugcccuu

SEQ ID NO: 2888356 - RNA, 16 nt, Human
acagccucccaccccc

SEQ ID NO: 2888357 - RNA, 15 nt, Human
acagccucccacccc

SEQ ID NO: 2888358 - RNA, 13 nt, Human
acagccccagagc

SEQ ID NO: 2888359 - RNA, 14 nt, Human
acagccccagagca

SEQ ID NO: 2888360 - RNA, 15 nt, Human
acagccccagagcag

SEQ ID NO: 2888361 - RNA, 14 nt, Human
acagccucacuugg

SEQ ID NO: 2888362 - RNA, 22 nt, Human
acagccucacuuggucugccag

SEQ ID NO: 2888363 - RNA, 23 nt, Human
acagccucacuuggucugccagg

SEQ ID NO: 2888364 - RNA, 20 nt, Human
uauagccuaggugacagagu

SEQ ID NO: 2888365 - RNA, 16 nt, Human
uauagcaaaacuuuua

SEQ ID NO: 2888366 - RNA, 19 nt, Human
uauagcaaaacuuuuaaac

SEQ ID NO: 2888367 - RNA, 20 nt, Human
uauagcaaaacuuuuaaacu

SEQ ID NO: 2888368 - RNA, 21 nt, Human
uauagcaaaacuuuuaaacua

SEQ ID NO: 2888369 - RNA, 22 nt, Human
uauagcaaaacuuuuaaacuac

SEQ ID NO: 2888370 - RNA, 23 nt, Human
uauagcaaaacuuuuaaacuaca

SEQ ID NO: 2888371 - RNA, 20 nt, Human
uauagccuauggcagaaaaa

SEQ ID NO: 2888372 - RNA, 19 nt, Human
uauagccuauggcagaaaa

SEQ ID NO: 2888373 - RNA, 21 nt, Human
uauagccuauggcagaaaaaa

SEQ ID NO: 2888374 - RNA, 14 nt, Human
uauagcuaaguaca

SEQ ID NO: 2888375 - RNA, 22 nt, Human
uauagcuacaggaagcacccca

SEQ ID NO: 2888376 - RNA, 16 nt, Human
uauagcuacaggaagc

SEQ ID NO: 2888377 - RNA, 11 nt, Human
uauagcuauua

SEQ ID NO: 2888378 - RNA, 14 nt, Human
uauagcuauuacug

SEQ ID NO: 2888379 - RNA, 22 nt, Human
uauagcuauuacugucugguuu

SEQ ID NO: 2888380 - RNA, 15 nt, Human
uauagguugugcaaa

SEQ ID NO: 2888381 - RNA, 22 nt, Human
uauagguugugcaaauuaacag

SEQ ID NO: 2888382 - RNA, 10 nt, Human
uauauauaaa

SEQ ID NO: 2888383 - RNA, 15 nt, Human
uauauauaagaaaga

SEQ ID NO: 2888384 - RNA, 21 nt, Human
uauagguguugguuuuggggg

SEQ ID NO: 2888385 - RNA, 12 nt, Human
uauauauaaaga

SEQ ID NO: 2888386 - RNA, 14 nt, Human
uauauauaaagaau

SEQ ID NO: 2888387 - RNA, 13 nt, Human
uauauauaaagua

SEQ ID NO: 2888388 - RNA, 15 nt, Human
uauauauaaaguaua

SEQ ID NO: 2888389 - RNA, 14 nt, Human
uauauauacauaug

SEQ ID NO: 2888390 - RNA, 15 nt, Human
uauauauacauaugu

SEQ ID NO: 2888391 - RNA, 16 nt, Human
uauauauacauaugua

SEQ ID NO: 2888392 - RNA, 18 nt, Human
uauauauacauauguaga

SEQ ID NO: 2888393 - RNA, 15 nt, Human
uauauauagaaauau

SEQ ID NO: 2888394 - RNA, 13 nt, Human
uauauauagaauc

SEQ ID NO: 2888395 - RNA, 12 nt, Human
uauauauagaau

SEQ ID NO: 2888396 - RNA, 12 nt, Human
uauauauacaua

SEQ ID NO: 2888397 - RNA, 14 nt, Human
uauauauacauaca

SEQ ID NO: 2888398 - RNA, 22 nt, Human
uauauauacauacacuuguaua

SEQ ID NO: 2888399 - RNA, 13 nt, Human
uauauauacauau

SEQ ID NO: 2888400 - RNA, 15 nt, Human
uauauauacacacac

SEQ ID NO: 2888401 - RNA, 16 nt, Human
uauauauacacacaca

SEQ ID NO: 2888402 - RNA, 13 nt, Human
uauauauacagua

SEQ ID NO: 2888403 - RNA, 11 nt, Human
uauauauacau

SEQ ID NO: 2888404 - RNA, 21 nt, Human
acacuccagugccagcaauga

SEQ ID NO: 2888405 - RNA, 16 nt, Human
acacucccacccaguc

SEQ ID NO: 2888406 - RNA, 22 nt, Human
acacucccacccagucucugcu

SEQ ID NO: 2888407 - RNA, 14 nt, Human
acacuccagugcca

SEQ ID NO: 2888408 - RNA, 16 nt, Human
acacuccagugccagc

SEQ ID NO: 2888409 - RNA, 19 nt, Human
acacuccagugccagcaau

SEQ ID NO: 2888410 - RNA, 16 nt, Human
uauauccuuucuaaca

SEQ ID NO: 2888411 - RNA, 14 nt, Human
uauauccugugacu

SEQ ID NO: 2888412 - RNA, 15 nt, Human
uauauccugugacug

SEQ ID NO: 2888413 - RNA, 17 nt, Human
uauauccugugacuguc

SEQ ID NO: 2888414 - RNA, 18 nt, Human
uauauccugugacugucu

SEQ ID NO: 2888415 - RNA, 14 nt, Human
uauaucccagaaau

SEQ ID NO: 2888416 - RNA, 14 nt, Human
uauauccccugcua

SEQ ID NO: 2888417 - RNA, 20 nt, Human
uauaucaugcuuuaaagugu

SEQ ID NO: 2888418 - RNA, 18 nt, Human
uauaucauguaaagaaau

SEQ ID NO: 2888419 - RNA, 19 nt, Human
uauaucauguaaagaaaug

SEQ ID NO: 2888420 - RNA, 13 nt, Human
uauaucaguuuga

SEQ ID NO: 2888421 - RNA, 14 nt, Human
uauaucaguuugau

SEQ ID NO: 2888422 - RNA, 14 nt, Human
uauaucauauguau

SEQ ID NO: 2888423 - RNA, 15 nt, Human
uauaucauauguaua

SEQ ID NO: 2888424 - RNA, 15 nt, Human
uauaucaaaguauuu

SEQ ID NO: 2888425 - RNA, 22 nt, Human
uauaucauuggaacaacugaua

SEQ ID NO: 2888426 - RNA, 22 nt, Human
uauauaucauauugguauucac

SEQ ID NO: 2888427 - RNA, 13 nt, Human
uauauaucaguuu

SEQ ID NO: 2888428 - RNA, 14 nt, Human
uauauaucaguuug

SEQ ID NO: 2888429 - RNA, 15 nt, Human
uauauaucaguuuga

SEQ ID NO: 2888430 - RNA, 16 nt, Human
uauauaucaguuugau

SEQ ID NO: 2888431 - RNA, 17 nt, Human
uauauaucaguuugauc

SEQ ID NO: 2888432 - RNA, 18 nt, Human
uauaucagaaaagggaag

SEQ ID NO: 2888433 - RNA, 22 nt, Human
uauaucaacagauaguuguguu

SEQ ID NO: 2888434 - RNA, 13 nt, Human
uauaucagaaaag

SEQ ID NO: 2888435 - RNA, 15 nt, Human
uauauauauauacuu

SEQ ID NO: 2888436 - RNA, 15 nt, Human
uauauauauauaaag

SEQ ID NO: 2888437 - RNA, 13 nt, Human
uauauauauauaa

SEQ ID NO: 2888438 - RNA, 14 nt, Human
uauauauauauaaa

SEQ ID NO: 2888439 - RNA, 14 nt, Human
uauauauauauaua

SEQ ID NO: 2888440 - RNA, 15 nt, Human
uauauauauauauaa

SEQ ID NO: 2888441 - RNA, 15 nt, Human
uauauauauaucagu

SEQ ID NO: 2888442 - RNA, 15 nt, Human
uauauauauaauaua

SEQ ID NO: 2888443 - RNA, 15 nt, Human
uauauauauacacac

SEQ ID NO: 2888444 - RNA, 11 nt, Human
uauauauauau

SEQ ID NO: 2888445 - RNA, 14 nt, Human
uauauauauaaagu

SEQ ID NO: 2888446 - RNA, 14 nt, Human
uauauauauaaaua

SEQ ID NO: 2888447 - RNA, 11 nt, Human
uauauauauaa

SEQ ID NO: 2888448 - RNA, 12 nt, Human
uauauauauaaa

SEQ ID NO: 2888449 - RNA, 19 nt, Human
uauauauagugcuauauau

SEQ ID NO: 2888450 - RNA, 11 nt, Human
uauauauauca

SEQ ID NO: 2888451 - RNA, 13 nt, Human
uauauauaucagu

SEQ ID NO: 2888452 - RNA, 23 nt, Human
acaccucaguucccuuggccuca

SEQ ID NO: 2888453 - RNA, 22 nt, Human
acaccucaguucccuuggccuc

SEQ ID NO: 2888454 - RNA, 14 nt, Human
uauaacagauacau

SEQ ID NO: 2888455 - RNA, 16 nt, Human
uauaacagauacauuu

SEQ ID NO: 2888456 - RNA, 20 nt, Human
uauaacagauacauuucccu

SEQ ID NO: 2888457 - RNA, 17 nt, Human
uauaacauauguacaua

SEQ ID NO: 2888458 - RNA, 11 nt, Human
uauaacaugaa

SEQ ID NO: 2888459 - RNA, 14 nt, Human
uauaacaugaaaug

SEQ ID NO: 2888460 - RNA, 15 nt, Human
uauaacaugaaauga

SEQ ID NO: 2888461 - RNA, 20 nt, Human
uauaaccacaaagcacaguu

SEQ ID NO: 2888462 - RNA, 21 nt, Human
acaccuagcuuuauucuucag

SEQ ID NO: 2888463 - RNA, 18 nt, Human
acaccuagcuuuauucuu

SEQ ID NO: 2888464 - RNA, 22 nt, Human
acaccuagcuuuauucuucaga

SEQ ID NO: 2888465 - RNA, 17 nt, Human
acaccucacaccucacu

SEQ ID NO: 2888466 - RNA, 19 nt, Human
acaccucacaccucacucu

SEQ ID NO: 2888467 - RNA, 21 nt, Human
acaccucaguucccuuggccu

SEQ ID NO: 2888468 - RNA, 18 nt, Human
acaccucaguucccuugg

SEQ ID NO: 2888469 - RNA, 16 nt, Human
acaccucacucuuuau

SEQ ID NO: 2888470 - RNA, 18 nt, Human
acaccucacucuuuauag

SEQ ID NO: 2888471 - RNA, 16 nt, Human
uauaauuuucugaaag

SEQ ID NO: 2888472 - RNA, 19 nt, Human
uauaauuuucugaaaguua

SEQ ID NO: 2888473 - RNA, 16 nt, Human
uauaagcccacuguua

SEQ ID NO: 2888474 - RNA, 20 nt, Human
uauaagccaguguugccuaa

SEQ ID NO: 2888475 - RNA, 21 nt, Human
uauaagccaguguugccuaag

SEQ ID NO: 2888476 - RNA, 18 nt, Human
uauaagcauugaaauuau

SEQ ID NO: 2888477 - RNA, 19 nt, Human
uauaagcauugaaauuaua

SEQ ID NO: 2888478 - RNA, 17 nt, Human
uauaagaaaugcauaug

SEQ ID NO: 2888479 - RNA, 12 nt, Human
uauaagacucuc

SEQ ID NO: 2888480 - RNA, 16 nt, Human
uauaagagcaugaaau

SEQ ID NO: 2888481 - RNA, 14 nt, Human
uauaagauccuaga

SEQ ID NO: 2888482 - RNA, 18 nt, Human
uauaagauccuagauccu

SEQ ID NO: 2888483 - RNA, 19 nt, Human
uauaagauccuagauccua

SEQ ID NO: 2888484 - RNA, 21 nt, Human
uauaagauccuagauccuaag

SEQ ID NO: 2888485 - RNA, 15 nt, Human
uauaagcaaauuuca

SEQ ID NO: 2888486 - RNA, 22 nt, Human
uauaagcaaauuucaaaagaca

SEQ ID NO: 2888487 - RNA, 23 nt, Human
uauaagcaaauuucaaaagacau

SEQ ID NO: 2888488 - RNA, 15 nt, Human
uauaagcacugaaaa

SEQ ID NO: 2888489 - RNA, 18 nt, Human
uauaagcacugaaaaaca

SEQ ID NO: 2888490 - RNA, 12 nt, Human
uauagauucuaa

SEQ ID NO: 2888491 - RNA, 14 nt, Human
uauaccauuuccuc

SEQ ID NO: 2888492 - RNA, 18 nt, Human
uauaccauuuccucagcu

SEQ ID NO: 2888493 - RNA, 13 nt, Human
uauagauucuaaa

SEQ ID NO: 2888494 - RNA, 14 nt, Human
uauagauucuaaag

SEQ ID NO: 2888495 - RNA, 15 nt, Human
uauagauucuaaaga

SEQ ID NO: 2888496 - RNA, 17 nt, Human
uauagauucuaaagauu

SEQ ID NO: 2888497 - RNA, 22 nt, Human
uauacaguaacuuuauguguaa

SEQ ID NO: 2888498 - RNA, 16 nt, Human
uauacaguucaauaaa

SEQ ID NO: 2888499 - RNA, 20 nt, Human
uauacaguucaauaaacuua

SEQ ID NO: 2888500 - RNA, 16 nt, Human
uauacauuaguaaaug

SEQ ID NO: 2888501 - RNA, 19 nt, Human
uauacauuaguaaaugucu

SEQ ID NO: 2888502 - RNA, 20 nt, Human
uauacauuaguaaaugucuu

SEQ ID NO: 2888503 - RNA, 23 nt, Human
uauacauuaguaaaugucuuugu

SEQ ID NO: 2888504 - RNA, 15 nt, Human
uauacacauauaccu

SEQ ID NO: 2888505 - RNA, 17 nt, Human
uauacacauauaccuau

SEQ ID NO: 2888506 - RNA, 21 nt, Human
uauacaccauauacuguucuu

SEQ ID NO: 2888507 - RNA, 14 nt, Human
uauacagugauaua

SEQ ID NO: 2888508 - RNA, 20 nt, Human
uauacaguaacuuuaugugu

SEQ ID NO: 2888509 - RNA, 21 nt, Human
uauacaguaacuuuaugugua

SEQ ID NO: 2888510 - RNA, 16 nt, Human
uauacaguaacuuuau

SEQ ID NO: 2888511 - RNA, 18 nt, Human
uauacaguaacuuuaugu

SEQ ID NO: 2888512 - RNA, 19 nt, Human
uauacaguaacuuuaugug

SEQ ID NO: 2888513 - RNA, 16 nt, Human
uauaauuucgagauuu

SEQ ID NO: 2888514 - RNA, 20 nt, Human
uauaauuucgagauuuguag

SEQ ID NO: 2888515 - RNA, 21 nt, Human
uauaauuucgagauuuguagg

SEQ ID NO: 2888516 - RNA, 13 nt, Human
uauacacacacac

SEQ ID NO: 2888517 - RNA, 14 nt, Human
uauacacacacaca

SEQ ID NO: 2888518 - RNA, 15 nt, Human
uauacacacacacac

SEQ ID NO: 2888519 - RNA, 21 nt, Human
uauacaacccuggcauuaugu

SEQ ID NO: 2888520 - RNA, 11 nt, Human
uauacacacac

SEQ ID NO: 2888521 - RNA, 12 nt, Human
uauacacacaca

SEQ ID NO: 2888522 - RNA, 22 nt, Human
uauacaacccuggcauuauguc

SEQ ID NO: 2888523 - RNA, 15 nt, Human
uauacaauaacauaa

SEQ ID NO: 2888524 - RNA, 13 nt, Human
uauacaauaaugg

SEQ ID NO: 2888525 - RNA, 15 nt, Human
uauacaauaauggaa

SEQ ID NO: 2888526 - RNA, 20 nt, Human
uauacaauaauggaaaaaaa

SEQ ID NO: 2888527 - RNA, 13 nt, Human
uauacaauauaua

SEQ ID NO: 2888528 - RNA, 14 nt, Human
uauacaauauauaa

SEQ ID NO: 2888529 - RNA, 15 nt, Human
uauacaauauauaaa

SEQ ID NO: 2888530 - RNA, 18 nt, Human
uauacaauauauaaaaau

SEQ ID NO: 2888531 - RNA, 19 nt, Human
uauacaauauauaaaaaua

SEQ ID NO: 2888532 - RNA, 22 nt, Human
uaguucucuugguguuaaaaca

SEQ ID NO: 2888533 - RNA, 16 nt, Human
uaguucuaggcacugu

SEQ ID NO: 2888534 - RNA, 15 nt, Human
uaguucguagcuuuc

SEQ ID NO: 2888535 - RNA, 13 nt, Human
uaguucuaagacu

SEQ ID NO: 2888536 - RNA, 14 nt, Human
uaguucuaagacuc

SEQ ID NO: 2888537 - RNA, 15 nt, Human
uaguucuaagacuca

SEQ ID NO: 2888538 - RNA, 11 nt, Human
uaguucuagac

SEQ ID NO: 2888539 - RNA, 12 nt, Human
uaguucuagaca

SEQ ID NO: 2888540 - RNA, 23 nt, Human
uaguucuagacauggagguucua

SEQ ID NO: 2888541 - RNA, 15 nt, Human
uaguucuaggcacug

SEQ ID NO: 2888542 - RNA, 14 nt, Human
uagugaucacagca

SEQ ID NO: 2888543 - RNA, 15 nt, Human
uagugaucacagcag

SEQ ID NO: 2888544 - RNA, 20 nt, Human
uagugaucacagcagcuucu

SEQ ID NO: 2888545 - RNA, 18 nt, Human
uagugagcagugagcaga

SEQ ID NO: 2888546 - RNA, 13 nt, Human
uagugagcccaga

SEQ ID NO: 2888547 - RNA, 12 nt, Human
uagugauauuuc

SEQ ID NO: 2888548 - RNA, 17 nt, Human
uagugauauuucucuag

SEQ ID NO: 2888549 - RNA, 15 nt, Human
uaguuauaguuucag

SEQ ID NO: 2888550 - RNA, 16 nt, Human
uaguucccucugcuca

SEQ ID NO: 2888551 - RNA, 18 nt, Human
uaguucccucugcucagc

SEQ ID NO: 2888552 - RNA, 19 nt, Human
uaguucccucugcucagcc

SEQ ID NO: 2888553 - RNA, 20 nt, Human
uaguucccucugcucagcca

SEQ ID NO: 2888554 - RNA, 14 nt, Human
uaguuccuaagaag

SEQ ID NO: 2888555 - RNA, 16 nt, Human
uaguuccuaagaagcu

SEQ ID NO: 2888556 - RNA, 19 nt, Human
uaguuccuaagaagcuucu

SEQ ID NO: 2888557 - RNA, 21 nt, Human
uaguuccuaagaagcuucuaa

SEQ ID NO: 2888558 - RNA, 20 nt, Human
uaguuaggauagcauuuuug

SEQ ID NO: 2888559 - RNA, 21 nt, Human
uaguuaggaugcucaguugcu

SEQ ID NO: 2888560 - RNA, 23 nt, Human
uaguuaggaaauaaaaccuuuca

SEQ ID NO: 2888561 - RNA, 15 nt, Human
uaguuaggauagcau

SEQ ID NO: 2888562 - RNA, 22 nt, Human
uaguuaggaaauaaaaccuuuc

SEQ ID NO: 2888563 - RNA, 21 nt, Human
uaguuaggaaauaaaaccuuu

SEQ ID NO: 2888564 - RNA, 18 nt, Human
uaguuaggaaauaaaacc

SEQ ID NO: 2888565 - RNA, 16 nt, Human
uaguuaggaaauaaaa

SEQ ID NO: 2888566 - RNA, 18 nt, Human
uagucugugugaagguga

SEQ ID NO: 2888567 - RNA, 12 nt, Human
uagucucuuuau

SEQ ID NO: 2888568 - RNA, 13 nt, Human
uagucucuuuauu

SEQ ID NO: 2888569 - RNA, 15 nt, Human
uagucucuuuauucc

SEQ ID NO: 2888570 - RNA, 18 nt, Human
uagucucuuuauuccuag

SEQ ID NO: 2888571 - RNA, 19 nt, Human
uagucucuuuauuccuagu

SEQ ID NO: 2888572 - RNA, 12 nt, Human
uagucugcucac

SEQ ID NO: 2888573 - RNA, 21 nt, Human
uaguccaaaaagcuccugggg

SEQ ID NO: 2888574 - RNA, 13 nt, Human
uaguccaaaauua

SEQ ID NO: 2888575 - RNA, 19 nt, Human
uagucagcuagaucauuug

SEQ ID NO: 2888576 - RNA, 11 nt, Human
uagucucaguu

SEQ ID NO: 2888577 - RNA, 19 nt, Human
uagucucaguuuguguguc

SEQ ID NO: 2888578 - RNA, 22 nt, Human
uagucucaguuugugugucuua

SEQ ID NO: 2888579 - RNA, 18 nt, Human
uagucauuccaaauauga

SEQ ID NO: 2888580 - RNA, 13 nt, Human
uagucauuuacua

SEQ ID NO: 2888581 - RNA, 14 nt, Human
uagucauuuacuaa

SEQ ID NO: 2888582 - RNA, 18 nt, Human
uagucauuuacuaaacau

SEQ ID NO: 2888583 - RNA, 19 nt, Human
uagucauuuacuaaacaua

SEQ ID NO: 2888584 - RNA, 13 nt, Human
uagucauuuauuu

SEQ ID NO: 2888585 - RNA, 19 nt, Human
uagucauuuauuuuaaaaa

SEQ ID NO: 2888586 - RNA, 14 nt, Human
acaaggacacgcgc

SEQ ID NO: 2888587 - RNA, 22 nt, Human
acaaggacacgcgccccccucc

SEQ ID NO: 2888588 - RNA, 17 nt, Human
acaaggaaggugguggg

SEQ ID NO: 2888589 - RNA, 22 nt, Human
acaaggaaauacccuucuuuua

SEQ ID NO: 2888590 - RNA, 20 nt, Human
acacaucccuaaugugugcc

SEQ ID NO: 2888591 - RNA, 16 nt, Human
acacauccgccuuuug

SEQ ID NO: 2888592 - RNA, 18 nt, Human
acacauccgccuuuugua

SEQ ID NO: 2888593 - RNA, 19 nt, Human
acacauccgccuuuuguau

SEQ ID NO: 2888594 - RNA, 21 nt, Human
acacauccgccuuuuguauac

SEQ ID NO: 2888595 - RNA, 22 nt, Human
acacauccgccuuuuguauaca

SEQ ID NO: 2888596 - RNA, 23 nt, Human
acacauccgccuuuuguauacau

SEQ ID NO: 2888597 - RNA, 14 nt, Human
acacauccacccca

SEQ ID NO: 2888598 - RNA, 17 nt, Human
acacauccagacaucau

SEQ ID NO: 2888599 - RNA, 20 nt, Human
acacauccagacaucaugaa

SEQ ID NO: 2888600 - RNA, 15 nt, Human
acacaucccagccca

SEQ ID NO: 2888601 - RNA, 16 nt, Human
acacaucccagcccaa

SEQ ID NO: 2888602 - RNA, 11 nt, Human
uauaaaauaau

SEQ ID NO: 2888603 - RNA, 12 nt, Human
uauaaaauaaug

SEQ ID NO: 2888604 - RNA, 17 nt, Human
acacaucccuaaugugu

SEQ ID NO: 2888605 - RNA, 19 nt, Human
acacaucccuaaugugugc

SEQ ID NO: 2888606 - RNA, 21 nt, Human
uaguuuuauuuuauguuuaga

SEQ ID NO: 2888607 - RNA, 13 nt, Human
uaguuuucuuguu

SEQ ID NO: 2888608 - RNA, 13 nt, Human
acacaucuuuccu

SEQ ID NO: 2888609 - RNA, 21 nt, Human
acacccagcccacuucugcca

SEQ ID NO: 2888610 - RNA, 20 nt, Human
acacccagcccacuucugcc

SEQ ID NO: 2888611 - RNA, 19 nt, Human
acacccagcccacuucugc

SEQ ID NO: 2888612 - RNA, 21 nt, Human
acaccaggcuugccugcaggc

SEQ ID NO: 2888613 - RNA, 17 nt, Human
acaccagucacaugacc

SEQ ID NO: 2888614 - RNA, 15 nt, Human
acaccuagcaucuca

SEQ ID NO: 2888615 - RNA, 21 nt, Human
acaccuacucuaucagagaaa

SEQ ID NO: 2888616 - RNA, 21 nt, Human
acaccuaaagguguauuuaaa

SEQ ID NO: 2888617 - RNA, 22 nt, Human
acaccuaaagguguauuuaaac

SEQ ID NO: 2888618 - RNA, 13 nt, Human
acacccuguacug

SEQ ID NO: 2888619 - RNA, 16 nt, Human
acaccgggccuggaga

SEQ ID NO: 2888620 - RNA, 22 nt, Human
acacccuguacuguucuguguc

SEQ ID NO: 2888621 - RNA, 19 nt, Human
acaccgggguggugggaac

SEQ ID NO: 2888622 - RNA, 14 nt, Human
uccucaaacaacac

SEQ ID NO: 2888623 - RNA, 23 nt, Human
acucuuaucucagucaugcauaa

SEQ ID NO: 2888624 - RNA, 14 nt, Human
uccucaaacacugc

SEQ ID NO: 2888625 - RNA, 15 nt, Human
uccucaaacacugca

SEQ ID NO: 2888626 - RNA, 19 nt, Human
acucuuauugcccacgcug

SEQ ID NO: 2888627 - RNA, 16 nt, Human
acucuuauugcccacg

SEQ ID NO: 2888628 - RNA, 16 nt, Human
uccucaaacacugcag

SEQ ID NO: 2888629 - RNA, 20 nt, Human
uccucacaacauggugucug

SEQ ID NO: 2888630 - RNA, 19 nt, Human
uccucacacacccugaggu

SEQ ID NO: 2888631 - RNA, 15 nt, Human
uccucacacuuacug

SEQ ID NO: 2888632 - RNA, 16 nt, Human
uccucacacuuacugu

SEQ ID NO: 2888633 - RNA, 23 nt, Human
uccucacacuuacuguaagacau

SEQ ID NO: 2888634 - RNA, 14 nt, Human
uccucacaguccca

SEQ ID NO: 2888635 - RNA, 19 nt, Human
uccucacagucccacugug

SEQ ID NO: 2888636 - RNA, 12 nt, Human
uccucacauagc

SEQ ID NO: 2888637 - RNA, 19 nt, Human
uccucagaucauccagaag

SEQ ID NO: 2888638 - RNA, 13 nt, Human
uccucagaugcuc

SEQ ID NO: 2888639 - RNA, 19 nt, Human
uccucagcauuucuuuucu

SEQ ID NO: 2888640 - RNA, 20 nt, Human
uccucagagaauuucuacca

SEQ ID NO: 2888641 - RNA, 17 nt, Human
uccucagagaauuucua

SEQ ID NO: 2888642 - RNA, 15 nt, Human
uccucacugcccgca

SEQ ID NO: 2888643 - RNA, 19 nt, Human
uccucacugcccuccccag

SEQ ID NO: 2888644 - RNA, 13 nt, Human
uccucacugcucc

SEQ ID NO: 2888645 - RNA, 15 nt, Human
uccucacugcucccu

SEQ ID NO: 2888646 - RNA, 17 nt, Human
uccucacugcucccuga

SEQ ID NO: 2888647 - RNA, 20 nt, Human
uccucacugcucccugaagc

SEQ ID NO: 2888648 - RNA, 21 nt, Human
uccucacugcucccugaagcc

SEQ ID NO: 2888649 - RNA, 22 nt, Human
uccucacuggccaucccucgug

SEQ ID NO: 2888650 - RNA, 23 nt, Human
uccucacugcucccugaagccag

SEQ ID NO: 2888651 - RNA, 13 nt, Human
uccucacuggcca

SEQ ID NO: 2888652 - RNA, 17 nt, Human
uccucacuggccauccc

SEQ ID NO: 2888653 - RNA, 18 nt, Human
uccucacuggccaucccu

SEQ ID NO: 2888654 - RNA, 17 nt, Human
uccucaccccuguccuc

SEQ ID NO: 2888655 - RNA, 19 nt, Human
uccucaccccuguccucac

SEQ ID NO: 2888656 - RNA, 12 nt, Human
uccucaccccug

SEQ ID NO: 2888657 - RNA, 13 nt, Human
uccucaccccugu

SEQ ID NO: 2888658 - RNA, 14 nt, Human
uccucaccccuguc

SEQ ID NO: 2888659 - RNA, 15 nt, Human
uccucaccccugucc

SEQ ID NO: 2888660 - RNA, 14 nt, Human
uccucaccacaugc

SEQ ID NO: 2888661 - RNA, 20 nt, Human
uccucacccccagcuuugcu

SEQ ID NO: 2888662 - RNA, 16 nt, Human
uccucacccccagcuu

SEQ ID NO: 2888663 - RNA, 13 nt, Human
uccucacccccag

SEQ ID NO: 2888664 - RNA, 12 nt, Human
uccucuccccag

SEQ ID NO: 2888665 - RNA, 15 nt, Human
uccucuccacugccu

SEQ ID NO: 2888666 - RNA, 12 nt, Human
uccucuccacug

SEQ ID NO: 2888667 - RNA, 14 nt, Human
uccucucaguguuu

SEQ ID NO: 2888668 - RNA, 13 nt, Human
uccucuccacugc

SEQ ID NO: 2888669 - RNA, 14 nt, Human
uccucuccacugcc

SEQ ID NO: 2888670 - RNA, 22 nt, Human
uccucacugugguaaaugccac

SEQ ID NO: 2888671 - RNA, 16 nt, Human
uccucaguccauuuau

SEQ ID NO: 2888672 - RNA, 18 nt, Human
uccucaguccauuuauau

SEQ ID NO: 2888673 - RNA, 19 nt, Human
uccucaguccauuuauaua

SEQ ID NO: 2888674 - RNA, 21 nt, Human
uccucaguccauuuauauaug

SEQ ID NO: 2888675 - RNA, 23 nt, Human
uccucaguccauuuauauaugaa

SEQ ID NO: 2888676 - RNA, 16 nt, Human
uccuccccuccuccug

SEQ ID NO: 2888677 - RNA, 20 nt, Human
uccuccccuccuccuggacu

SEQ ID NO: 2888678 - RNA, 18 nt, Human
uccuccccuccuccugga

SEQ ID NO: 2888679 - RNA, 22 nt, Human
uccuccccuccuccuggacucc

SEQ ID NO: 2888680 - RNA, 13 nt, Human
acucuccaucuua

SEQ ID NO: 2888681 - RNA, 12 nt, Human
acucuccccaca

SEQ ID NO: 2888682 - RNA, 11 nt, Human
acucuccccac

SEQ ID NO: 2888683 - RNA, 10 nt, Human
acucucccca

SEQ ID NO: 2888684 - RNA, 15 nt, Human
acucuccccacacua

SEQ ID NO: 2888685 - RNA, 14 nt, Human
acucuccccacacu

SEQ ID NO: 2888686 - RNA, 22 nt, Human
acucggcuuuggagacuuucuu

SEQ ID NO: 2888687 - RNA, 16 nt, Human
acucgggaggcugagg

SEQ ID NO: 2888688 - RNA, 20 nt, Human
acucgggaggcugaggcaca

SEQ ID NO: 2888689 - RNA, 21 nt, Human
acucgggaggcugaggcacaa

SEQ ID NO: 2888690 - RNA, 20 nt, Human
acucgcuucccccauagcca

SEQ ID NO: 2888691 - RNA, 16 nt, Human
acucggcacccugcaa

SEQ ID NO: 2888692 - RNA, 19 nt, Human
uccuagggaaggguggugg

SEQ ID NO: 2888693 - RNA, 22 nt, Human
uccuaggcuccaccccauccag

SEQ ID NO: 2888694 - RNA, 13 nt, Human
uccuaggccacac

SEQ ID NO: 2888695 - RNA, 17 nt, Human
uccuagcacaugcuuca

SEQ ID NO: 2888696 - RNA, 19 nt, Human
uccuagcacaugcuucaau

SEQ ID NO: 2888697 - RNA, 20 nt, Human
uccuaggcuccaccccaucc

SEQ ID NO: 2888698 - RNA, 15 nt, Human
acucgcuucccccau

SEQ ID NO: 2888699 - RNA, 12 nt, Human
acucgcuucccc

SEQ ID NO: 2888700 - RNA, 17 nt, Human
acucgcuugcuagaagu

SEQ ID NO: 2888701 - RNA, 12 nt, Human
acucgcuuguaa

SEQ ID NO: 2888702 - RNA, 13 nt, Human
acucgcuuguaaa

SEQ ID NO: 2888703 - RNA, 14 nt, Human
acucgcuuguaaau

SEQ ID NO: 2888704 - RNA, 15 nt, Human
acucgcuuguaaaua

SEQ ID NO: 2888705 - RNA, 17 nt, Human
acucgcuuguaaauacc

SEQ ID NO: 2888706 - RNA, 18 nt, Human
acucgcuuguaaauacca

SEQ ID NO: 2888707 - RNA, 20 nt, Human
acucugaaacacacugaaag

SEQ ID NO: 2888708 - RNA, 13 nt, Human
acucucuucccuu

SEQ ID NO: 2888709 - RNA, 16 nt, Human
acucucuucccuuucc

SEQ ID NO: 2888710 - RNA, 20 nt, Human
acucucuucccuuuccccag

SEQ ID NO: 2888711 - RNA, 21 nt, Human
acucucuucccuuuccccagc

SEQ ID NO: 2888712 - RNA, 18 nt, Human
acucugaagccucuggga

SEQ ID NO: 2888713 - RNA, 19 nt, Human
acucugaagccucugggaa

SEQ ID NO: 2888714 - RNA, 13 nt, Human
acucugaacuuug

SEQ ID NO: 2888715 - RNA, 16 nt, Human
acucugaacuuuggag

SEQ ID NO: 2888716 - RNA, 17 nt, Human
acucugaacuuuggaga

SEQ ID NO: 2888717 - RNA, 14 nt, Human
acucugaagccucu

SEQ ID NO: 2888718 - RNA, 15 nt, Human
acucugaagccucug

SEQ ID NO: 2888719 - RNA, 16 nt, Human
acucugaagccucugg

SEQ ID NO: 2888720 - RNA, 17 nt, Human
acucugaagccucuggg

SEQ ID NO: 2888721 - RNA, 11 nt, Human
acucugcacau

SEQ ID NO: 2888722 - RNA, 13 nt, Human
acucugcacaugu

SEQ ID NO: 2888723 - RNA, 17 nt, Human
acucugcacaugucuug

SEQ ID NO: 2888724 - RNA, 12 nt, Human
acucuuaucuca

SEQ ID NO: 2888725 - RNA, 13 nt, Human
acucuuaucucag

SEQ ID NO: 2888726 - RNA, 22 nt, Human
acucuuaucucagucaugcaua

SEQ ID NO: 2888727 - RNA, 18 nt, Human
acucugcaucccagcacc

SEQ ID NO: 2888728 - RNA, 21 nt, Human
acucugcaucccagcaccugc

SEQ ID NO: 2888729 - RNA, 17 nt, Human
acucugcagacugcuag

SEQ ID NO: 2888730 - RNA, 24 nt, Human
acucugcagacugcuaguguucug

SEQ ID NO: 2888731 - RNA, 18 nt, Human
acucugcacaugucuugu

SEQ ID NO: 2888732 - RNA, 19 nt, Human
acucugcacaugucuugua

SEQ ID NO: 2888733 - RNA, 21 nt, Human
acucugcacaugucuuguaca

SEQ ID NO: 2888734 - RNA, 22 nt, Human
acucugcacaugucuuguacau

SEQ ID NO: 2888735 - RNA, 18 nt, Human
uccgugaaaacggagcug

SEQ ID NO: 2888736 - RNA, 16 nt, Human
uccguccucgauggga

SEQ ID NO: 2888737 - RNA, 17 nt, Human
uccgucagaaaguguaa

SEQ ID NO: 2888738 - RNA, 18 nt, Human
uccgucaacguuguacug

SEQ ID NO: 2888739 - RNA, 14 nt, Human
ucccuuugucuuuc

SEQ ID NO: 2888740 - RNA, 16 nt, Human
ucccuuugucuuucaa

SEQ ID NO: 2888741 - RNA, 17 nt, Human
ucccuuugucuuucaaa

SEQ ID NO: 2888742 - RNA, 18 nt, Human
ucccuuugucuuucaaac

SEQ ID NO: 2888743 - RNA, 18 nt, Human
ucccuuuuaaacacauuu

SEQ ID NO: 2888744 - RNA, 23 nt, Human
uccuagauccuaagggucgaaag

SEQ ID NO: 2888745 - RNA, 13 nt, Human
uccuagauccuaa

SEQ ID NO: 2888746 - RNA, 14 nt, Human
uccuagauccuaag

SEQ ID NO: 2888747 - RNA, 20 nt, Human
uccuagauuauaucaaagua

SEQ ID NO: 2888748 - RNA, 21 nt, Human
uccguuuauuauaaacuguau

SEQ ID NO: 2888749 - RNA, 15 nt, Human
uccuaaaacaaauag

SEQ ID NO: 2888750 - RNA, 22 nt, Human
uccuaaaacaaaagcucaucca

SEQ ID NO: 2888751 - RNA, 14 nt, Human
uccuaaaagcaaaa

SEQ ID NO: 2888752 - RNA, 16 nt, Human
uccuaaaagcaaaaua

SEQ ID NO: 2888753 - RNA, 22 nt, Human
uccuaaaagcaaaauaaaaacu

SEQ ID NO: 2888754 - RNA, 23 nt, Human
uccuaaaagcaaaauaaaaacua

SEQ ID NO: 2888755 - RNA, 23 nt, Human
uccuaaaauaagggcagagucac

SEQ ID NO: 2888756 - RNA, 17 nt, Human
uccuaaaauaagggcag

SEQ ID NO: 2888757 - RNA, 22 nt, Human
uccuaaaauaagggcagaguca

SEQ ID NO: 2888758 - RNA, 23 nt, Human
acuccugcacacgcuccuuccuc

SEQ ID NO: 2888759 - RNA, 12 nt, Human
ucccugguucug

SEQ ID NO: 2888760 - RNA, 16 nt, Human
ucccugguucugauga

SEQ ID NO: 2888761 - RNA, 17 nt, Human
ucccugguucugaugau

SEQ ID NO: 2888762 - RNA, 21 nt, Human
ucccuguuuaauauuuaaaca

SEQ ID NO: 2888763 - RNA, 22 nt, Human
ucccuguuuaauauuuaaacag

SEQ ID NO: 2888764 - RNA, 14 nt, Human
ucccuguuuaauau

SEQ ID NO: 2888765 - RNA, 15 nt, Human
ucccuguuuaauauu

SEQ ID NO: 2888766 - RNA, 16 nt, Human
ucccuguuuaauauuu

SEQ ID NO: 2888767 - RNA, 18 nt, Human
ucccuguuuaauauuuaa

SEQ ID NO: 2888768 - RNA, 18 nt, Human
ucccuguuggucgguggg

SEQ ID NO: 2888769 - RNA, 11 nt, Human
ucccuguuuaa

SEQ ID NO: 2888770 - RNA, 13 nt, Human
ucccuguuauuuu

SEQ ID NO: 2888771 - RNA, 15 nt, Human
ucccuguuauuuuca

SEQ ID NO: 2888772 - RNA, 16 nt, Human
ucccuguuauuuucaa

SEQ ID NO: 2888773 - RNA, 17 nt, Human
ucccuguuauuuucaag

SEQ ID NO: 2888774 - RNA, 21 nt, Human
ucccuguuauuuucaaguagc

SEQ ID NO: 2888775 - RNA, 23 nt, Human
ucccuguuauuuucaaguagcug

SEQ ID NO: 2888776 - RNA, 14 nt, Human
ucccuguucuuccu

SEQ ID NO: 2888777 - RNA, 15 nt, Human
ucccuguucuuccuc

SEQ ID NO: 2888778 - RNA, 17 nt, Human
ucccuguucuuccucca

SEQ ID NO: 2888779 - RNA, 18 nt, Human
ucccuguucuuccuccag

SEQ ID NO: 2888780 - RNA, 21 nt, Human
ucccuguucuuccuccagcug

SEQ ID NO: 2888781 - RNA, 11 nt, Human
ucccuucaacc

SEQ ID NO: 2888782 - RNA, 21 nt, Human
ucccuucaaccauuccccaug

SEQ ID NO: 2888783 - RNA, 19 nt, Human
ucccuugguggcaagagcc

SEQ ID NO: 2888784 - RNA, 21 nt, Human
ucccuuucacaaaauuuuauu

SEQ ID NO: 2888785 - RNA, 15 nt, Human
ucccuuuccccagca

SEQ ID NO: 2888786 - RNA, 16 nt, Human
ucccuuuccccagcau

SEQ ID NO: 2888787 - RNA, 13 nt, Human
ucccuugugugug

SEQ ID NO: 2888788 - RNA, 16 nt, Human
ucccuuguggcccucu

SEQ ID NO: 2888789 - RNA, 15 nt, Human
ucccuugugugugug

SEQ ID NO: 2888790 - RNA, 16 nt, Human
ucccucagugcccuca

SEQ ID NO: 2888791 - RNA, 15 nt, Human
ucccucaccuucuga

SEQ ID NO: 2888792 - RNA, 14 nt, Human
ucccucaccuucug

SEQ ID NO: 2888793 - RNA, 15 nt, Human
acucaucauaaaaua

SEQ ID NO: 2888794 - RNA, 14 nt, Human
acucaucauaaaau

SEQ ID NO: 2888795 - RNA, 13 nt, Human
acucaucauaaaa

SEQ ID NO: 2888796 - RNA, 12 nt, Human
acucaucauaaa

SEQ ID NO: 2888797 - RNA, 9 nt, Human
acucaucau

SEQ ID NO: 2888798 - RNA, 16 nt, Human
acucaucacuguggcu

SEQ ID NO: 2888799 - RNA, 21 nt, Human
acucauugcugagccucugcu

SEQ ID NO: 2888800 - RNA, 22 nt, Human
acucauugcugagccucugcuc

SEQ ID NO: 2888801 - RNA, 23 nt, Human
acucauugcugagccucugcucc

SEQ ID NO: 2888802 - RNA, 14 nt, Human
acucauuucuaaaa

SEQ ID NO: 2888803 - RNA, 15 nt, Human
acucauuucuaaaag

SEQ ID NO: 2888804 - RNA, 17 nt, Human
acucauuucuaaaagaa

SEQ ID NO: 2888805 - RNA, 18 nt, Human
acucauuucuaaaagaau

SEQ ID NO: 2888806 - RNA, 19 nt, Human
acucauuucuaaaagaaua

SEQ ID NO: 2888807 - RNA, 21 nt, Human
acucauuucuaaaagaauauu

SEQ ID NO: 2888808 - RNA, 18 nt, Human
acucauugcugagccucu

SEQ ID NO: 2888809 - RNA, 20 nt, Human
acucauugcugagccucugc

SEQ ID NO: 2888810 - RNA, 15 nt, Human
acucauugcugagcc

SEQ ID NO: 2888811 - RNA, 18 nt, Human
acucauggccuugucuaa

SEQ ID NO: 2888812 - RNA, 17 nt, Human
acucaucauaaaauaaa

SEQ ID NO: 2888813 - RNA, 13 nt, Human
acucaucauuugu

SEQ ID NO: 2888814 - RNA, 16 nt, Human
acucaucauaaaauaa

SEQ ID NO: 2888815 - RNA, 14 nt, Human
acucaugagaaguu

SEQ ID NO: 2888816 - RNA, 14 nt, Human
acucaugaggaggg

SEQ ID NO: 2888817 - RNA, 19 nt, Human
acucaucccuaaugcugca

SEQ ID NO: 2888818 - RNA, 16 nt, Human
acucauccugaacagc

SEQ ID NO: 2888819 - RNA, 17 nt, Human
acucauccugaacagca

SEQ ID NO: 2888820 - RNA, 18 nt, Human
acucauccugaacagcau

SEQ ID NO: 2888821 - RNA, 22 nt, Human
acucauuuguuaaaauuaucaa

SEQ ID NO: 2888822 - RNA, 17 nt, Human
acuccaagaacaauugu

SEQ ID NO: 2888823 - RNA, 15 nt, Human
acuccaaccuaaccu

SEQ ID NO: 2888824 - RNA, 18 nt, Human
acuccaaccuaaccugug

SEQ ID NO: 2888825 - RNA, 20 nt, Human
acuccaaccuaaccuguguc

SEQ ID NO: 2888826 - RNA, 21 nt, Human
acuccaaccuaaccugugucu

SEQ ID NO: 2888827 - RNA, 23 nt, Human
acuccaaccuaaccugugucugc

SEQ ID NO: 2888828 - RNA, 15 nt, Human
acuccaagguucccu

SEQ ID NO: 2888829 - RNA, 17 nt, Human
acuccaagguucccuug

SEQ ID NO: 2888830 - RNA, 20 nt, Human
acuccaaugucugcugagga

SEQ ID NO: 2888831 - RNA, 21 nt, Human
acuccaaugucugcugaggag

SEQ ID NO: 2888832 - RNA, 18 nt, Human
acuccagccugggcgaca

SEQ ID NO: 2888833 - RNA, 15 nt, Human
acuccagccugggcg

SEQ ID NO: 2888834 - RNA, 23 nt, Human
acuccagccugggcaacagagca

SEQ ID NO: 2888835 - RNA, 18 nt, Human
acuccagccugggcaaca

SEQ ID NO: 2888836 - RNA, 20 nt, Human
acuccagccugggcgacaga

SEQ ID NO: 2888837 - RNA, 20 nt, Human
acuccagcuggguuggaaaa

SEQ ID NO: 2888838 - RNA, 21 nt, Human
acuccuacaugauguuaugua

SEQ ID NO: 2888839 - RNA, 19 nt, Human
acuccuaaaccuuugcccc

SEQ ID NO: 2888840 - RNA, 18 nt, Human
acuccuaaccucaaguga

SEQ ID NO: 2888841 - RNA, 20 nt, Human
acuccuacaagauuuagaaa

SEQ ID NO: 2888842 - RNA, 22 nt, Human
acuccuacaagauuuagaaaaa

SEQ ID NO: 2888843 - RNA, 17 nt, Human
acuccuaccucagccua

SEQ ID NO: 2888844 - RNA, 16 nt, Human
acuccuaccugcccug

SEQ ID NO: 2888845 - RNA, 17 nt, Human
acuccuaccugcccugg

SEQ ID NO: 2888846 - RNA, 18 nt, Human
acuccuaccugcccugga

SEQ ID NO: 2888847 - RNA, 16 nt, Human
acuccuaccucagccu

SEQ ID NO: 2888848 - RNA, 15 nt, Human
acuccuaccucagcc

SEQ ID NO: 2888849 - RNA, 14 nt, Human
acuccuaccucagc

SEQ ID NO: 2888850 - RNA, 14 nt, Human
acuccuaccuggua

SEQ ID NO: 2888851 - RNA, 20 nt, Human
acuccuagagaacgcagccc

SEQ ID NO: 2888852 - RNA, 21 nt, Human
acuccuagagaacgcagcccu

SEQ ID NO: 2888853 - RNA, 22 nt, Human
acuccuagagaacgcagcccua

SEQ ID NO: 2888854 - RNA, 23 nt, Human
acuccuagagaacgcagcccuag

SEQ ID NO: 2888855 - RNA, 15 nt, Human
acuccugaccucaag

SEQ ID NO: 2888856 - RNA, 13 nt, Human
acuccuaggcagg

SEQ ID NO: 2888857 - RNA, 16 nt, Human
acuccuaggcaggaca

SEQ ID NO: 2888858 - RNA, 18 nt, Human
acuccuaggcaggacaug

SEQ ID NO: 2888859 - RNA, 20 nt, Human
acuccuaggcaggacaugcu

SEQ ID NO: 2888860 - RNA, 19 nt, Human
acuccugacgucugaagcu

SEQ ID NO: 2888861 - RNA, 21 nt, Human
acuccugacgucugaagcuug

SEQ ID NO: 2888862 - RNA, 23 nt, Human
acuccugacgucugaagcuugac

SEQ ID NO: 2888863 - RNA, 11 nt, Human
acuccugacuc

SEQ ID NO: 2888864 - RNA, 12 nt, Human
acuccugacucc

SEQ ID NO: 2888865 - RNA, 18 nt, Human
acuccugacuccuaccug

SEQ ID NO: 2888866 - RNA, 13 nt, Human
uccccuucucugu

SEQ ID NO: 2888867 - RNA, 23 nt, Human
uccccuugauuuaaacacacaga

SEQ ID NO: 2888868 - RNA, 16 nt, Human
ucccgaauagcuggga

SEQ ID NO: 2888869 - RNA, 15 nt, Human
ucccgaauagcuggg

SEQ ID NO: 2888870 - RNA, 21 nt, Human
uccccucacagccucugaccc

SEQ ID NO: 2888871 - RNA, 15 nt, Human
uccccucaccuccuc

SEQ ID NO: 2888872 - RNA, 17 nt, Human
uccccucaccuccucua

SEQ ID NO: 2888873 - RNA, 17 nt, Human
uccccucacagccucug

SEQ ID NO: 2888874 - RNA, 18 nt, Human
uccccucacagccucuga

SEQ ID NO: 2888875 - RNA, 19 nt, Human
uccccucacagccucugac

SEQ ID NO: 2888876 - RNA, 20 nt, Human
uccccucacagccucugacc

SEQ ID NO: 2888877 - RNA, 16 nt, Human
uccccucacagccucu

SEQ ID NO: 2888878 - RNA, 19 nt, Human
acucaagaagcaggcuaca

SEQ ID NO: 2888879 - RNA, 23 nt, Human
acucaaccuuaagaccuacuguu

SEQ ID NO: 2888880 - RNA, 20 nt, Human
acucaacugggcucuguccc

SEQ ID NO: 2888881 - RNA, 13 nt, Human
acucaagaagcag

SEQ ID NO: 2888882 - RNA, 14 nt, Human
acucaagaagcagg

SEQ ID NO: 2888883 - RNA, 15 nt, Human
acucaagaagcaggc

SEQ ID NO: 2888884 - RNA, 16 nt, Human
acucaagaagcaggcu

SEQ ID NO: 2888885 - RNA, 14 nt, Human
uccccucccuguca

SEQ ID NO: 2888886 - RNA, 13 nt, Human
uccccucccuguc

SEQ ID NO: 2888887 - RNA, 15 nt, Human
uccccuccacuguca

SEQ ID NO: 2888888 - RNA, 12 nt, Human
uccccuccagcc

SEQ ID NO: 2888889 - RNA, 13 nt, Human
uccccuccagccu

SEQ ID NO: 2888890 - RNA, 21 nt, Human
uccccucccuggcucccauga

SEQ ID NO: 2888891 - RNA, 12 nt, Human
uccccuccacug

SEQ ID NO: 2888892 - RNA, 16 nt, Human
uccccucaggacugca

SEQ ID NO: 2888893 - RNA, 18 nt, Human
ucccgaauagcugggacu

SEQ ID NO: 2888894 - RNA, 20 nt, Human
ucccgaguagcugggacuac

SEQ ID NO: 2888895 - RNA, 20 nt, Human
ucccgaagaauggagaggaa

SEQ ID NO: 2888896 - RNA, 21 nt, Human
ucccgaagaauggagaggaac

SEQ ID NO: 2888897 - RNA, 21 nt, Human
ucccgaguagcugggauuaca

SEQ ID NO: 2888898 - RNA, 12 nt, Human
ucccgagucugg

SEQ ID NO: 2888899 - RNA, 14 nt, Human
ucccgagucuggga

SEQ ID NO: 2888900 - RNA, 15 nt, Human
ucccgagucugggac

SEQ ID NO: 2888901 - RNA, 16 nt, Human
ucccgagucugggaca

SEQ ID NO: 2888902 - RNA, 18 nt, Human
ucccgccagacuguuaga

SEQ ID NO: 2888903 - RNA, 17 nt, Human
ucccgccagagggcuug

SEQ ID NO: 2888904 - RNA, 23 nt, Human
ucccgcaucaaggucagcaugag

SEQ ID NO: 2888905 - RNA, 23 nt, Human
ucccgcggguuccgcaggcagac

SEQ ID NO: 2888906 - RNA, 21 nt, Human
uccccucagccacacccaggc

SEQ ID NO: 2888907 - RNA, 13 nt, Human
ucccgcucagccc

SEQ ID NO: 2888908 - RNA, 21 nt, Human
ucccgccccuucccacucacc

SEQ ID NO: 2888909 - RNA, 14 nt, Human
ucccgcucagcccu

SEQ ID NO: 2888910 - RNA, 15 nt, Human
ucccgcucagcccuc

SEQ ID NO: 2888911 - RNA, 16 nt, Human
ucccgcucagcccucc

SEQ ID NO: 2888912 - RNA, 20 nt, Human
ucccgcucagcccucccugc

SEQ ID NO: 2888913 - RNA, 18 nt, Human
ucccggagguuggguggg

SEQ ID NO: 2888914 - RNA, 13 nt, Human
ucccgcugcugcu

SEQ ID NO: 2888915 - RNA, 15 nt, Human
ucccgcugcugcugc

SEQ ID NO: 2888916 - RNA, 14 nt, Human
ucccggaggaaauc

SEQ ID NO: 2888917 - RNA, 15 nt, Human
ucccggaggaaaucu

SEQ ID NO: 2888918 - RNA, 16 nt, Human
ucccucaaccccacca

SEQ ID NO: 2888919 - RNA, 10 nt, Human
uccccacacu

SEQ ID NO: 2888920 - RNA, 18 nt, Human
uccccaccuucaauuccu

SEQ ID NO: 2888921 - RNA, 13 nt, Human
uccccaccuggga

SEQ ID NO: 2888922 - RNA, 14 nt, Human
uccccaccugggac

SEQ ID NO: 2888923 - RNA, 20 nt, Human
uccccaccuucuucagccac

SEQ ID NO: 2888924 - RNA, 23 nt, Human
uccccaccuucaauuccugggcc

SEQ ID NO: 2888925 - RNA, 22 nt, Human
uccccaccuucaauuccugggc

SEQ ID NO: 2888926 - RNA, 20 nt, Human
uccccaccuucaauuccugg

SEQ ID NO: 2888927 - RNA, 17 nt, Human
acuauagccuaggugac

SEQ ID NO: 2888928 - RNA, 16 nt, Human
acuauaguuuaaaaca

SEQ ID NO: 2888929 - RNA, 20 nt, Human
acuauaguuuaaaacacauu

SEQ ID NO: 2888930 - RNA, 15 nt, Human
acuauacaacaaagg

SEQ ID NO: 2888931 - RNA, 14 nt, Human
acuauacuugaaca

SEQ ID NO: 2888932 - RNA, 15 nt, Human
acuauacuugaacaa

SEQ ID NO: 2888933 - RNA, 16 nt, Human
acuauacuugaacaaa

SEQ ID NO: 2888934 - RNA, 17 nt, Human
acuauacuugaacaaaa

SEQ ID NO: 2888935 - RNA, 18 nt, Human
acuauacuugaacaaaag

SEQ ID NO: 2888936 - RNA, 23 nt, Human
acuauacuugaacaaaaggguca

SEQ ID NO: 2888937 - RNA, 16 nt, Human
acuauauagagauguu

SEQ ID NO: 2888938 - RNA, 17 nt, Human
acuauauagagauguuu

SEQ ID NO: 2888939 - RNA, 13 nt, Human
acuauauacaugu

SEQ ID NO: 2888940 - RNA, 14 nt, Human
acuauauacaugug

SEQ ID NO: 2888941 - RNA, 15 nt, Human
acuauauacaugugu

SEQ ID NO: 2888942 - RNA, 16 nt, Human
acuauauacaugugug

SEQ ID NO: 2888943 - RNA, 17 nt, Human
acuauauacaugugugu

SEQ ID NO: 2888944 - RNA, 18 nt, Human
acuauauacaugugugua

SEQ ID NO: 2888945 - RNA, 21 nt, Human
acuauauacauguguguauau

SEQ ID NO: 2888946 - RNA, 14 nt, Human
acuauauauauaug

SEQ ID NO: 2888947 - RNA, 19 nt, Human
acuauauauauaugccuuu

SEQ ID NO: 2888948 - RNA, 18 nt, Human
acuauauagagauguuuu

SEQ ID NO: 2888949 - RNA, 19 nt, Human
acuauauucauuuccacuc

SEQ ID NO: 2888950 - RNA, 16 nt, Human
acuauauucuggccag

SEQ ID NO: 2888951 - RNA, 18 nt, Human
acuauauugauuguccuu

SEQ ID NO: 2888952 - RNA, 19 nt, Human
acuauauugauuguccuuu

SEQ ID NO: 2888953 - RNA, 13 nt, Human
acuauaugugaau

SEQ ID NO: 2888954 - RNA, 23 nt, Human
acuauguugcccaggcaggucuu

SEQ ID NO: 2888955 - RNA, 18 nt, Human
acuaugaacuucucucag

SEQ ID NO: 2888956 - RNA, 19 nt, Human
acuaugaacuucucucaga

SEQ ID NO: 2888957 - RNA, 21 nt, Human
acuaugaacuucucucagacu

SEQ ID NO: 2888958 - RNA, 20 nt, Human
acuauguugcccaggcaggu

SEQ ID NO: 2888959 - RNA, 19 nt, Human
acuauguugcccaggcagg

SEQ ID NO: 2888960 - RNA, 17 nt, Human
acuauuauaauuuaaug

SEQ ID NO: 2888961 - RNA, 21 nt, Human
acuauuaagaggcagaaaauu

SEQ ID NO: 2888962 - RNA, 22 nt, Human
acuauuaggugcaauuucaagg

SEQ ID NO: 2888963 - RNA, 21 nt, Human
acuauuauaauuuaaugcaug

SEQ ID NO: 2888964 - RNA, 20 nt, Human
acuauuauguuguuagagaa

SEQ ID NO: 2888965 - RNA, 21 nt, Human
acuauuauguuguuagagaaa

SEQ ID NO: 2888966 - RNA, 14 nt, Human
acuauuaagaggca

SEQ ID NO: 2888967 - RNA, 19 nt, Human
acuauuaaggauguagcuu

SEQ ID NO: 2888968 - RNA, 20 nt, Human
acuauuaaggauguagcuuu

SEQ ID NO: 2888969 - RNA, 22 nt, Human
acucaacaaaacccaugcauuu

SEQ ID NO: 2888970 - RNA, 18 nt, Human
acucaaauguucuaaguu

SEQ ID NO: 2888971 - RNA, 22 nt, Human
acucaaauguucuaaguuucua

SEQ ID NO: 2888972 - RNA, 18 nt, Human
acuauguugcccaggcag

SEQ ID NO: 2888973 - RNA, 17 nt, Human
acuauguugcccaggca

SEQ ID NO: 2888974 - RNA, 22 nt, Human
acuaugaacugaaggcagcaug

SEQ ID NO: 2888975 - RNA, 15 nt, Human
acuaugaaaccuuuu

SEQ ID NO: 2888976 - RNA, 20 nt, Human
acuaucagcccaagaugcuu

SEQ ID NO: 2888977 - RNA, 22 nt, Human
acuaucaguuuguccuguagag

SEQ ID NO: 2888978 - RNA, 13 nt, Human
acuaucauaaaau

SEQ ID NO: 2888979 - RNA, 14 nt, Human
acuaucauaaaauc

SEQ ID NO: 2888980 - RNA, 18 nt, Human
acuaucauaguuaacaua

SEQ ID NO: 2888981 - RNA, 22 nt, Human
acuaucaugucaaacgugaaaa

SEQ ID NO: 2888982 - RNA, 17 nt, Human
acuaucccggcugcccu

SEQ ID NO: 2888983 - RNA, 16 nt, Human
acuaucccggcugccc

SEQ ID NO: 2888984 - RNA, 16 nt, Human
acuaucuuggugaauu

SEQ ID NO: 2888985 - RNA, 11 nt, Human
acuaucuugug

SEQ ID NO: 2888986 - RNA, 17 nt, Human
acuaucauuuaauaaua

SEQ ID NO: 2888987 - RNA, 15 nt, Human
acuauccugacuucu

SEQ ID NO: 2888988 - RNA, 18 nt, Human
acuaucccggcugcccuu

SEQ ID NO: 2888989 - RNA, 17 nt, Human
acuauccaugcaccaaa

SEQ ID NO: 2888990 - RNA, 18 nt, Human
acuauccaugcaccaaac

SEQ ID NO: 2888991 - RNA, 20 nt, Human
acuaucccaacagucauguu

SEQ ID NO: 2888992 - RNA, 20 nt, Human
acguuuuuaauauaaagccu

SEQ ID NO: 2888993 - RNA, 13 nt, Human
acguuuuuccuuu

SEQ ID NO: 2888994 - RNA, 14 nt, Human
acguuuuuccuuua

SEQ ID NO: 2888995 - RNA, 15 nt, Human
acuaaaaacaaaccc

SEQ ID NO: 2888996 - RNA, 16 nt, Human
acuaaaaacaaacccu

SEQ ID NO: 2888997 - RNA, 13 nt, Human
acuaaaagacauu

SEQ ID NO: 2888998 - RNA, 15 nt, Human
acuaaaagacauuug

SEQ ID NO: 2888999 - RNA, 17 nt, Human
acuaaaagacauuuguu

SEQ ID NO: 2889000 - RNA, 15 nt, Human
acguuuccugagaag

SEQ ID NO: 2889001 - RNA, 18 nt, Human
acguuuacaagccccccc

SEQ ID NO: 2889002 - RNA, 14 nt, Human
uccagcucaccagc

SEQ ID NO: 2889003 - RNA, 13 nt, Human
uccagccugggag

SEQ ID NO: 2889004 - RNA, 19 nt, Human
uccagccugggaggcacag

SEQ ID NO: 2889005 - RNA, 20 nt, Human
uccagccugggcgacagagc

SEQ ID NO: 2889006 - RNA, 17 nt, Human
uccagccugggcgacag

SEQ ID NO: 2889007 - RNA, 15 nt, Human
acuaaagccagccug

SEQ ID NO: 2889008 - RNA, 16 nt, Human
acuaaagccagccuga

SEQ ID NO: 2889009 - RNA, 14 nt, Human
acuaaaguauguaa

SEQ ID NO: 2889010 - RNA, 22 nt, Human
acuaaaguauguaaaguaugua

SEQ ID NO: 2889011 - RNA, 17 nt, Human
acuaaagguggccacaa

SEQ ID NO: 2889012 - RNA, 22 nt, Human
acuaaagguggccacaaauucu

SEQ ID NO: 2889013 - RNA, 14 nt, Human
acuaaaauaugucu

SEQ ID NO: 2889014 - RNA, 22 nt, Human
acuaaaauuuuaggcacucuua

SEQ ID NO: 2889015 - RNA, 18 nt, Human
acuaaacauaugauuuca

SEQ ID NO: 2889016 - RNA, 19 nt, Human
acuaaacauaugauuucac

SEQ ID NO: 2889017 - RNA, 17 nt, Human
acuaaagcaguagaaau

SEQ ID NO: 2889018 - RNA, 20 nt, Human
acuaaaaguucuucuccaau

SEQ ID NO: 2889019 - RNA, 14 nt, Human
acuaaaauauuuau

SEQ ID NO: 2889020 - RNA, 12 nt, Human
acuaaaauauau

SEQ ID NO: 2889021 - RNA, 14 nt, Human
acuaaaauauauau

SEQ ID NO: 2889022 - RNA, 13 nt, Human
acuaaccacgcug

SEQ ID NO: 2889023 - RNA, 21 nt, Human
acuaaaucagagacaaaauau

SEQ ID NO: 2889024 - RNA, 19 nt, Human
acuaaaucagagacaaaau

SEQ ID NO: 2889025 - RNA, 18 nt, Human
acuaaaucagagacaaaa

SEQ ID NO: 2889026 - RNA, 15 nt, Human
acuaaaucagagaca

SEQ ID NO: 2889027 - RNA, 19 nt, Human
acuaaauaagaaaauaaca

SEQ ID NO: 2889028 - RNA, 18 nt, Human
acuaaauacuugcuccau

SEQ ID NO: 2889029 - RNA, 22 nt, Human
acuaaauaugaacccuuuguuu

SEQ ID NO: 2889030 - RNA, 23 nt, Human
acuacaggugugagucaccaagc

SEQ ID NO: 2889031 - RNA, 17 nt, Human
acuaaaucucuaauaug

SEQ ID NO: 2889032 - RNA, 17 nt, Human
acuaaccccaacgcaca

SEQ ID NO: 2889033 - RNA, 21 nt, Human
acuaaccccaacgcacaggaa

SEQ ID NO: 2889034 - RNA, 23 nt, Human
acuaaccagggaagcugucccuc

SEQ ID NO: 2889035 - RNA, 14 nt, Human
acuaaaucucuaau

SEQ ID NO: 2889036 - RNA, 16 nt, Human
acuaaaucucuaauau

SEQ ID NO: 2889037 - RNA, 15 nt, Human
ucccagugaauucuu

SEQ ID NO: 2889038 - RNA, 16 nt, Human
ucccagucucuggcag

SEQ ID NO: 2889039 - RNA, 23 nt, Human
ucccagguguuaacauuccaaga

SEQ ID NO: 2889040 - RNA, 15 nt, Human
ucccagguguuaaca

SEQ ID NO: 2889041 - RNA, 21 nt, Human
ucccagguguuaacauuccaa

SEQ ID NO: 2889042 - RNA, 22 nt, Human
ucccagguguuaacauuccaag

SEQ ID NO: 2889043 - RNA, 21 nt, Human
ucccagguagcugggauuaca

SEQ ID NO: 2889044 - RNA, 15 nt, Human
ucccaguucaggagu

SEQ ID NO: 2889045 - RNA, 22 nt, Human
ucccaguggcugcugcccaggc

SEQ ID NO: 2889046 - RNA, 23 nt, Human
ucccaguggcugcugcccaggcc

SEQ ID NO: 2889047 - RNA, 15 nt, Human
ucccaguggcugcug

SEQ ID NO: 2889048 - RNA, 16 nt, Human
ucccaguggcugcugc

SEQ ID NO: 2889049 - RNA, 17 nt, Human
ucccaguggcugcugcc

SEQ ID NO: 2889050 - RNA, 18 nt, Human
ucccaguggcugcugccc

SEQ ID NO: 2889051 - RNA, 19 nt, Human
ucccaguggcugcugccca

SEQ ID NO: 2889052 - RNA, 21 nt, Human
ucccaguggcugcugcccagg

SEQ ID NO: 2889053 - RNA, 19 nt, Human
ucccagugagucucugggg

SEQ ID NO: 2889054 - RNA, 20 nt, Human
acuacaugcagcccaugccc

SEQ ID NO: 2889055 - RNA, 15 nt, Human
acuacaugugguuua

SEQ ID NO: 2889056 - RNA, 18 nt, Human
acuacaugugguuuauag

SEQ ID NO: 2889057 - RNA, 18 nt, Human
acuacaucuuuaaacagu

SEQ ID NO: 2889058 - RNA, 20 nt, Human
acuacaugagaacaaacaga

SEQ ID NO: 2889059 - RNA, 21 nt, Human
ucccaggggcccaaggcggcc

SEQ ID NO: 2889060 - RNA, 22 nt, Human
ucccaggggcccaaggcggccc

SEQ ID NO: 2889061 - RNA, 13 nt, Human
acuacauucauuu

SEQ ID NO: 2889062 - RNA, 19 nt, Human
acuacaugugguuuauaga

SEQ ID NO: 2889063 - RNA, 13 nt, Human
ucccaucgcuguc

SEQ ID NO: 2889064 - RNA, 17 nt, Human
ucccaucuaagcugcag

SEQ ID NO: 2889065 - RNA, 18 nt, Human
ucccaucuaagcugcagc

SEQ ID NO: 2889066 - RNA, 19 nt, Human
ucccaucuaagcugcagcu

SEQ ID NO: 2889067 - RNA, 20 nt, Human
ucccaucuaagcugcagcuu

SEQ ID NO: 2889068 - RNA, 22 nt, Human
ucccaucuaagcugcagcuucc

SEQ ID NO: 2889069 - RNA, 23 nt, Human
ucccaucuaagcugcagcuuccu

SEQ ID NO: 2889070 - RNA, 15 nt, Human
ucccauaggcccagu

SEQ ID NO: 2889071 - RNA, 23 nt, Human
ucccaguucaggagucccaagga

SEQ ID NO: 2889072 - RNA, 20 nt, Human
ucccaguucaggagucccaa

SEQ ID NO: 2889073 - RNA, 18 nt, Human
ucccauaaccgcugauuc

SEQ ID NO: 2889074 - RNA, 22 nt, Human
ucccauaaccgcugauucucag

SEQ ID NO: 2889075 - RNA, 14 nt, Human
ucccauaccaccca

SEQ ID NO: 2889076 - RNA, 21 nt, Human
uccccaacccccauucucauc

SEQ ID NO: 2889077 - RNA, 23 nt, Human
uccccaacccccauucucaucug

SEQ ID NO: 2889078 - RNA, 20 nt, Human
uccccaacccuagguucccu

SEQ ID NO: 2889079 - RNA, 22 nt, Human
uccccaacccuagguucccugu

SEQ ID NO: 2889080 - RNA, 15 nt, Human
uccccaagccuggca

SEQ ID NO: 2889081 - RNA, 23 nt, Human
uccccaagugguuuccacaugcu

SEQ ID NO: 2889082 - RNA, 16 nt, Human
uccccaaugagacuug

SEQ ID NO: 2889083 - RNA, 17 nt, Human
uccccaaugagacuugc

SEQ ID NO: 2889084 - RNA, 19 nt, Human
uccccaaugagacuugccu

SEQ ID NO: 2889085 - RNA, 21 nt, Human
uccccaaugagacuugccuuc

SEQ ID NO: 2889086 - RNA, 14 nt, Human
uccccaaaacaaag

SEQ ID NO: 2889087 - RNA, 17 nt, Human
uccccaaaacaaagucu

SEQ ID NO: 2889088 - RNA, 21 nt, Human
uccccaaaacaaagucuuugg

SEQ ID NO: 2889089 - RNA, 23 nt, Human
uccccaacagcgacauagcccau

SEQ ID NO: 2889090 - RNA, 12 nt, Human
uccuucagugca

SEQ ID NO: 2889091 - RNA, 18 nt, Human
uccuucagcuuccauuuc

SEQ ID NO: 2889092 - RNA, 20 nt, Human
uccuucaucuuuuaaagaaa

SEQ ID NO: 2889093 - RNA, 13 nt, Human
uccuuccuacccu

SEQ ID NO: 2889094 - RNA, 16 nt, Human
uccuuccucugaggcu

SEQ ID NO: 2889095 - RNA, 17 nt, Human
uccuuccucugagccuu

SEQ ID NO: 2889096 - RNA, 21 nt, Human
uccuuccucacaccaggcuug

SEQ ID NO: 2889097 - RNA, 14 nt, Human
uccuuccucuccuu

SEQ ID NO: 2889098 - RNA, 16 nt, Human
uccuuccucugagccu

SEQ ID NO: 2889099 - RNA, 16 nt, Human
uccuuccucacaccag

SEQ ID NO: 2889100 - RNA, 20 nt, Human
uccuuccuaauuucccuucu

SEQ ID NO: 2889101 - RNA, 18 nt, Human
uccuuccaaaaauuauua

SEQ ID NO: 2889102 - RNA, 19 nt, Human
uccuuccaaaaauuauuau

SEQ ID NO: 2889103 - RNA, 15 nt, Human
uccuuccaaagaauu

SEQ ID NO: 2889104 - RNA, 19 nt, Human
uccuuccaaagaauucuua

SEQ ID NO: 2889105 - RNA, 20 nt, Human
acuggcacugaauuaaucau

SEQ ID NO: 2889106 - RNA, 14 nt, Human
acuggcagacugug

SEQ ID NO: 2889107 - RNA, 18 nt, Human
acuggcaacauuccaaga

SEQ ID NO: 2889108 - RNA, 16 nt, Human
acuggcacugaauuaa

SEQ ID NO: 2889109 - RNA, 16 nt, Human
acuggccucugcugau

SEQ ID NO: 2889110 - RNA, 13 nt, Human
acuggccugacuu

SEQ ID NO: 2889111 - RNA, 18 nt, Human
acuggccugacuuggggg

SEQ ID NO: 2889112 - RNA, 21 nt, Human
acuggcuagaguccucacucc

SEQ ID NO: 2889113 - RNA, 15 nt, Human
acuggcguggauuaa

SEQ ID NO: 2889114 - RNA, 20 nt, Human
acuggcguggauuaaacuua

SEQ ID NO: 2889115 - RNA, 18 nt, Human
acuggcuagaguccucac

SEQ ID NO: 2889116 - RNA, 16 nt, Human
acuggcauaguuucau

SEQ ID NO: 2889117 - RNA, 17 nt, Human
acuggcauaguuucaua

SEQ ID NO: 2889118 - RNA, 23 nt, Human
acuggccucugcugauccuccca

SEQ ID NO: 2889119 - RNA, 22 nt, Human
acuggcugcaaaggguaucagg

SEQ ID NO: 2889120 - RNA, 16 nt, Human
acuggcuccucugugg

SEQ ID NO: 2889121 - RNA, 19 nt, Human
acuggcuccucuguggugu

SEQ ID NO: 2889122 - RNA, 23 nt, Human
uccuucagacacccucaaccucu

SEQ ID NO: 2889123 - RNA, 17 nt, Human
acuggcuggcugcagug

SEQ ID NO: 2889124 - RNA, 16 nt, Human
acuggcuggcugcagu

SEQ ID NO: 2889125 - RNA, 16 nt, Human
acugcauaccaaccug

SEQ ID NO: 2889126 - RNA, 17 nt, Human
acugcagguuggacccc

SEQ ID NO: 2889127 - RNA, 18 nt, Human
acugcagguuggacccca

SEQ ID NO: 2889128 - RNA, 19 nt, Human
acugcagguuggaccccag

SEQ ID NO: 2889129 - RNA, 20 nt, Human
acugcagguuggaccccaga

SEQ ID NO: 2889130 - RNA, 21 nt, Human
acugcagguuggaccccagag

SEQ ID NO: 2889131 - RNA, 22 nt, Human
acugcagggccaggacugagcc

SEQ ID NO: 2889132 - RNA, 21 nt, Human
acugcagggguuauguggaag

SEQ ID NO: 2889133 - RNA, 13 nt, Human
acugcagaagcaa

SEQ ID NO: 2889134 - RNA, 17 nt, Human
acugcaguccuggagca

SEQ ID NO: 2889135 - RNA, 21 nt, Human
acugccuugaaccugugagua

SEQ ID NO: 2889136 - RNA, 23 nt, Human
acugccuugaaccugugaguaaa

SEQ ID NO: 2889137 - RNA, 18 nt, Human
acugcgcuuuauuuucuu

SEQ ID NO: 2889138 - RNA, 19 nt, Human
acugcgggaugguccuggg

SEQ ID NO: 2889139 - RNA, 20 nt, Human
acugcggaaaaggaaggaaa

SEQ ID NO: 2889140 - RNA, 20 nt, Human
acugccuuuuuauuuauaug

SEQ ID NO: 2889141 - RNA, 22 nt, Human
acugcgggaugguccuggggcu

SEQ ID NO: 2889142 - RNA, 21 nt, Human
acugcgggaugguccuggggc

SEQ ID NO: 2889143 - RNA, 20 nt, Human
acugcgggaugguccugggg

SEQ ID NO: 2889144 - RNA, 15 nt, Human
acugcucaggcugca

SEQ ID NO: 2889145 - RNA, 18 nt, Human
acugcucaggcugcagcu

SEQ ID NO: 2889146 - RNA, 21 nt, Human
acugcucaggcugcagcugga

SEQ ID NO: 2889147 - RNA, 13 nt, Human
acugcuaguguuc

SEQ ID NO: 2889148 - RNA, 15 nt, Human
acugcuaguguucug

SEQ ID NO: 2889149 - RNA, 16 nt, Human
acugcuaguguucugu

SEQ ID NO: 2889150 - RNA, 17 nt, Human
acugcuaguguucuguc

SEQ ID NO: 2889151 - RNA, 19 nt, Human
acugcuaguguucugucua

SEQ ID NO: 2889152 - RNA, 23 nt, Human
acugcucaucauuccuugagaaa

SEQ ID NO: 2889153 - RNA, 19 nt, Human
acugcucaucauuccuuga

SEQ ID NO: 2889154 - RNA, 12 nt, Human
acugcucugaug

SEQ ID NO: 2889155 - RNA, 15 nt, Human
acugcucuuguuucu

SEQ ID NO: 2889156 - RNA, 18 nt, Human
acugcucuuguuucuuuu

SEQ ID NO: 2889157 - RNA, 16 nt, Human
acugcuugaugaagca

SEQ ID NO: 2889158 - RNA, 18 nt, Human
acugcuugaugaagcaag

SEQ ID NO: 2889159 - RNA, 20 nt, Human
acugcuugaugaagcaagga

SEQ ID NO: 2889160 - RNA, 23 nt, Human
acugcuugaugaagcaaggaaga

SEQ ID NO: 2889161 - RNA, 13 nt, Human
acugcuggcugcc

SEQ ID NO: 2889162 - RNA, 21 nt, Human
acugcugcccagccuccaagc

SEQ ID NO: 2889163 - RNA, 16 nt, Human
acugcugcccagccuc

SEQ ID NO: 2889164 - RNA, 18 nt, Human
acugcugcccagccucca

SEQ ID NO: 2889165 - RNA, 12 nt, Human
acugcuggcugc

SEQ ID NO: 2889166 - RNA, 20 nt, Human
acugcuggacgucuuucuuu

SEQ ID NO: 2889167 - RNA, 22 nt, Human
acugcuggacgucuuucuuuuu

SEQ ID NO: 2889168 - RNA, 13 nt, Human
acugcugcugccu

SEQ ID NO: 2889169 - RNA, 14 nt, Human
acugcugcugccug

SEQ ID NO: 2889170 - RNA, 15 nt, Human
acugcugcugccugg

SEQ ID NO: 2889171 - RNA, 18 nt, Human
acugcugcugccuggcca

SEQ ID NO: 2889172 - RNA, 19 nt, Human
acugcugcugccuggccac

SEQ ID NO: 2889173 - RNA, 12 nt, Human
acuguaauuuag

SEQ ID NO: 2889174 - RNA, 21 nt, Human
acuguaagacucauucccuag

SEQ ID NO: 2889175 - RNA, 13 nt, Human
acuguaauaauac

SEQ ID NO: 2889176 - RNA, 16 nt, Human
acuguaauaauaccuc

SEQ ID NO: 2889177 - RNA, 17 nt, Human
acuguaauaauaccuca

SEQ ID NO: 2889178 - RNA, 18 nt, Human
acuguaauaauaccucaa

SEQ ID NO: 2889179 - RNA, 19 nt, Human
acuguaauaauaccucaau

SEQ ID NO: 2889180 - RNA, 23 nt, Human
acuguaauaauaccucaauguuu

SEQ ID NO: 2889181 - RNA, 22 nt, Human
acuguaaucuuauuuaggaagu

SEQ ID NO: 2889182 - RNA, 19 nt, Human
acuguaaucuuauuuagga

SEQ ID NO: 2889183 - RNA, 15 nt, Human
acuguacauaaacaa

SEQ ID NO: 2889184 - RNA, 18 nt, Human
acuguagaaugauuucau

SEQ ID NO: 2889185 - RNA, 20 nt, Human
acuguagaaugauuucaugc

SEQ ID NO: 2889186 - RNA, 19 nt, Human
acuguagaaugauuucaug

SEQ ID NO: 2889187 - RNA, 16 nt, Human
acuguacccaaaugga

SEQ ID NO: 2889188 - RNA, 14 nt, Human
acuguacauuuaaa

SEQ ID NO: 2889189 - RNA, 15 nt, Human
acuguacauuuaaaa

SEQ ID NO: 2889190 - RNA, 16 nt, Human
acuguacauuuaaaau

SEQ ID NO: 2889191 - RNA, 22 nt, Human
acuguacauuuaaaauugcuau

SEQ ID NO: 2889192 - RNA, 19 nt, Human
acuguaccauauagcaaaa

SEQ ID NO: 2889193 - RNA, 17 nt, Human
acuguacccaaauggaa

SEQ ID NO: 2889194 - RNA, 12 nt, Human
acuguacuaauu

SEQ ID NO: 2889195 - RNA, 14 nt, Human
acuguacuaauucu

SEQ ID NO: 2889196 - RNA, 18 nt, Human
acuguacuaauucuuaca

SEQ ID NO: 2889197 - RNA, 22 nt, Human
acuguacuaauucuuacacugc

SEQ ID NO: 2889198 - RNA, 13 nt, Human
acuguacuccucc

SEQ ID NO: 2889199 - RNA, 14 nt, Human
acuguacuccuccc

SEQ ID NO: 2889200 - RNA, 18 nt, Human
acugggcaaugauggcaa

SEQ ID NO: 2889201 - RNA, 13 nt, Human
acugggcaaugau

SEQ ID NO: 2889202 - RNA, 22 nt, Human
acugggaugggaggagaggaca

SEQ ID NO: 2889203 - RNA, 14 nt, Human
acugggaggggaga

SEQ ID NO: 2889204 - RNA, 17 nt, Human
acugggaucacaggugu

SEQ ID NO: 2889205 - RNA, 20 nt, Human
acugggaggccgaggcaggg

SEQ ID NO: 2889206 - RNA, 13 nt, Human
ucgcuccuguguc

SEQ ID NO: 2889207 - RNA, 12 nt, Human
ucgcuccugugu

SEQ ID NO: 2889208 - RNA, 17 nt, Human
ucgcucccucccaggac

SEQ ID NO: 2889209 - RNA, 15 nt, Human
ucgcucccucccagg

SEQ ID NO: 2889210 - RNA, 19 nt, Human
acuggguacuuguggacac

SEQ ID NO: 2889211 - RNA, 18 nt, Human
acuggggaugugggaggg

SEQ ID NO: 2889212 - RNA, 16 nt, Human
acuggggaugugggag

SEQ ID NO: 2889213 - RNA, 17 nt, Human
acuggggaugugggagg

SEQ ID NO: 2889214 - RNA, 21 nt, Human
acuggggagcccgucucagug

SEQ ID NO: 2889215 - RNA, 15 nt, Human
acuggggagucuuug

SEQ ID NO: 2889216 - RNA, 13 nt, Human
acuggggagcccg

SEQ ID NO: 2889217 - RNA, 17 nt, Human
acuggggagcccgucuc

SEQ ID NO: 2889218 - RNA, 16 nt, Human
acugggaugagccgcu

SEQ ID NO: 2889219 - RNA, 19 nt, Human
acuggggaaaacuccaccu

SEQ ID NO: 2889220 - RNA, 23 nt, Human
acuggguacuuguggacacagcu

SEQ ID NO: 2889221 - RNA, 20 nt, Human
acuggguacuuguggacaca

SEQ ID NO: 2889222 - RNA, 13 nt, Human
acuguaagacauu

SEQ ID NO: 2889223 - RNA, 13 nt, Human
ucgaacuggcugc

SEQ ID NO: 2889224 - RNA, 14 nt, Human
ucgaacuggcugca

SEQ ID NO: 2889225 - RNA, 15 nt, Human
ucgaacuggcugcaa

SEQ ID NO: 2889226 - RNA, 23 nt, Human
ucgaagcgcgccacucgcuuccc

SEQ ID NO: 2889227 - RNA, 14 nt, Human
ucgaacuucacaac

SEQ ID NO: 2889228 - RNA, 18 nt, Human
ucgaacuucacaacuagg

SEQ ID NO: 2889229 - RNA, 23 nt, Human
ucgaagccuugccuaaauuuaau

SEQ ID NO: 2889230 - RNA, 22 nt, Human
uccuuucuaacaaaaaaauaua

SEQ ID NO: 2889231 - RNA, 18 nt, Human
uccuuuccccagcccagg

SEQ ID NO: 2889232 - RNA, 13 nt, Human
uccuuucccuucc

SEQ ID NO: 2889233 - RNA, 14 nt, Human
uccuuucccuuccu

SEQ ID NO: 2889234 - RNA, 15 nt, Human
uccuuucccuuccuc

SEQ ID NO: 2889235 - RNA, 16 nt, Human
uccuuucccuuccucu

SEQ ID NO: 2889236 - RNA, 17 nt, Human
uccuuucccuuccucuu

SEQ ID NO: 2889237 - RNA, 18 nt, Human
uccuuucccuuccucuuc

SEQ ID NO: 2889238 - RNA, 16 nt, Human
uccuuuccccagccca

SEQ ID NO: 2889239 - RNA, 17 nt, Human
uccuuuccccagcccag

SEQ ID NO: 2889240 - RNA, 20 nt, Human
uccuuuccccagcccagggu

SEQ ID NO: 2889241 - RNA, 16 nt, Human
uccuuuccccuuccuu

SEQ ID NO: 2889242 - RNA, 13 nt, Human
uccuuucccaagc

SEQ ID NO: 2889243 - RNA, 16 nt, Human
uccuuucccaagccuu

SEQ ID NO: 2889244 - RNA, 21 nt, Human
uccuuucccaagccuucgggc

SEQ ID NO: 2889245 - RNA, 13 nt, Human
uccuuuccccagc

SEQ ID NO: 2889246 - RNA, 14 nt, Human
uccuuuccccagcc

SEQ ID NO: 2889247 - RNA, 15 nt, Human
uccuuuccccagccc

SEQ ID NO: 2889248 - RNA, 17 nt, Human
uccuuuccaaggcuucu

SEQ ID NO: 2889249 - RNA, 18 nt, Human
uccuuuccaaggcuucuc

SEQ ID NO: 2889250 - RNA, 15 nt, Human
uccuuucaccacaug

SEQ ID NO: 2889251 - RNA, 17 nt, Human
uccuuucaccccagggc

SEQ ID NO: 2889252 - RNA, 20 nt, Human
uccuuucacaaccuucugug

SEQ ID NO: 2889253 - RNA, 22 nt, Human
uccuuucagggaauuucaggaa

SEQ ID NO: 2889254 - RNA, 21 nt, Human
uccuuucagggaauuucagga

SEQ ID NO: 2889255 - RNA, 23 nt, Human
uccuuucagggaauuucaggaac

SEQ ID NO: 2889256 - RNA, 21 nt, Human
uccuuucaccccagggccuga

SEQ ID NO: 2889257 - RNA, 19 nt, Human
uccuuucaccccagggccu

SEQ ID NO: 2889258 - RNA, 18 nt, Human
uccuuucaccccagggcc

SEQ ID NO: 2889259 - RNA, 12 nt, Human
uccuuuauagag

SEQ ID NO: 2889260 - RNA, 21 nt, Human
uccuuccuguuagugguugug

SEQ ID NO: 2889261 - RNA, 16 nt, Human
uccuuuauauuuagug

SEQ ID NO: 2889262 - RNA, 21 nt, Human
uccuuuauguggaaaacagaa

SEQ ID NO: 2889263 - RNA, 17 nt, Human
uccuuuauuauuauuuu

SEQ ID NO: 2889264 - RNA, 16 nt, Human
uccuuucacaaccuuc

SEQ ID NO: 2889265 - RNA, 18 nt, Human
uccuuucacaaccuucug

SEQ ID NO: 2889266 - RNA, 19 nt, Human
uccuuucacaaccuucugu

SEQ ID NO: 2889267 - RNA, 13 nt, Human
ucgaggacaggga

SEQ ID NO: 2889268 - RNA, 21 nt, Human
ucgagcaguccugccucagcc

SEQ ID NO: 2889269 - RNA, 17 nt, Human
ucgagcaguccugccuc

SEQ ID NO: 2889270 - RNA, 13 nt, Human
ucgaccugccucg

SEQ ID NO: 2889271 - RNA, 19 nt, Human
ucgacacucaccaugaagc

SEQ ID NO: 2889272 - RNA, 18 nt, Human
ucgacaucacuguucaug

SEQ ID NO: 2889273 - RNA, 14 nt, Human
ucgaccccaaagcc

SEQ ID NO: 2889274 - RNA, 19 nt, Human
ucgaccccaaagccccuug

SEQ ID NO: 2889275 - RNA, 17 nt, Human
ucgaggacagggaggug

SEQ ID NO: 2889276 - RNA, 14 nt, Human
ucgaggacagggag

SEQ ID NO: 2889277 - RNA, 22 nt, Human
ucgagcaguccugccucagccu

SEQ ID NO: 2889278 - RNA, 18 nt, Human
ucgaggcccagcgaccuc

SEQ ID NO: 2889279 - RNA, 22 nt, Human
ucgccuuagcacuaccacuccu

SEQ ID NO: 2889280 - RNA, 18 nt, Human
ucgccuguggagcucagc

SEQ ID NO: 2889281 - RNA, 19 nt, Human
ucgccuguggagcucagcc

SEQ ID NO: 2889282 - RNA, 20 nt, Human
ucgccuguggagcucagccc

SEQ ID NO: 2889283 - RNA, 21 nt, Human
ucgccuguggagcucagcccc

SEQ ID NO: 2889284 - RNA, 14 nt, Human
ucgcucccucccag

SEQ ID NO: 2889285 - RNA, 13 nt, Human
ucgcucccuccca

SEQ ID NO: 2889286 - RNA, 12 nt, Human
uccuggggccag

SEQ ID NO: 2889287 - RNA, 13 nt, Human
uccuggggccagg

SEQ ID NO: 2889288 - RNA, 14 nt, Human
uccuggggccaggc

SEQ ID NO: 2889289 - RNA, 15 nt, Human
uccuggggccaggcc

SEQ ID NO: 2889290 - RNA, 16 nt, Human
uccuggggccaggccg

SEQ ID NO: 2889291 - RNA, 19 nt, Human
uccuggggaaccugacccc

SEQ ID NO: 2889292 - RNA, 18 nt, Human
uccuggggaaccugaccc

SEQ ID NO: 2889293 - RNA, 13 nt, Human
uccugggcucagg

SEQ ID NO: 2889294 - RNA, 12 nt, Human
uccugggcucag

SEQ ID NO: 2889295 - RNA, 15 nt, Human
uccuggggcguccag

SEQ ID NO: 2889296 - RNA, 18 nt, Human
uccuggggcucugugcag

SEQ ID NO: 2889297 - RNA, 16 nt, Human
uccuggggcucugugc

SEQ ID NO: 2889298 - RNA, 15 nt, Human
uccuggggcucugug

SEQ ID NO: 2889299 - RNA, 19 nt, Human
uccuggggcucugugcagg

SEQ ID NO: 2889300 - RNA, 21 nt, Human
uccuggggguucuuucuuccu

SEQ ID NO: 2889301 - RNA, 22 nt, Human
uccuggggguucuuucuuccuc

SEQ ID NO: 2889302 - RNA, 23 nt, Human
uccuggggguucuuucuuccucu

SEQ ID NO: 2889303 - RNA, 15 nt, Human
uccugcacuguuuaa

SEQ ID NO: 2889304 - RNA, 22 nt, Human
uccugucuuucugagcacacuu

SEQ ID NO: 2889305 - RNA, 16 nt, Human
uccugucuuuucaggu

SEQ ID NO: 2889306 - RNA, 19 nt, Human
uccugucuuuaaggaaaaa

SEQ ID NO: 2889307 - RNA, 15 nt, Human
uccugucuuucugag

SEQ ID NO: 2889308 - RNA, 18 nt, Human
uccugucuuuaaggaaaa

SEQ ID NO: 2889309 - RNA, 17 nt, Human
uccugucuuuaaggaaa

SEQ ID NO: 2889310 - RNA, 14 nt, Human
uccuggguaaugag

SEQ ID NO: 2889311 - RNA, 19 nt, Human
uccuggguucaagcgauuu

SEQ ID NO: 2889312 - RNA, 13 nt, Human
uccuguguacugu

SEQ ID NO: 2889313 - RNA, 15 nt, Human
uccuguguacugugu

SEQ ID NO: 2889314 - RNA, 16 nt, Human
uccuguguacuguguc

SEQ ID NO: 2889315 - RNA, 17 nt, Human
uccuguguacuguguca

SEQ ID NO: 2889316 - RNA, 13 nt, Human
uccuguggggaaa

SEQ ID NO: 2889317 - RNA, 15 nt, Human
uccuguggggaaagg

SEQ ID NO: 2889318 - RNA, 11 nt, Human
uccugugagga

SEQ ID NO: 2889319 - RNA, 18 nt, Human
uccugugaggagccccau

SEQ ID NO: 2889320 - RNA, 22 nt, Human
uccugugaggagccccaucugu

SEQ ID NO: 2889321 - RNA, 17 nt, Human
uccugugagguuuccca

SEQ ID NO: 2889322 - RNA, 18 nt, Human
uccugugagguuucccaa

SEQ ID NO: 2889323 - RNA, 19 nt, Human
uccugugagguuucccaau

SEQ ID NO: 2889324 - RNA, 18 nt, Human
uccugugacuucagcucu

SEQ ID NO: 2889325 - RNA, 21 nt, Human
uccugugauccacccaacccu

SEQ ID NO: 2889326 - RNA, 17 nt, Human
uccugugaucuuauuuu

SEQ ID NO: 2889327 - RNA, 12 nt, Human
uccugugcuggg

SEQ ID NO: 2889328 - RNA, 14 nt, Human
uccugugcuggggg

SEQ ID NO: 2889329 - RNA, 17 nt, Human
uccuguggaacccagca

SEQ ID NO: 2889330 - RNA, 18 nt, Human
uccuguggaacccagcag

SEQ ID NO: 2889331 - RNA, 22 nt, Human
uccuguggaacccagcaguucu

SEQ ID NO: 2889332 - RNA, 14 nt, Human
uccugugugugcgc

SEQ ID NO: 2889333 - RNA, 13 nt, Human
uccugugugugcg

SEQ ID NO: 2889334 - RNA, 18 nt, Human
uccugugugugcgccuac

SEQ ID NO: 2889335 - RNA, 24 nt, Human
uccugugucuugcaauggcagccu

SEQ ID NO: 2889336 - RNA, 23 nt, Human
uccugugucuugcaauggcagcc

SEQ ID NO: 2889337 - RNA, 16 nt, Human
uccugugucaauccag

SEQ ID NO: 2889338 - RNA, 15 nt, Human
uccugugugcaguga

SEQ ID NO: 2889339 - RNA, 16 nt, Human
uccuguuagcuccuca

SEQ ID NO: 2889340 - RNA, 23 nt, Human
uccuguuagcuccucacuguggu

SEQ ID NO: 2889341 - RNA, 21 nt, Human
uccuguuaauguauuuguuca

SEQ ID NO: 2889342 - RNA, 21 nt, Human
uccuguuggauuuguuuaaaa

SEQ ID NO: 2889343 - RNA, 20 nt, Human
uccuguuuuauaaugaaccc

SEQ ID NO: 2889344 - RNA, 21 nt, Human
uccuguuucccuucccuucca

SEQ ID NO: 2889345 - RNA, 22 nt, Human
uccuguuucccuucccuuccac

SEQ ID NO: 2889346 - RNA, 13 nt, Human
uccuguuucugaa

SEQ ID NO: 2889347 - RNA, 17 nt, Human
uccuguuucugaaaaga

SEQ ID NO: 2889348 - RNA, 18 nt, Human
uccuguuucugaaaagaa

SEQ ID NO: 2889349 - RNA, 19 nt, Human
uccuguuucugaaaagaaa

SEQ ID NO: 2889350 - RNA, 21 nt, Human
uccuguuucugaaaagaaaua

SEQ ID NO: 2889351 - RNA, 22 nt, Human
uccuguuucugaaaagaaauaa

SEQ ID NO: 2889352 - RNA, 18 nt, Human
uccuguuuauucccaucu

SEQ ID NO: 2889353 - RNA, 23 nt, Human
acugcagccucaaccuccugggc

SEQ ID NO: 2889354 - RNA, 19 nt, Human
acugcagcaaucuuugaaa

SEQ ID NO: 2889355 - RNA, 21 nt, Human
acugcagcaaucuuugaaaga

SEQ ID NO: 2889356 - RNA, 19 nt, Human
acugcaggcaucacagcua

SEQ ID NO: 2889357 - RNA, 15 nt, Human
acugcagcuuuacau

SEQ ID NO: 2889358 - RNA, 16 nt, Human
acugcagggacugcca

SEQ ID NO: 2889359 - RNA, 13 nt, Human
acugcagggccag

SEQ ID NO: 2889360 - RNA, 15 nt, Human
acugcagggccagga

SEQ ID NO: 2889361 - RNA, 16 nt, Human
acugcagggccaggac

SEQ ID NO: 2889362 - RNA, 17 nt, Human
acugcagggccaggacu

SEQ ID NO: 2889363 - RNA, 20 nt, Human
acugcagggccaggacugag

SEQ ID NO: 2889364 - RNA, 17 nt, Human
acugcagggacugccag

SEQ ID NO: 2889365 - RNA, 18 nt, Human
acugcagggacugccagu

SEQ ID NO: 2889366 - RNA, 22 nt, Human
uccuuaaaggcaccaucuaaua

SEQ ID NO: 2889367 - RNA, 16 nt, Human
uccuguuuuucugggu

SEQ ID NO: 2889368 - RNA, 17 nt, Human
uccuguuuuucugggug

SEQ ID NO: 2889369 - RNA, 20 nt, Human
uccuguuuuucuggguggcc

SEQ ID NO: 2889370 - RNA, 18 nt, Human
uccuuaaaauguaagauu

SEQ ID NO: 2889371 - RNA, 12 nt, Human
uccuuaaaaauc

SEQ ID NO: 2889372 - RNA, 18 nt, Human
uccuuaaaaaucacacug

SEQ ID NO: 2889373 - RNA, 19 nt, Human
uccuuaaaaaucacacugu

SEQ ID NO: 2889374 - RNA, 22 nt, Human
acugcagccucaaccuccuggg

SEQ ID NO: 2889375 - RNA, 21 nt, Human
acugcagccucaaccuccugg

SEQ ID NO: 2889376 - RNA, 19 nt, Human
acugcagccucaaccuccu

SEQ ID NO: 2889377 - RNA, 23 nt, Human
uccuuaaaggcaccaucuaauag

SEQ ID NO: 2889378 - RNA, 22 nt, Human
acugagggaccaacugggccca

SEQ ID NO: 2889379 - RNA, 14 nt, Human
acugagggacucug

SEQ ID NO: 2889380 - RNA, 17 nt, Human
acugagggacucugaag

SEQ ID NO: 2889381 - RNA, 18 nt, Human
acugagggacucugaagc

SEQ ID NO: 2889382 - RNA, 21 nt, Human
acugagggaccaacugggccc

SEQ ID NO: 2889383 - RNA, 20 nt, Human
acugagggaccaacugggcc

SEQ ID NO: 2889384 - RNA, 19 nt, Human
acugaggccugagacccag

SEQ ID NO: 2889385 - RNA, 20 nt, Human
acugaggccugagacccagg

SEQ ID NO: 2889386 - RNA, 21 nt, Human
acugaggccugagacccagga

SEQ ID NO: 2889387 - RNA, 20 nt, Human
acugaggaauuuucuuugug

SEQ ID NO: 2889388 - RNA, 19 nt, Human
acugaggacaaaguggagg

SEQ ID NO: 2889389 - RNA, 15 nt, Human
acugaggaccagcca

SEQ ID NO: 2889390 - RNA, 15 nt, Human
uccucuccccagcaa

SEQ ID NO: 2889391 - RNA, 16 nt, Human
acugaggaauuuucuu

SEQ ID NO: 2889392 - RNA, 22 nt, Human
acugcaaccuccgccucuuggg

SEQ ID NO: 2889393 - RNA, 16 nt, Human
acugcaaccuccgccu

SEQ ID NO: 2889394 - RNA, 15 nt, Human
acugcaaccucugcc

SEQ ID NO: 2889395 - RNA, 20 nt, Human
acugcaaccuucgccaccug

SEQ ID NO: 2889396 - RNA, 15 nt, Human
acugcaaucauaugu

SEQ ID NO: 2889397 - RNA, 17 nt, Human
acugcaaucauauguga

SEQ ID NO: 2889398 - RNA, 14 nt, Human
acugcaaccuccgc

SEQ ID NO: 2889399 - RNA, 13 nt, Human
acugcaaccuccg

SEQ ID NO: 2889400 - RNA, 18 nt, Human
acugcaacaggcuugugc

SEQ ID NO: 2889401 - RNA, 22 nt, Human
acugagggacucugaagccucu

SEQ ID NO: 2889402 - RNA, 16 nt, Human
acugagugccuuuugg

SEQ ID NO: 2889403 - RNA, 20 nt, Human
acugaguagcucuccugacu

SEQ ID NO: 2889404 - RNA, 12 nt, Human
uccugcagcaug

SEQ ID NO: 2889405 - RNA, 17 nt, Human
uccugcagcaugguccc

SEQ ID NO: 2889406 - RNA, 22 nt, Human
uccugcagcauggucccugccu

SEQ ID NO: 2889407 - RNA, 23 nt, Human
uccugaugguacaggaaagcuca

SEQ ID NO: 2889408 - RNA, 13 nt, Human
uccugcaaugaaa

SEQ ID NO: 2889409 - RNA, 14 nt, Human
uccugcaaugaaag

SEQ ID NO: 2889410 - RNA, 19 nt, Human
uccugaguagcuggauuac

SEQ ID NO: 2889411 - RNA, 20 nt, Human
uccugaguagcugggauuac

SEQ ID NO: 2889412 - RNA, 22 nt, Human
uccugaggggcaucugccccuc

SEQ ID NO: 2889413 - RNA, 21 nt, Human
uccugaggggcaucugccccu

SEQ ID NO: 2889414 - RNA, 17 nt, Human
uccugaggguccccacc

SEQ ID NO: 2889415 - RNA, 19 nt, Human
uccugaggguccccaccug

SEQ ID NO: 2889416 - RNA, 22 nt, Human
uccugaggguccccaccuggga

SEQ ID NO: 2889417 - RNA, 23 nt, Human
uccugauaugauuuaaaacaugu

SEQ ID NO: 2889418 - RNA, 24 nt, Human
uccugauaugauuuaaaacaugua

SEQ ID NO: 2889419 - RNA, 21 nt, Human
uccugauggcaggauggccug

SEQ ID NO: 2889420 - RNA, 18 nt, Human
uccugaugguacaggaaa

SEQ ID NO: 2889421 - RNA, 16 nt, Human
uccugaguggccaggg

SEQ ID NO: 2889422 - RNA, 17 nt, Human
uccugaguggccaggga

SEQ ID NO: 2889423 - RNA, 21 nt, Human
uccugauaaaacaacagcucg

SEQ ID NO: 2889424 - RNA, 15 nt, Human
uccugauaaagcaca

SEQ ID NO: 2889425 - RNA, 18 nt, Human
uccugauaaagcacagcu

SEQ ID NO: 2889426 - RNA, 20 nt, Human
uccugauaaagcacagcugu

SEQ ID NO: 2889427 - RNA, 21 nt, Human
uccugauaaagcacagcugua

SEQ ID NO: 2889428 - RNA, 16 nt, Human
acugcacagugcaucu

SEQ ID NO: 2889429 - RNA, 20 nt, Human
acugcacagcggccccugca

SEQ ID NO: 2889430 - RNA, 22 nt, Human
acugcacagcggccccugcauc

SEQ ID NO: 2889431 - RNA, 20 nt, Human
uccugaggggcaucugcccc

SEQ ID NO: 2889432 - RNA, 18 nt, Human
acugcacagugcaucuca

SEQ ID NO: 2889433 - RNA, 20 nt, Human
acugcaauccugucuuucug

SEQ ID NO: 2889434 - RNA, 15 nt, Human
acugcaaccuucacc

SEQ ID NO: 2889435 - RNA, 17 nt, Human
acugcaaccucugccuc

SEQ ID NO: 2889436 - RNA, 21 nt, Human
acugcaauccugucuuucuga

SEQ ID NO: 2889437 - RNA, 15 nt, Human
acugcaaugugaucu

SEQ ID NO: 2889438 - RNA, 19 nt, Human
uccugccucagccucccaa

SEQ ID NO: 2889439 - RNA, 20 nt, Human
uccugcaggccaggccagcu

SEQ ID NO: 2889440 - RNA, 19 nt, Human
uccugcaggccaggccagc

SEQ ID NO: 2889441 - RNA, 14 nt, Human
uccugcaggccagg

SEQ ID NO: 2889442 - RNA, 20 nt, Human
uccugccucgaacuggcugc

SEQ ID NO: 2889443 - RNA, 17 nt, Human
uccugccucagccuccg

SEQ ID NO: 2889444 - RNA, 14 nt, Human
uccugccuccgccu

SEQ ID NO: 2889445 - RNA, 18 nt, Human
uccugccucagccucccg

SEQ ID NO: 2889446 - RNA, 21 nt, Human
uccugccucagccucccgagu

SEQ ID NO: 2889447 - RNA, 12 nt, Human
uccugcuccaga

SEQ ID NO: 2889448 - RNA, 13 nt, Human
uccugcuccagaa

SEQ ID NO: 2889449 - RNA, 14 nt, Human
uccugcuccagaau

SEQ ID NO: 2889450 - RNA, 20 nt, Human
uccugcuccagaauuuggaa

SEQ ID NO: 2889451 - RNA, 15 nt, Human
uccagccccuuucca

SEQ ID NO: 2889452 - RNA, 16 nt, Human
uccagccccuuuccaa

SEQ ID NO: 2889453 - RNA, 17 nt, Human
uccagccccuuuccaaa

SEQ ID NO: 2889454 - RNA, 18 nt, Human
uccagccccuuuccaaaa

SEQ ID NO: 2889455 - RNA, 13 nt, Human
uccagcccgggag

SEQ ID NO: 2889456 - RNA, 14 nt, Human
uccagcccgggagc

SEQ ID NO: 2889457 - RNA, 23 nt, Human
uccagaccccuggcuuuucacug

SEQ ID NO: 2889458 - RNA, 11 nt, Human
uccagccuggg

SEQ ID NO: 2889459 - RNA, 23 nt, Human
uccagccugggcagccaggcugc

SEQ ID NO: 2889460 - RNA, 22 nt, Human
uccagccugggcagccaggcug

SEQ ID NO: 2889461 - RNA, 19 nt, Human
uccagccugggcagccagg

SEQ ID NO: 2889462 - RNA, 20 nt, Human
uccagccugggcaacagagc

SEQ ID NO: 2889463 - RNA, 13 nt, Human
uccagccugggca

SEQ ID NO: 2889464 - RNA, 12 nt, Human
uccagccugggc

SEQ ID NO: 2889465 - RNA, 13 nt, Human
uccagccugagca

SEQ ID NO: 2889466 - RNA, 15 nt, Human
uccagaccccuggcu

SEQ ID NO: 2889467 - RNA, 16 nt, Human
uccagaccccuggcuu

SEQ ID NO: 2889468 - RNA, 17 nt, Human
uccagaccccuggcuuu

SEQ ID NO: 2889469 - RNA, 18 nt, Human
uccagaccccuggcuuuu

SEQ ID NO: 2889470 - RNA, 13 nt, Human
accuugaaugcug

SEQ ID NO: 2889471 - RNA, 15 nt, Human
accuugaaugcugcc

SEQ ID NO: 2889472 - RNA, 16 nt, Human
accuugaaugcugcca

SEQ ID NO: 2889473 - RNA, 17 nt, Human
accuugaaugcugccag

SEQ ID NO: 2889474 - RNA, 18 nt, Human
accuugaaugcugccagu

SEQ ID NO: 2889475 - RNA, 17 nt, Human
accuuuguacagcccag

SEQ ID NO: 2889476 - RNA, 18 nt, Human
accuuuguacagcccaga

SEQ ID NO: 2889477 - RNA, 22 nt, Human
accuuuguacagcccagaggcc

SEQ ID NO: 2889478 - RNA, 22 nt, Human
accuuuguagcacucaggcucu

SEQ ID NO: 2889479 - RNA, 13 nt, Human
uccacuacuccgu

SEQ ID NO: 2889480 - RNA, 17 nt, Human
uccacguauuccccuuc

SEQ ID NO: 2889481 - RNA, 18 nt, Human
uccacguauuccccuucc

SEQ ID NO: 2889482 - RNA, 20 nt, Human
uccacguauuccccuuccca

SEQ ID NO: 2889483 - RNA, 18 nt, Human
uccagaaucuaaagccag

SEQ ID NO: 2889484 - RNA, 19 nt, Human
uccagaaucuaaagccagu

SEQ ID NO: 2889485 - RNA, 14 nt, Human
uccagaaucuaaag

SEQ ID NO: 2889486 - RNA, 13 nt, Human
uccagaccccugg

SEQ ID NO: 2889487 - RNA, 16 nt, Human
uccagaaugcuguaca

SEQ ID NO: 2889488 - RNA, 15 nt, Human
uccagaaugcuguac

SEQ ID NO: 2889489 - RNA, 13 nt, Human
uccagaaugcugu

SEQ ID NO: 2889490 - RNA, 17 nt, Human
uccacucugauagaauu

SEQ ID NO: 2889491 - RNA, 18 nt, Human
uccacucugauagaauua

SEQ ID NO: 2889492 - RNA, 19 nt, Human
uccacucugauagaauuau

SEQ ID NO: 2889493 - RNA, 21 nt, Human
accuuaggccuuccucucucc

SEQ ID NO: 2889494 - RNA, 18 nt, Human
accuuaggccuuccucuc

SEQ ID NO: 2889495 - RNA, 20 nt, Human
accuuaggccuuccucucuc

SEQ ID NO: 2889496 - RNA, 14 nt, Human
accuuaggccuucc

SEQ ID NO: 2889497 - RNA, 15 nt, Human
accuuaggccuuccu

SEQ ID NO: 2889498 - RNA, 16 nt, Human
accuuaggccuuccuc

SEQ ID NO: 2889499 - RNA, 17 nt, Human
accuuaggccuuccucu

SEQ ID NO: 2889500 - RNA, 14 nt, Human
accuuagccugccc

SEQ ID NO: 2889501 - RNA, 13 nt, Human
accuuaggccuuc

SEQ ID NO: 2889502 - RNA, 22 nt, Human
accuuaggcccggagcugcccc

SEQ ID NO: 2889503 - RNA, 22 nt, Human
accuuagcuggcauuacagcug

SEQ ID NO: 2889504 - RNA, 21 nt, Human
accuuagcuggcauuacagcu

SEQ ID NO: 2889505 - RNA, 21 nt, Human
accuuagauuuaguaguguaa

SEQ ID NO: 2889506 - RNA, 13 nt, Human
accuuagcucccu

SEQ ID NO: 2889507 - RNA, 19 nt, Human
accuuagcucccucccgca

SEQ ID NO: 2889508 - RNA, 20 nt, Human
accuuagcucccucccgcac

SEQ ID NO: 2889509 - RNA, 23 nt, Human
accuuagcucccucccgcacccc

SEQ ID NO: 2889510 - RNA, 22 nt, Human
accuggucacaggacucugccu

SEQ ID NO: 2889511 - RNA, 23 nt, Human
accuggucacaggacucugccuc

SEQ ID NO: 2889512 - RNA, 15 nt, Human
accuuaccaacuuuc

SEQ ID NO: 2889513 - RNA, 16 nt, Human
accuuaccaacuuucu

SEQ ID NO: 2889514 - RNA, 17 nt, Human
accuuaccaacuuucug

SEQ ID NO: 2889515 - RNA, 18 nt, Human
accuuaccaacuuucugu

SEQ ID NO: 2889516 - RNA, 21 nt, Human
accuuacuguggaggaaggau

SEQ ID NO: 2889517 - RNA, 19 nt, Human
accuuaccaacuuucugua

SEQ ID NO: 2889518 - RNA, 15 nt, Human
accuuacuguggagg

SEQ ID NO: 2889519 - RNA, 20 nt, Human
accuuaccaacuuucuguaa

SEQ ID NO: 2889520 - RNA, 14 nt, Human
accuuaccccuggc

SEQ ID NO: 2889521 - RNA, 22 nt, Human
accuuaccccuggcuguuugga

SEQ ID NO: 2889522 - RNA, 17 nt, Human
accuuacgaucaggcac

SEQ ID NO: 2889523 - RNA, 18 nt, Human
accuuacgaucaggcaca

SEQ ID NO: 2889524 - RNA, 19 nt, Human
accuuacgaucaggcacag

SEQ ID NO: 2889525 - RNA, 20 nt, Human
accuuacgaucaggcacagg

SEQ ID NO: 2889526 - RNA, 21 nt, Human
accuuacgaucaggcacaggu

SEQ ID NO: 2889527 - RNA, 22 nt, Human
accugguuaaacaaaccagaau

SEQ ID NO: 2889528 - RNA, 12 nt, Human
accuuaagaccu

SEQ ID NO: 2889529 - RNA, 22 nt, Human
accuuaagaccuacuguucuaa

SEQ ID NO: 2889530 - RNA, 19 nt, Human
accuuaucacugcauuauu

SEQ ID NO: 2889531 - RNA, 23 nt, Human
accuuaucacugcauuauucucu

SEQ ID NO: 2889532 - RNA, 15 nt, Human
accuuauccugcauu

SEQ ID NO: 2889533 - RNA, 16 nt, Human
accuuauccugcauug

SEQ ID NO: 2889534 - RNA, 18 nt, Human
accuuauccugcauuguu

SEQ ID NO: 2889535 - RNA, 14 nt, Human
accuucccaaacgc

SEQ ID NO: 2889536 - RNA, 19 nt, Human
accuuccauggcucuuuuu

SEQ ID NO: 2889537 - RNA, 17 nt, Human
accuuccagcuccugua

SEQ ID NO: 2889538 - RNA, 14 nt, Human
accuuccaggaccc

SEQ ID NO: 2889539 - RNA, 15 nt, Human
accuuccaggacccc

SEQ ID NO: 2889540 - RNA, 13 nt, Human
accuuccagcucc

SEQ ID NO: 2889541 - RNA, 14 nt, Human
accuuccagcuccu

SEQ ID NO: 2889542 - RNA, 23 nt, Human
accuucucccucauuucaggagc

SEQ ID NO: 2889543 - RNA, 22 nt, Human
accuucuaggacgccacccagc

SEQ ID NO: 2889544 - RNA, 19 nt, Human
accuucccaaacgccuccc

SEQ ID NO: 2889545 - RNA, 21 nt, Human
accuucccaaacgccuccccu

SEQ ID NO: 2889546 - RNA, 22 nt, Human
accuucccaaacgccuccccug

SEQ ID NO: 2889547 - RNA, 12 nt, Human
accuucuguggc

SEQ ID NO: 2889548 - RNA, 13 nt, Human
accuucuguggcu

SEQ ID NO: 2889549 - RNA, 15 nt, Human
accuucuguggcuca

SEQ ID NO: 2889550 - RNA, 20 nt, Human
accuucuucagccaccucuc

SEQ ID NO: 2889551 - RNA, 18 nt, Human
accuucuucaggcugccu

SEQ ID NO: 2889552 - RNA, 19 nt, Human
accuucuucaggcugccua

SEQ ID NO: 2889553 - RNA, 19 nt, Human
accuucuucagccaccucu

SEQ ID NO: 2889554 - RNA, 16 nt, Human
accuucuguggcucac

SEQ ID NO: 2889555 - RNA, 14 nt, Human
accuugacagggca

SEQ ID NO: 2889556 - RNA, 15 nt, Human
accuugacagggcac

SEQ ID NO: 2889557 - RNA, 17 nt, Human
accuucuuucacucugu

SEQ ID NO: 2889558 - RNA, 15 nt, Human
accuucuuauuauau

SEQ ID NO: 2889559 - RNA, 19 nt, Human
accuucuuauuauauauau

SEQ ID NO: 2889560 - RNA, 18 nt, Human
uccaagcuccaucuccac

SEQ ID NO: 2889561 - RNA, 13 nt, Human
uccaaccuuccca

SEQ ID NO: 2889562 - RNA, 12 nt, Human
uccaagcucccu

SEQ ID NO: 2889563 - RNA, 14 nt, Human
uccaagcucccugc

SEQ ID NO: 2889564 - RNA, 15 nt, Human
uccaagcucccugcc

SEQ ID NO: 2889565 - RNA, 18 nt, Human
uccaagcucccugcccca

SEQ ID NO: 2889566 - RNA, 17 nt, Human
uccaagcugagagucua

SEQ ID NO: 2889567 - RNA, 14 nt, Human
uccaaccuucccaa

SEQ ID NO: 2889568 - RNA, 13 nt, Human
uccaacagugagu

SEQ ID NO: 2889569 - RNA, 13 nt, Human
uccaacguuugga

SEQ ID NO: 2889570 - RNA, 15 nt, Human
uccaacguuuggaag

SEQ ID NO: 2889571 - RNA, 21 nt, Human
uccaacguuuggaagauccug

SEQ ID NO: 2889572 - RNA, 21 nt, Human
uccaacaccacagacacacac

SEQ ID NO: 2889573 - RNA, 22 nt, Human
uccaacaccacagacacacaca

SEQ ID NO: 2889574 - RNA, 17 nt, Human
uccaacagaacuaaaug

SEQ ID NO: 2889575 - RNA, 20 nt, Human
uccaacagaacuaaauguuc

SEQ ID NO: 2889576 - RNA, 17 nt, Human
uccaacaccacagacac

SEQ ID NO: 2889577 - RNA, 18 nt, Human
uccaacaccacagacaca

SEQ ID NO: 2889578 - RNA, 19 nt, Human
uccaacaccacagacacac

SEQ ID NO: 2889579 - RNA, 20 nt, Human
uccaacaccacagacacaca

SEQ ID NO: 2889580 - RNA, 16 nt, Human
uccaaaugcaauuuga

SEQ ID NO: 2889581 - RNA, 16 nt, Human
uccaacaccacagaca

SEQ ID NO: 2889582 - RNA, 14 nt, Human
uccaaauaauaaag

SEQ ID NO: 2889583 - RNA, 15 nt, Human
uccaaauaauaaagu

SEQ ID NO: 2889584 - RNA, 16 nt, Human
uccaaauaauaaaguc

SEQ ID NO: 2889585 - RNA, 15 nt, Human
uccaaaugcagcuuu

SEQ ID NO: 2889586 - RNA, 14 nt, Human
uccaaaugcagcuu

SEQ ID NO: 2889587 - RNA, 11 nt, Human
uccaagcuggu

SEQ ID NO: 2889588 - RNA, 14 nt, Human
uccaaguuuccaaa

SEQ ID NO: 2889589 - RNA, 15 nt, Human
uccaaguuuccaaac

SEQ ID NO: 2889590 - RNA, 14 nt, Human
uccacaggucuaga

SEQ ID NO: 2889591 - RNA, 15 nt, Human
uccacaggucuagac

SEQ ID NO: 2889592 - RNA, 16 nt, Human
uccacaggucuagacu

SEQ ID NO: 2889593 - RNA, 17 nt, Human
uccacaggucuagacua

SEQ ID NO: 2889594 - RNA, 23 nt, Human
uccaauaagacacucaaauauga

SEQ ID NO: 2889595 - RNA, 13 nt, Human
uccaauauuucug

SEQ ID NO: 2889596 - RNA, 15 nt, Human
uccaauauuucugcu

SEQ ID NO: 2889597 - RNA, 16 nt, Human
uccaauauuucugcuu

SEQ ID NO: 2889598 - RNA, 23 nt, Human
uccaauauuucugcuuucuuuga

SEQ ID NO: 2889599 - RNA, 20 nt, Human
uccaaucagagaccaggccc

SEQ ID NO: 2889600 - RNA, 21 nt, Human
uccaaucagagaccaggcccu

SEQ ID NO: 2889601 - RNA, 23 nt, Human
uccaaucagagaccaggcccugg

SEQ ID NO: 2889602 - RNA, 20 nt, Human
uccaccagcaucaccugccu

SEQ ID NO: 2889603 - RNA, 22 nt, Human
uccaccagcccauggcccugug

SEQ ID NO: 2889604 - RNA, 19 nt, Human
uccaccagcaucaccugcc

SEQ ID NO: 2889605 - RNA, 12 nt, Human
uccaccagcauc

SEQ ID NO: 2889606 - RNA, 22 nt, Human
uccaccaccucccucaccaaca

SEQ ID NO: 2889607 - RNA, 13 nt, Human
uccaccaccgccc

SEQ ID NO: 2889608 - RNA, 22 nt, Human
uccaccaccgcccgucugugug

SEQ ID NO: 2889609 - RNA, 14 nt, Human
uccaccaccucccu

SEQ ID NO: 2889610 - RNA, 16 nt, Human
uccaccaccucccuca

SEQ ID NO: 2889611 - RNA, 17 nt, Human
uccaccaccucccucac

SEQ ID NO: 2889612 - RNA, 18 nt, Human
uccaccaccucccucacc

SEQ ID NO: 2889613 - RNA, 17 nt, Human
uccaccaagaaagcagg

SEQ ID NO: 2889614 - RNA, 12 nt, Human
uccacaguugcc

SEQ ID NO: 2889615 - RNA, 14 nt, Human
uccacaguugccac

SEQ ID NO: 2889616 - RNA, 16 nt, Human
uccacaguugccacca

SEQ ID NO: 2889617 - RNA, 19 nt, Human
uccacaguugccaccaccu

SEQ ID NO: 2889618 - RNA, 20 nt, Human
uccacaguugccaccaccuc

SEQ ID NO: 2889619 - RNA, 21 nt, Human
uccacaguugccaccaccucu

SEQ ID NO: 2889620 - RNA, 13 nt, Human
uccacauuucuaa

SEQ ID NO: 2889621 - RNA, 14 nt, Human
uccacauuucuaaa

SEQ ID NO: 2889622 - RNA, 16 nt, Human
uccacauuucuaaaau

SEQ ID NO: 2889623 - RNA, 15 nt, Human
uccacauuucuaaaa

SEQ ID NO: 2889624 - RNA, 17 nt, Human
uccaaagucucuaauuc

SEQ ID NO: 2889625 - RNA, 18 nt, Human
uccaaagucucuaauucu

SEQ ID NO: 2889626 - RNA, 13 nt, Human
uccaaagucucua

SEQ ID NO: 2889627 - RNA, 14 nt, Human
uccaaagucucuaa

SEQ ID NO: 2889628 - RNA, 13 nt, Human
ucauuuuccaaua

SEQ ID NO: 2889629 - RNA, 14 nt, Human
ucauuuuccaauac

SEQ ID NO: 2889630 - RNA, 15 nt, Human
ucauuuuccccccac

SEQ ID NO: 2889631 - RNA, 15 nt, Human
ucauuuuauauugaa

SEQ ID NO: 2889632 - RNA, 16 nt, Human
ucauuuuauauugaaa

SEQ ID NO: 2889633 - RNA, 17 nt, Human
ucauuuuauauugaaaa

SEQ ID NO: 2889634 - RNA, 18 nt, Human
ucauuuuauauugaaaaa

SEQ ID NO: 2889635 - RNA, 13 nt, Human
ucauuuuuucuua

SEQ ID NO: 2889636 - RNA, 17 nt, Human
ucauuuuuuuaauuuau

SEQ ID NO: 2889637 - RNA, 21 nt, Human
ucauuugagcagggcucagcg

SEQ ID NO: 2889638 - RNA, 14 nt, Human
ucauuugcugugaa

SEQ ID NO: 2889639 - RNA, 22 nt, Human
ucauuuguuaaaauuaucaaua

SEQ ID NO: 2889640 - RNA, 16 nt, Human
ucauuugugugcucau

SEQ ID NO: 2889641 - RNA, 13 nt, Human
ucauuugugucaa

SEQ ID NO: 2889642 - RNA, 15 nt, Human
ucauuugugucaaug

SEQ ID NO: 2889643 - RNA, 12 nt, Human
ucauuuguguca

SEQ ID NO: 2889644 - RNA, 21 nt, Human
ucauuuguggugauauagaau

SEQ ID NO: 2889645 - RNA, 23 nt, Human
ucauuuguggugauauagaauua

SEQ ID NO: 2889646 - RNA, 18 nt, Human
ucauuugugccagaaugc

SEQ ID NO: 2889647 - RNA, 21 nt, Human
ucauuuguggcagucccuuau

SEQ ID NO: 2889648 - RNA, 18 nt, Human
ucauuuuacccuuggcuc

SEQ ID NO: 2889649 - RNA, 15 nt, Human
ucauuuuaggaaagg

SEQ ID NO: 2889650 - RNA, 15 nt, Human
ucauuuguuuuucuc

SEQ ID NO: 2889651 - RNA, 12 nt, Human
ucauuuuaaugu

SEQ ID NO: 2889652 - RNA, 13 nt, Human
ucauuuuaaugua

SEQ ID NO: 2889653 - RNA, 15 nt, Human
ucauuuuaauguaaa

SEQ ID NO: 2889654 - RNA, 17 nt, Human
ucauuuuaauguaaaga

SEQ ID NO: 2889655 - RNA, 19 nt, Human
ucauuuuaauguaaagauu

SEQ ID NO: 2889656 - RNA, 15 nt, Human
ucauuuguuggaaug

SEQ ID NO: 2889657 - RNA, 12 nt, Human
ucauuuguugug

SEQ ID NO: 2889658 - RNA, 16 nt, Human
ucauuuguugugaugu

SEQ ID NO: 2889659 - RNA, 20 nt, Human
ucauuuguugugaugucuuu

SEQ ID NO: 2889660 - RNA, 22 nt, Human
ucauuuguugugaugucuuuuc

SEQ ID NO: 2889661 - RNA, 22 nt, Human
ucauuuguucugggaguauaaa

SEQ ID NO: 2889662 - RNA, 18 nt, Human
accugcucuccucuugcc

SEQ ID NO: 2889663 - RNA, 17 nt, Human
accugcucuccucuugc

SEQ ID NO: 2889664 - RNA, 19 nt, Human
ucauuugagcagggcucag

SEQ ID NO: 2889665 - RNA, 15 nt, Human
accugcuuugacuga

SEQ ID NO: 2889666 - RNA, 13 nt, Human
accugcuuuuuga

SEQ ID NO: 2889667 - RNA, 15 nt, Human
accugcuuuuugaaa

SEQ ID NO: 2889668 - RNA, 16 nt, Human
accugcuuuuugaaau

SEQ ID NO: 2889669 - RNA, 17 nt, Human
accugcuuuuugaaaug

SEQ ID NO: 2889670 - RNA, 18 nt, Human
accugcuuuuugaaauga

SEQ ID NO: 2889671 - RNA, 21 nt, Human
accugcuuuuugaaaugaaau

SEQ ID NO: 2889672 - RNA, 23 nt, Human
accugcuuuuugaaaugaaauuu

SEQ ID NO: 2889673 - RNA, 17 nt, Human
accuggaaaaauuccag

SEQ ID NO: 2889674 - RNA, 19 nt, Human
accuggaaaaauuccagaa

SEQ ID NO: 2889675 - RNA, 19 nt, Human
accugcucuccucuugcca

SEQ ID NO: 2889676 - RNA, 19 nt, Human
accugcugaagggcagagg

SEQ ID NO: 2889677 - RNA, 23 nt, Human
ucauccacugugccaugugccag

SEQ ID NO: 2889678 - RNA, 21 nt, Human
ucauccacugugccaugugcc

SEQ ID NO: 2889679 - RNA, 19 nt, Human
ucauccacugugccaugug

SEQ ID NO: 2889680 - RNA, 20 nt, Human
ucaugaauucuuaugcuuau

SEQ ID NO: 2889681 - RNA, 22 nt, Human
ucaugaauuuauugcacauugu

SEQ ID NO: 2889682 - RNA, 23 nt, Human
ucaugaauuuauugcacauuguu

SEQ ID NO: 2889683 - RNA, 19 nt, Human
ucaugacauguuauauauu

SEQ ID NO: 2889684 - RNA, 21 nt, Human
ucaugacauguuauauauuuu

SEQ ID NO: 2889685 - RNA, 16 nt, Human
ucaugacaagcauuuu

SEQ ID NO: 2889686 - RNA, 14 nt, Human
ucaugacauguuau

SEQ ID NO: 2889687 - RNA, 17 nt, Human
ucaugacauguuauaua

SEQ ID NO: 2889688 - RNA, 14 nt, Human
accuccucccuguu

SEQ ID NO: 2889689 - RNA, 15 nt, Human
accuccucccuguua

SEQ ID NO: 2889690 - RNA, 13 nt, Human
ucaugaauuuuac

SEQ ID NO: 2889691 - RNA, 14 nt, Human
ucaugaauuuuaca

SEQ ID NO: 2889692 - RNA, 16 nt, Human
ucaugaauuuuacaug

SEQ ID NO: 2889693 - RNA, 19 nt, Human
ucaugaauuuuacauggua

SEQ ID NO: 2889694 - RNA, 14 nt, Human
ucaugucaggccug

SEQ ID NO: 2889695 - RNA, 16 nt, Human
ucaugucaggccugug

SEQ ID NO: 2889696 - RNA, 17 nt, Human
ucaugucaggccugugu

SEQ ID NO: 2889697 - RNA, 19 nt, Human
ucaugucaggccugugugu

SEQ ID NO: 2889698 - RNA, 21 nt, Human
ucaugccagcuacuuccuccu

SEQ ID NO: 2889699 - RNA, 23 nt, Human
ucaugccagcuacuuccuccucc

SEQ ID NO: 2889700 - RNA, 22 nt, Human
ucaugccaccauggccagccaa

SEQ ID NO: 2889701 - RNA, 12 nt, Human
ucaugccagcua

SEQ ID NO: 2889702 - RNA, 19 nt, Human
ucaugccaccauggccagc

SEQ ID NO: 2889703 - RNA, 17 nt, Human
ucaugcaugucaaacau

SEQ ID NO: 2889704 - RNA, 20 nt, Human
ucaugaggaggggccccccu

SEQ ID NO: 2889705 - RNA, 20 nt, Human
ucaugaggaaagcaguugaa

SEQ ID NO: 2889706 - RNA, 20 nt, Human
ucauguuauauuuaaugcau

SEQ ID NO: 2889707 - RNA, 22 nt, Human
ucauguuauauuuaaugcauua

SEQ ID NO: 2889708 - RNA, 14 nt, Human
ucauguguucccuu

SEQ ID NO: 2889709 - RNA, 15 nt, Human
ucauguguucccuuu

SEQ ID NO: 2889710 - RNA, 17 nt, Human
ucauguguucccuuugu

SEQ ID NO: 2889711 - RNA, 13 nt, Human
ucaugucuggcua

SEQ ID NO: 2889712 - RNA, 22 nt, Human
ucauguugcacacccacucagc

SEQ ID NO: 2889713 - RNA, 13 nt, Human
ucauguuggucaa

SEQ ID NO: 2889714 - RNA, 13 nt, Human
ucauguuguuaaa

SEQ ID NO: 2889715 - RNA, 19 nt, Human
ucauguuguuaaaauuaug

SEQ ID NO: 2889716 - RNA, 14 nt, Human
ucauguuuugguga

SEQ ID NO: 2889717 - RNA, 15 nt, Human
ucauguuuuggugaa

SEQ ID NO: 2889718 - RNA, 14 nt, Human
ucauguuuugugac

SEQ ID NO: 2889719 - RNA, 15 nt, Human
ucauguuuugugacu

SEQ ID NO: 2889720 - RNA, 16 nt, Human
ucauguuuugugacua

SEQ ID NO: 2889721 - RNA, 17 nt, Human
ucauguuuugugacuau

SEQ ID NO: 2889722 - RNA, 23 nt, Human
ucauuccuugagaaaaacaauga

SEQ ID NO: 2889723 - RNA, 15 nt, Human
ucauuccuuccacua

SEQ ID NO: 2889724 - RNA, 21 nt, Human
ucauuccuucuuuuuaaaaug

SEQ ID NO: 2889725 - RNA, 19 nt, Human
ucauuaaccgaugcuuuac

SEQ ID NO: 2889726 - RNA, 23 nt, Human
ucauuaaccgaugcuuuaccaaa

SEQ ID NO: 2889727 - RNA, 15 nt, Human
ucauuaaauggggcu

SEQ ID NO: 2889728 - RNA, 14 nt, Human
ucauuaaauguuug

SEQ ID NO: 2889729 - RNA, 15 nt, Human
ucauuaaauguuuga

SEQ ID NO: 2889730 - RNA, 16 nt, Human
ucauuaaauguuugac

SEQ ID NO: 2889731 - RNA, 14 nt, Human
ucauugagaguuuu

SEQ ID NO: 2889732 - RNA, 18 nt, Human
ucauugagaguuuugucu

SEQ ID NO: 2889733 - RNA, 19 nt, Human
ucauugagaguuuugucuu

SEQ ID NO: 2889734 - RNA, 21 nt, Human
ucauugcuuugaagcaguugu

SEQ ID NO: 2889735 - RNA, 14 nt, Human
ucauugcugucugc

SEQ ID NO: 2889736 - RNA, 21 nt, Human
ucauugcugucugcagccuug

SEQ ID NO: 2889737 - RNA, 13 nt, Human
ucauucuccugcc

SEQ ID NO: 2889738 - RNA, 14 nt, Human
ucauucuccugccu

SEQ ID NO: 2889739 - RNA, 15 nt, Human
ucauucuccugccug

SEQ ID NO: 2889740 - RNA, 16 nt, Human
ucauucuccugccugu

SEQ ID NO: 2889741 - RNA, 21 nt, Human
ucauucgcucccacauucuga

SEQ ID NO: 2889742 - RNA, 15 nt, Human
ucauucgggaugauu

SEQ ID NO: 2889743 - RNA, 12 nt, Human
ucauucuccugc

SEQ ID NO: 2889744 - RNA, 15 nt, Human
ucauucuaucaagcc

SEQ ID NO: 2889745 - RNA, 18 nt, Human
ucauucucauaauuccua

SEQ ID NO: 2889746 - RNA, 21 nt, Human
ucauucucauaauuccuacag

SEQ ID NO: 2889747 - RNA, 23 nt, Human
ucauucucauaauuccuacagca

SEQ ID NO: 2889748 - RNA, 15 nt, Human
accucgcaucauugc

SEQ ID NO: 2889749 - RNA, 16 nt, Human
ucauuguaaacaaacu

SEQ ID NO: 2889750 - RNA, 19 nt, Human
ucauuguaaacaaacucuu

SEQ ID NO: 2889751 - RNA, 21 nt, Human
ucauuguaaacaaacucuuga

SEQ ID NO: 2889752 - RNA, 17 nt, Human
ucauuggucuaauuuau

SEQ ID NO: 2889753 - RNA, 14 nt, Human
ucauuguaaacaaa

SEQ ID NO: 2889754 - RNA, 18 nt, Human
ucauuggaacaacugaua

SEQ ID NO: 2889755 - RNA, 23 nt, Human
ucauugcuuugaagcaguugugu

SEQ ID NO: 2889756 - RNA, 19 nt, Human
accucuacccaaacccuag

SEQ ID NO: 2889757 - RNA, 20 nt, Human
accucuacccaaacccuagg

SEQ ID NO: 2889758 - RNA, 21 nt, Human
accucuacccaaacccuaggu

SEQ ID NO: 2889759 - RNA, 14 nt, Human
accucuacuuucca

SEQ ID NO: 2889760 - RNA, 15 nt, Human
accucuacuuuccag

SEQ ID NO: 2889761 - RNA, 23 nt, Human
accucucuccuuugcugaggccu

SEQ ID NO: 2889762 - RNA, 12 nt, Human
accucucugucc

SEQ ID NO: 2889763 - RNA, 14 nt, Human
accucucugucccu

SEQ ID NO: 2889764 - RNA, 15 nt, Human
accucucugucccuu

SEQ ID NO: 2889765 - RNA, 16 nt, Human
accucucugucccuug

SEQ ID NO: 2889766 - RNA, 19 nt, Human
accucucugucccuugcug

SEQ ID NO: 2889767 - RNA, 22 nt, Human
accucucugucccuugcuguau

SEQ ID NO: 2889768 - RNA, 14 nt, Human
accucuccucaugu

SEQ ID NO: 2889769 - RNA, 14 nt, Human
accucucuuuuuca

SEQ ID NO: 2889770 - RNA, 20 nt, Human
accucugaaacccuggacca

SEQ ID NO: 2889771 - RNA, 18 nt, Human
accucaccccgaggcccu

SEQ ID NO: 2889772 - RNA, 19 nt, Human
accucaccccgaggcccug

SEQ ID NO: 2889773 - RNA, 20 nt, Human
accucaccccgaggcccugc

SEQ ID NO: 2889774 - RNA, 21 nt, Human
accucaccccgaggcccugca

SEQ ID NO: 2889775 - RNA, 14 nt, Human
accucacagugacc

SEQ ID NO: 2889776 - RNA, 15 nt, Human
accucacagugaccc

SEQ ID NO: 2889777 - RNA, 19 nt, Human
accucacagugacccuucc

SEQ ID NO: 2889778 - RNA, 20 nt, Human
accucacagugacccuuccc

SEQ ID NO: 2889779 - RNA, 21 nt, Human
accucacagugacccuuccca

SEQ ID NO: 2889780 - RNA, 14 nt, Human
accucaauguuuga

SEQ ID NO: 2889781 - RNA, 17 nt, Human
accucacaccucacucu

SEQ ID NO: 2889782 - RNA, 23 nt, Human
accucaagugaucugcccaccuc

SEQ ID NO: 2889783 - RNA, 20 nt, Human
accucaagugauccucccac

SEQ ID NO: 2889784 - RNA, 19 nt, Human
accucaagugaucugccca

SEQ ID NO: 2889785 - RNA, 18 nt, Human
accucagaguauggagcu

SEQ ID NO: 2889786 - RNA, 10 nt, Human
accucagccu

SEQ ID NO: 2889787 - RNA, 15 nt, Human
accucagccuagacc

SEQ ID NO: 2889788 - RNA, 13 nt, Human
accucagccuaga

SEQ ID NO: 2889789 - RNA, 15 nt, Human
accuccccagccccu

SEQ ID NO: 2889790 - RNA, 16 nt, Human
accuccccagccccua

SEQ ID NO: 2889791 - RNA, 19 nt, Human
accuccccagccccuagcc

SEQ ID NO: 2889792 - RNA, 20 nt, Human
accuccgccucuuggguuca

SEQ ID NO: 2889793 - RNA, 23 nt, Human
accuccccagccccuagcccagg

SEQ ID NO: 2889794 - RNA, 23 nt, Human
accuccuacgucaaacaugaagu

SEQ ID NO: 2889795 - RNA, 12 nt, Human
accuaacuguau

SEQ ID NO: 2889796 - RNA, 15 nt, Human
accuaacuguaucuu

SEQ ID NO: 2889797 - RNA, 16 nt, Human
accuaacuguaucuug

SEQ ID NO: 2889798 - RNA, 16 nt, Human
accuaagucucuguga

SEQ ID NO: 2889799 - RNA, 15 nt, Human
accuaagucucugug

SEQ ID NO: 2889800 - RNA, 18 nt, Human
accuaaguccuuuaugug

SEQ ID NO: 2889801 - RNA, 14 nt, Human
accuaagucucugu

SEQ ID NO: 2889802 - RNA, 13 nt, Human
accuaaguacugu

SEQ ID NO: 2889803 - RNA, 14 nt, Human
accuaaguacugua

SEQ ID NO: 2889804 - RNA, 15 nt, Human
accuaaguacuguaa

SEQ ID NO: 2889805 - RNA, 17 nt, Human
accuaaguacuguaaua

SEQ ID NO: 2889806 - RNA, 23 nt, Human
accuaaguacuguaauaauaccu

SEQ ID NO: 2889807 - RNA, 16 nt, Human
accgccugucucuuua

SEQ ID NO: 2889808 - RNA, 18 nt, Human
accuaagucucugugaau

SEQ ID NO: 2889809 - RNA, 18 nt, Human
accuaagugacauuugua

SEQ ID NO: 2889810 - RNA, 16 nt, Human
accuagagccagacca

SEQ ID NO: 2889811 - RNA, 12 nt, Human
accuagauuuuu

SEQ ID NO: 2889812 - RNA, 13 nt, Human
accuagcaauucc

SEQ ID NO: 2889813 - RNA, 14 nt, Human
accuagcaauucca

SEQ ID NO: 2889814 - RNA, 18 nt, Human
accuagcaauuccaucac

SEQ ID NO: 2889815 - RNA, 12 nt, Human
accuaaccugug

SEQ ID NO: 2889816 - RNA, 13 nt, Human
accuaaccugugu

SEQ ID NO: 2889817 - RNA, 14 nt, Human
accuaaccuguguc

SEQ ID NO: 2889818 - RNA, 15 nt, Human
accuaaccugugucu

SEQ ID NO: 2889819 - RNA, 16 nt, Human
accuaaccugugucug

SEQ ID NO: 2889820 - RNA, 17 nt, Human
accuaaccugugucugc

SEQ ID NO: 2889821 - RNA, 17 nt, Human
accuaaaaaaagagaau

SEQ ID NO: 2889822 - RNA, 19 nt, Human
accuaacgcccuauuuuug

SEQ ID NO: 2889823 - RNA, 13 nt, Human
accuagccuuaga

SEQ ID NO: 2889824 - RNA, 15 nt, Human
accuauaaugugugu

SEQ ID NO: 2889825 - RNA, 16 nt, Human
accuauaaugugugua

SEQ ID NO: 2889826 - RNA, 17 nt, Human
accuauaauguguguau

SEQ ID NO: 2889827 - RNA, 22 nt, Human
accuauaauguguguaugugua

SEQ ID NO: 2889828 - RNA, 14 nt, Human
accuagcugugcaa

SEQ ID NO: 2889829 - RNA, 17 nt, Human
accuauaugauuuauag

SEQ ID NO: 2889830 - RNA, 17 nt, Human
accuaucccaccuccau

SEQ ID NO: 2889831 - RNA, 15 nt, Human
accuauccucacugc

SEQ ID NO: 2889832 - RNA, 14 nt, Human
accuaucccaccuc

SEQ ID NO: 2889833 - RNA, 14 nt, Human
accuaugaagcaau

SEQ ID NO: 2889834 - RNA, 22 nt, Human
accuauagucccagcuacucag

SEQ ID NO: 2889835 - RNA, 13 nt, Human
accuauaugauuu

SEQ ID NO: 2889836 - RNA, 16 nt, Human
accuauagucccagcu

SEQ ID NO: 2889837 - RNA, 15 nt, Human
accuauagucccagc

SEQ ID NO: 2889838 - RNA, 22 nt, Human
accuaugguauaaugguugacu

SEQ ID NO: 2889839 - RNA, 13 nt, Human
accgaugcuuuac

SEQ ID NO: 2889840 - RNA, 15 nt, Human
accgaugcuuuacca

SEQ ID NO: 2889841 - RNA, 22 nt, Human
accgaugguggguggggcugca

SEQ ID NO: 2889842 - RNA, 16 nt, Human
accgauucuuuggagu

SEQ ID NO: 2889843 - RNA, 24 nt, Human
accgauucuuuggaguugucacau

SEQ ID NO: 2889844 - RNA, 20 nt, Human
accgagucucuucuccacug

SEQ ID NO: 2889845 - RNA, 21 nt, Human
accgagucucuucuccacugg

SEQ ID NO: 2889846 - RNA, 24 nt, Human
accgagucucuucuccacuggaug

SEQ ID NO: 2889847 - RNA, 17 nt, Human
accgagcaaagaucaaa

SEQ ID NO: 2889848 - RNA, 19 nt, Human
accgagcaaagaucaaaau

SEQ ID NO: 2889849 - RNA, 12 nt, Human
accgcacagcuc

SEQ ID NO: 2889850 - RNA, 17 nt, Human
accgcugauucucaggg

SEQ ID NO: 2889851 - RNA, 15 nt, Human
accgcuucugccuuu

SEQ ID NO: 2889852 - RNA, 17 nt, Human
accgcuucugccuuuuc

SEQ ID NO: 2889853 - RNA, 18 nt, Human
accgcuuguggggaccca

SEQ ID NO: 2889854 - RNA, 21 nt, Human
accgcuuguggggacccaggc

SEQ ID NO: 2889855 - RNA, 22 nt, Human
accgcuuguggggacccaggcu

SEQ ID NO: 2889856 - RNA, 13 nt, Human
accgcuuuggccu

SEQ ID NO: 2889857 - RNA, 14 nt, Human
accgcuuuggccug

SEQ ID NO: 2889858 - RNA, 16 nt, Human
accgcuuuggccugag

SEQ ID NO: 2889859 - RNA, 17 nt, Human
accgcuuuggccugagu

SEQ ID NO: 2889860 - RNA, 15 nt, Human
accgcuucccuccug

SEQ ID NO: 2889861 - RNA, 19 nt, Human
accgcuucccuccugcccg

SEQ ID NO: 2889862 - RNA, 15 nt, Human
accggaagguuuuua

SEQ ID NO: 2889863 - RNA, 15 nt, Human
accgccuaguuuacu

SEQ ID NO: 2889864 - RNA, 19 nt, Human
accgccuaguuuacuguuu

SEQ ID NO: 2889865 - RNA, 16 nt, Human
accgcucucuuuucug

SEQ ID NO: 2889866 - RNA, 20 nt, Human
accgcucucuuuucuguacu

SEQ ID NO: 2889867 - RNA, 22 nt, Human
accgcucucuuuucuguacuuc

SEQ ID NO: 2889868 - RNA, 20 nt, Human
accgccccaaaguaaaagaa

SEQ ID NO: 2889869 - RNA, 11 nt, Human
accgcccccuc

SEQ ID NO: 2889870 - RNA, 12 nt, Human
accgcccccucc

SEQ ID NO: 2889871 - RNA, 14 nt, Human
accgcccccuccuc

SEQ ID NO: 2889872 - RNA, 11 nt, Human
accgcccgucu

SEQ ID NO: 2889873 - RNA, 13 nt, Human
accgcccgucugu

SEQ ID NO: 2889874 - RNA, 15 nt, Human
accgcccgucugugu

SEQ ID NO: 2889875 - RNA, 19 nt, Human
accgcccccuccucuagcu

SEQ ID NO: 2889876 - RNA, 21 nt, Human
accgaaguggacuggccccug

SEQ ID NO: 2889877 - RNA, 23 nt, Human
accgaaguggacuggccccuggg

SEQ ID NO: 2889878 - RNA, 20 nt, Human
accgaaguggacuggccccu

SEQ ID NO: 2889879 - RNA, 15 nt, Human
accgacaggcccugg

SEQ ID NO: 2889880 - RNA, 23 nt, Human
accgaccugguuuuuaaauagag

SEQ ID NO: 2889881 - RNA, 16 nt, Human
accgacgcgucuccug

SEQ ID NO: 2889882 - RNA, 17 nt, Human
accgacuagccaggaag

SEQ ID NO: 2889883 - RNA, 15 nt, Human
accgagcaaagauca

SEQ ID NO: 2889884 - RNA, 18 nt, Human
accgagucucuucuccac

SEQ ID NO: 2889885 - RNA, 17 nt, Human
accgacgcgucuccugu

SEQ ID NO: 2889886 - RNA, 18 nt, Human
accgacgcgucuccuguu

SEQ ID NO: 2889887 - RNA, 18 nt, Human
ucauauucuaaaaccauu

SEQ ID NO: 2889888 - RNA, 16 nt, Human
ucauauucugucugga

SEQ ID NO: 2889889 - RNA, 16 nt, Human
ucauauucuuucaauu

SEQ ID NO: 2889890 - RNA, 17 nt, Human
acccuuuuccuuugugg

SEQ ID NO: 2889891 - RNA, 19 nt, Human
acccuuuuccuuugugguu

SEQ ID NO: 2889892 - RNA, 12 nt, Human
ucauaugugauc

SEQ ID NO: 2889893 - RNA, 15 nt, Human
ucauaugugaucugu

SEQ ID NO: 2889894 - RNA, 17 nt, Human
ucauaugugaucugucu

SEQ ID NO: 2889895 - RNA, 21 nt, Human
ucauaugugaucugucuugua

SEQ ID NO: 2889896 - RNA, 22 nt, Human
ucauaugugaucugucuuguaa

SEQ ID NO: 2889897 - RNA, 23 nt, Human
ucauaugugaucugucuuguaau

SEQ ID NO: 2889898 - RNA, 14 nt, Human
acccuuuguuucuu

SEQ ID NO: 2889899 - RNA, 17 nt, Human
acccuuuguuucuuguu

SEQ ID NO: 2889900 - RNA, 14 nt, Human
ucagauucccagag

SEQ ID NO: 2889901 - RNA, 14 nt, Human
ucagauguggagcc

SEQ ID NO: 2889902 - RNA, 15 nt, Human
ucagauguggagcca

SEQ ID NO: 2889903 - RNA, 16 nt, Human
ucagauguggagccag

SEQ ID NO: 2889904 - RNA, 17 nt, Human
ucagauguggagccagg

SEQ ID NO: 2889905 - RNA, 18 nt, Human
ucagauguggagccaggc

SEQ ID NO: 2889906 - RNA, 20 nt, Human
ucagauguggagccaggcgu

SEQ ID NO: 2889907 - RNA, 18 nt, Human
ucagauguugaauucuuu

SEQ ID NO: 2889908 - RNA, 17 nt, Human
ucagauguuuuggucaa

SEQ ID NO: 2889909 - RNA, 13 nt, Human
ucagaugagaaca

SEQ ID NO: 2889910 - RNA, 14 nt, Human
ucagaugagaacaa

SEQ ID NO: 2889911 - RNA, 15 nt, Human
ucagaugagaacaaa

SEQ ID NO: 2889912 - RNA, 16 nt, Human
ucagaugagaacaaag

SEQ ID NO: 2889913 - RNA, 17 nt, Human
ucagaugagaacaaagc

SEQ ID NO: 2889914 - RNA, 20 nt, Human
ucagaugagaacaaagcugu

SEQ ID NO: 2889915 - RNA, 21 nt, Human
ucagaugagaacaaagcuguu

SEQ ID NO: 2889916 - RNA, 22 nt, Human
ucagauggauugauaauugcau

SEQ ID NO: 2889917 - RNA, 14 nt, Human
ucagaugcccagag

SEQ ID NO: 2889918 - RNA, 15 nt, Human
ucagaacaguaucuu

SEQ ID NO: 2889919 - RNA, 16 nt, Human
ucagaugcaguuugga

SEQ ID NO: 2889920 - RNA, 20 nt, Human
ucagaugggaggaaagagag

SEQ ID NO: 2889921 - RNA, 22 nt, Human
ucagaugggaggaaagagagca

SEQ ID NO: 2889922 - RNA, 13 nt, Human
ucagauguaaugu

SEQ ID NO: 2889923 - RNA, 14 nt, Human
ucagauguaauguu

SEQ ID NO: 2889924 - RNA, 15 nt, Human
ucagauguaauguuu

SEQ ID NO: 2889925 - RNA, 16 nt, Human
ucagauguaauguuuu

SEQ ID NO: 2889926 - RNA, 17 nt, Human
ucagauguaauguuuuc

SEQ ID NO: 2889927 - RNA, 13 nt, Human
ucagaugucccuu

SEQ ID NO: 2889928 - RNA, 14 nt, Human
ucagaugucccuug

SEQ ID NO: 2889929 - RNA, 23 nt, Human
ucagaugucccuugaugcacaga

SEQ ID NO: 2889930 - RNA, 13 nt, Human
ucagaagacacug

SEQ ID NO: 2889931 - RNA, 13 nt, Human
ucagaucugucug

SEQ ID NO: 2889932 - RNA, 14 nt, Human
ucagaucugucuga

SEQ ID NO: 2889933 - RNA, 21 nt, Human
ucagaugaacucuuagaaaug

SEQ ID NO: 2889934 - RNA, 16 nt, Human
ucagaucuuucuccuu

SEQ ID NO: 2889935 - RNA, 18 nt, Human
ucagaucuuucuccuuga

SEQ ID NO: 2889936 - RNA, 19 nt, Human
ucagaucuuucuccuugaa

SEQ ID NO: 2889937 - RNA, 20 nt, Human
ucagaaccucuuccccagaa

SEQ ID NO: 2889938 - RNA, 18 nt, Human
ucagaaccucuuccccag

SEQ ID NO: 2889939 - RNA, 17 nt, Human
ucagaaccucuucccca

SEQ ID NO: 2889940 - RNA, 16 nt, Human
ucagaaccucuucccc

SEQ ID NO: 2889941 - RNA, 15 nt, Human
ucagaaccucuuccc

SEQ ID NO: 2889942 - RNA, 24 nt, Human
ucagaacccuuggcuugcccacgu

SEQ ID NO: 2889943 - RNA, 20 nt, Human
ucagaacccuuggcuugccc

SEQ ID NO: 2889944 - RNA, 18 nt, Human
ucagaacccuuggcuugc

SEQ ID NO: 2889945 - RNA, 20 nt, Human
ucagaacugucggaggaaag

SEQ ID NO: 2889946 - RNA, 16 nt, Human
ucagccccgagcuguc

SEQ ID NO: 2889947 - RNA, 19 nt, Human
ucagccccgagcugucccc

SEQ ID NO: 2889948 - RNA, 13 nt, Human
ucagcccccagcc

SEQ ID NO: 2889949 - RNA, 16 nt, Human
ucagcccccagccccu

SEQ ID NO: 2889950 - RNA, 18 nt, Human
ucagcccccagccccucc

SEQ ID NO: 2889951 - RNA, 19 nt, Human
ucagcccccagccccuccc

SEQ ID NO: 2889952 - RNA, 20 nt, Human
ucagcccccagccccucccc

SEQ ID NO: 2889953 - RNA, 12 nt, Human
ucagcccagaag

SEQ ID NO: 2889954 - RNA, 13 nt, Human
ucagcccagaaga

SEQ ID NO: 2889955 - RNA, 15 nt, Human
ucagcccagaagaaa

SEQ ID NO: 2889956 - RNA, 16 nt, Human
ucagcccagaagaaaa

SEQ ID NO: 2889957 - RNA, 24 nt, Human
ucagcccagaagaaaauucuccug

SEQ ID NO: 2889958 - RNA, 17 nt, Human
ucagcccucccugcccc

SEQ ID NO: 2889959 - RNA, 19 nt, Human
ucagcccucccugccccuc

SEQ ID NO: 2889960 - RNA, 13 nt, Human
ucagcccugaggu

SEQ ID NO: 2889961 - RNA, 23 nt, Human
ucagcccugaggugaaagggagc

SEQ ID NO: 2889962 - RNA, 13 nt, Human
ucagccccuagga

SEQ ID NO: 2889963 - RNA, 14 nt, Human
ucagccccuaggag

SEQ ID NO: 2889964 - RNA, 16 nt, Human
ucagccccuaggagua

SEQ ID NO: 2889965 - RNA, 22 nt, Human
ucagccccuaggaguauauuuc

SEQ ID NO: 2889966 - RNA, 18 nt, Human
ucagcccucccugccccu

SEQ ID NO: 2889967 - RNA, 14 nt, Human
acccagcuaaauaa

SEQ ID NO: 2889968 - RNA, 18 nt, Human
acccagucaccucugucu

SEQ ID NO: 2889969 - RNA, 13 nt, Human
acccagucgcccu

SEQ ID NO: 2889970 - RNA, 14 nt, Human
acccagucgcccuu

SEQ ID NO: 2889971 - RNA, 19 nt, Human
acccagucgcccuuacuuc

SEQ ID NO: 2889972 - RNA, 18 nt, Human
acccagucucugcuccac

SEQ ID NO: 2889973 - RNA, 16 nt, Human
accccaugccaaagcu

SEQ ID NO: 2889974 - RNA, 17 nt, Human
acccagcugccaccucu

SEQ ID NO: 2889975 - RNA, 23 nt, Human
accccaugaccuuauccuuccuc

SEQ ID NO: 2889976 - RNA, 14 nt, Human
acccccagccugcu

SEQ ID NO: 2889977 - RNA, 15 nt, Human
acccccagccugcua

SEQ ID NO: 2889978 - RNA, 18 nt, Human
accccauuugcuuucuuu

SEQ ID NO: 2889979 - RNA, 21 nt, Human
acccccgcccccugcccuccc

SEQ ID NO: 2889980 - RNA, 15 nt, Human
acccccgcccccugc

SEQ ID NO: 2889981 - RNA, 18 nt, Human
acccccgcccccugcccu

SEQ ID NO: 2889982 - RNA, 19 nt, Human
acccccgcccccugcccuc

SEQ ID NO: 2889983 - RNA, 20 nt, Human
acccccgcccccugcccucc

SEQ ID NO: 2889984 - RNA, 14 nt, Human
acccccgcccccug

SEQ ID NO: 2889985 - RNA, 13 nt, Human
acccccgcccccu

SEQ ID NO: 2889986 - RNA, 13 nt, Human
accccccaccugc

SEQ ID NO: 2889987 - RNA, 12 nt, Human
accccccaccug

SEQ ID NO: 2889988 - RNA, 14 nt, Human
accccccaagcugu

SEQ ID NO: 2889989 - RNA, 17 nt, Human
acccccaucucucccuc

SEQ ID NO: 2889990 - RNA, 15 nt, Human
acccccauucucauc

SEQ ID NO: 2889991 - RNA, 16 nt, Human
acccccauucucaucu

SEQ ID NO: 2889992 - RNA, 16 nt, Human
acccccagcuuugcua

SEQ ID NO: 2889993 - RNA, 14 nt, Human
acccccagcuuugc

SEQ ID NO: 2889994 - RNA, 12 nt, Human
acccccagcuca

SEQ ID NO: 2889995 - RNA, 13 nt, Human
acccccagcucaa

SEQ ID NO: 2889996 - RNA, 20 nt, Human
acccccagcucaauggacug

SEQ ID NO: 2889997 - RNA, 21 nt, Human
acccccagcucaauggacugg

SEQ ID NO: 2889998 - RNA, 20 nt, Human
accccuuccagaucacugcc

SEQ ID NO: 2889999 - RNA, 16 nt, Human
accccuuccagaucac

SEQ ID NO: 2890000 - RNA, 21 nt, Human
accccuuccagaucacugcca

SEQ ID NO: 2890001 - RNA, 15 nt, Human
accccuuccagauca

SEQ ID NO: 2890002 - RNA, 13 nt, Human
accccuuccagau

SEQ ID NO: 2890003 - RNA, 16 nt, Human
accccuuccagaagca

SEQ ID NO: 2890004 - RNA, 18 nt, Human
accccuuagccucccuga

SEQ ID NO: 2890005 - RNA, 17 nt, Human
accccuuagccucccug

SEQ ID NO: 2890006 - RNA, 16 nt, Human
accccuuagccucccu

SEQ ID NO: 2890007 - RNA, 15 nt, Human
accccuuagccuccc

SEQ ID NO: 2890008 - RNA, 14 nt, Human
accccuuagccucc

SEQ ID NO: 2890009 - RNA, 15 nt, Human
accccuggcuguacu

SEQ ID NO: 2890010 - RNA, 21 nt, Human
accccuggcuguacugcucag

SEQ ID NO: 2890011 - RNA, 11 nt, Human
accccuggcug

SEQ ID NO: 2890012 - RNA, 18 nt, Human
accccuuaagcccuggcc

SEQ ID NO: 2890013 - RNA, 19 nt, Human
accccuuaagcccuggccc

SEQ ID NO: 2890014 - RNA, 20 nt, Human
accccuuaagcccuggcccc

SEQ ID NO: 2890015 - RNA, 15 nt, Human
accccuggcuuuuca

SEQ ID NO: 2890016 - RNA, 17 nt, Human
accccucccucugucca

SEQ ID NO: 2890017 - RNA, 18 nt, Human
accccucccucuguccac

SEQ ID NO: 2890018 - RNA, 13 nt, Human
accccuccucacu

SEQ ID NO: 2890019 - RNA, 14 nt, Human
accccuccucacug

SEQ ID NO: 2890020 - RNA, 16 nt, Human
accccuccucacuggc

SEQ ID NO: 2890021 - RNA, 17 nt, Human
accccuccucacuggcc

SEQ ID NO: 2890022 - RNA, 18 nt, Human
accccuccucacuggcca

SEQ ID NO: 2890023 - RNA, 19 nt, Human
accccuccucacuggccau

SEQ ID NO: 2890024 - RNA, 21 nt, Human
accccuccucacuggccaucc

SEQ ID NO: 2890025 - RNA, 23 nt, Human
accccuccucacuggccaucccu

SEQ ID NO: 2890026 - RNA, 12 nt, Human
accccuggcuuu

SEQ ID NO: 2890027 - RNA, 11 nt, Human
accccuccugg

SEQ ID NO: 2890028 - RNA, 12 nt, Human
accccuccuggg

SEQ ID NO: 2890029 - RNA, 14 nt, Human
accccuccuggggc

SEQ ID NO: 2890030 - RNA, 15 nt, Human
accccuccuggggcc

SEQ ID NO: 2890031 - RNA, 17 nt, Human
accccuccuggggccag

SEQ ID NO: 2890032 - RNA, 18 nt, Human
accccuccuggggccagg

SEQ ID NO: 2890033 - RNA, 20 nt, Human
accccuccuggggccaggcc

SEQ ID NO: 2890034 - RNA, 21 nt, Human
accccuccuggggccaggccg

SEQ ID NO: 2890035 - RNA, 17 nt, Human
ucagcggggacagcucc

SEQ ID NO: 2890036 - RNA, 16 nt, Human
ucagcggggacagcuc

SEQ ID NO: 2890037 - RNA, 15 nt, Human
ucagcggggacagcu

SEQ ID NO: 2890038 - RNA, 19 nt, Human
accccauggcugcacaguu

SEQ ID NO: 2890039 - RNA, 23 nt, Human
ucaggccaucaucaguggagcca

SEQ ID NO: 2890040 - RNA, 15 nt, Human
ucaggccauggcucc

SEQ ID NO: 2890041 - RNA, 11 nt, Human
ucaggcccugg

SEQ ID NO: 2890042 - RNA, 13 nt, Human
ucaggcccuggaa

SEQ ID NO: 2890043 - RNA, 19 nt, Human
ucaggccaggugcaguggc

SEQ ID NO: 2890044 - RNA, 18 nt, Human
ucaggccaggugcagugg

SEQ ID NO: 2890045 - RNA, 17 nt, Human
ucaggccaggugcagug

SEQ ID NO: 2890046 - RNA, 16 nt, Human
ucaggccaggugcagu

SEQ ID NO: 2890047 - RNA, 22 nt, Human
ucaggccaucaucaguggagcc

SEQ ID NO: 2890048 - RNA, 21 nt, Human
ucaggccaucaucaguggagc

SEQ ID NO: 2890049 - RNA, 19 nt, Human
accccuucgcuccuguguc

SEQ ID NO: 2890050 - RNA, 16 nt, Human
ucagguaacaggcaga

SEQ ID NO: 2890051 - RNA, 15 nt, Human
ucagguaacaggcag

SEQ ID NO: 2890052 - RNA, 13 nt, Human
ucagguaacaggc

SEQ ID NO: 2890053 - RNA, 15 nt, Human
ucagggucauagcau

SEQ ID NO: 2890054 - RNA, 19 nt, Human
ucaggcccuuauuuucaag

SEQ ID NO: 2890055 - RNA, 20 nt, Human
accccuucgcuccugugucu

SEQ ID NO: 2890056 - RNA, 23 nt, Human
ucaggguuggccccugcccggcu

SEQ ID NO: 2890057 - RNA, 14 nt, Human
ucaggguauugcuu

SEQ ID NO: 2890058 - RNA, 19 nt, Human
ucagccugggacaguuuau

SEQ ID NO: 2890059 - RNA, 18 nt, Human
ucaggguuggugugcuga

SEQ ID NO: 2890060 - RNA, 13 nt, Human
accccuucucugu

SEQ ID NO: 2890061 - RNA, 14 nt, Human
accccuucucugug

SEQ ID NO: 2890062 - RNA, 16 nt, Human
accccuucucugugac

SEQ ID NO: 2890063 - RNA, 17 nt, Human
accccuucucugugacc

SEQ ID NO: 2890064 - RNA, 18 nt, Human
accccuucucugugaccc

SEQ ID NO: 2890065 - RNA, 20 nt, Human
accccuucucugugacccac

SEQ ID NO: 2890066 - RNA, 21 nt, Human
accccuucucugugacccacu

SEQ ID NO: 2890067 - RNA, 17 nt, Human
accccuuucuggcucuc

SEQ ID NO: 2890068 - RNA, 23 nt, Human
acccgaccccccgugggcucccg

SEQ ID NO: 2890069 - RNA, 21 nt, Human
acccgaccccccgugggcucc

SEQ ID NO: 2890070 - RNA, 15 nt, Human
acccgaggguugauu

SEQ ID NO: 2890071 - RNA, 17 nt, Human
acccgaggguugauuaa

SEQ ID NO: 2890072 - RNA, 23 nt, Human
acccgaggguugauuaaggcagu

SEQ ID NO: 2890073 - RNA, 13 nt, Human
acccucccacccc

SEQ ID NO: 2890074 - RNA, 12 nt, Human
acccucccaccc

SEQ ID NO: 2890075 - RNA, 23 nt, Human
acccucccacccccuucucugcu

SEQ ID NO: 2890076 - RNA, 20 nt, Human
acccucccacccccuucucu

SEQ ID NO: 2890077 - RNA, 14 nt, Human
acccucccaccccc

SEQ ID NO: 2890078 - RNA, 14 nt, Human
acccucccuggagu

SEQ ID NO: 2890079 - RNA, 22 nt, Human
acccuccgccuucacuccggug

SEQ ID NO: 2890080 - RNA, 15 nt, Human
acccuccgccuucac

SEQ ID NO: 2890081 - RNA, 15 nt, Human
acccucccuggagug

SEQ ID NO: 2890082 - RNA, 15 nt, Human
acccucccuguucau

SEQ ID NO: 2890083 - RNA, 12 nt, Human
acccucccugga

SEQ ID NO: 2890084 - RNA, 13 nt, Human
acccucccuggag

SEQ ID NO: 2890085 - RNA, 13 nt, Human
acccuccuggcuc

SEQ ID NO: 2890086 - RNA, 11 nt, Human
acccuccuggc

SEQ ID NO: 2890087 - RNA, 15 nt, Human
acccuccuggccuca

SEQ ID NO: 2890088 - RNA, 19 nt, Human
acccuccuggccucagacu

SEQ ID NO: 2890089 - RNA, 22 nt, Human
acccuccuggccucagacugca

SEQ ID NO: 2890090 - RNA, 20 nt, Human
acccucugccaccagagacc

SEQ ID NO: 2890091 - RNA, 15 nt, Human
acccucugcugaaga

SEQ ID NO: 2890092 - RNA, 16 nt, Human
acccucugcugaagac

SEQ ID NO: 2890093 - RNA, 17 nt, Human
acccucugcugaagacu

SEQ ID NO: 2890094 - RNA, 17 nt, Human
acccuuucuugacaaaa

SEQ ID NO: 2890095 - RNA, 21 nt, Human
acccuuucuugacaaaaccua

SEQ ID NO: 2890096 - RNA, 17 nt, Human
acccuuccugagcuuua

SEQ ID NO: 2890097 - RNA, 18 nt, Human
acccuuccugagcuuuau

SEQ ID NO: 2890098 - RNA, 11 nt, Human
acccuuccuuc

SEQ ID NO: 2890099 - RNA, 22 nt, Human
acccuuccccuccuucucccuu

SEQ ID NO: 2890100 - RNA, 13 nt, Human
acccuucccugca

SEQ ID NO: 2890101 - RNA, 15 nt, Human
acccuucccugcacu

SEQ ID NO: 2890102 - RNA, 16 nt, Human
acccuucccugcacua

SEQ ID NO: 2890103 - RNA, 22 nt, Human
acccuucccugcacuaaagcca

SEQ ID NO: 2890104 - RNA, 13 nt, Human
acccuuccuaagu

SEQ ID NO: 2890105 - RNA, 13 nt, Human
acccuucccaauc

SEQ ID NO: 2890106 - RNA, 20 nt, Human
acccuucccaaucagcacug

SEQ ID NO: 2890107 - RNA, 21 nt, Human
acccuucccaaucagcacuga

SEQ ID NO: 2890108 - RNA, 22 nt, Human
acccuucccaaucagcacugaa

SEQ ID NO: 2890109 - RNA, 23 nt, Human
acccuucccaaucagcacugaaa

SEQ ID NO: 2890110 - RNA, 13 nt, Human
acccuuccagaca

SEQ ID NO: 2890111 - RNA, 16 nt, Human
acccuuccagacauac

SEQ ID NO: 2890112 - RNA, 21 nt, Human
acccuucaacguuucuucacu

SEQ ID NO: 2890113 - RNA, 22 nt, Human
acccuucaacguuucuucacuu

SEQ ID NO: 2890114 - RNA, 23 nt, Human
acccucuggagggguguggcucc

SEQ ID NO: 2890115 - RNA, 19 nt, Human
acccucugccaccagagac

SEQ ID NO: 2890116 - RNA, 11 nt, Human
acccucuggcc

SEQ ID NO: 2890117 - RNA, 12 nt, Human
acccucugggaa

SEQ ID NO: 2890118 - RNA, 13 nt, Human
acccucugggaac

SEQ ID NO: 2890119 - RNA, 15 nt, Human
acccucugggaaccu

SEQ ID NO: 2890120 - RNA, 19 nt, Human
acccucugggaaccuccca

SEQ ID NO: 2890121 - RNA, 20 nt, Human
acccucugggaaccucccag

SEQ ID NO: 2890122 - RNA, 21 nt, Human
acccucugggaaccucccaga

SEQ ID NO: 2890123 - RNA, 22 nt, Human
acccucugggaaccucccagag

SEQ ID NO: 2890124 - RNA, 23 nt, Human
acccucugggaaccucccagagg

SEQ ID NO: 2890125 - RNA, 12 nt, Human
acccucuguacc

SEQ ID NO: 2890126 - RNA, 22 nt, Human
acccucuguaccccaugaccuu

SEQ ID NO: 2890127 - RNA, 16 nt, Human
acccucuuccugugau

SEQ ID NO: 2890128 - RNA, 15 nt, Human
acccucuuccuguga

SEQ ID NO: 2890129 - RNA, 20 nt, Human
acccucuuccugugauccac

SEQ ID NO: 2890130 - RNA, 19 nt, Human
acccucuuccugugaucca

SEQ ID NO: 2890131 - RNA, 17 nt, Human
acccucuuccugugauc

SEQ ID NO: 2890132 - RNA, 23 nt, Human
accauuuugggguacccacugcu

SEQ ID NO: 2890133 - RNA, 22 nt, Human
accauuuuuaaaguagaagagg

SEQ ID NO: 2890134 - RNA, 11 nt, Human
accauuuuuca

SEQ ID NO: 2890135 - RNA, 17 nt, Human
accauuuuucauucacu

SEQ ID NO: 2890136 - RNA, 20 nt, Human
accauuuuuuaaggaaacaa

SEQ ID NO: 2890137 - RNA, 22 nt, Human
accauuuuuuaaggaaacaaua

SEQ ID NO: 2890138 - RNA, 22 nt, Human
accauuuugggguacccacugc

SEQ ID NO: 2890139 - RNA, 20 nt, Human
accauuucagagaggccuuu

SEQ ID NO: 2890140 - RNA, 14 nt, Human
accauuuaacaugc

SEQ ID NO: 2890141 - RNA, 14 nt, Human
accauuucagagag

SEQ ID NO: 2890142 - RNA, 11 nt, Human
accauuucaga

SEQ ID NO: 2890143 - RNA, 18 nt, Human
accaugauggccaggcug

SEQ ID NO: 2890144 - RNA, 19 nt, Human
accaugauggccaggcuga

SEQ ID NO: 2890145 - RNA, 24 nt, Human
accaguugaauaaaagugcacacc

SEQ ID NO: 2890146 - RNA, 23 nt, Human
accaugagaauaagagaaagaaa

SEQ ID NO: 2890147 - RNA, 15 nt, Human
accauuccccauggg

SEQ ID NO: 2890148 - RNA, 12 nt, Human
accauuccccau

SEQ ID NO: 2890149 - RNA, 20 nt, Human
acccaacccuaucuccugac

SEQ ID NO: 2890150 - RNA, 18 nt, Human
acccaacccuaucuccug

SEQ ID NO: 2890151 - RNA, 17 nt, Human
acccaacccuaucuccu

SEQ ID NO: 2890152 - RNA, 19 nt, Human
acccaaccccaagccagcc

SEQ ID NO: 2890153 - RNA, 18 nt, Human
acccaaaaacugucuuua

SEQ ID NO: 2890154 - RNA, 15 nt, Human
acccaaaacaagccu

SEQ ID NO: 2890155 - RNA, 21 nt, Human
acccaaaacaagccugguagg

SEQ ID NO: 2890156 - RNA, 14 nt, Human
acccaaaagagaaa

SEQ ID NO: 2890157 - RNA, 15 nt, Human
acccaaaagagaaaa

SEQ ID NO: 2890158 - RNA, 16 nt, Human
acccaaaagagaaaaa

SEQ ID NO: 2890159 - RNA, 14 nt, Human
acccaaacccuagg

SEQ ID NO: 2890160 - RNA, 15 nt, Human
acccaaacccuaggu

SEQ ID NO: 2890161 - RNA, 22 nt, Human
acccaacccuaucuccugacag

SEQ ID NO: 2890162 - RNA, 15 nt, Human
acccaacggcccugc

SEQ ID NO: 2890163 - RNA, 23 nt, Human
acccaacggcccugcagccagcu

SEQ ID NO: 2890164 - RNA, 18 nt, Human
acccagcccacuucugcc

SEQ ID NO: 2890165 - RNA, 22 nt, Human
ucagaaccauccauaguaguau

SEQ ID NO: 2890166 - RNA, 12 nt, Human
ucagaacccagg

SEQ ID NO: 2890167 - RNA, 13 nt, Human
ucagaacccaggg

SEQ ID NO: 2890168 - RNA, 14 nt, Human
ucagaacccagggc

SEQ ID NO: 2890169 - RNA, 16 nt, Human
ucagaacccagggcuc

SEQ ID NO: 2890170 - RNA, 20 nt, Human
ucagaacccagggcucugcc

SEQ ID NO: 2890171 - RNA, 22 nt, Human
ucagaacccagggcucugcccc

SEQ ID NO: 2890172 - RNA, 23 nt, Human
ucagaacccagggcucugcccca

SEQ ID NO: 2890173 - RNA, 16 nt, Human
ucagaacccuuggcuu

SEQ ID NO: 2890174 - RNA, 15 nt, Human
ucagaacccuuggcu

SEQ ID NO: 2890175 - RNA, 17 nt, Human
acccagcccacuucugc

SEQ ID NO: 2890176 - RNA, 16 nt, Human
acccagcccacuucug

SEQ ID NO: 2890177 - RNA, 15 nt, Human
acccacuugucacug

SEQ ID NO: 2890178 - RNA, 19 nt, Human
acccacuugucacugacac

SEQ ID NO: 2890179 - RNA, 22 nt, Human
acccacuugucacugacacaaa

SEQ ID NO: 2890180 - RNA, 23 nt, Human
acccacuugucacugacacaaag

SEQ ID NO: 2890181 - RNA, 12 nt, Human
ucaccugccugu

SEQ ID NO: 2890182 - RNA, 22 nt, Human
accacuuuccuuuucuauuccu

SEQ ID NO: 2890183 - RNA, 14 nt, Human
ucaccugccuguua

SEQ ID NO: 2890184 - RNA, 14 nt, Human
ucacugaauuuaua

SEQ ID NO: 2890185 - RNA, 12 nt, Human
ucacugacacaa

SEQ ID NO: 2890186 - RNA, 18 nt, Human
ucaccuggcuuguuuauu

SEQ ID NO: 2890187 - RNA, 23 nt, Human
ucaccuggcuuguuuauuuugug

SEQ ID NO: 2890188 - RNA, 12 nt, Human
ucacugcagccu

SEQ ID NO: 2890189 - RNA, 15 nt, Human
ucacugcacagugca

SEQ ID NO: 2890190 - RNA, 21 nt, Human
ucacuguagaaugauuucaug

SEQ ID NO: 2890191 - RNA, 20 nt, Human
ucacuguagaaugauuucau

SEQ ID NO: 2890192 - RNA, 14 nt, Human
ucacugacacaaag

SEQ ID NO: 2890193 - RNA, 15 nt, Human
ucacugacacaaagg

SEQ ID NO: 2890194 - RNA, 16 nt, Human
ucacugacacaaagga

SEQ ID NO: 2890195 - RNA, 17 nt, Human
ucacugacacaaaggaa

SEQ ID NO: 2890196 - RNA, 19 nt, Human
ucacugacacaaaggaagu

SEQ ID NO: 2890197 - RNA, 20 nt, Human
ucacugcacagugcaucuca

SEQ ID NO: 2890198 - RNA, 22 nt, Human
ucacugcacagugcaucucagc

SEQ ID NO: 2890199 - RNA, 24 nt, Human
ucacugcacagugcaucucagccc

SEQ ID NO: 2890200 - RNA, 16 nt, Human
ucacuguugcccaggc

SEQ ID NO: 2890201 - RNA, 19 nt, Human
ucacuguccuccaagccag

SEQ ID NO: 2890202 - RNA, 14 nt, Human
ucacugucaaugau

SEQ ID NO: 2890203 - RNA, 23 nt, Human
ucacugucaaugauuauuuucau

SEQ ID NO: 2890204 - RNA, 14 nt, Human
ucacugucccuccu

SEQ ID NO: 2890205 - RNA, 16 nt, Human
ucacugucccuccugg

SEQ ID NO: 2890206 - RNA, 17 nt, Human
ucacugucccuccuggu

SEQ ID NO: 2890207 - RNA, 19 nt, Human
ucacugucccuccuggugu

SEQ ID NO: 2890208 - RNA, 16 nt, Human
ucacuguccuccaagc

SEQ ID NO: 2890209 - RNA, 15 nt, Human
ucacuguccuccaag

SEQ ID NO: 2890210 - RNA, 14 nt, Human
ucacuguauaaaua

SEQ ID NO: 2890211 - RNA, 15 nt, Human
ucacuguauaaauag

SEQ ID NO: 2890212 - RNA, 16 nt, Human
ucacuguauaaauagg

SEQ ID NO: 2890213 - RNA, 17 nt, Human
ucacuguauaaauagga

SEQ ID NO: 2890214 - RNA, 19 nt, Human
ucacuguauaaauaggaga

SEQ ID NO: 2890215 - RNA, 23 nt, Human
ucacuguauaaauaggagaggau

SEQ ID NO: 2890216 - RNA, 24 nt, Human
ucacuguauaaauaggagaggaug

SEQ ID NO: 2890217 - RNA, 21 nt, Human
accaguguagccuugcccgga

SEQ ID NO: 2890218 - RNA, 14 nt, Human
accaguuaauuacu

SEQ ID NO: 2890219 - RNA, 16 nt, Human
accaguguagccuugc

SEQ ID NO: 2890220 - RNA, 13 nt, Human
accaguguagccu

SEQ ID NO: 2890221 - RNA, 17 nt, Human
accaguggucucacaug

SEQ ID NO: 2890222 - RNA, 12 nt, Human
accaguggucuc

SEQ ID NO: 2890223 - RNA, 21 nt, Human
accaguggcguuguugcaugu

SEQ ID NO: 2890224 - RNA, 22 nt, Human
accaguggcguuguugcauguu

SEQ ID NO: 2890225 - RNA, 23 nt, Human
accaguggcguuguugcauguuu

SEQ ID NO: 2890226 - RNA, 13 nt, Human
accagugcaggcu

SEQ ID NO: 2890227 - RNA, 14 nt, Human
accagugcaggcug

SEQ ID NO: 2890228 - RNA, 15 nt, Human
accagugcaggcugg

SEQ ID NO: 2890229 - RNA, 16 nt, Human
accagugcaggcuggc

SEQ ID NO: 2890230 - RNA, 19 nt, Human
accagugcaggcuggccag

SEQ ID NO: 2890231 - RNA, 20 nt, Human
accagugcaggcuggccagc

SEQ ID NO: 2890232 - RNA, 21 nt, Human
accagugcaggcuggccagcc

SEQ ID NO: 2890233 - RNA, 22 nt, Human
accagugcaggcuggccagccg

SEQ ID NO: 2890234 - RNA, 13 nt, Human
accagugccaagg

SEQ ID NO: 2890235 - RNA, 14 nt, Human
accagugccaagga

SEQ ID NO: 2890236 - RNA, 15 nt, Human
accagugccaaggac

SEQ ID NO: 2890237 - RNA, 16 nt, Human
accagugccaaggacc

SEQ ID NO: 2890238 - RNA, 17 nt, Human
accagugccaaggaccu

SEQ ID NO: 2890239 - RNA, 23 nt, Human
accagugcccaaagucuguguga

SEQ ID NO: 2890240 - RNA, 22 nt, Human
accagugcccaaagucugugug

SEQ ID NO: 2890241 - RNA, 18 nt, Human
ucacuguugcccaggcug

SEQ ID NO: 2890242 - RNA, 17 nt, Human
ucacuguugcccaggcu

SEQ ID NO: 2890243 - RNA, 16 nt, Human
accagggccgaggagg

SEQ ID NO: 2890244 - RNA, 21 nt, Human
uauuucaugcugggaaugaga

SEQ ID NO: 2890245 - RNA, 12 nt, Human
uauuucaugugg

SEQ ID NO: 2890246 - RNA, 17 nt, Human
uauuucauguggcugua

SEQ ID NO: 2890247 - RNA, 12 nt, Human
accacagacaca

SEQ ID NO: 2890248 - RNA, 13 nt, Human
accacagacacac

SEQ ID NO: 2890249 - RNA, 14 nt, Human
accacagacacaca

SEQ ID NO: 2890250 - RNA, 15 nt, Human
accacagacacacac

SEQ ID NO: 2890251 - RNA, 21 nt, Human
accacacuggacuccggcccu

SEQ ID NO: 2890252 - RNA, 22 nt, Human
accacacuggacuccggcccuc

SEQ ID NO: 2890253 - RNA, 12 nt, Human
uauuucauugcc

SEQ ID NO: 2890254 - RNA, 22 nt, Human
uauuucaguuccgucagaaagu

SEQ ID NO: 2890255 - RNA, 21 nt, Human
uauuucaguguaguuaauuua

SEQ ID NO: 2890256 - RNA, 22 nt, Human
uauuucaguguaguuaauuuau

SEQ ID NO: 2890257 - RNA, 23 nt, Human
uauuucaguguaguuaauuuauc

SEQ ID NO: 2890258 - RNA, 21 nt, Human
uauuucaguacuucagcaaga

SEQ ID NO: 2890259 - RNA, 13 nt, Human
uauuucagaugua

SEQ ID NO: 2890260 - RNA, 16 nt, Human
uauuucagauguaaug

SEQ ID NO: 2890261 - RNA, 19 nt, Human
uauuucagauguaauguuu

SEQ ID NO: 2890262 - RNA, 20 nt, Human
uauuucagauguaauguuuu

SEQ ID NO: 2890263 - RNA, 21 nt, Human
uauuucagauguaauguuuuc

SEQ ID NO: 2890264 - RNA, 12 nt, Human
uauuucagauuu

SEQ ID NO: 2890265 - RNA, 16 nt, Human
uauuucagauuuugau

SEQ ID NO: 2890266 - RNA, 17 nt, Human
uauuucagauuuugaua

SEQ ID NO: 2890267 - RNA, 18 nt, Human
uauuucagauuuugauaa

SEQ ID NO: 2890268 - RNA, 19 nt, Human
uauuucagauuuugauaac

SEQ ID NO: 2890269 - RNA, 20 nt, Human
uauuucagauuuugauaacu

SEQ ID NO: 2890270 - RNA, 23 nt, Human
uauuucagauuuugauaacuguu

SEQ ID NO: 2890271 - RNA, 14 nt, Human
accacaucuugcuc

SEQ ID NO: 2890272 - RNA, 20 nt, Human
accacauccuccguccagcc

SEQ ID NO: 2890273 - RNA, 14 nt, Human
accacauccuccgu

SEQ ID NO: 2890274 - RNA, 20 nt, Human
accacagacacacacacgca

SEQ ID NO: 2890275 - RNA, 16 nt, Human
accacagacacacaca

SEQ ID NO: 2890276 - RNA, 18 nt, Human
accacagacacacacacg

SEQ ID NO: 2890277 - RNA, 15 nt, Human
accacugcaaguccu

SEQ ID NO: 2890278 - RNA, 17 nt, Human
accacugcaaguccuuu

SEQ ID NO: 2890279 - RNA, 22 nt, Human
accacugcaaguccuuuuguaa

SEQ ID NO: 2890280 - RNA, 13 nt, Human
accacuucacuga

SEQ ID NO: 2890281 - RNA, 16 nt, Human
accacuucacugaaag

SEQ ID NO: 2890282 - RNA, 17 nt, Human
accacuucacugaaaga

SEQ ID NO: 2890283 - RNA, 18 nt, Human
accacuucacugaaagac

SEQ ID NO: 2890284 - RNA, 13 nt, Human
accacuguuucuu

SEQ ID NO: 2890285 - RNA, 16 nt, Human
accacuguuucuugcu

SEQ ID NO: 2890286 - RNA, 17 nt, Human
accacuguuucuugcuu

SEQ ID NO: 2890287 - RNA, 18 nt, Human
accacuguuucuugcuug

SEQ ID NO: 2890288 - RNA, 19 nt, Human
accacuguuucuugcuugu

SEQ ID NO: 2890289 - RNA, 20 nt, Human
accacuguuucuugcuugua

SEQ ID NO: 2890290 - RNA, 22 nt, Human
accacuguuucuugcuuguacc

SEQ ID NO: 2890291 - RNA, 23 nt, Human
accacuguuucuugcuuguaccu

SEQ ID NO: 2890292 - RNA, 24 nt, Human
accacaucuugcucugcugacaga

SEQ ID NO: 2890293 - RNA, 21 nt, Human
accacaucuugcucugcugac

SEQ ID NO: 2890294 - RNA, 20 nt, Human
accacaucuugcucugcuga

SEQ ID NO: 2890295 - RNA, 22 nt, Human
accacauccuccguccagccgc

SEQ ID NO: 2890296 - RNA, 21 nt, Human
accacauccuccguccagccg

SEQ ID NO: 2890297 - RNA, 15 nt, Human
accacagagcuguca

SEQ ID NO: 2890298 - RNA, 17 nt, Human
accacaucuuuaucugu

SEQ ID NO: 2890299 - RNA, 12 nt, Human
accacucagccc

SEQ ID NO: 2890300 - RNA, 13 nt, Human
accacucagcccc

SEQ ID NO: 2890301 - RNA, 14 nt, Human
accacucagccccu

SEQ ID NO: 2890302 - RNA, 15 nt, Human
accacucagccccua

SEQ ID NO: 2890303 - RNA, 16 nt, Human
accacucagccccuag

SEQ ID NO: 2890304 - RNA, 17 nt, Human
accacucagccccuagg

SEQ ID NO: 2890305 - RNA, 18 nt, Human
accacucagccccuagga

SEQ ID NO: 2890306 - RNA, 12 nt, Human
accacuccauuc

SEQ ID NO: 2890307 - RNA, 17 nt, Human
accagacaccuugacag

SEQ ID NO: 2890308 - RNA, 23 nt, Human
accagacaccuugacagggcaca

SEQ ID NO: 2890309 - RNA, 22 nt, Human
accagacaccuugacagggcac

SEQ ID NO: 2890310 - RNA, 18 nt, Human
accagagaccguccucac

SEQ ID NO: 2890311 - RNA, 16 nt, Human
accagagaccguccuc

SEQ ID NO: 2890312 - RNA, 12 nt, Human
accagacagagg

SEQ ID NO: 2890313 - RNA, 13 nt, Human
accagacagaggg

SEQ ID NO: 2890314 - RNA, 16 nt, Human
accagacagaggguca

SEQ ID NO: 2890315 - RNA, 19 nt, Human
accagacagagggucacag

SEQ ID NO: 2890316 - RNA, 22 nt, Human
accagacagagggucacagugu

SEQ ID NO: 2890317 - RNA, 22 nt, Human
accagagcccaccuuggcucaa

SEQ ID NO: 2890318 - RNA, 19 nt, Human
accagagcccaccuuggcu

SEQ ID NO: 2890319 - RNA, 16 nt, Human
accagagcagaugcag

SEQ ID NO: 2890320 - RNA, 17 nt, Human
accagagcagaugcaga

SEQ ID NO: 2890321 - RNA, 22 nt, Human
accagagcagaugcagagagcc

SEQ ID NO: 2890322 - RNA, 20 nt, Human
accagagcauuuccaacacc

SEQ ID NO: 2890323 - RNA, 15 nt, Human
accagagcagaugca

SEQ ID NO: 2890324 - RNA, 19 nt, Human
accagagcaaccucucacu

SEQ ID NO: 2890325 - RNA, 20 nt, Human
accagagcaaccucucacuc

SEQ ID NO: 2890326 - RNA, 12 nt, Human
accagagcagau

SEQ ID NO: 2890327 - RNA, 17 nt, Human
accagagcccaccuugg

SEQ ID NO: 2890328 - RNA, 12 nt, Human
accagccuggcc

SEQ ID NO: 2890329 - RNA, 11 nt, Human
accagccuggc

SEQ ID NO: 2890330 - RNA, 20 nt, Human
accagccuggccaacauggu

SEQ ID NO: 2890331 - RNA, 15 nt, Human
accagccuggccaac

SEQ ID NO: 2890332 - RNA, 17 nt, Human
accagccuggccaacau

SEQ ID NO: 2890333 - RNA, 13 nt, Human
accagccugggca

SEQ ID NO: 2890334 - RNA, 14 nt, Human
accagccugggcag

SEQ ID NO: 2890335 - RNA, 16 nt, Human
accaggacucccuccu

SEQ ID NO: 2890336 - RNA, 20 nt, Human
accaggagaaccacuacaug

SEQ ID NO: 2890337 - RNA, 19 nt, Human
accaggagaaccacuacau

SEQ ID NO: 2890338 - RNA, 18 nt, Human
accaggagaaccacuaca

SEQ ID NO: 2890339 - RNA, 14 nt, Human
accaggagaaccac

SEQ ID NO: 2890340 - RNA, 21 nt, Human
accaggacucccuccucaccu

SEQ ID NO: 2890341 - RNA, 18 nt, Human
accaggacucccuccuca

SEQ ID NO: 2890342 - RNA, 17 nt, Human
accaggacucccuccuc

SEQ ID NO: 2890343 - RNA, 11 nt, Human
accaggcaggg

SEQ ID NO: 2890344 - RNA, 19 nt, Human
accaggcaacuugggaacu

SEQ ID NO: 2890345 - RNA, 14 nt, Human
accaggauuucuaa

SEQ ID NO: 2890346 - RNA, 15 nt, Human
accaggauuucuaau

SEQ ID NO: 2890347 - RNA, 13 nt, Human
accaggauuuuuu

SEQ ID NO: 2890348 - RNA, 19 nt, Human
accaggauccagccucacu

SEQ ID NO: 2890349 - RNA, 23 nt, Human
ucaccugaagacucauucuucug

SEQ ID NO: 2890350 - RNA, 22 nt, Human
ucaccugagcaggaccucugaa

SEQ ID NO: 2890351 - RNA, 19 nt, Human
ucaccugaagacucauucu

SEQ ID NO: 2890352 - RNA, 16 nt, Human
ucaccugaagacucau

SEQ ID NO: 2890353 - RNA, 15 nt, Human
accaggccauucugc

SEQ ID NO: 2890354 - RNA, 12 nt, Human
accaggcccugg

SEQ ID NO: 2890355 - RNA, 15 nt, Human
accaggcccuggcua

SEQ ID NO: 2890356 - RNA, 15 nt, Human
ucaccucccccaucu

SEQ ID NO: 2890357 - RNA, 13 nt, Human
ucaccucccccau

SEQ ID NO: 2890358 - RNA, 12 nt, Human
ucaccuccucua

SEQ ID NO: 2890359 - RNA, 22 nt, Human
ucaccuccucuaagguugggca

SEQ ID NO: 2890360 - RNA, 12 nt, Human
agcaccacccua

SEQ ID NO: 2890361 - RNA, 23 nt, Human
agcacaucugcauuuucacccca

SEQ ID NO: 2890362 - RNA, 16 nt, Human
agcacaucugcauuuu

SEQ ID NO: 2890363 - RNA, 15 nt, Human
agcacaucugcauuu

SEQ ID NO: 2890364 - RNA, 22 nt, Human
agcaccaaaagcuuaccaaggg

SEQ ID NO: 2890365 - RNA, 12 nt, Human
agcacagccuag

SEQ ID NO: 2890366 - RNA, 21 nt, Human
agcacagcucaggaacuagac

SEQ ID NO: 2890367 - RNA, 15 nt, Human
agcacagcucccugc

SEQ ID NO: 2890368 - RNA, 17 nt, Human
agcacagcucccugcca

SEQ ID NO: 2890369 - RNA, 18 nt, Human
agcacagcucccugccaa

SEQ ID NO: 2890370 - RNA, 16 nt, Human
agcacagcuucauuuc

SEQ ID NO: 2890371 - RNA, 21 nt, Human
agcacaggugggcuucccagu

SEQ ID NO: 2890372 - RNA, 19 nt, Human
agcacaggugggcuuccca

SEQ ID NO: 2890373 - RNA, 17 nt, Human
agcacauauuuucuguu

SEQ ID NO: 2890374 - RNA, 17 nt, Human
agcacaguuugaacaaa

SEQ ID NO: 2890375 - RNA, 12 nt, Human
agcacaguuugu

SEQ ID NO: 2890376 - RNA, 19 nt, Human
agcacaguguuaaaugaaa

SEQ ID NO: 2890377 - RNA, 22 nt, Human
agcacaguguuaaaugaaauug

SEQ ID NO: 2890378 - RNA, 12 nt, Human
agcacaguuuga

SEQ ID NO: 2890379 - RNA, 14 nt, Human
agcacaguuugaac

SEQ ID NO: 2890380 - RNA, 16 nt, Human
agcacaguguuaaaug

SEQ ID NO: 2890381 - RNA, 18 nt, Human
agcacaguguuaaaugaa

SEQ ID NO: 2890382 - RNA, 12 nt, Human
ugagccaccacg

SEQ ID NO: 2890383 - RNA, 21 nt, Human
ugagccaggcuagcuggagcc

SEQ ID NO: 2890384 - RNA, 22 nt, Human
ugagccaggcuagcuggagccu

SEQ ID NO: 2890385 - RNA, 23 nt, Human
ugagccaggcuagcuggagccug

SEQ ID NO: 2890386 - RNA, 13 nt, Human
agcaagugagagc

SEQ ID NO: 2890387 - RNA, 17 nt, Human
agcaagugagagagaug

SEQ ID NO: 2890388 - RNA, 18 nt, Human
agcaagugagagagaugg

SEQ ID NO: 2890389 - RNA, 24 nt, Human
agcaagugagagagaugggagcuc

SEQ ID NO: 2890390 - RNA, 21 nt, Human
ugagccagugcuuuaauggca

SEQ ID NO: 2890391 - RNA, 14 nt, Human
agcaagugagagcu

SEQ ID NO: 2890392 - RNA, 18 nt, Human
agcaagugagagcugggu

SEQ ID NO: 2890393 - RNA, 22 nt, Human
agcaagugagagcuggguguca

SEQ ID NO: 2890394 - RNA, 21 nt, Human
agcaagugauugggacagagg

SEQ ID NO: 2890395 - RNA, 20 nt, Human
agcaaguucugagagccagg

SEQ ID NO: 2890396 - RNA, 15 nt, Human
agcaaguuuucuucc

SEQ ID NO: 2890397 - RNA, 15 nt, Human
agcaauaaaauuuuu

SEQ ID NO: 2890398 - RNA, 22 nt, Human
agcacagauuuuaauugucaug

SEQ ID NO: 2890399 - RNA, 23 nt, Human
agcacagauuuuaauugucaugg

SEQ ID NO: 2890400 - RNA, 21 nt, Human
agcacagcagccccugcacaa

SEQ ID NO: 2890401 - RNA, 19 nt, Human
agcaaccuuucaccuuugu

SEQ ID NO: 2890402 - RNA, 22 nt, Human
agcaaccuuucaccuuugugua

SEQ ID NO: 2890403 - RNA, 23 nt, Human
agcaaccuuucaccuuuguguau

SEQ ID NO: 2890404 - RNA, 13 nt, Human
agcaaccucccaa

SEQ ID NO: 2890405 - RNA, 19 nt, Human
agcaaccgccucaaaaugu

SEQ ID NO: 2890406 - RNA, 20 nt, Human
agcaaccgccucaaaaugug

SEQ ID NO: 2890407 - RNA, 21 nt, Human
agcaaccgccucaaaaugugu

SEQ ID NO: 2890408 - RNA, 18 nt, Human
agcaaccgguggauccuc

SEQ ID NO: 2890409 - RNA, 15 nt, Human
ugagcaaauguggcu

SEQ ID NO: 2890410 - RNA, 18 nt, Human
ugagcaacucuugauuau

SEQ ID NO: 2890411 - RNA, 16 nt, Human
ugagcaacucuugauu

SEQ ID NO: 2890412 - RNA, 16 nt, Human
ugagcaaauguggcuc

SEQ ID NO: 2890413 - RNA, 18 nt, Human
ugagcaaauguggcuccu

SEQ ID NO: 2890414 - RNA, 19 nt, Human
ugagcaaauguggcuccug

SEQ ID NO: 2890415 - RNA, 23 nt, Human
ugagcacuaaggugugcucugau

SEQ ID NO: 2890416 - RNA, 22 nt, Human
ugagcacuaaggugugcucuga

SEQ ID NO: 2890417 - RNA, 21 nt, Human
ugagcacuaaggugugcucug

SEQ ID NO: 2890418 - RNA, 20 nt, Human
ugagcacuaaggugugcucu

SEQ ID NO: 2890419 - RNA, 21 nt, Human
ugagcaaggagcacaagccac

SEQ ID NO: 2890420 - RNA, 23 nt, Human
ugagcaaggagcacaagccacaa

SEQ ID NO: 2890421 - RNA, 20 nt, Human
ugagcacacuuuaguggccg

SEQ ID NO: 2890422 - RNA, 13 nt, Human
ugagcacagagug

SEQ ID NO: 2890423 - RNA, 17 nt, Human
ugagcacagccuagggc

SEQ ID NO: 2890424 - RNA, 13 nt, Human
ugagcacacuuua

SEQ ID NO: 2890425 - RNA, 23 nt, Human
ugagccacugcaccgggccacag

SEQ ID NO: 2890426 - RNA, 18 nt, Human
ugagccacugcaccgggc

SEQ ID NO: 2890427 - RNA, 21 nt, Human
ugagccacugcaccgggccac

SEQ ID NO: 2890428 - RNA, 21 nt, Human
ugagccaccgugccuggccac

SEQ ID NO: 2890429 - RNA, 20 nt, Human
ugagccaccgugccuggcca

SEQ ID NO: 2890430 - RNA, 19 nt, Human
ugagccaccgugccuggcc

SEQ ID NO: 2890431 - RNA, 18 nt, Human
ugagccaccgugccuggc

SEQ ID NO: 2890432 - RNA, 14 nt, Human
ugagcauccugagc

SEQ ID NO: 2890433 - RNA, 15 nt, Human
ugagcauccugagcc

SEQ ID NO: 2890434 - RNA, 16 nt, Human
ugagcauccugagccc

SEQ ID NO: 2890435 - RNA, 17 nt, Human
ugagcauccugagcccc

SEQ ID NO: 2890436 - RNA, 18 nt, Human
ugagcauccugagccccg

SEQ ID NO: 2890437 - RNA, 19 nt, Human
ugagcauccugagccccgc

SEQ ID NO: 2890438 - RNA, 23 nt, Human
ugagcauccugagccccgcccuc

SEQ ID NO: 2890439 - RNA, 16 nt, Human
ugagccaccacaccug

SEQ ID NO: 2890440 - RNA, 14 nt, Human
ugagccaccgugcc

SEQ ID NO: 2890441 - RNA, 15 nt, Human
ugagccaccacgccc

SEQ ID NO: 2890442 - RNA, 13 nt, Human
ugagcagaaggaa

SEQ ID NO: 2890443 - RNA, 14 nt, Human
ugagcagaaggaaa

SEQ ID NO: 2890444 - RNA, 18 nt, Human
ugagcagaaggaaacaaa

SEQ ID NO: 2890445 - RNA, 14 nt, Human
agcagaagaaagga

SEQ ID NO: 2890446 - RNA, 13 nt, Human
agcagaagacaaa

SEQ ID NO: 2890447 - RNA, 14 nt, Human
agcagaaggaaaca

SEQ ID NO: 2890448 - RNA, 21 nt, Human
agcagaacggagccccaggcc

SEQ ID NO: 2890449 - RNA, 16 nt, Human
agcagaaccuuaaaca

SEQ ID NO: 2890450 - RNA, 15 nt, Human
ugagccacugcgccc

SEQ ID NO: 2890451 - RNA, 20 nt, Human
agcagaacagaucuuuuacu

SEQ ID NO: 2890452 - RNA, 16 nt, Human
agcagaaggauuuuuu

SEQ ID NO: 2890453 - RNA, 18 nt, Human
agcagaaggauuuuuuaa

SEQ ID NO: 2890454 - RNA, 16 nt, Human
agcagaaguggagcug

SEQ ID NO: 2890455 - RNA, 22 nt, Human
agcacuuugggaggcugaggcg

SEQ ID NO: 2890456 - RNA, 21 nt, Human
agcacuuugggaggcugaggc

SEQ ID NO: 2890457 - RNA, 23 nt, Human
agcagaaaaaggcugugcugccc

SEQ ID NO: 2890458 - RNA, 22 nt, Human
agcagaaaacuggcccugcccu

SEQ ID NO: 2890459 - RNA, 18 nt, Human
agcagaaaauaaaggaag

SEQ ID NO: 2890460 - RNA, 18 nt, Human
agcagaaagcugugaaca

SEQ ID NO: 2890461 - RNA, 12 nt, Human
agcacuuuggga

SEQ ID NO: 2890462 - RNA, 17 nt, Human
agcacuuugaaauaccu

SEQ ID NO: 2890463 - RNA, 18 nt, Human
agcacuuugaaauaccuc

SEQ ID NO: 2890464 - RNA, 19 nt, Human
agcacuuugaaauaccuca

SEQ ID NO: 2890465 - RNA, 20 nt, Human
agcacuuugaaauaccucau

SEQ ID NO: 2890466 - RNA, 21 nt, Human
agcacuuugaaauaccucaug

SEQ ID NO: 2890467 - RNA, 15 nt, Human
agcacuuugcaagga

SEQ ID NO: 2890468 - RNA, 19 nt, Human
agcacuuugcaaggaaugu

SEQ ID NO: 2890469 - RNA, 19 nt, Human
agcacuugucucauuuuaa

SEQ ID NO: 2890470 - RNA, 22 nt, Human
agcacuugucucauuuuaaugu

SEQ ID NO: 2890471 - RNA, 13 nt, Human
agcacuuguauau

SEQ ID NO: 2890472 - RNA, 12 nt, Human
agcacuuguaua

SEQ ID NO: 2890473 - RNA, 22 nt, Human
agcaccugucuccuuucacccc

SEQ ID NO: 2890474 - RNA, 14 nt, Human
agcaccuguaagaa

SEQ ID NO: 2890475 - RNA, 19 nt, Human
agcaccuuugcacaggaug

SEQ ID NO: 2890476 - RNA, 18 nt, Human
agcaccugccuccucguu

SEQ ID NO: 2890477 - RNA, 21 nt, Human
agcaccugccuccucguuccu

SEQ ID NO: 2890478 - RNA, 13 nt, Human
agcaccagggaag

SEQ ID NO: 2890479 - RNA, 12 nt, Human
agcaccagggaa

SEQ ID NO: 2890480 - RNA, 10 nt, Human
agcaccaggg

SEQ ID NO: 2890481 - RNA, 23 nt, Human
agcaccacccuagucccuucccc

SEQ ID NO: 2890482 - RNA, 17 nt, Human
agcaccaagcucaaagc

SEQ ID NO: 2890483 - RNA, 18 nt, Human
agcaccaagcucaaagcg

SEQ ID NO: 2890484 - RNA, 14 nt, Human
ugagccuucagucu

SEQ ID NO: 2890485 - RNA, 18 nt, Human
ugagccuucgugcccccc

SEQ ID NO: 2890486 - RNA, 19 nt, Human
ugagccuucgugccccccc

SEQ ID NO: 2890487 - RNA, 13 nt, Human
ugagccuucaguc

SEQ ID NO: 2890488 - RNA, 16 nt, Human
ugagccuggccagccu

SEQ ID NO: 2890489 - RNA, 22 nt, Human
ugagccuggcccauagaaacau

SEQ ID NO: 2890490 - RNA, 13 nt, Human
ugagccuggcucu

SEQ ID NO: 2890491 - RNA, 18 nt, Human
ugagccuggcucuugugc

SEQ ID NO: 2890492 - RNA, 12 nt, Human
ugagccuggcca

SEQ ID NO: 2890493 - RNA, 11 nt, Human
ugagccuggcc

SEQ ID NO: 2890494 - RNA, 21 nt, Human
agcagagaaugaaagggccca

SEQ ID NO: 2890495 - RNA, 22 nt, Human
agcagaccaccccgccugcccu

SEQ ID NO: 2890496 - RNA, 21 nt, Human
agcagaauggugaucacucca

SEQ ID NO: 2890497 - RNA, 23 nt, Human
agcagagaaugaaagggcccaga

SEQ ID NO: 2890498 - RNA, 22 nt, Human
agcagagaaugaaagggcccag

SEQ ID NO: 2890499 - RNA, 13 nt, Human
agcagagaagggc

SEQ ID NO: 2890500 - RNA, 16 nt, Human
agcagagaauauaaca

SEQ ID NO: 2890501 - RNA, 20 nt, Human
agcagagaauauaacaugaa

SEQ ID NO: 2890502 - RNA, 24 nt, Human
agcagagaauauaacaugaaauga

SEQ ID NO: 2890503 - RNA, 13 nt, Human
ugaggucagagcc

SEQ ID NO: 2890504 - RNA, 16 nt, Human
ugaggucagagccugc

SEQ ID NO: 2890505 - RNA, 14 nt, Human
ugaggucagagccu

SEQ ID NO: 2890506 - RNA, 21 nt, Human
ugagggugcuuguucccucuc

SEQ ID NO: 2890507 - RNA, 14 nt, Human
ugaggguguuucuu

SEQ ID NO: 2890508 - RNA, 15 nt, Human
ugagguaaguuuuuu

SEQ ID NO: 2890509 - RNA, 20 nt, Human
ugaggguugggcugguguca

SEQ ID NO: 2890510 - RNA, 17 nt, Human
ugaggucagagccugca

SEQ ID NO: 2890511 - RNA, 15 nt, Human
agcagagcaggggca

SEQ ID NO: 2890512 - RNA, 14 nt, Human
agcagagcaggggc

SEQ ID NO: 2890513 - RNA, 15 nt, Human
agcagagagaugcgg

SEQ ID NO: 2890514 - RNA, 14 nt, Human
ugagguaaagauau

SEQ ID NO: 2890515 - RNA, 22 nt, Human
ugagguagaccaggauuucuaa

SEQ ID NO: 2890516 - RNA, 19 nt, Human
ugagguacaaccuguucug

SEQ ID NO: 2890517 - RNA, 21 nt, Human
agcagauggaaugcuguguua

SEQ ID NO: 2890518 - RNA, 19 nt, Human
agcagaugcaaugacucag

SEQ ID NO: 2890519 - RNA, 12 nt, Human
agcagaugcaga

SEQ ID NO: 2890520 - RNA, 13 nt, Human
agcagaugcagag

SEQ ID NO: 2890521 - RNA, 16 nt, Human
agcagaugcagagagc

SEQ ID NO: 2890522 - RNA, 17 nt, Human
agcagaugcagagagcc

SEQ ID NO: 2890523 - RNA, 18 nt, Human
agcagaugcagagagcca

SEQ ID NO: 2890524 - RNA, 22 nt, Human
agcagauuguuuccucuuccaa

SEQ ID NO: 2890525 - RNA, 21 nt, Human
agcagaugcagagagccauuu

SEQ ID NO: 2890526 - RNA, 13 nt, Human
agcagauuggaag

SEQ ID NO: 2890527 - RNA, 14 nt, Human
agcagauuggaagg

SEQ ID NO: 2890528 - RNA, 15 nt, Human
agcagauuggaagga

SEQ ID NO: 2890529 - RNA, 17 nt, Human
agcagauuggaaggaga

SEQ ID NO: 2890530 - RNA, 18 nt, Human
agcagauuggaaggagac

SEQ ID NO: 2890531 - RNA, 19 nt, Human
agcagauuggaaggagaca

SEQ ID NO: 2890532 - RNA, 21 nt, Human
agcagauuggaaggagacaca

SEQ ID NO: 2890533 - RNA, 22 nt, Human
agcagauuggaaggagacacag

SEQ ID NO: 2890534 - RNA, 23 nt, Human
agcagauuggaaggagacacaga

SEQ ID NO: 2890535 - RNA, 15 nt, Human
agcagcaaaaauaua

SEQ ID NO: 2890536 - RNA, 16 nt, Human
agcagcaaaaauauaa

SEQ ID NO: 2890537 - RNA, 17 nt, Human
agcagcaaaaauauaaa

SEQ ID NO: 2890538 - RNA, 20 nt, Human
agcagcaaaaauauaaaaua

SEQ ID NO: 2890539 - RNA, 13 nt, Human
agcagcaagaaaa

SEQ ID NO: 2890540 - RNA, 15 nt, Human
agcagcaagaaaaaa

SEQ ID NO: 2890541 - RNA, 16 nt, Human
agcagcaagaaaaaaa

SEQ ID NO: 2890542 - RNA, 20 nt, Human
agcagcaagaaaaaaaaaug

SEQ ID NO: 2890543 - RNA, 21 nt, Human
agcagcaagaaaaaaaaaugc

SEQ ID NO: 2890544 - RNA, 23 nt, Human
agcagcaagaaaaaaaaaugcca

SEQ ID NO: 2890545 - RNA, 16 nt, Human
agcagagugcacagcu

SEQ ID NO: 2890546 - RNA, 17 nt, Human
agcagagugcacagcug

SEQ ID NO: 2890547 - RNA, 18 nt, Human
agcagagugcacagcugu

SEQ ID NO: 2890548 - RNA, 19 nt, Human
agcagagugcacagcuguc

SEQ ID NO: 2890549 - RNA, 23 nt, Human
agcagagugcacagcuguccacu

SEQ ID NO: 2890550 - RNA, 13 nt, Human
agcagaggcagcg

SEQ ID NO: 2890551 - RNA, 23 nt, Human
agcagagguggccagagcuggga

SEQ ID NO: 2890552 - RNA, 19 nt, Human
agcagauaccucacccugc

SEQ ID NO: 2890553 - RNA, 15 nt, Human
agcagauacugcugu

SEQ ID NO: 2890554 - RNA, 18 nt, Human
agcagauaccucacccug

SEQ ID NO: 2890555 - RNA, 14 nt, Human
ugaggggcuccugg

SEQ ID NO: 2890556 - RNA, 20 nt, Human
ugagggguauaucugggcug

SEQ ID NO: 2890557 - RNA, 15 nt, Human
ugaggggcuccugga

SEQ ID NO: 2890558 - RNA, 18 nt, Human
ugaggguaucaaauaaaa

SEQ ID NO: 2890559 - RNA, 15 nt, Human
ugaggguccccaccu

SEQ ID NO: 2890560 - RNA, 19 nt, Human
ugaggguccccaccuggga

SEQ ID NO: 2890561 - RNA, 17 nt, Human
ugaggggcaucugcccc

SEQ ID NO: 2890562 - RNA, 22 nt, Human
ugaggggcaucugccccucccc

SEQ ID NO: 2890563 - RNA, 11 nt, Human
ugaggggagga

SEQ ID NO: 2890564 - RNA, 22 nt, Human
ugaggggaggaucacuggagcc

SEQ ID NO: 2890565 - RNA, 21 nt, Human
ugaggggaggaucacuggagc

SEQ ID NO: 2890566 - RNA, 12 nt, Human
ugagggcccaga

SEQ ID NO: 2890567 - RNA, 13 nt, Human
ugagggcccagag

SEQ ID NO: 2890568 - RNA, 14 nt, Human
ugagggcccagagc

SEQ ID NO: 2890569 - RNA, 15 nt, Human
ugagggcccagagca

SEQ ID NO: 2890570 - RNA, 16 nt, Human
ugagggcccagagcag

SEQ ID NO: 2890571 - RNA, 17 nt, Human
ugagggcccagagcagg

SEQ ID NO: 2890572 - RNA, 18 nt, Human
ugagggcccagagcagga

SEQ ID NO: 2890573 - RNA, 19 nt, Human
ugagggcccagagcaggaa

SEQ ID NO: 2890574 - RNA, 20 nt, Human
ugagggcccagagcaggaag

SEQ ID NO: 2890575 - RNA, 21 nt, Human
ugagggcccagagcaggaagc

SEQ ID NO: 2890576 - RNA, 21 nt, Human
ugaggccccuucuagguggca

SEQ ID NO: 2890577 - RNA, 17 nt, Human
ugagggaugggccuggc

SEQ ID NO: 2890578 - RNA, 19 nt, Human
ugagggaugggccuggcau

SEQ ID NO: 2890579 - RNA, 12 nt, Human
ugagggcaaauc

SEQ ID NO: 2890580 - RNA, 15 nt, Human
ugagggauuaucuuu

SEQ ID NO: 2890581 - RNA, 14 nt, Human
ugaggcccugccca

SEQ ID NO: 2890582 - RNA, 22 nt, Human
ugaggccuccagcuucaggcag

SEQ ID NO: 2890583 - RNA, 14 nt, Human
ugaggccugagacc

SEQ ID NO: 2890584 - RNA, 16 nt, Human
ugaggccugagaccca

SEQ ID NO: 2890585 - RNA, 18 nt, Human
ugaggccugagacccagg

SEQ ID NO: 2890586 - RNA, 19 nt, Human
ugaggccugagacccagga

SEQ ID NO: 2890587 - RNA, 20 nt, Human
ugaggccugagacccaggac

SEQ ID NO: 2890588 - RNA, 21 nt, Human
ugaggccugagacccaggacu

SEQ ID NO: 2890589 - RNA, 23 nt, Human
ugaggccugagacccaggacucc

SEQ ID NO: 2890590 - RNA, 21 nt, Human
ugaggacacuaaccacgcugg

SEQ ID NO: 2890591 - RNA, 23 nt, Human
ugaggccaccaguaaaagacauu

SEQ ID NO: 2890592 - RNA, 20 nt, Human
ugaggacaaccauuccagac

SEQ ID NO: 2890593 - RNA, 19 nt, Human
ugaggacaaccauuccaga

SEQ ID NO: 2890594 - RNA, 18 nt, Human
ugaggaauuuucuuugug

SEQ ID NO: 2890595 - RNA, 22 nt, Human
ugaggacaaaguggaggagggc

SEQ ID NO: 2890596 - RNA, 16 nt, Human
ugaggacaaauugaga

SEQ ID NO: 2890597 - RNA, 20 nt, Human
ugaggacaaauugagacagu

SEQ ID NO: 2890598 - RNA, 14 nt, Human
ugaggaauuuucuu

SEQ ID NO: 2890599 - RNA, 13 nt, Human
ugaggaauuuucu

SEQ ID NO: 2890600 - RNA, 22 nt, Human
ugaggaauccagacccggcugc

SEQ ID NO: 2890601 - RNA, 21 nt, Human
ugaggaauccagacccggcug

SEQ ID NO: 2890602 - RNA, 13 nt, Human
ugaggccaggagu

SEQ ID NO: 2890603 - RNA, 12 nt, Human
ugaggccaggag

SEQ ID NO: 2890604 - RNA, 18 nt, Human
ugagcgccuggauuucug

SEQ ID NO: 2890605 - RNA, 18 nt, Human
ugagcgccugugcacaca

SEQ ID NO: 2890606 - RNA, 20 nt, Human
ugagcgccugugcacacaca

SEQ ID NO: 2890607 - RNA, 22 nt, Human
agcagacgauaguuaucuguuc

SEQ ID NO: 2890608 - RNA, 16 nt, Human
ugagccuuuucccucu

SEQ ID NO: 2890609 - RNA, 17 nt, Human
ugagcguccagaaaugg

SEQ ID NO: 2890610 - RNA, 12 nt, Human
ugagcgggaggc

SEQ ID NO: 2890611 - RNA, 13 nt, Human
ugagcgggaggca

SEQ ID NO: 2890612 - RNA, 14 nt, Human
ugagcgggaggcag

SEQ ID NO: 2890613 - RNA, 15 nt, Human
ugagcgggaggcaga

SEQ ID NO: 2890614 - RNA, 16 nt, Human
ugagcgggaggcagag

SEQ ID NO: 2890615 - RNA, 21 nt, Human
ugaggaacuguagaugaugua

SEQ ID NO: 2890616 - RNA, 19 nt, Human
ugaggaacuguagaugaug

SEQ ID NO: 2890617 - RNA, 15 nt, Human
ugaggaacuguacag

SEQ ID NO: 2890618 - RNA, 17 nt, Human
ugaggaacuguacagaa

SEQ ID NO: 2890619 - RNA, 19 nt, Human
ugaggaacuguacagaaaa

SEQ ID NO: 2890620 - RNA, 16 nt, Human
ugaggaaacaacagcu

SEQ ID NO: 2890621 - RNA, 16 nt, Human
ugaggaaaauaaugua

SEQ ID NO: 2890622 - RNA, 14 nt, Human
ugaggaaagcacac

SEQ ID NO: 2890623 - RNA, 17 nt, Human
ugaggaaagcacacagu

SEQ ID NO: 2890624 - RNA, 14 nt, Human
ugaggaagagucuu

SEQ ID NO: 2890625 - RNA, 23 nt, Human
ugaggaaggaggggaagcugcag

SEQ ID NO: 2890626 - RNA, 17 nt, Human
ugaggaauaauuauuua

SEQ ID NO: 2890627 - RNA, 19 nt, Human
ugaggaauaauuauuuauu

SEQ ID NO: 2890628 - RNA, 14 nt, Human
agagucuagauucu

SEQ ID NO: 2890629 - RNA, 16 nt, Human
agagugagacucuguc

SEQ ID NO: 2890630 - RNA, 15 nt, Human
agagugagacucugu

SEQ ID NO: 2890631 - RNA, 22 nt, Human
agagucucacuguugcccaggc

SEQ ID NO: 2890632 - RNA, 20 nt, Human
agagucucacuguugcccag

SEQ ID NO: 2890633 - RNA, 15 nt, Human
agagucuagauucaa

SEQ ID NO: 2890634 - RNA, 17 nt, Human
agagucuagauucaaag

SEQ ID NO: 2890635 - RNA, 19 nt, Human
agagucuagauucaaaggu

SEQ ID NO: 2890636 - RNA, 21 nt, Human
agagucuagauucaaagguuc

SEQ ID NO: 2890637 - RNA, 22 nt, Human
agagucuagauucaaagguucu

SEQ ID NO: 2890638 - RNA, 23 nt, Human
agagucuagauucaaagguucua

SEQ ID NO: 2890639 - RNA, 15 nt, Human
agagucuagauucuc

SEQ ID NO: 2890640 - RNA, 17 nt, Human
agagucuagcacucauu

SEQ ID NO: 2890641 - RNA, 15 nt, Human
ugaauguauuuauuu

SEQ ID NO: 2890642 - RNA, 17 nt, Human
ugaauguauuuauuugg

SEQ ID NO: 2890643 - RNA, 11 nt, Human
agagucuagau

SEQ ID NO: 2890644 - RNA, 12 nt, Human
agagucuagauu

SEQ ID NO: 2890645 - RNA, 13 nt, Human
agagucuagauuc

SEQ ID NO: 2890646 - RNA, 14 nt, Human
agagucuaaagaug

SEQ ID NO: 2890647 - RNA, 17 nt, Human
agagucuaaagauggag

SEQ ID NO: 2890648 - RNA, 22 nt, Human
agagucuaaagauggaguuucu

SEQ ID NO: 2890649 - RNA, 23 nt, Human
agagucuaaagauggaguuucua

SEQ ID NO: 2890650 - RNA, 12 nt, Human
agagucuaaaga

SEQ ID NO: 2890651 - RNA, 13 nt, Human
agagucuaaagau

SEQ ID NO: 2890652 - RNA, 19 nt, Human
ugaauguauuuauuuggga

SEQ ID NO: 2890653 - RNA, 23 nt, Human
ugaauguauuuauuugggagacc

SEQ ID NO: 2890654 - RNA, 13 nt, Human
agaguccucugaa

SEQ ID NO: 2890655 - RNA, 12 nt, Human
agaguccucuga

SEQ ID NO: 2890656 - RNA, 14 nt, Human
agaguccucugaau

SEQ ID NO: 2890657 - RNA, 14 nt, Human
agaguccucacucc

SEQ ID NO: 2890658 - RNA, 17 nt, Human
agaguccugugcugaau

SEQ ID NO: 2890659 - RNA, 14 nt, Human
ugaauauauggcau

SEQ ID NO: 2890660 - RNA, 15 nt, Human
ugaauauauggcauu

SEQ ID NO: 2890661 - RNA, 16 nt, Human
ugaauauauggcauuu

SEQ ID NO: 2890662 - RNA, 20 nt, Human
ugaauauauggcauuugcag

SEQ ID NO: 2890663 - RNA, 21 nt, Human
ugaauauauggcauuugcaga

SEQ ID NO: 2890664 - RNA, 21 nt, Human
ugaauauacagcaggugcuca

SEQ ID NO: 2890665 - RNA, 21 nt, Human
ugaauauaauauauuugugua

SEQ ID NO: 2890666 - RNA, 22 nt, Human
ugaauauaauauauuuguguau

SEQ ID NO: 2890667 - RNA, 14 nt, Human
ugaagcuugacucc

SEQ ID NO: 2890668 - RNA, 15 nt, Human
ugaagcuugacuccc

SEQ ID NO: 2890669 - RNA, 18 nt, Human
ugaagcuugacucccaag

SEQ ID NO: 2890670 - RNA, 15 nt, Human
ugaaggugacagcag

SEQ ID NO: 2890671 - RNA, 18 nt, Human
ugaaugccagugugcuga

SEQ ID NO: 2890672 - RNA, 21 nt, Human
ugaaugccauagucaaagaga

SEQ ID NO: 2890673 - RNA, 14 nt, Human
ugaaugcauaaaau

SEQ ID NO: 2890674 - RNA, 21 nt, Human
ugaaugcuuauagguggccuc

SEQ ID NO: 2890675 - RNA, 23 nt, Human
ugaaugcuuuuugaauguuauuu

SEQ ID NO: 2890676 - RNA, 18 nt, Human
ugaaugcuuuuugaaugu

SEQ ID NO: 2890677 - RNA, 19 nt, Human
ugaaugcuuuuugaauguu

SEQ ID NO: 2890678 - RNA, 12 nt, Human
ugaaugcuuuuu

SEQ ID NO: 2890679 - RNA, 14 nt, Human
ugaaugcuuugcau

SEQ ID NO: 2890680 - RNA, 21 nt, Human
ugaaugcuuugcauuuggaau

SEQ ID NO: 2890681 - RNA, 21 nt, Human
ugaauggccugccuugaagcc

SEQ ID NO: 2890682 - RNA, 17 nt, Human
ugaauggccugccuuga

SEQ ID NO: 2890683 - RNA, 15 nt, Human
ugaauggccugccuu

SEQ ID NO: 2890684 - RNA, 12 nt, Human
ugaauggccugc

SEQ ID NO: 2890685 - RNA, 14 nt, Human
ugaauggauuggau

SEQ ID NO: 2890686 - RNA, 15 nt, Human
ugaauggauuggauu

SEQ ID NO: 2890687 - RNA, 17 nt, Human
ugaauggauuggauuau

SEQ ID NO: 2890688 - RNA, 20 nt, Human
ugaauggauuggauuauuua

SEQ ID NO: 2890689 - RNA, 21 nt, Human
ugaauggauuggauuauuuaa

SEQ ID NO: 2890690 - RNA, 22 nt, Human
ugaauggauuggauuauuuaau

SEQ ID NO: 2890691 - RNA, 23 nt, Human
ugaauggauuggauuauuuaaua

SEQ ID NO: 2890692 - RNA, 14 nt, Human
ugaauaucuauuaa

SEQ ID NO: 2890693 - RNA, 22 nt, Human
ugaauauauuuaagcaacaucu

SEQ ID NO: 2890694 - RNA, 23 nt, Human
ugaauauauuuaagcaacaucuu

SEQ ID NO: 2890695 - RNA, 15 nt, Human
ugaaugcauaaaaug

SEQ ID NO: 2890696 - RNA, 16 nt, Human
ugaaugcauaaaaugu

SEQ ID NO: 2890697 - RNA, 16 nt, Human
ugaauaucuauuaaua

SEQ ID NO: 2890698 - RNA, 17 nt, Human
ugaauaucuauuaauau

SEQ ID NO: 2890699 - RNA, 21 nt, Human
agaucaaccccuucgcuccug

SEQ ID NO: 2890700 - RNA, 14 nt, Human
agaucacugccaca

SEQ ID NO: 2890701 - RNA, 18 nt, Human
agaucacugaauuuauaa

SEQ ID NO: 2890702 - RNA, 22 nt, Human
agaucacugcaaccucugccuc

SEQ ID NO: 2890703 - RNA, 19 nt, Human
agaucaaccccuucgcucc

SEQ ID NO: 2890704 - RNA, 14 nt, Human
agaucaaccccuuc

SEQ ID NO: 2890705 - RNA, 19 nt, Human
agauacaggaaaagcugcu

SEQ ID NO: 2890706 - RNA, 15 nt, Human
agauacaauguauuu

SEQ ID NO: 2890707 - RNA, 16 nt, Human
agauacaauguauuua

SEQ ID NO: 2890708 - RNA, 13 nt, Human
agauacaauguau

SEQ ID NO: 2890709 - RNA, 13 nt, Human
agauacaucacug

SEQ ID NO: 2890710 - RNA, 16 nt, Human
agauacaucacugcuu

SEQ ID NO: 2890711 - RNA, 20 nt, Human
agauacaucacugcuugaug

SEQ ID NO: 2890712 - RNA, 23 nt, Human
agauacaauguauuuauuuaaaa

SEQ ID NO: 2890713 - RNA, 17 nt, Human
agauauuuugggcaugu

SEQ ID NO: 2890714 - RNA, 19 nt, Human
agauauuuugggcaugugg

SEQ ID NO: 2890715 - RNA, 13 nt, Human
agauaccucaccc

SEQ ID NO: 2890716 - RNA, 14 nt, Human
agauaccucacccu

SEQ ID NO: 2890717 - RNA, 17 nt, Human
agauaccucacccugcu

SEQ ID NO: 2890718 - RNA, 16 nt, Human
agauaccauacucauu

SEQ ID NO: 2890719 - RNA, 19 nt, Human
agauaccauacucauuucu

SEQ ID NO: 2890720 - RNA, 14 nt, Human
agauaccuaaaaca

SEQ ID NO: 2890721 - RNA, 19 nt, Human
agagugagacucugucuca

SEQ ID NO: 2890722 - RNA, 15 nt, Human
agagugagacccugu

SEQ ID NO: 2890723 - RNA, 19 nt, Human
agagugacuaguacaaauu

SEQ ID NO: 2890724 - RNA, 16 nt, Human
agagugacuccaagaa

SEQ ID NO: 2890725 - RNA, 18 nt, Human
agagugacuccaagaaca

SEQ ID NO: 2890726 - RNA, 13 nt, Human
agaguuuugucuu

SEQ ID NO: 2890727 - RNA, 14 nt, Human
agaguuuugucuug

SEQ ID NO: 2890728 - RNA, 16 nt, Human
agagugagcuacagag

SEQ ID NO: 2890729 - RNA, 22 nt, Human
agagugagcuacagagccgagc

SEQ ID NO: 2890730 - RNA, 16 nt, Human
agaguuuugucuugaa

SEQ ID NO: 2890731 - RNA, 19 nt, Human
agaguuuugucuugaaugu

SEQ ID NO: 2890732 - RNA, 17 nt, Human
agaguuuuuaauagaac

SEQ ID NO: 2890733 - RNA, 13 nt, Human
agauaaaaagugg

SEQ ID NO: 2890734 - RNA, 16 nt, Human
agauaaaaaguggaau

SEQ ID NO: 2890735 - RNA, 17 nt, Human
agauaaaaaguggaauu

SEQ ID NO: 2890736 - RNA, 21 nt, Human
agauaaaaaguggaauuucuu

SEQ ID NO: 2890737 - RNA, 18 nt, Human
agauaaaagcugaaguua

SEQ ID NO: 2890738 - RNA, 19 nt, Human
agauaaucagugugucuaa

SEQ ID NO: 2890739 - RNA, 17 nt, Human
agauaaucagccucuua

SEQ ID NO: 2890740 - RNA, 16 nt, Human
agauaaucagccucuu

SEQ ID NO: 2890741 - RNA, 15 nt, Human
agauaaucagccucu

SEQ ID NO: 2890742 - RNA, 22 nt, Human
agauaauaauggguuucuuuca

SEQ ID NO: 2890743 - RNA, 14 nt, Human
agauaaucagccuc

SEQ ID NO: 2890744 - RNA, 15 nt, Human
agauaauuaaaaaga

SEQ ID NO: 2890745 - RNA, 22 nt, Human
agauaauuaaaaagaugguugc

SEQ ID NO: 2890746 - RNA, 14 nt, Human
agauacaaauuaau

SEQ ID NO: 2890747 - RNA, 18 nt, Human
agauacaaauuaauuuua

SEQ ID NO: 2890748 - RNA, 14 nt, Human
agauaauugcuauu

SEQ ID NO: 2890749 - RNA, 18 nt, Human
agauaauugcuauuuauu

SEQ ID NO: 2890750 - RNA, 17 nt, Human
agauaauuguugaaauu

SEQ ID NO: 2890751 - RNA, 18 nt, Human
agauaauuguugaaauuu

SEQ ID NO: 2890752 - RNA, 22 nt, Human
agauaauuguugaaauuuugca

SEQ ID NO: 2890753 - RNA, 18 nt, Human
agauaauucuagcuuuga

SEQ ID NO: 2890754 - RNA, 16 nt, Human
agauaaucuagaacac

SEQ ID NO: 2890755 - RNA, 23 nt, Human
agauaaucuagaacacaggcaaa

SEQ ID NO: 2890756 - RNA, 15 nt, Human
ugaagauguugagaa

SEQ ID NO: 2890757 - RNA, 16 nt, Human
ugaagauguugagaaa

SEQ ID NO: 2890758 - RNA, 17 nt, Human
ugaagcagcuuuaaaca

SEQ ID NO: 2890759 - RNA, 19 nt, Human
ugaagcagcuuuaaacaaa

SEQ ID NO: 2890760 - RNA, 17 nt, Human
agaggugggagggcccu

SEQ ID NO: 2890761 - RNA, 18 nt, Human
agagguggccagagcugg

SEQ ID NO: 2890762 - RNA, 14 nt, Human
agaggugggagggc

SEQ ID NO: 2890763 - RNA, 13 nt, Human
agagguggccaga

SEQ ID NO: 2890764 - RNA, 13 nt, Human
agaggugcuucac

SEQ ID NO: 2890765 - RNA, 16 nt, Human
agaggugcuucacccu

SEQ ID NO: 2890766 - RNA, 16 nt, Human
ugaagcauguuucaug

SEQ ID NO: 2890767 - RNA, 14 nt, Human
ugaagcauguuuca

SEQ ID NO: 2890768 - RNA, 19 nt, Human
ugaagccacugaagcuggg

SEQ ID NO: 2890769 - RNA, 20 nt, Human
ugaagcauguuucauguuuu

SEQ ID NO: 2890770 - RNA, 18 nt, Human
ugaagcauucuccccagu

SEQ ID NO: 2890771 - RNA, 21 nt, Human
ugaagcauucuccccagugua

SEQ ID NO: 2890772 - RNA, 14 nt, Human
ugaagcaguugugu

SEQ ID NO: 2890773 - RNA, 17 nt, Human
ugaagcaguugugucag

SEQ ID NO: 2890774 - RNA, 20 nt, Human
ugaagccacugaagcuggga

SEQ ID NO: 2890775 - RNA, 19 nt, Human
ugaagcauguuucauguuu

SEQ ID NO: 2890776 - RNA, 12 nt, Human
ugaagccagccu

SEQ ID NO: 2890777 - RNA, 13 nt, Human
ugaagccagccuu

SEQ ID NO: 2890778 - RNA, 14 nt, Human
ugaagccagccuuc

SEQ ID NO: 2890779 - RNA, 21 nt, Human
ugaagccagccuucuuccauc

SEQ ID NO: 2890780 - RNA, 11 nt, Human
ugaagccagcu

SEQ ID NO: 2890781 - RNA, 23 nt, Human
ugaagccagcucacagugcugug

SEQ ID NO: 2890782 - RNA, 17 nt, Human
ugaagcccauuucuccg

SEQ ID NO: 2890783 - RNA, 16 nt, Human
ugaagcccaagugaaa

SEQ ID NO: 2890784 - RNA, 16 nt, Human
ugaagccagccuucuu

SEQ ID NO: 2890785 - RNA, 22 nt, Human
ugaagcuucacucacugucaau

SEQ ID NO: 2890786 - RNA, 13 nt, Human
ugaagccugugga

SEQ ID NO: 2890787 - RNA, 13 nt, Human
ugaagcugaaaau

SEQ ID NO: 2890788 - RNA, 14 nt, Human
ugaagcugaaaaua

SEQ ID NO: 2890789 - RNA, 15 nt, Human
ugaagcugaaaauau

SEQ ID NO: 2890790 - RNA, 14 nt, Human
ugaagccucuggga

SEQ ID NO: 2890791 - RNA, 15 nt, Human
ugaagcccucccagg

SEQ ID NO: 2890792 - RNA, 13 nt, Human
ugaagccucuggg

SEQ ID NO: 2890793 - RNA, 22 nt, Human
ugaagccugcguugguccagag

SEQ ID NO: 2890794 - RNA, 23 nt, Human
ugaagccugcguugguccagagc

SEQ ID NO: 2890795 - RNA, 19 nt, Human
agagggaccucucccaggg

SEQ ID NO: 2890796 - RNA, 16 nt, Human
agagggaccucuccca

SEQ ID NO: 2890797 - RNA, 15 nt, Human
agagggaccucuccc

SEQ ID NO: 2890798 - RNA, 14 nt, Human
agagggaccaugug

SEQ ID NO: 2890799 - RNA, 17 nt, Human
agagggaccauguguca

SEQ ID NO: 2890800 - RNA, 19 nt, Human
agaggccuuuuggaaugug

SEQ ID NO: 2890801 - RNA, 18 nt, Human
agaggcagaaaauugcac

SEQ ID NO: 2890802 - RNA, 20 nt, Human
agaggcagaaaauugcacaa

SEQ ID NO: 2890803 - RNA, 19 nt, Human
agaggaaauauugcugggg

SEQ ID NO: 2890804 - RNA, 20 nt, Human
agaggaaauauugcuggggu

SEQ ID NO: 2890805 - RNA, 11 nt, Human
ugaacuuucuc

SEQ ID NO: 2890806 - RNA, 22 nt, Human
ugaacuuucucuucauacuuuu

SEQ ID NO: 2890807 - RNA, 13 nt, Human
ugaacuuugaaga

SEQ ID NO: 2890808 - RNA, 14 nt, Human
ugaacuuguagcug

SEQ ID NO: 2890809 - RNA, 15 nt, Human
ugaacuuguagcugu

SEQ ID NO: 2890810 - RNA, 16 nt, Human
ugaacuuguagcugua

SEQ ID NO: 2890811 - RNA, 17 nt, Human
ugaacuuguagcuguaa

SEQ ID NO: 2890812 - RNA, 18 nt, Human
ugaacuuguagcuguaaa

SEQ ID NO: 2890813 - RNA, 19 nt, Human
ugaacuuguagcuguaaaa

SEQ ID NO: 2890814 - RNA, 21 nt, Human
ugaacuuguagcuguaaaacg

SEQ ID NO: 2890815 - RNA, 13 nt, Human
ugaacuuuccugg

SEQ ID NO: 2890816 - RNA, 21 nt, Human
ugaacuuuccuggaugucuga

SEQ ID NO: 2890817 - RNA, 23 nt, Human
ucuuuguaagaguguagaagcau

SEQ ID NO: 2890818 - RNA, 24 nt, Human
ucuuuguaagaguguagaagcauu

SEQ ID NO: 2890819 - RNA, 12 nt, Human
ucuuuguaaguc

SEQ ID NO: 2890820 - RNA, 17 nt, Human
ucuuuguaagucagugu

SEQ ID NO: 2890821 - RNA, 21 nt, Human
ucuuuguaagucaguguugag

SEQ ID NO: 2890822 - RNA, 22 nt, Human
ucuuuguaagucaguguugaga

SEQ ID NO: 2890823 - RNA, 19 nt, Human
ucuuuguaagaguguagaa

SEQ ID NO: 2890824 - RNA, 21 nt, Human
ucuuuguaagaguguagaagc

SEQ ID NO: 2890825 - RNA, 22 nt, Human
ucuuuguaagaguguagaagca

SEQ ID NO: 2890826 - RNA, 19 nt, Human
agagcugggugucaagagg

SEQ ID NO: 2890827 - RNA, 13 nt, Human
agagcuggugccc

SEQ ID NO: 2890828 - RNA, 21 nt, Human
ugaacuuucucuucauacuuu

SEQ ID NO: 2890829 - RNA, 12 nt, Human
agagcugggagg

SEQ ID NO: 2890830 - RNA, 22 nt, Human
agagcugggaggcauggcccug

SEQ ID NO: 2890831 - RNA, 23 nt, Human
agagcugggaggcauggcccugg

SEQ ID NO: 2890832 - RNA, 15 nt, Human
agagcuggugcccgg

SEQ ID NO: 2890833 - RNA, 15 nt, Human
agagcuucuggcacu

SEQ ID NO: 2890834 - RNA, 21 nt, Human
agagcuucuguugcugccuca

SEQ ID NO: 2890835 - RNA, 20 nt, Human
agagcuucuguugcugccuc

SEQ ID NO: 2890836 - RNA, 19 nt, Human
agagcuucuguugcugccu

SEQ ID NO: 2890837 - RNA, 20 nt, Human
agaugcuagcgcguugccug

SEQ ID NO: 2890838 - RNA, 21 nt, Human
agaugcuagcgcguugccugu

SEQ ID NO: 2890839 - RNA, 10 nt, Human
agaugcucaa

SEQ ID NO: 2890840 - RNA, 15 nt, Human
agaugcucaaaguug

SEQ ID NO: 2890841 - RNA, 20 nt, Human
agaugcucaaaguuguuuuu

SEQ ID NO: 2890842 - RNA, 13 nt, Human
agaugcuccaaga

SEQ ID NO: 2890843 - RNA, 15 nt, Human
agaugcuccaagauu

SEQ ID NO: 2890844 - RNA, 18 nt, Human
agaugcuccaagauucua

SEQ ID NO: 2890845 - RNA, 19 nt, Human
agaugcuccaagauucuag

SEQ ID NO: 2890846 - RNA, 20 nt, Human
agaugcuccaagauucuaga

SEQ ID NO: 2890847 - RNA, 21 nt, Human
agaugcuccaagauucuagau

SEQ ID NO: 2890848 - RNA, 22 nt, Human
agaugcuccaagauucuagaug

SEQ ID NO: 2890849 - RNA, 23 nt, Human
agaugcuccaagauucuagauga

SEQ ID NO: 2890850 - RNA, 19 nt, Human
agaugcuuuccuaaaucag

SEQ ID NO: 2890851 - RNA, 12 nt, Human
agaugucccuug

SEQ ID NO: 2890852 - RNA, 16 nt, Human
agaugucccuugaugc

SEQ ID NO: 2890853 - RNA, 21 nt, Human
agaugucccuugaugcacaga

SEQ ID NO: 2890854 - RNA, 22 nt, Human
agaugucccuugaugcacagag

SEQ ID NO: 2890855 - RNA, 23 nt, Human
agaugucccuugaugcacagaga

SEQ ID NO: 2890856 - RNA, 24 nt, Human
agaugucccuugaugcacagagaa

SEQ ID NO: 2890857 - RNA, 18 nt, Human
agaugucagacuggcugg

SEQ ID NO: 2890858 - RNA, 13 nt, Human
agaugucaucaga

SEQ ID NO: 2890859 - RNA, 15 nt, Human
agaugucaucagagc

SEQ ID NO: 2890860 - RNA, 22 nt, Human
agaugucaucagagcuccucug

SEQ ID NO: 2890861 - RNA, 15 nt, Human
agaugucugucucug

SEQ ID NO: 2890862 - RNA, 11 nt, Human
agaugucuguu

SEQ ID NO: 2890863 - RNA, 16 nt, Human
agauggcaaaugacca

SEQ ID NO: 2890864 - RNA, 15 nt, Human
agaugucagacuggc

SEQ ID NO: 2890865 - RNA, 18 nt, Human
agauggaguuucuaaggu

SEQ ID NO: 2890866 - RNA, 16 nt, Human
agauggaguuucuaag

SEQ ID NO: 2890867 - RNA, 17 nt, Human
agauggaguuucuaagg

SEQ ID NO: 2890868 - RNA, 17 nt, Human
agauggaguucuugugc

SEQ ID NO: 2890869 - RNA, 19 nt, Human
agauggaguucuugugcca

SEQ ID NO: 2890870 - RNA, 13 nt, Human
agauggaguuucu

SEQ ID NO: 2890871 - RNA, 17 nt, Human
agauggaaaaacuugug

SEQ ID NO: 2890872 - RNA, 14 nt, Human
agauggaguuucua

SEQ ID NO: 2890873 - RNA, 15 nt, Human
agauggaguuucuaa

SEQ ID NO: 2890874 - RNA, 13 nt, Human
ugaccucugccug

SEQ ID NO: 2890875 - RNA, 20 nt, Human
ugaccccucauagcccucac

SEQ ID NO: 2890876 - RNA, 19 nt, Human
ugaccccucauagcccuca

SEQ ID NO: 2890877 - RNA, 22 nt, Human
ugacccccaaccaaguggcucc

SEQ ID NO: 2890878 - RNA, 13 nt, Human
ugacccagugaga

SEQ ID NO: 2890879 - RNA, 17 nt, Human
ugaccccucauagcccu

SEQ ID NO: 2890880 - RNA, 12 nt, Human
ugaccucuugcu

SEQ ID NO: 2890881 - RNA, 13 nt, Human
ugaccucuugcug

SEQ ID NO: 2890882 - RNA, 14 nt, Human
ugaccucuugcugu

SEQ ID NO: 2890883 - RNA, 15 nt, Human
ugaccucuugcuguc

SEQ ID NO: 2890884 - RNA, 16 nt, Human
ugaccucuugcugucu

SEQ ID NO: 2890885 - RNA, 17 nt, Human
ugaccucuugcugucuc

SEQ ID NO: 2890886 - RNA, 18 nt, Human
ugaccucuugcugucucu

SEQ ID NO: 2890887 - RNA, 19 nt, Human
ugaccucuugcugucucug

SEQ ID NO: 2890888 - RNA, 21 nt, Human
ugaccucuugcugucucugcu

SEQ ID NO: 2890889 - RNA, 22 nt, Human
ugaccucuugcugucucugcuc

SEQ ID NO: 2890890 - RNA, 23 nt, Human
ugaccucuugcugucucugcucg

SEQ ID NO: 2890891 - RNA, 14 nt, Human
ugaccucugccuga

SEQ ID NO: 2890892 - RNA, 23 nt, Human
ugaccccgguggcggccccagca

SEQ ID NO: 2890893 - RNA, 17 nt, Human
ugaccucuguccucccu

SEQ ID NO: 2890894 - RNA, 19 nt, Human
agauguguggacuguggca

SEQ ID NO: 2890895 - RNA, 16 nt, Human
agaugugucuauggcu

SEQ ID NO: 2890896 - RNA, 13 nt, Human
ugacccaggcugg

SEQ ID NO: 2890897 - RNA, 12 nt, Human
ugacccaggcug

SEQ ID NO: 2890898 - RNA, 14 nt, Human
ugacccaggcuggg

SEQ ID NO: 2890899 - RNA, 15 nt, Human
ugacccaggcugggc

SEQ ID NO: 2890900 - RNA, 17 nt, Human
ugacccaggcugggcaa

SEQ ID NO: 2890901 - RNA, 19 nt, Human
ugacccaggcugggcaagg

SEQ ID NO: 2890902 - RNA, 16 nt, Human
agaugauggaugccaa

SEQ ID NO: 2890903 - RNA, 12 nt, Human
agaugauguauu

SEQ ID NO: 2890904 - RNA, 14 nt, Human
agaugauuaaaaug

SEQ ID NO: 2890905 - RNA, 19 nt, Human
agaugauggaugccaauau

SEQ ID NO: 2890906 - RNA, 18 nt, Human
agaugauuaaauaagauu

SEQ ID NO: 2890907 - RNA, 19 nt, Human
agaugauuaaauaagauuc

SEQ ID NO: 2890908 - RNA, 20 nt, Human
agaugauuaaauaagauucu

SEQ ID NO: 2890909 - RNA, 21 nt, Human
agaugauuaaauaagauucua

SEQ ID NO: 2890910 - RNA, 22 nt, Human
agaugauuaaauaagauucuaa

SEQ ID NO: 2890911 - RNA, 12 nt, Human
agaugauucugg

SEQ ID NO: 2890912 - RNA, 21 nt, Human
agaugauucuggcugaaaaag

SEQ ID NO: 2890913 - RNA, 14 nt, Human
agaugauuugcaau

SEQ ID NO: 2890914 - RNA, 14 nt, Human
agauccuuguuuca

SEQ ID NO: 2890915 - RNA, 15 nt, Human
agauccuuguuucaa

SEQ ID NO: 2890916 - RNA, 21 nt, Human
agauccugucuuuaaggaaaa

SEQ ID NO: 2890917 - RNA, 13 nt, Human
agauccugugagg

SEQ ID NO: 2890918 - RNA, 15 nt, Human
agauccugugaggag

SEQ ID NO: 2890919 - RNA, 23 nt, Human
agauccugugaggagccccaucu

SEQ ID NO: 2890920 - RNA, 20 nt, Human
agauccuuuaaauccuucca

SEQ ID NO: 2890921 - RNA, 18 nt, Human
agauccuuguuucaaaca

SEQ ID NO: 2890922 - RNA, 20 nt, Human
agauccuuguuucaaacaca

SEQ ID NO: 2890923 - RNA, 16 nt, Human
agaucauuuguucugg

SEQ ID NO: 2890924 - RNA, 15 nt, Human
ugaccaauugugcug

SEQ ID NO: 2890925 - RNA, 16 nt, Human
ugaccaauugugcugc

SEQ ID NO: 2890926 - RNA, 17 nt, Human
ugaccaauugugcugcc

SEQ ID NO: 2890927 - RNA, 18 nt, Human
ugaccaauugugcugcca

SEQ ID NO: 2890928 - RNA, 19 nt, Human
ugaccaauugugcugccau

SEQ ID NO: 2890929 - RNA, 17 nt, Human
ugaccaacaguuccuuc

SEQ ID NO: 2890930 - RNA, 18 nt, Human
ugaccaacaggcuguucu

SEQ ID NO: 2890931 - RNA, 23 nt, Human
ugaccaacaggcuguucugcacu

SEQ ID NO: 2890932 - RNA, 20 nt, Human
ugaccacacuccagcuggga

SEQ ID NO: 2890933 - RNA, 19 nt, Human
ugaccacacuccagcuggg

SEQ ID NO: 2890934 - RNA, 17 nt, Human
ugaccacacuccagcug

SEQ ID NO: 2890935 - RNA, 12 nt, Human
ugaccacacucc

SEQ ID NO: 2890936 - RNA, 20 nt, Human
ugaauuuauugcacauuguu

SEQ ID NO: 2890937 - RNA, 11 nt, Human
ugacagucauc

SEQ ID NO: 2890938 - RNA, 13 nt, Human
ugacagucaucau

SEQ ID NO: 2890939 - RNA, 14 nt, Human
ugacagucaucauc

SEQ ID NO: 2890940 - RNA, 17 nt, Human
ugacagucaucaucagg

SEQ ID NO: 2890941 - RNA, 18 nt, Human
ugacagucaucaucaggg

SEQ ID NO: 2890942 - RNA, 19 nt, Human
ugacagucaucaucagggc

SEQ ID NO: 2890943 - RNA, 20 nt, Human
ugacagucaucaucagggcc

SEQ ID NO: 2890944 - RNA, 21 nt, Human
ugacagucaucaucagggccu

SEQ ID NO: 2890945 - RNA, 22 nt, Human
ugacagucaucaucagggccug

SEQ ID NO: 2890946 - RNA, 23 nt, Human
ugacagucaucaucagggccugg

SEQ ID NO: 2890947 - RNA, 18 nt, Human
agaucagaugcuccaaga

SEQ ID NO: 2890948 - RNA, 22 nt, Human
agaucagaugcuccaagauucu

SEQ ID NO: 2890949 - RNA, 23 nt, Human
agaucagaugcuccaagauucua

SEQ ID NO: 2890950 - RNA, 20 nt, Human
agaucagaaaaauggagcaa

SEQ ID NO: 2890951 - RNA, 21 nt, Human
agaucagaaaaauggagcaaa

SEQ ID NO: 2890952 - RNA, 19 nt, Human
ugaauuuagugagauuuac

SEQ ID NO: 2890953 - RNA, 20 nt, Human
ugaauuuagugagauuuacc

SEQ ID NO: 2890954 - RNA, 15 nt, Human
ugaauuuaaauauaa

SEQ ID NO: 2890955 - RNA, 14 nt, Human
ugaauuuaaauaua

SEQ ID NO: 2890956 - RNA, 16 nt, Human
ugaauuuaaauauaau

SEQ ID NO: 2890957 - RNA, 19 nt, Human
ugaauuuaaauauaauucu

SEQ ID NO: 2890958 - RNA, 20 nt, Human
ugaauuuaaauauaauucug

SEQ ID NO: 2890959 - RNA, 17 nt, Human
ugaauuuauaaaguacc

SEQ ID NO: 2890960 - RNA, 21 nt, Human
ugaauuuauaccuaccugugu

SEQ ID NO: 2890961 - RNA, 16 nt, Human
ugaccaaaguccuuuu

SEQ ID NO: 2890962 - RNA, 14 nt, Human
ugaccaaaguccuu

SEQ ID NO: 2890963 - RNA, 16 nt, Human
ugacauuuuacauuaa

SEQ ID NO: 2890964 - RNA, 15 nt, Human
ugacauuuuacauua

SEQ ID NO: 2890965 - RNA, 18 nt, Human
ugacauuguagagcuucu

SEQ ID NO: 2890966 - RNA, 14 nt, Human
ugacauugccaaaa

SEQ ID NO: 2890967 - RNA, 18 nt, Human
ugacauugccaaaaagga

SEQ ID NO: 2890968 - RNA, 19 nt, Human
ugacauugccaaaaaggau

SEQ ID NO: 2890969 - RNA, 14 nt, Human
ugacauuuuacauu

SEQ ID NO: 2890970 - RNA, 12 nt, Human
ugacauuuuaca

SEQ ID NO: 2890971 - RNA, 15 nt, Human
ugacagucuugugcu

SEQ ID NO: 2890972 - RNA, 23 nt, Human
ugacagucuugugcuuuuccuau

SEQ ID NO: 2890973 - RNA, 19 nt, Human
ugacauugcguuugaccuu

SEQ ID NO: 2890974 - RNA, 15 nt, Human
ugacauugcguuuga

SEQ ID NO: 2890975 - RNA, 24 nt, Human
ugacuguucaagagcacacuuggc

SEQ ID NO: 2890976 - RNA, 15 nt, Human
ugacuguugauguac

SEQ ID NO: 2890977 - RNA, 16 nt, Human
ugacugugcuacuguc

SEQ ID NO: 2890978 - RNA, 18 nt, Human
ugacuguucaagagcaca

SEQ ID NO: 2890979 - RNA, 17 nt, Human
ugacuucaaugauagua

SEQ ID NO: 2890980 - RNA, 16 nt, Human
ugacuguaucugugua

SEQ ID NO: 2890981 - RNA, 18 nt, Human
ugacuguaucuguguaga

SEQ ID NO: 2890982 - RNA, 17 nt, Human
ugacuguaucuguguag

SEQ ID NO: 2890983 - RNA, 19 nt, Human
ugacuccaagaacaauugu

SEQ ID NO: 2890984 - RNA, 19 nt, Human
ugacuccacgauccugcca

SEQ ID NO: 2890985 - RNA, 20 nt, Human
ugacuccacgauccugccac

SEQ ID NO: 2890986 - RNA, 21 nt, Human
ugacuccacgauccugccacc

SEQ ID NO: 2890987 - RNA, 22 nt, Human
ugacuccacgauccugccaccc

SEQ ID NO: 2890988 - RNA, 17 nt, Human
ugacugucacuguuccu

SEQ ID NO: 2890989 - RNA, 24 nt, Human
ugacuguccucuccccuccagccu

SEQ ID NO: 2890990 - RNA, 19 nt, Human
ugacuguaucuguguagac

SEQ ID NO: 2890991 - RNA, 16 nt, Human
ugacugucacuguucc

SEQ ID NO: 2890992 - RNA, 13 nt, Human
ugacugucacugu

SEQ ID NO: 2890993 - RNA, 15 nt, Human
ugacucaucauuugu

SEQ ID NO: 2890994 - RNA, 22 nt, Human
ugaccugacuugccuccguguc

SEQ ID NO: 2890995 - RNA, 23 nt, Human
ugacucaggauuuaaaaacugga

SEQ ID NO: 2890996 - RNA, 14 nt, Human
agauucaaagguuc

SEQ ID NO: 2890997 - RNA, 15 nt, Human
agauucaaagguucu

SEQ ID NO: 2890998 - RNA, 16 nt, Human
agauuauuuuauuaug

SEQ ID NO: 2890999 - RNA, 13 nt, Human
agauuauuuugga

SEQ ID NO: 2891000 - RNA, 14 nt, Human
agauuauuuuggaa

SEQ ID NO: 2891001 - RNA, 17 nt, Human
agauuauuuuggaaagu

SEQ ID NO: 2891002 - RNA, 20 nt, Human
agauuauuuuggaaaguuuu

SEQ ID NO: 2891003 - RNA, 16 nt, Human
agauucaaagguucua

SEQ ID NO: 2891004 - RNA, 17 nt, Human
agauucaaagguucuag

SEQ ID NO: 2891005 - RNA, 18 nt, Human
agauucaaagguucuagg

SEQ ID NO: 2891006 - RNA, 19 nt, Human
agauucaaagguucuaggu

SEQ ID NO: 2891007 - RNA, 16 nt, Human
agauucaaucccagga

SEQ ID NO: 2891008 - RNA, 21 nt, Human
agauucaaagguucuagguuu

SEQ ID NO: 2891009 - RNA, 14 nt, Human
agauucaaggcccc

SEQ ID NO: 2891010 - RNA, 20 nt, Human
agauuauaggcaccuaccac

SEQ ID NO: 2891011 - RNA, 15 nt, Human
agauuauaucaaagu

SEQ ID NO: 2891012 - RNA, 16 nt, Human
agauuauaucaaagua

SEQ ID NO: 2891013 - RNA, 18 nt, Human
agauuauaucaaaguauu

SEQ ID NO: 2891014 - RNA, 21 nt, Human
agauuauagauucuaaagauu

SEQ ID NO: 2891015 - RNA, 23 nt, Human
agauuauagauucuaaagauucu

SEQ ID NO: 2891016 - RNA, 15 nt, Human
agauuaucuauuugu

SEQ ID NO: 2891017 - RNA, 18 nt, Human
ugacuuuauauggaugau

SEQ ID NO: 2891018 - RNA, 20 nt, Human
ugacuuuagaaagcugacau

SEQ ID NO: 2891019 - RNA, 21 nt, Human
ugacuuuagaaagcugacauu

SEQ ID NO: 2891020 - RNA, 12 nt, Human
ugacuuucaggu

SEQ ID NO: 2891021 - RNA, 14 nt, Human
ugacuucuccaggu

SEQ ID NO: 2891022 - RNA, 17 nt, Human
ugacuucuaauaucauu

SEQ ID NO: 2891023 - RNA, 20 nt, Human
ugacuucuaauaucauucac

SEQ ID NO: 2891024 - RNA, 23 nt, Human
ugacuucuccaggucucacgggc

SEQ ID NO: 2891025 - RNA, 15 nt, Human
ugacuucuccagguc

SEQ ID NO: 2891026 - RNA, 16 nt, Human
ugacuucuccaggucu

SEQ ID NO: 2891027 - RNA, 14 nt, Human
ugacuuccacaccu

SEQ ID NO: 2891028 - RNA, 19 nt, Human
ugacuuccucgccucuccc

SEQ ID NO: 2891029 - RNA, 21 nt, Human
ugacuuccucgccucucccac

SEQ ID NO: 2891030 - RNA, 13 nt, Human
ugacuucauggaa

SEQ ID NO: 2891031 - RNA, 19 nt, Human
ugacuucauggaauggaca

SEQ ID NO: 2891032 - RNA, 21 nt, Human
ugacuucauggaauggacauc

SEQ ID NO: 2891033 - RNA, 23 nt, Human
ugacuucaaugauaguaagaaaa

SEQ ID NO: 2891034 - RNA, 21 nt, Human
ugacuucugcuggcaucaaga

SEQ ID NO: 2891035 - RNA, 13 nt, Human
ugacuucugugag

SEQ ID NO: 2891036 - RNA, 16 nt, Human
ugacuugcaugaagag

SEQ ID NO: 2891037 - RNA, 17 nt, Human
ugacuugcaugaagaga

SEQ ID NO: 2891038 - RNA, 19 nt, Human
ugacuugcaugaagagaag

SEQ ID NO: 2891039 - RNA, 23 nt, Human
ugacuugcaugaagagaagcaau

SEQ ID NO: 2891040 - RNA, 18 nt, Human
ugacuuggggagauggag

SEQ ID NO: 2891041 - RNA, 19 nt, Human
ugacuuggggagauggagu

SEQ ID NO: 2891042 - RNA, 12 nt, Human
ugacuuggggga

SEQ ID NO: 2891043 - RNA, 19 nt, Human
ugacuugugguugaauuaa

SEQ ID NO: 2891044 - RNA, 15 nt, Human
ugacuuguuugucuu

SEQ ID NO: 2891045 - RNA, 18 nt, Human
ugacuuguuugucuucca

SEQ ID NO: 2891046 - RNA, 19 nt, Human
ugacuuguuugucuuccau

SEQ ID NO: 2891047 - RNA, 16 nt, Human
ugacuuuaauuuaugu

SEQ ID NO: 2891048 - RNA, 17 nt, Human
ugacuuuaauuuaugua

SEQ ID NO: 2891049 - RNA, 19 nt, Human
agauuuaagcacaaacuuu

SEQ ID NO: 2891050 - RNA, 20 nt, Human
agauuuaagcacaaacuuua

SEQ ID NO: 2891051 - RNA, 11 nt, Human
agauuguaaac

SEQ ID NO: 2891052 - RNA, 22 nt, Human
agauuguaaaccgcuuuggccu

SEQ ID NO: 2891053 - RNA, 23 nt, Human
agauuguaaaccgcuuuggccug

SEQ ID NO: 2891054 - RNA, 14 nt, Human
agauuguauugcug

SEQ ID NO: 2891055 - RNA, 15 nt, Human
agauuguauugcugu

SEQ ID NO: 2891056 - RNA, 21 nt, Human
agauuguccagugcaaccaca

SEQ ID NO: 2891057 - RNA, 21 nt, Human
agauuggugggauuuuuuguu

SEQ ID NO: 2891058 - RNA, 17 nt, Human
agauucacacugucugg

SEQ ID NO: 2891059 - RNA, 16 nt, Human
agauucaccuaagaga

SEQ ID NO: 2891060 - RNA, 17 nt, Human
agauucaccuaagagau

SEQ ID NO: 2891061 - RNA, 18 nt, Human
agauucaccuaagagauu

SEQ ID NO: 2891062 - RNA, 20 nt, Human
agauucaccuaagagauucu

SEQ ID NO: 2891063 - RNA, 13 nt, Human
agauucacacugu

SEQ ID NO: 2891064 - RNA, 20 nt, Human
agauugugccacugcucucc

SEQ ID NO: 2891065 - RNA, 17 nt, Human
agauugucuuaauuucu

SEQ ID NO: 2891066 - RNA, 12 nt, Human
agauuuagugua

SEQ ID NO: 2891067 - RNA, 19 nt, Human
agauuuaguguaauaagac

SEQ ID NO: 2891068 - RNA, 15 nt, Human
agauuuauauaaaug

SEQ ID NO: 2891069 - RNA, 17 nt, Human
agauuuauauaaaugua

SEQ ID NO: 2891070 - RNA, 17 nt, Human
agauuucaagaaaaaau

SEQ ID NO: 2891071 - RNA, 18 nt, Human
agauuucaagaaaaaaua

SEQ ID NO: 2891072 - RNA, 19 nt, Human
agauuucaagaaaaaauaa

SEQ ID NO: 2891073 - RNA, 18 nt, Human
agauuuauuuuucaguuc

SEQ ID NO: 2891074 - RNA, 20 nt, Human
agauuuauuuuucaguucca

SEQ ID NO: 2891075 - RNA, 21 nt, Human
agauuuauuuuucaguuccaa

SEQ ID NO: 2891076 - RNA, 13 nt, Human
agauuuaucaaau

SEQ ID NO: 2891077 - RNA, 17 nt, Human
agauuuaucaaaucagu

SEQ ID NO: 2891078 - RNA, 15 nt, Human
agauuuaucaaauca

SEQ ID NO: 2891079 - RNA, 16 nt, Human
agauuuaucaaaucag

SEQ ID NO: 2891080 - RNA, 12 nt, Human
agauuugaccuc

SEQ ID NO: 2891081 - RNA, 13 nt, Human
agauuugaccucc

SEQ ID NO: 2891082 - RNA, 15 nt, Human
agauuugaccuccuc

SEQ ID NO: 2891083 - RNA, 19 nt, Human
agauuugaccuccucccug

SEQ ID NO: 2891084 - RNA, 22 nt, Human
agauuugaccuccucccuguua

SEQ ID NO: 2891085 - RNA, 12 nt, Human
agauuucaagau

SEQ ID NO: 2891086 - RNA, 12 nt, Human
agauuuggaaua

SEQ ID NO: 2891087 - RNA, 22 nt, Human
agauuuggaauaggaauaagcu

SEQ ID NO: 2891088 - RNA, 13 nt, Human
agauuugggcugg

SEQ ID NO: 2891089 - RNA, 20 nt, Human
agauuuaccagggauguaga

SEQ ID NO: 2891090 - RNA, 14 nt, Human
agauuugggcugga

SEQ ID NO: 2891091 - RNA, 17 nt, Human
agauuugggcuggaaca

SEQ ID NO: 2891092 - RNA, 22 nt, Human
agauuuguaggaaggucucauu

SEQ ID NO: 2891093 - RNA, 23 nt, Human
agauuuguaggaaggucucauuc

SEQ ID NO: 2891094 - RNA, 15 nt, Human
agauuugucuaauug

SEQ ID NO: 2891095 - RNA, 12 nt, Human
agauuuucagaa

SEQ ID NO: 2891096 - RNA, 17 nt, Human
agauuuucagaaaauau

SEQ ID NO: 2891097 - RNA, 14 nt, Human
agauuuucagucua

SEQ ID NO: 2891098 - RNA, 14 nt, Human
agauuuuauuuuac

SEQ ID NO: 2891099 - RNA, 15 nt, Human
agauuuuauuuuacu

SEQ ID NO: 2891100 - RNA, 12 nt, Human
agcaaaaagugg

SEQ ID NO: 2891101 - RNA, 17 nt, Human
agcaaaaaguggggcag

SEQ ID NO: 2891102 - RNA, 22 nt, Human
agcaaaaaguggggcagagccu

SEQ ID NO: 2891103 - RNA, 16 nt, Human
agcaaaaauauaaaau

SEQ ID NO: 2891104 - RNA, 11 nt, Human
agcaaaaaugc

SEQ ID NO: 2891105 - RNA, 13 nt, Human
agcaaaaaugcua

SEQ ID NO: 2891106 - RNA, 14 nt, Human
agcaaaaaugcuaa

SEQ ID NO: 2891107 - RNA, 15 nt, Human
agcaaaaaugcuaau

SEQ ID NO: 2891108 - RNA, 16 nt, Human
agcaaaaaugcuaaua

SEQ ID NO: 2891109 - RNA, 17 nt, Human
agcaaaaaugcuaauau

SEQ ID NO: 2891110 - RNA, 20 nt, Human
agcaaaaaugcuaauauuaa

SEQ ID NO: 2891111 - RNA, 21 nt, Human
agcaaaaaugcuaauauuaaa

SEQ ID NO: 2891112 - RNA, 18 nt, Human
agcaacacagccugggcc

SEQ ID NO: 2891113 - RNA, 17 nt, Human
agcaacacagccugggc

SEQ ID NO: 2891114 - RNA, 15 nt, Human
agcaacacagccugg

SEQ ID NO: 2891115 - RNA, 13 nt, Human
agcaacacagccu

SEQ ID NO: 2891116 - RNA, 11 nt, Human
agcaacacaga

SEQ ID NO: 2891117 - RNA, 15 nt, Human
agcaacacagaggaa

SEQ ID NO: 2891118 - RNA, 22 nt, Human
agcaacacagaggaauuuauac

SEQ ID NO: 2891119 - RNA, 21 nt, Human
agcaacacagccugggcccca

SEQ ID NO: 2891120 - RNA, 20 nt, Human
agcaacagagugagacccug

SEQ ID NO: 2891121 - RNA, 23 nt, Human
agcaacagagugagacccugucu

SEQ ID NO: 2891122 - RNA, 14 nt, Human
agcaacaggaaaaa

SEQ ID NO: 2891123 - RNA, 22 nt, Human
agcaacagagugagacccuguc

SEQ ID NO: 2891124 - RNA, 20 nt, Human
agcaacauuuuacccacaca

SEQ ID NO: 2891125 - RNA, 21 nt, Human
agcaacaggaaucaagagcug

SEQ ID NO: 2891126 - RNA, 22 nt, Human
agcaacaggaaucaagagcugc

SEQ ID NO: 2891127 - RNA, 23 nt, Human
agcaacaggaaucaagagcugcc

SEQ ID NO: 2891128 - RNA, 22 nt, Human
agcaacauuuuacccacacaca

SEQ ID NO: 2891129 - RNA, 19 nt, Human
ucucugcuccaccacaucc

SEQ ID NO: 2891130 - RNA, 17 nt, Human
ucucugcucgcccuccu

SEQ ID NO: 2891131 - RNA, 22 nt, Human
ucucugcucgcccuccuuucug

SEQ ID NO: 2891132 - RNA, 17 nt, Human
ucucugcuccaccacau

SEQ ID NO: 2891133 - RNA, 15 nt, Human
ucucugcuccaccac

SEQ ID NO: 2891134 - RNA, 14 nt, Human
ucucugcuccacca

SEQ ID NO: 2891135 - RNA, 13 nt, Human
ucucugcuccacc

SEQ ID NO: 2891136 - RNA, 12 nt, Human
ucucugcuccac

SEQ ID NO: 2891137 - RNA, 11 nt, Human
ucucugcucca

SEQ ID NO: 2891138 - RNA, 12 nt, Human
ucucugccuugc

SEQ ID NO: 2891139 - RNA, 14 nt, Human
ucucugccuugccu

SEQ ID NO: 2891140 - RNA, 15 nt, Human
ucucugccuugccuu

SEQ ID NO: 2891141 - RNA, 16 nt, Human
ucucugccuugccuuu

SEQ ID NO: 2891142 - RNA, 17 nt, Human
ucucugccuugccuuua

SEQ ID NO: 2891143 - RNA, 19 nt, Human
ucucugccuuugacauuua

SEQ ID NO: 2891144 - RNA, 21 nt, Human
ucucugccuuugacauuuaau

SEQ ID NO: 2891145 - RNA, 11 nt, Human
ucucugcccua

SEQ ID NO: 2891146 - RNA, 22 nt, Human
ucucugcccuaaugcgcaggcu

SEQ ID NO: 2891147 - RNA, 16 nt, Human
ucucugccgcuaccuc

SEQ ID NO: 2891148 - RNA, 22 nt, Human
ucucugccgcuaccucccuccc

SEQ ID NO: 2891149 - RNA, 19 nt, Human
ucucuucugcuccacccuu

SEQ ID NO: 2891150 - RNA, 21 nt, Human
ucucuucuggguuccuuccuc

SEQ ID NO: 2891151 - RNA, 14 nt, Human
ucucuucugcucca

SEQ ID NO: 2891152 - RNA, 13 nt, Human
ucucuucugcucc

SEQ ID NO: 2891153 - RNA, 17 nt, Human
ucucuucugcuccaccc

SEQ ID NO: 2891154 - RNA, 16 nt, Human
ucucuucugcuccacc

SEQ ID NO: 2891155 - RNA, 18 nt, Human
ucucuucuggguuccuuc

SEQ ID NO: 2891156 - RNA, 20 nt, Human
ucucuucuggguuccuuccu

SEQ ID NO: 2891157 - RNA, 19 nt, Human
ucucuucuggguuccuucc

SEQ ID NO: 2891158 - RNA, 17 nt, Human
acuuuuuuuuguauguu

SEQ ID NO: 2891159 - RNA, 20 nt, Human
agaaaaaaaaaaacuuacac

SEQ ID NO: 2891160 - RNA, 13 nt, Human
agaaaaaaaaaag

SEQ ID NO: 2891161 - RNA, 14 nt, Human
agaaaaaaaaaaga

SEQ ID NO: 2891162 - RNA, 15 nt, Human
agaaaaaaaaaagaa

SEQ ID NO: 2891163 - RNA, 16 nt, Human
agaaaaaaaaaagaag

SEQ ID NO: 2891164 - RNA, 17 nt, Human
agaaaaaaaaaagaaga

SEQ ID NO: 2891165 - RNA, 18 nt, Human
agaaaaaaaaaagaagaa

SEQ ID NO: 2891166 - RNA, 19 nt, Human
agaaaaaaaaaagaagaag

SEQ ID NO: 2891167 - RNA, 20 nt, Human
agaaaaaaaaaagaagaaga

SEQ ID NO: 2891168 - RNA, 13 nt, Human
ucucuccagaugu

SEQ ID NO: 2891169 - RNA, 16 nt, Human
ucucuccagauguuuc

SEQ ID NO: 2891170 - RNA, 20 nt, Human
ucucugcauuuuucugcaga

SEQ ID NO: 2891171 - RNA, 21 nt, Human
ucucugcauuuuucugcagaa

SEQ ID NO: 2891172 - RNA, 18 nt, Human
ucucugccauaucaguga

SEQ ID NO: 2891173 - RNA, 18 nt, Human
acuuuuuuucuucuacuu

SEQ ID NO: 2891174 - RNA, 10 nt, Human
ucucuccuuu

SEQ ID NO: 2891175 - RNA, 12 nt, Human
agaaaccuguau

SEQ ID NO: 2891176 - RNA, 13 nt, Human
agaaaccuguauc

SEQ ID NO: 2891177 - RNA, 14 nt, Human
agaaaccuguaucu

SEQ ID NO: 2891178 - RNA, 15 nt, Human
agaaaccuguaucuu

SEQ ID NO: 2891179 - RNA, 16 nt, Human
agaaaccuguaucuuu

SEQ ID NO: 2891180 - RNA, 17 nt, Human
agaaaccuguaucuuuc

SEQ ID NO: 2891181 - RNA, 19 nt, Human
agaaaccuguaucuuucua

SEQ ID NO: 2891182 - RNA, 20 nt, Human
agaaaccuguaucuuucuau

SEQ ID NO: 2891183 - RNA, 16 nt, Human
agaaacugaggaauuu

SEQ ID NO: 2891184 - RNA, 13 nt, Human
agaaacugaggaa

SEQ ID NO: 2891185 - RNA, 18 nt, Human
agaaacugaggaauuuuc

SEQ ID NO: 2891186 - RNA, 12 nt, Human
agaaagaaaguu

SEQ ID NO: 2891187 - RNA, 16 nt, Human
agaaagaaaaugaaga

SEQ ID NO: 2891188 - RNA, 14 nt, Human
agaaagaaggaagu

SEQ ID NO: 2891189 - RNA, 13 nt, Human
agaaagaaggaag

SEQ ID NO: 2891190 - RNA, 12 nt, Human
agaaagaaggaa

SEQ ID NO: 2891191 - RNA, 18 nt, Human
agaaaccacuucugguca

SEQ ID NO: 2891192 - RNA, 15 nt, Human
agaaacccaagcucc

SEQ ID NO: 2891193 - RNA, 16 nt, Human
agaaacccaagcuccu

SEQ ID NO: 2891194 - RNA, 17 nt, Human
agaaacccaagcuccuc

SEQ ID NO: 2891195 - RNA, 18 nt, Human
agaaacccaagcuccucc

SEQ ID NO: 2891196 - RNA, 19 nt, Human
agaaacccaagcuccuccu

SEQ ID NO: 2891197 - RNA, 20 nt, Human
agaaacccaagcuccuccuc

SEQ ID NO: 2891198 - RNA, 15 nt, Human
agaaaacugaaaauc

SEQ ID NO: 2891199 - RNA, 16 nt, Human
agaaaacugaaaaucu

SEQ ID NO: 2891200 - RNA, 13 nt, Human
agaaaaccacccc

SEQ ID NO: 2891201 - RNA, 15 nt, Human
agaaaaccaccccuu

SEQ ID NO: 2891202 - RNA, 13 nt, Human
agaaaacauuuuu

SEQ ID NO: 2891203 - RNA, 23 nt, Human
agaaaacauuuuuuuuuuaaauc

SEQ ID NO: 2891204 - RNA, 17 nt, Human
agaaaaccaaaaugaua

SEQ ID NO: 2891205 - RNA, 12 nt, Human
agaaaaaucuug

SEQ ID NO: 2891206 - RNA, 21 nt, Human
agaaaaaucuugugcuagaau

SEQ ID NO: 2891207 - RNA, 23 nt, Human
agaaaaaucuugugcuagaauac

SEQ ID NO: 2891208 - RNA, 21 nt, Human
agaaaaaugagcauacaucuu

SEQ ID NO: 2891209 - RNA, 15 nt, Human
agaaaacaucacuga

SEQ ID NO: 2891210 - RNA, 13 nt, Human
agaaaaaggguca

SEQ ID NO: 2891211 - RNA, 14 nt, Human
agaaaaagggucaa

SEQ ID NO: 2891212 - RNA, 17 nt, Human
agaaaaauauauacuaa

SEQ ID NO: 2891213 - RNA, 19 nt, Human
agaaaaauaugaccacacu

SEQ ID NO: 2891214 - RNA, 22 nt, Human
ucucuuuaaugucacaggcagg

SEQ ID NO: 2891215 - RNA, 18 nt, Human
ucucuucuuuuggcuucc

SEQ ID NO: 2891216 - RNA, 16 nt, Human
ucucuucuuuuggcuu

SEQ ID NO: 2891217 - RNA, 13 nt, Human
ucucuuuauuccu

SEQ ID NO: 2891218 - RNA, 14 nt, Human
ucucuuuauuccua

SEQ ID NO: 2891219 - RNA, 15 nt, Human
ucucuuuauuccuag

SEQ ID NO: 2891220 - RNA, 22 nt, Human
ucucuuucacauuguuugcugc

SEQ ID NO: 2891221 - RNA, 13 nt, Human
ucucuuucucucu

SEQ ID NO: 2891222 - RNA, 14 nt, Human
ucucuuucucucuu

SEQ ID NO: 2891223 - RNA, 15 nt, Human
ucucuuucucucuuc

SEQ ID NO: 2891224 - RNA, 17 nt, Human
ucucuuucucucuuccc

SEQ ID NO: 2891225 - RNA, 19 nt, Human
ucucuuucucucuucccuc

SEQ ID NO: 2891226 - RNA, 17 nt, Human
ucucuuucuuccuuuac

SEQ ID NO: 2891227 - RNA, 20 nt, Human
ucucuuucuuccuuuacuuu

SEQ ID NO: 2891228 - RNA, 12 nt, Human
ucucuucuuguu

SEQ ID NO: 2891229 - RNA, 15 nt, Human
ucucuucuuguuucu

SEQ ID NO: 2891230 - RNA, 12 nt, Human
ucucuucuucau

SEQ ID NO: 2891231 - RNA, 12 nt, Human
acuuuuguaaga

SEQ ID NO: 2891232 - RNA, 17 nt, Human
acuuuuguaagacaaag

SEQ ID NO: 2891233 - RNA, 13 nt, Human
acuuuuguacauc

SEQ ID NO: 2891234 - RNA, 14 nt, Human
acuuuuguacaucu

SEQ ID NO: 2891235 - RNA, 20 nt, Human
acuuuuguacaucuggcuua

SEQ ID NO: 2891236 - RNA, 18 nt, Human
acuuuuguguaaugaaaa

SEQ ID NO: 2891237 - RNA, 19 nt, Human
acuuugguacauggccagu

SEQ ID NO: 2891238 - RNA, 15 nt, Human
acuuuggggaaggga

SEQ ID NO: 2891239 - RNA, 19 nt, Human
acuuugggaggcugaggcg

SEQ ID NO: 2891240 - RNA, 17 nt, Human
acuuuuguaaagaaauu

SEQ ID NO: 2891241 - RNA, 21 nt, Human
acuuuuguaaagaaauuuacu

SEQ ID NO: 2891242 - RNA, 13 nt, Human
acuuuuuuucaau

SEQ ID NO: 2891243 - RNA, 14 nt, Human
acuuuuuuucaaug

SEQ ID NO: 2891244 - RNA, 15 nt, Human
acuuuuuuucaaugu

SEQ ID NO: 2891245 - RNA, 16 nt, Human
acuuuuuuucaaugug

SEQ ID NO: 2891246 - RNA, 21 nt, Human
acuuuuuucuaguacacuuuu

SEQ ID NO: 2891247 - RNA, 13 nt, Human
acuuuuugugaag

SEQ ID NO: 2891248 - RNA, 15 nt, Human
acuuuuugugaagac

SEQ ID NO: 2891249 - RNA, 18 nt, Human
acuuuuugugaagacggc

SEQ ID NO: 2891250 - RNA, 23 nt, Human
acuuuuugugaagacggcacggu

SEQ ID NO: 2891251 - RNA, 13 nt, Human
acuuuuuuaaaua

SEQ ID NO: 2891252 - RNA, 14 nt, Human
acuuuuuuaaauaa

SEQ ID NO: 2891253 - RNA, 15 nt, Human
acuuuuuuaaauaaa

SEQ ID NO: 2891254 - RNA, 17 nt, Human
acuuuuuuaaauaaacu

SEQ ID NO: 2891255 - RNA, 18 nt, Human
acuuuuuuaaauaaacuu

SEQ ID NO: 2891256 - RNA, 19 nt, Human
acuuuuuuaaauaaacuuu

SEQ ID NO: 2891257 - RNA, 20 nt, Human
acuuuuuuaaauaaacuuuu

SEQ ID NO: 2891258 - RNA, 21 nt, Human
acuuuuuuaaauaaacuuuuu

SEQ ID NO: 2891259 - RNA, 14 nt, Human
acuuuuucuuuugu

SEQ ID NO: 2891260 - RNA, 17 nt, Human
acuuuuucuuuuguaag

SEQ ID NO: 2891261 - RNA, 18 nt, Human
acuuuuucuuuuguaagu

SEQ ID NO: 2891262 - RNA, 17 nt, Human
acuuuuugaacuaagaa

SEQ ID NO: 2891263 - RNA, 20 nt, Human
acuuuuugaacuaagaaacu

SEQ ID NO: 2891264 - RNA, 21 nt, Human
acuuuuugaacuaagaaacuu

SEQ ID NO: 2891265 - RNA, 17 nt, Human
acuuugggaggccaagg

SEQ ID NO: 2891266 - RNA, 19 nt, Human
acuuguuucucuguuguaa

SEQ ID NO: 2891267 - RNA, 16 nt, Human
acuuguuugucuucca

SEQ ID NO: 2891268 - RNA, 17 nt, Human
acuuguuugucuuccau

SEQ ID NO: 2891269 - RNA, 17 nt, Human
acuuguuuuaugcucag

SEQ ID NO: 2891270 - RNA, 22 nt, Human
acuuugacgagucaccuuccag

SEQ ID NO: 2891271 - RNA, 23 nt, Human
acuuugacgagucaccuuccagg

SEQ ID NO: 2891272 - RNA, 21 nt, Human
acuuguugauuaauggaaaug

SEQ ID NO: 2891273 - RNA, 19 nt, Human
acuuguugauuaauggaaa

SEQ ID NO: 2891274 - RNA, 14 nt, Human
acuugugucucugu

SEQ ID NO: 2891275 - RNA, 21 nt, Human
acuugugucucugugcuuuua

SEQ ID NO: 2891276 - RNA, 16 nt, Human
acuugugucucugugc

SEQ ID NO: 2891277 - RNA, 17 nt, Human
acuuguuccagcucuuu

SEQ ID NO: 2891278 - RNA, 22 nt, Human
acuugugucucugugcuuuuaa

SEQ ID NO: 2891279 - RNA, 22 nt, Human
ucucccuucgguggaagagcuc

SEQ ID NO: 2891280 - RNA, 18 nt, Human
ucucccaaagugcuggga

SEQ ID NO: 2891281 - RNA, 22 nt, Human
ucucccaagcuaucuaaaguuu

SEQ ID NO: 2891282 - RNA, 12 nt, Human
acuguauaaaua

SEQ ID NO: 2891283 - RNA, 13 nt, Human
acuguauaaauag

SEQ ID NO: 2891284 - RNA, 14 nt, Human
acuguauaaauagg

SEQ ID NO: 2891285 - RNA, 15 nt, Human
acuguauaaauagga

SEQ ID NO: 2891286 - RNA, 17 nt, Human
acuguauaaauaggaga

SEQ ID NO: 2891287 - RNA, 20 nt, Human
acuguauaaauaggagagga

SEQ ID NO: 2891288 - RNA, 21 nt, Human
acuguauaaauaggagaggau

SEQ ID NO: 2891289 - RNA, 22 nt, Human
acuguauaaauaggagaggaug

SEQ ID NO: 2891290 - RNA, 23 nt, Human
acuguauaaauaggagaggauga

SEQ ID NO: 2891291 - RNA, 15 nt, Human
acuguauagacaguu

SEQ ID NO: 2891292 - RNA, 16 nt, Human
acuguauagacaguuu

SEQ ID NO: 2891293 - RNA, 17 nt, Human
acuguauagacaguuug

SEQ ID NO: 2891294 - RNA, 18 nt, Human
acuguauagacaguuugu

SEQ ID NO: 2891295 - RNA, 21 nt, Human
acuguauagacaguuuguaaa

SEQ ID NO: 2891296 - RNA, 22 nt, Human
acuguauagacaguuuguaaau

SEQ ID NO: 2891297 - RNA, 17 nt, Human
acuguagccuggauauu

SEQ ID NO: 2891298 - RNA, 18 nt, Human
acuguagcuuugugaaau

SEQ ID NO: 2891299 - RNA, 13 nt, Human
acuguagaugaug

SEQ ID NO: 2891300 - RNA, 15 nt, Human
acuguagaugaugua

SEQ ID NO: 2891301 - RNA, 22 nt, Human
acuguagccucgccgucuguga

SEQ ID NO: 2891302 - RNA, 16 nt, Human
acuguaguucuaagac

SEQ ID NO: 2891303 - RNA, 17 nt, Human
acuguaguucuaagacu

SEQ ID NO: 2891304 - RNA, 13 nt, Human
acuguaguucuaa

SEQ ID NO: 2891305 - RNA, 15 nt, Human
acuguaguucuaaga

SEQ ID NO: 2891306 - RNA, 20 nt, Human
ucuggaaaccucuacauauu

SEQ ID NO: 2891307 - RNA, 19 nt, Human
ucuggaaaagaacuguuua

SEQ ID NO: 2891308 - RNA, 22 nt, Human
ucuggaguuuuuguuuggagag

SEQ ID NO: 2891309 - RNA, 24 nt, Human
ucuggaguuuuuguuuggagagca

SEQ ID NO: 2891310 - RNA, 13 nt, Human
ucuggagugggca

SEQ ID NO: 2891311 - RNA, 14 nt, Human
ucuggagugggcag

SEQ ID NO: 2891312 - RNA, 14 nt, Human
ucuggauaggagcc

SEQ ID NO: 2891313 - RNA, 16 nt, Human
ucuggauaggagccug

SEQ ID NO: 2891314 - RNA, 20 nt, Human
ucuggauaggagccugcugg

SEQ ID NO: 2891315 - RNA, 21 nt, Human
ucuggauaggagccugcuggu

SEQ ID NO: 2891316 - RNA, 22 nt, Human
ucuggaugccugauugccaagc

SEQ ID NO: 2891317 - RNA, 17 nt, Human
ucuggauuaggucucug

SEQ ID NO: 2891318 - RNA, 18 nt, Human
ucuggcauuagaauuauu

SEQ ID NO: 2891319 - RNA, 18 nt, Human
ucuggcaguucuggaaug

SEQ ID NO: 2891320 - RNA, 23 nt, Human
ucuggcaguuuugacaucagcca

SEQ ID NO: 2891321 - RNA, 21 nt, Human
ucuggccauauuuacuaccuu

SEQ ID NO: 2891322 - RNA, 18 nt, Human
agaagccuucagcuccag

SEQ ID NO: 2891323 - RNA, 17 nt, Human
agaagccuucagcucca

SEQ ID NO: 2891324 - RNA, 14 nt, Human
agaagccuucagcu

SEQ ID NO: 2891325 - RNA, 13 nt, Human
agaagccuucagc

SEQ ID NO: 2891326 - RNA, 12 nt, Human
agaagccuucag

SEQ ID NO: 2891327 - RNA, 19 nt, Human
agaagccuucagcuccagg

SEQ ID NO: 2891328 - RNA, 16 nt, Human
agaagcggauuuccag

SEQ ID NO: 2891329 - RNA, 21 nt, Human
agaagcuaugucaagaggcug

SEQ ID NO: 2891330 - RNA, 19 nt, Human
agaagcugcauccagaggc

SEQ ID NO: 2891331 - RNA, 11 nt, Human
agaagcugcug

SEQ ID NO: 2891332 - RNA, 13 nt, Human
agaagcugcugac

SEQ ID NO: 2891333 - RNA, 14 nt, Human
agaagcugcugacc

SEQ ID NO: 2891334 - RNA, 16 nt, Human
agaagcugcugaccaa

SEQ ID NO: 2891335 - RNA, 13 nt, Human
agaagcugcucca

SEQ ID NO: 2891336 - RNA, 18 nt, Human
agaagcugcuccaggccu

SEQ ID NO: 2891337 - RNA, 19 nt, Human
agaagcugcuccaggccug

SEQ ID NO: 2891338 - RNA, 20 nt, Human
agaagcugcuccaggccugc

SEQ ID NO: 2891339 - RNA, 22 nt, Human
agaagcugcuccaggccugcag

SEQ ID NO: 2891340 - RNA, 23 nt, Human
agaagcugcuccaggccugcagc

SEQ ID NO: 2891341 - RNA, 13 nt, Human
agaagcuguagua

SEQ ID NO: 2891342 - RNA, 14 nt, Human
agaagcuguuguac

SEQ ID NO: 2891343 - RNA, 16 nt, Human
agaagcuguuguacau

SEQ ID NO: 2891344 - RNA, 18 nt, Human
agaagcuguuguacauuu

SEQ ID NO: 2891345 - RNA, 19 nt, Human
agaagcuguuguacauuua

SEQ ID NO: 2891346 - RNA, 20 nt, Human
agaagcuguuguacauuuau

SEQ ID NO: 2891347 - RNA, 21 nt, Human
agaagcuguuguacauuuaug

SEQ ID NO: 2891348 - RNA, 22 nt, Human
agaagcuguuguacauuuauga

SEQ ID NO: 2891349 - RNA, 12 nt, Human
ucugcuucaaua

SEQ ID NO: 2891350 - RNA, 18 nt, Human
ucugcuucaauaaaucuu

SEQ ID NO: 2891351 - RNA, 19 nt, Human
ucugcuucaauaaaucuuu

SEQ ID NO: 2891352 - RNA, 15 nt, Human
ucugcuguccccuug

SEQ ID NO: 2891353 - RNA, 17 nt, Human
ucugcuguccccuuggc

SEQ ID NO: 2891354 - RNA, 22 nt, Human
ucugcuguccccuuggcagguc

SEQ ID NO: 2891355 - RNA, 16 nt, Human
ucugcucacauaucug

SEQ ID NO: 2891356 - RNA, 17 nt, Human
ucugcggaccccagcug

SEQ ID NO: 2891357 - RNA, 22 nt, Human
ucugcggaccccagcugugagc

SEQ ID NO: 2891358 - RNA, 14 nt, Human
ucugcggaccccag

SEQ ID NO: 2891359 - RNA, 15 nt, Human
ucugcggaccccagc

SEQ ID NO: 2891360 - RNA, 16 nt, Human
ucugcggaccccagcu

SEQ ID NO: 2891361 - RNA, 21 nt, Human
ucugccuucgaggucagagga

SEQ ID NO: 2891362 - RNA, 11 nt, Human
ucugccuuuuc

SEQ ID NO: 2891363 - RNA, 14 nt, Human
ucugcgaaguccua

SEQ ID NO: 2891364 - RNA, 22 nt, Human
ucugcgaaguccuauggaaacc

SEQ ID NO: 2891365 - RNA, 13 nt, Human
ucugcgccucagg

SEQ ID NO: 2891366 - RNA, 14 nt, Human
ucugcgccucaggc

SEQ ID NO: 2891367 - RNA, 17 nt, Human
ucugcucacaguaaccc

SEQ ID NO: 2891368 - RNA, 12 nt, Human
ucugcucagcca

SEQ ID NO: 2891369 - RNA, 13 nt, Human
ucugcucagccaa

SEQ ID NO: 2891370 - RNA, 15 nt, Human
ucugcucagccaagc

SEQ ID NO: 2891371 - RNA, 16 nt, Human
ucugcucagccaagcu

SEQ ID NO: 2891372 - RNA, 17 nt, Human
ucugcucagccaagcuu

SEQ ID NO: 2891373 - RNA, 22 nt, Human
ucugcucaguaauuugaggaca

SEQ ID NO: 2891374 - RNA, 21 nt, Human
agaagaacuugcauggagcag

SEQ ID NO: 2891375 - RNA, 10 nt, Human
agaagaagaa

SEQ ID NO: 2891376 - RNA, 11 nt, Human
agaagaagaaa

SEQ ID NO: 2891377 - RNA, 13 nt, Human
agaagaagaaaaa

SEQ ID NO: 2891378 - RNA, 14 nt, Human
agaagaagaaaaaa

SEQ ID NO: 2891379 - RNA, 15 nt, Human
agaagaagaaaaaaa

SEQ ID NO: 2891380 - RNA, 13 nt, Human
agaagaagaaaag

SEQ ID NO: 2891381 - RNA, 14 nt, Human
agaagaagaaaaga

SEQ ID NO: 2891382 - RNA, 15 nt, Human
agaagaagaaaagag

SEQ ID NO: 2891383 - RNA, 14 nt, Human
agaagaagaagaaa

SEQ ID NO: 2891384 - RNA, 15 nt, Human
agaagaagaagaaaa

SEQ ID NO: 2891385 - RNA, 15 nt, Human
agaagaagaagaaga

SEQ ID NO: 2891386 - RNA, 16 nt, Human
agaagaagagaagcug

SEQ ID NO: 2891387 - RNA, 18 nt, Human
agaagaagagaagcugcu

SEQ ID NO: 2891388 - RNA, 20 nt, Human
agaagaagagaagcugcuga

SEQ ID NO: 2891389 - RNA, 12 nt, Human
agaagaaaauuc

SEQ ID NO: 2891390 - RNA, 16 nt, Human
agaagaaaauucuccu

SEQ ID NO: 2891391 - RNA, 17 nt, Human
agaagaaaauucuccug

SEQ ID NO: 2891392 - RNA, 14 nt, Human
ucugccccuccccc

SEQ ID NO: 2891393 - RNA, 13 nt, Human
ucugccccucccc

SEQ ID NO: 2891394 - RNA, 22 nt, Human
ucugccccucccccaaccccca

SEQ ID NO: 2891395 - RNA, 18 nt, Human
ucugccccucccccaacc

SEQ ID NO: 2891396 - RNA, 16 nt, Human
ucugccccucccccaa

SEQ ID NO: 2891397 - RNA, 15 nt, Human
ucugccccuccccca

SEQ ID NO: 2891398 - RNA, 17 nt, Human
ucugcccgccugcccac

SEQ ID NO: 2891399 - RNA, 19 nt, Human
ucugcccgccugcccaccu

SEQ ID NO: 2891400 - RNA, 20 nt, Human
ucugcccgccugcccaccug

SEQ ID NO: 2891401 - RNA, 21 nt, Human
ucugcccgccugcccaccugc

SEQ ID NO: 2891402 - RNA, 22 nt, Human
ucugcccgccugcccaccugcc

SEQ ID NO: 2891403 - RNA, 23 nt, Human
ucugcccgccugcccaccugccu

SEQ ID NO: 2891404 - RNA, 16 nt, Human
ucugccgucucuggag

SEQ ID NO: 2891405 - RNA, 15 nt, Human
ucugccgucucugga

SEQ ID NO: 2891406 - RNA, 10 nt, Human
ucugccuuug

SEQ ID NO: 2891407 - RNA, 14 nt, Human
ucugccuuugacau

SEQ ID NO: 2891408 - RNA, 16 nt, Human
ucugccuuugacauuu

SEQ ID NO: 2891409 - RNA, 20 nt, Human
ucugccuuugacauuuaauu

SEQ ID NO: 2891410 - RNA, 23 nt, Human
ucugccuuugacauuuaauuuag

SEQ ID NO: 2891411 - RNA, 12 nt, Human
ucugccuugccu

SEQ ID NO: 2891412 - RNA, 13 nt, Human
ucugccuugccuu

SEQ ID NO: 2891413 - RNA, 14 nt, Human
ucugccgucucugg

SEQ ID NO: 2891414 - RNA, 18 nt, Human
ucugccgcccccuccuga

SEQ ID NO: 2891415 - RNA, 15 nt, Human
ucugccgcuaccucc

SEQ ID NO: 2891416 - RNA, 18 nt, Human
ucugccgcuaccucccuc

SEQ ID NO: 2891417 - RNA, 19 nt, Human
ucugccgcuaccucccucc

SEQ ID NO: 2891418 - RNA, 20 nt, Human
ucugccgcuaccucccuccc

SEQ ID NO: 2891419 - RNA, 23 nt, Human
ucugcccgggaaggucaccagca

SEQ ID NO: 2891420 - RNA, 18 nt, Human
ucugcccucauuacuggg

SEQ ID NO: 2891421 - RNA, 21 nt, Human
ucugcccucauuacugggccu

SEQ ID NO: 2891422 - RNA, 14 nt, Human
agaagaaagacucu

SEQ ID NO: 2891423 - RNA, 10 nt, Human
ucugcccggg

SEQ ID NO: 2891424 - RNA, 11 nt, Human
agaacuccuga

SEQ ID NO: 2891425 - RNA, 13 nt, Human
agaacuccugacu

SEQ ID NO: 2891426 - RNA, 14 nt, Human
agaacuccugacug

SEQ ID NO: 2891427 - RNA, 15 nt, Human
agaacuccugacugu

SEQ ID NO: 2891428 - RNA, 14 nt, Human
agaacucugggcug

SEQ ID NO: 2891429 - RNA, 23 nt, Human
agaacucuccaucuuauuuucau

SEQ ID NO: 2891430 - RNA, 12 nt, Human
agaacugaaaag

SEQ ID NO: 2891431 - RNA, 13 nt, Human
agaacugaaaaga

SEQ ID NO: 2891432 - RNA, 14 nt, Human
agaacugaaaagag

SEQ ID NO: 2891433 - RNA, 15 nt, Human
agaacugaaaagaga

SEQ ID NO: 2891434 - RNA, 17 nt, Human
agaacugaaaagagagc

SEQ ID NO: 2891435 - RNA, 20 nt, Human
agaacucugggcugcuaccc

SEQ ID NO: 2891436 - RNA, 10 nt, Human
agaacugaaa

SEQ ID NO: 2891437 - RNA, 12 nt, Human
agaagaaaagag

SEQ ID NO: 2891438 - RNA, 13 nt, Human
agaagaaaagaga

SEQ ID NO: 2891439 - RNA, 15 nt, Human
agaagaaaagagaag

SEQ ID NO: 2891440 - RNA, 17 nt, Human
agaagaaaagagaagaa

SEQ ID NO: 2891441 - RNA, 18 nt, Human
agaagaaaagagaagaag

SEQ ID NO: 2891442 - RNA, 20 nt, Human
agaagaaaagagaagaagaa

SEQ ID NO: 2891443 - RNA, 23 nt, Human
agaacuuuuuuaaauaaacuuuu

SEQ ID NO: 2891444 - RNA, 11 nt, Human
agaagaaaaaa

SEQ ID NO: 2891445 - RNA, 13 nt, Human
agaagaaaaaaac

SEQ ID NO: 2891446 - RNA, 14 nt, Human
agaagaaaaaaacg

SEQ ID NO: 2891447 - RNA, 21 nt, Human
agaagaaaaaaacgaaaacag

SEQ ID NO: 2891448 - RNA, 14 nt, Human
agaaccucuucccc

SEQ ID NO: 2891449 - RNA, 13 nt, Human
agaaccucuuccc

SEQ ID NO: 2891450 - RNA, 21 nt, Human
agaaccucaggcuuccuuggc

SEQ ID NO: 2891451 - RNA, 19 nt, Human
agaaccucaggcuuccuug

SEQ ID NO: 2891452 - RNA, 12 nt, Human
agaaccucaggc

SEQ ID NO: 2891453 - RNA, 20 nt, Human
agaacguauuuuaaaagcca

SEQ ID NO: 2891454 - RNA, 23 nt, Human
agaacguauuuuaaaagccacau

SEQ ID NO: 2891455 - RNA, 17 nt, Human
agaacguaaagaacuuu

SEQ ID NO: 2891456 - RNA, 21 nt, Human
agaacggagccccaggccucu

SEQ ID NO: 2891457 - RNA, 15 nt, Human
agaaccucuucccca

SEQ ID NO: 2891458 - RNA, 18 nt, Human
agaacuaaagguggccac

SEQ ID NO: 2891459 - RNA, 20 nt, Human
agaacuaaagguggccacaa

SEQ ID NO: 2891460 - RNA, 11 nt, Human
agaacuaaaug

SEQ ID NO: 2891461 - RNA, 12 nt, Human
agaacuaaaugu

SEQ ID NO: 2891462 - RNA, 13 nt, Human
agaacuaaauguu

SEQ ID NO: 2891463 - RNA, 15 nt, Human
agaacuaaauguucu

SEQ ID NO: 2891464 - RNA, 16 nt, Human
agaacuaaauguucua

SEQ ID NO: 2891465 - RNA, 19 nt, Human
agaacucacuggggccuac

SEQ ID NO: 2891466 - RNA, 15 nt, Human
agaacucaucacugu

SEQ ID NO: 2891467 - RNA, 19 nt, Human
agaacucaucacuguggcu

SEQ ID NO: 2891468 - RNA, 23 nt, Human
agaacucaucacuguggcugucu

SEQ ID NO: 2891469 - RNA, 16 nt, Human
agaacucacuggggcc

SEQ ID NO: 2891470 - RNA, 23 nt, Human
agaacucaucccuaaugcugcag

SEQ ID NO: 2891471 - RNA, 15 nt, Human
ucugcagaaacagaa

SEQ ID NO: 2891472 - RNA, 15 nt, Human
ucugcagaagaggag

SEQ ID NO: 2891473 - RNA, 19 nt, Human
ucugcagacacgccuuccc

SEQ ID NO: 2891474 - RNA, 23 nt, Human
ucugcagacacgccuuccccuca

SEQ ID NO: 2891475 - RNA, 15 nt, Human
ucugcagacugcuag

SEQ ID NO: 2891476 - RNA, 23 nt, Human
ucugcagacugcuaguguucugu

SEQ ID NO: 2891477 - RNA, 12 nt, Human
ucugcagagcag

SEQ ID NO: 2891478 - RNA, 10 nt, Human
agaaauguag

SEQ ID NO: 2891479 - RNA, 15 nt, Human
agaaauguaguugau

SEQ ID NO: 2891480 - RNA, 16 nt, Human
agaaaugucuuaauuu

SEQ ID NO: 2891481 - RNA, 21 nt, Human
agaaaugucuuaauuuuugaa

SEQ ID NO: 2891482 - RNA, 12 nt, Human
ucugauagaauu

SEQ ID NO: 2891483 - RNA, 20 nt, Human
agaaaugucuaaaugcugaa

SEQ ID NO: 2891484 - RNA, 14 nt, Human
agaaauuggcugga

SEQ ID NO: 2891485 - RNA, 19 nt, Human
agaaauuggaacagaaugu

SEQ ID NO: 2891486 - RNA, 20 nt, Human
agaaauugccuauccugcug

SEQ ID NO: 2891487 - RNA, 15 nt, Human
agaaauuggcuggau

SEQ ID NO: 2891488 - RNA, 22 nt, Human
agaaauuggaacagaauguuuu

SEQ ID NO: 2891489 - RNA, 14 nt, Human
agaaauuuuuauca

SEQ ID NO: 2891490 - RNA, 15 nt, Human
agaaauuuuuaucag

SEQ ID NO: 2891491 - RNA, 16 nt, Human
agaaauuuuuaucagu

SEQ ID NO: 2891492 - RNA, 17 nt, Human
agaaauuuuuaucaguu

SEQ ID NO: 2891493 - RNA, 20 nt, Human
agaaauuugauuucuauuca

SEQ ID NO: 2891494 - RNA, 13 nt, Human
agaaauuuacuau

SEQ ID NO: 2891495 - RNA, 14 nt, Human
agaaauuuacuaua

SEQ ID NO: 2891496 - RNA, 15 nt, Human
agaaauuuacuauau

SEQ ID NO: 2891497 - RNA, 16 nt, Human
agaaauuuacuauaua

SEQ ID NO: 2891498 - RNA, 17 nt, Human
agaaauuuacuauauau

SEQ ID NO: 2891499 - RNA, 19 nt, Human
agaaauuuacuauauauau

SEQ ID NO: 2891500 - RNA, 15 nt, Human
agaaccuaacuguau

SEQ ID NO: 2891501 - RNA, 16 nt, Human
agaaccuaacuguauc

SEQ ID NO: 2891502 - RNA, 17 nt, Human
agaaccuaacuguaucu

SEQ ID NO: 2891503 - RNA, 18 nt, Human
agaaccuaacuguaucuu

SEQ ID NO: 2891504 - RNA, 19 nt, Human
agaaccuaacuguaucuug

SEQ ID NO: 2891505 - RNA, 20 nt, Human
agaaccuaacuguaucuuga

SEQ ID NO: 2891506 - RNA, 21 nt, Human
agaaccuaacuguaucuugag

SEQ ID NO: 2891507 - RNA, 16 nt, Human
agaacaaagugagaca

SEQ ID NO: 2891508 - RNA, 18 nt, Human
agaaccgagcaaagauca

SEQ ID NO: 2891509 - RNA, 22 nt, Human
agaaccgagcaaagaucaaaau

SEQ ID NO: 2891510 - RNA, 20 nt, Human
agaaccgagcaaagaucaaa

SEQ ID NO: 2891511 - RNA, 21 nt, Human
agaaccgagcaaagaucaaaa

SEQ ID NO: 2891512 - RNA, 13 nt, Human
agaacaaagcugu

SEQ ID NO: 2891513 - RNA, 14 nt, Human
agaacaaagcuguu

SEQ ID NO: 2891514 - RNA, 15 nt, Human
agaacaaagcuguua

SEQ ID NO: 2891515 - RNA, 16 nt, Human
agaacaaagcuguuaa

SEQ ID NO: 2891516 - RNA, 17 nt, Human
agaacaaagcuguuaaa

SEQ ID NO: 2891517 - RNA, 18 nt, Human
agaacaaagcuguuaaac

SEQ ID NO: 2891518 - RNA, 19 nt, Human
agaacaaagcuguuaaacu

SEQ ID NO: 2891519 - RNA, 20 nt, Human
agaacaaagcuguuaaacug

SEQ ID NO: 2891520 - RNA, 21 nt, Human
agaacaaagcuguuaaacugu

SEQ ID NO: 2891521 - RNA, 22 nt, Human
agaacaaagcuguuaaacuguu

SEQ ID NO: 2891522 - RNA, 14 nt, Human
agaacaaaggacag

SEQ ID NO: 2891523 - RNA, 21 nt, Human
agaacaaaggacagaguauga

SEQ ID NO: 2891524 - RNA, 22 nt, Human
agaacaaaggacagaguaugaa

SEQ ID NO: 2891525 - RNA, 12 nt, Human
ucugagaaaaca

SEQ ID NO: 2891526 - RNA, 9 nt, Human
ucugagaaa

SEQ ID NO: 2891527 - RNA, 14 nt, Human
ucugagaaaacaag

SEQ ID NO: 2891528 - RNA, 22 nt, Human
ucugagaaaagaacguauuuua

SEQ ID NO: 2891529 - RNA, 16 nt, Human
ucugagggaaagugca

SEQ ID NO: 2891530 - RNA, 12 nt, Human
ucugcacugaaa

SEQ ID NO: 2891531 - RNA, 13 nt, Human
ucugcacugaaaa

SEQ ID NO: 2891532 - RNA, 16 nt, Human
ucugcacugaaaaggu

SEQ ID NO: 2891533 - RNA, 21 nt, Human
ucugauucccaagcucugcuc

SEQ ID NO: 2891534 - RNA, 20 nt, Human
ucugauucccaagcucugcu

SEQ ID NO: 2891535 - RNA, 19 nt, Human
ucugauucccaagcucugc

SEQ ID NO: 2891536 - RNA, 23 nt, Human
ucugauaggaaugugaaagcacg

SEQ ID NO: 2891537 - RNA, 18 nt, Human
ucugauucccaagcucug

SEQ ID NO: 2891538 - RNA, 20 nt, Human
ucugauaucuauaguagaca

SEQ ID NO: 2891539 - RNA, 13 nt, Human
ucugauaugggac

SEQ ID NO: 2891540 - RNA, 14 nt, Human
ucugauaugggacu

SEQ ID NO: 2891541 - RNA, 15 nt, Human
ucugauaugggacug

SEQ ID NO: 2891542 - RNA, 21 nt, Human
ucugauaugggacugagccug

SEQ ID NO: 2891543 - RNA, 19 nt, Human
ucugacuuaagcaaaagaa

SEQ ID NO: 2891544 - RNA, 20 nt, Human
ucugacuuaagcaaaagaaa

SEQ ID NO: 2891545 - RNA, 23 nt, Human
ucugacuuaagcaaaagaaaaag

SEQ ID NO: 2891546 - RNA, 14 nt, Human
ucugaccugcaggc

SEQ ID NO: 2891547 - RNA, 14 nt, Human
ucugacuuuacacu

SEQ ID NO: 2891548 - RNA, 18 nt, Human
ucugacuuuacacucggc

SEQ ID NO: 2891549 - RNA, 18 nt, Human
agaaagaaggaagugaag

SEQ ID NO: 2891550 - RNA, 13 nt, Human
ucugaccccuccu

SEQ ID NO: 2891551 - RNA, 15 nt, Human
ucugaccccuccuca

SEQ ID NO: 2891552 - RNA, 18 nt, Human
ucugaccccuccucacug

SEQ ID NO: 2891553 - RNA, 21 nt, Human
ucugacccuagcucuuuccuu

SEQ ID NO: 2891554 - RNA, 16 nt, Human
ucugaccccuccucac

SEQ ID NO: 2891555 - RNA, 17 nt, Human
ucugaccccuccucacu

SEQ ID NO: 2891556 - RNA, 12 nt, Human
ucugaccugcag

SEQ ID NO: 2891557 - RNA, 18 nt, Human
ucugaccugcacugggga

SEQ ID NO: 2891558 - RNA, 17 nt, Human
agacucauucuucugua

SEQ ID NO: 2891559 - RNA, 18 nt, Human
agacucauucuucuguac

SEQ ID NO: 2891560 - RNA, 12 nt, Human
agaccugccccu

SEQ ID NO: 2891561 - RNA, 15 nt, Human
agaccugaauucuuu

SEQ ID NO: 2891562 - RNA, 18 nt, Human
agaccuacuguucuaaag

SEQ ID NO: 2891563 - RNA, 19 nt, Human
agaccuacuguucuaaagc

SEQ ID NO: 2891564 - RNA, 17 nt, Human
ucuugcaagcaugcuug

SEQ ID NO: 2891565 - RNA, 16 nt, Human
ucuugcaagcaugcuu

SEQ ID NO: 2891566 - RNA, 12 nt, Human
ucuugaugacca

SEQ ID NO: 2891567 - RNA, 16 nt, Human
ucuugcaauggcagcc

SEQ ID NO: 2891568 - RNA, 13 nt, Human
ucuugcaauggca

SEQ ID NO: 2891569 - RNA, 17 nt, Human
ucuugcaauggcagccu

SEQ ID NO: 2891570 - RNA, 14 nt, Human
ucuugcuuguaccu

SEQ ID NO: 2891571 - RNA, 15 nt, Human
ucuugcuuguaccuc

SEQ ID NO: 2891572 - RNA, 17 nt, Human
ucuugcuuguaccucug

SEQ ID NO: 2891573 - RNA, 18 nt, Human
ucuugcuuguaccucugg

SEQ ID NO: 2891574 - RNA, 22 nt, Human
ucuugcuuguaccucuggcuga

SEQ ID NO: 2891575 - RNA, 13 nt, Human
ucuugcuuucuau

SEQ ID NO: 2891576 - RNA, 16 nt, Human
ucuuggacacuguaca

SEQ ID NO: 2891577 - RNA, 19 nt, Human
agacccucgcccaacucca

SEQ ID NO: 2891578 - RNA, 18 nt, Human
ucuuggaaguacaugaau

SEQ ID NO: 2891579 - RNA, 17 nt, Human
ucuuggacacuguacaa

SEQ ID NO: 2891580 - RNA, 12 nt, Human
agacaugguggc

SEQ ID NO: 2891581 - RNA, 21 nt, Human
ucuuccucacagucccacugu

SEQ ID NO: 2891582 - RNA, 22 nt, Human
ucuuccucacagucccacugug

SEQ ID NO: 2891583 - RNA, 21 nt, Human
ucuuccuauuugccaugggcu

SEQ ID NO: 2891584 - RNA, 23 nt, Human
ucuuccuaguuuucuccucccag

SEQ ID NO: 2891585 - RNA, 21 nt, Human
ucuuccuaguuuucuccuccc

SEQ ID NO: 2891586 - RNA, 19 nt, Human
ucuuccuaguuuucuccuc

SEQ ID NO: 2891587 - RNA, 17 nt, Human
ucuuccuaccuauccca

SEQ ID NO: 2891588 - RNA, 15 nt, Human
agacaugugucaaca

SEQ ID NO: 2891589 - RNA, 17 nt, Human
agacauguuguaaauua

SEQ ID NO: 2891590 - RNA, 20 nt, Human
agacccugcaaacagaacag

SEQ ID NO: 2891591 - RNA, 21 nt, Human
agacccugcaaacagaacagg

SEQ ID NO: 2891592 - RNA, 22 nt, Human
agacccugcaaacagaacaggg

SEQ ID NO: 2891593 - RNA, 15 nt, Human
agacccucugccacc

SEQ ID NO: 2891594 - RNA, 16 nt, Human
agacccucugccacca

SEQ ID NO: 2891595 - RNA, 17 nt, Human
agacccucugccaccag

SEQ ID NO: 2891596 - RNA, 20 nt, Human
agaccguuauaaagugugcc

SEQ ID NO: 2891597 - RNA, 18 nt, Human
agaccguuuaccuagaag

SEQ ID NO: 2891598 - RNA, 21 nt, Human
agaccguuuaccuagaagaag

SEQ ID NO: 2891599 - RNA, 15 nt, Human
agaccuacuguucua

SEQ ID NO: 2891600 - RNA, 16 nt, Human
agaccuacuguucuaa

SEQ ID NO: 2891601 - RNA, 17 nt, Human
agaccuacuguucuaaa

SEQ ID NO: 2891602 - RNA, 20 nt, Human
agacccucugccaccagaga

SEQ ID NO: 2891603 - RNA, 21 nt, Human
agacccucugccaccagagac

SEQ ID NO: 2891604 - RNA, 14 nt, Human
agacccuggugccu

SEQ ID NO: 2891605 - RNA, 18 nt, Human
agacccuggugccuggcu

SEQ ID NO: 2891606 - RNA, 19 nt, Human
agacccuggugccuggcuc

SEQ ID NO: 2891607 - RNA, 13 nt, Human
agacccugucucu

SEQ ID NO: 2891608 - RNA, 13 nt, Human
ucuuuaaagaugu

SEQ ID NO: 2891609 - RNA, 14 nt, Human
ucuuuaaaggccca

SEQ ID NO: 2891610 - RNA, 15 nt, Human
ucuuuaaaggcccag

SEQ ID NO: 2891611 - RNA, 18 nt, Human
ucuuuaaaggcccagccc

SEQ ID NO: 2891612 - RNA, 21 nt, Human
ucuuuaaaggcccagccccua

SEQ ID NO: 2891613 - RNA, 22 nt, Human
ucuuuaaaggcccagccccuag

SEQ ID NO: 2891614 - RNA, 23 nt, Human
ucuuuaaaggcccagccccuaga

SEQ ID NO: 2891615 - RNA, 21 nt, Human
ucuuuaaaauuuaaguaucuu

SEQ ID NO: 2891616 - RNA, 23 nt, Human
ucuuuaaacaguauuucauugcc

SEQ ID NO: 2891617 - RNA, 22 nt, Human
ucuuggcacauuuaagagacag

SEQ ID NO: 2891618 - RNA, 21 nt, Human
ucuuggcacauuuaagagaca

SEQ ID NO: 2891619 - RNA, 15 nt, Human
ucuuggaguuuuuca

SEQ ID NO: 2891620 - RNA, 17 nt, Human
ucuuggcaaaagccuug

SEQ ID NO: 2891621 - RNA, 20 nt, Human
ucuuggcaaaagccuugugu

SEQ ID NO: 2891622 - RNA, 21 nt, Human
ucuuggcaaaagccuugugua

SEQ ID NO: 2891623 - RNA, 22 nt, Human
ucuuggcaaaagccuuguguau

SEQ ID NO: 2891624 - RNA, 17 nt, Human
ucuuggagacccugcaa

SEQ ID NO: 2891625 - RNA, 17 nt, Human
ucuuggagaccuuaccc

SEQ ID NO: 2891626 - RNA, 16 nt, Human
ucuuuacccuugagcc

SEQ ID NO: 2891627 - RNA, 16 nt, Human
ucuuuacucccaagac

SEQ ID NO: 2891628 - RNA, 23 nt, Human
ucuuuacuccucacacuuacugu

SEQ ID NO: 2891629 - RNA, 12 nt, Human
ucuuuacuuuua

SEQ ID NO: 2891630 - RNA, 13 nt, Human
ucuuuagagaacu

SEQ ID NO: 2891631 - RNA, 14 nt, Human
ucuuuagagaacug

SEQ ID NO: 2891632 - RNA, 16 nt, Human
ucuuuagagaacugaa

SEQ ID NO: 2891633 - RNA, 17 nt, Human
ucuuuagagaacugaaa

SEQ ID NO: 2891634 - RNA, 19 nt, Human
ucuuuagagaacugaaaag

SEQ ID NO: 2891635 - RNA, 20 nt, Human
ucuuuagagaacugaaaaga

SEQ ID NO: 2891636 - RNA, 22 nt, Human
ucuuuagagaacugaaaagaga

SEQ ID NO: 2891637 - RNA, 17 nt, Human
agacucuacagaggcca

SEQ ID NO: 2891638 - RNA, 19 nt, Human
agacucuacagaggccaug

SEQ ID NO: 2891639 - RNA, 19 nt, Human
agagaccaggcaaagcaag

SEQ ID NO: 2891640 - RNA, 16 nt, Human
agagaccaggcccugg

SEQ ID NO: 2891641 - RNA, 20 nt, Human
ucuuuggggagguguucacu

SEQ ID NO: 2891642 - RNA, 10 nt, Human
ucuuuggggu

SEQ ID NO: 2891643 - RNA, 17 nt, Human
ucuuuggggucuacacu

SEQ ID NO: 2891644 - RNA, 23 nt, Human
ucuuuggggucuacacugcaauc

SEQ ID NO: 2891645 - RNA, 16 nt, Human
ucuuuggggugccccu

SEQ ID NO: 2891646 - RNA, 15 nt, Human
agagaaucauacuua

SEQ ID NO: 2891647 - RNA, 22 nt, Human
agacuguguaaaauguaaugca

SEQ ID NO: 2891648 - RNA, 14 nt, Human
agagaaugcacaga

SEQ ID NO: 2891649 - RNA, 19 nt, Human
agagaaugcacagauauac

SEQ ID NO: 2891650 - RNA, 20 nt, Human
agagaaugcacagauauacu

SEQ ID NO: 2891651 - RNA, 16 nt, Human
agagaaugcugaccug

SEQ ID NO: 2891652 - RNA, 18 nt, Human
agagaaugaaagggccca

SEQ ID NO: 2891653 - RNA, 18 nt, Human
agacugugacaacugucu

SEQ ID NO: 2891654 - RNA, 14 nt, Human
agacugucucaaga

SEQ ID NO: 2891655 - RNA, 17 nt, Human
ucuuggcaauauuccuu

SEQ ID NO: 2891656 - RNA, 22 nt, Human
agacugugucucucugauaccu

SEQ ID NO: 2891657 - RNA, 19 nt, Human
agacuuggcaacagaagca

SEQ ID NO: 2891658 - RNA, 21 nt, Human
agacuuucuuucuguaggugg

SEQ ID NO: 2891659 - RNA, 17 nt, Human
agacuuggcaacagaag

SEQ ID NO: 2891660 - RNA, 18 nt, Human
agacuuggcaacagaagc

SEQ ID NO: 2891661 - RNA, 16 nt, Human
agacuugccagagccg

SEQ ID NO: 2891662 - RNA, 15 nt, Human
agacuugccauguga

SEQ ID NO: 2891663 - RNA, 17 nt, Human
agacuugccaugugacu

SEQ ID NO: 2891664 - RNA, 11 nt, Human
agacuugccuu

SEQ ID NO: 2891665 - RNA, 13 nt, Human
agacuugccuucc

SEQ ID NO: 2891666 - RNA, 16 nt, Human
agacuugccuuccuaa

SEQ ID NO: 2891667 - RNA, 22 nt, Human
agacuugccuuccuaagccugu

SEQ ID NO: 2891668 - RNA, 12 nt, Human
agacuugccaac

SEQ ID NO: 2891669 - RNA, 23 nt, Human
agacuugccaacaccacagaaau

SEQ ID NO: 2891670 - RNA, 14 nt, Human
ucuuagacuacauu

SEQ ID NO: 2891671 - RNA, 20 nt, Human
ucuuagacuacauuuagaga

SEQ ID NO: 2891672 - RNA, 15 nt, Human
ucuuagaaaugaagg

SEQ ID NO: 2891673 - RNA, 14 nt, Human
ucuuaauuaauuug

SEQ ID NO: 2891674 - RNA, 15 nt, Human
ucuuaauuaauuuga

SEQ ID NO: 2891675 - RNA, 23 nt, Human
ucuuaauuaauuugauuaacaaa

SEQ ID NO: 2891676 - RNA, 14 nt, Human
ucuuagaaaugaag

SEQ ID NO: 2891677 - RNA, 12 nt, Human
ucuuaauuauua

SEQ ID NO: 2891678 - RNA, 22 nt, Human
ucuuauugcccacgcuggagug

SEQ ID NO: 2891679 - RNA, 18 nt, Human
ucuuauugcccacgcugg

SEQ ID NO: 2891680 - RNA, 14 nt, Human
ucuuauugcccacg

SEQ ID NO: 2891681 - RNA, 14 nt, Human
ucuuccagggggaa

SEQ ID NO: 2891682 - RNA, 18 nt, Human
ucuuccaggugcccagcu

SEQ ID NO: 2891683 - RNA, 15 nt, Human
ucuuccaggugccca

SEQ ID NO: 2891684 - RNA, 17 nt, Human
ucuucccuuuccccagc

SEQ ID NO: 2891685 - RNA, 19 nt, Human
ucuucccuuuccccagcau

SEQ ID NO: 2891686 - RNA, 15 nt, Human
ucuuccgccccugcc

SEQ ID NO: 2891687 - RNA, 16 nt, Human
ucuuccgccccugccu

SEQ ID NO: 2891688 - RNA, 17 nt, Human
ucuuccgccccugccug

SEQ ID NO: 2891689 - RNA, 18 nt, Human
ucuuccgccccugccugc

SEQ ID NO: 2891690 - RNA, 19 nt, Human
ucuuccgccccugccugcc

SEQ ID NO: 2891691 - RNA, 21 nt, Human
ucuuccgccccugccugccau

SEQ ID NO: 2891692 - RNA, 23 nt, Human
ucuuccgccccugccugccaugu

SEQ ID NO: 2891693 - RNA, 21 nt, Human
ucuucccuaccucaggcagga

SEQ ID NO: 2891694 - RNA, 14 nt, Human
ucuucccuaccuca

SEQ ID NO: 2891695 - RNA, 13 nt, Human
ucuucccuaccuc

SEQ ID NO: 2891696 - RNA, 15 nt, Human
ucuuaauauauuuga

SEQ ID NO: 2891697 - RNA, 23 nt, Human
ucuucaccuaagucucugugaau

SEQ ID NO: 2891698 - RNA, 19 nt, Human
ucuucaccuaagucucugu

SEQ ID NO: 2891699 - RNA, 14 nt, Human
ucuucacucccccu

SEQ ID NO: 2891700 - RNA, 14 nt, Human
ucuucacucuuagg

SEQ ID NO: 2891701 - RNA, 15 nt, Human
ucuucacucuuaggc

SEQ ID NO: 2891702 - RNA, 21 nt, Human
ucuucacucuuaggcacuuug

SEQ ID NO: 2891703 - RNA, 15 nt, Human
ucuucacuuuugcaa

SEQ ID NO: 2891704 - RNA, 16 nt, Human
ucuucacuuuugcaag

SEQ ID NO: 2891705 - RNA, 18 nt, Human
ucuucagacucucagccc

SEQ ID NO: 2891706 - RNA, 20 nt, Human
ucuucagacucucagcccag

SEQ ID NO: 2891707 - RNA, 22 nt, Human
ucuucagacucucagcccagaa

SEQ ID NO: 2891708 - RNA, 23 nt, Human
ucuucagacucucagcccagaag

SEQ ID NO: 2891709 - RNA, 18 nt, Human
ucuucacagcucuguguu

SEQ ID NO: 2891710 - RNA, 17 nt, Human
ucuucaacauccugcca

SEQ ID NO: 2891711 - RNA, 18 nt, Human
ucuucaacauccugccag

SEQ ID NO: 2891712 - RNA, 19 nt, Human
ucuucaacauccugccagc

SEQ ID NO: 2891713 - RNA, 21 nt, Human
ucuucaacauccugccagccc

SEQ ID NO: 2891714 - RNA, 22 nt, Human
ucuucaacauccugccagcccc

SEQ ID NO: 2891715 - RNA, 19 nt, Human
ucuucacccaggccuaugu

SEQ ID NO: 2891716 - RNA, 23 nt, Human
ucuucacccaggccuauguugau

SEQ ID NO: 2891717 - RNA, 11 nt, Human
ucuucaccccg

SEQ ID NO: 2891718 - RNA, 15 nt, Human
ucuucaccccggcag

SEQ ID NO: 2891719 - RNA, 17 nt, Human
ucuucaccccggcaggc

SEQ ID NO: 2891720 - RNA, 18 nt, Human
ucuucaccccggcaggcc

SEQ ID NO: 2891721 - RNA, 20 nt, Human
ucuucaccccggcaggcccu

SEQ ID NO: 2891722 - RNA, 21 nt, Human
ucuucaccccggcaggcccug

SEQ ID NO: 2891723 - RNA, 22 nt, Human
ucuucaccccggcaggcccugc

SEQ ID NO: 2891724 - RNA, 23 nt, Human
ucuucaccccggcaggcccugca

SEQ ID NO: 2891725 - RNA, 22 nt, Human
ucuucaacauaacccacuuguc

SEQ ID NO: 2891726 - RNA, 13 nt, Human
ucuucaaauccuu

SEQ ID NO: 2891727 - RNA, 17 nt, Human
ucuucaaauccuuccaa

SEQ ID NO: 2891728 - RNA, 19 nt, Human
ucuucaaauccuuccaaaa

SEQ ID NO: 2891729 - RNA, 22 nt, Human
ucuucaaauccuuccaaaaauu

SEQ ID NO: 2891730 - RNA, 14 nt, Human
ucuucaaaauguau

SEQ ID NO: 2891731 - RNA, 17 nt, Human
ucuucaaaauguauaua

SEQ ID NO: 2891732 - RNA, 19 nt, Human
ucuucaaaauguauauauu

SEQ ID NO: 2891733 - RNA, 20 nt, Human
ucuucaaaauguauauauuu

SEQ ID NO: 2891734 - RNA, 14 nt, Human
ucuucaaacuguga

SEQ ID NO: 2891735 - RNA, 16 nt, Human
ucuuauugcgcugcua

SEQ ID NO: 2891736 - RNA, 17 nt, Human
ucuuauugcgcugcuac

SEQ ID NO: 2891737 - RNA, 16 nt, Human
ucuuauuuuucuaaac

SEQ ID NO: 2891738 - RNA, 18 nt, Human
ucuuauuuuucuaaacgu

SEQ ID NO: 2891739 - RNA, 17 nt, Human
ucuucaaaaugagcccu

SEQ ID NO: 2891740 - RNA, 15 nt, Human
ucuucaaaaacuguu

SEQ ID NO: 2891741 - RNA, 16 nt, Human
ucuucaaaaacuguuu

SEQ ID NO: 2891742 - RNA, 16 nt, Human
ucuucaaaaguaaugc

SEQ ID NO: 2891743 - RNA, 20 nt, Human
ucuucaaaaguaaugccucu

SEQ ID NO: 2891744 - RNA, 21 nt, Human
ucuucaaaaguaaugccucug

SEQ ID NO: 2891745 - RNA, 22 nt, Human
ucuucaaaaguaaugccucugu

SEQ ID NO: 2891746 - RNA, 13 nt, Human
agacaccagagca

SEQ ID NO: 2891747 - RNA, 15 nt, Human
agacaccagagcaga

SEQ ID NO: 2891748 - RNA, 17 nt, Human
agacaccaaaguucuaa

SEQ ID NO: 2891749 - RNA, 18 nt, Human
agacaccaaaguucuaau

SEQ ID NO: 2891750 - RNA, 13 nt, Human
agacaccaaaguu

SEQ ID NO: 2891751 - RNA, 14 nt, Human
agacaccaaaguuc

SEQ ID NO: 2891752 - RNA, 15 nt, Human
agacaccaaaguucu

SEQ ID NO: 2891753 - RNA, 16 nt, Human
agacaccaaaguucua

SEQ ID NO: 2891754 - RNA, 21 nt, Human
agacacccucaaccucuucug

SEQ ID NO: 2891755 - RNA, 14 nt, Human
agacacccuggcag

SEQ ID NO: 2891756 - RNA, 15 nt, Human
agacacccuggcagc

SEQ ID NO: 2891757 - RNA, 21 nt, Human
agacacggagcccagcccucc

SEQ ID NO: 2891758 - RNA, 16 nt, Human
agacacucaaauauga

SEQ ID NO: 2891759 - RNA, 20 nt, Human
agacacuccccgaagucuuu

SEQ ID NO: 2891760 - RNA, 19 nt, Human
agacacccucaaccucuuc

SEQ ID NO: 2891761 - RNA, 15 nt, Human
ucuguucuaacaugu

SEQ ID NO: 2891762 - RNA, 20 nt, Human
agacaccagagcagaugcag

SEQ ID NO: 2891763 - RNA, 14 nt, Human
agacaccagccacu

SEQ ID NO: 2891764 - RNA, 22 nt, Human
agacagagacccucugccacca

SEQ ID NO: 2891765 - RNA, 22 nt, Human
agacagcuucucauccugcagg

SEQ ID NO: 2891766 - RNA, 23 nt, Human
agacagcuucucauccugcaggc

SEQ ID NO: 2891767 - RNA, 14 nt, Human
agacagacacacac

SEQ ID NO: 2891768 - RNA, 14 nt, Human
agacagaauguauc

SEQ ID NO: 2891769 - RNA, 15 nt, Human
agacagaauguaucu

SEQ ID NO: 2891770 - RNA, 17 nt, Human
agacagaauguaucugu

SEQ ID NO: 2891771 - RNA, 18 nt, Human
agacagaauguaucugug

SEQ ID NO: 2891772 - RNA, 19 nt, Human
agacagaauguaucuguga

SEQ ID NO: 2891773 - RNA, 20 nt, Human
agacagaauguaucugugaa

SEQ ID NO: 2891774 - RNA, 21 nt, Human
agacagaauguaucugugaag

SEQ ID NO: 2891775 - RNA, 15 nt, Human
agacagacacacaca

SEQ ID NO: 2891776 - RNA, 16 nt, Human
agacagacacacacac

SEQ ID NO: 2891777 - RNA, 17 nt, Human
agacagacccugaaaag

SEQ ID NO: 2891778 - RNA, 12 nt, Human
agacagaaucuc

SEQ ID NO: 2891779 - RNA, 19 nt, Human
agacagagacccucugcca

SEQ ID NO: 2891780 - RNA, 18 nt, Human
agacagagaauaugucug

SEQ ID NO: 2891781 - RNA, 19 nt, Human
agacagagaauaugucugc

SEQ ID NO: 2891782 - RNA, 21 nt, Human
agacagagaauaugucugcuc

SEQ ID NO: 2891783 - RNA, 23 nt, Human
agacagagaauaugucugcuccu

SEQ ID NO: 2891784 - RNA, 16 nt, Human
agacagaagucuccuc

SEQ ID NO: 2891785 - RNA, 17 nt, Human
agacagaagucuccuca

SEQ ID NO: 2891786 - RNA, 22 nt, Human
agacagaaucucgcucugucgc

SEQ ID NO: 2891787 - RNA, 18 nt, Human
agacagaaucucgcucug

SEQ ID NO: 2891788 - RNA, 23 nt, Human
agacacuccccgaagucuuuugu

SEQ ID NO: 2891789 - RNA, 22 nt, Human
agacacuccccgaagucuuuug

SEQ ID NO: 2891790 - RNA, 21 nt, Human
agacaggguuuugccauguug

SEQ ID NO: 2891791 - RNA, 23 nt, Human
agacaggguuucaccauguugcc

SEQ ID NO: 2891792 - RNA, 22 nt, Human
agacaggucccuccccuucucu

SEQ ID NO: 2891793 - RNA, 19 nt, Human
agacaggguuucaccaugu

SEQ ID NO: 2891794 - RNA, 22 nt, Human
agacaggcaagcaccuccugcc

SEQ ID NO: 2891795 - RNA, 23 nt, Human
agacaggcaagcaccuccugccu

SEQ ID NO: 2891796 - RNA, 21 nt, Human
agacaggacagugcuucagcc

SEQ ID NO: 2891797 - RNA, 19 nt, Human
agacaggaaaguucagagu

SEQ ID NO: 2891798 - RNA, 18 nt, Human
agacagguuuucacauaa

SEQ ID NO: 2891799 - RNA, 21 nt, Human
agacagguuuucacauaaaug

SEQ ID NO: 2891800 - RNA, 22 nt, Human
agacagguuuucacauaaaugc

SEQ ID NO: 2891801 - RNA, 12 nt, Human
ucuuaagcuucc

SEQ ID NO: 2891802 - RNA, 18 nt, Human
ucuuaaggugaggccugu

SEQ ID NO: 2891803 - RNA, 23 nt, Human
ucuuaaggugaggccugucugug

SEQ ID NO: 2891804 - RNA, 13 nt, Human
ucuguuuguuauu

SEQ ID NO: 2891805 - RNA, 13 nt, Human
ucuguuuguuuca

SEQ ID NO: 2891806 - RNA, 21 nt, Human
ucuguuuguuucaagaaccug

SEQ ID NO: 2891807 - RNA, 19 nt, Human
ucuguuuggacugcagaag

SEQ ID NO: 2891808 - RNA, 21 nt, Human
ucuguuuggacugcagaagca

SEQ ID NO: 2891809 - RNA, 12 nt, Human
ucuguuuccugu

SEQ ID NO: 2891810 - RNA, 11 nt, Human
ucuguuguaac

SEQ ID NO: 2891811 - RNA, 12 nt, Human
ucuguuguaacu

SEQ ID NO: 2891812 - RNA, 13 nt, Human
ucuguuguaacuu

SEQ ID NO: 2891813 - RNA, 14 nt, Human
ucuguuguaacuua

SEQ ID NO: 2891814 - RNA, 15 nt, Human
ucuguuguaacuuau

SEQ ID NO: 2891815 - RNA, 16 nt, Human
ucuguuguaacuuaug

SEQ ID NO: 2891816 - RNA, 21 nt, Human
ucuguuguaacuuauguagau

SEQ ID NO: 2891817 - RNA, 13 nt, Human
ucuguuugauucu

SEQ ID NO: 2891818 - RNA, 14 nt, Human
ucuguuugauucuu

SEQ ID NO: 2891819 - RNA, 16 nt, Human
ucuguuugauucuuuu

SEQ ID NO: 2891820 - RNA, 23 nt, Human
agaauugcugaagggcauucuuu

SEQ ID NO: 2891821 - RNA, 18 nt, Human
ucuguuuuagguuaaaaa

SEQ ID NO: 2891822 - RNA, 13 nt, Human
agaauuggcucaa

SEQ ID NO: 2891823 - RNA, 16 nt, Human
agaauuggcucaauaa

SEQ ID NO: 2891824 - RNA, 18 nt, Human
agaauuggcugaacucau

SEQ ID NO: 2891825 - RNA, 21 nt, Human
agaauuggcugaacucaugag

SEQ ID NO: 2891826 - RNA, 22 nt, Human
agaauuggcugaacucaugaga

SEQ ID NO: 2891827 - RNA, 13 nt, Human
agaauugggcggc

SEQ ID NO: 2891828 - RNA, 18 nt, Human
agaauugugcaaauggaa

SEQ ID NO: 2891829 - RNA, 23 nt, Human
agaauugugcaaauggaagacaa

SEQ ID NO: 2891830 - RNA, 11 nt, Human
agaauuguuau

SEQ ID NO: 2891831 - RNA, 17 nt, Human
agaauuucuaaaaagau

SEQ ID NO: 2891832 - RNA, 22 nt, Human
agaauuucuaaaaagauuagca

SEQ ID NO: 2891833 - RNA, 23 nt, Human
agaauuucuaaaaagauuagcaa

SEQ ID NO: 2891834 - RNA, 20 nt, Human
agaauuucuaccauuucaga

SEQ ID NO: 2891835 - RNA, 16 nt, Human
agaauuucuaccauuu

SEQ ID NO: 2891836 - RNA, 22 nt, Human
agaauuucuugguaagaagccg

SEQ ID NO: 2891837 - RNA, 21 nt, Human
agaauuucuugguaagaagcc

SEQ ID NO: 2891838 - RNA, 13 nt, Human
agaauuucuuggu

SEQ ID NO: 2891839 - RNA, 21 nt, Human
agaauuucuaccauuucagag

SEQ ID NO: 2891840 - RNA, 21 nt, Human
agaauuuaucacacuucugug

SEQ ID NO: 2891841 - RNA, 24 nt, Human
ucuguccaggcacugcugcccagc

SEQ ID NO: 2891842 - RNA, 14 nt, Human
ucugucuuguaaua

SEQ ID NO: 2891843 - RNA, 19 nt, Human
ucugucuuguaauauuuug

SEQ ID NO: 2891844 - RNA, 20 nt, Human
ucugucuuguaauauuuugu

SEQ ID NO: 2891845 - RNA, 18 nt, Human
ucugugccuucuuuugau

SEQ ID NO: 2891846 - RNA, 22 nt, Human
ucugugccuucuuuugauuaug

SEQ ID NO: 2891847 - RNA, 22 nt, Human
ucugugccccaugccuguccag

SEQ ID NO: 2891848 - RNA, 14 nt, Human
ucuguccaccagcc

SEQ ID NO: 2891849 - RNA, 13 nt, Human
ucugugaaaccug

SEQ ID NO: 2891850 - RNA, 14 nt, Human
ucugugaaaccugu

SEQ ID NO: 2891851 - RNA, 22 nt, Human
ucugugaaaccugugaagcuga

SEQ ID NO: 2891852 - RNA, 17 nt, Human
ucugugccccaugccug

SEQ ID NO: 2891853 - RNA, 20 nt, Human
ucuguuggccagugugacaa

SEQ ID NO: 2891854 - RNA, 19 nt, Human
ucuguuggccagugugaca

SEQ ID NO: 2891855 - RNA, 18 nt, Human
ucuguuggccagugugac

SEQ ID NO: 2891856 - RNA, 14 nt, Human
ucuguucuacccgu

SEQ ID NO: 2891857 - RNA, 21 nt, Human
ucuguucuacccguuccaaaa

SEQ ID NO: 2891858 - RNA, 13 nt, Human
ucugugcucagga

SEQ ID NO: 2891859 - RNA, 14 nt, Human
ucugugcuccuccu

SEQ ID NO: 2891860 - RNA, 14 nt, Human
ucugugcugacaug

SEQ ID NO: 2891861 - RNA, 21 nt, Human
ucugucagcgcagguuuaguu

SEQ ID NO: 2891862 - RNA, 14 nt, Human
ucuguauauaaaug

SEQ ID NO: 2891863 - RNA, 15 nt, Human
ucuguauauaaaugg

SEQ ID NO: 2891864 - RNA, 16 nt, Human
ucuguauauaaauggg

SEQ ID NO: 2891865 - RNA, 17 nt, Human
ucuguauauaaauggga

SEQ ID NO: 2891866 - RNA, 23 nt, Human
ucuguauauaaaugggaacauuu

SEQ ID NO: 2891867 - RNA, 15 nt, Human
ucugucauuugagca

SEQ ID NO: 2891868 - RNA, 23 nt, Human
ucugucauuugagcagggcucag

SEQ ID NO: 2891869 - RNA, 20 nt, Human
ucugucauuugagcagggcu

SEQ ID NO: 2891870 - RNA, 13 nt, Human
ucugucauuuguu

SEQ ID NO: 2891871 - RNA, 23 nt, Human
ucuguccaaaggaggcuggcagg

SEQ ID NO: 2891872 - RNA, 22 nt, Human
ucuguccaaaggaggcuggcag

SEQ ID NO: 2891873 - RNA, 19 nt, Human
ucuguccaaaggaggcugg

SEQ ID NO: 2891874 - RNA, 17 nt, Human
ucuguccaaaggaggcu

SEQ ID NO: 2891875 - RNA, 16 nt, Human
ucuguccaaaggaggc

SEQ ID NO: 2891876 - RNA, 15 nt, Human
ucuguccaaaggagg

SEQ ID NO: 2891877 - RNA, 17 nt, Human
ucugucauuguacccuu

SEQ ID NO: 2891878 - RNA, 14 nt, Human
ucuguauacugugg

SEQ ID NO: 2891879 - RNA, 15 nt, Human
ucuguauacaacccu

SEQ ID NO: 2891880 - RNA, 15 nt, Human
ucuguagucauuuac

SEQ ID NO: 2891881 - RNA, 18 nt, Human
ucuguagucauuuacuaa

SEQ ID NO: 2891882 - RNA, 19 nt, Human
ucuguagucauuuacuaaa

SEQ ID NO: 2891883 - RNA, 21 nt, Human
ucuguauaaacauuaaauguc

SEQ ID NO: 2891884 - RNA, 22 nt, Human
ucuguauaaacauuaaaugucu

SEQ ID NO: 2891885 - RNA, 23 nt, Human
ucuguauaaacauuaaaugucuu

SEQ ID NO: 2891886 - RNA, 18 nt, Human
ucuguagagccuucugau

SEQ ID NO: 2891887 - RNA, 16 nt, Human
ucuguagauucugugg

SEQ ID NO: 2891888 - RNA, 19 nt, Human
ucuguagauucuguggaac

SEQ ID NO: 2891889 - RNA, 23 nt, Human
ucuguagauucuguggaacaagc

SEQ ID NO: 2891890 - RNA, 15 nt, Human
ucuguagccacuagu

SEQ ID NO: 2891891 - RNA, 16 nt, Human
ucuguagguuaaaaaa

SEQ ID NO: 2891892 - RNA, 13 nt, Human
ucuggguggccuc

SEQ ID NO: 2891893 - RNA, 16 nt, Human
ucuggguuccuuccuc

SEQ ID NO: 2891894 - RNA, 18 nt, Human
ucugguccggacacuccu

SEQ ID NO: 2891895 - RNA, 14 nt, Human
ucuggggcucuagg

SEQ ID NO: 2891896 - RNA, 23 nt, Human
ucuggucaaagaaagaaaguuua

SEQ ID NO: 2891897 - RNA, 14 nt, Human
ucuggucccuugca

SEQ ID NO: 2891898 - RNA, 13 nt, Human
ucuggucccuugc

SEQ ID NO: 2891899 - RNA, 16 nt, Human
ucuggguucacugcaa

SEQ ID NO: 2891900 - RNA, 14 nt, Human
ucuggguucacugc

SEQ ID NO: 2891901 - RNA, 13 nt, Human
ucugggucuuuug

SEQ ID NO: 2891902 - RNA, 20 nt, Human
ucuggggcaggcugggccau

SEQ ID NO: 2891903 - RNA, 19 nt, Human
ucuggggcaggcugggcca

SEQ ID NO: 2891904 - RNA, 18 nt, Human
ucuggggcaggcugggcc

SEQ ID NO: 2891905 - RNA, 17 nt, Human
ucuggggcaggcugggc

SEQ ID NO: 2891906 - RNA, 21 nt, Human
ucuggggcaggcugggccaug

SEQ ID NO: 2891907 - RNA, 17 nt, Human
agaaggaagugaagagg

SEQ ID NO: 2891908 - RNA, 17 nt, Human
agaagcuucagaaguuu

SEQ ID NO: 2891909 - RNA, 16 nt, Human
agaagcuucagaaguu

SEQ ID NO: 2891910 - RNA, 12 nt, Human
agaagcuucuaa

SEQ ID NO: 2891911 - RNA, 16 nt, Human
agaagcuucuaauaaa

SEQ ID NO: 2891912 - RNA, 18 nt, Human
agaagcuucuaauaaauu

SEQ ID NO: 2891913 - RNA, 22 nt, Human
agaagcuucuaauaaauuauac

SEQ ID NO: 2891914 - RNA, 23 nt, Human
agaagcuguuguacauuuaugau

SEQ ID NO: 2891915 - RNA, 23 nt, Human
agaaggaaagcuuuggcaguguu

SEQ ID NO: 2891916 - RNA, 9 nt, Human
agaaggaag

SEQ ID NO: 2891917 - RNA, 14 nt, Human
agcuacucagaagc

SEQ ID NO: 2891918 - RNA, 20 nt, Human
agcuacucagaagccugagg

SEQ ID NO: 2891919 - RNA, 19 nt, Human
agcuacucagaagccugag

SEQ ID NO: 2891920 - RNA, 18 nt, Human
agcuacucagaagccuga

SEQ ID NO: 2891921 - RNA, 15 nt, Human
agcuacucagaagcc

SEQ ID NO: 2891922 - RNA, 23 nt, Human
agcgugucuguauuuauguguga

SEQ ID NO: 2891923 - RNA, 17 nt, Human
agcguggcugugcucuc

SEQ ID NO: 2891924 - RNA, 15 nt, Human
agcguggacaggugu

SEQ ID NO: 2891925 - RNA, 17 nt, Human
agcgugagccacugcac

SEQ ID NO: 2891926 - RNA, 16 nt, Human
agcgugagccacugca

SEQ ID NO: 2891927 - RNA, 21 nt, Human
ugccauauucuguuggccagu

SEQ ID NO: 2891928 - RNA, 20 nt, Human
ugccauauucuguuggccag

SEQ ID NO: 2891929 - RNA, 15 nt, Human
agcggggacagcucc

SEQ ID NO: 2891930 - RNA, 17 nt, Human
agcggggacagcuccuu

SEQ ID NO: 2891931 - RNA, 16 nt, Human
agcggggacagcuccu

SEQ ID NO: 2891932 - RNA, 15 nt, Human
agcgugagccacugc

SEQ ID NO: 2891933 - RNA, 13 nt, Human
agcgugagccacu

SEQ ID NO: 2891934 - RNA, 13 nt, Human
agcgggcgccugu

SEQ ID NO: 2891935 - RNA, 15 nt, Human
agcgggaggcagagu

SEQ ID NO: 2891936 - RNA, 21 nt, Human
agcgggaggcagaguuugccu

SEQ ID NO: 2891937 - RNA, 19 nt, Human
agcgggcagguucugccug

SEQ ID NO: 2891938 - RNA, 23 nt, Human
agcgggcagguucugccugcuuu

SEQ ID NO: 2891939 - RNA, 19 nt, Human
ugccacuugaacaaaaucu

SEQ ID NO: 2891940 - RNA, 21 nt, Human
ugccacuugaacaaaaucugu

SEQ ID NO: 2891941 - RNA, 22 nt, Human
ugccacuugaacaaaaucuguu

SEQ ID NO: 2891942 - RNA, 18 nt, Human
ugccacacucuccaucac

SEQ ID NO: 2891943 - RNA, 19 nt, Human
ugccacuggggaaaacucc

SEQ ID NO: 2891944 - RNA, 23 nt, Human
ugccacugccucuuccucccuca

SEQ ID NO: 2891945 - RNA, 12 nt, Human
ugccacacuuca

SEQ ID NO: 2891946 - RNA, 15 nt, Human
ugccauauucuguug

SEQ ID NO: 2891947 - RNA, 18 nt, Human
ugccauagucacauggcc

SEQ ID NO: 2891948 - RNA, 19 nt, Human
ugccauagucacauggccu

SEQ ID NO: 2891949 - RNA, 13 nt, Human
agcggauuuccag

SEQ ID NO: 2891950 - RNA, 21 nt, Human
ugccauauauaacagauacau

SEQ ID NO: 2891951 - RNA, 17 nt, Human
ugccauauucuguuggc

SEQ ID NO: 2891952 - RNA, 16 nt, Human
ugccauauucuguugg

SEQ ID NO: 2891953 - RNA, 22 nt, Human
ugccacuuuacccaccuagaac

SEQ ID NO: 2891954 - RNA, 21 nt, Human
ugccacuuuacccaccuagaa

SEQ ID NO: 2891955 - RNA, 17 nt, Human
ugccauagucacauggc

SEQ ID NO: 2891956 - RNA, 19 nt, Human
ugccagucccccugcccca

SEQ ID NO: 2891957 - RNA, 20 nt, Human
ugccacuucacuccagccug

SEQ ID NO: 2891958 - RNA, 20 nt, Human
ugccacuuuacccaccuaga

SEQ ID NO: 2891959 - RNA, 17 nt, Human
ugccagucccccugccc

SEQ ID NO: 2891960 - RNA, 15 nt, Human
ugccaauauguauug

SEQ ID NO: 2891961 - RNA, 14 nt, Human
ugccacacucucca

SEQ ID NO: 2891962 - RNA, 14 nt, Human
ugccacacccuccc

SEQ ID NO: 2891963 - RNA, 22 nt, Human
ugccacacccucccccgccacu

SEQ ID NO: 2891964 - RNA, 13 nt, Human
ugccacacccucc

SEQ ID NO: 2891965 - RNA, 18 nt, Human
ugccaauauuaaaucugc

SEQ ID NO: 2891966 - RNA, 16 nt, Human
ugccaauauguauugu

SEQ ID NO: 2891967 - RNA, 19 nt, Human
ugccaauauguauuguaaa

SEQ ID NO: 2891968 - RNA, 13 nt, Human
ugcauuuccugac

SEQ ID NO: 2891969 - RNA, 21 nt, Human
ugcauugaacacaaacuguaa

SEQ ID NO: 2891970 - RNA, 19 nt, Human
ugcauugaacacaaacugu

SEQ ID NO: 2891971 - RNA, 14 nt, Human
ugcauuuccugaca

SEQ ID NO: 2891972 - RNA, 18 nt, Human
ugcauuucugaauagaaa

SEQ ID NO: 2891973 - RNA, 19 nt, Human
ugcauuucugaauagaaau

SEQ ID NO: 2891974 - RNA, 20 nt, Human
ugcauucuugguuggcuggc

SEQ ID NO: 2891975 - RNA, 18 nt, Human
ugcauugaacacaaacug

SEQ ID NO: 2891976 - RNA, 17 nt, Human
ugcauugaacacaaacu

SEQ ID NO: 2891977 - RNA, 15 nt, Human
ugcauugaacacaaa

SEQ ID NO: 2891978 - RNA, 14 nt, Human
ugcauugaacacaa

SEQ ID NO: 2891979 - RNA, 13 nt, Human
ugcauugaacaca

SEQ ID NO: 2891980 - RNA, 22 nt, Human
agcgcccaguuggguggaugcc

SEQ ID NO: 2891981 - RNA, 14 nt, Human
agcgcccaguuggg

SEQ ID NO: 2891982 - RNA, 18 nt, Human
agcgccagccugucccau

SEQ ID NO: 2891983 - RNA, 20 nt, Human
agcgcccacuagacccacug

SEQ ID NO: 2891984 - RNA, 22 nt, Human
agcgccaguguaaucccccagg

SEQ ID NO: 2891985 - RNA, 21 nt, Human
agccugcguugguccagagcg

SEQ ID NO: 2891986 - RNA, 15 nt, Human
agccugccuggagcg

SEQ ID NO: 2891987 - RNA, 14 nt, Human
agccugccuggagc

SEQ ID NO: 2891988 - RNA, 13 nt, Human
agccugccuggag

SEQ ID NO: 2891989 - RNA, 21 nt, Human
agccugcaucccaggaugcug

SEQ ID NO: 2891990 - RNA, 22 nt, Human
agcgcgccacucgcuuccccca

SEQ ID NO: 2891991 - RNA, 20 nt, Human
agcgcgccacucgcuucccc

SEQ ID NO: 2891992 - RNA, 19 nt, Human
agcgcgccacucgcuuccc

SEQ ID NO: 2891993 - RNA, 12 nt, Human
agcgcgccacuc

SEQ ID NO: 2891994 - RNA, 15 nt, Human
agcgcguugccuguc

SEQ ID NO: 2891995 - RNA, 17 nt, Human
agcgcuaucuucacaua

SEQ ID NO: 2891996 - RNA, 18 nt, Human
agcgcuaucuucacauag

SEQ ID NO: 2891997 - RNA, 22 nt, Human
agcgcucagaacaguaucuuug

SEQ ID NO: 2891998 - RNA, 17 nt, Human
agcggagucuguccugu

SEQ ID NO: 2891999 - RNA, 18 nt, Human
agcggaugauucuucaag

SEQ ID NO: 2892000 - RNA, 12 nt, Human
agcgcucugccu

SEQ ID NO: 2892001 - RNA, 15 nt, Human
agcggcgaccgcccu

SEQ ID NO: 2892002 - RNA, 18 nt, Human
agcggcgaccgcccuccg

SEQ ID NO: 2892003 - RNA, 17 nt, Human
agcggcccuaagggagu

SEQ ID NO: 2892004 - RNA, 16 nt, Human
ugcccuagaugagccc

SEQ ID NO: 2892005 - RNA, 17 nt, Human
ugcccucauggccccuc

SEQ ID NO: 2892006 - RNA, 19 nt, Human
ugcccucauggccccucug

SEQ ID NO: 2892007 - RNA, 23 nt, Human
ugcccucauggccccucugaccu

SEQ ID NO: 2892008 - RNA, 18 nt, Human
ugcccucauuacugggcc

SEQ ID NO: 2892009 - RNA, 19 nt, Human
ugcccucauuacugggccu

SEQ ID NO: 2892010 - RNA, 23 nt, Human
ugcccucauuacugggccuuagu

SEQ ID NO: 2892011 - RNA, 22 nt, Human
ugcccccugguggacaguccug

SEQ ID NO: 2892012 - RNA, 14 nt, Human
ugccccgucucugu

SEQ ID NO: 2892013 - RNA, 17 nt, Human
ugccccgucucuguucc

SEQ ID NO: 2892014 - RNA, 18 nt, Human
ugccccgucccccucugg

SEQ ID NO: 2892015 - RNA, 16 nt, Human
ugccccgucccccucu

SEQ ID NO: 2892016 - RNA, 21 nt, Human
ugcccccugguggacaguccu

SEQ ID NO: 2892017 - RNA, 13 nt, Human
ugcccccuggugg

SEQ ID NO: 2892018 - RNA, 12 nt, Human
ugcccccuggug

SEQ ID NO: 2892019 - RNA, 16 nt, Human
ugcccccugcuggcuc

SEQ ID NO: 2892020 - RNA, 22 nt, Human
ugcccccugcuggcucuucugc

SEQ ID NO: 2892021 - RNA, 13 nt, Human
ugcccccugcugg

SEQ ID NO: 2892022 - RNA, 14 nt, Human
ugcccccugcuggc

SEQ ID NO: 2892023 - RNA, 14 nt, Human
ugccccccagccuc

SEQ ID NO: 2892024 - RNA, 15 nt, Human
ugccccccagccucu

SEQ ID NO: 2892025 - RNA, 19 nt, Human
ugccccccagccucuggca

SEQ ID NO: 2892026 - RNA, 20 nt, Human
ugccccccagccucuggcau

SEQ ID NO: 2892027 - RNA, 12 nt, Human
ugccccccagcc

SEQ ID NO: 2892028 - RNA, 11 nt, Human
ugcccaggccc

SEQ ID NO: 2892029 - RNA, 20 nt, Human
ugcccaggcaggucuugaac

SEQ ID NO: 2892030 - RNA, 17 nt, Human
ugcccaggcaggucuug

SEQ ID NO: 2892031 - RNA, 16 nt, Human
ugcccaggcaggucuu

SEQ ID NO: 2892032 - RNA, 15 nt, Human
ugcccaggcaggucu

SEQ ID NO: 2892033 - RNA, 14 nt, Human
ugcccacaggauca

SEQ ID NO: 2892034 - RNA, 14 nt, Human
ugcccaagggaaag

SEQ ID NO: 2892035 - RNA, 15 nt, Human
ugcccaauuggagga

SEQ ID NO: 2892036 - RNA, 21 nt, Human
ugcccaaugagacucuagggu

SEQ ID NO: 2892037 - RNA, 20 nt, Human
ugcccaaugagacucuaggg

SEQ ID NO: 2892038 - RNA, 22 nt, Human
ugcccaggccccugccacccug

SEQ ID NO: 2892039 - RNA, 20 nt, Human
ugcccaggccccugccaccc

SEQ ID NO: 2892040 - RNA, 12 nt, Human
ugcccaggcccc

SEQ ID NO: 2892041 - RNA, 16 nt, Human
ugcccaauuggaggaa

SEQ ID NO: 2892042 - RNA, 21 nt, Human
ugcccaauuggaggaaagcaa

SEQ ID NO: 2892043 - RNA, 14 nt, Human
ugcccccagcccaa

SEQ ID NO: 2892044 - RNA, 17 nt, Human
ugcccccagcccaaagg

SEQ ID NO: 2892045 - RNA, 15 nt, Human
ugcccaggcccagac

SEQ ID NO: 2892046 - RNA, 17 nt, Human
ugcccaggccugccugu

SEQ ID NO: 2892047 - RNA, 14 nt, Human
ugcccaggcccaga

SEQ ID NO: 2892048 - RNA, 15 nt, Human
ugcccaggccggcca

SEQ ID NO: 2892049 - RNA, 20 nt, Human
ugcccaggccggccagccuc

SEQ ID NO: 2892050 - RNA, 21 nt, Human
ugcccaggccggccagccuca

SEQ ID NO: 2892051 - RNA, 22 nt, Human
ugcccaggccggccagccucac

SEQ ID NO: 2892052 - RNA, 15 nt, Human
ugcccaggccugccu

SEQ ID NO: 2892053 - RNA, 19 nt, Human
ugccauguuggccaggcug

SEQ ID NO: 2892054 - RNA, 18 nt, Human
ugccauguuggccaggcu

SEQ ID NO: 2892055 - RNA, 17 nt, Human
ugccauguuggccaggc

SEQ ID NO: 2892056 - RNA, 20 nt, Human
ugccauguuggccaggcugg

SEQ ID NO: 2892057 - RNA, 21 nt, Human
ugccauguuggccaggcuggu

SEQ ID NO: 2892058 - RNA, 16 nt, Human
ugccauuaucccugaa

SEQ ID NO: 2892059 - RNA, 16 nt, Human
ugccauucauagagag

SEQ ID NO: 2892060 - RNA, 18 nt, Human
ugccauucauagagagcc

SEQ ID NO: 2892061 - RNA, 14 nt, Human
ugcccaagcccagg

SEQ ID NO: 2892062 - RNA, 18 nt, Human
ugcccaagcccaggccac

SEQ ID NO: 2892063 - RNA, 21 nt, Human
ugcccaagcccaggccacccu

SEQ ID NO: 2892064 - RNA, 22 nt, Human
ugcccaacuacuaucucagaga

SEQ ID NO: 2892065 - RNA, 18 nt, Human
ugcccaacuguguagcau

SEQ ID NO: 2892066 - RNA, 23 nt, Human
ugcccaaccugcucuccucuugc

SEQ ID NO: 2892067 - RNA, 24 nt, Human
ugcccaaccugcucuccucuugcc

SEQ ID NO: 2892068 - RNA, 15 nt, Human
ugccauugcacucca

SEQ ID NO: 2892069 - RNA, 23 nt, Human
ugccauuaucccugaaucccccu

SEQ ID NO: 2892070 - RNA, 18 nt, Human
ugccauuauuuucuguca

SEQ ID NO: 2892071 - RNA, 19 nt, Human
ugccauuauuuucugucag

SEQ ID NO: 2892072 - RNA, 20 nt, Human
ugccauuauuuucugucaga

SEQ ID NO: 2892073 - RNA, 21 nt, Human
ugccauuauuuucugucagau

SEQ ID NO: 2892074 - RNA, 18 nt, Human
ugcccaaccugcucuccu

SEQ ID NO: 2892075 - RNA, 22 nt, Human
ugcccaaccugcucuccucuug

SEQ ID NO: 2892076 - RNA, 14 nt, Human
agcuauuccuuucc

SEQ ID NO: 2892077 - RNA, 16 nt, Human
agcuauuccuuucccu

SEQ ID NO: 2892078 - RNA, 18 nt, Human
agcuauuccuuucccuuc

SEQ ID NO: 2892079 - RNA, 19 nt, Human
agcuauuccuuucccuucc

SEQ ID NO: 2892080 - RNA, 20 nt, Human
agcuauuccuuucccuuccu

SEQ ID NO: 2892081 - RNA, 21 nt, Human
agcuauuccuuucccuuccuc

SEQ ID NO: 2892082 - RNA, 22 nt, Human
agcuauuccuuucccuuccucu

SEQ ID NO: 2892083 - RNA, 17 nt, Human
agcuaugggagccccag

SEQ ID NO: 2892084 - RNA, 23 nt, Human
agcuaugcugguaggcuccugcc

SEQ ID NO: 2892085 - RNA, 19 nt, Human
agcuaugggagccccaggg

SEQ ID NO: 2892086 - RNA, 18 nt, Human
agcuaugggagccccagg

SEQ ID NO: 2892087 - RNA, 22 nt, Human
agcuaugggagccccagggucu

SEQ ID NO: 2892088 - RNA, 13 nt, Human
agcuaugaagaaa

SEQ ID NO: 2892089 - RNA, 17 nt, Human
agcuauaccugugccuc

SEQ ID NO: 2892090 - RNA, 12 nt, Human
agcuaguuuucu

SEQ ID NO: 2892091 - RNA, 16 nt, Human
agcuauaccugugccu

SEQ ID NO: 2892092 - RNA, 15 nt, Human
agcuauaccugugcc

SEQ ID NO: 2892093 - RNA, 21 nt, Human
agcuacuuccuccuccccacu

SEQ ID NO: 2892094 - RNA, 23 nt, Human
agcuacugugugugugaaugaac

SEQ ID NO: 2892095 - RNA, 15 nt, Human
agcuacuuaagagaa

SEQ ID NO: 2892096 - RNA, 17 nt, Human
agcuacuuaagagaaau

SEQ ID NO: 2892097 - RNA, 18 nt, Human
agcuacuuaagagaaaug

SEQ ID NO: 2892098 - RNA, 19 nt, Human
agcuacuuaagagaaaugg

SEQ ID NO: 2892099 - RNA, 21 nt, Human
agcuacuuaagagaaauggca

SEQ ID NO: 2892100 - RNA, 15 nt, Human
agcuacuuccuccuc

SEQ ID NO: 2892101 - RNA, 16 nt, Human
agcuacuuccuccucc

SEQ ID NO: 2892102 - RNA, 22 nt, Human
agcuacucgggaggcugaggca

SEQ ID NO: 2892103 - RNA, 23 nt, Human
agcuacucgggaggcugaggcac

SEQ ID NO: 2892104 - RNA, 21 nt, Human
agcuacucagaagccugaggc

SEQ ID NO: 2892105 - RNA, 20 nt, Human
agcuacugugugugugaaug

SEQ ID NO: 2892106 - RNA, 19 nt, Human
agcuacugugugugugaau

SEQ ID NO: 2892107 - RNA, 15 nt, Human
agcuacugugugugu

SEQ ID NO: 2892108 - RNA, 19 nt, Human
agcuacugcggaaaaggaa

SEQ ID NO: 2892109 - RNA, 18 nt, Human
agcuacugcggaaaagga

SEQ ID NO: 2892110 - RNA, 16 nt, Human
agcuacugauuuuugu

SEQ ID NO: 2892111 - RNA, 18 nt, Human
agcccuuaucugugcuca

SEQ ID NO: 2892112 - RNA, 13 nt, Human
agcccuugaggga

SEQ ID NO: 2892113 - RNA, 20 nt, Human
agcccuugagggagaacuua

SEQ ID NO: 2892114 - RNA, 19 nt, Human
agccguuuguuccccaaga

SEQ ID NO: 2892115 - RNA, 23 nt, Human
agccguuuguuccccaagacauu

SEQ ID NO: 2892116 - RNA, 22 nt, Human
agccuaaaugccuuagaaaugu

SEQ ID NO: 2892117 - RNA, 15 nt, Human
agccuaauacaacau

SEQ ID NO: 2892118 - RNA, 23 nt, Human
agccuaggaccacucagccccua

SEQ ID NO: 2892119 - RNA, 17 nt, Human
agccuaggugacagagu

SEQ ID NO: 2892120 - RNA, 15 nt, Human
agccuaggugacaga

SEQ ID NO: 2892121 - RNA, 15 nt, Human
agccuaguggcuugu

SEQ ID NO: 2892122 - RNA, 18 nt, Human
agccuaguggcuuguccu

SEQ ID NO: 2892123 - RNA, 19 nt, Human
agccuaguggcuuguccuc

SEQ ID NO: 2892124 - RNA, 19 nt, Human
agccuaguuuuuaauagcu

SEQ ID NO: 2892125 - RNA, 15 nt, Human
agccucaaccuccug

SEQ ID NO: 2892126 - RNA, 19 nt, Human
agccuauggcagaaaaaau

SEQ ID NO: 2892127 - RNA, 16 nt, Human
agccuauggcagaaaa

SEQ ID NO: 2892128 - RNA, 13 nt, Human
agccuauguugug

SEQ ID NO: 2892129 - RNA, 16 nt, Human
agccuauguugugguc

SEQ ID NO: 2892130 - RNA, 13 nt, Human
agccuauuccuga

SEQ ID NO: 2892131 - RNA, 15 nt, Human
agccuauuuaccugc

SEQ ID NO: 2892132 - RNA, 16 nt, Human
agccuauuuaccugca

SEQ ID NO: 2892133 - RNA, 20 nt, Human
agccuauuuaccugcaggcu

SEQ ID NO: 2892134 - RNA, 21 nt, Human
agccuauuuaccugcaggcug

SEQ ID NO: 2892135 - RNA, 14 nt, Human
agccuauggcagaa

SEQ ID NO: 2892136 - RNA, 16 nt, Human
agccuaugagcauccu

SEQ ID NO: 2892137 - RNA, 17 nt, Human
agccuaugagcauccug

SEQ ID NO: 2892138 - RNA, 18 nt, Human
agccuaugagcauccuga

SEQ ID NO: 2892139 - RNA, 19 nt, Human
agccuaugagcauccugag

SEQ ID NO: 2892140 - RNA, 21 nt, Human
agccuaugagcauccugagcc

SEQ ID NO: 2892141 - RNA, 23 nt, Human
agccuaugagcauccugagcccc

SEQ ID NO: 2892142 - RNA, 23 nt, Human
agcccuuccaugucgccucugca

SEQ ID NO: 2892143 - RNA, 19 nt, Human
agcccuuccaugucgccuc

SEQ ID NO: 2892144 - RNA, 22 nt, Human
agcccuuccaugucgccucugc

SEQ ID NO: 2892145 - RNA, 23 nt, Human
ugcagagagccauuuugugaaug

SEQ ID NO: 2892146 - RNA, 21 nt, Human
ugcagagagccauuuugugaa

SEQ ID NO: 2892147 - RNA, 22 nt, Human
ugcagagagccauuuugugaau

SEQ ID NO: 2892148 - RNA, 13 nt, Human
agcccuucauuug

SEQ ID NO: 2892149 - RNA, 14 nt, Human
agcccuucauuugg

SEQ ID NO: 2892150 - RNA, 15 nt, Human
ugcagagagccauuu

SEQ ID NO: 2892151 - RNA, 16 nt, Human
ugcagagagccauuuu

SEQ ID NO: 2892152 - RNA, 17 nt, Human
ugcagagagccauuuug

SEQ ID NO: 2892153 - RNA, 18 nt, Human
ugcagagagccauuuugu

SEQ ID NO: 2892154 - RNA, 22 nt, Human
ugcagacucuacagaggccaug

SEQ ID NO: 2892155 - RNA, 12 nt, Human
ugcagacugcua

SEQ ID NO: 2892156 - RNA, 22 nt, Human
ugcagacugcuaguguucuguc

SEQ ID NO: 2892157 - RNA, 18 nt, Human
ugcagacucuacagaggc

SEQ ID NO: 2892158 - RNA, 20 nt, Human
ugcagacucuacagaggcca

SEQ ID NO: 2892159 - RNA, 19 nt, Human
ugcagacucuacagaggcc

SEQ ID NO: 2892160 - RNA, 19 nt, Human
ugcacuccagccugggcga

SEQ ID NO: 2892161 - RNA, 18 nt, Human
ugcacuaaaucagagaca

SEQ ID NO: 2892162 - RNA, 21 nt, Human
ugcacguggagagcuggugcc

SEQ ID NO: 2892163 - RNA, 15 nt, Human
ugcacguugcuucag

SEQ ID NO: 2892164 - RNA, 18 nt, Human
ugcacuaaaguauguaaa

SEQ ID NO: 2892165 - RNA, 13 nt, Human
ugcacuaaauaug

SEQ ID NO: 2892166 - RNA, 17 nt, Human
ugcacuaaagccagccu

SEQ ID NO: 2892167 - RNA, 18 nt, Human
ugcacuaaagccagccug

SEQ ID NO: 2892168 - RNA, 19 nt, Human
ugcacuaaagccagccuga

SEQ ID NO: 2892169 - RNA, 20 nt, Human
ugcacuaaagccagccugac

SEQ ID NO: 2892170 - RNA, 22 nt, Human
ugcacuaaagccagccugaccu

SEQ ID NO: 2892171 - RNA, 19 nt, Human
ugcacguacacacacauac

SEQ ID NO: 2892172 - RNA, 12 nt, Human
ugcacguggaga

SEQ ID NO: 2892173 - RNA, 20 nt, Human
ugcacguggagagcuggugc

SEQ ID NO: 2892174 - RNA, 18 nt, Human
ugcacguggagagcuggu

SEQ ID NO: 2892175 - RNA, 17 nt, Human
ugcacguggagagcugg

SEQ ID NO: 2892176 - RNA, 16 nt, Human
ugcacguggagagcug

SEQ ID NO: 2892177 - RNA, 19 nt, Human
ugcacaugucuuguacaug

SEQ ID NO: 2892178 - RNA, 15 nt, Human
ugcacaugucuugua

SEQ ID NO: 2892179 - RNA, 14 nt, Human
ugcacaacauuaca

SEQ ID NO: 2892180 - RNA, 19 nt, Human
agcagaugguuuccacauu

SEQ ID NO: 2892181 - RNA, 15 nt, Human
ugcacacaccagagc

SEQ ID NO: 2892182 - RNA, 17 nt, Human
ugcacaauauugaacuu

SEQ ID NO: 2892183 - RNA, 19 nt, Human
ugcacaauauugaacuuuu

SEQ ID NO: 2892184 - RNA, 18 nt, Human
ugcacaaggauugaaaau

SEQ ID NO: 2892185 - RNA, 19 nt, Human
ugcacaaggauugaaaauu

SEQ ID NO: 2892186 - RNA, 20 nt, Human
ugcacacaagcccacagcac

SEQ ID NO: 2892187 - RNA, 18 nt, Human
ugcacacacacacacaug

SEQ ID NO: 2892188 - RNA, 21 nt, Human
ugcacacacacacacaugcac

SEQ ID NO: 2892189 - RNA, 22 nt, Human
ugcacacacacacacaugcaca

SEQ ID NO: 2892190 - RNA, 23 nt, Human
ugcacaugaaucccacccacaug

SEQ ID NO: 2892191 - RNA, 14 nt, Human
ugcacaugaagaaa

SEQ ID NO: 2892192 - RNA, 15 nt, Human
ugcacaugaagaaau

SEQ ID NO: 2892193 - RNA, 16 nt, Human
ugcacaugaagaaaua

SEQ ID NO: 2892194 - RNA, 21 nt, Human
ugcacaugaagaaauacugca

SEQ ID NO: 2892195 - RNA, 23 nt, Human
ugcacaugaagaaauacugcacu

SEQ ID NO: 2892196 - RNA, 24 nt, Human
ugcacaucuuggcuauguaauucu

SEQ ID NO: 2892197 - RNA, 14 nt, Human
ugcacaugaacugu

SEQ ID NO: 2892198 - RNA, 21 nt, Human
agccugagcaacucuugauua

SEQ ID NO: 2892199 - RNA, 16 nt, Human
agccugagcaacucuu

SEQ ID NO: 2892200 - RNA, 16 nt, Human
agccugaccuuccuuc

SEQ ID NO: 2892201 - RNA, 19 nt, Human
agccugaccuuccuuccug

SEQ ID NO: 2892202 - RNA, 21 nt, Human
agccugaccuuccuuccuguu

SEQ ID NO: 2892203 - RNA, 15 nt, Human
agccucagcauccug

SEQ ID NO: 2892204 - RNA, 14 nt, Human
agccucagcauccu

SEQ ID NO: 2892205 - RNA, 13 nt, Human
agccucagcaucc

SEQ ID NO: 2892206 - RNA, 18 nt, Human
agccucaaccuccugggc

SEQ ID NO: 2892207 - RNA, 17 nt, Human
agccucaaccuccuggg

SEQ ID NO: 2892208 - RNA, 12 nt, Human
ugcagcuggaca

SEQ ID NO: 2892209 - RNA, 13 nt, Human
ugcagcuggacag

SEQ ID NO: 2892210 - RNA, 14 nt, Human
ugcagcuggacaga

SEQ ID NO: 2892211 - RNA, 15 nt, Human
ugcagcuggacagag

SEQ ID NO: 2892212 - RNA, 16 nt, Human
ugcagcuggacagagg

SEQ ID NO: 2892213 - RNA, 18 nt, Human
ugcagcuggacagagggg

SEQ ID NO: 2892214 - RNA, 11 nt, Human
ugcagcuuccu

SEQ ID NO: 2892215 - RNA, 13 nt, Human
ugcagcuuccugu

SEQ ID NO: 2892216 - RNA, 15 nt, Human
ugcagcuuccuguca

SEQ ID NO: 2892217 - RNA, 18 nt, Human
ugcagcuuccugucaaca

SEQ ID NO: 2892218 - RNA, 16 nt, Human
ugcagcugauguugga

SEQ ID NO: 2892219 - RNA, 19 nt, Human
ugcagccucaaccuccugg

SEQ ID NO: 2892220 - RNA, 18 nt, Human
ugcagccucaaccuccug

SEQ ID NO: 2892221 - RNA, 15 nt, Human
ugcagccgccuuccu

SEQ ID NO: 2892222 - RNA, 16 nt, Human
ugcagccgccuuccuu

SEQ ID NO: 2892223 - RNA, 17 nt, Human
ugcagccgccuuccuug

SEQ ID NO: 2892224 - RNA, 19 nt, Human
ugcagugacgugcaccugu

SEQ ID NO: 2892225 - RNA, 18 nt, Human
ugcagugacgugcaccug

SEQ ID NO: 2892226 - RNA, 16 nt, Human
ugcagcuugggagagc

SEQ ID NO: 2892227 - RNA, 18 nt, Human
ugcagcuugggagagccc

SEQ ID NO: 2892228 - RNA, 22 nt, Human
ugcagcuugggagagccccugg

SEQ ID NO: 2892229 - RNA, 23 nt, Human
ugcagcuugggagagccccuggg

SEQ ID NO: 2892230 - RNA, 22 nt, Human
ugcagugacgugcaccuguacu

SEQ ID NO: 2892231 - RNA, 14 nt, Human
ugcaguuuuucagg

SEQ ID NO: 2892232 - RNA, 15 nt, Human
ugcaguuuuucagga

SEQ ID NO: 2892233 - RNA, 12 nt, Human
ugcauaaauaug

SEQ ID NO: 2892234 - RNA, 13 nt, Human
ugcauaaauaugc

SEQ ID NO: 2892235 - RNA, 11 nt, Human
ugcauaaaaug

SEQ ID NO: 2892236 - RNA, 12 nt, Human
ugcaguuuuccu

SEQ ID NO: 2892237 - RNA, 18 nt, Human
ugcaguuuugguguguaa

SEQ ID NO: 2892238 - RNA, 14 nt, Human
ugcauaaauaugca

SEQ ID NO: 2892239 - RNA, 15 nt, Human
ugcauaaauaugcag

SEQ ID NO: 2892240 - RNA, 19 nt, Human
ugcauaaauaugcagugau

SEQ ID NO: 2892241 - RNA, 18 nt, Human
ugcauaacaaauucugaa

SEQ ID NO: 2892242 - RNA, 21 nt, Human
agccugcaauuucauaugcug

SEQ ID NO: 2892243 - RNA, 19 nt, Human
agccugaucaccugcccug

SEQ ID NO: 2892244 - RNA, 19 nt, Human
agccugcaauuucauaugc

SEQ ID NO: 2892245 - RNA, 13 nt, Human
agccugaucucuu

SEQ ID NO: 2892246 - RNA, 15 nt, Human
agccugaucucuucc

SEQ ID NO: 2892247 - RNA, 16 nt, Human
agccugaucucuuccu

SEQ ID NO: 2892248 - RNA, 17 nt, Human
agccugaucucuuccug

SEQ ID NO: 2892249 - RNA, 18 nt, Human
agccugaucucuuccugu

SEQ ID NO: 2892250 - RNA, 20 nt, Human
agccugaucucuuccuguuu

SEQ ID NO: 2892251 - RNA, 18 nt, Human
agccugaucaccugcccu

SEQ ID NO: 2892252 - RNA, 12 nt, Human
agccugcccucc

SEQ ID NO: 2892253 - RNA, 21 nt, Human
agccugcccaagcccaggcca

SEQ ID NO: 2892254 - RNA, 22 nt, Human
agccugcccaagcccaggccac

SEQ ID NO: 2892255 - RNA, 23 nt, Human
agccugcaguuauuaacacuaac

SEQ ID NO: 2892256 - RNA, 14 nt, Human
agccugcacuuuga

SEQ ID NO: 2892257 - RNA, 16 nt, Human
agccugcacuuugaug

SEQ ID NO: 2892258 - RNA, 17 nt, Human
agccugcacuuugaugu

SEQ ID NO: 2892259 - RNA, 23 nt, Human
agccugcacuuugaugucaugug

SEQ ID NO: 2892260 - RNA, 15 nt, Human
ugcaugagcuuuuau

SEQ ID NO: 2892261 - RNA, 19 nt, Human
ugcaugaauaucauacaaa

SEQ ID NO: 2892262 - RNA, 15 nt, Human
ugcaugacagccucu

SEQ ID NO: 2892263 - RNA, 15 nt, Human
ugcaugacuuguagc

SEQ ID NO: 2892264 - RNA, 22 nt, Human
ugcaucugaaauaggaaacaag

SEQ ID NO: 2892265 - RNA, 15 nt, Human
ugcaucucagcccac

SEQ ID NO: 2892266 - RNA, 12 nt, Human
agcuggacagag

SEQ ID NO: 2892267 - RNA, 13 nt, Human
agcuggacagagg

SEQ ID NO: 2892268 - RNA, 17 nt, Human
agcuggacagaggggac

SEQ ID NO: 2892269 - RNA, 18 nt, Human
agcuggacagaggggacu

SEQ ID NO: 2892270 - RNA, 21 nt, Human
agcuggacagaggggacucug

SEQ ID NO: 2892271 - RNA, 22 nt, Human
agcuggacagaggggacucugg

SEQ ID NO: 2892272 - RNA, 23 nt, Human
agcuggacagaggggacucuggg

SEQ ID NO: 2892273 - RNA, 17 nt, Human
agcuggagaaauauggu

SEQ ID NO: 2892274 - RNA, 16 nt, Human
agcuggacucugcauc

SEQ ID NO: 2892275 - RNA, 19 nt, Human
agcuggacucugcauccca

SEQ ID NO: 2892276 - RNA, 15 nt, Human
agcuggaccaguggu

SEQ ID NO: 2892277 - RNA, 22 nt, Human
ugccucugacacacagcucugu

SEQ ID NO: 2892278 - RNA, 12 nt, Human
ugccucucuagg

SEQ ID NO: 2892279 - RNA, 15 nt, Human
ugccucucuaggacc

SEQ ID NO: 2892280 - RNA, 15 nt, Human
agcugggcucugcaa

SEQ ID NO: 2892281 - RNA, 16 nt, Human
agcugggcuggggagg

SEQ ID NO: 2892282 - RNA, 20 nt, Human
agcugggcuggggaggaccu

SEQ ID NO: 2892283 - RNA, 14 nt, Human
agcuggggaccugg

SEQ ID NO: 2892284 - RNA, 18 nt, Human
agcuggggaggagcuuug

SEQ ID NO: 2892285 - RNA, 23 nt, Human
agcugggauuacaggcuccugcc

SEQ ID NO: 2892286 - RNA, 22 nt, Human
agcugggauuacaggcuccugc

SEQ ID NO: 2892287 - RNA, 15 nt, Human
agcugggauuuuaaa

SEQ ID NO: 2892288 - RNA, 16 nt, Human
agcugggauuuuaaac

SEQ ID NO: 2892289 - RNA, 17 nt, Human
agcugggcaugguacca

SEQ ID NO: 2892290 - RNA, 21 nt, Human
agcugggcaugguaccagccc

SEQ ID NO: 2892291 - RNA, 22 nt, Human
agcugggcaugguaccagcccu

SEQ ID NO: 2892292 - RNA, 19 nt, Human
agcugggacuacaggugug

SEQ ID NO: 2892293 - RNA, 17 nt, Human
agcugggacuacaggug

SEQ ID NO: 2892294 - RNA, 15 nt, Human
agcuggagaagaccc

SEQ ID NO: 2892295 - RNA, 21 nt, Human
agcugggauuacaggcuccug

SEQ ID NO: 2892296 - RNA, 18 nt, Human
agcugggauuacaggcuc

SEQ ID NO: 2892297 - RNA, 21 nt, Human
agcugggaggcauggcccugg

SEQ ID NO: 2892298 - RNA, 22 nt, Human
agcugggaggcauggcccuggg

SEQ ID NO: 2892299 - RNA, 22 nt, Human
agcugggaucacauguggacuu

SEQ ID NO: 2892300 - RNA, 14 nt, Human
agcugggaggcaug

SEQ ID NO: 2892301 - RNA, 16 nt, Human
agcugggaggcauggc

SEQ ID NO: 2892302 - RNA, 19 nt, Human
agcugggaggcauggcccu

SEQ ID NO: 2892303 - RNA, 20 nt, Human
agcugggaggcauggcccug

SEQ ID NO: 2892304 - RNA, 21 nt, Human
ugccuuuuuauuuauauguac

SEQ ID NO: 2892305 - RNA, 19 nt, Human
ugccuuuuuauuuauaugu

SEQ ID NO: 2892306 - RNA, 15 nt, Human
ugccuuuuuauuuau

SEQ ID NO: 2892307 - RNA, 13 nt, Human
ugccuuuuuauuu

SEQ ID NO: 2892308 - RNA, 12 nt, Human
ugccuuucaaau

SEQ ID NO: 2892309 - RNA, 13 nt, Human
ugccuuucaaauu

SEQ ID NO: 2892310 - RNA, 17 nt, Human
ugccuuucaaauuuaga

SEQ ID NO: 2892311 - RNA, 20 nt, Human
ugccuuuagccccucccaag

SEQ ID NO: 2892312 - RNA, 21 nt, Human
ugccuuuagccccucccaagc

SEQ ID NO: 2892313 - RNA, 14 nt, Human
ugccuuguuuggau

SEQ ID NO: 2892314 - RNA, 19 nt, Human
ugccuuuuucauuuuccaa

SEQ ID NO: 2892315 - RNA, 20 nt, Human
ugccuuuuucauuuuccaau

SEQ ID NO: 2892316 - RNA, 21 nt, Human
ugccuuuuucauuuuccaaua

SEQ ID NO: 2892317 - RNA, 13 nt, Human
ugccuuuuuccua

SEQ ID NO: 2892318 - RNA, 16 nt, Human
ugcgaaggggcccugg

SEQ ID NO: 2892319 - RNA, 19 nt, Human
ugccuuuuuuguaguuuuu

SEQ ID NO: 2892320 - RNA, 19 nt, Human
ugcgaacuagagaugugca

SEQ ID NO: 2892321 - RNA, 18 nt, Human
ugcgaaggggcccugguc

SEQ ID NO: 2892322 - RNA, 21 nt, Human
ugcgaaggggcccugguccuu

SEQ ID NO: 2892323 - RNA, 12 nt, Human
ugcgaaguccua

SEQ ID NO: 2892324 - RNA, 16 nt, Human
ugcgaaguccuaugga

SEQ ID NO: 2892325 - RNA, 18 nt, Human
ugcgaaguccuauggaaa

SEQ ID NO: 2892326 - RNA, 18 nt, Human
ugcgaauccaagcucccu

SEQ ID NO: 2892327 - RNA, 22 nt, Human
ugcgaauccaagcucccugccc

SEQ ID NO: 2892328 - RNA, 21 nt, Human
ugcgaauggacuuuggaagca

SEQ ID NO: 2892329 - RNA, 22 nt, Human
ugcgaauggacuuuggaagcag

SEQ ID NO: 2892330 - RNA, 17 nt, Human
ugcggacagccacggcc

SEQ ID NO: 2892331 - RNA, 21 nt, Human
ugcgagcgcuaucuucacaua

SEQ ID NO: 2892332 - RNA, 18 nt, Human
ugcggacagccacggcca

SEQ ID NO: 2892333 - RNA, 16 nt, Human
ugccuguucagcucca

SEQ ID NO: 2892334 - RNA, 15 nt, Human
ugccuguucagcucc

SEQ ID NO: 2892335 - RNA, 14 nt, Human
ugccugugucuucu

SEQ ID NO: 2892336 - RNA, 15 nt, Human
ugccuugugcuguua

SEQ ID NO: 2892337 - RNA, 21 nt, Human
ugccuuagaaccuuucuuaca

SEQ ID NO: 2892338 - RNA, 20 nt, Human
ugccuuagaaauguaaacug

SEQ ID NO: 2892339 - RNA, 22 nt, Human
ugccuuagaaauguaaacugcc

SEQ ID NO: 2892340 - RNA, 23 nt, Human
ugccuuagaaauguaaacugcca

SEQ ID NO: 2892341 - RNA, 14 nt, Human
ugccuuagaaccuu

SEQ ID NO: 2892342 - RNA, 17 nt, Human
ugccuuagaaccuuucu

SEQ ID NO: 2892343 - RNA, 18 nt, Human
agcugugagccuuggcug

SEQ ID NO: 2892344 - RNA, 12 nt, Human
agcugugauuuu

SEQ ID NO: 2892345 - RNA, 15 nt, Human
agcugugagccuugg

SEQ ID NO: 2892346 - RNA, 16 nt, Human
agcugugagccuuggc

SEQ ID NO: 2892347 - RNA, 17 nt, Human
agcugugagccuuggcu

SEQ ID NO: 2892348 - RNA, 18 nt, Human
agcugugacuucuccagg

SEQ ID NO: 2892349 - RNA, 15 nt, Human
agcugugaacaggcu

SEQ ID NO: 2892350 - RNA, 15 nt, Human
agcucucaucugagg

SEQ ID NO: 2892351 - RNA, 23 nt, Human
agcucucaucugaggcauccagc

SEQ ID NO: 2892352 - RNA, 15 nt, Human
agcucuccccucaga

SEQ ID NO: 2892353 - RNA, 18 nt, Human
agcucuauugauacucuu

SEQ ID NO: 2892354 - RNA, 17 nt, Human
agcucuaucaccaagga

SEQ ID NO: 2892355 - RNA, 22 nt, Human
agcucuaucaccaaggagccaa

SEQ ID NO: 2892356 - RNA, 21 nt, Human
ugcccuccacagccgcagccu

SEQ ID NO: 2892357 - RNA, 18 nt, Human
ugcccuccacagccgcag

SEQ ID NO: 2892358 - RNA, 18 nt, Human
ugcccucauuuuauguca

SEQ ID NO: 2892359 - RNA, 21 nt, Human
ugcccucauggccccucugac

SEQ ID NO: 2892360 - RNA, 18 nt, Human
agcucuccggucucucuc

SEQ ID NO: 2892361 - RNA, 14 nt, Human
agcucuccugacuu

SEQ ID NO: 2892362 - RNA, 17 nt, Human
agcucuccugacuuuua

SEQ ID NO: 2892363 - RNA, 22 nt, Human
agcucugcuccucuccccagca

SEQ ID NO: 2892364 - RNA, 12 nt, Human
agcucugcuccu

SEQ ID NO: 2892365 - RNA, 20 nt, Human
agcucugccgucucuggagc

SEQ ID NO: 2892366 - RNA, 19 nt, Human
agcucugccgucucuggag

SEQ ID NO: 2892367 - RNA, 18 nt, Human
agcucugccgucucugga

SEQ ID NO: 2892368 - RNA, 17 nt, Human
agcucugccgucucugg

SEQ ID NO: 2892369 - RNA, 14 nt, Human
agcucugccgucuc

SEQ ID NO: 2892370 - RNA, 12 nt, Human
agcucuguccug

SEQ ID NO: 2892371 - RNA, 17 nt, Human
agcucuucuccaggcug

SEQ ID NO: 2892372 - RNA, 18 nt, Human
agcucuucuccaggcugu

SEQ ID NO: 2892373 - RNA, 22 nt, Human
agcugaucugcggaucucagcu

SEQ ID NO: 2892374 - RNA, 11 nt, Human
agcugaugaaa

SEQ ID NO: 2892375 - RNA, 12 nt, Human
agcugaugaaac

SEQ ID NO: 2892376 - RNA, 13 nt, Human
agcugaugaaacu

SEQ ID NO: 2892377 - RNA, 22 nt, Human
agcugaugaaacucacaaauga

SEQ ID NO: 2892378 - RNA, 23 nt, Human
agcugaugaaacucacaaaugau

SEQ ID NO: 2892379 - RNA, 20 nt, Human
agcugaugaacuuauucugu

SEQ ID NO: 2892380 - RNA, 22 nt, Human
agcugaugaacuuauucuguag

SEQ ID NO: 2892381 - RNA, 17 nt, Human
agcugauguuggaagag

SEQ ID NO: 2892382 - RNA, 23 nt, Human
agcugccaccucuccauccugcu

SEQ ID NO: 2892383 - RNA, 13 nt, Human
ugcccuugggcca

SEQ ID NO: 2892384 - RNA, 20 nt, Human
agcugauguuggaagagaaa

SEQ ID NO: 2892385 - RNA, 21 nt, Human
agcugauguuggaagagaaag

SEQ ID NO: 2892386 - RNA, 16 nt, Human
agcugcaccugccagc

SEQ ID NO: 2892387 - RNA, 23 nt, Human
agcugcauguggcuuuuuuaaaa

SEQ ID NO: 2892388 - RNA, 21 nt, Human
agcugcaccugccagccuggc

SEQ ID NO: 2892389 - RNA, 18 nt, Human
agcugcaccugccagccu

SEQ ID NO: 2892390 - RNA, 22 nt, Human
agcugcaccugccagccuggcu

SEQ ID NO: 2892391 - RNA, 14 nt, Human
ugccggagaggaag

SEQ ID NO: 2892392 - RNA, 15 nt, Human
ugccggagaggaaga

SEQ ID NO: 2892393 - RNA, 21 nt, Human
ugccggagaggaagagacacu

SEQ ID NO: 2892394 - RNA, 20 nt, Human
ugccgcgucgcccucccagg

SEQ ID NO: 2892395 - RNA, 14 nt, Human
ugccgggccugauu

SEQ ID NO: 2892396 - RNA, 21 nt, Human
ugccucauuuuagaaccacca

SEQ ID NO: 2892397 - RNA, 21 nt, Human
ugccucaguauauuuaaacuc

SEQ ID NO: 2892398 - RNA, 16 nt, Human
ugccgccugcacuccu

SEQ ID NO: 2892399 - RNA, 18 nt, Human
ugccgccucccagccugg

SEQ ID NO: 2892400 - RNA, 17 nt, Human
ugccgccucccagccug

SEQ ID NO: 2892401 - RNA, 16 nt, Human
ugccgccucccagccu

SEQ ID NO: 2892402 - RNA, 20 nt, Human
ugccgccugcacuccucagg

SEQ ID NO: 2892403 - RNA, 16 nt, Human
ugccgcgucgcccucc

SEQ ID NO: 2892404 - RNA, 21 nt, Human
ugccgcgucgcccucccaggc

SEQ ID NO: 2892405 - RNA, 13 nt, Human
ugccgcuaccucc

SEQ ID NO: 2892406 - RNA, 15 nt, Human
ugccgcuaccucccu

SEQ ID NO: 2892407 - RNA, 16 nt, Human
ugccgcuaccucccuc

SEQ ID NO: 2892408 - RNA, 17 nt, Human
ugccgcuaccucccucc

SEQ ID NO: 2892409 - RNA, 18 nt, Human
ugccgcuaccucccuccc

SEQ ID NO: 2892410 - RNA, 15 nt, Human
ugcccuuucugggca

SEQ ID NO: 2892411 - RNA, 21 nt, Human
ugccucugacacacagcucug

SEQ ID NO: 2892412 - RNA, 20 nt, Human
ugccucugacacacagcucu

SEQ ID NO: 2892413 - RNA, 15 nt, Human
aggaaagacaacaca

SEQ ID NO: 2892414 - RNA, 12 nt, Human
aggaaagagagc

SEQ ID NO: 2892415 - RNA, 17 nt, Human
aggaaagagucuucaac

SEQ ID NO: 2892416 - RNA, 12 nt, Human
ugcuaguauuug

SEQ ID NO: 2892417 - RNA, 13 nt, Human
ugcuaguauuuga

SEQ ID NO: 2892418 - RNA, 14 nt, Human
ugcuaguauuugaa

SEQ ID NO: 2892419 - RNA, 15 nt, Human
ugcuaguauuugaau

SEQ ID NO: 2892420 - RNA, 16 nt, Human
ugcuaguauuugaauu

SEQ ID NO: 2892421 - RNA, 17 nt, Human
ugcuaguauuugaauua

SEQ ID NO: 2892422 - RNA, 18 nt, Human
ugcuaguauuugaauuaa

SEQ ID NO: 2892423 - RNA, 20 nt, Human
ugcuaguauuugaauuaaaa

SEQ ID NO: 2892424 - RNA, 22 nt, Human
ugcuaguauuugaauuaaaacu

SEQ ID NO: 2892425 - RNA, 23 nt, Human
ugcuaguauuugaauuaaaacuu

SEQ ID NO: 2892426 - RNA, 15 nt, Human
ugcuaguguucuguc

SEQ ID NO: 2892427 - RNA, 20 nt, Human
ugcuauaaagcuagaugcuu

SEQ ID NO: 2892428 - RNA, 13 nt, Human
ugcuagugagcug

SEQ ID NO: 2892429 - RNA, 16 nt, Human
ugcuagugagcugggc

SEQ ID NO: 2892430 - RNA, 18 nt, Human
ugcuagugagcugggcau

SEQ ID NO: 2892431 - RNA, 19 nt, Human
ugcuagugagcugggcaug

SEQ ID NO: 2892432 - RNA, 16 nt, Human
ugcuaguggugggcag

SEQ ID NO: 2892433 - RNA, 21 nt, Human
ugcuauaacuauguugauaaa

SEQ ID NO: 2892434 - RNA, 12 nt, Human
aggaaagaauag

SEQ ID NO: 2892435 - RNA, 20 nt, Human
aggaaacuccugacagucuu

SEQ ID NO: 2892436 - RNA, 16 nt, Human
aggaaacgcuaccucu

SEQ ID NO: 2892437 - RNA, 18 nt, Human
aggaaacucuuaucucag

SEQ ID NO: 2892438 - RNA, 22 nt, Human
aggaaacucuuaucucagucau

SEQ ID NO: 2892439 - RNA, 17 nt, Human
aggaaagaaagaaggaa

SEQ ID NO: 2892440 - RNA, 15 nt, Human
aggaaacuuuuaacu

SEQ ID NO: 2892441 - RNA, 12 nt, Human
aggaaacucuua

SEQ ID NO: 2892442 - RNA, 13 nt, Human
aggaaacucuuau

SEQ ID NO: 2892443 - RNA, 17 nt, Human
aggaaacucuuaucuca

SEQ ID NO: 2892444 - RNA, 14 nt, Human
aggaaaauaaugua

SEQ ID NO: 2892445 - RNA, 22 nt, Human
aggaaaauaauguaauuguaau

SEQ ID NO: 2892446 - RNA, 16 nt, Human
aggaaaccgccuaguu

SEQ ID NO: 2892447 - RNA, 20 nt, Human
aggaaaccgccuaguuuacu

SEQ ID NO: 2892448 - RNA, 21 nt, Human
aggaaaccgccuaguuuacug

SEQ ID NO: 2892449 - RNA, 22 nt, Human
aggaaaccgccuaguuuacugu

SEQ ID NO: 2892450 - RNA, 18 nt, Human
agcuuauccauaaaaaaa

SEQ ID NO: 2892451 - RNA, 11 nt, Human
agcuuaucucu

SEQ ID NO: 2892452 - RNA, 13 nt, Human
agcuuaucucuuu

SEQ ID NO: 2892453 - RNA, 14 nt, Human
agcuuaucucuuuu

SEQ ID NO: 2892454 - RNA, 17 nt, Human
agcuuaucucuuuuaua

SEQ ID NO: 2892455 - RNA, 19 nt, Human
agcuuaucucuuuuauauu

SEQ ID NO: 2892456 - RNA, 22 nt, Human
agcuuaucucuuuuauauuugu

SEQ ID NO: 2892457 - RNA, 23 nt, Human
agcuuaucucuuuuauauuugua

SEQ ID NO: 2892458 - RNA, 21 nt, Human
agcuugcuugcuuucuuuuuu

SEQ ID NO: 2892459 - RNA, 23 nt, Human
agcuugcuugcuuucuuuuuuaa

SEQ ID NO: 2892460 - RNA, 12 nt, Human
agcuugcuuuga

SEQ ID NO: 2892461 - RNA, 18 nt, Human
agcuugcuuugauuuaca

SEQ ID NO: 2892462 - RNA, 22 nt, Human
agcuugcuuugauuuacagcaa

SEQ ID NO: 2892463 - RNA, 22 nt, Human
agcuuauucaucuguuuuucuu

SEQ ID NO: 2892464 - RNA, 21 nt, Human
agcuuguaaauagcucaggug

SEQ ID NO: 2892465 - RNA, 20 nt, Human
agcuuguaaauagcucaggu

SEQ ID NO: 2892466 - RNA, 19 nt, Human
agcuuguaaauagcucagg

SEQ ID NO: 2892467 - RNA, 17 nt, Human
agcuuggcccuuuccuu

SEQ ID NO: 2892468 - RNA, 14 nt, Human
agcuugggaaugga

SEQ ID NO: 2892469 - RNA, 12 nt, Human
agcuugggaaug

SEQ ID NO: 2892470 - RNA, 18 nt, Human
agcuuguaaauagcucag

SEQ ID NO: 2892471 - RNA, 15 nt, Human
agcuugggagagccc

SEQ ID NO: 2892472 - RNA, 18 nt, Human
agcuugggagagccccug

SEQ ID NO: 2892473 - RNA, 19 nt, Human
agcuugggagagccccugg

SEQ ID NO: 2892474 - RNA, 22 nt, Human
agcuuucuagaaguuucccuuc

SEQ ID NO: 2892475 - RNA, 23 nt, Human
agcuuucuagaaguuucccuucc

SEQ ID NO: 2892476 - RNA, 13 nt, Human
agcuuucuccccg

SEQ ID NO: 2892477 - RNA, 16 nt, Human
agcuuucuugcucccu

SEQ ID NO: 2892478 - RNA, 17 nt, Human
agcuuucuugcucccuu

SEQ ID NO: 2892479 - RNA, 19 nt, Human
agcuuucugaccuucagcu

SEQ ID NO: 2892480 - RNA, 20 nt, Human
agcuuucugaccuucagcuc

SEQ ID NO: 2892481 - RNA, 15 nt, Human
ugcuaccguugacuu

SEQ ID NO: 2892482 - RNA, 18 nt, Human
ugcuaccguugacuucca

SEQ ID NO: 2892483 - RNA, 21 nt, Human
ugcggacagccacggccaggc

SEQ ID NO: 2892484 - RNA, 20 nt, Human
ugcggacagccacggccagg

SEQ ID NO: 2892485 - RNA, 20 nt, Human
ugcuacgccugcauguaaac

SEQ ID NO: 2892486 - RNA, 16 nt, Human
ugcuacgccugcaugu

SEQ ID NO: 2892487 - RNA, 13 nt, Human
ugcuacgccugca

SEQ ID NO: 2892488 - RNA, 14 nt, Human
agcuguuuucuucu

SEQ ID NO: 2892489 - RNA, 20 nt, Human
agcuuaaaauaaacaguugu

SEQ ID NO: 2892490 - RNA, 23 nt, Human
agcuuaaaauaaacaguugugaa

SEQ ID NO: 2892491 - RNA, 23 nt, Human
aggaaugaaauccugcuucagug

SEQ ID NO: 2892492 - RNA, 13 nt, Human
aggaaugagaagu

SEQ ID NO: 2892493 - RNA, 14 nt, Human
aggaaugagaagua

SEQ ID NO: 2892494 - RNA, 23 nt, Human
aggaauccagacccggcugcgug

SEQ ID NO: 2892495 - RNA, 20 nt, Human
aggaauccuggcagcccaga

SEQ ID NO: 2892496 - RNA, 19 nt, Human
aggaauccuggcagcccag

SEQ ID NO: 2892497 - RNA, 18 nt, Human
aggaauccuggcagccca

SEQ ID NO: 2892498 - RNA, 16 nt, Human
aggaauccuggcagcc

SEQ ID NO: 2892499 - RNA, 15 nt, Human
aggaauccuggcagc

SEQ ID NO: 2892500 - RNA, 14 nt, Human
aggaauccuggcag

SEQ ID NO: 2892501 - RNA, 13 nt, Human
aggaauccuggca

SEQ ID NO: 2892502 - RNA, 15 nt, Human
aggaagcuccacugu

SEQ ID NO: 2892503 - RNA, 15 nt, Human
aggaauccaugaaga

SEQ ID NO: 2892504 - RNA, 13 nt, Human
aggaaucuuuaag

SEQ ID NO: 2892505 - RNA, 16 nt, Human
aggaaucuuuaagcag

SEQ ID NO: 2892506 - RNA, 14 nt, Human
aggaagagacacuc

SEQ ID NO: 2892507 - RNA, 16 nt, Human
aggaauuuucuuugug

SEQ ID NO: 2892508 - RNA, 14 nt, Human
aggaauuuucuuug

SEQ ID NO: 2892509 - RNA, 14 nt, Human
aggacaaccauucc

SEQ ID NO: 2892510 - RNA, 12 nt, Human
aggacaaaacuu

SEQ ID NO: 2892511 - RNA, 13 nt, Human
aggacaaaacuuc

SEQ ID NO: 2892512 - RNA, 14 nt, Human
aggacaaaacuucu

SEQ ID NO: 2892513 - RNA, 15 nt, Human
aggacaaaacuucuu

SEQ ID NO: 2892514 - RNA, 16 nt, Human
aggacaaaacuucuug

SEQ ID NO: 2892515 - RNA, 17 nt, Human
aggacaaaacuucuugu

SEQ ID NO: 2892516 - RNA, 20 nt, Human
aggacaaaacuucuugucag

SEQ ID NO: 2892517 - RNA, 21 nt, Human
aggacaaaacuucuugucaga

SEQ ID NO: 2892518 - RNA, 22 nt, Human
aggacaaaacuucuugucagac

SEQ ID NO: 2892519 - RNA, 23 nt, Human
aggacaaaacuucuugucagaca

SEQ ID NO: 2892520 - RNA, 15 nt, Human
ugcugccacacuuca

SEQ ID NO: 2892521 - RNA, 16 nt, Human
ugcugccacacuucag

SEQ ID NO: 2892522 - RNA, 19 nt, Human
ugcugccacacuucaggcu

SEQ ID NO: 2892523 - RNA, 11 nt, Human
ugcugccaucc

SEQ ID NO: 2892524 - RNA, 22 nt, Human
ugcugccacacuucaggcucuu

SEQ ID NO: 2892525 - RNA, 14 nt, Human
ugcugccacuuuuu

SEQ ID NO: 2892526 - RNA, 15 nt, Human
ugcugccauccaggu

SEQ ID NO: 2892527 - RNA, 14 nt, Human
ugcugccauccagg

SEQ ID NO: 2892528 - RNA, 13 nt, Human
ugcugccauccag

SEQ ID NO: 2892529 - RNA, 12 nt, Human
ugcugccaucca

SEQ ID NO: 2892530 - RNA, 22 nt, Human
ugcugccauccagguucagcuu

SEQ ID NO: 2892531 - RNA, 21 nt, Human
ugcugccauccagguucagcu

SEQ ID NO: 2892532 - RNA, 20 nt, Human
ugcugccauuugauuuuucu

SEQ ID NO: 2892533 - RNA, 21 nt, Human
ugcugccauuugauuuuucua

SEQ ID NO: 2892534 - RNA, 16 nt, Human
ugcugcccaggcccag

SEQ ID NO: 2892535 - RNA, 16 nt, Human
ugcugcccagccucca

SEQ ID NO: 2892536 - RNA, 14 nt, Human
ugcugcccagccuc

SEQ ID NO: 2892537 - RNA, 16 nt, Human
aggacaaauugagaca

SEQ ID NO: 2892538 - RNA, 18 nt, Human
aggacaaauugagacagu

SEQ ID NO: 2892539 - RNA, 23 nt, Human
aggacaaauugagacagugcaca

SEQ ID NO: 2892540 - RNA, 20 nt, Human
aggaaagccccagcacuaac

SEQ ID NO: 2892541 - RNA, 16 nt, Human
aggaaagccucacuga

SEQ ID NO: 2892542 - RNA, 20 nt, Human
aggaaagccucacugauaua

SEQ ID NO: 2892543 - RNA, 19 nt, Human
aggaaagccccagcacuaa

SEQ ID NO: 2892544 - RNA, 22 nt, Human
aggaaagcuuuggcaguguuuu

SEQ ID NO: 2892545 - RNA, 12 nt, Human
ugcucuuagcug

SEQ ID NO: 2892546 - RNA, 24 nt, Human
ugcugaguagaugcgcagccccau

SEQ ID NO: 2892547 - RNA, 12 nt, Human
ugcugagggugu

SEQ ID NO: 2892548 - RNA, 22 nt, Human
ugcugaggguguuucuuccugc

SEQ ID NO: 2892549 - RNA, 23 nt, Human
ugcugaggguguuucuuccugca

SEQ ID NO: 2892550 - RNA, 23 nt, Human
ugcuaucaugauggaauuucaua

SEQ ID NO: 2892551 - RNA, 19 nt, Human
aggaaagcaguugaaauga

SEQ ID NO: 2892552 - RNA, 22 nt, Human
ugcugagucccaggcugagccu

SEQ ID NO: 2892553 - RNA, 18 nt, Human
ugcugagucccaggcuga

SEQ ID NO: 2892554 - RNA, 15 nt, Human
ugcugagucccaggc

SEQ ID NO: 2892555 - RNA, 17 nt, Human
ugcucuggacaggcaug

SEQ ID NO: 2892556 - RNA, 15 nt, Human
ugcucuuaagccuaa

SEQ ID NO: 2892557 - RNA, 19 nt, Human
ugcucuuacuacacugagg

SEQ ID NO: 2892558 - RNA, 20 nt, Human
ugcucuuacuacacugagga

SEQ ID NO: 2892559 - RNA, 21 nt, Human
ugcucuuacuacacugaggag

SEQ ID NO: 2892560 - RNA, 20 nt, Human
ugcucuguaggagcuacccu

SEQ ID NO: 2892561 - RNA, 22 nt, Human
ugcucugaucauccacugugcc

SEQ ID NO: 2892562 - RNA, 15 nt, Human
ugcucugcaaaagga

SEQ ID NO: 2892563 - RNA, 19 nt, Human
ugcucugaugaagaggagu

SEQ ID NO: 2892564 - RNA, 18 nt, Human
ugcucugaugaagaggag

SEQ ID NO: 2892565 - RNA, 19 nt, Human
ugcucugaucauccacugu

SEQ ID NO: 2892566 - RNA, 12 nt, Human
ugcuauauauau

SEQ ID NO: 2892567 - RNA, 15 nt, Human
ugcuauauauauaaa

SEQ ID NO: 2892568 - RNA, 16 nt, Human
ugcuauauauauaaau

SEQ ID NO: 2892569 - RNA, 17 nt, Human
ugcuauauauauaaaua

SEQ ID NO: 2892570 - RNA, 16 nt, Human
ugcuauauugcccagg

SEQ ID NO: 2892571 - RNA, 17 nt, Human
ugcuauauugcccaggc

SEQ ID NO: 2892572 - RNA, 13 nt, Human
ugcuauaguauuu

SEQ ID NO: 2892573 - RNA, 14 nt, Human
ugcuauaguauuug

SEQ ID NO: 2892574 - RNA, 15 nt, Human
ugcuauaguauuuga

SEQ ID NO: 2892575 - RNA, 20 nt, Human
ugcuauaguauuugauucaa

SEQ ID NO: 2892576 - RNA, 21 nt, Human
ugcuauaguauuugauucaaa

SEQ ID NO: 2892577 - RNA, 22 nt, Human
ugcuauaguauuugauucaaaa

SEQ ID NO: 2892578 - RNA, 12 nt, Human
uggagaagagag

SEQ ID NO: 2892579 - RNA, 17 nt, Human
uggagaagacccucccc

SEQ ID NO: 2892580 - RNA, 14 nt, Human
uggagaagagagga

SEQ ID NO: 2892581 - RNA, 19 nt, Human
uggagaagagaggagagga

SEQ ID NO: 2892582 - RNA, 14 nt, Human
uggagaagcacacu

SEQ ID NO: 2892583 - RNA, 22 nt, Human
uggagaagcacacucuggucuu

SEQ ID NO: 2892584 - RNA, 16 nt, Human
uggagaagagaggaga

SEQ ID NO: 2892585 - RNA, 16 nt, Human
uggacaagagguacag

SEQ ID NO: 2892586 - RNA, 14 nt, Human
uggagccuggcaca

SEQ ID NO: 2892587 - RNA, 18 nt, Human
uggagccuggcacaggac

SEQ ID NO: 2892588 - RNA, 19 nt, Human
uggagccuggcacaggacu

SEQ ID NO: 2892589 - RNA, 21 nt, Human
uggagccuggcacaggacuga

SEQ ID NO: 2892590 - RNA, 13 nt, Human
uggagccuggugc

SEQ ID NO: 2892591 - RNA, 21 nt, Human
uggagccugagucagggccca

SEQ ID NO: 2892592 - RNA, 22 nt, Human
uggagccugagucagggcccag

SEQ ID NO: 2892593 - RNA, 13 nt, Human
uggagcugccuga

SEQ ID NO: 2892594 - RNA, 15 nt, Human
uggagcugccugaua

SEQ ID NO: 2892595 - RNA, 14 nt, Human
uggagccuggugcc

SEQ ID NO: 2892596 - RNA, 15 nt, Human
uggagcccuuggguu

SEQ ID NO: 2892597 - RNA, 13 nt, Human
uggagcccaggcg

SEQ ID NO: 2892598 - RNA, 23 nt, Human
aggcaaugucaggaacagaagga

SEQ ID NO: 2892599 - RNA, 22 nt, Human
aggcaaugucaggaacagaagg

SEQ ID NO: 2892600 - RNA, 14 nt, Human
aggcaauucuccug

SEQ ID NO: 2892601 - RNA, 19 nt, Human
aggcaauucuccugccuuu

SEQ ID NO: 2892602 - RNA, 13 nt, Human
aggcaccagaaga

SEQ ID NO: 2892603 - RNA, 14 nt, Human
aggcaccagaagaa

SEQ ID NO: 2892604 - RNA, 19 nt, Human
aggcaccagaagaacagua

SEQ ID NO: 2892605 - RNA, 15 nt, Human
aggcacagggagaag

SEQ ID NO: 2892606 - RNA, 22 nt, Human
aggcacaggucaggggugacac

SEQ ID NO: 2892607 - RNA, 16 nt, Human
aggcaaugcuggcugu

SEQ ID NO: 2892608 - RNA, 19 nt, Human
aggcaaugucaggaacaga

SEQ ID NO: 2892609 - RNA, 17 nt, Human
aggcaaugucaggaaca

SEQ ID NO: 2892610 - RNA, 13 nt, Human
uggaggaaagcaa

SEQ ID NO: 2892611 - RNA, 15 nt, Human
aggcaaugcuggcug

SEQ ID NO: 2892612 - RNA, 21 nt, Human
uggaggaaaaccaagccgugg

SEQ ID NO: 2892613 - RNA, 23 nt, Human
uggaggaaaaccaagccguggcu

SEQ ID NO: 2892614 - RNA, 21 nt, Human
aggcagggucucacucugucg

SEQ ID NO: 2892615 - RNA, 20 nt, Human
aggcagggucucacucuguc

SEQ ID NO: 2892616 - RNA, 18 nt, Human
aggcagggucucacucug

SEQ ID NO: 2892617 - RNA, 19 nt, Human
aggcagggucucacucugu

SEQ ID NO: 2892618 - RNA, 14 nt, Human
aggcagguccaggg

SEQ ID NO: 2892619 - RNA, 14 nt, Human
aggcagguagccag

SEQ ID NO: 2892620 - RNA, 15 nt, Human
aggcagguagccagg

SEQ ID NO: 2892621 - RNA, 22 nt, Human
aggcagggucucacucugucgc

SEQ ID NO: 2892622 - RNA, 21 nt, Human
aggcaggucuugaacuccugg

SEQ ID NO: 2892623 - RNA, 16 nt, Human
aggcagguagccaggg

SEQ ID NO: 2892624 - RNA, 16 nt, Human
aggcaguuuagugcau

SEQ ID NO: 2892625 - RNA, 19 nt, Human
aggcaguuuagugcaucuu

SEQ ID NO: 2892626 - RNA, 13 nt, Human
aggcagugucauu

SEQ ID NO: 2892627 - RNA, 14 nt, Human
aggcagugucauuu

SEQ ID NO: 2892628 - RNA, 15 nt, Human
aggcagugucauuug

SEQ ID NO: 2892629 - RNA, 19 nt, Human
aggcagugucauuugcucu

SEQ ID NO: 2892630 - RNA, 21 nt, Human
aggcagugucauuugcucugc

SEQ ID NO: 2892631 - RNA, 11 nt, Human
aggcagucucu

SEQ ID NO: 2892632 - RNA, 16 nt, Human
aggcagucucucucuu

SEQ ID NO: 2892633 - RNA, 15 nt, Human
aggcaguaggccggu

SEQ ID NO: 2892634 - RNA, 22 nt, Human
aggcaguaggccggugugccug

SEQ ID NO: 2892635 - RNA, 19 nt, Human
aggcagcgccaagugcgug

SEQ ID NO: 2892636 - RNA, 21 nt, Human
aggcagcgccaagugcgugcc

SEQ ID NO: 2892637 - RNA, 21 nt, Human
aggcaggacaugcugaagcca

SEQ ID NO: 2892638 - RNA, 23 nt, Human
aggcaggacaugcugaagccaaa

SEQ ID NO: 2892639 - RNA, 15 nt, Human
aggcagcccugccau

SEQ ID NO: 2892640 - RNA, 16 nt, Human
aggcagggagggccug

SEQ ID NO: 2892641 - RNA, 16 nt, Human
aggcagggcaaaugac

SEQ ID NO: 2892642 - RNA, 18 nt, Human
aggcagggcaaaugacau

SEQ ID NO: 2892643 - RNA, 24 nt, Human
aggcagggcaaaugacaugcacug

SEQ ID NO: 2892644 - RNA, 21 nt, Human
aggcagccccauucugccugc

SEQ ID NO: 2892645 - RNA, 20 nt, Human
aggcagccccauucugccug

SEQ ID NO: 2892646 - RNA, 19 nt, Human
aggcagccccauucugccu

SEQ ID NO: 2892647 - RNA, 15 nt, Human
aggcaccagucccug

SEQ ID NO: 2892648 - RNA, 22 nt, Human
aggcagccccauucugccugcc

SEQ ID NO: 2892649 - RNA, 13 nt, Human
aggcagccgcccu

SEQ ID NO: 2892650 - RNA, 14 nt, Human
aggcaccaucuccc

SEQ ID NO: 2892651 - RNA, 16 nt, Human
aggcaccagucccugu

SEQ ID NO: 2892652 - RNA, 13 nt, Human
aggcagccuccag

SEQ ID NO: 2892653 - RNA, 16 nt, Human
aggcagccuccagccu

SEQ ID NO: 2892654 - RNA, 21 nt, Human
aggcagccuccagccugccca

SEQ ID NO: 2892655 - RNA, 13 nt, Human
uggaauuuguuca

SEQ ID NO: 2892656 - RNA, 15 nt, Human
uggaauuuguucaag

SEQ ID NO: 2892657 - RNA, 13 nt, Human
uggaauuucuugu

SEQ ID NO: 2892658 - RNA, 14 nt, Human
uggaauuucuuguu

SEQ ID NO: 2892659 - RNA, 15 nt, Human
uggaauuucuuguuu

SEQ ID NO: 2892660 - RNA, 17 nt, Human
uggaauuucuuguuucu

SEQ ID NO: 2892661 - RNA, 22 nt, Human
uggaauuucuuguuucuccaga

SEQ ID NO: 2892662 - RNA, 16 nt, Human
aggcaacuugggaacu

SEQ ID NO: 2892663 - RNA, 14 nt, Human
aggcaagcaccucc

SEQ ID NO: 2892664 - RNA, 17 nt, Human
aggcaacuucaguccug

SEQ ID NO: 2892665 - RNA, 19 nt, Human
aggcaacuucaguccuggg

SEQ ID NO: 2892666 - RNA, 22 nt, Human
aggcaacuucaguccugggaga

SEQ ID NO: 2892667 - RNA, 14 nt, Human
aggauugcuaucug

SEQ ID NO: 2892668 - RNA, 18 nt, Human
aggcaagcaagcucucuu

SEQ ID NO: 2892669 - RNA, 16 nt, Human
uggacaaacuggaguc

SEQ ID NO: 2892670 - RNA, 18 nt, Human
uggacaaacuggagucug

SEQ ID NO: 2892671 - RNA, 20 nt, Human
uggacaaacuggagucugga

SEQ ID NO: 2892672 - RNA, 22 nt, Human
uggacaaacuggagucuggagu

SEQ ID NO: 2892673 - RNA, 13 nt, Human
uggacaaauguga

SEQ ID NO: 2892674 - RNA, 15 nt, Human
uggacaaaugugaag

SEQ ID NO: 2892675 - RNA, 18 nt, Human
uggacaaaugugaagaug

SEQ ID NO: 2892676 - RNA, 19 nt, Human
uggacaaaugugaagaugc

SEQ ID NO: 2892677 - RNA, 20 nt, Human
uggacaaaugugaagaugca

SEQ ID NO: 2892678 - RNA, 21 nt, Human
uggacaaaugugaagaugcau

SEQ ID NO: 2892679 - RNA, 19 nt, Human
uggaauuuuugcuugacuu

SEQ ID NO: 2892680 - RNA, 21 nt, Human
uggaauuuuugcuugacuuca

SEQ ID NO: 2892681 - RNA, 14 nt, Human
aggaugcucaguug

SEQ ID NO: 2892682 - RNA, 21 nt, Human
aggaugcucaguugcuaaaca

SEQ ID NO: 2892683 - RNA, 12 nt, Human
aggaugcuggcc

SEQ ID NO: 2892684 - RNA, 13 nt, Human
aggaugcugggug

SEQ ID NO: 2892685 - RNA, 14 nt, Human
aggaugcugggugg

SEQ ID NO: 2892686 - RNA, 15 nt, Human
aggaugcuggguggc

SEQ ID NO: 2892687 - RNA, 18 nt, Human
aggaugcuguguugucaa

SEQ ID NO: 2892688 - RNA, 21 nt, Human
aggaugcuugauuccaguggu

SEQ ID NO: 2892689 - RNA, 12 nt, Human
aggaucagucug

SEQ ID NO: 2892690 - RNA, 13 nt, Human
aggaucagccagg

SEQ ID NO: 2892691 - RNA, 14 nt, Human
aggaucuaaggcug

SEQ ID NO: 2892692 - RNA, 16 nt, Human
aggaucuaaggcuguu

SEQ ID NO: 2892693 - RNA, 14 nt, Human
aggaucuagagggg

SEQ ID NO: 2892694 - RNA, 22 nt, Human
aggauugcuacuguccuaccca

SEQ ID NO: 2892695 - RNA, 20 nt, Human
aggauugcuugagcccagga

SEQ ID NO: 2892696 - RNA, 19 nt, Human
aggauugcuugagcccagg

SEQ ID NO: 2892697 - RNA, 18 nt, Human
aggauugcuugagcccag

SEQ ID NO: 2892698 - RNA, 17 nt, Human
aggauugcuugagccca

SEQ ID NO: 2892699 - RNA, 22 nt, Human
aggauugcuugagcccaggagu

SEQ ID NO: 2892700 - RNA, 21 nt, Human
aggauugcuugagcccaggag

SEQ ID NO: 2892701 - RNA, 13 nt, Human
aggauuguaaaaa

SEQ ID NO: 2892702 - RNA, 22 nt, Human
aggauuuuagcuaggauuugaa

SEQ ID NO: 2892703 - RNA, 13 nt, Human
aggauuuuauacc

SEQ ID NO: 2892704 - RNA, 18 nt, Human
aggauuucuaaucaaaag

SEQ ID NO: 2892705 - RNA, 23 nt, Human
aggauuugcacagaagcacaugc

SEQ ID NO: 2892706 - RNA, 16 nt, Human
aggauuugcugggaga

SEQ ID NO: 2892707 - RNA, 20 nt, Human
aggauuguugaaucuauuuc

SEQ ID NO: 2892708 - RNA, 15 nt, Human
aggauuuaaaaacug

SEQ ID NO: 2892709 - RNA, 16 nt, Human
aggauuuaaaaacugg

SEQ ID NO: 2892710 - RNA, 18 nt, Human
aggauuuaaaaacuggaa

SEQ ID NO: 2892711 - RNA, 19 nt, Human
aggauuuaaaaacuggaac

SEQ ID NO: 2892712 - RNA, 19 nt, Human
aggauuguaaaaaaaaaug

SEQ ID NO: 2892713 - RNA, 23 nt, Human
aggauuguaaaaaaaaaugccuu

SEQ ID NO: 2892714 - RNA, 13 nt, Human
aggauuuagaagu

SEQ ID NO: 2892715 - RNA, 24 nt, Human
aggaguuugaggcugcagcgagcu

SEQ ID NO: 2892716 - RNA, 19 nt, Human
aggauauuuugucaccaga

SEQ ID NO: 2892717 - RNA, 22 nt, Human
aggaucacuggagcccaggagu

SEQ ID NO: 2892718 - RNA, 20 nt, Human
aggaucacuggagcccagga

SEQ ID NO: 2892719 - RNA, 19 nt, Human
aggaucacuggagcccagg

SEQ ID NO: 2892720 - RNA, 18 nt, Human
aggaucacuggagcccag

SEQ ID NO: 2892721 - RNA, 16 nt, Human
aggaucacuggagccc

SEQ ID NO: 2892722 - RNA, 15 nt, Human
aggaucacuggagcc

SEQ ID NO: 2892723 - RNA, 14 nt, Human
aggaucacuggagc

SEQ ID NO: 2892724 - RNA, 20 nt, Human
aggaguuugaggcugcagcg

SEQ ID NO: 2892725 - RNA, 19 nt, Human
aggaguuugaggcugcagc

SEQ ID NO: 2892726 - RNA, 19 nt, Human
aggaguuugagaccagccu

SEQ ID NO: 2892727 - RNA, 16 nt, Human
aggaguuugagaccag

SEQ ID NO: 2892728 - RNA, 15 nt, Human
aggaggccuccaucu

SEQ ID NO: 2892729 - RNA, 17 nt, Human
aggaggccuccaucuca

SEQ ID NO: 2892730 - RNA, 12 nt, Human
aggaggccucca

SEQ ID NO: 2892731 - RNA, 22 nt, Human
aggaggccaggccggcgagccc

SEQ ID NO: 2892732 - RNA, 13 nt, Human
aggaggccaggcc

SEQ ID NO: 2892733 - RNA, 14 nt, Human
aggaggccacguga

SEQ ID NO: 2892734 - RNA, 19 nt, Human
aggaggccacgugaugugg

SEQ ID NO: 2892735 - RNA, 22 nt, Human
ugcugcccugaagaauggcgcc

SEQ ID NO: 2892736 - RNA, 15 nt, Human
ugcugcccugaagaa

SEQ ID NO: 2892737 - RNA, 20 nt, Human
ugcugccacaaccagccagg

SEQ ID NO: 2892738 - RNA, 19 nt, Human
uggaacacaaacacauugu

SEQ ID NO: 2892739 - RNA, 20 nt, Human
uggaacacaaacacauuguu

SEQ ID NO: 2892740 - RNA, 17 nt, Human
uggaagcuaauuugcau

SEQ ID NO: 2892741 - RNA, 16 nt, Human
uggaagcuaauuugca

SEQ ID NO: 2892742 - RNA, 13 nt, Human
uggaagcuccgcu

SEQ ID NO: 2892743 - RNA, 18 nt, Human
uggaagcuaauuugcauu

SEQ ID NO: 2892744 - RNA, 18 nt, Human
uggaagcugcccugccca

SEQ ID NO: 2892745 - RNA, 17 nt, Human
uggaagcugcccugccc

SEQ ID NO: 2892746 - RNA, 17 nt, Human
uggaaguccaauguggc

SEQ ID NO: 2892747 - RNA, 22 nt, Human
aggcuccaccccauccaguuca

SEQ ID NO: 2892748 - RNA, 11 nt, Human
aggcucagaga

SEQ ID NO: 2892749 - RNA, 13 nt, Human
aggcucagagaug

SEQ ID NO: 2892750 - RNA, 14 nt, Human
aggcucagagaugu

SEQ ID NO: 2892751 - RNA, 15 nt, Human
aggcucaacaauaaa

SEQ ID NO: 2892752 - RNA, 17 nt, Human
aggcucaacaauaaaac

SEQ ID NO: 2892753 - RNA, 19 nt, Human
aggcucaacaauaaaacau

SEQ ID NO: 2892754 - RNA, 18 nt, Human
aggcucagcggcgaccgc

SEQ ID NO: 2892755 - RNA, 21 nt, Human
aggcucagagaugugcaccca

SEQ ID NO: 2892756 - RNA, 24 nt, Human
aggcucagagaugugcacccaugg

SEQ ID NO: 2892757 - RNA, 13 nt, Human
aggcucaggccau

SEQ ID NO: 2892758 - RNA, 23 nt, Human
aggcucagucucaggagcauggg

SEQ ID NO: 2892759 - RNA, 19 nt, Human
aggcucagucucaggagca

SEQ ID NO: 2892760 - RNA, 18 nt, Human
aggcucagucucaggagc

SEQ ID NO: 2892761 - RNA, 17 nt, Human
aggcucagucucaggag

SEQ ID NO: 2892762 - RNA, 16 nt, Human
aggcucagucucagga

SEQ ID NO: 2892763 - RNA, 18 nt, Human
aggccuucucugaaggac

SEQ ID NO: 2892764 - RNA, 17 nt, Human
aggccuucucugaagga

SEQ ID NO: 2892765 - RNA, 12 nt, Human
uggccugugugg

SEQ ID NO: 2892766 - RNA, 20 nt, Human
uggccuguguggccacuucu

SEQ ID NO: 2892767 - RNA, 22 nt, Human
uggccuguguggccacuucugu

SEQ ID NO: 2892768 - RNA, 16 nt, Human
aggccuuuuggaaugu

SEQ ID NO: 2892769 - RNA, 19 nt, Human
aggcgagagaggagccaga

SEQ ID NO: 2892770 - RNA, 23 nt, Human
aggcgagagaggagccagacaga

SEQ ID NO: 2892771 - RNA, 16 nt, Human
aggccuuuuaacauuu

SEQ ID NO: 2892772 - RNA, 17 nt, Human
aggccuuuuaacauuuu

SEQ ID NO: 2892773 - RNA, 18 nt, Human
aggccuuuuaacauuuug

SEQ ID NO: 2892774 - RNA, 14 nt, Human
aggcgccccuuccc

SEQ ID NO: 2892775 - RNA, 23 nt, Human
aggcgauccaccugucucagccu

SEQ ID NO: 2892776 - RNA, 21 nt, Human
aggcuauuguccccuaaacca

SEQ ID NO: 2892777 - RNA, 19 nt, Human
aggcuauuauuuucacugu

SEQ ID NO: 2892778 - RNA, 23 nt, Human
aggcggcacuccaaccuaaccug

SEQ ID NO: 2892779 - RNA, 14 nt, Human
aggcuaugugauua

SEQ ID NO: 2892780 - RNA, 12 nt, Human
aggcggccccuc

SEQ ID NO: 2892781 - RNA, 17 nt, Human
aggcuaugugauuacaa

SEQ ID NO: 2892782 - RNA, 18 nt, Human
aggcuauuauuuucacug

SEQ ID NO: 2892783 - RNA, 16 nt, Human
aggcuauuauuuucac

SEQ ID NO: 2892784 - RNA, 21 nt, Human
uggcccucccaguaccuccug

SEQ ID NO: 2892785 - RNA, 18 nt, Human
uggcccucucccuuaccc

SEQ ID NO: 2892786 - RNA, 12 nt, Human
uggcccugcccu

SEQ ID NO: 2892787 - RNA, 22 nt, Human
uggcccagccaaacccugucug

SEQ ID NO: 2892788 - RNA, 18 nt, Human
uggcauuauguccacugu

SEQ ID NO: 2892789 - RNA, 20 nt, Human
uggcccacgccuguaauccc

SEQ ID NO: 2892790 - RNA, 23 nt, Human
uggcauuauguccacuguguaua

SEQ ID NO: 2892791 - RNA, 15 nt, Human
uggcauucuuguaca

SEQ ID NO: 2892792 - RNA, 17 nt, Human
uggcauucuuguacagu

SEQ ID NO: 2892793 - RNA, 13 nt, Human
uggcauuaugucc

SEQ ID NO: 2892794 - RNA, 17 nt, Human
uggcauuagaauuauuu

SEQ ID NO: 2892795 - RNA, 19 nt, Human
uggcauuacagcuggagaa

SEQ ID NO: 2892796 - RNA, 20 nt, Human
uggcauguuuugugcauuug

SEQ ID NO: 2892797 - RNA, 22 nt, Human
uggcauguuuugugcauuugua

SEQ ID NO: 2892798 - RNA, 20 nt, Human
uggccgaggguccuggcucc

SEQ ID NO: 2892799 - RNA, 19 nt, Human
uggccgaggguccuggcuc

SEQ ID NO: 2892800 - RNA, 21 nt, Human
uggccucugcugauccuccca

SEQ ID NO: 2892801 - RNA, 22 nt, Human
uggcccuugcaguucagcacca

SEQ ID NO: 2892802 - RNA, 23 nt, Human
uggcccuugcaguucagcaccac

SEQ ID NO: 2892803 - RNA, 13 nt, Human
uggcccuuuccuu

SEQ ID NO: 2892804 - RNA, 18 nt, Human
uggccgaggguccuggcu

SEQ ID NO: 2892805 - RNA, 18 nt, Human
uggcccuuuccuuccaga

SEQ ID NO: 2892806 - RNA, 13 nt, Human
uggcccuuuuaua

SEQ ID NO: 2892807 - RNA, 16 nt, Human
uggccgaggacuuuga

SEQ ID NO: 2892808 - RNA, 15 nt, Human
uggcccugucccucc

SEQ ID NO: 2892809 - RNA, 17 nt, Human
uggcccugucccuccca

SEQ ID NO: 2892810 - RNA, 18 nt, Human
uggcccugcccucuccuu

SEQ ID NO: 2892811 - RNA, 21 nt, Human
uggcccugcccucuccuuccu

SEQ ID NO: 2892812 - RNA, 19 nt, Human
uggcccugucccucccacc

SEQ ID NO: 2892813 - RNA, 20 nt, Human
uggcccugucccucccaccu

SEQ ID NO: 2892814 - RNA, 18 nt, Human
uggcccuuccuccuccac

SEQ ID NO: 2892815 - RNA, 20 nt, Human
uggcccuuccuccuccacca

SEQ ID NO: 2892816 - RNA, 21 nt, Human
uggcccuuccuccuccaccac

SEQ ID NO: 2892817 - RNA, 21 nt, Human
uggcccugucccucccaccuc

SEQ ID NO: 2892818 - RNA, 22 nt, Human
uggcccugucccucccaccucu

SEQ ID NO: 2892819 - RNA, 23 nt, Human
uggcccugucccucccaccucug

SEQ ID NO: 2892820 - RNA, 13 nt, Human
uggcccugugcua

SEQ ID NO: 2892821 - RNA, 16 nt, Human
uggccucuggcucuca

SEQ ID NO: 2892822 - RNA, 18 nt, Human
uggccugccuugaagcca

SEQ ID NO: 2892823 - RNA, 16 nt, Human
uggccugcacuaauuu

SEQ ID NO: 2892824 - RNA, 14 nt, Human
uggccugcacuaau

SEQ ID NO: 2892825 - RNA, 24 nt, Human
uggccugucucauccccagggguc

SEQ ID NO: 2892826 - RNA, 20 nt, Human
uggccugucucauccccagg

SEQ ID NO: 2892827 - RNA, 18 nt, Human
uggccugucucaucccca

SEQ ID NO: 2892828 - RNA, 16 nt, Human
uggccugucucauccc

SEQ ID NO: 2892829 - RNA, 14 nt, Human
uggccugucucauc

SEQ ID NO: 2892830 - RNA, 17 nt, Human
uggccugggccuccuca

SEQ ID NO: 2892831 - RNA, 21 nt, Human
uggccugguauggcugcaguc

SEQ ID NO: 2892832 - RNA, 19 nt, Human
uggccuguagaauagccug

SEQ ID NO: 2892833 - RNA, 21 nt, Human
uggccuguagaauagccugug

SEQ ID NO: 2892834 - RNA, 23 nt, Human
uggccuguagaauagccuguggc

SEQ ID NO: 2892835 - RNA, 12 nt, Human
uggccugucuca

SEQ ID NO: 2892836 - RNA, 14 nt, Human
uggccugggccucc

SEQ ID NO: 2892837 - RNA, 11 nt, Human
uggccuggaca

SEQ ID NO: 2892838 - RNA, 13 nt, Human
uggccuggacugu

SEQ ID NO: 2892839 - RNA, 15 nt, Human
uggccuggacaguau

SEQ ID NO: 2892840 - RNA, 11 nt, Human
uggccugggca

SEQ ID NO: 2892841 - RNA, 21 nt, Human
aggccccugccacccugggga

SEQ ID NO: 2892842 - RNA, 12 nt, Human
aggccccugcca

SEQ ID NO: 2892843 - RNA, 18 nt, Human
aggccccugccacccugg

SEQ ID NO: 2892844 - RNA, 17 nt, Human
aggccccugccacccug

SEQ ID NO: 2892845 - RNA, 15 nt, Human
aggccccugccaccc

SEQ ID NO: 2892846 - RNA, 13 nt, Human
aggccccugccac

SEQ ID NO: 2892847 - RNA, 16 nt, Human
aggcccggcuccaggc

SEQ ID NO: 2892848 - RNA, 15 nt, Human
aggcccggcuccagg

SEQ ID NO: 2892849 - RNA, 14 nt, Human
aggcccggcuccag

SEQ ID NO: 2892850 - RNA, 17 nt, Human
aggccccuggacaagca

SEQ ID NO: 2892851 - RNA, 18 nt, Human
aggccccuucucucccug

SEQ ID NO: 2892852 - RNA, 19 nt, Human
aggccccuucucucccugc

SEQ ID NO: 2892853 - RNA, 20 nt, Human
aggccccuucucucccugcc

SEQ ID NO: 2892854 - RNA, 14 nt, Human
aggccggugugccu

SEQ ID NO: 2892855 - RNA, 21 nt, Human
aggccgggccgaauccccucc

SEQ ID NO: 2892856 - RNA, 15 nt, Human
aggccgggccuguac

SEQ ID NO: 2892857 - RNA, 17 nt, Human
aggccgggccuguacag

SEQ ID NO: 2892858 - RNA, 18 nt, Human
aggccgggccuguacagu

SEQ ID NO: 2892859 - RNA, 20 nt, Human
aggccgggccuguacagucu

SEQ ID NO: 2892860 - RNA, 22 nt, Human
aggccgggccuguacagucugu

SEQ ID NO: 2892861 - RNA, 12 nt, Human
aggccuggccag

SEQ ID NO: 2892862 - RNA, 13 nt, Human
aggccuggccaga

SEQ ID NO: 2892863 - RNA, 14 nt, Human
uggcaucagcuggc

SEQ ID NO: 2892864 - RNA, 20 nt, Human
uggcaucacagggcagagcc

SEQ ID NO: 2892865 - RNA, 18 nt, Human
uggcaucacagggcagag

SEQ ID NO: 2892866 - RNA, 15 nt, Human
uggcaucacagggca

SEQ ID NO: 2892867 - RNA, 15 nt, Human
uggcaucagcuggcg

SEQ ID NO: 2892868 - RNA, 18 nt, Human
uggcaucagcuggcguca

SEQ ID NO: 2892869 - RNA, 19 nt, Human
aggccuaaucucauaccuc

SEQ ID NO: 2892870 - RNA, 22 nt, Human
aggccuaaucucauaccucuga

SEQ ID NO: 2892871 - RNA, 16 nt, Human
aggccuauaaccccag

SEQ ID NO: 2892872 - RNA, 14 nt, Human
aggccucugugucc

SEQ ID NO: 2892873 - RNA, 15 nt, Human
aggccucuguguccu

SEQ ID NO: 2892874 - RNA, 16 nt, Human
aggccucuguguccuu

SEQ ID NO: 2892875 - RNA, 20 nt, Human
aggccucuguguccuucccu

SEQ ID NO: 2892876 - RNA, 15 nt, Human
aggccuaggauucua

SEQ ID NO: 2892877 - RNA, 16 nt, Human
aggccuaggauucuaa

SEQ ID NO: 2892878 - RNA, 17 nt, Human
aggccuaggauucuaaa

SEQ ID NO: 2892879 - RNA, 18 nt, Human
aggccugaaaggagcccu

SEQ ID NO: 2892880 - RNA, 22 nt, Human
aggccucuguguccuucccugc

SEQ ID NO: 2892881 - RNA, 23 nt, Human
aggccucuguguccuucccugca

SEQ ID NO: 2892882 - RNA, 15 nt, Human
aggccucuuggagac

SEQ ID NO: 2892883 - RNA, 17 nt, Human
aggccucuuggagaccu

SEQ ID NO: 2892884 - RNA, 21 nt, Human
uggcagauaaucagccucuua

SEQ ID NO: 2892885 - RNA, 23 nt, Human
uggcagaugacaagaugguacaa

SEQ ID NO: 2892886 - RNA, 18 nt, Human
uggcagcaccugucuccu

SEQ ID NO: 2892887 - RNA, 20 nt, Human
uggcagcagaaaacuugugu

SEQ ID NO: 2892888 - RNA, 14 nt, Human
uggcagauucaaau

SEQ ID NO: 2892889 - RNA, 14 nt, Human
uggcagcaggcagc

SEQ ID NO: 2892890 - RNA, 17 nt, Human
uggcagccgugccuuca

SEQ ID NO: 2892891 - RNA, 20 nt, Human
aggcauccuuccucacacca

SEQ ID NO: 2892892 - RNA, 18 nt, Human
aggcauccuuccucacac

SEQ ID NO: 2892893 - RNA, 18 nt, Human
aggcauaucaugcuuuga

SEQ ID NO: 2892894 - RNA, 14 nt, Human
aggcaucacagcua

SEQ ID NO: 2892895 - RNA, 19 nt, Human
aggcaucagucccuaugua

SEQ ID NO: 2892896 - RNA, 20 nt, Human
aggcaucagucccuauguau

SEQ ID NO: 2892897 - RNA, 16 nt, Human
aggcaucaugcagagu

SEQ ID NO: 2892898 - RNA, 20 nt, Human
aggcauccagcagucucugc

SEQ ID NO: 2892899 - RNA, 23 nt, Human
aggcauccagcagucucugccuu

SEQ ID NO: 2892900 - RNA, 13 nt, Human
uggcacaggacug

SEQ ID NO: 2892901 - RNA, 14 nt, Human
uggcacaggacuga

SEQ ID NO: 2892902 - RNA, 15 nt, Human
uggcacaggacugau

SEQ ID NO: 2892903 - RNA, 15 nt, Human
uggcacagggcagug

SEQ ID NO: 2892904 - RNA, 16 nt, Human
uggcacaggcccccuu

SEQ ID NO: 2892905 - RNA, 18 nt, Human
uggcagccgugccuucag

SEQ ID NO: 2892906 - RNA, 19 nt, Human
uggcagccgugccuucagc

SEQ ID NO: 2892907 - RNA, 20 nt, Human
uggcagccgugccuucagcu

SEQ ID NO: 2892908 - RNA, 21 nt, Human
uggcagccgugccuucagcuc

SEQ ID NO: 2892909 - RNA, 16 nt, Human
uggcagccgugccuuc

SEQ ID NO: 2892910 - RNA, 18 nt, Human
aggccaugggccuccugu

SEQ ID NO: 2892911 - RNA, 16 nt, Human
aggccauucugccgcc

SEQ ID NO: 2892912 - RNA, 20 nt, Human
aggccauuccccgucucugg

SEQ ID NO: 2892913 - RNA, 22 nt, Human
uggcuagaggccagccccaccc

SEQ ID NO: 2892914 - RNA, 21 nt, Human
uggcuagaggccagccccacc

SEQ ID NO: 2892915 - RNA, 23 nt, Human
uggcuagaggccagccccaccca

SEQ ID NO: 2892916 - RNA, 19 nt, Human
uggcuagaggccagcccca

SEQ ID NO: 2892917 - RNA, 22 nt, Human
uggcuacuuugguuucugucug

SEQ ID NO: 2892918 - RNA, 23 nt, Human
uggcuacuuugguuucugucugu

SEQ ID NO: 2892919 - RNA, 16 nt, Human
uggcuaauaaggcuuu

SEQ ID NO: 2892920 - RNA, 21 nt, Human
uggcuaacuauauuugcuuuu

SEQ ID NO: 2892921 - RNA, 20 nt, Human
aggcucccgaggggaagggg

SEQ ID NO: 2892922 - RNA, 13 nt, Human
aggcuccgcccuu

SEQ ID NO: 2892923 - RNA, 15 nt, Human
aggcuccgcccuuag

SEQ ID NO: 2892924 - RNA, 21 nt, Human
uggcuauauggcaagaaagcu

SEQ ID NO: 2892925 - RNA, 22 nt, Human
uggcuaucaaagaauaagaaaa

SEQ ID NO: 2892926 - RNA, 16 nt, Human
uggcucacaccuguaa

SEQ ID NO: 2892927 - RNA, 17 nt, Human
uggcucacaccuguaau

SEQ ID NO: 2892928 - RNA, 16 nt, Human
uggcucaauccucuaa

SEQ ID NO: 2892929 - RNA, 19 nt, Human
uggcucacaccuguaaucc

SEQ ID NO: 2892930 - RNA, 22 nt, Human
uggcucacaccuguaaucccag

SEQ ID NO: 2892931 - RNA, 12 nt, Human
uggcuaagaccc

SEQ ID NO: 2892932 - RNA, 14 nt, Human
uggcucaccuuccg

SEQ ID NO: 2892933 - RNA, 14 nt, Human
uggcucacaguaca

SEQ ID NO: 2892934 - RNA, 22 nt, Human
uggcucacaguacagcaugugc

SEQ ID NO: 2892935 - RNA, 24 nt, Human
uggcucacaguacagcaugugccu

SEQ ID NO: 2892936 - RNA, 19 nt, Human
uggcucacgccuguaaucc

SEQ ID NO: 2892937 - RNA, 22 nt, Human
uggcucacgucuguaaucccag

SEQ ID NO: 2892938 - RNA, 21 nt, Human
uggcucacugcaacuucugcc

SEQ ID NO: 2892939 - RNA, 22 nt, Human
uggcucagcucggggagccuua

SEQ ID NO: 2892940 - RNA, 19 nt, Human
uggcucuugauaccccccu

SEQ ID NO: 2892941 - RNA, 20 nt, Human
uggcucuugauaccccccuc

SEQ ID NO: 2892942 - RNA, 21 nt, Human
uggcucuugauaccccccucu

SEQ ID NO: 2892943 - RNA, 18 nt, Human
uggcucagacauguuuuc

SEQ ID NO: 2892944 - RNA, 13 nt, Human
uggcucagagggg

SEQ ID NO: 2892945 - RNA, 22 nt, Human
uggcucagagggggacugcugc

SEQ ID NO: 2892946 - RNA, 14 nt, Human
uggcucagcucggg

SEQ ID NO: 2892947 - RNA, 15 nt, Human
uggcugaaaaaggcc

SEQ ID NO: 2892948 - RNA, 23 nt, Human
uggcucuugauaccccccucugu

SEQ ID NO: 2892949 - RNA, 19 nt, Human
uggcucuuuggagaucaag

SEQ ID NO: 2892950 - RNA, 16 nt, Human
uggcucuuugggcugg

SEQ ID NO: 2892951 - RNA, 13 nt, Human
uggcugaacucau

SEQ ID NO: 2892952 - RNA, 20 nt, Human
uggcugaagacuuuuguuau

SEQ ID NO: 2892953 - RNA, 16 nt, Human
uggcugacuuugcucu

SEQ ID NO: 2892954 - RNA, 15 nt, Human
uggcugacuaaauuu

SEQ ID NO: 2892955 - RNA, 20 nt, Human
uggcugacuaaauuugggga

SEQ ID NO: 2892956 - RNA, 22 nt, Human
uggcugacuaaauuuggggaca

SEQ ID NO: 2892957 - RNA, 23 nt, Human
uggcugacuaaauuuggggacag

SEQ ID NO: 2892958 - RNA, 11 nt, Human
uggcuguuugg

SEQ ID NO: 2892959 - RNA, 16 nt, Human
uggcuguuuggacuuu

SEQ ID NO: 2892960 - RNA, 21 nt, Human
uggcuuauuuuaaugugauga

SEQ ID NO: 2892961 - RNA, 19 nt, Human
ugggaaaaaaaugaaugag

SEQ ID NO: 2892962 - RNA, 22 nt, Human
uggcuuuuuuaaaaaagcaaca

SEQ ID NO: 2892963 - RNA, 23 nt, Human
ugggaaaaaugcccuuaaaucau

SEQ ID NO: 2892964 - RNA, 19 nt, Human
ugggaaaugagaaggcagc

SEQ ID NO: 2892965 - RNA, 20 nt, Human
ugggaaaugagaaggcagcc

SEQ ID NO: 2892966 - RNA, 15 nt, Human
ugggaaaugagcagg

SEQ ID NO: 2892967 - RNA, 16 nt, Human
ugggaaaugagcaggg

SEQ ID NO: 2892968 - RNA, 20 nt, Human
ugggaacaccauaggucacc

SEQ ID NO: 2892969 - RNA, 21 nt, Human
ugggaaaccccuucucuguga

SEQ ID NO: 2892970 - RNA, 15 nt, Human
ugggaaacuugucac

SEQ ID NO: 2892971 - RNA, 21 nt, Human
ugggaaacuugucacuugcau

SEQ ID NO: 2892972 - RNA, 22 nt, Human
ugggaaacuugucacuugcaug

SEQ ID NO: 2892973 - RNA, 16 nt, Human
ugggaaaacacugcca

SEQ ID NO: 2892974 - RNA, 15 nt, Human
ugggaaacagaggcu

SEQ ID NO: 2892975 - RNA, 17 nt, Human
ugggaaacacuccuugc

SEQ ID NO: 2892976 - RNA, 18 nt, Human
ugggaaacacuccuugca

SEQ ID NO: 2892977 - RNA, 19 nt, Human
ugggaaacacuccuugcau

SEQ ID NO: 2892978 - RNA, 20 nt, Human
ugggaaacacuccuugcauc

SEQ ID NO: 2892979 - RNA, 23 nt, Human
uggcugcaaaggguaucaggugc

SEQ ID NO: 2892980 - RNA, 14 nt, Human
uggcugugccucug

SEQ ID NO: 2892981 - RNA, 15 nt, Human
uggcugugccucugc

SEQ ID NO: 2892982 - RNA, 16 nt, Human
uggcugugccucugcc

SEQ ID NO: 2892983 - RNA, 17 nt, Human
uggcugugccucugccu

SEQ ID NO: 2892984 - RNA, 18 nt, Human
uggcugucuggaaagccc

SEQ ID NO: 2892985 - RNA, 15 nt, Human
uggcugugaggcccc

SEQ ID NO: 2892986 - RNA, 18 nt, Human
uggcuguuggcugggggc

SEQ ID NO: 2892987 - RNA, 16 nt, Human
uggcuguuggcugggg

SEQ ID NO: 2892988 - RNA, 23 nt, Human
uggcuguuggcugggggccucag

SEQ ID NO: 2892989 - RNA, 22 nt, Human
uggcugugccucugccugucuc

SEQ ID NO: 2892990 - RNA, 18 nt, Human
uggcugugccucugccug

SEQ ID NO: 2892991 - RNA, 19 nt, Human
uggcugugccucugccugu

SEQ ID NO: 2892992 - RNA, 19 nt, Human
uggcugugcucucaccagc

SEQ ID NO: 2892993 - RNA, 21 nt, Human
uggcuguggagacaaugucug

SEQ ID NO: 2892994 - RNA, 22 nt, Human
uggcuguggagacaaugucugc

SEQ ID NO: 2892995 - RNA, 16 nt, Human
agggaaaagcagcucu

SEQ ID NO: 2892996 - RNA, 10 nt, Human
agggaaaagg

SEQ ID NO: 2892997 - RNA, 14 nt, Human
agggaaaagggaag

SEQ ID NO: 2892998 - RNA, 20 nt, Human
aggcuuugugauagugacau

SEQ ID NO: 2892999 - RNA, 13 nt, Human
aggcuuuguguug

SEQ ID NO: 2893000 - RNA, 15 nt, Human
aggcuuuguguugua

SEQ ID NO: 2893001 - RNA, 16 nt, Human
aggcuuuguguuguaa

SEQ ID NO: 2893002 - RNA, 17 nt, Human
aggcuuuguguuguaau

SEQ ID NO: 2893003 - RNA, 18 nt, Human
aggcuuuguguuguaauu

SEQ ID NO: 2893004 - RNA, 19 nt, Human
aggcuuuggauuugacauu

SEQ ID NO: 2893005 - RNA, 19 nt, Human
aggcuuugauuaguuuucu

SEQ ID NO: 2893006 - RNA, 21 nt, Human
aggcuuguuccaaugccacau

SEQ ID NO: 2893007 - RNA, 23 nt, Human
aggcuuuaugauaauagauucuc

SEQ ID NO: 2893008 - RNA, 12 nt, Human
aggcuuucagcu

SEQ ID NO: 2893009 - RNA, 13 nt, Human
aggcuuucagcuu

SEQ ID NO: 2893010 - RNA, 18 nt, Human
aggcuuuaguguauuuau

SEQ ID NO: 2893011 - RNA, 22 nt, Human
aggcuuuaugauaauagauucu

SEQ ID NO: 2893012 - RNA, 15 nt, Human
aggcuuauauucaac

SEQ ID NO: 2893013 - RNA, 16 nt, Human
aggcuuauauucaacc

SEQ ID NO: 2893014 - RNA, 17 nt, Human
aggcuuauauucaacca

SEQ ID NO: 2893015 - RNA, 19 nt, Human
aggcuucaaaauguuaucu

SEQ ID NO: 2893016 - RNA, 18 nt, Human
aggcuuauauucaaccau

SEQ ID NO: 2893017 - RNA, 21 nt, Human
aggcuuauauucaaccaugga

SEQ ID NO: 2893018 - RNA, 21 nt, Human
aggcuuccugcaauuuucuaa

SEQ ID NO: 2893019 - RNA, 22 nt, Human
aggcuuccugcaauuuucuaag

SEQ ID NO: 2893020 - RNA, 22 nt, Human
aggcuucuccaauucugcccaa

SEQ ID NO: 2893021 - RNA, 13 nt, Human
aggcuuccuuggc

SEQ ID NO: 2893022 - RNA, 23 nt, Human
aggcuucugguugaugccuguga

SEQ ID NO: 2893023 - RNA, 16 nt, Human
aggcuucucuguucua

SEQ ID NO: 2893024 - RNA, 13 nt, Human
aggcuugaagcug

SEQ ID NO: 2893025 - RNA, 15 nt, Human
aggcugggugacaga

SEQ ID NO: 2893026 - RNA, 20 nt, Human
aggcuucuguuccucucuuu

SEQ ID NO: 2893027 - RNA, 15 nt, Human
aggcuugccugcagg

SEQ ID NO: 2893028 - RNA, 16 nt, Human
aggcuugccugcaggc

SEQ ID NO: 2893029 - RNA, 17 nt, Human
aggcuugccugcaggca

SEQ ID NO: 2893030 - RNA, 17 nt, Human
ugggaacacuggcagac

SEQ ID NO: 2893031 - RNA, 14 nt, Human
ugggaacauuuauu

SEQ ID NO: 2893032 - RNA, 18 nt, Human
ugggaacauuuauuuuau

SEQ ID NO: 2893033 - RNA, 21 nt, Human
ugggaacauuuauuuuaugag

SEQ ID NO: 2893034 - RNA, 22 nt, Human
ugggaacauuuauuuuaugaga

SEQ ID NO: 2893035 - RNA, 23 nt, Human
ugggaacauuuauuuuaugagaa

SEQ ID NO: 2893036 - RNA, 20 nt, Human
ugggaaccaagcuauuccuu

SEQ ID NO: 2893037 - RNA, 18 nt, Human
aggcugggccauguccaa

SEQ ID NO: 2893038 - RNA, 12 nt, Human
aggcugggccau

SEQ ID NO: 2893039 - RNA, 10 nt, Human
aggcugggcc

SEQ ID NO: 2893040 - RNA, 13 nt, Human
aggcugggcaagg

SEQ ID NO: 2893041 - RNA, 14 nt, Human
aggcugggcuucag

SEQ ID NO: 2893042 - RNA, 22 nt, Human
aggcugggccauguccaaagag

SEQ ID NO: 2893043 - RNA, 18 nt, Human
aggcugggcguaguggcu

SEQ ID NO: 2893044 - RNA, 21 nt, Human
aggcugggccauguccaaaga

SEQ ID NO: 2893045 - RNA, 20 nt, Human
aggcugggccauguccaaag

SEQ ID NO: 2893046 - RNA, 21 nt, Human
aggcugggcuucaguggcagc

SEQ ID NO: 2893047 - RNA, 20 nt, Human
aggcugggcuucaguggcag

SEQ ID NO: 2893048 - RNA, 19 nt, Human
aggcugggcuucaguggca

SEQ ID NO: 2893049 - RNA, 18 nt, Human
aggcugggcuucaguggc

SEQ ID NO: 2893050 - RNA, 23 nt, Human
aggcugggcuucaguggcagcug

SEQ ID NO: 2893051 - RNA, 22 nt, Human
aggcugggcuucaguggcagcu

SEQ ID NO: 2893052 - RNA, 16 nt, Human
aggcuggggaaguccu

SEQ ID NO: 2893053 - RNA, 18 nt, Human
aggcuggggaaguccucu

SEQ ID NO: 2893054 - RNA, 21 nt, Human
aggcuggggaaguccucuggg

SEQ ID NO: 2893055 - RNA, 22 nt, Human
aggcuggggaaguccucugggu

SEQ ID NO: 2893056 - RNA, 14 nt, Human
agggcugucaucug

SEQ ID NO: 2893057 - RNA, 15 nt, Human
agggcugucaucuga

SEQ ID NO: 2893058 - RNA, 20 nt, Human
ugggcucaagcaauccucuc

SEQ ID NO: 2893059 - RNA, 14 nt, Human
ugggcuauggacac

SEQ ID NO: 2893060 - RNA, 15 nt, Human
ugggcuauggacaca

SEQ ID NO: 2893061 - RNA, 17 nt, Human
ugggcuauggacacagg

SEQ ID NO: 2893062 - RNA, 18 nt, Human
ugggcuauggacacaggg

SEQ ID NO: 2893063 - RNA, 19 nt, Human
ugggcuauggacacagggu

SEQ ID NO: 2893064 - RNA, 21 nt, Human
ugggcuauggacacaggguga

SEQ ID NO: 2893065 - RNA, 18 nt, Human
agggcuuaccuguacacu

SEQ ID NO: 2893066 - RNA, 23 nt, Human
agggcuuaccuguacacugacuu

SEQ ID NO: 2893067 - RNA, 14 nt, Human
agggcuggccccag

SEQ ID NO: 2893068 - RNA, 18 nt, Human
agggcuggccccagggca

SEQ ID NO: 2893069 - RNA, 19 nt, Human
agggcuggccccagggcac

SEQ ID NO: 2893070 - RNA, 22 nt, Human
agggcuggccccagggcacccu

SEQ ID NO: 2893071 - RNA, 16 nt, Human
agggcugggaaacacu

SEQ ID NO: 2893072 - RNA, 22 nt, Human
agggcugggaaacacuccuugc

SEQ ID NO: 2893073 - RNA, 23 nt, Human
agggcugggaaacacuccuugca

SEQ ID NO: 2893074 - RNA, 20 nt, Human
agggcugggcaaggaaaaag

SEQ ID NO: 2893075 - RNA, 21 nt, Human
agggcugggcaaggaaaaaga

SEQ ID NO: 2893076 - RNA, 22 nt, Human
agggcugggcaaggaaaaagaa

SEQ ID NO: 2893077 - RNA, 16 nt, Human
ugggcucccguguuuu

SEQ ID NO: 2893078 - RNA, 19 nt, Human
ugggcucccguguuuugua

SEQ ID NO: 2893079 - RNA, 19 nt, Human
ugggcucugacagaaagca

SEQ ID NO: 2893080 - RNA, 17 nt, Human
ugggcucggaggcugcc

SEQ ID NO: 2893081 - RNA, 12 nt, Human
ugggcuccuggc

SEQ ID NO: 2893082 - RNA, 15 nt, Human
ugggcuccuggcaga

SEQ ID NO: 2893083 - RNA, 23 nt, Human
ugggcuccuggcagaagggagca

SEQ ID NO: 2893084 - RNA, 17 nt, Human
agggcccaggcaggcca

SEQ ID NO: 2893085 - RNA, 14 nt, Human
agggcccagagagg

SEQ ID NO: 2893086 - RNA, 16 nt, Human
agggccaagacuuggc

SEQ ID NO: 2893087 - RNA, 16 nt, Human
agggccaauccccagc

SEQ ID NO: 2893088 - RNA, 15 nt, Human
agggcccaggcaggc

SEQ ID NO: 2893089 - RNA, 14 nt, Human
agggcccaggcagg

SEQ ID NO: 2893090 - RNA, 15 nt, Human
agggcccagaggcug

SEQ ID NO: 2893091 - RNA, 12 nt, Human
agggcccaggag

SEQ ID NO: 2893092 - RNA, 11 nt, Human
agggcccagag

SEQ ID NO: 2893093 - RNA, 20 nt, Human
agggcugcugggggcaacug

SEQ ID NO: 2893094 - RNA, 12 nt, Human
agggcugcuggg

SEQ ID NO: 2893095 - RNA, 23 nt, Human
agggcugcugggggcaacuggcc

SEQ ID NO: 2893096 - RNA, 17 nt, Human
agggcugcuagacggag

SEQ ID NO: 2893097 - RNA, 13 nt, Human
agggcugcccuga

SEQ ID NO: 2893098 - RNA, 15 nt, Human
agggcugcccugaga

SEQ ID NO: 2893099 - RNA, 16 nt, Human
agggcugcccugagaa

SEQ ID NO: 2893100 - RNA, 23 nt, Human
agggcugcccugagaagcugcuc

SEQ ID NO: 2893101 - RNA, 13 nt, Human
agggcugccacca

SEQ ID NO: 2893102 - RNA, 11 nt, Human
agggcuccucc

SEQ ID NO: 2893103 - RNA, 13 nt, Human
agggcuccuccca

SEQ ID NO: 2893104 - RNA, 14 nt, Human
agggcuccucccag

SEQ ID NO: 2893105 - RNA, 15 nt, Human
agggcuccucccagc

SEQ ID NO: 2893106 - RNA, 17 nt, Human
agggcuccucccagcuu

SEQ ID NO: 2893107 - RNA, 18 nt, Human
agggcuccucccagcuug

SEQ ID NO: 2893108 - RNA, 14 nt, Human
agggcuccugcagg

SEQ ID NO: 2893109 - RNA, 15 nt, Human
agggcucccugcccu

SEQ ID NO: 2893110 - RNA, 15 nt, Human
agggcugaccugccu

SEQ ID NO: 2893111 - RNA, 16 nt, Human
agggcugaccugccuc

SEQ ID NO: 2893112 - RNA, 17 nt, Human
agggcugaccugccucu

SEQ ID NO: 2893113 - RNA, 19 nt, Human
agggcugaccugccucuca

SEQ ID NO: 2893114 - RNA, 23 nt, Human
agggcugaccugccucucacaca

SEQ ID NO: 2893115 - RNA, 16 nt, Human
agggcugagcugggga

SEQ ID NO: 2893116 - RNA, 13 nt, Human
agggcccagagag

SEQ ID NO: 2893117 - RNA, 12 nt, Human
agggcccagaga

SEQ ID NO: 2893118 - RNA, 23 nt, Human
agggccaacuugagggcccagag

SEQ ID NO: 2893119 - RNA, 13 nt, Human
agggcaguuuucu

SEQ ID NO: 2893120 - RNA, 14 nt, Human
agggcauaaaacag

SEQ ID NO: 2893121 - RNA, 15 nt, Human
agggcauaaaacagc

SEQ ID NO: 2893122 - RNA, 16 nt, Human
agggcauaaaacagcu

SEQ ID NO: 2893123 - RNA, 19 nt, Human
agggcauaaaacagcuuug

SEQ ID NO: 2893124 - RNA, 14 nt, Human
agggcauccauacc

SEQ ID NO: 2893125 - RNA, 21 nt, Human
agggcauccauaccagcucgc

SEQ ID NO: 2893126 - RNA, 16 nt, Human
agggcauucaaauggg

SEQ ID NO: 2893127 - RNA, 14 nt, Human
agggcauucuuucc

SEQ ID NO: 2893128 - RNA, 19 nt, Human
agggcauucuuucccagug

SEQ ID NO: 2893129 - RNA, 17 nt, Human
agggcauggccaggugg

SEQ ID NO: 2893130 - RNA, 15 nt, Human
agggcagagccggga

SEQ ID NO: 2893131 - RNA, 19 nt, Human
agggcagaaagguucugcc

SEQ ID NO: 2893132 - RNA, 20 nt, Human
agggcagaaagguucugccc

SEQ ID NO: 2893133 - RNA, 15 nt, Human
agggcagaaaguaga

SEQ ID NO: 2893134 - RNA, 17 nt, Human
agggcacugguggcccg

SEQ ID NO: 2893135 - RNA, 15 nt, Human
agggagugcuggcuc

SEQ ID NO: 2893136 - RNA, 16 nt, Human
agggagugcuggcuca

SEQ ID NO: 2893137 - RNA, 17 nt, Human
agggagugcuggcucac

SEQ ID NO: 2893138 - RNA, 18 nt, Human
agggagugcuggcucaca

SEQ ID NO: 2893139 - RNA, 20 nt, Human
agggagugcuggcucacagu

SEQ ID NO: 2893140 - RNA, 23 nt, Human
agggagugcuggcucacaguaca

SEQ ID NO: 2893141 - RNA, 24 nt, Human
agggagugcuggcucacaguacag

SEQ ID NO: 2893142 - RNA, 17 nt, Human
agggcagagucacacgg

SEQ ID NO: 2893143 - RNA, 21 nt, Human
agggcagugcuagugagcugg

SEQ ID NO: 2893144 - RNA, 22 nt, Human
agggcagugcuagugagcuggg

SEQ ID NO: 2893145 - RNA, 15 nt, Human
agggagggccugggc

SEQ ID NO: 2893146 - RNA, 13 nt, Human
agggagggccugg

SEQ ID NO: 2893147 - RNA, 20 nt, Human
ugggccaccaggaucagcca

SEQ ID NO: 2893148 - RNA, 16 nt, Human
ugggccaacucaccug

SEQ ID NO: 2893149 - RNA, 19 nt, Human
ugggcauugacaaaucugu

SEQ ID NO: 2893150 - RNA, 23 nt, Human
ugggcauugacaaaucuguguau

SEQ ID NO: 2893151 - RNA, 21 nt, Human
ugggccaaauccgcucucuuc

SEQ ID NO: 2893152 - RNA, 23 nt, Human
ugggccaaauccgcucucuuccu

SEQ ID NO: 2893153 - RNA, 17 nt, Human
agggagggcaguuuucu

SEQ ID NO: 2893154 - RNA, 20 nt, Human
agggaguccgaaagggacuu

SEQ ID NO: 2893155 - RNA, 20 nt, Human
agggagugacagaggcagcc

SEQ ID NO: 2893156 - RNA, 23 nt, Human
agggaguccgaaagggacuugga

SEQ ID NO: 2893157 - RNA, 15 nt, Human
agggacuuggaagcu

SEQ ID NO: 2893158 - RNA, 19 nt, Human
agggacuuggaagcuccgc

SEQ ID NO: 2893159 - RNA, 18 nt, Human
agggacuuggaagcuccg

SEQ ID NO: 2893160 - RNA, 12 nt, Human
agggaaagaaaa

SEQ ID NO: 2893161 - RNA, 19 nt, Human
agggaaagaaaaggaaggc

SEQ ID NO: 2893162 - RNA, 23 nt, Human
agggaaagaaaguugcacggcug

SEQ ID NO: 2893163 - RNA, 15 nt, Human
agggaaauaucauuu

SEQ ID NO: 2893164 - RNA, 17 nt, Human
agggagcagacaggagg

SEQ ID NO: 2893165 - RNA, 19 nt, Human
agggagcaggcggugggca

SEQ ID NO: 2893166 - RNA, 16 nt, Human
agggagcagggaaggc

SEQ ID NO: 2893167 - RNA, 20 nt, Human
agggacuuggaagcuccgcu

SEQ ID NO: 2893168 - RNA, 14 nt, Human
agggagaacuuaug

SEQ ID NO: 2893169 - RNA, 23 nt, Human
agggaaauagcuaauaauguuaa

SEQ ID NO: 2893170 - RNA, 18 nt, Human
agggagaagggauggagg

SEQ ID NO: 2893171 - RNA, 20 nt, Human
agggagacacuggccccuca

SEQ ID NO: 2893172 - RNA, 18 nt, Human
ugggacucaaugcacuga

SEQ ID NO: 2893173 - RNA, 13 nt, Human
ugggacuggccuc

SEQ ID NO: 2893174 - RNA, 16 nt, Human
ugggacuacaggugug

SEQ ID NO: 2893175 - RNA, 16 nt, Human
ugggacuggccucugc

SEQ ID NO: 2893176 - RNA, 14 nt, Human
ugggacuggccucu

SEQ ID NO: 2893177 - RNA, 15 nt, Human
ugggacuuauuacaa

SEQ ID NO: 2893178 - RNA, 18 nt, Human
ugggacuacaggcaccca

SEQ ID NO: 2893179 - RNA, 18 nt, Human
agggagccuuugguucug

SEQ ID NO: 2893180 - RNA, 19 nt, Human
agggagcagggaaggccug

SEQ ID NO: 2893181 - RNA, 18 nt, Human
agggagcaucagugcccu

SEQ ID NO: 2893182 - RNA, 20 nt, Human
agggagccuagaagcuggug

SEQ ID NO: 2893183 - RNA, 13 nt, Human
ugggaggcugagg

SEQ ID NO: 2893184 - RNA, 14 nt, Human
ugggaggcugaggc

SEQ ID NO: 2893185 - RNA, 15 nt, Human
ugggaggcugaggcg

SEQ ID NO: 2893186 - RNA, 14 nt, Human
ugggaggcuucccc

SEQ ID NO: 2893187 - RNA, 14 nt, Human
ugggagggaaaagg

SEQ ID NO: 2893188 - RNA, 18 nt, Human
ugggagggaaaagggaag

SEQ ID NO: 2893189 - RNA, 17 nt, Human
ugggagggagcagacag

SEQ ID NO: 2893190 - RNA, 18 nt, Human
ugggagggagcagacagg

SEQ ID NO: 2893191 - RNA, 19 nt, Human
ugggagggagcagacagga

SEQ ID NO: 2893192 - RNA, 14 nt, Human
ugggagggauggcc

SEQ ID NO: 2893193 - RNA, 21 nt, Human
ugggagggauggcccuuccuc

SEQ ID NO: 2893194 - RNA, 14 nt, Human
ugggaggcuccugu

SEQ ID NO: 2893195 - RNA, 17 nt, Human
ugggaggcuccuguuag

SEQ ID NO: 2893196 - RNA, 22 nt, Human
ugggaggcuccuguuagcuccu

SEQ ID NO: 2893197 - RNA, 19 nt, Human
ugggcaaugauggcaauuu

SEQ ID NO: 2893198 - RNA, 20 nt, Human
ugggcacaaagggcccagau

SEQ ID NO: 2893199 - RNA, 22 nt, Human
ugggcacaacugcaauaacuuc

SEQ ID NO: 2893200 - RNA, 16 nt, Human
ugggcacacgccuccc

SEQ ID NO: 2893201 - RNA, 21 nt, Human
ugggcacacgccucccacugg

SEQ ID NO: 2893202 - RNA, 16 nt, Human
ugggcaauauagcaag

SEQ ID NO: 2893203 - RNA, 15 nt, Human
ugggcaauauagcaa

SEQ ID NO: 2893204 - RNA, 19 nt, Human
ugggcacaaagggcccaga

SEQ ID NO: 2893205 - RNA, 21 nt, Human
ugggcaacccccagccugcua

SEQ ID NO: 2893206 - RNA, 16 nt, Human
ugggcaacagagcaag

SEQ ID NO: 2893207 - RNA, 14 nt, Human
ugggcaaggaggcc

SEQ ID NO: 2893208 - RNA, 13 nt, Human
ugggcaaggaaaa

SEQ ID NO: 2893209 - RNA, 14 nt, Human
ugggcaaggaaaaa

SEQ ID NO: 2893210 - RNA, 19 nt, Human
ugggcaaggaaaaagaaaa

SEQ ID NO: 2893211 - RNA, 14 nt, Human
ugggcaacagagca

SEQ ID NO: 2893212 - RNA, 12 nt, Human
ugggcaacagag

SEQ ID NO: 2893213 - RNA, 12 nt, Human
ugggcaacaaag

SEQ ID NO: 2893214 - RNA, 15 nt, Human
ugggcaacaaaguga

SEQ ID NO: 2893215 - RNA, 19 nt, Human
ugggaggggcgcccaccuc

SEQ ID NO: 2893216 - RNA, 23 nt, Human
ugggaggggcgcccaccucccca

SEQ ID NO: 2893217 - RNA, 18 nt, Human
ugggagggggagaaaagg

SEQ ID NO: 2893218 - RNA, 20 nt, Human
ugggaggggcgcccaccucc

SEQ ID NO: 2893219 - RNA, 18 nt, Human
ugggauuuuaaacuagau

SEQ ID NO: 2893220 - RNA, 21 nt, Human
ugggauuuuaaacuagaugac

SEQ ID NO: 2893221 - RNA, 18 nt, Human
aguauuaauacuaaaaua

SEQ ID NO: 2893222 - RNA, 14 nt, Human
aguauucauucugc

SEQ ID NO: 2893223 - RNA, 14 nt, Human
aguauguuuuacac

SEQ ID NO: 2893224 - RNA, 17 nt, Human
aguauguuuuacacugu

SEQ ID NO: 2893225 - RNA, 21 nt, Human
aguauguuuuacacuguacca

SEQ ID NO: 2893226 - RNA, 13 nt, Human
aguauuaaaacau

SEQ ID NO: 2893227 - RNA, 14 nt, Human
aguauuaaaacauu

SEQ ID NO: 2893228 - RNA, 15 nt, Human
aguauuaaaacauug

SEQ ID NO: 2893229 - RNA, 16 nt, Human
aguauuaaaacauugg

SEQ ID NO: 2893230 - RNA, 19 nt, Human
aguauuaaaacauuggauu

SEQ ID NO: 2893231 - RNA, 22 nt, Human
aguauuaaaacauuggauuauc

SEQ ID NO: 2893232 - RNA, 23 nt, Human
aguauuaaaacauuggauuaucc

SEQ ID NO: 2893233 - RNA, 18 nt, Human
aguauaauuuuuuguaau

SEQ ID NO: 2893234 - RNA, 15 nt, Human
aguauacaauauaua

SEQ ID NO: 2893235 - RNA, 16 nt, Human
aguauacaauauauaa

SEQ ID NO: 2893236 - RNA, 17 nt, Human
aguauacaauauauaaa

SEQ ID NO: 2893237 - RNA, 19 nt, Human
aguauacaauauauaaaaa

SEQ ID NO: 2893238 - RNA, 21 nt, Human
aguauacaauauauaaaaaua

SEQ ID NO: 2893239 - RNA, 23 nt, Human
aguauacaauauauaaaaauaua

SEQ ID NO: 2893240 - RNA, 21 nt, Human
aguauacaguucaauaaacuu

SEQ ID NO: 2893241 - RNA, 14 nt, Human
aguauagagagaag

SEQ ID NO: 2893242 - RNA, 16 nt, Human
aguauagagagaaguu

SEQ ID NO: 2893243 - RNA, 21 nt, Human
aguauaaccauaugauacuau

SEQ ID NO: 2893244 - RNA, 13 nt, Human
aguauaagaaaug

SEQ ID NO: 2893245 - RNA, 14 nt, Human
aguauaagaaaugc

SEQ ID NO: 2893246 - RNA, 16 nt, Human
aguauaagaaaugcau

SEQ ID NO: 2893247 - RNA, 18 nt, Human
aguauaagaaaugcauau

SEQ ID NO: 2893248 - RNA, 15 nt, Human
uguauauuuguauau

SEQ ID NO: 2893249 - RNA, 19 nt, Human
uguauauuuguauauuaca

SEQ ID NO: 2893250 - RNA, 13 nt, Human
uguauauuccuuu

SEQ ID NO: 2893251 - RNA, 14 nt, Human
uguauauuccuuug

SEQ ID NO: 2893252 - RNA, 20 nt, Human
uguauauuguguuuguguau

SEQ ID NO: 2893253 - RNA, 18 nt, Human
uguauauuacacauuugu

SEQ ID NO: 2893254 - RNA, 23 nt, Human
uguauauuacacauuuguacaga

SEQ ID NO: 2893255 - RNA, 13 nt, Human
uguauauuauuug

SEQ ID NO: 2893256 - RNA, 15 nt, Human
uguauauuauuuggc

SEQ ID NO: 2893257 - RNA, 16 nt, Human
uguauauuauuuggca

SEQ ID NO: 2893258 - RNA, 18 nt, Human
uguauauuauuuggcagu

SEQ ID NO: 2893259 - RNA, 21 nt, Human
uguauauuauuuggcaguuug

SEQ ID NO: 2893260 - RNA, 22 nt, Human
uguauauuauuuggcaguuugg

SEQ ID NO: 2893261 - RNA, 24 nt, Human
uguauauuauuuggcaguuuggua

SEQ ID NO: 2893262 - RNA, 16 nt, Human
aguauuuauaauagca

SEQ ID NO: 2893263 - RNA, 12 nt, Human
aguauuuauaua

SEQ ID NO: 2893264 - RNA, 16 nt, Human
aguauuuauauauuua

SEQ ID NO: 2893265 - RNA, 15 nt, Human
aguauuuauauauuu

SEQ ID NO: 2893266 - RNA, 14 nt, Human
aguauuuauauauu

SEQ ID NO: 2893267 - RNA, 13 nt, Human
aguauuuauauau

SEQ ID NO: 2893268 - RNA, 18 nt, Human
aguauuauucuacuauac

SEQ ID NO: 2893269 - RNA, 17 nt, Human
aguauuuauuuauguac

SEQ ID NO: 2893270 - RNA, 16 nt, Human
aguauuuauuuaugua

SEQ ID NO: 2893271 - RNA, 18 nt, Human
aguauuuauuuauguacu

SEQ ID NO: 2893272 - RNA, 21 nt, Human
aguauuugggaagugaagacu

SEQ ID NO: 2893273 - RNA, 21 nt, Human
aguauuugucguguguagaaa

SEQ ID NO: 2893274 - RNA, 20 nt, Human
aguauuuauuuauguacuuu

SEQ ID NO: 2893275 - RNA, 14 nt, Human
aguauuuauuuugu

SEQ ID NO: 2893276 - RNA, 15 nt, Human
aguauuuauuuugua

SEQ ID NO: 2893277 - RNA, 16 nt, Human
aguauuuauuuuguaa

SEQ ID NO: 2893278 - RNA, 17 nt, Human
aguauuuauuuuguaau

SEQ ID NO: 2893279 - RNA, 18 nt, Human
aguauuuauuuuguaauu

SEQ ID NO: 2893280 - RNA, 21 nt, Human
aguauuuauuuuguaauuaug

SEQ ID NO: 2893281 - RNA, 22 nt, Human
aguauuuauuuuguaauuauga

SEQ ID NO: 2893282 - RNA, 13 nt, Human
aguauuuauuuau

SEQ ID NO: 2893283 - RNA, 15 nt, Human
aguauuuauuuaugu

SEQ ID NO: 2893284 - RNA, 23 nt, Human
aguauuuauauauuuauaacuca

SEQ ID NO: 2893285 - RNA, 20 nt, Human
aguauuuauauauuuauaac

SEQ ID NO: 2893286 - RNA, 19 nt, Human
aguauuuauauauuuauaa

SEQ ID NO: 2893287 - RNA, 17 nt, Human
aguauuuauauauuuau

SEQ ID NO: 2893288 - RNA, 18 nt, Human
agucaccacuccauuccc

SEQ ID NO: 2893289 - RNA, 19 nt, Human
agucaccacuccauuccca

SEQ ID NO: 2893290 - RNA, 17 nt, Human
agucacccaugaagaca

SEQ ID NO: 2893291 - RNA, 16 nt, Human
agucacccaugaagac

SEQ ID NO: 2893292 - RNA, 15 nt, Human
ugucagauacaaugu

SEQ ID NO: 2893293 - RNA, 16 nt, Human
ugucagauacaaugua

SEQ ID NO: 2893294 - RNA, 13 nt, Human
agucaccccagga

SEQ ID NO: 2893295 - RNA, 20 nt, Human
agucacccaugaagacagga

SEQ ID NO: 2893296 - RNA, 21 nt, Human
agucaccccaaguagucugcu

SEQ ID NO: 2893297 - RNA, 15 nt, Human
agucaccaagcccag

SEQ ID NO: 2893298 - RNA, 13 nt, Human
aguauuuugaagu

SEQ ID NO: 2893299 - RNA, 14 nt, Human
aguauuuugaaguu

SEQ ID NO: 2893300 - RNA, 15 nt, Human
aguauuuugaaguuu

SEQ ID NO: 2893301 - RNA, 18 nt, Human
aguauuuugaaguuuaca

SEQ ID NO: 2893302 - RNA, 19 nt, Human
aguauuuugaaguuuacau

SEQ ID NO: 2893303 - RNA, 20 nt, Human
aguauuuugaaguuuacauu

SEQ ID NO: 2893304 - RNA, 21 nt, Human
aguauuuugaaguuuacauuu

SEQ ID NO: 2893305 - RNA, 22 nt, Human
aguauuuugaaguuuacauuuu

SEQ ID NO: 2893306 - RNA, 23 nt, Human
aguauuuugaaguuuacauuuuu

SEQ ID NO: 2893307 - RNA, 12 nt, Human
uguccagccugg

SEQ ID NO: 2893308 - RNA, 15 nt, Human
uguccagcagucacu

SEQ ID NO: 2893309 - RNA, 21 nt, Human
uguccagagagcaacucugag

SEQ ID NO: 2893310 - RNA, 23 nt, Human
uguccaauuguugacaguucuga

SEQ ID NO: 2893311 - RNA, 23 nt, Human
ugucccugcacuugcagacucua

SEQ ID NO: 2893312 - RNA, 22 nt, Human
ugucccugcacuugcagacucu

SEQ ID NO: 2893313 - RNA, 20 nt, Human
ugucccugcacuugcagacu

SEQ ID NO: 2893314 - RNA, 21 nt, Human
uguccccuuggcagguccugg

SEQ ID NO: 2893315 - RNA, 23 nt, Human
uguccagccugggcagccaggcu

SEQ ID NO: 2893316 - RNA, 22 nt, Human
uguccagccugggcagccaggc

SEQ ID NO: 2893317 - RNA, 19 nt, Human
uguccagccugggcagcca

SEQ ID NO: 2893318 - RNA, 14 nt, Human
uguccagccugggc

SEQ ID NO: 2893319 - RNA, 13 nt, Human
uguccccucccag

SEQ ID NO: 2893320 - RNA, 16 nt, Human
uguccccucccagagc

SEQ ID NO: 2893321 - RNA, 12 nt, Human
uguccccugcuu

SEQ ID NO: 2893322 - RNA, 22 nt, Human
ugucauuugagcagggcucagc

SEQ ID NO: 2893323 - RNA, 21 nt, Human
ugucauuugagcagggcucag

SEQ ID NO: 2893324 - RNA, 20 nt, Human
ugucauuugagcagggcuca

SEQ ID NO: 2893325 - RNA, 20 nt, Human
ugucagguggggcagcuuga

SEQ ID NO: 2893326 - RNA, 18 nt, Human
ugucagguggggcagcuu

SEQ ID NO: 2893327 - RNA, 17 nt, Human
ugucagguggggcagcu

SEQ ID NO: 2893328 - RNA, 16 nt, Human
ugucagaugagaacaa

SEQ ID NO: 2893329 - RNA, 17 nt, Human
ugucagaugagaacaaa

SEQ ID NO: 2893330 - RNA, 18 nt, Human
ugucagaugagaacaaag

SEQ ID NO: 2893331 - RNA, 19 nt, Human
ugucagaugagaacaaagc

SEQ ID NO: 2893332 - RNA, 20 nt, Human
ugucagaugagaacaaagcu

SEQ ID NO: 2893333 - RNA, 21 nt, Human
ugucagaugagaacaaagcug

SEQ ID NO: 2893334 - RNA, 23 nt, Human
ugucagaugagaacaaagcuguu

SEQ ID NO: 2893335 - RNA, 12 nt, Human
uguccaaagcag

SEQ ID NO: 2893336 - RNA, 17 nt, Human
uguccaaagcagggucu

SEQ ID NO: 2893337 - RNA, 18 nt, Human
uguccaaagcagggucug

SEQ ID NO: 2893338 - RNA, 19 nt, Human
uguccaaaggaggcuggca

SEQ ID NO: 2893339 - RNA, 14 nt, Human
uguccaacuaaaaa

SEQ ID NO: 2893340 - RNA, 22 nt, Human
uguccaacuaaaaacaaacccu

SEQ ID NO: 2893341 - RNA, 19 nt, Human
uguccaaagcagggucugg

SEQ ID NO: 2893342 - RNA, 21 nt, Human
uguccaaagaggcugccccuc

SEQ ID NO: 2893343 - RNA, 20 nt, Human
uguccaaagaggcugccccu

SEQ ID NO: 2893344 - RNA, 19 nt, Human
uguccaaagaggcugcccc

SEQ ID NO: 2893345 - RNA, 17 nt, Human
uguccaaagaggcugcc

SEQ ID NO: 2893346 - RNA, 11 nt, Human
uguccaaagag

SEQ ID NO: 2893347 - RNA, 15 nt, Human
agucaguguugagau

SEQ ID NO: 2893348 - RNA, 16 nt, Human
agucaguguugagaug

SEQ ID NO: 2893349 - RNA, 18 nt, Human
agucagcuuucaucuuug

SEQ ID NO: 2893350 - RNA, 17 nt, Human
agucagcucuucaucug

SEQ ID NO: 2893351 - RNA, 20 nt, Human
agucagcucuucaucugccc

SEQ ID NO: 2893352 - RNA, 22 nt, Human
agucagcucuucaucugcccaa

SEQ ID NO: 2893353 - RNA, 23 nt, Human
agucagccuucccccucccaggg

SEQ ID NO: 2893354 - RNA, 22 nt, Human
agucagccuucccccucccagg

SEQ ID NO: 2893355 - RNA, 20 nt, Human
agucacuucggccagagcug

SEQ ID NO: 2893356 - RNA, 16 nt, Human
agucacuuacuauugu

SEQ ID NO: 2893357 - RNA, 19 nt, Human
agucacuuacuauuguugc

SEQ ID NO: 2893358 - RNA, 18 nt, Human
agucagccaggagcuguc

SEQ ID NO: 2893359 - RNA, 21 nt, Human
agucagccgacaacuauuucg

SEQ ID NO: 2893360 - RNA, 13 nt, Human
agucagaaaacuu

SEQ ID NO: 2893361 - RNA, 15 nt, Human
agucagaaaacuuua

SEQ ID NO: 2893362 - RNA, 17 nt, Human
agucagaaaacuuuaaa

SEQ ID NO: 2893363 - RNA, 23 nt, Human
agucagaaaacuuuaaaaaauau

SEQ ID NO: 2893364 - RNA, 14 nt, Human
ugucccugggccag

SEQ ID NO: 2893365 - RNA, 15 nt, Human
ugucccugggccagg

SEQ ID NO: 2893366 - RNA, 20 nt, Human
ugucccugggccagggucug

SEQ ID NO: 2893367 - RNA, 18 nt, Human
ugucgcuuucccuuggau

SEQ ID NO: 2893368 - RNA, 14 nt, Human
ugucggaggaaaga

SEQ ID NO: 2893369 - RNA, 16 nt, Human
ugucggaggaaagaca

SEQ ID NO: 2893370 - RNA, 17 nt, Human
ugucggaggaaagacaa

SEQ ID NO: 2893371 - RNA, 19 nt, Human
ugucggaggaaagacaaca

SEQ ID NO: 2893372 - RNA, 14 nt, Human
ugucggcacauuca

SEQ ID NO: 2893373 - RNA, 14 nt, Human
ugucgccucugcau

SEQ ID NO: 2893374 - RNA, 13 nt, Human
ugucgccucugca

SEQ ID NO: 2893375 - RNA, 16 nt, Human
agucccaccuuggcug

SEQ ID NO: 2893376 - RNA, 15 nt, Human
agucccaccuuggcu

SEQ ID NO: 2893377 - RNA, 12 nt, Human
aguccauuuaua

SEQ ID NO: 2893378 - RNA, 16 nt, Human
aguccauuuauauaug

SEQ ID NO: 2893379 - RNA, 17 nt, Human
aguccauuuauauauga

SEQ ID NO: 2893380 - RNA, 18 nt, Human
aguccauuuauauaugaa

SEQ ID NO: 2893381 - RNA, 19 nt, Human
aguccauuuauauaugaaa

SEQ ID NO: 2893382 - RNA, 20 nt, Human
aguccauuuauauaugaaaa

SEQ ID NO: 2893383 - RNA, 22 nt, Human
aguccauuuauauaugaaaacu

SEQ ID NO: 2893384 - RNA, 20 nt, Human
aguccaugcaugacagccuc

SEQ ID NO: 2893385 - RNA, 21 nt, Human
aguccaugcaugacagccucu

SEQ ID NO: 2893386 - RNA, 22 nt, Human
aguccaugcaugacagccucua

SEQ ID NO: 2893387 - RNA, 17 nt, Human
agucccaaggaaagccc

SEQ ID NO: 2893388 - RNA, 14 nt, Human
agucccaaggaaag

SEQ ID NO: 2893389 - RNA, 14 nt, Human
agucauagaaauag

SEQ ID NO: 2893390 - RNA, 14 nt, Human
agucaguuucuaca

SEQ ID NO: 2893391 - RNA, 15 nt, Human
agucaguuucuacac

SEQ ID NO: 2893392 - RNA, 16 nt, Human
agucaguugaaauucu

SEQ ID NO: 2893393 - RNA, 14 nt, Human
agucaguuugcagu

SEQ ID NO: 2893394 - RNA, 19 nt, Human
agucccaccuuggcugcag

SEQ ID NO: 2893395 - RNA, 18 nt, Human
agucccaccuuggcugca

SEQ ID NO: 2893396 - RNA, 21 nt, Human
agucccaaggaaagccccagc

SEQ ID NO: 2893397 - RNA, 20 nt, Human
agucccaaggaaagccccag

SEQ ID NO: 2893398 - RNA, 13 nt, Human
agucccacugugc

SEQ ID NO: 2893399 - RNA, 19 nt, Human
agucccaggcugagccuca

SEQ ID NO: 2893400 - RNA, 20 nt, Human
aguccccccucccaccucca

SEQ ID NO: 2893401 - RNA, 21 nt, Human
aguccccccucccaccuccag

SEQ ID NO: 2893402 - RNA, 18 nt, Human
agucccccuauccuuggc

SEQ ID NO: 2893403 - RNA, 19 nt, Human
agucccccuauccuuggca

SEQ ID NO: 2893404 - RNA, 22 nt, Human
agucccccuauccuuggcacca

SEQ ID NO: 2893405 - RNA, 18 nt, Human
agucccccaacucugagc

SEQ ID NO: 2893406 - RNA, 19 nt, Human
agucccccaacucugagcc

SEQ ID NO: 2893407 - RNA, 22 nt, Human
agucccccaacucugagcccau

SEQ ID NO: 2893408 - RNA, 23 nt, Human
agucccccaacucugagcccaug

SEQ ID NO: 2893409 - RNA, 18 nt, Human
agucccccagagauguca

SEQ ID NO: 2893410 - RNA, 22 nt, Human
agucccagcuacucagaagccu

SEQ ID NO: 2893411 - RNA, 18 nt, Human
agucccaggcugagccuc

SEQ ID NO: 2893412 - RNA, 17 nt, Human
agucccaggcugagccu

SEQ ID NO: 2893413 - RNA, 19 nt, Human
agucucacuuugucgccca

SEQ ID NO: 2893414 - RNA, 17 nt, Human
agucucaaaaauacaaa

SEQ ID NO: 2893415 - RNA, 21 nt, Human
agucucacuguugcccaggcu

SEQ ID NO: 2893416 - RNA, 15 nt, Human
ugucucaguuggaaa

SEQ ID NO: 2893417 - RNA, 16 nt, Human
ugucucaguuggaaau

SEQ ID NO: 2893418 - RNA, 23 nt, Human
ugucucauccccaggggucccag

SEQ ID NO: 2893419 - RNA, 14 nt, Human
ugucucauccuccu

SEQ ID NO: 2893420 - RNA, 15 nt, Human
ugucucauccuccug

SEQ ID NO: 2893421 - RNA, 18 nt, Human
ugucucauccuccuggaa

SEQ ID NO: 2893422 - RNA, 19 nt, Human
ugucucauccuccuggaac

SEQ ID NO: 2893423 - RNA, 14 nt, Human
ugucucauuuuaau

SEQ ID NO: 2893424 - RNA, 23 nt, Human
ugucucauuuuaauguaaagauu

SEQ ID NO: 2893425 - RNA, 16 nt, Human
ugucucauccccaggg

SEQ ID NO: 2893426 - RNA, 13 nt, Human
ugucucaucccca

SEQ ID NO: 2893427 - RNA, 13 nt, Human
ugucuccacugug

SEQ ID NO: 2893428 - RNA, 14 nt, Human
ugucuccacugugc

SEQ ID NO: 2893429 - RNA, 23 nt, Human
agucucacuguugcccaggcugg

SEQ ID NO: 2893430 - RNA, 18 nt, Human
agucuaucuaaugacaug

SEQ ID NO: 2893431 - RNA, 11 nt, Human
agucuauggcc

SEQ ID NO: 2893432 - RNA, 23 nt, Human
agucuauggccagguaugcaugg

SEQ ID NO: 2893433 - RNA, 22 nt, Human
aguccguguggauccaauguua

SEQ ID NO: 2893434 - RNA, 23 nt, Human
agucuaaauauucagaaucuuug

SEQ ID NO: 2893435 - RNA, 15 nt, Human
agucuacgcucuccu

SEQ ID NO: 2893436 - RNA, 14 nt, Human
agucuacgcucucc

SEQ ID NO: 2893437 - RNA, 12 nt, Human
agucuaguguag

SEQ ID NO: 2893438 - RNA, 15 nt, Human
agucuaguguaguau

SEQ ID NO: 2893439 - RNA, 17 nt, Human
agucuacgcucuccuuu

SEQ ID NO: 2893440 - RNA, 23 nt, Human
agucgauuauuuccaguguucua

SEQ ID NO: 2893441 - RNA, 12 nt, Human
aguccuccccuc

SEQ ID NO: 2893442 - RNA, 13 nt, Human
aguccuccccuca

SEQ ID NO: 2893443 - RNA, 14 nt, Human
aguccuccccucac

SEQ ID NO: 2893444 - RNA, 15 nt, Human
aguccuccccucaca

SEQ ID NO: 2893445 - RNA, 16 nt, Human
aguccuccccucacag

SEQ ID NO: 2893446 - RNA, 18 nt, Human
aguccuccccucacagcc

SEQ ID NO: 2893447 - RNA, 19 nt, Human
aguccuccccucacagccu

SEQ ID NO: 2893448 - RNA, 15 nt, Human
agucggaacagcaga

SEQ ID NO: 2893449 - RNA, 23 nt, Human
agucuaaagauggaguuucuaag

SEQ ID NO: 2893450 - RNA, 22 nt, Human
agucgucaucacuuuucaguga

SEQ ID NO: 2893451 - RNA, 18 nt, Human
aguccucacucccagucc

SEQ ID NO: 2893452 - RNA, 17 nt, Human
aguccucacucccaguc

SEQ ID NO: 2893453 - RNA, 16 nt, Human
aguccucacucccagu

SEQ ID NO: 2893454 - RNA, 15 nt, Human
aguccucacucccag

SEQ ID NO: 2893455 - RNA, 14 nt, Human
aguccuauggaaac

SEQ ID NO: 2893456 - RNA, 15 nt, Human
aguccuauggaaacc

SEQ ID NO: 2893457 - RNA, 13 nt, Human
aguccuagugaac

SEQ ID NO: 2893458 - RNA, 16 nt, Human
aguccuagugaaccuc

SEQ ID NO: 2893459 - RNA, 17 nt, Human
aguccuagccacucagg

SEQ ID NO: 2893460 - RNA, 16 nt, Human
agucccccugccccag

SEQ ID NO: 2893461 - RNA, 18 nt, Human
aguccccgggcaucuuug

SEQ ID NO: 2893462 - RNA, 19 nt, Human
aguccccgggcaucuuugg

SEQ ID NO: 2893463 - RNA, 22 nt, Human
aguccccgggcaucuuugggga

SEQ ID NO: 2893464 - RNA, 16 nt, Human
aguccccucaccuccu

SEQ ID NO: 2893465 - RNA, 16 nt, Human
aguccccguggccauc

SEQ ID NO: 2893466 - RNA, 22 nt, Human
aguccccguggccaucccugug

SEQ ID NO: 2893467 - RNA, 23 nt, Human
aggugcuaaauggucgcccagga

SEQ ID NO: 2893468 - RNA, 15 nt, Human
aggugccuuucaaau

SEQ ID NO: 2893469 - RNA, 18 nt, Human
aggugccuuucaaauuua

SEQ ID NO: 2893470 - RNA, 19 nt, Human
aggugccuuucaaauuuag

SEQ ID NO: 2893471 - RNA, 21 nt, Human
aggugcgaaugacaguagcau

SEQ ID NO: 2893472 - RNA, 15 nt, Human
aggugcuaaaucugc

SEQ ID NO: 2893473 - RNA, 13 nt, Human
aggugggagcagg

SEQ ID NO: 2893474 - RNA, 14 nt, Human
aggugggagcagga

SEQ ID NO: 2893475 - RNA, 15 nt, Human
aggugggagcaggag

SEQ ID NO: 2893476 - RNA, 16 nt, Human
aggugggagcaggaga

SEQ ID NO: 2893477 - RNA, 17 nt, Human
aggugggagcaggagau

SEQ ID NO: 2893478 - RNA, 20 nt, Human
aggugggagcaggagauuga

SEQ ID NO: 2893479 - RNA, 15 nt, Human
aggugggcugagccc

SEQ ID NO: 2893480 - RNA, 17 nt, Human
aggugggcugagcccug

SEQ ID NO: 2893481 - RNA, 16 nt, Human
aggugggcugagcccu

SEQ ID NO: 2893482 - RNA, 21 nt, Human
ugggcucugccccagcucugg

SEQ ID NO: 2893483 - RNA, 20 nt, Human
ugggcucugccccagcucug

SEQ ID NO: 2893484 - RNA, 23 nt, Human
ugggcucugccccagcucuggcu

SEQ ID NO: 2893485 - RNA, 19 nt, Human
ugggcucugccccagcucu

SEQ ID NO: 2893486 - RNA, 17 nt, Human
ugggcucugccccagcu

SEQ ID NO: 2893487 - RNA, 15 nt, Human
ugggcucugccccag

SEQ ID NO: 2893488 - RNA, 12 nt, Human
ugggcucugccc

SEQ ID NO: 2893489 - RNA, 20 nt, Human
ugggcucugcaauuccccuc

SEQ ID NO: 2893490 - RNA, 22 nt, Human
ugggcucugcaauuccccucug

SEQ ID NO: 2893491 - RNA, 13 nt, Human
ugggcugcccugg

SEQ ID NO: 2893492 - RNA, 14 nt, Human
ugggcugcccuggu

SEQ ID NO: 2893493 - RNA, 13 nt, Human
aggugccuucuuc

SEQ ID NO: 2893494 - RNA, 16 nt, Human
aggugccuucuucagg

SEQ ID NO: 2893495 - RNA, 17 nt, Human
aggugccuucuucaggg

SEQ ID NO: 2893496 - RNA, 18 nt, Human
aggugccuucuucagggc

SEQ ID NO: 2893497 - RNA, 20 nt, Human
aggugccuucuucagggccu

SEQ ID NO: 2893498 - RNA, 21 nt, Human
aggugccuucuucagggccug

SEQ ID NO: 2893499 - RNA, 22 nt, Human
aggugccuucuucagggccugg

SEQ ID NO: 2893500 - RNA, 23 nt, Human
aggugccuucuucagggccuggu

SEQ ID NO: 2893501 - RNA, 11 nt, Human
aggugccuucu

SEQ ID NO: 2893502 - RNA, 15 nt, Human
ugggcugcccuggug

SEQ ID NO: 2893503 - RNA, 14 nt, Human
agguugaagcacca

SEQ ID NO: 2893504 - RNA, 20 nt, Human
agguugcauugagcugagau

SEQ ID NO: 2893505 - RNA, 16 nt, Human
agguugcuguuucaca

SEQ ID NO: 2893506 - RNA, 14 nt, Human
agguuggaagagaa

SEQ ID NO: 2893507 - RNA, 15 nt, Human
agguuggaagagaau

SEQ ID NO: 2893508 - RNA, 17 nt, Human
agguuggaagagaauca

SEQ ID NO: 2893509 - RNA, 18 nt, Human
agguuggaagagaaucac

SEQ ID NO: 2893510 - RNA, 19 nt, Human
agguucuucaucccuuucc

SEQ ID NO: 2893511 - RNA, 22 nt, Human
aggugugagucaccaagcccag

SEQ ID NO: 2893512 - RNA, 21 nt, Human
aggugugagucaccaagccca

SEQ ID NO: 2893513 - RNA, 20 nt, Human
aggugucccugcacuugcag

SEQ ID NO: 2893514 - RNA, 16 nt, Human
aggugucccugcacuu

SEQ ID NO: 2893515 - RNA, 20 nt, Human
aggugggcugagcccuggca

SEQ ID NO: 2893516 - RNA, 19 nt, Human
aggugggcugagcccuggc

SEQ ID NO: 2893517 - RNA, 18 nt, Human
aggugggcugagcccugg

SEQ ID NO: 2893518 - RNA, 15 nt, Human
aggugggcuucccag

SEQ ID NO: 2893519 - RNA, 21 nt, Human
aggugggcuucccaguggcug

SEQ ID NO: 2893520 - RNA, 18 nt, Human
aggugggcuucaguaagu

SEQ ID NO: 2893521 - RNA, 13 nt, Human
agguggggacagg

SEQ ID NO: 2893522 - RNA, 14 nt, Human
agguggggacaggg

SEQ ID NO: 2893523 - RNA, 13 nt, Human
agguguauuuaaa

SEQ ID NO: 2893524 - RNA, 13 nt, Human
aggugucacaugg

SEQ ID NO: 2893525 - RNA, 23 nt, Human
aggugucagccauugcacccagc

SEQ ID NO: 2893526 - RNA, 17 nt, Human
agguggggacagggaug

SEQ ID NO: 2893527 - RNA, 19 nt, Human
uguaauugacgguuuuuua

SEQ ID NO: 2893528 - RNA, 23 nt, Human
uguaauugacgguuuuuuauuau

SEQ ID NO: 2893529 - RNA, 14 nt, Human
uguaauucuucagu

SEQ ID NO: 2893530 - RNA, 16 nt, Human
uguaauugcuuuuuua

SEQ ID NO: 2893531 - RNA, 18 nt, Human
uguaauuguaauuuugaa

SEQ ID NO: 2893532 - RNA, 13 nt, Human
uguaauucagugu

SEQ ID NO: 2893533 - RNA, 14 nt, Human
uguaauucagugua

SEQ ID NO: 2893534 - RNA, 21 nt, Human
uguaaggcuuguuccaaugcc

SEQ ID NO: 2893535 - RNA, 18 nt, Human
agguuucuggucucuagg

SEQ ID NO: 2893536 - RNA, 14 nt, Human
uguaaggcucuaga

SEQ ID NO: 2893537 - RNA, 15 nt, Human
uguaaggcucuagau

SEQ ID NO: 2893538 - RNA, 18 nt, Human
uguaaggcucuagaucau

SEQ ID NO: 2893539 - RNA, 13 nt, Human
agguuucaaagau

SEQ ID NO: 2893540 - RNA, 14 nt, Human
agguuucaaagaug

SEQ ID NO: 2893541 - RNA, 16 nt, Human
agguuggaccccagag

SEQ ID NO: 2893542 - RNA, 17 nt, Human
agguuggaccccagaga

SEQ ID NO: 2893543 - RNA, 17 nt, Human
agguuucguuucuguau

SEQ ID NO: 2893544 - RNA, 17 nt, Human
agguuucaaagaugcug

SEQ ID NO: 2893545 - RNA, 16 nt, Human
agguuucccaauggug

SEQ ID NO: 2893546 - RNA, 18 nt, Human
agguuucccaaugguguu

SEQ ID NO: 2893547 - RNA, 11 nt, Human
uguacauaaaa

SEQ ID NO: 2893548 - RNA, 13 nt, Human
uguacauaaaaga

SEQ ID NO: 2893549 - RNA, 16 nt, Human
uguacauaaaagaauu

SEQ ID NO: 2893550 - RNA, 18 nt, Human
uguacauaaaagaauuuu

SEQ ID NO: 2893551 - RNA, 14 nt, Human
uguacauaaacaau

SEQ ID NO: 2893552 - RNA, 19 nt, Human
uguacauaaacaaugaugc

SEQ ID NO: 2893553 - RNA, 23 nt, Human
uguacauaaauugcauaaagcau

SEQ ID NO: 2893554 - RNA, 14 nt, Human
uguacauaacucug

SEQ ID NO: 2893555 - RNA, 23 nt, Human
uguacauaacucuguaaaaacac

SEQ ID NO: 2893556 - RNA, 17 nt, Human
uguacaaaauaaacaaa

SEQ ID NO: 2893557 - RNA, 13 nt, Human
uguacaaaauaaa

SEQ ID NO: 2893558 - RNA, 15 nt, Human
uguaauuguuccuuu

SEQ ID NO: 2893559 - RNA, 16 nt, Human
uguaauuguuccuuuu

SEQ ID NO: 2893560 - RNA, 19 nt, Human
uguaauuguuccuuuuauu

SEQ ID NO: 2893561 - RNA, 22 nt, Human
uguaauuuuucagcucucugua

SEQ ID NO: 2893562 - RNA, 21 nt, Human
uguacaucuauuuuggauugu

SEQ ID NO: 2893563 - RNA, 20 nt, Human
uguacaucuauuuuggauug

SEQ ID NO: 2893564 - RNA, 19 nt, Human
uguacaucuauuuuggauu

SEQ ID NO: 2893565 - RNA, 18 nt, Human
uguacaucuauuuuggau

SEQ ID NO: 2893566 - RNA, 14 nt, Human
uguacaucuggccu

SEQ ID NO: 2893567 - RNA, 14 nt, Human
uguacaucuggcuu

SEQ ID NO: 2893568 - RNA, 15 nt, Human
uguacaucuggcuua

SEQ ID NO: 2893569 - RNA, 16 nt, Human
uguacaucuggcuuau

SEQ ID NO: 2893570 - RNA, 17 nt, Human
uguacaucuggcuuauu

SEQ ID NO: 2893571 - RNA, 21 nt, Human
uguacaucuggcuuauuuuaa

SEQ ID NO: 2893572 - RNA, 23 nt, Human
uguacaucuauuuuggauuguau

SEQ ID NO: 2893573 - RNA, 21 nt, Human
uguacauacccuggccgcccc

SEQ ID NO: 2893574 - RNA, 22 nt, Human
uguacauaaugcuuaauuucua

SEQ ID NO: 2893575 - RNA, 23 nt, Human
uguacauaaugcuuaauuucuaa

SEQ ID NO: 2893576 - RNA, 18 nt, Human
uguacauaguuauuuauu

SEQ ID NO: 2893577 - RNA, 15 nt, Human
uguacauaguguaau

SEQ ID NO: 2893578 - RNA, 16 nt, Human
uguacauaguguaaug

SEQ ID NO: 2893579 - RNA, 14 nt, Human
uguagugauucaaa

SEQ ID NO: 2893580 - RNA, 15 nt, Human
uguauaguguaaaau

SEQ ID NO: 2893581 - RNA, 16 nt, Human
uguauaguguaaaaua

SEQ ID NO: 2893582 - RNA, 24 nt, Human
uguauaguguaaaauaagaaugau

SEQ ID NO: 2893583 - RNA, 13 nt, Human
uguauaguugcuu

SEQ ID NO: 2893584 - RNA, 14 nt, Human
uguauaguugcuuu

SEQ ID NO: 2893585 - RNA, 15 nt, Human
uguauaguugcuuuu

SEQ ID NO: 2893586 - RNA, 17 nt, Human
uguauaguugcuuuuga

SEQ ID NO: 2893587 - RNA, 20 nt, Human
uguauaguuaggauagcauu

SEQ ID NO: 2893588 - RNA, 17 nt, Human
uguauauacaauaacau

SEQ ID NO: 2893589 - RNA, 18 nt, Human
uguauauacaauaacaua

SEQ ID NO: 2893590 - RNA, 13 nt, Human
uguauauacacau

SEQ ID NO: 2893591 - RNA, 14 nt, Human
uguauauacacaua

SEQ ID NO: 2893592 - RNA, 16 nt, Human
uguauauacacauaua

SEQ ID NO: 2893593 - RNA, 17 nt, Human
uguauauacacauauac

SEQ ID NO: 2893594 - RNA, 18 nt, Human
uguauauacacauauacc

SEQ ID NO: 2893595 - RNA, 19 nt, Human
uguauauacacauauaccu

SEQ ID NO: 2893596 - RNA, 20 nt, Human
uguauauacacauauaccua

SEQ ID NO: 2893597 - RNA, 15 nt, Human
uguauauacauauau

SEQ ID NO: 2893598 - RNA, 16 nt, Human
uguauauacaauaaca

SEQ ID NO: 2893599 - RNA, 15 nt, Human
uguauauacaauaac

SEQ ID NO: 2893600 - RNA, 17 nt, Human
uguauaguuuucccuau

SEQ ID NO: 2893601 - RNA, 14 nt, Human
uguauauaaauggg

SEQ ID NO: 2893602 - RNA, 18 nt, Human
uguauauaaaugggaaca

SEQ ID NO: 2893603 - RNA, 19 nt, Human
uguauauaaaugggaacau

SEQ ID NO: 2893604 - RNA, 20 nt, Human
uguauauaaaugggaacauu

SEQ ID NO: 2893605 - RNA, 17 nt, Human
uguauauaucugcuuca

SEQ ID NO: 2893606 - RNA, 14 nt, Human
uguauauaugugua

SEQ ID NO: 2893607 - RNA, 15 nt, Human
uguauauauguguau

SEQ ID NO: 2893608 - RNA, 16 nt, Human
uguauauauguguaua

SEQ ID NO: 2893609 - RNA, 18 nt, Human
uguauauauguguauaua

SEQ ID NO: 2893610 - RNA, 20 nt, Human
uguauauauguguauauaua

SEQ ID NO: 2893611 - RNA, 21 nt, Human
uguauauauguguauauauac

SEQ ID NO: 2893612 - RNA, 22 nt, Human
uguauauauguguauauauaca

SEQ ID NO: 2893613 - RNA, 23 nt, Human
uguauauauguguauauauacau

SEQ ID NO: 2893614 - RNA, 17 nt, Human
uguauauauauuaagag

SEQ ID NO: 2893615 - RNA, 14 nt, Human
uguauauauaugug

SEQ ID NO: 2893616 - RNA, 21 nt, Human
uguauauauaugugaggaugu

SEQ ID NO: 2893617 - RNA, 17 nt, Human
uguauauauacauacac

SEQ ID NO: 2893618 - RNA, 18 nt, Human
uguauauauacauacacu

SEQ ID NO: 2893619 - RNA, 19 nt, Human
uguauauauacauacacuu

SEQ ID NO: 2893620 - RNA, 20 nt, Human
uguauauauacauacacuug

SEQ ID NO: 2893621 - RNA, 14 nt, Human
uguauauauacaua

SEQ ID NO: 2893622 - RNA, 13 nt, Human
uguauauauacau

SEQ ID NO: 2893623 - RNA, 13 nt, Human
uguauauacuuuu

SEQ ID NO: 2893624 - RNA, 14 nt, Human
uguauauaguuuuu

SEQ ID NO: 2893625 - RNA, 11 nt, Human
uguauauauac

SEQ ID NO: 2893626 - RNA, 12 nt, Human
uguauauacuuu

SEQ ID NO: 2893627 - RNA, 17 nt, Human
uguauauacgcaucuau

SEQ ID NO: 2893628 - RNA, 21 nt, Human
uguauauacgcaucuauaaau

SEQ ID NO: 2893629 - RNA, 16 nt, Human
uguauauauuuagugc

SEQ ID NO: 2893630 - RNA, 18 nt, Human
uguauauauuuagugcug

SEQ ID NO: 2893631 - RNA, 18 nt, Human
uguauauccuuucuaaca

SEQ ID NO: 2893632 - RNA, 13 nt, Human
uguauaucagaaa

SEQ ID NO: 2893633 - RNA, 14 nt, Human
uguauaucagaaaa

SEQ ID NO: 2893634 - RNA, 18 nt, Human
uguauaucagaaaaggga

SEQ ID NO: 2893635 - RNA, 23 nt, Human
uguaguccuagccacucaggagg

SEQ ID NO: 2893636 - RNA, 13 nt, Human
uguagguaaaaug

SEQ ID NO: 2893637 - RNA, 15 nt, Human
uguagguaaaaugua

SEQ ID NO: 2893638 - RNA, 19 nt, Human
uguagguaaaauguauuuu

SEQ ID NO: 2893639 - RNA, 14 nt, Human
uguagucauuuacu

SEQ ID NO: 2893640 - RNA, 15 nt, Human
uguagucauuuacua

SEQ ID NO: 2893641 - RNA, 19 nt, Human
uguagucauuuacuaaaca

SEQ ID NO: 2893642 - RNA, 20 nt, Human
uguagucauuuacuaaacau

SEQ ID NO: 2893643 - RNA, 24 nt, Human
uguagucauuuacuaaacauauga

SEQ ID NO: 2893644 - RNA, 16 nt, Human
uguaggguuacagaga

SEQ ID NO: 2893645 - RNA, 22 nt, Human
aguagauucuggacagucagcu

SEQ ID NO: 2893646 - RNA, 20 nt, Human
aguagauuuacagaacaaag

SEQ ID NO: 2893647 - RNA, 15 nt, Human
aguaccacucaggcc

SEQ ID NO: 2893648 - RNA, 14 nt, Human
aguaccagcgcucu

SEQ ID NO: 2893649 - RNA, 21 nt, Human
aguaccagcgcucuaaaagca

SEQ ID NO: 2893650 - RNA, 22 nt, Human
aguaccagcgcucuaaaagcac

SEQ ID NO: 2893651 - RNA, 23 nt, Human
aguaccaguaggggcuuauaaua

SEQ ID NO: 2893652 - RNA, 15 nt, Human
aguaccaaaguuuua

SEQ ID NO: 2893653 - RNA, 18 nt, Human
aguaccaaaguuuuauca

SEQ ID NO: 2893654 - RNA, 19 nt, Human
aguaccaaaguuuuaucaa

SEQ ID NO: 2893655 - RNA, 19 nt, Human
aguaaguaccacucaggcc

SEQ ID NO: 2893656 - RNA, 20 nt, Human
aguaaguaccacucaggcca

SEQ ID NO: 2893657 - RNA, 13 nt, Human
aguaauagagcaa

SEQ ID NO: 2893658 - RNA, 14 nt, Human
uguacauagauuua

SEQ ID NO: 2893659 - RNA, 17 nt, Human
aguaauaaacuguguuu

SEQ ID NO: 2893660 - RNA, 14 nt, Human
aguaaguucagcac

SEQ ID NO: 2893661 - RNA, 17 nt, Human
aguaaguucagcacuug

SEQ ID NO: 2893662 - RNA, 16 nt, Human
aguaauaaacuguguu

SEQ ID NO: 2893663 - RNA, 16 nt, Human
uguacaugagaaggaa

SEQ ID NO: 2893664 - RNA, 14 nt, Human
uguacaugcauuca

SEQ ID NO: 2893665 - RNA, 12 nt, Human
uguacaugaaau

SEQ ID NO: 2893666 - RNA, 18 nt, Human
uguacaugaaauuuuugu

SEQ ID NO: 2893667 - RNA, 19 nt, Human
uguacaugaaauuuuugua

SEQ ID NO: 2893668 - RNA, 20 nt, Human
uguacaugaaauuuuuguaa

SEQ ID NO: 2893669 - RNA, 17 nt, Human
uguacauggcagaguuu

SEQ ID NO: 2893670 - RNA, 19 nt, Human
uguacauggcagaguuugu

SEQ ID NO: 2893671 - RNA, 11 nt, Human
uguacaugugu

SEQ ID NO: 2893672 - RNA, 19 nt, Human
agguuuuuguuuguuuccu

SEQ ID NO: 2893673 - RNA, 22 nt, Human
agguuuuuuuguauaguaaagu

SEQ ID NO: 2893674 - RNA, 22 nt, Human
agguuuuuuugucaacauugug

SEQ ID NO: 2893675 - RNA, 21 nt, Human
agguuuuuuuguauaguaaag

SEQ ID NO: 2893676 - RNA, 19 nt, Human
aguaauucaagaaaacaac

SEQ ID NO: 2893677 - RNA, 14 nt, Human
aguaauucucaggc

SEQ ID NO: 2893678 - RNA, 20 nt, Human
aguaauugacaugugccagg

SEQ ID NO: 2893679 - RNA, 18 nt, Human
aguaauugacaugugcca

SEQ ID NO: 2893680 - RNA, 19 nt, Human
aguaaucuaauauggccac

SEQ ID NO: 2893681 - RNA, 13 nt, Human
aguaaucuguaca

SEQ ID NO: 2893682 - RNA, 14 nt, Human
aguaaucuguacau

SEQ ID NO: 2893683 - RNA, 15 nt, Human
aguaaucuguacauu

SEQ ID NO: 2893684 - RNA, 18 nt, Human
aguaaucuguacauuuug

SEQ ID NO: 2893685 - RNA, 19 nt, Human
aguaaucuguacauuuugu

SEQ ID NO: 2893686 - RNA, 21 nt, Human
aguaaucuguacauuuuguug

SEQ ID NO: 2893687 - RNA, 23 nt, Human
aguaaucuguacauuuuguugua

SEQ ID NO: 2893688 - RNA, 19 nt, Human
aguacacuuuuaugagcuu

SEQ ID NO: 2893689 - RNA, 19 nt, Human
aguacauuuggagacacaa

SEQ ID NO: 2893690 - RNA, 15 nt, Human
aguacagcaugugcc

SEQ ID NO: 2893691 - RNA, 16 nt, Human
aguacagcaugugccu

SEQ ID NO: 2893692 - RNA, 22 nt, Human
aguguucuguuuguuauuguuu

SEQ ID NO: 2893693 - RNA, 16 nt, Human
aguguugaaaauguuc

SEQ ID NO: 2893694 - RNA, 18 nt, Human
aguguucugccagaucuu

SEQ ID NO: 2893695 - RNA, 13 nt, Human
aguguucugucua

SEQ ID NO: 2893696 - RNA, 15 nt, Human
aguguucgcuuggcu

SEQ ID NO: 2893697 - RNA, 20 nt, Human
aguguguguggcagcaggca

SEQ ID NO: 2893698 - RNA, 14 nt, Human
agugugugugugca

SEQ ID NO: 2893699 - RNA, 16 nt, Human
agugugugugugcaug

SEQ ID NO: 2893700 - RNA, 18 nt, Human
agugugugugugcaugug

SEQ ID NO: 2893701 - RNA, 20 nt, Human
agugugugugugcaugugug

SEQ ID NO: 2893702 - RNA, 23 nt, Human
aguguugguuuaauauuaccuaa

SEQ ID NO: 2893703 - RNA, 16 nt, Human
aguuagcucaggaggc

SEQ ID NO: 2893704 - RNA, 14 nt, Human
aguuagcucaggag

SEQ ID NO: 2893705 - RNA, 12 nt, Human
aguuagagcuga

SEQ ID NO: 2893706 - RNA, 15 nt, Human
aguuagcaaacuuug

SEQ ID NO: 2893707 - RNA, 16 nt, Human
aguuagcaaacuuugu

SEQ ID NO: 2893708 - RNA, 22 nt, Human
aguuagcaaacuuuguauguca

SEQ ID NO: 2893709 - RNA, 23 nt, Human
aguuacuaucaugucaaacguga

SEQ ID NO: 2893710 - RNA, 16 nt, Human
uguucuaacauguaau

SEQ ID NO: 2893711 - RNA, 13 nt, Human
uguucuaagaugu

SEQ ID NO: 2893712 - RNA, 14 nt, Human
uguucuaagaugug

SEQ ID NO: 2893713 - RNA, 18 nt, Human
uguucuaaagcucugaca

SEQ ID NO: 2893714 - RNA, 19 nt, Human
uguucuaaagcucugacau

SEQ ID NO: 2893715 - RNA, 17 nt, Human
uguugcacugaaaugga

SEQ ID NO: 2893716 - RNA, 23 nt, Human
uguugcacacccacucagcuccg

SEQ ID NO: 2893717 - RNA, 22 nt, Human
uguucuaagaugugauauucua

SEQ ID NO: 2893718 - RNA, 10 nt, Human
uguucuaagg

SEQ ID NO: 2893719 - RNA, 16 nt, Human
uguucuaagaugugau

SEQ ID NO: 2893720 - RNA, 12 nt, Human
uguucuaaggcu

SEQ ID NO: 2893721 - RNA, 14 nt, Human
uguugcauguuuga

SEQ ID NO: 2893722 - RNA, 15 nt, Human
uguugcauguuugaa

SEQ ID NO: 2893723 - RNA, 16 nt, Human
uguugcauuauucauu

SEQ ID NO: 2893724 - RNA, 18 nt, Human
uguugcauuauucauuua

SEQ ID NO: 2893725 - RNA, 20 nt, Human
uguugcauuauucauuuagu

SEQ ID NO: 2893726 - RNA, 20 nt, Human
uguugcccaggcuggcgugc

SEQ ID NO: 2893727 - RNA, 23 nt, Human
uguugcccaggcuggcgugcagu

SEQ ID NO: 2893728 - RNA, 15 nt, Human
uguugccauguguuu

SEQ ID NO: 2893729 - RNA, 23 nt, Human
uguugcccaacuacuaucucaga

SEQ ID NO: 2893730 - RNA, 14 nt, Human
uguugccauguguu

SEQ ID NO: 2893731 - RNA, 22 nt, Human
uguugccuaaguauuaaaacau

SEQ ID NO: 2893732 - RNA, 15 nt, Human
uguugcccuuucugu

SEQ ID NO: 2893733 - RNA, 21 nt, Human
uguugcccuuucuguaccauu

SEQ ID NO: 2893734 - RNA, 12 nt, Human
uguugccuaagu

SEQ ID NO: 2893735 - RNA, 16 nt, Human
agugugugguguuagg

SEQ ID NO: 2893736 - RNA, 16 nt, Human
uguuccaaggccaggg

SEQ ID NO: 2893737 - RNA, 15 nt, Human
uguuccaaguuucca

SEQ ID NO: 2893738 - RNA, 17 nt, Human
uguuccaaguuuccaaa

SEQ ID NO: 2893739 - RNA, 15 nt, Human
uguuccaaugccaca

SEQ ID NO: 2893740 - RNA, 20 nt, Human
uguuccaaugccacauacuu

SEQ ID NO: 2893741 - RNA, 21 nt, Human
uguuccaaugccacauacuug

SEQ ID NO: 2893742 - RNA, 18 nt, Human
uguuccaaugucaaugug

SEQ ID NO: 2893743 - RNA, 17 nt, Human
uguucgguuuuuuuccu

SEQ ID NO: 2893744 - RNA, 21 nt, Human
uguucgguuuuuuuccuguuu

SEQ ID NO: 2893745 - RNA, 19 nt, Human
uguucguugguuauacaag

SEQ ID NO: 2893746 - RNA, 13 nt, Human
uguucuaaagcuc

SEQ ID NO: 2893747 - RNA, 14 nt, Human
uguucuaaagcucu

SEQ ID NO: 2893748 - RNA, 16 nt, Human
uguucuaaagcucuga

SEQ ID NO: 2893749 - RNA, 14 nt, Human
uguucgcuuggcuc

SEQ ID NO: 2893750 - RNA, 19 nt, Human
uguucgcuuggcuccaugc

SEQ ID NO: 2893751 - RNA, 23 nt, Human
uguucgcauggucacacacugau

SEQ ID NO: 2893752 - RNA, 22 nt, Human
uguucgcauggucacacacuga

SEQ ID NO: 2893753 - RNA, 20 nt, Human
uguucgcauggucacacacu

SEQ ID NO: 2893754 - RNA, 19 nt, Human
uguuccuuagaccuuccau

SEQ ID NO: 2893755 - RNA, 20 nt, Human
uguuaugacuauguaaacua

SEQ ID NO: 2893756 - RNA, 18 nt, Human
uguuaugacuauguaaac

SEQ ID NO: 2893757 - RNA, 17 nt, Human
uguuaugacuauguaaa

SEQ ID NO: 2893758 - RNA, 16 nt, Human
uguuaugacuauguaa

SEQ ID NO: 2893759 - RNA, 16 nt, Human
aguguguaugccaaga

SEQ ID NO: 2893760 - RNA, 13 nt, Human
uguuaugaaauaa

SEQ ID NO: 2893761 - RNA, 16 nt, Human
uguuaugaaauaaaga

SEQ ID NO: 2893762 - RNA, 21 nt, Human
uguuaugaaauaaagaaauug

SEQ ID NO: 2893763 - RNA, 22 nt, Human
uguuaucuucucaaguucuaag

SEQ ID NO: 2893764 - RNA, 23 nt, Human
uguuaucuucucaaguucuaaga

SEQ ID NO: 2893765 - RNA, 14 nt, Human
agugugggaggcuc

SEQ ID NO: 2893766 - RNA, 16 nt, Human
agugugggaggcuccu

SEQ ID NO: 2893767 - RNA, 18 nt, Human
agugugggaggcuccugu

SEQ ID NO: 2893768 - RNA, 20 nt, Human
agugugggaggcuccuguua

SEQ ID NO: 2893769 - RNA, 20 nt, Human
aguguggcugaggaggccuc

SEQ ID NO: 2893770 - RNA, 14 nt, Human
aguguggacucugg

SEQ ID NO: 2893771 - RNA, 12 nt, Human
aguguggagugg

SEQ ID NO: 2893772 - RNA, 17 nt, Human
aguguggaguggguaau

SEQ ID NO: 2893773 - RNA, 22 nt, Human
aguguggaguggguaauccagg

SEQ ID NO: 2893774 - RNA, 19 nt, Human
agugugcugcuguaagaaa

SEQ ID NO: 2893775 - RNA, 20 nt, Human
agugugcugcuguaagaaau

SEQ ID NO: 2893776 - RNA, 16 nt, Human
agugugacagggccag

SEQ ID NO: 2893777 - RNA, 17 nt, Human
agugugacagggccagu

SEQ ID NO: 2893778 - RNA, 22 nt, Human
agugugacagggccaguggggc

SEQ ID NO: 2893779 - RNA, 17 nt, Human
agugguccacaucccgg

SEQ ID NO: 2893780 - RNA, 19 nt, Human
uguuaacucuugucuauuu

SEQ ID NO: 2893781 - RNA, 22 nt, Human
uguguuaaguauguguaaaaug

SEQ ID NO: 2893782 - RNA, 23 nt, Human
uguuaagcagauggaaugcugug

SEQ ID NO: 2893783 - RNA, 17 nt, Human
uguuaagaaaucuguuu

SEQ ID NO: 2893784 - RNA, 15 nt, Human
uguuaagaauugacc

SEQ ID NO: 2893785 - RNA, 23 nt, Human
uguuaagaauugaccaucugcuu

SEQ ID NO: 2893786 - RNA, 22 nt, Human
uguuaacugagugccuuuuggu

SEQ ID NO: 2893787 - RNA, 16 nt, Human
uguuaacugagugccu

SEQ ID NO: 2893788 - RNA, 16 nt, Human
uguuacacaaugguuu

SEQ ID NO: 2893789 - RNA, 22 nt, Human
uguuacacaaugguuuuuaaau

SEQ ID NO: 2893790 - RNA, 22 nt, Human
uguuaaguugauggugaugaaa

SEQ ID NO: 2893791 - RNA, 18 nt, Human
uguuaagcagcuaaauuu

SEQ ID NO: 2893792 - RNA, 23 nt, Human
uguuaagcagcuaaauuuucuga

SEQ ID NO: 2893793 - RNA, 22 nt, Human
agugggcuugauucugcaguaa

SEQ ID NO: 2893794 - RNA, 16 nt, Human
agugggcuugauucug

SEQ ID NO: 2893795 - RNA, 15 nt, Human
aguggggacagagca

SEQ ID NO: 2893796 - RNA, 14 nt, Human
aguggggaggggcu

SEQ ID NO: 2893797 - RNA, 12 nt, Human
aguggauguaua

SEQ ID NO: 2893798 - RNA, 18 nt, Human
agugggguuaucucugug

SEQ ID NO: 2893799 - RNA, 19 nt, Human
agugggguuaucucugugu

SEQ ID NO: 2893800 - RNA, 16 nt, Human
aguggggcagagccuc

SEQ ID NO: 2893801 - RNA, 23 nt, Human
uguuacagccaagugccaaaugc

SEQ ID NO: 2893802 - RNA, 14 nt, Human
aguggauugcauuu

SEQ ID NO: 2893803 - RNA, 21 nt, Human
aguggauuguaggugcaagau

SEQ ID NO: 2893804 - RNA, 14 nt, Human
aguggauuguuuau

SEQ ID NO: 2893805 - RNA, 17 nt, Human
aguggauggaaggggcu

SEQ ID NO: 2893806 - RNA, 17 nt, Human
aguggaccuuaggccuu

SEQ ID NO: 2893807 - RNA, 19 nt, Human
aguggaccuuaggccuucc

SEQ ID NO: 2893808 - RNA, 20 nt, Human
aguggaccuuaggccuuccu

SEQ ID NO: 2893809 - RNA, 23 nt, Human
aguggaccuuaggccuuccucuc

SEQ ID NO: 2893810 - RNA, 17 nt, Human
uguuacauaacaagaaa

SEQ ID NO: 2893811 - RNA, 22 nt, Human
uguuacauaacaagaaaaucaa

SEQ ID NO: 2893812 - RNA, 15 nt, Human
aguggacuggccccu

SEQ ID NO: 2893813 - RNA, 16 nt, Human
aguggacuggccccug

SEQ ID NO: 2893814 - RNA, 17 nt, Human
aguggacuggccccugg

SEQ ID NO: 2893815 - RNA, 18 nt, Human
aguggacuggccccuggg

SEQ ID NO: 2893816 - RNA, 22 nt, Human
ugugucuaaauuugaauguuaa

SEQ ID NO: 2893817 - RNA, 19 nt, Human
ugugucuaaauuugaaugu

SEQ ID NO: 2893818 - RNA, 19 nt, Human
ugugucugcgucuguguug

SEQ ID NO: 2893819 - RNA, 13 nt, Human
ugugucuguacac

SEQ ID NO: 2893820 - RNA, 14 nt, Human
ugugucugcucagu

SEQ ID NO: 2893821 - RNA, 22 nt, Human
ugugucugcuuuaaagggccug

SEQ ID NO: 2893822 - RNA, 14 nt, Human
ugugucuguacacg

SEQ ID NO: 2893823 - RNA, 21 nt, Human
ugugucuguacacguguccug

SEQ ID NO: 2893824 - RNA, 24 nt, Human
ugugucuguauuucauguggcugu

SEQ ID NO: 2893825 - RNA, 14 nt, Human
ugugucuuaauuau

SEQ ID NO: 2893826 - RNA, 16 nt, Human
ugugucuuaauuauua

SEQ ID NO: 2893827 - RNA, 18 nt, Human
uguguguugucuugaaag

SEQ ID NO: 2893828 - RNA, 14 nt, Human
uguguguugucuga

SEQ ID NO: 2893829 - RNA, 22 nt, Human
uguguguugaucccaagacaau

SEQ ID NO: 2893830 - RNA, 17 nt, Human
ugugucugcgaaguccu

SEQ ID NO: 2893831 - RNA, 16 nt, Human
uguguccaccuguggg

SEQ ID NO: 2893832 - RNA, 19 nt, Human
uguguccaccugugggugu

SEQ ID NO: 2893833 - RNA, 17 nt, Human
uguguccuucccugcau

SEQ ID NO: 2893834 - RNA, 14 nt, Human
uguguccuucccug

SEQ ID NO: 2893835 - RNA, 16 nt, Human
uguguccuucccugca

SEQ ID NO: 2893836 - RNA, 14 nt, Human
uguguccugguucc

SEQ ID NO: 2893837 - RNA, 17 nt, Human
ugugucccucuucucuu

SEQ ID NO: 2893838 - RNA, 14 nt, Human
uguguccucaggga

SEQ ID NO: 2893839 - RNA, 14 nt, Human
uguguaaaauguga

SEQ ID NO: 2893840 - RNA, 15 nt, Human
uguguaaaaagagag

SEQ ID NO: 2893841 - RNA, 17 nt, Human
uguguaaaauguaaugc

SEQ ID NO: 2893842 - RNA, 10 nt, Human
ugugguuuua

SEQ ID NO: 2893843 - RNA, 14 nt, Human
ugugguuuuaugga

SEQ ID NO: 2893844 - RNA, 17 nt, Human
ugugguuuuauggagac

SEQ ID NO: 2893845 - RNA, 18 nt, Human
ugugguuugguuccucuc

SEQ ID NO: 2893846 - RNA, 21 nt, Human
ugugguuugguuccucucugg

SEQ ID NO: 2893847 - RNA, 22 nt, Human
ugugguuugguuccucucuggu

SEQ ID NO: 2893848 - RNA, 19 nt, Human
ugugguauugaauauugug

SEQ ID NO: 2893849 - RNA, 20 nt, Human
ugugucagguggggcagcuu

SEQ ID NO: 2893850 - RNA, 19 nt, Human
ugugucaguggggcucucu

SEQ ID NO: 2893851 - RNA, 21 nt, Human
ugugucaguggggcucucuga

SEQ ID NO: 2893852 - RNA, 22 nt, Human
ugugucaguggggcucucugag

SEQ ID NO: 2893853 - RNA, 21 nt, Human
uguguaaacacagucaaaaua

SEQ ID NO: 2893854 - RNA, 20 nt, Human
uguguaaagaucuacaugaa

SEQ ID NO: 2893855 - RNA, 14 nt, Human
ugugucaugccagu

SEQ ID NO: 2893856 - RNA, 16 nt, Human
ugugucaugccaguga

SEQ ID NO: 2893857 - RNA, 20 nt, Human
ugugucaucaauaguguccu

SEQ ID NO: 2893858 - RNA, 16 nt, Human
agugcccuccaggaua

SEQ ID NO: 2893859 - RNA, 21 nt, Human
agugcccuccacagccgcagc

SEQ ID NO: 2893860 - RNA, 17 nt, Human
agugcccuccacagccg

SEQ ID NO: 2893861 - RNA, 16 nt, Human
agugcccuccacagcc

SEQ ID NO: 2893862 - RNA, 20 nt, Human
agugccagucuugugucugc

SEQ ID NO: 2893863 - RNA, 17 nt, Human
ugugguaggccuuuuaa

SEQ ID NO: 2893864 - RNA, 19 nt, Human
ugugguaggccuuuuaaca

SEQ ID NO: 2893865 - RNA, 21 nt, Human
ugugguaggccuuuuaacauu

SEQ ID NO: 2893866 - RNA, 22 nt, Human
ugugguaggccuuuuaacauuu

SEQ ID NO: 2893867 - RNA, 23 nt, Human
ugugguaggccuuuuaacauuuu

SEQ ID NO: 2893868 - RNA, 24 nt, Human
ugugguaggccuuuuaacauuuug

SEQ ID NO: 2893869 - RNA, 16 nt, Human
ugugguaaaugccaca

SEQ ID NO: 2893870 - RNA, 23 nt, Human
ugugguaaaugccacacaccuuu

SEQ ID NO: 2893871 - RNA, 15 nt, Human
agucuuuaggucuuu

SEQ ID NO: 2893872 - RNA, 19 nt, Human
agucuuuaggucuuuguaa

SEQ ID NO: 2893873 - RNA, 21 nt, Human
agucuuuaggucuuuguaaga

SEQ ID NO: 2893874 - RNA, 16 nt, Human
agucuuucaagaauga

SEQ ID NO: 2893875 - RNA, 20 nt, Human
agucuugugcuuuuccuauu

SEQ ID NO: 2893876 - RNA, 17 nt, Human
agucuuuaaaggcccag

SEQ ID NO: 2893877 - RNA, 19 nt, Human
agucuuuaaaggcccagcc

SEQ ID NO: 2893878 - RNA, 20 nt, Human
agucuuuaaaggcccagccc

SEQ ID NO: 2893879 - RNA, 21 nt, Human
agucuuuaaaggcccagcccc

SEQ ID NO: 2893880 - RNA, 23 nt, Human
agucuuuaaaggcccagccccua

SEQ ID NO: 2893881 - RNA, 15 nt, Human
agucuugugcuuuuc

SEQ ID NO: 2893882 - RNA, 12 nt, Human
agucuugugcuu

SEQ ID NO: 2893883 - RNA, 12 nt, Human
agucucccuucu

SEQ ID NO: 2893884 - RNA, 16 nt, Human
agugacuccaagaaca

SEQ ID NO: 2893885 - RNA, 18 nt, Human
agugacuccaagaacaau

SEQ ID NO: 2893886 - RNA, 22 nt, Human
agugacuaugaacuucucucag

SEQ ID NO: 2893887 - RNA, 16 nt, Human
agugacuaguacaaau

SEQ ID NO: 2893888 - RNA, 17 nt, Human
agugacuaguacaaauu

SEQ ID NO: 2893889 - RNA, 18 nt, Human
agugacuaguacaaauua

SEQ ID NO: 2893890 - RNA, 22 nt, Human
agugaaccucaccccgaggccc

SEQ ID NO: 2893891 - RNA, 20 nt, Human
agugaacuacgcuugcucau

SEQ ID NO: 2893892 - RNA, 19 nt, Human
agugaacuauuucuacaca

SEQ ID NO: 2893893 - RNA, 22 nt, Human
agugagcacuaaggugugcucu

SEQ ID NO: 2893894 - RNA, 14 nt, Human
agugagcacuaagg

SEQ ID NO: 2893895 - RNA, 20 nt, Human
agugagaaaaagcuccuguc

SEQ ID NO: 2893896 - RNA, 17 nt, Human
agugagaauaggcagcc

SEQ ID NO: 2893897 - RNA, 15 nt, Human
agugagacaaaauuu

SEQ ID NO: 2893898 - RNA, 16 nt, Human
agugagacaaaauuuu

SEQ ID NO: 2893899 - RNA, 19 nt, Human
agugagacaaaauuuuagu

SEQ ID NO: 2893900 - RNA, 17 nt, Human
agugacuguucaagagc

SEQ ID NO: 2893901 - RNA, 19 nt, Human
agugacuguucaagagcac

SEQ ID NO: 2893902 - RNA, 20 nt, Human
agugacuguucaagagcaca

SEQ ID NO: 2893903 - RNA, 15 nt, Human
agugacuguaucugu

SEQ ID NO: 2893904 - RNA, 20 nt, Human
agugacuguaucuguguaga

SEQ ID NO: 2893905 - RNA, 18 nt, Human
agugacuguaucugugua

SEQ ID NO: 2893906 - RNA, 17 nt, Human
agugacuguaucugugu

SEQ ID NO: 2893907 - RNA, 16 nt, Human
agugacuguaucugug

SEQ ID NO: 2893908 - RNA, 14 nt, Human
agugagaaaaagcu

SEQ ID NO: 2893909 - RNA, 18 nt, Human
agugagaaaaagcuccug

SEQ ID NO: 2893910 - RNA, 19 nt, Human
agugagaaaaagcuccugu

SEQ ID NO: 2893911 - RNA, 22 nt, Human
agugagaaaaagcuccuguccu

SEQ ID NO: 2893912 - RNA, 12 nt, Human
agugagcugguu

SEQ ID NO: 2893913 - RNA, 14 nt, Human
agugagccuggcuc

SEQ ID NO: 2893914 - RNA, 15 nt, Human
agugagccuggcucu

SEQ ID NO: 2893915 - RNA, 14 nt, Human
agugagcuacagag

SEQ ID NO: 2893916 - RNA, 16 nt, Human
agugagcuacagagcc

SEQ ID NO: 2893917 - RNA, 11 nt, Human
agugagccuga

SEQ ID NO: 2893918 - RNA, 13 nt, Human
agugagccuggcu

SEQ ID NO: 2893919 - RNA, 21 nt, Human
agugagccugaauuuuguugc

SEQ ID NO: 2893920 - RNA, 16 nt, Human
agugagaugcauucuu

SEQ ID NO: 2893921 - RNA, 12 nt, Human
agugagaugcau

SEQ ID NO: 2893922 - RNA, 14 nt, Human
agugagaugaggga

SEQ ID NO: 2893923 - RNA, 22 nt, Human
agugagaugagggaugggccug

SEQ ID NO: 2893924 - RNA, 23 nt, Human
agugagaugagggaugggccugg

SEQ ID NO: 2893925 - RNA, 22 nt, Human
ugugaugaugaaaugaggucag

SEQ ID NO: 2893926 - RNA, 14 nt, Human
ugugaugauguaau

SEQ ID NO: 2893927 - RNA, 16 nt, Human
ugugaugauguaauug

SEQ ID NO: 2893928 - RNA, 17 nt, Human
ugugaugauguaauuga

SEQ ID NO: 2893929 - RNA, 14 nt, Human
ugugaugagcugau

SEQ ID NO: 2893930 - RNA, 13 nt, Human
ugugaugagcuga

SEQ ID NO: 2893931 - RNA, 13 nt, Human
agugagcugggca

SEQ ID NO: 2893932 - RNA, 21 nt, Human
agugagcugggcaugguacca

SEQ ID NO: 2893933 - RNA, 16 nt, Human
agucucuuuauuccua

SEQ ID NO: 2893934 - RNA, 17 nt, Human
agucucuuuauuccuag

SEQ ID NO: 2893935 - RNA, 18 nt, Human
agucucuuuauuccuagu

SEQ ID NO: 2893936 - RNA, 23 nt, Human
agucucuuuauuccuaguuggug

SEQ ID NO: 2893937 - RNA, 18 nt, Human
agucucuucuccacugga

SEQ ID NO: 2893938 - RNA, 21 nt, Human
agucucuucuccacuggaugg

SEQ ID NO: 2893939 - RNA, 11 nt, Human
agucuccucaa

SEQ ID NO: 2893940 - RNA, 23 nt, Human
agucuccucaauuuuugucucag

SEQ ID NO: 2893941 - RNA, 13 nt, Human
agucuccucuuua

SEQ ID NO: 2893942 - RNA, 14 nt, Human
agucuccucuuuaa

SEQ ID NO: 2893943 - RNA, 15 nt, Human
agucuccucuuuaaa

SEQ ID NO: 2893944 - RNA, 16 nt, Human
agucuccucuuuaaaa

SEQ ID NO: 2893945 - RNA, 18 nt, Human
agucuccucuuuaaaaca

SEQ ID NO: 2893946 - RNA, 19 nt, Human
agucuccucuuuaaaacaa

SEQ ID NO: 2893947 - RNA, 20 nt, Human
agucuccucuuuaaaacaaa

SEQ ID NO: 2893948 - RNA, 21 nt, Human
agucuccucuuuaaaacaaaa

SEQ ID NO: 2893949 - RNA, 22 nt, Human
agucuccucuuuaaaacaaaac

SEQ ID NO: 2893950 - RNA, 16 nt, Human
agucucuagguucuga

SEQ ID NO: 2893951 - RNA, 14 nt, Human
agucucuaauucua

SEQ ID NO: 2893952 - RNA, 19 nt, Human
agucucuucuccacuggau

SEQ ID NO: 2893953 - RNA, 19 nt, Human
agucucgcucuguugccca

SEQ ID NO: 2893954 - RNA, 14 nt, Human
ugucuccuacuccu

SEQ ID NO: 2893955 - RNA, 16 nt, Human
ugucuccuacuccuga

SEQ ID NO: 2893956 - RNA, 17 nt, Human
ugucuccuacuccugac

SEQ ID NO: 2893957 - RNA, 15 nt, Human
ugugacuucuccagg

SEQ ID NO: 2893958 - RNA, 15 nt, Human
ugugacuuugacgcu

SEQ ID NO: 2893959 - RNA, 20 nt, Human
ugugacuguacccaaaugga

SEQ ID NO: 2893960 - RNA, 18 nt, Human
ugugacuucagcucuguu

SEQ ID NO: 2893961 - RNA, 19 nt, Human
ugugacuucagcucuguuu

SEQ ID NO: 2893962 - RNA, 18 nt, Human
agucucccucccuugggg

SEQ ID NO: 2893963 - RNA, 14 nt, Human
ugugagccuuggcu

SEQ ID NO: 2893964 - RNA, 21 nt, Human
ugugagccccugguccugagg

SEQ ID NO: 2893965 - RNA, 22 nt, Human
ugugagccccugguccugaggg

SEQ ID NO: 2893966 - RNA, 14 nt, Human
ugugagacccccac

SEQ ID NO: 2893967 - RNA, 13 nt, Human
ugugagaccccca

SEQ ID NO: 2893968 - RNA, 19 nt, Human
ugugagacccccacaccuc

SEQ ID NO: 2893969 - RNA, 15 nt, Human
ugugagacuacuaag

SEQ ID NO: 2893970 - RNA, 18 nt, Human
ugugagacccccacaccu

SEQ ID NO: 2893971 - RNA, 16 nt, Human
ugugagacccccacac

SEQ ID NO: 2893972 - RNA, 15 nt, Human
ugugagacccccaca

SEQ ID NO: 2893973 - RNA, 12 nt, Human
ugugagccccug

SEQ ID NO: 2893974 - RNA, 14 nt, Human
ugugagccccuggu

SEQ ID NO: 2893975 - RNA, 17 nt, Human
ugugagccccugguccu

SEQ ID NO: 2893976 - RNA, 18 nt, Human
agugcaaauuugauacau

SEQ ID NO: 2893977 - RNA, 16 nt, Human
agugcaaccacacacc

SEQ ID NO: 2893978 - RNA, 18 nt, Human
agugcaaccacacaccuc

SEQ ID NO: 2893979 - RNA, 24 nt, Human
agugcaaccacacaccucaccaga

SEQ ID NO: 2893980 - RNA, 13 nt, Human
agugcaaccucug

SEQ ID NO: 2893981 - RNA, 14 nt, Human
agugcaaccucugc

SEQ ID NO: 2893982 - RNA, 15 nt, Human
agugcaaccucugcu

SEQ ID NO: 2893983 - RNA, 16 nt, Human
agugcaaccucugcuu

SEQ ID NO: 2893984 - RNA, 15 nt, Human
agugauauggagcaa

SEQ ID NO: 2893985 - RNA, 17 nt, Human
agugauauggagcaaga

SEQ ID NO: 2893986 - RNA, 14 nt, Human
agugauauggcaga

SEQ ID NO: 2893987 - RNA, 17 nt, Human
agugauauggcagaaga

SEQ ID NO: 2893988 - RNA, 20 nt, Human
agugauacuauccaguuacu

SEQ ID NO: 2893989 - RNA, 19 nt, Human
agugauaauuucuggaauu

SEQ ID NO: 2893990 - RNA, 17 nt, Human
agugauaacuccuaaga

SEQ ID NO: 2893991 - RNA, 18 nt, Human
agugauaacuccuaagag

SEQ ID NO: 2893992 - RNA, 21 nt, Human
agugauaacuccuaagaggag

SEQ ID NO: 2893993 - RNA, 19 nt, Human
uguggaugaucaauccuuu

SEQ ID NO: 2893994 - RNA, 22 nt, Human
uguggauucugaggcccugccc

SEQ ID NO: 2893995 - RNA, 17 nt, Human
uguggauucugaggccc

SEQ ID NO: 2893996 - RNA, 20 nt, Human
agugccagaauuuuaggaac

SEQ ID NO: 2893997 - RNA, 16 nt, Human
agugcauauuuaucca

SEQ ID NO: 2893998 - RNA, 15 nt, Human
agugcauuguuucug

SEQ ID NO: 2893999 - RNA, 16 nt, Human
agugcauuguuucugu

SEQ ID NO: 2894000 - RNA, 17 nt, Human
agugcauuguuucugug

SEQ ID NO: 2894001 - RNA, 20 nt, Human
agugcauuguuucugugggc

SEQ ID NO: 2894002 - RNA, 21 nt, Human
agugcauuguuucugugggcg

SEQ ID NO: 2894003 - RNA, 12 nt, Human
agugcauuucug

SEQ ID NO: 2894004 - RNA, 15 nt, Human
agugcauuucugaau

SEQ ID NO: 2894005 - RNA, 16 nt, Human
agugcauuucugaaua

SEQ ID NO: 2894006 - RNA, 21 nt, Human
agugcauuucugaauagaaau

SEQ ID NO: 2894007 - RNA, 22 nt, Human
agugcauuucugaauagaaaug

SEQ ID NO: 2894008 - RNA, 14 nt, Human
agugcacuuucuaa

SEQ ID NO: 2894009 - RNA, 18 nt, Human
agugcacuuucuaauguu

SEQ ID NO: 2894010 - RNA, 21 nt, Human
agugcacuuucuaauguuucu

SEQ ID NO: 2894011 - RNA, 17 nt, Human
agugcaagccccugcuc

SEQ ID NO: 2894012 - RNA, 15 nt, Human
agugcaagccccugc

SEQ ID NO: 2894013 - RNA, 18 nt, Human
agugcaagccccugcucc

SEQ ID NO: 2894014 - RNA, 17 nt, Human
agugcagugagccgaga

SEQ ID NO: 2894015 - RNA, 21 nt, Human
agugcagcagguuaagaauuu

SEQ ID NO: 2894016 - RNA, 12 nt, Human
ugugcuguaauu

SEQ ID NO: 2894017 - RNA, 12 nt, Human
ugugcugugacu

SEQ ID NO: 2894018 - RNA, 16 nt, Human
ugugcugccauuugau

SEQ ID NO: 2894019 - RNA, 23 nt, Human
ugugcugccauuugauuuuucua

SEQ ID NO: 2894020 - RNA, 14 nt, Human
ugugcuguggaagc

SEQ ID NO: 2894021 - RNA, 16 nt, Human
ugugcuguggaagcaa

SEQ ID NO: 2894022 - RNA, 17 nt, Human
uguggauaacaaagaua

SEQ ID NO: 2894023 - RNA, 18 nt, Human
uguggauaacaaagauau

SEQ ID NO: 2894024 - RNA, 19 nt, Human
uguggauaacaaagauauc

SEQ ID NO: 2894025 - RNA, 15 nt, Human
uguggauauaaaaug

SEQ ID NO: 2894026 - RNA, 17 nt, Human
ugugcuguggaagcaac

SEQ ID NO: 2894027 - RNA, 23 nt, Human
agugagcugguuuuuagcggaga

SEQ ID NO: 2894028 - RNA, 19 nt, Human
uguggaugagcccucagaa

SEQ ID NO: 2894029 - RNA, 23 nt, Human
uguggaugagcccucagaacccu

SEQ ID NO: 2894030 - RNA, 21 nt, Human
uguggaugccuguggaagagu

SEQ ID NO: 2894031 - RNA, 22 nt, Human
uguggaugccuguggaagagug

SEQ ID NO: 2894032 - RNA, 14 nt, Human
uguggauccaaugu

SEQ ID NO: 2894033 - RNA, 15 nt, Human
uguggauccaauguu

SEQ ID NO: 2894034 - RNA, 17 nt, Human
uguggauccaauguuag

SEQ ID NO: 2894035 - RNA, 16 nt, Human
uguggaucuuuucauu

SEQ ID NO: 2894036 - RNA, 19 nt, Human
uguggaucuuuucauucuc

SEQ ID NO: 2894037 - RNA, 13 nt, Human
ugugcugaaugug

SEQ ID NO: 2894038 - RNA, 20 nt, Human
ugugcugaucauuugaggaa

SEQ ID NO: 2894039 - RNA, 15 nt, Human
ugugcucauuuaagu

SEQ ID NO: 2894040 - RNA, 21 nt, Human
ugugcucccugguucugauga

SEQ ID NO: 2894041 - RNA, 16 nt, Human
ugugcuccuccuuggu

SEQ ID NO: 2894042 - RNA, 16 nt, Human
ugugcucucaccagcu

SEQ ID NO: 2894043 - RNA, 17 nt, Human
ugugccgacacuguucu

SEQ ID NO: 2894044 - RNA, 15 nt, Human
ugugccgacagaagg

SEQ ID NO: 2894045 - RNA, 14 nt, Human
ugugauucuaaugu

SEQ ID NO: 2894046 - RNA, 16 nt, Human
ugugauucuaaugucu

SEQ ID NO: 2894047 - RNA, 12 nt, Human
ugugcccuccug

SEQ ID NO: 2894048 - RNA, 21 nt, Human
ugugauucuaaugucuucauu

SEQ ID NO: 2894049 - RNA, 19 nt, Human
ugugauucuuccagaugug

SEQ ID NO: 2894050 - RNA, 20 nt, Human
ugugauucuuccagauguga

SEQ ID NO: 2894051 - RNA, 21 nt, Human
ugugauucuuccagaugugau

SEQ ID NO: 2894052 - RNA, 17 nt, Human
ugugauucuaaugucuu

SEQ ID NO: 2894053 - RNA, 18 nt, Human
auacuaaaaaucaugaga

SEQ ID NO: 2894054 - RNA, 13 nt, Human
auacuaaaaauca

SEQ ID NO: 2894055 - RNA, 21 nt, Human
auacuaaaaguucuucuccaa

SEQ ID NO: 2894056 - RNA, 12 nt, Human
auacuaaaauau

SEQ ID NO: 2894057 - RNA, 13 nt, Human
auacuaaaauaug

SEQ ID NO: 2894058 - RNA, 14 nt, Human
auacuaaaauaugu

SEQ ID NO: 2894059 - RNA, 16 nt, Human
auacuaaaauaugucu

SEQ ID NO: 2894060 - RNA, 14 nt, Human
auacuauaguacca

SEQ ID NO: 2894061 - RNA, 13 nt, Human
auacguuugauaa

SEQ ID NO: 2894062 - RNA, 15 nt, Human
uuauauuuuuauaga

SEQ ID NO: 2894063 - RNA, 13 nt, Human
uuauauuuuuaaa

SEQ ID NO: 2894064 - RNA, 15 nt, Human
uuauauuuucguaug

SEQ ID NO: 2894065 - RNA, 18 nt, Human
uuauauuuucguaugaaa

SEQ ID NO: 2894066 - RNA, 20 nt, Human
uuauauuuucguaugaaaau

SEQ ID NO: 2894067 - RNA, 15 nt, Human
uuauauuuguaggag

SEQ ID NO: 2894068 - RNA, 13 nt, Human
uuauauuuguauc

SEQ ID NO: 2894069 - RNA, 18 nt, Human
uuauauuugugcuauagu

SEQ ID NO: 2894070 - RNA, 19 nt, Human
uuaucaauaucuaauauau

SEQ ID NO: 2894071 - RNA, 23 nt, Human
uuaucacaccaucgcuggccccu

SEQ ID NO: 2894072 - RNA, 22 nt, Human
uuaucaauaucuaauauauaug

SEQ ID NO: 2894073 - RNA, 15 nt, Human
uuaucaauaucuaau

SEQ ID NO: 2894074 - RNA, 16 nt, Human
uuaucaauaucuaaua

SEQ ID NO: 2894075 - RNA, 17 nt, Human
uuaucaauaucuaauau

SEQ ID NO: 2894076 - RNA, 22 nt, Human
uuaucaaguuugggucugugcu

SEQ ID NO: 2894077 - RNA, 16 nt, Human
auaccacccaaugcug

SEQ ID NO: 2894078 - RNA, 13 nt, Human
auacauuaguaaa

SEQ ID NO: 2894079 - RNA, 14 nt, Human
auacauuaguaaau

SEQ ID NO: 2894080 - RNA, 16 nt, Human
auacauuaguaaaugu

SEQ ID NO: 2894081 - RNA, 17 nt, Human
auacauuaguaaauguc

SEQ ID NO: 2894082 - RNA, 15 nt, Human
auaccuuugccuugg

SEQ ID NO: 2894083 - RNA, 20 nt, Human
auaccuuugcuacuacuaug

SEQ ID NO: 2894084 - RNA, 14 nt, Human
auaccuuuuauuuu

SEQ ID NO: 2894085 - RNA, 11 nt, Human
auacgaacaaa

SEQ ID NO: 2894086 - RNA, 15 nt, Human
auaccagacugcagg

SEQ ID NO: 2894087 - RNA, 16 nt, Human
auaccagacugcaggu

SEQ ID NO: 2894088 - RNA, 16 nt, Human
auacaugcaaaaagaa

SEQ ID NO: 2894089 - RNA, 14 nt, Human
auacgaaacacaaa

SEQ ID NO: 2894090 - RNA, 17 nt, Human
auacgcacuacaugugg

SEQ ID NO: 2894091 - RNA, 15 nt, Human
auacgcuuuucuuug

SEQ ID NO: 2894092 - RNA, 24 nt, Human
auacgcuuuucuuuguuauaccau

SEQ ID NO: 2894093 - RNA, 18 nt, Human
auacggucagguuuaaca

SEQ ID NO: 2894094 - RNA, 22 nt, Human
auacggucagguuuaacauuug

SEQ ID NO: 2894095 - RNA, 23 nt, Human
auacgcaacauaauuaaauuuug

SEQ ID NO: 2894096 - RNA, 21 nt, Human
auacgccuguaguccuagcca

SEQ ID NO: 2894097 - RNA, 19 nt, Human
auacgcuacuauaaagaga

SEQ ID NO: 2894098 - RNA, 20 nt, Human
auacgcuacuauaaagagaa

SEQ ID NO: 2894099 - RNA, 16 nt, Human
auacgcacuacaugug

SEQ ID NO: 2894100 - RNA, 13 nt, Human
auacgaacaaaac

SEQ ID NO: 2894101 - RNA, 22 nt, Human
auacaguuaggcaccagaagaa

SEQ ID NO: 2894102 - RNA, 15 nt, Human
auacaguucaauaaa

SEQ ID NO: 2894103 - RNA, 19 nt, Human
auacaguucaauaaacuua

SEQ ID NO: 2894104 - RNA, 21 nt, Human
auacauaagcggcguaaguuu

SEQ ID NO: 2894105 - RNA, 13 nt, Human
auacauaauaaaa

SEQ ID NO: 2894106 - RNA, 12 nt, Human
auacauaauggg

SEQ ID NO: 2894107 - RNA, 22 nt, Human
auacauaaugggccacugaaau

SEQ ID NO: 2894108 - RNA, 15 nt, Human
auacauaacuaaauu

SEQ ID NO: 2894109 - RNA, 19 nt, Human
auacauaacuaaauuugau

SEQ ID NO: 2894110 - RNA, 21 nt, Human
auacauaacuaaauuugauac

SEQ ID NO: 2894111 - RNA, 22 nt, Human
auacauaacuaaauuugauacu

SEQ ID NO: 2894112 - RNA, 24 nt, Human
auacauaacuaaauuugauacuua

SEQ ID NO: 2894113 - RNA, 14 nt, Human
auacauacacuugu

SEQ ID NO: 2894114 - RNA, 19 nt, Human
auacauacacuuguauaaa

SEQ ID NO: 2894115 - RNA, 22 nt, Human
auacauacacuuguauaaaugu

SEQ ID NO: 2894116 - RNA, 20 nt, Human
auacauacggucagguuuaa

SEQ ID NO: 2894117 - RNA, 21 nt, Human
auacauacggucagguuuaac

SEQ ID NO: 2894118 - RNA, 22 nt, Human
auacauacggucagguuuaaca

SEQ ID NO: 2894119 - RNA, 12 nt, Human
auacaugugugu

SEQ ID NO: 2894120 - RNA, 13 nt, Human
auacaugugugua

SEQ ID NO: 2894121 - RNA, 14 nt, Human
auacauguguguau

SEQ ID NO: 2894122 - RNA, 17 nt, Human
auacauguguguauaua

SEQ ID NO: 2894123 - RNA, 18 nt, Human
auacauguguguauauau

SEQ ID NO: 2894124 - RNA, 19 nt, Human
auacauguguguauauaug

SEQ ID NO: 2894125 - RNA, 20 nt, Human
auacauguguguauauaugu

SEQ ID NO: 2894126 - RNA, 21 nt, Human
auacauguguguauauaugug

SEQ ID NO: 2894127 - RNA, 22 nt, Human
auacauguguguauauaugugu

SEQ ID NO: 2894128 - RNA, 23 nt, Human
auacauguguguauauaugugua

SEQ ID NO: 2894129 - RNA, 16 nt, Human
auacauaucgcugacu

SEQ ID NO: 2894130 - RNA, 21 nt, Human
auacauaucgcugacuucaug

SEQ ID NO: 2894131 - RNA, 23 nt, Human
auacaggaaaagcugcugacagu

SEQ ID NO: 2894132 - RNA, 22 nt, Human
auacaggaaaagcugcugacag

SEQ ID NO: 2894133 - RNA, 14 nt, Human
auacagauaacauu

SEQ ID NO: 2894134 - RNA, 15 nt, Human
auacagauaacauua

SEQ ID NO: 2894135 - RNA, 12 nt, Human
auacagaggaaa

SEQ ID NO: 2894136 - RNA, 21 nt, Human
auacagaggaaaucuguaaca

SEQ ID NO: 2894137 - RNA, 21 nt, Human
auacaggauuugaacucagau

SEQ ID NO: 2894138 - RNA, 19 nt, Human
auacaaguucuuggucccu

SEQ ID NO: 2894139 - RNA, 22 nt, Human
auacaagccauucuaaggaaau

SEQ ID NO: 2894140 - RNA, 15 nt, Human
auacaagauugaaaa

SEQ ID NO: 2894141 - RNA, 17 nt, Human
auacaagauugaaaauc

SEQ ID NO: 2894142 - RNA, 12 nt, Human
auacaagccaaa

SEQ ID NO: 2894143 - RNA, 19 nt, Human
uuauaaauaaacuguugcu

SEQ ID NO: 2894144 - RNA, 18 nt, Human
uuauaaauauaagccuuu

SEQ ID NO: 2894145 - RNA, 21 nt, Human
uuauaaauauaagccuuuuau

SEQ ID NO: 2894146 - RNA, 16 nt, Human
uuauaaauauauauaa

SEQ ID NO: 2894147 - RNA, 17 nt, Human
uuauaaauauauauaaa

SEQ ID NO: 2894148 - RNA, 19 nt, Human
uuauaaauauauauaaaga

SEQ ID NO: 2894149 - RNA, 19 nt, Human
uuauaaagaauguuucuua

SEQ ID NO: 2894150 - RNA, 17 nt, Human
uuauaaacuuuuaaaga

SEQ ID NO: 2894151 - RNA, 12 nt, Human
uuauaaagugcu

SEQ ID NO: 2894152 - RNA, 17 nt, Human
uuauaaagugcuugugu

SEQ ID NO: 2894153 - RNA, 18 nt, Human
uuauaaagugcuugugua

SEQ ID NO: 2894154 - RNA, 19 nt, Human
uuauaaagugcuuguguaa

SEQ ID NO: 2894155 - RNA, 21 nt, Human
uuauaaagugcuuguguaauu

SEQ ID NO: 2894156 - RNA, 20 nt, Human
auacaacauguagcugaguu

SEQ ID NO: 2894157 - RNA, 22 nt, Human
auacaacccuggcauuaugucc

SEQ ID NO: 2894158 - RNA, 15 nt, Human
auacaaccucccucu

SEQ ID NO: 2894159 - RNA, 16 nt, Human
auacaaccucccucuu

SEQ ID NO: 2894160 - RNA, 17 nt, Human
auacaaccucccucuug

SEQ ID NO: 2894161 - RNA, 18 nt, Human
auacaaccucccucuugu

SEQ ID NO: 2894162 - RNA, 20 nt, Human
auacaaccucccucuuguuu

SEQ ID NO: 2894163 - RNA, 21 nt, Human
auacaaccucccucuuguuuu

SEQ ID NO: 2894164 - RNA, 23 nt, Human
auacaaccucccucuuguuuugu

SEQ ID NO: 2894165 - RNA, 14 nt, Human
uuaugaaugaaaaa

SEQ ID NO: 2894166 - RNA, 13 nt, Human
uuaugaaucagug

SEQ ID NO: 2894167 - RNA, 12 nt, Human
uuaugaaucuga

SEQ ID NO: 2894168 - RNA, 23 nt, Human
uuaugacaaugacugugcuacug

SEQ ID NO: 2894169 - RNA, 13 nt, Human
uuaugaauguuuc

SEQ ID NO: 2894170 - RNA, 23 nt, Human
uuaugacaucacuuguacaaaau

SEQ ID NO: 2894171 - RNA, 21 nt, Human
uuaugacaucacuuguacaaa

SEQ ID NO: 2894172 - RNA, 18 nt, Human
uuaugacaucacuuguac

SEQ ID NO: 2894173 - RNA, 16 nt, Human
uuaugacaucacuugu

SEQ ID NO: 2894174 - RNA, 15 nt, Human
uuaugaguuugcuua

SEQ ID NO: 2894175 - RNA, 16 nt, Human
uuaugauaauagauuc

SEQ ID NO: 2894176 - RNA, 17 nt, Human
uuaugauaauagauucu

SEQ ID NO: 2894177 - RNA, 19 nt, Human
uuaugaucaccauguauuu

SEQ ID NO: 2894178 - RNA, 15 nt, Human
uuaugaucaguguug

SEQ ID NO: 2894179 - RNA, 23 nt, Human
uuaugaguuuuugauagcuuuau

SEQ ID NO: 2894180 - RNA, 21 nt, Human
uuaugaguuuuugauagcuuu

SEQ ID NO: 2894181 - RNA, 15 nt, Human
uuaugaguuuuugau

SEQ ID NO: 2894182 - RNA, 13 nt, Human
uuaugaguuuuug

SEQ ID NO: 2894183 - RNA, 13 nt, Human
uuaugagaaacug

SEQ ID NO: 2894184 - RNA, 16 nt, Human
uuaugacuauguaaac

SEQ ID NO: 2894185 - RNA, 15 nt, Human
uuaugacuauguaaa

SEQ ID NO: 2894186 - RNA, 16 nt, Human
uuaugagcagaaggaa

SEQ ID NO: 2894187 - RNA, 11 nt, Human
uuaugagaaau

SEQ ID NO: 2894188 - RNA, 12 nt, Human
uuaugagaaaug

SEQ ID NO: 2894189 - RNA, 13 nt, Human
uuaugagaaaugu

SEQ ID NO: 2894190 - RNA, 14 nt, Human
uuaugagaaaugua

SEQ ID NO: 2894191 - RNA, 18 nt, Human
uuaugagaaauguaaugc

SEQ ID NO: 2894192 - RNA, 21 nt, Human
uuaugagaaauguaaugcgau

SEQ ID NO: 2894193 - RNA, 22 nt, Human
uuaugaggcaaccugauuguaa

SEQ ID NO: 2894194 - RNA, 19 nt, Human
uuaugaggguccucuacuu

SEQ ID NO: 2894195 - RNA, 15 nt, Human
uuaugaguaacuauu

SEQ ID NO: 2894196 - RNA, 20 nt, Human
uuaugaguaacuauuauuau

SEQ ID NO: 2894197 - RNA, 19 nt, Human
uuaugaguuauucauauuc

SEQ ID NO: 2894198 - RNA, 19 nt, Human
uuaugagauggaucacaua

SEQ ID NO: 2894199 - RNA, 14 nt, Human
uuaugagcuuccaa

SEQ ID NO: 2894200 - RNA, 17 nt, Human
uuaugaggagcugcaga

SEQ ID NO: 2894201 - RNA, 15 nt, Human
uuaugaaaauaaaua

SEQ ID NO: 2894202 - RNA, 18 nt, Human
uuaugaaaauaaauagcu

SEQ ID NO: 2894203 - RNA, 18 nt, Human
uuaugaaagguuuacauu

SEQ ID NO: 2894204 - RNA, 14 nt, Human
uuaugaaauaaaga

SEQ ID NO: 2894205 - RNA, 15 nt, Human
uuaugaaagaauaua

SEQ ID NO: 2894206 - RNA, 20 nt, Human
uuaugaaauaaagaaauugc

SEQ ID NO: 2894207 - RNA, 20 nt, Human
uuaugaacccuuccugagcu

SEQ ID NO: 2894208 - RNA, 19 nt, Human
uuaugaaauucacccccuu

SEQ ID NO: 2894209 - RNA, 20 nt, Human
uuaugaagugcgugaaugua

SEQ ID NO: 2894210 - RNA, 11 nt, Human
uuaugaaguuu

SEQ ID NO: 2894211 - RNA, 13 nt, Human
uuaugaaguuuaa

SEQ ID NO: 2894212 - RNA, 14 nt, Human
uuaugaaguuuaaa

SEQ ID NO: 2894213 - RNA, 16 nt, Human
uuaugaaguuuaaaac

SEQ ID NO: 2894214 - RNA, 20 nt, Human
uuaugaaguuuaaaacagua

SEQ ID NO: 2894215 - RNA, 22 nt, Human
uuaugaaguuuaaaacaguauu

SEQ ID NO: 2894216 - RNA, 22 nt, Human
uuauccaaaaguggaagugaca

SEQ ID NO: 2894217 - RNA, 15 nt, Human
uuauccaaaaugugu

SEQ ID NO: 2894218 - RNA, 16 nt, Human
uuauccaaaaugugua

SEQ ID NO: 2894219 - RNA, 17 nt, Human
uuauccaaaauguguau

SEQ ID NO: 2894220 - RNA, 18 nt, Human
uuauccaaaauguguauu

SEQ ID NO: 2894221 - RNA, 21 nt, Human
uuauccaaaauguguauuucu

SEQ ID NO: 2894222 - RNA, 22 nt, Human
uuauccaaaauguguauuucuu

SEQ ID NO: 2894223 - RNA, 14 nt, Human
uuauccauaaaaaa

SEQ ID NO: 2894224 - RNA, 16 nt, Human
uuauauuuuuucaguu

SEQ ID NO: 2894225 - RNA, 14 nt, Human
uuauccauuuguaa

SEQ ID NO: 2894226 - RNA, 15 nt, Human
uuauccauuuguaau

SEQ ID NO: 2894227 - RNA, 19 nt, Human
uuauccauuuguaauuaaa

SEQ ID NO: 2894228 - RNA, 19 nt, Human
uuauccauauugagucaaa

SEQ ID NO: 2894229 - RNA, 17 nt, Human
uuauccaugacaggccu

SEQ ID NO: 2894230 - RNA, 17 nt, Human
uuauccauauugaguca

SEQ ID NO: 2894231 - RNA, 12 nt, Human
uuaugauagauu

SEQ ID NO: 2894232 - RNA, 23 nt, Human
uuaugaugaaaaccuacauauuc

SEQ ID NO: 2894233 - RNA, 18 nt, Human
uuaugauaauagauucuc

SEQ ID NO: 2894234 - RNA, 13 nt, Human
uuaugaugaugaa

SEQ ID NO: 2894235 - RNA, 14 nt, Human
uuaugaugaugaaa

SEQ ID NO: 2894236 - RNA, 23 nt, Human
uuaugaugaugaaaauuuuacca

SEQ ID NO: 2894237 - RNA, 21 nt, Human
uuaugauggaagacaggaaag

SEQ ID NO: 2894238 - RNA, 23 nt, Human
uuaugauggaagacaggaaaguu

SEQ ID NO: 2894239 - RNA, 19 nt, Human
uuaugggaauaauugcuuu

SEQ ID NO: 2894240 - RNA, 17 nt, Human
uuaugggcauugacaaa

SEQ ID NO: 2894241 - RNA, 22 nt, Human
uuaugggcauugacaaaucugu

SEQ ID NO: 2894242 - RNA, 22 nt, Human
uuauggucaaucccaaaaguca

SEQ ID NO: 2894243 - RNA, 19 nt, Human
uuaugguccuaaaagcaaa

SEQ ID NO: 2894244 - RNA, 21 nt, Human
uuaugguccuaaaagcaaaau

SEQ ID NO: 2894245 - RNA, 16 nt, Human
uuauguaaaauguuuu

SEQ ID NO: 2894246 - RNA, 20 nt, Human
uuauguaaaauguuuuagca

SEQ ID NO: 2894247 - RNA, 14 nt, Human
uuaugugaucaauu

SEQ ID NO: 2894248 - RNA, 20 nt, Human
uuaugugacauuuuacauua

SEQ ID NO: 2894249 - RNA, 19 nt, Human
uuaugugacauuuuacauu

SEQ ID NO: 2894250 - RNA, 14 nt, Human
uuaugugacauuuu

SEQ ID NO: 2894251 - RNA, 19 nt, Human
uuauguguaugugccauuu

SEQ ID NO: 2894252 - RNA, 16 nt, Human
uuaugugguuuuagau

SEQ ID NO: 2894253 - RNA, 15 nt, Human
uuauguguaaauaca

SEQ ID NO: 2894254 - RNA, 22 nt, Human
uuauguguaguugucucucuuc

SEQ ID NO: 2894255 - RNA, 18 nt, Human
uuaugugguuuuagauuu

SEQ ID NO: 2894256 - RNA, 19 nt, Human
uuaugugguuuuagauuuu

SEQ ID NO: 2894257 - RNA, 19 nt, Human
uuaugugugaggagcugcu

SEQ ID NO: 2894258 - RNA, 17 nt, Human
uuaugugugcaugugug

SEQ ID NO: 2894259 - RNA, 18 nt, Human
uuaugugugcaugugugu

SEQ ID NO: 2894260 - RNA, 20 nt, Human
uuaugugugcauguguguau

SEQ ID NO: 2894261 - RNA, 21 nt, Human
uuaugugugcauguguguaua

SEQ ID NO: 2894262 - RNA, 18 nt, Human
uuauguguaugugccauu

SEQ ID NO: 2894263 - RNA, 20 nt, Human
uuaugugguuuuagauuuuc

SEQ ID NO: 2894264 - RNA, 20 nt, Human
uuauguaaauguuuguuaaa

SEQ ID NO: 2894265 - RNA, 20 nt, Human
uuauguacuaguguucuguu

SEQ ID NO: 2894266 - RNA, 12 nt, Human
uuauguacugua

SEQ ID NO: 2894267 - RNA, 13 nt, Human
uuauguacuguac

SEQ ID NO: 2894268 - RNA, 15 nt, Human
uuauguacuguacua

SEQ ID NO: 2894269 - RNA, 17 nt, Human
uuauguacuguacuaau

SEQ ID NO: 2894270 - RNA, 18 nt, Human
uuauguacuguacuaauu

SEQ ID NO: 2894271 - RNA, 15 nt, Human
uuauguagauauuug

SEQ ID NO: 2894272 - RNA, 18 nt, Human
uuauguagauauuuggcu

SEQ ID NO: 2894273 - RNA, 22 nt, Human
uuauguagauauuuggcuuaaa

SEQ ID NO: 2894274 - RNA, 16 nt, Human
uuauguagcacauaaa

SEQ ID NO: 2894275 - RNA, 16 nt, Human
uuauguaguaauugac

SEQ ID NO: 2894276 - RNA, 15 nt, Human
uuauguaguaauuga

SEQ ID NO: 2894277 - RNA, 17 nt, Human
uuauguaucagaagaga

SEQ ID NO: 2894278 - RNA, 19 nt, Human
uuauguaguaauugacaug

SEQ ID NO: 2894279 - RNA, 14 nt, Human
uuaugucuguuuaa

SEQ ID NO: 2894280 - RNA, 16 nt, Human
uuaugucuguuuaaga

SEQ ID NO: 2894281 - RNA, 17 nt, Human
uuaugucuguuuaagaa

SEQ ID NO: 2894282 - RNA, 13 nt, Human
uuaugucuuuuau

SEQ ID NO: 2894283 - RNA, 21 nt, Human
uuaugucuuuuauauuuguau

SEQ ID NO: 2894284 - RNA, 17 nt, Human
uuaugucuauuuaagcc

SEQ ID NO: 2894285 - RNA, 15 nt, Human
uuauguccacugugu

SEQ ID NO: 2894286 - RNA, 17 nt, Human
uuauguccacuguguau

SEQ ID NO: 2894287 - RNA, 18 nt, Human
uuauguccacuguguaua

SEQ ID NO: 2894288 - RNA, 11 nt, Human
uuauguauuuc

SEQ ID NO: 2894289 - RNA, 19 nt, Human
uuauguauuuccuggaugu

SEQ ID NO: 2894290 - RNA, 20 nt, Human
uuauguauuuccuggauguu

SEQ ID NO: 2894291 - RNA, 16 nt, Human
auagaagcuguaguag

SEQ ID NO: 2894292 - RNA, 18 nt, Human
auagaauaaaauauaauu

SEQ ID NO: 2894293 - RNA, 21 nt, Human
auagaaguuuguccauuugua

SEQ ID NO: 2894294 - RNA, 22 nt, Human
auagaaguuuguccauuuguaa

SEQ ID NO: 2894295 - RNA, 23 nt, Human
auagaaguuuguccauuuguaaa

SEQ ID NO: 2894296 - RNA, 14 nt, Human
auagaagcuguagu

SEQ ID NO: 2894297 - RNA, 13 nt, Human
auagaagcuguag

SEQ ID NO: 2894298 - RNA, 13 nt, Human
auagaacagugcu

SEQ ID NO: 2894299 - RNA, 14 nt, Human
auagaacuggguaa

SEQ ID NO: 2894300 - RNA, 15 nt, Human
auagaacuggguaaa

SEQ ID NO: 2894301 - RNA, 16 nt, Human
auagaacuggguaaau

SEQ ID NO: 2894302 - RNA, 19 nt, Human
auagaacuggguaaaugca

SEQ ID NO: 2894303 - RNA, 20 nt, Human
auagaacuggguaaaugcaa

SEQ ID NO: 2894304 - RNA, 17 nt, Human
auagaacagagaaagag

SEQ ID NO: 2894305 - RNA, 16 nt, Human
auacuguaguauucuu

SEQ ID NO: 2894306 - RNA, 15 nt, Human
auacuguacaugaaa

SEQ ID NO: 2894307 - RNA, 19 nt, Human
auacuguacaugaaaguag

SEQ ID NO: 2894308 - RNA, 13 nt, Human
auacuguacaaua

SEQ ID NO: 2894309 - RNA, 20 nt, Human
auacuguacaauaaaaacau

SEQ ID NO: 2894310 - RNA, 12 nt, Human
auagaaugcugc

SEQ ID NO: 2894311 - RNA, 13 nt, Human
auagaaugcugca

SEQ ID NO: 2894312 - RNA, 16 nt, Human
auagaaucaaucagua

SEQ ID NO: 2894313 - RNA, 14 nt, Human
auagaauuuccaau

SEQ ID NO: 2894314 - RNA, 14 nt, Human
auagacaauugagg

SEQ ID NO: 2894315 - RNA, 13 nt, Human
auagaauuagcuu

SEQ ID NO: 2894316 - RNA, 15 nt, Human
auagaauuagcuuuu

SEQ ID NO: 2894317 - RNA, 20 nt, Human
auagaauuagcuuuuucauc

SEQ ID NO: 2894318 - RNA, 22 nt, Human
auagaauuauuucacaaauaau

SEQ ID NO: 2894319 - RNA, 20 nt, Human
auagacaauuugcacaucuu

SEQ ID NO: 2894320 - RNA, 21 nt, Human
auagacaauugagguaaguuu

SEQ ID NO: 2894321 - RNA, 22 nt, Human
auagacacuccccgaagucuuu

SEQ ID NO: 2894322 - RNA, 15 nt, Human
auagacagcuuugac

SEQ ID NO: 2894323 - RNA, 16 nt, Human
auagacagcuuugacu

SEQ ID NO: 2894324 - RNA, 13 nt, Human
auagacaguuugu

SEQ ID NO: 2894325 - RNA, 14 nt, Human
auagacaguuugua

SEQ ID NO: 2894326 - RNA, 16 nt, Human
auagacaguuuguaaa

SEQ ID NO: 2894327 - RNA, 21 nt, Human
auagacaguuuguaaauguua

SEQ ID NO: 2894328 - RNA, 22 nt, Human
auagacaguuuguaaauguuau

SEQ ID NO: 2894329 - RNA, 19 nt, Human
auagaguguacuuaacuau

SEQ ID NO: 2894330 - RNA, 14 nt, Human
auagaguguacuua

SEQ ID NO: 2894331 - RNA, 21 nt, Human
auagaguguacuuaacuauuc

SEQ ID NO: 2894332 - RNA, 16 nt, Human
auagaguguaguuuac

SEQ ID NO: 2894333 - RNA, 23 nt, Human
auagaguguaguuuacagaaaaa

SEQ ID NO: 2894334 - RNA, 14 nt, Human
auagaguauaugca

SEQ ID NO: 2894335 - RNA, 22 nt, Human
auagagugacuccaagaacaau

SEQ ID NO: 2894336 - RNA, 15 nt, Human
auagaguauaugcac

SEQ ID NO: 2894337 - RNA, 14 nt, Human
auagagggccaaga

SEQ ID NO: 2894338 - RNA, 16 nt, Human
auagagguaccagcaa

SEQ ID NO: 2894339 - RNA, 18 nt, Human
auagagguauauuggaag

SEQ ID NO: 2894340 - RNA, 19 nt, Human
auagagguauauuggaaga

SEQ ID NO: 2894341 - RNA, 22 nt, Human
auagagcaaaauugauguguuu

SEQ ID NO: 2894342 - RNA, 21 nt, Human
auagagcaaaauugauguguu

SEQ ID NO: 2894343 - RNA, 17 nt, Human
auagagcaaaauugaug

SEQ ID NO: 2894344 - RNA, 15 nt, Human
auagagcaaaauuga

SEQ ID NO: 2894345 - RNA, 17 nt, Human
auagagaguuguugugu

SEQ ID NO: 2894346 - RNA, 21 nt, Human
auagagcaccuaguccaguga

SEQ ID NO: 2894347 - RNA, 23 nt, Human
auagagcuguucaacaucacuga

SEQ ID NO: 2894348 - RNA, 12 nt, Human
auagagcuuuua

SEQ ID NO: 2894349 - RNA, 16 nt, Human
auagagcuuuuaaaaa

SEQ ID NO: 2894350 - RNA, 18 nt, Human
auagagcuuuuaaaaaug

SEQ ID NO: 2894351 - RNA, 14 nt, Human
auagagagagacca

SEQ ID NO: 2894352 - RNA, 16 nt, Human
auagagauguuuuuaa

SEQ ID NO: 2894353 - RNA, 22 nt, Human
auagagauuugucuaauugcau

SEQ ID NO: 2894354 - RNA, 24 nt, Human
auagagauuuuuuaaccauggcag

SEQ ID NO: 2894355 - RNA, 18 nt, Human
auagacccacaagaggca

SEQ ID NO: 2894356 - RNA, 21 nt, Human
auagacugccgugcauuagca

SEQ ID NO: 2894357 - RNA, 17 nt, Human
auagacuggaaaaaaug

SEQ ID NO: 2894358 - RNA, 18 nt, Human
auagacuggaaaaaauga

SEQ ID NO: 2894359 - RNA, 22 nt, Human
auagagaaggaaagcuuuggca

SEQ ID NO: 2894360 - RNA, 17 nt, Human
auagauuaauggcacug

SEQ ID NO: 2894361 - RNA, 18 nt, Human
auagauuaauggcacuga

SEQ ID NO: 2894362 - RNA, 19 nt, Human
auagauuaauggcacugau

SEQ ID NO: 2894363 - RNA, 13 nt, Human
auagauuagaaaa

SEQ ID NO: 2894364 - RNA, 14 nt, Human
auagauuagaaaaa

SEQ ID NO: 2894365 - RNA, 21 nt, Human
auagauuagaaaaauuccuaa

SEQ ID NO: 2894366 - RNA, 12 nt, Human
auagauucuaaa

SEQ ID NO: 2894367 - RNA, 13 nt, Human
auagauucuaaag

SEQ ID NO: 2894368 - RNA, 14 nt, Human
auagauucuaaaga

SEQ ID NO: 2894369 - RNA, 18 nt, Human
auagauucuaaagauucu

SEQ ID NO: 2894370 - RNA, 15 nt, Human
auagauucuaaagau

SEQ ID NO: 2894371 - RNA, 16 nt, Human
auagauucuaaagauu

SEQ ID NO: 2894372 - RNA, 19 nt, Human
auagauucucuuguauaag

SEQ ID NO: 2894373 - RNA, 14 nt, Human
auagauuugaccuc

SEQ ID NO: 2894374 - RNA, 15 nt, Human
auagauuugaccucc

SEQ ID NO: 2894375 - RNA, 13 nt, Human
auagauuuggaau

SEQ ID NO: 2894376 - RNA, 18 nt, Human
auagaugucuagguacuu

SEQ ID NO: 2894377 - RNA, 22 nt, Human
auagauguuuugguagauuaaa

SEQ ID NO: 2894378 - RNA, 23 nt, Human
auagauguuuugguagauuaaau

SEQ ID NO: 2894379 - RNA, 14 nt, Human
auagaugucuuuua

SEQ ID NO: 2894380 - RNA, 15 nt, Human
auagaugucuuuuau

SEQ ID NO: 2894381 - RNA, 16 nt, Human
auagaugucuuuuaua

SEQ ID NO: 2894382 - RNA, 17 nt, Human
auagaugucuuuuauag

SEQ ID NO: 2894383 - RNA, 19 nt, Human
auagaugucuuuuauagug

SEQ ID NO: 2894384 - RNA, 20 nt, Human
auagaugucuuuuauagugg

SEQ ID NO: 2894385 - RNA, 21 nt, Human
auagaugucuuuuauagugga

SEQ ID NO: 2894386 - RNA, 12 nt, Human
auagaucuucug

SEQ ID NO: 2894387 - RNA, 13 nt, Human
auagaucuucuga

SEQ ID NO: 2894388 - RNA, 14 nt, Human
auagaucuucugaa

SEQ ID NO: 2894389 - RNA, 21 nt, Human
auagaucuucugaaaugaaac

SEQ ID NO: 2894390 - RNA, 13 nt, Human
auagauauuuuca

SEQ ID NO: 2894391 - RNA, 17 nt, Human
auagauauuuucacaau

SEQ ID NO: 2894392 - RNA, 19 nt, Human
auagaucaaagucaaaaau

SEQ ID NO: 2894393 - RNA, 13 nt, Human
auagauacaaaug

SEQ ID NO: 2894394 - RNA, 13 nt, Human
auagaguucaucc

SEQ ID NO: 2894395 - RNA, 16 nt, Human
auagaguuuaacacaa

SEQ ID NO: 2894396 - RNA, 15 nt, Human
auagaguuugcuauu

SEQ ID NO: 2894397 - RNA, 22 nt, Human
uuauuccuauauaguuuauuga

SEQ ID NO: 2894398 - RNA, 23 nt, Human
uuauucaagaaugccaguagaaa

SEQ ID NO: 2894399 - RNA, 14 nt, Human
auacucauuucuaa

SEQ ID NO: 2894400 - RNA, 16 nt, Human
auacucauuucuaaaa

SEQ ID NO: 2894401 - RNA, 19 nt, Human
auacucauuucuaaaagaa

SEQ ID NO: 2894402 - RNA, 20 nt, Human
auacucauuucuaaaagaau

SEQ ID NO: 2894403 - RNA, 21 nt, Human
auacucauuucuaaaagaaua

SEQ ID NO: 2894404 - RNA, 22 nt, Human
auacucauuucuaaaagaauau

SEQ ID NO: 2894405 - RNA, 23 nt, Human
auacucauuucuaaaagaauauu

SEQ ID NO: 2894406 - RNA, 20 nt, Human
uuauuccuauauaguuuauu

SEQ ID NO: 2894407 - RNA, 19 nt, Human
uuauucccuuucacaaaau

SEQ ID NO: 2894408 - RNA, 14 nt, Human
uuauuccuaguugg

SEQ ID NO: 2894409 - RNA, 20 nt, Human
uuauuccccauucuuccuag

SEQ ID NO: 2894410 - RNA, 22 nt, Human
uuauuccagaaugcuguacauc

SEQ ID NO: 2894411 - RNA, 20 nt, Human
uuauuccagaaugcuguaca

SEQ ID NO: 2894412 - RNA, 17 nt, Human
uuauuccagaaugcugu

SEQ ID NO: 2894413 - RNA, 18 nt, Human
auacucuuauagacaaca

SEQ ID NO: 2894414 - RNA, 23 nt, Human
auacucuagaugaaguuuuacau

SEQ ID NO: 2894415 - RNA, 17 nt, Human
auacucuagaugaaguu

SEQ ID NO: 2894416 - RNA, 13 nt, Human
auacuccagugua

SEQ ID NO: 2894417 - RNA, 16 nt, Human
auacuccaguguacau

SEQ ID NO: 2894418 - RNA, 17 nt, Human
auacuccaguguacaua

SEQ ID NO: 2894419 - RNA, 21 nt, Human
auacuccaguguacauagugu

SEQ ID NO: 2894420 - RNA, 23 nt, Human
auacuccaguguacauaguguaa

SEQ ID NO: 2894421 - RNA, 16 nt, Human
auacuggacucuucaa

SEQ ID NO: 2894422 - RNA, 19 nt, Human
auacuggacucuucaaaaa

SEQ ID NO: 2894423 - RNA, 21 nt, Human
auacuggacucuucaaaaacu

SEQ ID NO: 2894424 - RNA, 14 nt, Human
auacuggccuggac

SEQ ID NO: 2894425 - RNA, 15 nt, Human
auacuggccuggacu

SEQ ID NO: 2894426 - RNA, 17 nt, Human
auacugauuaugucuuu

SEQ ID NO: 2894427 - RNA, 20 nt, Human
auacugauuaugucuuuuau

SEQ ID NO: 2894428 - RNA, 13 nt, Human
auacugcacuuac

SEQ ID NO: 2894429 - RNA, 16 nt, Human
auacugcacuuacaau

SEQ ID NO: 2894430 - RNA, 20 nt, Human
auacugcacuuacaauccca

SEQ ID NO: 2894431 - RNA, 22 nt, Human
auacugagggaccaacugggcc

SEQ ID NO: 2894432 - RNA, 18 nt, Human
auacugagccaaguauaa

SEQ ID NO: 2894433 - RNA, 14 nt, Human
auacugagggacca

SEQ ID NO: 2894434 - RNA, 14 nt, Human
auacugcagggcca

SEQ ID NO: 2894435 - RNA, 15 nt, Human
auacugcagggccag

SEQ ID NO: 2894436 - RNA, 17 nt, Human
auacugcagggccagga

SEQ ID NO: 2894437 - RNA, 19 nt, Human
auacugcagggccaggacu

SEQ ID NO: 2894438 - RNA, 22 nt, Human
auacucuuccuauuuuuguagu

SEQ ID NO: 2894439 - RNA, 16 nt, Human
auacucuguuguacua

SEQ ID NO: 2894440 - RNA, 14 nt, Human
auacucuuucugua

SEQ ID NO: 2894441 - RNA, 16 nt, Human
auacucuuucuguaua

SEQ ID NO: 2894442 - RNA, 15 nt, Human
auacucuuucuguau

SEQ ID NO: 2894443 - RNA, 23 nt, Human
auacucuuucuguauauacuuuu

SEQ ID NO: 2894444 - RNA, 22 nt, Human
auacucuuucuguauauacuuu

SEQ ID NO: 2894445 - RNA, 17 nt, Human
auacucuuucuguauau

SEQ ID NO: 2894446 - RNA, 12 nt, Human
uuauguuaaaau

SEQ ID NO: 2894447 - RNA, 13 nt, Human
uuauguuaaaauc

SEQ ID NO: 2894448 - RNA, 20 nt, Human
uuauuaguaagaaaacauca

SEQ ID NO: 2894449 - RNA, 14 nt, Human
uuauuaguuuacau

SEQ ID NO: 2894450 - RNA, 15 nt, Human
uuauuaguuaauaua

SEQ ID NO: 2894451 - RNA, 15 nt, Human
uuauuauauauauaa

SEQ ID NO: 2894452 - RNA, 19 nt, Human
uuauguggguugccuggug

SEQ ID NO: 2894453 - RNA, 14 nt, Human
uuauuauaaacugu

SEQ ID NO: 2894454 - RNA, 15 nt, Human
uuauuaguuuacauc

SEQ ID NO: 2894455 - RNA, 18 nt, Human
uuauuaguuuacaucauu

SEQ ID NO: 2894456 - RNA, 15 nt, Human
uuauucagcuucauu

SEQ ID NO: 2894457 - RNA, 20 nt, Human
uuauucagcuucauuugugu

SEQ ID NO: 2894458 - RNA, 21 nt, Human
uuauucacugaaguucuccug

SEQ ID NO: 2894459 - RNA, 20 nt, Human
uuauucacuuuuauuuagca

SEQ ID NO: 2894460 - RNA, 16 nt, Human
uuauucauuagcugug

SEQ ID NO: 2894461 - RNA, 17 nt, Human
uuauucauuagcuguga

SEQ ID NO: 2894462 - RNA, 23 nt, Human
uuauucauucugugaucauuuau

SEQ ID NO: 2894463 - RNA, 11 nt, Human
uuauucauugg

SEQ ID NO: 2894464 - RNA, 16 nt, Human
uuauuauuauuuuuua

SEQ ID NO: 2894465 - RNA, 13 nt, Human
uuauuaucuuuaa

SEQ ID NO: 2894466 - RNA, 22 nt, Human
uuauuauuuguguuuuaauuua

SEQ ID NO: 2894467 - RNA, 15 nt, Human
uuauuauugaaauug

SEQ ID NO: 2894468 - RNA, 16 nt, Human
uuauuauugaaauugu

SEQ ID NO: 2894469 - RNA, 11 nt, Human
uuauuauugug

SEQ ID NO: 2894470 - RNA, 14 nt, Human
uuauuauuguggua

SEQ ID NO: 2894471 - RNA, 15 nt, Human
uuauuauuuuggggu

SEQ ID NO: 2894472 - RNA, 16 nt, Human
uuauucaaguuauugu

SEQ ID NO: 2894473 - RNA, 14 nt, Human
aguuuuaguuuucu

SEQ ID NO: 2894474 - RNA, 15 nt, Human
aguuuuaguuuucuc

SEQ ID NO: 2894475 - RNA, 20 nt, Human
aguuuuucaggagcgcaaga

SEQ ID NO: 2894476 - RNA, 21 nt, Human
aguuuuucaggagcgcaagau

SEQ ID NO: 2894477 - RNA, 23 nt, Human
aguuuuucaggagcgcaagauag

SEQ ID NO: 2894478 - RNA, 16 nt, Human
aguuuuugauagcuuu

SEQ ID NO: 2894479 - RNA, 22 nt, Human
aguuuuucuguuuuguuuggca

SEQ ID NO: 2894480 - RNA, 23 nt, Human
aguuuuucuguuuuguuuggcaa

SEQ ID NO: 2894481 - RNA, 12 nt, Human
aguuuuucuguc

SEQ ID NO: 2894482 - RNA, 13 nt, Human
aguuuuucuguca

SEQ ID NO: 2894483 - RNA, 21 nt, Human
aguuuuuugaaauuaugugac

SEQ ID NO: 2894484 - RNA, 16 nt, Human
aguuuuuguaauuuau

SEQ ID NO: 2894485 - RNA, 22 nt, Human
aguuuuuggaguguuauguauu

SEQ ID NO: 2894486 - RNA, 23 nt, Human
aguuuuuggaguguuauguauuu

SEQ ID NO: 2894487 - RNA, 20 nt, Human
auaaaaggcuugaagcugug

SEQ ID NO: 2894488 - RNA, 18 nt, Human
uuaacuuuuuuucuucua

SEQ ID NO: 2894489 - RNA, 22 nt, Human
uuaacuuuuuuucuucuacuuu

SEQ ID NO: 2894490 - RNA, 19 nt, Human
auaaaaggcaaauguguac

SEQ ID NO: 2894491 - RNA, 20 nt, Human
auaaaaggcaaauguguaca

SEQ ID NO: 2894492 - RNA, 13 nt, Human
auaaaaaaaaaua

SEQ ID NO: 2894493 - RNA, 22 nt, Human
auaaaaaaaaauagaugucuuu

SEQ ID NO: 2894494 - RNA, 23 nt, Human
aguuuuuugaaauuaugugacau

SEQ ID NO: 2894495 - RNA, 16 nt, Human
aguuuuuuguuuuaca

SEQ ID NO: 2894496 - RNA, 19 nt, Human
auaaaagcugaaguuacuu

SEQ ID NO: 2894497 - RNA, 22 nt, Human
auaaaagcugaaguuacuuuau

SEQ ID NO: 2894498 - RNA, 18 nt, Human
uuaagacaugauuuccuu

SEQ ID NO: 2894499 - RNA, 18 nt, Human
uuaagaccuacuguucua

SEQ ID NO: 2894500 - RNA, 23 nt, Human
uuaagacauuuuuggaaggggac

SEQ ID NO: 2894501 - RNA, 18 nt, Human
uuaagacauuuuuggaag

SEQ ID NO: 2894502 - RNA, 16 nt, Human
uuaagacaugauuucc

SEQ ID NO: 2894503 - RNA, 20 nt, Human
uuaagaccuacuguucuaaa

SEQ ID NO: 2894504 - RNA, 21 nt, Human
uuaagaccuacuguucuaaag

SEQ ID NO: 2894505 - RNA, 20 nt, Human
uuaagaaaaaauaacacaca

SEQ ID NO: 2894506 - RNA, 14 nt, Human
uuaagaaggcaaaa

SEQ ID NO: 2894507 - RNA, 21 nt, Human
uuaagaaaaaauaacacacau

SEQ ID NO: 2894508 - RNA, 18 nt, Human
uuaagaaggcaaaaaugu

SEQ ID NO: 2894509 - RNA, 16 nt, Human
uuaagaauauguuucc

SEQ ID NO: 2894510 - RNA, 19 nt, Human
uuaagaauauguuuccuug

SEQ ID NO: 2894511 - RNA, 20 nt, Human
uuaagaauauguuuccuugu

SEQ ID NO: 2894512 - RNA, 10 nt, Human
uuaagacaag

SEQ ID NO: 2894513 - RNA, 19 nt, Human
uuaagacaagccuggcaac

SEQ ID NO: 2894514 - RNA, 22 nt, Human
uuaagaauguugguuuacuuuc

SEQ ID NO: 2894515 - RNA, 14 nt, Human
uuaagaauugacca

SEQ ID NO: 2894516 - RNA, 21 nt, Human
uuaagaauugaccaucugcuu

SEQ ID NO: 2894517 - RNA, 19 nt, Human
uuaauuuuuacauggagaa

SEQ ID NO: 2894518 - RNA, 17 nt, Human
uuaauuuuauucaagaa

SEQ ID NO: 2894519 - RNA, 17 nt, Human
uuaauuuuacuccauaa

SEQ ID NO: 2894520 - RNA, 13 nt, Human
uuaaucuucaugg

SEQ ID NO: 2894521 - RNA, 12 nt, Human
uuaaucuuggau

SEQ ID NO: 2894522 - RNA, 16 nt, Human
uuaaucuuggauagcu

SEQ ID NO: 2894523 - RNA, 19 nt, Human
uuaaucuuggauagcuaau

SEQ ID NO: 2894524 - RNA, 14 nt, Human
uuaaucuuuccuga

SEQ ID NO: 2894525 - RNA, 13 nt, Human
uuaauuucagucc

SEQ ID NO: 2894526 - RNA, 14 nt, Human
uuaauuucaguccu

SEQ ID NO: 2894527 - RNA, 17 nt, Human
uuaauuucaguccugua

SEQ ID NO: 2894528 - RNA, 20 nt, Human
uuaauuucaguccuguaguu

SEQ ID NO: 2894529 - RNA, 23 nt, Human
uuaauuucaguccuguaguuuua

SEQ ID NO: 2894530 - RNA, 11 nt, Human
uuaauuuccag

SEQ ID NO: 2894531 - RNA, 14 nt, Human
uuaauuucuucaaa

SEQ ID NO: 2894532 - RNA, 15 nt, Human
uuaauuucuucaaaa

SEQ ID NO: 2894533 - RNA, 17 nt, Human
uuaauuucuucaaaaug

SEQ ID NO: 2894534 - RNA, 18 nt, Human
uuaauuucuucaaaaugu

SEQ ID NO: 2894535 - RNA, 21 nt, Human
uuaauuucuucaaaauguaua

SEQ ID NO: 2894536 - RNA, 23 nt, Human
uuaauuucuucaaaauguauaua

SEQ ID NO: 2894537 - RNA, 18 nt, Human
uuaauuugcaucugaaau

SEQ ID NO: 2894538 - RNA, 14 nt, Human
uuaauuugauuaac

SEQ ID NO: 2894539 - RNA, 19 nt, Human
uuaauuugauuaacaaaua

SEQ ID NO: 2894540 - RNA, 21 nt, Human
uuaauuugauuaacaaauaug

SEQ ID NO: 2894541 - RNA, 18 nt, Human
uuaauuuaugaguuuuug

SEQ ID NO: 2894542 - RNA, 15 nt, Human
uuaauuuaugaguuu

SEQ ID NO: 2894543 - RNA, 15 nt, Human
uuaauuuaucuaaau

SEQ ID NO: 2894544 - RNA, 17 nt, Human
uuaauuuaucuaaauua

SEQ ID NO: 2894545 - RNA, 20 nt, Human
uuaauuuaugaguuuuugau

SEQ ID NO: 2894546 - RNA, 19 nt, Human
uuaauuuauuauugaaauu

SEQ ID NO: 2894547 - RNA, 22 nt, Human
uuaauccuuuguuuucugacua

SEQ ID NO: 2894548 - RNA, 21 nt, Human
uuaauccguaguuauuuugca

SEQ ID NO: 2894549 - RNA, 23 nt, Human
uuaauccuuuguuuucugacuaa

SEQ ID NO: 2894550 - RNA, 18 nt, Human
uuaaucaucuauaaagaa

SEQ ID NO: 2894551 - RNA, 22 nt, Human
uuaaucauuuugccucuuuucu

SEQ ID NO: 2894552 - RNA, 15 nt, Human
uuaaucacuuaacau

SEQ ID NO: 2894553 - RNA, 20 nt, Human
uuaaucacuuaacauuccua

SEQ ID NO: 2894554 - RNA, 16 nt, Human
uuaauaaaauaauucu

SEQ ID NO: 2894555 - RNA, 19 nt, Human
uuaaucacaaauuucacuu

SEQ ID NO: 2894556 - RNA, 20 nt, Human
uuaaucacaaauuucacuua

SEQ ID NO: 2894557 - RNA, 21 nt, Human
uuaaucacaaauuucacuuau

SEQ ID NO: 2894558 - RNA, 16 nt, Human
uuaaucagacaaagua

SEQ ID NO: 2894559 - RNA, 20 nt, Human
uuaaucagguccucagagaa

SEQ ID NO: 2894560 - RNA, 15 nt, Human
uuaaucaucuauaaa

SEQ ID NO: 2894561 - RNA, 23 nt, Human
uuaagagcagaacagaucuuuua

SEQ ID NO: 2894562 - RNA, 15 nt, Human
uuaagagcaguccau

SEQ ID NO: 2894563 - RNA, 16 nt, Human
uuaagagcaguccauu

SEQ ID NO: 2894564 - RNA, 22 nt, Human
uuaagaccuacuguucuaaagc

SEQ ID NO: 2894565 - RNA, 12 nt, Human
uuaagagaaacu

SEQ ID NO: 2894566 - RNA, 13 nt, Human
uuaagagaaacuu

SEQ ID NO: 2894567 - RNA, 14 nt, Human
uuaagagaaacuuu

SEQ ID NO: 2894568 - RNA, 15 nt, Human
uuaagagaaacuuua

SEQ ID NO: 2894569 - RNA, 16 nt, Human
uuaagagaaacuuuau

SEQ ID NO: 2894570 - RNA, 19 nt, Human
uuaagagaaacuuuauaca

SEQ ID NO: 2894571 - RNA, 20 nt, Human
uuaagagaaacuuuauacau

SEQ ID NO: 2894572 - RNA, 21 nt, Human
uuaagagaaacuuuauacauu

SEQ ID NO: 2894573 - RNA, 23 nt, Human
uuaagagaaacuuuauacauuag

SEQ ID NO: 2894574 - RNA, 12 nt, Human
uuaagagaaaug

SEQ ID NO: 2894575 - RNA, 13 nt, Human
uuaagagaaaugg

SEQ ID NO: 2894576 - RNA, 15 nt, Human
uuaagagaaauggca

SEQ ID NO: 2894577 - RNA, 13 nt, Human
uuaagagagaaau

SEQ ID NO: 2894578 - RNA, 14 nt, Human
uuaagagagaaauc

SEQ ID NO: 2894579 - RNA, 15 nt, Human
uuaagagagaaaucu

SEQ ID NO: 2894580 - RNA, 17 nt, Human
uuaagacguguuugugu

SEQ ID NO: 2894581 - RNA, 13 nt, Human
uuaagacguguuu

SEQ ID NO: 2894582 - RNA, 16 nt, Human
uuaagacguguuugug

SEQ ID NO: 2894583 - RNA, 21 nt, Human
uuaauaaaaagcuuuuuccuc

SEQ ID NO: 2894584 - RNA, 15 nt, Human
uuaauaaaaaugaca

SEQ ID NO: 2894585 - RNA, 17 nt, Human
uuaauaaaaaugacaga

SEQ ID NO: 2894586 - RNA, 19 nt, Human
uuaauaaaaaugacagacu

SEQ ID NO: 2894587 - RNA, 16 nt, Human
uuaaguuguuugcaug

SEQ ID NO: 2894588 - RNA, 19 nt, Human
uuaaguuguuugcauguga

SEQ ID NO: 2894589 - RNA, 15 nt, Human
uuaaguuucaaacuu

SEQ ID NO: 2894590 - RNA, 16 nt, Human
uuaaguuucaaacuua

SEQ ID NO: 2894591 - RNA, 22 nt, Human
uuaaguuucaaacuuacuauuu

SEQ ID NO: 2894592 - RNA, 20 nt, Human
uuaauaaaaaaacaaucauu

SEQ ID NO: 2894593 - RNA, 21 nt, Human
uuaauaaaaacuuacacucuu

SEQ ID NO: 2894594 - RNA, 13 nt, Human
aguuuacauugua

SEQ ID NO: 2894595 - RNA, 14 nt, Human
aguuaggaaauaaa

SEQ ID NO: 2894596 - RNA, 13 nt, Human
aguuaggaaauaa

SEQ ID NO: 2894597 - RNA, 22 nt, Human
aguuagcucaggaggcuuggaa

SEQ ID NO: 2894598 - RNA, 19 nt, Human
aguuagcucaggaggcuug

SEQ ID NO: 2894599 - RNA, 12 nt, Human
aguuaggaaaua

SEQ ID NO: 2894600 - RNA, 17 nt, Human
aguuuacauuguaaaua

SEQ ID NO: 2894601 - RNA, 15 nt, Human
aguuuacauuguaaa

SEQ ID NO: 2894602 - RNA, 12 nt, Human
aguuuacauuuu

SEQ ID NO: 2894603 - RNA, 13 nt, Human
aguuuacauuuuu

SEQ ID NO: 2894604 - RNA, 14 nt, Human
aguuuacauuuuua

SEQ ID NO: 2894605 - RNA, 19 nt, Human
aguuuacauuuuuauuuau

SEQ ID NO: 2894606 - RNA, 21 nt, Human
aguuuacauuuuuauuuauga

SEQ ID NO: 2894607 - RNA, 22 nt, Human
aguuuacauuuuuauuuaugaa

SEQ ID NO: 2894608 - RNA, 20 nt, Human
aguuuacuagcuuuucaaac

SEQ ID NO: 2894609 - RNA, 12 nt, Human
aguuuaacacaa

SEQ ID NO: 2894610 - RNA, 16 nt, Human
aguuuaccucuuuaaa

SEQ ID NO: 2894611 - RNA, 20 nt, Human
aguuuaccucuuuaaaaaca

SEQ ID NO: 2894612 - RNA, 17 nt, Human
aguuuacccaugaagau

SEQ ID NO: 2894613 - RNA, 21 nt, Human
aguuuacccaugaagauuggu

SEQ ID NO: 2894614 - RNA, 16 nt, Human
aguuuacccgguuucu

SEQ ID NO: 2894615 - RNA, 14 nt, Human
aguuuagauuucaa

SEQ ID NO: 2894616 - RNA, 21 nt, Human
aguuuagauuucaagaaaaaa

SEQ ID NO: 2894617 - RNA, 15 nt, Human
uuaaaaaaucuuaau

SEQ ID NO: 2894618 - RNA, 15 nt, Human
uuaaaaaauauuuau

SEQ ID NO: 2894619 - RNA, 19 nt, Human
uuaaaaaauauuuauuaaa

SEQ ID NO: 2894620 - RNA, 21 nt, Human
uuaaaaaauauuuauuaaaua

SEQ ID NO: 2894621 - RNA, 16 nt, Human
uuaaaaaaucuuaaug

SEQ ID NO: 2894622 - RNA, 12 nt, Human
uuaaaaaaugaa

SEQ ID NO: 2894623 - RNA, 16 nt, Human
uuaaaaaaugaaaaua

SEQ ID NO: 2894624 - RNA, 16 nt, Human
uuaaaaaaugaaaucc

SEQ ID NO: 2894625 - RNA, 19 nt, Human
uuaaaaaugagugugaagg

SEQ ID NO: 2894626 - RNA, 18 nt, Human
uuaaaaaugguggcuuca

SEQ ID NO: 2894627 - RNA, 22 nt, Human
uuaaaaaugguggcuucagcuc

SEQ ID NO: 2894628 - RNA, 17 nt, Human
uuaaaaucuauucugug

SEQ ID NO: 2894629 - RNA, 18 nt, Human
uuaaaaucuauucugugu

SEQ ID NO: 2894630 - RNA, 19 nt, Human
uuaaaaucuauucuguguu

SEQ ID NO: 2894631 - RNA, 23 nt, Human
uuaaaaucuauucuguguugcau

SEQ ID NO: 2894632 - RNA, 24 nt, Human
uuaaaaucuauucuguguugcauu

SEQ ID NO: 2894633 - RNA, 10 nt, Human
uuaaaaaugg

SEQ ID NO: 2894634 - RNA, 12 nt, Human
uuaaaaauggaa

SEQ ID NO: 2894635 - RNA, 17 nt, Human
uuaaaaauggaacugug

SEQ ID NO: 2894636 - RNA, 19 nt, Human
uuaaaccagauuggagcaa

SEQ ID NO: 2894637 - RNA, 21 nt, Human
uuaaaccaguuuagauuucaa

SEQ ID NO: 2894638 - RNA, 17 nt, Human
uuaaaauguaagauuau

SEQ ID NO: 2894639 - RNA, 24 nt, Human
uuaaaauguaagauuauagauucu

SEQ ID NO: 2894640 - RNA, 18 nt, Human
uuaaaaugauuguaaaau

SEQ ID NO: 2894641 - RNA, 18 nt, Human
uuaaaaugcaaaauaaug

SEQ ID NO: 2894642 - RNA, 16 nt, Human
uuaaaaugauuguaaa

SEQ ID NO: 2894643 - RNA, 12 nt, Human
uuaaaaugcaau

SEQ ID NO: 2894644 - RNA, 13 nt, Human
uuaaaaugcaaua

SEQ ID NO: 2894645 - RNA, 20 nt, Human
uuaaaaugcaauauuuguaa

SEQ ID NO: 2894646 - RNA, 23 nt, Human
uuaaaaugcaauauuuguaaggc

SEQ ID NO: 2894647 - RNA, 11 nt, Human
uuaaaauggaa

SEQ ID NO: 2894648 - RNA, 21 nt, Human
uuaaaauggaugccuugaaua

SEQ ID NO: 2894649 - RNA, 21 nt, Human
uuaaaauggugcuuaaguucc

SEQ ID NO: 2894650 - RNA, 19 nt, Human
uuaaaaugguuuguccuga

SEQ ID NO: 2894651 - RNA, 21 nt, Human
uuaaaaugguuuguccugaug

SEQ ID NO: 2894652 - RNA, 14 nt, Human
aguuugugugucuu

SEQ ID NO: 2894653 - RNA, 15 nt, Human
aguuugugugucuua

SEQ ID NO: 2894654 - RNA, 16 nt, Human
aguuugugugucuuaa

SEQ ID NO: 2894655 - RNA, 16 nt, Human
aguuuguguguugucu

SEQ ID NO: 2894656 - RNA, 18 nt, Human
aguuuguguguugucuug

SEQ ID NO: 2894657 - RNA, 22 nt, Human
aguuugugugucuuaauuauua

SEQ ID NO: 2894658 - RNA, 20 nt, Human
aguuuguuuaaugugaacuu

SEQ ID NO: 2894659 - RNA, 19 nt, Human
aguuuguguguugucuuga

SEQ ID NO: 2894660 - RNA, 20 nt, Human
aguuuguguguugucuugaa

SEQ ID NO: 2894661 - RNA, 13 nt, Human
aguuuuacaaagg

SEQ ID NO: 2894662 - RNA, 15 nt, Human
aguuuuaaacucauu

SEQ ID NO: 2894663 - RNA, 23 nt, Human
aguuuuaaacucauuuuugccau

SEQ ID NO: 2894664 - RNA, 14 nt, Human
aguuucucuuuuca

SEQ ID NO: 2894665 - RNA, 13 nt, Human
aguuucucagcuc

SEQ ID NO: 2894666 - RNA, 22 nt, Human
aguuuauugacaauaauuucag

SEQ ID NO: 2894667 - RNA, 22 nt, Human
aguuuauuuccaaauaaaauga

SEQ ID NO: 2894668 - RNA, 15 nt, Human
aguuuauucucauuu

SEQ ID NO: 2894669 - RNA, 16 nt, Human
aguuuauucucauuug

SEQ ID NO: 2894670 - RNA, 14 nt, Human
aguuucuaagauuc

SEQ ID NO: 2894671 - RNA, 23 nt, Human
aguuucuaagguccgguguucua

SEQ ID NO: 2894672 - RNA, 15 nt, Human
aguuucucagauccu

SEQ ID NO: 2894673 - RNA, 18 nt, Human
aguuucucagauccuugu

SEQ ID NO: 2894674 - RNA, 22 nt, Human
aguuucucagauccuuguuuca

SEQ ID NO: 2894675 - RNA, 23 nt, Human
aguuucucagauccuuguuucaa

SEQ ID NO: 2894676 - RNA, 15 nt, Human
aguuucuaagauucu

SEQ ID NO: 2894677 - RNA, 16 nt, Human
aguuucuaagauucua

SEQ ID NO: 2894678 - RNA, 17 nt, Human
aguuucuaagauucuaa

SEQ ID NO: 2894679 - RNA, 18 nt, Human
aguuucuaagauucuaaa

SEQ ID NO: 2894680 - RNA, 19 nt, Human
aguuucuaagauucuaaag

SEQ ID NO: 2894681 - RNA, 20 nt, Human
aguuucuaagauucuaaagg

SEQ ID NO: 2894682 - RNA, 11 nt, Human
aguuucuaagg

SEQ ID NO: 2894683 - RNA, 12 nt, Human
aguuucuaaggu

SEQ ID NO: 2894684 - RNA, 15 nt, Human
uuaaaguucuguaaa

SEQ ID NO: 2894685 - RNA, 20 nt, Human
uuaaauuuugaguucuacau

SEQ ID NO: 2894686 - RNA, 15 nt, Human
uuaaauuuugaguuc

SEQ ID NO: 2894687 - RNA, 23 nt, Human
uuaaauuuuacccuuuagacugu

SEQ ID NO: 2894688 - RNA, 16 nt, Human
uuaaauuuuacccuuu

SEQ ID NO: 2894689 - RNA, 20 nt, Human
uuaaauuuuacccuuuagac

SEQ ID NO: 2894690 - RNA, 13 nt, Human
uuaaauaaaagaa

SEQ ID NO: 2894691 - RNA, 14 nt, Human
uuaaaguuggaauu

SEQ ID NO: 2894692 - RNA, 19 nt, Human
uuaaaguuggaauuuacca

SEQ ID NO: 2894693 - RNA, 14 nt, Human
uuaaauuuuguaau

SEQ ID NO: 2894694 - RNA, 15 nt, Human
uuaaauuuuguaaug

SEQ ID NO: 2894695 - RNA, 16 nt, Human
uuaaauuuuguaauga

SEQ ID NO: 2894696 - RNA, 14 nt, Human
aguuuaucaugaag

SEQ ID NO: 2894697 - RNA, 15 nt, Human
aguuuaucaugaagc

SEQ ID NO: 2894698 - RNA, 16 nt, Human
aguuuaucaugaagcc

SEQ ID NO: 2894699 - RNA, 17 nt, Human
aguuuaucaugaagccu

SEQ ID NO: 2894700 - RNA, 19 nt, Human
aguuuaucaugaagccugu

SEQ ID NO: 2894701 - RNA, 16 nt, Human
uuaaauuuuuuuuaca

SEQ ID NO: 2894702 - RNA, 14 nt, Human
uuaggguacauuua

SEQ ID NO: 2894703 - RNA, 15 nt, Human
uuaggguacauuuau

SEQ ID NO: 2894704 - RNA, 15 nt, Human
uuaggguacuaaauu

SEQ ID NO: 2894705 - RNA, 15 nt, Human
uuagggugaaccacu

SEQ ID NO: 2894706 - RNA, 21 nt, Human
uuagggugaaccacuucauuc

SEQ ID NO: 2894707 - RNA, 15 nt, Human
uuagggugcagccac

SEQ ID NO: 2894708 - RNA, 15 nt, Human
uuagggccaggcagg

SEQ ID NO: 2894709 - RNA, 21 nt, Human
uuagggauaguacuaagcauu

SEQ ID NO: 2894710 - RNA, 14 nt, Human
uuagggauuuauuu

SEQ ID NO: 2894711 - RNA, 11 nt, Human
auaauuuuaaa

SEQ ID NO: 2894712 - RNA, 19 nt, Human
uuagauguugccauguguu

SEQ ID NO: 2894713 - RNA, 16 nt, Human
uuagauguugccaugu

SEQ ID NO: 2894714 - RNA, 22 nt, Human
uuagauguugccauguguuuua

SEQ ID NO: 2894715 - RNA, 15 nt, Human
uuagauguuucacac

SEQ ID NO: 2894716 - RNA, 16 nt, Human
uuaggucucuguugac

SEQ ID NO: 2894717 - RNA, 20 nt, Human
uuaggguugguuccuuucca

SEQ ID NO: 2894718 - RNA, 17 nt, Human
uuagguaauuuuuuuca

SEQ ID NO: 2894719 - RNA, 13 nt, Human
uuagguacuauuc

SEQ ID NO: 2894720 - RNA, 14 nt, Human
uuagguagaaaaac

SEQ ID NO: 2894721 - RNA, 15 nt, Human
uuagguagaaaaaca

SEQ ID NO: 2894722 - RNA, 20 nt, Human
uuagguuaaaaaaaggcauu

SEQ ID NO: 2894723 - RNA, 12 nt, Human
uuagguuaacau

SEQ ID NO: 2894724 - RNA, 12 nt, Human
uuagguucuaaa

SEQ ID NO: 2894725 - RNA, 22 nt, Human
uuagguuccauccuuuacgugu

SEQ ID NO: 2894726 - RNA, 13 nt, Human
uuagguucuaaag

SEQ ID NO: 2894727 - RNA, 14 nt, Human
uuagguucuaaagu

SEQ ID NO: 2894728 - RNA, 16 nt, Human
uuagguucuaaaguuc

SEQ ID NO: 2894729 - RNA, 18 nt, Human
uuagguucuaaaguucua

SEQ ID NO: 2894730 - RNA, 19 nt, Human
uuagguucuaaaguucuaa

SEQ ID NO: 2894731 - RNA, 20 nt, Human
uuagguucuaaaguucuaag

SEQ ID NO: 2894732 - RNA, 22 nt, Human
uuagguucuaaaguucuaagau

SEQ ID NO: 2894733 - RNA, 14 nt, Human
uuagguucuuaaaa

SEQ ID NO: 2894734 - RNA, 13 nt, Human
uuaguaaucugua

SEQ ID NO: 2894735 - RNA, 15 nt, Human
uuaguaaucuguaca

SEQ ID NO: 2894736 - RNA, 16 nt, Human
uuaguaaucuguacau

SEQ ID NO: 2894737 - RNA, 17 nt, Human
uuaguaaucuguacauu

SEQ ID NO: 2894738 - RNA, 21 nt, Human
uuaguaaucuguacauuuugu

SEQ ID NO: 2894739 - RNA, 19 nt, Human
uuauaaacagacaauaugu

SEQ ID NO: 2894740 - RNA, 21 nt, Human
uuauaaacagacaauauguga

SEQ ID NO: 2894741 - RNA, 23 nt, Human
uuauaaacagacaauaugugagu

SEQ ID NO: 2894742 - RNA, 20 nt, Human
uuauaaaauauaaacaaaga

SEQ ID NO: 2894743 - RNA, 16 nt, Human
uuauaaaaucaaguuu

SEQ ID NO: 2894744 - RNA, 10 nt, Human
uuauaaaauu

SEQ ID NO: 2894745 - RNA, 16 nt, Human
uuauaaaauuaagcaa

SEQ ID NO: 2894746 - RNA, 17 nt, Human
uuauaaaauuagaaagc

SEQ ID NO: 2894747 - RNA, 17 nt, Human
uuauaaaauuuugcuuu

SEQ ID NO: 2894748 - RNA, 18 nt, Human
uuauaaaauuuugcuuuu

SEQ ID NO: 2894749 - RNA, 13 nt, Human
uuauaaaauauaa

SEQ ID NO: 2894750 - RNA, 18 nt, Human
uuauaaaauauaaacaaa

SEQ ID NO: 2894751 - RNA, 22 nt, Human
uuauaaaaggggguccguggaa

SEQ ID NO: 2894752 - RNA, 17 nt, Human
uuauaaaaauaaauaga

SEQ ID NO: 2894753 - RNA, 20 nt, Human
uuauaaaaauaaauagaaaa

SEQ ID NO: 2894754 - RNA, 21 nt, Human
uuauaaaaauaaauagaaaag

SEQ ID NO: 2894755 - RNA, 14 nt, Human
uuaguagagacagg

SEQ ID NO: 2894756 - RNA, 19 nt, Human
uuaguuuuuguaauuuauu

SEQ ID NO: 2894757 - RNA, 13 nt, Human
uuaguagagacag

SEQ ID NO: 2894758 - RNA, 21 nt, Human
auaauuaugaguuugcuuaug

SEQ ID NO: 2894759 - RNA, 16 nt, Human
auaauuauuuauuuaa

SEQ ID NO: 2894760 - RNA, 17 nt, Human
auaauuauuuauuuaau

SEQ ID NO: 2894761 - RNA, 18 nt, Human
auaauuauuuauuuaaua

SEQ ID NO: 2894762 - RNA, 21 nt, Human
auaauuauuuauuuaauaaca

SEQ ID NO: 2894763 - RNA, 18 nt, Human
auaauucaauuuuaaaga

SEQ ID NO: 2894764 - RNA, 13 nt, Human
auaauucacucaa

SEQ ID NO: 2894765 - RNA, 16 nt, Human
auaauucacucaagca

SEQ ID NO: 2894766 - RNA, 18 nt, Human
auaauucacucaagcacu

SEQ ID NO: 2894767 - RNA, 20 nt, Human
auaauucacucaagcacuga

SEQ ID NO: 2894768 - RNA, 22 nt, Human
auaauucacucaagcacugaua

SEQ ID NO: 2894769 - RNA, 15 nt, Human
auaauuuuaaaaaug

SEQ ID NO: 2894770 - RNA, 16 nt, Human
auaauuuuaaaaaugg

SEQ ID NO: 2894771 - RNA, 17 nt, Human
auaauuuuaaaaauggu

SEQ ID NO: 2894772 - RNA, 15 nt, Human
auaauuuuaaacaaa

SEQ ID NO: 2894773 - RNA, 22 nt, Human
auaauuuguacauauguaaaau

SEQ ID NO: 2894774 - RNA, 19 nt, Human
auaauuuguacauauguaa

SEQ ID NO: 2894775 - RNA, 13 nt, Human
auaauuucgagau

SEQ ID NO: 2894776 - RNA, 15 nt, Human
auaauuucgagauuu

SEQ ID NO: 2894777 - RNA, 12 nt, Human
auaauuucuaau

SEQ ID NO: 2894778 - RNA, 14 nt, Human
auaauuucuaaugu

SEQ ID NO: 2894779 - RNA, 22 nt, Human
uuagauguuccaguaaucuaau

SEQ ID NO: 2894780 - RNA, 21 nt, Human
uuagauguuccaguaaucuaa

SEQ ID NO: 2894781 - RNA, 11 nt, Human
auaagauucua

SEQ ID NO: 2894782 - RNA, 15 nt, Human
auaagcauugaaauu

SEQ ID NO: 2894783 - RNA, 16 nt, Human
auaagcauugaaauua

SEQ ID NO: 2894784 - RNA, 18 nt, Human
auaagcauugaaauuaua

SEQ ID NO: 2894785 - RNA, 14 nt, Human
auaauaguuuuuuc

SEQ ID NO: 2894786 - RNA, 18 nt, Human
auaauauaccaaugcuuu

SEQ ID NO: 2894787 - RNA, 14 nt, Human
auaauauauuugug

SEQ ID NO: 2894788 - RNA, 23 nt, Human
auaauauauucuauuuuuauacu

SEQ ID NO: 2894789 - RNA, 10 nt, Human
auaauauaua

SEQ ID NO: 2894790 - RNA, 13 nt, Human
auaauauauauau

SEQ ID NO: 2894791 - RNA, 15 nt, Human
auaauauauauauau

SEQ ID NO: 2894792 - RNA, 21 nt, Human
auaauauauauauauaucagu

SEQ ID NO: 2894793 - RNA, 20 nt, Human
auaauauccaggucaacaga

SEQ ID NO: 2894794 - RNA, 21 nt, Human
auaauauccaggucaacagaa

SEQ ID NO: 2894795 - RNA, 22 nt, Human
auaauauccaggucaacagaau

SEQ ID NO: 2894796 - RNA, 23 nt, Human
auaauauccaggucaacagaaug

SEQ ID NO: 2894797 - RNA, 14 nt, Human
auaauaucuaaagu

SEQ ID NO: 2894798 - RNA, 17 nt, Human
auaauaucuaaaguuau

SEQ ID NO: 2894799 - RNA, 18 nt, Human
auaauaucuaaaguuaua

SEQ ID NO: 2894800 - RNA, 19 nt, Human
auaauaucuaaaguuauau

SEQ ID NO: 2894801 - RNA, 20 nt, Human
auaauaucuaaaguuauauu

SEQ ID NO: 2894802 - RNA, 13 nt, Human
auaauaugauuuu

SEQ ID NO: 2894803 - RNA, 18 nt, Human
auaauaucuuugugauaa

SEQ ID NO: 2894804 - RNA, 22 nt, Human
auaauaucuuugugauaauuua

SEQ ID NO: 2894805 - RNA, 16 nt, Human
auaauauuguuuuucu

SEQ ID NO: 2894806 - RNA, 14 nt, Human
auaauauuguugua

SEQ ID NO: 2894807 - RNA, 17 nt, Human
auaauauuguuguauaa

SEQ ID NO: 2894808 - RNA, 19 nt, Human
auaauauuguuguauaauu

SEQ ID NO: 2894809 - RNA, 22 nt, Human
auaauauuguuguauaauuucg

SEQ ID NO: 2894810 - RNA, 13 nt, Human
auaauauggcuau

SEQ ID NO: 2894811 - RNA, 17 nt, Human
auaauauggcuaugcuu

SEQ ID NO: 2894812 - RNA, 22 nt, Human
auaauauggcuaugcuuaaaag

SEQ ID NO: 2894813 - RNA, 23 nt, Human
auaauauggcuaugcuuaaaagg

SEQ ID NO: 2894814 - RNA, 13 nt, Human
auaauauuacugu

SEQ ID NO: 2894815 - RNA, 14 nt, Human
auaauauuacuguu

SEQ ID NO: 2894816 - RNA, 12 nt, Human
auaaucugucaa

SEQ ID NO: 2894817 - RNA, 13 nt, Human
auaaucugucaaa

SEQ ID NO: 2894818 - RNA, 17 nt, Human
auaaucugucaaaacac

SEQ ID NO: 2894819 - RNA, 19 nt, Human
auaaucugucaaaacacug

SEQ ID NO: 2894820 - RNA, 20 nt, Human
auaaucugucaaaacacugu

SEQ ID NO: 2894821 - RNA, 22 nt, Human
auaaucuggacuccucugucca

SEQ ID NO: 2894822 - RNA, 16 nt, Human
auaaaugauucuuagu

SEQ ID NO: 2894823 - RNA, 18 nt, Human
auaaaugauucuuaguga

SEQ ID NO: 2894824 - RNA, 13 nt, Human
auaaaugggaaca

SEQ ID NO: 2894825 - RNA, 17 nt, Human
auaaaugggaacauuua

SEQ ID NO: 2894826 - RNA, 14 nt, Human
auaaaugcagccca

SEQ ID NO: 2894827 - RNA, 15 nt, Human
auaaaugcagcccau

SEQ ID NO: 2894828 - RNA, 18 nt, Human
auaaaugcagcccauuuc

SEQ ID NO: 2894829 - RNA, 13 nt, Human
auaaauggaaauc

SEQ ID NO: 2894830 - RNA, 14 nt, Human
auaaauggaaauca

SEQ ID NO: 2894831 - RNA, 15 nt, Human
auaaauggaaaucau

SEQ ID NO: 2894832 - RNA, 13 nt, Human
auaaauugaaauu

SEQ ID NO: 2894833 - RNA, 17 nt, Human
auaaauugaaauuguga

SEQ ID NO: 2894834 - RNA, 17 nt, Human
auaaauugcauaaagca

SEQ ID NO: 2894835 - RNA, 18 nt, Human
auaaauugcauaaagcau

SEQ ID NO: 2894836 - RNA, 13 nt, Human
auaaauugcuccu

SEQ ID NO: 2894837 - RNA, 16 nt, Human
auaaauugcuccuuga

SEQ ID NO: 2894838 - RNA, 13 nt, Human
uuacaaacuacag

SEQ ID NO: 2894839 - RNA, 14 nt, Human
uuacaaacuacaga

SEQ ID NO: 2894840 - RNA, 17 nt, Human
uuaauuuuuugguacaa

SEQ ID NO: 2894841 - RNA, 18 nt, Human
uuaauuuuuugguacaaa

SEQ ID NO: 2894842 - RNA, 13 nt, Human
uuacauaacugcc

SEQ ID NO: 2894843 - RNA, 15 nt, Human
uuacauaacugccuu

SEQ ID NO: 2894844 - RNA, 17 nt, Human
uuacauaacugccuuga

SEQ ID NO: 2894845 - RNA, 16 nt, Human
uuaccagcuuuuaacc

SEQ ID NO: 2894846 - RNA, 19 nt, Human
uuaccagcuuuuaaccauc

SEQ ID NO: 2894847 - RNA, 17 nt, Human
uuaccagggauguagau

SEQ ID NO: 2894848 - RNA, 14 nt, Human
uuacaggugugaac

SEQ ID NO: 2894849 - RNA, 22 nt, Human
uuacaggguaacugugcugaau

SEQ ID NO: 2894850 - RNA, 18 nt, Human
uuacagguggacacacaa

SEQ ID NO: 2894851 - RNA, 20 nt, Human
uuacagggaugagccaccgc

SEQ ID NO: 2894852 - RNA, 12 nt, Human
auaacucuguaa

SEQ ID NO: 2894853 - RNA, 13 nt, Human
auaacucuguaaa

SEQ ID NO: 2894854 - RNA, 19 nt, Human
auaacucuguaaaaacacu

SEQ ID NO: 2894855 - RNA, 14 nt, Human
auaacuauucaguu

SEQ ID NO: 2894856 - RNA, 15 nt, Human
auaacuauucaguug

SEQ ID NO: 2894857 - RNA, 17 nt, Human
auaacuauucaguugug

SEQ ID NO: 2894858 - RNA, 15 nt, Human
auaacucaucauaaa

SEQ ID NO: 2894859 - RNA, 17 nt, Human
auaacucaucauaaaau

SEQ ID NO: 2894860 - RNA, 16 nt, Human
auaacucaucauaaaa

SEQ ID NO: 2894861 - RNA, 19 nt, Human
auaacucaucauaaaauaa

SEQ ID NO: 2894862 - RNA, 18 nt, Human
auaacucaucauaaaaua

SEQ ID NO: 2894863 - RNA, 18 nt, Human
auaaauugcuccuugaca

SEQ ID NO: 2894864 - RNA, 19 nt, Human
auaacuaguguugcuugga

SEQ ID NO: 2894865 - RNA, 16 nt, Human
auaacuaguguugcuu

SEQ ID NO: 2894866 - RNA, 15 nt, Human
auaacuauguugaua

SEQ ID NO: 2894867 - RNA, 22 nt, Human
auaagaaaaccaccccuuagau

SEQ ID NO: 2894868 - RNA, 23 nt, Human
auaagaaaaccaccccuuagauu

SEQ ID NO: 2894869 - RNA, 19 nt, Human
auaagauccuagauccuaa

SEQ ID NO: 2894870 - RNA, 13 nt, Human
auaagaaagacau

SEQ ID NO: 2894871 - RNA, 14 nt, Human
auaagaaagacauc

SEQ ID NO: 2894872 - RNA, 16 nt, Human
uuagaagucacacagu

SEQ ID NO: 2894873 - RNA, 13 nt, Human
uuagaauaaauuc

SEQ ID NO: 2894874 - RNA, 16 nt, Human
uuagaauaaauuccca

SEQ ID NO: 2894875 - RNA, 17 nt, Human
uuagaagugcauuucug

SEQ ID NO: 2894876 - RNA, 19 nt, Human
uuagaagugcauuucugaa

SEQ ID NO: 2894877 - RNA, 12 nt, Human
uuagaaguguca

SEQ ID NO: 2894878 - RNA, 13 nt, Human
uuagaagugucau

SEQ ID NO: 2894879 - RNA, 14 nt, Human
uuagaagugucaug

SEQ ID NO: 2894880 - RNA, 17 nt, Human
uuagaagugucauguuu

SEQ ID NO: 2894881 - RNA, 18 nt, Human
uuagaagguucucuccuc

SEQ ID NO: 2894882 - RNA, 23 nt, Human
uuacugucugguuuuaacaauuu

SEQ ID NO: 2894883 - RNA, 13 nt, Human
uuacuguaccugu

SEQ ID NO: 2894884 - RNA, 22 nt, Human
uuacugucugguuuuaacaauu

SEQ ID NO: 2894885 - RNA, 15 nt, Human
uuacuguaauuccuc

SEQ ID NO: 2894886 - RNA, 12 nt, Human
uuagaauuauuu

SEQ ID NO: 2894887 - RNA, 13 nt, Human
uuagaauuauuua

SEQ ID NO: 2894888 - RNA, 15 nt, Human
uuagaauuauuuaaa

SEQ ID NO: 2894889 - RNA, 16 nt, Human
uuagaauuauuuaaac

SEQ ID NO: 2894890 - RNA, 21 nt, Human
uuagaauccacguauuccccu

SEQ ID NO: 2894891 - RNA, 12 nt, Human
uuagaaugaaaa

SEQ ID NO: 2894892 - RNA, 14 nt, Human
uuagaaucuauuuu

SEQ ID NO: 2894893 - RNA, 15 nt, Human
uuagaaucuauuuuc

SEQ ID NO: 2894894 - RNA, 16 nt, Human
uuagaaucuauuuucu

SEQ ID NO: 2894895 - RNA, 17 nt, Human
uuagaaucuauuuucua

SEQ ID NO: 2894896 - RNA, 21 nt, Human
uuagaaucuauuuucuaugua

SEQ ID NO: 2894897 - RNA, 23 nt, Human
uuagaaucuauuuucuauguacu

SEQ ID NO: 2894898 - RNA, 21 nt, Human
uuagaaucagccuugaaacau

SEQ ID NO: 2894899 - RNA, 20 nt, Human
uuagaaucauuaccuuuuac

SEQ ID NO: 2894900 - RNA, 20 nt, Human
uuacucccaagacuucauug

SEQ ID NO: 2894901 - RNA, 22 nt, Human
uuacuccuauuuuuguaaacug

SEQ ID NO: 2894902 - RNA, 15 nt, Human
uuacuccucacacuu

SEQ ID NO: 2894903 - RNA, 21 nt, Human
uuacuccucacacuuacugua

SEQ ID NO: 2894904 - RNA, 12 nt, Human
uuacuccuccuc

SEQ ID NO: 2894905 - RNA, 17 nt, Human
uuacuccuccucuuucu

SEQ ID NO: 2894906 - RNA, 18 nt, Human
uuacuccuccucuuucuc

SEQ ID NO: 2894907 - RNA, 19 nt, Human
uuacaggugugcaccacca

SEQ ID NO: 2894908 - RNA, 16 nt, Human
uuacuccauaaacaga

SEQ ID NO: 2894909 - RNA, 19 nt, Human
uuacugccgguuugaaaau

SEQ ID NO: 2894910 - RNA, 21 nt, Human
uuacugccaaagggaaauauc

SEQ ID NO: 2894911 - RNA, 22 nt, Human
uuacugcagccuuugccucccc

SEQ ID NO: 2894912 - RNA, 12 nt, Human
uuacugcaguug

SEQ ID NO: 2894913 - RNA, 21 nt, Human
uuacugcauggggaaagagau

SEQ ID NO: 2894914 - RNA, 22 nt, Human
uuacucuaagaucuuagauucu

SEQ ID NO: 2894915 - RNA, 18 nt, Human
uuacucuagauaccuaaa

SEQ ID NO: 2894916 - RNA, 12 nt, Human
uuacucuaagau

SEQ ID NO: 2894917 - RNA, 14 nt, Human
uuacucuaagaucu

SEQ ID NO: 2894918 - RNA, 19 nt, Human
uuacucuaagaucuuagau

SEQ ID NO: 2894919 - RNA, 21 nt, Human
uuacucuaagaucuuagauuc

SEQ ID NO: 2894920 - RNA, 21 nt, Human
uuacucauuuuuuuaauuuau

SEQ ID NO: 2894921 - RNA, 13 nt, Human
uuacucauugaaa

SEQ ID NO: 2894922 - RNA, 14 nt, Human
uuacucauugaaau

SEQ ID NO: 2894923 - RNA, 15 nt, Human
uuacucauugaaaug

SEQ ID NO: 2894924 - RNA, 16 nt, Human
uuacucauugaaaugu

SEQ ID NO: 2894925 - RNA, 17 nt, Human
uuacucauugaaauguc

SEQ ID NO: 2894926 - RNA, 18 nt, Human
uuacucauugaaauguca

SEQ ID NO: 2894927 - RNA, 19 nt, Human
uuacucauugaaaugucac

SEQ ID NO: 2894928 - RNA, 13 nt, Human
uuacucagggcuc

SEQ ID NO: 2894929 - RNA, 18 nt, Human
uuacucagggcuccuccc

SEQ ID NO: 2894930 - RNA, 19 nt, Human
uuacucagggcuccuccca

SEQ ID NO: 2894931 - RNA, 20 nt, Human
uuacucagggcuccucccag

SEQ ID NO: 2894932 - RNA, 21 nt, Human
uuacucagggcuccucccagc

SEQ ID NO: 2894933 - RNA, 15 nt, Human
uuacucaguuuaugu

SEQ ID NO: 2894934 - RNA, 19 nt, Human
uuaccauggaguuaacauc

SEQ ID NO: 2894935 - RNA, 21 nt, Human
uuaccagucuuuaaaggccca

SEQ ID NO: 2894936 - RNA, 23 nt, Human
uuaccagucuuuaaaggcccagc

SEQ ID NO: 2894937 - RNA, 23 nt, Human
uuaccaguggcguuguugcaugu

SEQ ID NO: 2894938 - RNA, 24 nt, Human
uuaccaguggcguuguugcauguu

SEQ ID NO: 2894939 - RNA, 16 nt, Human
uuaccaguuaauuacu

SEQ ID NO: 2894940 - RNA, 18 nt, Human
uuaccaguuaauuacuca

SEQ ID NO: 2894941 - RNA, 22 nt, Human
augaauaucuauuaauauaugu

SEQ ID NO: 2894942 - RNA, 18 nt, Human
augaagagcuugcuuuga

SEQ ID NO: 2894943 - RNA, 17 nt, Human
augaauauugaaguuuc

SEQ ID NO: 2894944 - RNA, 13 nt, Human
augaaucacuguu

SEQ ID NO: 2894945 - RNA, 17 nt, Human
augaaucacuguuuuua

SEQ ID NO: 2894946 - RNA, 18 nt, Human
augaaucacuguuuuuag

SEQ ID NO: 2894947 - RNA, 19 nt, Human
augaaucacuguuuuuaga

SEQ ID NO: 2894948 - RNA, 21 nt, Human
augaaucacuguuuuuagaca

SEQ ID NO: 2894949 - RNA, 23 nt, Human
augaaucacuguuuuuagacacc

SEQ ID NO: 2894950 - RNA, 18 nt, Human
augaauaucuauuaauau

SEQ ID NO: 2894951 - RNA, 19 nt, Human
augaauaucuauuaauaua

SEQ ID NO: 2894952 - RNA, 20 nt, Human
augaauaucuauuaauauau

SEQ ID NO: 2894953 - RNA, 21 nt, Human
augaauaucuauuaauauaug

SEQ ID NO: 2894954 - RNA, 12 nt, Human
augaauauuuug

SEQ ID NO: 2894955 - RNA, 13 nt, Human
augaauauuuuga

SEQ ID NO: 2894956 - RNA, 14 nt, Human
augaauauuuugau

SEQ ID NO: 2894957 - RNA, 15 nt, Human
augaauauuuugaua

SEQ ID NO: 2894958 - RNA, 19 nt, Human
augaauauuuugauaauaa

SEQ ID NO: 2894959 - RNA, 20 nt, Human
augaauauuuugauaauaau

SEQ ID NO: 2894960 - RNA, 22 nt, Human
augaauauuuugauaauaauau

SEQ ID NO: 2894961 - RNA, 21 nt, Human
augaaugguauggaacucucu

SEQ ID NO: 2894962 - RNA, 16 nt, Human
uuggggagauuugcca

SEQ ID NO: 2894963 - RNA, 20 nt, Human
uuggggaggacaaaacuucu

SEQ ID NO: 2894964 - RNA, 16 nt, Human
uuggugagaaaccugu

SEQ ID NO: 2894965 - RNA, 18 nt, Human
uuggugagaaaccuguau

SEQ ID NO: 2894966 - RNA, 21 nt, Human
uuggugagaaaccuguaucuu

SEQ ID NO: 2894967 - RNA, 15 nt, Human
uuggugauucaaaug

SEQ ID NO: 2894968 - RNA, 16 nt, Human
uuggugauucaaaugg

SEQ ID NO: 2894969 - RNA, 21 nt, Human
uuggugcaacccuuaccccuu

SEQ ID NO: 2894970 - RNA, 16 nt, Human
uuggugcaacccuuac

SEQ ID NO: 2894971 - RNA, 15 nt, Human
uuggggagguguuca

SEQ ID NO: 2894972 - RNA, 12 nt, Human
uuggugccuggc

SEQ ID NO: 2894973 - RNA, 13 nt, Human
uuggugccuggcc

SEQ ID NO: 2894974 - RNA, 15 nt, Human
uuggugcauagaacu

SEQ ID NO: 2894975 - RNA, 16 nt, Human
uuggugcauagaacug

SEQ ID NO: 2894976 - RNA, 21 nt, Human
uuggugcauagaacuggguaa

SEQ ID NO: 2894977 - RNA, 22 nt, Human
uuggugcauagaacuggguaaa

SEQ ID NO: 2894978 - RNA, 22 nt, Human
augaaauugucuagcagagcag

SEQ ID NO: 2894979 - RNA, 20 nt, Human
augaaauugucuagcagagc

SEQ ID NO: 2894980 - RNA, 16 nt, Human
augaaauuacuuauca

SEQ ID NO: 2894981 - RNA, 23 nt, Human
augaaauuacuuaucauccacau

SEQ ID NO: 2894982 - RNA, 16 nt, Human
augaacuuauucugua

SEQ ID NO: 2894983 - RNA, 17 nt, Human
augaacuuauucuguag

SEQ ID NO: 2894984 - RNA, 18 nt, Human
augaacuuauucuguaga

SEQ ID NO: 2894985 - RNA, 23 nt, Human
augaaauugucuagcagagcagg

SEQ ID NO: 2894986 - RNA, 12 nt, Human
augaaauuuaaa

SEQ ID NO: 2894987 - RNA, 14 nt, Human
augaaauuuaaaca

SEQ ID NO: 2894988 - RNA, 15 nt, Human
augaaauuuaaacau

SEQ ID NO: 2894989 - RNA, 16 nt, Human
augaaauuuaaacauu

SEQ ID NO: 2894990 - RNA, 18 nt, Human
augaaauuuaaacauuaa

SEQ ID NO: 2894991 - RNA, 21 nt, Human
augaaauuuaaacauuaaaaa

SEQ ID NO: 2894992 - RNA, 19 nt, Human
augaaagggcccagagagg

SEQ ID NO: 2894993 - RNA, 16 nt, Human
augaaagguuuacauu

SEQ ID NO: 2894994 - RNA, 14 nt, Human
augaaagguacuau

SEQ ID NO: 2894995 - RNA, 15 nt, Human
augaaagguacuaua

SEQ ID NO: 2894996 - RNA, 20 nt, Human
augaaagguacuauauuugc

SEQ ID NO: 2894997 - RNA, 21 nt, Human
augaaagguacuauauuugcu

SEQ ID NO: 2894998 - RNA, 21 nt, Human
augaaagguuuacauugucaa

SEQ ID NO: 2894999 - RNA, 16 nt, Human
augaagacaggacagu

SEQ ID NO: 2895000 - RNA, 21 nt, Human
augaagacaggacagugcuuc

SEQ ID NO: 2895001 - RNA, 15 nt, Human
augaagagaagcaau

SEQ ID NO: 2895002 - RNA, 18 nt, Human
augaagagaagcaauuuu

SEQ ID NO: 2895003 - RNA, 11 nt, Human
augaagaggag

SEQ ID NO: 2895004 - RNA, 13 nt, Human
augaagagcaaaa

SEQ ID NO: 2895005 - RNA, 15 nt, Human
augaagagcaaaaau

SEQ ID NO: 2895006 - RNA, 17 nt, Human
augaauaucuauuaaua

SEQ ID NO: 2895007 - RNA, 18 nt, Human
augaauaucauacaaauc

SEQ ID NO: 2895008 - RNA, 20 nt, Human
uuggagacacaacuauuuuu

SEQ ID NO: 2895009 - RNA, 17 nt, Human
uugcuugagcccaggag

SEQ ID NO: 2895010 - RNA, 16 nt, Human
uugcuugagcccagga

SEQ ID NO: 2895011 - RNA, 18 nt, Human
uugcuugagcccaggagu

SEQ ID NO: 2895012 - RNA, 22 nt, Human
uuggagacccgccuggcuaaca

SEQ ID NO: 2895013 - RNA, 22 nt, Human
uuggagacccugcaaacagaac

SEQ ID NO: 2895014 - RNA, 23 nt, Human
uuggagacccugcaaacagaaca

SEQ ID NO: 2895015 - RNA, 15 nt, Human
uuggagaccuuaccc

SEQ ID NO: 2895016 - RNA, 11 nt, Human
uuggagacaga

SEQ ID NO: 2895017 - RNA, 14 nt, Human
uugcuugagcccag

SEQ ID NO: 2895018 - RNA, 15 nt, Human
uuggagacucugugg

SEQ ID NO: 2895019 - RNA, 13 nt, Human
uuggagacucugu

SEQ ID NO: 2895020 - RNA, 20 nt, Human
uuggagacucuguggggccu

SEQ ID NO: 2895021 - RNA, 16 nt, Human
uuggagacuuucuuua

SEQ ID NO: 2895022 - RNA, 22 nt, Human
uuggagacuuucuuuaaauuau

SEQ ID NO: 2895023 - RNA, 15 nt, Human
uuggagagacacagc

SEQ ID NO: 2895024 - RNA, 22 nt, Human
uugcucgggucccuucaccucc

SEQ ID NO: 2895025 - RNA, 17 nt, Human
uugcuugacuucaguua

SEQ ID NO: 2895026 - RNA, 23 nt, Human
uuggagggugggagagcccagcc

SEQ ID NO: 2895027 - RNA, 22 nt, Human
uuggagggugggagagcccagc

SEQ ID NO: 2895028 - RNA, 22 nt, Human
uuggagggcccacuuguauccu

SEQ ID NO: 2895029 - RNA, 16 nt, Human
uuggagggugucccaa

SEQ ID NO: 2895030 - RNA, 23 nt, Human
uuggaguccccucaccuccucua

SEQ ID NO: 2895031 - RNA, 18 nt, Human
uuggccccugcccggcug

SEQ ID NO: 2895032 - RNA, 23 nt, Human
uuggcuauuagagaucaaccccu

SEQ ID NO: 2895033 - RNA, 11 nt, Human
uuggccugagu

SEQ ID NO: 2895034 - RNA, 14 nt, Human
uuggcucaauccuc

SEQ ID NO: 2895035 - RNA, 13 nt, Human
uuggcucaauccu

SEQ ID NO: 2895036 - RNA, 17 nt, Human
uuggcucaauaaagauu

SEQ ID NO: 2895037 - RNA, 19 nt, Human
uuggcccuuuccuuccaga

SEQ ID NO: 2895038 - RNA, 14 nt, Human
uuggcccuuuccuu

SEQ ID NO: 2895039 - RNA, 23 nt, Human
uuggccuagcccacccugcugcc

SEQ ID NO: 2895040 - RNA, 20 nt, Human
uuggccuaucuccuagggcu

SEQ ID NO: 2895041 - RNA, 19 nt, Human
uuggccggcugugcucaga

SEQ ID NO: 2895042 - RNA, 21 nt, Human
uuggccggcugugcucagaga

SEQ ID NO: 2895043 - RNA, 12 nt, Human
uuggccucagaa

SEQ ID NO: 2895044 - RNA, 14 nt, Human
aucuuugcacucca

SEQ ID NO: 2895045 - RNA, 16 nt, Human
aucuuugcacuccaau

SEQ ID NO: 2895046 - RNA, 13 nt, Human
aucuuuucauucu

SEQ ID NO: 2895047 - RNA, 17 nt, Human
aucuuugcagacaggca

SEQ ID NO: 2895048 - RNA, 18 nt, Human
augaaagggcccagagag

SEQ ID NO: 2895049 - RNA, 15 nt, Human
augaaagggcccaga

SEQ ID NO: 2895050 - RNA, 14 nt, Human
aucuuuugggggaa

SEQ ID NO: 2895051 - RNA, 11 nt, Human
aucuuuugaac

SEQ ID NO: 2895052 - RNA, 12 nt, Human
aucuuuucuuua

SEQ ID NO: 2895053 - RNA, 13 nt, Human
aucuuuucuuuag

SEQ ID NO: 2895054 - RNA, 18 nt, Human
aucuuuucuuuagagaac

SEQ ID NO: 2895055 - RNA, 19 nt, Human
aucuuuucuuuagagaacu

SEQ ID NO: 2895056 - RNA, 20 nt, Human
aucuuuucuuuagagaacug

SEQ ID NO: 2895057 - RNA, 22 nt, Human
aucuuuucuuuagagaacugaa

SEQ ID NO: 2895058 - RNA, 23 nt, Human
aucuuuucuuuagagaacugaaa

SEQ ID NO: 2895059 - RNA, 13 nt, Human
uuggcucagacau

SEQ ID NO: 2895060 - RNA, 14 nt, Human
uuggcucagacaug

SEQ ID NO: 2895061 - RNA, 13 nt, Human
aucuuucugcaga

SEQ ID NO: 2895062 - RNA, 11 nt, Human
aucuuucuucu

SEQ ID NO: 2895063 - RNA, 22 nt, Human
aucuuucuucuauuuuauuccc

SEQ ID NO: 2895064 - RNA, 19 nt, Human
aucuuucuucuauuuuauu

SEQ ID NO: 2895065 - RNA, 21 nt, Human
aucuuucuuuugauucuuccu

SEQ ID NO: 2895066 - RNA, 13 nt, Human
aucugcccgccug

SEQ ID NO: 2895067 - RNA, 15 nt, Human
aucugcccgccugcc

SEQ ID NO: 2895068 - RNA, 17 nt, Human
aucugcccgccugccca

SEQ ID NO: 2895069 - RNA, 18 nt, Human
aucugcccgccugcccac

SEQ ID NO: 2895070 - RNA, 19 nt, Human
aucugcccgccugcccacc

SEQ ID NO: 2895071 - RNA, 20 nt, Human
aucugcccgccugcccaccu

SEQ ID NO: 2895072 - RNA, 21 nt, Human
aucugcccgccugcccaccug

SEQ ID NO: 2895073 - RNA, 22 nt, Human
aucugcccgccugcccaccugc

SEQ ID NO: 2895074 - RNA, 23 nt, Human
aucugcccgccugcccaccugcc

SEQ ID NO: 2895075 - RNA, 17 nt, Human
aucugccccucccccaa

SEQ ID NO: 2895076 - RNA, 23 nt, Human
aucugcggaucucagcuuugaga

SEQ ID NO: 2895077 - RNA, 22 nt, Human
aucugcggaucucagcuuugag

SEQ ID NO: 2895078 - RNA, 15 nt, Human
aucugcgaucaucgu

SEQ ID NO: 2895079 - RNA, 20 nt, Human
aucugcuagggaauaucaau

SEQ ID NO: 2895080 - RNA, 14 nt, Human
aucugcccaacugu

SEQ ID NO: 2895081 - RNA, 21 nt, Human
aucugcccaacuguguagcau

SEQ ID NO: 2895082 - RNA, 15 nt, Human
aucugcccaccucag

SEQ ID NO: 2895083 - RNA, 23 nt, Human
aucugcccaccucagccucccaa

SEQ ID NO: 2895084 - RNA, 16 nt, Human
aucugccccuccccca

SEQ ID NO: 2895085 - RNA, 15 nt, Human
aucugccccuccccc

SEQ ID NO: 2895086 - RNA, 12 nt, Human
aucugccccucc

SEQ ID NO: 2895087 - RNA, 11 nt, Human
aucugccccuc

SEQ ID NO: 2895088 - RNA, 15 nt, Human
uugcauuugcucuuu

SEQ ID NO: 2895089 - RNA, 20 nt, Human
uugcauuuauauguaccgua

SEQ ID NO: 2895090 - RNA, 15 nt, Human
uugcauuuauaugua

SEQ ID NO: 2895091 - RNA, 15 nt, Human
uugccaaaaaggaua

SEQ ID NO: 2895092 - RNA, 13 nt, Human
aucugcucacuuu

SEQ ID NO: 2895093 - RNA, 14 nt, Human
aucugcucacuuua

SEQ ID NO: 2895094 - RNA, 18 nt, Human
aucugcucacuuuaaacc

SEQ ID NO: 2895095 - RNA, 21 nt, Human
aucuggucuuguuagaaaaca

SEQ ID NO: 2895096 - RNA, 14 nt, Human
aucuggugaucucc

SEQ ID NO: 2895097 - RNA, 20 nt, Human
aucuguauauacaauaacau

SEQ ID NO: 2895098 - RNA, 14 nt, Human
aucuguauauacaa

SEQ ID NO: 2895099 - RNA, 18 nt, Human
aucugucucccaguuaug

SEQ ID NO: 2895100 - RNA, 20 nt, Human
aucugucucccaguuaugaa

SEQ ID NO: 2895101 - RNA, 13 nt, Human
aucugucuaaaga

SEQ ID NO: 2895102 - RNA, 17 nt, Human
aucugucuaaagauaga

SEQ ID NO: 2895103 - RNA, 21 nt, Human
aucuguauauacaauaacaua

SEQ ID NO: 2895104 - RNA, 12 nt, Human
uugcauuuggaa

SEQ ID NO: 2895105 - RNA, 23 nt, Human
aucuguauguauuagugauauuu

SEQ ID NO: 2895106 - RNA, 15 nt, Human
aucugucaaaacacu

SEQ ID NO: 2895107 - RNA, 16 nt, Human
aucugucaaaacacug

SEQ ID NO: 2895108 - RNA, 17 nt, Human
aucugucaaaacacugu

SEQ ID NO: 2895109 - RNA, 18 nt, Human
aucugucaaaacacugug

SEQ ID NO: 2895110 - RNA, 19 nt, Human
aucugucaaaacacugugg

SEQ ID NO: 2895111 - RNA, 20 nt, Human
aucugucaaaacacugugga

SEQ ID NO: 2895112 - RNA, 22 nt, Human
aucugucaaaacacuguggaac

SEQ ID NO: 2895113 - RNA, 23 nt, Human
aucuguccaaaggaggcuggcag

SEQ ID NO: 2895114 - RNA, 21 nt, Human
aucuguccaaaggaggcuggc

SEQ ID NO: 2895115 - RNA, 19 nt, Human
aucuguccaaaggaggcug

SEQ ID NO: 2895116 - RNA, 18 nt, Human
aucuguccaaaggaggcu

SEQ ID NO: 2895117 - RNA, 16 nt, Human
aucuugcgaauccaag

SEQ ID NO: 2895118 - RNA, 21 nt, Human
aucuugcgaauccaagcuccc

SEQ ID NO: 2895119 - RNA, 22 nt, Human
aucuugcgaauccaagcucccu

SEQ ID NO: 2895120 - RNA, 23 nt, Human
aucuugcgaauccaagcucccug

SEQ ID NO: 2895121 - RNA, 17 nt, Human
aucuugccggucauuuu

SEQ ID NO: 2895122 - RNA, 23 nt, Human
aucuuaguuuggauucuuaugua

SEQ ID NO: 2895123 - RNA, 22 nt, Human
aucuugcagaaguucuuagugu

SEQ ID NO: 2895124 - RNA, 13 nt, Human
aucuugcucugcu

SEQ ID NO: 2895125 - RNA, 14 nt, Human
aucuuaguuuggau

SEQ ID NO: 2895126 - RNA, 22 nt, Human
aucuuaguuuggauucuuaugu

SEQ ID NO: 2895127 - RNA, 12 nt, Human
aucuuagugguu

SEQ ID NO: 2895128 - RNA, 15 nt, Human
aucuuagggugaacc

SEQ ID NO: 2895129 - RNA, 18 nt, Human
aucuuagggugaaccacu

SEQ ID NO: 2895130 - RNA, 19 nt, Human
aucuguuuugaaggcaaaa

SEQ ID NO: 2895131 - RNA, 18 nt, Human
aucuguuuugaaggcaaa

SEQ ID NO: 2895132 - RNA, 17 nt, Human
aucuguuuugaaggcaa

SEQ ID NO: 2895133 - RNA, 12 nt, Human
aucugucuugua

SEQ ID NO: 2895134 - RNA, 13 nt, Human
aucugucuuguaa

SEQ ID NO: 2895135 - RNA, 14 nt, Human
aucugucuuguaau

SEQ ID NO: 2895136 - RNA, 15 nt, Human
aucugucuuguaaua

SEQ ID NO: 2895137 - RNA, 16 nt, Human
aucugucuuguaauau

SEQ ID NO: 2895138 - RNA, 21 nt, Human
aucugucuuguaauauuuugu

SEQ ID NO: 2895139 - RNA, 22 nt, Human
aucugucuuguaauauuuugua

SEQ ID NO: 2895140 - RNA, 13 nt, Human
aucuguuucccag

SEQ ID NO: 2895141 - RNA, 14 nt, Human
aucuguuucccagc

SEQ ID NO: 2895142 - RNA, 15 nt, Human
uugcuucuugugaag

SEQ ID NO: 2895143 - RNA, 18 nt, Human
uugcuucuugugaaggcc

SEQ ID NO: 2895144 - RNA, 21 nt, Human
uugcuucuugugaaggccaug

SEQ ID NO: 2895145 - RNA, 20 nt, Human
uugcucugccaacuucuuca

SEQ ID NO: 2895146 - RNA, 15 nt, Human
uugcuucuuacugau

SEQ ID NO: 2895147 - RNA, 18 nt, Human
uugcuucuuacugauaau

SEQ ID NO: 2895148 - RNA, 20 nt, Human
uugcucucugugucugagag

SEQ ID NO: 2895149 - RNA, 22 nt, Human
uugcucaaguucauugaugacc

SEQ ID NO: 2895150 - RNA, 21 nt, Human
uugcucaaguucauugaugac

SEQ ID NO: 2895151 - RNA, 14 nt, Human
uugcucuaggaaga

SEQ ID NO: 2895152 - RNA, 16 nt, Human
uugcucuaucucucaa

SEQ ID NO: 2895153 - RNA, 21 nt, Human
uugcucuccccugcccugcug

SEQ ID NO: 2895154 - RNA, 12 nt, Human
uugcuccuugac

SEQ ID NO: 2895155 - RNA, 14 nt, Human
uugcuccuggccuu

SEQ ID NO: 2895156 - RNA, 18 nt, Human
uugcuccuggccuugcug

SEQ ID NO: 2895157 - RNA, 16 nt, Human
aucuuguauacacaua

SEQ ID NO: 2895158 - RNA, 18 nt, Human
uugcuauugaauugagau

SEQ ID NO: 2895159 - RNA, 14 nt, Human
uugcuauuagagca

SEQ ID NO: 2895160 - RNA, 17 nt, Human
uugcuauuagagcauug

SEQ ID NO: 2895161 - RNA, 11 nt, Human
aucuugugaaa

SEQ ID NO: 2895162 - RNA, 15 nt, Human
uugcuauguuacuau

SEQ ID NO: 2895163 - RNA, 16 nt, Human
uugcuauguuacuauu

SEQ ID NO: 2895164 - RNA, 18 nt, Human
uugcuauguuacuauuuu

SEQ ID NO: 2895165 - RNA, 19 nt, Human
uugcuauguuacuauuuuc

SEQ ID NO: 2895166 - RNA, 21 nt, Human
uugcuauguuacuauuuucua

SEQ ID NO: 2895167 - RNA, 23 nt, Human
uugcuauguuacuauuuucuaca

SEQ ID NO: 2895168 - RNA, 15 nt, Human
aucuugugaaauggc

SEQ ID NO: 2895169 - RNA, 20 nt, Human
aucuugugaaauggccagga

SEQ ID NO: 2895170 - RNA, 18 nt, Human
aucuugugcuagaauacu

SEQ ID NO: 2895171 - RNA, 19 nt, Human
aucuugugcuagaauacuu

SEQ ID NO: 2895172 - RNA, 20 nt, Human
aucuugugcuagaauacuuu

SEQ ID NO: 2895173 - RNA, 22 nt, Human
aucuugugcuagaauacuuuuu

SEQ ID NO: 2895174 - RNA, 21 nt, Human
aucuacaucuuuuuucacaaa

SEQ ID NO: 2895175 - RNA, 14 nt, Human
aucuacaucuuuuu

SEQ ID NO: 2895176 - RNA, 17 nt, Human
aucuacaucuuuuuuca

SEQ ID NO: 2895177 - RNA, 20 nt, Human
aucuacaucuuuuuucacaa

SEQ ID NO: 2895178 - RNA, 22 nt, Human
aucuaauauauaugaauaaagu

SEQ ID NO: 2895179 - RNA, 23 nt, Human
aucuaauauggccacaguagucu

SEQ ID NO: 2895180 - RNA, 18 nt, Human
aucuaauauguaacaagc

SEQ ID NO: 2895181 - RNA, 19 nt, Human
aucuaauauauaugaauaa

SEQ ID NO: 2895182 - RNA, 20 nt, Human
aucuaauauauaugaauaaa

SEQ ID NO: 2895183 - RNA, 16 nt, Human
aucuaauauggccaca

SEQ ID NO: 2895184 - RNA, 15 nt, Human
aucuaauauauauga

SEQ ID NO: 2895185 - RNA, 22 nt, Human
aucuaauagcggguuacuuuca

SEQ ID NO: 2895186 - RNA, 17 nt, Human
aucuaauauauaugaau

SEQ ID NO: 2895187 - RNA, 18 nt, Human
aucuaauauauaugaaua

SEQ ID NO: 2895188 - RNA, 13 nt, Human
uugauaccccccu

SEQ ID NO: 2895189 - RNA, 15 nt, Human
uugauaccccccucu

SEQ ID NO: 2895190 - RNA, 13 nt, Human
uugauaccccugg

SEQ ID NO: 2895191 - RNA, 16 nt, Human
uugauaccccugggga

SEQ ID NO: 2895192 - RNA, 20 nt, Human
uugauaccccuggggaacau

SEQ ID NO: 2895193 - RNA, 23 nt, Human
uugauaccccuggggaacauuuc

SEQ ID NO: 2895194 - RNA, 22 nt, Human
aucuaauaccucugugugcucc

SEQ ID NO: 2895195 - RNA, 21 nt, Human
aucuaauagcggguuacuuuc

SEQ ID NO: 2895196 - RNA, 19 nt, Human
aucuaauaccucugugugc

SEQ ID NO: 2895197 - RNA, 22 nt, Human
uugagucuguuuuuuuauaguu

SEQ ID NO: 2895198 - RNA, 18 nt, Human
uugaguucuguagagccu

SEQ ID NO: 2895199 - RNA, 13 nt, Human
uugauacauaaua

SEQ ID NO: 2895200 - RNA, 17 nt, Human
uugauacauaauaaaaa

SEQ ID NO: 2895201 - RNA, 23 nt, Human
uugauacauaauaaaaaauuaug

SEQ ID NO: 2895202 - RNA, 15 nt, Human
uugauaauugcauuc

SEQ ID NO: 2895203 - RNA, 23 nt, Human
uugauaauugcauucaucuugug

SEQ ID NO: 2895204 - RNA, 14 nt, Human
uugauaauguuaaa

SEQ ID NO: 2895205 - RNA, 15 nt, Human
uugauaauguuaaau

SEQ ID NO: 2895206 - RNA, 18 nt, Human
uugauaauguuaaauuug

SEQ ID NO: 2895207 - RNA, 19 nt, Human
uugauaauguuaaauuugu

SEQ ID NO: 2895208 - RNA, 20 nt, Human
uugauaauguuaaauuugua

SEQ ID NO: 2895209 - RNA, 21 nt, Human
uugauaauguuaaauuuguaa

SEQ ID NO: 2895210 - RNA, 22 nt, Human
uugauaauguuaaauuuguaag

SEQ ID NO: 2895211 - RNA, 12 nt, Human
uugauaauucuu

SEQ ID NO: 2895212 - RNA, 21 nt, Human
uugauaauucuuauuuugugg

SEQ ID NO: 2895213 - RNA, 22 nt, Human
uugauaauucuuauuuugugga

SEQ ID NO: 2895214 - RNA, 13 nt, Human
uugaguuuguagg

SEQ ID NO: 2895215 - RNA, 20 nt, Human
uugaguuuguagguaaaaug

SEQ ID NO: 2895216 - RNA, 14 nt, Human
uugauaaugauaaa

SEQ ID NO: 2895217 - RNA, 15 nt, Human
uugauaaugcuuuca

SEQ ID NO: 2895218 - RNA, 23 nt, Human
uugauaaugcuuucacaacauuu

SEQ ID NO: 2895219 - RNA, 18 nt, Human
uugaguuuucuucuguga

SEQ ID NO: 2895220 - RNA, 13 nt, Human
uugauaauguuaa

SEQ ID NO: 2895221 - RNA, 21 nt, Human
uugacuuaaugugauuacugc

SEQ ID NO: 2895222 - RNA, 18 nt, Human
uugacuuauaguacauga

SEQ ID NO: 2895223 - RNA, 16 nt, Human
uugacuugauuagugc

SEQ ID NO: 2895224 - RNA, 16 nt, Human
uugacuugcaugaaga

SEQ ID NO: 2895225 - RNA, 13 nt, Human
uugacuuuaauuu

SEQ ID NO: 2895226 - RNA, 14 nt, Human
uugacuuuaauuua

SEQ ID NO: 2895227 - RNA, 12 nt, Human
uugacuuucagg

SEQ ID NO: 2895228 - RNA, 12 nt, Human
uugagacagagu

SEQ ID NO: 2895229 - RNA, 21 nt, Human
uugacuuucagguacuaaaua

SEQ ID NO: 2895230 - RNA, 15 nt, Human
uugacuuucagguac

SEQ ID NO: 2895231 - RNA, 14 nt, Human
uugacuuucaggua

SEQ ID NO: 2895232 - RNA, 13 nt, Human
uugacuuucaggu

SEQ ID NO: 2895233 - RNA, 20 nt, Human
uugagacagugcacaugaac

SEQ ID NO: 2895234 - RNA, 15 nt, Human
uugagaccagccugg

SEQ ID NO: 2895235 - RNA, 13 nt, Human
uugagaccagccu

SEQ ID NO: 2895236 - RNA, 12 nt, Human
uugagacaguuu

SEQ ID NO: 2895237 - RNA, 13 nt, Human
uugagacaguuuc

SEQ ID NO: 2895238 - RNA, 17 nt, Human
uugagacaguuucuuag

SEQ ID NO: 2895239 - RNA, 19 nt, Human
uugagacaguuucuuagcu

SEQ ID NO: 2895240 - RNA, 13 nt, Human
uugagauggggau

SEQ ID NO: 2895241 - RNA, 18 nt, Human
uugagauggggauaaaau

SEQ ID NO: 2895242 - RNA, 22 nt, Human
uugagauggggauaaaaugacu

SEQ ID NO: 2895243 - RNA, 23 nt, Human
uugagauggggauaaaaugacua

SEQ ID NO: 2895244 - RNA, 13 nt, Human
uugagauguauga

SEQ ID NO: 2895245 - RNA, 17 nt, Human
uugagauguaugaaggc

SEQ ID NO: 2895246 - RNA, 22 nt, Human
uugagacaguuucuuagcuuuu

SEQ ID NO: 2895247 - RNA, 14 nt, Human
uugagacuaguuuu

SEQ ID NO: 2895248 - RNA, 16 nt, Human
uugagacuauuuaaac

SEQ ID NO: 2895249 - RNA, 23 nt, Human
uugagacuauuuaaacuuauaaa

SEQ ID NO: 2895250 - RNA, 13 nt, Human
uugaguagauauu

SEQ ID NO: 2895251 - RNA, 16 nt, Human
uugaguagauauuacu

SEQ ID NO: 2895252 - RNA, 17 nt, Human
uugaguagauauuacuu

SEQ ID NO: 2895253 - RNA, 19 nt, Human
uugaguagauauuacuuua

SEQ ID NO: 2895254 - RNA, 20 nt, Human
uugaguagauauuacuuuau

SEQ ID NO: 2895255 - RNA, 21 nt, Human
uugaguagauauuacuuuauc

SEQ ID NO: 2895256 - RNA, 17 nt, Human
uugaguauaagaaaugc

SEQ ID NO: 2895257 - RNA, 19 nt, Human
uugaguauaagaaaugcau

SEQ ID NO: 2895258 - RNA, 21 nt, Human
uugagaugcuguaggugguau

SEQ ID NO: 2895259 - RNA, 15 nt, Human
uugagauugccccag

SEQ ID NO: 2895260 - RNA, 17 nt, Human
uugagauugccccaggu

SEQ ID NO: 2895261 - RNA, 19 nt, Human
uugagauugccccaggucu

SEQ ID NO: 2895262 - RNA, 20 nt, Human
uugagauugccccaggucug

SEQ ID NO: 2895263 - RNA, 15 nt, Human
uugagauuguccuca

SEQ ID NO: 2895264 - RNA, 11 nt, Human
uugagauuucu

SEQ ID NO: 2895265 - RNA, 21 nt, Human
uugaauaaagccugcuuuuua

SEQ ID NO: 2895266 - RNA, 20 nt, Human
uugaauaaaaauauguacaa

SEQ ID NO: 2895267 - RNA, 14 nt, Human
uugaauaaaagugc

SEQ ID NO: 2895268 - RNA, 16 nt, Human
uugaauaaaagugcac

SEQ ID NO: 2895269 - RNA, 13 nt, Human
uugaagccuuugu

SEQ ID NO: 2895270 - RNA, 15 nt, Human
uugaaggcaaaauug

SEQ ID NO: 2895271 - RNA, 12 nt, Human
uugaaggcaaaa

SEQ ID NO: 2895272 - RNA, 13 nt, Human
uugaaggccugga

SEQ ID NO: 2895273 - RNA, 15 nt, Human
uugaaggccuggaau

SEQ ID NO: 2895274 - RNA, 17 nt, Human
uugaaggcaaaauugca

SEQ ID NO: 2895275 - RNA, 18 nt, Human
uugaaucaguuuccaauu

SEQ ID NO: 2895276 - RNA, 21 nt, Human
uugaaucaguuuccaauuauu

SEQ ID NO: 2895277 - RNA, 15 nt, Human
uugaaucuauuuaag

SEQ ID NO: 2895278 - RNA, 14 nt, Human
uugaauccuuugcc

SEQ ID NO: 2895279 - RNA, 17 nt, Human
uugaaucuauuuaagua

SEQ ID NO: 2895280 - RNA, 12 nt, Human
uugaauauugug

SEQ ID NO: 2895281 - RNA, 13 nt, Human
uugaauauugugu

SEQ ID NO: 2895282 - RNA, 13 nt, Human
uugaauauuacuc

SEQ ID NO: 2895283 - RNA, 21 nt, Human
uugaauauuacuccuauuuuu

SEQ ID NO: 2895284 - RNA, 23 nt, Human
uugaauauuacuccuauuuuugu

SEQ ID NO: 2895285 - RNA, 13 nt, Human
uugaaucacagua

SEQ ID NO: 2895286 - RNA, 15 nt, Human
uugaauacuuacauu

SEQ ID NO: 2895287 - RNA, 16 nt, Human
uugaauaccauuaaaa

SEQ ID NO: 2895288 - RNA, 19 nt, Human
uugaauaccauuaaaacug

SEQ ID NO: 2895289 - RNA, 22 nt, Human
uugaauaccauuaaaacugcuu

SEQ ID NO: 2895290 - RNA, 12 nt, Human
uugaauaauaag

SEQ ID NO: 2895291 - RNA, 20 nt, Human
uugaauaauaagcaggaugu

SEQ ID NO: 2895292 - RNA, 22 nt, Human
aucuaaaucuauuuauuaauau

SEQ ID NO: 2895293 - RNA, 20 nt, Human
aucuaaaucuauuuauuaau

SEQ ID NO: 2895294 - RNA, 18 nt, Human
aucuaaaucuauuuauua

SEQ ID NO: 2895295 - RNA, 14 nt, Human
aucguuuauuucac

SEQ ID NO: 2895296 - RNA, 14 nt, Human
aucguucucugccu

SEQ ID NO: 2895297 - RNA, 21 nt, Human
auccuacaaggccuaugagua

SEQ ID NO: 2895298 - RNA, 14 nt, Human
aucuaaaugaugag

SEQ ID NO: 2895299 - RNA, 13 nt, Human
uugaagccacuga

SEQ ID NO: 2895300 - RNA, 21 nt, Human
uugaagccacugaagcuggga

SEQ ID NO: 2895301 - RNA, 17 nt, Human
uugaagccacugaagcu

SEQ ID NO: 2895302 - RNA, 19 nt, Human
auccucugguucuucauuu

SEQ ID NO: 2895303 - RNA, 21 nt, Human
aucguguauugagauuucuua

SEQ ID NO: 2895304 - RNA, 12 nt, Human
auccuccuggaa

SEQ ID NO: 2895305 - RNA, 14 nt, Human
auccuccuggaacc

SEQ ID NO: 2895306 - RNA, 16 nt, Human
auccuccuggaaccuu

SEQ ID NO: 2895307 - RNA, 21 nt, Human
auccuccuggaaccuugcugu

SEQ ID NO: 2895308 - RNA, 22 nt, Human
auccuccuggaaccuugcuguc

SEQ ID NO: 2895309 - RNA, 23 nt, Human
auccuccuggaaccuugcugucc

SEQ ID NO: 2895310 - RNA, 13 nt, Human
auccucucaccuc

SEQ ID NO: 2895311 - RNA, 16 nt, Human
auccucucaccucagc

SEQ ID NO: 2895312 - RNA, 14 nt, Human
auccucuccuuuga

SEQ ID NO: 2895313 - RNA, 15 nt, Human
auccucuccuuugaa

SEQ ID NO: 2895314 - RNA, 16 nt, Human
auccucuccuuugaaa

SEQ ID NO: 2895315 - RNA, 12 nt, Human
uugauucaaaau

SEQ ID NO: 2895316 - RNA, 15 nt, Human
uugauucaaaauauu

SEQ ID NO: 2895317 - RNA, 18 nt, Human
uugauucaaaauauuuaa

SEQ ID NO: 2895318 - RNA, 22 nt, Human
uugauucaaaauauuuaaaaau

SEQ ID NO: 2895319 - RNA, 21 nt, Human
uugauuauccauauugaguca

SEQ ID NO: 2895320 - RNA, 14 nt, Human
uugauuaacaaaua

SEQ ID NO: 2895321 - RNA, 16 nt, Human
uugauuaacaaauaug

SEQ ID NO: 2895322 - RNA, 15 nt, Human
uugauuaagauuuua

SEQ ID NO: 2895323 - RNA, 16 nt, Human
uugauuaagauuuuac

SEQ ID NO: 2895324 - RNA, 17 nt, Human
uugauuaagauuuuaca

SEQ ID NO: 2895325 - RNA, 18 nt, Human
uugauuaagauuuuacaa

SEQ ID NO: 2895326 - RNA, 20 nt, Human
uugauuaagauuuuacaaaa

SEQ ID NO: 2895327 - RNA, 11 nt, Human
uugauuaaggc

SEQ ID NO: 2895328 - RNA, 14 nt, Human
uugauuaaggcagu

SEQ ID NO: 2895329 - RNA, 16 nt, Human
uugauuaguuuucuug

SEQ ID NO: 2895330 - RNA, 22 nt, Human
uugauguuuguggccucagaau

SEQ ID NO: 2895331 - RNA, 20 nt, Human
uugauguuuguggccucaga

SEQ ID NO: 2895332 - RNA, 21 nt, Human
aucugaaauaggaaacaagug

SEQ ID NO: 2895333 - RNA, 13 nt, Human
aucugaaauguga

SEQ ID NO: 2895334 - RNA, 13 nt, Human
uugcauauucauu

SEQ ID NO: 2895335 - RNA, 19 nt, Human
uugcaauggcuauauggca

SEQ ID NO: 2895336 - RNA, 20 nt, Human
uugcaucaaggggucacuua

SEQ ID NO: 2895337 - RNA, 16 nt, Human
uugcauaugagccgug

SEQ ID NO: 2895338 - RNA, 20 nt, Human
uugcaucaccucuguaauuu

SEQ ID NO: 2895339 - RNA, 22 nt, Human
uugcauugaacacaaacuguaa

SEQ ID NO: 2895340 - RNA, 18 nt, Human
uugcauugaacacaaacu

SEQ ID NO: 2895341 - RNA, 15 nt, Human
uugcauugaacacaa

SEQ ID NO: 2895342 - RNA, 14 nt, Human
uugcauugaacaca

SEQ ID NO: 2895343 - RNA, 15 nt, Human
uugcauugacauuau

SEQ ID NO: 2895344 - RNA, 23 nt, Human
uugcauugaacacaaacuguaaa

SEQ ID NO: 2895345 - RNA, 21 nt, Human
uugcauugaccgcgacuaauu

SEQ ID NO: 2895346 - RNA, 16 nt, Human
uugcauugagcugaga

SEQ ID NO: 2895347 - RNA, 19 nt, Human
uugcaauggcagccuuggc

SEQ ID NO: 2895348 - RNA, 17 nt, Human
uugcaauggcagccuug

SEQ ID NO: 2895349 - RNA, 16 nt, Human
uugcaauggcagccuu

SEQ ID NO: 2895350 - RNA, 15 nt, Human
uugcaagguuccaca

SEQ ID NO: 2895351 - RNA, 17 nt, Human
uugcaagguuccacaga

SEQ ID NO: 2895352 - RNA, 19 nt, Human
uugcaagguuccacagagu

SEQ ID NO: 2895353 - RNA, 16 nt, Human
aucucauguaucaucu

SEQ ID NO: 2895354 - RNA, 19 nt, Human
aucucauguaucaucugga

SEQ ID NO: 2895355 - RNA, 21 nt, Human
aucuagaacacaggcaaaauc

SEQ ID NO: 2895356 - RNA, 17 nt, Human
aucuagacaauauacaa

SEQ ID NO: 2895357 - RNA, 15 nt, Human
aucucaggggccaga

SEQ ID NO: 2895358 - RNA, 16 nt, Human
aucucaggggccagag

SEQ ID NO: 2895359 - RNA, 17 nt, Human
aucucaggggccagagg

SEQ ID NO: 2895360 - RNA, 23 nt, Human
aucucaggggccagaggaacugu

SEQ ID NO: 2895361 - RNA, 15 nt, Human
aucucagucaugcau

SEQ ID NO: 2895362 - RNA, 16 nt, Human
aucucagucaugcaua

SEQ ID NO: 2895363 - RNA, 18 nt, Human
aucucagucaugcauaaa

SEQ ID NO: 2895364 - RNA, 20 nt, Human
aucucagucaugcauaaaua

SEQ ID NO: 2895365 - RNA, 21 nt, Human
aucucagucaugcauaaauau

SEQ ID NO: 2895366 - RNA, 22 nt, Human
aucuacagauagagaguuguug

SEQ ID NO: 2895367 - RNA, 21 nt, Human
aucucuucuggguuccuuccu

SEQ ID NO: 2895368 - RNA, 19 nt, Human
aucuccacagucaaagaag

SEQ ID NO: 2895369 - RNA, 18 nt, Human
aucuccaagaccagagau

SEQ ID NO: 2895370 - RNA, 20 nt, Human
aucucuucuuuuggcuucca

SEQ ID NO: 2895371 - RNA, 15 nt, Human
uugaaauuguacaua

SEQ ID NO: 2895372 - RNA, 13 nt, Human
uugaaauugugaa

SEQ ID NO: 2895373 - RNA, 19 nt, Human
uugaaauugugaacucauu

SEQ ID NO: 2895374 - RNA, 13 nt, Human
uugaaccugggag

SEQ ID NO: 2895375 - RNA, 21 nt, Human
uugaaccugugaguaaauauu

SEQ ID NO: 2895376 - RNA, 23 nt, Human
uugaaccugugaguaaauauuga

SEQ ID NO: 2895377 - RNA, 18 nt, Human
uugaacccgggaggcaga

SEQ ID NO: 2895378 - RNA, 20 nt, Human
uugaaauuaugugacauuuu

SEQ ID NO: 2895379 - RNA, 20 nt, Human
uugaaauuaagaaggcaaaa

SEQ ID NO: 2895380 - RNA, 11 nt, Human
uugaaauuaua

SEQ ID NO: 2895381 - RNA, 14 nt, Human
uugaaauuauaucu

SEQ ID NO: 2895382 - RNA, 16 nt, Human
uugaaauuauaucugu

SEQ ID NO: 2895383 - RNA, 17 nt, Human
uugaaauuauaucugug

SEQ ID NO: 2895384 - RNA, 19 nt, Human
uugaaauuauaucuguggu

SEQ ID NO: 2895385 - RNA, 14 nt, Human
uugaaaugucacgu

SEQ ID NO: 2895386 - RNA, 18 nt, Human
uugaaaugugguuuuccu

SEQ ID NO: 2895387 - RNA, 19 nt, Human
uugaaaugugguuuuccug

SEQ ID NO: 2895388 - RNA, 17 nt, Human
uugaaauuaugugacau

SEQ ID NO: 2895389 - RNA, 18 nt, Human
uugaaagugaauaaacuu

SEQ ID NO: 2895390 - RNA, 21 nt, Human
uugaaagugaauaaacuucag

SEQ ID NO: 2895391 - RNA, 22 nt, Human
uugaaagugaauaaacuucagc

SEQ ID NO: 2895392 - RNA, 17 nt, Human
uugaaagggaucaucau

SEQ ID NO: 2895393 - RNA, 17 nt, Human
uugaaagggcaauauga

SEQ ID NO: 2895394 - RNA, 22 nt, Human
uugaaagauucagguauguugc

SEQ ID NO: 2895395 - RNA, 13 nt, Human
uugaaagcaaaaa

SEQ ID NO: 2895396 - RNA, 14 nt, Human
uugaaagcaaaaau

SEQ ID NO: 2895397 - RNA, 17 nt, Human
uugaaagcaaaaaugcu

SEQ ID NO: 2895398 - RNA, 18 nt, Human
uugaaagcaaaaaugcua

SEQ ID NO: 2895399 - RNA, 19 nt, Human
uugaaagcaaaaaugcuaa

SEQ ID NO: 2895400 - RNA, 20 nt, Human
uugaaagcaaaaaugcuaau

SEQ ID NO: 2895401 - RNA, 21 nt, Human
uugaaagcaaaaaugcuaaua

SEQ ID NO: 2895402 - RNA, 16 nt, Human
auccgcccgccucggc

SEQ ID NO: 2895403 - RNA, 14 nt, Human
auccgccuuuugua

SEQ ID NO: 2895404 - RNA, 15 nt, Human
auccgccuuuuguau

SEQ ID NO: 2895405 - RNA, 18 nt, Human
auccgccuuuuguauaca

SEQ ID NO: 2895406 - RNA, 12 nt, Human
auccgcucucuu

SEQ ID NO: 2895407 - RNA, 13 nt, Human
auccgcucucuuc

SEQ ID NO: 2895408 - RNA, 14 nt, Human
auccgcucucuucc

SEQ ID NO: 2895409 - RNA, 15 nt, Human
auccgcucucuuccu

SEQ ID NO: 2895410 - RNA, 16 nt, Human
auccgcucucuuccug

SEQ ID NO: 2895411 - RNA, 17 nt, Human
auccgcucucuuccugc

SEQ ID NO: 2895412 - RNA, 18 nt, Human
auccgcucucuuccugcc

SEQ ID NO: 2895413 - RNA, 19 nt, Human
auccgcucucuuccugccc

SEQ ID NO: 2895414 - RNA, 20 nt, Human
auccgcucucuuccugcccc

SEQ ID NO: 2895415 - RNA, 23 nt, Human
auccuaaaacaaaagcucaucca

SEQ ID NO: 2895416 - RNA, 18 nt, Human
auccguaguuauuuugca

SEQ ID NO: 2895417 - RNA, 19 nt, Human
auccuaaaacaaaagcuca

SEQ ID NO: 2895418 - RNA, 18 nt, Human
auccuaacugaagagaca

SEQ ID NO: 2895419 - RNA, 12 nt, Human
auccuaagaaau

SEQ ID NO: 2895420 - RNA, 14 nt, Human
auccuaagaaauau

SEQ ID NO: 2895421 - RNA, 15 nt, Human
auccuaagaaauaug

SEQ ID NO: 2895422 - RNA, 16 nt, Human
auccuaagaaauaugu

SEQ ID NO: 2895423 - RNA, 19 nt, Human
auccuaagaaauaugugag

SEQ ID NO: 2895424 - RNA, 20 nt, Human
auccuaagaaauaugugaga

SEQ ID NO: 2895425 - RNA, 21 nt, Human
auccuaagaaauaugugagau

SEQ ID NO: 2895426 - RNA, 22 nt, Human
auccuaagaaauaugugagauu

SEQ ID NO: 2895427 - RNA, 23 nt, Human
auccuaagaaauaugugagauuu

SEQ ID NO: 2895428 - RNA, 14 nt, Human
auccuaagacacaa

SEQ ID NO: 2895429 - RNA, 15 nt, Human
auccuaagacacaaa

SEQ ID NO: 2895430 - RNA, 20 nt, Human
auccuaagacacaaaugcau

SEQ ID NO: 2895431 - RNA, 14 nt, Human
auccuaaaacaaau

SEQ ID NO: 2895432 - RNA, 17 nt, Human
auccuaagcaucuaagu

SEQ ID NO: 2895433 - RNA, 14 nt, Human
auccuacaagacac

SEQ ID NO: 2895434 - RNA, 19 nt, Human
auccuacaagacacaguga

SEQ ID NO: 2895435 - RNA, 18 nt, Human
auccuacaagacacagug

SEQ ID NO: 2895436 - RNA, 16 nt, Human
auccuagauccuaagg

SEQ ID NO: 2895437 - RNA, 13 nt, Human
auccuagauuaua

SEQ ID NO: 2895438 - RNA, 17 nt, Human
auccuagauuauaucaa

SEQ ID NO: 2895439 - RNA, 18 nt, Human
auccuagauuauaucaaa

SEQ ID NO: 2895440 - RNA, 20 nt, Human
auccuagauuauaucaaagu

SEQ ID NO: 2895441 - RNA, 23 nt, Human
auccuagauuauaucaaaguauu

SEQ ID NO: 2895442 - RNA, 16 nt, Human
auccuagcacaugcuu

SEQ ID NO: 2895443 - RNA, 19 nt, Human
auccuagcacaugcuucaa

SEQ ID NO: 2895444 - RNA, 13 nt, Human
auccuccuccagg

SEQ ID NO: 2895445 - RNA, 15 nt, Human
auccuccuccagggu

SEQ ID NO: 2895446 - RNA, 18 nt, Human
auccuaagcaucuaaguu

SEQ ID NO: 2895447 - RNA, 15 nt, Human
auccuagauccuaag

SEQ ID NO: 2895448 - RNA, 18 nt, Human
uucuuaagacauguauca

SEQ ID NO: 2895449 - RNA, 20 nt, Human
uucuuaacccuuuccagagu

SEQ ID NO: 2895450 - RNA, 19 nt, Human
aucccaugagacccuggug

SEQ ID NO: 2895451 - RNA, 18 nt, Human
aucccaucuaagcugcag

SEQ ID NO: 2895452 - RNA, 19 nt, Human
aucccaucuaagcugcagc

SEQ ID NO: 2895453 - RNA, 20 nt, Human
aucccaucuaagcugcagcu

SEQ ID NO: 2895454 - RNA, 21 nt, Human
aucccaggacaccacacccag

SEQ ID NO: 2895455 - RNA, 23 nt, Human
uucuuaaggugaggccugucugu

SEQ ID NO: 2895456 - RNA, 19 nt, Human
aucccagccccaauuuucu

SEQ ID NO: 2895457 - RNA, 15 nt, Human
uucuucugcuucagc

SEQ ID NO: 2895458 - RNA, 13 nt, Human
uucuucugcuuca

SEQ ID NO: 2895459 - RNA, 20 nt, Human
uucuucugcuucagccuccc

SEQ ID NO: 2895460 - RNA, 20 nt, Human
uucuucuguguuuauaaaau

SEQ ID NO: 2895461 - RNA, 20 nt, Human
uucuucuguccugagaagca

SEQ ID NO: 2895462 - RNA, 21 nt, Human
uucuucuguguuuauaaaaua

SEQ ID NO: 2895463 - RNA, 16 nt, Human
uucuucuguucugcag

SEQ ID NO: 2895464 - RNA, 12 nt, Human
uucuucuuuaau

SEQ ID NO: 2895465 - RNA, 17 nt, Human
uucuucuuuuugcuuca

SEQ ID NO: 2895466 - RNA, 21 nt, Human
uucuucuuuuugcuucaaaaa

SEQ ID NO: 2895467 - RNA, 16 nt, Human
uucuugaaagaagaau

SEQ ID NO: 2895468 - RNA, 19 nt, Human
uucuugaaagaauuuuccu

SEQ ID NO: 2895469 - RNA, 14 nt, Human
uucuuugcuguaag

SEQ ID NO: 2895470 - RNA, 15 nt, Human
uucuuugcuguaaga

SEQ ID NO: 2895471 - RNA, 16 nt, Human
uucuuugcuguaagau

SEQ ID NO: 2895472 - RNA, 17 nt, Human
uucuuuuuuaaaaucaa

SEQ ID NO: 2895473 - RNA, 16 nt, Human
uucuuuuuuucuuggc

SEQ ID NO: 2895474 - RNA, 14 nt, Human
uucuuuuuuuguga

SEQ ID NO: 2895475 - RNA, 15 nt, Human
uugaaagauucaggu

SEQ ID NO: 2895476 - RNA, 14 nt, Human
uugaaagaguccua

SEQ ID NO: 2895477 - RNA, 21 nt, Human
uucuccuugaauaucuuucga

SEQ ID NO: 2895478 - RNA, 21 nt, Human
uucuccuuguuguugguuguu

SEQ ID NO: 2895479 - RNA, 20 nt, Human
uucucuugagcuggccucuc

SEQ ID NO: 2895480 - RNA, 18 nt, Human
uucucuugagcuggccuc

SEQ ID NO: 2895481 - RNA, 22 nt, Human
uucucuugagcuggccucucua

SEQ ID NO: 2895482 - RNA, 18 nt, Human
uucucuugagucacacug

SEQ ID NO: 2895483 - RNA, 23 nt, Human
uucucuucccugcgccugugaug

SEQ ID NO: 2895484 - RNA, 14 nt, Human
uucucuugcuuucu

SEQ ID NO: 2895485 - RNA, 17 nt, Human
uucucuugagcuggccu

SEQ ID NO: 2895486 - RNA, 16 nt, Human
uucucuugagcuggcc

SEQ ID NO: 2895487 - RNA, 15 nt, Human
uucucuugagcuggc

SEQ ID NO: 2895488 - RNA, 14 nt, Human
uucucuugagcugg

SEQ ID NO: 2895489 - RNA, 20 nt, Human
uucuccuguuuauucccauc

SEQ ID NO: 2895490 - RNA, 14 nt, Human
uucuccuggaugcu

SEQ ID NO: 2895491 - RNA, 21 nt, Human
uucuccugccugugcugugac

SEQ ID NO: 2895492 - RNA, 22 nt, Human
uucuccugccuuugccuccaga

SEQ ID NO: 2895493 - RNA, 15 nt, Human
uucuccugccugugc

SEQ ID NO: 2895494 - RNA, 19 nt, Human
aucaguaagaaaaagaaga

SEQ ID NO: 2895495 - RNA, 15 nt, Human
aucaguaauauuuau

SEQ ID NO: 2895496 - RNA, 14 nt, Human
aucaguaggcuaau

SEQ ID NO: 2895497 - RNA, 16 nt, Human
aucaguaggcuaaugu

SEQ ID NO: 2895498 - RNA, 18 nt, Human
aucaguaggcuaauguca

SEQ ID NO: 2895499 - RNA, 13 nt, Human
aucaggucuccca

SEQ ID NO: 2895500 - RNA, 11 nt, Human
uucucuuggug

SEQ ID NO: 2895501 - RNA, 21 nt, Human
uucucuugguguuaaaacacu

SEQ ID NO: 2895502 - RNA, 19 nt, Human
uucucuuguauaagauccu

SEQ ID NO: 2895503 - RNA, 22 nt, Human
uucucuugggaacugaacucac

SEQ ID NO: 2895504 - RNA, 17 nt, Human
uucucuugggaacugaa

SEQ ID NO: 2895505 - RNA, 15 nt, Human
uucugccauauucug

SEQ ID NO: 2895506 - RNA, 19 nt, Human
uucugcccaauuggaggaa

SEQ ID NO: 2895507 - RNA, 13 nt, Human
uucugcccccagc

SEQ ID NO: 2895508 - RNA, 14 nt, Human
uucugcccccagcc

SEQ ID NO: 2895509 - RNA, 15 nt, Human
uucugcccccagccc

SEQ ID NO: 2895510 - RNA, 16 nt, Human
uucugcccccagccca

SEQ ID NO: 2895511 - RNA, 19 nt, Human
uucugcccaaaaauauggu

SEQ ID NO: 2895512 - RNA, 19 nt, Human
uucugcccacauuggaccc

SEQ ID NO: 2895513 - RNA, 16 nt, Human
uucugccagggagcuu

SEQ ID NO: 2895514 - RNA, 15 nt, Human
uucugccagggagcu

SEQ ID NO: 2895515 - RNA, 18 nt, Human
uucugccugcccaggccc

SEQ ID NO: 2895516 - RNA, 17 nt, Human
uucugccugcccaggcc

SEQ ID NO: 2895517 - RNA, 21 nt, Human
uucugccugcccaggccccug

SEQ ID NO: 2895518 - RNA, 11 nt, Human
uucuggcugcc

SEQ ID NO: 2895519 - RNA, 20 nt, Human
uucuggcugccccaaccugc

SEQ ID NO: 2895520 - RNA, 15 nt, Human
uucuggcugaaaaag

SEQ ID NO: 2895521 - RNA, 18 nt, Human
uucuggcugaaaaaggcc

SEQ ID NO: 2895522 - RNA, 16 nt, Human
uucugggaggaagcag

SEQ ID NO: 2895523 - RNA, 20 nt, Human
uucuggcuuccuucucucaa

SEQ ID NO: 2895524 - RNA, 13 nt, Human
auccaucaggcca

SEQ ID NO: 2895525 - RNA, 20 nt, Human
auccauauugagucaaaugg

SEQ ID NO: 2895526 - RNA, 18 nt, Human
auccauauugagucaaau

SEQ ID NO: 2895527 - RNA, 23 nt, Human
auccauaucuuaaagaaacagcu

SEQ ID NO: 2895528 - RNA, 16 nt, Human
auccauaguaguauga

SEQ ID NO: 2895529 - RNA, 17 nt, Human
auccauaguaacugaca

SEQ ID NO: 2895530 - RNA, 18 nt, Human
auccauaguaacugacau

SEQ ID NO: 2895531 - RNA, 20 nt, Human
auccauaguaacugacauga

SEQ ID NO: 2895532 - RNA, 14 nt, Human
auccaccaccuccc

SEQ ID NO: 2895533 - RNA, 17 nt, Human
auccaccaccucccuca

SEQ ID NO: 2895534 - RNA, 18 nt, Human
auccacauuguuuuaaaa

SEQ ID NO: 2895535 - RNA, 19 nt, Human
auccacauuguuuuaaaaa

SEQ ID NO: 2895536 - RNA, 15 nt, Human
auccacauuucuaaa

SEQ ID NO: 2895537 - RNA, 16 nt, Human
auccacauuucuaaaa

SEQ ID NO: 2895538 - RNA, 20 nt, Human
auccacccaacccuaucucc

SEQ ID NO: 2895539 - RNA, 16 nt, Human
auccaguucaugagaa

SEQ ID NO: 2895540 - RNA, 17 nt, Human
auccacauuguuuuaaa

SEQ ID NO: 2895541 - RNA, 16 nt, Human
auccauaccagcucgc

SEQ ID NO: 2895542 - RNA, 13 nt, Human
auccauuuguaau

SEQ ID NO: 2895543 - RNA, 13 nt, Human
aucccaaaaguca

SEQ ID NO: 2895544 - RNA, 14 nt, Human
aucccaaacuguga

SEQ ID NO: 2895545 - RNA, 24 nt, Human
aucccaaacugugaugaagccgac

SEQ ID NO: 2895546 - RNA, 12 nt, Human
aucccaggacac

SEQ ID NO: 2895547 - RNA, 17 nt, Human
aucccaggacaccacac

SEQ ID NO: 2895548 - RNA, 14 nt, Human
aucccagccggcca

SEQ ID NO: 2895549 - RNA, 22 nt, Human
aucccagccggccaauggaaac

SEQ ID NO: 2895550 - RNA, 24 nt, Human
aucccagccggccaauggaaaccu

SEQ ID NO: 2895551 - RNA, 15 nt, Human
auccacccaccucag

SEQ ID NO: 2895552 - RNA, 13 nt, Human
auccacccaccuc

SEQ ID NO: 2895553 - RNA, 21 nt, Human
auccaagcuggucccacucag

SEQ ID NO: 2895554 - RNA, 18 nt, Human
auccaagcuggucccacu

SEQ ID NO: 2895555 - RNA, 21 nt, Human
auccaagccuccacagcgagg

SEQ ID NO: 2895556 - RNA, 13 nt, Human
auccaagcucccu

SEQ ID NO: 2895557 - RNA, 14 nt, Human
auccaagcucccug

SEQ ID NO: 2895558 - RNA, 15 nt, Human
auccaagcucccugc

SEQ ID NO: 2895559 - RNA, 17 nt, Human
auccaagcucccugccc

SEQ ID NO: 2895560 - RNA, 18 nt, Human
auccaagcucccugcccc

SEQ ID NO: 2895561 - RNA, 19 nt, Human
auccaagcucccugcccca

SEQ ID NO: 2895562 - RNA, 19 nt, Human
auccaagccuccacagcga

SEQ ID NO: 2895563 - RNA, 18 nt, Human
auccaagccuccacagcg

SEQ ID NO: 2895564 - RNA, 17 nt, Human
auccaagccuccacagc

SEQ ID NO: 2895565 - RNA, 16 nt, Human
auccaagccuccacag

SEQ ID NO: 2895566 - RNA, 15 nt, Human
auccaagccuccaca

SEQ ID NO: 2895567 - RNA, 14 nt, Human
auccaagccuccac

SEQ ID NO: 2895568 - RNA, 12 nt, Human
auccaagccucc

SEQ ID NO: 2895569 - RNA, 19 nt, Human
uucuggggcaggcugggcc

SEQ ID NO: 2895570 - RNA, 18 nt, Human
uucuggggcaggcugggc

SEQ ID NO: 2895571 - RNA, 23 nt, Human
uucuggggaaagacacugccugg

SEQ ID NO: 2895572 - RNA, 22 nt, Human
uucuggggaaagacacugccug

SEQ ID NO: 2895573 - RNA, 17 nt, Human
uucuggggcaggcuggg

SEQ ID NO: 2895574 - RNA, 21 nt, Human
uucuggggaaagacacugccu

SEQ ID NO: 2895575 - RNA, 20 nt, Human
uucuggggaaagacacugcc

SEQ ID NO: 2895576 - RNA, 14 nt, Human
uucuggggaaagac

SEQ ID NO: 2895577 - RNA, 12 nt, Human
uucugggcucuu

SEQ ID NO: 2895578 - RNA, 13 nt, Human
uucugggcucuuu

SEQ ID NO: 2895579 - RNA, 16 nt, Human
uucugggcucuuuccu

SEQ ID NO: 2895580 - RNA, 21 nt, Human
uucuggggcaggcugggccau

SEQ ID NO: 2895581 - RNA, 20 nt, Human
uucuggggcaggcugggcca

SEQ ID NO: 2895582 - RNA, 14 nt, Human
uucuggggucccca

SEQ ID NO: 2895583 - RNA, 17 nt, Human
aucauuuuccccccacu

SEQ ID NO: 2895584 - RNA, 19 nt, Human
aucauuuugccucuuuucu

SEQ ID NO: 2895585 - RNA, 14 nt, Human
aucauuuuguuuuc

SEQ ID NO: 2895586 - RNA, 16 nt, Human
aucauuuuguuuucca

SEQ ID NO: 2895587 - RNA, 13 nt, Human
aucauuuuccccc

SEQ ID NO: 2895588 - RNA, 15 nt, Human
aucauuuucccccca

SEQ ID NO: 2895589 - RNA, 14 nt, Human
aucauuuucccccc

SEQ ID NO: 2895590 - RNA, 15 nt, Human
aucauuuuaggaaag

SEQ ID NO: 2895591 - RNA, 16 nt, Human
aucauuuuaggaaagg

SEQ ID NO: 2895592 - RNA, 22 nt, Human
uuccggauccuaagcaucuaag

SEQ ID NO: 2895593 - RNA, 17 nt, Human
uuccgugaaaacggagc

SEQ ID NO: 2895594 - RNA, 18 nt, Human
uuccgugacgucacugga

SEQ ID NO: 2895595 - RNA, 15 nt, Human
uuccgucagaaagug

SEQ ID NO: 2895596 - RNA, 17 nt, Human
uuccgucagaaagugua

SEQ ID NO: 2895597 - RNA, 20 nt, Human
uuccguagguagauguguaa

SEQ ID NO: 2895598 - RNA, 21 nt, Human
uuccguaauaacacccuuccu

SEQ ID NO: 2895599 - RNA, 19 nt, Human
uuccgucaacguuguacug

SEQ ID NO: 2895600 - RNA, 21 nt, Human
uuccgucaacguuguacugua

SEQ ID NO: 2895601 - RNA, 17 nt, Human
uuccgguagggaggcag

SEQ ID NO: 2895602 - RNA, 19 nt, Human
uuccgguagggaggcagcc

SEQ ID NO: 2895603 - RNA, 21 nt, Human
uuccgguagggaggcagccuc

SEQ ID NO: 2895604 - RNA, 14 nt, Human
uucccggucccgag

SEQ ID NO: 2895605 - RNA, 15 nt, Human
uucccggucccgagu

SEQ ID NO: 2895606 - RNA, 19 nt, Human
uucccggucccgaguacag

SEQ ID NO: 2895607 - RNA, 20 nt, Human
uucccggucccgaguacagu

SEQ ID NO: 2895608 - RNA, 23 nt, Human
auagcaaaacuuuuaaacuacag

SEQ ID NO: 2895609 - RNA, 20 nt, Human
auagauuuauuuuucaguuc

SEQ ID NO: 2895610 - RNA, 21 nt, Human
auagauuuauuuuucaguucc

SEQ ID NO: 2895611 - RNA, 22 nt, Human
auagauuuauuuuucaguucca

SEQ ID NO: 2895612 - RNA, 23 nt, Human
auagauuuauuuuucaguuccaa

SEQ ID NO: 2895613 - RNA, 16 nt, Human
uucccgcucagcccuc

SEQ ID NO: 2895614 - RNA, 18 nt, Human
uucccgcucagcccuccc

SEQ ID NO: 2895615 - RNA, 21 nt, Human
uucccgcucagcccucccugc

SEQ ID NO: 2895616 - RNA, 22 nt, Human
uucccgcucagcccucccugcc

SEQ ID NO: 2895617 - RNA, 14 nt, Human
uuccguugucugug

SEQ ID NO: 2895618 - RNA, 13 nt, Human
uuccuaaaaugcu

SEQ ID NO: 2895619 - RNA, 15 nt, Human
uuccguuugcuuuug

SEQ ID NO: 2895620 - RNA, 17 nt, Human
uuccguuugcuuuuguu

SEQ ID NO: 2895621 - RNA, 18 nt, Human
uuccuaauuccacagcug

SEQ ID NO: 2895622 - RNA, 17 nt, Human
uuccuaauuccacagcu

SEQ ID NO: 2895623 - RNA, 16 nt, Human
uuccuaauuccacagc

SEQ ID NO: 2895624 - RNA, 21 nt, Human
uuccucugaggcugaaauuca

SEQ ID NO: 2895625 - RNA, 18 nt, Human
uuccuaauuucccuucuu

SEQ ID NO: 2895626 - RNA, 23 nt, Human
uuccuacaagagcagccuguggc

SEQ ID NO: 2895627 - RNA, 22 nt, Human
uuccuacaagagcagccugugg

SEQ ID NO: 2895628 - RNA, 20 nt, Human
uuccuacaagagcagccugu

SEQ ID NO: 2895629 - RNA, 17 nt, Human
uuccucugagccuuggg

SEQ ID NO: 2895630 - RNA, 14 nt, Human
uuccucugagccuu

SEQ ID NO: 2895631 - RNA, 17 nt, Human
auauuuuuuaauuuaaa

SEQ ID NO: 2895632 - RNA, 21 nt, Human
auauuuuuuaauuuaaagcuu

SEQ ID NO: 2895633 - RNA, 20 nt, Human
aucaaauuucacgucgucuu

SEQ ID NO: 2895634 - RNA, 20 nt, Human
auauuuuuuauauauacagu

SEQ ID NO: 2895635 - RNA, 22 nt, Human
auauuuuuuauaucuggaauga

SEQ ID NO: 2895636 - RNA, 18 nt, Human
auauuuuuauauuuaguu

SEQ ID NO: 2895637 - RNA, 15 nt, Human
aucaacaagauuucc

SEQ ID NO: 2895638 - RNA, 22 nt, Human
aucaaauuucacgucgucuucu

SEQ ID NO: 2895639 - RNA, 15 nt, Human
aucaacaaagaaaua

SEQ ID NO: 2895640 - RNA, 14 nt, Human
aucaagcagccaag

SEQ ID NO: 2895641 - RNA, 18 nt, Human
aucaagcagguuagagaa

SEQ ID NO: 2895642 - RNA, 19 nt, Human
aucaagcaugaaaggcuuu

SEQ ID NO: 2895643 - RNA, 21 nt, Human
aucaagccauguauaaaugug

SEQ ID NO: 2895644 - RNA, 13 nt, Human
aucaacagaagca

SEQ ID NO: 2895645 - RNA, 17 nt, Human
aucaacagaagcauuug

SEQ ID NO: 2895646 - RNA, 22 nt, Human
aucaacagaagcauuuguauuu

SEQ ID NO: 2895647 - RNA, 11 nt, Human
uuccugugucu

SEQ ID NO: 2895648 - RNA, 22 nt, Human
uuccugugauccacccaacccu

SEQ ID NO: 2895649 - RNA, 11 nt, Human
uuccuguguca

SEQ ID NO: 2895650 - RNA, 13 nt, Human
uuccugugucaau

SEQ ID NO: 2895651 - RNA, 18 nt, Human
uuccugugucaauccaga

SEQ ID NO: 2895652 - RNA, 17 nt, Human
uuccugugauccaccca

SEQ ID NO: 2895653 - RNA, 20 nt, Human
uuccugucuagucucuccug

SEQ ID NO: 2895654 - RNA, 15 nt, Human
uuccugaacuauaac

SEQ ID NO: 2895655 - RNA, 22 nt, Human
aucaaugcaagagugauugcag

SEQ ID NO: 2895656 - RNA, 15 nt, Human
aucaaugaauauuga

SEQ ID NO: 2895657 - RNA, 16 nt, Human
aucaaugaauauugaa

SEQ ID NO: 2895658 - RNA, 18 nt, Human
aucaaugaauauugaagu

SEQ ID NO: 2895659 - RNA, 14 nt, Human
aucaauccuuuauu

SEQ ID NO: 2895660 - RNA, 16 nt, Human
aucaauccuuuauuau

SEQ ID NO: 2895661 - RNA, 22 nt, Human
aucaaucaucugugugaaaaug

SEQ ID NO: 2895662 - RNA, 19 nt, Human
aucaaggggucacuuacag

SEQ ID NO: 2895663 - RNA, 15 nt, Human
aucaaggcacugccu

SEQ ID NO: 2895664 - RNA, 16 nt, Human
aucaaggcacugccug

SEQ ID NO: 2895665 - RNA, 22 nt, Human
aucaaggaagaaaugguucaga

SEQ ID NO: 2895666 - RNA, 21 nt, Human
aucaaggacucugguuucuca

SEQ ID NO: 2895667 - RNA, 13 nt, Human
aucaaggcacugc

SEQ ID NO: 2895668 - RNA, 14 nt, Human
aucaaggcacugcc

SEQ ID NO: 2895669 - RNA, 15 nt, Human
aucacggcucacugc

SEQ ID NO: 2895670 - RNA, 19 nt, Human
aucacgauguaaauuauua

SEQ ID NO: 2895671 - RNA, 18 nt, Human
aucacgauguaaauuauu

SEQ ID NO: 2895672 - RNA, 13 nt, Human
aucacgccacugc

SEQ ID NO: 2895673 - RNA, 17 nt, Human
aucacgacgcugcagag

SEQ ID NO: 2895674 - RNA, 15 nt, Human
aucacgauguaaauu

SEQ ID NO: 2895675 - RNA, 19 nt, Human
aucacggcucacugcagcc

SEQ ID NO: 2895676 - RNA, 18 nt, Human
aucacggcucacugcagc

SEQ ID NO: 2895677 - RNA, 22 nt, Human
aucacugccacacucuccauca

SEQ ID NO: 2895678 - RNA, 21 nt, Human
aucacugccagagauaaacua

SEQ ID NO: 2895679 - RNA, 23 nt, Human
aucacugccagagauaaacuaau

SEQ ID NO: 2895680 - RNA, 20 nt, Human
aucacugccacacucuccau

SEQ ID NO: 2895681 - RNA, 19 nt, Human
aucacugccacacucucca

SEQ ID NO: 2895682 - RNA, 18 nt, Human
aucacugccacacucucc

SEQ ID NO: 2895683 - RNA, 12 nt, Human
aucacugccaca

SEQ ID NO: 2895684 - RNA, 22 nt, Human
aucacugcauuauucucuuuua

SEQ ID NO: 2895685 - RNA, 15 nt, Human
aucacugaauuuaua

SEQ ID NO: 2895686 - RNA, 20 nt, Human
aucacugaauuuauaaagua

SEQ ID NO: 2895687 - RNA, 21 nt, Human
aucacuuguacaaaauaaaca

SEQ ID NO: 2895688 - RNA, 19 nt, Human
aucagaauagccacauuug

SEQ ID NO: 2895689 - RNA, 18 nt, Human
aucagaaguuucucagcu

SEQ ID NO: 2895690 - RNA, 17 nt, Human
uucucaggccaucauca

SEQ ID NO: 2895691 - RNA, 19 nt, Human
uucucagggucucugcugc

SEQ ID NO: 2895692 - RNA, 20 nt, Human
uucucagggucucugcugcc

SEQ ID NO: 2895693 - RNA, 13 nt, Human
uucucagggucuc

SEQ ID NO: 2895694 - RNA, 16 nt, Human
uucucagggucucugc

SEQ ID NO: 2895695 - RNA, 17 nt, Human
uucucagggucucugcu

SEQ ID NO: 2895696 - RNA, 18 nt, Human
uucucagggucucugcug

SEQ ID NO: 2895697 - RNA, 15 nt, Human
aucacuugauucaua

SEQ ID NO: 2895698 - RNA, 18 nt, Human
aucacuugauucauaaag

SEQ ID NO: 2895699 - RNA, 21 nt, Human
uucucagggucucugcugccg

SEQ ID NO: 2895700 - RNA, 18 nt, Human
aucacuuguacaaaauaa

SEQ ID NO: 2895701 - RNA, 17 nt, Human
aucacuuguacaaaaua

SEQ ID NO: 2895702 - RNA, 16 nt, Human
aucacuuguacaaaau

SEQ ID NO: 2895703 - RNA, 14 nt, Human
aucacuuguacaaa

SEQ ID NO: 2895704 - RNA, 16 nt, Human
uucucacuccuaccug

SEQ ID NO: 2895705 - RNA, 18 nt, Human
uucucacuccuaccuggu

SEQ ID NO: 2895706 - RNA, 21 nt, Human
aucagggcaaucccaacacau

SEQ ID NO: 2895707 - RNA, 11 nt, Human
aucagggccug

SEQ ID NO: 2895708 - RNA, 13 nt, Human
aucagggccuggg

SEQ ID NO: 2895709 - RNA, 14 nt, Human
aucagggccugggg

SEQ ID NO: 2895710 - RNA, 15 nt, Human
aucagggccuggggc

SEQ ID NO: 2895711 - RNA, 17 nt, Human
aucagggccuggggccu

SEQ ID NO: 2895712 - RNA, 19 nt, Human
aucagggccuggggccuga

SEQ ID NO: 2895713 - RNA, 20 nt, Human
aucagggccuggggccugag

SEQ ID NO: 2895714 - RNA, 21 nt, Human
aucagggccuggggccugaga

SEQ ID NO: 2895715 - RNA, 22 nt, Human
aucagggccuggggccugagag

SEQ ID NO: 2895716 - RNA, 23 nt, Human
aucagggccuggggccugagaga

SEQ ID NO: 2895717 - RNA, 24 nt, Human
aucagggccuggggccugagagaa

SEQ ID NO: 2895718 - RNA, 14 nt, Human
aucagggggaagaa

SEQ ID NO: 2895719 - RNA, 16 nt, Human
aucagggggaagaagc

SEQ ID NO: 2895720 - RNA, 18 nt, Human
aucagggggaagaagcag

SEQ ID NO: 2895721 - RNA, 21 nt, Human
aucagggggaagaagcagaga

SEQ ID NO: 2895722 - RNA, 23 nt, Human
aucagggggaagaagcagagaga

SEQ ID NO: 2895723 - RNA, 20 nt, Human
aucagguccucagagaauuu

SEQ ID NO: 2895724 - RNA, 16 nt, Human
aucagguccucagaga

SEQ ID NO: 2895725 - RNA, 16 nt, Human
aucaggcuacuagaau

SEQ ID NO: 2895726 - RNA, 22 nt, Human
aucagcacagauaaaaagugga

SEQ ID NO: 2895727 - RNA, 15 nt, Human
aucagcacauauuuu

SEQ ID NO: 2895728 - RNA, 17 nt, Human
aucagauuuuaacagcu

SEQ ID NO: 2895729 - RNA, 12 nt, Human
aucagcaaaaaa

SEQ ID NO: 2895730 - RNA, 13 nt, Human
aucagcaaaaaag

SEQ ID NO: 2895731 - RNA, 18 nt, Human
aucaggccuaaucucaua

SEQ ID NO: 2895732 - RNA, 19 nt, Human
aucaggccuaaucucauac

SEQ ID NO: 2895733 - RNA, 22 nt, Human
aucagaauagccacauuuggaa

SEQ ID NO: 2895734 - RNA, 19 nt, Human
uucucacuccuuuuggugu

SEQ ID NO: 2895735 - RNA, 17 nt, Human
aucagaauugaaacacu

SEQ ID NO: 2895736 - RNA, 21 nt, Human
aucagaugcuccaagauucua

SEQ ID NO: 2895737 - RNA, 22 nt, Human
aucagaugcuccaagauucuag

SEQ ID NO: 2895738 - RNA, 23 nt, Human
aucagcaacaaccagcaucccuu

SEQ ID NO: 2895739 - RNA, 23 nt, Human
aucagaugcuccaagauucuaga

SEQ ID NO: 2895740 - RNA, 14 nt, Human
aucagauggaaaua

SEQ ID NO: 2895741 - RNA, 21 nt, Human
aucagauggaaauauuuugau

SEQ ID NO: 2895742 - RNA, 22 nt, Human
aucagauggaaauauuuugaua

SEQ ID NO: 2895743 - RNA, 23 nt, Human
aucagauggaaauauuuugauaa

SEQ ID NO: 2895744 - RNA, 15 nt, Human
aucagauguugaauu

SEQ ID NO: 2895745 - RNA, 16 nt, Human
aucagauguugaauuc

SEQ ID NO: 2895746 - RNA, 19 nt, Human
aucagauguugaauucuuu

SEQ ID NO: 2895747 - RNA, 21 nt, Human
aucagauguuuuggucaagua

SEQ ID NO: 2895748 - RNA, 23 nt, Human
uucuagaucagaugcuccaagau

SEQ ID NO: 2895749 - RNA, 23 nt, Human
uucuaagguccgguguucuaaga

SEQ ID NO: 2895750 - RNA, 24 nt, Human
uucuagaucagaugcuccaagauu

SEQ ID NO: 2895751 - RNA, 18 nt, Human
uucuaaggcucugagagu

SEQ ID NO: 2895752 - RNA, 20 nt, Human
uucuaaggcucugagagucu

SEQ ID NO: 2895753 - RNA, 20 nt, Human
uucuaagguccgguguucua

SEQ ID NO: 2895754 - RNA, 21 nt, Human
uucuaagguccgguguucuaa

SEQ ID NO: 2895755 - RNA, 21 nt, Human
uucuaagacuuacucuaagau

SEQ ID NO: 2895756 - RNA, 20 nt, Human
uucuaaggccuaggauucua

SEQ ID NO: 2895757 - RNA, 21 nt, Human
uucuaaggccuaggauucuaa

SEQ ID NO: 2895758 - RNA, 22 nt, Human
uucuaaggccuaggauucuaaa

SEQ ID NO: 2895759 - RNA, 12 nt, Human
uucuaaggcucu

SEQ ID NO: 2895760 - RNA, 13 nt, Human
uucuaaggcucug

SEQ ID NO: 2895761 - RNA, 16 nt, Human
uucuaaggcucugaga

SEQ ID NO: 2895762 - RNA, 17 nt, Human
uucuaaggcucugagag

SEQ ID NO: 2895763 - RNA, 12 nt, Human
uucuaagacuca

SEQ ID NO: 2895764 - RNA, 13 nt, Human
uucuaagacucaa

SEQ ID NO: 2895765 - RNA, 16 nt, Human
uucuaagacucaaaug

SEQ ID NO: 2895766 - RNA, 19 nt, Human
uucuaaggccuaggauucu

SEQ ID NO: 2895767 - RNA, 20 nt, Human
uucuaagacucaaauguucu

SEQ ID NO: 2895768 - RNA, 21 nt, Human
uucuaagacucaaauguucua

SEQ ID NO: 2895769 - RNA, 22 nt, Human
uucuaagacucaaauguucuaa

SEQ ID NO: 2895770 - RNA, 20 nt, Human
uucuaagacuuacucuaaga

SEQ ID NO: 2895771 - RNA, 12 nt, Human
uucuagaugauu

SEQ ID NO: 2895772 - RNA, 22 nt, Human
uucuagaugauuaaauaagauu

SEQ ID NO: 2895773 - RNA, 12 nt, Human
uucuagccugca

SEQ ID NO: 2895774 - RNA, 24 nt, Human
uucuagccugcacuuugaugucau

SEQ ID NO: 2895775 - RNA, 17 nt, Human
uucuagcuaauguaaua

SEQ ID NO: 2895776 - RNA, 16 nt, Human
uucggccagagcugaa

SEQ ID NO: 2895777 - RNA, 13 nt, Human
uucuaaaggucca

SEQ ID NO: 2895778 - RNA, 14 nt, Human
uucuaaaugaagug

SEQ ID NO: 2895779 - RNA, 16 nt, Human
uucuaaagguccacag

SEQ ID NO: 2895780 - RNA, 19 nt, Human
uucggaggccccacugaug

SEQ ID NO: 2895781 - RNA, 17 nt, Human
uucgcuuggcuccaugc

SEQ ID NO: 2895782 - RNA, 17 nt, Human
aucacuggagcccagga

SEQ ID NO: 2895783 - RNA, 16 nt, Human
aucacuggagcccagg

SEQ ID NO: 2895784 - RNA, 19 nt, Human
uucgcuccugugucuugca

SEQ ID NO: 2895785 - RNA, 15 nt, Human
uucgcuccugugucu

SEQ ID NO: 2895786 - RNA, 21 nt, Human
aucacugccacacucuccauc

SEQ ID NO: 2895787 - RNA, 10 nt, Human
aucacuggag

SEQ ID NO: 2895788 - RNA, 14 nt, Human
aucacugcuugaug

SEQ ID NO: 2895789 - RNA, 19 nt, Human
aucacugcuugaugaagca

SEQ ID NO: 2895790 - RNA, 21 nt, Human
aucacugcuugaugaagcaag

SEQ ID NO: 2895791 - RNA, 15 nt, Human
aucacuggagcccag

SEQ ID NO: 2895792 - RNA, 14 nt, Human
aucacuggagccca

SEQ ID NO: 2895793 - RNA, 13 nt, Human
aucacuggagccc

SEQ ID NO: 2895794 - RNA, 12 nt, Human
aucacuggagcc

SEQ ID NO: 2895795 - RNA, 12 nt, Human
uuuguaguuuuu

SEQ ID NO: 2895796 - RNA, 22 nt, Human
uuuguaauuaaauuaugguauu

SEQ ID NO: 2895797 - RNA, 24 nt, Human
uuuguaauuaaauuaugguauuaa

SEQ ID NO: 2895798 - RNA, 13 nt, Human
uuuguaauuauga

SEQ ID NO: 2895799 - RNA, 13 nt, Human
uuuguaauugcuu

SEQ ID NO: 2895800 - RNA, 14 nt, Human
uuuguaaugaauuc

SEQ ID NO: 2895801 - RNA, 20 nt, Human
uuuguaaugaauuccuagaa

SEQ ID NO: 2895802 - RNA, 15 nt, Human
uuuguaaugugugaa

SEQ ID NO: 2895803 - RNA, 18 nt, Human
uuuguaaugugugaaaaa

SEQ ID NO: 2895804 - RNA, 16 nt, Human
augugcacccaugggc

SEQ ID NO: 2895805 - RNA, 17 nt, Human
uuugucuuuuaaugcuu

SEQ ID NO: 2895806 - RNA, 22 nt, Human
uuugugaaaugauggugaaagu

SEQ ID NO: 2895807 - RNA, 16 nt, Human
uuugucuugaaugucu

SEQ ID NO: 2895808 - RNA, 14 nt, Human
uuugugacuauaua

SEQ ID NO: 2895809 - RNA, 23 nt, Human
uuugugaauggauuggauuauuu

SEQ ID NO: 2895810 - RNA, 19 nt, Human
uuugugaauggauuggauu

SEQ ID NO: 2895811 - RNA, 17 nt, Human
uuugugaauggauugga

SEQ ID NO: 2895812 - RNA, 14 nt, Human
uuugugaagcccug

SEQ ID NO: 2895813 - RNA, 15 nt, Human
uuugugaagcccugu

SEQ ID NO: 2895814 - RNA, 17 nt, Human
uuugugaagcccuguug

SEQ ID NO: 2895815 - RNA, 23 nt, Human
augugcacaugcacgugugugca

SEQ ID NO: 2895816 - RNA, 18 nt, Human
augugcaauugauuucuu

SEQ ID NO: 2895817 - RNA, 20 nt, Human
augugcaagcgacgacagau

SEQ ID NO: 2895818 - RNA, 14 nt, Human
augugacuguauaa

SEQ ID NO: 2895819 - RNA, 14 nt, Human
augugauguucuaa

SEQ ID NO: 2895820 - RNA, 15 nt, Human
augugauguucuaag

SEQ ID NO: 2895821 - RNA, 14 nt, Human
augugacucuggcu

SEQ ID NO: 2895822 - RNA, 15 nt, Human
augugacucuggcuu

SEQ ID NO: 2895823 - RNA, 22 nt, Human
augugacucuggcuuggccuau

SEQ ID NO: 2895824 - RNA, 14 nt, Human
augugaugauguaa

SEQ ID NO: 2895825 - RNA, 16 nt, Human
augugaugauguaauu

SEQ ID NO: 2895826 - RNA, 17 nt, Human
augugaugauguaauug

SEQ ID NO: 2895827 - RNA, 21 nt, Human
augugaugauguaauugacgg

SEQ ID NO: 2895828 - RNA, 15 nt, Human
augugauuacaaggc

SEQ ID NO: 2895829 - RNA, 15 nt, Human
augugauucaaaaga

SEQ ID NO: 2895830 - RNA, 21 nt, Human
augugauguucuaaggcucug

SEQ ID NO: 2895831 - RNA, 16 nt, Human
augugauguucuaagg

SEQ ID NO: 2895832 - RNA, 17 nt, Human
augugauguucuaaggc

SEQ ID NO: 2895833 - RNA, 19 nt, Human
augugauguucuaaggcuc

SEQ ID NO: 2895834 - RNA, 20 nt, Human
augugauguucuaaggcucu

SEQ ID NO: 2895835 - RNA, 22 nt, Human
augugauuguggaauggagauu

SEQ ID NO: 2895836 - RNA, 17 nt, Human
augugauuguggaaugg

SEQ ID NO: 2895837 - RNA, 15 nt, Human
augugauuguggaau

SEQ ID NO: 2895838 - RNA, 14 nt, Human
augugauuguggaa

SEQ ID NO: 2895839 - RNA, 15 nt, Human
augugauucuaaugu

SEQ ID NO: 2895840 - RNA, 16 nt, Human
augugacauuuuacau

SEQ ID NO: 2895841 - RNA, 18 nt, Human
augugacauuuuacauua

SEQ ID NO: 2895842 - RNA, 13 nt, Human
auguccugccuuu

SEQ ID NO: 2895843 - RNA, 15 nt, Human
auguccugccuuuua

SEQ ID NO: 2895844 - RNA, 16 nt, Human
auguccacuguguaua

SEQ ID NO: 2895845 - RNA, 17 nt, Human
auguccacuguguauag

SEQ ID NO: 2895846 - RNA, 14 nt, Human
auguccacugugua

SEQ ID NO: 2895847 - RNA, 16 nt, Human
augucaguauuucagu

SEQ ID NO: 2895848 - RNA, 24 nt, Human
augucaguauuucaguguaguuaa

SEQ ID NO: 2895849 - RNA, 13 nt, Human
augucuccucccc

SEQ ID NO: 2895850 - RNA, 15 nt, Human
augucucgcuaguga

SEQ ID NO: 2895851 - RNA, 16 nt, Human
augucucgcuagugau

SEQ ID NO: 2895852 - RNA, 14 nt, Human
augucucuaaagca

SEQ ID NO: 2895853 - RNA, 15 nt, Human
augucucuaaagcac

SEQ ID NO: 2895854 - RNA, 17 nt, Human
augucucugagcauuag

SEQ ID NO: 2895855 - RNA, 13 nt, Human
augucgccucugc

SEQ ID NO: 2895856 - RNA, 14 nt, Human
augucgccucugca

SEQ ID NO: 2895857 - RNA, 17 nt, Human
augucucaggucccugc

SEQ ID NO: 2895858 - RNA, 22 nt, Human
augucucaggucccugcagggc

SEQ ID NO: 2895859 - RNA, 14 nt, Human
auguaucugaguug

SEQ ID NO: 2895860 - RNA, 17 nt, Human
auguaucugaguugcca

SEQ ID NO: 2895861 - RNA, 14 nt, Human
auguaucugugaag

SEQ ID NO: 2895862 - RNA, 13 nt, Human
auguaugaaggcu

SEQ ID NO: 2895863 - RNA, 14 nt, Human
auguaugaaggcuu

SEQ ID NO: 2895864 - RNA, 17 nt, Human
auguaugaauacagcag

SEQ ID NO: 2895865 - RNA, 18 nt, Human
auguaugaauacagcagc

SEQ ID NO: 2895866 - RNA, 23 nt, Human
auguaugaauacagcagcaagaa

SEQ ID NO: 2895867 - RNA, 18 nt, Human
auguaugagguacaaccu

SEQ ID NO: 2895868 - RNA, 22 nt, Human
uuuggcaggggcagaaaacucu

SEQ ID NO: 2895869 - RNA, 20 nt, Human
uuuggcagagcuucuuccag

SEQ ID NO: 2895870 - RNA, 14 nt, Human
uuuggcaaggaaag

SEQ ID NO: 2895871 - RNA, 23 nt, Human
uuuggcaaggaaaggggagaagg

SEQ ID NO: 2895872 - RNA, 21 nt, Human
auguauuaauaaauagagcaa

SEQ ID NO: 2895873 - RNA, 12 nt, Human
auguauuaguga

SEQ ID NO: 2895874 - RNA, 16 nt, Human
auguauuagugauauu

SEQ ID NO: 2895875 - RNA, 19 nt, Human
auguauuagugauauuucu

SEQ ID NO: 2895876 - RNA, 21 nt, Human
auguauuagugauauuucucu

SEQ ID NO: 2895877 - RNA, 22 nt, Human
auguauuagugauauuucucua

SEQ ID NO: 2895878 - RNA, 23 nt, Human
auguauuagugauauuucucuag

SEQ ID NO: 2895879 - RNA, 22 nt, Human
auguacuuuuauuuuacacaga

SEQ ID NO: 2895880 - RNA, 20 nt, Human
auguacuuuuauuuuacaca

SEQ ID NO: 2895881 - RNA, 13 nt, Human
auguagaagcugc

SEQ ID NO: 2895882 - RNA, 16 nt, Human
auguagacuauauaca

SEQ ID NO: 2895883 - RNA, 17 nt, Human
auguagacuauauacau

SEQ ID NO: 2895884 - RNA, 19 nt, Human
auguagacuauauacaugu

SEQ ID NO: 2895885 - RNA, 20 nt, Human
auguagacuauauacaugug

SEQ ID NO: 2895886 - RNA, 21 nt, Human
auguagacuauauacaugugu

SEQ ID NO: 2895887 - RNA, 23 nt, Human
auguagacuauauacaugugugu

SEQ ID NO: 2895888 - RNA, 15 nt, Human
auguagagaaaagca

SEQ ID NO: 2895889 - RNA, 13 nt, Human
auguagauauuug

SEQ ID NO: 2895890 - RNA, 15 nt, Human
auguagauauuuggc

SEQ ID NO: 2895891 - RNA, 16 nt, Human
auguagauauuuggcu

SEQ ID NO: 2895892 - RNA, 20 nt, Human
auguagauauuuggcuuaaa

SEQ ID NO: 2895893 - RNA, 21 nt, Human
auguagauauuuggcuuaaau

SEQ ID NO: 2895894 - RNA, 19 nt, Human
auguacuuguuucucuguu

SEQ ID NO: 2895895 - RNA, 17 nt, Human
auguacuccucuuuaca

SEQ ID NO: 2895896 - RNA, 20 nt, Human
auguacuccucuuuacacug

SEQ ID NO: 2895897 - RNA, 16 nt, Human
auguacugauugagaa

SEQ ID NO: 2895898 - RNA, 18 nt, Human
auguacugauugagaagu

SEQ ID NO: 2895899 - RNA, 14 nt, Human
auguacugagauuu

SEQ ID NO: 2895900 - RNA, 11 nt, Human
auguacuguac

SEQ ID NO: 2895901 - RNA, 12 nt, Human
auguacuguacu

SEQ ID NO: 2895902 - RNA, 13 nt, Human
auguacuguacua

SEQ ID NO: 2895903 - RNA, 14 nt, Human
auguacuguacuaa

SEQ ID NO: 2895904 - RNA, 16 nt, Human
auguacuguacuaauu

SEQ ID NO: 2895905 - RNA, 17 nt, Human
auguacuguacuaauuc

SEQ ID NO: 2895906 - RNA, 18 nt, Human
auguacuguacuaauucu

SEQ ID NO: 2895907 - RNA, 20 nt, Human
auguacuguacuaauucuua

SEQ ID NO: 2895908 - RNA, 22 nt, Human
auguaccuucuuucacucuguc

SEQ ID NO: 2895909 - RNA, 14 nt, Human
auguacguuuguau

SEQ ID NO: 2895910 - RNA, 21 nt, Human
auguacguuuguaugugugua

SEQ ID NO: 2895911 - RNA, 15 nt, Human
auguacuaguacugu

SEQ ID NO: 2895912 - RNA, 17 nt, Human
auguacuaguacugugu

SEQ ID NO: 2895913 - RNA, 18 nt, Human
auguacuaguacugugua

SEQ ID NO: 2895914 - RNA, 19 nt, Human
auguacuaguacuguguac

SEQ ID NO: 2895915 - RNA, 21 nt, Human
auguacuaguacuguguacug

SEQ ID NO: 2895916 - RNA, 22 nt, Human
auguacuaguacuguguacugu

SEQ ID NO: 2895917 - RNA, 15 nt, Human
auguacuaguguucu

SEQ ID NO: 2895918 - RNA, 18 nt, Human
auguacuaguguucuguu

SEQ ID NO: 2895919 - RNA, 20 nt, Human
auguacuaguguucuguuug

SEQ ID NO: 2895920 - RNA, 22 nt, Human
auguacuaguguucuguuuguu

SEQ ID NO: 2895921 - RNA, 21 nt, Human
auguacuaguuuuaguuuucu

SEQ ID NO: 2895922 - RNA, 18 nt, Human
auguaccaugaaacaaag

SEQ ID NO: 2895923 - RNA, 15 nt, Human
auguaccauuugcau

SEQ ID NO: 2895924 - RNA, 18 nt, Human
auguaccauuugcauggc

SEQ ID NO: 2895925 - RNA, 22 nt, Human
auguaccauuugcauggcucca

SEQ ID NO: 2895926 - RNA, 16 nt, Human
auguaccguaggcuuu

SEQ ID NO: 2895927 - RNA, 14 nt, Human
auguaccuccccug

SEQ ID NO: 2895928 - RNA, 16 nt, Human
auguaccuccccugcc

SEQ ID NO: 2895929 - RNA, 17 nt, Human
auguaccuccccugccu

SEQ ID NO: 2895930 - RNA, 18 nt, Human
auguaccuccccugccuu

SEQ ID NO: 2895931 - RNA, 19 nt, Human
auguaccuccccugccuug

SEQ ID NO: 2895932 - RNA, 22 nt, Human
auguaccuccccugccuugcug

SEQ ID NO: 2895933 - RNA, 23 nt, Human
auguaccuccccugccuugcugu

SEQ ID NO: 2895934 - RNA, 13 nt, Human
uuugaccuuuuau

SEQ ID NO: 2895935 - RNA, 20 nt, Human
uuugacauugcguuugaccu

SEQ ID NO: 2895936 - RNA, 17 nt, Human
uuugacauuguauguau

SEQ ID NO: 2895937 - RNA, 22 nt, Human
uuugacauuguauguaucuauu

SEQ ID NO: 2895938 - RNA, 14 nt, Human
uuugacauuuaauu

SEQ ID NO: 2895939 - RNA, 16 nt, Human
uuugacauuuaauuua

SEQ ID NO: 2895940 - RNA, 18 nt, Human
uuugaccucacagugacc

SEQ ID NO: 2895941 - RNA, 10 nt, Human
uuugaccucc

SEQ ID NO: 2895942 - RNA, 17 nt, Human
uuugaccuccucccugu

SEQ ID NO: 2895943 - RNA, 19 nt, Human
auguaguauaaagaaaagu

SEQ ID NO: 2895944 - RNA, 18 nt, Human
uuugacaguuauuuugau

SEQ ID NO: 2895945 - RNA, 19 nt, Human
uuugacaucagccagcugc

SEQ ID NO: 2895946 - RNA, 19 nt, Human
uuugacaguguugaaaaug

SEQ ID NO: 2895947 - RNA, 18 nt, Human
uuugacaguguugaaaau

SEQ ID NO: 2895948 - RNA, 17 nt, Human
auguaguauaaagaaaa

SEQ ID NO: 2895949 - RNA, 16 nt, Human
auguaguauaaagaaa

SEQ ID NO: 2895950 - RNA, 18 nt, Human
auguaguaauugacaugu

SEQ ID NO: 2895951 - RNA, 17 nt, Human
auguaguaauugacaug

SEQ ID NO: 2895952 - RNA, 16 nt, Human
auguaguaauugacau

SEQ ID NO: 2895953 - RNA, 13 nt, Human
auguaguaauuga

SEQ ID NO: 2895954 - RNA, 23 nt, Human
auguaggagcugccuuggcucag

SEQ ID NO: 2895955 - RNA, 18 nt, Human
auguagcuuuucaccuuu

SEQ ID NO: 2895956 - RNA, 16 nt, Human
auguaggaaaaaaaua

SEQ ID NO: 2895957 - RNA, 17 nt, Human
auguaggaaaaaaauag

SEQ ID NO: 2895958 - RNA, 21 nt, Human
auguaggaaaaaaauagucua

SEQ ID NO: 2895959 - RNA, 13 nt, Human
auguagcguguuu

SEQ ID NO: 2895960 - RNA, 16 nt, Human
auguagcguguuuaca

SEQ ID NO: 2895961 - RNA, 21 nt, Human
auguagcguguuuacaugugu

SEQ ID NO: 2895962 - RNA, 22 nt, Human
auguagcguguuuacaugugua

SEQ ID NO: 2895963 - RNA, 22 nt, Human
auguagcucugcaucuccuguc

SEQ ID NO: 2895964 - RNA, 20 nt, Human
auguagauuuguacaggagu

SEQ ID NO: 2895965 - RNA, 19 nt, Human
auguagauuaaggugaugu

SEQ ID NO: 2895966 - RNA, 22 nt, Human
auguagauuaaggugaugugau

SEQ ID NO: 2895967 - RNA, 18 nt, Human
auguagcccccuggccuc

SEQ ID NO: 2895968 - RNA, 19 nt, Human
auguagcccccuggccucu

SEQ ID NO: 2895969 - RNA, 21 nt, Human
auguagcccccuggccucugu

SEQ ID NO: 2895970 - RNA, 23 nt, Human
auguagcccccuggccucugugc

SEQ ID NO: 2895971 - RNA, 18 nt, Human
auguagcauuaugcaauu

SEQ ID NO: 2895972 - RNA, 13 nt, Human
auguagcccaucc

SEQ ID NO: 2895973 - RNA, 16 nt, Human
auguagcccauccuuc

SEQ ID NO: 2895974 - RNA, 20 nt, Human
auguagcccauccuucccuu

SEQ ID NO: 2895975 - RNA, 15 nt, Human
auguagcacauaaac

SEQ ID NO: 2895976 - RNA, 16 nt, Human
auguagcacauaaacu

SEQ ID NO: 2895977 - RNA, 19 nt, Human
auguagcacauaaacuuug

SEQ ID NO: 2895978 - RNA, 14 nt, Human
uuugcuccgaagcu

SEQ ID NO: 2895979 - RNA, 13 nt, Human
uuugccucugccu

SEQ ID NO: 2895980 - RNA, 19 nt, Human
uuugccugccuggugugcc

SEQ ID NO: 2895981 - RNA, 18 nt, Human
uuugccugguuuugucuu

SEQ ID NO: 2895982 - RNA, 20 nt, Human
uuugccucuuuucucugugc

SEQ ID NO: 2895983 - RNA, 22 nt, Human
uuugccuccagaagcacuggga

SEQ ID NO: 2895984 - RNA, 21 nt, Human
uuugccuccuguguacugugu

SEQ ID NO: 2895985 - RNA, 17 nt, Human
uuugcucuugucccacg

SEQ ID NO: 2895986 - RNA, 17 nt, Human
uuugcucuuguuuuuau

SEQ ID NO: 2895987 - RNA, 23 nt, Human
uuugcucuuguuuuuauuaauuu

SEQ ID NO: 2895988 - RNA, 13 nt, Human
uuugcucuuucuu

SEQ ID NO: 2895989 - RNA, 12 nt, Human
uuugcucugcca

SEQ ID NO: 2895990 - RNA, 19 nt, Human
uuugcugauggucuggucu

SEQ ID NO: 2895991 - RNA, 21 nt, Human
uuugcugauuuccccucuucc

SEQ ID NO: 2895992 - RNA, 10 nt, Human
uuugcugcca

SEQ ID NO: 2895993 - RNA, 19 nt, Human
uuugauguuuguggccuca

SEQ ID NO: 2895994 - RNA, 17 nt, Human
uuugauguuuguggccu

SEQ ID NO: 2895995 - RNA, 20 nt, Human
uuugauucauaguaacuucu

SEQ ID NO: 2895996 - RNA, 15 nt, Human
uuugauucauaguaa

SEQ ID NO: 2895997 - RNA, 22 nt, Human
uuugcaaaguauuguaaauuau

SEQ ID NO: 2895998 - RNA, 17 nt, Human
uuugcaaauauaaacau

SEQ ID NO: 2895999 - RNA, 13 nt, Human
uuugcaacauuua

SEQ ID NO: 2896000 - RNA, 12 nt, Human
uuugauucuccu

SEQ ID NO: 2896001 - RNA, 21 nt, Human
uuugacgucacugauauuuuu

SEQ ID NO: 2896002 - RNA, 19 nt, Human
uuugaccuuuuauguagua

SEQ ID NO: 2896003 - RNA, 21 nt, Human
uuugacuagggauucaggcug

SEQ ID NO: 2896004 - RNA, 16 nt, Human
uuugacuauucuguau

SEQ ID NO: 2896005 - RNA, 19 nt, Human
uuugacuagaugauggaug

SEQ ID NO: 2896006 - RNA, 15 nt, Human
uuugaugcuguuuga

SEQ ID NO: 2896007 - RNA, 19 nt, Human
uuugacugaagaugcagcu

SEQ ID NO: 2896008 - RNA, 15 nt, Human
uuugaugucaugugu

SEQ ID NO: 2896009 - RNA, 16 nt, Human
uuugaugucauguguu

SEQ ID NO: 2896010 - RNA, 18 nt, Human
uuugaugucauguguucc

SEQ ID NO: 2896011 - RNA, 14 nt, Human
uuugaugugacaau

SEQ ID NO: 2896012 - RNA, 19 nt, Human
uuugaugugacaauaauau

SEQ ID NO: 2896013 - RNA, 19 nt, Human
augguuccccuguucacuc

SEQ ID NO: 2896014 - RNA, 20 nt, Human
augguuccccuguucacucu

SEQ ID NO: 2896015 - RNA, 13 nt, Human
augguucugugcc

SEQ ID NO: 2896016 - RNA, 15 nt, Human
augguugccuuaaag

SEQ ID NO: 2896017 - RNA, 17 nt, Human
augguugccuuaaagaa

SEQ ID NO: 2896018 - RNA, 18 nt, Human
augguugccuuaaagaaa

SEQ ID NO: 2896019 - RNA, 15 nt, Human
augguuucuugcaag

SEQ ID NO: 2896020 - RNA, 23 nt, Human
augguugguaacacaaauuuuca

SEQ ID NO: 2896021 - RNA, 19 nt, Human
augguuuauuuuguauugu

SEQ ID NO: 2896022 - RNA, 21 nt, Human
augguuuauuuuguauugugg

SEQ ID NO: 2896023 - RNA, 22 nt, Human
augguuuauuuuguauuguggu

SEQ ID NO: 2896024 - RNA, 15 nt, Human
augguuuguccugau

SEQ ID NO: 2896025 - RNA, 22 nt, Human
augguuugacucccgaacauca

SEQ ID NO: 2896026 - RNA, 16 nt, Human
augguuuuuaaauuuu

SEQ ID NO: 2896027 - RNA, 18 nt, Human
augguuuuuaaauuuugu

SEQ ID NO: 2896028 - RNA, 21 nt, Human
augguuuuuaaauuuuguaau

SEQ ID NO: 2896029 - RNA, 11 nt, Human
auguaaaaaag

SEQ ID NO: 2896030 - RNA, 13 nt, Human
auguaaaaaagaa

SEQ ID NO: 2896031 - RNA, 19 nt, Human
auguaaaaaagaaaaacac

SEQ ID NO: 2896032 - RNA, 12 nt, Human
auguaaauauuc

SEQ ID NO: 2896033 - RNA, 15 nt, Human
auguaaauauucuau

SEQ ID NO: 2896034 - RNA, 18 nt, Human
auguaaaguauguaaaca

SEQ ID NO: 2896035 - RNA, 13 nt, Human
auguaaauacugu

SEQ ID NO: 2896036 - RNA, 12 nt, Human
auguaaauagug

SEQ ID NO: 2896037 - RNA, 17 nt, Human
auguaaauagugcagaa

SEQ ID NO: 2896038 - RNA, 20 nt, Human
auguaaaggagucaaaacua

SEQ ID NO: 2896039 - RNA, 13 nt, Human
auguaaaguaugu

SEQ ID NO: 2896040 - RNA, 17 nt, Human
auguaaaguauguaaac

SEQ ID NO: 2896041 - RNA, 14 nt, Human
auguacauuuggaa

SEQ ID NO: 2896042 - RNA, 16 nt, Human
auguacauuuggaacu

SEQ ID NO: 2896043 - RNA, 19 nt, Human
auguaccauaugaucuguu

SEQ ID NO: 2896044 - RNA, 19 nt, Human
auguaaaagaacuuacuga

SEQ ID NO: 2896045 - RNA, 22 nt, Human
auguaaaagaacuuacugauua

SEQ ID NO: 2896046 - RNA, 23 nt, Human
auguaaaagaacuuacugauuau

SEQ ID NO: 2896047 - RNA, 21 nt, Human
auguaaaagguauuaaauuga

SEQ ID NO: 2896048 - RNA, 13 nt, Human
auguaaaauguuu

SEQ ID NO: 2896049 - RNA, 16 nt, Human
auguaaaauguugaau

SEQ ID NO: 2896050 - RNA, 17 nt, Human
auguaaaauguugaaua

SEQ ID NO: 2896051 - RNA, 12 nt, Human
auguaaaaugau

SEQ ID NO: 2896052 - RNA, 13 nt, Human
auguaaaaugauu

SEQ ID NO: 2896053 - RNA, 18 nt, Human
auguaaacauaccaacau

SEQ ID NO: 2896054 - RNA, 20 nt, Human
auguaaacauaccaacaugu

SEQ ID NO: 2896055 - RNA, 12 nt, Human
auguaaacauuu

SEQ ID NO: 2896056 - RNA, 11 nt, Human
auguaaacugc

SEQ ID NO: 2896057 - RNA, 13 nt, Human
auguaaacugcca

SEQ ID NO: 2896058 - RNA, 14 nt, Human
auguaaacugccau

SEQ ID NO: 2896059 - RNA, 15 nt, Human
auguaaacugccaua

SEQ ID NO: 2896060 - RNA, 14 nt, Human
auguaaacaggaga

SEQ ID NO: 2896061 - RNA, 14 nt, Human
auguaaagaaaugu

SEQ ID NO: 2896062 - RNA, 16 nt, Human
auguaaagaaaugucu

SEQ ID NO: 2896063 - RNA, 17 nt, Human
auguaaagaaaugucuu

SEQ ID NO: 2896064 - RNA, 17 nt, Human
augguggcuggguugga

SEQ ID NO: 2896065 - RNA, 15 nt, Human
augguggcuucagcu

SEQ ID NO: 2896066 - RNA, 17 nt, Human
augguggcuucagcucc

SEQ ID NO: 2896067 - RNA, 18 nt, Human
augguggcuucagcucca

SEQ ID NO: 2896068 - RNA, 22 nt, Human
augguggcuucagcuccagccc

SEQ ID NO: 2896069 - RNA, 22 nt, Human
augguggcuucuuuucuuugua

SEQ ID NO: 2896070 - RNA, 23 nt, Human
augguggcuucuuuucuuuguau

SEQ ID NO: 2896071 - RNA, 14 nt, Human
auggugggcuucag

SEQ ID NO: 2896072 - RNA, 16 nt, Human
auggugggcuucaggg

SEQ ID NO: 2896073 - RNA, 17 nt, Human
auggugggcuucagggc

SEQ ID NO: 2896074 - RNA, 23 nt, Human
auggugggcuucagggcaggugg

SEQ ID NO: 2896075 - RNA, 15 nt, Human
augguggcuggguug

SEQ ID NO: 2896076 - RNA, 13 nt, Human
augguggcugggu

SEQ ID NO: 2896077 - RNA, 12 nt, Human
augguggcuggg

SEQ ID NO: 2896078 - RNA, 19 nt, Human
augguggcaugcaccugca

SEQ ID NO: 2896079 - RNA, 20 nt, Human
auggugcuacgccugcaugu

SEQ ID NO: 2896080 - RNA, 15 nt, Human
auggugcucaccaug

SEQ ID NO: 2896081 - RNA, 22 nt, Human
auggugcucaccaugcuuccag

SEQ ID NO: 2896082 - RNA, 16 nt, Human
augguggacccagcgg

SEQ ID NO: 2896083 - RNA, 16 nt, Human
auggugcuuaaguucc

SEQ ID NO: 2896084 - RNA, 17 nt, Human
auggugcuuaaguucca

SEQ ID NO: 2896085 - RNA, 19 nt, Human
auggugcuuaaguuccagc

SEQ ID NO: 2896086 - RNA, 14 nt, Human
augguuaugaaaga

SEQ ID NO: 2896087 - RNA, 15 nt, Human
augguuaugaaagaa

SEQ ID NO: 2896088 - RNA, 16 nt, Human
augguuaugaaagaau

SEQ ID NO: 2896089 - RNA, 18 nt, Human
augguuaugaaagaauau

SEQ ID NO: 2896090 - RNA, 19 nt, Human
augguuaugaaagaauaua

SEQ ID NO: 2896091 - RNA, 20 nt, Human
augguuaugaaagaauauau

SEQ ID NO: 2896092 - RNA, 18 nt, Human
augguuaagaguccaaga

SEQ ID NO: 2896093 - RNA, 23 nt, Human
augguuaagaguccaagaaucca

SEQ ID NO: 2896094 - RNA, 17 nt, Human
augguuacaaacuacag

SEQ ID NO: 2896095 - RNA, 17 nt, Human
augguguuuuucuugua

SEQ ID NO: 2896096 - RNA, 18 nt, Human
augguguuuuucuuguaa

SEQ ID NO: 2896097 - RNA, 19 nt, Human
augguguuuuucuuguaaa

SEQ ID NO: 2896098 - RNA, 22 nt, Human
augguguuuuucuuguaaaugu

SEQ ID NO: 2896099 - RNA, 20 nt, Human
augguguaauaagacauaac

SEQ ID NO: 2896100 - RNA, 22 nt, Human
augguguaauaagacauaacgu

SEQ ID NO: 2896101 - RNA, 12 nt, Human
augguguaauaa

SEQ ID NO: 2896102 - RNA, 14 nt, Human
augguguaauaaga

SEQ ID NO: 2896103 - RNA, 16 nt, Human
augguguaauaagaca

SEQ ID NO: 2896104 - RNA, 18 nt, Human
augguguaauaagacaua

SEQ ID NO: 2896105 - RNA, 23 nt, Human
augguguggacugaaugggauca

SEQ ID NO: 2896106 - RNA, 14 nt, Human
augguguguuacac

SEQ ID NO: 2896107 - RNA, 22 nt, Human
auggugugaaagucagaugccc

SEQ ID NO: 2896108 - RNA, 18 nt, Human
auggugugaaagucagau

SEQ ID NO: 2896109 - RNA, 14 nt, Human
augguguuacugca

SEQ ID NO: 2896110 - RNA, 18 nt, Human
augguguuacugcaguug

SEQ ID NO: 2896111 - RNA, 16 nt, Human
auggugaugaaaugua

SEQ ID NO: 2896112 - RNA, 17 nt, Human
auggugaugaaauguaa

SEQ ID NO: 2896113 - RNA, 15 nt, Human
augggugauauccug

SEQ ID NO: 2896114 - RNA, 16 nt, Human
augggugcaaggaaaa

SEQ ID NO: 2896115 - RNA, 20 nt, Human
augggugcaaggaaaauuag

SEQ ID NO: 2896116 - RNA, 14 nt, Human
auggugaugaaaug

SEQ ID NO: 2896117 - RNA, 23 nt, Human
uuucuccccaaugagacuugccu

SEQ ID NO: 2896118 - RNA, 13 nt, Human
uuucucccccugg

SEQ ID NO: 2896119 - RNA, 15 nt, Human
uuucucccccugggc

SEQ ID NO: 2896120 - RNA, 12 nt, Human
uuucuccccgcu

SEQ ID NO: 2896121 - RNA, 14 nt, Human
uuucucccccuggg

SEQ ID NO: 2896122 - RNA, 17 nt, Human
augggauacaaccuccc

SEQ ID NO: 2896123 - RNA, 21 nt, Human
augggauacaaccucccucuu

SEQ ID NO: 2896124 - RNA, 15 nt, Human
augggaucaugaaag

SEQ ID NO: 2896125 - RNA, 21 nt, Human
augggauguaugaauacagca

SEQ ID NO: 2896126 - RNA, 23 nt, Human
augggauguaugaauacagcagc

SEQ ID NO: 2896127 - RNA, 13 nt, Human
augggaucuuucu

SEQ ID NO: 2896128 - RNA, 14 nt, Human
uuucugcagaaaca

SEQ ID NO: 2896129 - RNA, 14 nt, Human
uuucugcaaaauag

SEQ ID NO: 2896130 - RNA, 14 nt, Human
uuucugcaaacaaa

SEQ ID NO: 2896131 - RNA, 19 nt, Human
uuucugcaaacaaacaccu

SEQ ID NO: 2896132 - RNA, 20 nt, Human
uuucugcaaacaaacaccuu

SEQ ID NO: 2896133 - RNA, 15 nt, Human
uuucugauguugccu

SEQ ID NO: 2896134 - RNA, 16 nt, Human
uuucugauguugccuu

SEQ ID NO: 2896135 - RNA, 14 nt, Human
uuucugauuagcuu

SEQ ID NO: 2896136 - RNA, 16 nt, Human
uuucugauuagcuuug

SEQ ID NO: 2896137 - RNA, 17 nt, Human
uuucugauuagcuuugu

SEQ ID NO: 2896138 - RNA, 18 nt, Human
uuucugauuagcuuugug

SEQ ID NO: 2896139 - RNA, 19 nt, Human
uuucugauuagcuuugugu

SEQ ID NO: 2896140 - RNA, 20 nt, Human
uuucugauuagcuuuguguu

SEQ ID NO: 2896141 - RNA, 15 nt, Human
uuucugguucuaaca

SEQ ID NO: 2896142 - RNA, 15 nt, Human
uuucuguaaauacca

SEQ ID NO: 2896143 - RNA, 13 nt, Human
uuucuguaccauu

SEQ ID NO: 2896144 - RNA, 11 nt, Human
uuucuguacuu

SEQ ID NO: 2896145 - RNA, 19 nt, Human
uuucuguagucauuuacua

SEQ ID NO: 2896146 - RNA, 24 nt, Human
uuucuguagucauuuacuaaacau

SEQ ID NO: 2896147 - RNA, 17 nt, Human
uuucuguauauacuuuu

SEQ ID NO: 2896148 - RNA, 15 nt, Human
uuucugucaagaaga

SEQ ID NO: 2896149 - RNA, 14 nt, Human
uuucugucagaaug

SEQ ID NO: 2896150 - RNA, 15 nt, Human
uuucugucagaaugc

SEQ ID NO: 2896151 - RNA, 16 nt, Human
uuucugucagaaugcu

SEQ ID NO: 2896152 - RNA, 17 nt, Human
uuucugucagaugagaa

SEQ ID NO: 2896153 - RNA, 19 nt, Human
uuucugucagaugagaaca

SEQ ID NO: 2896154 - RNA, 20 nt, Human
uuucugucagaugagaacaa

SEQ ID NO: 2896155 - RNA, 22 nt, Human
uuucugucagaugagaacaaag

SEQ ID NO: 2896156 - RNA, 23 nt, Human
uuucugucagaugagaacaaagc

SEQ ID NO: 2896157 - RNA, 13 nt, Human
uuucugucauuca

SEQ ID NO: 2896158 - RNA, 23 nt, Human
uuucugggcaccggggccucgga

SEQ ID NO: 2896159 - RNA, 22 nt, Human
uuucuggggaaagacacugccu

SEQ ID NO: 2896160 - RNA, 15 nt, Human
uuucuggguccugaa

SEQ ID NO: 2896161 - RNA, 15 nt, Human
uuucugggucuuuug

SEQ ID NO: 2896162 - RNA, 21 nt, Human
uuucuggggaaagacacugcc

SEQ ID NO: 2896163 - RNA, 15 nt, Human
uuucuggggaaagac

SEQ ID NO: 2896164 - RNA, 11 nt, Human
uuucugugugc

SEQ ID NO: 2896165 - RNA, 20 nt, Human
uuucugugugcaccuuacca

SEQ ID NO: 2896166 - RNA, 14 nt, Human
uuucugucuucucu

SEQ ID NO: 2896167 - RNA, 13 nt, Human
uuucugugcccua

SEQ ID NO: 2896168 - RNA, 18 nt, Human
uuucugugcccuacucau

SEQ ID NO: 2896169 - RNA, 15 nt, Human
uuucugucccuucug

SEQ ID NO: 2896170 - RNA, 22 nt, Human
uuucugugugcaccuuaccaac

SEQ ID NO: 2896171 - RNA, 15 nt, Human
uuucuuucagauuuu

SEQ ID NO: 2896172 - RNA, 12 nt, Human
uuucuuucuagu

SEQ ID NO: 2896173 - RNA, 13 nt, Human
uuucuuucuagug

SEQ ID NO: 2896174 - RNA, 16 nt, Human
uuucuuugaaugcuuu

SEQ ID NO: 2896175 - RNA, 22 nt, Human
uuucuuugaaugcuuuuugaau

SEQ ID NO: 2896176 - RNA, 14 nt, Human
uuucuuugcaaagu

SEQ ID NO: 2896177 - RNA, 15 nt, Human
uuucuuugcaaagua

SEQ ID NO: 2896178 - RNA, 13 nt, Human
uuugaaaaaguua

SEQ ID NO: 2896179 - RNA, 13 nt, Human
uuugaaaugaaau

SEQ ID NO: 2896180 - RNA, 14 nt, Human
uuugaaaugaaauu

SEQ ID NO: 2896181 - RNA, 15 nt, Human
uuugaaaugaaauuu

SEQ ID NO: 2896182 - RNA, 16 nt, Human
uuugaaaugaaauuua

SEQ ID NO: 2896183 - RNA, 17 nt, Human
uuugaaaugaaauuuaa

SEQ ID NO: 2896184 - RNA, 22 nt, Human
uuugaaaugaaauuuaaacauu

SEQ ID NO: 2896185 - RNA, 20 nt, Human
uuugaaaugaggucuguuua

SEQ ID NO: 2896186 - RNA, 21 nt, Human
uuugaaaugaggucuguuuaa

SEQ ID NO: 2896187 - RNA, 17 nt, Human
uuucuuuuuuaaaauca

SEQ ID NO: 2896188 - RNA, 16 nt, Human
uuugaaaaaaacuuca

SEQ ID NO: 2896189 - RNA, 14 nt, Human
uuugaaaaaagcuc

SEQ ID NO: 2896190 - RNA, 15 nt, Human
uuugaaaaaagcuca

SEQ ID NO: 2896191 - RNA, 21 nt, Human
uuugaaaaaagcucauuucau

SEQ ID NO: 2896192 - RNA, 20 nt, Human
uuucuuuuuaaguaaugugg

SEQ ID NO: 2896193 - RNA, 22 nt, Human
uuucuuuuuaaguaauguggaa

SEQ ID NO: 2896194 - RNA, 12 nt, Human
uuucuuuuuaca

SEQ ID NO: 2896195 - RNA, 13 nt, Human
uuucuuuuuacau

SEQ ID NO: 2896196 - RNA, 14 nt, Human
uuucuuuuuacaua

SEQ ID NO: 2896197 - RNA, 17 nt, Human
uuucuuuguaucauuca

SEQ ID NO: 2896198 - RNA, 19 nt, Human
uuucuuuuguaauaaacua

SEQ ID NO: 2896199 - RNA, 14 nt, Human
uuucuuuuguuacu

SEQ ID NO: 2896200 - RNA, 16 nt, Human
uuucuuuuguuacugu

SEQ ID NO: 2896201 - RNA, 17 nt, Human
uuucuuuuguuacuguu

SEQ ID NO: 2896202 - RNA, 20 nt, Human
uuucuuuuguuacuguucuu

SEQ ID NO: 2896203 - RNA, 24 nt, Human
uuucuuuuguuacuguucuugcug

SEQ ID NO: 2896204 - RNA, 18 nt, Human
augggccuccugugugug

SEQ ID NO: 2896205 - RNA, 13 nt, Human
augggccuggcau

SEQ ID NO: 2896206 - RNA, 20 nt, Human
augggccuggccaccucucu

SEQ ID NO: 2896207 - RNA, 22 nt, Human
uuugaaauuaugugacauuuua

SEQ ID NO: 2896208 - RNA, 23 nt, Human
uuugaaaugugguuuuccugaaa

SEQ ID NO: 2896209 - RNA, 17 nt, Human
uuugaaauuaugugaca

SEQ ID NO: 2896210 - RNA, 15 nt, Human
uuugaaauuauguga

SEQ ID NO: 2896211 - RNA, 17 nt, Human
auggggauaaaaugacu

SEQ ID NO: 2896212 - RNA, 22 nt, Human
auggggauaaaaugacuacuua

SEQ ID NO: 2896213 - RNA, 21 nt, Human
augggcucugacagaaagcag

SEQ ID NO: 2896214 - RNA, 14 nt, Human
augggcucuucacu

SEQ ID NO: 2896215 - RNA, 14 nt, Human
augggcucuuccaa

SEQ ID NO: 2896216 - RNA, 15 nt, Human
augggcucuuccaac

SEQ ID NO: 2896217 - RNA, 18 nt, Human
augggcguacgcuggugc

SEQ ID NO: 2896218 - RNA, 20 nt, Human
auggggcccuaauucagcca

SEQ ID NO: 2896219 - RNA, 11 nt, Human
augggggaaag

SEQ ID NO: 2896220 - RNA, 16 nt, Human
augggggaaagcacag

SEQ ID NO: 2896221 - RNA, 17 nt, Human
augggggcacugaggac

SEQ ID NO: 2896222 - RNA, 22 nt, Human
augggggaaagcacaggugggc

SEQ ID NO: 2896223 - RNA, 19 nt, Human
auggggugggguagggcug

SEQ ID NO: 2896224 - RNA, 20 nt, Human
uuuaaauacgcacuacaugu

SEQ ID NO: 2896225 - RNA, 12 nt, Human
uuuaaauauaau

SEQ ID NO: 2896226 - RNA, 16 nt, Human
uuuaaauaauuuaacu

SEQ ID NO: 2896227 - RNA, 21 nt, Human
uuuaaauaauuuaacuacccu

SEQ ID NO: 2896228 - RNA, 13 nt, Human
uuuaaauauaauu

SEQ ID NO: 2896229 - RNA, 15 nt, Human
uuuaaauauaauucu

SEQ ID NO: 2896230 - RNA, 16 nt, Human
uuuaaauauaauucug

SEQ ID NO: 2896231 - RNA, 18 nt, Human
uuuaaauauaauucugua

SEQ ID NO: 2896232 - RNA, 19 nt, Human
uuuaagugaaagugaggaa

SEQ ID NO: 2896233 - RNA, 20 nt, Human
uuuaaguauuuauauauuua

SEQ ID NO: 2896234 - RNA, 20 nt, Human
uuuaagucaguauggucuaa

SEQ ID NO: 2896235 - RNA, 15 nt, Human
uuuaaguauuuauau

SEQ ID NO: 2896236 - RNA, 14 nt, Human
uuuaaguauuuaua

SEQ ID NO: 2896237 - RNA, 13 nt, Human
uuuaaguauuuau

SEQ ID NO: 2896238 - RNA, 21 nt, Human
uuuaaauauaauucuguaaau

SEQ ID NO: 2896239 - RNA, 14 nt, Human
uuuaaguaaugugg

SEQ ID NO: 2896240 - RNA, 16 nt, Human
uuuaaguaauguggaa

SEQ ID NO: 2896241 - RNA, 22 nt, Human
uuuaaguaauguggaagaaaau

SEQ ID NO: 2896242 - RNA, 23 nt, Human
uuuaaguaauguggaagaaaaug

SEQ ID NO: 2896243 - RNA, 20 nt, Human
uuuaaguacuacacauuuuu

SEQ ID NO: 2896244 - RNA, 21 nt, Human
uuuaaguacuacacauuuuua

SEQ ID NO: 2896245 - RNA, 12 nt, Human
uuuaaguauuua

SEQ ID NO: 2896246 - RNA, 16 nt, Human
uuuaagguuuuuacug

SEQ ID NO: 2896247 - RNA, 18 nt, Human
uuuaaguauuuagguuuu

SEQ ID NO: 2896248 - RNA, 13 nt, Human
uuuaaguauuuag

SEQ ID NO: 2896249 - RNA, 13 nt, Human
uuuaauuaaauaa

SEQ ID NO: 2896250 - RNA, 15 nt, Human
uuuaauguuuuaaau

SEQ ID NO: 2896251 - RNA, 18 nt, Human
uuuaauguuuuaaaugua

SEQ ID NO: 2896252 - RNA, 19 nt, Human
uuuaauguuuuaaauguac

SEQ ID NO: 2896253 - RNA, 18 nt, Human
uuuaauuaaaaacuagua

SEQ ID NO: 2896254 - RNA, 20 nt, Human
uuuaauuaaaaacuaguagu

SEQ ID NO: 2896255 - RNA, 21 nt, Human
uuuaauuaaaaacuaguaguu

SEQ ID NO: 2896256 - RNA, 18 nt, Human
uuuaagugcguguguaga

SEQ ID NO: 2896257 - RNA, 20 nt, Human
uuuaagugcguguguagagu

SEQ ID NO: 2896258 - RNA, 13 nt, Human
uuuaaugugaacu

SEQ ID NO: 2896259 - RNA, 15 nt, Human
uuuaaugugaacuug

SEQ ID NO: 2896260 - RNA, 16 nt, Human
uuuaaugugaacuugu

SEQ ID NO: 2896261 - RNA, 17 nt, Human
uuuaaugugaacuugua

SEQ ID NO: 2896262 - RNA, 19 nt, Human
uuuaaugugaacuuguagc

SEQ ID NO: 2896263 - RNA, 20 nt, Human
uuuaaugugaacuuguagcu

SEQ ID NO: 2896264 - RNA, 21 nt, Human
uuuaaugugaacuuguagcug

SEQ ID NO: 2896265 - RNA, 13 nt, Human
uuuaaugugauga

SEQ ID NO: 2896266 - RNA, 21 nt, Human
uuuaaugugaugauguaauug

SEQ ID NO: 2896267 - RNA, 22 nt, Human
uuuaaugugaugauguaauuga

SEQ ID NO: 2896268 - RNA, 15 nt, Human
uuuaauguucuguga

SEQ ID NO: 2896269 - RNA, 13 nt, Human
uuuaauugucaug

SEQ ID NO: 2896270 - RNA, 14 nt, Human
uuuaauugucaugg

SEQ ID NO: 2896271 - RNA, 21 nt, Human
uuuaauugucaugguuacaaa

SEQ ID NO: 2896272 - RNA, 11 nt, Human
uuuaauuauua

SEQ ID NO: 2896273 - RNA, 18 nt, Human
uuuaauuauuaacuacau

SEQ ID NO: 2896274 - RNA, 19 nt, Human
uuuaauuauuaacuacauu

SEQ ID NO: 2896275 - RNA, 13 nt, Human
augcagcgugaag

SEQ ID NO: 2896276 - RNA, 19 nt, Human
augcaggauuuguucucug

SEQ ID NO: 2896277 - RNA, 21 nt, Human
augcaggcacuuauuguaaau

SEQ ID NO: 2896278 - RNA, 22 nt, Human
augcaggcacuuauuguaaauu

SEQ ID NO: 2896279 - RNA, 12 nt, Human
augcaggcccuu

SEQ ID NO: 2896280 - RNA, 22 nt, Human
augcaggcccuuugaagccuca

SEQ ID NO: 2896281 - RNA, 22 nt, Human
augcagcccaugcccaccugcc

SEQ ID NO: 2896282 - RNA, 13 nt, Human
augcagcucaacu

SEQ ID NO: 2896283 - RNA, 23 nt, Human
augcagcucaacuuucuguugga

SEQ ID NO: 2896284 - RNA, 17 nt, Human
augcagcaucuaaguaa

SEQ ID NO: 2896285 - RNA, 16 nt, Human
augcagcaaggcccug

SEQ ID NO: 2896286 - RNA, 19 nt, Human
augcagcaaggcccugcug

SEQ ID NO: 2896287 - RNA, 21 nt, Human
augcagcaaggcccugcugcc

SEQ ID NO: 2896288 - RNA, 23 nt, Human
augcagcccaugcccaccugccc

SEQ ID NO: 2896289 - RNA, 14 nt, Human
augcagcccauuuc

SEQ ID NO: 2896290 - RNA, 16 nt, Human
augcagcccauuucuc

SEQ ID NO: 2896291 - RNA, 20 nt, Human
augcagcccauuucuccaga

SEQ ID NO: 2896292 - RNA, 21 nt, Human
augcagcccauuucuccagaa

SEQ ID NO: 2896293 - RNA, 18 nt, Human
augcagccgccuuccuug

SEQ ID NO: 2896294 - RNA, 19 nt, Human
augcagccgccuuccuuga

SEQ ID NO: 2896295 - RNA, 21 nt, Human
augcagcccaugcccaccugc

SEQ ID NO: 2896296 - RNA, 15 nt, Human
augcagcccaugccc

SEQ ID NO: 2896297 - RNA, 12 nt, Human
augcagcauuug

SEQ ID NO: 2896298 - RNA, 14 nt, Human
augcagcauuugau

SEQ ID NO: 2896299 - RNA, 15 nt, Human
augcagcauuugaua

SEQ ID NO: 2896300 - RNA, 16 nt, Human
augcagcauuugauaa

SEQ ID NO: 2896301 - RNA, 19 nt, Human
uuuaauuuuuuugagacag

SEQ ID NO: 2896302 - RNA, 20 nt, Human
uuuaauuucugucagaaugc

SEQ ID NO: 2896303 - RNA, 13 nt, Human
uuuaauuucuuca

SEQ ID NO: 2896304 - RNA, 23 nt, Human
uuuaauuguuguuucuuucuagu

SEQ ID NO: 2896305 - RNA, 24 nt, Human
uuuaauuguuguuucuuucuagug

SEQ ID NO: 2896306 - RNA, 16 nt, Human
uuuaauuguuguuucu

SEQ ID NO: 2896307 - RNA, 18 nt, Human
uuuaauuguuguuucuuu

SEQ ID NO: 2896308 - RNA, 21 nt, Human
uuuaauuguuguuucuuucua

SEQ ID NO: 2896309 - RNA, 22 nt, Human
uuuaauuguuguuucuuucuag

SEQ ID NO: 2896310 - RNA, 16 nt, Human
uuuaauuuaugaguuu

SEQ ID NO: 2896311 - RNA, 14 nt, Human
uuuaauuuauguaa

SEQ ID NO: 2896312 - RNA, 20 nt, Human
uuuaauuuauguaacuugaa

SEQ ID NO: 2896313 - RNA, 16 nt, Human
uuuaauuuaguaaaug

SEQ ID NO: 2896314 - RNA, 18 nt, Human
uuuaauuuaguaaauguu

SEQ ID NO: 2896315 - RNA, 19 nt, Human
uuuaauuuaguaaauguua

SEQ ID NO: 2896316 - RNA, 18 nt, Human
uuuaauuuuuuuuaguau

SEQ ID NO: 2896317 - RNA, 17 nt, Human
uuuaauuuuuuuuagua

SEQ ID NO: 2896318 - RNA, 19 nt, Human
uuuacaaaacuacaugaga

SEQ ID NO: 2896319 - RNA, 21 nt, Human
uuuacaaaagaaauaccuuga

SEQ ID NO: 2896320 - RNA, 20 nt, Human
uuuacaaaagaggagcacuu

SEQ ID NO: 2896321 - RNA, 20 nt, Human
uuuacaacauaaucuaguuu

SEQ ID NO: 2896322 - RNA, 14 nt, Human
augcauuugcauuu

SEQ ID NO: 2896323 - RNA, 23 nt, Human
augcagugguaugaucacggcuc

SEQ ID NO: 2896324 - RNA, 18 nt, Human
augccaaaaaaagacagg

SEQ ID NO: 2896325 - RNA, 17 nt, Human
augccaauauuaaaucu

SEQ ID NO: 2896326 - RNA, 16 nt, Human
augccaauacuaguca

SEQ ID NO: 2896327 - RNA, 23 nt, Human
augccaauacuagucaccccaag

SEQ ID NO: 2896328 - RNA, 12 nt, Human
augcccaaggga

SEQ ID NO: 2896329 - RNA, 15 nt, Human
augcccaagggaaag

SEQ ID NO: 2896330 - RNA, 23 nt, Human
augcccacauuuagucucuuuau

SEQ ID NO: 2896331 - RNA, 14 nt, Human
augccacccuagcc

SEQ ID NO: 2896332 - RNA, 15 nt, Human
augccacccacaucu

SEQ ID NO: 2896333 - RNA, 22 nt, Human
augccaauuagcaauugacugu

SEQ ID NO: 2896334 - RNA, 16 nt, Human
augccaauuauuguua

SEQ ID NO: 2896335 - RNA, 14 nt, Human
augccacacaccuu

SEQ ID NO: 2896336 - RNA, 15 nt, Human
augccacacaccuuu

SEQ ID NO: 2896337 - RNA, 13 nt, Human
augcgucccaaga

SEQ ID NO: 2896338 - RNA, 19 nt, Human
augcgucccaagauguuga

SEQ ID NO: 2896339 - RNA, 21 nt, Human
augcguacguuuccugagaag

SEQ ID NO: 2896340 - RNA, 16 nt, Human
augcguaaacgacacu

SEQ ID NO: 2896341 - RNA, 22 nt, Human
augccucccuaucccucacaca

SEQ ID NO: 2896342 - RNA, 14 nt, Human
augccuccuguggg

SEQ ID NO: 2896343 - RNA, 15 nt, Human
augccuccugugggg

SEQ ID NO: 2896344 - RNA, 11 nt, Human
augcagcccau

SEQ ID NO: 2896345 - RNA, 14 nt, Human
augcccugcuccag

SEQ ID NO: 2896346 - RNA, 14 nt, Human
augcccuggaucca

SEQ ID NO: 2896347 - RNA, 19 nt, Human
augccgauauacucuagau

SEQ ID NO: 2896348 - RNA, 16 nt, Human
augccucagccuccug

SEQ ID NO: 2896349 - RNA, 15 nt, Human
augcccuuaaaucau

SEQ ID NO: 2896350 - RNA, 22 nt, Human
augauccaugaguuugcccugg

SEQ ID NO: 2896351 - RNA, 21 nt, Human
augauccaugaguuugcccug

SEQ ID NO: 2896352 - RNA, 20 nt, Human
augaucaguguuguugcucu

SEQ ID NO: 2896353 - RNA, 14 nt, Human
augauaucccugau

SEQ ID NO: 2896354 - RNA, 12 nt, Human
augauaugcauu

SEQ ID NO: 2896355 - RNA, 17 nt, Human
augauacaaugaacacu

SEQ ID NO: 2896356 - RNA, 22 nt, Human
augauacccugaauuuggccug

SEQ ID NO: 2896357 - RNA, 20 nt, Human
augauaaguuccuuuccuuu

SEQ ID NO: 2896358 - RNA, 21 nt, Human
augauacuaucauacuacuga

SEQ ID NO: 2896359 - RNA, 17 nt, Human
augauaguaagaaaagu

SEQ ID NO: 2896360 - RNA, 14 nt, Human
augauagauuugac

SEQ ID NO: 2896361 - RNA, 17 nt, Human
augauagauuugaccuc

SEQ ID NO: 2896362 - RNA, 18 nt, Human
augauagauuugaccucc

SEQ ID NO: 2896363 - RNA, 20 nt, Human
augauagauuugaccuccuc

SEQ ID NO: 2896364 - RNA, 18 nt, Human
uuguugacaguucugaag

SEQ ID NO: 2896365 - RNA, 21 nt, Human
uuguugacaguucugaagaau

SEQ ID NO: 2896366 - RNA, 17 nt, Human
augauaaguaaaugcua

SEQ ID NO: 2896367 - RNA, 16 nt, Human
uuguugacaaaauuuu

SEQ ID NO: 2896368 - RNA, 13 nt, Human
augauacaaugaa

SEQ ID NO: 2896369 - RNA, 17 nt, Human
augauacaagauuagaa

SEQ ID NO: 2896370 - RNA, 18 nt, Human
uuguugagcuauugcugu

SEQ ID NO: 2896371 - RNA, 15 nt, Human
augauaauagauucu

SEQ ID NO: 2896372 - RNA, 19 nt, Human
augauaauagauucucuug

SEQ ID NO: 2896373 - RNA, 16 nt, Human
uuguuccaaugccaca

SEQ ID NO: 2896374 - RNA, 12 nt, Human
uuguuccagcuc

SEQ ID NO: 2896375 - RNA, 15 nt, Human
uuguucuuuguucuu

SEQ ID NO: 2896376 - RNA, 17 nt, Human
uugguggaaucuuuagc

SEQ ID NO: 2896377 - RNA, 13 nt, Human
uuguucuuuuuau

SEQ ID NO: 2896378 - RNA, 12 nt, Human
uuguugaaauuu

SEQ ID NO: 2896379 - RNA, 18 nt, Human
uuguugaaauuuugcaaa

SEQ ID NO: 2896380 - RNA, 17 nt, Human
uuguugaacagguguuu

SEQ ID NO: 2896381 - RNA, 20 nt, Human
uuggugccuggccuggcaca

SEQ ID NO: 2896382 - RNA, 22 nt, Human
uuggugccuggccuggcacaca

SEQ ID NO: 2896383 - RNA, 12 nt, Human
uuguucauguuu

SEQ ID NO: 2896384 - RNA, 13 nt, Human
uuguucauguuug

SEQ ID NO: 2896385 - RNA, 14 nt, Human
uuguucauguuugg

SEQ ID NO: 2896386 - RNA, 19 nt, Human
uuguucauguuuggugcau

SEQ ID NO: 2896387 - RNA, 19 nt, Human
uuggugcucauuuaaauau

SEQ ID NO: 2896388 - RNA, 14 nt, Human
uuggugcugggaac

SEQ ID NO: 2896389 - RNA, 20 nt, Human
uuguguuaaguauguguaaa

SEQ ID NO: 2896390 - RNA, 18 nt, Human
augauucguguaauuacu

SEQ ID NO: 2896391 - RNA, 23 nt, Human
augauucuaauuuuuaagcaaaa

SEQ ID NO: 2896392 - RNA, 23 nt, Human
augauucuauuuauauguacaug

SEQ ID NO: 2896393 - RNA, 22 nt, Human
augauucuauuuauauguacau

SEQ ID NO: 2896394 - RNA, 23 nt, Human
augcaagauaguuuaucuaacuu

SEQ ID NO: 2896395 - RNA, 18 nt, Human
augcaagagugauugcag

SEQ ID NO: 2896396 - RNA, 20 nt, Human
augcaagagugauugcagcu

SEQ ID NO: 2896397 - RNA, 21 nt, Human
augcaagagugauugcagcuu

SEQ ID NO: 2896398 - RNA, 20 nt, Human
augcaacacgcauggucaac

SEQ ID NO: 2896399 - RNA, 16 nt, Human
augcaaggaaggaaag

SEQ ID NO: 2896400 - RNA, 15 nt, Human
augcaaggaaggaaa

SEQ ID NO: 2896401 - RNA, 14 nt, Human
augcaaggaaggaa

SEQ ID NO: 2896402 - RNA, 13 nt, Human
augcaaggaagga

SEQ ID NO: 2896403 - RNA, 20 nt, Human
augcaccuagcugugcaaga

SEQ ID NO: 2896404 - RNA, 22 nt, Human
augcaccagcccuuagcaggga

SEQ ID NO: 2896405 - RNA, 15 nt, Human
augcaaggaccagga

SEQ ID NO: 2896406 - RNA, 14 nt, Human
augcaaggaccagg

SEQ ID NO: 2896407 - RNA, 20 nt, Human
augcaaggaaggaaagaaag

SEQ ID NO: 2896408 - RNA, 18 nt, Human
augcaaggaaggaaagaa

SEQ ID NO: 2896409 - RNA, 13 nt, Human
uuuaaagagucua

SEQ ID NO: 2896410 - RNA, 15 nt, Human
uuuaaagagucuaga

SEQ ID NO: 2896411 - RNA, 16 nt, Human
uuuaaagagucuagau

SEQ ID NO: 2896412 - RNA, 17 nt, Human
uuuaaagagucuagauu

SEQ ID NO: 2896413 - RNA, 18 nt, Human
uuuaaagagucuagauuc

SEQ ID NO: 2896414 - RNA, 21 nt, Human
uuuaaagagucuagauucaaa

SEQ ID NO: 2896415 - RNA, 23 nt, Human
uuuaaagagucuagauucaaagg

SEQ ID NO: 2896416 - RNA, 23 nt, Human
uuuaaagguggauuuuguuuaaa

SEQ ID NO: 2896417 - RNA, 18 nt, Human
uuuaaaguggcaaucuca

SEQ ID NO: 2896418 - RNA, 18 nt, Human
uuuaaaguguaauaauau

SEQ ID NO: 2896419 - RNA, 19 nt, Human
uuuaaaguguuucuguuau

SEQ ID NO: 2896420 - RNA, 14 nt, Human
uuuaaaguguuuca

SEQ ID NO: 2896421 - RNA, 18 nt, Human
uuuaaaguguuucagcua

SEQ ID NO: 2896422 - RNA, 12 nt, Human
uuuaaauaaacu

SEQ ID NO: 2896423 - RNA, 13 nt, Human
uuuaaauaaacuu

SEQ ID NO: 2896424 - RNA, 14 nt, Human
uuuaaauaaacuuu

SEQ ID NO: 2896425 - RNA, 15 nt, Human
uuuaaauaaacuuuu

SEQ ID NO: 2896426 - RNA, 20 nt, Human
uuuaaauaaacuuuuuuuca

SEQ ID NO: 2896427 - RNA, 21 nt, Human
uuuaaauaaacuuuuuuucaa

SEQ ID NO: 2896428 - RNA, 22 nt, Human
uuuaaauaaacuuuuuuucaau

SEQ ID NO: 2896429 - RNA, 23 nt, Human
uuuaaauaaacuuuuuuucaaug

SEQ ID NO: 2896430 - RNA, 20 nt, Human
uuuaaaguguuucuguuauu

SEQ ID NO: 2896431 - RNA, 23 nt, Human
uuuaaauaaaagaaaaaauaucu

SEQ ID NO: 2896432 - RNA, 17 nt, Human
uuuaaaaauagacacuc

SEQ ID NO: 2896433 - RNA, 11 nt, Human
uuuaaaaaugg

SEQ ID NO: 2896434 - RNA, 11 nt, Human
uuuaaaaaugu

SEQ ID NO: 2896435 - RNA, 12 nt, Human
uuuaaaaauguc

SEQ ID NO: 2896436 - RNA, 13 nt, Human
uuuaaaaaugucu

SEQ ID NO: 2896437 - RNA, 14 nt, Human
uuuaaaaaugucuu

SEQ ID NO: 2896438 - RNA, 17 nt, Human
uuuaaaaaugucuugcu

SEQ ID NO: 2896439 - RNA, 15 nt, Human
uuguuuucugacuaa

SEQ ID NO: 2896440 - RNA, 20 nt, Human
augcaccugcaaucccagcu

SEQ ID NO: 2896441 - RNA, 18 nt, Human
uuguuuucugacuaauua

SEQ ID NO: 2896442 - RNA, 16 nt, Human
uuguuuucugacuaau

SEQ ID NO: 2896443 - RNA, 17 nt, Human
uuguuuucugacuaauu

SEQ ID NO: 2896444 - RNA, 23 nt, Human
uuguuuugauguuuguggccuca

SEQ ID NO: 2896445 - RNA, 22 nt, Human
uuguuuucuuucuuuaaauguu

SEQ ID NO: 2896446 - RNA, 16 nt, Human
uuguuuugcacuuuuu

SEQ ID NO: 2896447 - RNA, 14 nt, Human
uuguuuugcacuuu

SEQ ID NO: 2896448 - RNA, 15 nt, Human
uuguuuugcacuuuu

SEQ ID NO: 2896449 - RNA, 17 nt, Human
auggagaauugcugaag

SEQ ID NO: 2896450 - RNA, 18 nt, Human
auggagacgcauuucggu

SEQ ID NO: 2896451 - RNA, 18 nt, Human
auggagacugucucaaga

SEQ ID NO: 2896452 - RNA, 21 nt, Human
auggagacugguccugugugc

SEQ ID NO: 2896453 - RNA, 19 nt, Human
auggcaccaaagccaccag

SEQ ID NO: 2896454 - RNA, 17 nt, Human
auggcagcagaaaacuu

SEQ ID NO: 2896455 - RNA, 20 nt, Human
auggcacuuagcuaucagaa

SEQ ID NO: 2896456 - RNA, 22 nt, Human
auggcacuuagcuaucagaaga

SEQ ID NO: 2896457 - RNA, 15 nt, Human
auggcacucccucca

SEQ ID NO: 2896458 - RNA, 16 nt, Human
auggcacucccuccag

SEQ ID NO: 2896459 - RNA, 18 nt, Human
auggcacucccuccagca

SEQ ID NO: 2896460 - RNA, 20 nt, Human
auggcacucccuccagcaca

SEQ ID NO: 2896461 - RNA, 21 nt, Human
auggcacucccuccagcacaa

SEQ ID NO: 2896462 - RNA, 23 nt, Human
auggcacucccuccagcacaaac

SEQ ID NO: 2896463 - RNA, 14 nt, Human
auggcagcugccac

SEQ ID NO: 2896464 - RNA, 16 nt, Human
auggcaggauggccug

SEQ ID NO: 2896465 - RNA, 17 nt, Human
auggcaggauggccugg

SEQ ID NO: 2896466 - RNA, 22 nt, Human
auggcaggauggccuggccagg

SEQ ID NO: 2896467 - RNA, 20 nt, Human
auggcaucuucgucuucacu

SEQ ID NO: 2896468 - RNA, 15 nt, Human
auggcaucaccucca

SEQ ID NO: 2896469 - RNA, 20 nt, Human
auggcgugucccucucggaa

SEQ ID NO: 2896470 - RNA, 22 nt, Human
auggcguccguggguugcuaac

SEQ ID NO: 2896471 - RNA, 24 nt, Human
auggcguccguggguugcuaacug

SEQ ID NO: 2896472 - RNA, 21 nt, Human
auggcccuguagccagcaccu

SEQ ID NO: 2896473 - RNA, 11 nt, Human
auggcccuggg

SEQ ID NO: 2896474 - RNA, 11 nt, Human
auggccccucu

SEQ ID NO: 2896475 - RNA, 18 nt, Human
auggccccucugaccugc

SEQ ID NO: 2896476 - RNA, 23 nt, Human
auggccccucugaccugcacugg

SEQ ID NO: 2896477 - RNA, 17 nt, Human
auggcccggaugcugcu

SEQ ID NO: 2896478 - RNA, 18 nt, Human
auggcccggaugcugcuu

SEQ ID NO: 2896479 - RNA, 19 nt, Human
auggcccggaugcugcuuc

SEQ ID NO: 2896480 - RNA, 21 nt, Human
auggcccggaugcugcuuccg

SEQ ID NO: 2896481 - RNA, 14 nt, Human
auggcuauauggca

SEQ ID NO: 2896482 - RNA, 15 nt, Human
auggcuccagaaaug

SEQ ID NO: 2896483 - RNA, 16 nt, Human
auggcuccagaaaugu

SEQ ID NO: 2896484 - RNA, 12 nt, Human
auggcucagagg

SEQ ID NO: 2896485 - RNA, 13 nt, Human
auggcucagaggg

SEQ ID NO: 2896486 - RNA, 15 nt, Human
auggcucagaggggg

SEQ ID NO: 2896487 - RNA, 22 nt, Human
auggcucagagggggacugcug

SEQ ID NO: 2896488 - RNA, 19 nt, Human
auggcuauauggcaagaaa

SEQ ID NO: 2896489 - RNA, 14 nt, Human
auggcuaugcuuaa

SEQ ID NO: 2896490 - RNA, 21 nt, Human
augggagggauggcccuuccu

SEQ ID NO: 2896491 - RNA, 21 nt, Human
augggagcugguuagaaaugc

SEQ ID NO: 2896492 - RNA, 13 nt, Human
augggaggaaaga

SEQ ID NO: 2896493 - RNA, 18 nt, Human
augggaggaaagagagca

SEQ ID NO: 2896494 - RNA, 22 nt, Human
augggagcugguuagaaaugca

SEQ ID NO: 2896495 - RNA, 20 nt, Human
augggagcugguuagaaaug

SEQ ID NO: 2896496 - RNA, 15 nt, Human
augggagaguagaug

SEQ ID NO: 2896497 - RNA, 17 nt, Human
auggcuccagaaauguc

SEQ ID NO: 2896498 - RNA, 17 nt, Human
auggcucccacaggagu

SEQ ID NO: 2896499 - RNA, 23 nt, Human
auggcuccccuuuuucuuccuca

SEQ ID NO: 2896500 - RNA, 13 nt, Human
uuucauuauuagu

SEQ ID NO: 2896501 - RNA, 21 nt, Human
uuucauuauuaguacugcucu

SEQ ID NO: 2896502 - RNA, 12 nt, Human
uuuccaucuuua

SEQ ID NO: 2896503 - RNA, 20 nt, Human
uuuccccugcccccagaccu

SEQ ID NO: 2896504 - RNA, 18 nt, Human
uuuccccuaucauuuauu

SEQ ID NO: 2896505 - RNA, 17 nt, Human
uuuccaugaaguuugaa

SEQ ID NO: 2896506 - RNA, 23 nt, Human
uuuccccccacucuccccacacu

SEQ ID NO: 2896507 - RNA, 19 nt, Human
uuuccccccuuuuuuuccu

SEQ ID NO: 2896508 - RNA, 19 nt, Human
uuuccccccacucucccca

SEQ ID NO: 2896509 - RNA, 16 nt, Human
uuucccccuucuacau

SEQ ID NO: 2896510 - RNA, 18 nt, Human
uuucauuauguaaaaugu

SEQ ID NO: 2896511 - RNA, 20 nt, Human
uuucauuauguaaaauguuu

SEQ ID NO: 2896512 - RNA, 14 nt, Human
uuucauuacaaugg

SEQ ID NO: 2896513 - RNA, 16 nt, Human
uuucauuacaauggaa

SEQ ID NO: 2896514 - RNA, 21 nt, Human
uuucauuacaauggaaacaau

SEQ ID NO: 2896515 - RNA, 14 nt, Human
uuucaaauuucaca

SEQ ID NO: 2896516 - RNA, 23 nt, Human
uuucaacaaauaucuuguguugu

SEQ ID NO: 2896517 - RNA, 20 nt, Human
uuucaaccagauaacauacc

SEQ ID NO: 2896518 - RNA, 14 nt, Human
uuucaaccccaccc

SEQ ID NO: 2896519 - RNA, 19 nt, Human
uuucaaccccacccuguuu

SEQ ID NO: 2896520 - RNA, 21 nt, Human
uuucaaccccacccuguuugg

SEQ ID NO: 2896521 - RNA, 23 nt, Human
uuucaaccccacccuguuuggau

SEQ ID NO: 2896522 - RNA, 13 nt, Human
uuucaaagaugcu

SEQ ID NO: 2896523 - RNA, 14 nt, Human
uuucaaagaugcug

SEQ ID NO: 2896524 - RNA, 19 nt, Human
uuucaaagaugcugugagu

SEQ ID NO: 2896525 - RNA, 17 nt, Human
uuucaaagcuuuuucca

SEQ ID NO: 2896526 - RNA, 14 nt, Human
uuucaaauuuagaa

SEQ ID NO: 2896527 - RNA, 18 nt, Human
uuucaaauuuagaaacua

SEQ ID NO: 2896528 - RNA, 20 nt, Human
uuucaaauuuagaaacuaau

SEQ ID NO: 2896529 - RNA, 21 nt, Human
uuucaaauuuagaaacuaauu

SEQ ID NO: 2896530 - RNA, 23 nt, Human
uuucaaauuuagaaacuaauuga

SEQ ID NO: 2896531 - RNA, 19 nt, Human
uuucaaauuggacuuucaa

SEQ ID NO: 2896532 - RNA, 20 nt, Human
uuucaaauuggacuuucaaa

SEQ ID NO: 2896533 - RNA, 21 nt, Human
uuucaaauuggacuuucaaaa

SEQ ID NO: 2896534 - RNA, 14 nt, Human
uuucaaaugugcug

SEQ ID NO: 2896535 - RNA, 17 nt, Human
auggacuuuauaagcca

SEQ ID NO: 2896536 - RNA, 15 nt, Human
auggacugguuugag

SEQ ID NO: 2896537 - RNA, 17 nt, Human
auggacugguuugagau

SEQ ID NO: 2896538 - RNA, 18 nt, Human
auggacuuauuucuucaa

SEQ ID NO: 2896539 - RNA, 19 nt, Human
auggacuuauuucuucaaa

SEQ ID NO: 2896540 - RNA, 20 nt, Human
auggacuuauuucuucaaau

SEQ ID NO: 2896541 - RNA, 15 nt, Human
auggacucugcacau

SEQ ID NO: 2896542 - RNA, 15 nt, Human
auggacuuuggaagc

SEQ ID NO: 2896543 - RNA, 17 nt, Human
auggacuuuggaagcag

SEQ ID NO: 2896544 - RNA, 18 nt, Human
auggacuuuggaagcagg

SEQ ID NO: 2896545 - RNA, 11 nt, Human
auggacacucc

SEQ ID NO: 2896546 - RNA, 13 nt, Human
auggacacuccag

SEQ ID NO: 2896547 - RNA, 15 nt, Human
auggacacuccagug

SEQ ID NO: 2896548 - RNA, 17 nt, Human
auggacacuccagugcc

SEQ ID NO: 2896549 - RNA, 19 nt, Human
auggacacuccagugccag

SEQ ID NO: 2896550 - RNA, 14 nt, Human
auggacacuuuuca

SEQ ID NO: 2896551 - RNA, 16 nt, Human
auggacacuuuucacc

SEQ ID NO: 2896552 - RNA, 20 nt, Human
auggacaagagguacagggu

SEQ ID NO: 2896553 - RNA, 12 nt, Human
uuuccccuuccu

SEQ ID NO: 2896554 - RNA, 21 nt, Human
uuucaaaauccaaaaagaaau

SEQ ID NO: 2896555 - RNA, 19 nt, Human
uuucaaaauccaaaaagaa

SEQ ID NO: 2896556 - RNA, 12 nt, Human
uuucaaaaugcu

SEQ ID NO: 2896557 - RNA, 15 nt, Human
uuucaaaaugcuuuu

SEQ ID NO: 2896558 - RNA, 13 nt, Human
uuucaaaaugcuu

SEQ ID NO: 2896559 - RNA, 18 nt, Human
uuucaaaauccaaaaaga

SEQ ID NO: 2896560 - RNA, 17 nt, Human
uuucaaaauccaaaaag

SEQ ID NO: 2896561 - RNA, 11 nt, Human
uuucaaaauag

SEQ ID NO: 2896562 - RNA, 19 nt, Human
uuucaaaauagaaaaguua

SEQ ID NO: 2896563 - RNA, 20 nt, Human
uuucaaaauagaaaaguuau

SEQ ID NO: 2896564 - RNA, 21 nt, Human
uuucaaaauagaaaaguuauu

SEQ ID NO: 2896565 - RNA, 16 nt, Human
uuucaaacacaaaugc

SEQ ID NO: 2896566 - RNA, 17 nt, Human
uuucaaacacaaaugca

SEQ ID NO: 2896567 - RNA, 23 nt, Human
uuuauuuuuacaagaaguuuauu

SEQ ID NO: 2896568 - RNA, 15 nt, Human
uuuauuuuucauauu

SEQ ID NO: 2896569 - RNA, 12 nt, Human
uuucaaaagaca

SEQ ID NO: 2896570 - RNA, 13 nt, Human
uuucaaaagacau

SEQ ID NO: 2896571 - RNA, 18 nt, Human
uuucaaaagacauguugu

SEQ ID NO: 2896572 - RNA, 12 nt, Human
uuucaaaagcau

SEQ ID NO: 2896573 - RNA, 23 nt, Human
uuucaaaacacaucuuuccuguc

SEQ ID NO: 2896574 - RNA, 21 nt, Human
uuucaaaaauauaacuuaaaa

SEQ ID NO: 2896575 - RNA, 17 nt, Human
uuucaaaaauauaacuu

SEQ ID NO: 2896576 - RNA, 18 nt, Human
uuucaaaaauauaacuua

SEQ ID NO: 2896577 - RNA, 20 nt, Human
uuuauuuuucauauugugcc

SEQ ID NO: 2896578 - RNA, 16 nt, Human
uuucaaaaauauaacu

SEQ ID NO: 2896579 - RNA, 13 nt, Human
uuucaaaaacauu

SEQ ID NO: 2896580 - RNA, 16 nt, Human
uuuauuuuucauauug

SEQ ID NO: 2896581 - RNA, 17 nt, Human
uuuauuuuucauauugu

SEQ ID NO: 2896582 - RNA, 17 nt, Human
augcuucauucaauauu

SEQ ID NO: 2896583 - RNA, 20 nt, Human
augcuucauucaauauugac

SEQ ID NO: 2896584 - RNA, 21 nt, Human
augcuucauucaauauugaca

SEQ ID NO: 2896585 - RNA, 18 nt, Human
augcugugcuaaauauca

SEQ ID NO: 2896586 - RNA, 17 nt, Human
augcuggaaccugcaaa

SEQ ID NO: 2896587 - RNA, 18 nt, Human
augcuggaaccugcaaaa

SEQ ID NO: 2896588 - RNA, 15 nt, Human
augcugcuuuuauau

SEQ ID NO: 2896589 - RNA, 16 nt, Human
augcugcuuuuauauc

SEQ ID NO: 2896590 - RNA, 18 nt, Human
augcugcuuuuauaucug

SEQ ID NO: 2896591 - RNA, 19 nt, Human
augcugcuuuuauaucugu

SEQ ID NO: 2896592 - RNA, 20 nt, Human
augcugcuuuuauaucugua

SEQ ID NO: 2896593 - RNA, 21 nt, Human
augcugcuuuuauaucuguau

SEQ ID NO: 2896594 - RNA, 14 nt, Human
augcucccuccccu

SEQ ID NO: 2896595 - RNA, 21 nt, Human
augcuaggaugcggaaauccc

SEQ ID NO: 2896596 - RNA, 15 nt, Human
augcuaggucucgga

SEQ ID NO: 2896597 - RNA, 16 nt, Human
augcuagaagaaaaca

SEQ ID NO: 2896598 - RNA, 17 nt, Human
augcuagcgcguugccu

SEQ ID NO: 2896599 - RNA, 18 nt, Human
augcuagcgcguugccug

SEQ ID NO: 2896600 - RNA, 19 nt, Human
augcuagcgcguugccugu

SEQ ID NO: 2896601 - RNA, 16 nt, Human
uuuauuaauuuauaug

SEQ ID NO: 2896602 - RNA, 14 nt, Human
uuuauuaagauuau

SEQ ID NO: 2896603 - RNA, 23 nt, Human
uuuauuaagauuauuuuauuaug

SEQ ID NO: 2896604 - RNA, 23 nt, Human
uuuaucaugacauguuauauauu

SEQ ID NO: 2896605 - RNA, 18 nt, Human
augcuagguuaauuccaa

SEQ ID NO: 2896606 - RNA, 13 nt, Human
augcuaucucugu

SEQ ID NO: 2896607 - RNA, 13 nt, Human
augcuauuaaagu

SEQ ID NO: 2896608 - RNA, 15 nt, Human
augcuauugaaaaug

SEQ ID NO: 2896609 - RNA, 11 nt, Human
augcuauuuuu

SEQ ID NO: 2896610 - RNA, 18 nt, Human
augcuauuuuuguuuuua

SEQ ID NO: 2896611 - RNA, 22 nt, Human
augcuauuuuuguuuuuagaau

SEQ ID NO: 2896612 - RNA, 21 nt, Human
augcuccagcaacacagccug

SEQ ID NO: 2896613 - RNA, 18 nt, Human
augcuccaagauucuaga

SEQ ID NO: 2896614 - RNA, 19 nt, Human
augcuccaagauucuagau

SEQ ID NO: 2896615 - RNA, 15 nt, Human
augcuccaagauucu

SEQ ID NO: 2896616 - RNA, 16 nt, Human
augcuccaagauucua

SEQ ID NO: 2896617 - RNA, 17 nt, Human
augcuccaagauucuag

SEQ ID NO: 2896618 - RNA, 22 nt, Human
augcuccagcaacacagccugg

SEQ ID NO: 2896619 - RNA, 20 nt, Human
augcuccaagauucuagaug

SEQ ID NO: 2896620 - RNA, 17 nt, Human
uuuauauuuaauuauua

SEQ ID NO: 2896621 - RNA, 18 nt, Human
uuuauauuuaauuauuaa

SEQ ID NO: 2896622 - RNA, 21 nt, Human
uuuauauguguugaaaaccaa

SEQ ID NO: 2896623 - RNA, 16 nt, Human
uuuauauuaguugcuu

SEQ ID NO: 2896624 - RNA, 19 nt, Human
uuuauauuaguugcuuugu

SEQ ID NO: 2896625 - RNA, 20 nt, Human
uuuauauuaguugcuuuguu

SEQ ID NO: 2896626 - RNA, 21 nt, Human
uuuauauuaguugcuuuguua

SEQ ID NO: 2896627 - RNA, 12 nt, Human
uuuauauugaaa

SEQ ID NO: 2896628 - RNA, 14 nt, Human
uuuauauugaaaaa

SEQ ID NO: 2896629 - RNA, 14 nt, Human
uuuauauuuaguga

SEQ ID NO: 2896630 - RNA, 14 nt, Human
uuuauauuuaguua

SEQ ID NO: 2896631 - RNA, 14 nt, Human
uuuauauuuaucca

SEQ ID NO: 2896632 - RNA, 16 nt, Human
uuuauauuuauccacu

SEQ ID NO: 2896633 - RNA, 14 nt, Human
uuuauauuaaugua

SEQ ID NO: 2896634 - RNA, 16 nt, Human
uuuauauuaauguacu

SEQ ID NO: 2896635 - RNA, 21 nt, Human
augcuaagcaagcuaaccuua

SEQ ID NO: 2896636 - RNA, 16 nt, Human
augcuaagacucagug

SEQ ID NO: 2896637 - RNA, 22 nt, Human
uuuaucaaacagaauuuuaaag

SEQ ID NO: 2896638 - RNA, 14 nt, Human
uuuaucaaagcaua

SEQ ID NO: 2896639 - RNA, 22 nt, Human
uuuaucaaagcauagauguuuu

SEQ ID NO: 2896640 - RNA, 12 nt, Human
uuuauauuuuua

SEQ ID NO: 2896641 - RNA, 13 nt, Human
uuuauauuuuccc

SEQ ID NO: 2896642 - RNA, 14 nt, Human
uuuauauuuucccu

SEQ ID NO: 2896643 - RNA, 22 nt, Human
uuuaucacaaccaccguuacaa

SEQ ID NO: 2896644 - RNA, 15 nt, Human
uuuaucacacuucug

SEQ ID NO: 2896645 - RNA, 14 nt, Human
uuuaucaaaucagu

SEQ ID NO: 2896646 - RNA, 17 nt, Human
uuuaucaacucaagaau

SEQ ID NO: 2896647 - RNA, 18 nt, Human
uuuaucacacuucuguga

SEQ ID NO: 2896648 - RNA, 17 nt, Human
uuuaucacacuucugug

SEQ ID NO: 2896649 - RNA, 14 nt, Human
uuuaucaugacaug

SEQ ID NO: 2896650 - RNA, 15 nt, Human
uuuaucaugacaugu

SEQ ID NO: 2896651 - RNA, 14 nt, Human
auugcuuuuuuaaa

SEQ ID NO: 2896652 - RNA, 16 nt, Human
auugcuuuuuuaaaua

SEQ ID NO: 2896653 - RNA, 17 nt, Human
auugcuuuuuuaaauau

SEQ ID NO: 2896654 - RNA, 18 nt, Human
auuggaaugggcagcuca

SEQ ID NO: 2896655 - RNA, 15 nt, Human
auugcuuuuuuguau

SEQ ID NO: 2896656 - RNA, 18 nt, Human
auugcuuuuuuguauugg

SEQ ID NO: 2896657 - RNA, 12 nt, Human
auuggaaaaauc

SEQ ID NO: 2896658 - RNA, 13 nt, Human
auuggaaaaauca

SEQ ID NO: 2896659 - RNA, 14 nt, Human
auuggaaaaaucac

SEQ ID NO: 2896660 - RNA, 15 nt, Human
auuggaccaggccau

SEQ ID NO: 2896661 - RNA, 13 nt, Human
auuggaccaggcc

SEQ ID NO: 2896662 - RNA, 13 nt, Human
auuggacaguugu

SEQ ID NO: 2896663 - RNA, 21 nt, Human
auuggacaguugucuagagau

SEQ ID NO: 2896664 - RNA, 16 nt, Human
auuggacauagauauu

SEQ ID NO: 2896665 - RNA, 22 nt, Human
auuggacauagauauuuucaca

SEQ ID NO: 2896666 - RNA, 16 nt, Human
auuggauuauccugag

SEQ ID NO: 2896667 - RNA, 16 nt, Human
auuggauaaagcagcu

SEQ ID NO: 2896668 - RNA, 13 nt, Human
auuggauacagca

SEQ ID NO: 2896669 - RNA, 15 nt, Human
auuggauacagcagu

SEQ ID NO: 2896670 - RNA, 20 nt, Human
auuggauacagcaguagaca

SEQ ID NO: 2896671 - RNA, 23 nt, Human
auuggauacagcaguagacauuu

SEQ ID NO: 2896672 - RNA, 22 nt, Human
auuggagggugggagagcccag

SEQ ID NO: 2896673 - RNA, 15 nt, Human
auuggaggaaagcaa

SEQ ID NO: 2896674 - RNA, 23 nt, Human
auuggaggaaagcaaccggugga

SEQ ID NO: 2896675 - RNA, 23 nt, Human
auuggagggugggagagcccagc

SEQ ID NO: 2896676 - RNA, 22 nt, Human
auugauuccuuuuuucaaaauc

SEQ ID NO: 2896677 - RNA, 13 nt, Human
auugauuccuuuu

SEQ ID NO: 2896678 - RNA, 14 nt, Human
auugcuuuggucau

SEQ ID NO: 2896679 - RNA, 13 nt, Human
auugauuuccugu

SEQ ID NO: 2896680 - RNA, 15 nt, Human
auugauuuccugugu

SEQ ID NO: 2896681 - RNA, 16 nt, Human
auugauuuccuguguc

SEQ ID NO: 2896682 - RNA, 17 nt, Human
auugauuuccuguguca

SEQ ID NO: 2896683 - RNA, 18 nt, Human
auugcuuuggucauauga

SEQ ID NO: 2896684 - RNA, 16 nt, Human
auugcuuuuauuuuga

SEQ ID NO: 2896685 - RNA, 18 nt, Human
auugcuuuuauuuugaaa

SEQ ID NO: 2896686 - RNA, 19 nt, Human
auugcuuuuauuuugaaaa

SEQ ID NO: 2896687 - RNA, 19 nt, Human
auuggauuauuuaauaaca

SEQ ID NO: 2896688 - RNA, 20 nt, Human
auuggauuauuuaauaacau

SEQ ID NO: 2896689 - RNA, 22 nt, Human
auuggauuauuuaauaacauua

SEQ ID NO: 2896690 - RNA, 14 nt, Human
auuggauuauuuaa

SEQ ID NO: 2896691 - RNA, 16 nt, Human
auuggauuauuuaaua

SEQ ID NO: 2896692 - RNA, 17 nt, Human
auuggauuauuuaauaa

SEQ ID NO: 2896693 - RNA, 18 nt, Human
auuggauuauuuaauaac

SEQ ID NO: 2896694 - RNA, 13 nt, Human
auugguuaauuuu

SEQ ID NO: 2896695 - RNA, 15 nt, Human
auugguuaauuuuua

SEQ ID NO: 2896696 - RNA, 18 nt, Human
auugguauucacuaaucu

SEQ ID NO: 2896697 - RNA, 14 nt, Human
auuggguucaugau

SEQ ID NO: 2896698 - RNA, 18 nt, Human
auuggguucaugaugcag

SEQ ID NO: 2896699 - RNA, 19 nt, Human
auuggguucaugaugcagu

SEQ ID NO: 2896700 - RNA, 22 nt, Human
auuggguucaugaugcagucuc

SEQ ID NO: 2896701 - RNA, 23 nt, Human
auuggguucaugaugcagucucc

SEQ ID NO: 2896702 - RNA, 18 nt, Human
auugguaaagaauggaag

SEQ ID NO: 2896703 - RNA, 20 nt, Human
auugggaaggggacccccgc

SEQ ID NO: 2896704 - RNA, 18 nt, Human
auugggagcuugggaaug

SEQ ID NO: 2896705 - RNA, 21 nt, Human
auuuaaagacagggaagagca

SEQ ID NO: 2896706 - RNA, 13 nt, Human
auuuaaagauauu

SEQ ID NO: 2896707 - RNA, 19 nt, Human
auuuaaagauauuguucaa

SEQ ID NO: 2896708 - RNA, 18 nt, Human
auuguccucauuucucca

SEQ ID NO: 2896709 - RNA, 22 nt, Human
auugucgaaaagagucuuccaa

SEQ ID NO: 2896710 - RNA, 15 nt, Human
auugucgcuauugau

SEQ ID NO: 2896711 - RNA, 21 nt, Human
auugucauaucagcacauauu

SEQ ID NO: 2896712 - RNA, 15 nt, Human
auugucaucaggaga

SEQ ID NO: 2896713 - RNA, 21 nt, Human
auugugggacuuauuacaauu

SEQ ID NO: 2896714 - RNA, 16 nt, Human
auugugggcauaaacu

SEQ ID NO: 2896715 - RNA, 19 nt, Human
auugugggcauaaacuguu

SEQ ID NO: 2896716 - RNA, 18 nt, Human
auugugggggaaaaauaa

SEQ ID NO: 2896717 - RNA, 12 nt, Human
auugucuauuua

SEQ ID NO: 2896718 - RNA, 13 nt, Human
auugucuauuuau

SEQ ID NO: 2896719 - RNA, 14 nt, Human
auugucuauuuauc

SEQ ID NO: 2896720 - RNA, 23 nt, Human
auuguaaaaaaaaaugccuuuga

SEQ ID NO: 2896721 - RNA, 21 nt, Human
auuguaaaaaaaaaugccuuu

SEQ ID NO: 2896722 - RNA, 22 nt, Human
auuguaaaaaaaaaugccuuug

SEQ ID NO: 2896723 - RNA, 17 nt, Human
auuguaaaaaaaaaugc

SEQ ID NO: 2896724 - RNA, 20 nt, Human
auuguaaaaaaaaaugccuu

SEQ ID NO: 2896725 - RNA, 12 nt, Human
auuguacauaaa

SEQ ID NO: 2896726 - RNA, 15 nt, Human
auuguacauaaaaga

SEQ ID NO: 2896727 - RNA, 15 nt, Human
auuguacauauuugu

SEQ ID NO: 2896728 - RNA, 20 nt, Human
auuguacauauuuguggaau

SEQ ID NO: 2896729 - RNA, 21 nt, Human
auuguuuggggaugagaaagg

SEQ ID NO: 2896730 - RNA, 14 nt, Human
auuguuuuaaaaag

SEQ ID NO: 2896731 - RNA, 23 nt, Human
auuguuuuaaaaagaaacaagau

SEQ ID NO: 2896732 - RNA, 13 nt, Human
auuguuuuaaucu

SEQ ID NO: 2896733 - RNA, 17 nt, Human
auuguuuuaaucugaaa

SEQ ID NO: 2896734 - RNA, 18 nt, Human
auuguuuuaaucugaaau

SEQ ID NO: 2896735 - RNA, 20 nt, Human
auuguuuuaaucugaaauuc

SEQ ID NO: 2896736 - RNA, 22 nt, Human
auuguuuuaaaaagaaacaaga

SEQ ID NO: 2896737 - RNA, 13 nt, Human
auuuaaaagauuc

SEQ ID NO: 2896738 - RNA, 16 nt, Human
auuuaaacuaucuugu

SEQ ID NO: 2896739 - RNA, 17 nt, Human
auuuaaacuaucuugug

SEQ ID NO: 2896740 - RNA, 18 nt, Human
auuuaaacucaagacaau

SEQ ID NO: 2896741 - RNA, 17 nt, Human
auuuaaacauuaaaaau

SEQ ID NO: 2896742 - RNA, 13 nt, Human
auuuauuuaaaag

SEQ ID NO: 2896743 - RNA, 16 nt, Human
auuucauuuuuugcau

SEQ ID NO: 2896744 - RNA, 22 nt, Human
auuucauuuuuugcaucaguau

SEQ ID NO: 2896745 - RNA, 13 nt, Human
auuuccaaauaaa

SEQ ID NO: 2896746 - RNA, 15 nt, Human
auuuccaaauaaaau

SEQ ID NO: 2896747 - RNA, 22 nt, Human
auuuauuuuaaaaaaugaaaau

SEQ ID NO: 2896748 - RNA, 14 nt, Human
auuuauuuuaagca

SEQ ID NO: 2896749 - RNA, 12 nt, Human
auuuauuuaaua

SEQ ID NO: 2896750 - RNA, 14 nt, Human
auuuauuuaaagca

SEQ ID NO: 2896751 - RNA, 15 nt, Human
auuuauuuaaagcau

SEQ ID NO: 2896752 - RNA, 20 nt, Human
auuuauuuaaagcauugcuu

SEQ ID NO: 2896753 - RNA, 20 nt, Human
auuuauuuaaaagauucauu

SEQ ID NO: 2896754 - RNA, 14 nt, Human
auuuauuuaaaaga

SEQ ID NO: 2896755 - RNA, 16 nt, Human
auuuauuuaaaagauu

SEQ ID NO: 2896756 - RNA, 16 nt, Human
auuuauuuaauaacaa

SEQ ID NO: 2896757 - RNA, 13 nt, Human
auuuauuuaauaa

SEQ ID NO: 2896758 - RNA, 20 nt, Human
auuuauuuaauaacaauugu

SEQ ID NO: 2896759 - RNA, 14 nt, Human
auuuauuuauuuau

SEQ ID NO: 2896760 - RNA, 19 nt, Human
auuuccaaguaauauaaug

SEQ ID NO: 2896761 - RNA, 23 nt, Human
auuuccaacaccacagacacaca

SEQ ID NO: 2896762 - RNA, 21 nt, Human
auuuccaacaccacagacaca

SEQ ID NO: 2896763 - RNA, 22 nt, Human
auuuccaacaccacagacacac

SEQ ID NO: 2896764 - RNA, 19 nt, Human
auuuccaacaccacagaca

SEQ ID NO: 2896765 - RNA, 20 nt, Human
auuuccaacaccacagacac

SEQ ID NO: 2896766 - RNA, 17 nt, Human
auuuccaaauaaaauga

SEQ ID NO: 2896767 - RNA, 18 nt, Human
auuuccaaauaaaaugag

SEQ ID NO: 2896768 - RNA, 11 nt, Human
auuugaccucc

SEQ ID NO: 2896769 - RNA, 21 nt, Human
auuugaccuccucccuguuau

SEQ ID NO: 2896770 - RNA, 22 nt, Human
auuugaccuccucccuguuauu

SEQ ID NO: 2896771 - RNA, 22 nt, Human
auuucuucuccuggaguugcau

SEQ ID NO: 2896772 - RNA, 17 nt, Human
auuucuucguucuuuuu

SEQ ID NO: 2896773 - RNA, 19 nt, Human
auuucuucguucuuuuuaa

SEQ ID NO: 2896774 - RNA, 18 nt, Human
auuucccuaaaauacauu

SEQ ID NO: 2896775 - RNA, 20 nt, Human
auuucccuaaaauacauuua

SEQ ID NO: 2896776 - RNA, 21 nt, Human
auuucccuaaaauacauuuaa

SEQ ID NO: 2896777 - RNA, 20 nt, Human
auuucuaguccaaaauuaca

SEQ ID NO: 2896778 - RNA, 21 nt, Human
auuucuaguccaaaauuacaa

SEQ ID NO: 2896779 - RNA, 22 nt, Human
auuucuagggcugggaaacacu

SEQ ID NO: 2896780 - RNA, 16 nt, Human
auuuguaaggcuuguu

SEQ ID NO: 2896781 - RNA, 18 nt, Human
auuuguaaguuucaggug

SEQ ID NO: 2896782 - RNA, 16 nt, Human
auuuguauuuugugug

SEQ ID NO: 2896783 - RNA, 17 nt, Human
auuuguauuuuguguga

SEQ ID NO: 2896784 - RNA, 18 nt, Human
auuuguauuuugugugac

SEQ ID NO: 2896785 - RNA, 23 nt, Human
auuuguauuuugugugaccaacu

SEQ ID NO: 2896786 - RNA, 14 nt, Human
auuuguaaguuuca

SEQ ID NO: 2896787 - RNA, 15 nt, Human
auuuguaaguuucag

SEQ ID NO: 2896788 - RNA, 17 nt, Human
auuuguaaguuucaggu

SEQ ID NO: 2896789 - RNA, 13 nt, Human
auuuguaaaugcu

SEQ ID NO: 2896790 - RNA, 17 nt, Human
auuugggagggaaaagg

SEQ ID NO: 2896791 - RNA, 21 nt, Human
auuugggagggaaaagggaag

SEQ ID NO: 2896792 - RNA, 13 nt, Human
auuugacuauucu

SEQ ID NO: 2896793 - RNA, 17 nt, Human
auuugacuauucuguau

SEQ ID NO: 2896794 - RNA, 14 nt, Human
auuugacugaagau

SEQ ID NO: 2896795 - RNA, 18 nt, Human
auuugacuugcaugaaga

SEQ ID NO: 2896796 - RNA, 19 nt, Human
auuugacuugcaugaagag

SEQ ID NO: 2896797 - RNA, 21 nt, Human
auuugacuugcaugaagagaa

SEQ ID NO: 2896798 - RNA, 13 nt, Human
auuugacuugugg

SEQ ID NO: 2896799 - RNA, 15 nt, Human
auuugacuugugguu

SEQ ID NO: 2896800 - RNA, 16 nt, Human
auuugacuugugguug

SEQ ID NO: 2896801 - RNA, 18 nt, Human
auuugacuuuaauuuaug

SEQ ID NO: 2896802 - RNA, 14 nt, Human
auuuggcuuaaaua

SEQ ID NO: 2896803 - RNA, 15 nt, Human
auuuggcuuaaauau

SEQ ID NO: 2896804 - RNA, 16 nt, Human
auuuggcuuaaauaua

SEQ ID NO: 2896805 - RNA, 17 nt, Human
auuuggcuuaaauauag

SEQ ID NO: 2896806 - RNA, 19 nt, Human
auuuggccugcacuaauuu

SEQ ID NO: 2896807 - RNA, 16 nt, Human
auuuggccugcacuaa

SEQ ID NO: 2896808 - RNA, 18 nt, Human
auuugggaagugaagacu

SEQ ID NO: 2896809 - RNA, 16 nt, Human
auuugggacccugcuu

SEQ ID NO: 2896810 - RNA, 22 nt, Human
auuugggacccugcuuuagagc

SEQ ID NO: 2896811 - RNA, 14 nt, Human
auuugggaagugaa

SEQ ID NO: 2896812 - RNA, 19 nt, Human
auuugggaaacuugucacu

SEQ ID NO: 2896813 - RNA, 23 nt, Human
auuugggaagguuuguguuuucu

SEQ ID NO: 2896814 - RNA, 13 nt, Human
auuuuaacaagaa

SEQ ID NO: 2896815 - RNA, 14 nt, Human
auuuuaacaagaag

SEQ ID NO: 2896816 - RNA, 17 nt, Human
auuuuaacaagaagaug

SEQ ID NO: 2896817 - RNA, 18 nt, Human
auuuuaacaagaagauga

SEQ ID NO: 2896818 - RNA, 19 nt, Human
auuuuaacaagaagaugaa

SEQ ID NO: 2896819 - RNA, 20 nt, Human
auuuuaacaagaagaugaau

SEQ ID NO: 2896820 - RNA, 21 nt, Human
auuuuaacaagaagaugaaug

SEQ ID NO: 2896821 - RNA, 22 nt, Human
auuuuaacaagaagaugaaugg

SEQ ID NO: 2896822 - RNA, 13 nt, Human
auuuuaaaaaugg

SEQ ID NO: 2896823 - RNA, 15 nt, Human
auuuuaaaaauggug

SEQ ID NO: 2896824 - RNA, 16 nt, Human
auuuuaaaaauggugg

SEQ ID NO: 2896825 - RNA, 19 nt, Human
auuuuaaaagccacauaga

SEQ ID NO: 2896826 - RNA, 14 nt, Human
auuuuaaaaauaca

SEQ ID NO: 2896827 - RNA, 15 nt, Human
auuuuaaaaauacau

SEQ ID NO: 2896828 - RNA, 17 nt, Human
auuuuaaaaauacauau

SEQ ID NO: 2896829 - RNA, 18 nt, Human
auuuuaaaaauacauauc

SEQ ID NO: 2896830 - RNA, 22 nt, Human
auuuuaaaaauacauaucgcug

SEQ ID NO: 2896831 - RNA, 23 nt, Human
auuugugaaaugauggugaaagu

SEQ ID NO: 2896832 - RNA, 15 nt, Human
auuugucuugccuua

SEQ ID NO: 2896833 - RNA, 15 nt, Human
auuugucuuucagga

SEQ ID NO: 2896834 - RNA, 17 nt, Human
auuuuccccuaucauuu

SEQ ID NO: 2896835 - RNA, 15 nt, Human
auuuuccccccacuc

SEQ ID NO: 2896836 - RNA, 14 nt, Human
auuuuccccccacu

SEQ ID NO: 2896837 - RNA, 21 nt, Human
auuuuccccccacucucccca

SEQ ID NO: 2896838 - RNA, 20 nt, Human
auuuuccccccacucucccc

SEQ ID NO: 2896839 - RNA, 22 nt, Human
auuuuccccccacucuccccac

SEQ ID NO: 2896840 - RNA, 19 nt, Human
auuuuaagacguguuugug

SEQ ID NO: 2896841 - RNA, 20 nt, Human
auuuugauuuuuuuuuuaaa

SEQ ID NO: 2896842 - RNA, 18 nt, Human
auuuugaugugacaauaa

SEQ ID NO: 2896843 - RNA, 19 nt, Human
auuuugaugugacaauaau

SEQ ID NO: 2896844 - RNA, 21 nt, Human
auuuugaugugacaauaauau

SEQ ID NO: 2896845 - RNA, 19 nt, Human
auuuugauccaagcugguc

SEQ ID NO: 2896846 - RNA, 19 nt, Human
auuuucuagacuuucuguu

SEQ ID NO: 2896847 - RNA, 12 nt, Human
auuuugaugcag

SEQ ID NO: 2896848 - RNA, 16 nt, Human
auuuugaugcagcauu

SEQ ID NO: 2896849 - RNA, 17 nt, Human
auuuugaugcagcauuu

SEQ ID NO: 2896850 - RNA, 20 nt, Human
auuuugaugcagcauuugau

SEQ ID NO: 2896851 - RNA, 21 nt, Human
auuuugaugcagcauuugaua

SEQ ID NO: 2896852 - RNA, 22 nt, Human
auuuugaugcagcauuugauaa

SEQ ID NO: 2896853 - RNA, 23 nt, Human
auuuugaugcagcauuugauaau

SEQ ID NO: 2896854 - RNA, 24 nt, Human
auuuugaugcagcauuugauaaug

SEQ ID NO: 2896855 - RNA, 19 nt, Human
auuuuaaaauaaauuaguu

SEQ ID NO: 2896856 - RNA, 13 nt, Human
auuuuccugcuuc

SEQ ID NO: 2896857 - RNA, 17 nt, Human
auuuucuauaacagaua

SEQ ID NO: 2896858 - RNA, 19 nt, Human
auuuugcuggaauuccuaa

SEQ ID NO: 2896859 - RNA, 18 nt, Human
auuuugccucuuuucucu

SEQ ID NO: 2896860 - RNA, 16 nt, Human
auuuugccauuuagcg

SEQ ID NO: 2896861 - RNA, 21 nt, Human
auuuugccucuuuucucugug

SEQ ID NO: 2896862 - RNA, 13 nt, Human
auuuugccugugu

SEQ ID NO: 2896863 - RNA, 13 nt, Human
auuuugcaaauau

SEQ ID NO: 2896864 - RNA, 14 nt, Human
auuuugcaaauaua

SEQ ID NO: 2896865 - RNA, 19 nt, Human
auuuugcaaauauaaacau

SEQ ID NO: 2896866 - RNA, 18 nt, Human
auuuugcacccacugaaa

SEQ ID NO: 2896867 - RNA, 16 nt, Human
auuuugcauuugaaua

SEQ ID NO: 2896868 - RNA, 18 nt, Human
auuuugccagugggaacu

SEQ ID NO: 2896869 - RNA, 17 nt, Human
auuuuguuuaaaaaauc

SEQ ID NO: 2896870 - RNA, 13 nt, Human
auuuuguuguaaa

SEQ ID NO: 2896871 - RNA, 14 nt, Human
auuuuguuguaaaa

SEQ ID NO: 2896872 - RNA, 17 nt, Human
auuuuguuguaaaaaga

SEQ ID NO: 2896873 - RNA, 18 nt, Human
auuuuguuguaaaaagaa

SEQ ID NO: 2896874 - RNA, 19 nt, Human
auuuuguuguaaaaagaaa

SEQ ID NO: 2896875 - RNA, 23 nt, Human
auuuuguugcuguuuugauuugu

SEQ ID NO: 2896876 - RNA, 19 nt, Human
auuuuguugcuguuuugau

SEQ ID NO: 2896877 - RNA, 14 nt, Human
auuuuguucuuaca

SEQ ID NO: 2896878 - RNA, 16 nt, Human
auuuuguucuuacaca

SEQ ID NO: 2896879 - RNA, 17 nt, Human
auuuuguucuuacacau

SEQ ID NO: 2896880 - RNA, 18 nt, Human
auuuuguucuuacacaua

SEQ ID NO: 2896881 - RNA, 20 nt, Human
auuuugucaccagaacacaa

SEQ ID NO: 2896882 - RNA, 20 nt, Human
auuuugucugcuuaguaucu

SEQ ID NO: 2896883 - RNA, 12 nt, Human
auuuugugaaug

SEQ ID NO: 2896884 - RNA, 13 nt, Human
auuuugugaaugg

SEQ ID NO: 2896885 - RNA, 15 nt, Human
auuuugugaauggau

SEQ ID NO: 2896886 - RNA, 12 nt, Human
auuuugugaagc

SEQ ID NO: 2896887 - RNA, 18 nt, Human
auuuugugaagcccuguu

SEQ ID NO: 2896888 - RNA, 16 nt, Human
auuuugugcucauuua

SEQ ID NO: 2896889 - RNA, 20 nt, Human
auuuugugcucauuuaaguu

SEQ ID NO: 2896890 - RNA, 21 nt, Human
auuuuguggaggcagugucau

SEQ ID NO: 2896891 - RNA, 23 nt, Human
auuuuguggaggcagugucauuu

SEQ ID NO: 2896892 - RNA, 20 nt, Human
auuuugugggaauuuaagag

SEQ ID NO: 2896893 - RNA, 21 nt, Human
auuuugugggaauuuaagagc

SEQ ID NO: 2896894 - RNA, 13 nt, Human
auuuugugugacc

SEQ ID NO: 2896895 - RNA, 14 nt, Human
auuuugugugacca

SEQ ID NO: 2896896 - RNA, 15 nt, Human
auuuugugugaccaa

SEQ ID NO: 2896897 - RNA, 17 nt, Human
auuuugugugaccaacu

SEQ ID NO: 2896898 - RNA, 18 nt, Human
auuuugugugaccaacug

SEQ ID NO: 2896899 - RNA, 20 nt, Human
auuuugugugaccaacugug

SEQ ID NO: 2896900 - RNA, 22 nt, Human
auuuugugugaccaacuguguu

SEQ ID NO: 2896901 - RNA, 23 nt, Human
auuuugugugaccaacuguguug

SEQ ID NO: 2896902 - RNA, 19 nt, Human
auuuuggaaaguuuuugua

SEQ ID NO: 2896903 - RNA, 17 nt, Human
auuuuggaagauuuuca

SEQ ID NO: 2896904 - RNA, 20 nt, Human
auuuuggaagauuuucaguc

SEQ ID NO: 2896905 - RNA, 16 nt, Human
auuuuguauuauugcu

SEQ ID NO: 2896906 - RNA, 17 nt, Human
auuuuguauuauugcug

SEQ ID NO: 2896907 - RNA, 19 nt, Human
auuuuguauuauugcuguu

SEQ ID NO: 2896908 - RNA, 22 nt, Human
auuuuguauuauugcuguugcu

SEQ ID NO: 2896909 - RNA, 23 nt, Human
auuuuguauuauugcuguugcuu

SEQ ID NO: 2896910 - RNA, 14 nt, Human
auuuuguauugugg

SEQ ID NO: 2896911 - RNA, 15 nt, Human
auuuuguauuguggu

SEQ ID NO: 2896912 - RNA, 17 nt, Human
auuuuguauugugguau

SEQ ID NO: 2896913 - RNA, 14 nt, Human
auuuuguauauauc

SEQ ID NO: 2896914 - RNA, 19 nt, Human
auuuuguaacgaagacaca

SEQ ID NO: 2896915 - RNA, 18 nt, Human
auuuuguaacgaagacac

SEQ ID NO: 2896916 - RNA, 20 nt, Human
auuuuguaaacucaaaauau

SEQ ID NO: 2896917 - RNA, 23 nt, Human
auuuuguaaauaauaaaauagua

SEQ ID NO: 2896918 - RNA, 19 nt, Human
auuuuguaaacucaaaaua

SEQ ID NO: 2896919 - RNA, 15 nt, Human
auuuuguaauuauga

SEQ ID NO: 2896920 - RNA, 12 nt, Human
auuuuguaauga

SEQ ID NO: 2896921 - RNA, 16 nt, Human
auuuuguaaugaauuc

SEQ ID NO: 2896922 - RNA, 17 nt, Human
auuuuugaaaaaaguac

SEQ ID NO: 2896923 - RNA, 15 nt, Human
auuuuucuuccagga

SEQ ID NO: 2896924 - RNA, 13 nt, Human
auuuuucugcaga

SEQ ID NO: 2896925 - RNA, 15 nt, Human
auuuuugacaguguu

SEQ ID NO: 2896926 - RNA, 21 nt, Human
auuuuugauaaagccucaagg

SEQ ID NO: 2896927 - RNA, 23 nt, Human
auuuuugauuuaugcauggaaac

SEQ ID NO: 2896928 - RNA, 13 nt, Human
auuuuugauuuau

SEQ ID NO: 2896929 - RNA, 19 nt, Human
auuuuugcaauaccaagua

SEQ ID NO: 2896930 - RNA, 22 nt, Human
auuuuugcccugaguccaagag

SEQ ID NO: 2896931 - RNA, 15 nt, Human
auuuuugccauacau

SEQ ID NO: 2896932 - RNA, 18 nt, Human
auuuuugccauacaucag

SEQ ID NO: 2896933 - RNA, 14 nt, Human
auuuuugccuucau

SEQ ID NO: 2896934 - RNA, 15 nt, Human
auuuuugccuucauu

SEQ ID NO: 2896935 - RNA, 12 nt, Human
auuuuuguaaau

SEQ ID NO: 2896936 - RNA, 19 nt, Human
auuuuuguaaacuggaauu

SEQ ID NO: 2896937 - RNA, 16 nt, Human
auuuuugcuugacuuc

SEQ ID NO: 2896938 - RNA, 20 nt, Human
auuuuguuuuauuuugaaug

SEQ ID NO: 2896939 - RNA, 16 nt, Human
auuuuguuucuuuuaa

SEQ ID NO: 2896940 - RNA, 20 nt, Human
auuuuguuucuuuuaaagca

SEQ ID NO: 2896941 - RNA, 15 nt, Human
auuuuucaaggaagg

SEQ ID NO: 2896942 - RNA, 20 nt, Human
auuuuucaacaaauaucuug

SEQ ID NO: 2896943 - RNA, 21 nt, Human
auuuuucaacaaauaucuugu

SEQ ID NO: 2896944 - RNA, 22 nt, Human
auuuuucaaccccacccuguuu

SEQ ID NO: 2896945 - RNA, 23 nt, Human
auuuuucaaccccacccuguuug

SEQ ID NO: 2896946 - RNA, 19 nt, Human
auuuuuauuuuuuagugca

SEQ ID NO: 2896947 - RNA, 17 nt, Human
auuuuucaauaauaaaa

SEQ ID NO: 2896948 - RNA, 17 nt, Human
auuuuuccguuugcuuu

SEQ ID NO: 2896949 - RNA, 22 nt, Human
auuuuucggaggccccacugau

SEQ ID NO: 2896950 - RNA, 23 nt, Human
auuuuucggaggccccacugaug

SEQ ID NO: 2896951 - RNA, 21 nt, Human
auuuuucucaaaguuuugaaa

SEQ ID NO: 2896952 - RNA, 19 nt, Human
auuuuucucaguuuguaua

SEQ ID NO: 2896953 - RNA, 16 nt, Human
auuuuucuaaacguaa

SEQ ID NO: 2896954 - RNA, 17 nt, Human
auuuuucuaaccuugaa

SEQ ID NO: 2896955 - RNA, 18 nt, Human
auuuuucuaaccuugaau

SEQ ID NO: 2896956 - RNA, 17 nt, Human
auuuuucucaaaguuuu

SEQ ID NO: 2896957 - RNA, 19 nt, Human
auuuuucauauugugccaa

SEQ ID NO: 2896958 - RNA, 15 nt, Human
auuuuuccaaaauaa

SEQ ID NO: 2896959 - RNA, 13 nt, Human
auuuuucauauug

SEQ ID NO: 2896960 - RNA, 18 nt, Human
auuuuucauauugugcca

SEQ ID NO: 2896961 - RNA, 18 nt, Human
auuuuucagcucucugua

SEQ ID NO: 2896962 - RNA, 20 nt, Human
auuuuucagcucucuguaua

SEQ ID NO: 2896963 - RNA, 15 nt, Human
auuuuucaguuccaa

SEQ ID NO: 2896964 - RNA, 16 nt, Human
auuuuucaguuccaag

SEQ ID NO: 2896965 - RNA, 18 nt, Human
auuuuucaguuccaagaa

SEQ ID NO: 2896966 - RNA, 22 nt, Human
auuuuucaguuccaagaaagau

SEQ ID NO: 2896967 - RNA, 16 nt, Human
auuuuugucucagaag

SEQ ID NO: 2896968 - RNA, 23 nt, Human
auuuuugucuuauauauauuucu

SEQ ID NO: 2896969 - RNA, 21 nt, Human
auuuuuguaucuacaucuuuu

SEQ ID NO: 2896970 - RNA, 13 nt, Human
auuuuuguaucua

SEQ ID NO: 2896971 - RNA, 15 nt, Human
auuuuuguaguagcg

SEQ ID NO: 2896972 - RNA, 12 nt, Human
auuuuuguaauu

SEQ ID NO: 2896973 - RNA, 19 nt, Human
auuuuuguagagccagggu

SEQ ID NO: 2896974 - RNA, 12 nt, Human
auuuuuuaaagu

SEQ ID NO: 2896975 - RNA, 22 nt, Human
auuuuuuaaaacaagccaagaa

SEQ ID NO: 2896976 - RNA, 23 nt, Human
auuuuuuaaaacaagccaagaaa

SEQ ID NO: 2896977 - RNA, 14 nt, Human
auuuuuuaaaagaa

SEQ ID NO: 2896978 - RNA, 17 nt, Human
auuuuuuaaaagaaauu

SEQ ID NO: 2896979 - RNA, 15 nt, Human
auuuuuuaaaagaga

SEQ ID NO: 2896980 - RNA, 21 nt, Human
auuuuuuaaaagagacaaacu

SEQ ID NO: 2896981 - RNA, 18 nt, Human
auuuuuuaaauugaauuc

SEQ ID NO: 2896982 - RNA, 11 nt, Human
auuuuuuaagu

SEQ ID NO: 2896983 - RNA, 16 nt, Human
auuuuuuaaggaaaca

SEQ ID NO: 2896984 - RNA, 17 nt, Human
auuuuuuaaggaaacaa

SEQ ID NO: 2896985 - RNA, 23 nt, Human
auuuuuuguaaugugugaaaaag

SEQ ID NO: 2896986 - RNA, 22 nt, Human
auuuuuugggcagcaauuuaaa

SEQ ID NO: 2896987 - RNA, 17 nt, Human
auuuuuugguacaaaaa

SEQ ID NO: 2896988 - RNA, 18 nt, Human
auuuuuugcaucaguauu

SEQ ID NO: 2896989 - RNA, 14 nt, Human
auuuuuucuugcau

SEQ ID NO: 2896990 - RNA, 17 nt, Human
auuuuuucuugcauuga

SEQ ID NO: 2896991 - RNA, 20 nt, Human
auuuuuucagacuugucaag

SEQ ID NO: 2896992 - RNA, 14 nt, Human
auuuuuucaguugu

SEQ ID NO: 2896993 - RNA, 13 nt, Human
auuuuuucauuuc

SEQ ID NO: 2896994 - RNA, 14 nt, Human
auuuuuucauuuca

SEQ ID NO: 2896995 - RNA, 21 nt, Human
auuuuuucauuucaaaaugcu

SEQ ID NO: 2896996 - RNA, 12 nt, Human
auuuuuuauugu

SEQ ID NO: 2896997 - RNA, 13 nt, Human
auuuuuuauuguu

SEQ ID NO: 2896998 - RNA, 13 nt, Human
auuuuuuauugcu

SEQ ID NO: 2896999 - RNA, 14 nt, Human
auuuuuuauugcua

SEQ ID NO: 2897000 - RNA, 18 nt, Human
auuuuuuauauauacagu

SEQ ID NO: 2897001 - RNA, 22 nt, Human
auuuuuuaugggcauugacaaa

SEQ ID NO: 2897002 - RNA, 19 nt, Human
auuuuuuaauuuaaagcuu

SEQ ID NO: 2897003 - RNA, 13 nt, Human
auuuuuuauauau

SEQ ID NO: 2897004 - RNA, 19 nt, Human
auuuuuuacagcugccugc

SEQ ID NO: 2897005 - RNA, 19 nt, Human
auuuuuuaaguauuuauau

SEQ ID NO: 2897006 - RNA, 18 nt, Human
auuuuuuaaguauuuaua

SEQ ID NO: 2897007 - RNA, 17 nt, Human
auuuuuuaaguauuuau

SEQ ID NO: 2897008 - RNA, 16 nt, Human
auuuuuuaaguauuua

SEQ ID NO: 2897009 - RNA, 22 nt, Human
auuuuuuaaguauuuauauauu

SEQ ID NO: 2897010 - RNA, 20 nt, Human
auuuuuuaaguauuuauaua

SEQ ID NO: 2897011 - RNA, 20 nt, Human
auugacaauaauuucagguu

SEQ ID NO: 2897012 - RNA, 18 nt, Human
auugacaauaauuucagg

SEQ ID NO: 2897013 - RNA, 14 nt, Human
auugacacagaaaa

SEQ ID NO: 2897014 - RNA, 12 nt, Human
auugacacagaa

SEQ ID NO: 2897015 - RNA, 17 nt, Human
auugacaauaauuucag

SEQ ID NO: 2897016 - RNA, 15 nt, Human
auugacaagaacuga

SEQ ID NO: 2897017 - RNA, 14 nt, Human
auugaagaaacaga

SEQ ID NO: 2897018 - RNA, 15 nt, Human
auugaagaaacagau

SEQ ID NO: 2897019 - RNA, 17 nt, Human
auugaagaaacagauac

SEQ ID NO: 2897020 - RNA, 13 nt, Human
auugaagaagaau

SEQ ID NO: 2897021 - RNA, 13 nt, Human
auugaagacaauu

SEQ ID NO: 2897022 - RNA, 14 nt, Human
auugaagacaauuu

SEQ ID NO: 2897023 - RNA, 19 nt, Human
auugaagacaauuugauac

SEQ ID NO: 2897024 - RNA, 20 nt, Human
auugaagacaauuugauaca

SEQ ID NO: 2897025 - RNA, 22 nt, Human
auugaagacaauuugauacaua

SEQ ID NO: 2897026 - RNA, 19 nt, Human
auugaagagagauauaucu

SEQ ID NO: 2897027 - RNA, 21 nt, Human
auugaagagagauauaucuga

SEQ ID NO: 2897028 - RNA, 23 nt, Human
auugaagagagauauaucugaaa

SEQ ID NO: 2897029 - RNA, 13 nt, Human
auugacaaaucug

SEQ ID NO: 2897030 - RNA, 15 nt, Human
auugacaaaucugug

SEQ ID NO: 2897031 - RNA, 16 nt, Human
auugacaaaucugugu

SEQ ID NO: 2897032 - RNA, 17 nt, Human
auugacaaaucugugua

SEQ ID NO: 2897033 - RNA, 18 nt, Human
auugacaaaucuguguau

SEQ ID NO: 2897034 - RNA, 20 nt, Human
auugacaaaucuguguauau

SEQ ID NO: 2897035 - RNA, 21 nt, Human
auugacaaaucuguguauauu

SEQ ID NO: 2897036 - RNA, 22 nt, Human
auugacaaaucuguguauauua

SEQ ID NO: 2897037 - RNA, 16 nt, Human
auugacgauuccuucu

SEQ ID NO: 2897038 - RNA, 20 nt, Human
auugacgauuccuucucuga

SEQ ID NO: 2897039 - RNA, 15 nt, Human
auugacgguuuuuua

SEQ ID NO: 2897040 - RNA, 21 nt, Human
auugacgguuuuuuauuauug

SEQ ID NO: 2897041 - RNA, 22 nt, Human
auugacgguuuuuuauuauugu

SEQ ID NO: 2897042 - RNA, 12 nt, Human
auugaccugcuc

SEQ ID NO: 2897043 - RNA, 17 nt, Human
auugaccugcuccgcug

SEQ ID NO: 2897044 - RNA, 21 nt, Human
auugaccugcuccgcugcucc

SEQ ID NO: 2897045 - RNA, 17 nt, Human
auugacacagaaaaugu

SEQ ID NO: 2897046 - RNA, 22 nt, Human
auugacucaaaucuccaguauu

SEQ ID NO: 2897047 - RNA, 19 nt, Human
auugacacauccgccuuuu

SEQ ID NO: 2897048 - RNA, 22 nt, Human
auugacuauuuucguucauuac

SEQ ID NO: 2897049 - RNA, 21 nt, Human
auugacugguuuacaggcccu

SEQ ID NO: 2897050 - RNA, 22 nt, Human
auugacugguuuacaggcccug

SEQ ID NO: 2897051 - RNA, 11 nt, Human
auugacuucuu

SEQ ID NO: 2897052 - RNA, 21 nt, Human
auugacuuuagaaagcugaca

SEQ ID NO: 2897053 - RNA, 15 nt, Human
auugacuuucaguaa

SEQ ID NO: 2897054 - RNA, 19 nt, Human
auugacuuucaguaaacau

SEQ ID NO: 2897055 - RNA, 14 nt, Human
auugacuucaauga

SEQ ID NO: 2897056 - RNA, 18 nt, Human
auugacuucaaugauagu

SEQ ID NO: 2897057 - RNA, 17 nt, Human
auucuguagauucugug

SEQ ID NO: 2897058 - RNA, 13 nt, Human
auucuguuggaag

SEQ ID NO: 2897059 - RNA, 15 nt, Human
auucuuaaccaugga

SEQ ID NO: 2897060 - RNA, 22 nt, Human
auucuuaagggaacuuccacau

SEQ ID NO: 2897061 - RNA, 15 nt, Human
auucuuacacugccu

SEQ ID NO: 2897062 - RNA, 22 nt, Human
auucuuccaagcugagagucua

SEQ ID NO: 2897063 - RNA, 18 nt, Human
auucuuccagaugugaug

SEQ ID NO: 2897064 - RNA, 19 nt, Human
auucuuccuaguuuucucc

SEQ ID NO: 2897065 - RNA, 17 nt, Human
auucuuccuaguuuucu

SEQ ID NO: 2897066 - RNA, 12 nt, Human
auucuuccuagu

SEQ ID NO: 2897067 - RNA, 20 nt, Human
auucuucccuuuuaaacaca

SEQ ID NO: 2897068 - RNA, 22 nt, Human
auucuucccuuuuaaacacauu

SEQ ID NO: 2897069 - RNA, 12 nt, Human
auugaaauguca

SEQ ID NO: 2897070 - RNA, 13 nt, Human
auugaaaaaaaua

SEQ ID NO: 2897071 - RNA, 15 nt, Human
auugaaaaaaauaau

SEQ ID NO: 2897072 - RNA, 15 nt, Human
auucuguagauucug

SEQ ID NO: 2897073 - RNA, 12 nt, Human
auucuguaaaug

SEQ ID NO: 2897074 - RNA, 14 nt, Human
auucuguguugcau

SEQ ID NO: 2897075 - RNA, 18 nt, Human
auucuguguugcauuauu

SEQ ID NO: 2897076 - RNA, 12 nt, Human
auucuguuaaaa

SEQ ID NO: 2897077 - RNA, 15 nt, Human
auucuguuaaaaucu

SEQ ID NO: 2897078 - RNA, 16 nt, Human
auucuguuaaaaucua

SEQ ID NO: 2897079 - RNA, 20 nt, Human
auucuguuaaaaucuauucu

SEQ ID NO: 2897080 - RNA, 22 nt, Human
auucuguuaaaaucuauucugu

SEQ ID NO: 2897081 - RNA, 14 nt, Human
auucuguuggccag

SEQ ID NO: 2897082 - RNA, 21 nt, Human
auucuguuggccagugugaca

SEQ ID NO: 2897083 - RNA, 19 nt, Human
auucuguuggccaguguga

SEQ ID NO: 2897084 - RNA, 22 nt, Human
auucugcucacauaucugucau

SEQ ID NO: 2897085 - RNA, 21 nt, Human
auucugcucacauaucuguca

SEQ ID NO: 2897086 - RNA, 20 nt, Human
auucugcucacauaucuguc

SEQ ID NO: 2897087 - RNA, 19 nt, Human
auucugcucacauaucugu

SEQ ID NO: 2897088 - RNA, 21 nt, Human
auucugccugcccaggccccu

SEQ ID NO: 2897089 - RNA, 20 nt, Human
auucugccugcccaggcccc

SEQ ID NO: 2897090 - RNA, 18 nt, Human
auucugcucacauaucug

SEQ ID NO: 2897091 - RNA, 21 nt, Human
auucugccgcccccuccugaa

SEQ ID NO: 2897092 - RNA, 20 nt, Human
auucugccgcccccuccuga

SEQ ID NO: 2897093 - RNA, 22 nt, Human
auucugccgcccccuccugaac

SEQ ID NO: 2897094 - RNA, 17 nt, Human
auucugccucucuagga

SEQ ID NO: 2897095 - RNA, 15 nt, Human
auucugccucucuag

SEQ ID NO: 2897096 - RNA, 16 nt, Human
auucugccucucuagg

SEQ ID NO: 2897097 - RNA, 19 nt, Human
auucugccugcccaggccc

SEQ ID NO: 2897098 - RNA, 18 nt, Human
auucugccugcccaggcc

SEQ ID NO: 2897099 - RNA, 17 nt, Human
auucugccugcccaggc

SEQ ID NO: 2897100 - RNA, 16 nt, Human
auucugccugcccagg

SEQ ID NO: 2897101 - RNA, 15 nt, Human
auucugccugcccag

SEQ ID NO: 2897102 - RNA, 14 nt, Human
auucugccugccca

SEQ ID NO: 2897103 - RNA, 13 nt, Human
auucugccugccc

SEQ ID NO: 2897104 - RNA, 11 nt, Human
auucugccugc

SEQ ID NO: 2897105 - RNA, 17 nt, Human
auucucauuugucacac

SEQ ID NO: 2897106 - RNA, 19 nt, Human
auucugcccaaaaauaugg

SEQ ID NO: 2897107 - RNA, 17 nt, Human
auucugcccuccuuaau

SEQ ID NO: 2897108 - RNA, 19 nt, Human
auucugcccuccuuaauuu

SEQ ID NO: 2897109 - RNA, 13 nt, Human
auucugcccugug

SEQ ID NO: 2897110 - RNA, 16 nt, Human
auucucauugcagaau

SEQ ID NO: 2897111 - RNA, 18 nt, Human
auucucauugcagaauaa

SEQ ID NO: 2897112 - RNA, 22 nt, Human
auucucaugccucagccuccug

SEQ ID NO: 2897113 - RNA, 18 nt, Human
auucuagcuaauguaaua

SEQ ID NO: 2897114 - RNA, 15 nt, Human
auucuagcuaaugua

SEQ ID NO: 2897115 - RNA, 15 nt, Human
auucuagcuuugagc

SEQ ID NO: 2897116 - RNA, 14 nt, Human
auucuaaugucuuc

SEQ ID NO: 2897117 - RNA, 16 nt, Human
auucuaaugucuucau

SEQ ID NO: 2897118 - RNA, 21 nt, Human
auucucaugccucagccuccu

SEQ ID NO: 2897119 - RNA, 17 nt, Human
auugaaggaagccaaau

SEQ ID NO: 2897120 - RNA, 21 nt, Human
auuauuuucuucauccaacuu

SEQ ID NO: 2897121 - RNA, 15 nt, Human
auuauuauuuguguu

SEQ ID NO: 2897122 - RNA, 13 nt, Human
auuauuuauuauu

SEQ ID NO: 2897123 - RNA, 15 nt, Human
auuauuuauuuauuu

SEQ ID NO: 2897124 - RNA, 20 nt, Human
auuauuuauuucugguaacu

SEQ ID NO: 2897125 - RNA, 18 nt, Human
auuauuucacaaauaaua

SEQ ID NO: 2897126 - RNA, 23 nt, Human
auuauuuauucagcuucauuugu

SEQ ID NO: 2897127 - RNA, 14 nt, Human
auuauuuauuuaau

SEQ ID NO: 2897128 - RNA, 17 nt, Human
auuauuuauuuaauaac

SEQ ID NO: 2897129 - RNA, 15 nt, Human
auuauuuguguaaua

SEQ ID NO: 2897130 - RNA, 15 nt, Human
auuauuuuggaaagu

SEQ ID NO: 2897131 - RNA, 12 nt, Human
auuauuuugggg

SEQ ID NO: 2897132 - RNA, 14 nt, Human
auuauuuugggguc

SEQ ID NO: 2897133 - RNA, 16 nt, Human
auuauuuuggggucuc

SEQ ID NO: 2897134 - RNA, 17 nt, Human
auuauuuuggggucucu

SEQ ID NO: 2897135 - RNA, 19 nt, Human
auuauuuuggggucucuuu

SEQ ID NO: 2897136 - RNA, 21 nt, Human
auuauuuuggggucucuuuug

SEQ ID NO: 2897137 - RNA, 22 nt, Human
auuauuuuggggucucuuuugu

SEQ ID NO: 2897138 - RNA, 11 nt, Human
auuauuuggca

SEQ ID NO: 2897139 - RNA, 18 nt, Human
auuauuuggcaguuuggu

SEQ ID NO: 2897140 - RNA, 23 nt, Human
auuauuuggcaguuugguauuug

SEQ ID NO: 2897141 - RNA, 20 nt, Human
auuauuugggagggaaaagg

SEQ ID NO: 2897142 - RNA, 21 nt, Human
auuauuugggagggaaaaggg

SEQ ID NO: 2897143 - RNA, 15 nt, Human
auuauuacuguugau

SEQ ID NO: 2897144 - RNA, 21 nt, Human
auuauuacuguugauaauucu

SEQ ID NO: 2897145 - RNA, 23 nt, Human
auuauuacuguugauaauucuua

SEQ ID NO: 2897146 - RNA, 16 nt, Human
auuauguuguuagaga

SEQ ID NO: 2897147 - RNA, 21 nt, Human
auuauuacuuauuuuugacag

SEQ ID NO: 2897148 - RNA, 20 nt, Human
auuauuacuuauuuuugaca

SEQ ID NO: 2897149 - RNA, 14 nt, Human
auuauuaucuuuaa

SEQ ID NO: 2897150 - RNA, 22 nt, Human
auuauuaguuuacaucauuuuu

SEQ ID NO: 2897151 - RNA, 15 nt, Human
auuauuauaaaaggg

SEQ ID NO: 2897152 - RNA, 19 nt, Human
auuauuauaaaaggggguc

SEQ ID NO: 2897153 - RNA, 20 nt, Human
auuauuauaagcauugaaau

SEQ ID NO: 2897154 - RNA, 15 nt, Human
auuauuauagguaau

SEQ ID NO: 2897155 - RNA, 17 nt, Human
auuauuauuaaaaauau

SEQ ID NO: 2897156 - RNA, 21 nt, Human
auuauuaguaagaaaacauca

SEQ ID NO: 2897157 - RNA, 15 nt, Human
auuauuaguacugcu

SEQ ID NO: 2897158 - RNA, 12 nt, Human
auuauuagaaau

SEQ ID NO: 2897159 - RNA, 19 nt, Human
auuauauuugugcuauagu

SEQ ID NO: 2897160 - RNA, 19 nt, Human
auuaucuaaaaucugcuag

SEQ ID NO: 2897161 - RNA, 13 nt, Human
auuccccucugcu

SEQ ID NO: 2897162 - RNA, 15 nt, Human
auuccccucugcugc

SEQ ID NO: 2897163 - RNA, 22 nt, Human
auuccccucugcugcugucccu

SEQ ID NO: 2897164 - RNA, 23 nt, Human
auuccccgucucugguuccuccc

SEQ ID NO: 2897165 - RNA, 17 nt, Human
auucccuagaucuuucu

SEQ ID NO: 2897166 - RNA, 12 nt, Human
auucuaagacuu

SEQ ID NO: 2897167 - RNA, 18 nt, Human
auucuaacggucuguucu

SEQ ID NO: 2897168 - RNA, 23 nt, Human
auucuaagacuuacucuaagauc

SEQ ID NO: 2897169 - RNA, 20 nt, Human
auucuaagacuuacucuaag

SEQ ID NO: 2897170 - RNA, 22 nt, Human
auucuaagacuuacucuaagau

SEQ ID NO: 2897171 - RNA, 23 nt, Human
auucuaaugaugaucaauuauag

SEQ ID NO: 2897172 - RNA, 12 nt, Human
auucuaaugucu

SEQ ID NO: 2897173 - RNA, 13 nt, Human
auucuaaugucuu

SEQ ID NO: 2897174 - RNA, 21 nt, Human
auuccagagaguggcuccucc

SEQ ID NO: 2897175 - RNA, 19 nt, Human
auuccagagaguggcuccu

SEQ ID NO: 2897176 - RNA, 19 nt, Human
auucccagagcaaaauaau

SEQ ID NO: 2897177 - RNA, 17 nt, Human
auucccagagcaaaaua

SEQ ID NO: 2897178 - RNA, 15 nt, Human
auucccaucugucac

SEQ ID NO: 2897179 - RNA, 15 nt, Human
auucccaucuuuacu

SEQ ID NO: 2897180 - RNA, 20 nt, Human
auucagcuucauuuguguca

SEQ ID NO: 2897181 - RNA, 12 nt, Human
auucagcuucau

SEQ ID NO: 2897182 - RNA, 22 nt, Human
auucaggaagcagcuuucccca

SEQ ID NO: 2897183 - RNA, 15 nt, Human
auucagaauauucau

SEQ ID NO: 2897184 - RNA, 21 nt, Human
auucaccaaaauagucuucuc

SEQ ID NO: 2897185 - RNA, 16 nt, Human
auucaccaaaauuauc

SEQ ID NO: 2897186 - RNA, 13 nt, Human
auucagaaauugg

SEQ ID NO: 2897187 - RNA, 14 nt, Human
auucagaaauugga

SEQ ID NO: 2897188 - RNA, 13 nt, Human
auuauauuggugg

SEQ ID NO: 2897189 - RNA, 20 nt, Human
auuauauuggugguucucag

SEQ ID NO: 2897190 - RNA, 15 nt, Human
auuauaauuuaaugc

SEQ ID NO: 2897191 - RNA, 19 nt, Human
auuauacccccugcaaagc

SEQ ID NO: 2897192 - RNA, 17 nt, Human
auuauacuaacuuauuu

SEQ ID NO: 2897193 - RNA, 18 nt, Human
auuaguuuacaucauuuu

SEQ ID NO: 2897194 - RNA, 14 nt, Human
auuaguuaauauau

SEQ ID NO: 2897195 - RNA, 18 nt, Human
auuaguucccugucucuu

SEQ ID NO: 2897196 - RNA, 21 nt, Human
auuaguucccugucucuugaa

SEQ ID NO: 2897197 - RNA, 13 nt, Human
auuaguugcuuug

SEQ ID NO: 2897198 - RNA, 14 nt, Human
auuaguugcuuugu

SEQ ID NO: 2897199 - RNA, 15 nt, Human
auuaguugcuuuguu

SEQ ID NO: 2897200 - RNA, 14 nt, Human
auuaguuuucuugu

SEQ ID NO: 2897201 - RNA, 15 nt, Human
auuaguuuucuuguu

SEQ ID NO: 2897202 - RNA, 16 nt, Human
auuaguuuucuuguug

SEQ ID NO: 2897203 - RNA, 19 nt, Human
auuaguuuucuuguugcuu

SEQ ID NO: 2897204 - RNA, 21 nt, Human
auuaguuuucuuguugcuuug

SEQ ID NO: 2897205 - RNA, 18 nt, Human
auuauacaaauuaaaaag

SEQ ID NO: 2897206 - RNA, 19 nt, Human
auuauacaaauuaaaaaga

SEQ ID NO: 2897207 - RNA, 17 nt, Human
auuauaauuuaaugcau

SEQ ID NO: 2897208 - RNA, 14 nt, Human
uuuguggccucaga

SEQ ID NO: 2897209 - RNA, 12 nt, Human
uuuguggccuca

SEQ ID NO: 2897210 - RNA, 17 nt, Human
uuuguggcaccuuuucu

SEQ ID NO: 2897211 - RNA, 12 nt, Human
uuuguggaauaa

SEQ ID NO: 2897212 - RNA, 11 nt, Human
uuuguggaaaa

SEQ ID NO: 2897213 - RNA, 12 nt, Human
cuguuuaagaaa

SEQ ID NO: 2897214 - RNA, 13 nt, Human
cuguuuaagaaaa

SEQ ID NO: 2897215 - RNA, 20 nt, Human
cuguuuaagaaaaguauuuu

SEQ ID NO: 2897216 - RNA, 22 nt, Human
cuguuuaagaaaaguauuuuga

SEQ ID NO: 2897217 - RNA, 12 nt, Human
cuguuguacauu

SEQ ID NO: 2897218 - RNA, 13 nt, Human
cuguuguacauuu

SEQ ID NO: 2897219 - RNA, 14 nt, Human
cuguuguacauuua

SEQ ID NO: 2897220 - RNA, 22 nt, Human
cuguuguaacuaggcucagaga

SEQ ID NO: 2897221 - RNA, 12 nt, Human
cuguuguaacuu

SEQ ID NO: 2897222 - RNA, 15 nt, Human
cuguuguaacuuaug

SEQ ID NO: 2897223 - RNA, 17 nt, Human
cuguuguaacuuaugua

SEQ ID NO: 2897224 - RNA, 18 nt, Human
cuguuguaacuuauguag

SEQ ID NO: 2897225 - RNA, 20 nt, Human
cuguuguaacuuauguagau

SEQ ID NO: 2897226 - RNA, 21 nt, Human
cuguuguaacuuauguagaua

SEQ ID NO: 2897227 - RNA, 22 nt, Human
cuguuguacauuuaugauuuaa

SEQ ID NO: 2897228 - RNA, 15 nt, Human
cuguuguacuaugga

SEQ ID NO: 2897229 - RNA, 15 nt, Human
cuguuguacauuuau

SEQ ID NO: 2897230 - RNA, 17 nt, Human
cuguuguacauuuauga

SEQ ID NO: 2897231 - RNA, 18 nt, Human
cuguuguacauuuaugau

SEQ ID NO: 2897232 - RNA, 19 nt, Human
cuguuguacauuuaugauu

SEQ ID NO: 2897233 - RNA, 16 nt, Human
cuguuguuuuguuuua

SEQ ID NO: 2897234 - RNA, 20 nt, Human
cuguuguuuuguuuuaaaua

SEQ ID NO: 2897235 - RNA, 22 nt, Human
cuguuggcugggggccucagug

SEQ ID NO: 2897236 - RNA, 19 nt, Human
cuguuggcugggggccuca

SEQ ID NO: 2897237 - RNA, 11 nt, Human
cuguuguaacu

SEQ ID NO: 2897238 - RNA, 16 nt, Human
cuguuguaacuaggcu

SEQ ID NO: 2897239 - RNA, 14 nt, Human
cuguuggcuggggg

SEQ ID NO: 2897240 - RNA, 14 nt, Human
cuuaaaacaacacu

SEQ ID NO: 2897241 - RNA, 16 nt, Human
cuguuuaauauuuaaa

SEQ ID NO: 2897242 - RNA, 18 nt, Human
cuguuuaauauuuaaaca

SEQ ID NO: 2897243 - RNA, 20 nt, Human
cuguuuaauauuuaaacagc

SEQ ID NO: 2897244 - RNA, 15 nt, Human
cuuaaaaauguaaau

SEQ ID NO: 2897245 - RNA, 16 nt, Human
cuuaaaaauguaaaua

SEQ ID NO: 2897246 - RNA, 17 nt, Human
cuuaaaaauguaaauau

SEQ ID NO: 2897247 - RNA, 18 nt, Human
cuuaaaaauguaaauauu

SEQ ID NO: 2897248 - RNA, 22 nt, Human
cuuaaaaauguuuuuucaugug

SEQ ID NO: 2897249 - RNA, 23 nt, Human
cuuaaaaauguuuuuucaugugu

SEQ ID NO: 2897250 - RNA, 19 nt, Human
cuuaauuuuuuuuucauag

SEQ ID NO: 2897251 - RNA, 20 nt, Human
cuuaauuuuuuuuucauaga

SEQ ID NO: 2897252 - RNA, 19 nt, Human
cuuaaauaaugcuucagau

SEQ ID NO: 2897253 - RNA, 20 nt, Human
cuuaaauaaugcuucagaua

SEQ ID NO: 2897254 - RNA, 21 nt, Human
cuuaaauaaugcuucagauau

SEQ ID NO: 2897255 - RNA, 15 nt, Human
cuuaccaacuuucug

SEQ ID NO: 2897256 - RNA, 16 nt, Human
cuuaccaacuuucugu

SEQ ID NO: 2897257 - RNA, 17 nt, Human
cuuaccaacuuucugua

SEQ ID NO: 2897258 - RNA, 19 nt, Human
cuuaccaacuuucuguaaa

SEQ ID NO: 2897259 - RNA, 16 nt, Human
cuuaccaauagcaggg

SEQ ID NO: 2897260 - RNA, 13 nt, Human
cuuaccagaagcu

SEQ ID NO: 2897261 - RNA, 20 nt, Human
cuuacauuuuacuuuuuccu

SEQ ID NO: 2897262 - RNA, 14 nt, Human
cuuaccaacuuucu

SEQ ID NO: 2897263 - RNA, 12 nt, Human
cuuacauucucu

SEQ ID NO: 2897264 - RNA, 16 nt, Human
cuuacauucucuaaua

SEQ ID NO: 2897265 - RNA, 20 nt, Human
cuuacauucucuaauaagaa

SEQ ID NO: 2897266 - RNA, 21 nt, Human
cuuacauucucuaauaagaaa

SEQ ID NO: 2897267 - RNA, 22 nt, Human
cuuacauucucuaauaagaaaa

SEQ ID NO: 2897268 - RNA, 23 nt, Human
cuuacauucucuaauaagaaaac

SEQ ID NO: 2897269 - RNA, 12 nt, Human
cuuacauuugug

SEQ ID NO: 2897270 - RNA, 13 nt, Human
cuuacauuuguga

SEQ ID NO: 2897271 - RNA, 18 nt, Human
cuuacauuugugagauuc

SEQ ID NO: 2897272 - RNA, 20 nt, Human
cuuacauuugugagauuccu

SEQ ID NO: 2897273 - RNA, 17 nt, Human
cuuacaaucgcaaauca

SEQ ID NO: 2897274 - RNA, 21 nt, Human
cuuacaaucgcaaaucaaaac

SEQ ID NO: 2897275 - RNA, 16 nt, Human
cuuacaagccagcugg

SEQ ID NO: 2897276 - RNA, 17 nt, Human
cuuacaagccagcugga

SEQ ID NO: 2897277 - RNA, 21 nt, Human
cuuacauuagcaguuugcuuu

SEQ ID NO: 2897278 - RNA, 22 nt, Human
cuuacauuagcaguuugcuuug

SEQ ID NO: 2897279 - RNA, 13 nt, Human
cuuacacaaaggg

SEQ ID NO: 2897280 - RNA, 16 nt, Human
cuuacacaaaggggau

SEQ ID NO: 2897281 - RNA, 18 nt, Human
cuuacacaaaggggauca

SEQ ID NO: 2897282 - RNA, 21 nt, Human
cuuacacaaaggggaucauaa

SEQ ID NO: 2897283 - RNA, 21 nt, Human
cuuacacaaaucuauuuaauu

SEQ ID NO: 2897284 - RNA, 12 nt, Human
cuguuauguacu

SEQ ID NO: 2897285 - RNA, 13 nt, Human
cuguuauguacug

SEQ ID NO: 2897286 - RNA, 14 nt, Human
cuguuauguacugu

SEQ ID NO: 2897287 - RNA, 15 nt, Human
cuguuauguacugua

SEQ ID NO: 2897288 - RNA, 16 nt, Human
cuguuauguacuguac

SEQ ID NO: 2897289 - RNA, 17 nt, Human
cuguuauguacuguacu

SEQ ID NO: 2897290 - RNA, 21 nt, Human
cuguuauguacuguacuaauu

SEQ ID NO: 2897291 - RNA, 12 nt, Human
cuguuaugucug

SEQ ID NO: 2897292 - RNA, 16 nt, Human
cuguuaugucuguuua

SEQ ID NO: 2897293 - RNA, 17 nt, Human
cuguuaugucuguuuaa

SEQ ID NO: 2897294 - RNA, 20 nt, Human
cuguuaugucuguuuaagaa

SEQ ID NO: 2897295 - RNA, 21 nt, Human
cuguuaugucuguuuaagaaa

SEQ ID NO: 2897296 - RNA, 22 nt, Human
cuguuaugucuguuuaagaaaa

SEQ ID NO: 2897297 - RNA, 20 nt, Human
cuguuauuuucaaguagcug

SEQ ID NO: 2897298 - RNA, 14 nt, Human
cuguuauuuagacu

SEQ ID NO: 2897299 - RNA, 16 nt, Human
cuguuauuuagacuca

SEQ ID NO: 2897300 - RNA, 12 nt, Human
cuguucaagagc

SEQ ID NO: 2897301 - RNA, 16 nt, Human
cuguucaacaucacug

SEQ ID NO: 2897302 - RNA, 19 nt, Human
cuguucaacaucacugaaa

SEQ ID NO: 2897303 - RNA, 17 nt, Human
cuguucaauguuuaaug

SEQ ID NO: 2897304 - RNA, 21 nt, Human
cuguucaagagcacacuuggc

SEQ ID NO: 2897305 - RNA, 23 nt, Human
cuguucaagagcacacuuggccc

SEQ ID NO: 2897306 - RNA, 17 nt, Human
cuguucaaggccccuga

SEQ ID NO: 2897307 - RNA, 16 nt, Human
cuuagggugaaccacu

SEQ ID NO: 2897308 - RNA, 20 nt, Human
cuuagggaagcuggccugag

SEQ ID NO: 2897309 - RNA, 12 nt, Human
cuuaggccuucc

SEQ ID NO: 2897310 - RNA, 13 nt, Human
cuuaggccuuccu

SEQ ID NO: 2897311 - RNA, 15 nt, Human
cuuaggccuuccucu

SEQ ID NO: 2897312 - RNA, 17 nt, Human
cuuaggccuuccucucu

SEQ ID NO: 2897313 - RNA, 23 nt, Human
cuuaggccuuccucucuccagau

SEQ ID NO: 2897314 - RNA, 16 nt, Human
cuuaggcugcugggau

SEQ ID NO: 2897315 - RNA, 13 nt, Human
cuuaggcuuugua

SEQ ID NO: 2897316 - RNA, 17 nt, Human
cuuagggaagcuggccu

SEQ ID NO: 2897317 - RNA, 13 nt, Human
cuuagggaagcug

SEQ ID NO: 2897318 - RNA, 16 nt, Human
cuuagcuuuuuaauug

SEQ ID NO: 2897319 - RNA, 17 nt, Human
cuuagcuuuuuaauugu

SEQ ID NO: 2897320 - RNA, 19 nt, Human
cuuaggcaugacuguagaa

SEQ ID NO: 2897321 - RNA, 21 nt, Human
cuuaggcccggagcugccccu

SEQ ID NO: 2897322 - RNA, 22 nt, Human
cuuaggcauguaggacccugca

SEQ ID NO: 2897323 - RNA, 18 nt, Human
cuuagcuuugcucugcca

SEQ ID NO: 2897324 - RNA, 14 nt, Human
cuuagcuuuuuaau

SEQ ID NO: 2897325 - RNA, 17 nt, Human
cuuagcugucugcucag

SEQ ID NO: 2897326 - RNA, 14 nt, Human
cuuagcuaucagaa

SEQ ID NO: 2897327 - RNA, 14 nt, Human
cuuagcugucugcu

SEQ ID NO: 2897328 - RNA, 13 nt, Human
cuuagcugggaga

SEQ ID NO: 2897329 - RNA, 11 nt, Human
cuuagcucccu

SEQ ID NO: 2897330 - RNA, 13 nt, Human
cuuagcucccucc

SEQ ID NO: 2897331 - RNA, 17 nt, Human
cuuagcucccucccgca

SEQ ID NO: 2897332 - RNA, 21 nt, Human
cuuagcucccucccgcacccc

SEQ ID NO: 2897333 - RNA, 14 nt, Human
cuuagccuggagca

SEQ ID NO: 2897334 - RNA, 15 nt, Human
cuuagccuggagcac

SEQ ID NO: 2897335 - RNA, 17 nt, Human
cuuagccuggagcaccu

SEQ ID NO: 2897336 - RNA, 22 nt, Human
cuuagccuggagcaccuuuccu

SEQ ID NO: 2897337 - RNA, 15 nt, Human
cuuagccucccugaa

SEQ ID NO: 2897338 - RNA, 14 nt, Human
cuuagccucccuga

SEQ ID NO: 2897339 - RNA, 11 nt, Human
cuuagccuccc

SEQ ID NO: 2897340 - RNA, 13 nt, Human
cuuaccauuaaag

SEQ ID NO: 2897341 - RNA, 23 nt, Human
cuuaccauuugcuacuguacaua

SEQ ID NO: 2897342 - RNA, 22 nt, Human
cuuacccaaacuguucaagaaa

SEQ ID NO: 2897343 - RNA, 15 nt, Human
cuuacccaauuuccc

SEQ ID NO: 2897344 - RNA, 16 nt, Human
cuuacccaauuuccca

SEQ ID NO: 2897345 - RNA, 19 nt, Human
cuuagcauagcuuauuauu

SEQ ID NO: 2897346 - RNA, 22 nt, Human
cuuagcauagcuuauuauugaa

SEQ ID NO: 2897347 - RNA, 18 nt, Human
cuuagcauccuaagaaau

SEQ ID NO: 2897348 - RNA, 19 nt, Human
cuuagcauccuaagaaaua

SEQ ID NO: 2897349 - RNA, 20 nt, Human
cuuagcauccuaagaaauau

SEQ ID NO: 2897350 - RNA, 22 nt, Human
cuuagcauccuaagaaauaugu

SEQ ID NO: 2897351 - RNA, 18 nt, Human
cuguuaggagaagcugca

SEQ ID NO: 2897352 - RNA, 13 nt, Human
cugugucuaagau

SEQ ID NO: 2897353 - RNA, 12 nt, Human
cugugucuaaga

SEQ ID NO: 2897354 - RNA, 16 nt, Human
cugugucguagccaag

SEQ ID NO: 2897355 - RNA, 15 nt, Human
cuguguccuucccug

SEQ ID NO: 2897356 - RNA, 16 nt, Human
cuguguccuucccugc

SEQ ID NO: 2897357 - RNA, 20 nt, Human
cuguguccugguuagcagag

SEQ ID NO: 2897358 - RNA, 17 nt, Human
cugugcugcccugaaga

SEQ ID NO: 2897359 - RNA, 18 nt, Human
cugugcugcccugaagaa

SEQ ID NO: 2897360 - RNA, 14 nt, Human
cugugucacccagg

SEQ ID NO: 2897361 - RNA, 17 nt, Human
cugugucaauccagaug

SEQ ID NO: 2897362 - RNA, 19 nt, Human
cugugucaauccagauggu

SEQ ID NO: 2897363 - RNA, 20 nt, Human
cugugucaauccagauggug

SEQ ID NO: 2897364 - RNA, 14 nt, Human
cugugaccucaggc

SEQ ID NO: 2897365 - RNA, 17 nt, Human
cugugaccucaggcacu

SEQ ID NO: 2897366 - RNA, 22 nt, Human
cugugacccacuucucaucaca

SEQ ID NO: 2897367 - RNA, 23 nt, Human
cugugacccacuucucaucacac

SEQ ID NO: 2897368 - RNA, 14 nt, Human
cugugaccugcauc

SEQ ID NO: 2897369 - RNA, 15 nt, Human
cugugaccugcaucu

SEQ ID NO: 2897370 - RNA, 22 nt, Human
cugugaccucaggcacuagccu

SEQ ID NO: 2897371 - RNA, 23 nt, Human
cugugaccucaggcacuagccuu

SEQ ID NO: 2897372 - RNA, 22 nt, Human
cugugaccugccccgcccagcu

SEQ ID NO: 2897373 - RNA, 16 nt, Human
cugugaccugccccgc

SEQ ID NO: 2897374 - RNA, 19 nt, Human
cugugccuucuuuugauua

SEQ ID NO: 2897375 - RNA, 19 nt, Human
cugugccuuugcaaaucag

SEQ ID NO: 2897376 - RNA, 19 nt, Human
cuguagaauagccuguggc

SEQ ID NO: 2897377 - RNA, 20 nt, Human
cuguagaauagccuguggcc

SEQ ID NO: 2897378 - RNA, 21 nt, Human
cuguagaauagccuguggccu

SEQ ID NO: 2897379 - RNA, 18 nt, Human
cuguagagccuucugaug

SEQ ID NO: 2897380 - RNA, 15 nt, Human
cuguaggugguaugu

SEQ ID NO: 2897381 - RNA, 18 nt, Human
cuguaguagcccuuucug

SEQ ID NO: 2897382 - RNA, 19 nt, Human
cuguaguagcccuuucugu

SEQ ID NO: 2897383 - RNA, 21 nt, Human
cuguaguagcccuuucugugu

SEQ ID NO: 2897384 - RNA, 14 nt, Human
cuguagucagccga

SEQ ID NO: 2897385 - RNA, 16 nt, Human
cuguagucauuuacua

SEQ ID NO: 2897386 - RNA, 17 nt, Human
cuguagucauuuacuaa

SEQ ID NO: 2897387 - RNA, 22 nt, Human
cuguagucauuuacuaaacaua

SEQ ID NO: 2897388 - RNA, 23 nt, Human
cuguagucauuuacuaaacauau

SEQ ID NO: 2897389 - RNA, 17 nt, Human
cuguaacagguauuuug

SEQ ID NO: 2897390 - RNA, 18 nt, Human
cuguaacagguauuuugu

SEQ ID NO: 2897391 - RNA, 23 nt, Human
cuguaacagguauuuuguuucuu

SEQ ID NO: 2897392 - RNA, 19 nt, Human
cuguaacauacuggccugg

SEQ ID NO: 2897393 - RNA, 21 nt, Human
cuguaacaucacuauccaugc

SEQ ID NO: 2897394 - RNA, 22 nt, Human
cuguaacaucacuauccaugca

SEQ ID NO: 2897395 - RNA, 18 nt, Human
cuguacucuggggugcug

SEQ ID NO: 2897396 - RNA, 23 nt, Human
cuguacucuggggugcugccuga

SEQ ID NO: 2897397 - RNA, 15 nt, Human
cuguaacuuaaaaua

SEQ ID NO: 2897398 - RNA, 16 nt, Human
cuguaacuuaaaauag

SEQ ID NO: 2897399 - RNA, 16 nt, Human
cuguacugacuugagg

SEQ ID NO: 2897400 - RNA, 17 nt, Human
cuguacuguucuguguc

SEQ ID NO: 2897401 - RNA, 20 nt, Human
cuguacuguucugugucuuu

SEQ ID NO: 2897402 - RNA, 14 nt, Human
cuguacugcucagg

SEQ ID NO: 2897403 - RNA, 16 nt, Human
cuguacugcucaggcu

SEQ ID NO: 2897404 - RNA, 21 nt, Human
cuguacugcucaggcugcagc

SEQ ID NO: 2897405 - RNA, 22 nt, Human
cuguacugcucaggcugcagcu

SEQ ID NO: 2897406 - RNA, 20 nt, Human
cuggugaauggccuuccuuc

SEQ ID NO: 2897407 - RNA, 15 nt, Human
cuggucuuuccucug

SEQ ID NO: 2897408 - RNA, 18 nt, Human
cuggucuuguggaauugg

SEQ ID NO: 2897409 - RNA, 20 nt, Human
cuggucuuguggaauuggga

SEQ ID NO: 2897410 - RNA, 15 nt, Human
cuggucuuguuagaa

SEQ ID NO: 2897411 - RNA, 19 nt, Human
cuggucuuguuagaaaaca

SEQ ID NO: 2897412 - RNA, 20 nt, Human
cuggucuuguuagaaaacaa

SEQ ID NO: 2897413 - RNA, 22 nt, Human
cuguaaacucaaaacuuaacau

SEQ ID NO: 2897414 - RNA, 17 nt, Human
cugguuucacuggccca

SEQ ID NO: 2897415 - RNA, 13 nt, Human
cugguuucacugg

SEQ ID NO: 2897416 - RNA, 18 nt, Human
cugguuucacuggcccaa

SEQ ID NO: 2897417 - RNA, 16 nt, Human
cugguuuacaggcccu

SEQ ID NO: 2897418 - RNA, 17 nt, Human
cugguuuacaggcccug

SEQ ID NO: 2897419 - RNA, 18 nt, Human
cugguuuacaggcccugc

SEQ ID NO: 2897420 - RNA, 21 nt, Human
cugguuuacaggcccugcucc

SEQ ID NO: 2897421 - RNA, 22 nt, Human
cugguuuacaggcccugcuccu

SEQ ID NO: 2897422 - RNA, 14 nt, Human
cugguuuccugccc

SEQ ID NO: 2897423 - RNA, 13 nt, Human
cugguuuccugcc

SEQ ID NO: 2897424 - RNA, 19 nt, Human
cuguaaacucaaaacuuaa

SEQ ID NO: 2897425 - RNA, 16 nt, Human
cugucgcccagucugg

SEQ ID NO: 2897426 - RNA, 15 nt, Human
cugucgcccagucug

SEQ ID NO: 2897427 - RNA, 16 nt, Human
cugucauagaaauuac

SEQ ID NO: 2897428 - RNA, 14 nt, Human
cugucauagaaauu

SEQ ID NO: 2897429 - RNA, 13 nt, Human
cugucacaccagc

SEQ ID NO: 2897430 - RNA, 15 nt, Human
cugucacaccagcca

SEQ ID NO: 2897431 - RNA, 16 nt, Human
cugucacaccagccau

SEQ ID NO: 2897432 - RNA, 14 nt, Human
cugucaucugaauu

SEQ ID NO: 2897433 - RNA, 17 nt, Human
cuguccuccaagccagc

SEQ ID NO: 2897434 - RNA, 15 nt, Human
cuguccuccaagcca

SEQ ID NO: 2897435 - RNA, 16 nt, Human
cuguccucccaucccc

SEQ ID NO: 2897436 - RNA, 18 nt, Human
cuguccucccauccccug

SEQ ID NO: 2897437 - RNA, 19 nt, Human
cuguccucccauccccugg

SEQ ID NO: 2897438 - RNA, 13 nt, Human
cuguccucucccc

SEQ ID NO: 2897439 - RNA, 14 nt, Human
cuguccucuccccu

SEQ ID NO: 2897440 - RNA, 16 nt, Human
cuguccucuccccucc

SEQ ID NO: 2897441 - RNA, 17 nt, Human
cuguccucuccccucca

SEQ ID NO: 2897442 - RNA, 18 nt, Human
cuguccucuccccuccag

SEQ ID NO: 2897443 - RNA, 19 nt, Human
cuguccucuccccuccagc

SEQ ID NO: 2897444 - RNA, 20 nt, Human
cuguccucuccccuccagcc

SEQ ID NO: 2897445 - RNA, 21 nt, Human
cuguccucuccccuccagccu

SEQ ID NO: 2897446 - RNA, 22 nt, Human
cuguccucuccccuccagccuu

SEQ ID NO: 2897447 - RNA, 21 nt, Human
cuguccucccauccccuggac

SEQ ID NO: 2897448 - RNA, 14 nt, Human
cuguccucccucca

SEQ ID NO: 2897449 - RNA, 15 nt, Human
cuguccucccuccac

SEQ ID NO: 2897450 - RNA, 14 nt, Human
cuguccucccucug

SEQ ID NO: 2897451 - RNA, 21 nt, Human
cuguccugggagugagcuggu

SEQ ID NO: 2897452 - RNA, 20 nt, Human
cugaugaacuuauucuguag

SEQ ID NO: 2897453 - RNA, 14 nt, Human
cugaugaaucacug

SEQ ID NO: 2897454 - RNA, 15 nt, Human
cugaugaaucacugu

SEQ ID NO: 2897455 - RNA, 16 nt, Human
cugaugaaucacuguu

SEQ ID NO: 2897456 - RNA, 18 nt, Human
cugaugaaucacuguuuu

SEQ ID NO: 2897457 - RNA, 21 nt, Human
cugaugaaacucacaaaugau

SEQ ID NO: 2897458 - RNA, 12 nt, Human
cugaucugcgga

SEQ ID NO: 2897459 - RNA, 20 nt, Human
cugaucugcggaucucagcu

SEQ ID NO: 2897460 - RNA, 19 nt, Human
cugaucugcggaucucagc

SEQ ID NO: 2897461 - RNA, 20 nt, Human
cugaucugaugcaagcaaga

SEQ ID NO: 2897462 - RNA, 13 nt, Human
cugaucucuuccu

SEQ ID NO: 2897463 - RNA, 14 nt, Human
cugaucucuuccug

SEQ ID NO: 2897464 - RNA, 15 nt, Human
cugaucucuuccugu

SEQ ID NO: 2897465 - RNA, 16 nt, Human
cugaucucuuccuguu

SEQ ID NO: 2897466 - RNA, 21 nt, Human
cugaucucuuccuguuuugua

SEQ ID NO: 2897467 - RNA, 18 nt, Human
cugaucuuuguauauuac

SEQ ID NO: 2897468 - RNA, 12 nt, Human
cugaugaaaaca

SEQ ID NO: 2897469 - RNA, 18 nt, Human
cugaucuuaagaggcuga

SEQ ID NO: 2897470 - RNA, 23 nt, Human
cugccuccgcgugaucaaagcca

SEQ ID NO: 2897471 - RNA, 11 nt, Human
cugccuccucg

SEQ ID NO: 2897472 - RNA, 15 nt, Human
cugccuccucguucc

SEQ ID NO: 2897473 - RNA, 17 nt, Human
cugccuccucguuccuu

SEQ ID NO: 2897474 - RNA, 19 nt, Human
cugccuccucguuccuuuc

SEQ ID NO: 2897475 - RNA, 13 nt, Human
cugccuccucuuc

SEQ ID NO: 2897476 - RNA, 14 nt, Human
cugccuccucuuca

SEQ ID NO: 2897477 - RNA, 15 nt, Human
cugccuccucuucaa

SEQ ID NO: 2897478 - RNA, 19 nt, Human
cugccuguucagcuccagc

SEQ ID NO: 2897479 - RNA, 18 nt, Human
cugccuguucagcuccag

SEQ ID NO: 2897480 - RNA, 17 nt, Human
cugccuguucagcucca

SEQ ID NO: 2897481 - RNA, 16 nt, Human
cugccuguagcaguga

SEQ ID NO: 2897482 - RNA, 19 nt, Human
cugccuguagcccacucug

SEQ ID NO: 2897483 - RNA, 15 nt, Human
cugccuguagcccac

SEQ ID NO: 2897484 - RNA, 13 nt, Human
cugccuguaguua

SEQ ID NO: 2897485 - RNA, 23 nt, Human
cugccuguagcccacucugcucg

SEQ ID NO: 2897486 - RNA, 22 nt, Human
cugccuguagcccacucugcuc

SEQ ID NO: 2897487 - RNA, 20 nt, Human
cugccuguagcccacucugc

SEQ ID NO: 2897488 - RNA, 15 nt, Human
cugccuguaguuagg

SEQ ID NO: 2897489 - RNA, 16 nt, Human
cugcuaguguucuguc

SEQ ID NO: 2897490 - RNA, 13 nt, Human
cugcucaggcugc

SEQ ID NO: 2897491 - RNA, 16 nt, Human
cugcucaggcugcagc

SEQ ID NO: 2897492 - RNA, 18 nt, Human
cugcucaggcugcagcug

SEQ ID NO: 2897493 - RNA, 19 nt, Human
cugcucaggcugcagcugg

SEQ ID NO: 2897494 - RNA, 20 nt, Human
cugcucaggcugcagcugga

SEQ ID NO: 2897495 - RNA, 22 nt, Human
cugcucaggcugcagcuggaca

SEQ ID NO: 2897496 - RNA, 23 nt, Human
cugcucaggcugcagcuggacag

SEQ ID NO: 2897497 - RNA, 22 nt, Human
cugcucagggaaaagcagcucu

SEQ ID NO: 2897498 - RNA, 23 nt, Human
cugcucagggaaaagcagcucuc

SEQ ID NO: 2897499 - RNA, 12 nt, Human
cugcucaucauu

SEQ ID NO: 2897500 - RNA, 11 nt, Human
cugcugaccaa

SEQ ID NO: 2897501 - RNA, 20 nt, Human
cugcugaccaauugugcugc

SEQ ID NO: 2897502 - RNA, 21 nt, Human
cugcugaccaauugugcugcc

SEQ ID NO: 2897503 - RNA, 22 nt, Human
cugcugaccaauugugcugcca

SEQ ID NO: 2897504 - RNA, 23 nt, Human
cugcugaccaauugugcugccau

SEQ ID NO: 2897505 - RNA, 20 nt, Human
cugcuuuugucuaugggacu

SEQ ID NO: 2897506 - RNA, 19 nt, Human
cugcuucaaggcuuccacu

SEQ ID NO: 2897507 - RNA, 13 nt, Human
cuggaguugucac

SEQ ID NO: 2897508 - RNA, 13 nt, Human
cuggauaggagcc

SEQ ID NO: 2897509 - RNA, 15 nt, Human
cuggauaggagccug

SEQ ID NO: 2897510 - RNA, 15 nt, Human
cuggauaacuuaggu

SEQ ID NO: 2897511 - RNA, 20 nt, Human
cuggauacaguauaaaaaua

SEQ ID NO: 2897512 - RNA, 14 nt, Human
cuggauaacuuagg

SEQ ID NO: 2897513 - RNA, 18 nt, Human
cuggaguuucauguacaa

SEQ ID NO: 2897514 - RNA, 22 nt, Human
cuggaguuuuuguuuggagagc

SEQ ID NO: 2897515 - RNA, 23 nt, Human
cuggaguuuuuguuuggagagca

SEQ ID NO: 2897516 - RNA, 13 nt, Human
cuggaguuucaug

SEQ ID NO: 2897517 - RNA, 22 nt, Human
cuggaguuucauguacaagaug

SEQ ID NO: 2897518 - RNA, 14 nt, Human
cuggaguuugggau

SEQ ID NO: 2897519 - RNA, 20 nt, Human
cuggaguuugggaucccugu

SEQ ID NO: 2897520 - RNA, 20 nt, Human
cuggaucacgacgcugcaga

SEQ ID NO: 2897521 - RNA, 21 nt, Human
cuggaucacgacgcugcagag

SEQ ID NO: 2897522 - RNA, 24 nt, Human
cuggaucacgacgcugcagagcac

SEQ ID NO: 2897523 - RNA, 20 nt, Human
cuggauaggagccugcuggu

SEQ ID NO: 2897524 - RNA, 18 nt, Human
cuggauaggagccugcug

SEQ ID NO: 2897525 - RNA, 19 nt, Human
cuggauaggagccugcugg

SEQ ID NO: 2897526 - RNA, 14 nt, Human
cuggaguugcauug

SEQ ID NO: 2897527 - RNA, 15 nt, Human
cuggaguugcauuga

SEQ ID NO: 2897528 - RNA, 18 nt, Human
cuggacuuuccuguuguc

SEQ ID NO: 2897529 - RNA, 20 nt, Human
cuggacuugagcuuggcagc

SEQ ID NO: 2897530 - RNA, 18 nt, Human
cuggacuugagcuuggca

SEQ ID NO: 2897531 - RNA, 21 nt, Human
cugcuuuugucuaugggacuc

SEQ ID NO: 2897532 - RNA, 19 nt, Human
cugcuuuugucuaugggac

SEQ ID NO: 2897533 - RNA, 12 nt, Human
cuggaagaaaaa

SEQ ID NO: 2897534 - RNA, 14 nt, Human
cuggaagaaaaaaa

SEQ ID NO: 2897535 - RNA, 18 nt, Human
cuggaagaaaaaaaccac

SEQ ID NO: 2897536 - RNA, 19 nt, Human
cugcuucaaucccagccua

SEQ ID NO: 2897537 - RNA, 20 nt, Human
cugcuucagauguggagcca

SEQ ID NO: 2897538 - RNA, 21 nt, Human
cugcuucagauguggagccag

SEQ ID NO: 2897539 - RNA, 13 nt, Human
cuggaagacagag

SEQ ID NO: 2897540 - RNA, 21 nt, Human
cuggaagacagagaccuccug

SEQ ID NO: 2897541 - RNA, 15 nt, Human
cuggacucugcaucc

SEQ ID NO: 2897542 - RNA, 18 nt, Human
cuggacucugcaucccag

SEQ ID NO: 2897543 - RNA, 23 nt, Human
cuggacucugcaucccagcaccu

SEQ ID NO: 2897544 - RNA, 24 nt, Human
cuggacucugcaucccagcaccug

SEQ ID NO: 2897545 - RNA, 12 nt, Human
cuggacugacag

SEQ ID NO: 2897546 - RNA, 13 nt, Human
cuggacugacagc

SEQ ID NO: 2897547 - RNA, 15 nt, Human
cuggacugacagcau

SEQ ID NO: 2897548 - RNA, 16 nt, Human
cuggacugacagcaug

SEQ ID NO: 2897549 - RNA, 17 nt, Human
cuggacugacagcaugu

SEQ ID NO: 2897550 - RNA, 21 nt, Human
cuggacugacagcaugugccc

SEQ ID NO: 2897551 - RNA, 14 nt, Human
cuggacucuucaaa

SEQ ID NO: 2897552 - RNA, 22 nt, Human
cuggacucuucaaaaacuguuu

SEQ ID NO: 2897553 - RNA, 23 nt, Human
cuggacucuucaaaaacuguuuu

SEQ ID NO: 2897554 - RNA, 20 nt, Human
cugggcaccggggccucgga

SEQ ID NO: 2897555 - RNA, 12 nt, Human
cugggcacuucc

SEQ ID NO: 2897556 - RNA, 13 nt, Human
cugggcacuuccc

SEQ ID NO: 2897557 - RNA, 16 nt, Human
cugggcacuucccugc

SEQ ID NO: 2897558 - RNA, 17 nt, Human
cugggcacuucccugcu

SEQ ID NO: 2897559 - RNA, 18 nt, Human
cugggcacuucccugcug

SEQ ID NO: 2897560 - RNA, 22 nt, Human
cugggcacuucccugcugccug

SEQ ID NO: 2897561 - RNA, 14 nt, Human
cuggggagaaagua

SEQ ID NO: 2897562 - RNA, 16 nt, Human
cuggggagaggaaaga

SEQ ID NO: 2897563 - RNA, 13 nt, Human
cugggccagagua

SEQ ID NO: 2897564 - RNA, 13 nt, Human
cugggccaggguc

SEQ ID NO: 2897565 - RNA, 14 nt, Human
cugggccagggucu

SEQ ID NO: 2897566 - RNA, 15 nt, Human
cugggccagggucug

SEQ ID NO: 2897567 - RNA, 17 nt, Human
cugggccagggucugug

SEQ ID NO: 2897568 - RNA, 19 nt, Human
cugggccagggucugugug

SEQ ID NO: 2897569 - RNA, 20 nt, Human
cugggccagggucuguguga

SEQ ID NO: 2897570 - RNA, 14 nt, Human
cugggccagaauuu

SEQ ID NO: 2897571 - RNA, 20 nt, Human
cugggccaaguuccucuagu

SEQ ID NO: 2897572 - RNA, 18 nt, Human
cugggccaaguuccucua

SEQ ID NO: 2897573 - RNA, 15 nt, Human
cugggccaaguuccu

SEQ ID NO: 2897574 - RNA, 19 nt, Human
cugggccaacucaccugag

SEQ ID NO: 2897575 - RNA, 21 nt, Human
cugggccaaguuccucuagug

SEQ ID NO: 2897576 - RNA, 20 nt, Human
cugggccaauucaauacaaa

SEQ ID NO: 2897577 - RNA, 22 nt, Human
cugggccaauucaauacaaaca

SEQ ID NO: 2897578 - RNA, 23 nt, Human
cugggccaauucaauacaaacaa

SEQ ID NO: 2897579 - RNA, 12 nt, Human
cugggccagaau

SEQ ID NO: 2897580 - RNA, 15 nt, Human
cuggggcaggcuggg

SEQ ID NO: 2897581 - RNA, 14 nt, Human
cuggggcaggcugg

SEQ ID NO: 2897582 - RNA, 12 nt, Human
cuggggcaggcu

SEQ ID NO: 2897583 - RNA, 14 nt, Human
cuggggcaggcugc

SEQ ID NO: 2897584 - RNA, 18 nt, Human
cuggggcaggcugcuuca

SEQ ID NO: 2897585 - RNA, 20 nt, Human
cuggggagcccgucucagug

SEQ ID NO: 2897586 - RNA, 14 nt, Human
cuggggaggaccug

SEQ ID NO: 2897587 - RNA, 12 nt, Human
cuggggaggagc

SEQ ID NO: 2897588 - RNA, 12 nt, Human
cuggggagcccg

SEQ ID NO: 2897589 - RNA, 15 nt, Human
cuggggagcccgucu

SEQ ID NO: 2897590 - RNA, 15 nt, Human
cuggguucacugcaa

SEQ ID NO: 2897591 - RNA, 23 nt, Human
cuggguggccucgggacaccugc

SEQ ID NO: 2897592 - RNA, 19 nt, Human
cuggguggccucgggacac

SEQ ID NO: 2897593 - RNA, 20 nt, Human
cuggguucacugcaaccucc

SEQ ID NO: 2897594 - RNA, 18 nt, Human
cuggguucacugcaaccu

SEQ ID NO: 2897595 - RNA, 16 nt, Human
cuggucuugaaguccu

SEQ ID NO: 2897596 - RNA, 18 nt, Human
cuggucuugaaguccugg

SEQ ID NO: 2897597 - RNA, 21 nt, Human
cuggucuugaaguccuggcuu

SEQ ID NO: 2897598 - RNA, 22 nt, Human
cuggucuugaaguccuggcuuc

SEQ ID NO: 2897599 - RNA, 17 nt, Human
cuggguuccaauccugg

SEQ ID NO: 2897600 - RNA, 19 nt, Human
cuggggcaggcugggccau

SEQ ID NO: 2897601 - RNA, 18 nt, Human
cuggggcaggcugggcca

SEQ ID NO: 2897602 - RNA, 17 nt, Human
cuggggcaggcugggcc

SEQ ID NO: 2897603 - RNA, 16 nt, Human
cuggggcaggcugggc

SEQ ID NO: 2897604 - RNA, 21 nt, Human
cuggggcaggcugggccaugu

SEQ ID NO: 2897605 - RNA, 12 nt, Human
cuggggccaggc

SEQ ID NO: 2897606 - RNA, 13 nt, Human
cuggggccaggcc

SEQ ID NO: 2897607 - RNA, 14 nt, Human
cuggggccaggccg

SEQ ID NO: 2897608 - RNA, 16 nt, Human
cuggguggccucggga

SEQ ID NO: 2897609 - RNA, 19 nt, Human
cuggggcucugugcaggga

SEQ ID NO: 2897610 - RNA, 17 nt, Human
cuggggcucugugcagg

SEQ ID NO: 2897611 - RNA, 14 nt, Human
cuggggcucugugc

SEQ ID NO: 2897612 - RNA, 16 nt, Human
cuggcagcccagagac

SEQ ID NO: 2897613 - RNA, 13 nt, Human
cuggcagcccaga

SEQ ID NO: 2897614 - RNA, 12 nt, Human
cuggcagcccag

SEQ ID NO: 2897615 - RNA, 19 nt, Human
cuggcagccgugccuucag

SEQ ID NO: 2897616 - RNA, 20 nt, Human
cuggcagccgugccuucagc

SEQ ID NO: 2897617 - RNA, 21 nt, Human
cuggcagccgugccuucagcu

SEQ ID NO: 2897618 - RNA, 22 nt, Human
cuggcagccgugccuucagcuc

SEQ ID NO: 2897619 - RNA, 14 nt, Human
cuggcagaggaggg

SEQ ID NO: 2897620 - RNA, 15 nt, Human
cuggcagacugugua

SEQ ID NO: 2897621 - RNA, 23 nt, Human
cuggcagacuguguaaaauguaa

SEQ ID NO: 2897622 - RNA, 17 nt, Human
cuggcagaagggagcag

SEQ ID NO: 2897623 - RNA, 13 nt, Human
cuggccguacuug

SEQ ID NO: 2897624 - RNA, 11 nt, Human
cugggacacag

SEQ ID NO: 2897625 - RNA, 24 nt, Human
cuggcucugcaaugggcacuggga

SEQ ID NO: 2897626 - RNA, 14 nt, Human
cuggcucugcuguc

SEQ ID NO: 2897627 - RNA, 15 nt, Human
cuggcucugcugucc

SEQ ID NO: 2897628 - RNA, 18 nt, Human
cuggcucugcaaugggca

SEQ ID NO: 2897629 - RNA, 14 nt, Human
cugggacuggccag

SEQ ID NO: 2897630 - RNA, 13 nt, Human
cugggacuggcca

SEQ ID NO: 2897631 - RNA, 16 nt, Human
cugggacacaaaacuc

SEQ ID NO: 2897632 - RNA, 21 nt, Human
cugggacacaaaacuccgccc

SEQ ID NO: 2897633 - RNA, 22 nt, Human
cuggcagcccagagacuuugua

SEQ ID NO: 2897634 - RNA, 14 nt, Human
cuggccccucgccu

SEQ ID NO: 2897635 - RNA, 15 nt, Human
cuggccccucgccug

SEQ ID NO: 2897636 - RNA, 24 nt, Human
cuggccccucgccuguggagcuca

SEQ ID NO: 2897637 - RNA, 12 nt, Human
cuggccccuggg

SEQ ID NO: 2897638 - RNA, 13 nt, Human
cuggccccugggu

SEQ ID NO: 2897639 - RNA, 14 nt, Human
cuggccccuggguc

SEQ ID NO: 2897640 - RNA, 17 nt, Human
cuggccccuuugggccc

SEQ ID NO: 2897641 - RNA, 20 nt, Human
cuggccccuuugggcccugc

SEQ ID NO: 2897642 - RNA, 21 nt, Human
cuggccccuuugggcccugca

SEQ ID NO: 2897643 - RNA, 22 nt, Human
cuggccccuuugggcccugcau

SEQ ID NO: 2897644 - RNA, 23 nt, Human
cuggccccuuugggcccugcaug

SEQ ID NO: 2897645 - RNA, 14 nt, Human
cuggcccugcccug

SEQ ID NO: 2897646 - RNA, 15 nt, Human
cuggcccugcccuga

SEQ ID NO: 2897647 - RNA, 16 nt, Human
cuggcccugcccugag

SEQ ID NO: 2897648 - RNA, 17 nt, Human
cuggcccugcccugagg

SEQ ID NO: 2897649 - RNA, 13 nt, Human
cuggcccugcccu

SEQ ID NO: 2897650 - RNA, 11 nt, Human
cuggcccugcc

SEQ ID NO: 2897651 - RNA, 15 nt, Human
cuggccgugggccug

SEQ ID NO: 2897652 - RNA, 23 nt, Human
cuggccguugauguuggcuggga

SEQ ID NO: 2897653 - RNA, 16 nt, Human
cuggccuaaaaucuug

SEQ ID NO: 2897654 - RNA, 19 nt, Human
cuggccuaaaaucuuggaa

SEQ ID NO: 2897655 - RNA, 20 nt, Human
cuggccuaaaaucuuggaag

SEQ ID NO: 2897656 - RNA, 21 nt, Human
cuggccuaaaaucuuggaagu

SEQ ID NO: 2897657 - RNA, 16 nt, Human
cuggccgggagccuga

SEQ ID NO: 2897658 - RNA, 15 nt, Human
cuggcccugcccugg

SEQ ID NO: 2897659 - RNA, 20 nt, Human
cuggcucucccauuuccuga

SEQ ID NO: 2897660 - RNA, 22 nt, Human
cuggccguugauguuggcuggg

SEQ ID NO: 2897661 - RNA, 17 nt, Human
cuggcucucaugggguc

SEQ ID NO: 2897662 - RNA, 18 nt, Human
cuuccugacgaaacuggc

SEQ ID NO: 2897663 - RNA, 14 nt, Human
cuuccugagcuuua

SEQ ID NO: 2897664 - RNA, 15 nt, Human
cuuccugagcuuuau

SEQ ID NO: 2897665 - RNA, 20 nt, Human
cuucuagguggcaaggcugu

SEQ ID NO: 2897666 - RNA, 16 nt, Human
cuucucuuaaacuugu

SEQ ID NO: 2897667 - RNA, 19 nt, Human
cuucucuuaaacuugugaa

SEQ ID NO: 2897668 - RNA, 20 nt, Human
cuucucuuaaacuugugaau

SEQ ID NO: 2897669 - RNA, 13 nt, Human
cuucucugugacc

SEQ ID NO: 2897670 - RNA, 20 nt, Human
cuucucugugacccacuucu

SEQ ID NO: 2897671 - RNA, 14 nt, Human
cuucucugucucag

SEQ ID NO: 2897672 - RNA, 11 nt, Human
cuucucuguga

SEQ ID NO: 2897673 - RNA, 22 nt, Human
cuucuagguggcaaggcugugc

SEQ ID NO: 2897674 - RNA, 18 nt, Human
cuucucacagcacaugcu

SEQ ID NO: 2897675 - RNA, 19 nt, Human
cuucucacagcacaugcug

SEQ ID NO: 2897676 - RNA, 23 nt, Human
cuucucacagcacaugcuggcca

SEQ ID NO: 2897677 - RNA, 16 nt, Human
cuuccucucuccagau

SEQ ID NO: 2897678 - RNA, 16 nt, Human
cuuccucugaggcuga

SEQ ID NO: 2897679 - RNA, 22 nt, Human
cuuccucugaggcugaaauuca

SEQ ID NO: 2897680 - RNA, 15 nt, Human
cuuccucucuccaga

SEQ ID NO: 2897681 - RNA, 12 nt, Human
cuuccucuccuu

SEQ ID NO: 2897682 - RNA, 15 nt, Human
cuuccucuccuuccu

SEQ ID NO: 2897683 - RNA, 16 nt, Human
cuuccucuccuuccuu

SEQ ID NO: 2897684 - RNA, 17 nt, Human
cuuccucuccuuccuug

SEQ ID NO: 2897685 - RNA, 15 nt, Human
cuuccucugagccuu

SEQ ID NO: 2897686 - RNA, 14 nt, Human
cuuccucugagccu

SEQ ID NO: 2897687 - RNA, 13 nt, Human
cuuccucuccacu

SEQ ID NO: 2897688 - RNA, 14 nt, Human
cuuccucuccacug

SEQ ID NO: 2897689 - RNA, 15 nt, Human
cuuccucuccacugc

SEQ ID NO: 2897690 - RNA, 16 nt, Human
cuucucuuguuaggua

SEQ ID NO: 2897691 - RNA, 13 nt, Human
cuucucuugcuuu

SEQ ID NO: 2897692 - RNA, 15 nt, Human
cuucucuugcuuucu

SEQ ID NO: 2897693 - RNA, 16 nt, Human
cuucucuugcuuucua

SEQ ID NO: 2897694 - RNA, 17 nt, Human
cuucucuugcuuucuau

SEQ ID NO: 2897695 - RNA, 20 nt, Human
cuucugaaugugcugaucau

SEQ ID NO: 2897696 - RNA, 21 nt, Human
cuucugaaugugcugaucauu

SEQ ID NO: 2897697 - RNA, 16 nt, Human
cuucugacaaacugug

SEQ ID NO: 2897698 - RNA, 14 nt, Human
cuucugaauauuuu

SEQ ID NO: 2897699 - RNA, 15 nt, Human
cuucugaauauuuua

SEQ ID NO: 2897700 - RNA, 18 nt, Human
cuucugaauauuuuaucu

SEQ ID NO: 2897701 - RNA, 19 nt, Human
cuucuuaaauaucuuuuau

SEQ ID NO: 2897702 - RNA, 22 nt, Human
cuucuuaaauaucuuuuauguu

SEQ ID NO: 2897703 - RNA, 12 nt, Human
cuucuuaauuaa

SEQ ID NO: 2897704 - RNA, 14 nt, Human
cuucuuaauuaauu

SEQ ID NO: 2897705 - RNA, 16 nt, Human
cuucuuaauuaauuug

SEQ ID NO: 2897706 - RNA, 17 nt, Human
cuucuuaauuaauuuga

SEQ ID NO: 2897707 - RNA, 18 nt, Human
cuucuuaauuaauuugau

SEQ ID NO: 2897708 - RNA, 21 nt, Human
cuucuuaauuaauuugauuaa

SEQ ID NO: 2897709 - RNA, 22 nt, Human
cuucuuaauuaauuugauuaac

SEQ ID NO: 2897710 - RNA, 13 nt, Human
cuugaagggccca

SEQ ID NO: 2897711 - RNA, 14 nt, Human
cuugaagggcccag

SEQ ID NO: 2897712 - RNA, 15 nt, Human
cuugaagggcccagg

SEQ ID NO: 2897713 - RNA, 16 nt, Human
cuugaagggcccagga

SEQ ID NO: 2897714 - RNA, 20 nt, Human
cuugacagggcacaccgggc

SEQ ID NO: 2897715 - RNA, 15 nt, Human
cuugaaugugucagg

SEQ ID NO: 2897716 - RNA, 20 nt, Human
cuugaauguggcuugagaaa

SEQ ID NO: 2897717 - RNA, 22 nt, Human
cuugaauguggcuugagaaaua

SEQ ID NO: 2897718 - RNA, 17 nt, Human
cuugaauguggucucag

SEQ ID NO: 2897719 - RNA, 18 nt, Human
cuugaauguggucucagg

SEQ ID NO: 2897720 - RNA, 19 nt, Human
cuugaauguggucucagga

SEQ ID NO: 2897721 - RNA, 20 nt, Human
cuugaauguggucucaggau

SEQ ID NO: 2897722 - RNA, 21 nt, Human
cuugaauguggucucaggaua

SEQ ID NO: 2897723 - RNA, 19 nt, Human
cuugaauguggcuugagaa

SEQ ID NO: 2897724 - RNA, 13 nt, Human
cuugaaugucuuu

SEQ ID NO: 2897725 - RNA, 16 nt, Human
cuugaauguagcagcc

SEQ ID NO: 2897726 - RNA, 20 nt, Human
cuugaauguagcagccccgg

SEQ ID NO: 2897727 - RNA, 21 nt, Human
cuugaauguagcagccccggg

SEQ ID NO: 2897728 - RNA, 23 nt, Human
cuugaaugccauagucaaagaga

SEQ ID NO: 2897729 - RNA, 13 nt, Human
cuugaaugcugcc

SEQ ID NO: 2897730 - RNA, 14 nt, Human
cuugaaugcugcca

SEQ ID NO: 2897731 - RNA, 15 nt, Human
cuugaaugcugccag

SEQ ID NO: 2897732 - RNA, 16 nt, Human
cuugaaugcugccagu

SEQ ID NO: 2897733 - RNA, 13 nt, Human
cuugauauuuucu

SEQ ID NO: 2897734 - RNA, 14 nt, Human
cuugauauuuucua

SEQ ID NO: 2897735 - RNA, 16 nt, Human
cuugaucauuuuggga

SEQ ID NO: 2897736 - RNA, 18 nt, Human
cuugauucacaaugaaau

SEQ ID NO: 2897737 - RNA, 16 nt, Human
cuugauuauccauauu

SEQ ID NO: 2897738 - RNA, 15 nt, Human
cuugauuaagauuuu

SEQ ID NO: 2897739 - RNA, 18 nt, Human
cuugauuaagauuuuaca

SEQ ID NO: 2897740 - RNA, 20 nt, Human
cuugauuaagauuuuacaaa

SEQ ID NO: 2897741 - RNA, 21 nt, Human
cuugauuaagauuuuacaaaa

SEQ ID NO: 2897742 - RNA, 22 nt, Human
cuugauuaagauuuuacaaaag

SEQ ID NO: 2897743 - RNA, 22 nt, Human
cuuggccugucucauccccagg

SEQ ID NO: 2897744 - RNA, 17 nt, Human
cuuggccugucucaucc

SEQ ID NO: 2897745 - RNA, 23 nt, Human
cuuggccugucucauccccaggg

SEQ ID NO: 2897746 - RNA, 17 nt, Human
cuugcuaauuuucucaa

SEQ ID NO: 2897747 - RNA, 19 nt, Human
cuugacaucuggaaaccuc

SEQ ID NO: 2897748 - RNA, 24 nt, Human
cuugauuugaguugauugagaaga

SEQ ID NO: 2897749 - RNA, 14 nt, Human
cuugcucauuaauu

SEQ ID NO: 2897750 - RNA, 16 nt, Human
cuugcucauuaauuuu

SEQ ID NO: 2897751 - RNA, 20 nt, Human
cuugcuagcuaugugaccuu

SEQ ID NO: 2897752 - RNA, 23 nt, Human
cuugcuagcuaugugaccuugag

SEQ ID NO: 2897753 - RNA, 17 nt, Human
cuugcuauauugcccag

SEQ ID NO: 2897754 - RNA, 22 nt, Human
cuugcuauauugcccaggcugg

SEQ ID NO: 2897755 - RNA, 23 nt, Human
cuugcuauauugcccaggcuggu

SEQ ID NO: 2897756 - RNA, 21 nt, Human
cuugcuaucggggaagccaga

SEQ ID NO: 2897757 - RNA, 20 nt, Human
cuuggcaacagaagcaguug

SEQ ID NO: 2897758 - RNA, 18 nt, Human
cuuggccuagcccacccu

SEQ ID NO: 2897759 - RNA, 20 nt, Human
cuuggccuagcccacccugc

SEQ ID NO: 2897760 - RNA, 21 nt, Human
cuuggccuagcccacccugcu

SEQ ID NO: 2897761 - RNA, 13 nt, Human
cuuggccuaucuc

SEQ ID NO: 2897762 - RNA, 21 nt, Human
cuuggccuaucuccuagggcu

SEQ ID NO: 2897763 - RNA, 11 nt, Human
cuuggccucag

SEQ ID NO: 2897764 - RNA, 15 nt, Human
cuuggcaacagaagc

SEQ ID NO: 2897765 - RNA, 15 nt, Human
cuugcucccuguguc

SEQ ID NO: 2897766 - RNA, 20 nt, Human
cuugcucccuguguccaccu

SEQ ID NO: 2897767 - RNA, 13 nt, Human
cuugcucccuuca

SEQ ID NO: 2897768 - RNA, 15 nt, Human
cuuggcaaaagccuu

SEQ ID NO: 2897769 - RNA, 16 nt, Human
cuuggcaaaagccuug

SEQ ID NO: 2897770 - RNA, 17 nt, Human
cuuggcaaaagccuugu

SEQ ID NO: 2897771 - RNA, 18 nt, Human
cuuggcaaaagccuugug

SEQ ID NO: 2897772 - RNA, 20 nt, Human
cuuggcaaaagccuugugua

SEQ ID NO: 2897773 - RNA, 21 nt, Human
cuuggcaaaagccuuguguau

SEQ ID NO: 2897774 - RNA, 23 nt, Human
cuuggcaaaagccuuguguauau

SEQ ID NO: 2897775 - RNA, 23 nt, Human
cuuggccucagaauucacaaaau

SEQ ID NO: 2897776 - RNA, 12 nt, Human
cuuggccucaga

SEQ ID NO: 2897777 - RNA, 14 nt, Human
cuuggccucccaag

SEQ ID NO: 2897778 - RNA, 16 nt, Human
cuuucaccuuugugua

SEQ ID NO: 2897779 - RNA, 17 nt, Human
cuuuaccccaucccugu

SEQ ID NO: 2897780 - RNA, 17 nt, Human
cuuuacccaccuagaac

SEQ ID NO: 2897781 - RNA, 19 nt, Human
cuuuacccaccuagaacac

SEQ ID NO: 2897782 - RNA, 18 nt, Human
cuuuacccaccuagaaca

SEQ ID NO: 2897783 - RNA, 23 nt, Human
cuuucaccccagggccugagccu

SEQ ID NO: 2897784 - RNA, 22 nt, Human
cuuucaccccagggccugagcc

SEQ ID NO: 2897785 - RNA, 14 nt, Human
cuuuaccaaacagc

SEQ ID NO: 2897786 - RNA, 16 nt, Human
cuuuaccaaacagcaa

SEQ ID NO: 2897787 - RNA, 18 nt, Human
cuuuaccaaacagcaaac

SEQ ID NO: 2897788 - RNA, 20 nt, Human
cuuuaccaaacagcaaacca

SEQ ID NO: 2897789 - RNA, 23 nt, Human
cuuuaccaaacagcaaaccaaga

SEQ ID NO: 2897790 - RNA, 17 nt, Human
cuuuacaugcaauuuau

SEQ ID NO: 2897791 - RNA, 14 nt, Human
cuuuacaugcaauu

SEQ ID NO: 2897792 - RNA, 19 nt, Human
cuuuacaugcaauuuauua

SEQ ID NO: 2897793 - RNA, 23 nt, Human
cuuuaaugucacaggcaggucca

SEQ ID NO: 2897794 - RNA, 15 nt, Human
cuugugccugggagu

SEQ ID NO: 2897795 - RNA, 21 nt, Human
cuugugcuggauggagcccag

SEQ ID NO: 2897796 - RNA, 22 nt, Human
cuugugcuggauggagcccagg

SEQ ID NO: 2897797 - RNA, 23 nt, Human
cuugugcuggauggagcccaggc

SEQ ID NO: 2897798 - RNA, 14 nt, Human
cuugugcuuugcuc

SEQ ID NO: 2897799 - RNA, 16 nt, Human
cuugugcuuugcucuu

SEQ ID NO: 2897800 - RNA, 17 nt, Human
cuugugcuuugcucuug

SEQ ID NO: 2897801 - RNA, 23 nt, Human
cuugugcuuugcucuugucccac

SEQ ID NO: 2897802 - RNA, 19 nt, Human
cuugugccauagucacaug

SEQ ID NO: 2897803 - RNA, 11 nt, Human
cuugugccaua

SEQ ID NO: 2897804 - RNA, 18 nt, Human
cuugugccaacacucaag

SEQ ID NO: 2897805 - RNA, 17 nt, Human
cuugugccacacccucc

SEQ ID NO: 2897806 - RNA, 12 nt, Human
cuuuaauuuaug

SEQ ID NO: 2897807 - RNA, 15 nt, Human
cuuuaauuuauguaa

SEQ ID NO: 2897808 - RNA, 19 nt, Human
cuuuaauucucuuucaaag

SEQ ID NO: 2897809 - RNA, 21 nt, Human
cuuuacagguauuuauaauau

SEQ ID NO: 2897810 - RNA, 18 nt, Human
cuuuaauuucugucagaa

SEQ ID NO: 2897811 - RNA, 21 nt, Human
cuuuaauuucugucagaaugc

SEQ ID NO: 2897812 - RNA, 18 nt, Human
cuuguggaauugggagcu

SEQ ID NO: 2897813 - RNA, 20 nt, Human
cuugugcuuuuccuauuugu

SEQ ID NO: 2897814 - RNA, 13 nt, Human
cuuggucugccag

SEQ ID NO: 2897815 - RNA, 17 nt, Human
cuuggucugccaggccc

SEQ ID NO: 2897816 - RNA, 20 nt, Human
cuuggucugccaggccccca

SEQ ID NO: 2897817 - RNA, 18 nt, Human
cuugguccaacugcaacu

SEQ ID NO: 2897818 - RNA, 15 nt, Human
cuugguaagaagccg

SEQ ID NO: 2897819 - RNA, 23 nt, Human
cuuggguucaagugauucuccug

SEQ ID NO: 2897820 - RNA, 22 nt, Human
cuugguaaaguccuuuucuugc

SEQ ID NO: 2897821 - RNA, 19 nt, Human
cuuggguagaguuuacagc

SEQ ID NO: 2897822 - RNA, 22 nt, Human
cuuggguagaguuuacagcucu

SEQ ID NO: 2897823 - RNA, 23 nt, Human
cuuggguagaguuuacagcucug

SEQ ID NO: 2897824 - RNA, 17 nt, Human
cuugucuauuuuugucu

SEQ ID NO: 2897825 - RNA, 16 nt, Human
cuugguggcuuauggg

SEQ ID NO: 2897826 - RNA, 13 nt, Human
cuuggugcuggga

SEQ ID NO: 2897827 - RNA, 14 nt, Human
cuuggugcugggaa

SEQ ID NO: 2897828 - RNA, 15 nt, Human
cuuggugcugggaac

SEQ ID NO: 2897829 - RNA, 22 nt, Human
cuuggugaauuuuuuuuuccua

SEQ ID NO: 2897830 - RNA, 20 nt, Human
cuuggugaauuuuuuuuucc

SEQ ID NO: 2897831 - RNA, 16 nt, Human
cuuggucuuuguaucu

SEQ ID NO: 2897832 - RNA, 18 nt, Human
cuugugaaaauguguucu

SEQ ID NO: 2897833 - RNA, 14 nt, Human
cuugugaaacacag

SEQ ID NO: 2897834 - RNA, 16 nt, Human
cuugugaaacacagcu

SEQ ID NO: 2897835 - RNA, 17 nt, Human
cuugugaaacacagcug

SEQ ID NO: 2897836 - RNA, 18 nt, Human
cuugugaaacacagcugu

SEQ ID NO: 2897837 - RNA, 19 nt, Human
cuugugaaacacagcuguu

SEQ ID NO: 2897838 - RNA, 20 nt, Human
cuugugaaacacagcuguuc

SEQ ID NO: 2897839 - RNA, 12 nt, Human
cuugugaacaga

SEQ ID NO: 2897840 - RNA, 10 nt, Human
cuugugaagg

SEQ ID NO: 2897841 - RNA, 16 nt, Human
cuugugaaggccauga

SEQ ID NO: 2897842 - RNA, 20 nt, Human
cuugugaaggccaugauauu

SEQ ID NO: 2897843 - RNA, 21 nt, Human
cuugugaaggccaugauauuu

SEQ ID NO: 2897844 - RNA, 14 nt, Human
cuugugaaaaugug

SEQ ID NO: 2897845 - RNA, 13 nt, Human
cuugugaaaaugu

SEQ ID NO: 2897846 - RNA, 16 nt, Human
cuugugaaaauguguu

SEQ ID NO: 2897847 - RNA, 23 nt, Human
cuugguauuuuucagagauuuau

SEQ ID NO: 2897848 - RNA, 22 nt, Human
cuugugacagcucuuuuuguga

SEQ ID NO: 2897849 - RNA, 15 nt, Human
cuugugaaugcuucu

SEQ ID NO: 2897850 - RNA, 16 nt, Human
cuugugaaugcuucuc

SEQ ID NO: 2897851 - RNA, 17 nt, Human
cuugugaaugcuucuca

SEQ ID NO: 2897852 - RNA, 19 nt, Human
cuugugaaugcuucucacu

SEQ ID NO: 2897853 - RNA, 19 nt, Human
cuuuguacagagugcuuuu

SEQ ID NO: 2897854 - RNA, 15 nt, Human
cuuuguacagcccag

SEQ ID NO: 2897855 - RNA, 13 nt, Human
cuuuguauucaaa

SEQ ID NO: 2897856 - RNA, 20 nt, Human
cuuuguaugucauuuccuuc

SEQ ID NO: 2897857 - RNA, 22 nt, Human
cuuuuauaacuaguccuuuacu

SEQ ID NO: 2897858 - RNA, 12 nt, Human
cuuuguaugcac

SEQ ID NO: 2897859 - RNA, 18 nt, Human
cuuuguaucauucaucuu

SEQ ID NO: 2897860 - RNA, 19 nt, Human
cuuuguaucauucaucuuc

SEQ ID NO: 2897861 - RNA, 15 nt, Human
cuuuguaucuuccau

SEQ ID NO: 2897862 - RNA, 23 nt, Human
cuuuguaucuuccauauuuggaa

SEQ ID NO: 2897863 - RNA, 15 nt, Human
cuuuguacagagugc

SEQ ID NO: 2897864 - RNA, 19 nt, Human
cuuugguuggcagcauucc

SEQ ID NO: 2897865 - RNA, 14 nt, Human
cuuugguucuggcc

SEQ ID NO: 2897866 - RNA, 19 nt, Human
cuuugguucuggccagaau

SEQ ID NO: 2897867 - RNA, 13 nt, Human
cuuugguucuaag

SEQ ID NO: 2897868 - RNA, 14 nt, Human
cuuugguucuaagg

SEQ ID NO: 2897869 - RNA, 15 nt, Human
cuuugguucuaagga

SEQ ID NO: 2897870 - RNA, 21 nt, Human
cuuugguucuggccagaaugc

SEQ ID NO: 2897871 - RNA, 16 nt, Human
cuuugguucuaaggac

SEQ ID NO: 2897872 - RNA, 16 nt, Human
cuuugguuucugucug

SEQ ID NO: 2897873 - RNA, 19 nt, Human
cuuugagaagccuucagcu

SEQ ID NO: 2897874 - RNA, 17 nt, Human
cuuugagaagccuucag

SEQ ID NO: 2897875 - RNA, 15 nt, Human
cuuugagaagccuuc

SEQ ID NO: 2897876 - RNA, 22 nt, Human
cuuugagaagccuucagcucca

SEQ ID NO: 2897877 - RNA, 13 nt, Human
cuuugagacaguu

SEQ ID NO: 2897878 - RNA, 15 nt, Human
cuuugagacaguuuc

SEQ ID NO: 2897879 - RNA, 16 nt, Human
cuuugagacaguuucu

SEQ ID NO: 2897880 - RNA, 17 nt, Human
cuuugagacugggucuc

SEQ ID NO: 2897881 - RNA, 17 nt, Human
cuuugagacaguuucuu

SEQ ID NO: 2897882 - RNA, 18 nt, Human
cuuugagacaguuucuua

SEQ ID NO: 2897883 - RNA, 22 nt, Human
cuuugauucuccuuuuaugugu

SEQ ID NO: 2897884 - RNA, 23 nt, Human
cuuugauucuccuuuuaugugua

SEQ ID NO: 2897885 - RNA, 14 nt, Human
cuuugauugcacau

SEQ ID NO: 2897886 - RNA, 18 nt, Human
cuuugauugcacauuguu

SEQ ID NO: 2897887 - RNA, 21 nt, Human
cuuugauugcacauuguuguu

SEQ ID NO: 2897888 - RNA, 13 nt, Human
cuuugauuuacag

SEQ ID NO: 2897889 - RNA, 18 nt, Human
cuuugauuuacagcaagu

SEQ ID NO: 2897890 - RNA, 14 nt, Human
cuuugguucagcua

SEQ ID NO: 2897891 - RNA, 12 nt, Human
cuuugauuucca

SEQ ID NO: 2897892 - RNA, 20 nt, Human
cuuugauuuccaaguaauau

SEQ ID NO: 2897893 - RNA, 18 nt, Human
cuuugcacagcucuccgg

SEQ ID NO: 2897894 - RNA, 16 nt, Human
cuuugcacaggaugcu

SEQ ID NO: 2897895 - RNA, 20 nt, Human
cuuugcacaggaugcuggcc

SEQ ID NO: 2897896 - RNA, 14 nt, Human
cuuugcacauuuug

SEQ ID NO: 2897897 - RNA, 15 nt, Human
cuuugcacauuuuga

SEQ ID NO: 2897898 - RNA, 17 nt, Human
cuuugcacgacgcccuc

SEQ ID NO: 2897899 - RNA, 18 nt, Human
cuuugcacgacgcccucu

SEQ ID NO: 2897900 - RNA, 21 nt, Human
cuuugcacgacgcccucuccc

SEQ ID NO: 2897901 - RNA, 22 nt, Human
cuuugcacgacgcccucucccc

SEQ ID NO: 2897902 - RNA, 23 nt, Human
cuuugcacgacgcccucucccca

SEQ ID NO: 2897903 - RNA, 15 nt, Human
cuuugcaaaguauug

SEQ ID NO: 2897904 - RNA, 19 nt, Human
cuuugcaaaguauuguaaa

SEQ ID NO: 2897905 - RNA, 20 nt, Human
cuuugcaaaguauuguaaau

SEQ ID NO: 2897906 - RNA, 21 nt, Human
cuuugcaaaguauuguaaauu

SEQ ID NO: 2897907 - RNA, 22 nt, Human
cuuugcaaaguauuguaaauua

SEQ ID NO: 2897908 - RNA, 17 nt, Human
cuuucuaaugugugaau

SEQ ID NO: 2897909 - RNA, 15 nt, Human
cuuucuaauguuucu

SEQ ID NO: 2897910 - RNA, 23 nt, Human
cuuucuacaaagcacuagagaau

SEQ ID NO: 2897911 - RNA, 16 nt, Human
cuuucuacccagcgag

SEQ ID NO: 2897912 - RNA, 15 nt, Human
cuuucuacccagcga

SEQ ID NO: 2897913 - RNA, 17 nt, Human
cuuucuauuugacuugu

SEQ ID NO: 2897914 - RNA, 18 nt, Human
cuuucuauuugacuugug

SEQ ID NO: 2897915 - RNA, 15 nt, Human
cuuucuauuccaaag

SEQ ID NO: 2897916 - RNA, 21 nt, Human
cuuugacugaugcugagauuc

SEQ ID NO: 2897917 - RNA, 18 nt, Human
cuuugacuggagggucca

SEQ ID NO: 2897918 - RNA, 14 nt, Human
cuuugacuuucuuc

SEQ ID NO: 2897919 - RNA, 20 nt, Human
cuuugacgagucaccuucca

SEQ ID NO: 2897920 - RNA, 21 nt, Human
cuuugacgagucaccuuccag

SEQ ID NO: 2897921 - RNA, 21 nt, Human
cuuucucagccgcuucugacu

SEQ ID NO: 2897922 - RNA, 22 nt, Human
cuuucucagccgcuucugacug

SEQ ID NO: 2897923 - RNA, 14 nt, Human
cuuucuccaaaguu

SEQ ID NO: 2897924 - RNA, 15 nt, Human
cuuucuccaaaguua

SEQ ID NO: 2897925 - RNA, 20 nt, Human
cuuucuccaaaguuauccag

SEQ ID NO: 2897926 - RNA, 23 nt, Human
cuuucuccaaaguuauccagagg

SEQ ID NO: 2897927 - RNA, 13 nt, Human
cuuucuccaggac

SEQ ID NO: 2897928 - RNA, 14 nt, Human
cuuucuccaggacc

SEQ ID NO: 2897929 - RNA, 15 nt, Human
cuuucuccaggacca

SEQ ID NO: 2897930 - RNA, 18 nt, Human
cuuucucccacugaguuu

SEQ ID NO: 2897931 - RNA, 13 nt, Human
gaacuccuggccu

SEQ ID NO: 2897932 - RNA, 16 nt, Human
gaacccgggaggcaga

SEQ ID NO: 2897933 - RNA, 15 nt, Human
gaacuccugaccuca

SEQ ID NO: 2897934 - RNA, 14 nt, Human
gaacuccugaccuc

SEQ ID NO: 2897935 - RNA, 14 nt, Human
gaacuccuggccuc

SEQ ID NO: 2897936 - RNA, 19 nt, Human
gaaccccgucgaggggcuc

SEQ ID NO: 2897937 - RNA, 15 nt, Human
gaacucuuagaaaug

SEQ ID NO: 2897938 - RNA, 18 nt, Human
gaacucuuagaaaugaag

SEQ ID NO: 2897939 - RNA, 13 nt, Human
gaacucugggcuc

SEQ ID NO: 2897940 - RNA, 14 nt, Human
gaacucugggcuca

SEQ ID NO: 2897941 - RNA, 22 nt, Human
gaacucugggcucaagcaaucc

SEQ ID NO: 2897942 - RNA, 17 nt, Human
gaacugcacaugaagaa

SEQ ID NO: 2897943 - RNA, 18 nt, Human
gaacugcacaugaagaaa

SEQ ID NO: 2897944 - RNA, 20 nt, Human
gaacugcacaugaagaaaua

SEQ ID NO: 2897945 - RNA, 11 nt, Human
gaacugcagca

SEQ ID NO: 2897946 - RNA, 19 nt, Human
gaacugcagcaaucuuuga

SEQ ID NO: 2897947 - RNA, 20 nt, Human
gaacugcagcaaucuuugaa

SEQ ID NO: 2897948 - RNA, 21 nt, Human
gaacugcagcaaucuuugaaa

SEQ ID NO: 2897949 - RNA, 13 nt, Human
gaacugaaaagag

SEQ ID NO: 2897950 - RNA, 14 nt, Human
gaacugaaaagaga

SEQ ID NO: 2897951 - RNA, 17 nt, Human
gaacugaaaagagagca

SEQ ID NO: 2897952 - RNA, 18 nt, Human
gaacugaaaagagagcag

SEQ ID NO: 2897953 - RNA, 19 nt, Human
gaacugaaaagagagcaga

SEQ ID NO: 2897954 - RNA, 21 nt, Human
gaacugaaaagagagcagaga

SEQ ID NO: 2897955 - RNA, 18 nt, Human
gaacccagcaguucuguu

SEQ ID NO: 2897956 - RNA, 19 nt, Human
gaacccagcaguucuguua

SEQ ID NO: 2897957 - RNA, 12 nt, Human
gaacccagggcu

SEQ ID NO: 2897958 - RNA, 13 nt, Human
gaacccagggcuc

SEQ ID NO: 2897959 - RNA, 14 nt, Human
gaacccagggcucu

SEQ ID NO: 2897960 - RNA, 17 nt, Human
gaacccagggcucugcc

SEQ ID NO: 2897961 - RNA, 18 nt, Human
gaacccagggcucugccc

SEQ ID NO: 2897962 - RNA, 20 nt, Human
gaacccagggcucugcccca

SEQ ID NO: 2897963 - RNA, 21 nt, Human
gaacccagggcucugccccag

SEQ ID NO: 2897964 - RNA, 21 nt, Human
gaaccccuacaugaaacagaa

SEQ ID NO: 2897965 - RNA, 21 nt, Human
gaaccacgcgggggccuugag

SEQ ID NO: 2897966 - RNA, 21 nt, Human
gaaccauguugguugcacuuu

SEQ ID NO: 2897967 - RNA, 16 nt, Human
gaaccaugaagacagg

SEQ ID NO: 2897968 - RNA, 17 nt, Human
gaaccaugaagacagga

SEQ ID NO: 2897969 - RNA, 18 nt, Human
gaaccaugaagacaggau

SEQ ID NO: 2897970 - RNA, 20 nt, Human
gaaccauccacuuacauaua

SEQ ID NO: 2897971 - RNA, 23 nt, Human
gaaccaccacacccagcccacuu

SEQ ID NO: 2897972 - RNA, 19 nt, Human
gaaccacuacaugcagccc

SEQ ID NO: 2897973 - RNA, 16 nt, Human
gaagacacugaugggc

SEQ ID NO: 2897974 - RNA, 18 nt, Human
gaacugccauuauuuucu

SEQ ID NO: 2897975 - RNA, 21 nt, Human
gaagacacugaugggcaaccc

SEQ ID NO: 2897976 - RNA, 23 nt, Human
gaagacaccagagcagaugcaga

SEQ ID NO: 2897977 - RNA, 18 nt, Human
gaagacagagaccuccug

SEQ ID NO: 2897978 - RNA, 14 nt, Human
gaagacauuucuuu

SEQ ID NO: 2897979 - RNA, 15 nt, Human
gaagacauuucuuuu

SEQ ID NO: 2897980 - RNA, 17 nt, Human
gaagacauuucuuuucu

SEQ ID NO: 2897981 - RNA, 23 nt, Human
gaagacauuucuuuucuuuuuac

SEQ ID NO: 2897982 - RNA, 15 nt, Human
gaagacaggacagug

SEQ ID NO: 2897983 - RNA, 21 nt, Human
gaagacagagaccuccugccu

SEQ ID NO: 2897984 - RNA, 12 nt, Human
gaagacaggaaa

SEQ ID NO: 2897985 - RNA, 13 nt, Human
gaagacaggaaag

SEQ ID NO: 2897986 - RNA, 19 nt, Human
gaagaccucaccuagaaau

SEQ ID NO: 2897987 - RNA, 22 nt, Human
gaagaccguuuaccuagaagaa

SEQ ID NO: 2897988 - RNA, 19 nt, Human
gaagaccccugacucauca

SEQ ID NO: 2897989 - RNA, 20 nt, Human
gaagaccucaccuagaaauu

SEQ ID NO: 2897990 - RNA, 22 nt, Human
gaagaccuggcaaggacacaga

SEQ ID NO: 2897991 - RNA, 14 nt, Human
gaagacccuccccg

SEQ ID NO: 2897992 - RNA, 16 nt, Human
gaagacucauucuucu

SEQ ID NO: 2897993 - RNA, 21 nt, Human
gaagacgccgucuccauggca

SEQ ID NO: 2897994 - RNA, 15 nt, Human
gaagacgccugagcu

SEQ ID NO: 2897995 - RNA, 16 nt, Human
gaagacgccugagcuc

SEQ ID NO: 2897996 - RNA, 18 nt, Human
gaagacucauucuucugu

SEQ ID NO: 2897997 - RNA, 17 nt, Human
gaagacucauucuucug

SEQ ID NO: 2897998 - RNA, 14 nt, Human
gaagcacagcuuca

SEQ ID NO: 2897999 - RNA, 13 nt, Human
gaagcacagcuuc

SEQ ID NO: 2898000 - RNA, 20 nt, Human
gaagcacaugcaccuaccca

SEQ ID NO: 2898001 - RNA, 18 nt, Human
gaagcacugggaucacag

SEQ ID NO: 2898002 - RNA, 21 nt, Human
gaagcaccccaugccaaagcu

SEQ ID NO: 2898003 - RNA, 16 nt, Human
gaagcaccccaugcca

SEQ ID NO: 2898004 - RNA, 18 nt, Human
gaagcagguugaggggcu

SEQ ID NO: 2898005 - RNA, 22 nt, Human
gaagcagguugaggggcuccug

SEQ ID NO: 2898006 - RNA, 19 nt, Human
gaagcagguugaggggcuc

SEQ ID NO: 2898007 - RNA, 23 nt, Human
gaagcagguugaggggcuccugg

SEQ ID NO: 2898008 - RNA, 19 nt, Human
gaagcaggcuacacugaca

SEQ ID NO: 2898009 - RNA, 23 nt, Human
gaagcaggcuacacugacacugg

SEQ ID NO: 2898010 - RNA, 14 nt, Human
gaagcaggcuacac

SEQ ID NO: 2898011 - RNA, 18 nt, Human
gaagcaggcuacacugac

SEQ ID NO: 2898012 - RNA, 23 nt, Human
gaagcacacucuggucuuggaau

SEQ ID NO: 2898013 - RNA, 22 nt, Human
gaaccaccacacccagcccacu

SEQ ID NO: 2898014 - RNA, 21 nt, Human
gaaccaccacacccagcccac

SEQ ID NO: 2898015 - RNA, 20 nt, Human
gaaccaccacacccagccca

SEQ ID NO: 2898016 - RNA, 18 nt, Human
gaaccaccacacccagcc

SEQ ID NO: 2898017 - RNA, 17 nt, Human
gaaaaaaguuccuuccu

SEQ ID NO: 2898018 - RNA, 22 nt, Human
gaaaacuugugugaaauuuucu

SEQ ID NO: 2898019 - RNA, 12 nt, Human
gaaaacuuuaaa

SEQ ID NO: 2898020 - RNA, 13 nt, Human
gaaaacuuuaaaa

SEQ ID NO: 2898021 - RNA, 19 nt, Human
gaaaacuuuaaaaaauauu

SEQ ID NO: 2898022 - RNA, 20 nt, Human
gaaaacuuuaaaaaauauuu

SEQ ID NO: 2898023 - RNA, 22 nt, Human
gaaaacuuuaaaaaauauuuau

SEQ ID NO: 2898024 - RNA, 11 nt, Human
gaaaagaaaua

SEQ ID NO: 2898025 - RNA, 14 nt, Human
gaaaagaaauaaua

SEQ ID NO: 2898026 - RNA, 15 nt, Human
gaaaagaaauaauaa

SEQ ID NO: 2898027 - RNA, 21 nt, Human
gaaaagaaaauuuuuguagua

SEQ ID NO: 2898028 - RNA, 10 nt, Human
gaaaaaagcu

SEQ ID NO: 2898029 - RNA, 11 nt, Human
gaaaaaagcuc

SEQ ID NO: 2898030 - RNA, 13 nt, Human
gaaaaaagcucau

SEQ ID NO: 2898031 - RNA, 17 nt, Human
gaaaaaauaacacacau

SEQ ID NO: 2898032 - RNA, 13 nt, Human
gaaaaaaauguug

SEQ ID NO: 2898033 - RNA, 21 nt, Human
gaaaaaaauguuguuuccuaa

SEQ ID NO: 2898034 - RNA, 19 nt, Human
gaaaaaacaccuagcuuua

SEQ ID NO: 2898035 - RNA, 16 nt, Human
gaaaagacaagaaaau

SEQ ID NO: 2898036 - RNA, 19 nt, Human
gaaaagaacguauuuuaaa

SEQ ID NO: 2898037 - RNA, 19 nt, Human
gaaaagaacuguuuacugc

SEQ ID NO: 2898038 - RNA, 20 nt, Human
gaaaagauguaccuggugga

SEQ ID NO: 2898039 - RNA, 14 nt, Human
gaaaauguucauca

SEQ ID NO: 2898040 - RNA, 22 nt, Human
gaaaauuaggauuucaugauuu

SEQ ID NO: 2898041 - RNA, 17 nt, Human
gaaaauguugagaaucc

SEQ ID NO: 2898042 - RNA, 15 nt, Human
gaaaauguugagaau

SEQ ID NO: 2898043 - RNA, 19 nt, Human
gaaaauguguccuaucuau

SEQ ID NO: 2898044 - RNA, 15 nt, Human
gaaaaugugugugug

SEQ ID NO: 2898045 - RNA, 12 nt, Human
gaaaaugugugu

SEQ ID NO: 2898046 - RNA, 23 nt, Human
gaaaagauucuucuguguuuaua

SEQ ID NO: 2898047 - RNA, 14 nt, Human
gaaaagauuuaagc

SEQ ID NO: 2898048 - RNA, 15 nt, Human
gaaaagauucuucug

SEQ ID NO: 2898049 - RNA, 17 nt, Human
gaaaauuauuuuaaaca

SEQ ID NO: 2898050 - RNA, 17 nt, Human
gaaaauucaaaaagugu

SEQ ID NO: 2898051 - RNA, 19 nt, Human
gaaaauucaaaaaguguuu

SEQ ID NO: 2898052 - RNA, 20 nt, Human
gaaaauucaaaaaguguuua

SEQ ID NO: 2898053 - RNA, 21 nt, Human
gaaaauucaaaaaguguuuau

SEQ ID NO: 2898054 - RNA, 21 nt, Human
gaaacaacagcuuuaaaagaa

SEQ ID NO: 2898055 - RNA, 15 nt, Human
gaaacaacagcuuua

SEQ ID NO: 2898056 - RNA, 14 nt, Human
gaaacaaauaauca

SEQ ID NO: 2898057 - RNA, 17 nt, Human
gaaacaaauaaucacau

SEQ ID NO: 2898058 - RNA, 19 nt, Human
gaaacaaauaaucacauug

SEQ ID NO: 2898059 - RNA, 15 nt, Human
gaaagaaagaaggaa

SEQ ID NO: 2898060 - RNA, 17 nt, Human
gaaacuggcacugaauu

SEQ ID NO: 2898061 - RNA, 12 nt, Human
gaaacuggcccc

SEQ ID NO: 2898062 - RNA, 15 nt, Human
gaaacuggccccgga

SEQ ID NO: 2898063 - RNA, 16 nt, Human
gaaacuggccccggau

SEQ ID NO: 2898064 - RNA, 13 nt, Human
gaaagggcccaga

SEQ ID NO: 2898065 - RNA, 22 nt, Human
gaaagaaaguugcacggcugcu

SEQ ID NO: 2898066 - RNA, 23 nt, Human
gaaagaaaguugcacggcugcug

SEQ ID NO: 2898067 - RNA, 18 nt, Human
gaaaucucccaugugcau

SEQ ID NO: 2898068 - RNA, 20 nt, Human
gaaaucuccuuuagccauca

SEQ ID NO: 2898069 - RNA, 20 nt, Human
gaaaucugucaagaguaguu

SEQ ID NO: 2898070 - RNA, 19 nt, Human
gaaaucuuacagcugggug

SEQ ID NO: 2898071 - RNA, 14 nt, Human
gaaaucuuuuaaaa

SEQ ID NO: 2898072 - RNA, 23 nt, Human
gaacaaaacacacgcgcgcacac

SEQ ID NO: 2898073 - RNA, 13 nt, Human
gaacaaaaggguc

SEQ ID NO: 2898074 - RNA, 14 nt, Human
gaacaaaaggguca

SEQ ID NO: 2898075 - RNA, 14 nt, Human
gaaauuuuuguaaa

SEQ ID NO: 2898076 - RNA, 15 nt, Human
gaaauuuuuguaaau

SEQ ID NO: 2898077 - RNA, 16 nt, Human
gaaauuuuuguaaauc

SEQ ID NO: 2898078 - RNA, 21 nt, Human
gaaauuuuuguaaaucacauc

SEQ ID NO: 2898079 - RNA, 14 nt, Human
gaacaaaaaaacca

SEQ ID NO: 2898080 - RNA, 18 nt, Human
gaacaaaaaaaccacaaa

SEQ ID NO: 2898081 - RNA, 19 nt, Human
gaacaaaaaaaccacaaag

SEQ ID NO: 2898082 - RNA, 20 nt, Human
gaacaaaaaaaccacaaagg

SEQ ID NO: 2898083 - RNA, 15 nt, Human
gaacaaaaucuguug

SEQ ID NO: 2898084 - RNA, 13 nt, Human
gaacaaagcuguu

SEQ ID NO: 2898085 - RNA, 14 nt, Human
gaacaaagcuguua

SEQ ID NO: 2898086 - RNA, 15 nt, Human
gaacaaagcuguuaa

SEQ ID NO: 2898087 - RNA, 16 nt, Human
gaacaaagcuguuaaa

SEQ ID NO: 2898088 - RNA, 18 nt, Human
gaacaaagcuguuaaacu

SEQ ID NO: 2898089 - RNA, 19 nt, Human
gaacaaagcuguuaaacug

SEQ ID NO: 2898090 - RNA, 20 nt, Human
gaacaaagcuguuaaacugu

SEQ ID NO: 2898091 - RNA, 21 nt, Human
gaacaaagcuguuaaacuguu

SEQ ID NO: 2898092 - RNA, 22 nt, Human
gaacaaagcuguuaaacuguua

SEQ ID NO: 2898093 - RNA, 22 nt, Human
gaacaaaggacagaguaugaac

SEQ ID NO: 2898094 - RNA, 17 nt, Human
gaacaaagugaaggaca

SEQ ID NO: 2898095 - RNA, 15 nt, Human
gaacaaagugagaca

SEQ ID NO: 2898096 - RNA, 19 nt, Human
gaacaaauauucagaauau

SEQ ID NO: 2898097 - RNA, 16 nt, Human
gaaagggcccagagag

SEQ ID NO: 2898098 - RNA, 15 nt, Human
gaaagggcccagaga

SEQ ID NO: 2898099 - RNA, 20 nt, Human
gaaagggccuugacaucagu

SEQ ID NO: 2898100 - RNA, 14 nt, Human
gaaagggaucauca

SEQ ID NO: 2898101 - RNA, 20 nt, Human
gaaauccuaguuuccucucc

SEQ ID NO: 2898102 - RNA, 21 nt, Human
gaaauccuaguuuccucuccu

SEQ ID NO: 2898103 - RNA, 22 nt, Human
gaaauccuaguuuccucuccuu

SEQ ID NO: 2898104 - RNA, 23 nt, Human
gaaauccuaguuuccucuccuuc

SEQ ID NO: 2898105 - RNA, 18 nt, Human
gaaaucccuguuuaauau

SEQ ID NO: 2898106 - RNA, 19 nt, Human
gaaaucccuguuuaauauu

SEQ ID NO: 2898107 - RNA, 21 nt, Human
gaaaucccuguuuaauauuua

SEQ ID NO: 2898108 - RNA, 22 nt, Human
gaaaucccuguuuaauauuuaa

SEQ ID NO: 2898109 - RNA, 23 nt, Human
gaaaucccuguuuaauauuuaaa

SEQ ID NO: 2898110 - RNA, 12 nt, Human
gaaaucucaccc

SEQ ID NO: 2898111 - RNA, 15 nt, Human
gaaaucuaguauuuc

SEQ ID NO: 2898112 - RNA, 19 nt, Human
gaaauccuugacuggaccu

SEQ ID NO: 2898113 - RNA, 12 nt, Human
gaacaaguuuua

SEQ ID NO: 2898114 - RNA, 17 nt, Human
gaacaauagguaaagcu

SEQ ID NO: 2898115 - RNA, 17 nt, Human
gaacacaaacuguaaau

SEQ ID NO: 2898116 - RNA, 13 nt, Human
gaacaauuuucuu

SEQ ID NO: 2898117 - RNA, 20 nt, Human
gaacacaaacacauuguuau

SEQ ID NO: 2898118 - RNA, 22 nt, Human
gaacacaaacacauuguuauuu

SEQ ID NO: 2898119 - RNA, 19 nt, Human
gaacacaaacuguaaauaa

SEQ ID NO: 2898120 - RNA, 11 nt, Human
gaacacaggca

SEQ ID NO: 2898121 - RNA, 17 nt, Human
gaacacaggcaaaaucc

SEQ ID NO: 2898122 - RNA, 12 nt, Human
gaacacaggcag

SEQ ID NO: 2898123 - RNA, 13 nt, Human
gaacacaggcagc

SEQ ID NO: 2898124 - RNA, 14 nt, Human
gaacacaggcagcu

SEQ ID NO: 2898125 - RNA, 16 nt, Human
gaacacaggcagcuuu

SEQ ID NO: 2898126 - RNA, 19 nt, Human
gaacacaggcagcuuucua

SEQ ID NO: 2898127 - RNA, 20 nt, Human
gaacacauaauucaggaagc

SEQ ID NO: 2898128 - RNA, 17 nt, Human
gaacacauaauucagga

SEQ ID NO: 2898129 - RNA, 22 nt, Human
gaacacuaacucaccagcccca

SEQ ID NO: 2898130 - RNA, 19 nt, Human
gaacacuaacucaccagcc

SEQ ID NO: 2898131 - RNA, 14 nt, Human
gaacacccucgaag

SEQ ID NO: 2898132 - RNA, 13 nt, Human
gaacacccuuaga

SEQ ID NO: 2898133 - RNA, 23 nt, Human
gaacacccuuagaaaaugugucc

SEQ ID NO: 2898134 - RNA, 16 nt, Human
gaacacgcguauuuac

SEQ ID NO: 2898135 - RNA, 17 nt, Human
gaacacgcguauuuaca

SEQ ID NO: 2898136 - RNA, 18 nt, Human
gcaaaaauccgaggugcu

SEQ ID NO: 2898137 - RNA, 12 nt, Human
gcaaaaaugcua

SEQ ID NO: 2898138 - RNA, 13 nt, Human
gcaaaaaugcuaa

SEQ ID NO: 2898139 - RNA, 14 nt, Human
gcaaaaaugcuaau

SEQ ID NO: 2898140 - RNA, 15 nt, Human
gcaaaaaugcuaaua

SEQ ID NO: 2898141 - RNA, 12 nt, Human
gcaaaaaaauua

SEQ ID NO: 2898142 - RNA, 21 nt, Human
gcaaaaaaauuaaaauggaug

SEQ ID NO: 2898143 - RNA, 20 nt, Human
gauuucaguuuuaacaaaug

SEQ ID NO: 2898144 - RNA, 23 nt, Human
gauuucaguuuuaacaaaugcua

SEQ ID NO: 2898145 - RNA, 16 nt, Human
gauuucauaccucaga

SEQ ID NO: 2898146 - RNA, 23 nt, Human
gauuucauaccucagaauguaaa

SEQ ID NO: 2898147 - RNA, 15 nt, Human
gauuuaauaaaauaa

SEQ ID NO: 2898148 - RNA, 15 nt, Human
gauuucagcucacug

SEQ ID NO: 2898149 - RNA, 20 nt, Human
gauuucagcucacugcaacc

SEQ ID NO: 2898150 - RNA, 17 nt, Human
gauuucagcucacugca

SEQ ID NO: 2898151 - RNA, 16 nt, Human
gauuuaagcacaaacu

SEQ ID NO: 2898152 - RNA, 14 nt, Human
gauuuaauaaaaua

SEQ ID NO: 2898153 - RNA, 13 nt, Human
gauuuaauaaaau

SEQ ID NO: 2898154 - RNA, 20 nt, Human
gauucuucuguguuuauaaa

SEQ ID NO: 2898155 - RNA, 16 nt, Human
gauucuucuguguuua

SEQ ID NO: 2898156 - RNA, 21 nt, Human
gauucuucugcuucagccucc

SEQ ID NO: 2898157 - RNA, 15 nt, Human
gauucuguggaacaa

SEQ ID NO: 2898158 - RNA, 21 nt, Human
gauucuccugccucagccucc

SEQ ID NO: 2898159 - RNA, 20 nt, Human
gauucuccugccucagccuc

SEQ ID NO: 2898160 - RNA, 19 nt, Human
gauucuccugccucagccu

SEQ ID NO: 2898161 - RNA, 12 nt, Human
gaugugcaagcg

SEQ ID NO: 2898162 - RNA, 19 nt, Human
gaugugcaagcgacgacag

SEQ ID NO: 2898163 - RNA, 14 nt, Human
gaugugcaauugau

SEQ ID NO: 2898164 - RNA, 16 nt, Human
gaugugcaauugauuu

SEQ ID NO: 2898165 - RNA, 19 nt, Human
gaugugcaauugauuucuu

SEQ ID NO: 2898166 - RNA, 14 nt, Human
gaugugcagcagau

SEQ ID NO: 2898167 - RNA, 15 nt, Human
gaugugcagcagauu

SEQ ID NO: 2898168 - RNA, 21 nt, Human
gaugugcagcagauuggaagg

SEQ ID NO: 2898169 - RNA, 23 nt, Human
gaugugcagcagauuggaaggag

SEQ ID NO: 2898170 - RNA, 14 nt, Human
gaugugcacccaug

SEQ ID NO: 2898171 - RNA, 18 nt, Human
gaugugauuguggaaugg

SEQ ID NO: 2898172 - RNA, 16 nt, Human
gaugugauuguggaau

SEQ ID NO: 2898173 - RNA, 15 nt, Human
gaugugauuguggaa

SEQ ID NO: 2898174 - RNA, 15 nt, Human
gaugugauauucuaa

SEQ ID NO: 2898175 - RNA, 20 nt, Human
gaugugauucaaaagaugcc

SEQ ID NO: 2898176 - RNA, 19 nt, Human
gaugugauauauuccuaaa

SEQ ID NO: 2898177 - RNA, 17 nt, Human
gauguccucaccacaug

SEQ ID NO: 2898178 - RNA, 16 nt, Human
gaugucucuaaagcac

SEQ ID NO: 2898179 - RNA, 21 nt, Human
gaugucugaacuuugggaagc

SEQ ID NO: 2898180 - RNA, 14 nt, Human
gaugucugccaauu

SEQ ID NO: 2898181 - RNA, 22 nt, Human
gaugucugccaauuuuugccuu

SEQ ID NO: 2898182 - RNA, 19 nt, Human
gaugucuguuugcugaugg

SEQ ID NO: 2898183 - RNA, 20 nt, Human
gaugucuguuugcugauggu

SEQ ID NO: 2898184 - RNA, 21 nt, Human
gaugucugccaauuuuugccu

SEQ ID NO: 2898185 - RNA, 13 nt, Human
gaugucuuuuaua

SEQ ID NO: 2898186 - RNA, 18 nt, Human
gaugucuuuuauagugga

SEQ ID NO: 2898187 - RNA, 14 nt, Human
gaugucuuuucuug

SEQ ID NO: 2898188 - RNA, 14 nt, Human
gaugugacuguaua

SEQ ID NO: 2898189 - RNA, 18 nt, Human
gaucuggguucacugcaa

SEQ ID NO: 2898190 - RNA, 17 nt, Human
gaucuggaagggccaag

SEQ ID NO: 2898191 - RNA, 22 nt, Human
gaucuggaagggccaaggucug

SEQ ID NO: 2898192 - RNA, 20 nt, Human
gaucuggguucacugcaacc

SEQ ID NO: 2898193 - RNA, 15 nt, Human
gaugauucagaaauu

SEQ ID NO: 2898194 - RNA, 15 nt, Human
gaugauucaggugca

SEQ ID NO: 2898195 - RNA, 16 nt, Human
gaugauucaggugcag

SEQ ID NO: 2898196 - RNA, 23 nt, Human
gaugauuaaauaagauucuaacg

SEQ ID NO: 2898197 - RNA, 12 nt, Human
gaugcugggugg

SEQ ID NO: 2898198 - RNA, 17 nt, Human
gaugcuggguggcccug

SEQ ID NO: 2898199 - RNA, 19 nt, Human
gaugcuguaacuuaaaaua

SEQ ID NO: 2898200 - RNA, 21 nt, Human
gaugaugaaaugaggucagag

SEQ ID NO: 2898201 - RNA, 16 nt, Human
gaugagggaugggccu

SEQ ID NO: 2898202 - RNA, 18 nt, Human
gaugagggaugggccugg

SEQ ID NO: 2898203 - RNA, 19 nt, Human
gaugagggaugggccuggc

SEQ ID NO: 2898204 - RNA, 19 nt, Human
gaugaugagaauuucuaaa

SEQ ID NO: 2898205 - RNA, 21 nt, Human
gaugauggucuucagccucuu

SEQ ID NO: 2898206 - RNA, 22 nt, Human
gaugaugguugcaaaagacuaa

SEQ ID NO: 2898207 - RNA, 14 nt, Human
gaugaugugccugg

SEQ ID NO: 2898208 - RNA, 15 nt, Human
gaugaugugccuggg

SEQ ID NO: 2898209 - RNA, 17 nt, Human
gaugaugugccugggug

SEQ ID NO: 2898210 - RNA, 13 nt, Human
gaugauguguaua

SEQ ID NO: 2898211 - RNA, 16 nt, Human
gaugagcucuacccag

SEQ ID NO: 2898212 - RNA, 11 nt, Human
gaugagcucua

SEQ ID NO: 2898213 - RNA, 14 nt, Human
gaugagcugggccg

SEQ ID NO: 2898214 - RNA, 20 nt, Human
gaugagcucuacccagggcc

SEQ ID NO: 2898215 - RNA, 19 nt, Human
gaugagcucuacccagggc

SEQ ID NO: 2898216 - RNA, 13 nt, Human
gaugcuguuugac

SEQ ID NO: 2898217 - RNA, 14 nt, Human
gaugcuguuugaca

SEQ ID NO: 2898218 - RNA, 20 nt, Human
gaugcuuagagggauuucuu

SEQ ID NO: 2898219 - RNA, 22 nt, Human
gaugcuuagagggauuucuuug

SEQ ID NO: 2898220 - RNA, 21 nt, Human
gaugcuuuaagugcacaacau

SEQ ID NO: 2898221 - RNA, 14 nt, Human
gaugcuuuaccaaa

SEQ ID NO: 2898222 - RNA, 20 nt, Human
gaugcuuuaccaaacagcaa

SEQ ID NO: 2898223 - RNA, 21 nt, Human
gaugcuuuaccaaacagcaaa

SEQ ID NO: 2898224 - RNA, 16 nt, Human
gauggaggggaguguu

SEQ ID NO: 2898225 - RNA, 23 nt, Human
gauggaggaaaaccaagccgugg

SEQ ID NO: 2898226 - RNA, 22 nt, Human
gauggagcgcaccugcccccug

SEQ ID NO: 2898227 - RNA, 16 nt, Human
gaugcuuuugucuaau

SEQ ID NO: 2898228 - RNA, 18 nt, Human
gauggauaaccuauauga

SEQ ID NO: 2898229 - RNA, 17 nt, Human
gauggaguuucuaaggu

SEQ ID NO: 2898230 - RNA, 13 nt, Human
gauggaguuucua

SEQ ID NO: 2898231 - RNA, 15 nt, Human
gauggaguuucuaag

SEQ ID NO: 2898232 - RNA, 16 nt, Human
gauggaguucuugugc

SEQ ID NO: 2898233 - RNA, 18 nt, Human
gauggaguucuugugcca

SEQ ID NO: 2898234 - RNA, 19 nt, Human
gauggaguucuugugccau

SEQ ID NO: 2898235 - RNA, 19 nt, Human
gauguaccaugaaacaaag

SEQ ID NO: 2898236 - RNA, 20 nt, Human
gauguaaucucucugcagcu

SEQ ID NO: 2898237 - RNA, 21 nt, Human
gauguaaucucucugcagcug

SEQ ID NO: 2898238 - RNA, 22 nt, Human
gauguaaucucucugcagcugc

SEQ ID NO: 2898239 - RNA, 23 nt, Human
gauguaaucucucugcagcugcc

SEQ ID NO: 2898240 - RNA, 13 nt, Human
gauguaauguuuu

SEQ ID NO: 2898241 - RNA, 11 nt, Human
gauguaauuga

SEQ ID NO: 2898242 - RNA, 12 nt, Human
gauguaauuuag

SEQ ID NO: 2898243 - RNA, 22 nt, Human
gauguaauuuaggguacuaaau

SEQ ID NO: 2898244 - RNA, 23 nt, Human
gauguaauuuaggguacuaaauu

SEQ ID NO: 2898245 - RNA, 16 nt, Human
gauguacaauuaaaaa

SEQ ID NO: 2898246 - RNA, 20 nt, Human
gaugucaucagagcuccucu

SEQ ID NO: 2898247 - RNA, 14 nt, Human
gaugucauguguuc

SEQ ID NO: 2898248 - RNA, 16 nt, Human
gaugucauguguuccc

SEQ ID NO: 2898249 - RNA, 17 nt, Human
gaugucccaacuuguaa

SEQ ID NO: 2898250 - RNA, 21 nt, Human
gauguccucaccacaugcgga

SEQ ID NO: 2898251 - RNA, 16 nt, Human
gaugucccugggccag

SEQ ID NO: 2898252 - RNA, 19 nt, Human
gaugucccugggccagggu

SEQ ID NO: 2898253 - RNA, 20 nt, Human
gaugucccugggccaggguc

SEQ ID NO: 2898254 - RNA, 21 nt, Human
gaugucccugggccagggucu

SEQ ID NO: 2898255 - RNA, 22 nt, Human
gaugucccugggccagggucug

SEQ ID NO: 2898256 - RNA, 19 nt, Human
gaugucccuugaugcacag

SEQ ID NO: 2898257 - RNA, 20 nt, Human
gaugucccuugaugcacaga

SEQ ID NO: 2898258 - RNA, 21 nt, Human
gaugucccuugaugcacagag

SEQ ID NO: 2898259 - RNA, 22 nt, Human
gaugucccuugaugcacagaga

SEQ ID NO: 2898260 - RNA, 18 nt, Human
gaugucccaacuuguaaa

SEQ ID NO: 2898261 - RNA, 13 nt, Human
gcaauaccaagua

SEQ ID NO: 2898262 - RNA, 19 nt, Human
gcaauagaagugcuccccu

SEQ ID NO: 2898263 - RNA, 19 nt, Human
gcaauaaacgcauuaucag

SEQ ID NO: 2898264 - RNA, 16 nt, Human
gcaauaaaauuauuug

SEQ ID NO: 2898265 - RNA, 18 nt, Human
gcaauaaaauuauuugca

SEQ ID NO: 2898266 - RNA, 19 nt, Human
gcaauaaaauuauuugcag

SEQ ID NO: 2898267 - RNA, 19 nt, Human
gcacacaccagagcccacc

SEQ ID NO: 2898268 - RNA, 18 nt, Human
gcacacaccagagcccac

SEQ ID NO: 2898269 - RNA, 17 nt, Human
gcacacaccagagccca

SEQ ID NO: 2898270 - RNA, 16 nt, Human
gcacacaccagagccc

SEQ ID NO: 2898271 - RNA, 15 nt, Human
gcacacaccagagcc

SEQ ID NO: 2898272 - RNA, 14 nt, Human
gcacacaccagagc

SEQ ID NO: 2898273 - RNA, 12 nt, Human
gcacacaccaga

SEQ ID NO: 2898274 - RNA, 16 nt, Human
gcaaaagacuaauuua

SEQ ID NO: 2898275 - RNA, 14 nt, Human
gcaaaacuuuuaaa

SEQ ID NO: 2898276 - RNA, 16 nt, Human
gcaaaacuuuuaaacu

SEQ ID NO: 2898277 - RNA, 17 nt, Human
gcaaaacuuuuaaacua

SEQ ID NO: 2898278 - RNA, 12 nt, Human
gcaaaagaaaaa

SEQ ID NO: 2898279 - RNA, 21 nt, Human
gcaaaaccacuagaacucucc

SEQ ID NO: 2898280 - RNA, 20 nt, Human
gcaaaacuaaauacuugcuc

SEQ ID NO: 2898281 - RNA, 23 nt, Human
gcaaaacuaaauacuugcuccau

SEQ ID NO: 2898282 - RNA, 18 nt, Human
gcaacccccagccugcua

SEQ ID NO: 2898283 - RNA, 17 nt, Human
gcaacccccagccugcu

SEQ ID NO: 2898284 - RNA, 21 nt, Human
gcaacccuuaccccuuagccu

SEQ ID NO: 2898285 - RNA, 18 nt, Human
gcaaccgccucaaaaugu

SEQ ID NO: 2898286 - RNA, 14 nt, Human
gcaaccgcuucccu

SEQ ID NO: 2898287 - RNA, 12 nt, Human
gcaaccucccaa

SEQ ID NO: 2898288 - RNA, 17 nt, Human
gcaaccucccaacccag

SEQ ID NO: 2898289 - RNA, 18 nt, Human
gcaaccuccgccucuugg

SEQ ID NO: 2898290 - RNA, 12 nt, Human
gcaccuccugcc

SEQ ID NO: 2898291 - RNA, 14 nt, Human
gcacacagucaccu

SEQ ID NO: 2898292 - RNA, 20 nt, Human
gcacacaccagagcccaccu

SEQ ID NO: 2898293 - RNA, 11 nt, Human
gcacacacugu

SEQ ID NO: 2898294 - RNA, 15 nt, Human
gcacacacucagugc

SEQ ID NO: 2898295 - RNA, 23 nt, Human
gcacacagcacgggggccaagga

SEQ ID NO: 2898296 - RNA, 11 nt, Human
gcacacagcac

SEQ ID NO: 2898297 - RNA, 13 nt, Human
gcacacagaaaua

SEQ ID NO: 2898298 - RNA, 14 nt, Human
gcacacagaaauau

SEQ ID NO: 2898299 - RNA, 15 nt, Human
gcacacagaaauaua

SEQ ID NO: 2898300 - RNA, 17 nt, Human
gcacacagaaauauaua

SEQ ID NO: 2898301 - RNA, 18 nt, Human
gcacacagaaauauauau

SEQ ID NO: 2898302 - RNA, 20 nt, Human
gcacacagaaauauauauac

SEQ ID NO: 2898303 - RNA, 22 nt, Human
gcacacagaaauauauauacau

SEQ ID NO: 2898304 - RNA, 23 nt, Human
gcacacagaaauauauauacaua

SEQ ID NO: 2898305 - RNA, 18 nt, Human
gcaccucagccugcacag

SEQ ID NO: 2898306 - RNA, 18 nt, Human
gcaccuaccaccacgccc

SEQ ID NO: 2898307 - RNA, 17 nt, Human
gcaccuaccaccacgcc

SEQ ID NO: 2898308 - RNA, 12 nt, Human
gcacucuagauu

SEQ ID NO: 2898309 - RNA, 13 nt, Human
gcacucuagauuc

SEQ ID NO: 2898310 - RNA, 21 nt, Human
gcacucgugugcaacagacaa

SEQ ID NO: 2898311 - RNA, 11 nt, Human
gcacucuagau

SEQ ID NO: 2898312 - RNA, 15 nt, Human
gcacuccagccuggg

SEQ ID NO: 2898313 - RNA, 19 nt, Human
gcacucaaccuuaagaccu

SEQ ID NO: 2898314 - RNA, 21 nt, Human
gcacuccagccugggcgacag

SEQ ID NO: 2898315 - RNA, 17 nt, Human
gcacuccagccugggca

SEQ ID NO: 2898316 - RNA, 16 nt, Human
gcacuccagccugggc

SEQ ID NO: 2898317 - RNA, 22 nt, Human
gcacuaugaggaauaauuauuu

SEQ ID NO: 2898318 - RNA, 22 nt, Human
gcacuauagccuaggugacaga

SEQ ID NO: 2898319 - RNA, 13 nt, Human
gcauugggauuuu

SEQ ID NO: 2898320 - RNA, 21 nt, Human
gcaugugaaaaucaaauacau

SEQ ID NO: 2898321 - RNA, 20 nt, Human
gcaugugaucacgccuggcu

SEQ ID NO: 2898322 - RNA, 14 nt, Human
gcaugucaaacaug

SEQ ID NO: 2898323 - RNA, 21 nt, Human
gcaugucaaacaugagaugug

SEQ ID NO: 2898324 - RNA, 20 nt, Human
gcaugucaaacaugagaugu

SEQ ID NO: 2898325 - RNA, 21 nt, Human
gcaugucagacagaacuugaa

SEQ ID NO: 2898326 - RNA, 16 nt, Human
gcaugucccaucacgu

SEQ ID NO: 2898327 - RNA, 23 nt, Human
gcaugucccuaccgagucucuuc

SEQ ID NO: 2898328 - RNA, 13 nt, Human
gcaugggccuggc

SEQ ID NO: 2898329 - RNA, 15 nt, Human
gcaugggccagcccc

SEQ ID NO: 2898330 - RNA, 17 nt, Human
gcaugggccagccccuc

SEQ ID NO: 2898331 - RNA, 12 nt, Human
gcauggcccugg

SEQ ID NO: 2898332 - RNA, 15 nt, Human
gcaugggcacucccu

SEQ ID NO: 2898333 - RNA, 14 nt, Human
gcauguaggacccu

SEQ ID NO: 2898334 - RNA, 20 nt, Human
gcauguaccauuugcauggc

SEQ ID NO: 2898335 - RNA, 18 nt, Human
gcauguaccauuugcaug

SEQ ID NO: 2898336 - RNA, 22 nt, Human
gcaugggccuggccaccucucu

SEQ ID NO: 2898337 - RNA, 22 nt, Human
gcauggggauaaaggagaaggc

SEQ ID NO: 2898338 - RNA, 14 nt, Human
gcauguaugucuug

SEQ ID NO: 2898339 - RNA, 15 nt, Human
gcauguaugucuugg

SEQ ID NO: 2898340 - RNA, 22 nt, Human
gcauguagugugggaggcuccu

SEQ ID NO: 2898341 - RNA, 16 nt, Human
gcauguauaguugcuu

SEQ ID NO: 2898342 - RNA, 18 nt, Human
gcauguauaguugcuuuu

SEQ ID NO: 2898343 - RNA, 19 nt, Human
gcauguauaguugcuuuug

SEQ ID NO: 2898344 - RNA, 21 nt, Human
gcauccuggcacccggccccu

SEQ ID NO: 2898345 - RNA, 17 nt, Human
gcauccuggcacccggc

SEQ ID NO: 2898346 - RNA, 23 nt, Human
gcauccuggcacccggccccugc

SEQ ID NO: 2898347 - RNA, 22 nt, Human
gcauccuggcacccggccccug

SEQ ID NO: 2898348 - RNA, 14 nt, Human
gcauccuggcaccc

SEQ ID NO: 2898349 - RNA, 13 nt, Human
gcauccuuccuau

SEQ ID NO: 2898350 - RNA, 14 nt, Human
gcauccuuccuaua

SEQ ID NO: 2898351 - RNA, 15 nt, Human
gcauccuuccuauaa

SEQ ID NO: 2898352 - RNA, 16 nt, Human
gcauccuuccuauaac

SEQ ID NO: 2898353 - RNA, 19 nt, Human
gcauccuuccuauaacuug

SEQ ID NO: 2898354 - RNA, 23 nt, Human
gcauccuuccuauaacuugaugc

SEQ ID NO: 2898355 - RNA, 20 nt, Human
gcauccuuuucugcagaggg

SEQ ID NO: 2898356 - RNA, 13 nt, Human
gcaucgcaaugua

SEQ ID NO: 2898357 - RNA, 18 nt, Human
gcauggcaucaccuccac

SEQ ID NO: 2898358 - RNA, 14 nt, Human
gcauggccaggugg

SEQ ID NO: 2898359 - RNA, 17 nt, Human
gcauggccagguggcca

SEQ ID NO: 2898360 - RNA, 13 nt, Human
gcauggccaggug

SEQ ID NO: 2898361 - RNA, 13 nt, Human
gccaacuccucac

SEQ ID NO: 2898362 - RNA, 14 nt, Human
gccaacuccucaca

SEQ ID NO: 2898363 - RNA, 17 nt, Human
gccaacugguguuugaa

SEQ ID NO: 2898364 - RNA, 12 nt, Human
gccaacuguugu

SEQ ID NO: 2898365 - RNA, 19 nt, Human
gccaacuucuucagagcug

SEQ ID NO: 2898366 - RNA, 20 nt, Human
gccaacuucuucagagcuga

SEQ ID NO: 2898367 - RNA, 15 nt, Human
gccaacuugagggcc

SEQ ID NO: 2898368 - RNA, 20 nt, Human
gccaacuugagggcccagag

SEQ ID NO: 2898369 - RNA, 21 nt, Human
gccaacuugagggcccagagc

SEQ ID NO: 2898370 - RNA, 22 nt, Human
gccaacuugagggcccagagca

SEQ ID NO: 2898371 - RNA, 23 nt, Human
gccaacuugagggcccagagcag

SEQ ID NO: 2898372 - RNA, 14 nt, Human
gccaacgacaaagc

SEQ ID NO: 2898373 - RNA, 23 nt, Human
gccaacgacaaagccaaacucug

SEQ ID NO: 2898374 - RNA, 20 nt, Human
gccaagaaaagggcugacau

SEQ ID NO: 2898375 - RNA, 15 nt, Human
gccaagaaacgucuu

SEQ ID NO: 2898376 - RNA, 22 nt, Human
gccaagaaacgucuucuaaacu

SEQ ID NO: 2898377 - RNA, 19 nt, Human
gccaagaaagauguauaua

SEQ ID NO: 2898378 - RNA, 21 nt, Human
gccaagaaacgucuucuaaac

SEQ ID NO: 2898379 - RNA, 13 nt, Human
gccaagacaaauc

SEQ ID NO: 2898380 - RNA, 15 nt, Human
gccaagacaaaucaa

SEQ ID NO: 2898381 - RNA, 17 nt, Human
gccaagacaaaucaaca

SEQ ID NO: 2898382 - RNA, 19 nt, Human
gccaagacaaaucaacaga

SEQ ID NO: 2898383 - RNA, 22 nt, Human
gccaagacaaaucaacagaagc

SEQ ID NO: 2898384 - RNA, 23 nt, Human
gccaagacaaaucaacagaagca

SEQ ID NO: 2898385 - RNA, 12 nt, Human
gccaagacuugg

SEQ ID NO: 2898386 - RNA, 18 nt, Human
gccaagacuuggcaacag

SEQ ID NO: 2898387 - RNA, 22 nt, Human
gccaagacuuggcaacagaagc

SEQ ID NO: 2898388 - RNA, 21 nt, Human
gccaagagaaaggccugcaca

SEQ ID NO: 2898389 - RNA, 22 nt, Human
gccaagagaaaggccugcacac

SEQ ID NO: 2898390 - RNA, 23 nt, Human
gccaagagaaaggccugcacaca

SEQ ID NO: 2898391 - RNA, 20 nt, Human
gccaagagcagaggcagcga

SEQ ID NO: 2898392 - RNA, 16 nt, Human
gccaagagcagaggca

SEQ ID NO: 2898393 - RNA, 18 nt, Human
gcauuucugaauagaaau

SEQ ID NO: 2898394 - RNA, 19 nt, Human
gcauuucugaauagaaaug

SEQ ID NO: 2898395 - RNA, 22 nt, Human
gcauuucgguugagaauggaaa

SEQ ID NO: 2898396 - RNA, 11 nt, Human
gccaacagcua

SEQ ID NO: 2898397 - RNA, 14 nt, Human
gccaacagcuacaa

SEQ ID NO: 2898398 - RNA, 17 nt, Human
gccaacagcuacaacag

SEQ ID NO: 2898399 - RNA, 18 nt, Human
gccaacagcuacaacagc

SEQ ID NO: 2898400 - RNA, 22 nt, Human
gccaacagcuacaacagccuca

SEQ ID NO: 2898401 - RNA, 23 nt, Human
gcauugugaguaaaucagauguu

SEQ ID NO: 2898402 - RNA, 14 nt, Human
gcauuguuucugug

SEQ ID NO: 2898403 - RNA, 17 nt, Human
gcauuguuucugugggc

SEQ ID NO: 2898404 - RNA, 19 nt, Human
gcauuucacaaaacagccu

SEQ ID NO: 2898405 - RNA, 20 nt, Human
gcauuucacaaaacagccuu

SEQ ID NO: 2898406 - RNA, 22 nt, Human
gcauuucacaaaacagccuuug

SEQ ID NO: 2898407 - RNA, 17 nt, Human
gcauuuaucauucuugu

SEQ ID NO: 2898408 - RNA, 16 nt, Human
gcauuucauaaacuaa

SEQ ID NO: 2898409 - RNA, 21 nt, Human
gcauuuccaacaccacagaca

SEQ ID NO: 2898410 - RNA, 22 nt, Human
gcauuuccaacaccacagacac

SEQ ID NO: 2898411 - RNA, 23 nt, Human
gcauuuccaacaccacagacaca

SEQ ID NO: 2898412 - RNA, 21 nt, Human
gcauuuccuaucaccuauuuc

SEQ ID NO: 2898413 - RNA, 20 nt, Human
gccaaggagggugagugcaa

SEQ ID NO: 2898414 - RNA, 21 nt, Human
gccaaggagggugagugcaag

SEQ ID NO: 2898415 - RNA, 20 nt, Human
gccaaggaggugaggagcag

SEQ ID NO: 2898416 - RNA, 18 nt, Human
gccaagauaggaccuugg

SEQ ID NO: 2898417 - RNA, 20 nt, Human
gccaagauaggaccuugggc

SEQ ID NO: 2898418 - RNA, 22 nt, Human
gccaagauaggaccuugggcca

SEQ ID NO: 2898419 - RNA, 23 nt, Human
gccaagacuuggcaacagaagca

SEQ ID NO: 2898420 - RNA, 23 nt, Human
gccaagcacugugcucagggcua

SEQ ID NO: 2898421 - RNA, 15 nt, Human
gccaagcacugugcu

SEQ ID NO: 2898422 - RNA, 18 nt, Human
gccaagcacugugcucag

SEQ ID NO: 2898423 - RNA, 22 nt, Human
gccaagcaccuagccucgcucu

SEQ ID NO: 2898424 - RNA, 23 nt, Human
gccaagcucaggaccaggcaaug

SEQ ID NO: 2898425 - RNA, 21 nt, Human
gccaagcccuccccaucccau

SEQ ID NO: 2898426 - RNA, 22 nt, Human
gccaagcccuccccaucccaug

SEQ ID NO: 2898427 - RNA, 20 nt, Human
gccaagcucaggaccaggca

SEQ ID NO: 2898428 - RNA, 22 nt, Human
gccaagcuuguuaucagcuuuc

SEQ ID NO: 2898429 - RNA, 14 nt, Human
gcagcuucaccaga

SEQ ID NO: 2898430 - RNA, 13 nt, Human
gcagcuuccuguc

SEQ ID NO: 2898431 - RNA, 14 nt, Human
gcagcuuccuguca

SEQ ID NO: 2898432 - RNA, 16 nt, Human
gcagcuugaggguugg

SEQ ID NO: 2898433 - RNA, 22 nt, Human
gcagcugcuauuuauuuuccua

SEQ ID NO: 2898434 - RNA, 12 nt, Human
gcagcuggacag

SEQ ID NO: 2898435 - RNA, 14 nt, Human
gcagcuggacagag

SEQ ID NO: 2898436 - RNA, 15 nt, Human
gcagcuggacagagg

SEQ ID NO: 2898437 - RNA, 17 nt, Human
gcagcuggacagagggg

SEQ ID NO: 2898438 - RNA, 23 nt, Human
gcagcuggacagaggggacucug

SEQ ID NO: 2898439 - RNA, 16 nt, Human
gcagcuggacucugca

SEQ ID NO: 2898440 - RNA, 22 nt, Human
gcagcuggacucugcaucccag

SEQ ID NO: 2898441 - RNA, 12 nt, Human
gcagcugggcug

SEQ ID NO: 2898442 - RNA, 20 nt, Human
gcagcugcuuuugucuaugg

SEQ ID NO: 2898443 - RNA, 13 nt, Human
gcagcugcuuuug

SEQ ID NO: 2898444 - RNA, 23 nt, Human
gcagcugcgguccacccaggagc

SEQ ID NO: 2898445 - RNA, 22 nt, Human
gcagcugcgguccacccaggag

SEQ ID NO: 2898446 - RNA, 21 nt, Human
gcagcuugaggguugggcugg

SEQ ID NO: 2898447 - RNA, 19 nt, Human
gcagcuugaggguugggcu

SEQ ID NO: 2898448 - RNA, 16 nt, Human
gcaggcugagccacuc

SEQ ID NO: 2898449 - RNA, 17 nt, Human
gcaggcugagccacucu

SEQ ID NO: 2898450 - RNA, 22 nt, Human
gcagggaaacagcuaaugggac

SEQ ID NO: 2898451 - RNA, 15 nt, Human
gcagggaaggccuga

SEQ ID NO: 2898452 - RNA, 14 nt, Human
gcagggaaggccug

SEQ ID NO: 2898453 - RNA, 12 nt, Human
gcaggcuggcca

SEQ ID NO: 2898454 - RNA, 13 nt, Human
gcaggcuggccag

SEQ ID NO: 2898455 - RNA, 14 nt, Human
gcaggcuggccagc

SEQ ID NO: 2898456 - RNA, 15 nt, Human
gcaggcuggccagcc

SEQ ID NO: 2898457 - RNA, 16 nt, Human
gcaggcuggccagccg

SEQ ID NO: 2898458 - RNA, 17 nt, Human
gcaggcuggccagccgc

SEQ ID NO: 2898459 - RNA, 20 nt, Human
gcaggcuggccagccgcucu

SEQ ID NO: 2898460 - RNA, 13 nt, Human
gcaggcuggcccu

SEQ ID NO: 2898461 - RNA, 11 nt, Human
gcacuuugggg

SEQ ID NO: 2898462 - RNA, 13 nt, Human
gcacuuuguaaau

SEQ ID NO: 2898463 - RNA, 14 nt, Human
gcacuuuguaaauu

SEQ ID NO: 2898464 - RNA, 15 nt, Human
gcacuuuguaaauuc

SEQ ID NO: 2898465 - RNA, 11 nt, Human
gcacuuuguag

SEQ ID NO: 2898466 - RNA, 17 nt, Human
gcacuuuguaguguuug

SEQ ID NO: 2898467 - RNA, 21 nt, Human
gcacuuugggaggcugaggcg

SEQ ID NO: 2898468 - RNA, 20 nt, Human
gcacuuugggaggcugaggc

SEQ ID NO: 2898469 - RNA, 16 nt, Human
gcacuuugggaggcug

SEQ ID NO: 2898470 - RNA, 15 nt, Human
gcacuuugaugucau

SEQ ID NO: 2898471 - RNA, 21 nt, Human
gcacuuugaugucauguguuc

SEQ ID NO: 2898472 - RNA, 16 nt, Human
gcacucuuaagcuucc

SEQ ID NO: 2898473 - RNA, 14 nt, Human
gcacucuguuauuu

SEQ ID NO: 2898474 - RNA, 19 nt, Human
gcacucuguuauuuagacu

SEQ ID NO: 2898475 - RNA, 15 nt, Human
gcacucuuaaagcaa

SEQ ID NO: 2898476 - RNA, 15 nt, Human
gcacucuagauucca

SEQ ID NO: 2898477 - RNA, 14 nt, Human
gcacugaaaagguu

SEQ ID NO: 2898478 - RNA, 20 nt, Human
gcacugaaaauaccaucagg

SEQ ID NO: 2898479 - RNA, 13 nt, Human
gcacuuugaaaua

SEQ ID NO: 2898480 - RNA, 16 nt, Human
gcacuuugaaauaccu

SEQ ID NO: 2898481 - RNA, 17 nt, Human
gcacuuugaaauaccuc

SEQ ID NO: 2898482 - RNA, 18 nt, Human
gcacuuugaaauaccuca

SEQ ID NO: 2898483 - RNA, 19 nt, Human
gcacuuugaaauaccucau

SEQ ID NO: 2898484 - RNA, 21 nt, Human
gcacuuugaaauaccucaugu

SEQ ID NO: 2898485 - RNA, 22 nt, Human
gcacuuugaaauaccucauguu

SEQ ID NO: 2898486 - RNA, 23 nt, Human
gcacuuugaaauaccucauguuu

SEQ ID NO: 2898487 - RNA, 22 nt, Human
gcaguugaaugacaacagaagc

SEQ ID NO: 2898488 - RNA, 19 nt, Human
gcagguucugccugcuuug

SEQ ID NO: 2898489 - RNA, 15 nt, Human
gcagggaauuucuau

SEQ ID NO: 2898490 - RNA, 16 nt, Human
gcagggaaggccugac

SEQ ID NO: 2898491 - RNA, 13 nt, Human
gcagguuagagaa

SEQ ID NO: 2898492 - RNA, 15 nt, Human
gcagguuagagaaaa

SEQ ID NO: 2898493 - RNA, 16 nt, Human
gcauaacaaauucuga

SEQ ID NO: 2898494 - RNA, 18 nt, Human
gcauaacaaauucugaau

SEQ ID NO: 2898495 - RNA, 14 nt, Human
gcauaaauaugcag

SEQ ID NO: 2898496 - RNA, 15 nt, Human
gcauaaauaugcagu

SEQ ID NO: 2898497 - RNA, 13 nt, Human
gcauaaauaugca

SEQ ID NO: 2898498 - RNA, 11 nt, Human
gcauaaaacag

SEQ ID NO: 2898499 - RNA, 12 nt, Human
gcauaaaacagc

SEQ ID NO: 2898500 - RNA, 13 nt, Human
gcauaaaacagcu

SEQ ID NO: 2898501 - RNA, 12 nt, Human
gcauaaacuguu

SEQ ID NO: 2898502 - RNA, 16 nt, Human
gcauaaaaacauuuua

SEQ ID NO: 2898503 - RNA, 21 nt, Human
gcauacagaaauauaauaaaa

SEQ ID NO: 2898504 - RNA, 19 nt, Human
gcauacaugcaaaaagaaa

SEQ ID NO: 2898505 - RNA, 15 nt, Human
gagcgcuacccacuu

SEQ ID NO: 2898506 - RNA, 17 nt, Human
gagcgccugugcacaca

SEQ ID NO: 2898507 - RNA, 16 nt, Human
gagcgagcauccccca

SEQ ID NO: 2898508 - RNA, 16 nt, Human
gagcgagcgcuaccca

SEQ ID NO: 2898509 - RNA, 17 nt, Human
gagcccggcgccccugc

SEQ ID NO: 2898510 - RNA, 19 nt, Human
gagccuuagccgcccaugc

SEQ ID NO: 2898511 - RNA, 19 nt, Human
gagccugugccuccucacc

SEQ ID NO: 2898512 - RNA, 20 nt, Human
gagcccuaaccccuuccaga

SEQ ID NO: 2898513 - RNA, 19 nt, Human
gagcccuaaccccuuccag

SEQ ID NO: 2898514 - RNA, 18 nt, Human
gagcccuaaccccuucca

SEQ ID NO: 2898515 - RNA, 16 nt, Human
gagcccuaaccccuuc

SEQ ID NO: 2898516 - RNA, 19 nt, Human
gagcccuacucccugcaga

SEQ ID NO: 2898517 - RNA, 18 nt, Human
gagcccuacucccugcag

SEQ ID NO: 2898518 - RNA, 17 nt, Human
gagcccuacucccugca

SEQ ID NO: 2898519 - RNA, 21 nt, Human
gagcccuaaccccuuccagau

SEQ ID NO: 2898520 - RNA, 22 nt, Human
gagcccuacucccugcagaugc

SEQ ID NO: 2898521 - RNA, 13 nt, Human
gagcccucagaac

SEQ ID NO: 2898522 - RNA, 16 nt, Human
gagcuguuaccauuca

SEQ ID NO: 2898523 - RNA, 22 nt, Human
gagcuguucaacaucacugaaa

SEQ ID NO: 2898524 - RNA, 19 nt, Human
gagcuguggaggauugcua

SEQ ID NO: 2898525 - RNA, 22 nt, Human
gagcuguggaggauugcuaucu

SEQ ID NO: 2898526 - RNA, 19 nt, Human
gagcugccuguucagcucc

SEQ ID NO: 2898527 - RNA, 16 nt, Human
gagcugccuguucagc

SEQ ID NO: 2898528 - RNA, 15 nt, Human
gagcugccuguucag

SEQ ID NO: 2898529 - RNA, 23 nt, Human
gagcugguggacccagggaacag

SEQ ID NO: 2898530 - RNA, 16 nt, Human
gagcugguggacccag

SEQ ID NO: 2898531 - RNA, 16 nt, Human
gagcugucaccaagga

SEQ ID NO: 2898532 - RNA, 17 nt, Human
gagcugucaccaaggaa

SEQ ID NO: 2898533 - RNA, 18 nt, Human
gagcugucaccaaggaaa

SEQ ID NO: 2898534 - RNA, 19 nt, Human
gagcugucaccaaggaaac

SEQ ID NO: 2898535 - RNA, 18 nt, Human
gagcuguccggcuggugg

SEQ ID NO: 2898536 - RNA, 21 nt, Human
gagcuggugcccggagauugg

SEQ ID NO: 2898537 - RNA, 17 nt, Human
gagcuggugcccggaga

SEQ ID NO: 2898538 - RNA, 16 nt, Human
gagcuggugcccggag

SEQ ID NO: 2898539 - RNA, 15 nt, Human
gagcuggugcccgga

SEQ ID NO: 2898540 - RNA, 14 nt, Human
gagaagcugcaucc

SEQ ID NO: 2898541 - RNA, 11 nt, Human
gagaagcugcu

SEQ ID NO: 2898542 - RNA, 12 nt, Human
gagaagcugcuc

SEQ ID NO: 2898543 - RNA, 19 nt, Human
gagaagcugcuccaggccu

SEQ ID NO: 2898544 - RNA, 20 nt, Human
gagaagcugcuccaggccug

SEQ ID NO: 2898545 - RNA, 12 nt, Human
gagaagcugcug

SEQ ID NO: 2898546 - RNA, 13 nt, Human
gagaagcugcuga

SEQ ID NO: 2898547 - RNA, 17 nt, Human
gagaagcugcugaccaa

SEQ ID NO: 2898548 - RNA, 18 nt, Human
gagaagcugcugaccaau

SEQ ID NO: 2898549 - RNA, 15 nt, Human
gagaagcuggggagg

SEQ ID NO: 2898550 - RNA, 15 nt, Human
gagcagugagcagaa

SEQ ID NO: 2898551 - RNA, 14 nt, Human
gagcagugcaggca

SEQ ID NO: 2898552 - RNA, 15 nt, Human
gagcagugcaggcac

SEQ ID NO: 2898553 - RNA, 16 nt, Human
gagcagugcaggcaca

SEQ ID NO: 2898554 - RNA, 17 nt, Human
gagcagugcaggcacag

SEQ ID NO: 2898555 - RNA, 19 nt, Human
gagguggaggcugcaguga

SEQ ID NO: 2898556 - RNA, 19 nt, Human
gagguggagguugcauuga

SEQ ID NO: 2898557 - RNA, 18 nt, Human
gagguggcagcccuguag

SEQ ID NO: 2898558 - RNA, 16 nt, Human
gagguggcagcccugu

SEQ ID NO: 2898559 - RNA, 15 nt, Human
gagguggcagcccug

SEQ ID NO: 2898560 - RNA, 13 nt, Human
gaggugggagcag

SEQ ID NO: 2898561 - RNA, 20 nt, Human
gagguggcuuuugcggccag

SEQ ID NO: 2898562 - RNA, 23 nt, Human
gagguggccagagcugggaggca

SEQ ID NO: 2898563 - RNA, 13 nt, Human
gagguggccuccu

SEQ ID NO: 2898564 - RNA, 18 nt, Human
gagguggccuccuugcuu

SEQ ID NO: 2898565 - RNA, 17 nt, Human
gagguggccagagcugg

SEQ ID NO: 2898566 - RNA, 19 nt, Human
gagguggccagagcuggga

SEQ ID NO: 2898567 - RNA, 21 nt, Human
gagguggccagagcugggagg

SEQ ID NO: 2898568 - RNA, 22 nt, Human
gagguggccagagcugggaggc

SEQ ID NO: 2898569 - RNA, 14 nt, Human
gagucauugcugua

SEQ ID NO: 2898570 - RNA, 13 nt, Human
gagucauuuaaau

SEQ ID NO: 2898571 - RNA, 14 nt, Human
gagucauuuaaaug

SEQ ID NO: 2898572 - RNA, 15 nt, Human
gagucauuuaaaugu

SEQ ID NO: 2898573 - RNA, 16 nt, Human
gagucauuuaaaugug

SEQ ID NO: 2898574 - RNA, 20 nt, Human
gagucauuuaaauguguaca

SEQ ID NO: 2898575 - RNA, 18 nt, Human
gagugagacucugucuca

SEQ ID NO: 2898576 - RNA, 14 nt, Human
gagugagacucugu

SEQ ID NO: 2898577 - RNA, 18 nt, Human
gagugcagugagccgaga

SEQ ID NO: 2898578 - RNA, 13 nt, Human
gagugcagugagc

SEQ ID NO: 2898579 - RNA, 23 nt, Human
gagugcccacccugggagacaga

SEQ ID NO: 2898580 - RNA, 13 nt, Human
gagugagacccug

SEQ ID NO: 2898581 - RNA, 15 nt, Human
gaguccaagaaucca

SEQ ID NO: 2898582 - RNA, 14 nt, Human
gagugccuggccaa

SEQ ID NO: 2898583 - RNA, 23 nt, Human
gaggggaagaaacacuuucucuu

SEQ ID NO: 2898584 - RNA, 12 nt, Human
gaggggaacaga

SEQ ID NO: 2898585 - RNA, 16 nt, Human
gaggggaagcugcagc

SEQ ID NO: 2898586 - RNA, 19 nt, Human
gaggggaagcugcagcuug

SEQ ID NO: 2898587 - RNA, 16 nt, Human
gaggggaaggggcggu

SEQ ID NO: 2898588 - RNA, 14 nt, Human
gaggggaagucccu

SEQ ID NO: 2898589 - RNA, 15 nt, Human
gagggcuugugaaca

SEQ ID NO: 2898590 - RNA, 17 nt, Human
gaggggaaaaaaauguu

SEQ ID NO: 2898591 - RNA, 18 nt, Human
gaggggaaaggggagagg

SEQ ID NO: 2898592 - RNA, 15 nt, Human
gaggggaacacugcc

SEQ ID NO: 2898593 - RNA, 16 nt, Human
gaggggaacacugccc

SEQ ID NO: 2898594 - RNA, 17 nt, Human
gaggggaacacugcccu

SEQ ID NO: 2898595 - RNA, 19 nt, Human
gaggcugccccucucacca

SEQ ID NO: 2898596 - RNA, 18 nt, Human
gaggcugccccucucacc

SEQ ID NO: 2898597 - RNA, 23 nt, Human
gaggcugcccccggcccccuggu

SEQ ID NO: 2898598 - RNA, 15 nt, Human
gaggcugccccucuc

SEQ ID NO: 2898599 - RNA, 14 nt, Human
gaggcugccccucu

SEQ ID NO: 2898600 - RNA, 19 nt, Human
gaggcugcccccggccccc

SEQ ID NO: 2898601 - RNA, 20 nt, Human
gaggcugcccccggcccccu

SEQ ID NO: 2898602 - RNA, 21 nt, Human
gaggcugcccccggcccccug

SEQ ID NO: 2898603 - RNA, 22 nt, Human
gaggcugcccccggcccccugg

SEQ ID NO: 2898604 - RNA, 14 nt, Human
gaggcugcagucag

SEQ ID NO: 2898605 - RNA, 16 nt, Human
gaggcugcagcgagcu

SEQ ID NO: 2898606 - RNA, 9 nt, Human
gaggcugcc

SEQ ID NO: 2898607 - RNA, 12 nt, Human
gaggcugccccc

SEQ ID NO: 2898608 - RNA, 17 nt, Human
gaggcugcccccggccc

SEQ ID NO: 2898609 - RNA, 21 nt, Human
gaggcuccuguuagcuccuca

SEQ ID NO: 2898610 - RNA, 13 nt, Human
gaggcuccugucc

SEQ ID NO: 2898611 - RNA, 16 nt, Human
gagggcggagccggcc

SEQ ID NO: 2898612 - RNA, 14 nt, Human
gaggccagccccac

SEQ ID NO: 2898613 - RNA, 13 nt, Human
gaggccagcccca

SEQ ID NO: 2898614 - RNA, 21 nt, Human
gaggccagccccacccaggag

SEQ ID NO: 2898615 - RNA, 20 nt, Human
gaggccagccccacccagga

SEQ ID NO: 2898616 - RNA, 18 nt, Human
gaggccagccccacccag

SEQ ID NO: 2898617 - RNA, 16 nt, Human
gaggccagccccaccc

SEQ ID NO: 2898618 - RNA, 22 nt, Human
gaggccagccccacccaggagg

SEQ ID NO: 2898619 - RNA, 22 nt, Human
gacugucucaagagggcacugg

SEQ ID NO: 2898620 - RNA, 23 nt, Human
gacugucucaagagggcacuggu

SEQ ID NO: 2898621 - RNA, 21 nt, Human
gacugucucaagagggcacug

SEQ ID NO: 2898622 - RNA, 15 nt, Human
gacugucauagaaau

SEQ ID NO: 2898623 - RNA, 16 nt, Human
gacuguccucuccccu

SEQ ID NO: 2898624 - RNA, 19 nt, Human
gacuguccucuccccucca

SEQ ID NO: 2898625 - RNA, 20 nt, Human
gacuguccucuccccuccag

SEQ ID NO: 2898626 - RNA, 22 nt, Human
gacuguccucuccccuccagcc

SEQ ID NO: 2898627 - RNA, 23 nt, Human
gacuguccucuccccuccagccu

SEQ ID NO: 2898628 - RNA, 14 nt, Human
gacucaaugcacug

SEQ ID NO: 2898629 - RNA, 15 nt, Human
gacucaaucccuagg

SEQ ID NO: 2898630 - RNA, 17 nt, Human
gacucaaugcacugaca

SEQ ID NO: 2898631 - RNA, 16 nt, Human
gacuguacuccuccca

SEQ ID NO: 2898632 - RNA, 17 nt, Human
gacuguacuccucccag

SEQ ID NO: 2898633 - RNA, 14 nt, Human
gacucacaggaagg

SEQ ID NO: 2898634 - RNA, 19 nt, Human
gacucacagguuggaagag

SEQ ID NO: 2898635 - RNA, 17 nt, Human
gacugguuuacaggccc

SEQ ID NO: 2898636 - RNA, 18 nt, Human
gacugguuuacaggcccu

SEQ ID NO: 2898637 - RNA, 19 nt, Human
gacugguuuacaggcccug

SEQ ID NO: 2898638 - RNA, 21 nt, Human
gacuuugcugauuuccccucu

SEQ ID NO: 2898639 - RNA, 15 nt, Human
gacuuuguagauccu

SEQ ID NO: 2898640 - RNA, 16 nt, Human
gacuuuguauacuuua

SEQ ID NO: 2898641 - RNA, 18 nt, Human
gacuuuguauacuuuaaa

SEQ ID NO: 2898642 - RNA, 19 nt, Human
gacugucucacuuaauccu

SEQ ID NO: 2898643 - RNA, 19 nt, Human
gacuguuuucucucggcuc

SEQ ID NO: 2898644 - RNA, 21 nt, Human
gacuguuuucucucggcuccc

SEQ ID NO: 2898645 - RNA, 11 nt, Human
gacuuucuguu

SEQ ID NO: 2898646 - RNA, 13 nt, Human
gacuuucuguugg

SEQ ID NO: 2898647 - RNA, 20 nt, Human
gacuuugauugcacauuguu

SEQ ID NO: 2898648 - RNA, 15 nt, Human
gacuuuggaagcagg

SEQ ID NO: 2898649 - RNA, 12 nt, Human
gacuauauacau

SEQ ID NO: 2898650 - RNA, 13 nt, Human
gacuauauacaug

SEQ ID NO: 2898651 - RNA, 16 nt, Human
gacuauauacaugugu

SEQ ID NO: 2898652 - RNA, 21 nt, Human
gacuauauacauguguguaua

SEQ ID NO: 2898653 - RNA, 22 nt, Human
gacuauauacauguguguauau

SEQ ID NO: 2898654 - RNA, 23 nt, Human
gacuauauacauguguguauaua

SEQ ID NO: 2898655 - RNA, 16 nt, Human
gacuauauagagaugu

SEQ ID NO: 2898656 - RNA, 19 nt, Human
gacuauauagagauguuuu

SEQ ID NO: 2898657 - RNA, 20 nt, Human
gacuauauagagauguuuuu

SEQ ID NO: 2898658 - RNA, 23 nt, Human
gacuauauagagauguuuuuaaa

SEQ ID NO: 2898659 - RNA, 22 nt, Human
gacucaaaugcucagaccagcu

SEQ ID NO: 2898660 - RNA, 19 nt, Human
gacucaaaucuccaguauu

SEQ ID NO: 2898661 - RNA, 12 nt, Human
gacuauggagcc

SEQ ID NO: 2898662 - RNA, 16 nt, Human
gacuauggagccuggc

SEQ ID NO: 2898663 - RNA, 20 nt, Human
gacuauggagccuggcacag

SEQ ID NO: 2898664 - RNA, 22 nt, Human
gacuauuaggugcaauuucaag

SEQ ID NO: 2898665 - RNA, 15 nt, Human
gacuauuauguuguu

SEQ ID NO: 2898666 - RNA, 16 nt, Human
gacuauuauguuguua

SEQ ID NO: 2898667 - RNA, 20 nt, Human
gacuauuauguuguuagaga

SEQ ID NO: 2898668 - RNA, 21 nt, Human
gacuauuauguuguuagagaa

SEQ ID NO: 2898669 - RNA, 19 nt, Human
gacucaaauguucuaaguu

SEQ ID NO: 2898670 - RNA, 23 nt, Human
gacucaaauguucuaaguuucua

SEQ ID NO: 2898671 - RNA, 15 nt, Human
gacucaaauguucua

SEQ ID NO: 2898672 - RNA, 16 nt, Human
gacucaaauguucuaa

SEQ ID NO: 2898673 - RNA, 17 nt, Human
gacucaaauguucuaag

SEQ ID NO: 2898674 - RNA, 18 nt, Human
gacucaaauguucuaagu

SEQ ID NO: 2898675 - RNA, 13 nt, Human
gacuaguacaaau

SEQ ID NO: 2898676 - RNA, 14 nt, Human
gacuaguacaaauu

SEQ ID NO: 2898677 - RNA, 17 nt, Human
gacuaguacaaauuaua

SEQ ID NO: 2898678 - RNA, 15 nt, Human
gacgcugauacauaa

SEQ ID NO: 2898679 - RNA, 19 nt, Human
gacgcugauacauaacuaa

SEQ ID NO: 2898680 - RNA, 22 nt, Human
gacgcugauacauaacuaaauu

SEQ ID NO: 2898681 - RNA, 13 nt, Human
gacgcugcagagc

SEQ ID NO: 2898682 - RNA, 22 nt, Human
gacccuccuccucccccagagg

SEQ ID NO: 2898683 - RNA, 19 nt, Human
gacccuccuccucccccag

SEQ ID NO: 2898684 - RNA, 17 nt, Human
gacccuccccgcacccc

SEQ ID NO: 2898685 - RNA, 15 nt, Human
gacccuccccgcacc

SEQ ID NO: 2898686 - RNA, 14 nt, Human
gacacucuccuugc

SEQ ID NO: 2898687 - RNA, 15 nt, Human
gacacucuccuugca

SEQ ID NO: 2898688 - RNA, 17 nt, Human
gacacucuccuugcagu

SEQ ID NO: 2898689 - RNA, 18 nt, Human
gacacucuccuugcaguu

SEQ ID NO: 2898690 - RNA, 19 nt, Human
gacacucuccuugcaguuc

SEQ ID NO: 2898691 - RNA, 15 nt, Human
gacacucucuggaag

SEQ ID NO: 2898692 - RNA, 17 nt, Human
gacacucucuggaagcc

SEQ ID NO: 2898693 - RNA, 21 nt, Human
gacacuccccgaagucuuuug

SEQ ID NO: 2898694 - RNA, 16 nt, Human
gacacuccccgaaguc

SEQ ID NO: 2898695 - RNA, 12 nt, Human
gacacuccagug

SEQ ID NO: 2898696 - RNA, 14 nt, Human
gacacuccagugcc

SEQ ID NO: 2898697 - RNA, 19 nt, Human
gacacuccagugccagcaa

SEQ ID NO: 2898698 - RNA, 13 nt, Human
gacacucccaccc

SEQ ID NO: 2898699 - RNA, 16 nt, Human
gacacucccacccagu

SEQ ID NO: 2898700 - RNA, 23 nt, Human
gacacucccacccagucucugcu

SEQ ID NO: 2898701 - RNA, 16 nt, Human
gacacuccagugccag

SEQ ID NO: 2898702 - RNA, 14 nt, Human
gacacuccuagaga

SEQ ID NO: 2898703 - RNA, 21 nt, Human
gacacuccuagagaacgcagc

SEQ ID NO: 2898704 - RNA, 22 nt, Human
gacacuccuagagaacgcagcc

SEQ ID NO: 2898705 - RNA, 13 nt, Human
gacagcccuccau

SEQ ID NO: 2898706 - RNA, 11 nt, Human
gacagccuccc

SEQ ID NO: 2898707 - RNA, 12 nt, Human
gacagaaagcag

SEQ ID NO: 2898708 - RNA, 16 nt, Human
gacagccucccacccc

SEQ ID NO: 2898709 - RNA, 15 nt, Human
gacagcuccuucugu

SEQ ID NO: 2898710 - RNA, 14 nt, Human
gacagcuccuucug

SEQ ID NO: 2898711 - RNA, 13 nt, Human
gacagcuccuucu

SEQ ID NO: 2898712 - RNA, 11 nt, Human
gacagccuggc

SEQ ID NO: 2898713 - RNA, 12 nt, Human
gacagccuggca

SEQ ID NO: 2898714 - RNA, 15 nt, Human
gacacucagaccuga

SEQ ID NO: 2898715 - RNA, 13 nt, Human
gacacucagaccu

SEQ ID NO: 2898716 - RNA, 23 nt, Human
gacacucaagucccccaagaccu

SEQ ID NO: 2898717 - RNA, 19 nt, Human
gacacucagaccagagaag

SEQ ID NO: 2898718 - RNA, 13 nt, Human
gaagcaguugugu

SEQ ID NO: 2898719 - RNA, 14 nt, Human
gaagcaguuguguc

SEQ ID NO: 2898720 - RNA, 16 nt, Human
gaagcaguugugucag

SEQ ID NO: 2898721 - RNA, 12 nt, Human
gaagcauguuuc

SEQ ID NO: 2898722 - RNA, 13 nt, Human
gaagcauguuuca

SEQ ID NO: 2898723 - RNA, 14 nt, Human
gaagcauguuucau

SEQ ID NO: 2898724 - RNA, 16 nt, Human
gaagcauguuucaugu

SEQ ID NO: 2898725 - RNA, 18 nt, Human
gacaguaucccacaucca

SEQ ID NO: 2898726 - RNA, 16 nt, Human
gacaguaucccacauc

SEQ ID NO: 2898727 - RNA, 21 nt, Human
gacaguaucccacauccaacu

SEQ ID NO: 2898728 - RNA, 19 nt, Human
gacagguuuucacauaaau

SEQ ID NO: 2898729 - RNA, 15 nt, Human
gacaguaucccacau

SEQ ID NO: 2898730 - RNA, 17 nt, Human
gacaggguuucaccaug

SEQ ID NO: 2898731 - RNA, 12 nt, Human
gacaggguuuca

SEQ ID NO: 2898732 - RNA, 22 nt, Human
gacccuacucccuugcccuaga

SEQ ID NO: 2898733 - RNA, 13 nt, Human
gacccggcugcgu

SEQ ID NO: 2898734 - RNA, 12 nt, Human
gacccggcugcg

SEQ ID NO: 2898735 - RNA, 21 nt, Human
gaccccuggcuuuucacugcu

SEQ ID NO: 2898736 - RNA, 22 nt, Human
gaccccuggcuuuucacugcug

SEQ ID NO: 2898737 - RNA, 22 nt, Human
gaccaugguuaagaguccaaga

SEQ ID NO: 2898738 - RNA, 12 nt, Human
gaccauguguca

SEQ ID NO: 2898739 - RNA, 13 nt, Human
gaccaugugucac

SEQ ID NO: 2898740 - RNA, 15 nt, Human
gaccaugugucacuu

SEQ ID NO: 2898741 - RNA, 20 nt, Human
gaccaugugucacuugugcu

SEQ ID NO: 2898742 - RNA, 21 nt, Human
gaccaugugucacuugugcuu

SEQ ID NO: 2898743 - RNA, 13 nt, Human
gaccccuggcuuu

SEQ ID NO: 2898744 - RNA, 22 nt, Human
gaccaguggugccuuggaggga

SEQ ID NO: 2898745 - RNA, 22 nt, Human
gaccagugguuuccagucauga

SEQ ID NO: 2898746 - RNA, 22 nt, Human
gaccaguugaauaaaagugcac

SEQ ID NO: 2898747 - RNA, 23 nt, Human
gaccaguugaauaaaagugcaca

SEQ ID NO: 2898748 - RNA, 14 nt, Human
gaccaguggucuca

SEQ ID NO: 2898749 - RNA, 15 nt, Human
gaccaguggugccuu

SEQ ID NO: 2898750 - RNA, 19 nt, Human
gaccaguuuaaccugaugc

SEQ ID NO: 2898751 - RNA, 14 nt, Human
gaccaggcuguguc

SEQ ID NO: 2898752 - RNA, 15 nt, Human
gaccaggcugugucc

SEQ ID NO: 2898753 - RNA, 15 nt, Human
gaccaggauuucuaa

SEQ ID NO: 2898754 - RNA, 13 nt, Human
gaccaggccuggg

SEQ ID NO: 2898755 - RNA, 19 nt, Human
gaccaggccauucugccgc

SEQ ID NO: 2898756 - RNA, 13 nt, Human
gaccaggauccag

SEQ ID NO: 2898757 - RNA, 15 nt, Human
gaccaggauccagcc

SEQ ID NO: 2898758 - RNA, 17 nt, Human
gaccaggauccagccuc

SEQ ID NO: 2898759 - RNA, 23 nt, Human
gaccaggacucccuccucaccuc

SEQ ID NO: 2898760 - RNA, 21 nt, Human
gaccaggacucccuccucacc

SEQ ID NO: 2898761 - RNA, 19 nt, Human
gaccaggacucccuccuca

SEQ ID NO: 2898762 - RNA, 17 nt, Human
gaccaggacucccuccu

SEQ ID NO: 2898763 - RNA, 16 nt, Human
gaccaggacucccucc

SEQ ID NO: 2898764 - RNA, 14 nt, Human
gaccaggacucccu

SEQ ID NO: 2898765 - RNA, 18 nt, Human
ggcuccaagaccuaggcu

SEQ ID NO: 2898766 - RNA, 18 nt, Human
ggcucagagaugugcacc

SEQ ID NO: 2898767 - RNA, 17 nt, Human
ggcucagaugaaaugca

SEQ ID NO: 2898768 - RNA, 12 nt, Human
ggcucagagggg

SEQ ID NO: 2898769 - RNA, 15 nt, Human
ggcucagagggggac

SEQ ID NO: 2898770 - RNA, 21 nt, Human
ggcucagagggggacugcugc

SEQ ID NO: 2898771 - RNA, 18 nt, Human
ggcucagcggggacagcu

SEQ ID NO: 2898772 - RNA, 13 nt, Human
ggcucagagaugu

SEQ ID NO: 2898773 - RNA, 17 nt, Human
ggcucacuggcuuugaa

SEQ ID NO: 2898774 - RNA, 21 nt, Human
ggcucagcucggggagccuua

SEQ ID NO: 2898775 - RNA, 20 nt, Human
ggcucagcggggacagcucc

SEQ ID NO: 2898776 - RNA, 19 nt, Human
ggcucagcggggacagcuc

SEQ ID NO: 2898777 - RNA, 16 nt, Human
ggcucaggucacauaa

SEQ ID NO: 2898778 - RNA, 14 nt, Human
ggcucagucucagg

SEQ ID NO: 2898779 - RNA, 17 nt, Human
ggcucagucucaggagc

SEQ ID NO: 2898780 - RNA, 15 nt, Human
ggcucagucucagga

SEQ ID NO: 2898781 - RNA, 18 nt, Human
ggcucagugcaaccucug

SEQ ID NO: 2898782 - RNA, 19 nt, Human
ggcucagugcaaccucugc

SEQ ID NO: 2898783 - RNA, 21 nt, Human
ggcucagugcaaccucugcuu

SEQ ID NO: 2898784 - RNA, 13 nt, Human
ggcuccuggaaag

SEQ ID NO: 2898785 - RNA, 11 nt, Human
ggcucuagauc

SEQ ID NO: 2898786 - RNA, 22 nt, Human
ggcucuagaucauaaggcuuca

SEQ ID NO: 2898787 - RNA, 19 nt, Human
ggcucuaggguugcuggag

SEQ ID NO: 2898788 - RNA, 22 nt, Human
ggcucuaggguugcuggagccu

SEQ ID NO: 2898789 - RNA, 18 nt, Human
ggcuccuguuagcuccuc

SEQ ID NO: 2898790 - RNA, 21 nt, Human
ggcuccuguuagcuccucacu

SEQ ID NO: 2898791 - RNA, 20 nt, Human
ggcuccuucccaucgcuguc

SEQ ID NO: 2898792 - RNA, 11 nt, Human
ggcuccugucc

SEQ ID NO: 2898793 - RNA, 12 nt, Human
ggcucuucuccu

SEQ ID NO: 2898794 - RNA, 13 nt, Human
ggcucuucuccuu

SEQ ID NO: 2898795 - RNA, 17 nt, Human
ggcucuucuccccagag

SEQ ID NO: 2898796 - RNA, 11 nt, Human
ggcucuuccaa

SEQ ID NO: 2898797 - RNA, 16 nt, Human
ggcucuucuccccaga

SEQ ID NO: 2898798 - RNA, 18 nt, Human
ggcucuaugagucuagau

SEQ ID NO: 2898799 - RNA, 23 nt, Human
ggcucuaugagucuagauguuua

SEQ ID NO: 2898800 - RNA, 19 nt, Human
ggcucucagcucagcgcca

SEQ ID NO: 2898801 - RNA, 12 nt, Human
ggcucucagcuc

SEQ ID NO: 2898802 - RNA, 14 nt, Human
ggcucucagcucag

SEQ ID NO: 2898803 - RNA, 15 nt, Human
ggcucugugcaggga

SEQ ID NO: 2898804 - RNA, 15 nt, Human
ggcucugucccccug

SEQ ID NO: 2898805 - RNA, 18 nt, Human
ggcucuguggcuugcuag

SEQ ID NO: 2898806 - RNA, 16 nt, Human
ggcucuucuccuuuca

SEQ ID NO: 2898807 - RNA, 21 nt, Human
ggcugacacuucaaggugaca

SEQ ID NO: 2898808 - RNA, 22 nt, Human
ggcugacacuucaaggugacag

SEQ ID NO: 2898809 - RNA, 22 nt, Human
ggcugacagacagcccuccauc

SEQ ID NO: 2898810 - RNA, 14 nt, Human
ggcucuucuccuuu

SEQ ID NO: 2898811 - RNA, 15 nt, Human
ggcucuucuccuuuc

SEQ ID NO: 2898812 - RNA, 15 nt, Human
ggcugccaaggccag

SEQ ID NO: 2898813 - RNA, 13 nt, Human
ggcugcccuggug

SEQ ID NO: 2898814 - RNA, 14 nt, Human
ggcugcccuggugc

SEQ ID NO: 2898815 - RNA, 15 nt, Human
ggcugcccuggugcu

SEQ ID NO: 2898816 - RNA, 16 nt, Human
ggcugcccuggugcug

SEQ ID NO: 2898817 - RNA, 19 nt, Human
ggcugcccuggugcugcca

SEQ ID NO: 2898818 - RNA, 22 nt, Human
ggcugcggaaugaaccacaucu

SEQ ID NO: 2898819 - RNA, 16 nt, Human
ggcugccuuagaaccu

SEQ ID NO: 2898820 - RNA, 17 nt, Human
ggcugccaaggccagag

SEQ ID NO: 2898821 - RNA, 15 nt, Human
ggcugcgcuuccuau

SEQ ID NO: 2898822 - RNA, 23 nt, Human
ggcugcgcuuccuauuucuaggg

SEQ ID NO: 2898823 - RNA, 17 nt, Human
ggcugcggcgucugucu

SEQ ID NO: 2898824 - RNA, 16 nt, Human
ggcugcuacccagaaa

SEQ ID NO: 2898825 - RNA, 15 nt, Human
ggcugcuacccagaa

SEQ ID NO: 2898826 - RNA, 19 nt, Human
ggcugcugaaaaccaucug

SEQ ID NO: 2898827 - RNA, 23 nt, Human
ggcugcugaaaaccaucuggccu

SEQ ID NO: 2898828 - RNA, 21 nt, Human
gggacagggugucuccugaag

SEQ ID NO: 2898829 - RNA, 20 nt, Human
gggacaguuuaucaugaagc

SEQ ID NO: 2898830 - RNA, 21 nt, Human
gggacaguuuaucaugaagcc

SEQ ID NO: 2898831 - RNA, 22 nt, Human
gggacaguuuaucaugaagccu

SEQ ID NO: 2898832 - RNA, 15 nt, Human
gggacagcuccuucu

SEQ ID NO: 2898833 - RNA, 14 nt, Human
gggacagaggccug

SEQ ID NO: 2898834 - RNA, 22 nt, Human
gggacagauucagucuugccuu

SEQ ID NO: 2898835 - RNA, 22 nt, Human
gggacaguaauaagaauggaaa

SEQ ID NO: 2898836 - RNA, 20 nt, Human
gggaagaaacacuuucucuu

SEQ ID NO: 2898837 - RNA, 21 nt, Human
gggaagaaacacuuucucuuc

SEQ ID NO: 2898838 - RNA, 16 nt, Human
gggaagaagcagagag

SEQ ID NO: 2898839 - RNA, 17 nt, Human
gggaagaagcagagaga

SEQ ID NO: 2898840 - RNA, 19 nt, Human
gggaagaagcagagagaug

SEQ ID NO: 2898841 - RNA, 14 nt, Human
gggacaccugcccu

SEQ ID NO: 2898842 - RNA, 16 nt, Human
gggacaccugcccugc

SEQ ID NO: 2898843 - RNA, 17 nt, Human
gggacaccugcccugcc

SEQ ID NO: 2898844 - RNA, 17 nt, Human
gggaagacgccugagcu

SEQ ID NO: 2898845 - RNA, 13 nt, Human
gggacagcuccuu

SEQ ID NO: 2898846 - RNA, 12 nt, Human
gggacagcuccu

SEQ ID NO: 2898847 - RNA, 13 nt, Human
gggacagagcaga

SEQ ID NO: 2898848 - RNA, 19 nt, Human
gggaaccaugaagacagga

SEQ ID NO: 2898849 - RNA, 11 nt, Human
gggaaccuccc

SEQ ID NO: 2898850 - RNA, 14 nt, Human
gggaaccucccaga

SEQ ID NO: 2898851 - RNA, 16 nt, Human
gggaaccucccagagg

SEQ ID NO: 2898852 - RNA, 17 nt, Human
gggaaccucccagaggu

SEQ ID NO: 2898853 - RNA, 16 nt, Human
gggaacgaugugucug

SEQ ID NO: 2898854 - RNA, 13 nt, Human
gggaaccugaccc

SEQ ID NO: 2898855 - RNA, 13 nt, Human
gggaacucugaca

SEQ ID NO: 2898856 - RNA, 14 nt, Human
gggaacucugacaa

SEQ ID NO: 2898857 - RNA, 19 nt, Human
gggaacucugacaagggcu

SEQ ID NO: 2898858 - RNA, 21 nt, Human
gggaacucugacaagggcuga

SEQ ID NO: 2898859 - RNA, 22 nt, Human
gggaacucaccuggggcugcug

SEQ ID NO: 2898860 - RNA, 23 nt, Human
gggaacucaccuggggcugcugg

SEQ ID NO: 2898861 - RNA, 13 nt, Human
ggcuuccuccuga

SEQ ID NO: 2898862 - RNA, 22 nt, Human
ggcuucccgcucagcccucccu

SEQ ID NO: 2898863 - RNA, 13 nt, Human
gggaacagccacu

SEQ ID NO: 2898864 - RNA, 22 nt, Human
gggaacagccacuccccuccac

SEQ ID NO: 2898865 - RNA, 18 nt, Human
gggaaccaugaagacagg

SEQ ID NO: 2898866 - RNA, 10 nt, Human
gggaacauuu

SEQ ID NO: 2898867 - RNA, 21 nt, Human
gggaacauuuauuuuaugaga

SEQ ID NO: 2898868 - RNA, 19 nt, Human
gggaacauuucuguaaaua

SEQ ID NO: 2898869 - RNA, 22 nt, Human
gggaacauuucuguaaauacca

SEQ ID NO: 2898870 - RNA, 22 nt, Human
gggaaccaagcuauuccuuucc

SEQ ID NO: 2898871 - RNA, 21 nt, Human
ggcuucugugaugagcugauc

SEQ ID NO: 2898872 - RNA, 18 nt, Human
ggcuucugugaugagcug

SEQ ID NO: 2898873 - RNA, 20 nt, Human
ggcuucuggagcccuugggu

SEQ ID NO: 2898874 - RNA, 18 nt, Human
ggcuucuggagcccuugg

SEQ ID NO: 2898875 - RNA, 16 nt, Human
ggcuucuggagcccuu

SEQ ID NO: 2898876 - RNA, 13 nt, Human
ggcuucuggagcc

SEQ ID NO: 2898877 - RNA, 17 nt, Human
aaaaauaaauaaaagcc

SEQ ID NO: 2898878 - RNA, 12 nt, Human
aaaaauaaaugg

SEQ ID NO: 2898879 - RNA, 19 nt, Human
ggcugggggccucagugcc

SEQ ID NO: 2898880 - RNA, 17 nt, Human
ggcugggggccucagug

SEQ ID NO: 2898881 - RNA, 16 nt, Human
ggcugggggccucagu

SEQ ID NO: 2898882 - RNA, 15 nt, Human
ggcugggggccucag

SEQ ID NO: 2898883 - RNA, 16 nt, Human
ggcugggguggccugu

SEQ ID NO: 2898884 - RNA, 20 nt, Human
ggcugggguggccugugugg

SEQ ID NO: 2898885 - RNA, 14 nt, Human
ggcuguaaggcucu

SEQ ID NO: 2898886 - RNA, 15 nt, Human
ggcuguaaggcucua

SEQ ID NO: 2898887 - RNA, 20 nt, Human
ggcuguacugcucaggcugc

SEQ ID NO: 2898888 - RNA, 21 nt, Human
ggcuguacugcucaggcugca

SEQ ID NO: 2898889 - RNA, 18 nt, Human
ggcuguaucccaugagcc

SEQ ID NO: 2898890 - RNA, 20 nt, Human
ggcuucaguggcagcugcuu

SEQ ID NO: 2898891 - RNA, 19 nt, Human
ggcuucaguggcagcugcu

SEQ ID NO: 2898892 - RNA, 17 nt, Human
ggcuucaguggcagcug

SEQ ID NO: 2898893 - RNA, 18 nt, Human
ggcuucaguggcagcugc

SEQ ID NO: 2898894 - RNA, 16 nt, Human
ggcuuccucauaguau

SEQ ID NO: 2898895 - RNA, 19 nt, Human
ggcuucccgcucagcccuc

SEQ ID NO: 2898896 - RNA, 21 nt, Human
ggcuucccgcucagcccuccc

SEQ ID NO: 2898897 - RNA, 15 nt, Human
ggcuucccgcucagc

SEQ ID NO: 2898898 - RNA, 16 nt, Human
ggcuucccgcucagcc

SEQ ID NO: 2898899 - RNA, 17 nt, Human
ggcuucccgcucagccc

SEQ ID NO: 2898900 - RNA, 18 nt, Human
ggcuucccgcucagcccu

SEQ ID NO: 2898901 - RNA, 14 nt, Human
ggcuucccgcucag

SEQ ID NO: 2898902 - RNA, 10 nt, Human
aaaacuucuu

SEQ ID NO: 2898903 - RNA, 18 nt, Human
aaaacuucuuaaauaucu

SEQ ID NO: 2898904 - RNA, 23 nt, Human
aaaacuucuuaaauaucuuuuau

SEQ ID NO: 2898905 - RNA, 18 nt, Human
aaaacuucuugucagaca

SEQ ID NO: 2898906 - RNA, 20 nt, Human
aaaacuucuugucagacaua

SEQ ID NO: 2898907 - RNA, 22 nt, Human
aaaacuucuugucagacauaaa

SEQ ID NO: 2898908 - RNA, 23 nt, Human
aaaacuucuugucagacauaaag

SEQ ID NO: 2898909 - RNA, 24 nt, Human
aaaacuucuugucagacauaaagc

SEQ ID NO: 2898910 - RNA, 16 nt, Human
aaaacuguuaccuaaa

SEQ ID NO: 2898911 - RNA, 23 nt, Human
aaaacuguuuuggguagcugcca

SEQ ID NO: 2898912 - RNA, 17 nt, Human
aaaacuuaacauauuua

SEQ ID NO: 2898913 - RNA, 19 nt, Human
aaaacuuaacauauuuacu

SEQ ID NO: 2898914 - RNA, 21 nt, Human
aaaacuuaacuuccaaugaaa

SEQ ID NO: 2898915 - RNA, 21 nt, Human
aaaacccacaaaaauguugaa

SEQ ID NO: 2898916 - RNA, 21 nt, Human
aaaagauuuucagaaaauauu

SEQ ID NO: 2898917 - RNA, 13 nt, Human
aaaagcaaaauaa

SEQ ID NO: 2898918 - RNA, 21 nt, Human
aaaagcaaaauaaaaacuauu

SEQ ID NO: 2898919 - RNA, 12 nt, Human
aaaagauucuuc

SEQ ID NO: 2898920 - RNA, 18 nt, Human
aaaagauucuuuuucuga

SEQ ID NO: 2898921 - RNA, 15 nt, Human
aaaagauuguauugc

SEQ ID NO: 2898922 - RNA, 17 nt, Human
aaaagauuguauugcug

SEQ ID NO: 2898923 - RNA, 13 nt, Human
aaaagauuuaagc

SEQ ID NO: 2898924 - RNA, 11 nt, Human
aaaagauucau

SEQ ID NO: 2898925 - RNA, 13 nt, Human
aaaagauucauuu

SEQ ID NO: 2898926 - RNA, 15 nt, Human
aaaagauuaaacugc

SEQ ID NO: 2898927 - RNA, 13 nt, Human
aaaagauuagcaa

SEQ ID NO: 2898928 - RNA, 20 nt, Human
aaaacuugaaaauauaugau

SEQ ID NO: 2898929 - RNA, 21 nt, Human
aaaacuugacuccauuucauc

SEQ ID NO: 2898930 - RNA, 23 nt, Human
aaaacugaaagugaaaguccaga

SEQ ID NO: 2898931 - RNA, 18 nt, Human
aaaacugaaaaucuaaua

SEQ ID NO: 2898932 - RNA, 19 nt, Human
aaaacugaaaaucuaauau

SEQ ID NO: 2898933 - RNA, 20 nt, Human
aaaaccuuucaaauuucaca

SEQ ID NO: 2898934 - RNA, 13 nt, Human
aaaacgaaaacag

SEQ ID NO: 2898935 - RNA, 14 nt, Human
aaaacgaaaacagu

SEQ ID NO: 2898936 - RNA, 14 nt, Human
aaaacgcgcagaug

SEQ ID NO: 2898937 - RNA, 15 nt, Human
aaaacgcgcagaugu

SEQ ID NO: 2898938 - RNA, 16 nt, Human
aaaacgcgcagaugug

SEQ ID NO: 2898939 - RNA, 17 nt, Human
aaaacgcgcagaugugc

SEQ ID NO: 2898940 - RNA, 21 nt, Human
aaaacgcgcagaugugcagca

SEQ ID NO: 2898941 - RNA, 19 nt, Human
aaaacgcugucaaaaguug

SEQ ID NO: 2898942 - RNA, 13 nt, Human
aaaaccuuucaaa

SEQ ID NO: 2898943 - RNA, 23 nt, Human
aaaaccuuagcucccucccgcac

SEQ ID NO: 2898944 - RNA, 14 nt, Human
aaaaccugucaaug

SEQ ID NO: 2898945 - RNA, 17 nt, Human
aaaaccugucaaugaua

SEQ ID NO: 2898946 - RNA, 13 nt, Human
aaaaccauuugaa

SEQ ID NO: 2898947 - RNA, 18 nt, Human
aaaaccaucuggccuggc

SEQ ID NO: 2898948 - RNA, 18 nt, Human
aaaaaugguggcuucagc

SEQ ID NO: 2898949 - RNA, 19 nt, Human
aaaaaugguggcuucagcu

SEQ ID NO: 2898950 - RNA, 20 nt, Human
aaaaaugguggcuucagcuc

SEQ ID NO: 2898951 - RNA, 22 nt, Human
aaaaaugguggcuucagcucca

SEQ ID NO: 2898952 - RNA, 12 nt, Human
aaaaauguaaau

SEQ ID NO: 2898953 - RNA, 13 nt, Human
aaaaauguaaaua

SEQ ID NO: 2898954 - RNA, 22 nt, Human
aaaaaugguauaaguaacuuua

SEQ ID NO: 2898955 - RNA, 13 nt, Human
aaaaaugguaauu

SEQ ID NO: 2898956 - RNA, 15 nt, Human
gggacauugggaagg

SEQ ID NO: 2898957 - RNA, 12 nt, Human
aaaaccaccccu

SEQ ID NO: 2898958 - RNA, 16 nt, Human
aaaaccacuagaacuc

SEQ ID NO: 2898959 - RNA, 11 nt, Human
aaaaccaggcc

SEQ ID NO: 2898960 - RNA, 17 nt, Human
aaaaccacuagaacucu

SEQ ID NO: 2898961 - RNA, 15 nt, Human
gggaggucaggcccu

SEQ ID NO: 2898962 - RNA, 16 nt, Human
gggaggucaggcccug

SEQ ID NO: 2898963 - RNA, 17 nt, Human
gggaggucaggcccugg

SEQ ID NO: 2898964 - RNA, 22 nt, Human
gggaggucaggcccuggaacuc

SEQ ID NO: 2898965 - RNA, 20 nt, Human
gggaugacuaaaauauuuau

SEQ ID NO: 2898966 - RNA, 19 nt, Human
gggaugacuaaaauauuua

SEQ ID NO: 2898967 - RNA, 13 nt, Human
gggaggcuucccc

SEQ ID NO: 2898968 - RNA, 13 nt, Human
gggagggaaaagg

SEQ ID NO: 2898969 - RNA, 20 nt, Human
gggagggaaaagggaaguag

SEQ ID NO: 2898970 - RNA, 14 nt, Human
gggaggcugaggcg

SEQ ID NO: 2898971 - RNA, 16 nt, Human
gggaggcugaggcaca

SEQ ID NO: 2898972 - RNA, 13 nt, Human
gggagggauggcc

SEQ ID NO: 2898973 - RNA, 11 nt, Human
gggagggauua

SEQ ID NO: 2898974 - RNA, 14 nt, Human
gggagagccccugg

SEQ ID NO: 2898975 - RNA, 15 nt, Human
gggagagccccuggg

SEQ ID NO: 2898976 - RNA, 13 nt, Human
gggagaggaaaga

SEQ ID NO: 2898977 - RNA, 13 nt, Human
gggagaggaacuc

SEQ ID NO: 2898978 - RNA, 22 nt, Human
gggagccaaaaucucaagaaau

SEQ ID NO: 2898979 - RNA, 24 nt, Human
gggagcaggcggugggcacccacc

SEQ ID NO: 2898980 - RNA, 17 nt, Human
gggagcaguccaugcau

SEQ ID NO: 2898981 - RNA, 15 nt, Human
gggagcagggaaggc

SEQ ID NO: 2898982 - RNA, 23 nt, Human
gggacuuggaagcuccgcuuucu

SEQ ID NO: 2898983 - RNA, 18 nt, Human
gggacuuggaagcuccgc

SEQ ID NO: 2898984 - RNA, 17 nt, Human
gggacuuggaagcuccg

SEQ ID NO: 2898985 - RNA, 15 nt, Human
gggacuuggaagcuc

SEQ ID NO: 2898986 - RNA, 21 nt, Human
gggagaaaaggaaaagaaaaa

SEQ ID NO: 2898987 - RNA, 22 nt, Human
gggagaaaaggaaaagaaaaaa

SEQ ID NO: 2898988 - RNA, 23 nt, Human
gggacuuugcugauuuccccucu

SEQ ID NO: 2898989 - RNA, 15 nt, Human
gggagaaccucaggc

SEQ ID NO: 2898990 - RNA, 14 nt, Human
gggagaaccucagg

SEQ ID NO: 2898991 - RNA, 14 nt, Human
aaaaggaacugcag

SEQ ID NO: 2898992 - RNA, 16 nt, Human
aaaaggaacugcagca

SEQ ID NO: 2898993 - RNA, 21 nt, Human
aaaagccucaacuagucauuu

SEQ ID NO: 2898994 - RNA, 13 nt, Human
aaaagcuucuuaa

SEQ ID NO: 2898995 - RNA, 15 nt, Human
aaaagcuucuuaauu

SEQ ID NO: 2898996 - RNA, 16 nt, Human
aaaagcuucuuaauua

SEQ ID NO: 2898997 - RNA, 20 nt, Human
aaaagcuucuuaauuaauuu

SEQ ID NO: 2898998 - RNA, 21 nt, Human
aaaagcuucuuaauuaauuug

SEQ ID NO: 2898999 - RNA, 22 nt, Human
aaaagcuucuuaauuaauuuga

SEQ ID NO: 2899000 - RNA, 11 nt, Human
aaaagcuuuau

SEQ ID NO: 2899001 - RNA, 17 nt, Human
aaaagcuuuaugauuuu

SEQ ID NO: 2899002 - RNA, 18 nt, Human
aaaagcuuuaugauuuuc

SEQ ID NO: 2899003 - RNA, 20 nt, Human
aaaagcuuuaugauuuucau

SEQ ID NO: 2899004 - RNA, 22 nt, Human
aaaagcuuuaugauuuucauaa

SEQ ID NO: 2899005 - RNA, 11 nt, Human
aaaaggaaaaa

SEQ ID NO: 2899006 - RNA, 13 nt, Human
aaaaggaaaaaaa

SEQ ID NO: 2899007 - RNA, 15 nt, Human
aaaaggaaaaaaaga

SEQ ID NO: 2899008 - RNA, 21 nt, Human
aaaaggaaaaaaagacucuuu

SEQ ID NO: 2899009 - RNA, 14 nt, Human
aaaaggaaaaagcu

SEQ ID NO: 2899010 - RNA, 15 nt, Human
aaaaggaaaaagcuc

SEQ ID NO: 2899011 - RNA, 12 nt, Human
aaaaggaaaaga

SEQ ID NO: 2899012 - RNA, 15 nt, Human
aaaaggaaaagaaaa

SEQ ID NO: 2899013 - RNA, 16 nt, Human
aaaaggaaaagaaaaa

SEQ ID NO: 2899014 - RNA, 23 nt, Human
aaaaggaaaagaaaaaaaaaaga

SEQ ID NO: 2899015 - RNA, 18 nt, Human
aaaacuucauucucguga

SEQ ID NO: 2899016 - RNA, 21 nt, Human
aaaagccaaggugucauuuau

SEQ ID NO: 2899017 - RNA, 17 nt, Human
aaaagccacuagacucu

SEQ ID NO: 2899018 - RNA, 13 nt, Human
ggcauaaaacagc

SEQ ID NO: 2899019 - RNA, 16 nt, Human
ggcauaaaacagcuuu

SEQ ID NO: 2899020 - RNA, 13 nt, Human
ggcauaaacuguu

SEQ ID NO: 2899021 - RNA, 14 nt, Human
ggcauaaacuguuu

SEQ ID NO: 2899022 - RNA, 21 nt, Human
ggcauacgccuguaguccuag

SEQ ID NO: 2899023 - RNA, 19 nt, Human
ggcauagaugcaggugagc

SEQ ID NO: 2899024 - RNA, 16 nt, Human
ggccaguccugccugg

SEQ ID NO: 2899025 - RNA, 20 nt, Human
ggccagugugacaaggauug

SEQ ID NO: 2899026 - RNA, 22 nt, Human
ggccaguccugccuggccaggc

SEQ ID NO: 2899027 - RNA, 21 nt, Human
ggccaguccugccuggccagg

SEQ ID NO: 2899028 - RNA, 20 nt, Human
ggccaguccugccuggccag

SEQ ID NO: 2899029 - RNA, 19 nt, Human
ggccaguccugccuggcca

SEQ ID NO: 2899030 - RNA, 18 nt, Human
ggccaguccugccuggcc

SEQ ID NO: 2899031 - RNA, 19 nt, Human
ggccagugugaucccaagu

SEQ ID NO: 2899032 - RNA, 19 nt, Human
ggccucaccgagugggggc

SEQ ID NO: 2899033 - RNA, 15 nt, Human
ggccucaccucuacc

SEQ ID NO: 2899034 - RNA, 17 nt, Human
ggccucagcugaaugcc

SEQ ID NO: 2899035 - RNA, 23 nt, Human
ggccucaagugauucuccugccu

SEQ ID NO: 2899036 - RNA, 19 nt, Human
ggccgaauccccucccugu

SEQ ID NO: 2899037 - RNA, 10 nt, Human
ggccucagaa

SEQ ID NO: 2899038 - RNA, 11 nt, Human
ggccucagacu

SEQ ID NO: 2899039 - RNA, 18 nt, Human
ggccucagacugcaccca

SEQ ID NO: 2899040 - RNA, 19 nt, Human
ggccucagacugcacccag

SEQ ID NO: 2899041 - RNA, 20 nt, Human
ggccucagacugcacccagg

SEQ ID NO: 2899042 - RNA, 21 nt, Human
ggccucagacugcacccagga

SEQ ID NO: 2899043 - RNA, 22 nt, Human
ggccucagacugcacccaggag

SEQ ID NO: 2899044 - RNA, 23 nt, Human
ggccucagacugcacccaggagg

SEQ ID NO: 2899045 - RNA, 19 nt, Human
ggccucacuaggcuucugg

SEQ ID NO: 2899046 - RNA, 21 nt, Human
ggccgaauccccucccuguca

SEQ ID NO: 2899047 - RNA, 18 nt, Human
ggccucaccgaguggggg

SEQ ID NO: 2899048 - RNA, 19 nt, Human
ggcccuuuccuuccagauc

SEQ ID NO: 2899049 - RNA, 18 nt, Human
ggcccuuugaagccucag

SEQ ID NO: 2899050 - RNA, 19 nt, Human
ggcccuuugaagccucagc

SEQ ID NO: 2899051 - RNA, 20 nt, Human
ggcccuuugaagccucagcu

SEQ ID NO: 2899052 - RNA, 21 nt, Human
ggcccuugcaguucagcacca

SEQ ID NO: 2899053 - RNA, 14 nt, Human
ggccccugcugguu

SEQ ID NO: 2899054 - RNA, 13 nt, Human
ggccccugcuggu

SEQ ID NO: 2899055 - RNA, 23 nt, Human
ggccccugcugguucaggguugg

SEQ ID NO: 2899056 - RNA, 13 nt, Human
ggcccggcuccag

SEQ ID NO: 2899057 - RNA, 23 nt, Human
ggcccggagcugccccucucugg

SEQ ID NO: 2899058 - RNA, 15 nt, Human
ggcccggaugcugcu

SEQ ID NO: 2899059 - RNA, 17 nt, Human
ggcccggaugcugcuuc

SEQ ID NO: 2899060 - RNA, 15 nt, Human
ggcccggcuccaggc

SEQ ID NO: 2899061 - RNA, 16 nt, Human
ggcccuccuacccugc

SEQ ID NO: 2899062 - RNA, 22 nt, Human
ggcccuccgaccacuuccaggg

SEQ ID NO: 2899063 - RNA, 20 nt, Human
ggcccuccuacccugcgccc

SEQ ID NO: 2899064 - RNA, 17 nt, Human
ggcccuccuacccugcg

SEQ ID NO: 2899065 - RNA, 19 nt, Human
ggcccuccuacccugcgcc

SEQ ID NO: 2899066 - RNA, 21 nt, Human
ggcccuccuacccugcgccca

SEQ ID NO: 2899067 - RNA, 14 nt, Human
ggcccuccugugcu

SEQ ID NO: 2899068 - RNA, 20 nt, Human
ggcccuccugugcuggggga

SEQ ID NO: 2899069 - RNA, 15 nt, Human
ggcccucgacacuca

SEQ ID NO: 2899070 - RNA, 23 nt, Human
ggcccucgacacucaccaugaag

SEQ ID NO: 2899071 - RNA, 14 nt, Human
ggcacaggucaggg

SEQ ID NO: 2899072 - RNA, 22 nt, Human
ggcacaggucaggggugacaca

SEQ ID NO: 2899073 - RNA, 17 nt, Human
ggcacaggucgggcgca

SEQ ID NO: 2899074 - RNA, 17 nt, Human
ggcacaguaugucccau

SEQ ID NO: 2899075 - RNA, 14 nt, Human
ggcacaguccagga

SEQ ID NO: 2899076 - RNA, 15 nt, Human
ggcacaguccaggaa

SEQ ID NO: 2899077 - RNA, 22 nt, Human
ggcacaguccaggaacaagcua

SEQ ID NO: 2899078 - RNA, 20 nt, Human
ggcacucagaagacacugau

SEQ ID NO: 2899079 - RNA, 23 nt, Human
ggcacucagaagacacugauggg

SEQ ID NO: 2899080 - RNA, 22 nt, Human
ggcacucuguuauuuagacuca

SEQ ID NO: 2899081 - RNA, 13 nt, Human
ggcacucuagauu

SEQ ID NO: 2899082 - RNA, 14 nt, Human
ggcacuccaaccua

SEQ ID NO: 2899083 - RNA, 19 nt, Human
ggcacuccaaccuaaccug

SEQ ID NO: 2899084 - RNA, 20 nt, Human
ggcacuccaaccuaaccugu

SEQ ID NO: 2899085 - RNA, 22 nt, Human
ggcacuccaaccuaaccugugu

SEQ ID NO: 2899086 - RNA, 16 nt, Human
ggcacucccuccagca

SEQ ID NO: 2899087 - RNA, 18 nt, Human
ggcacucccuccagcaca

SEQ ID NO: 2899088 - RNA, 16 nt, Human
ggcacuugccuggguc

SEQ ID NO: 2899089 - RNA, 15 nt, Human
ggcacuugccugggu

SEQ ID NO: 2899090 - RNA, 14 nt, Human
ggcacuugccuggg

SEQ ID NO: 2899091 - RNA, 16 nt, Human
ggcacuugauuccuug

SEQ ID NO: 2899092 - RNA, 13 nt, Human
ggcacuucccugc

SEQ ID NO: 2899093 - RNA, 14 nt, Human
ggcacuucccugcu

SEQ ID NO: 2899094 - RNA, 18 nt, Human
ggcacuucccugcugccu

SEQ ID NO: 2899095 - RNA, 20 nt, Human
ggcacuguaguucuaagacu

SEQ ID NO: 2899096 - RNA, 24 nt, Human
ggcacuguacuaggcgugagaagc

SEQ ID NO: 2899097 - RNA, 17 nt, Human
ggcacuguaguucuaag

SEQ ID NO: 2899098 - RNA, 18 nt, Human
ggcacuguaguucuaaga

SEQ ID NO: 2899099 - RNA, 15 nt, Human
ggcacuuaagcacaa

SEQ ID NO: 2899100 - RNA, 22 nt, Human
ggcacuuauuguaaauuuuaga

SEQ ID NO: 2899101 - RNA, 22 nt, Human
ggcacugauuguuuuagagacu

SEQ ID NO: 2899102 - RNA, 15 nt, Human
ggcacugguggcccg

SEQ ID NO: 2899103 - RNA, 17 nt, Human
ggcagacagcaggcagc

SEQ ID NO: 2899104 - RNA, 23 nt, Human
ggcagacagcaggcagcgccaag

SEQ ID NO: 2899105 - RNA, 16 nt, Human
ggcagacgccggggac

SEQ ID NO: 2899106 - RNA, 15 nt, Human
ggcagacuacacagg

SEQ ID NO: 2899107 - RNA, 17 nt, Human
ggcagacuacacaggau

SEQ ID NO: 2899108 - RNA, 23 nt, Human
ggcagccccauucugccugccca

SEQ ID NO: 2899109 - RNA, 18 nt, Human
ggagagaaacaauaaaga

SEQ ID NO: 2899110 - RNA, 16 nt, Human
ggagagaaagugggug

SEQ ID NO: 2899111 - RNA, 18 nt, Human
ggagagaaagugggugag

SEQ ID NO: 2899112 - RNA, 24 nt, Human
ggagagaaagugggugagaugcug

SEQ ID NO: 2899113 - RNA, 22 nt, Human
ggagacuugccagagccgggca

SEQ ID NO: 2899114 - RNA, 14 nt, Human
ggagagaaaauaua

SEQ ID NO: 2899115 - RNA, 15 nt, Human
ggagagaaaauauau

SEQ ID NO: 2899116 - RNA, 16 nt, Human
ggagagaaaauauaug

SEQ ID NO: 2899117 - RNA, 20 nt, Human
ggagacucuguggggccuug

SEQ ID NO: 2899118 - RNA, 14 nt, Human
ggagagacacagcg

SEQ ID NO: 2899119 - RNA, 15 nt, Human
ggcagcccuguaggg

SEQ ID NO: 2899120 - RNA, 13 nt, Human
ggcagcccuguag

SEQ ID NO: 2899121 - RNA, 21 nt, Human
ggcagggcuggccccagggca

SEQ ID NO: 2899122 - RNA, 20 nt, Human
ggcaguuuugacaucagcca

SEQ ID NO: 2899123 - RNA, 21 nt, Human
ggcaguuuugacaucagccag

SEQ ID NO: 2899124 - RNA, 23 nt, Human
ggcaguuuugacaucagccagcu

SEQ ID NO: 2899125 - RNA, 15 nt, Human
ggcaguguuuugaga

SEQ ID NO: 2899126 - RNA, 14 nt, Human
guacuucagcaaga

SEQ ID NO: 2899127 - RNA, 16 nt, Human
guacuucagcaagaga

SEQ ID NO: 2899128 - RNA, 18 nt, Human
guacuucagcaagagaga

SEQ ID NO: 2899129 - RNA, 19 nt, Human
guacuucagcaagagagaa

SEQ ID NO: 2899130 - RNA, 21 nt, Human
guacuucagcaagagagaacc

SEQ ID NO: 2899131 - RNA, 23 nt, Human
guacuucagcaagagagaaccua

SEQ ID NO: 2899132 - RNA, 15 nt, Human
guacuguaugugaug

SEQ ID NO: 2899133 - RNA, 17 nt, Human
guacugucugauuggcu

SEQ ID NO: 2899134 - RNA, 18 nt, Human
guacugucugauuggcuu

SEQ ID NO: 2899135 - RNA, 14 nt, Human
guacuguucugugu

SEQ ID NO: 2899136 - RNA, 15 nt, Human
guacuguucuguguc

SEQ ID NO: 2899137 - RNA, 14 nt, Human
guacuuaacuauuc

SEQ ID NO: 2899138 - RNA, 17 nt, Human
guacuuagaguuucugu

SEQ ID NO: 2899139 - RNA, 19 nt, Human
guacuuagaguuucuguuu

SEQ ID NO: 2899140 - RNA, 20 nt, Human
guacuuagaguuucuguuug

SEQ ID NO: 2899141 - RNA, 17 nt, Human
guacuguucugugucuu

SEQ ID NO: 2899142 - RNA, 18 nt, Human
guacuguucugugucuuu

SEQ ID NO: 2899143 - RNA, 15 nt, Human
guacuguuuaauguu

SEQ ID NO: 2899144 - RNA, 19 nt, Human
guacuguuuaauguucugu

SEQ ID NO: 2899145 - RNA, 13 nt, Human
guacuguuuacca

SEQ ID NO: 2899146 - RNA, 20 nt, Human
guacuguuuaccauuuuuca

SEQ ID NO: 2899147 - RNA, 19 nt, Human
guacuggcugauggaguaa

SEQ ID NO: 2899148 - RNA, 16 nt, Human
guacuggcaugguacg

SEQ ID NO: 2899149 - RNA, 14 nt, Human
guacuggcauggua

SEQ ID NO: 2899150 - RNA, 16 nt, Human
guacuguauagacagu

SEQ ID NO: 2899151 - RNA, 17 nt, Human
guacuguauagacaguu

SEQ ID NO: 2899152 - RNA, 18 nt, Human
guacuguauagacaguuu

SEQ ID NO: 2899153 - RNA, 20 nt, Human
guacuguauagacaguuugu

SEQ ID NO: 2899154 - RNA, 12 nt, Human
guacuguacuaa

SEQ ID NO: 2899155 - RNA, 13 nt, Human
guacuguacuaau

SEQ ID NO: 2899156 - RNA, 14 nt, Human
guacuguacuaauu

SEQ ID NO: 2899157 - RNA, 12 nt, Human
guacuguaauaa

SEQ ID NO: 2899158 - RNA, 13 nt, Human
guacuguaauaau

SEQ ID NO: 2899159 - RNA, 17 nt, Human
guacuguaauaauaccu

SEQ ID NO: 2899160 - RNA, 18 nt, Human
guacuguaauaauaccuc

SEQ ID NO: 2899161 - RNA, 19 nt, Human
guacuguaauaauaccuca

SEQ ID NO: 2899162 - RNA, 20 nt, Human
guacuguaauaauaccucaa

SEQ ID NO: 2899163 - RNA, 23 nt, Human
guacugaaagccuuagggaagcu

SEQ ID NO: 2899164 - RNA, 22 nt, Human
guacugaaagccuuagggaagc

SEQ ID NO: 2899165 - RNA, 14 nt, Human
guacugaaagccuu

SEQ ID NO: 2899166 - RNA, 12 nt, Human
guacugagauuu

SEQ ID NO: 2899167 - RNA, 17 nt, Human
guacugauugagaaguu

SEQ ID NO: 2899168 - RNA, 19 nt, Human
guacugccccccaugagga

SEQ ID NO: 2899169 - RNA, 23 nt, Human
guacugccccccaugaggaagga

SEQ ID NO: 2899170 - RNA, 22 nt, Human
guacugccccccaugaggaagg

SEQ ID NO: 2899171 - RNA, 21 nt, Human
guacugccccccaugaggaag

SEQ ID NO: 2899172 - RNA, 17 nt, Human
guacugcucaggcugca

SEQ ID NO: 2899173 - RNA, 20 nt, Human
guacugcucaggcugcagcu

SEQ ID NO: 2899174 - RNA, 22 nt, Human
guacugcucaggcugcagcugg

SEQ ID NO: 2899175 - RNA, 23 nt, Human
guacugcucaggcugcagcugga

SEQ ID NO: 2899176 - RNA, 14 nt, Human
guacccacugcucu

SEQ ID NO: 2899177 - RNA, 13 nt, Human
guacccacugcuc

SEQ ID NO: 2899178 - RNA, 13 nt, Human
guacuaguuuuag

SEQ ID NO: 2899179 - RNA, 21 nt, Human
guacuauaaugaaaacauccu

SEQ ID NO: 2899180 - RNA, 14 nt, Human
guacuaguguucug

SEQ ID NO: 2899181 - RNA, 15 nt, Human
guacuaguguucugu

SEQ ID NO: 2899182 - RNA, 17 nt, Human
guacuaguguucuguuu

SEQ ID NO: 2899183 - RNA, 13 nt, Human
guacuaguacugu

SEQ ID NO: 2899184 - RNA, 16 nt, Human
guacuaguacugugua

SEQ ID NO: 2899185 - RNA, 17 nt, Human
guacuaguacuguguac

SEQ ID NO: 2899186 - RNA, 19 nt, Human
guacuaguacuguguacug

SEQ ID NO: 2899187 - RNA, 14 nt, Human
guacucauuaaaaa

SEQ ID NO: 2899188 - RNA, 23 nt, Human
guacucaggaggcugaggggagg

SEQ ID NO: 2899189 - RNA, 17 nt, Human
guacucaggaggcugag

SEQ ID NO: 2899190 - RNA, 15 nt, Human
guacucacugaagcc

SEQ ID NO: 2899191 - RNA, 16 nt, Human
guacucacugaagccu

SEQ ID NO: 2899192 - RNA, 20 nt, Human
guacucacugaagccugcgu

SEQ ID NO: 2899193 - RNA, 21 nt, Human
guacuauuuagauauaacacu

SEQ ID NO: 2899194 - RNA, 15 nt, Human
guacuaccuguguau

SEQ ID NO: 2899195 - RNA, 15 nt, Human
guacucuaacuuaag

SEQ ID NO: 2899196 - RNA, 14 nt, Human
guacucugaaacac

SEQ ID NO: 2899197 - RNA, 21 nt, Human
guacucugaaacacacugaaa

SEQ ID NO: 2899198 - RNA, 20 nt, Human
guacucccucucaggaucca

SEQ ID NO: 2899199 - RNA, 15 nt, Human
guacucccucucagg

SEQ ID NO: 2899200 - RNA, 16 nt, Human
guacucccucucagga

SEQ ID NO: 2899201 - RNA, 14 nt, Human
guacuccucccagg

SEQ ID NO: 2899202 - RNA, 15 nt, Human
guagacuauauacau

SEQ ID NO: 2899203 - RNA, 16 nt, Human
guagacuauauacaug

SEQ ID NO: 2899204 - RNA, 17 nt, Human
guagacuauauacaugu

SEQ ID NO: 2899205 - RNA, 12 nt, Human
guagagacaggg

SEQ ID NO: 2899206 - RNA, 11 nt, Human
guagagacagg

SEQ ID NO: 2899207 - RNA, 13 nt, Human
guagacaguuuug

SEQ ID NO: 2899208 - RNA, 22 nt, Human
guagacaagcaauuagacaaga

SEQ ID NO: 2899209 - RNA, 18 nt, Human
guagacaaucauuguuuu

SEQ ID NO: 2899210 - RNA, 21 nt, Human
guagacacacuaucauaguua

SEQ ID NO: 2899211 - RNA, 16 nt, Human
guagaccaaaauaaaa

SEQ ID NO: 2899212 - RNA, 15 nt, Human
guagaccaaaauaaa

SEQ ID NO: 2899213 - RNA, 14 nt, Human
guagaccaaaauaa

SEQ ID NO: 2899214 - RNA, 14 nt, Human
guagacauuuuaac

SEQ ID NO: 2899215 - RNA, 21 nt, Human
guagacauuuuaacaagaaga

SEQ ID NO: 2899216 - RNA, 22 nt, Human
guagacauuuuaacaagaagau

SEQ ID NO: 2899217 - RNA, 11 nt, Human
guagagccagg

SEQ ID NO: 2899218 - RNA, 10 nt, Human
guagagccag

SEQ ID NO: 2899219 - RNA, 13 nt, Human
guagagacagggu

SEQ ID NO: 2899220 - RNA, 18 nt, Human
guagagccagggucucac

SEQ ID NO: 2899221 - RNA, 15 nt, Human
guagagccagggucu

SEQ ID NO: 2899222 - RNA, 14 nt, Human
guagagccagcuug

SEQ ID NO: 2899223 - RNA, 12 nt, Human
guagagccagcu

SEQ ID NO: 2899224 - RNA, 14 nt, Human
guagcccuuucugu

SEQ ID NO: 2899225 - RNA, 16 nt, Human
guagccuauguugugg

SEQ ID NO: 2899226 - RNA, 16 nt, Human
guagaaauaauaugca

SEQ ID NO: 2899227 - RNA, 18 nt, Human
guacuucaggggcacuuc

SEQ ID NO: 2899228 - RNA, 17 nt, Human
guagaaauaauaugcau

SEQ ID NO: 2899229 - RNA, 14 nt, Human
guacuguguacugu

SEQ ID NO: 2899230 - RNA, 17 nt, Human
guagaacuuacuauuca

SEQ ID NO: 2899231 - RNA, 19 nt, Human
guagaacguaaccacggaa

SEQ ID NO: 2899232 - RNA, 18 nt, Human
guagaacguaaccacgga

SEQ ID NO: 2899233 - RNA, 14 nt, Human
guagaaccucaccu

SEQ ID NO: 2899234 - RNA, 22 nt, Human
guagaagcauuccuucuuugau

SEQ ID NO: 2899235 - RNA, 18 nt, Human
guagaagcauuccuucuu

SEQ ID NO: 2899236 - RNA, 21 nt, Human
guagaagcauuccuucuuuga

SEQ ID NO: 2899237 - RNA, 15 nt, Human
guagaagcauuccuu

SEQ ID NO: 2899238 - RNA, 15 nt, Human
guagaauugcauuga

SEQ ID NO: 2899239 - RNA, 16 nt, Human
guagaauuguuauaga

SEQ ID NO: 2899240 - RNA, 14 nt, Human
guagaauugcauug

SEQ ID NO: 2899241 - RNA, 19 nt, Human
guagaagguugacacaguu

SEQ ID NO: 2899242 - RNA, 19 nt, Human
guagaauagccuguggccu

SEQ ID NO: 2899243 - RNA, 22 nt, Human
aaaucauaggaaaguauuuuuu

SEQ ID NO: 2899244 - RNA, 16 nt, Human
aaaucauuuuaggaaa

SEQ ID NO: 2899245 - RNA, 18 nt, Human
aaaucauuuuaggaaagg

SEQ ID NO: 2899246 - RNA, 19 nt, Human
aaaucauuuuaggaaagga

SEQ ID NO: 2899247 - RNA, 17 nt, Human
aaauccacccauauguu

SEQ ID NO: 2899248 - RNA, 19 nt, Human
aaauccacccauauguuaa

SEQ ID NO: 2899249 - RNA, 20 nt, Human
aaauccacccauauguuaaa

SEQ ID NO: 2899250 - RNA, 22 nt, Human
aaaucagagacaaaauauuucc

SEQ ID NO: 2899251 - RNA, 22 nt, Human
aaaucagauguugaauucuuuu

SEQ ID NO: 2899252 - RNA, 15 nt, Human
aaaucagguauuaau

SEQ ID NO: 2899253 - RNA, 17 nt, Human
aaaucagguauuaaucu

SEQ ID NO: 2899254 - RNA, 22 nt, Human
aaaucagucagugcaaauguca

SEQ ID NO: 2899255 - RNA, 14 nt, Human
aaauauuauguguu

SEQ ID NO: 2899256 - RNA, 19 nt, Human
aaauauuaguuaauggauu

SEQ ID NO: 2899257 - RNA, 14 nt, Human
aaauauacuuaaau

SEQ ID NO: 2899258 - RNA, 18 nt, Human
aaauauacuuaaauggaa

SEQ ID NO: 2899259 - RNA, 18 nt, Human
aaauacauuuaaaacuua

SEQ ID NO: 2899260 - RNA, 16 nt, Human
aaaucagagacaaaau

SEQ ID NO: 2899261 - RNA, 14 nt, Human
aaaucacauccuua

SEQ ID NO: 2899262 - RNA, 18 nt, Human
aaaucacauccuuauccu

SEQ ID NO: 2899263 - RNA, 15 nt, Human
aaauauuccugcauu

SEQ ID NO: 2899264 - RNA, 15 nt, Human
aaauauuauguguuu

SEQ ID NO: 2899265 - RNA, 23 nt, Human
aaauauuauuguggaaaugaaua

SEQ ID NO: 2899266 - RNA, 12 nt, Human
aaauauucagaa

SEQ ID NO: 2899267 - RNA, 13 nt, Human
aaauauucagaau

SEQ ID NO: 2899268 - RNA, 17 nt, Human
aaauauucagaaucuuu

SEQ ID NO: 2899269 - RNA, 16 nt, Human
aaauauucaugcuucu

SEQ ID NO: 2899270 - RNA, 20 nt, Human
aaauauuauuuuaugaaagg

SEQ ID NO: 2899271 - RNA, 19 nt, Human
guacauauuuguggaauaa

SEQ ID NO: 2899272 - RNA, 20 nt, Human
guacauauuuguggaauaau

SEQ ID NO: 2899273 - RNA, 14 nt, Human
guacaucuggccuu

SEQ ID NO: 2899274 - RNA, 13 nt, Human
guacaucuggcuu

SEQ ID NO: 2899275 - RNA, 14 nt, Human
guacaucuggcuua

SEQ ID NO: 2899276 - RNA, 16 nt, Human
guacaucuggcuuauu

SEQ ID NO: 2899277 - RNA, 18 nt, Human
guacaucuggcuuauuuu

SEQ ID NO: 2899278 - RNA, 19 nt, Human
guacaucuggcuuauuuua

SEQ ID NO: 2899279 - RNA, 20 nt, Human
guacaucuggcuuauuuuaa

SEQ ID NO: 2899280 - RNA, 21 nt, Human
guacaucuggcuuauuuuaau

SEQ ID NO: 2899281 - RNA, 22 nt, Human
guacaucuggcuuauuuuaaug

SEQ ID NO: 2899282 - RNA, 23 nt, Human
guacaucuggcuuauuuuaaugu

SEQ ID NO: 2899283 - RNA, 20 nt, Human
guacaucuauuuuggauugu

SEQ ID NO: 2899284 - RNA, 18 nt, Human
guacaucuauuuuggauu

SEQ ID NO: 2899285 - RNA, 16 nt, Human
guacauggcagaguuu

SEQ ID NO: 2899286 - RNA, 10 nt, Human
guacauguau

SEQ ID NO: 2899287 - RNA, 11 nt, Human
guacaugagaa

SEQ ID NO: 2899288 - RNA, 14 nt, Human
guacaugaaaguag

SEQ ID NO: 2899289 - RNA, 11 nt, Human
guacaugaaau

SEQ ID NO: 2899290 - RNA, 19 nt, Human
guacaugaaauuuuuguaa

SEQ ID NO: 2899291 - RNA, 20 nt, Human
guacaugaaauuuuuguaaa

SEQ ID NO: 2899292 - RNA, 18 nt, Human
guacauucaauguuuaug

SEQ ID NO: 2899293 - RNA, 17 nt, Human
guacauucaauguuuau

SEQ ID NO: 2899294 - RNA, 12 nt, Human
guacauuuauaa

SEQ ID NO: 2899295 - RNA, 13 nt, Human
guacauuuauaau

SEQ ID NO: 2899296 - RNA, 14 nt, Human
guacauuuauaauu

SEQ ID NO: 2899297 - RNA, 15 nt, Human
guacauuuauaauug

SEQ ID NO: 2899298 - RNA, 17 nt, Human
guacauugaaggccugg

SEQ ID NO: 2899299 - RNA, 14 nt, Human
guacauuuaaaauu

SEQ ID NO: 2899300 - RNA, 15 nt, Human
guacauuuaaaauug

SEQ ID NO: 2899301 - RNA, 19 nt, Human
guacauguguagccugugc

SEQ ID NO: 2899302 - RNA, 20 nt, Human
guacauguguagccugugca

SEQ ID NO: 2899303 - RNA, 23 nt, Human
guaccaggaaaggauuuuauaau

SEQ ID NO: 2899304 - RNA, 16 nt, Human
guaccagcccuggggc

SEQ ID NO: 2899305 - RNA, 17 nt, Human
guaccagcccuggggcu

SEQ ID NO: 2899306 - RNA, 21 nt, Human
guaccagcgcucuaaaagcac

SEQ ID NO: 2899307 - RNA, 22 nt, Human
guaccagcgcucuaaaagcacc

SEQ ID NO: 2899308 - RNA, 16 nt, Human
guaccagcaauaugua

SEQ ID NO: 2899309 - RNA, 20 nt, Human
guaccaugaaacaaagcugc

SEQ ID NO: 2899310 - RNA, 21 nt, Human
guaccagguauuauuaucuuu

SEQ ID NO: 2899311 - RNA, 12 nt, Human
guacccacugcu

SEQ ID NO: 2899312 - RNA, 14 nt, Human
guaccauuugcaug

SEQ ID NO: 2899313 - RNA, 22 nt, Human
guacccaauagcugcccauuuc

SEQ ID NO: 2899314 - RNA, 15 nt, Human
guacauuuggagaca

SEQ ID NO: 2899315 - RNA, 14 nt, Human
guacauuuaugauu

SEQ ID NO: 2899316 - RNA, 16 nt, Human
guacauuuaugauuua

SEQ ID NO: 2899317 - RNA, 18 nt, Human
guacauuuaugauuuaau

SEQ ID NO: 2899318 - RNA, 19 nt, Human
guacauuuaugauuuaaua

SEQ ID NO: 2899319 - RNA, 20 nt, Human
guacauuuaugauuuaauaa

SEQ ID NO: 2899320 - RNA, 21 nt, Human
guacauuuaugauuuaauaaa

SEQ ID NO: 2899321 - RNA, 22 nt, Human
guacauuuaugauuuaauaaaa

SEQ ID NO: 2899322 - RNA, 16 nt, Human
guacauuuuguuguaa

SEQ ID NO: 2899323 - RNA, 17 nt, Human
guacauuuuguuguaaa

SEQ ID NO: 2899324 - RNA, 18 nt, Human
guacauuuuguuguaaaa

SEQ ID NO: 2899325 - RNA, 19 nt, Human
guacauuuuguuguaaaaa

SEQ ID NO: 2899326 - RNA, 21 nt, Human
guacauuuuguuguaaaaaga

SEQ ID NO: 2899327 - RNA, 22 nt, Human
guacauuuuguuguaaaaagaa

SEQ ID NO: 2899328 - RNA, 23 nt, Human
guacauuuuguuguaaaaagaaa

SEQ ID NO: 2899329 - RNA, 13 nt, Human
guaccaaaguuuu

SEQ ID NO: 2899330 - RNA, 18 nt, Human
guaccaaaguuuuaucaa

SEQ ID NO: 2899331 - RNA, 21 nt, Human
guaccaaaguuuuaucaaguu

SEQ ID NO: 2899332 - RNA, 14 nt, Human
guaccacucaggcc

SEQ ID NO: 2899333 - RNA, 19 nt, Human
guaauauaauggaagagaa

SEQ ID NO: 2899334 - RNA, 20 nt, Human
guaauauaauggaagagaaa

SEQ ID NO: 2899335 - RNA, 22 nt, Human
guaauauaauggaagagaaauc

SEQ ID NO: 2899336 - RNA, 12 nt, Human
guaauauaaaag

SEQ ID NO: 2899337 - RNA, 14 nt, Human
guaauauaaaagau

SEQ ID NO: 2899338 - RNA, 13 nt, Human
guaauaagacaua

SEQ ID NO: 2899339 - RNA, 14 nt, Human
guaauaagacauaa

SEQ ID NO: 2899340 - RNA, 19 nt, Human
guaauaagacauaacguuu

SEQ ID NO: 2899341 - RNA, 19 nt, Human
guaauagagcaaaauugau

SEQ ID NO: 2899342 - RNA, 22 nt, Human
guaauaacugugaaguuuacau

SEQ ID NO: 2899343 - RNA, 17 nt, Human
guaauaacacccuuccu

SEQ ID NO: 2899344 - RNA, 13 nt, Human
guaacugacauga

SEQ ID NO: 2899345 - RNA, 20 nt, Human
guaauaagaauggaaaagag

SEQ ID NO: 2899346 - RNA, 16 nt, Human
guaauaacugugaagu

SEQ ID NO: 2899347 - RNA, 15 nt, Human
guaauaacugugaag

SEQ ID NO: 2899348 - RNA, 16 nt, Human
guaaacuguggaugau

SEQ ID NO: 2899349 - RNA, 13 nt, Human
guaaagaaauguc

SEQ ID NO: 2899350 - RNA, 16 nt, Human
guaaagaaaugucuua

SEQ ID NO: 2899351 - RNA, 16 nt, Human
guaauuugaggacaac

SEQ ID NO: 2899352 - RNA, 18 nt, Human
guaauuugguuuaaaaau

SEQ ID NO: 2899353 - RNA, 15 nt, Human
guaauuuguaaaaug

SEQ ID NO: 2899354 - RNA, 11 nt, Human
guaauuuauuu

SEQ ID NO: 2899355 - RNA, 17 nt, Human
guaauuuaguuauugau

SEQ ID NO: 2899356 - RNA, 14 nt, Human
guaauuuauaaaau

SEQ ID NO: 2899357 - RNA, 15 nt, Human
guaauuuauaaaauu

SEQ ID NO: 2899358 - RNA, 18 nt, Human
guaauuuauaaaauuaga

SEQ ID NO: 2899359 - RNA, 17 nt, Human
guaauuuagauuguaaa

SEQ ID NO: 2899360 - RNA, 18 nt, Human
guaauuuagauuguaaac

SEQ ID NO: 2899361 - RNA, 19 nt, Human
guaauuuaggguacuaaau

SEQ ID NO: 2899362 - RNA, 20 nt, Human
guaauuuaggguacuaaauu

SEQ ID NO: 2899363 - RNA, 21 nt, Human
guaauuguugcuaaucuucuu

SEQ ID NO: 2899364 - RNA, 22 nt, Human
guaauauauucugaagcaacau

SEQ ID NO: 2899365 - RNA, 14 nt, Human
guaauuguuccuuu

SEQ ID NO: 2899366 - RNA, 15 nt, Human
guaaucccagcacuu

SEQ ID NO: 2899367 - RNA, 15 nt, Human
guaauccaccugccu

SEQ ID NO: 2899368 - RNA, 18 nt, Human
guaauccaggcacagcug

SEQ ID NO: 2899369 - RNA, 19 nt, Human
guaauccaggcacagcuga

SEQ ID NO: 2899370 - RNA, 20 nt, Human
guaauccaggcacagcugag

SEQ ID NO: 2899371 - RNA, 16 nt, Human
guaaucccagcacacu

SEQ ID NO: 2899372 - RNA, 14 nt, Human
guacacguguccug

SEQ ID NO: 2899373 - RNA, 15 nt, Human
guacacguguccugu

SEQ ID NO: 2899374 - RNA, 17 nt, Human
guacacguguccuguag

SEQ ID NO: 2899375 - RNA, 20 nt, Human
guacacagcucuagacacug

SEQ ID NO: 2899376 - RNA, 22 nt, Human
guaauuuuuacccuaaugucuu

SEQ ID NO: 2899377 - RNA, 16 nt, Human
guacacugacuugaga

SEQ ID NO: 2899378 - RNA, 21 nt, Human
aaauacauaucgcugacuuca

SEQ ID NO: 2899379 - RNA, 20 nt, Human
aaauacaguuugucacauga

SEQ ID NO: 2899380 - RNA, 22 nt, Human
aaauacaguuugucacaugaaa

SEQ ID NO: 2899381 - RNA, 16 nt, Human
aaauacauacggucag

SEQ ID NO: 2899382 - RNA, 14 nt, Human
aaauacaugcaucu

SEQ ID NO: 2899383 - RNA, 20 nt, Human
aaauacuauuuaaagccucc

SEQ ID NO: 2899384 - RNA, 18 nt, Human
aaaguauauauagaaucu

SEQ ID NO: 2899385 - RNA, 17 nt, Human
aaaguauauauagaauc

SEQ ID NO: 2899386 - RNA, 13 nt, Human
aaaguauauauag

SEQ ID NO: 2899387 - RNA, 13 nt, Human
aaaguauagagag

SEQ ID NO: 2899388 - RNA, 17 nt, Human
aaaguauagagagaagu

SEQ ID NO: 2899389 - RNA, 21 nt, Human
aaaguacuucuccacccugcu

SEQ ID NO: 2899390 - RNA, 20 nt, Human
aaaguacuucuccacccugc

SEQ ID NO: 2899391 - RNA, 23 nt, Human
aaaguacuucuccacccugcucu

SEQ ID NO: 2899392 - RNA, 15 nt, Human
aaagguaaaacaaaa

SEQ ID NO: 2899393 - RNA, 12 nt, Human
aaagguauuugg

SEQ ID NO: 2899394 - RNA, 21 nt, Human
aaagguagcuuaccugacaca

SEQ ID NO: 2899395 - RNA, 18 nt, Human
aaagguauuuugaauacc

SEQ ID NO: 2899396 - RNA, 19 nt, Human
aaagguccacaggucuaga

SEQ ID NO: 2899397 - RNA, 20 nt, Human
aaagguccacaggucuagac

SEQ ID NO: 2899398 - RNA, 19 nt, Human
aaaguacuucuccacccug

SEQ ID NO: 2899399 - RNA, 18 nt, Human
aaaggucuuuuuaaacca

SEQ ID NO: 2899400 - RNA, 17 nt, Human
aaaguacauauuuauuu

SEQ ID NO: 2899401 - RNA, 13 nt, Human
aaaggucuaugca

SEQ ID NO: 2899402 - RNA, 21 nt, Human
aaagguccacaggucuagacu

SEQ ID NO: 2899403 - RNA, 17 nt, Human
aaaguucuguaaaauau

SEQ ID NO: 2899404 - RNA, 18 nt, Human
aaaguucuaauaauuucu

SEQ ID NO: 2899405 - RNA, 19 nt, Human
aaaguucuaauaauuucua

SEQ ID NO: 2899406 - RNA, 20 nt, Human
aaaguucuaauaauuucuaa

SEQ ID NO: 2899407 - RNA, 21 nt, Human
aaaguucuaauaauuucuaau

SEQ ID NO: 2899408 - RNA, 17 nt, Human
aaaguucuguguuuaau

SEQ ID NO: 2899409 - RNA, 15 nt, Human
aaaguucuaagauuc

SEQ ID NO: 2899410 - RNA, 16 nt, Human
aaaguucuaagauucu

SEQ ID NO: 2899411 - RNA, 17 nt, Human
aaaguucuaagauucug

SEQ ID NO: 2899412 - RNA, 18 nt, Human
aaaguuauuagugguuua

SEQ ID NO: 2899413 - RNA, 13 nt, Human
aaaguuauauuuc

SEQ ID NO: 2899414 - RNA, 14 nt, Human
aaaguuauauuuca

SEQ ID NO: 2899415 - RNA, 22 nt, Human
aaaguuauauuucagauguaau

SEQ ID NO: 2899416 - RNA, 24 nt, Human
aaaguuauauuucagauguaaugu

SEQ ID NO: 2899417 - RNA, 13 nt, Human
aaaguuagaaucu

SEQ ID NO: 2899418 - RNA, 15 nt, Human
aaaguuagaaucuau

SEQ ID NO: 2899419 - RNA, 18 nt, Human
aaaguuagaaucuauuuu

SEQ ID NO: 2899420 - RNA, 19 nt, Human
aaaguuagaaucuauuuuc

SEQ ID NO: 2899421 - RNA, 20 nt, Human
aaaguuagaaucuauuuucu

SEQ ID NO: 2899422 - RNA, 17 nt, Human
aaaguuacccacugaag

SEQ ID NO: 2899423 - RNA, 22 nt, Human
aaaguuacugauucacugcaug

SEQ ID NO: 2899424 - RNA, 13 nt, Human
aaaguauuguaaa

SEQ ID NO: 2899425 - RNA, 14 nt, Human
aaaguauuguaaau

SEQ ID NO: 2899426 - RNA, 15 nt, Human
aaaguauuguaaauu

SEQ ID NO: 2899427 - RNA, 16 nt, Human
aaaguauuguaaauua

SEQ ID NO: 2899428 - RNA, 20 nt, Human
aaaguauuguaaauuauauu

SEQ ID NO: 2899429 - RNA, 21 nt, Human
aaaguauuguaaauuauauuu

SEQ ID NO: 2899430 - RNA, 23 nt, Human
aaaguauuguaaauuauauuugu

SEQ ID NO: 2899431 - RNA, 10 nt, Human
aaaguauuuu

SEQ ID NO: 2899432 - RNA, 13 nt, Human
aaaguuggacuaa

SEQ ID NO: 2899433 - RNA, 14 nt, Human
aaaguuggacuaaa

SEQ ID NO: 2899434 - RNA, 15 nt, Human
aaaguuggacuaaau

SEQ ID NO: 2899435 - RNA, 19 nt, Human
aaaguuggacuaaaugccu

SEQ ID NO: 2899436 - RNA, 13 nt, Human
aaauaaaaacuau

SEQ ID NO: 2899437 - RNA, 18 nt, Human
aaauaaaaacaaacguuu

SEQ ID NO: 2899438 - RNA, 18 nt, Human
aaaguugugauuccagau

SEQ ID NO: 2899439 - RNA, 16 nt, Human
aaaguuguucaacuau

SEQ ID NO: 2899440 - RNA, 17 nt, Human
aaaguuguucaacuauu

SEQ ID NO: 2899441 - RNA, 18 nt, Human
aaaguuguucaacuauuu

SEQ ID NO: 2899442 - RNA, 19 nt, Human
aaaguuguucaacuauuuu

SEQ ID NO: 2899443 - RNA, 12 nt, Human
aaaguuguacau

SEQ ID NO: 2899444 - RNA, 13 nt, Human
aaaguuguacaug

SEQ ID NO: 2899445 - RNA, 17 nt, Human
aaaguuguacaugaaau

SEQ ID NO: 2899446 - RNA, 14 nt, Human
aaauaaaaauauug

SEQ ID NO: 2899447 - RNA, 13 nt, Human
aaauaacacacau

SEQ ID NO: 2899448 - RNA, 18 nt, Human
aaauaacaauguuaagga

SEQ ID NO: 2899449 - RNA, 22 nt, Human
aaaguucugcuuucuccccaau

SEQ ID NO: 2899450 - RNA, 17 nt, Human
aaauaacaauguuaagg

SEQ ID NO: 2899451 - RNA, 13 nt, Human
aaauaaaaagaaa

SEQ ID NO: 2899452 - RNA, 14 nt, Human
aaauaaaaagugac

SEQ ID NO: 2899453 - RNA, 15 nt, Human
aaauaaaaagugaca

SEQ ID NO: 2899454 - RNA, 19 nt, Human
aaauaaaaagugacacagc

SEQ ID NO: 2899455 - RNA, 20 nt, Human
aaauaaaaagugacacagca

SEQ ID NO: 2899456 - RNA, 21 nt, Human
aaauaaaaagugacacagcag

SEQ ID NO: 2899457 - RNA, 20 nt, Human
aaauaacaggcauuuguuca

SEQ ID NO: 2899458 - RNA, 19 nt, Human
aaauaacaauguuaaggaa

SEQ ID NO: 2899459 - RNA, 21 nt, Human
aaauaacacacauauaaacau

SEQ ID NO: 2899460 - RNA, 17 nt, Human
aaauaacuaguguugcu

SEQ ID NO: 2899461 - RNA, 23 nt, Human
aaauaacccuucaacguuucuuc

SEQ ID NO: 2899462 - RNA, 18 nt, Human
aaauaacuucaagcaaac

SEQ ID NO: 2899463 - RNA, 14 nt, Human
aaauaacuucaguc

SEQ ID NO: 2899464 - RNA, 15 nt, Human
aaauaacuucagucc

SEQ ID NO: 2899465 - RNA, 16 nt, Human
aaauaacuucaguccu

SEQ ID NO: 2899466 - RNA, 15 nt, Human
aaauaacuucaagca

SEQ ID NO: 2899467 - RNA, 15 nt, Human
guaaaccaauuuuuu

SEQ ID NO: 2899468 - RNA, 19 nt, Human
guaaaccaauuuuuuguuc

SEQ ID NO: 2899469 - RNA, 22 nt, Human
guaaaccccuuuaguggcuuca

SEQ ID NO: 2899470 - RNA, 21 nt, Human
guaaaccgcuuuggccugagu

SEQ ID NO: 2899471 - RNA, 16 nt, Human
guaaacauaccaacau

SEQ ID NO: 2899472 - RNA, 19 nt, Human
guaaacauaccaacauguu

SEQ ID NO: 2899473 - RNA, 14 nt, Human
guaaacauguguuu

SEQ ID NO: 2899474 - RNA, 20 nt, Human
guaaacauguguuuuaauuc

SEQ ID NO: 2899475 - RNA, 22 nt, Human
guaaacauguguuuuaauucca

SEQ ID NO: 2899476 - RNA, 12 nt, Human
aaauaauuuuaa

SEQ ID NO: 2899477 - RNA, 17 nt, Human
aaauaauuuuaaaaaug

SEQ ID NO: 2899478 - RNA, 18 nt, Human
aaauaauuuuaaaaaugg

SEQ ID NO: 2899479 - RNA, 20 nt, Human
aaauaauuuuaaaaauggug

SEQ ID NO: 2899480 - RNA, 20 nt, Human
aaauaauuuuaaacaaaggu

SEQ ID NO: 2899481 - RNA, 13 nt, Human
aaauaauuuuagu

SEQ ID NO: 2899482 - RNA, 18 nt, Human
aaauaauuuuaaacaaag

SEQ ID NO: 2899483 - RNA, 14 nt, Human
aaauaauuuuaaac

SEQ ID NO: 2899484 - RNA, 13 nt, Human
aaauaauuuaacu

SEQ ID NO: 2899485 - RNA, 14 nt, Human
aaauaauuuaacua

SEQ ID NO: 2899486 - RNA, 18 nt, Human
aaauaauuuaacuacccu

SEQ ID NO: 2899487 - RNA, 19 nt, Human
aaauaauuuaacuacccuu

SEQ ID NO: 2899488 - RNA, 19 nt, Human
guaaacagauggcacuuug

SEQ ID NO: 2899489 - RNA, 20 nt, Human
guaaacagauggcacuuuga

SEQ ID NO: 2899490 - RNA, 19 nt, Human
aaauaauaaagaugcucuu

SEQ ID NO: 2899491 - RNA, 17 nt, Human
aaauaauaaagaugcuc

SEQ ID NO: 2899492 - RNA, 14 nt, Human
aaauaauaaaagau

SEQ ID NO: 2899493 - RNA, 11 nt, Human
aaauaauaaag

SEQ ID NO: 2899494 - RNA, 14 nt, Human
aaauaauaugcauu

SEQ ID NO: 2899495 - RNA, 12 nt, Human
aaauaauaugca

SEQ ID NO: 2899496 - RNA, 13 nt, Human
aaauaauaugcau

SEQ ID NO: 2899497 - RNA, 20 nt, Human
aaauaagaacgaggauuuua

SEQ ID NO: 2899498 - RNA, 16 nt, Human
aaauaacuucaagcaa

SEQ ID NO: 2899499 - RNA, 12 nt, Human
aaauaagauucu

SEQ ID NO: 2899500 - RNA, 17 nt, Human
aaauaagaauagaaaua

SEQ ID NO: 2899501 - RNA, 14 nt, Human
aaauaagaauagaa

SEQ ID NO: 2899502 - RNA, 18 nt, Human
aaagagcacuuacuguaa

SEQ ID NO: 2899503 - RNA, 11 nt, Human
aaagaggaaaa

SEQ ID NO: 2899504 - RNA, 12 nt, Human
aaagagcacaaa

SEQ ID NO: 2899505 - RNA, 18 nt, Human
aaagagcacaaacauuuu

SEQ ID NO: 2899506 - RNA, 19 nt, Human
aaagagcacaaacauuuuu

SEQ ID NO: 2899507 - RNA, 19 nt, Human
aaagaggacucgcuuguaa

SEQ ID NO: 2899508 - RNA, 20 nt, Human
aaagaggacucgcuuguaaa

SEQ ID NO: 2899509 - RNA, 21 nt, Human
aaagaggacucgcuuguaaau

SEQ ID NO: 2899510 - RNA, 23 nt, Human
aaagagaguuuuuaauagaacca

SEQ ID NO: 2899511 - RNA, 21 nt, Human
aaagagauaccaagaugccau

SEQ ID NO: 2899512 - RNA, 17 nt, Human
aaagagauaugggaaca

SEQ ID NO: 2899513 - RNA, 24 nt, Human
aaagagauccaggaagcaugagug

SEQ ID NO: 2899514 - RNA, 21 nt, Human
aaagagaugagacaaacaugc

SEQ ID NO: 2899515 - RNA, 17 nt, Human
aaagacucuauucucaa

SEQ ID NO: 2899516 - RNA, 17 nt, Human
gguccugagggucccca

SEQ ID NO: 2899517 - RNA, 12 nt, Human
gguccugucccc

SEQ ID NO: 2899518 - RNA, 15 nt, Human
gguccuguccccgca

SEQ ID NO: 2899519 - RNA, 19 nt, Human
gguccugugaucuuauuuu

SEQ ID NO: 2899520 - RNA, 21 nt, Human
gguccuucaaguuagcucagg

SEQ ID NO: 2899521 - RNA, 14 nt, Human
gguccuucuccaca

SEQ ID NO: 2899522 - RNA, 16 nt, Human
gguccuugcaccccuc

SEQ ID NO: 2899523 - RNA, 16 nt, Human
gguccuuccaggcccc

SEQ ID NO: 2899524 - RNA, 15 nt, Human
gguccuuccaggccc

SEQ ID NO: 2899525 - RNA, 20 nt, Human
aaagagagcagagaauauaa

SEQ ID NO: 2899526 - RNA, 23 nt, Human
aaagcaaugcugaugaaucacug

SEQ ID NO: 2899527 - RNA, 22 nt, Human
aaagcaagugauugggacagag

SEQ ID NO: 2899528 - RNA, 13 nt, Human
aaagcaauaaaau

SEQ ID NO: 2899529 - RNA, 21 nt, Human
aaagcaauaaaauuuuuuugg

SEQ ID NO: 2899530 - RNA, 18 nt, Human
aaagauggcucagagggg

SEQ ID NO: 2899531 - RNA, 23 nt, Human
aaagauggcugugccucugccug

SEQ ID NO: 2899532 - RNA, 21 nt, Human
aaagauggaguuucuaagguc

SEQ ID NO: 2899533 - RNA, 18 nt, Human
aaagauggaguuucuaag

SEQ ID NO: 2899534 - RNA, 19 nt, Human
aaagauggaguuucuaagg

SEQ ID NO: 2899535 - RNA, 15 nt, Human
aaagauggaguuucu

SEQ ID NO: 2899536 - RNA, 16 nt, Human
aaagauggaguuucua

SEQ ID NO: 2899537 - RNA, 17 nt, Human
aaagauggaguuucuaa

SEQ ID NO: 2899538 - RNA, 21 nt, Human
aaagauggcugugccucugcc

SEQ ID NO: 2899539 - RNA, 22 nt, Human
aaagauggcugugccucugccu

SEQ ID NO: 2899540 - RNA, 22 nt, Human
aaagaccuuuggagcaaagcug

SEQ ID NO: 2899541 - RNA, 19 nt, Human
aaagacgauuugucaguua

SEQ ID NO: 2899542 - RNA, 12 nt, Human
aaacuuuucuca

SEQ ID NO: 2899543 - RNA, 14 nt, Human
aaacuuuuaaacua

SEQ ID NO: 2899544 - RNA, 13 nt, Human
aaacuuuuaacug

SEQ ID NO: 2899545 - RNA, 22 nt, Human
aaacuuuucaaggcuuauauuc

SEQ ID NO: 2899546 - RNA, 12 nt, Human
aaagacacugcc

SEQ ID NO: 2899547 - RNA, 13 nt, Human
aaagacacugccu

SEQ ID NO: 2899548 - RNA, 14 nt, Human
aaacuuuucucaga

SEQ ID NO: 2899549 - RNA, 9 nt, Human
aaagacaga

SEQ ID NO: 2899550 - RNA, 16 nt, Human
aaagacccagggggag

SEQ ID NO: 2899551 - RNA, 15 nt, Human
aaagacccaggggga

SEQ ID NO: 2899552 - RNA, 20 nt, Human
aaagacauugauucagccug

SEQ ID NO: 2899553 - RNA, 11 nt, Human
aaagaccaaac

SEQ ID NO: 2899554 - RNA, 13 nt, Human
aaagaccaaacuu

SEQ ID NO: 2899555 - RNA, 14 nt, Human
aaagaccaaacuuc

SEQ ID NO: 2899556 - RNA, 22 nt, Human
aaagaccaaacuucacucuggg

SEQ ID NO: 2899557 - RNA, 13 nt, Human
aaagacaucuuuc

SEQ ID NO: 2899558 - RNA, 23 nt, Human
aaagacaucuuucucuuuucuaa

SEQ ID NO: 2899559 - RNA, 14 nt, Human
aaagacauguugua

SEQ ID NO: 2899560 - RNA, 17 nt, Human
aaagacacugccugggc

SEQ ID NO: 2899561 - RNA, 16 nt, Human
aaagacacugccuggg

SEQ ID NO: 2899562 - RNA, 19 nt, Human
aaagacacugccugggcug

SEQ ID NO: 2899563 - RNA, 22 nt, Human
aaagacagggcugauaagcuaa

SEQ ID NO: 2899564 - RNA, 15 nt, Human
aaagacaggcucugu

SEQ ID NO: 2899565 - RNA, 17 nt, Human
aaacuucauucucguga

SEQ ID NO: 2899566 - RNA, 20 nt, Human
aaacuucagaugggaggaaa

SEQ ID NO: 2899567 - RNA, 13 nt, Human
aaacuucagcacc

SEQ ID NO: 2899568 - RNA, 15 nt, Human
aaacuucauguaacu

SEQ ID NO: 2899569 - RNA, 16 nt, Human
gggugggggccaccug

SEQ ID NO: 2899570 - RNA, 21 nt, Human
gggugggggccaccugccugc

SEQ ID NO: 2899571 - RNA, 16 nt, Human
aaacuugcugagcugu

SEQ ID NO: 2899572 - RNA, 18 nt, Human
aaacuugcuuuaugccuu

SEQ ID NO: 2899573 - RNA, 18 nt, Human
aaacuuuucaaggcuuau

SEQ ID NO: 2899574 - RNA, 16 nt, Human
aaacuugucacuugca

SEQ ID NO: 2899575 - RNA, 17 nt, Human
aaacuugucacuugcau

SEQ ID NO: 2899576 - RNA, 18 nt, Human
aaacuugucacuugcaug

SEQ ID NO: 2899577 - RNA, 19 nt, Human
aaacuugucacuugcaugu

SEQ ID NO: 2899578 - RNA, 20 nt, Human
aaacuugucacuugcauguc

SEQ ID NO: 2899579 - RNA, 22 nt, Human
aaacuugucuuuucaaaauauu

SEQ ID NO: 2899580 - RNA, 12 nt, Human
aaacuugugaau

SEQ ID NO: 2899581 - RNA, 13 nt, Human
aaacuugugaaug

SEQ ID NO: 2899582 - RNA, 15 nt, Human
aaacuugugaaugcu

SEQ ID NO: 2899583 - RNA, 20 nt, Human
aaagggguuggggugacagu

SEQ ID NO: 2899584 - RNA, 22 nt, Human
aaagggguuggggugacaguca

SEQ ID NO: 2899585 - RNA, 22 nt, Human
aaagggucaaugcuauuuuugu

SEQ ID NO: 2899586 - RNA, 20 nt, Human
aaagggaucaucaugcagcu

SEQ ID NO: 2899587 - RNA, 22 nt, Human
aaagggacuuggaagcuccgcu

SEQ ID NO: 2899588 - RNA, 23 nt, Human
aaaggagcccuuaucugugcuca

SEQ ID NO: 2899589 - RNA, 18 nt, Human
aaagggagcuaucaggaa

SEQ ID NO: 2899590 - RNA, 23 nt, Human
aaagggagcacuggguugacuuu

SEQ ID NO: 2899591 - RNA, 17 nt, Human
aaaggaaaucucacccc

SEQ ID NO: 2899592 - RNA, 12 nt, Human
aaaggaacauuu

SEQ ID NO: 2899593 - RNA, 16 nt, Human
aaaggaacauuuaggg

SEQ ID NO: 2899594 - RNA, 15 nt, Human
aaaggaacugcagca

SEQ ID NO: 2899595 - RNA, 23 nt, Human
aaaggaaaucucaccccauccca

SEQ ID NO: 2899596 - RNA, 19 nt, Human
aaaggagcccuuaucugug

SEQ ID NO: 2899597 - RNA, 17 nt, Human
aaaggaaagugcuuucc

SEQ ID NO: 2899598 - RNA, 14 nt, Human
aaagcacggacucu

SEQ ID NO: 2899599 - RNA, 15 nt, Human
aaagcacuagagaau

SEQ ID NO: 2899600 - RNA, 18 nt, Human
aaagcacuagagaaugca

SEQ ID NO: 2899601 - RNA, 22 nt, Human
aaagcacuagagaaugcacaga

SEQ ID NO: 2899602 - RNA, 21 nt, Human
aaagcucauauuuuguauaua

SEQ ID NO: 2899603 - RNA, 19 nt, Human
aaagcucauuucaugcucu

SEQ ID NO: 2899604 - RNA, 20 nt, Human
aaagcucauuucaugcucug

SEQ ID NO: 2899605 - RNA, 19 nt, Human
aaagcuccaugugccucuu

SEQ ID NO: 2899606 - RNA, 22 nt, Human
aaagcuccaugugccucuuugu

SEQ ID NO: 2899607 - RNA, 20 nt, Human
aaagcuccuggggcguccag

SEQ ID NO: 2899608 - RNA, 13 nt, Human
aaagcucauauuu

SEQ ID NO: 2899609 - RNA, 13 nt, Human
aaagcucuguggc

SEQ ID NO: 2899610 - RNA, 22 nt, Human
aaagcucuguugcaauuaggau

SEQ ID NO: 2899611 - RNA, 14 nt, Human
aaagcucuagaauc

SEQ ID NO: 2899612 - RNA, 13 nt, Human
aaagcuccugucc

SEQ ID NO: 2899613 - RNA, 16 nt, Human
aaagcuccuguccucc

SEQ ID NO: 2899614 - RNA, 15 nt, Human
aaagcugaaaacugc

SEQ ID NO: 2899615 - RNA, 12 nt, Human
aaagcuuuauga

SEQ ID NO: 2899616 - RNA, 13 nt, Human
aaagcuuuaugau

SEQ ID NO: 2899617 - RNA, 19 nt, Human
aaagcuuuaugauuuucau

SEQ ID NO: 2899618 - RNA, 20 nt, Human
aaagcuuuaugauuuucaua

SEQ ID NO: 2899619 - RNA, 21 nt, Human
aaagcuuuaugauuuucauaa

SEQ ID NO: 2899620 - RNA, 18 nt, Human
aaagcuuuauuaccagug

SEQ ID NO: 2899621 - RNA, 13 nt, Human
aaagcugcugaca

SEQ ID NO: 2899622 - RNA, 21 nt, Human
aaagcugcucagggaaaagca

SEQ ID NO: 2899623 - RNA, 24 nt, Human
aaagcugcccacuguuucucuuga

SEQ ID NO: 2899624 - RNA, 22 nt, Human
aaagcugcccacuguuucucuu

SEQ ID NO: 2899625 - RNA, 15 nt, Human
aaagcugccuguagu

SEQ ID NO: 2899626 - RNA, 12 nt, Human
aaagcugaaaac

SEQ ID NO: 2899627 - RNA, 23 nt, Human
aaagcugccuguaguuaggaaau

SEQ ID NO: 2899628 - RNA, 21 nt, Human
aaagcugccuguaguuaggaa

SEQ ID NO: 2899629 - RNA, 17 nt, Human
aaagcugccuguaguua

SEQ ID NO: 2899630 - RNA, 16 nt, Human
aaagcugccuguaguu

SEQ ID NO: 2899631 - RNA, 20 nt, Human
ggucgaccccaaagccccuu

SEQ ID NO: 2899632 - RNA, 13 nt, Human
ggucgcccaggag

SEQ ID NO: 2899633 - RNA, 12 nt, Human
ggucgcccagga

SEQ ID NO: 2899634 - RNA, 14 nt, Human
ggucgcccaggaga

SEQ ID NO: 2899635 - RNA, 13 nt, Human
ggugaaagggagc

SEQ ID NO: 2899636 - RNA, 24 nt, Human
ggugauccacccaccucagccucc

SEQ ID NO: 2899637 - RNA, 23 nt, Human
ggugauccacccaccucagccuc

SEQ ID NO: 2899638 - RNA, 18 nt, Human
ggugauccacccaccuca

SEQ ID NO: 2899639 - RNA, 14 nt, Human
ggugaaagggagcu

SEQ ID NO: 2899640 - RNA, 23 nt, Human
ggugaaauuuauuaguuaauaua

SEQ ID NO: 2899641 - RNA, 22 nt, Human
ggugcaacccaaggacugaggg

SEQ ID NO: 2899642 - RNA, 18 nt, Human
ggugcaaaguucccuacu

SEQ ID NO: 2899643 - RNA, 13 nt, Human
gguggaugccugg

SEQ ID NO: 2899644 - RNA, 20 nt, Human
gguggagguugcauugagcu

SEQ ID NO: 2899645 - RNA, 19 nt, Human
gguggagugcaguggugcg

SEQ ID NO: 2899646 - RNA, 16 nt, Human
gguggaucaccugagg

SEQ ID NO: 2899647 - RNA, 21 nt, Human
gguggagccaguaaacagagg

SEQ ID NO: 2899648 - RNA, 20 nt, Human
gguggaggguggggggcgcu

SEQ ID NO: 2899649 - RNA, 21 nt, Human
ggugcuuguucccucucccug

SEQ ID NO: 2899650 - RNA, 11 nt, Human
gguggaagagc

SEQ ID NO: 2899651 - RNA, 14 nt, Human
gguggaagagcuca

SEQ ID NO: 2899652 - RNA, 15 nt, Human
gguggaaggcagaca

SEQ ID NO: 2899653 - RNA, 15 nt, Human
ggugcauagaacugg

SEQ ID NO: 2899654 - RNA, 18 nt, Human
ggugcauagaacugggua

SEQ ID NO: 2899655 - RNA, 23 nt, Human
ggugcaacccaaggacugaggga

SEQ ID NO: 2899656 - RNA, 13 nt, Human
ggugcaaggaaaa

SEQ ID NO: 2899657 - RNA, 16 nt, Human
ggugcaacccuuaccc

SEQ ID NO: 2899658 - RNA, 15 nt, Human
ggugcagcagugagg

SEQ ID NO: 2899659 - RNA, 23 nt, Human
aaacucaggauggucaucuugga

SEQ ID NO: 2899660 - RNA, 13 nt, Human
aaacucagggaca

SEQ ID NO: 2899661 - RNA, 17 nt, Human
aaacucagggacagagc

SEQ ID NO: 2899662 - RNA, 21 nt, Human
aaacucagccugggacaguuu

SEQ ID NO: 2899663 - RNA, 18 nt, Human
aaacucagggacagagcc

SEQ ID NO: 2899664 - RNA, 19 nt, Human
aaacucagggacagagcca

SEQ ID NO: 2899665 - RNA, 13 nt, Human
aaacucacaaaug

SEQ ID NO: 2899666 - RNA, 15 nt, Human
aaacucacaaaugau

SEQ ID NO: 2899667 - RNA, 13 nt, Human
aaacucaagacaa

SEQ ID NO: 2899668 - RNA, 14 nt, Human
aaacucaagacaau

SEQ ID NO: 2899669 - RNA, 20 nt, Human
aaacuauuugucuuucagga

SEQ ID NO: 2899670 - RNA, 13 nt, Human
aaacucaaaacuu

SEQ ID NO: 2899671 - RNA, 21 nt, Human
aaacucaaaauauuuguacau

SEQ ID NO: 2899672 - RNA, 22 nt, Human
aaacucaaaacuuaacauauuu

SEQ ID NO: 2899673 - RNA, 13 nt, Human
aaacucaaaauau

SEQ ID NO: 2899674 - RNA, 18 nt, Human
aaacucaaaacuuaacau

SEQ ID NO: 2899675 - RNA, 19 nt, Human
aaacucaaaacuuaacaua

SEQ ID NO: 2899676 - RNA, 17 nt, Human
aaacuaggaaauuuuuu

SEQ ID NO: 2899677 - RNA, 14 nt, Human
aaacgguucaguuu

SEQ ID NO: 2899678 - RNA, 17 nt, Human
aaacgguucaguuucuu

SEQ ID NO: 2899679 - RNA, 19 nt, Human
aaacgguucaguuucuucu

SEQ ID NO: 2899680 - RNA, 15 nt, Human
aaaccuuuuuuaaga

SEQ ID NO: 2899681 - RNA, 16 nt, Human
aaaccuuuuuuaagau

SEQ ID NO: 2899682 - RNA, 11 nt, Human
aaacuaucagu

SEQ ID NO: 2899683 - RNA, 13 nt, Human
aaacuauacuuga

SEQ ID NO: 2899684 - RNA, 18 nt, Human
aaacuauacuugaacaaa

SEQ ID NO: 2899685 - RNA, 19 nt, Human
aaacuauacuugaacaaaa

SEQ ID NO: 2899686 - RNA, 20 nt, Human
aaacuauacuugaacaaaag

SEQ ID NO: 2899687 - RNA, 22 nt, Human
aaacuauacuugaacaaaaggg

SEQ ID NO: 2899688 - RNA, 16 nt, Human
aaacuaucuuggugaa

SEQ ID NO: 2899689 - RNA, 14 nt, Human
aaacuaucuugugu

SEQ ID NO: 2899690 - RNA, 14 nt, Human
aaacuaugaaaccu

SEQ ID NO: 2899691 - RNA, 19 nt, Human
aaacuaugaaaccuuuuuc

SEQ ID NO: 2899692 - RNA, 16 nt, Human
aaacuaucaguuuguc

SEQ ID NO: 2899693 - RNA, 15 nt, Human
aaacuaucuggccau

SEQ ID NO: 2899694 - RNA, 14 nt, Human
aaacuauuaaggau

SEQ ID NO: 2899695 - RNA, 21 nt, Human
aaacuauuaaggauguagcuu

SEQ ID NO: 2899696 - RNA, 22 nt, Human
aaacuauuaaggauguagcuuu

SEQ ID NO: 2899697 - RNA, 19 nt, Human
aaacuauucaugcuaccca

SEQ ID NO: 2899698 - RNA, 14 nt, Human
aaacuaguaguucu

SEQ ID NO: 2899699 - RNA, 15 nt, Human
aaacuaguaguucuc

SEQ ID NO: 2899700 - RNA, 17 nt, Human
aaacuaguaguucucuu

SEQ ID NO: 2899701 - RNA, 18 nt, Human
aaacuaguaguucucuug

SEQ ID NO: 2899702 - RNA, 22 nt, Human
aaacugcccccucugcccugcg

SEQ ID NO: 2899703 - RNA, 21 nt, Human
aaacucuaaacauuaaucaau

SEQ ID NO: 2899704 - RNA, 20 nt, Human
aaacucuaaacauuaaucaa

SEQ ID NO: 2899705 - RNA, 21 nt, Human
aaacugcuggacgucuuucuu

SEQ ID NO: 2899706 - RNA, 21 nt, Human
aaacugcccccucugcccugc

SEQ ID NO: 2899707 - RNA, 19 nt, Human
aaacuggaacggugaaggu

SEQ ID NO: 2899708 - RNA, 20 nt, Human
aaacuggaacggugaaggug

SEQ ID NO: 2899709 - RNA, 21 nt, Human
aaacugcuuuuuuuuuuccag

SEQ ID NO: 2899710 - RNA, 22 nt, Human
aaacugcuuuuuuuuuuccagc

SEQ ID NO: 2899711 - RNA, 23 nt, Human
aaacugcuuuuuuuuuuccagca

SEQ ID NO: 2899712 - RNA, 14 nt, Human
aaacuggaauaaga

SEQ ID NO: 2899713 - RNA, 15 nt, Human
aaacuggaauaagaa

SEQ ID NO: 2899714 - RNA, 18 nt, Human
aaacugucuuuaaaagag

SEQ ID NO: 2899715 - RNA, 19 nt, Human
aaacugucuuuaaaagaga

SEQ ID NO: 2899716 - RNA, 20 nt, Human
aaacugucuuuaaaagagag

SEQ ID NO: 2899717 - RNA, 14 nt, Human
ggguggcacugcca

SEQ ID NO: 2899718 - RNA, 12 nt, Human
aaaccacacaaa

SEQ ID NO: 2899719 - RNA, 14 nt, Human
aaaccacacaaaga

SEQ ID NO: 2899720 - RNA, 20 nt, Human
aaaccaagucggaacagcag

SEQ ID NO: 2899721 - RNA, 21 nt, Human
aaaccaagucggaacagcaga

SEQ ID NO: 2899722 - RNA, 19 nt, Human
aaaccaauuuuuuguucuu

SEQ ID NO: 2899723 - RNA, 22 nt, Human
aaaccaauuuuuuguucuucag

SEQ ID NO: 2899724 - RNA, 15 nt, Human
aaaccacaaaaaaau

SEQ ID NO: 2899725 - RNA, 12 nt, Human
aaaccacaaagg

SEQ ID NO: 2899726 - RNA, 15 nt, Human
aaaccacaaaggcca

SEQ ID NO: 2899727 - RNA, 19 nt, Human
aaaccacaaaggccaaacu

SEQ ID NO: 2899728 - RNA, 22 nt, Human
aaaccacaaaggccaaacugcu

SEQ ID NO: 2899729 - RNA, 21 nt, Human
aaaccacaacugacacaggaa

SEQ ID NO: 2899730 - RNA, 22 nt, Human
aaaccacaacugacacaggaaa

SEQ ID NO: 2899731 - RNA, 14 nt, Human
aaaccacaacuuuu

SEQ ID NO: 2899732 - RNA, 12 nt, Human
aaacauugaaga

SEQ ID NO: 2899733 - RNA, 16 nt, Human
aaaccaagccguggcu

SEQ ID NO: 2899734 - RNA, 23 nt, Human
aaacauucugauuuggaaaaaga

SEQ ID NO: 2899735 - RNA, 23 nt, Human
aaacauucuuuuaacuucuuucu

SEQ ID NO: 2899736 - RNA, 15 nt, Human
aaacauuaugaugug

SEQ ID NO: 2899737 - RNA, 20 nt, Human
aaacauuauagauuuucaug

SEQ ID NO: 2899738 - RNA, 13 nt, Human
aaaccuuugcccc

SEQ ID NO: 2899739 - RNA, 20 nt, Human
aaaccuuuuggaaaaucugc

SEQ ID NO: 2899740 - RNA, 22 nt, Human
aaaccucuccucauguucugcu

SEQ ID NO: 2899741 - RNA, 11 nt, Human
aaaccucuccu

SEQ ID NO: 2899742 - RNA, 17 nt, Human
aaaccucuacauauuua

SEQ ID NO: 2899743 - RNA, 16 nt, Human
aaaccugaaaaaaagu

SEQ ID NO: 2899744 - RNA, 17 nt, Human
aaaccuuucaaauuuca

SEQ ID NO: 2899745 - RNA, 11 nt, Human
aaaccuuucaa

SEQ ID NO: 2899746 - RNA, 19 nt, Human
aaaccuuucaaauuucaca

SEQ ID NO: 2899747 - RNA, 22 nt, Human
aaaccugaaaaaaaguuuacaa

SEQ ID NO: 2899748 - RNA, 12 nt, Human
aaaccugaagac

SEQ ID NO: 2899749 - RNA, 15 nt, Human
aaaccugaagacuga

SEQ ID NO: 2899750 - RNA, 18 nt, Human
aaaccugaagacugagga

SEQ ID NO: 2899751 - RNA, 14 nt, Human
gggucgaaagcucu

SEQ ID NO: 2899752 - RNA, 16 nt, Human
gggucgaaagcucuag

SEQ ID NO: 2899753 - RNA, 15 nt, Human
ggguccuucuccaca

SEQ ID NO: 2899754 - RNA, 13 nt, Human
ggguccccagggc

SEQ ID NO: 2899755 - RNA, 16 nt, Human
gggucccagccacccc

SEQ ID NO: 2899756 - RNA, 23 nt, Human
gggucggaacccaagcuuagaac

SEQ ID NO: 2899757 - RNA, 16 nt, Human
ggggggauguggauca

SEQ ID NO: 2899758 - RNA, 21 nt, Human
gggggucaccggccgauggag

SEQ ID NO: 2899759 - RNA, 20 nt, Human
gggggucaggcagccaguga

SEQ ID NO: 2899760 - RNA, 15 nt, Human
ggggggccaaaagga

SEQ ID NO: 2899761 - RNA, 16 nt, Human
ggguccagggagcagg

SEQ ID NO: 2899762 - RNA, 17 nt, Human
ggguccagggagcaggc

SEQ ID NO: 2899763 - RNA, 19 nt, Human
ggguccaguggaugccaca

SEQ ID NO: 2899764 - RNA, 15 nt, Human
aaacaauuuaaaaau

SEQ ID NO: 2899765 - RNA, 18 nt, Human
aaacagguggugagaaau

SEQ ID NO: 2899766 - RNA, 12 nt, Human
aaacaguauuua

SEQ ID NO: 2899767 - RNA, 14 nt, Human
aaacaguauuuauu

SEQ ID NO: 2899768 - RNA, 15 nt, Human
aaacaguauuuauuu

SEQ ID NO: 2899769 - RNA, 17 nt, Human
aaacaguauuuauuuug

SEQ ID NO: 2899770 - RNA, 19 nt, Human
aaacaguauuuauuuugua

SEQ ID NO: 2899771 - RNA, 20 nt, Human
aaacaguauuuauuuuguaa

SEQ ID NO: 2899772 - RNA, 15 nt, Human
aaacaguauuucauu

SEQ ID NO: 2899773 - RNA, 17 nt, Human
aaacaguauuucauugc

SEQ ID NO: 2899774 - RNA, 18 nt, Human
aaacaguauuucauugcc

SEQ ID NO: 2899775 - RNA, 17 nt, Human
aaacauguuagaagcaa

SEQ ID NO: 2899776 - RNA, 14 nt, Human
aaacauguguuuua

SEQ ID NO: 2899777 - RNA, 16 nt, Human
aaacauguuagaagca

SEQ ID NO: 2899778 - RNA, 13 nt, Human
aaacauguauuua

SEQ ID NO: 2899779 - RNA, 15 nt, Human
aaacauguauuuaug

SEQ ID NO: 2899780 - RNA, 12 nt, Human
ggggaaucuaag

SEQ ID NO: 2899781 - RNA, 19 nt, Human
ggggaaugagcccagagaa

SEQ ID NO: 2899782 - RNA, 21 nt, Human
ggggaaugagcccagagaaca

SEQ ID NO: 2899783 - RNA, 23 nt, Human
ggggaaugagcccagagaacagc

SEQ ID NO: 2899784 - RNA, 20 nt, Human
ggggaauucucagugccaac

SEQ ID NO: 2899785 - RNA, 16 nt, Human
ggggaaguccucuggg

SEQ ID NO: 2899786 - RNA, 22 nt, Human
ggggacagaggccugcccgggc

SEQ ID NO: 2899787 - RNA, 13 nt, Human
ggggacagauuca

SEQ ID NO: 2899788 - RNA, 22 nt, Human
ggggaauguuugccucugccuc

SEQ ID NO: 2899789 - RNA, 18 nt, Human
ggggaauguuugccucug

SEQ ID NO: 2899790 - RNA, 15 nt, Human
ggggaagcugcagcu

SEQ ID NO: 2899791 - RNA, 19 nt, Human
ggggaagcugcagcuuggg

SEQ ID NO: 2899792 - RNA, 21 nt, Human
ggggaaggaggguacagcugg

SEQ ID NO: 2899793 - RNA, 22 nt, Human
ggggaaggaggguacagcuggg

SEQ ID NO: 2899794 - RNA, 14 nt, Human
ggggaaggggcggu

SEQ ID NO: 2899795 - RNA, 13 nt, Human
ggggaaggcaggg

SEQ ID NO: 2899796 - RNA, 11 nt, Human
ggggagaaagu

SEQ ID NO: 2899797 - RNA, 16 nt, Human
ggggacucagcccuga

SEQ ID NO: 2899798 - RNA, 21 nt, Human
ggggacuagccccuguggaga

SEQ ID NO: 2899799 - RNA, 13 nt, Human
ggggccgggcaca

SEQ ID NO: 2899800 - RNA, 17 nt, Human
ggggaaggccaagggga

SEQ ID NO: 2899801 - RNA, 21 nt, Human
ggggcccugguccuuccaggc

SEQ ID NO: 2899802 - RNA, 12 nt, Human
ggggacugcugc

SEQ ID NO: 2899803 - RNA, 18 nt, Human
ggggacugcugcugccug

SEQ ID NO: 2899804 - RNA, 16 nt, Human
ggggacgcuccgcugc

SEQ ID NO: 2899805 - RNA, 13 nt, Human
ggggacucagccc

SEQ ID NO: 2899806 - RNA, 15 nt, Human
ggggacucagcccug

SEQ ID NO: 2899807 - RNA, 14 nt, Human
ggggacucagcccu

SEQ ID NO: 2899808 - RNA, 20 nt, Human
ggggacucugagcgggaggc

SEQ ID NO: 2899809 - RNA, 21 nt, Human
ggggacucugagcgggaggca

SEQ ID NO: 2899810 - RNA, 23 nt, Human
ggggacucugagcgggaggcaga

SEQ ID NO: 2899811 - RNA, 15 nt, Human
ggggacucugggcua

SEQ ID NO: 2899812 - RNA, 16 nt, Human
ggggacucugggcuau

SEQ ID NO: 2899813 - RNA, 22 nt, Human
ggggacucugggcuauggacac

SEQ ID NO: 2899814 - RNA, 21 nt, Human
ggggacccaauguaggagcug

SEQ ID NO: 2899815 - RNA, 11 nt, Human
ggggacccacg

SEQ ID NO: 2899816 - RNA, 13 nt, Human
ggggacccaggcu

SEQ ID NO: 2899817 - RNA, 14 nt, Human
ggggacccaggcuc

SEQ ID NO: 2899818 - RNA, 19 nt, Human
ggggacccaggcuccgccc

SEQ ID NO: 2899819 - RNA, 18 nt, Human
ggggacccccgcccccug

SEQ ID NO: 2899820 - RNA, 13 nt, Human
ggggacccccgcc

SEQ ID NO: 2899821 - RNA, 15 nt, Human
ggggacccccgcccc

SEQ ID NO: 2899822 - RNA, 18 nt, Human
gggggccucagugccacu

SEQ ID NO: 2899823 - RNA, 17 nt, Human
gggggccucagugccac

SEQ ID NO: 2899824 - RNA, 15 nt, Human
gggggccucagugcc

SEQ ID NO: 2899825 - RNA, 12 nt, Human
gggggccucagu

SEQ ID NO: 2899826 - RNA, 15 nt, Human
ggggccucagugcca

SEQ ID NO: 2899827 - RNA, 23 nt, Human
ggggccuacagcuuugaucccug

SEQ ID NO: 2899828 - RNA, 18 nt, Human
ggggccguggggguugag

SEQ ID NO: 2899829 - RNA, 14 nt, Human
gggggccaccugcc

SEQ ID NO: 2899830 - RNA, 16 nt, Human
gggggccaccugccug

SEQ ID NO: 2899831 - RNA, 13 nt, Human
ggggccucagacg

SEQ ID NO: 2899832 - RNA, 14 nt, Human
ggggccucagacga

SEQ ID NO: 2899833 - RNA, 11 nt, Human
aaacacagagg

SEQ ID NO: 2899834 - RNA, 10 nt, Human
aaacacagag

SEQ ID NO: 2899835 - RNA, 22 nt, Human
aaacacaaaccacaacugacac

SEQ ID NO: 2899836 - RNA, 11 nt, Human
aaacacagcug

SEQ ID NO: 2899837 - RNA, 12 nt, Human
aaacacagcugu

SEQ ID NO: 2899838 - RNA, 13 nt, Human
aaacacagcuguu

SEQ ID NO: 2899839 - RNA, 23 nt, Human
aaacacagcuuacaaucgcaaau

SEQ ID NO: 2899840 - RNA, 19 nt, Human
aaacacagucaaaauaauu

SEQ ID NO: 2899841 - RNA, 20 nt, Human
aaacacagucaaaauaauuc

SEQ ID NO: 2899842 - RNA, 18 nt, Human
aaacacaucuuuccuguc

SEQ ID NO: 2899843 - RNA, 13 nt, Human
aaacacauugccu

SEQ ID NO: 2899844 - RNA, 23 nt, Human
aaacacauugccuaacuacuagu

SEQ ID NO: 2899845 - RNA, 15 nt, Human
aaacacauuguuauu

SEQ ID NO: 2899846 - RNA, 16 nt, Human
aaacacauuguuauuu

SEQ ID NO: 2899847 - RNA, 20 nt, Human
aaacacauuguuauuuucag

SEQ ID NO: 2899848 - RNA, 17 nt, Human
aaacaaugcaaaaccuu

SEQ ID NO: 2899849 - RNA, 15 nt, Human
aaacaaucacacuca

SEQ ID NO: 2899850 - RNA, 12 nt, Human
aaacaaucucuu

SEQ ID NO: 2899851 - RNA, 15 nt, Human
aaacaaucucuuaaa

SEQ ID NO: 2899852 - RNA, 18 nt, Human
aaacaaucuggaagaaaa

SEQ ID NO: 2899853 - RNA, 22 nt, Human
aaacaauaguaauucucaggcc

SEQ ID NO: 2899854 - RNA, 12 nt, Human
aaacaauaucau

SEQ ID NO: 2899855 - RNA, 21 nt, Human
aaacaaauucauauucugucu

SEQ ID NO: 2899856 - RNA, 16 nt, Human
aaacaacaacacaaua

SEQ ID NO: 2899857 - RNA, 16 nt, Human
aaacaauaaaugugca

SEQ ID NO: 2899858 - RNA, 15 nt, Human
aaacaauaaaugugc

SEQ ID NO: 2899859 - RNA, 12 nt, Human
aaacaaauaugc

SEQ ID NO: 2899860 - RNA, 13 nt, Human
aaacaaauaaaaa

SEQ ID NO: 2899861 - RNA, 15 nt, Human
aaacaaauaaucaca

SEQ ID NO: 2899862 - RNA, 16 nt, Human
aaacaaauaaucacau

SEQ ID NO: 2899863 - RNA, 17 nt, Human
aaacaaauaaucacauu

SEQ ID NO: 2899864 - RNA, 13 nt, Human
aaacaaauaugca

SEQ ID NO: 2899865 - RNA, 14 nt, Human
aaacaaauaugcaa

SEQ ID NO: 2899866 - RNA, 17 nt, Human
aaacaaauaugcaaaag

SEQ ID NO: 2899867 - RNA, 19 nt, Human
aaacaaauucauauucugu

SEQ ID NO: 2899868 - RNA, 13 nt, Human
aaaauuuuauucc

SEQ ID NO: 2899869 - RNA, 15 nt, Human
aaaauuuucucauuu

SEQ ID NO: 2899870 - RNA, 19 nt, Human
aaaauuuucucauuuucuu

SEQ ID NO: 2899871 - RNA, 21 nt, Human
aaaauuuuaggcacucuuaaa

SEQ ID NO: 2899872 - RNA, 16 nt, Human
aaaauuuugcuuuuaa

SEQ ID NO: 2899873 - RNA, 17 nt, Human
aaaauuuugcuuuuaau

SEQ ID NO: 2899874 - RNA, 17 nt, Human
aaacaaagguugagaug

SEQ ID NO: 2899875 - RNA, 13 nt, Human
aaacaaagucuuu

SEQ ID NO: 2899876 - RNA, 20 nt, Human
gggaugccacuccucccucc

SEQ ID NO: 2899877 - RNA, 18 nt, Human
aaaauuuaagugcgugug

SEQ ID NO: 2899878 - RNA, 23 nt, Human
aaaauuuaagugcguguguagag

SEQ ID NO: 2899879 - RNA, 19 nt, Human
aaaauuuuaccagcagaag

SEQ ID NO: 2899880 - RNA, 22 nt, Human
aaaauuuuaccagcagaaggau

SEQ ID NO: 2899881 - RNA, 21 nt, Human
aaaauuuuauaaaauuaagca

SEQ ID NO: 2899882 - RNA, 13 nt, Human
aaaauuuuauaag

SEQ ID NO: 2899883 - RNA, 15 nt, Human
aaaauuuuauaagca

SEQ ID NO: 2899884 - RNA, 23 nt, Human
aaaauuuuauaagcaaauuucaa

SEQ ID NO: 2899885 - RNA, 13 nt, Human
aaaauuuauuuca

SEQ ID NO: 2899886 - RNA, 14 nt, Human
aaaauuuauuucau

SEQ ID NO: 2899887 - RNA, 19 nt, Human
aaaauuuguuugaaaucuu

SEQ ID NO: 2899888 - RNA, 13 nt, Human
gggaugagaaagg

SEQ ID NO: 2899889 - RNA, 20 nt, Human
gggaugacaugcacucagcu

SEQ ID NO: 2899890 - RNA, 20 nt, Human
gggaugagcauggagcuggc

SEQ ID NO: 2899891 - RNA, 18 nt, Human
aaaauguuaucuucucaa

SEQ ID NO: 2899892 - RNA, 21 nt, Human
gggaugagcauggagcuggcc

SEQ ID NO: 2899893 - RNA, 15 nt, Human
gggaugagccgcugu

SEQ ID NO: 2899894 - RNA, 20 nt, Human
gggaugagcucaagcaggaa

SEQ ID NO: 2899895 - RNA, 22 nt, Human
aaaauguuaucuucucaaguuc

SEQ ID NO: 2899896 - RNA, 16 nt, Human
aaaauguucagaaggu

SEQ ID NO: 2899897 - RNA, 12 nt, Human
aaaauguucauc

SEQ ID NO: 2899898 - RNA, 22 nt, Human
aaaauguucaucaauucccauu

SEQ ID NO: 2899899 - RNA, 15 nt, Human
aaaauguuuuagcaa

SEQ ID NO: 2899900 - RNA, 18 nt, Human
aaaauguuuuagcaauuu

SEQ ID NO: 2899901 - RNA, 15 nt, Human
aaaauguuuuuucau

SEQ ID NO: 2899902 - RNA, 21 nt, Human
aaaauguuuuuucauguguuu

SEQ ID NO: 2899903 - RNA, 12 nt, Human
aaaauuaaaaug

SEQ ID NO: 2899904 - RNA, 18 nt, Human
aaaauuaaacacaaagug

SEQ ID NO: 2899905 - RNA, 19 nt, Human
aaaauuuaaguaucuuuuu

SEQ ID NO: 2899906 - RNA, 15 nt, Human
aaaauuuaagugcgu

SEQ ID NO: 2899907 - RNA, 14 nt, Human
aaaauguugagaau

SEQ ID NO: 2899908 - RNA, 20 nt, Human
ggacucagggccaugccugc

SEQ ID NO: 2899909 - RNA, 18 nt, Human
ggacuccagaaucuaaag

SEQ ID NO: 2899910 - RNA, 14 nt, Human
ggacucaugaggag

SEQ ID NO: 2899911 - RNA, 18 nt, Human
ggacucaaugcacugaca

SEQ ID NO: 2899912 - RNA, 16 nt, Human
ggacucaaugcacuga

SEQ ID NO: 2899913 - RNA, 13 nt, Human
ggacucagcuccc

SEQ ID NO: 2899914 - RNA, 17 nt, Human
ggacucagcuccccaga

SEQ ID NO: 2899915 - RNA, 21 nt, Human
ggacuaagccuaccugcucuc

SEQ ID NO: 2899916 - RNA, 14 nt, Human
ggacuacaggugug

SEQ ID NO: 2899917 - RNA, 15 nt, Human
ggacucaaugcacug

SEQ ID NO: 2899918 - RNA, 14 nt, Human
ggacuauuauaauu

SEQ ID NO: 2899919 - RNA, 16 nt, Human
ggacuaagccuaccug

SEQ ID NO: 2899920 - RNA, 19 nt, Human
ggacuaagccuaccugcuc

SEQ ID NO: 2899921 - RNA, 22 nt, Human
ggacuaaccccaacgcacagga

SEQ ID NO: 2899922 - RNA, 12 nt, Human
ggacguuucuca

SEQ ID NO: 2899923 - RNA, 21 nt, Human
ggacuaaaugccuaguuuuua

SEQ ID NO: 2899924 - RNA, 22 nt, Human
ggacuuugcugauuuccccucu

SEQ ID NO: 2899925 - RNA, 17 nt, Human
ggagacuaucagcccaa

SEQ ID NO: 2899926 - RNA, 16 nt, Human
ggagacucuguggggc

SEQ ID NO: 2899927 - RNA, 13 nt, Human
ggagacucugugg

SEQ ID NO: 2899928 - RNA, 18 nt, Human
ggagacuccuaggcagga

SEQ ID NO: 2899929 - RNA, 21 nt, Human
ggagacuccuaggcaggacau

SEQ ID NO: 2899930 - RNA, 13 nt, Human
ggagacuccuagg

SEQ ID NO: 2899931 - RNA, 16 nt, Human
ggagacuccuaggcag

SEQ ID NO: 2899932 - RNA, 19 nt, Human
ggacuugaacuuuccugga

SEQ ID NO: 2899933 - RNA, 14 nt, Human
ggacuuggaagcuc

SEQ ID NO: 2899934 - RNA, 22 nt, Human
ggacuuucaaaauuaaaucugu

SEQ ID NO: 2899935 - RNA, 11 nt, Human
ggacuccaucu

SEQ ID NO: 2899936 - RNA, 22 nt, Human
ggacuccaucucucauccucca

SEQ ID NO: 2899937 - RNA, 16 nt, Human
ggacuccggcccuccu

SEQ ID NO: 2899938 - RNA, 21 nt, Human
ggacuccuccccacccuccug

SEQ ID NO: 2899939 - RNA, 22 nt, Human
ggacuccuccccacccuccugg

SEQ ID NO: 2899940 - RNA, 23 nt, Human
ggacuccuccccacccuccuggc

SEQ ID NO: 2899941 - RNA, 15 nt, Human
ggacuccuccuuucu

SEQ ID NO: 2899942 - RNA, 17 nt, Human
ggacuccuccuuucucc

SEQ ID NO: 2899943 - RNA, 22 nt, Human
ggacucccuccucaccucugga

SEQ ID NO: 2899944 - RNA, 20 nt, Human
ggacucccuccucaccucug

SEQ ID NO: 2899945 - RNA, 22 nt, Human
ggacggccugaugcucccuccc

SEQ ID NO: 2899946 - RNA, 15 nt, Human
ggacggcugggcaca

SEQ ID NO: 2899947 - RNA, 17 nt, Human
ggacggggaagccgagc

SEQ ID NO: 2899948 - RNA, 21 nt, Human
ggacggccugaugcucccucc

SEQ ID NO: 2899949 - RNA, 18 nt, Human
ggacggcauuccugcuua

SEQ ID NO: 2899950 - RNA, 13 nt, Human
ggacgucuuucuu

SEQ ID NO: 2899951 - RNA, 20 nt, Human
ggacggugcuccaggcaggc

SEQ ID NO: 2899952 - RNA, 17 nt, Human
ggacgucagacuuggcu

SEQ ID NO: 2899953 - RNA, 17 nt, Human
ggacggugcuccaggca

SEQ ID NO: 2899954 - RNA, 18 nt, Human
ggacggugcuccaggcag

SEQ ID NO: 2899955 - RNA, 14 nt, Human
ggacggugcuccag

SEQ ID NO: 2899956 - RNA, 15 nt, Human
ggacggugcuccagg

SEQ ID NO: 2899957 - RNA, 15 nt, Human
ggacggucaguuugg

SEQ ID NO: 2899958 - RNA, 23 nt, Human
ggacccuugagaguaucaggucu

SEQ ID NO: 2899959 - RNA, 11 nt, Human
ggacccugcuu

SEQ ID NO: 2899960 - RNA, 21 nt, Human
ggacccugcuuuagagcuagg

SEQ ID NO: 2899961 - RNA, 23 nt, Human
ggacccccgcccccugcccuccc

SEQ ID NO: 2899962 - RNA, 16 nt, Human
ggacccccgcccccug

SEQ ID NO: 2899963 - RNA, 19 nt, Human
ggacccccgcccccugccc

SEQ ID NO: 2899964 - RNA, 20 nt, Human
ggacccccgcccccugcccu

SEQ ID NO: 2899965 - RNA, 22 nt, Human
ggacccccgcccccugcccucc

SEQ ID NO: 2899966 - RNA, 14 nt, Human
ggacccccgccccc

SEQ ID NO: 2899967 - RNA, 15 nt, Human
ggacccccgcccccu

SEQ ID NO: 2899968 - RNA, 20 nt, Human
ggacaggaugaccuggauaa

SEQ ID NO: 2899969 - RNA, 12 nt, Human
ggaagagaaauc

SEQ ID NO: 2899970 - RNA, 13 nt, Human
ggaagagaaucac

SEQ ID NO: 2899971 - RNA, 13 nt, Human
ggaagacauuucu

SEQ ID NO: 2899972 - RNA, 15 nt, Human
ggaagacauuucuuu

SEQ ID NO: 2899973 - RNA, 19 nt, Human
ggaagacauuucuuuucuu

SEQ ID NO: 2899974 - RNA, 23 nt, Human
ggaagacauuucuuuucuuuuua

SEQ ID NO: 2899975 - RNA, 15 nt, Human
ggaagacauuuuucc

SEQ ID NO: 2899976 - RNA, 12 nt, Human
ggaagacagaga

SEQ ID NO: 2899977 - RNA, 23 nt, Human
ggaagacagagaccuccugccuc

SEQ ID NO: 2899978 - RNA, 21 nt, Human
ggaacuugagcgugaaucugu

SEQ ID NO: 2899979 - RNA, 16 nt, Human
ggaacuguccagagag

SEQ ID NO: 2899980 - RNA, 17 nt, Human
ggaacuguccagagagc

SEQ ID NO: 2899981 - RNA, 14 nt, Human
ggaacuucagagau

SEQ ID NO: 2899982 - RNA, 18 nt, Human
ggaacuguccagagagca

SEQ ID NO: 2899983 - RNA, 15 nt, Human
ggaacuucuaauaua

SEQ ID NO: 2899984 - RNA, 12 nt, Human
ggaacacugccc

SEQ ID NO: 2899985 - RNA, 13 nt, Human
ggaacacugcccu

SEQ ID NO: 2899986 - RNA, 16 nt, Human
ggaacacugcccucgc

SEQ ID NO: 2899987 - RNA, 14 nt, Human
ggaacacuggcaga

SEQ ID NO: 2899988 - RNA, 15 nt, Human
ggaacacuggcagac

SEQ ID NO: 2899989 - RNA, 19 nt, Human
ggaacagaaggaugaauga

SEQ ID NO: 2899990 - RNA, 13 nt, Human
ggaacagaaggau

SEQ ID NO: 2899991 - RNA, 12 nt, Human
ggaacagaagga

SEQ ID NO: 2899992 - RNA, 11 nt, Human
ggaacagaagg

SEQ ID NO: 2899993 - RNA, 21 nt, Human
ggaacagacaacagaagucau

SEQ ID NO: 2899994 - RNA, 20 nt, Human
ggaacagacaacagaaguca

SEQ ID NO: 2899995 - RNA, 18 nt, Human
ggaacagacaacagaagu

SEQ ID NO: 2899996 - RNA, 12 nt, Human
ggaacagaaugu

SEQ ID NO: 2899997 - RNA, 16 nt, Human
ggaacagaauguuuua

SEQ ID NO: 2899998 - RNA, 19 nt, Human
ggaacagaauguuuuacug

SEQ ID NO: 2899999 - RNA, 14 nt, Human
ggaacuguccagag

SEQ ID NO: 2900000 - RNA, 15 nt, Human
ggaacuguccagaga

SEQ ID NO: 2900001 - RNA, 17 nt, Human
ggaauaagaagcaaaua

SEQ ID NO: 2900002 - RNA, 20 nt, Human
ggaauaagaagcaaauaaau

SEQ ID NO: 2900003 - RNA, 21 nt, Human
ggaauaagaagcaaauaaaua

SEQ ID NO: 2900004 - RNA, 14 nt, Human
ggaauaaccuucca

SEQ ID NO: 2900005 - RNA, 22 nt, Human
ggaauaaccuuccauacauuuu

SEQ ID NO: 2900006 - RNA, 22 nt, Human
ggaauaaaaggcuugaagcugu

SEQ ID NO: 2900007 - RNA, 21 nt, Human
ggaauaaaauccuaagacaca

SEQ ID NO: 2900008 - RNA, 18 nt, Human
ggaauaaaaggcuugaag

SEQ ID NO: 2900009 - RNA, 17 nt, Human
ggaauaaaaggcuugaa

SEQ ID NO: 2900010 - RNA, 15 nt, Human
ggaauaaaaggcuug

SEQ ID NO: 2900011 - RNA, 14 nt, Human
ggaauaaaaggcuu

SEQ ID NO: 2900012 - RNA, 16 nt, Human
ggaauccagacccggc

SEQ ID NO: 2900013 - RNA, 17 nt, Human
ggaauccuauauagaau

SEQ ID NO: 2900014 - RNA, 22 nt, Human
ggaauccuauauagaaugcugc

SEQ ID NO: 2900015 - RNA, 23 nt, Human
ggaauccuauauagaaugcugca

SEQ ID NO: 2900016 - RNA, 14 nt, Human
ggaauccuccucca

SEQ ID NO: 2900017 - RNA, 16 nt, Human
ggaauccuccuccagg

SEQ ID NO: 2900018 - RNA, 19 nt, Human
ggaauccuccuccagggug

SEQ ID NO: 2900019 - RNA, 16 nt, Human
ggaauccacucccagg

SEQ ID NO: 2900020 - RNA, 19 nt, Human
ggaauccacucccaggcag

SEQ ID NO: 2900021 - RNA, 21 nt, Human
ggaauccaagccuccacagcg

SEQ ID NO: 2900022 - RNA, 14 nt, Human
ggaauccacuccca

SEQ ID NO: 2900023 - RNA, 20 nt, Human
ggaauccaagccuccacagc

SEQ ID NO: 2900024 - RNA, 16 nt, Human
ggaaucagcaagaaga

SEQ ID NO: 2900025 - RNA, 13 nt, Human
ggaaucagcuucu

SEQ ID NO: 2900026 - RNA, 19 nt, Human
ggaaucaugucaggccugu

SEQ ID NO: 2900027 - RNA, 21 nt, Human
ggaaucaugucaggccugugu

SEQ ID NO: 2900028 - RNA, 14 nt, Human
ggaaucagcuucua

SEQ ID NO: 2900029 - RNA, 15 nt, Human
ggaaucaugucaggc

SEQ ID NO: 2900030 - RNA, 18 nt, Human
ggaaucaugucaggccug

SEQ ID NO: 2900031 - RNA, 13 nt, Human
ggacaagcagagg

SEQ ID NO: 2900032 - RNA, 20 nt, Human
ggacaagcagagguggccag

SEQ ID NO: 2900033 - RNA, 21 nt, Human
ggaauccuggcagcccagaga

SEQ ID NO: 2900034 - RNA, 13 nt, Human
ggaauccuggcag

SEQ ID NO: 2900035 - RNA, 12 nt, Human
ggaauccuggca

SEQ ID NO: 2900036 - RNA, 20 nt, Human
ggaauccacucccaggcagc

SEQ ID NO: 2900037 - RNA, 22 nt, Human
ggaaucuaauauccccaaauua

SEQ ID NO: 2900038 - RNA, 18 nt, Human
ggacacagcucuucucca

SEQ ID NO: 2900039 - RNA, 15 nt, Human
ggacacagcucuucu

SEQ ID NO: 2900040 - RNA, 21 nt, Human
ggacacagcucuucuccaggc

SEQ ID NO: 2900041 - RNA, 16 nt, Human
ggacaccugcccugcc

SEQ ID NO: 2900042 - RNA, 21 nt, Human
ggacacgcgccccccucccag

SEQ ID NO: 2900043 - RNA, 22 nt, Human
ggacacgcgccccccucccaga

SEQ ID NO: 2900044 - RNA, 23 nt, Human
ggacacgcgccccccucccagag

SEQ ID NO: 2900045 - RNA, 14 nt, Human
ggacacagcucuuc

SEQ ID NO: 2900046 - RNA, 19 nt, Human
ggacaaucaugaaauaugc

SEQ ID NO: 2900047 - RNA, 21 nt, Human
ggacaaucaugaaauaugcau

SEQ ID NO: 2900048 - RNA, 19 nt, Human
ggacaaggacuaggguccu

SEQ ID NO: 2900049 - RNA, 12 nt, Human
ggacaauaaacc

SEQ ID NO: 2900050 - RNA, 13 nt, Human
ggacaauaaaccu

SEQ ID NO: 2900051 - RNA, 19 nt, Human
ggacaauaaaccuccgcca

SEQ ID NO: 2900052 - RNA, 20 nt, Human
ggacagcuccuucuguccua

SEQ ID NO: 2900053 - RNA, 19 nt, Human
ggacagcuccuucuguccu

SEQ ID NO: 2900054 - RNA, 22 nt, Human
ggacacuaaccacgcuggaccu

SEQ ID NO: 2900055 - RNA, 17 nt, Human
ggacacuaaccacgcug

SEQ ID NO: 2900056 - RNA, 15 nt, Human
ggacaagagguacag

SEQ ID NO: 2900057 - RNA, 22 nt, Human
ggacacggggcaguggcaaccu

SEQ ID NO: 2900058 - RNA, 15 nt, Human
ggaagcuggccugag

SEQ ID NO: 2900059 - RNA, 18 nt, Human
ggaagcucugaagucaca

SEQ ID NO: 2900060 - RNA, 17 nt, Human
ggaagcugcccugccca

SEQ ID NO: 2900061 - RNA, 10 nt, Human
ggaagcugca

SEQ ID NO: 2900062 - RNA, 11 nt, Human
ggaagcugcag

SEQ ID NO: 2900063 - RNA, 12 nt, Human
ggaagcugcagc

SEQ ID NO: 2900064 - RNA, 13 nt, Human
ggaagcugcagcu

SEQ ID NO: 2900065 - RNA, 14 nt, Human
ggaagcugcagcuu

SEQ ID NO: 2900066 - RNA, 15 nt, Human
ggaagcugcagcuug

SEQ ID NO: 2900067 - RNA, 16 nt, Human
ggaagcugcagcuugg

SEQ ID NO: 2900068 - RNA, 18 nt, Human
ggaagcugcagcuuggga

SEQ ID NO: 2900069 - RNA, 18 nt, Human
ggaagcuggccgaggguc

SEQ ID NO: 2900070 - RNA, 11 nt, Human
ggaagcuccgc

SEQ ID NO: 2900071 - RNA, 23 nt, Human
ggaagcuccacugucacccucca

SEQ ID NO: 2900072 - RNA, 14 nt, Human
ggaagcuccacugu

SEQ ID NO: 2900073 - RNA, 14 nt, Human
ggaaggagacacag

SEQ ID NO: 2900074 - RNA, 16 nt, Human
ggaaggagacacagau

SEQ ID NO: 2900075 - RNA, 17 nt, Human
ggaaggagacacagaug

SEQ ID NO: 2900076 - RNA, 19 nt, Human
ggaaggagacacagauguu

SEQ ID NO: 2900077 - RNA, 20 nt, Human
ggaaggagacacagauguuc

SEQ ID NO: 2900078 - RNA, 19 nt, Human
ggaaggaaagaaagaagga

SEQ ID NO: 2900079 - RNA, 19 nt, Human
ggaagcuuuguccccugcu

SEQ ID NO: 2900080 - RNA, 21 nt, Human
ggaagcuuuguccccugcuuc

SEQ ID NO: 2900081 - RNA, 13 nt, Human
ggaaggagagccu

SEQ ID NO: 2900082 - RNA, 14 nt, Human
ggaaguuuucugua

SEQ ID NO: 2900083 - RNA, 18 nt, Human
ggaaguuucauauauugu

SEQ ID NO: 2900084 - RNA, 19 nt, Human
ggaaguguguguggcagca

SEQ ID NO: 2900085 - RNA, 23 nt, Human
ggaaguucauaccuaaguacugu

SEQ ID NO: 2900086 - RNA, 18 nt, Human
ggaaguugacuuauagua

SEQ ID NO: 2900087 - RNA, 22 nt, Human
ggaagcggagguugcagggagc

SEQ ID NO: 2900088 - RNA, 21 nt, Human
ggaagcggcccuaagggagug

SEQ ID NO: 2900089 - RNA, 16 nt, Human
ggaagcuaauuugcau

SEQ ID NO: 2900090 - RNA, 21 nt, Human
ggaagccgagcuccagagcaa

SEQ ID NO: 2900091 - RNA, 15 nt, Human
ggaagcccuggagac

SEQ ID NO: 2900092 - RNA, 21 nt, Human
gcuggguaaacuguggaugau

SEQ ID NO: 2900093 - RNA, 15 nt, Human
gcuggguauuggaaa

SEQ ID NO: 2900094 - RNA, 23 nt, Human
gcuggguauuggaaauggaugca

SEQ ID NO: 2900095 - RNA, 16 nt, Human
gcuggcuguuggcugg

SEQ ID NO: 2900096 - RNA, 15 nt, Human
gcuggcuguuggcug

SEQ ID NO: 2900097 - RNA, 16 nt, Human
gcuggcugggcaugga

SEQ ID NO: 2900098 - RNA, 15 nt, Human
gcuggcugggcaugg

SEQ ID NO: 2900099 - RNA, 13 nt, Human
gcuggcuggggug

SEQ ID NO: 2900100 - RNA, 21 nt, Human
gcuggcugggguggccugugu

SEQ ID NO: 2900101 - RNA, 22 nt, Human
gcuggcugggguggccugugug

SEQ ID NO: 2900102 - RNA, 20 nt, Human
gcuggaguacaguggugcca

SEQ ID NO: 2900103 - RNA, 16 nt, Human
gcuggcucacaguaca

SEQ ID NO: 2900104 - RNA, 17 nt, Human
gcuggcucacaguacag

SEQ ID NO: 2900105 - RNA, 18 nt, Human
gcuggcucacaguacagc

SEQ ID NO: 2900106 - RNA, 23 nt, Human
gcuggcucacaguacagcaugug

SEQ ID NO: 2900107 - RNA, 22 nt, Human
gcuggagugcagugagccgaga

SEQ ID NO: 2900108 - RNA, 17 nt, Human
gcuggagugcagugagc

SEQ ID NO: 2900109 - RNA, 18 nt, Human
gcuggagugcagugagcc

SEQ ID NO: 2900110 - RNA, 20 nt, Human
gcuggcgugcaguggugcga

SEQ ID NO: 2900111 - RNA, 22 nt, Human
gcuggaggugggagcaggagau

SEQ ID NO: 2900112 - RNA, 16 nt, Human
gcuggagguggggcga

SEQ ID NO: 2900113 - RNA, 22 nt, Human
gcuggagguggggcgaggcagg

SEQ ID NO: 2900114 - RNA, 23 nt, Human
gcuggagguggggcgaggcaggc

SEQ ID NO: 2900115 - RNA, 16 nt, Human
gcuggaggugggagca

SEQ ID NO: 2900116 - RNA, 17 nt, Human
gcuggaggugggagcag

SEQ ID NO: 2900117 - RNA, 19 nt, Human
gcuggaggugggagcagga

SEQ ID NO: 2900118 - RNA, 21 nt, Human
gcuggaggugggagcaggaga

SEQ ID NO: 2900119 - RNA, 23 nt, Human
gcuggagggaggcgggggcugcc

SEQ ID NO: 2900120 - RNA, 14 nt, Human
gcuggaggugggag

SEQ ID NO: 2900121 - RNA, 15 nt, Human
gcuggaggugggagc

SEQ ID NO: 2900122 - RNA, 13 nt, Human
gcucugccccagu

SEQ ID NO: 2900123 - RNA, 11 nt, Human
gcugcuggcuu

SEQ ID NO: 2900124 - RNA, 13 nt, Human
gcugcugcugcug

SEQ ID NO: 2900125 - RNA, 12 nt, Human
gcugcugcugcu

SEQ ID NO: 2900126 - RNA, 13 nt, Human
gcugcuggagacu

SEQ ID NO: 2900127 - RNA, 14 nt, Human
gcugcuggagacuc

SEQ ID NO: 2900128 - RNA, 16 nt, Human
gcuuugagaagccuuc

SEQ ID NO: 2900129 - RNA, 14 nt, Human
gcuuugagaagccu

SEQ ID NO: 2900130 - RNA, 22 nt, Human
gcuuugagaagccuucagcucc

SEQ ID NO: 2900131 - RNA, 21 nt, Human
gcuuugacuggaggguccauu

SEQ ID NO: 2900132 - RNA, 13 nt, Human
gcuuguaggagcu

SEQ ID NO: 2900133 - RNA, 14 nt, Human
gcuuguaggagcug

SEQ ID NO: 2900134 - RNA, 22 nt, Human
gcuuguaggagcugagguuuca

SEQ ID NO: 2900135 - RNA, 14 nt, Human
gcuuguauagugua

SEQ ID NO: 2900136 - RNA, 17 nt, Human
gcuuguaucaacacugu

SEQ ID NO: 2900137 - RNA, 18 nt, Human
gcuuguaugcaauggauu

SEQ ID NO: 2900138 - RNA, 18 nt, Human
gcuugugaaaauguguuc

SEQ ID NO: 2900139 - RNA, 15 nt, Human
gcuuucuugcucccu

SEQ ID NO: 2900140 - RNA, 20 nt, Human
gcuuucuugcucccuucagc

SEQ ID NO: 2900141 - RNA, 21 nt, Human
gcuuucuugcucccuucagcc

SEQ ID NO: 2900142 - RNA, 17 nt, Human
gcuuucuuugauucucc

SEQ ID NO: 2900143 - RNA, 19 nt, Human
gcuuucuuugauucuccuu

SEQ ID NO: 2900144 - RNA, 20 nt, Human
gcuuguaaauagcucaggug

SEQ ID NO: 2900145 - RNA, 16 nt, Human
gcuugagcccaggagu

SEQ ID NO: 2900146 - RNA, 15 nt, Human
gcuugagcccaggag

SEQ ID NO: 2900147 - RNA, 14 nt, Human
gcuugagcccagga

SEQ ID NO: 2900148 - RNA, 12 nt, Human
gcuugagcccag

SEQ ID NO: 2900149 - RNA, 20 nt, Human
gcuugagaaauauggacacu

SEQ ID NO: 2900150 - RNA, 16 nt, Human
gcuugacucaggauuu

SEQ ID NO: 2900151 - RNA, 23 nt, Human
gcuugacucaggauuuaaaaacu

SEQ ID NO: 2900152 - RNA, 17 nt, Human
gcuugacucccaaguuu

SEQ ID NO: 2900153 - RNA, 22 nt, Human
gcuuccucauaguaugguggcu

SEQ ID NO: 2900154 - RNA, 20 nt, Human
gcuuccucccaacaagcagc

SEQ ID NO: 2900155 - RNA, 14 nt, Human
gcuuccucccaaca

SEQ ID NO: 2900156 - RNA, 23 nt, Human
gcuuccuauuucuagggcuggga

SEQ ID NO: 2900157 - RNA, 11 nt, Human
gcuuccuccug

SEQ ID NO: 2900158 - RNA, 21 nt, Human
gcuuccuccuccccaacugug

SEQ ID NO: 2900159 - RNA, 12 nt, Human
gcuucuaauaaa

SEQ ID NO: 2900160 - RNA, 16 nt, Human
gcuucuaauaaauuau

SEQ ID NO: 2900161 - RNA, 17 nt, Human
gcuucuaccaugaacag

SEQ ID NO: 2900162 - RNA, 19 nt, Human
gcuucuaccaugaacagaa

SEQ ID NO: 2900163 - RNA, 15 nt, Human
gcuucuuccaggugc

SEQ ID NO: 2900164 - RNA, 19 nt, Human
gcuucuuccaggugcccag

SEQ ID NO: 2900165 - RNA, 16 nt, Human
gcuucuuccaggugcc

SEQ ID NO: 2900166 - RNA, 21 nt, Human
gcuucuuccuauuugccaugg

SEQ ID NO: 2900167 - RNA, 14 nt, Human
gcuuauuauugaag

SEQ ID NO: 2900168 - RNA, 16 nt, Human
gcuuauuuauuaacag

SEQ ID NO: 2900169 - RNA, 19 nt, Human
gcuuauuuauuaacaggau

SEQ ID NO: 2900170 - RNA, 16 nt, Human
gcuuauuuaauaaaga

SEQ ID NO: 2900171 - RNA, 14 nt, Human
gcuuauuuaauaaa

SEQ ID NO: 2900172 - RNA, 17 nt, Human
gcuuauugcuuaguaaa

SEQ ID NO: 2900173 - RNA, 18 nt, Human
gcuuauugcuuaguaaaa

SEQ ID NO: 2900174 - RNA, 20 nt, Human
gcuuauucaucuguuuuucu

SEQ ID NO: 2900175 - RNA, 12 nt, Human
gcuucagccucc

SEQ ID NO: 2900176 - RNA, 17 nt, Human
gcuucagccuccccacc

SEQ ID NO: 2900177 - RNA, 20 nt, Human
gcuucagccugaggcugaga

SEQ ID NO: 2900178 - RNA, 15 nt, Human
gcuucagccugaggc

SEQ ID NO: 2900179 - RNA, 14 nt, Human
gcuucagccugagg

SEQ ID NO: 2900180 - RNA, 12 nt, Human
gcuucagccuga

SEQ ID NO: 2900181 - RNA, 23 nt, Human
gcuucagccugaggcugagacug

SEQ ID NO: 2900182 - RNA, 12 nt, Human
gcuucagcucca

SEQ ID NO: 2900183 - RNA, 13 nt, Human
gcuucagcuccag

SEQ ID NO: 2900184 - RNA, 14 nt, Human
gcuucagcuccagc

SEQ ID NO: 2900185 - RNA, 15 nt, Human
gcuucagcuccagcc

SEQ ID NO: 2900186 - RNA, 16 nt, Human
gcuucagcuccagccc

SEQ ID NO: 2900187 - RNA, 18 nt, Human
gcuucagcuccagccccu

SEQ ID NO: 2900188 - RNA, 21 nt, Human
gcuucagccugaggcugagac

SEQ ID NO: 2900189 - RNA, 16 nt, Human
gcuauuggaggaucag

SEQ ID NO: 2900190 - RNA, 19 nt, Human
gcuauuggaggaucaguuu

SEQ ID NO: 2900191 - RNA, 14 nt, Human
gcuauuccuuuccc

SEQ ID NO: 2900192 - RNA, 16 nt, Human
gcuauuccuuucccuu

SEQ ID NO: 2900193 - RNA, 17 nt, Human
gcuauuccuuucccuuc

SEQ ID NO: 2900194 - RNA, 19 nt, Human
gcuauuccuuucccuuccu

SEQ ID NO: 2900195 - RNA, 21 nt, Human
gcuauuccuuucccuuccucu

SEQ ID NO: 2900196 - RNA, 13 nt, Human
gcucaaaacuuuc

SEQ ID NO: 2900197 - RNA, 14 nt, Human
gcucacugcagccu

SEQ ID NO: 2900198 - RNA, 13 nt, Human
gcucacugcagcc

SEQ ID NO: 2900199 - RNA, 12 nt, Human
gcucacugcagc

SEQ ID NO: 2900200 - RNA, 11 nt, Human
gcucacugcag

SEQ ID NO: 2900201 - RNA, 16 nt, Human
gcucacugcagccuca

SEQ ID NO: 2900202 - RNA, 15 nt, Human
gcucacugcagccuc

SEQ ID NO: 2900203 - RNA, 17 nt, Human
gcucacugcagccucaa

SEQ ID NO: 2900204 - RNA, 16 nt, Human
gcucacugcauccucc

SEQ ID NO: 2900205 - RNA, 16 nt, Human
gcucacucggcacccu

SEQ ID NO: 2900206 - RNA, 14 nt, Human
gcucaggugucccu

SEQ ID NO: 2900207 - RNA, 16 nt, Human
gcucaggugucccugc

SEQ ID NO: 2900208 - RNA, 17 nt, Human
gcucagggaaaagcagc

SEQ ID NO: 2900209 - RNA, 15 nt, Human
gcucagggaaaagca

SEQ ID NO: 2900210 - RNA, 24 nt, Human
gcucaggcgauccaccugucucag

SEQ ID NO: 2900211 - RNA, 12 nt, Human
gcucaggcugca

SEQ ID NO: 2900212 - RNA, 14 nt, Human
gcucaggcugcagc

SEQ ID NO: 2900213 - RNA, 17 nt, Human
gcucaggcugcagcugg

SEQ ID NO: 2900214 - RNA, 21 nt, Human
gcucaggcugcagcuggacag

SEQ ID NO: 2900215 - RNA, 22 nt, Human
gcucaggcugcagcuggacaga

SEQ ID NO: 2900216 - RNA, 23 nt, Human
gcucaggcugcagcuggacagag

SEQ ID NO: 2900217 - RNA, 22 nt, Human
gcucaggcgauccaccugucuc

SEQ ID NO: 2900218 - RNA, 19 nt, Human
gcucaggcgauccaccugu

SEQ ID NO: 2900219 - RNA, 20 nt, Human
gcucaggccuauaaccccag

SEQ ID NO: 2900220 - RNA, 15 nt, Human
gcucaggaccaggca

SEQ ID NO: 2900221 - RNA, 16 nt, Human
gcucaggaccaggcaa

SEQ ID NO: 2900222 - RNA, 19 nt, Human
gcucagagagggcaggcau

SEQ ID NO: 2900223 - RNA, 14 nt, Human
gcucaggaccaggc

SEQ ID NO: 2900224 - RNA, 16 nt, Human
gcucagagagggcagg

SEQ ID NO: 2900225 - RNA, 18 nt, Human
gcucagagagggcaggca

SEQ ID NO: 2900226 - RNA, 21 nt, Human
gcucagacauguuuuccguga

SEQ ID NO: 2900227 - RNA, 16 nt, Human
gcucagaccagcucuu

SEQ ID NO: 2900228 - RNA, 13 nt, Human
gcucagagagggc

SEQ ID NO: 2900229 - RNA, 20 nt, Human
gcucacugcauccuccgccu

SEQ ID NO: 2900230 - RNA, 16 nt, Human
gcucagacauguuuuc

SEQ ID NO: 2900231 - RNA, 16 nt, Human
gcuaggccuggccaga

SEQ ID NO: 2900232 - RNA, 23 nt, Human
gcuaggccuggccagaugcacca

SEQ ID NO: 2900233 - RNA, 17 nt, Human
gcuaggccuggccagau

SEQ ID NO: 2900234 - RNA, 20 nt, Human
gcuaguccggacccaccuca

SEQ ID NO: 2900235 - RNA, 22 nt, Human
gcuaguccggacccaccucacc

SEQ ID NO: 2900236 - RNA, 15 nt, Human
gcuaguccuagugaa

SEQ ID NO: 2900237 - RNA, 18 nt, Human
gcuaguccuagugaaccu

SEQ ID NO: 2900238 - RNA, 19 nt, Human
gcuaguccuagugaaccuc

SEQ ID NO: 2900239 - RNA, 13 nt, Human
gcuagugagcugg

SEQ ID NO: 2900240 - RNA, 15 nt, Human
gcuagugagcugggc

SEQ ID NO: 2900241 - RNA, 17 nt, Human
gcuagugauguuuuuau

SEQ ID NO: 2900242 - RNA, 17 nt, Human
gcuaguguaccuccucu

SEQ ID NO: 2900243 - RNA, 22 nt, Human
gcuaguguaccuccucucagug

SEQ ID NO: 2900244 - RNA, 17 nt, Human
gcuaugaucgcgccacu

SEQ ID NO: 2900245 - RNA, 11 nt, Human
gcuauggacac

SEQ ID NO: 2900246 - RNA, 13 nt, Human
gcuauggacacag

SEQ ID NO: 2900247 - RNA, 14 nt, Human
gcuauggacacagg

SEQ ID NO: 2900248 - RNA, 16 nt, Human
gcuauggacacagggu

SEQ ID NO: 2900249 - RNA, 18 nt, Human
gcuauggacacaggguga

SEQ ID NO: 2900250 - RNA, 14 nt, Human
gcuaugggagcccc

SEQ ID NO: 2900251 - RNA, 13 nt, Human
gcuaugggagccc

SEQ ID NO: 2900252 - RNA, 18 nt, Human
gcuacugcagcuuuacau

SEQ ID NO: 2900253 - RNA, 19 nt, Human
gcuacugcagcuuuacaug

SEQ ID NO: 2900254 - RNA, 19 nt, Human
gcuacucgggaggcugagg

SEQ ID NO: 2900255 - RNA, 21 nt, Human
gcuacucgggaggcugaggca

SEQ ID NO: 2900256 - RNA, 22 nt, Human
gcuacucgggaggcugaggcac

SEQ ID NO: 2900257 - RNA, 23 nt, Human
gcuacucgggaggcugaggcaca

SEQ ID NO: 2900258 - RNA, 16 nt, Human
gcuacugauuuuugug

SEQ ID NO: 2900259 - RNA, 17 nt, Human
gcuacugauuuuuguga

SEQ ID NO: 2900260 - RNA, 20 nt, Human
gcgggaggauguucugggac

SEQ ID NO: 2900261 - RNA, 22 nt, Human
gcgggaggauguucugggacac

SEQ ID NO: 2900262 - RNA, 21 nt, Human
gcgggaggauguucugggaca

SEQ ID NO: 2900263 - RNA, 20 nt, Human
gcgugcacacaccagagccc

SEQ ID NO: 2900264 - RNA, 22 nt, Human
gcguuugaccuuuuauguagua

SEQ ID NO: 2900265 - RNA, 19 nt, Human
gcguuuuuuaaauguauac

SEQ ID NO: 2900266 - RNA, 23 nt, Human
gcguguucauaucuacucuuuac

SEQ ID NO: 2900267 - RNA, 22 nt, Human
gcguguguagaguuaagaagcu

SEQ ID NO: 2900268 - RNA, 20 nt, Human
gcguguguagaguuaagaag

SEQ ID NO: 2900269 - RNA, 21 nt, Human
gcguguguagaguuaagaagc

SEQ ID NO: 2900270 - RNA, 12 nt, Human
gcguguguagag

SEQ ID NO: 2900271 - RNA, 15 nt, Human
gcguguguagaguua

SEQ ID NO: 2900272 - RNA, 23 nt, Human
gcgugcacacaccagagcccacc

SEQ ID NO: 2900273 - RNA, 19 nt, Human
gcgugcacacaccagagcc

SEQ ID NO: 2900274 - RNA, 19 nt, Human
gcgugucgugggugugugu

SEQ ID NO: 2900275 - RNA, 17 nt, Human
gcguguccccggggccc

SEQ ID NO: 2900276 - RNA, 20 nt, Human
gcguguccccggggcccagg

SEQ ID NO: 2900277 - RNA, 14 nt, Human
gcgugcccucgcug

SEQ ID NO: 2900278 - RNA, 23 nt, Human
gcgugccagucaagaagaaaaag

SEQ ID NO: 2900279 - RNA, 16 nt, Human
gcgugccccugcugcu

SEQ ID NO: 2900280 - RNA, 15 nt, Human
gcgugguuccuuucu

SEQ ID NO: 2900281 - RNA, 14 nt, Human
gcuaauuaaaaagu

SEQ ID NO: 2900282 - RNA, 15 nt, Human
gcuaauuaaaaaguu

SEQ ID NO: 2900283 - RNA, 15 nt, Human
gcuaaugggacacua

SEQ ID NO: 2900284 - RNA, 13 nt, Human
gcuaaugggacac

SEQ ID NO: 2900285 - RNA, 15 nt, Human
gcuacucagaagccu

SEQ ID NO: 2900286 - RNA, 19 nt, Human
gcuacucagaagccugagg

SEQ ID NO: 2900287 - RNA, 18 nt, Human
gcuacucagaagccugag

SEQ ID NO: 2900288 - RNA, 17 nt, Human
gcuacucagaagccuga

SEQ ID NO: 2900289 - RNA, 16 nt, Human
gcuacucagaagccug

SEQ ID NO: 2900290 - RNA, 21 nt, Human
gcuacucagaagccugaggcu

SEQ ID NO: 2900291 - RNA, 14 nt, Human
gcuacucagaagcc

SEQ ID NO: 2900292 - RNA, 23 nt, Human
gcuaagugauccucccaccucag

SEQ ID NO: 2900293 - RNA, 20 nt, Human
gcuaaacacugcgcuuuauu

SEQ ID NO: 2900294 - RNA, 22 nt, Human
gcuaaacacugcgcuuuauuuu

SEQ ID NO: 2900295 - RNA, 18 nt, Human
gcuaauaaugagcuauua

SEQ ID NO: 2900296 - RNA, 20 nt, Human
gcuaauaaugagcuauuaaa

SEQ ID NO: 2900297 - RNA, 21 nt, Human
gcuaauaaugagcuauuaaaa

SEQ ID NO: 2900298 - RNA, 17 nt, Human
gcuaauaauguuaacca

SEQ ID NO: 2900299 - RNA, 14 nt, Human
gcuaaucagcauuc

SEQ ID NO: 2900300 - RNA, 14 nt, Human
gcuaauauuaaaag

SEQ ID NO: 2900301 - RNA, 18 nt, Human
gcuaaucaaagccagggu

SEQ ID NO: 2900302 - RNA, 19 nt, Human
gcuaaucaaagccaggguc

SEQ ID NO: 2900303 - RNA, 20 nt, Human
gcuaaucaaagccagggucu

SEQ ID NO: 2900304 - RNA, 21 nt, Human
gcuaaucaaagccagggucuc

SEQ ID NO: 2900305 - RNA, 16 nt, Human
gcuaaucagcauucuc

SEQ ID NO: 2900306 - RNA, 17 nt, Human
gcuaaucagcauucuca

SEQ ID NO: 2900307 - RNA, 22 nt, Human
gcuaaucagcauucucacuccu

SEQ ID NO: 2900308 - RNA, 23 nt, Human
gcuccacccuuggccugucucau

SEQ ID NO: 2900309 - RNA, 22 nt, Human
gcuccacccuuggccugucuca

SEQ ID NO: 2900310 - RNA, 20 nt, Human
gcuccaccagcaucaccugc

SEQ ID NO: 2900311 - RNA, 18 nt, Human
gcuccaccagcaucaccu

SEQ ID NO: 2900312 - RNA, 23 nt, Human
gcuccaccagcaucaccugccug

SEQ ID NO: 2900313 - RNA, 15 nt, Human
gcuccaccacauccu

SEQ ID NO: 2900314 - RNA, 12 nt, Human
gcuccaccacau

SEQ ID NO: 2900315 - RNA, 19 nt, Human
gcuccaccaagaaagcagg

SEQ ID NO: 2900316 - RNA, 19 nt, Human
gcuccacccuuggccuguc

SEQ ID NO: 2900317 - RNA, 17 nt, Human
gcuccacccuuggccug

SEQ ID NO: 2900318 - RNA, 16 nt, Human
gcuccacccuuggccu

SEQ ID NO: 2900319 - RNA, 15 nt, Human
gcuccacccuuggcc

SEQ ID NO: 2900320 - RNA, 14 nt, Human
gcuccacccuuggc

SEQ ID NO: 2900321 - RNA, 13 nt, Human
gcuccacccuugg

SEQ ID NO: 2900322 - RNA, 11 nt, Human
gcuccacccuu

SEQ ID NO: 2900323 - RNA, 23 nt, Human
gcuccugaggggcaucugccccu

SEQ ID NO: 2900324 - RNA, 22 nt, Human
gcuccugaggggcaucugcccc

SEQ ID NO: 2900325 - RNA, 18 nt, Human
gcuccugccaccacgccc

SEQ ID NO: 2900326 - RNA, 12 nt, Human
gcuccugccacc

SEQ ID NO: 2900327 - RNA, 21 nt, Human
gcuccugaggggcaucugccc

SEQ ID NO: 2900328 - RNA, 18 nt, Human
gcuccugaggggcaucug

SEQ ID NO: 2900329 - RNA, 14 nt, Human
gcucccguggccug

SEQ ID NO: 2900330 - RNA, 15 nt, Human
gcucccguggccugu

SEQ ID NO: 2900331 - RNA, 18 nt, Human
gcucccuaagccagccug

SEQ ID NO: 2900332 - RNA, 19 nt, Human
gcucccuaagccagccugg

SEQ ID NO: 2900333 - RNA, 23 nt, Human
gcucccuaagccagccuggucca

SEQ ID NO: 2900334 - RNA, 18 nt, Human
gcuccuggcagaagggag

SEQ ID NO: 2900335 - RNA, 22 nt, Human
gcuccuggcagaagggagcagc

SEQ ID NO: 2900336 - RNA, 17 nt, Human
gcuccuggccuugcuga

SEQ ID NO: 2900337 - RNA, 22 nt, Human
gcuccuggaaaggcucagucuc

SEQ ID NO: 2900338 - RNA, 21 nt, Human
gcuccuggaaaggcucagucu

SEQ ID NO: 2900339 - RNA, 23 nt, Human
gcuccuggaaaggcucagucuca

SEQ ID NO: 2900340 - RNA, 18 nt, Human
gcuccuggaaaggcucag

SEQ ID NO: 2900341 - RNA, 14 nt, Human
gcuccugcagcaug

SEQ ID NO: 2900342 - RNA, 15 nt, Human
gcuccugcagcaugg

SEQ ID NO: 2900343 - RNA, 21 nt, Human
gcuccugcagcauggucccug

SEQ ID NO: 2900344 - RNA, 23 nt, Human
gcuccugcaggccacagccaccu

SEQ ID NO: 2900345 - RNA, 18 nt, Human
gcuccagcucaccagccc

SEQ ID NO: 2900346 - RNA, 12 nt, Human
gcuccacuguca

SEQ ID NO: 2900347 - RNA, 18 nt, Human
gcuccacugucacccucc

SEQ ID NO: 2900348 - RNA, 17 nt, Human
gcuccagcucaccagcc

SEQ ID NO: 2900349 - RNA, 21 nt, Human
gcuccagcucaccagccccag

SEQ ID NO: 2900350 - RNA, 20 nt, Human
gcuccagcucaccagcccca

SEQ ID NO: 2900351 - RNA, 16 nt, Human
gcucccacaggcccuu

SEQ ID NO: 2900352 - RNA, 17 nt, Human
gcucccacaggcccuuc

SEQ ID NO: 2900353 - RNA, 20 nt, Human
gcucccacaggcccuuccuc

SEQ ID NO: 2900354 - RNA, 21 nt, Human
gcucccacaggcccuuccucu

SEQ ID NO: 2900355 - RNA, 21 nt, Human
gcuccccagcccuggcucugc

SEQ ID NO: 2900356 - RNA, 14 nt, Human
gcuccccauguguc

SEQ ID NO: 2900357 - RNA, 22 nt, Human
gcuccccagcccuggcucugca

SEQ ID NO: 2900358 - RNA, 14 nt, Human
gcuccaccuuucag

SEQ ID NO: 2900359 - RNA, 12 nt, Human
gcuccccaugug

SEQ ID NO: 2900360 - RNA, 16 nt, Human
gcucccacauucugau

SEQ ID NO: 2900361 - RNA, 22 nt, Human
gcucccacaggcccuuccucuc

SEQ ID NO: 2900362 - RNA, 19 nt, Human
gcucugccccagcucuggc

SEQ ID NO: 2900363 - RNA, 18 nt, Human
gcucugccccagcucugg

SEQ ID NO: 2900364 - RNA, 20 nt, Human
gcucugccccagcucuggcu

SEQ ID NO: 2900365 - RNA, 15 nt, Human
gcucugccccagcuc

SEQ ID NO: 2900366 - RNA, 13 nt, Human
gcucugccccagc

SEQ ID NO: 2900367 - RNA, 12 nt, Human
gcucugccccag

SEQ ID NO: 2900368 - RNA, 23 nt, Human
gcucugcaaugggcacugggaug

SEQ ID NO: 2900369 - RNA, 15 nt, Human
gcucugcaaaaggag

SEQ ID NO: 2900370 - RNA, 17 nt, Human
gcucugcaauuccccuc

SEQ ID NO: 2900371 - RNA, 17 nt, Human
gcucugaucauccacug

SEQ ID NO: 2900372 - RNA, 23 nt, Human
gcucugaucauccacugugccau

SEQ ID NO: 2900373 - RNA, 14 nt, Human
gccuguugcccuuu

SEQ ID NO: 2900374 - RNA, 15 nt, Human
gcgagcccugguggc

SEQ ID NO: 2900375 - RNA, 17 nt, Human
gcgagcccugguggcag

SEQ ID NO: 2900376 - RNA, 21 nt, Human
gcgagcuaugaucgcgccacu

SEQ ID NO: 2900377 - RNA, 21 nt, Human
gcgauccaccugucucagccu

SEQ ID NO: 2900378 - RNA, 15 nt, Human
gcgaucccacacagg

SEQ ID NO: 2900379 - RNA, 20 nt, Human
gcgaucccacacaggcuggc

SEQ ID NO: 2900380 - RNA, 17 nt, Human
gcgauccaccugucuca

SEQ ID NO: 2900381 - RNA, 22 nt, Human
gccuugcccggauucugggagg

SEQ ID NO: 2900382 - RNA, 23 nt, Human
gccuugccuaaauuuaaugcugc

SEQ ID NO: 2900383 - RNA, 22 nt, Human
gcgaucuggguucacugcaacc

SEQ ID NO: 2900384 - RNA, 19 nt, Human
gcgaugaauuuggagacuc

SEQ ID NO: 2900385 - RNA, 16 nt, Human
gcgaucucggcucagu

SEQ ID NO: 2900386 - RNA, 15 nt, Human
gcgauggucucagaa

SEQ ID NO: 2900387 - RNA, 19 nt, Human
gcgcaccugcccccuggug

SEQ ID NO: 2900388 - RNA, 18 nt, Human
gcgcaccugcccccuggu

SEQ ID NO: 2900389 - RNA, 17 nt, Human
gcgcaccugcccccugg

SEQ ID NO: 2900390 - RNA, 12 nt, Human
gcgcaccugccc

SEQ ID NO: 2900391 - RNA, 18 nt, Human
gcgcacacacacacauac

SEQ ID NO: 2900392 - RNA, 13 nt, Human
gcgcacacacaca

SEQ ID NO: 2900393 - RNA, 15 nt, Human
gcgcacacacacaca

SEQ ID NO: 2900394 - RNA, 16 nt, Human
gcgcacacacacacau

SEQ ID NO: 2900395 - RNA, 20 nt, Human
gcgcacaauaguaaccuggg

SEQ ID NO: 2900396 - RNA, 11 nt, Human
gcgcacacaca

SEQ ID NO: 2900397 - RNA, 19 nt, Human
gcgcacacacacacauaca

SEQ ID NO: 2900398 - RNA, 23 nt, Human
gccuguucccauucuugcauggc

SEQ ID NO: 2900399 - RNA, 19 nt, Human
gccuguucccauucuugca

SEQ ID NO: 2900400 - RNA, 16 nt, Human
gccuguggccuuugca

SEQ ID NO: 2900401 - RNA, 19 nt, Human
gccugugccuccucacccc

SEQ ID NO: 2900402 - RNA, 14 nt, Human
gccuguggcugugg

SEQ ID NO: 2900403 - RNA, 16 nt, Human
gccuguggcuguggag

SEQ ID NO: 2900404 - RNA, 17 nt, Human
gccuguggcuguggaga

SEQ ID NO: 2900405 - RNA, 12 nt, Human
gccuguggcugc

SEQ ID NO: 2900406 - RNA, 13 nt, Human
gccuguggcugcg

SEQ ID NO: 2900407 - RNA, 12 nt, Human
gccuguggcugu

SEQ ID NO: 2900408 - RNA, 14 nt, Human
gccuggccuggccc

SEQ ID NO: 2900409 - RNA, 15 nt, Human
gccuggccuggcccu

SEQ ID NO: 2900410 - RNA, 16 nt, Human
gccuggccuggcccug

SEQ ID NO: 2900411 - RNA, 17 nt, Human
gccuggccuggcccugc

SEQ ID NO: 2900412 - RNA, 19 nt, Human
gccuggccuggcccugccc

SEQ ID NO: 2900413 - RNA, 13 nt, Human
gccuggccuggca

SEQ ID NO: 2900414 - RNA, 16 nt, Human
gccuggccuggcacac

SEQ ID NO: 2900415 - RNA, 22 nt, Human
gccucgaacuggcugcaaaggg

SEQ ID NO: 2900416 - RNA, 20 nt, Human
gccucgaacuggcugcaaag

SEQ ID NO: 2900417 - RNA, 23 nt, Human
gccucuuaaagcugccuguaguu

SEQ ID NO: 2900418 - RNA, 22 nt, Human
gccucuuaaagcugccuguagu

SEQ ID NO: 2900419 - RNA, 20 nt, Human
gccucuuacgguaguuagga

SEQ ID NO: 2900420 - RNA, 17 nt, Human
gccucuuacuaauguaa

SEQ ID NO: 2900421 - RNA, 19 nt, Human
gccucuuacuaauguaaaa

SEQ ID NO: 2900422 - RNA, 20 nt, Human
gccucuuaaagcugccugua

SEQ ID NO: 2900423 - RNA, 14 nt, Human
gccucuuggguuca

SEQ ID NO: 2900424 - RNA, 20 nt, Human
gccucuuggagaccuuaccc

SEQ ID NO: 2900425 - RNA, 14 nt, Human
gccugcccaggccc

SEQ ID NO: 2900426 - RNA, 13 nt, Human
gccugcccaggcc

SEQ ID NO: 2900427 - RNA, 19 nt, Human
gccucuuaaagcugccugu

SEQ ID NO: 2900428 - RNA, 17 nt, Human
gccucuuucugucccuu

SEQ ID NO: 2900429 - RNA, 12 nt, Human
gccucuuuucuc

SEQ ID NO: 2900430 - RNA, 17 nt, Human
gccucccaaagugcugg

SEQ ID NO: 2900431 - RNA, 13 nt, Human
gccuccugugugu

SEQ ID NO: 2900432 - RNA, 16 nt, Human
gccucccaaagugcug

SEQ ID NO: 2900433 - RNA, 11 nt, Human
gccuccaugcu

SEQ ID NO: 2900434 - RNA, 23 nt, Human
gccuccugugugugcgccuacag

SEQ ID NO: 2900435 - RNA, 19 nt, Human
gccuccugugugugcgccu

SEQ ID NO: 2900436 - RNA, 17 nt, Human
gccucgaacuggcugca

SEQ ID NO: 2900437 - RNA, 13 nt, Human
gccucccaaagug

SEQ ID NO: 2900438 - RNA, 20 nt, Human
gccugcccaggccccugcca

SEQ ID NO: 2900439 - RNA, 15 nt, Human
gccugcccaggcccc

SEQ ID NO: 2900440 - RNA, 22 nt, Human
gccugcccaggccccugccacc

SEQ ID NO: 2900441 - RNA, 22 nt, Human
gccugcccauucugcccugugg

SEQ ID NO: 2900442 - RNA, 17 nt, Human
gccugccccaaacaaau

SEQ ID NO: 2900443 - RNA, 23 nt, Human
gccugccccaaacaaauaugcaa

SEQ ID NO: 2900444 - RNA, 18 nt, Human
gccucuuuucucugugcu

SEQ ID NO: 2900445 - RNA, 16 nt, Human
gccugccccccucauc

SEQ ID NO: 2900446 - RNA, 16 nt, Human
gccccugccacccugg

SEQ ID NO: 2900447 - RNA, 17 nt, Human
gccccugccacccuggg

SEQ ID NO: 2900448 - RNA, 15 nt, Human
gcccccccuuccacu

SEQ ID NO: 2900449 - RNA, 23 nt, Human
gcccccccuucccccuuuuuugu

SEQ ID NO: 2900450 - RNA, 13 nt, Human
gccccccucccag

SEQ ID NO: 2900451 - RNA, 18 nt, Human
gccccugccaccucccug

SEQ ID NO: 2900452 - RNA, 13 nt, Human
gcccccccuucca

SEQ ID NO: 2900453 - RNA, 14 nt, Human
gcccccccuuccac

SEQ ID NO: 2900454 - RNA, 16 nt, Human
gccccccagccucugg

SEQ ID NO: 2900455 - RNA, 13 nt, Human
gccccccagcuca

SEQ ID NO: 2900456 - RNA, 15 nt, Human
gccccccagcucagg

SEQ ID NO: 2900457 - RNA, 16 nt, Human
gccccccagcucaggg

SEQ ID NO: 2900458 - RNA, 15 nt, Human
gccccugcugcuguc

SEQ ID NO: 2900459 - RNA, 20 nt, Human
gccccugcugcugucaccuc

SEQ ID NO: 2900460 - RNA, 22 nt, Human
gccccugcugcugucaccucuc

SEQ ID NO: 2900461 - RNA, 16 nt, Human
gcccggucccaccccu

SEQ ID NO: 2900462 - RNA, 10 nt, Human
gccccugcug

SEQ ID NO: 2900463 - RNA, 12 nt, Human
gccccugccugc

SEQ ID NO: 2900464 - RNA, 13 nt, Human
gccccugccugcc

SEQ ID NO: 2900465 - RNA, 14 nt, Human
gccccugccugcca

SEQ ID NO: 2900466 - RNA, 15 nt, Human
gccccugccugccau

SEQ ID NO: 2900467 - RNA, 21 nt, Human
gccccugccugccauguaccu

SEQ ID NO: 2900468 - RNA, 22 nt, Human
gccccugccugccauguaccuc

SEQ ID NO: 2900469 - RNA, 14 nt, Human
gcccuaagggagug

SEQ ID NO: 2900470 - RNA, 17 nt, Human
gcccguaaacacgccug

SEQ ID NO: 2900471 - RNA, 18 nt, Human
gcccuaaccccuuccaga

SEQ ID NO: 2900472 - RNA, 21 nt, Human
gcccuaaccucugagucacca

SEQ ID NO: 2900473 - RNA, 20 nt, Human
gcccuaaugcgcaggcuggc

SEQ ID NO: 2900474 - RNA, 19 nt, Human
gcccuaaugcgcaggcugg

SEQ ID NO: 2900475 - RNA, 17 nt, Human
gcccuaaugcgcaggcu

SEQ ID NO: 2900476 - RNA, 16 nt, Human
gcccuaaugcgcaggc

SEQ ID NO: 2900477 - RNA, 19 nt, Human
gccuagcugccuagcaagc

SEQ ID NO: 2900478 - RNA, 14 nt, Human
gccuagcccacccu

SEQ ID NO: 2900479 - RNA, 16 nt, Human
gccuagcccacccugc

SEQ ID NO: 2900480 - RNA, 18 nt, Human
gccuagcccacccugcug

SEQ ID NO: 2900481 - RNA, 22 nt, Human
gccuagcccacccugcugccuu

SEQ ID NO: 2900482 - RNA, 23 nt, Human
gccuagcccacccugcugccuuc

SEQ ID NO: 2900483 - RNA, 15 nt, Human
gccuaggugacagag

SEQ ID NO: 2900484 - RNA, 14 nt, Human
gccuaggugacaga

SEQ ID NO: 2900485 - RNA, 13 nt, Human
gccuaggugacag

SEQ ID NO: 2900486 - RNA, 15 nt, Human
gccuaggauucuaaa

SEQ ID NO: 2900487 - RNA, 16 nt, Human
gccuaggauucuaaaa

SEQ ID NO: 2900488 - RNA, 12 nt, Human
gccuaggauucu

SEQ ID NO: 2900489 - RNA, 13 nt, Human
gccuaggauucua

SEQ ID NO: 2900490 - RNA, 14 nt, Human
gccuaggauucuaa

SEQ ID NO: 2900491 - RNA, 15 nt, Human
gccuaggaccacuca

SEQ ID NO: 2900492 - RNA, 18 nt, Human
gccuaggaccacucagcc

SEQ ID NO: 2900493 - RNA, 19 nt, Human
gccuaggaccacucagccc

SEQ ID NO: 2900494 - RNA, 20 nt, Human
gccuaggaccacucagcccc

SEQ ID NO: 2900495 - RNA, 21 nt, Human
gccuaggaccacucagccccu

SEQ ID NO: 2900496 - RNA, 22 nt, Human
gccuaggaccacucagccccua

SEQ ID NO: 2900497 - RNA, 23 nt, Human
gccuaggaccacucagccccuag

SEQ ID NO: 2900498 - RNA, 20 nt, Human
gccuaggugacagagugaga

SEQ ID NO: 2900499 - RNA, 16 nt, Human
gccuaguuuacuguuu

SEQ ID NO: 2900500 - RNA, 15 nt, Human
gccuaguuuuuagua

SEQ ID NO: 2900501 - RNA, 21 nt, Human
gccuaguuuuuaguaaucugu

SEQ ID NO: 2900502 - RNA, 14 nt, Human
gccuaguggcuugu

SEQ ID NO: 2900503 - RNA, 17 nt, Human
gccgccuaggcucagcg

SEQ ID NO: 2900504 - RNA, 16 nt, Human
gcccugcccugguuuc

SEQ ID NO: 2900505 - RNA, 12 nt, Human
gcccugcccugg

SEQ ID NO: 2900506 - RNA, 20 nt, Human
gcccugcccucuccuuccuu

SEQ ID NO: 2900507 - RNA, 11 nt, Human
gcccugcccug

SEQ ID NO: 2900508 - RNA, 21 nt, Human
gcccugcagaggggaaaccag

SEQ ID NO: 2900509 - RNA, 14 nt, Human
gcccugcagccagc

SEQ ID NO: 2900510 - RNA, 15 nt, Human
gcccugcagccagcu

SEQ ID NO: 2900511 - RNA, 13 nt, Human
gcccugcaguguu

SEQ ID NO: 2900512 - RNA, 22 nt, Human
gcccugcaguguucgcuuggcu

SEQ ID NO: 2900513 - RNA, 15 nt, Human
gcccugcaugggcca

SEQ ID NO: 2900514 - RNA, 18 nt, Human
gcccugcaugggccagcc

SEQ ID NO: 2900515 - RNA, 19 nt, Human
gcccugcaugggccagccc

SEQ ID NO: 2900516 - RNA, 21 nt, Human
gcccugcaugggccagccccu

SEQ ID NO: 2900517 - RNA, 22 nt, Human
gcccugcaugggccagccccuc

SEQ ID NO: 2900518 - RNA, 23 nt, Human
gcccugcaugggccagccccucc

SEQ ID NO: 2900519 - RNA, 11 nt, Human
gcccugcaugu

SEQ ID NO: 2900520 - RNA, 14 nt, Human
gcccugcauguagu

SEQ ID NO: 2900521 - RNA, 20 nt, Human
gcccuuagcagggaaacagc

SEQ ID NO: 2900522 - RNA, 19 nt, Human
gcccuuagcagggaaacag

SEQ ID NO: 2900523 - RNA, 11 nt, Human
gcccugucugu

SEQ ID NO: 2900524 - RNA, 22 nt, Human
gcccuguccugccuaaggcuga

SEQ ID NO: 2900525 - RNA, 19 nt, Human
gcccugucccucccaccuc

SEQ ID NO: 2900526 - RNA, 20 nt, Human
gcccugucccucccaccucu

SEQ ID NO: 2900527 - RNA, 21 nt, Human
gcccugucccucccaccucug

SEQ ID NO: 2900528 - RNA, 22 nt, Human
gcccugucccucccaccucugu

SEQ ID NO: 2900529 - RNA, 23 nt, Human
gcccugucccucccaccucugug

SEQ ID NO: 2900530 - RNA, 15 nt, Human
gcccuguccugccau

SEQ ID NO: 2900531 - RNA, 16 nt, Human
gcccugucgggcuuug

SEQ ID NO: 2900532 - RNA, 17 nt, Human
gcccugucgggcuuugu

SEQ ID NO: 2900533 - RNA, 19 nt, Human
gcccugucgggcuuugugu

SEQ ID NO: 2900534 - RNA, 20 nt, Human
gcccugucgggcuuugugug

SEQ ID NO: 2900535 - RNA, 13 nt, Human
gcccugucccucc

SEQ ID NO: 2900536 - RNA, 13 nt, Human
gcccugcccugag

SEQ ID NO: 2900537 - RNA, 15 nt, Human
gcccugcccugagga

SEQ ID NO: 2900538 - RNA, 20 nt, Human
gcccugcccugaggaaggag

SEQ ID NO: 2900539 - RNA, 15 nt, Human
gcccugcccuggcag

SEQ ID NO: 2900540 - RNA, 17 nt, Human
gcccugcccuggcaggg

SEQ ID NO: 2900541 - RNA, 15 nt, Human
gcccugucccuccca

SEQ ID NO: 2900542 - RNA, 16 nt, Human
gcccugucccucccac

SEQ ID NO: 2900543 - RNA, 17 nt, Human
gcccugucccucccacc

SEQ ID NO: 2900544 - RNA, 18 nt, Human
gcccugucccucccaccu

SEQ ID NO: 2900545 - RNA, 18 nt, Human
gcccugcccugguuuccu

SEQ ID NO: 2900546 - RNA, 22 nt, Human
gcccuuagcagggaaacagcua

SEQ ID NO: 2900547 - RNA, 16 nt, Human
gcccuuaucugugcuc

SEQ ID NO: 2900548 - RNA, 15 nt, Human
gcccuuaucugugcu

SEQ ID NO: 2900549 - RNA, 15 nt, Human
gcccuuaguccccca

SEQ ID NO: 2900550 - RNA, 16 nt, Human
gcccuuagucccccaa

SEQ ID NO: 2900551 - RNA, 17 nt, Human
gcccuuagucccccaac

SEQ ID NO: 2900552 - RNA, 18 nt, Human
gcccuuagucccccaacu

SEQ ID NO: 2900553 - RNA, 20 nt, Human
gcccuuagucccccaacucu

SEQ ID NO: 2900554 - RNA, 23 nt, Human
gcccuuagucccccaacucugag

SEQ ID NO: 2900555 - RNA, 18 nt, Human
gccgcagccucccucuga

SEQ ID NO: 2900556 - RNA, 17 nt, Human
gccgcagccucccucug

SEQ ID NO: 2900557 - RNA, 14 nt, Human
gccgcccaaggccc

SEQ ID NO: 2900558 - RNA, 16 nt, Human
gccgcccccuccugaa

SEQ ID NO: 2900559 - RNA, 15 nt, Human
gccgccccacccaga

SEQ ID NO: 2900560 - RNA, 17 nt, Human
gccgcccccugcccccc

SEQ ID NO: 2900561 - RNA, 15 nt, Human
gccgcccccuccuga

SEQ ID NO: 2900562 - RNA, 14 nt, Human
gccgccccacccag

SEQ ID NO: 2900563 - RNA, 23 nt, Human
gccgcccccugccccccagccuc

SEQ ID NO: 2900564 - RNA, 12 nt, Human
caggaacagaag

SEQ ID NO: 2900565 - RNA, 19 nt, Human
caggaaagcucagcuacug

SEQ ID NO: 2900566 - RNA, 18 nt, Human
cagcuucauuuccugugu

SEQ ID NO: 2900567 - RNA, 15 nt, Human
cagcuucauuuccug

SEQ ID NO: 2900568 - RNA, 14 nt, Human
cagcuucagguuau

SEQ ID NO: 2900569 - RNA, 18 nt, Human
cagcugugcucuggacag

SEQ ID NO: 2900570 - RNA, 17 nt, Human
cagcuguccucccucca

SEQ ID NO: 2900571 - RNA, 18 nt, Human
cagcuguccucccuccac

SEQ ID NO: 2900572 - RNA, 12 nt, Human
cagcugucucua

SEQ ID NO: 2900573 - RNA, 14 nt, Human
cagcugucuguggc

SEQ ID NO: 2900574 - RNA, 16 nt, Human
cagcugucuguggcuu

SEQ ID NO: 2900575 - RNA, 13 nt, Human
cagcugugagccu

SEQ ID NO: 2900576 - RNA, 15 nt, Human
cagcugugagccuug

SEQ ID NO: 2900577 - RNA, 16 nt, Human
cagcugugagccuugg

SEQ ID NO: 2900578 - RNA, 17 nt, Human
cagcugugagccuuggc

SEQ ID NO: 2900579 - RNA, 14 nt, Human
cagcugcaccagag

SEQ ID NO: 2900580 - RNA, 16 nt, Human
cagcugcaccagagca

SEQ ID NO: 2900581 - RNA, 19 nt, Human
cagcugcaccagagcaacc

SEQ ID NO: 2900582 - RNA, 21 nt, Human
cagcugcaccugccagccugg

SEQ ID NO: 2900583 - RNA, 20 nt, Human
cagcugcaccugccagccug

SEQ ID NO: 2900584 - RNA, 18 nt, Human
cagcugcaccugccagcc

SEQ ID NO: 2900585 - RNA, 17 nt, Human
cagcugcaccugccagc

SEQ ID NO: 2900586 - RNA, 16 nt, Human
cagcugcaccugccag

SEQ ID NO: 2900587 - RNA, 16 nt, Human
cagcugcagcugggcu

SEQ ID NO: 2900588 - RNA, 12 nt, Human
cagcugccaccu

SEQ ID NO: 2900589 - RNA, 17 nt, Human
cagcugcagcugggcug

SEQ ID NO: 2900590 - RNA, 15 nt, Human
cagcugcaggaauca

SEQ ID NO: 2900591 - RNA, 22 nt, Human
cagcugcaccugccagccuggc

SEQ ID NO: 2900592 - RNA, 15 nt, Human
cagcuccagcucacc

SEQ ID NO: 2900593 - RNA, 14 nt, Human
cagcuccagcucac

SEQ ID NO: 2900594 - RNA, 13 nt, Human
cagcuccagcuca

SEQ ID NO: 2900595 - RNA, 20 nt, Human
cagcuccagcucaccagccc

SEQ ID NO: 2900596 - RNA, 18 nt, Human
cagcuccagcucaccagc

SEQ ID NO: 2900597 - RNA, 17 nt, Human
cagcuccagcucaccag

SEQ ID NO: 2900598 - RNA, 16 nt, Human
cagcuccagcucacca

SEQ ID NO: 2900599 - RNA, 22 nt, Human
cagcuccagcucaccagcccca

SEQ ID NO: 2900600 - RNA, 20 nt, Human
cagcuccagggaauccaagc

SEQ ID NO: 2900601 - RNA, 20 nt, Human
cagcuccagccccuuuccaa

SEQ ID NO: 2900602 - RNA, 22 nt, Human
cagcuccagccccuuuccaaaa

SEQ ID NO: 2900603 - RNA, 22 nt, Human
cagcuccagggaauccaagccu

SEQ ID NO: 2900604 - RNA, 21 nt, Human
cagcuccagggaauccaagcc

SEQ ID NO: 2900605 - RNA, 17 nt, Human
cagcuccagguggcucu

SEQ ID NO: 2900606 - RNA, 21 nt, Human
cagcuccagguggcucugagg

SEQ ID NO: 2900607 - RNA, 21 nt, Human
cagcucccaaggcucugagca

SEQ ID NO: 2900608 - RNA, 14 nt, Human
cagcuccauuuucu

SEQ ID NO: 2900609 - RNA, 18 nt, Human
cagccgauucaccugagc

SEQ ID NO: 2900610 - RNA, 11 nt, Human
cagccucuuaa

SEQ ID NO: 2900611 - RNA, 20 nt, Human
cagccggcguggcaaauaua

SEQ ID NO: 2900612 - RNA, 21 nt, Human
cagccggcguggcaaauauaa

SEQ ID NO: 2900613 - RNA, 21 nt, Human
cagccucuuaaagcugccugu

SEQ ID NO: 2900614 - RNA, 20 nt, Human
cagccucuuaaagcugccug

SEQ ID NO: 2900615 - RNA, 19 nt, Human
cagccucuuaaagcugccu

SEQ ID NO: 2900616 - RNA, 15 nt, Human
cagccucuuaaagcu

SEQ ID NO: 2900617 - RNA, 18 nt, Human
cagccucuuggccccaga

SEQ ID NO: 2900618 - RNA, 16 nt, Human
cagccucuuucugucc

SEQ ID NO: 2900619 - RNA, 16 nt, Human
cagccggccaauggaa

SEQ ID NO: 2900620 - RNA, 19 nt, Human
cagccggccaauggaaacc

SEQ ID NO: 2900621 - RNA, 20 nt, Human
cagccggccaauggaaaccu

SEQ ID NO: 2900622 - RNA, 18 nt, Human
cagccgcuucugacugcu

SEQ ID NO: 2900623 - RNA, 14 nt, Human
cagccgcuucugac

SEQ ID NO: 2900624 - RNA, 16 nt, Human
cagccgcagccucccu

SEQ ID NO: 2900625 - RNA, 19 nt, Human
cagccgauucaccugagca

SEQ ID NO: 2900626 - RNA, 21 nt, Human
cagcccuuagcagggaaacag

SEQ ID NO: 2900627 - RNA, 16 nt, Human
cagcccuuagcaggga

SEQ ID NO: 2900628 - RNA, 15 nt, Human
cagcccuuagcaggg

SEQ ID NO: 2900629 - RNA, 17 nt, Human
cagccucuuucuguccc

SEQ ID NO: 2900630 - RNA, 15 nt, Human
cagccugaccuuccu

SEQ ID NO: 2900631 - RNA, 22 nt, Human
cagccugaccuuccuuccuguu

SEQ ID NO: 2900632 - RNA, 17 nt, Human
cagcggggacagcuccu

SEQ ID NO: 2900633 - RNA, 16 nt, Human
cagcggggacagcucc

SEQ ID NO: 2900634 - RNA, 14 nt, Human
cagcggggacagcu

SEQ ID NO: 2900635 - RNA, 20 nt, Human
cagccugagcaacucuugau

SEQ ID NO: 2900636 - RNA, 16 nt, Human
cagccugagcaacucu

SEQ ID NO: 2900637 - RNA, 15 nt, Human
cagcggggacagcuc

SEQ ID NO: 2900638 - RNA, 14 nt, Human
cagcgucccagucu

SEQ ID NO: 2900639 - RNA, 21 nt, Human
cagcguauauauaagaaagac

SEQ ID NO: 2900640 - RNA, 23 nt, Human
cagcguauauauaagaaagacau

SEQ ID NO: 2900641 - RNA, 21 nt, Human
cagcgucccagucucuggcag

SEQ ID NO: 2900642 - RNA, 17 nt, Human
cagcgucccuagcagug

SEQ ID NO: 2900643 - RNA, 18 nt, Human
cagcgucccuagcaguga

SEQ ID NO: 2900644 - RNA, 21 nt, Human
cagccugagcaacucuugauu

SEQ ID NO: 2900645 - RNA, 14 nt, Human
cagcguaaaauggu

SEQ ID NO: 2900646 - RNA, 15 nt, Human
cagcguaaaauggug

SEQ ID NO: 2900647 - RNA, 16 nt, Human
cagcguaaaaugguga

SEQ ID NO: 2900648 - RNA, 17 nt, Human
cagcguaaaauggugaa

SEQ ID NO: 2900649 - RNA, 21 nt, Human
cagcgugcccgcuuccgcugu

SEQ ID NO: 2900650 - RNA, 22 nt, Human
cagcagguccuccaucccaaca

SEQ ID NO: 2900651 - RNA, 14 nt, Human
cagcaucaccugcc

SEQ ID NO: 2900652 - RNA, 18 nt, Human
cagccaggagcugucacc

SEQ ID NO: 2900653 - RNA, 19 nt, Human
cagcacagauaaaaagugg

SEQ ID NO: 2900654 - RNA, 21 nt, Human
cagcacagauaaaaaguggaa

SEQ ID NO: 2900655 - RNA, 23 nt, Human
cagcaggugauuggaccaggcca

SEQ ID NO: 2900656 - RNA, 21 nt, Human
cagcaggugauuggaccaggc

SEQ ID NO: 2900657 - RNA, 20 nt, Human
cagcaggugauuggaccagg

SEQ ID NO: 2900658 - RNA, 18 nt, Human
cagcaggugauuggacca

SEQ ID NO: 2900659 - RNA, 15 nt, Human
cagcaguacaauaaa

SEQ ID NO: 2900660 - RNA, 13 nt, Human
cagcaguagacau

SEQ ID NO: 2900661 - RNA, 14 nt, Human
cagcaguagacauu

SEQ ID NO: 2900662 - RNA, 15 nt, Human
cagcaguagacauuu

SEQ ID NO: 2900663 - RNA, 19 nt, Human
cagcaguccuuuguaaaca

SEQ ID NO: 2900664 - RNA, 19 nt, Human
cagcagucgguuggagcga

SEQ ID NO: 2900665 - RNA, 13 nt, Human
cagcagucucugc

SEQ ID NO: 2900666 - RNA, 15 nt, Human
cagcagucucugccu

SEQ ID NO: 2900667 - RNA, 16 nt, Human
cagcagucucugccuu

SEQ ID NO: 2900668 - RNA, 17 nt, Human
cagcagucucugccuug

SEQ ID NO: 2900669 - RNA, 21 nt, Human
cagcagucucugccuugccuu

SEQ ID NO: 2900670 - RNA, 15 nt, Human
cagcaccucagccug

SEQ ID NO: 2900671 - RNA, 16 nt, Human
cagcaccucagccugc

SEQ ID NO: 2900672 - RNA, 17 nt, Human
cagcaccucagccugca

SEQ ID NO: 2900673 - RNA, 19 nt, Human
cagagggcuugugaacaga

SEQ ID NO: 2900674 - RNA, 23 nt, Human
cagaggggaaaccaguguagccu

SEQ ID NO: 2900675 - RNA, 12 nt, Human
cagaggggaagg

SEQ ID NO: 2900676 - RNA, 14 nt, Human
cagaggggacucug

SEQ ID NO: 2900677 - RNA, 15 nt, Human
cagaggggacucugg

SEQ ID NO: 2900678 - RNA, 16 nt, Human
cagaggggacucuggg

SEQ ID NO: 2900679 - RNA, 17 nt, Human
cagaggggacucugggc

SEQ ID NO: 2900680 - RNA, 20 nt, Human
cagagcugguggacccaggg

SEQ ID NO: 2900681 - RNA, 18 nt, Human
cagagcugguggacccag

SEQ ID NO: 2900682 - RNA, 17 nt, Human
cagagcugguggaccca

SEQ ID NO: 2900683 - RNA, 22 nt, Human
cagagcuguuuauggccucagc

SEQ ID NO: 2900684 - RNA, 21 nt, Human
cagagcuguuuauggccucag

SEQ ID NO: 2900685 - RNA, 20 nt, Human
cagagcuguuuauggccuca

SEQ ID NO: 2900686 - RNA, 19 nt, Human
cagagcuguuuauggccuc

SEQ ID NO: 2900687 - RNA, 15 nt, Human
cagagcuguggagga

SEQ ID NO: 2900688 - RNA, 21 nt, Human
cagagcugguggacccaggga

SEQ ID NO: 2900689 - RNA, 12 nt, Human
cagagcugugga

SEQ ID NO: 2900690 - RNA, 19 nt, Human
cagagucacaagccucgag

SEQ ID NO: 2900691 - RNA, 22 nt, Human
cagagucacaagccucgaggug

SEQ ID NO: 2900692 - RNA, 21 nt, Human
cagagucacacgggggcagcu

SEQ ID NO: 2900693 - RNA, 20 nt, Human
cagaguauuugaaaaaugua

SEQ ID NO: 2900694 - RNA, 20 nt, Human
cagaguauggagcucagaga

SEQ ID NO: 2900695 - RNA, 13 nt, Human
cagaguaugaaca

SEQ ID NO: 2900696 - RNA, 21 nt, Human
cagaguaugaacaccugggcu

SEQ ID NO: 2900697 - RNA, 14 nt, Human
cagaguauggagcu

SEQ ID NO: 2900698 - RNA, 22 nt, Human
cagucugaugagaacucugagc

SEQ ID NO: 2900699 - RNA, 14 nt, Human
cagucucaggagca

SEQ ID NO: 2900700 - RNA, 13 nt, Human
cagucucaggagc

SEQ ID NO: 2900701 - RNA, 19 nt, Human
cagucucaggagcaugggg

SEQ ID NO: 2900702 - RNA, 18 nt, Human
cagucucaggagcauggg

SEQ ID NO: 2900703 - RNA, 14 nt, Human
cagucucccucccu

SEQ ID NO: 2900704 - RNA, 15 nt, Human
caguccuuccaccuc

SEQ ID NO: 2900705 - RNA, 14 nt, Human
caguccuuuguaaa

SEQ ID NO: 2900706 - RNA, 20 nt, Human
caguccuuuguaaacagugu

SEQ ID NO: 2900707 - RNA, 21 nt, Human
caguccuuuguaaacaguguu

SEQ ID NO: 2900708 - RNA, 21 nt, Human
caguccuuuuacuacagcuau

SEQ ID NO: 2900709 - RNA, 12 nt, Human
cagugcaggcac

SEQ ID NO: 2900710 - RNA, 13 nt, Human
cagugcagcaaua

SEQ ID NO: 2900711 - RNA, 20 nt, Human
cagucugauucccaagcucu

SEQ ID NO: 2900712 - RNA, 19 nt, Human
cagucugauucccaagcuc

SEQ ID NO: 2900713 - RNA, 22 nt, Human
cagugcaaugguauaaauuuca

SEQ ID NO: 2900714 - RNA, 12 nt, Human
cagugcacauga

SEQ ID NO: 2900715 - RNA, 14 nt, Human
cagugcacaugaac

SEQ ID NO: 2900716 - RNA, 12 nt, Human
cagugcccacag

SEQ ID NO: 2900717 - RNA, 19 nt, Human
cagugggacagggcauggc

SEQ ID NO: 2900718 - RNA, 16 nt, Human
cagugggacagggcau

SEQ ID NO: 2900719 - RNA, 11 nt, Human
cagugggagcu

SEQ ID NO: 2900720 - RNA, 15 nt, Human
cagugggagauguua

SEQ ID NO: 2900721 - RNA, 17 nt, Human
cagugggagauguuaga

SEQ ID NO: 2900722 - RNA, 14 nt, Human
cagugcaggcacag

SEQ ID NO: 2900723 - RNA, 14 nt, Human
cagugcaggcuggc

SEQ ID NO: 2900724 - RNA, 16 nt, Human
cagugcaggcuggcca

SEQ ID NO: 2900725 - RNA, 17 nt, Human
cagugcaggcuggccag

SEQ ID NO: 2900726 - RNA, 18 nt, Human
cagugcaggcuggccagc

SEQ ID NO: 2900727 - RNA, 19 nt, Human
cagugcaggcuggccagcc

SEQ ID NO: 2900728 - RNA, 20 nt, Human
cagugcaggcuggccagccg

SEQ ID NO: 2900729 - RNA, 22 nt, Human
cagugcaggcuggccagccgcu

SEQ ID NO: 2900730 - RNA, 17 nt, Human
cagugcagggcaaaaua

SEQ ID NO: 2900731 - RNA, 20 nt, Human
cagugcagggcaaaauauuc

SEQ ID NO: 2900732 - RNA, 10 nt, Human
cagugccaac

SEQ ID NO: 2900733 - RNA, 11 nt, Human
cagugccaacu

SEQ ID NO: 2900734 - RNA, 17 nt, Human
cagugccaacuccucac

SEQ ID NO: 2900735 - RNA, 16 nt, Human
cagugccaacuguggc

SEQ ID NO: 2900736 - RNA, 17 nt, Human
cagugccaacuguggcu

SEQ ID NO: 2900737 - RNA, 18 nt, Human
cagugccaacuguggcug

SEQ ID NO: 2900738 - RNA, 19 nt, Human
cagugccaacuguggcugg

SEQ ID NO: 2900739 - RNA, 20 nt, Human
cagugccaacuguggcuggu

SEQ ID NO: 2900740 - RNA, 12 nt, Human
cagugccaagga

SEQ ID NO: 2900741 - RNA, 13 nt, Human
cagugccaaggac

SEQ ID NO: 2900742 - RNA, 23 nt, Human
cagugccaaggaccuccucuucc

SEQ ID NO: 2900743 - RNA, 14 nt, Human
cagugccagcaaug

SEQ ID NO: 2900744 - RNA, 15 nt, Human
cagugccagcaauga

SEQ ID NO: 2900745 - RNA, 17 nt, Human
cagugccagcaaugaca

SEQ ID NO: 2900746 - RNA, 21 nt, Human
cagugccagcaaugacaucuc

SEQ ID NO: 2900747 - RNA, 20 nt, Human
cagguuucuggucucuaggc

SEQ ID NO: 2900748 - RNA, 17 nt, Human
cagguuucuggucucua

SEQ ID NO: 2900749 - RNA, 20 nt, Human
caguauuuuggagaaauuau

SEQ ID NO: 2900750 - RNA, 19 nt, Human
caguauuuuggagaaauua

SEQ ID NO: 2900751 - RNA, 21 nt, Human
caguauuuuggagaaauuauu

SEQ ID NO: 2900752 - RNA, 23 nt, Human
caguauuuuggagaaauuauuua

SEQ ID NO: 2900753 - RNA, 15 nt, Human
cagucaacaagccug

SEQ ID NO: 2900754 - RNA, 15 nt, Human
cagucaaaauaauuc

SEQ ID NO: 2900755 - RNA, 13 nt, Human
cagucaagaagaa

SEQ ID NO: 2900756 - RNA, 14 nt, Human
cagucaagaagaaa

SEQ ID NO: 2900757 - RNA, 20 nt, Human
cagucaagaagaaaaagguu

SEQ ID NO: 2900758 - RNA, 15 nt, Human
caggugcuauuguua

SEQ ID NO: 2900759 - RNA, 18 nt, Human
caggugcuauuguuacuc

SEQ ID NO: 2900760 - RNA, 20 nt, Human
caggugcuauuguuacucuu

SEQ ID NO: 2900761 - RNA, 15 nt, Human
cagguuggaagagaa

SEQ ID NO: 2900762 - RNA, 18 nt, Human
cagguuggaagagaauca

SEQ ID NO: 2900763 - RNA, 20 nt, Human
cagguuggaagagaaucacc

SEQ ID NO: 2900764 - RNA, 13 nt, Human
cagguuggacccc

SEQ ID NO: 2900765 - RNA, 14 nt, Human
cagguuggacccca

SEQ ID NO: 2900766 - RNA, 17 nt, Human
cagguuggaccccagag

SEQ ID NO: 2900767 - RNA, 13 nt, Human
caggugcaguggc

SEQ ID NO: 2900768 - RNA, 14 nt, Human
caggugccuuucaa

SEQ ID NO: 2900769 - RNA, 15 nt, Human
caggugccuuucaaa

SEQ ID NO: 2900770 - RNA, 17 nt, Human
caggugccuuucaaauu

SEQ ID NO: 2900771 - RNA, 21 nt, Human
caggugccuuucaaauuuaga

SEQ ID NO: 2900772 - RNA, 12 nt, Human
caggugcagugg

SEQ ID NO: 2900773 - RNA, 17 nt, Human
caggugauccacccacc

SEQ ID NO: 2900774 - RNA, 16 nt, Human
caggugauccacccac

SEQ ID NO: 2900775 - RNA, 12 nt, Human
caggguuggccc

SEQ ID NO: 2900776 - RNA, 13 nt, Human
caggugcagagga

SEQ ID NO: 2900777 - RNA, 14 nt, Human
caggugcagaggaa

SEQ ID NO: 2900778 - RNA, 15 nt, Human
caggugcagaggaag

SEQ ID NO: 2900779 - RNA, 19 nt, Human
caggugcagaggaaguaca

SEQ ID NO: 2900780 - RNA, 18 nt, Human
cagggucucacucugucg

SEQ ID NO: 2900781 - RNA, 17 nt, Human
cagggucucacucuguc

SEQ ID NO: 2900782 - RNA, 21 nt, Human
cagggucucacucugucgccc

SEQ ID NO: 2900783 - RNA, 13 nt, Human
cagggucucugcu

SEQ ID NO: 2900784 - RNA, 15 nt, Human
cagggucucucccuc

SEQ ID NO: 2900785 - RNA, 16 nt, Human
cagggucucucccuca

SEQ ID NO: 2900786 - RNA, 18 nt, Human
cagggucucucccucagg

SEQ ID NO: 2900787 - RNA, 20 nt, Human
cagggucucucccucaggug

SEQ ID NO: 2900788 - RNA, 21 nt, Human
cagggucucucccucaggugu

SEQ ID NO: 2900789 - RNA, 15 nt, Human
cagggucucugcugc

SEQ ID NO: 2900790 - RNA, 16 nt, Human
cagggucucugcugcc

SEQ ID NO: 2900791 - RNA, 17 nt, Human
cagggucucugcugccg

SEQ ID NO: 2900792 - RNA, 18 nt, Human
cagggucucugcugccgc

SEQ ID NO: 2900793 - RNA, 17 nt, Human
cagggugucuccugaag

SEQ ID NO: 2900794 - RNA, 20 nt, Human
cagggugugagcgccacauc

SEQ ID NO: 2900795 - RNA, 15 nt, Human
cagggucugggcagg

SEQ ID NO: 2900796 - RNA, 17 nt, Human
cagggucuucccuaccu

SEQ ID NO: 2900797 - RNA, 13 nt, Human
cagggucuucccu

SEQ ID NO: 2900798 - RNA, 16 nt, Human
cagggucugggcagga

SEQ ID NO: 2900799 - RNA, 15 nt, Human
cagggucugugugaa

SEQ ID NO: 2900800 - RNA, 19 nt, Human
cagggucugugugaaugug

SEQ ID NO: 2900801 - RNA, 20 nt, Human
cagggucugugugaaugugg

SEQ ID NO: 2900802 - RNA, 23 nt, Human
cagggucugugugaaugugggca

SEQ ID NO: 2900803 - RNA, 19 nt, Human
cagggucucugcugccgcc

SEQ ID NO: 2900804 - RNA, 14 nt, Human
cagggucugggcag

SEQ ID NO: 2900805 - RNA, 23 nt, Human
caggguucucccucccaccuuaa

SEQ ID NO: 2900806 - RNA, 23 nt, Human
caggguguugggauacugcaggg

SEQ ID NO: 2900807 - RNA, 19 nt, Human
caggcugggcuucaguggc

SEQ ID NO: 2900808 - RNA, 17 nt, Human
caggcugggcuucagug

SEQ ID NO: 2900809 - RNA, 13 nt, Human
cagggagggccug

SEQ ID NO: 2900810 - RNA, 12 nt, Human
cagggagggccu

SEQ ID NO: 2900811 - RNA, 23 nt, Human
cagggaggagguggcagcccugu

SEQ ID NO: 2900812 - RNA, 22 nt, Human
cagggaggagguggcagcccug

SEQ ID NO: 2900813 - RNA, 17 nt, Human
caggcgccccuuccccc

SEQ ID NO: 2900814 - RNA, 15 nt, Human
caggcgcugugcuau

SEQ ID NO: 2900815 - RNA, 20 nt, Human
caggcgcugugcuaucauga

SEQ ID NO: 2900816 - RNA, 23 nt, Human
caggcgggagcgguggcccuguc

SEQ ID NO: 2900817 - RNA, 16 nt, Human
caggcgggaggaggug

SEQ ID NO: 2900818 - RNA, 21 nt, Human
caggcgggagcgguggcccug

SEQ ID NO: 2900819 - RNA, 15 nt, Human
caggcggugggcacc

SEQ ID NO: 2900820 - RNA, 17 nt, Human
caggcggugggcaccca

SEQ ID NO: 2900821 - RNA, 17 nt, Human
caggcuggcccugcccu

SEQ ID NO: 2900822 - RNA, 19 nt, Human
caggcuggcccugcccugg

SEQ ID NO: 2900823 - RNA, 18 nt, Human
caggcuggcccugcccug

SEQ ID NO: 2900824 - RNA, 15 nt, Human
caggcugggcuucag

SEQ ID NO: 2900825 - RNA, 16 nt, Human
caggcugggcuucagu

SEQ ID NO: 2900826 - RNA, 15 nt, Human
caggcuggcgugcag

SEQ ID NO: 2900827 - RNA, 20 nt, Human
caggcuggcccugcccuggu

SEQ ID NO: 2900828 - RNA, 12 nt, Human
caggccucaccu

SEQ ID NO: 2900829 - RNA, 13 nt, Human
caggccucaccuc

SEQ ID NO: 2900830 - RNA, 17 nt, Human
caggccucaccucuacc

SEQ ID NO: 2900831 - RNA, 19 nt, Human
caggccucaccucuaccca

SEQ ID NO: 2900832 - RNA, 21 nt, Human
caggccucaccucuacccaaa

SEQ ID NO: 2900833 - RNA, 22 nt, Human
caggccucaccucuacccaaac

SEQ ID NO: 2900834 - RNA, 12 nt, Human
caggccucccuc

SEQ ID NO: 2900835 - RNA, 22 nt, Human
caggccuauguugauccaucca

SEQ ID NO: 2900836 - RNA, 20 nt, Human
caggccugccuguucccauu

SEQ ID NO: 2900837 - RNA, 15 nt, Human
caggcgccccuuccc

SEQ ID NO: 2900838 - RNA, 20 nt, Human
caggcgauccaccugucuca

SEQ ID NO: 2900839 - RNA, 12 nt, Human
caggccugcagc

SEQ ID NO: 2900840 - RNA, 22 nt, Human
caggccugcagcaggaguggug

SEQ ID NO: 2900841 - RNA, 19 nt, Human
caggccucccucucucuuc

SEQ ID NO: 2900842 - RNA, 18 nt, Human
caggccucccucucucuu

SEQ ID NO: 2900843 - RNA, 17 nt, Human
caggccucccucucucu

SEQ ID NO: 2900844 - RNA, 16 nt, Human
caggccucccucucuc

SEQ ID NO: 2900845 - RNA, 15 nt, Human
caggccucccucucu

SEQ ID NO: 2900846 - RNA, 14 nt, Human
caggccucccucuc

SEQ ID NO: 2900847 - RNA, 13 nt, Human
caggccucccucu

SEQ ID NO: 2900848 - RNA, 23 nt, Human
caggccucccucucucuucugcu

SEQ ID NO: 2900849 - RNA, 22 nt, Human
caggccucccucucucuucugc

SEQ ID NO: 2900850 - RNA, 18 nt, Human
cagggaggugaccccagg

SEQ ID NO: 2900851 - RNA, 16 nt, Human
cagggagggccugggc

SEQ ID NO: 2900852 - RNA, 14 nt, Human
cagggagggccugg

SEQ ID NO: 2900853 - RNA, 22 nt, Human
cagggaguccgaaagggacuug

SEQ ID NO: 2900854 - RNA, 14 nt, Human
cagggagugcuggc

SEQ ID NO: 2900855 - RNA, 16 nt, Human
cagggagugcuggcuc

SEQ ID NO: 2900856 - RNA, 17 nt, Human
cagggagugcuggcuca

SEQ ID NO: 2900857 - RNA, 22 nt, Human
cagggagugcuggcucacagua

SEQ ID NO: 2900858 - RNA, 17 nt, Human
caggcgcugaguaugga

SEQ ID NO: 2900859 - RNA, 21 nt, Human
caggccagagggagugacaga

SEQ ID NO: 2900860 - RNA, 19 nt, Human
caggccagagggagugaca

SEQ ID NO: 2900861 - RNA, 16 nt, Human
caggccagagggagug

SEQ ID NO: 2900862 - RNA, 23 nt, Human
caggccagagggagugacagagg

SEQ ID NO: 2900863 - RNA, 12 nt, Human
caggagcucuuc

SEQ ID NO: 2900864 - RNA, 20 nt, Human
caggagcucuucaggccucc

SEQ ID NO: 2900865 - RNA, 19 nt, Human
caggagcucuucaggccuc

SEQ ID NO: 2900866 - RNA, 18 nt, Human
caggagcucuucaggccu

SEQ ID NO: 2900867 - RNA, 15 nt, Human
caggagcucuucagg

SEQ ID NO: 2900868 - RNA, 19 nt, Human
caggagcugucaccaagga

SEQ ID NO: 2900869 - RNA, 21 nt, Human
caggagcugucaccaaggaaa

SEQ ID NO: 2900870 - RNA, 22 nt, Human
caggagcugucaccaaggaaac

SEQ ID NO: 2900871 - RNA, 23 nt, Human
caggagcucuucaggccucccuc

SEQ ID NO: 2900872 - RNA, 22 nt, Human
caggagcucuucaggccucccu

SEQ ID NO: 2900873 - RNA, 13 nt, Human
caggaacagaagg

SEQ ID NO: 2900874 - RNA, 23 nt, Human
caggcacccaccaucaugucugg

SEQ ID NO: 2900875 - RNA, 22 nt, Human
caggcacccaccaucaugucug

SEQ ID NO: 2900876 - RNA, 18 nt, Human
caggcacccaccaucaug

SEQ ID NO: 2900877 - RNA, 22 nt, Human
caggcagaucugugccccaugc

SEQ ID NO: 2900878 - RNA, 21 nt, Human
caggcagaucugugccccaug

SEQ ID NO: 2900879 - RNA, 19 nt, Human
caggcagaucugugcccca

SEQ ID NO: 2900880 - RNA, 18 nt, Human
caggcagaucugugcccc

SEQ ID NO: 2900881 - RNA, 17 nt, Human
caggcagaucugugccc

SEQ ID NO: 2900882 - RNA, 16 nt, Human
caggcagaucugugcc

SEQ ID NO: 2900883 - RNA, 15 nt, Human
caggcagaucugugc

SEQ ID NO: 2900884 - RNA, 13 nt, Human
caggcagaucugu

SEQ ID NO: 2900885 - RNA, 19 nt, Human
caggagguuuuuuugucaa

SEQ ID NO: 2900886 - RNA, 13 nt, Human
caggaccccuggg

SEQ ID NO: 2900887 - RNA, 12 nt, Human
caggagggaggg

SEQ ID NO: 2900888 - RNA, 15 nt, Human
caggagggaggggga

SEQ ID NO: 2900889 - RNA, 20 nt, Human
caggagguggaggcugcagu

SEQ ID NO: 2900890 - RNA, 15 nt, Human
caggagggucuaugg

SEQ ID NO: 2900891 - RNA, 20 nt, Human
caggagggucuauggggaga

SEQ ID NO: 2900892 - RNA, 19 nt, Human
caggaggggaacacugccc

SEQ ID NO: 2900893 - RNA, 24 nt, Human
caggaggggaacacugcccucgca

SEQ ID NO: 2900894 - RNA, 22 nt, Human
caggagggcguucuuaggcugc

SEQ ID NO: 2900895 - RNA, 12 nt, Human
caggagggcccu

SEQ ID NO: 2900896 - RNA, 16 nt, Human
caggagggcccuaccu

SEQ ID NO: 2900897 - RNA, 16 nt, Human
caggagggcauccaua

SEQ ID NO: 2900898 - RNA, 23 nt, Human
caggagggagggggaaggcaggg

SEQ ID NO: 2900899 - RNA, 20 nt, Human
cauuagggaugccuccuuuc

SEQ ID NO: 2900900 - RNA, 22 nt, Human
cauguugcccccgugagccaau

SEQ ID NO: 2900901 - RNA, 18 nt, Human
cauuagguuguccuagaa

SEQ ID NO: 2900902 - RNA, 14 nt, Human
cauuaguaaauguc

SEQ ID NO: 2900903 - RNA, 16 nt, Human
cauuaguaaaugucuu

SEQ ID NO: 2900904 - RNA, 17 nt, Human
cauuaguaaaugucuuu

SEQ ID NO: 2900905 - RNA, 18 nt, Human
cauuaguaaaugucuuug

SEQ ID NO: 2900906 - RNA, 19 nt, Human
cauuaguaaaugucuuugu

SEQ ID NO: 2900907 - RNA, 21 nt, Human
cauuaguaaaugucuuuguaa

SEQ ID NO: 2900908 - RNA, 22 nt, Human
cauuaguaaaugucuuuguaag

SEQ ID NO: 2900909 - RNA, 23 nt, Human
cauuaguaaaugucuuuguaagu

SEQ ID NO: 2900910 - RNA, 21 nt, Human
cauuaguaacauaauaaauua

SEQ ID NO: 2900911 - RNA, 21 nt, Human
caugucaggccugugugugaa

SEQ ID NO: 2900912 - RNA, 13 nt, Human
cauguuggccagg

SEQ ID NO: 2900913 - RNA, 12 nt, Human
cauguuggccag

SEQ ID NO: 2900914 - RNA, 16 nt, Human
caugucaggccugugu

SEQ ID NO: 2900915 - RNA, 23 nt, Human
cauguugcacacccacucagcuc

SEQ ID NO: 2900916 - RNA, 22 nt, Human
cauguugcacacccacucagcu

SEQ ID NO: 2900917 - RNA, 18 nt, Human
cauguugcacacccacuc

SEQ ID NO: 2900918 - RNA, 12 nt, Human
cauuaugagguc

SEQ ID NO: 2900919 - RNA, 15 nt, Human
cauuaugaggucaga

SEQ ID NO: 2900920 - RNA, 14 nt, Human
cauuccuucuuuga

SEQ ID NO: 2900921 - RNA, 16 nt, Human
cauucgcgcucugcuc

SEQ ID NO: 2900922 - RNA, 17 nt, Human
cauucgcgcucugcuca

SEQ ID NO: 2900923 - RNA, 18 nt, Human
cauucgcgcucugcucag

SEQ ID NO: 2900924 - RNA, 19 nt, Human
cauuccuucuuugauaaug

SEQ ID NO: 2900925 - RNA, 13 nt, Human
cauuccuugccug

SEQ ID NO: 2900926 - RNA, 23 nt, Human
cauuccuucuuugauaauguuaa

SEQ ID NO: 2900927 - RNA, 13 nt, Human
cauuccuucuuuu

SEQ ID NO: 2900928 - RNA, 15 nt, Human
cauuccuucuuugau

SEQ ID NO: 2900929 - RNA, 16 nt, Human
cauuccuucuuugaua

SEQ ID NO: 2900930 - RNA, 18 nt, Human
cauuccuucuuugauaau

SEQ ID NO: 2900931 - RNA, 13 nt, Human
cauucucacuccu

SEQ ID NO: 2900932 - RNA, 18 nt, Human
cauucuagguuugcaaga

SEQ ID NO: 2900933 - RNA, 16 nt, Human
cauucuauuuuagaau

SEQ ID NO: 2900934 - RNA, 17 nt, Human
cauucuauuuuagaaua

SEQ ID NO: 2900935 - RNA, 15 nt, Human
cauucuaucaagccc

SEQ ID NO: 2900936 - RNA, 17 nt, Human
cauucuaucaagcccag

SEQ ID NO: 2900937 - RNA, 18 nt, Human
cauucuaucaagcccagg

SEQ ID NO: 2900938 - RNA, 23 nt, Human
cauucuaucaagcccaggugcca

SEQ ID NO: 2900939 - RNA, 13 nt, Human
cauucuauugccu

SEQ ID NO: 2900940 - RNA, 14 nt, Human
cauucuauugccuu

SEQ ID NO: 2900941 - RNA, 16 nt, Human
cauucuauugccuucu

SEQ ID NO: 2900942 - RNA, 18 nt, Human
cauucuauugccuucuuu

SEQ ID NO: 2900943 - RNA, 19 nt, Human
cauucuauugccuucuuug

SEQ ID NO: 2900944 - RNA, 20 nt, Human
cauucuauugccuucuuuga

SEQ ID NO: 2900945 - RNA, 21 nt, Human
cauucuauugccuucuuugaa

SEQ ID NO: 2900946 - RNA, 22 nt, Human
cauucuauugccuucuuugaag

SEQ ID NO: 2900947 - RNA, 23 nt, Human
cauucuauugccuucuuugaaga

SEQ ID NO: 2900948 - RNA, 15 nt, Human
cauguauaguugcuu

SEQ ID NO: 2900949 - RNA, 17 nt, Human
cauguauaguugcuuuu

SEQ ID NO: 2900950 - RNA, 20 nt, Human
cauguauaguugcuuuugaa

SEQ ID NO: 2900951 - RNA, 19 nt, Human
cauguauaguuuucccuau

SEQ ID NO: 2900952 - RNA, 23 nt, Human
cauguagugugggaggcuccugu

SEQ ID NO: 2900953 - RNA, 14 nt, Human
cauguauaaaugug

SEQ ID NO: 2900954 - RNA, 15 nt, Human
cauguauaaauguga

SEQ ID NO: 2900955 - RNA, 16 nt, Human
cauguauaaaugugau

SEQ ID NO: 2900956 - RNA, 17 nt, Human
cauguauaaaugugaua

SEQ ID NO: 2900957 - RNA, 15 nt, Human
cauguaucaucugga

SEQ ID NO: 2900958 - RNA, 20 nt, Human
caugaaguuuccuuggcugg

SEQ ID NO: 2900959 - RNA, 12 nt, Human
caugacauguua

SEQ ID NO: 2900960 - RNA, 20 nt, Human
caugacagcgcuaaacguug

SEQ ID NO: 2900961 - RNA, 18 nt, Human
caugacaggccugaagau

SEQ ID NO: 2900962 - RNA, 15 nt, Human
caugacauaacagug

SEQ ID NO: 2900963 - RNA, 18 nt, Human
caugacauaacagugcag

SEQ ID NO: 2900964 - RNA, 20 nt, Human
caugacauaacagugcaggg

SEQ ID NO: 2900965 - RNA, 18 nt, Human
caugacauaugacuugau

SEQ ID NO: 2900966 - RNA, 18 nt, Human
caugcaauuuauuaaaau

SEQ ID NO: 2900967 - RNA, 11 nt, Human
caugcacacac

SEQ ID NO: 2900968 - RNA, 10 nt, Human
caugcacaca

SEQ ID NO: 2900969 - RNA, 14 nt, Human
caugcuccucacug

SEQ ID NO: 2900970 - RNA, 15 nt, Human
caugcuccucacugc

SEQ ID NO: 2900971 - RNA, 17 nt, Human
caugcuccucacugccc

SEQ ID NO: 2900972 - RNA, 19 nt, Human
caugcuccucacugcccgc

SEQ ID NO: 2900973 - RNA, 20 nt, Human
caugcuccucacugcccgca

SEQ ID NO: 2900974 - RNA, 16 nt, Human
caugcacgugugugca

SEQ ID NO: 2900975 - RNA, 23 nt, Human
caugcuaucucugugugcacaaa

SEQ ID NO: 2900976 - RNA, 19 nt, Human
caugcaccugcaaucccag

SEQ ID NO: 2900977 - RNA, 20 nt, Human
caugcaccugcaaucccagc

SEQ ID NO: 2900978 - RNA, 12 nt, Human
caugcaccaaac

SEQ ID NO: 2900979 - RNA, 22 nt, Human
caugcuauuuguucuucaagaa

SEQ ID NO: 2900980 - RNA, 20 nt, Human
caugaaguguguuuccuuca

SEQ ID NO: 2900981 - RNA, 18 nt, Human
caugaaguuuccuuggcu

SEQ ID NO: 2900982 - RNA, 12 nt, Human
caugacacugac

SEQ ID NO: 2900983 - RNA, 13 nt, Human
caugacacugacc

SEQ ID NO: 2900984 - RNA, 15 nt, Human
caugacacugaccuu

SEQ ID NO: 2900985 - RNA, 13 nt, Human
caugaaggaaacu

SEQ ID NO: 2900986 - RNA, 22 nt, Human
caugaagcccaagugaaaucaa

SEQ ID NO: 2900987 - RNA, 11 nt, Human
caugaagccug

SEQ ID NO: 2900988 - RNA, 12 nt, Human
caugaagccugu

SEQ ID NO: 2900989 - RNA, 13 nt, Human
caugaagccugug

SEQ ID NO: 2900990 - RNA, 16 nt, Human
caugaagccuguggau

SEQ ID NO: 2900991 - RNA, 11 nt, Human
caugaagccuu

SEQ ID NO: 2900992 - RNA, 12 nt, Human
caugaagccuuu

SEQ ID NO: 2900993 - RNA, 13 nt, Human
caugaagccuuuu

SEQ ID NO: 2900994 - RNA, 15 nt, Human
caugaagccuuuuga

SEQ ID NO: 2900995 - RNA, 16 nt, Human
caugaagccuuuugaa

SEQ ID NO: 2900996 - RNA, 19 nt, Human
caugaagccuuuugaaagg

SEQ ID NO: 2900997 - RNA, 14 nt, Human
cauggccacacugu

SEQ ID NO: 2900998 - RNA, 15 nt, Human
cauggccacacugug

SEQ ID NO: 2900999 - RNA, 16 nt, Human
cauggccacacuguga

SEQ ID NO: 2901000 - RNA, 18 nt, Human
cauggccacacugugaca

SEQ ID NO: 2901001 - RNA, 19 nt, Human
cauggccacacugugacac

SEQ ID NO: 2901002 - RNA, 20 nt, Human
cauggccacacugugacaca

SEQ ID NO: 2901003 - RNA, 22 nt, Human
cauggccacacugugacacacu

SEQ ID NO: 2901004 - RNA, 21 nt, Human
cauggcaucuucgucuucacu

SEQ ID NO: 2901005 - RNA, 19 nt, Human
cauggcaucaccuccacca

SEQ ID NO: 2901006 - RNA, 13 nt, Human
cauggccaggugg

SEQ ID NO: 2901007 - RNA, 22 nt, Human
cauagcuuacaagccagcugga

SEQ ID NO: 2901008 - RNA, 18 nt, Human
cauagcuuauuauugaag

SEQ ID NO: 2901009 - RNA, 20 nt, Human
cauagcuuauuauugaagga

SEQ ID NO: 2901010 - RNA, 14 nt, Human
cauagcugucuaga

SEQ ID NO: 2901011 - RNA, 15 nt, Human
cauagcugucuagag

SEQ ID NO: 2901012 - RNA, 22 nt, Human
cauagcagagaaugaaagggcc

SEQ ID NO: 2901013 - RNA, 19 nt, Human
cauagcagagaaugaaagg

SEQ ID NO: 2901014 - RNA, 14 nt, Human
cauagcaagacaca

SEQ ID NO: 2901015 - RNA, 20 nt, Human
cauagcaagacacaucccua

SEQ ID NO: 2901016 - RNA, 15 nt, Human
cauagcaagacacau

SEQ ID NO: 2901017 - RNA, 23 nt, Human
cauagcaagauugcuuaaaauag

SEQ ID NO: 2901018 - RNA, 15 nt, Human
cauaauuuguacaua

SEQ ID NO: 2901019 - RNA, 19 nt, Human
cauacacuaaccaaaucuc

SEQ ID NO: 2901020 - RNA, 16 nt, Human
cauacacuuguauaaa

SEQ ID NO: 2901021 - RNA, 18 nt, Human
cauacacuuguauaaaug

SEQ ID NO: 2901022 - RNA, 19 nt, Human
cauacacuuguauaaaugu

SEQ ID NO: 2901023 - RNA, 20 nt, Human
cauacacuuguauaaaugua

SEQ ID NO: 2901024 - RNA, 21 nt, Human
cauacacuuguauaaauguau

SEQ ID NO: 2901025 - RNA, 23 nt, Human
cauacacccccucuucugagcac

SEQ ID NO: 2901026 - RNA, 17 nt, Human
cauacacgaaagagaga

SEQ ID NO: 2901027 - RNA, 13 nt, Human
cauacacgaaaga

SEQ ID NO: 2901028 - RNA, 22 nt, Human
cauacacccccucuucugagca

SEQ ID NO: 2901029 - RNA, 21 nt, Human
cauacacccccucuucugagc

SEQ ID NO: 2901030 - RNA, 23 nt, Human
cauaauuuguacauauguaaaau

SEQ ID NO: 2901031 - RNA, 21 nt, Human
cauaauuuguacauauguaaa

SEQ ID NO: 2901032 - RNA, 22 nt, Human
cauaugccuuggggaggacaaa

SEQ ID NO: 2901033 - RNA, 15 nt, Human
cauccauguuuguaa

SEQ ID NO: 2901034 - RNA, 18 nt, Human
cauccauguuuguaaaac

SEQ ID NO: 2901035 - RNA, 19 nt, Human
cauccauguuuguaaaacu

SEQ ID NO: 2901036 - RNA, 12 nt, Human
cauccauuccca

SEQ ID NO: 2901037 - RNA, 14 nt, Human
cauccauucccaag

SEQ ID NO: 2901038 - RNA, 18 nt, Human
cauccauucccaagaaau

SEQ ID NO: 2901039 - RNA, 16 nt, Human
caucccagccccaauu

SEQ ID NO: 2901040 - RNA, 20 nt, Human
caucccagccccaauuuucu

SEQ ID NO: 2901041 - RNA, 13 nt, Human
caucccaggacac

SEQ ID NO: 2901042 - RNA, 19 nt, Human
caucccaggacaccacacc

SEQ ID NO: 2901043 - RNA, 16 nt, Human
cauccauguccuaugu

SEQ ID NO: 2901044 - RNA, 18 nt, Human
cauccauguccuaugugu

SEQ ID NO: 2901045 - RNA, 20 nt, Human
cauccauguccuauguguga

SEQ ID NO: 2901046 - RNA, 21 nt, Human
caucccaggacaccacaccca

SEQ ID NO: 2901047 - RNA, 22 nt, Human
caucccaggacaccacacccag

SEQ ID NO: 2901048 - RNA, 23 nt, Human
caucccaggacaccacacccagc

SEQ ID NO: 2901049 - RNA, 20 nt, Human
caucccaggaugcugggugg

SEQ ID NO: 2901050 - RNA, 12 nt, Human
caucccccaaag

SEQ ID NO: 2901051 - RNA, 14 nt, Human
caucccccaaaguu

SEQ ID NO: 2901052 - RNA, 14 nt, Human
cauccccuggacug

SEQ ID NO: 2901053 - RNA, 14 nt, Human
cauccccucccauc

SEQ ID NO: 2901054 - RNA, 19 nt, Human
cauccccuggacugggagg

SEQ ID NO: 2901055 - RNA, 21 nt, Human
cauccuucaagaacucugggc

SEQ ID NO: 2901056 - RNA, 15 nt, Human
cauccuuauccuuca

SEQ ID NO: 2901057 - RNA, 19 nt, Human
cauccuuauccuucaucuu

SEQ ID NO: 2901058 - RNA, 20 nt, Human
cauccuuauccuucaucuuu

SEQ ID NO: 2901059 - RNA, 22 nt, Human
cauccuuauccuucaucuuuua

SEQ ID NO: 2901060 - RNA, 19 nt, Human
caucugccccucccccaac

SEQ ID NO: 2901061 - RNA, 12 nt, Human
caucugcccgcc

SEQ ID NO: 2901062 - RNA, 13 nt, Human
caucugcccgccu

SEQ ID NO: 2901063 - RNA, 14 nt, Human
caucugcccgccug

SEQ ID NO: 2901064 - RNA, 19 nt, Human
caucugcccgccugcccac

SEQ ID NO: 2901065 - RNA, 20 nt, Human
caucugcccgccugcccacc

SEQ ID NO: 2901066 - RNA, 21 nt, Human
caucugcccgccugcccaccu

SEQ ID NO: 2901067 - RNA, 22 nt, Human
caucugcccgccugcccaccug

SEQ ID NO: 2901068 - RNA, 23 nt, Human
caucugcccgccugcccaccugc

SEQ ID NO: 2901069 - RNA, 13 nt, Human
cauccuucccuuu

SEQ ID NO: 2901070 - RNA, 12 nt, Human
cauccuuccuau

SEQ ID NO: 2901071 - RNA, 13 nt, Human
cauccuuccuaua

SEQ ID NO: 2901072 - RNA, 18 nt, Human
caucugccccucccccaa

SEQ ID NO: 2901073 - RNA, 18 nt, Human
cauccuuccucacaccag

SEQ ID NO: 2901074 - RNA, 23 nt, Human
cauccuucaagaacucugggcug

SEQ ID NO: 2901075 - RNA, 22 nt, Human
cauccuucaagaacucugggcu

SEQ ID NO: 2901076 - RNA, 11 nt, Human
cauccuuaaag

SEQ ID NO: 2901077 - RNA, 21 nt, Human
caucugggaagauuucuaccu

SEQ ID NO: 2901078 - RNA, 23 nt, Human
caucuggcuuauuuuaaugugau

SEQ ID NO: 2901079 - RNA, 11 nt, Human
caucugggcuc

SEQ ID NO: 2901080 - RNA, 13 nt, Human
caucugggcuccu

SEQ ID NO: 2901081 - RNA, 21 nt, Human
ccacacuucaggcucuucucc

SEQ ID NO: 2901082 - RNA, 16 nt, Human
ccacacuucaggcucu

SEQ ID NO: 2901083 - RNA, 20 nt, Human
ccacacuucaggcucuucuc

SEQ ID NO: 2901084 - RNA, 13 nt, Human
ccacacugugaca

SEQ ID NO: 2901085 - RNA, 17 nt, Human
ccacacugugacacacu

SEQ ID NO: 2901086 - RNA, 18 nt, Human
ccacacugugacacacua

SEQ ID NO: 2901087 - RNA, 19 nt, Human
ccacacugugacacacuac

SEQ ID NO: 2901088 - RNA, 21 nt, Human
ccacacugugacacacuacac

SEQ ID NO: 2901089 - RNA, 21 nt, Human
ccacacuggacuccggcccuc

SEQ ID NO: 2901090 - RNA, 14 nt, Human
ccacacuggacucc

SEQ ID NO: 2901091 - RNA, 22 nt, Human
ccacacuggacuccggcccucc

SEQ ID NO: 2901092 - RNA, 16 nt, Human
ccaccaggugccuuuc

SEQ ID NO: 2901093 - RNA, 19 nt, Human
ccaccaggugccuuucaaa

SEQ ID NO: 2901094 - RNA, 20 nt, Human
ccaccaggugccuuucaaau

SEQ ID NO: 2901095 - RNA, 20 nt, Human
ccaccacuaggacucugagg

SEQ ID NO: 2901096 - RNA, 13 nt, Human
ccaccacuauaaa

SEQ ID NO: 2901097 - RNA, 14 nt, Human
ccaccacuauaaaa

SEQ ID NO: 2901098 - RNA, 17 nt, Human
ccaccacuaggacucug

SEQ ID NO: 2901099 - RNA, 18 nt, Human
ccaccaccgcccgucugu

SEQ ID NO: 2901100 - RNA, 12 nt, Human
ccaccaccuccc

SEQ ID NO: 2901101 - RNA, 17 nt, Human
ccaccaccucccucacc

SEQ ID NO: 2901102 - RNA, 14 nt, Human
ccaccaccucugug

SEQ ID NO: 2901103 - RNA, 15 nt, Human
ccaccaccucugugg

SEQ ID NO: 2901104 - RNA, 15 nt, Human
ccaccacgcccggcu

SEQ ID NO: 2901105 - RNA, 18 nt, Human
ccacagccgcagccuccc

SEQ ID NO: 2901106 - RNA, 15 nt, Human
ccacagccgcagccu

SEQ ID NO: 2901107 - RNA, 12 nt, Human
ccacagccgcag

SEQ ID NO: 2901108 - RNA, 23 nt, Human
ccacagacaauacguuugauaau

SEQ ID NO: 2901109 - RNA, 11 nt, Human
ccacagacaca

SEQ ID NO: 2901110 - RNA, 12 nt, Human
ccacagacacac

SEQ ID NO: 2901111 - RNA, 22 nt, Human
ccacagagaaaguacuucucca

SEQ ID NO: 2901112 - RNA, 21 nt, Human
ccacagacacacacacgcacg

SEQ ID NO: 2901113 - RNA, 13 nt, Human
ccacagacacaca

SEQ ID NO: 2901114 - RNA, 14 nt, Human
ccacagacacacac

SEQ ID NO: 2901115 - RNA, 15 nt, Human
ccacagacacacaca

SEQ ID NO: 2901116 - RNA, 20 nt, Human
ccacagacacacacacgcac

SEQ ID NO: 2901117 - RNA, 14 nt, Human
ccacagagcgggga

SEQ ID NO: 2901118 - RNA, 21 nt, Human
ccacagagagggagagcagag

SEQ ID NO: 2901119 - RNA, 16 nt, Human
ccacagacugguuuug

SEQ ID NO: 2901120 - RNA, 16 nt, Human
ccacagaguaagacau

SEQ ID NO: 2901121 - RNA, 17 nt, Human
ccacagaguaagacauu

SEQ ID NO: 2901122 - RNA, 18 nt, Human
ccacagaguaagacauug

SEQ ID NO: 2901123 - RNA, 16 nt, Human
ccacagaguguagcca

SEQ ID NO: 2901124 - RNA, 22 nt, Human
ccacagaguguagccagguccc

SEQ ID NO: 2901125 - RNA, 23 nt, Human
ccacagaguguagccaggucccc

SEQ ID NO: 2901126 - RNA, 18 nt, Human
ccaccaucaugucuggcu

SEQ ID NO: 2901127 - RNA, 19 nt, Human
ccaccaucaugucuggcua

SEQ ID NO: 2901128 - RNA, 13 nt, Human
ccaccgcugcucc

SEQ ID NO: 2901129 - RNA, 19 nt, Human
ccaccgcugcuccacgcgc

SEQ ID NO: 2901130 - RNA, 19 nt, Human
ccaccgggcugggagcucu

SEQ ID NO: 2901131 - RNA, 16 nt, Human
ccaccuuggcugcagg

SEQ ID NO: 2901132 - RNA, 15 nt, Human
ccaccuuggcugcag

SEQ ID NO: 2901133 - RNA, 14 nt, Human
ccaccuuggcugca

SEQ ID NO: 2901134 - RNA, 12 nt, Human
ccaccuuggcug

SEQ ID NO: 2901135 - RNA, 21 nt, Human
ccaccuagacuguaaaccucu

SEQ ID NO: 2901136 - RNA, 19 nt, Human
ccaccuagaacacuaacuc

SEQ ID NO: 2901137 - RNA, 19 nt, Human
ccaccuuggcugcagggag

SEQ ID NO: 2901138 - RNA, 18 nt, Human
ccaccuuggcugcaggga

SEQ ID NO: 2901139 - RNA, 16 nt, Human
ccacgauuuucuccag

SEQ ID NO: 2901140 - RNA, 17 nt, Human
ccacgauuuucuccagc

SEQ ID NO: 2901141 - RNA, 19 nt, Human
ccacgauuuucuccagcuc

SEQ ID NO: 2901142 - RNA, 20 nt, Human
ccacgauuuucuccagcuca

SEQ ID NO: 2901143 - RNA, 21 nt, Human
ccacgauuuucuccagcucag

SEQ ID NO: 2901144 - RNA, 22 nt, Human
ccacgauuuucuccagcucaga

SEQ ID NO: 2901145 - RNA, 16 nt, Human
ccacgagggucaggac

SEQ ID NO: 2901146 - RNA, 15 nt, Human
ccacgauccugccac

SEQ ID NO: 2901147 - RNA, 16 nt, Human
ccacgauccugccacc

SEQ ID NO: 2901148 - RNA, 19 nt, Human
ccacgauccugccacccug

SEQ ID NO: 2901149 - RNA, 23 nt, Human
ccacgauccugccacccuguagc

SEQ ID NO: 2901150 - RNA, 20 nt, Human
ccacgcccuccccuccccug

SEQ ID NO: 2901151 - RNA, 18 nt, Human
ccacgcuggaccuugaac

SEQ ID NO: 2901152 - RNA, 14 nt, Human
ccacgcuagggcgg

SEQ ID NO: 2901153 - RNA, 22 nt, Human
ccacgcuagggcggggcacaga

SEQ ID NO: 2901154 - RNA, 21 nt, Human
ccacgcccuccccuccccugc

SEQ ID NO: 2901155 - RNA, 22 nt, Human
ccacgcccuccccuccccugcu

SEQ ID NO: 2901156 - RNA, 17 nt, Human
ccacgccuguaauccca

SEQ ID NO: 2901157 - RNA, 18 nt, Human
ccacgcgggggccuugag

SEQ ID NO: 2901158 - RNA, 17 nt, Human
cauuuggaauacuuuuu

SEQ ID NO: 2901159 - RNA, 17 nt, Human
cauuuggaauuuuugcu

SEQ ID NO: 2901160 - RNA, 23 nt, Human
cauuuggaauuuuugcuugacuu

SEQ ID NO: 2901161 - RNA, 21 nt, Human
cauuuggagacacaacuauuu

SEQ ID NO: 2901162 - RNA, 15 nt, Human
cauuuggaauacuuu

SEQ ID NO: 2901163 - RNA, 22 nt, Human
cauuuggaggaaaaaaagcaug

SEQ ID NO: 2901164 - RNA, 18 nt, Human
cauuuguauuuuguguga

SEQ ID NO: 2901165 - RNA, 17 nt, Human
cauuugucacacacuuu

SEQ ID NO: 2901166 - RNA, 16 nt, Human
cauuugucucuacuuu

SEQ ID NO: 2901167 - RNA, 18 nt, Human
cauuugucucuacuuuuc

SEQ ID NO: 2901168 - RNA, 14 nt, Human
cauuugugaaauga

SEQ ID NO: 2901169 - RNA, 15 nt, Human
cauuuauucugcuca

SEQ ID NO: 2901170 - RNA, 14 nt, Human
cauuuauucugcuc

SEQ ID NO: 2901171 - RNA, 23 nt, Human
cauuuaugauuuaauaaaauaau

SEQ ID NO: 2901172 - RNA, 14 nt, Human
cauuuaugcacauu

SEQ ID NO: 2901173 - RNA, 17 nt, Human
cauuuaugauuuaauaa

SEQ ID NO: 2901174 - RNA, 18 nt, Human
cauuuaugauuuaauaaa

SEQ ID NO: 2901175 - RNA, 20 nt, Human
cauuuaugauuuaauaaaau

SEQ ID NO: 2901176 - RNA, 21 nt, Human
cauuuaugauuuaauaaaaua

SEQ ID NO: 2901177 - RNA, 16 nt, Human
cauuuaugauuuaaua

SEQ ID NO: 2901178 - RNA, 13 nt, Human
cauuuauauguac

SEQ ID NO: 2901179 - RNA, 14 nt, Human
cauuucaugcucug

SEQ ID NO: 2901180 - RNA, 22 nt, Human
cauuucaugcucugcaaaagga

SEQ ID NO: 2901181 - RNA, 15 nt, Human
cauuucauguauagu

SEQ ID NO: 2901182 - RNA, 16 nt, Human
cauuucauguauaguu

SEQ ID NO: 2901183 - RNA, 12 nt, Human
cauuucauucca

SEQ ID NO: 2901184 - RNA, 13 nt, Human
cauuucauuccau

SEQ ID NO: 2901185 - RNA, 15 nt, Human
cauuucauuccauug

SEQ ID NO: 2901186 - RNA, 18 nt, Human
cauuucauuccauugccu

SEQ ID NO: 2901187 - RNA, 19 nt, Human
cauuucauuccauugccua

SEQ ID NO: 2901188 - RNA, 21 nt, Human
cauuucauuccauugccuagc

SEQ ID NO: 2901189 - RNA, 16 nt, Human
cauuucaggagcagcc

SEQ ID NO: 2901190 - RNA, 22 nt, Human
cauuucaggagcagccucagaa

SEQ ID NO: 2901191 - RNA, 15 nt, Human
cauuucauaaacuaa

SEQ ID NO: 2901192 - RNA, 19 nt, Human
cauuucauauucuuucaau

SEQ ID NO: 2901193 - RNA, 20 nt, Human
cauuucauauucuuucaauu

SEQ ID NO: 2901194 - RNA, 16 nt, Human
cauuucaucauuguuu

SEQ ID NO: 2901195 - RNA, 17 nt, Human
cauuucaucauuguuuc

SEQ ID NO: 2901196 - RNA, 18 nt, Human
cauuucaucauuguuucu

SEQ ID NO: 2901197 - RNA, 19 nt, Human
cauuucaucauuguuucug

SEQ ID NO: 2901198 - RNA, 21 nt, Human
cauuucaucauuguuucugca

SEQ ID NO: 2901199 - RNA, 15 nt, Human
cauuucaggagcagc

SEQ ID NO: 2901200 - RNA, 18 nt, Human
cauuuaugugucaguuca

SEQ ID NO: 2901201 - RNA, 21 nt, Human
cauuuaugugucaguucauuu

SEQ ID NO: 2901202 - RNA, 19 nt, Human
cauuguaaauaguauuuga

SEQ ID NO: 2901203 - RNA, 15 nt, Human
cauuguaaacaaacu

SEQ ID NO: 2901204 - RNA, 18 nt, Human
cauuguaaacaaacucuu

SEQ ID NO: 2901205 - RNA, 23 nt, Human
cauuguaaacaaacucuugaaga

SEQ ID NO: 2901206 - RNA, 16 nt, Human
cauuuauaagaagaga

SEQ ID NO: 2901207 - RNA, 15 nt, Human
cauuuauaauugcau

SEQ ID NO: 2901208 - RNA, 17 nt, Human
cauuuauaauugcaucu

SEQ ID NO: 2901209 - RNA, 12 nt, Human
cauuuauauaug

SEQ ID NO: 2901210 - RNA, 14 nt, Human
cauuuauauaugaa

SEQ ID NO: 2901211 - RNA, 15 nt, Human
cauuuauauaugaaa

SEQ ID NO: 2901212 - RNA, 16 nt, Human
cauuuauauaugaaaa

SEQ ID NO: 2901213 - RNA, 20 nt, Human
cauuuauauaugaaaacuau

SEQ ID NO: 2901214 - RNA, 13 nt, Human
cauuguaaacaaa

SEQ ID NO: 2901215 - RNA, 23 nt, Human
cauugcuuugaagcaguuguguc

SEQ ID NO: 2901216 - RNA, 15 nt, Human
cauugcuuuuauuuu

SEQ ID NO: 2901217 - RNA, 17 nt, Human
cauugcuuuuauuuuga

SEQ ID NO: 2901218 - RNA, 18 nt, Human
cauugcuuuuauuuugaa

SEQ ID NO: 2901219 - RNA, 19 nt, Human
cauugcuuuuauuuugaaa

SEQ ID NO: 2901220 - RNA, 20 nt, Human
cauugcuuuuauuuugaaaa

SEQ ID NO: 2901221 - RNA, 21 nt, Human
cauugcuuuuauuuugaaaag

SEQ ID NO: 2901222 - RNA, 16 nt, Human
cauugcuuugaagcag

SEQ ID NO: 2901223 - RNA, 18 nt, Human
cauugcuuugaagcaguu

SEQ ID NO: 2901224 - RNA, 22 nt, Human
cauugcuuugaagcaguugugu

SEQ ID NO: 2901225 - RNA, 18 nt, Human
cauugcuuucguguaaau

SEQ ID NO: 2901226 - RNA, 19 nt, Human
cauugcuuucguguaaauu

SEQ ID NO: 2901227 - RNA, 22 nt, Human
cauugcuugugccacacccucc

SEQ ID NO: 2901228 - RNA, 17 nt, Human
cauuuuuuaaggaaaca

SEQ ID NO: 2901229 - RNA, 18 nt, Human
ccaaucccagcuaccuca

SEQ ID NO: 2901230 - RNA, 20 nt, Human
ccaaggcauaucaugcuuug

SEQ ID NO: 2901231 - RNA, 20 nt, Human
ccaauccagguacgcacaga

SEQ ID NO: 2901232 - RNA, 21 nt, Human
ccaauccagguacgcacagac

SEQ ID NO: 2901233 - RNA, 22 nt, Human
ccaauccagguacgcacagaca

SEQ ID NO: 2901234 - RNA, 23 nt, Human
ccaauccagguacgcacagacag

SEQ ID NO: 2901235 - RNA, 13 nt, Human
ccaagaaagcagg

SEQ ID NO: 2901236 - RNA, 14 nt, Human
ccaagaaacgucuu

SEQ ID NO: 2901237 - RNA, 22 nt, Human
ccaagaaagaugaauacauuuu

SEQ ID NO: 2901238 - RNA, 15 nt, Human
ccaagaaagauguau

SEQ ID NO: 2901239 - RNA, 22 nt, Human
ccaagaaagauguauauaggug

SEQ ID NO: 2901240 - RNA, 20 nt, Human
ccaacggcccugcagccagc

SEQ ID NO: 2901241 - RNA, 21 nt, Human
ccaacggcccugcagccagcu

SEQ ID NO: 2901242 - RNA, 13 nt, Human
ccaacgcacagga

SEQ ID NO: 2901243 - RNA, 15 nt, Human
ccaacgcacaggaaa

SEQ ID NO: 2901244 - RNA, 22 nt, Human
ccaacgcgaaaccaauuccuca

SEQ ID NO: 2901245 - RNA, 18 nt, Human
ccaaggaugccccguccc

SEQ ID NO: 2901246 - RNA, 19 nt, Human
ccaagcuggucccacucag

SEQ ID NO: 2901247 - RNA, 12 nt, Human
ccaagcuggucc

SEQ ID NO: 2901248 - RNA, 15 nt, Human
ccaaauaacuucagu

SEQ ID NO: 2901249 - RNA, 16 nt, Human
ccaaauaacuucaguc

SEQ ID NO: 2901250 - RNA, 18 nt, Human
ccaaauaacuucaguccu

SEQ ID NO: 2901251 - RNA, 13 nt, Human
ccaaauaauaaag

SEQ ID NO: 2901252 - RNA, 23 nt, Human
ccaaaguucuaauaauuucuaau

SEQ ID NO: 2901253 - RNA, 12 nt, Human
ccaaaguucuaa

SEQ ID NO: 2901254 - RNA, 14 nt, Human
ccaaaguucuaaua

SEQ ID NO: 2901255 - RNA, 19 nt, Human
ccaaaguucuaauaauuuc

SEQ ID NO: 2901256 - RNA, 20 nt, Human
ccaaaguucuaauaauuucu

SEQ ID NO: 2901257 - RNA, 11 nt, Human
ccaaaguucua

SEQ ID NO: 2901258 - RNA, 18 nt, Human
ccaaauauagcguuccca

SEQ ID NO: 2901259 - RNA, 12 nt, Human
ccaaaugcagcu

SEQ ID NO: 2901260 - RNA, 18 nt, Human
ccaaaugcagcuuuaaaa

SEQ ID NO: 2901261 - RNA, 15 nt, Human
ccaaaugcagcuuua

SEQ ID NO: 2901262 - RNA, 13 nt, Human
ccaaaugcagcuu

SEQ ID NO: 2901263 - RNA, 13 nt, Human
auuuaauaacauu

SEQ ID NO: 2901264 - RNA, 12 nt, Human
auuuaauaacau

SEQ ID NO: 2901265 - RNA, 14 nt, Human
auuuaauaacauua

SEQ ID NO: 2901266 - RNA, 16 nt, Human
auuuaauaacaauugu

SEQ ID NO: 2901267 - RNA, 11 nt, Human
auuuaauaaag

SEQ ID NO: 2901268 - RNA, 15 nt, Human
auuuaauaacauuac

SEQ ID NO: 2901269 - RNA, 17 nt, Human
auuuaauaacauuaccu

SEQ ID NO: 2901270 - RNA, 18 nt, Human
auuuaauaacauuaccuu

SEQ ID NO: 2901271 - RNA, 19 nt, Human
auuuaauaacauuaccuua

SEQ ID NO: 2901272 - RNA, 23 nt, Human
auuuauaacucaucauaaaauaa

SEQ ID NO: 2901273 - RNA, 22 nt, Human
auuuauaacucaucauaaaaua

SEQ ID NO: 2901274 - RNA, 19 nt, Human
auuuauauauuuauaacuc

SEQ ID NO: 2901275 - RNA, 16 nt, Human
auuuauaagguuuuaa

SEQ ID NO: 2901276 - RNA, 21 nt, Human
auuuauaacucaucauaaaau

SEQ ID NO: 2901277 - RNA, 20 nt, Human
auuuauaacucaucauaaaa

SEQ ID NO: 2901278 - RNA, 19 nt, Human
auuuauaacucaucauaaa

SEQ ID NO: 2901279 - RNA, 18 nt, Human
auuuauaacucaucauaa

SEQ ID NO: 2901280 - RNA, 17 nt, Human
auuuauaacucaucaua

SEQ ID NO: 2901281 - RNA, 16 nt, Human
auuuauaacucaucau

SEQ ID NO: 2901282 - RNA, 15 nt, Human
auuuauaacucauca

SEQ ID NO: 2901283 - RNA, 14 nt, Human
auuuauaacucauc

SEQ ID NO: 2901284 - RNA, 23 nt, Human
auuuaauaacauuaccuuacugu

SEQ ID NO: 2901285 - RNA, 16 nt, Human
auuuaucugugcaaau

SEQ ID NO: 2901286 - RNA, 16 nt, Human
auuuaucucuauuuaa

SEQ ID NO: 2901287 - RNA, 19 nt, Human
auuuaucucuauuuaauau

SEQ ID NO: 2901288 - RNA, 22 nt, Human
auuuaucucuauuuaauauuua

SEQ ID NO: 2901289 - RNA, 22 nt, Human
auuuaucuuuacuuuuaaacag

SEQ ID NO: 2901290 - RNA, 16 nt, Human
auuuaucuuucaaaga

SEQ ID NO: 2901291 - RNA, 20 nt, Human
auuuaugaguaacuauuauu

SEQ ID NO: 2901292 - RNA, 13 nt, Human
auuuaugaaguuu

SEQ ID NO: 2901293 - RNA, 22 nt, Human
auuuaugaaguuuaaaacagua

SEQ ID NO: 2901294 - RNA, 17 nt, Human
auuuauauguacuguuu

SEQ ID NO: 2901295 - RNA, 16 nt, Human
auuuauauguacuguu

SEQ ID NO: 2901296 - RNA, 15 nt, Human
auuuauauguacugu

SEQ ID NO: 2901297 - RNA, 13 nt, Human
auuuauauguacu

SEQ ID NO: 2901298 - RNA, 19 nt, Human
auuuauauggggaauauau

SEQ ID NO: 2901299 - RNA, 11 nt, Human
auuuauaugaa

SEQ ID NO: 2901300 - RNA, 20 nt, Human
auuuauauauuuauaacuca

SEQ ID NO: 2901301 - RNA, 20 nt, Human
auuuauauggggaauauauu

SEQ ID NO: 2901302 - RNA, 15 nt, Human
auuuauauguacaug

SEQ ID NO: 2901303 - RNA, 17 nt, Human
auuuauauguacaugag

SEQ ID NO: 2901304 - RNA, 16 nt, Human
auuuauauguacauga

SEQ ID NO: 2901305 - RNA, 16 nt, Human
auuuaugauuuaauaa

SEQ ID NO: 2901306 - RNA, 17 nt, Human
auuuaugauuuaauaaa

SEQ ID NO: 2901307 - RNA, 19 nt, Human
auuuaugauuuaauaaaau

SEQ ID NO: 2901308 - RNA, 13 nt, Human
auuuaugcacauu

SEQ ID NO: 2901309 - RNA, 17 nt, Human
auuuaugcacauucacg

SEQ ID NO: 2901310 - RNA, 19 nt, Human
auuuaugcacuuauaaggu

SEQ ID NO: 2901311 - RNA, 19 nt, Human
auuuaugaguuuuugauag

SEQ ID NO: 2901312 - RNA, 13 nt, Human
auuuaugauuuaa

SEQ ID NO: 2901313 - RNA, 15 nt, Human
auuuaugauuuaaua

SEQ ID NO: 2901314 - RNA, 18 nt, Human
auuuaugaguuuuugaua

SEQ ID NO: 2901315 - RNA, 15 nt, Human
auuuaugaguuuuug

SEQ ID NO: 2901316 - RNA, 12 nt, Human
auuucacuugau

SEQ ID NO: 2901317 - RNA, 19 nt, Human
auuucacuugaugauacaa

SEQ ID NO: 2901318 - RNA, 21 nt, Human
auuuaugccuugaugauuuaa

SEQ ID NO: 2901319 - RNA, 22 nt, Human
auuuaugccuugaugauuuaau

SEQ ID NO: 2901320 - RNA, 19 nt, Human
auuuaugcauggaaaccug

SEQ ID NO: 2901321 - RNA, 16 nt, Human
auuucauaugcuguau

SEQ ID NO: 2901322 - RNA, 15 nt, Human
auuucauauucuuuc

SEQ ID NO: 2901323 - RNA, 18 nt, Human
auuucauauucuuucaau

SEQ ID NO: 2901324 - RNA, 14 nt, Human
auuucauaucuaca

SEQ ID NO: 2901325 - RNA, 18 nt, Human
auuucauaucuacagaua

SEQ ID NO: 2901326 - RNA, 20 nt, Human
auuucauaucuacagauaga

SEQ ID NO: 2901327 - RNA, 22 nt, Human
auuucauaucuacagauagaga

SEQ ID NO: 2901328 - RNA, 22 nt, Human
auuucaguuccgucagaaagug

SEQ ID NO: 2901329 - RNA, 21 nt, Human
auuucauaccucagaauguaa

SEQ ID NO: 2901330 - RNA, 20 nt, Human
auuucaguguaguuaauuua

SEQ ID NO: 2901331 - RNA, 21 nt, Human
auuucaguguaguuaauuuau

SEQ ID NO: 2901332 - RNA, 10 nt, Human
auuucaguuu

SEQ ID NO: 2901333 - RNA, 19 nt, Human
auuucuaucuuguuccaag

SEQ ID NO: 2901334 - RNA, 23 nt, Human
auuucuauucaagguggccaaau

SEQ ID NO: 2901335 - RNA, 16 nt, Human
auuucugggucuuuug

SEQ ID NO: 2901336 - RNA, 18 nt, Human
auuucugggucuuuugcu

SEQ ID NO: 2901337 - RNA, 20 nt, Human
auuucugggucuuuugcuac

SEQ ID NO: 2901338 - RNA, 16 nt, Human
auuucugguucugaug

SEQ ID NO: 2901339 - RNA, 17 nt, Human
auuucugguucugaugc

SEQ ID NO: 2901340 - RNA, 16 nt, Human
auuucugcuuucuuug

SEQ ID NO: 2901341 - RNA, 17 nt, Human
auuucugcuuucuuuga

SEQ ID NO: 2901342 - RNA, 16 nt, Human
auuucuguaaauacca

SEQ ID NO: 2901343 - RNA, 17 nt, Human
auuucuguaaauaccau

SEQ ID NO: 2901344 - RNA, 23 nt, Human
auuucuguaaauaccauugacac

SEQ ID NO: 2901345 - RNA, 13 nt, Human
auuucugucagaa

SEQ ID NO: 2901346 - RNA, 15 nt, Human
auuucugucagaaug

SEQ ID NO: 2901347 - RNA, 21 nt, Human
auuucugucauucaaaugggu

SEQ ID NO: 2901348 - RNA, 13 nt, Human
auuucugcauaug

SEQ ID NO: 2901349 - RNA, 23 nt, Human
auuucugcauauguugaauacuu

SEQ ID NO: 2901350 - RNA, 22 nt, Human
auuucugcauauguugaauacu

SEQ ID NO: 2901351 - RNA, 18 nt, Human
auuucugcauauguugaa

SEQ ID NO: 2901352 - RNA, 22 nt, Human
auuguuguuugccauacuuugu

SEQ ID NO: 2901353 - RNA, 12 nt, Human
auuguaauuuug

SEQ ID NO: 2901354 - RNA, 17 nt, Human
auuguuguuuuuuuaau

SEQ ID NO: 2901355 - RNA, 14 nt, Human
auuguguugugaau

SEQ ID NO: 2901356 - RNA, 14 nt, Human
auuguguuccuuuu

SEQ ID NO: 2901357 - RNA, 13 nt, Human
auuguguugacau

SEQ ID NO: 2901358 - RNA, 17 nt, Human
auuguguugacauuaag

SEQ ID NO: 2901359 - RNA, 20 nt, Human
auuguguugacauuaagaau

SEQ ID NO: 2901360 - RNA, 17 nt, Human
auuguguugugaauguu

SEQ ID NO: 2901361 - RNA, 17 nt, Human
auuguguuauuuuacua

SEQ ID NO: 2901362 - RNA, 15 nt, Human
auuguuaaaauaacu

SEQ ID NO: 2901363 - RNA, 13 nt, Human
auuguuaaaauaa

SEQ ID NO: 2901364 - RNA, 13 nt, Human
auuguguuugugu

SEQ ID NO: 2901365 - RNA, 12 nt, Human
auuguuguuucu

SEQ ID NO: 2901366 - RNA, 14 nt, Human
auuguuguuucuuu

SEQ ID NO: 2901367 - RNA, 16 nt, Human
auuguuguuucuuucu

SEQ ID NO: 2901368 - RNA, 19 nt, Human
auuguuguuucuuucuagu

SEQ ID NO: 2901369 - RNA, 20 nt, Human
auuguuguuucuuucuagug

SEQ ID NO: 2901370 - RNA, 19 nt, Human
auuguuguuugccauacuu

SEQ ID NO: 2901371 - RNA, 17 nt, Human
auuguuaaucucuguua

SEQ ID NO: 2901372 - RNA, 18 nt, Human
auuguuaaucucuguuau

SEQ ID NO: 2901373 - RNA, 17 nt, Human
auuguuaacucuugucu

SEQ ID NO: 2901374 - RNA, 17 nt, Human
auuguuacacauuaagu

SEQ ID NO: 2901375 - RNA, 14 nt, Human
auuguuaauuucag

SEQ ID NO: 2901376 - RNA, 15 nt, Human
auuguuaauuucagu

SEQ ID NO: 2901377 - RNA, 16 nt, Human
auuguuaauuucaguc

SEQ ID NO: 2901378 - RNA, 18 nt, Human
auuguuaauuucaguccu

SEQ ID NO: 2901379 - RNA, 20 nt, Human
auugcuguuaugucuguuua

SEQ ID NO: 2901380 - RNA, 23 nt, Human
auugcuguuaugucuguuuaaga

SEQ ID NO: 2901381 - RNA, 15 nt, Human
auugcuguugaaagc

SEQ ID NO: 2901382 - RNA, 17 nt, Human
auugcuguugaaagcaa

SEQ ID NO: 2901383 - RNA, 18 nt, Human
auugcuguugaaagcaaa

SEQ ID NO: 2901384 - RNA, 19 nt, Human
auugcuguugaaagcaaaa

SEQ ID NO: 2901385 - RNA, 21 nt, Human
auugcuguugaaagcaaaaau

SEQ ID NO: 2901386 - RNA, 22 nt, Human
auugcuguugaaagcaaaaaug

SEQ ID NO: 2901387 - RNA, 23 nt, Human
auugcuguugaaagcaaaaaugc

SEQ ID NO: 2901388 - RNA, 12 nt, Human
auugcuguugcu

SEQ ID NO: 2901389 - RNA, 15 nt, Human
auugcuguugcuuga

SEQ ID NO: 2901390 - RNA, 17 nt, Human
auugcuguugcuugaau

SEQ ID NO: 2901391 - RNA, 18 nt, Human
auugcugugcuuuaugga

SEQ ID NO: 2901392 - RNA, 22 nt, Human
auugcuguccuugaaugccaua

SEQ ID NO: 2901393 - RNA, 15 nt, Human
auugcugucugcagc

SEQ ID NO: 2901394 - RNA, 17 nt, Human
auugcugucugcagccu

SEQ ID NO: 2901395 - RNA, 17 nt, Human
auugcuuaaaauagcaa

SEQ ID NO: 2901396 - RNA, 16 nt, Human
auugcuuaaaauagca

SEQ ID NO: 2901397 - RNA, 13 nt, Human
auugcuuaguaaa

SEQ ID NO: 2901398 - RNA, 15 nt, Human
auugcuuaguaaaau

SEQ ID NO: 2901399 - RNA, 16 nt, Human
auugcuuaguaaaauu

SEQ ID NO: 2901400 - RNA, 22 nt, Human
auugcuuaguaaaauuuauuuc

SEQ ID NO: 2901401 - RNA, 23 nt, Human
auugcuuaguaaaauuuauuuca

SEQ ID NO: 2901402 - RNA, 18 nt, Human
auugcuuucguguaaauu

SEQ ID NO: 2901403 - RNA, 21 nt, Human
auugcuuugaagcaguugugu

SEQ ID NO: 2901404 - RNA, 16 nt, Human
auugcuuugaaaaagu

SEQ ID NO: 2901405 - RNA, 17 nt, Human
auugcuuugaaaaaguu

SEQ ID NO: 2901406 - RNA, 23 nt, Human
auugcuuugaagcaguuguguca

SEQ ID NO: 2901407 - RNA, 15 nt, Human
auuguaaauuuuaga

SEQ ID NO: 2901408 - RNA, 19 nt, Human
auuaguacugcucuuguuu

SEQ ID NO: 2901409 - RNA, 16 nt, Human
auuaguaaaugcuuau

SEQ ID NO: 2901410 - RNA, 13 nt, Human
auuaguaaauguc

SEQ ID NO: 2901411 - RNA, 14 nt, Human
auuaguaaaugucu

SEQ ID NO: 2901412 - RNA, 15 nt, Human
auuaguaaaugucuu

SEQ ID NO: 2901413 - RNA, 16 nt, Human
auuaguaaaugucuuu

SEQ ID NO: 2901414 - RNA, 17 nt, Human
auuaguaaaugucuuug

SEQ ID NO: 2901415 - RNA, 20 nt, Human
auuaguaaaugucuuuguaa

SEQ ID NO: 2901416 - RNA, 21 nt, Human
auuaguaaaugucuuuguaag

SEQ ID NO: 2901417 - RNA, 23 nt, Human
auuaguaaaugucuuuguaaguc

SEQ ID NO: 2901418 - RNA, 23 nt, Human
auuaguaacauaauaaauuaaaa

SEQ ID NO: 2901419 - RNA, 20 nt, Human
auuaggcaaggcuaugugau

SEQ ID NO: 2901420 - RNA, 14 nt, Human
auuaggauuuugau

SEQ ID NO: 2901421 - RNA, 21 nt, Human
auuaggcaaggcuaugugauu

SEQ ID NO: 2901422 - RNA, 17 nt, Human
auuaggaggcucaacaa

SEQ ID NO: 2901423 - RNA, 21 nt, Human
auuaggaggcucaacaauaaa

SEQ ID NO: 2901424 - RNA, 22 nt, Human
auuaggaggcucaacaauaaaa

SEQ ID NO: 2901425 - RNA, 14 nt, Human
auuaggauuucaug

SEQ ID NO: 2901426 - RNA, 16 nt, Human
auuaggauuucaugau

SEQ ID NO: 2901427 - RNA, 14 nt, Human
auuaaaugucuuau

SEQ ID NO: 2901428 - RNA, 11 nt, Human
auuaaauguuu

SEQ ID NO: 2901429 - RNA, 13 nt, Human
auuaaauguuuga

SEQ ID NO: 2901430 - RNA, 13 nt, Human
auuaaauuaagac

SEQ ID NO: 2901431 - RNA, 22 nt, Human
auucaacacucccuucccauga

SEQ ID NO: 2901432 - RNA, 17 nt, Human
auucaaccauggacuuu

SEQ ID NO: 2901433 - RNA, 14 nt, Human
auucaaccauggac

SEQ ID NO: 2901434 - RNA, 22 nt, Human
auuauguaaaauguuuuagcaa

SEQ ID NO: 2901435 - RNA, 23 nt, Human
auuauggguuaggcauuaauguu

SEQ ID NO: 2901436 - RNA, 18 nt, Human
auuaugcggaaagguauu

SEQ ID NO: 2901437 - RNA, 20 nt, Human
auuaugcggaaagguauuug

SEQ ID NO: 2901438 - RNA, 18 nt, Human
auucaaccauggacuuua

SEQ ID NO: 2901439 - RNA, 13 nt, Human
auucaauauugac

SEQ ID NO: 2901440 - RNA, 15 nt, Human
auucaauauugacau

SEQ ID NO: 2901441 - RNA, 16 nt, Human
auucaauauugacauu

SEQ ID NO: 2901442 - RNA, 17 nt, Human
auucaauauugacauuu

SEQ ID NO: 2901443 - RNA, 19 nt, Human
auucaauauugacauuugu

SEQ ID NO: 2901444 - RNA, 20 nt, Human
auucaauauugacauuugua

SEQ ID NO: 2901445 - RNA, 21 nt, Human
auucaauauugacauuuguag

SEQ ID NO: 2901446 - RNA, 15 nt, Human
auucaauacaaacaa

SEQ ID NO: 2901447 - RNA, 21 nt, Human
auucaauacaaacaaucucuu

SEQ ID NO: 2901448 - RNA, 22 nt, Human
auucaauacaaacaaucucuua

SEQ ID NO: 2901449 - RNA, 14 nt, Human
auuccuucuuugau

SEQ ID NO: 2901450 - RNA, 15 nt, Human
auuccuucuuugaua

SEQ ID NO: 2901451 - RNA, 16 nt, Human
auuccuucuuugauaa

SEQ ID NO: 2901452 - RNA, 17 nt, Human
auuccuucuuugauaau

SEQ ID NO: 2901453 - RNA, 20 nt, Human
auuccuucuuugauaauguu

SEQ ID NO: 2901454 - RNA, 21 nt, Human
auuccuucuuugauaauguua

SEQ ID NO: 2901455 - RNA, 11 nt, Human
auuccuucucu

SEQ ID NO: 2901456 - RNA, 14 nt, Human
auuccuucucugaa

SEQ ID NO: 2901457 - RNA, 15 nt, Human
auuccuucucugaac

SEQ ID NO: 2901458 - RNA, 16 nt, Human
auuccuucucugaaca

SEQ ID NO: 2901459 - RNA, 22 nt, Human
auuccuucucugaacacaggca

SEQ ID NO: 2901460 - RNA, 14 nt, Human
auuccuucuggccu

SEQ ID NO: 2901461 - RNA, 16 nt, Human
auuccuucuggccuuu

SEQ ID NO: 2901462 - RNA, 22 nt, Human
auuccuucuggccuuuccucuc

SEQ ID NO: 2901463 - RNA, 13 nt, Human
auuccuguauguu

SEQ ID NO: 2901464 - RNA, 16 nt, Human
auuccuguauguuguc

SEQ ID NO: 2901465 - RNA, 17 nt, Human
auuccuguauguugucc

SEQ ID NO: 2901466 - RNA, 18 nt, Human
auuccuguauguugucca

SEQ ID NO: 2901467 - RNA, 10 nt, Human
auuccugggc

SEQ ID NO: 2901468 - RNA, 19 nt, Human
auuccucauccucagaugc

SEQ ID NO: 2901469 - RNA, 21 nt, Human
auuccucauccucagaugcuc

SEQ ID NO: 2901470 - RNA, 17 nt, Human
auuccucaacguauugu

SEQ ID NO: 2901471 - RNA, 18 nt, Human
auuccugcauuugugaaa

SEQ ID NO: 2901472 - RNA, 15 nt, Human
auuccugcauuugug

SEQ ID NO: 2901473 - RNA, 22 nt, Human
auucuucuguacgucugacagg

SEQ ID NO: 2901474 - RNA, 20 nt, Human
auucuucugcuucagccucc

SEQ ID NO: 2901475 - RNA, 19 nt, Human
auucuucugcuucagccuc

SEQ ID NO: 2901476 - RNA, 17 nt, Human
auucucugugucuaaga

SEQ ID NO: 2901477 - RNA, 18 nt, Human
auucucugugucuaagau

SEQ ID NO: 2901478 - RNA, 20 nt, Human
auucucugugucuaagauuc

SEQ ID NO: 2901479 - RNA, 22 nt, Human
auuccuuccacuaacucauagu

SEQ ID NO: 2901480 - RNA, 18 nt, Human
auucuccuuguuguuggu

SEQ ID NO: 2901481 - RNA, 16 nt, Human
auucuccuuuuaugug

SEQ ID NO: 2901482 - RNA, 17 nt, Human
auucuccuuuuaugugu

SEQ ID NO: 2901483 - RNA, 18 nt, Human
auucuccuuuuaugugua

SEQ ID NO: 2901484 - RNA, 19 nt, Human
auucuccuuuuauguguag

SEQ ID NO: 2901485 - RNA, 19 nt, Human
auucucgugagucauuuaa

SEQ ID NO: 2901486 - RNA, 17 nt, Human
auucucuaauaagaaaa

SEQ ID NO: 2901487 - RNA, 17 nt, Human
auucucuggcuguaagg

SEQ ID NO: 2901488 - RNA, 19 nt, Human
auucucuggcuguaaggcu

SEQ ID NO: 2901489 - RNA, 20 nt, Human
auucucuggcuguaaggcuc

SEQ ID NO: 2901490 - RNA, 21 nt, Human
auucucuggcuguaaggcucu

SEQ ID NO: 2901491 - RNA, 22 nt, Human
auucucuggcuguaaggcucua

SEQ ID NO: 2901492 - RNA, 12 nt, Human
auuccuuucccu

SEQ ID NO: 2901493 - RNA, 13 nt, Human
auuccuuucccuu

SEQ ID NO: 2901494 - RNA, 14 nt, Human
auuccuuucccuuc

SEQ ID NO: 2901495 - RNA, 15 nt, Human
auuccuuucccuucc

SEQ ID NO: 2901496 - RNA, 16 nt, Human
auuccuuucccuuccu

SEQ ID NO: 2901497 - RNA, 17 nt, Human
auuccuuucccuuccuc

SEQ ID NO: 2901498 - RNA, 12 nt, Human
auuccuugugaa

SEQ ID NO: 2901499 - RNA, 22 nt, Human
auuccuucuuugauaauguuaa

SEQ ID NO: 2901500 - RNA, 23 nt, Human
auuccuucuuugauaauguuaaa

SEQ ID NO: 2901501 - RNA, 18 nt, Human
auuccuucuuuuuaaaau

SEQ ID NO: 2901502 - RNA, 19 nt, Human
auuccuugaucauuuuggg

SEQ ID NO: 2901503 - RNA, 20 nt, Human
auuccuugaucauuuuggga

SEQ ID NO: 2901504 - RNA, 21 nt, Human
auucucugugucuaagauucu

SEQ ID NO: 2901505 - RNA, 21 nt, Human
caaaucuggcuccuuuacaaa

SEQ ID NO: 2901506 - RNA, 22 nt, Human
caaagucaugcaaaggcuggga

SEQ ID NO: 2901507 - RNA, 17 nt, Human
caaaguccuuuuuuucc

SEQ ID NO: 2901508 - RNA, 14 nt, Human
caaaguccuuuuuu

SEQ ID NO: 2901509 - RNA, 23 nt, Human
caaaguccuuuuuuuccaucuuu

SEQ ID NO: 2901510 - RNA, 19 nt, Human
caaaguccuuuuuuuccau

SEQ ID NO: 2901511 - RNA, 22 nt, Human
caaaugaccagcagauucaaau

SEQ ID NO: 2901512 - RNA, 10 nt, Human
caaaugaauu

SEQ ID NO: 2901513 - RNA, 10 nt, Human
caaaugacau

SEQ ID NO: 2901514 - RNA, 14 nt, Human
caaaugacaugcac

SEQ ID NO: 2901515 - RNA, 15 nt, Human
caaaugacaugcacu

SEQ ID NO: 2901516 - RNA, 16 nt, Human
caaaugacaugcacug

SEQ ID NO: 2901517 - RNA, 17 nt, Human
caaaugacaugcacuga

SEQ ID NO: 2901518 - RNA, 18 nt, Human
caaaugacaugcacugac

SEQ ID NO: 2901519 - RNA, 19 nt, Human
caaaugacaugcacugacc

SEQ ID NO: 2901520 - RNA, 20 nt, Human
caaaugacaugcacugaccc

SEQ ID NO: 2901521 - RNA, 21 nt, Human
caaaugacaugcacugacccu

SEQ ID NO: 2901522 - RNA, 13 nt, Human
caaaucuugaaau

SEQ ID NO: 2901523 - RNA, 19 nt, Human
caaaucuugaaauuaagaa

SEQ ID NO: 2901524 - RNA, 21 nt, Human
caaaucuuggcaauauuccuu

SEQ ID NO: 2901525 - RNA, 22 nt, Human
caaaucuuggcaauauuccuua

SEQ ID NO: 2901526 - RNA, 12 nt, Human
caaaucuugaaa

SEQ ID NO: 2901527 - RNA, 12 nt, Human
caaaucugugua

SEQ ID NO: 2901528 - RNA, 13 nt, Human
caaaucuguguau

SEQ ID NO: 2901529 - RNA, 15 nt, Human
caaaucuguguauau

SEQ ID NO: 2901530 - RNA, 16 nt, Human
caaaucuguguauauu

SEQ ID NO: 2901531 - RNA, 17 nt, Human
caaaucuguguauauua

SEQ ID NO: 2901532 - RNA, 18 nt, Human
caaaucuguguauauuau

SEQ ID NO: 2901533 - RNA, 16 nt, Human
caaaugcaugaacaag

SEQ ID NO: 2901534 - RNA, 17 nt, Human
caaaugcaugaacaagu

SEQ ID NO: 2901535 - RNA, 19 nt, Human
caaaugcccaagggaaaga

SEQ ID NO: 2901536 - RNA, 17 nt, Human
caaaugccuuaaaaugg

SEQ ID NO: 2901537 - RNA, 18 nt, Human
caaaugccuuaaaaugga

SEQ ID NO: 2901538 - RNA, 19 nt, Human
caaaugccuuaaaauggaa

SEQ ID NO: 2901539 - RNA, 18 nt, Human
caaaugcccaagggaaag

SEQ ID NO: 2901540 - RNA, 22 nt, Human
caaaugcucucucaaauuguca

SEQ ID NO: 2901541 - RNA, 13 nt, Human
caaaugcuauuaa

SEQ ID NO: 2901542 - RNA, 17 nt, Human
caaaugcuauuaaagug

SEQ ID NO: 2901543 - RNA, 13 nt, Human
caacaacauccau

SEQ ID NO: 2901544 - RNA, 14 nt, Human
caacaacauccaug

SEQ ID NO: 2901545 - RNA, 13 nt, Human
caacaaagaaaua

SEQ ID NO: 2901546 - RNA, 14 nt, Human
caacaaagaaauau

SEQ ID NO: 2901547 - RNA, 17 nt, Human
caacaaagcacaguguu

SEQ ID NO: 2901548 - RNA, 12 nt, Human
caacaaaggaag

SEQ ID NO: 2901549 - RNA, 22 nt, Human
caacaaaggauuaauugcugca

SEQ ID NO: 2901550 - RNA, 23 nt, Human
caacaaaggauuaauugcugcaa

SEQ ID NO: 2901551 - RNA, 18 nt, Human
caacaaaggcaaguuaag

SEQ ID NO: 2901552 - RNA, 14 nt, Human
caaagcauggacua

SEQ ID NO: 2901553 - RNA, 13 nt, Human
caaagcauagaug

SEQ ID NO: 2901554 - RNA, 19 nt, Human
caaagcauagauguuuugg

SEQ ID NO: 2901555 - RNA, 23 nt, Human
caaaggguugggagcugaugaaa

SEQ ID NO: 2901556 - RNA, 13 nt, Human
caaaguauaacca

SEQ ID NO: 2901557 - RNA, 20 nt, Human
caaagucaugcaaaggcugg

SEQ ID NO: 2901558 - RNA, 21 nt, Human
caaagucaugcaaaggcuggg

SEQ ID NO: 2901559 - RNA, 16 nt, Human
caacacagccugggcc

SEQ ID NO: 2901560 - RNA, 15 nt, Human
caacacagccugggc

SEQ ID NO: 2901561 - RNA, 13 nt, Human
caacacagccugg

SEQ ID NO: 2901562 - RNA, 16 nt, Human
caacacaccuggugaa

SEQ ID NO: 2901563 - RNA, 14 nt, Human
caacacagaggaau

SEQ ID NO: 2901564 - RNA, 16 nt, Human
caacacagaggaauuu

SEQ ID NO: 2901565 - RNA, 22 nt, Human
caacacagccugggccccagcu

SEQ ID NO: 2901566 - RNA, 22 nt, Human
caacaacgcuugugaauguauu

SEQ ID NO: 2901567 - RNA, 16 nt, Human
caacacaauaacacua

SEQ ID NO: 2901568 - RNA, 14 nt, Human
caacacacacacuc

SEQ ID NO: 2901569 - RNA, 22 nt, Human
caacacacagauuugagcucag

SEQ ID NO: 2901570 - RNA, 21 nt, Human
caacacacagauuugagcuca

SEQ ID NO: 2901571 - RNA, 21 nt, Human
caagaauuuccuguuggauuu

SEQ ID NO: 2901572 - RNA, 12 nt, Human
caagaccagacu

SEQ ID NO: 2901573 - RNA, 22 nt, Human
caagaccagacucgccaacaug

SEQ ID NO: 2901574 - RNA, 18 nt, Human
caagaugccaucuguguc

SEQ ID NO: 2901575 - RNA, 17 nt, Human
caagaugucagacuggc

SEQ ID NO: 2901576 - RNA, 16 nt, Human
caagaugucagacugg

SEQ ID NO: 2901577 - RNA, 15 nt, Human
caagaugucagacug

SEQ ID NO: 2901578 - RNA, 22 nt, Human
caagaugcuggaugucugccaa

SEQ ID NO: 2901579 - RNA, 16 nt, Human
caagauggaaaggauu

SEQ ID NO: 2901580 - RNA, 20 nt, Human
caagaugccaucuguguccu

SEQ ID NO: 2901581 - RNA, 19 nt, Human
caacuccucgacaucacug

SEQ ID NO: 2901582 - RNA, 21 nt, Human
caacuccucgacaucacuguu

SEQ ID NO: 2901583 - RNA, 13 nt, Human
caacuccaaaacc

SEQ ID NO: 2901584 - RNA, 19 nt, Human
caacuccuagggccacuga

SEQ ID NO: 2901585 - RNA, 21 nt, Human
caagaauuggaagcugcccug

SEQ ID NO: 2901586 - RNA, 15 nt, Human
caagaaugguggcuu

SEQ ID NO: 2901587 - RNA, 20 nt, Human
caagaaugguggcuucuuuu

SEQ ID NO: 2901588 - RNA, 23 nt, Human
caagaaugacggaauaagagacc

SEQ ID NO: 2901589 - RNA, 14 nt, Human
caagaaugcauuga

SEQ ID NO: 2901590 - RNA, 15 nt, Human
caagaaugcauugau

SEQ ID NO: 2901591 - RNA, 16 nt, Human
caagaaugcauugaua

SEQ ID NO: 2901592 - RNA, 17 nt, Human
caagaaugcauugauau

SEQ ID NO: 2901593 - RNA, 22 nt, Human
caagaaugcauugauauuguga

SEQ ID NO: 2901594 - RNA, 16 nt, Human
caacuaagcagucccu

SEQ ID NO: 2901595 - RNA, 18 nt, Human
caacuaauuuuuguauuu

SEQ ID NO: 2901596 - RNA, 16 nt, Human
caacuacccaaaacaa

SEQ ID NO: 2901597 - RNA, 17 nt, Human
caacuacccaaaacaag

SEQ ID NO: 2901598 - RNA, 20 nt, Human
caacuacccaaaacaagccu

SEQ ID NO: 2901599 - RNA, 21 nt, Human
caacuacccaaaacaagccug

SEQ ID NO: 2901600 - RNA, 22 nt, Human
caacuacccaaaacaagccugg

SEQ ID NO: 2901601 - RNA, 15 nt, Human
caacuagacauuacc

SEQ ID NO: 2901602 - RNA, 20 nt, Human
caacuacuaucucagagaua

SEQ ID NO: 2901603 - RNA, 13 nt, Human
caacuacuauuca

SEQ ID NO: 2901604 - RNA, 20 nt, Human
caaccagauaacauaccuuu

SEQ ID NO: 2901605 - RNA, 18 nt, Human
caaccagacagaggguca

SEQ ID NO: 2901606 - RNA, 22 nt, Human
caaccagcaucccuugaccagg

SEQ ID NO: 2901607 - RNA, 12 nt, Human
caaccagugcca

SEQ ID NO: 2901608 - RNA, 15 nt, Human
caaccagugccaagg

SEQ ID NO: 2901609 - RNA, 16 nt, Human
caaccagugccaagga

SEQ ID NO: 2901610 - RNA, 17 nt, Human
caaccagugccaaggac

SEQ ID NO: 2901611 - RNA, 19 nt, Human
caaccagugccaaggaccu

SEQ ID NO: 2901612 - RNA, 12 nt, Human
caaccauauuua

SEQ ID NO: 2901613 - RNA, 15 nt, Human
caaccauauuuagca

SEQ ID NO: 2901614 - RNA, 13 nt, Human
caaccauggacuu

SEQ ID NO: 2901615 - RNA, 17 nt, Human
caaccccccaccugcca

SEQ ID NO: 2901616 - RNA, 16 nt, Human
caaccccccaccugcc

SEQ ID NO: 2901617 - RNA, 14 nt, Human
caaccauggacuuu

SEQ ID NO: 2901618 - RNA, 15 nt, Human
caaccauggacuuua

SEQ ID NO: 2901619 - RNA, 21 nt, Human
caacccccauucucaucugca

SEQ ID NO: 2901620 - RNA, 18 nt, Human
auuuuaggagcuaaggcu

SEQ ID NO: 2901621 - RNA, 19 nt, Human
auuuuaggagcuaaggcuc

SEQ ID NO: 2901622 - RNA, 20 nt, Human
auuuuaggagcuaaggcucu

SEQ ID NO: 2901623 - RNA, 20 nt, Human
auuuuaggcacucuuaaaug

SEQ ID NO: 2901624 - RNA, 22 nt, Human
auuuuaggcacucuuaaaugau

SEQ ID NO: 2901625 - RNA, 21 nt, Human
auuuuaggagcuaaggcucua

SEQ ID NO: 2901626 - RNA, 22 nt, Human
auuuuaggagcuaaggcucuau

SEQ ID NO: 2901627 - RNA, 15 nt, Human
auuuuaggaacuuca

SEQ ID NO: 2901628 - RNA, 17 nt, Human
auuuuaggaacuucaga

SEQ ID NO: 2901629 - RNA, 18 nt, Human
auuuuaggaacuucagag

SEQ ID NO: 2901630 - RNA, 19 nt, Human
auuuuaggaacuucagaga

SEQ ID NO: 2901631 - RNA, 13 nt, Human
auuuuaggaaagg

SEQ ID NO: 2901632 - RNA, 15 nt, Human
auuuuaggaaaggau

SEQ ID NO: 2901633 - RNA, 19 nt, Human
auuuuagcuaggauuugaa

SEQ ID NO: 2901634 - RNA, 23 nt, Human
auuuuagcucuauugauacucuu

SEQ ID NO: 2901635 - RNA, 15 nt, Human
auuuucugguucuaa

SEQ ID NO: 2901636 - RNA, 17 nt, Human
auuuucugguucuaaca

SEQ ID NO: 2901637 - RNA, 14 nt, Human
auuuucugguucua

SEQ ID NO: 2901638 - RNA, 19 nt, Human
auuuucugguucuaacauu

SEQ ID NO: 2901639 - RNA, 12 nt, Human
auuuucugucag

SEQ ID NO: 2901640 - RNA, 13 nt, Human
auuuucugucaga

SEQ ID NO: 2901641 - RNA, 14 nt, Human
auuuucugucagau

SEQ ID NO: 2901642 - RNA, 18 nt, Human
auuuucugucagaugaga

SEQ ID NO: 2901643 - RNA, 20 nt, Human
auuuucugucagaugagaac

SEQ ID NO: 2901644 - RNA, 22 nt, Human
auuuucugucagaugagaacaa

SEQ ID NO: 2901645 - RNA, 12 nt, Human
auuuugaaguuu

SEQ ID NO: 2901646 - RNA, 14 nt, Human
auuuugaaguuuac

SEQ ID NO: 2901647 - RNA, 15 nt, Human
auuuugaaguuuaca

SEQ ID NO: 2901648 - RNA, 16 nt, Human
auuuugaaguuuacau

SEQ ID NO: 2901649 - RNA, 17 nt, Human
auuuugaaguuuacauu

SEQ ID NO: 2901650 - RNA, 18 nt, Human
auuuugaaguuuacauuu

SEQ ID NO: 2901651 - RNA, 19 nt, Human
auuuugaaguuuacauuuu

SEQ ID NO: 2901652 - RNA, 15 nt, Human
auuuugaaauguggu

SEQ ID NO: 2901653 - RNA, 15 nt, Human
auuuucuuaaccagu

SEQ ID NO: 2901654 - RNA, 17 nt, Human
auuuucuuaaccaguug

SEQ ID NO: 2901655 - RNA, 20 nt, Human
auuuucuuacccaauuuccc

SEQ ID NO: 2901656 - RNA, 21 nt, Human
auuuucuuacccaauuuccca

SEQ ID NO: 2901657 - RNA, 19 nt, Human
auuuucuuauugcgcugcu

SEQ ID NO: 2901658 - RNA, 21 nt, Human
auuuucuuauugcgcugcuac

SEQ ID NO: 2901659 - RNA, 11 nt, Human
auuuugaauac

SEQ ID NO: 2901660 - RNA, 12 nt, Human
auuuugaauacc

SEQ ID NO: 2901661 - RNA, 14 nt, Human
auuuugaauaccau

SEQ ID NO: 2901662 - RNA, 15 nt, Human
auuuugaauaccauu

SEQ ID NO: 2901663 - RNA, 22 nt, Human
auuuugaauaccauuaaaacug

SEQ ID NO: 2901664 - RNA, 14 nt, Human
auuuuuagacagag

SEQ ID NO: 2901665 - RNA, 14 nt, Human
auuuuuaaucauga

SEQ ID NO: 2901666 - RNA, 17 nt, Human
auuuuuauacaaaccua

SEQ ID NO: 2901667 - RNA, 20 nt, Human
auuuuuauacaaaccuacca

SEQ ID NO: 2901668 - RNA, 22 nt, Human
auuuuuaguagagacugguuuc

SEQ ID NO: 2901669 - RNA, 21 nt, Human
auuuuuagauaguuagaaccu

SEQ ID NO: 2901670 - RNA, 21 nt, Human
auuuuuaggaaguuuucugua

SEQ ID NO: 2901671 - RNA, 22 nt, Human
auuuuuaggaaguuuucuguag

SEQ ID NO: 2901672 - RNA, 15 nt, Human
auuuuuauauuuagu

SEQ ID NO: 2901673 - RNA, 18 nt, Human
auuuuuauauuaguugcu

SEQ ID NO: 2901674 - RNA, 19 nt, Human
auuuuuauauuaguugcuu

SEQ ID NO: 2901675 - RNA, 20 nt, Human
auuuuuauauuaguugcuuu

SEQ ID NO: 2901676 - RNA, 17 nt, Human
auuuuuauauaauaucu

SEQ ID NO: 2901677 - RNA, 21 nt, Human
auuuuuauauaauaucuaaag

SEQ ID NO: 2901678 - RNA, 23 nt, Human
auuuuuauauaauaucuaaaguu

SEQ ID NO: 2901679 - RNA, 14 nt, Human
auuuuuuuguaauu

SEQ ID NO: 2901680 - RNA, 15 nt, Human
auuuuuuuguaauug

SEQ ID NO: 2901681 - RNA, 18 nt, Human
auuuuuuuguaauugcuu

SEQ ID NO: 2901682 - RNA, 16 nt, Human
auuuuuuugagacaga

SEQ ID NO: 2901683 - RNA, 22 nt, Human
auuuuuuugguaccuauuugac

SEQ ID NO: 2901684 - RNA, 16 nt, Human
caaaagcuucaaauua

SEQ ID NO: 2901685 - RNA, 17 nt, Human
caaaagcuucaaauuaa

SEQ ID NO: 2901686 - RNA, 15 nt, Human
caaaagacauguugu

SEQ ID NO: 2901687 - RNA, 16 nt, Human
caaaagacauguugua

SEQ ID NO: 2901688 - RNA, 21 nt, Human
caaaagacauguuguaaauua

SEQ ID NO: 2901689 - RNA, 12 nt, Human
caaaagagaaaa

SEQ ID NO: 2901690 - RNA, 14 nt, Human
caaaagagaaaaaa

SEQ ID NO: 2901691 - RNA, 19 nt, Human
caaaagagaaaaaaaauua

SEQ ID NO: 2901692 - RNA, 13 nt, Human
auuuuuuugucuu

SEQ ID NO: 2901693 - RNA, 13 nt, Human
caaaaggaagucu

SEQ ID NO: 2901694 - RNA, 11 nt, Human
caaaaggaaaa

SEQ ID NO: 2901695 - RNA, 12 nt, Human
caaaaggaaaaa

SEQ ID NO: 2901696 - RNA, 14 nt, Human
caaaaggaaaaagc

SEQ ID NO: 2901697 - RNA, 15 nt, Human
caaaaggaaaaagcu

SEQ ID NO: 2901698 - RNA, 16 nt, Human
caaaaggaaaaagcuc

SEQ ID NO: 2901699 - RNA, 17 nt, Human
caaaaggaaaaagcucc

SEQ ID NO: 2901700 - RNA, 22 nt, Human
caaaaggagagacucccaugaa

SEQ ID NO: 2901701 - RNA, 13 nt, Human
caaacccaugagg

SEQ ID NO: 2901702 - RNA, 18 nt, Human
caaaccccgaccaccugc

SEQ ID NO: 2901703 - RNA, 17 nt, Human
caaaccccacccuaguu

SEQ ID NO: 2901704 - RNA, 21 nt, Human
caaaccccgaccaccugccca

SEQ ID NO: 2901705 - RNA, 21 nt, Human
caaacccuagguucccggucc

SEQ ID NO: 2901706 - RNA, 14 nt, Human
caaaccaaauaaaa

SEQ ID NO: 2901707 - RNA, 15 nt, Human
caaaccaaauaaaaa

SEQ ID NO: 2901708 - RNA, 11 nt, Human
caaacauugug

SEQ ID NO: 2901709 - RNA, 17 nt, Human
caaacauuguguugaca

SEQ ID NO: 2901710 - RNA, 18 nt, Human
caaacauuguguugacau

SEQ ID NO: 2901711 - RNA, 19 nt, Human
caaacauuguguugacauu

SEQ ID NO: 2901712 - RNA, 12 nt, Human
caaagauaucuu

SEQ ID NO: 2901713 - RNA, 14 nt, Human
caaagauaucuuuu

SEQ ID NO: 2901714 - RNA, 17 nt, Human
caaagauaucuuuucuu

SEQ ID NO: 2901715 - RNA, 21 nt, Human
caaagauaucuuuucuuuaga

SEQ ID NO: 2901716 - RNA, 24 nt, Human
caaagaguucuggaaaagaacugu

SEQ ID NO: 2901717 - RNA, 23 nt, Human
caaacccccuccuuacgcuuugu

SEQ ID NO: 2901718 - RNA, 20 nt, Human
caauaaaaucuugaaaaugc

SEQ ID NO: 2901719 - RNA, 12 nt, Human
caauaaaagcuu

SEQ ID NO: 2901720 - RNA, 12 nt, Human
caauaaaacauu

SEQ ID NO: 2901721 - RNA, 16 nt, Human
caaguuuccauagcaa

SEQ ID NO: 2901722 - RNA, 17 nt, Human
caaguuuccauagcaac

SEQ ID NO: 2901723 - RNA, 20 nt, Human
caaguuuccauagcaacagg

SEQ ID NO: 2901724 - RNA, 17 nt, Human
caaguuuucuuccauga

SEQ ID NO: 2901725 - RNA, 21 nt, Human
caaguuuucuuccaugauuuu

SEQ ID NO: 2901726 - RNA, 13 nt, Human
caagucaguuucu

SEQ ID NO: 2901727 - RNA, 16 nt, Human
caagucaguuucuaca

SEQ ID NO: 2901728 - RNA, 14 nt, Human
caagucauguaaau

SEQ ID NO: 2901729 - RNA, 17 nt, Human
caagucauguaaauacu

SEQ ID NO: 2901730 - RNA, 19 nt, Human
caagucauguaaauacugu

SEQ ID NO: 2901731 - RNA, 13 nt, Human
caagucaugugca

SEQ ID NO: 2901732 - RNA, 16 nt, Human
caagucaugugcauuu

SEQ ID NO: 2901733 - RNA, 14 nt, Human
caaggccccugaca

SEQ ID NO: 2901734 - RNA, 19 nt, Human
caagucaggcccuuauuuu

SEQ ID NO: 2901735 - RNA, 12 nt, Human
caaggccuuaag

SEQ ID NO: 2901736 - RNA, 13 nt, Human
caaggcggccccu

SEQ ID NO: 2901737 - RNA, 14 nt, Human
caaggccuucuccu

SEQ ID NO: 2901738 - RNA, 14 nt, Human
caaggcuaugugau

SEQ ID NO: 2901739 - RNA, 19 nt, Human
caaggcuccugaucauucu

SEQ ID NO: 2901740 - RNA, 15 nt, Human
caaggcucugagcaa

SEQ ID NO: 2901741 - RNA, 19 nt, Human
caaggcgggagcaucucuu

SEQ ID NO: 2901742 - RNA, 14 nt, Human
caaggcggccccuc

SEQ ID NO: 2901743 - RNA, 15 nt, Human
caaggcggccccucc

SEQ ID NO: 2901744 - RNA, 16 nt, Human
caaggcggccccuccc

SEQ ID NO: 2901745 - RNA, 21 nt, Human
caaggcgguggacuugaacuu

SEQ ID NO: 2901746 - RNA, 22 nt, Human
caaggcgguggacuugaacuuu

SEQ ID NO: 2901747 - RNA, 14 nt, Human
caaggcacucuaga

SEQ ID NO: 2901748 - RNA, 15 nt, Human
caaggcacucuagau

SEQ ID NO: 2901749 - RNA, 14 nt, Human
caagauuuagaaaa

SEQ ID NO: 2901750 - RNA, 15 nt, Human
caagauuuagaaaaa

SEQ ID NO: 2901751 - RNA, 16 nt, Human
caagauuuagaaaaaa

SEQ ID NO: 2901752 - RNA, 13 nt, Human
caagauuuccuug

SEQ ID NO: 2901753 - RNA, 16 nt, Human
caagauuuccuugugc

SEQ ID NO: 2901754 - RNA, 12 nt, Human
caagauucuaga

SEQ ID NO: 2901755 - RNA, 13 nt, Human
caagaugucuguc

SEQ ID NO: 2901756 - RNA, 13 nt, Human
caagauucuagau

SEQ ID NO: 2901757 - RNA, 14 nt, Human
caagauucuagaug

SEQ ID NO: 2901758 - RNA, 17 nt, Human
caagauucuagaugauu

SEQ ID NO: 2901759 - RNA, 13 nt, Human
caagauugcuuaa

SEQ ID NO: 2901760 - RNA, 12 nt, Human
caagauugaaaa

SEQ ID NO: 2901761 - RNA, 18 nt, Human
caagauucuagaugauua

SEQ ID NO: 2901762 - RNA, 18 nt, Human
caagauugcuuaaaauag

SEQ ID NO: 2901763 - RNA, 16 nt, Human
caagauugcuuaaaau

SEQ ID NO: 2901764 - RNA, 21 nt, Human
caagauugcuuaaaauagcaa

SEQ ID NO: 2901765 - RNA, 16 nt, Human
caaggcacucuagauu

SEQ ID NO: 2901766 - RNA, 17 nt, Human
caaggcacucuagauuc

SEQ ID NO: 2901767 - RNA, 14 nt, Human
caaggccagagugg

SEQ ID NO: 2901768 - RNA, 12 nt, Human
caaggcccugcu

SEQ ID NO: 2901769 - RNA, 13 nt, Human
caaggcccugcug

SEQ ID NO: 2901770 - RNA, 14 nt, Human
caaggcccugcugc

SEQ ID NO: 2901771 - RNA, 16 nt, Human
caaggcccugcugccc

SEQ ID NO: 2901772 - RNA, 17 nt, Human
caaggcccugcugccca

SEQ ID NO: 2901773 - RNA, 22 nt, Human
caaggcccugcugcccaaucuc

SEQ ID NO: 2901774 - RNA, 13 nt, Human
caaugcuggcugu

SEQ ID NO: 2901775 - RNA, 20 nt, Human
caaucccuuuauuacccccu

SEQ ID NO: 2901776 - RNA, 20 nt, Human
caaucccucaccuucugagu

SEQ ID NO: 2901777 - RNA, 17 nt, Human
caaucccagcuaccuca

SEQ ID NO: 2901778 - RNA, 16 nt, Human
caauccccagcccuuu

SEQ ID NO: 2901779 - RNA, 12 nt, Human
caaucccagcua

SEQ ID NO: 2901780 - RNA, 23 nt, Human
caaucccaccaacccucagagcc

SEQ ID NO: 2901781 - RNA, 21 nt, Human
caaugcuggcuguuggcuggg

SEQ ID NO: 2901782 - RNA, 20 nt, Human
caaugcuggcuguuggcugg

SEQ ID NO: 2901783 - RNA, 12 nt, Human
caaugcuggcug

SEQ ID NO: 2901784 - RNA, 16 nt, Human
caauggcagccuuggc

SEQ ID NO: 2901785 - RNA, 21 nt, Human
caauggccuaaaacuggccug

SEQ ID NO: 2901786 - RNA, 15 nt, Human
caauccaagagucug

SEQ ID NO: 2901787 - RNA, 18 nt, Human
caauccagauggugggau

SEQ ID NO: 2901788 - RNA, 16 nt, Human
caauccagguacgcac

SEQ ID NO: 2901789 - RNA, 19 nt, Human
caauccagguacgcacaga

SEQ ID NO: 2901790 - RNA, 20 nt, Human
caauccagguacgcacagac

SEQ ID NO: 2901791 - RNA, 21 nt, Human
caauccagguacgcacagaca

SEQ ID NO: 2901792 - RNA, 22 nt, Human
caauccagguacgcacagacag

SEQ ID NO: 2901793 - RNA, 23 nt, Human
caauccagguacgcacagacagg

SEQ ID NO: 2901794 - RNA, 12 nt, Human
caaucauuguuu

SEQ ID NO: 2901795 - RNA, 17 nt, Human
caaucauuguuuugaau

SEQ ID NO: 2901796 - RNA, 19 nt, Human
caaucauuguuuugaauau

SEQ ID NO: 2901797 - RNA, 20 nt, Human
caaucauuguuuugaauauu

SEQ ID NO: 2901798 - RNA, 12 nt, Human
caaucauuucuc

SEQ ID NO: 2901799 - RNA, 13 nt, Human
caaucauuucuca

SEQ ID NO: 2901800 - RNA, 14 nt, Human
caaucauuucucac

SEQ ID NO: 2901801 - RNA, 17 nt, Human
caaucauuucucacugu

SEQ ID NO: 2901802 - RNA, 18 nt, Human
caaucauuucucacugug

SEQ ID NO: 2901803 - RNA, 18 nt, Human
caaucccaaaagucacca

SEQ ID NO: 2901804 - RNA, 16 nt, Human
caaucccaccaacccu

SEQ ID NO: 2901805 - RNA, 17 nt, Human
caaucccaccaacccuc

SEQ ID NO: 2901806 - RNA, 22 nt, Human
caaucccaccaacccucagagc

SEQ ID NO: 2901807 - RNA, 15 nt, Human
caaucaucuguguga

SEQ ID NO: 2901808 - RNA, 13 nt, Human
caaucauauguga

SEQ ID NO: 2901809 - RNA, 14 nt, Human
caaucauaugugau

SEQ ID NO: 2901810 - RNA, 15 nt, Human
caaucauaugugauc

SEQ ID NO: 2901811 - RNA, 17 nt, Human
caaucauaugugaucug

SEQ ID NO: 2901812 - RNA, 17 nt, Human
caaucaugaaauaugca

SEQ ID NO: 2901813 - RNA, 17 nt, Human
caaucaucugugugaaa

SEQ ID NO: 2901814 - RNA, 19 nt, Human
caaucaucugugugaaaau

SEQ ID NO: 2901815 - RNA, 20 nt, Human
caaucaucugugugaaaaug

SEQ ID NO: 2901816 - RNA, 19 nt, Human
caaucaguauguauucuuu

SEQ ID NO: 2901817 - RNA, 22 nt, Human
caauggcuauauggcaagaaag

SEQ ID NO: 2901818 - RNA, 20 nt, Human
caauugaaggaucaucugaa

SEQ ID NO: 2901819 - RNA, 22 nt, Human
caauugaaggaucaucugaagg

SEQ ID NO: 2901820 - RNA, 16 nt, Human
caauuuccuuuauauu

SEQ ID NO: 2901821 - RNA, 15 nt, Human
caauuuccuuuauau

SEQ ID NO: 2901822 - RNA, 21 nt, Human
caauuuccuuuauauuuagug

SEQ ID NO: 2901823 - RNA, 19 nt, Human
caauuuccuuuauauuuag

SEQ ID NO: 2901824 - RNA, 20 nt, Human
caauuuccuuuauauuuagu

SEQ ID NO: 2901825 - RNA, 19 nt, Human
caauugacugucacuguuc

SEQ ID NO: 2901826 - RNA, 23 nt, Human
caauugagaaaaauauauacuaa

SEQ ID NO: 2901827 - RNA, 14 nt, Human
caauugagaaaaau

SEQ ID NO: 2901828 - RNA, 17 nt, Human
cacccaccucagccucc

SEQ ID NO: 2901829 - RNA, 20 nt, Human
caccaggcuugccugcaggc

SEQ ID NO: 2901830 - RNA, 13 nt, Human
caccagggaaggg

SEQ ID NO: 2901831 - RNA, 21 nt, Human
caccagggaaggggacaagga

SEQ ID NO: 2901832 - RNA, 18 nt, Human
caccagggaaggggacaa

SEQ ID NO: 2901833 - RNA, 13 nt, Human
caccagccccagu

SEQ ID NO: 2901834 - RNA, 14 nt, Human
caccagccccacug

SEQ ID NO: 2901835 - RNA, 12 nt, Human
caccagccccac

SEQ ID NO: 2901836 - RNA, 19 nt, Human
caccagcccauggcccugu

SEQ ID NO: 2901837 - RNA, 21 nt, Human
caccagcccauggcccugugc

SEQ ID NO: 2901838 - RNA, 16 nt, Human
caccagccccagugcc

SEQ ID NO: 2901839 - RNA, 22 nt, Human
caccagccccacugccagcagc

SEQ ID NO: 2901840 - RNA, 21 nt, Human
caccagccccacugccagcag

SEQ ID NO: 2901841 - RNA, 20 nt, Human
caccagccccacugccagca

SEQ ID NO: 2901842 - RNA, 18 nt, Human
caccagccccacugccag

SEQ ID NO: 2901843 - RNA, 23 nt, Human
caccagccccacugccagcagca

SEQ ID NO: 2901844 - RNA, 18 nt, Human
cacccaccucagccuccc

SEQ ID NO: 2901845 - RNA, 14 nt, Human
cacccacucagcuc

SEQ ID NO: 2901846 - RNA, 13 nt, Human
cacccacucagcu

SEQ ID NO: 2901847 - RNA, 16 nt, Human
cacccaggagccccga

SEQ ID NO: 2901848 - RNA, 22 nt, Human
cacccagccucaguccuccccu

SEQ ID NO: 2901849 - RNA, 15 nt, Human
cacccagccucaguc

SEQ ID NO: 2901850 - RNA, 19 nt, Human
cacccagccucaguccucc

SEQ ID NO: 2901851 - RNA, 11 nt, Human
cacccagccuc

SEQ ID NO: 2901852 - RNA, 12 nt, Human
cacccagccuca

SEQ ID NO: 2901853 - RNA, 13 nt, Human
cacccagccucag

SEQ ID NO: 2901854 - RNA, 14 nt, Human
cacccagccucagu

SEQ ID NO: 2901855 - RNA, 13 nt, Human
cacccaugguacc

SEQ ID NO: 2901856 - RNA, 20 nt, Human
cacccaugggcucugacaga

SEQ ID NO: 2901857 - RNA, 18 nt, Human
cacccaugggcucugaca

SEQ ID NO: 2901858 - RNA, 19 nt, Human
cacccaugggcucugacag

SEQ ID NO: 2901859 - RNA, 13 nt, Human
cacccaugggcuc

SEQ ID NO: 2901860 - RNA, 22 nt, Human
cacccaugaagacaggacagug

SEQ ID NO: 2901861 - RNA, 15 nt, Human
cacccaugaagacag

SEQ ID NO: 2901862 - RNA, 21 nt, Human
caccccaaguagucugcucac

SEQ ID NO: 2901863 - RNA, 22 nt, Human
caccccaaguagucugcucaca

SEQ ID NO: 2901864 - RNA, 15 nt, Human
cacccauuuucacau

SEQ ID NO: 2901865 - RNA, 12 nt, Human
caccccacacuu

SEQ ID NO: 2901866 - RNA, 11 nt, Human
caccccacacu

SEQ ID NO: 2901867 - RNA, 15 nt, Human
caccaaccgacaggc

SEQ ID NO: 2901868 - RNA, 13 nt, Human
caccaacccucag

SEQ ID NO: 2901869 - RNA, 18 nt, Human
caccaaagcugcccacug

SEQ ID NO: 2901870 - RNA, 14 nt, Human
caccaaagcugccc

SEQ ID NO: 2901871 - RNA, 13 nt, Human
caccaaagcugcc

SEQ ID NO: 2901872 - RNA, 22 nt, Human
caccaaagggagaguuccagag

SEQ ID NO: 2901873 - RNA, 12 nt, Human
caccaaaguucu

SEQ ID NO: 2901874 - RNA, 13 nt, Human
caccaaaguucua

SEQ ID NO: 2901875 - RNA, 14 nt, Human
caccaaagaugcag

SEQ ID NO: 2901876 - RNA, 15 nt, Human
caccaaagaugcagc

SEQ ID NO: 2901877 - RNA, 17 nt, Human
caccaaagaugcagccg

SEQ ID NO: 2901878 - RNA, 18 nt, Human
caccaaagaugcagccgc

SEQ ID NO: 2901879 - RNA, 14 nt, Human
caccaaaguucuaa

SEQ ID NO: 2901880 - RNA, 16 nt, Human
caccaaaguucuaaua

SEQ ID NO: 2901881 - RNA, 17 nt, Human
caccaaaguucuaauaa

SEQ ID NO: 2901882 - RNA, 22 nt, Human
caccaaaguucuaauaauuucu

SEQ ID NO: 2901883 - RNA, 15 nt, Human
caccaacaccacggu

SEQ ID NO: 2901884 - RNA, 21 nt, Human
cacaucugcauuuucacccca

SEQ ID NO: 2901885 - RNA, 13 nt, Human
cacaucugcauuu

SEQ ID NO: 2901886 - RNA, 13 nt, Human
cacaucucugaaa

SEQ ID NO: 2901887 - RNA, 21 nt, Human
cacaucucugaaagcacagga

SEQ ID NO: 2901888 - RNA, 16 nt, Human
cacagaagcacaugca

SEQ ID NO: 2901889 - RNA, 10 nt, Human
cacagcuccu

SEQ ID NO: 2901890 - RNA, 15 nt, Human
cacagcuccucccac

SEQ ID NO: 2901891 - RNA, 14 nt, Human
cacagcucuguccu

SEQ ID NO: 2901892 - RNA, 11 nt, Human
cacagcucugu

SEQ ID NO: 2901893 - RNA, 18 nt, Human
cacagcucuguccuggga

SEQ ID NO: 2901894 - RNA, 16 nt, Human
cacagcucuguccugg

SEQ ID NO: 2901895 - RNA, 15 nt, Human
cacagcucuguccug

SEQ ID NO: 2901896 - RNA, 15 nt, Human
cacagcucuucucca

SEQ ID NO: 2901897 - RNA, 14 nt, Human
cacagcucuucucc

SEQ ID NO: 2901898 - RNA, 17 nt, Human
cacagcucuucuccagg

SEQ ID NO: 2901899 - RNA, 21 nt, Human
cacagcucuccggucucucuc

SEQ ID NO: 2901900 - RNA, 20 nt, Human
cacagcucuccggucucucu

SEQ ID NO: 2901901 - RNA, 20 nt, Human
cacaccaaagggagaguucc

SEQ ID NO: 2901902 - RNA, 22 nt, Human
cacacauggaaacccauaggcc

SEQ ID NO: 2901903 - RNA, 18 nt, Human
cacacuuguuccagcucu

SEQ ID NO: 2901904 - RNA, 19 nt, Human
cacacuuguuccagcucuu

SEQ ID NO: 2901905 - RNA, 20 nt, Human
cacacuuguuccagcucuuu

SEQ ID NO: 2901906 - RNA, 17 nt, Human
cacacuuuuuaagaaau

SEQ ID NO: 2901907 - RNA, 13 nt, Human
cacagaaaagcau

SEQ ID NO: 2901908 - RNA, 14 nt, Human
cacagaaaagcaua

SEQ ID NO: 2901909 - RNA, 12 nt, Human
cacagaaaccuu

SEQ ID NO: 2901910 - RNA, 12 nt, Human
cacagaaauaua

SEQ ID NO: 2901911 - RNA, 13 nt, Human
cacagaaauauau

SEQ ID NO: 2901912 - RNA, 15 nt, Human
cacagaaauauauau

SEQ ID NO: 2901913 - RNA, 18 nt, Human
cacagaaauauauauaca

SEQ ID NO: 2901914 - RNA, 19 nt, Human
cacagaaauauauauacau

SEQ ID NO: 2901915 - RNA, 20 nt, Human
cacagaaauauauauacaua

SEQ ID NO: 2901916 - RNA, 21 nt, Human
cacagaaauauauauacauau

SEQ ID NO: 2901917 - RNA, 23 nt, Human
cacagaaauauauauacauaugu

SEQ ID NO: 2901918 - RNA, 13 nt, Human
cacagaacccuug

SEQ ID NO: 2901919 - RNA, 22 nt, Human
cacagggacugaaaaccucucc

SEQ ID NO: 2901920 - RNA, 19 nt, Human
cacagggaagagcuccccu

SEQ ID NO: 2901921 - RNA, 13 nt, Human
cacagggaagugg

SEQ ID NO: 2901922 - RNA, 14 nt, Human
cacuguuuuuagac

SEQ ID NO: 2901923 - RNA, 20 nt, Human
cacuguuuuuagacaccuuc

SEQ ID NO: 2901924 - RNA, 21 nt, Human
cacuguuuuuagacaccuuca

SEQ ID NO: 2901925 - RNA, 13 nt, Human
cacuguuuuucca

SEQ ID NO: 2901926 - RNA, 14 nt, Human
cacuguuuuuccau

SEQ ID NO: 2901927 - RNA, 15 nt, Human
cacuguuuuuccaua

SEQ ID NO: 2901928 - RNA, 16 nt, Human
cacuguuuuuccauag

SEQ ID NO: 2901929 - RNA, 19 nt, Human
cacuguuuuuccauaguuu

SEQ ID NO: 2901930 - RNA, 21 nt, Human
cacuguuucucuugagcuggc

SEQ ID NO: 2901931 - RNA, 19 nt, Human
cacugguauuccugccucc

SEQ ID NO: 2901932 - RNA, 19 nt, Human
cacuguugcccaggcuggc

SEQ ID NO: 2901933 - RNA, 18 nt, Human
cacuguugcccaggcugg

SEQ ID NO: 2901934 - RNA, 23 nt, Human
cacuguugcccaggcuggcgugc

SEQ ID NO: 2901935 - RNA, 22 nt, Human
cacuguuucucuugagcuggcc

SEQ ID NO: 2901936 - RNA, 15 nt, Human
cacuguuucuugcuu

SEQ ID NO: 2901937 - RNA, 17 nt, Human
cacuguuucuugcuugu

SEQ ID NO: 2901938 - RNA, 18 nt, Human
cacuguuucuugcuugua

SEQ ID NO: 2901939 - RNA, 19 nt, Human
cacuguuucuugcuuguac

SEQ ID NO: 2901940 - RNA, 21 nt, Human
cacuguuucuugcuuguaccu

SEQ ID NO: 2901941 - RNA, 24 nt, Human
cacuguuucuugcuuguaccucug

SEQ ID NO: 2901942 - RNA, 20 nt, Human
cacugguauuccugccucca

SEQ ID NO: 2901943 - RNA, 22 nt, Human
cacugggaugagccgcugugag

SEQ ID NO: 2901944 - RNA, 21 nt, Human
cacugguacuuagaguuucug

SEQ ID NO: 2901945 - RNA, 22 nt, Human
cacugguacuuagaguuucugu

SEQ ID NO: 2901946 - RNA, 20 nt, Human
cacugguagaccaaaauaaa

SEQ ID NO: 2901947 - RNA, 16 nt, Human
cacugguauuccugcc

SEQ ID NO: 2901948 - RNA, 17 nt, Human
cacugguauuccugccu

SEQ ID NO: 2901949 - RNA, 15 nt, Human
cacuggguugacuuu

SEQ ID NO: 2901950 - RNA, 22 nt, Human
cacugccaucuuaguuuggauu

SEQ ID NO: 2901951 - RNA, 17 nt, Human
cacugccaugcagggcc

SEQ ID NO: 2901952 - RNA, 19 nt, Human
cacugccaugcagggccuc

SEQ ID NO: 2901953 - RNA, 20 nt, Human
cacugggaugagccgcugug

SEQ ID NO: 2901954 - RNA, 23 nt, Human
cacugggaugagccgcugugagc

SEQ ID NO: 2901955 - RNA, 15 nt, Human
cacugggcacaacug

SEQ ID NO: 2901956 - RNA, 11 nt, Human
cacugggccaa

SEQ ID NO: 2901957 - RNA, 20 nt, Human
cacugggccaauucaauaca

SEQ ID NO: 2901958 - RNA, 12 nt, Human
cacugggaucac

SEQ ID NO: 2901959 - RNA, 22 nt, Human
cacugggaucacaggugucagc

SEQ ID NO: 2901960 - RNA, 13 nt, Human
cacugggcuucua

SEQ ID NO: 2901961 - RNA, 14 nt, Human
cacugcagccucaa

SEQ ID NO: 2901962 - RNA, 19 nt, Human
cacugcagccucaaccucc

SEQ ID NO: 2901963 - RNA, 23 nt, Human
cacugcagccucaaccuccuggg

SEQ ID NO: 2901964 - RNA, 22 nt, Human
cacugcagccucaaccuccugg

SEQ ID NO: 2901965 - RNA, 21 nt, Human
cacugcagccucaaccuccug

SEQ ID NO: 2901966 - RNA, 20 nt, Human
cacugcagccucaaccuccu

SEQ ID NO: 2901967 - RNA, 16 nt, Human
cacugccaucuuaguu

SEQ ID NO: 2901968 - RNA, 20 nt, Human
cacugccaucuuaguuugga

SEQ ID NO: 2901969 - RNA, 20 nt, Human
cacugccaucaaacuguaaa

SEQ ID NO: 2901970 - RNA, 17 nt, Human
cacugccaucugaugcc

SEQ ID NO: 2901971 - RNA, 20 nt, Human
cacugcaggcaucacagcua

SEQ ID NO: 2901972 - RNA, 18 nt, Human
cacuuguuccagcucuuu

SEQ ID NO: 2901973 - RNA, 18 nt, Human
cacuuguguuaugaagca

SEQ ID NO: 2901974 - RNA, 19 nt, Human
cacuuguugauuaauggaa

SEQ ID NO: 2901975 - RNA, 13 nt, Human
cacuuuaaaccug

SEQ ID NO: 2901976 - RNA, 18 nt, Human
cacuuuaagagagaaauc

SEQ ID NO: 2901977 - RNA, 16 nt, Human
cacuugugcuuugcuc

SEQ ID NO: 2901978 - RNA, 18 nt, Human
cacuugugcuuugcucuu

SEQ ID NO: 2901979 - RNA, 19 nt, Human
cacuugugcuuugcucuug

SEQ ID NO: 2901980 - RNA, 20 nt, Human
cacuugugcuuugcucuugu

SEQ ID NO: 2901981 - RNA, 21 nt, Human
cacuuaacauuccuaaaaugc

SEQ ID NO: 2901982 - RNA, 17 nt, Human
cacuuaaaaugugcagu

SEQ ID NO: 2901983 - RNA, 17 nt, Human
cacuuaaggcacucugu

SEQ ID NO: 2901984 - RNA, 18 nt, Human
cacuuuauaagucauugu

SEQ ID NO: 2901985 - RNA, 17 nt, Human
cacuuucuaauguuucu

SEQ ID NO: 2901986 - RNA, 18 nt, Human
cacuuucuaauguuucug

SEQ ID NO: 2901987 - RNA, 14 nt, Human
cacuuuacccaccu

SEQ ID NO: 2901988 - RNA, 22 nt, Human
cacuuuacccaccuagaacacu

SEQ ID NO: 2901989 - RNA, 20 nt, Human
cacuuuacccaccuagaaca

SEQ ID NO: 2901990 - RNA, 19 nt, Human
cacuuuacccaccuagaac

SEQ ID NO: 2901991 - RNA, 17 nt, Human
cacuuuacccaccuaga

SEQ ID NO: 2901992 - RNA, 17 nt, Human
cagaacagcuucagguu

SEQ ID NO: 2901993 - RNA, 18 nt, Human
cagaacagcuucagguua

SEQ ID NO: 2901994 - RNA, 19 nt, Human
cagaacagcuucagguuau

SEQ ID NO: 2901995 - RNA, 24 nt, Human
cagaacagcuucagguuaucgaaa

SEQ ID NO: 2901996 - RNA, 12 nt, Human
cagaacaggguc

SEQ ID NO: 2901997 - RNA, 13 nt, Human
cagaacaggguca

SEQ ID NO: 2901998 - RNA, 14 nt, Human
cagaacagggucau

SEQ ID NO: 2901999 - RNA, 20 nt, Human
cagaacagguguuggugaca

SEQ ID NO: 2902000 - RNA, 24 nt, Human
cagaacagguguuggugacaauug

SEQ ID NO: 2902001 - RNA, 14 nt, Human
cagaacaguaucuu

SEQ ID NO: 2902002 - RNA, 15 nt, Human
cagaacaguaucuuu

SEQ ID NO: 2902003 - RNA, 15 nt, Human
cagaaguuucucagc

SEQ ID NO: 2902004 - RNA, 19 nt, Human
cagaaguuucucagcuccc

SEQ ID NO: 2902005 - RNA, 21 nt, Human
cagaaaugucuaaaugcugaa

SEQ ID NO: 2902006 - RNA, 12 nt, Human
cagaacagcuuc

SEQ ID NO: 2902007 - RNA, 13 nt, Human
cagaacagcuuca

SEQ ID NO: 2902008 - RNA, 15 nt, Human
cagaacagcuucagg

SEQ ID NO: 2902009 - RNA, 16 nt, Human
cagaacagcuucaggu

SEQ ID NO: 2902010 - RNA, 11 nt, Human
cagaaaugucu

SEQ ID NO: 2902011 - RNA, 14 nt, Human
cagaaaugucuaaa

SEQ ID NO: 2902012 - RNA, 21 nt, Human
cagaaauggggaauucucuaa

SEQ ID NO: 2902013 - RNA, 21 nt, Human
cagaaauauaauaaaaugugu

SEQ ID NO: 2902014 - RNA, 13 nt, Human
cagaaauauauau

SEQ ID NO: 2902015 - RNA, 16 nt, Human
cagaaauauauauaca

SEQ ID NO: 2902016 - RNA, 17 nt, Human
cagaaauauauauacau

SEQ ID NO: 2902017 - RNA, 18 nt, Human
cagaaauauauauacaua

SEQ ID NO: 2902018 - RNA, 19 nt, Human
cagaaauauauauacauau

SEQ ID NO: 2902019 - RNA, 20 nt, Human
cagaaauauauauacauaug

SEQ ID NO: 2902020 - RNA, 22 nt, Human
cagaaauauauauacauaugua

SEQ ID NO: 2902021 - RNA, 20 nt, Human
cagaaaucaguaauauuuau

SEQ ID NO: 2902022 - RNA, 14 nt, Human
cagaaaguguaaau

SEQ ID NO: 2902023 - RNA, 22 nt, Human
cagaaauacuauaacauaugua

SEQ ID NO: 2902024 - RNA, 20 nt, Human
cagaaagguuuucuucuuuu

SEQ ID NO: 2902025 - RNA, 15 nt, Human
cagaaagguucugcc

SEQ ID NO: 2902026 - RNA, 16 nt, Human
cagaaagguucugccc

SEQ ID NO: 2902027 - RNA, 17 nt, Human
cagaaagguucugcccg

SEQ ID NO: 2902028 - RNA, 21 nt, Human
cagaaagguucugcccgggaa

SEQ ID NO: 2902029 - RNA, 21 nt, Human
cagaaagucauuccuucuuuu

SEQ ID NO: 2902030 - RNA, 15 nt, Human
cagaaaggaaaaccu

SEQ ID NO: 2902031 - RNA, 18 nt, Human
cagaaaggaaaaccugaa

SEQ ID NO: 2902032 - RNA, 20 nt, Human
cagaaaggaaaaccugaaga

SEQ ID NO: 2902033 - RNA, 12 nt, Human
cagaaaggagac

SEQ ID NO: 2902034 - RNA, 12 nt, Human
cagaaaggagag

SEQ ID NO: 2902035 - RNA, 13 nt, Human
cagaaaggagagu

SEQ ID NO: 2902036 - RNA, 15 nt, Human
cagaaaggcuuuuua

SEQ ID NO: 2902037 - RNA, 12 nt, Human
cacuccagccug

SEQ ID NO: 2902038 - RNA, 13 nt, Human
cacuccagccuga

SEQ ID NO: 2902039 - RNA, 23 nt, Human
cacuaccagcguauauauaagaa

SEQ ID NO: 2902040 - RNA, 20 nt, Human
cacuacaugugguuuauaga

SEQ ID NO: 2902041 - RNA, 19 nt, Human
cacuacaugugguuuauag

SEQ ID NO: 2902042 - RNA, 15 nt, Human
cacuacaugcagccc

SEQ ID NO: 2902043 - RNA, 21 nt, Human
cacuacacuccagccugagca

SEQ ID NO: 2902044 - RNA, 20 nt, Human
cacuacacuccagccugagc

SEQ ID NO: 2902045 - RNA, 23 nt, Human
cacuacaugcagcccaugcccac

SEQ ID NO: 2902046 - RNA, 21 nt, Human
cacuacaugcagcccaugccc

SEQ ID NO: 2902047 - RNA, 21 nt, Human
cacuccagccugagcaacaga

SEQ ID NO: 2902048 - RNA, 15 nt, Human
cacuccagccugagc

SEQ ID NO: 2902049 - RNA, 14 nt, Human
cacuccagccugag

SEQ ID NO: 2902050 - RNA, 14 nt, Human
cacuccagccuggg

SEQ ID NO: 2902051 - RNA, 13 nt, Human
cacuccagccugg

SEQ ID NO: 2902052 - RNA, 20 nt, Human
cacucugucgcccagucugg

SEQ ID NO: 2902053 - RNA, 16 nt, Human
cacuccagccugggcg

SEQ ID NO: 2902054 - RNA, 15 nt, Human
cacuccagccugggc

SEQ ID NO: 2902055 - RNA, 21 nt, Human
cacuccagccugggcgacaga

SEQ ID NO: 2902056 - RNA, 15 nt, Human
cacuaccgauucuuu

SEQ ID NO: 2902057 - RNA, 17 nt, Human
cacucuguuauuuagac

SEQ ID NO: 2902058 - RNA, 13 nt, Human
cacucuguuauuu

SEQ ID NO: 2902059 - RNA, 13 nt, Human
cacggccaggcca

SEQ ID NO: 2902060 - RNA, 12 nt, Human
cacggccaggcc

SEQ ID NO: 2902061 - RNA, 17 nt, Human
cacggccaggccagagg

SEQ ID NO: 2902062 - RNA, 21 nt, Human
cacggccccgaagggccccca

SEQ ID NO: 2902063 - RNA, 14 nt, Human
cacggcucacugca

SEQ ID NO: 2902064 - RNA, 15 nt, Human
cacggcguuguaccu

SEQ ID NO: 2902065 - RNA, 16 nt, Human
cacggcuaagaggcug

SEQ ID NO: 2902066 - RNA, 20 nt, Human
cacggcuaagaggcugcuga

SEQ ID NO: 2902067 - RNA, 19 nt, Human
cacuacacuccagccugag

SEQ ID NO: 2902068 - RNA, 18 nt, Human
cacuacacuccagccuga

SEQ ID NO: 2902069 - RNA, 17 nt, Human
cacuacacuccagccug

SEQ ID NO: 2902070 - RNA, 16 nt, Human
cacuacacuccagccu

SEQ ID NO: 2902071 - RNA, 22 nt, Human
cacucuuauugcccacgcugga

SEQ ID NO: 2902072 - RNA, 21 nt, Human
cacucuuauugcccacgcugg

SEQ ID NO: 2902073 - RNA, 20 nt, Human
cacucuuauugcccacgcug

SEQ ID NO: 2902074 - RNA, 16 nt, Human
cacucuuaagcuuccg

SEQ ID NO: 2902075 - RNA, 14 nt, Human
cacucuuaaagcaa

SEQ ID NO: 2902076 - RNA, 22 nt, Human
cacucuuaaagcaaaaaaugaa

SEQ ID NO: 2902077 - RNA, 14 nt, Human
cacucuuaaaugau

SEQ ID NO: 2902078 - RNA, 20 nt, Human
cacucuguuauuuagacuca

SEQ ID NO: 2902079 - RNA, 16 nt, Human
caccuuggcugcaggg

SEQ ID NO: 2902080 - RNA, 15 nt, Human
caccuuggcugcagg

SEQ ID NO: 2902081 - RNA, 18 nt, Human
caccuuggcugcagggag

SEQ ID NO: 2902082 - RNA, 21 nt, Human
caccugcccccugguggacag

SEQ ID NO: 2902083 - RNA, 23 nt, Human
caccuuuauucuggcagaggagg

SEQ ID NO: 2902084 - RNA, 22 nt, Human
caccugcccaucacaggguugg

SEQ ID NO: 2902085 - RNA, 18 nt, Human
caccugcccaucacaggg

SEQ ID NO: 2902086 - RNA, 22 nt, Human
caccugccauuugcacccuccg

SEQ ID NO: 2902087 - RNA, 15 nt, Human
caccugcccccuggu

SEQ ID NO: 2902088 - RNA, 14 nt, Human
caccugcccccugg

SEQ ID NO: 2902089 - RNA, 18 nt, Human
caccugcccaaccugcuc

SEQ ID NO: 2902090 - RNA, 19 nt, Human
caccugcccaaccugcucu

SEQ ID NO: 2902091 - RNA, 13 nt, Human
caccugcccaacc

SEQ ID NO: 2902092 - RNA, 14 nt, Human
caccuuuauucugg

SEQ ID NO: 2902093 - RNA, 14 nt, Human
caccuuucagccca

SEQ ID NO: 2902094 - RNA, 17 nt, Human
caccuuucagcccacgu

SEQ ID NO: 2902095 - RNA, 13 nt, Human
caccuuuguguau

SEQ ID NO: 2902096 - RNA, 14 nt, Human
caccuuuguguauu

SEQ ID NO: 2902097 - RNA, 17 nt, Human
caccuuuguguauuuuu

SEQ ID NO: 2902098 - RNA, 21 nt, Human
caccuuuguguauuuuucaau

SEQ ID NO: 2902099 - RNA, 19 nt, Human
caccuuuccucaaauguug

SEQ ID NO: 2902100 - RNA, 17 nt, Human
caccuuuucuugccuga

SEQ ID NO: 2902101 - RNA, 14 nt, Human
caccuuuuuuccua

SEQ ID NO: 2902102 - RNA, 12 nt, Human
cacgaaacuugu

SEQ ID NO: 2902103 - RNA, 14 nt, Human
cacgaaacuuguua

SEQ ID NO: 2902104 - RNA, 20 nt, Human
cacgaaacuuguuauuguga

SEQ ID NO: 2902105 - RNA, 21 nt, Human
cacgaaacuuguuauugugaa

SEQ ID NO: 2902106 - RNA, 22 nt, Human
cacgaaacuuguuauugugaau

SEQ ID NO: 2902107 - RNA, 13 nt, Human
cacgaaagagaga

SEQ ID NO: 2902108 - RNA, 17 nt, Human
caccuuuuuuaaggaaa

SEQ ID NO: 2902109 - RNA, 22 nt, Human
cacgaaagagagagaaacaaac

SEQ ID NO: 2902110 - RNA, 11 nt, Human
cacgaaagcac

SEQ ID NO: 2902111 - RNA, 14 nt, Human
cacgaaagcacaca

SEQ ID NO: 2902112 - RNA, 12 nt, Human
caccucagccuc

SEQ ID NO: 2902113 - RNA, 19 nt, Human
caccucagaguauggagcu

SEQ ID NO: 2902114 - RNA, 22 nt, Human
caccucagaguauggagcucag

SEQ ID NO: 2902115 - RNA, 18 nt, Human
caccucaccccguuacag

SEQ ID NO: 2902116 - RNA, 23 nt, Human
caccuagaacacuaacucaccag

SEQ ID NO: 2902117 - RNA, 16 nt, Human
caccuagaauuggcug

SEQ ID NO: 2902118 - RNA, 14 nt, Human
caccuagagccaga

SEQ ID NO: 2902119 - RNA, 16 nt, Human
caccuagagccagacc

SEQ ID NO: 2902120 - RNA, 17 nt, Human
caccuagagccagacca

SEQ ID NO: 2902121 - RNA, 20 nt, Human
caccuagcaauuccaucacc

SEQ ID NO: 2902122 - RNA, 22 nt, Human
caccuacuuuucuuuccucaga

SEQ ID NO: 2902123 - RNA, 16 nt, Human
caccuagcuuuauucu

SEQ ID NO: 2902124 - RNA, 15 nt, Human
caccuagcugugcaa

SEQ ID NO: 2902125 - RNA, 12 nt, Human
caccuacugagu

SEQ ID NO: 2902126 - RNA, 12 nt, Human
ccucgcuuggac

SEQ ID NO: 2902127 - RNA, 18 nt, Human
ccucggaaccgcucaccu

SEQ ID NO: 2902128 - RNA, 21 nt, Human
ccucggaaccgcucaccuaga

SEQ ID NO: 2902129 - RNA, 23 nt, Human
ccucggaaccgcucaccuagagc

SEQ ID NO: 2902130 - RNA, 20 nt, Human
ccucggacuuagcugggaga

SEQ ID NO: 2902131 - RNA, 19 nt, Human
ccucggacuuagcugggag

SEQ ID NO: 2902132 - RNA, 13 nt, Human
ccucgcugcuucu

SEQ ID NO: 2902133 - RNA, 12 nt, Human
ccucgcugcuuc

SEQ ID NO: 2902134 - RNA, 20 nt, Human
ccucgaaacacagaaaccuu

SEQ ID NO: 2902135 - RNA, 16 nt, Human
ccucgaaacacagaaa

SEQ ID NO: 2902136 - RNA, 18 nt, Human
ccucgcacggccccgaag

SEQ ID NO: 2902137 - RNA, 21 nt, Human
ccucgaugggagggauggccc

SEQ ID NO: 2902138 - RNA, 12 nt, Human
ccuccucaccuc

SEQ ID NO: 2902139 - RNA, 19 nt, Human
ccuccuaucagaaguuucu

SEQ ID NO: 2902140 - RNA, 16 nt, Human
ccuccucacccccagc

SEQ ID NO: 2902141 - RNA, 14 nt, Human
ccuccucaccccca

SEQ ID NO: 2902142 - RNA, 13 nt, Human
ccuccucaccccc

SEQ ID NO: 2902143 - RNA, 20 nt, Human
ccucccuuggggccuaugca

SEQ ID NO: 2902144 - RNA, 19 nt, Human
ccucccuuccgacccucug

SEQ ID NO: 2902145 - RNA, 20 nt, Human
ccucccuuccgacccucugg

SEQ ID NO: 2902146 - RNA, 21 nt, Human
ccucccuuccgacccucuggg

SEQ ID NO: 2902147 - RNA, 22 nt, Human
ccucccuuccgacccucuggga

SEQ ID NO: 2902148 - RNA, 23 nt, Human
ccucccuuccgacccucugggaa

SEQ ID NO: 2902149 - RNA, 14 nt, Human
ccuccgccucuugg

SEQ ID NO: 2902150 - RNA, 20 nt, Human
ccuccgcgugaucaaagcca

SEQ ID NO: 2902151 - RNA, 19 nt, Human
ccuccgccuucacuccggu

SEQ ID NO: 2902152 - RNA, 18 nt, Human
ccuccgccuucacauucc

SEQ ID NO: 2902153 - RNA, 13 nt, Human
ccuccgccucuug

SEQ ID NO: 2902154 - RNA, 22 nt, Human
ccuccgaccacuuccaggggaa

SEQ ID NO: 2902155 - RNA, 20 nt, Human
ccuccgaccacuuccagggg

SEQ ID NO: 2902156 - RNA, 15 nt, Human
ccucaaccuccuggg

SEQ ID NO: 2902157 - RNA, 15 nt, Human
ccucaaaucguccag

SEQ ID NO: 2902158 - RNA, 19 nt, Human
ccucaggcaggaagggcag

SEQ ID NO: 2902159 - RNA, 15 nt, Human
ccucaggcaggaagg

SEQ ID NO: 2902160 - RNA, 13 nt, Human
ccucaggcaggaa

SEQ ID NO: 2902161 - RNA, 14 nt, Human
ccucagcugaaugc

SEQ ID NO: 2902162 - RNA, 21 nt, Human
ccucaggccaggugcaguggc

SEQ ID NO: 2902163 - RNA, 20 nt, Human
ccucauucaaagggacgguc

SEQ ID NO: 2902164 - RNA, 21 nt, Human
ccucauuccaccuucccaugc

SEQ ID NO: 2902165 - RNA, 18 nt, Human
ccucagcugccucacuuc

SEQ ID NO: 2902166 - RNA, 17 nt, Human
ccucagcugccucacuu

SEQ ID NO: 2902167 - RNA, 16 nt, Human
ccucagcugccucacu

SEQ ID NO: 2902168 - RNA, 15 nt, Human
ccucagcugccucac

SEQ ID NO: 2902169 - RNA, 14 nt, Human
ccucagcugccuca

SEQ ID NO: 2902170 - RNA, 13 nt, Human
ccucagcugccuc

SEQ ID NO: 2902171 - RNA, 20 nt, Human
ccucaagugauucuccugcc

SEQ ID NO: 2902172 - RNA, 20 nt, Human
ccucaagguuuuagguucua

SEQ ID NO: 2902173 - RNA, 22 nt, Human
ccucaagguuuuagguucuaaa

SEQ ID NO: 2902174 - RNA, 23 nt, Human
ccucaagguuuuagguucuaaag

SEQ ID NO: 2902175 - RNA, 16 nt, Human
ccucaaguaaacuccc

SEQ ID NO: 2902176 - RNA, 12 nt, Human
ccucaaccuccu

SEQ ID NO: 2902177 - RNA, 23 nt, Human
ccucaagugauucuccugccuca

SEQ ID NO: 2902178 - RNA, 17 nt, Human
ccucaagugauccuccc

SEQ ID NO: 2902179 - RNA, 18 nt, Human
ccucaagugauccuccca

SEQ ID NO: 2902180 - RNA, 19 nt, Human
ccucaagugauccucccac

SEQ ID NO: 2902181 - RNA, 13 nt, Human
ccucagcuaccca

SEQ ID NO: 2902182 - RNA, 20 nt, Human
ccucagcuacccacuauccu

SEQ ID NO: 2902183 - RNA, 23 nt, Human
ccucccaucauuacccuucccug

SEQ ID NO: 2902184 - RNA, 20 nt, Human
ccucauuuaucccucaaccc

SEQ ID NO: 2902185 - RNA, 22 nt, Human
ccucauuucaggagcagccuca

SEQ ID NO: 2902186 - RNA, 11 nt, Human
ccucauuucuc

SEQ ID NO: 2902187 - RNA, 19 nt, Human
ccucauuuaucccucaacc

SEQ ID NO: 2902188 - RNA, 16 nt, Human
ccucauuuaucccuca

SEQ ID NO: 2902189 - RNA, 21 nt, Human
ccucccagggccagggcccug

SEQ ID NO: 2902190 - RNA, 17 nt, Human
ccucccaguaccuccug

SEQ ID NO: 2902191 - RNA, 19 nt, Human
ccucauugacaagaacuga

SEQ ID NO: 2902192 - RNA, 15 nt, Human
ccucccaggcucuca

SEQ ID NO: 2902193 - RNA, 14 nt, Human
ccucccagggccag

SEQ ID NO: 2902194 - RNA, 18 nt, Human
ccuaauaaacauccuuca

SEQ ID NO: 2902195 - RNA, 20 nt, Human
ccgugagcgccugugcacac

SEQ ID NO: 2902196 - RNA, 21 nt, Human
ccgugagcgccugugcacaca

SEQ ID NO: 2902197 - RNA, 22 nt, Human
ccgugagcgccugugcacacac

SEQ ID NO: 2902198 - RNA, 13 nt, Human
ccgucugugaauu

SEQ ID NO: 2902199 - RNA, 23 nt, Human
ccgucugugugugaccccuccug

SEQ ID NO: 2902200 - RNA, 17 nt, Human
ccgugaaaacggagcug

SEQ ID NO: 2902201 - RNA, 18 nt, Human
ccgugaaaacggagcuga

SEQ ID NO: 2902202 - RNA, 16 nt, Human
ccgugaacugugcaua

SEQ ID NO: 2902203 - RNA, 22 nt, Human
ccgugagccaaucccucaccuu

SEQ ID NO: 2902204 - RNA, 19 nt, Human
ccgugagcaggaaggccug

SEQ ID NO: 2902205 - RNA, 20 nt, Human
ccgugagcaggaaggccugg

SEQ ID NO: 2902206 - RNA, 21 nt, Human
ccgugagcaggaaggccuggg

SEQ ID NO: 2902207 - RNA, 22 nt, Human
ccgugagcaggaaggccugggu

SEQ ID NO: 2902208 - RNA, 23 nt, Human
ccgugaaggcuucucuguucuac

SEQ ID NO: 2902209 - RNA, 17 nt, Human
ccuaaugucuucauaaa

SEQ ID NO: 2902210 - RNA, 12 nt, Human
ccuaaugcugca

SEQ ID NO: 2902211 - RNA, 22 nt, Human
ccuaauaaacauccuucaagaa

SEQ ID NO: 2902212 - RNA, 20 nt, Human
ccuaaugcgcaggcuggccc

SEQ ID NO: 2902213 - RNA, 21 nt, Human
ccuaaugcgcaggcuggcccu

SEQ ID NO: 2902214 - RNA, 12 nt, Human
ccuaauucagcc

SEQ ID NO: 2902215 - RNA, 20 nt, Human
ccuaauucagccauguacag

SEQ ID NO: 2902216 - RNA, 17 nt, Human
ccuagcccaggagagag

SEQ ID NO: 2902217 - RNA, 18 nt, Human
ccuagcccaggagagaga

SEQ ID NO: 2902218 - RNA, 19 nt, Human
ccuagcccaggagagagaa

SEQ ID NO: 2902219 - RNA, 20 nt, Human
ccuagcccaggagagagaaa

SEQ ID NO: 2902220 - RNA, 13 nt, Human
ccuagccauucug

SEQ ID NO: 2902221 - RNA, 13 nt, Human
ccuagcccacccu

SEQ ID NO: 2902222 - RNA, 14 nt, Human
ccuagcccacccug

SEQ ID NO: 2902223 - RNA, 15 nt, Human
ccuagcccacccugc

SEQ ID NO: 2902224 - RNA, 16 nt, Human
ccuagcccacccugcu

SEQ ID NO: 2902225 - RNA, 17 nt, Human
ccuagcccacccugcug

SEQ ID NO: 2902226 - RNA, 20 nt, Human
ccuagcccacccugcugccu

SEQ ID NO: 2902227 - RNA, 13 nt, Human
ccuagcccagcgc

SEQ ID NO: 2902228 - RNA, 17 nt, Human
ccuagcccagcgcucug

SEQ ID NO: 2902229 - RNA, 20 nt, Human
ccuagcccagcgcucugccu

SEQ ID NO: 2902230 - RNA, 23 nt, Human
ccuagcccagcgcucugccucac

SEQ ID NO: 2902231 - RNA, 11 nt, Human
ccuagcccagg

SEQ ID NO: 2902232 - RNA, 13 nt, Human
ccuagcccaggag

SEQ ID NO: 2902233 - RNA, 15 nt, Human
ccuagcccaggagag

SEQ ID NO: 2902234 - RNA, 19 nt, Human
ccuagccuuagaagucaca

SEQ ID NO: 2902235 - RNA, 22 nt, Human
ccuagccuuagaagucacacag

SEQ ID NO: 2902236 - RNA, 16 nt, Human
ccuaauuaccagucuu

SEQ ID NO: 2902237 - RNA, 17 nt, Human
ccuagccuguuucuucc

SEQ ID NO: 2902238 - RNA, 11 nt, Human
ccggccagcca

SEQ ID NO: 2902239 - RNA, 14 nt, Human
ccggccagccagcc

SEQ ID NO: 2902240 - RNA, 17 nt, Human
ccggccagccagccacu

SEQ ID NO: 2902241 - RNA, 18 nt, Human
ccggccagccagccacuc

SEQ ID NO: 2902242 - RNA, 14 nt, Human
ccgguguucuaaga

SEQ ID NO: 2902243 - RNA, 15 nt, Human
ccgguguucuaagau

SEQ ID NO: 2902244 - RNA, 11 nt, Human
ccggcaggccc

SEQ ID NO: 2902245 - RNA, 12 nt, Human
ccggcaggcccu

SEQ ID NO: 2902246 - RNA, 13 nt, Human
ccggcaggcccug

SEQ ID NO: 2902247 - RNA, 14 nt, Human
ccggcaggcccugc

SEQ ID NO: 2902248 - RNA, 15 nt, Human
ccggcaggcccugca

SEQ ID NO: 2902249 - RNA, 16 nt, Human
ccggcaggcccugcag

SEQ ID NO: 2902250 - RNA, 17 nt, Human
ccggcaggcccugcagu

SEQ ID NO: 2902251 - RNA, 18 nt, Human
ccggcaggcccugcagug

SEQ ID NO: 2902252 - RNA, 20 nt, Human
ccggcaggcccugcaguguu

SEQ ID NO: 2902253 - RNA, 21 nt, Human
ccggcaggcccugcaguguuc

SEQ ID NO: 2902254 - RNA, 15 nt, Human
ccgucuguccaucug

SEQ ID NO: 2902255 - RNA, 16 nt, Human
ccgucuguccaucugc

SEQ ID NO: 2902256 - RNA, 22 nt, Human
ccgucuguccaucugcccgccu

SEQ ID NO: 2902257 - RNA, 11 nt, Human
ccguccucacc

SEQ ID NO: 2902258 - RNA, 14 nt, Human
ccguccucaccccu

SEQ ID NO: 2902259 - RNA, 16 nt, Human
ccguccucaccccugu

SEQ ID NO: 2902260 - RNA, 19 nt, Human
ccguccucaccccuguccu

SEQ ID NO: 2902261 - RNA, 20 nt, Human
ccguccucaccccuguccuc

SEQ ID NO: 2902262 - RNA, 23 nt, Human
ccguccucaccccuguccucacu

SEQ ID NO: 2902263 - RNA, 24 nt, Human
ccguccucaccccuguccucacug

SEQ ID NO: 2902264 - RNA, 14 nt, Human
ccgucccccucugg

SEQ ID NO: 2902265 - RNA, 18 nt, Human
ccguccaggagccugugc

SEQ ID NO: 2902266 - RNA, 15 nt, Human
ccgguuucuuuuuaa

SEQ ID NO: 2902267 - RNA, 19 nt, Human
ccguaauaacacccuuccu

SEQ ID NO: 2902268 - RNA, 20 nt, Human
ccguaauaacacccuuccuu

SEQ ID NO: 2902269 - RNA, 17 nt, Human
ccguaauaauuauuauu

SEQ ID NO: 2902270 - RNA, 21 nt, Human
ccguaaacacgccugcaaacg

SEQ ID NO: 2902271 - RNA, 18 nt, Human
ccguacauucaauguuua

SEQ ID NO: 2902272 - RNA, 16 nt, Human
cccuuuuuuguccccc

SEQ ID NO: 2902273 - RNA, 17 nt, Human
cccuuuuuuguccccca

SEQ ID NO: 2902274 - RNA, 18 nt, Human
cccuuuuuugucccccaa

SEQ ID NO: 2902275 - RNA, 19 nt, Human
cccuuuuuugucccccaac

SEQ ID NO: 2902276 - RNA, 21 nt, Human
cccuuuuuugucccccaacuu

SEQ ID NO: 2902277 - RNA, 21 nt, Human
cccuuuuuuuccuuuuucuga

SEQ ID NO: 2902278 - RNA, 23 nt, Human
cccuuuuuuuccuuuuucugauu

SEQ ID NO: 2902279 - RNA, 14 nt, Human
ccgacaggcccugg

SEQ ID NO: 2902280 - RNA, 15 nt, Human
ccgacaggcccuggc

SEQ ID NO: 2902281 - RNA, 15 nt, Human
ccgacagccuggcac

SEQ ID NO: 2902282 - RNA, 22 nt, Human
ccgacagccuggcacagggcag

SEQ ID NO: 2902283 - RNA, 13 nt, Human
ccgacagccuggc

SEQ ID NO: 2902284 - RNA, 14 nt, Human
ccgacagccuggca

SEQ ID NO: 2902285 - RNA, 12 nt, Human
ccgacagccugg

SEQ ID NO: 2902286 - RNA, 18 nt, Human
ccgaagaauggagaggaa

SEQ ID NO: 2902287 - RNA, 23 nt, Human
ccgaacaucaccgacgcgucucc

SEQ ID NO: 2902288 - RNA, 15 nt, Human
ccgaacacccucgaa

SEQ ID NO: 2902289 - RNA, 18 nt, Human
cccuccuuguccacccac

SEQ ID NO: 2902290 - RNA, 14 nt, Human
cccuccuuucacca

SEQ ID NO: 2902291 - RNA, 12 nt, Human
cccuccuucaga

SEQ ID NO: 2902292 - RNA, 19 nt, Human
cccuccugugcugggggaa

SEQ ID NO: 2902293 - RNA, 23 nt, Human
cccuccugugcugggggaaugag

SEQ ID NO: 2902294 - RNA, 23 nt, Human
cccugugaguuuguacagucuug

SEQ ID NO: 2902295 - RNA, 16 nt, Human
cccuguggagacuggg

SEQ ID NO: 2902296 - RNA, 21 nt, Human
cccuguggaugagcccucaga

SEQ ID NO: 2902297 - RNA, 20 nt, Human
cccuguggaugagcccucag

SEQ ID NO: 2902298 - RNA, 23 nt, Human
cccuguggaugagcccucagaac

SEQ ID NO: 2902299 - RNA, 22 nt, Human
cccuguggaugagcccucagaa

SEQ ID NO: 2902300 - RNA, 23 nt, Human
cccuucucauuccaacagugagu

SEQ ID NO: 2902301 - RNA, 14 nt, Human
cccuguggcccugg

SEQ ID NO: 2902302 - RNA, 15 nt, Human
cccuguggcccuggc

SEQ ID NO: 2902303 - RNA, 12 nt, Human
cccugugggacc

SEQ ID NO: 2902304 - RNA, 16 nt, Human
cccugugggaccccag

SEQ ID NO: 2902305 - RNA, 17 nt, Human
cccugugggaccccagg

SEQ ID NO: 2902306 - RNA, 18 nt, Human
cccugugggaccccaggc

SEQ ID NO: 2902307 - RNA, 19 nt, Human
cccugugggaccccaggcc

SEQ ID NO: 2902308 - RNA, 13 nt, Human
cccuucucacagc

SEQ ID NO: 2902309 - RNA, 15 nt, Human
cccuucucacagcac

SEQ ID NO: 2902310 - RNA, 19 nt, Human
cccuucucacagcacaugc

SEQ ID NO: 2902311 - RNA, 15 nt, Human
ccgcagaccucugga

SEQ ID NO: 2902312 - RNA, 13 nt, Human
ccugucuccuuuc

SEQ ID NO: 2902313 - RNA, 23 nt, Human
ccugucuccuuucaccccagggc

SEQ ID NO: 2902314 - RNA, 20 nt, Human
ccugucucauccccaggggu

SEQ ID NO: 2902315 - RNA, 15 nt, Human
ccugucuccacugug

SEQ ID NO: 2902316 - RNA, 16 nt, Human
ccugucuccacugugc

SEQ ID NO: 2902317 - RNA, 23 nt, Human
ccugucuccacugugccuuugca

SEQ ID NO: 2902318 - RNA, 18 nt, Human
ccugucucauccccaggg

SEQ ID NO: 2902319 - RNA, 19 nt, Human
ccuguaacauacuggccug

SEQ ID NO: 2902320 - RNA, 23 nt, Human
ccuguaacauacuggccuggacu

SEQ ID NO: 2902321 - RNA, 22 nt, Human
ccugguuuccugcccugggagg

SEQ ID NO: 2902322 - RNA, 22 nt, Human
ccugguuuuuaaauagaguuug

SEQ ID NO: 2902323 - RNA, 12 nt, Human
ccugcugcaggg

SEQ ID NO: 2902324 - RNA, 13 nt, Human
ccugcugcagggg

SEQ ID NO: 2902325 - RNA, 12 nt, Human
ccuggaugucug

SEQ ID NO: 2902326 - RNA, 17 nt, Human
ccuggaugucugaacuu

SEQ ID NO: 2902327 - RNA, 18 nt, Human
ccuggaugucugaacuuu

SEQ ID NO: 2902328 - RNA, 17 nt, Human
ccuggauguugugugua

SEQ ID NO: 2902329 - RNA, 12 nt, Human
ccuggauguuug

SEQ ID NO: 2902330 - RNA, 14 nt, Human
ccuggauuucuggu

SEQ ID NO: 2902331 - RNA, 21 nt, Human
ccuggauuucugguucugaug

SEQ ID NO: 2902332 - RNA, 12 nt, Human
ccuggcacacau

SEQ ID NO: 2902333 - RNA, 13 nt, Human
ccuggcacacauc

SEQ ID NO: 2902334 - RNA, 15 nt, Human
ccuggcacacaucag

SEQ ID NO: 2902335 - RNA, 22 nt, Human
ccuggccucaagugauucuccu

SEQ ID NO: 2902336 - RNA, 14 nt, Human
ccuggccccucgcc

SEQ ID NO: 2902337 - RNA, 15 nt, Human
ccuggccccucgccu

SEQ ID NO: 2902338 - RNA, 17 nt, Human
ccuggccccucgccugu

SEQ ID NO: 2902339 - RNA, 13 nt, Human
ccuggccucagac

SEQ ID NO: 2902340 - RNA, 15 nt, Human
ccuggccucagacug

SEQ ID NO: 2902341 - RNA, 16 nt, Human
ccuggccucagacugc

SEQ ID NO: 2902342 - RNA, 20 nt, Human
ccuggccucagacugcaccc

SEQ ID NO: 2902343 - RNA, 22 nt, Human
ccuggccucagacugcacccag

SEQ ID NO: 2902344 - RNA, 23 nt, Human
ccuggccucagacugcacccagg

SEQ ID NO: 2902345 - RNA, 11 nt, Human
ccuggccucca

SEQ ID NO: 2902346 - RNA, 13 nt, Human
ccuggccuccagg

SEQ ID NO: 2902347 - RNA, 14 nt, Human
ccuggccuccaggc

SEQ ID NO: 2902348 - RNA, 15 nt, Human
ccuggccuccaggcc

SEQ ID NO: 2902349 - RNA, 16 nt, Human
ccuggccuccaggccc

SEQ ID NO: 2902350 - RNA, 17 nt, Human
ccuggccuccaggcccg

SEQ ID NO: 2902351 - RNA, 18 nt, Human
ccuggccuccaggcccgu

SEQ ID NO: 2902352 - RNA, 19 nt, Human
ccuggccuccaggcccguc

SEQ ID NO: 2902353 - RNA, 12 nt, Human
ccuggccuggca

SEQ ID NO: 2902354 - RNA, 13 nt, Human
ccuggccuggcac

SEQ ID NO: 2902355 - RNA, 19 nt, Human
ccugguggcagugggagcu

SEQ ID NO: 2902356 - RNA, 18 nt, Human
ccugguggcagugggagc

SEQ ID NO: 2902357 - RNA, 14 nt, Human
ccuggggcugcugg

SEQ ID NO: 2902358 - RNA, 18 nt, Human
ccuggggcucugugcagg

SEQ ID NO: 2902359 - RNA, 15 nt, Human
ccuggggcucugugc

SEQ ID NO: 2902360 - RNA, 15 nt, Human
ccuggggcugcuggc

SEQ ID NO: 2902361 - RNA, 15 nt, Human
ccugguggcaguggg

SEQ ID NO: 2902362 - RNA, 17 nt, Human
ccuggggcugcuggccu

SEQ ID NO: 2902363 - RNA, 20 nt, Human
ccugguggcagugggagcug

SEQ ID NO: 2902364 - RNA, 12 nt, Human
ccuggugucacc

SEQ ID NO: 2902365 - RNA, 13 nt, Human
ccuggugucaccc

SEQ ID NO: 2902366 - RNA, 16 nt, Human
ccuggugucaccccag

SEQ ID NO: 2902367 - RNA, 17 nt, Human
ccuggugucaccccaga

SEQ ID NO: 2902368 - RNA, 18 nt, Human
ccuggugucaccccagag

SEQ ID NO: 2902369 - RNA, 19 nt, Human
ccuggugucaccccagagc

SEQ ID NO: 2902370 - RNA, 20 nt, Human
ccuggugucaccccagagcc

SEQ ID NO: 2902371 - RNA, 21 nt, Human
ccuggugucaccccagagcca

SEQ ID NO: 2902372 - RNA, 23 nt, Human
ccuggugucaccccagagccaca

SEQ ID NO: 2902373 - RNA, 13 nt, Human
ccugguucccguu

SEQ ID NO: 2902374 - RNA, 16 nt, Human
ccugguuuccugcccu

SEQ ID NO: 2902375 - RNA, 22 nt, Human
ccugguucccguuucuccaccu

SEQ ID NO: 2902376 - RNA, 21 nt, Human
ccugguuuccugcccugggag

SEQ ID NO: 2902377 - RNA, 20 nt, Human
ccugguuuccugcccuggga

SEQ ID NO: 2902378 - RNA, 19 nt, Human
ccugguuuccugcccuggg

SEQ ID NO: 2902379 - RNA, 18 nt, Human
ccugguuuccugcccugg

SEQ ID NO: 2902380 - RNA, 15 nt, Human
ccuggggagaaagua

SEQ ID NO: 2902381 - RNA, 12 nt, Human
ccuggggaccca

SEQ ID NO: 2902382 - RNA, 13 nt, Human
ccuggggacccac

SEQ ID NO: 2902383 - RNA, 17 nt, Human
ccuggggacccacgugg

SEQ ID NO: 2902384 - RNA, 13 nt, Human
ccuggggcacagu

SEQ ID NO: 2902385 - RNA, 14 nt, Human
ccuggggcacaguc

SEQ ID NO: 2902386 - RNA, 22 nt, Human
ccuggggcacaguccaggaaca

SEQ ID NO: 2902387 - RNA, 18 nt, Human
ccuggggaaccugacccc

SEQ ID NO: 2902388 - RNA, 24 nt, Human
ccugggcucugccccagcucuggc

SEQ ID NO: 2902389 - RNA, 22 nt, Human
ccugggcucugccccagcucug

SEQ ID NO: 2902390 - RNA, 20 nt, Human
ccugggcucugccccagcuc

SEQ ID NO: 2902391 - RNA, 14 nt, Human
ccugggcucugccc

SEQ ID NO: 2902392 - RNA, 12 nt, Human
ccugggcucugc

SEQ ID NO: 2902393 - RNA, 22 nt, Human
ccugggcucggaggcugccccc

SEQ ID NO: 2902394 - RNA, 16 nt, Human
ccugggcucggaggcu

SEQ ID NO: 2902395 - RNA, 18 nt, Human
ccugggcucggaggcugc

SEQ ID NO: 2902396 - RNA, 19 nt, Human
ccugggcucggaggcugcc

SEQ ID NO: 2902397 - RNA, 21 nt, Human
ccugggcucggaggcugcccc

SEQ ID NO: 2902398 - RNA, 14 nt, Human
ccugggcucggagg

SEQ ID NO: 2902399 - RNA, 15 nt, Human
ccugggcucggaggc

SEQ ID NO: 2902400 - RNA, 15 nt, Human
ccuggccuggcacac

SEQ ID NO: 2902401 - RNA, 16 nt, Human
ccuggccuggcacaca

SEQ ID NO: 2902402 - RNA, 19 nt, Human
ccuggccuggcacacauca

SEQ ID NO: 2902403 - RNA, 13 nt, Human
ccuggccuggccc

SEQ ID NO: 2902404 - RNA, 14 nt, Human
ccuggccuggcccu

SEQ ID NO: 2902405 - RNA, 15 nt, Human
ccuggccuggcccug

SEQ ID NO: 2902406 - RNA, 16 nt, Human
ccuggccuggcccugc

SEQ ID NO: 2902407 - RNA, 17 nt, Human
ccuggccuggcccugcc

SEQ ID NO: 2902408 - RNA, 18 nt, Human
ccuggccuggcccugccc

SEQ ID NO: 2902409 - RNA, 20 nt, Human
ccuggccuggcccugcccug

SEQ ID NO: 2902410 - RNA, 22 nt, Human
ccuggccuggcccugcccugag

SEQ ID NO: 2902411 - RNA, 15 nt, Human
ccuggccuuccuguc

SEQ ID NO: 2902412 - RNA, 22 nt, Human
ccucggccucccaaagugcugg

SEQ ID NO: 2902413 - RNA, 12 nt, Human
ccucuuucucuc

SEQ ID NO: 2902414 - RNA, 13 nt, Human
ccucuuucucucc

SEQ ID NO: 2902415 - RNA, 15 nt, Human
ccucuuucucucccc

SEQ ID NO: 2902416 - RNA, 18 nt, Human
ccucuuucucuccccaac

SEQ ID NO: 2902417 - RNA, 21 nt, Human
ccucuuucucuccccaacccc

SEQ ID NO: 2902418 - RNA, 12 nt, Human
ccucuuucucuu

SEQ ID NO: 2902419 - RNA, 13 nt, Human
ccucuuucucuuu

SEQ ID NO: 2902420 - RNA, 18 nt, Human
ccucuuucucuuucuucc

SEQ ID NO: 2902421 - RNA, 20 nt, Human
ccucuuucucuuucuuccuu

SEQ ID NO: 2902422 - RNA, 21 nt, Human
ccucuuucucuuucuuccuuu

SEQ ID NO: 2902423 - RNA, 15 nt, Human
ccucuuucuuauaau

SEQ ID NO: 2902424 - RNA, 12 nt, Human
ccucuugcuguc

SEQ ID NO: 2902425 - RNA, 13 nt, Human
ccucuugcugucu

SEQ ID NO: 2902426 - RNA, 14 nt, Human
ccucuugcugucuc

SEQ ID NO: 2902427 - RNA, 15 nt, Human
ccucuugcugucucu

SEQ ID NO: 2902428 - RNA, 16 nt, Human
ccucuugcugucucug

SEQ ID NO: 2902429 - RNA, 23 nt, Human
ccucuugccacugccucuuccuc

SEQ ID NO: 2902430 - RNA, 22 nt, Human
ccucuugccacugccucuuccu

SEQ ID NO: 2902431 - RNA, 14 nt, Human
ccucuugccacugc

SEQ ID NO: 2902432 - RNA, 20 nt, Human
ccugcaggaccugccuguag

SEQ ID NO: 2902433 - RNA, 19 nt, Human
ccugcaggaccugccugua

SEQ ID NO: 2902434 - RNA, 17 nt, Human
ccugauaaagcacagcu

SEQ ID NO: 2902435 - RNA, 18 nt, Human
ccugauaaagcacagcug

SEQ ID NO: 2902436 - RNA, 23 nt, Human
ccugaguuuccuuuucugucucu

SEQ ID NO: 2902437 - RNA, 20 nt, Human
ccugauaaaacaacagcucg

SEQ ID NO: 2902438 - RNA, 14 nt, Human
ccugauaugauuua

SEQ ID NO: 2902439 - RNA, 18 nt, Human
ccugcaggaccugccugu

SEQ ID NO: 2902440 - RNA, 19 nt, Human
ccugauaugauuuaaaaca

SEQ ID NO: 2902441 - RNA, 20 nt, Human
ccugauaugauuuaaaacau

SEQ ID NO: 2902442 - RNA, 12 nt, Human
ccugacccgucu

SEQ ID NO: 2902443 - RNA, 18 nt, Human
ccugaccccucauagccc

SEQ ID NO: 2902444 - RNA, 22 nt, Human
ccugacccgucuaauauauaaa

SEQ ID NO: 2902445 - RNA, 23 nt, Human
ccugagcaacagagugagacccu

SEQ ID NO: 2902446 - RNA, 21 nt, Human
ccugagcaacagagugagacc

SEQ ID NO: 2902447 - RNA, 23 nt, Human
ccugaggucgggaguuggagacc

SEQ ID NO: 2902448 - RNA, 14 nt, Human
ccugaggucaggga

SEQ ID NO: 2902449 - RNA, 20 nt, Human
ccugaggucagggagugcug

SEQ ID NO: 2902450 - RNA, 22 nt, Human
ccugaggucagggagugcuggc

SEQ ID NO: 2902451 - RNA, 20 nt, Human
ccugaggugaaagggagcua

SEQ ID NO: 2902452 - RNA, 14 nt, Human
ccugagguguacca

SEQ ID NO: 2902453 - RNA, 22 nt, Human
ccugagggcagaaagguucugc

SEQ ID NO: 2902454 - RNA, 16 nt, Human
ccugagggaggaccug

SEQ ID NO: 2902455 - RNA, 17 nt, Human
ccugagggaggaccugg

SEQ ID NO: 2902456 - RNA, 18 nt, Human
ccugagggaggaccuggg

SEQ ID NO: 2902457 - RNA, 21 nt, Human
ccugagggaggaccuggggca

SEQ ID NO: 2902458 - RNA, 22 nt, Human
ccugagggaggaccuggggcac

SEQ ID NO: 2902459 - RNA, 23 nt, Human
ccugagggaggaccuggggcaca

SEQ ID NO: 2902460 - RNA, 22 nt, Human
ccugaggcuuuggauuugacau

SEQ ID NO: 2902461 - RNA, 20 nt, Human
ccugaggcuuuggauuugac

SEQ ID NO: 2902462 - RNA, 23 nt, Human
ccugagggcagaaagguucugcc

SEQ ID NO: 2902463 - RNA, 19 nt, Human
ccugaggguccccaccugg

SEQ ID NO: 2902464 - RNA, 13 nt, Human
ccugagggucccc

SEQ ID NO: 2902465 - RNA, 23 nt, Human
ccugccauuugcacccuccgccu

SEQ ID NO: 2902466 - RNA, 16 nt, Human
ccugcccaagcccagg

SEQ ID NO: 2902467 - RNA, 17 nt, Human
ccugcccaagcccaggc

SEQ ID NO: 2902468 - RNA, 18 nt, Human
ccugcccaagcccaggcc

SEQ ID NO: 2902469 - RNA, 17 nt, Human
ccugccauuugcacccu

SEQ ID NO: 2902470 - RNA, 19 nt, Human
ccugccauguaccuccccu

SEQ ID NO: 2902471 - RNA, 21 nt, Human
ccugccauguaccuccccugc

SEQ ID NO: 2902472 - RNA, 23 nt, Human
ccugccauguaccuccccugccu

SEQ ID NO: 2902473 - RNA, 14 nt, Human
ccugccauuuaaaa

SEQ ID NO: 2902474 - RNA, 18 nt, Human
ccugccauuuaaaaaguu

SEQ ID NO: 2902475 - RNA, 16 nt, Human
ccugccaugcaagaac

SEQ ID NO: 2902476 - RNA, 15 nt, Human
ccugccaugccagga

SEQ ID NO: 2902477 - RNA, 19 nt, Human
ccugcccaggccccugcca

SEQ ID NO: 2902478 - RNA, 18 nt, Human
ccugcccaggccccugcc

SEQ ID NO: 2902479 - RNA, 14 nt, Human
ccugcccacacagg

SEQ ID NO: 2902480 - RNA, 23 nt, Human
ccugcccaaugagacucuagggu

SEQ ID NO: 2902481 - RNA, 19 nt, Human
ccugccaugccaggaaccu

SEQ ID NO: 2902482 - RNA, 21 nt, Human
ccugcccaggccccugccacc

SEQ ID NO: 2902483 - RNA, 15 nt, Human
ccugccucagccucc

SEQ ID NO: 2902484 - RNA, 16 nt, Human
ccugccucagccuccc

SEQ ID NO: 2902485 - RNA, 19 nt, Human
ccugccucagccucccgag

SEQ ID NO: 2902486 - RNA, 17 nt, Human
ccugccucagccucccg

SEQ ID NO: 2902487 - RNA, 22 nt, Human
ccugcccacacagguucacgug

SEQ ID NO: 2902488 - RNA, 20 nt, Human
ccugcugagucccaggcuga

SEQ ID NO: 2902489 - RNA, 19 nt, Human
ccugcugagucccaggcug

SEQ ID NO: 2902490 - RNA, 15 nt, Human
ccugcugagucccag

SEQ ID NO: 2902491 - RNA, 18 nt, Human
ccugcugagucccaggcu

SEQ ID NO: 2902492 - RNA, 20 nt, Human
cccaacuacuaucucagaga

SEQ ID NO: 2902493 - RNA, 20 nt, Human
cccaacuaauuuuuguauuu

SEQ ID NO: 2902494 - RNA, 18 nt, Human
cccaagacagaugcccca

SEQ ID NO: 2902495 - RNA, 20 nt, Human
cccaacuccaccagauagca

SEQ ID NO: 2902496 - RNA, 20 nt, Human
cccaagacuucauugucccu

SEQ ID NO: 2902497 - RNA, 21 nt, Human
cccaagagaaggggaagcacu

SEQ ID NO: 2902498 - RNA, 21 nt, Human
cccaagacagaugccccagag

SEQ ID NO: 2902499 - RNA, 17 nt, Human
cccaagaccuaaggguu

SEQ ID NO: 2902500 - RNA, 20 nt, Human
cccaagacagaugccccaga

SEQ ID NO: 2902501 - RNA, 19 nt, Human
cccaagacagaugccccag

SEQ ID NO: 2902502 - RNA, 15 nt, Human
cccaagcucugcucc

SEQ ID NO: 2902503 - RNA, 15 nt, Human
cccacccacauguga

SEQ ID NO: 2902504 - RNA, 14 nt, Human
cccacccacaugug

SEQ ID NO: 2902505 - RNA, 12 nt, Human
cccaccccacac

SEQ ID NO: 2902506 - RNA, 13 nt, Human
cccacccagucuc

SEQ ID NO: 2902507 - RNA, 16 nt, Human
cccacccagucucugc

SEQ ID NO: 2902508 - RNA, 20 nt, Human
cccacccagucucugcucca

SEQ ID NO: 2902509 - RNA, 12 nt, Human
cccacccaggag

SEQ ID NO: 2902510 - RNA, 13 nt, Human
cccacccaggagg

SEQ ID NO: 2902511 - RNA, 12 nt, Human
cccaagcucugc

SEQ ID NO: 2902512 - RNA, 23 nt, Human
cccaagaggucaaggcugcagug

SEQ ID NO: 2902513 - RNA, 14 nt, Human
cccaagcucugcuc

SEQ ID NO: 2902514 - RNA, 13 nt, Human
cccaagcucugcu

SEQ ID NO: 2902515 - RNA, 22 nt, Human
cccacugcuuuuggucugugug

SEQ ID NO: 2902516 - RNA, 23 nt, Human
cccacugcuuuuggucuguguga

SEQ ID NO: 2902517 - RNA, 16 nt, Human
cccacugacagccucc

SEQ ID NO: 2902518 - RNA, 15 nt, Human
cccacugcaauccug

SEQ ID NO: 2902519 - RNA, 18 nt, Human
cccacugcaauccugucu

SEQ ID NO: 2902520 - RNA, 12 nt, Human
cccacugaugcu

SEQ ID NO: 2902521 - RNA, 22 nt, Human
cccacugaugcuguucucuucu

SEQ ID NO: 2902522 - RNA, 15 nt, Human
cccacucuccccaca

SEQ ID NO: 2902523 - RNA, 14 nt, Human
cccacucuccccac

SEQ ID NO: 2902524 - RNA, 11 nt, Human
cccacucuccc

SEQ ID NO: 2902525 - RNA, 17 nt, Human
cccacucuccccacacu

SEQ ID NO: 2902526 - RNA, 14 nt, Human
cccacccucccugg

SEQ ID NO: 2902527 - RNA, 13 nt, Human
cccaccccucccu

SEQ ID NO: 2902528 - RNA, 11 nt, Human
cccaccccugc

SEQ ID NO: 2902529 - RNA, 15 nt, Human
cccaccccaccugca

SEQ ID NO: 2902530 - RNA, 16 nt, Human
cccaccccaccugcag

SEQ ID NO: 2902531 - RNA, 14 nt, Human
cccaccccacacuu

SEQ ID NO: 2902532 - RNA, 13 nt, Human
cccaccccacacu

SEQ ID NO: 2902533 - RNA, 22 nt, Human
ccauuuccauguccccucccag

SEQ ID NO: 2902534 - RNA, 22 nt, Human
ccauuucauuugugccagaaug

SEQ ID NO: 2902535 - RNA, 21 nt, Human
ccauuucauuugugccagaau

SEQ ID NO: 2902536 - RNA, 12 nt, Human
ccauuuauuuau

SEQ ID NO: 2902537 - RNA, 17 nt, Human
ccauuucaauucucaaa

SEQ ID NO: 2902538 - RNA, 20 nt, Human
ccauuuaugugagugugugu

SEQ ID NO: 2902539 - RNA, 13 nt, Human
ccauuucagagag

SEQ ID NO: 2902540 - RNA, 19 nt, Human
ccauuucauauucuuucaa

SEQ ID NO: 2902541 - RNA, 19 nt, Human
ccauugcuguucuacuuuu

SEQ ID NO: 2902542 - RNA, 20 nt, Human
ccauugcuguucuacuuuuu

SEQ ID NO: 2902543 - RNA, 17 nt, Human
ccauugccuagcucuuu

SEQ ID NO: 2902544 - RNA, 21 nt, Human
ccauugccaccaggagaacca

SEQ ID NO: 2902545 - RNA, 17 nt, Human
ccauugccaccaggaga

SEQ ID NO: 2902546 - RNA, 16 nt, Human
ccauugccaccaggag

SEQ ID NO: 2902547 - RNA, 15 nt, Human
ccauugccaccagga

SEQ ID NO: 2902548 - RNA, 19 nt, Human
ccauugcacuccagccugg

SEQ ID NO: 2902549 - RNA, 20 nt, Human
ccauugcacuccagccuggg

SEQ ID NO: 2902550 - RNA, 20 nt, Human
ccauugcaucaccucuguaa

SEQ ID NO: 2902551 - RNA, 13 nt, Human
ccauugcacccag

SEQ ID NO: 2902552 - RNA, 16 nt, Human
ccauugcacccagccc

SEQ ID NO: 2902553 - RNA, 20 nt, Human
ccauucuuccuaguuuucuc

SEQ ID NO: 2902554 - RNA, 22 nt, Human
ccauucuggauuuugucaagca

SEQ ID NO: 2902555 - RNA, 22 nt, Human
ccauucuuacuuacuaaaauau

SEQ ID NO: 2902556 - RNA, 23 nt, Human
ccauucuuacuuacuaaaauaua

SEQ ID NO: 2902557 - RNA, 19 nt, Human
ccauucuuccuaguuuucu

SEQ ID NO: 2902558 - RNA, 14 nt, Human
ccauucuuccuagu

SEQ ID NO: 2902559 - RNA, 16 nt, Human
ccaucccuccccaguu

SEQ ID NO: 2902560 - RNA, 21 nt, Human
ccauccauaaauccaguucua

SEQ ID NO: 2902561 - RNA, 19 nt, Human
ccauccagguucagcuugu

SEQ ID NO: 2902562 - RNA, 18 nt, Human
ccauccagguucagcuug

SEQ ID NO: 2902563 - RNA, 14 nt, Human
ccauaaucuggacu

SEQ ID NO: 2902564 - RNA, 21 nt, Human
ccauaaucuggacuccucugu

SEQ ID NO: 2902565 - RNA, 21 nt, Human
ccauaaugcuacugucucacu

SEQ ID NO: 2902566 - RNA, 23 nt, Human
ccauaaugcuaauuuaaagagac

SEQ ID NO: 2902567 - RNA, 20 nt, Human
ccauaagguuucguuucugu

SEQ ID NO: 2902568 - RNA, 22 nt, Human
ccauaagguuucguuucuguau

SEQ ID NO: 2902569 - RNA, 12 nt, Human
ccauaauacaaa

SEQ ID NO: 2902570 - RNA, 14 nt, Human
ccauaauacaaaag

SEQ ID NO: 2902571 - RNA, 23 nt, Human
ccaguuggguggaugccuggugg

SEQ ID NO: 2902572 - RNA, 17 nt, Human
ccaguugaauaaaagug

SEQ ID NO: 2902573 - RNA, 18 nt, Human
ccaguugaauaaaagugc

SEQ ID NO: 2902574 - RNA, 18 nt, Human
ccaguucgccuggagccc

SEQ ID NO: 2902575 - RNA, 19 nt, Human
ccaguucgccuggagcccu

SEQ ID NO: 2902576 - RNA, 20 nt, Human
ccaguucgccuggagcccuc

SEQ ID NO: 2902577 - RNA, 17 nt, Human
ccaugaggaaggaacag

SEQ ID NO: 2902578 - RNA, 22 nt, Human
ccaugaggagaaaaaaagcaug

SEQ ID NO: 2902579 - RNA, 23 nt, Human
ccaugaggagaaaaaaagcaugu

SEQ ID NO: 2902580 - RNA, 17 nt, Human
ccaugaguccuugaaaa

SEQ ID NO: 2902581 - RNA, 18 nt, Human
ccaugaguuugcccuggu

SEQ ID NO: 2902582 - RNA, 17 nt, Human
ccaugaguuugcccugg

SEQ ID NO: 2902583 - RNA, 22 nt, Human
ccauguagcccccuggccucug

SEQ ID NO: 2902584 - RNA, 23 nt, Human
ccauguagcccccuggccucugu

SEQ ID NO: 2902585 - RNA, 17 nt, Human
ccauguauaaaugugau

SEQ ID NO: 2902586 - RNA, 23 nt, Human
ccauguccaaagaggcugccccu

SEQ ID NO: 2902587 - RNA, 20 nt, Human
ccauguccaaagaggcugcc

SEQ ID NO: 2902588 - RNA, 12 nt, Human
ccaugucgccuc

SEQ ID NO: 2902589 - RNA, 16 nt, Human
ccauguccccucccag

SEQ ID NO: 2902590 - RNA, 16 nt, Human
ccauguccuaugugug

SEQ ID NO: 2902591 - RNA, 17 nt, Human
ccauguccuauguguga

SEQ ID NO: 2902592 - RNA, 19 nt, Human
ccauguccuaugugugacu

SEQ ID NO: 2902593 - RNA, 15 nt, Human
ccauguccucagcau

SEQ ID NO: 2902594 - RNA, 15 nt, Human
ccauguccccuccca

SEQ ID NO: 2902595 - RNA, 13 nt, Human
ccauguccccucc

SEQ ID NO: 2902596 - RNA, 15 nt, Human
ccaugucgccucugc

SEQ ID NO: 2902597 - RNA, 16 nt, Human
ccaugucgccucugca

SEQ ID NO: 2902598 - RNA, 17 nt, Human
ccaugucgccucugcau

SEQ ID NO: 2902599 - RNA, 14 nt, Human
ccauguagcccccu

SEQ ID NO: 2902600 - RNA, 20 nt, Human
ccauguagcccccuggccuc

SEQ ID NO: 2902601 - RNA, 14 nt, Human
ccauguagaagcug

SEQ ID NO: 2902602 - RNA, 15 nt, Human
ccauguagaagcugc

SEQ ID NO: 2902603 - RNA, 18 nt, Human
ccauguagaagcugcauc

SEQ ID NO: 2902604 - RNA, 19 nt, Human
ccauguagaagcugcaucu

SEQ ID NO: 2902605 - RNA, 13 nt, Human
ccauguaccuccc

SEQ ID NO: 2902606 - RNA, 14 nt, Human
ccauguaccucccc

SEQ ID NO: 2902607 - RNA, 17 nt, Human
ccauguaccuccccugc

SEQ ID NO: 2902608 - RNA, 19 nt, Human
ccauguaccuccccugccu

SEQ ID NO: 2902609 - RNA, 20 nt, Human
ccauguaccuccccugccuu

SEQ ID NO: 2902610 - RNA, 17 nt, Human
ccauguacuaguuuuag

SEQ ID NO: 2902611 - RNA, 18 nt, Human
ccauccagugacaaacca

SEQ ID NO: 2902612 - RNA, 16 nt, Human
ccagccccucccccau

SEQ ID NO: 2902613 - RNA, 17 nt, Human
ccagccccucccccauc

SEQ ID NO: 2902614 - RNA, 18 nt, Human
ccagccccucccccaucu

SEQ ID NO: 2902615 - RNA, 21 nt, Human
ccagccccucccccaucuccc

SEQ ID NO: 2902616 - RNA, 14 nt, Human
ccagccccuagccc

SEQ ID NO: 2902617 - RNA, 15 nt, Human
ccagccccuagccca

SEQ ID NO: 2902618 - RNA, 16 nt, Human
ccagccccuagcccag

SEQ ID NO: 2902619 - RNA, 17 nt, Human
ccagccccuagcccagg

SEQ ID NO: 2902620 - RNA, 18 nt, Human
ccagccccuagcccagga

SEQ ID NO: 2902621 - RNA, 19 nt, Human
ccagccccuagcccaggag

SEQ ID NO: 2902622 - RNA, 22 nt, Human
ccagccccuagcccaggagaga

SEQ ID NO: 2902623 - RNA, 23 nt, Human
ccagccccuagcccaggagagag

SEQ ID NO: 2902624 - RNA, 15 nt, Human
ccagcuacuuccucc

SEQ ID NO: 2902625 - RNA, 17 nt, Human
ccagcuacuuccuccuc

SEQ ID NO: 2902626 - RNA, 22 nt, Human
ccagcccggccgcuccaccagc

SEQ ID NO: 2902627 - RNA, 14 nt, Human
ccagccccuuucca

SEQ ID NO: 2902628 - RNA, 15 nt, Human
ccagccccuuuccaa

SEQ ID NO: 2902629 - RNA, 17 nt, Human
ccagccccuuuccaaaa

SEQ ID NO: 2902630 - RNA, 13 nt, Human
ccagcccgggagc

SEQ ID NO: 2902631 - RNA, 14 nt, Human
ccagcccgggagcc

SEQ ID NO: 2902632 - RNA, 15 nt, Human
ccagcccgggagccu

SEQ ID NO: 2902633 - RNA, 16 nt, Human
ccagcccgggagccua

SEQ ID NO: 2902634 - RNA, 17 nt, Human
ccagcccgggagccuag

SEQ ID NO: 2902635 - RNA, 14 nt, Human
ccagcucccuagga

SEQ ID NO: 2902636 - RNA, 18 nt, Human
ccagcuuucuccccgcua

SEQ ID NO: 2902637 - RNA, 19 nt, Human
ccagcuauaccugugccuc

SEQ ID NO: 2902638 - RNA, 15 nt, Human
ccagcuauacuguau

SEQ ID NO: 2902639 - RNA, 18 nt, Human
ccagcuauaccugugccu

SEQ ID NO: 2902640 - RNA, 16 nt, Human
ccagcuauaccugugc

SEQ ID NO: 2902641 - RNA, 15 nt, Human
ccagcuauaccugug

SEQ ID NO: 2902642 - RNA, 14 nt, Human
ccagcuauaccugu

SEQ ID NO: 2902643 - RNA, 16 nt, Human
ccagcucauucauuuu

SEQ ID NO: 2902644 - RNA, 17 nt, Human
ccagcucauucauuuua

SEQ ID NO: 2902645 - RNA, 17 nt, Human
ccagccccagugcccac

SEQ ID NO: 2902646 - RNA, 13 nt, Human
ccagccccuagcc

SEQ ID NO: 2902647 - RNA, 12 nt, Human
ccagccccuaga

SEQ ID NO: 2902648 - RNA, 15 nt, Human
ccagccccuagaaac

SEQ ID NO: 2902649 - RNA, 21 nt, Human
ccagccccuagaaacccaagc

SEQ ID NO: 2902650 - RNA, 22 nt, Human
ccagccccuagaaacccaagcu

SEQ ID NO: 2902651 - RNA, 23 nt, Human
ccagccccuagaaacccaagcuc

SEQ ID NO: 2902652 - RNA, 18 nt, Human
ccagccccggcccugggc

SEQ ID NO: 2902653 - RNA, 15 nt, Human
ccagcacuuguauau

SEQ ID NO: 2902654 - RNA, 21 nt, Human
ccacucgcuucccccauagcc

SEQ ID NO: 2902655 - RNA, 18 nt, Human
ccacucgcuucccccaua

SEQ ID NO: 2902656 - RNA, 15 nt, Human
ccacucuaccagugc

SEQ ID NO: 2902657 - RNA, 19 nt, Human
ccacucuaccagugcaggc

SEQ ID NO: 2902658 - RNA, 20 nt, Human
ccacucuaccagugcaggcu

SEQ ID NO: 2902659 - RNA, 23 nt, Human
ccacucuaccagugcaggcuggc

SEQ ID NO: 2902660 - RNA, 16 nt, Human
ccacucgcuuccccca

SEQ ID NO: 2902661 - RNA, 13 nt, Human
ccacucgcuuccc

SEQ ID NO: 2902662 - RNA, 21 nt, Human
ccagcacuuugggaggcugag

SEQ ID NO: 2902663 - RNA, 19 nt, Human
ccagcacuuugggagacca

SEQ ID NO: 2902664 - RNA, 11 nt, Human
ccagcacuuug

SEQ ID NO: 2902665 - RNA, 14 nt, Human
ccagcacuuuggga

SEQ ID NO: 2902666 - RNA, 20 nt, Human
ccagcuuugcuaccaaagca

SEQ ID NO: 2902667 - RNA, 16 nt, Human
ccagcuuuuaaccauc

SEQ ID NO: 2902668 - RNA, 18 nt, Human
ccagcuuuuaaccaucug

SEQ ID NO: 2902669 - RNA, 21 nt, Human
ccagcuuuuaaccaucugaua

SEQ ID NO: 2902670 - RNA, 14 nt, Human
ccaggcaggucuug

SEQ ID NO: 2902671 - RNA, 12 nt, Human
ccaggcaggucu

SEQ ID NO: 2902672 - RNA, 23 nt, Human
ccaggcaggucuugaacuccugg

SEQ ID NO: 2902673 - RNA, 17 nt, Human
ccaggaucccaggggcc

SEQ ID NO: 2902674 - RNA, 19 nt, Human
ccaggcagguagccagggg

SEQ ID NO: 2902675 - RNA, 17 nt, Human
ccaggcaggugccugga

SEQ ID NO: 2902676 - RNA, 13 nt, Human
ccaggcugccaag

SEQ ID NO: 2902677 - RNA, 20 nt, Human
ccaggcugccaaggccagag

SEQ ID NO: 2902678 - RNA, 19 nt, Human
ccaggcugccaaggccaga

SEQ ID NO: 2902679 - RNA, 21 nt, Human
ccaggcugcucuugaacuccu

SEQ ID NO: 2902680 - RNA, 13 nt, Human
ccaggcuggacau

SEQ ID NO: 2902681 - RNA, 18 nt, Human
ccaggcuggacaugcuga

SEQ ID NO: 2902682 - RNA, 21 nt, Human
ccaggcuggacaugcugacug

SEQ ID NO: 2902683 - RNA, 12 nt, Human
ccaggcuggcgu

SEQ ID NO: 2902684 - RNA, 12 nt, Human
ccaggggaaccu

SEQ ID NO: 2902685 - RNA, 17 nt, Human
ccaggggaaccugccau

SEQ ID NO: 2902686 - RNA, 16 nt, Human
ccaggggaaccugcca

SEQ ID NO: 2902687 - RNA, 15 nt, Human
ccaggggaaccugcc

SEQ ID NO: 2902688 - RNA, 13 nt, Human
ccaggggaaccug

SEQ ID NO: 2902689 - RNA, 16 nt, Human
ccaggggaguuguguc

SEQ ID NO: 2902690 - RNA, 18 nt, Human
ccaggggaguugugucug

SEQ ID NO: 2902691 - RNA, 24 nt, Human
ccaggggaaccugccaugccagga

SEQ ID NO: 2902692 - RNA, 18 nt, Human
ccaggaucguuuuuuccc

SEQ ID NO: 2902693 - RNA, 20 nt, Human
ccaggaugagcaucccagga

SEQ ID NO: 2902694 - RNA, 21 nt, Human
ccaggaugauaaguuccuuuc

SEQ ID NO: 2902695 - RNA, 18 nt, Human
ccaggaugcuggguggcc

SEQ ID NO: 2902696 - RNA, 14 nt, Human
ccaggaucauggug

SEQ ID NO: 2902697 - RNA, 14 nt, Human
ccaggaucagccag

SEQ ID NO: 2902698 - RNA, 15 nt, Human
ccaggaucauggugu

SEQ ID NO: 2902699 - RNA, 17 nt, Human
ccaggaucaugguguaa

SEQ ID NO: 2902700 - RNA, 20 nt, Human
ccaggaucaugguguaauaa

SEQ ID NO: 2902701 - RNA, 23 nt, Human
ccaggaucaugguguaauaagac

SEQ ID NO: 2902702 - RNA, 23 nt, Human
ccaggauagugggcaccccacug

SEQ ID NO: 2902703 - RNA, 18 nt, Human
ccaguccaaauguccucc

SEQ ID NO: 2902704 - RNA, 21 nt, Human
ccaguccaaauguccuccaga

SEQ ID NO: 2902705 - RNA, 14 nt, Human
ccaguccaaggaaa

SEQ ID NO: 2902706 - RNA, 18 nt, Human
ccaggggucccagccacc

SEQ ID NO: 2902707 - RNA, 17 nt, Human
ccaggggucccagccac

SEQ ID NO: 2902708 - RNA, 14 nt, Human
ccaggggucccagc

SEQ ID NO: 2902709 - RNA, 18 nt, Human
ccagucccccugccccag

SEQ ID NO: 2902710 - RNA, 22 nt, Human
ccagucccaaugguccugacuu

SEQ ID NO: 2902711 - RNA, 18 nt, Human
ccagucccuguccggaau

SEQ ID NO: 2902712 - RNA, 13 nt, Human
ccagucccugucc

SEQ ID NO: 2902713 - RNA, 22 nt, Human
ccaguccucucccaaguccaca

SEQ ID NO: 2902714 - RNA, 15 nt, Human
cccuccucucugccc

SEQ ID NO: 2902715 - RNA, 16 nt, Human
cccuccucucugcccu

SEQ ID NO: 2902716 - RNA, 20 nt, Human
cccuccugagggaggaccug

SEQ ID NO: 2902717 - RNA, 21 nt, Human
cccuccugagggaggaccugg

SEQ ID NO: 2902718 - RNA, 22 nt, Human
cccuccugagggaggaccuggg

SEQ ID NO: 2902719 - RNA, 23 nt, Human
cccuccugaaccgcacagcucag

SEQ ID NO: 2902720 - RNA, 22 nt, Human
cccuccugaaccgcacagcuca

SEQ ID NO: 2902721 - RNA, 13 nt, Human
cccuccuggcucu

SEQ ID NO: 2902722 - RNA, 16 nt, Human
cccuccuggccucaga

SEQ ID NO: 2902723 - RNA, 19 nt, Human
cccuccuggccucagacug

SEQ ID NO: 2902724 - RNA, 19 nt, Human
cccuccuggugucacccca

SEQ ID NO: 2902725 - RNA, 20 nt, Human
cccuccuggugucaccccag

SEQ ID NO: 2902726 - RNA, 21 nt, Human
cccuccuggugucaccccaga

SEQ ID NO: 2902727 - RNA, 22 nt, Human
cccuccuggugucaccccagag

SEQ ID NO: 2902728 - RNA, 23 nt, Human
cccuccuggugucaccccagagc

SEQ ID NO: 2902729 - RNA, 13 nt, Human
cccuccuggggcc

SEQ ID NO: 2902730 - RNA, 14 nt, Human
cccuccuggggcca

SEQ ID NO: 2902731 - RNA, 16 nt, Human
cccuccuggggccagg

SEQ ID NO: 2902732 - RNA, 17 nt, Human
cccuccuggggccaggc

SEQ ID NO: 2902733 - RNA, 18 nt, Human
cccuccuggggccaggcc

SEQ ID NO: 2902734 - RNA, 19 nt, Human
cccuccuggggccaggccg

SEQ ID NO: 2902735 - RNA, 10 nt, Human
cccuccuggu

SEQ ID NO: 2902736 - RNA, 13 nt, Human
cccuccucaccuc

SEQ ID NO: 2902737 - RNA, 12 nt, Human
cccuccucaccu

SEQ ID NO: 2902738 - RNA, 23 nt, Human
cccuccucaccucuggacuggcu

SEQ ID NO: 2902739 - RNA, 18 nt, Human
cccuccucaccucuggac

SEQ ID NO: 2902740 - RNA, 17 nt, Human
cccuccucaccucugga

SEQ ID NO: 2902741 - RNA, 16 nt, Human
cccuccucaccucugg

SEQ ID NO: 2902742 - RNA, 14 nt, Human
cccuccucacuggc

SEQ ID NO: 2902743 - RNA, 12 nt, Human
cccuccucacug

SEQ ID NO: 2902744 - RNA, 15 nt, Human
cccuccucacuggcc

SEQ ID NO: 2902745 - RNA, 16 nt, Human
cccuccucacuggcca

SEQ ID NO: 2902746 - RNA, 19 nt, Human
cccuccucacuggccaucc

SEQ ID NO: 2902747 - RNA, 21 nt, Human
cccuccucacuggccaucccu

SEQ ID NO: 2902748 - RNA, 21 nt, Human
ccccugcaaagcccagcuuga

SEQ ID NO: 2902749 - RNA, 17 nt, Human
ccccugcaaagcccagc

SEQ ID NO: 2902750 - RNA, 20 nt, Human
ccccugcaaagcccagcuug

SEQ ID NO: 2902751 - RNA, 18 nt, Human
ccccugcaaagcccagcu

SEQ ID NO: 2902752 - RNA, 12 nt, Human
ccccucuuucuc

SEQ ID NO: 2902753 - RNA, 13 nt, Human
ccccucuuucucu

SEQ ID NO: 2902754 - RNA, 14 nt, Human
ccccucuuucucuu

SEQ ID NO: 2902755 - RNA, 16 nt, Human
ccccucuuucucuuuc

SEQ ID NO: 2902756 - RNA, 17 nt, Human
ccccucuuucucuuucu

SEQ ID NO: 2902757 - RNA, 18 nt, Human
ccccucuuucucuuucuu

SEQ ID NO: 2902758 - RNA, 22 nt, Human
ccccucuuucucuuucuuccuu

SEQ ID NO: 2902759 - RNA, 16 nt, Human
ccccucuggcuccagc

SEQ ID NO: 2902760 - RNA, 16 nt, Human
ccccugccacccuggg

SEQ ID NO: 2902761 - RNA, 14 nt, Human
ccccugccacccug

SEQ ID NO: 2902762 - RNA, 18 nt, Human
ccccugccaccucccuga

SEQ ID NO: 2902763 - RNA, 21 nt, Human
ccccugccaccucccugaccc

SEQ ID NO: 2902764 - RNA, 17 nt, Human
ccccugccccccagccu

SEQ ID NO: 2902765 - RNA, 16 nt, Human
ccccucugcugcuguc

SEQ ID NO: 2902766 - RNA, 23 nt, Human
ccccucugcccugcgggucacag

SEQ ID NO: 2902767 - RNA, 20 nt, Human
ccccucugcccugcggguca

SEQ ID NO: 2902768 - RNA, 15 nt, Human
ccccucugcccugcg

SEQ ID NO: 2902769 - RNA, 14 nt, Human
ccccucugcccugc

SEQ ID NO: 2902770 - RNA, 17 nt, Human
cccggcuaauuuuugua

SEQ ID NO: 2902771 - RNA, 16 nt, Human
cccucaaccucuucug

SEQ ID NO: 2902772 - RNA, 15 nt, Human
cccucacccuggggc

SEQ ID NO: 2902773 - RNA, 14 nt, Human
cccucaccuccucu

SEQ ID NO: 2902774 - RNA, 16 nt, Human
cccucacccuggggcu

SEQ ID NO: 2902775 - RNA, 13 nt, Human
cccucaggacugc

SEQ ID NO: 2902776 - RNA, 17 nt, Human
cccucaggacugcaaca

SEQ ID NO: 2902777 - RNA, 13 nt, Human
cccucacucugcc

SEQ ID NO: 2902778 - RNA, 15 nt, Human
cccucacucugccag

SEQ ID NO: 2902779 - RNA, 16 nt, Human
cccucacucugccagg

SEQ ID NO: 2902780 - RNA, 19 nt, Human
cccucagccacacccaggc

SEQ ID NO: 2902781 - RNA, 16 nt, Human
cccucaccuucugagu

SEQ ID NO: 2902782 - RNA, 18 nt, Human
cccgaauagcugggacua

SEQ ID NO: 2902783 - RNA, 17 nt, Human
cccgaauagcugggacu

SEQ ID NO: 2902784 - RNA, 16 nt, Human
cccgaauagcugggac

SEQ ID NO: 2902785 - RNA, 22 nt, Human
ccccuucucugcuccaccacau

SEQ ID NO: 2902786 - RNA, 13 nt, Human
ccccuucucugug

SEQ ID NO: 2902787 - RNA, 15 nt, Human
ccccuucucugugac

SEQ ID NO: 2902788 - RNA, 16 nt, Human
ccccuucucugcucca

SEQ ID NO: 2902789 - RNA, 12 nt, Human
ccccuucucugc

SEQ ID NO: 2902790 - RNA, 14 nt, Human
ccccuucucugcuc

SEQ ID NO: 2902791 - RNA, 13 nt, Human
ccccuucucugcu

SEQ ID NO: 2902792 - RNA, 20 nt, Human
cccggcuaauuuuuguauuu

SEQ ID NO: 2902793 - RNA, 23 nt, Human
cccggcgccccgcaccuguacag

SEQ ID NO: 2902794 - RNA, 16 nt, Human
cccggcgccuggccuc

SEQ ID NO: 2902795 - RNA, 20 nt, Human
cccggcgccuggccuccagg

SEQ ID NO: 2902796 - RNA, 21 nt, Human
cccggcgccuggccuccaggc

SEQ ID NO: 2902797 - RNA, 15 nt, Human
cccggccccugcugg

SEQ ID NO: 2902798 - RNA, 15 nt, Human
cccggcccccugccc

SEQ ID NO: 2902799 - RNA, 12 nt, Human
cccggcccccug

SEQ ID NO: 2902800 - RNA, 16 nt, Human
cccggccccugcuggu

SEQ ID NO: 2902801 - RNA, 17 nt, Human
cccggccgcuccaccag

SEQ ID NO: 2902802 - RNA, 22 nt, Human
cccggcccugggcucggaggcu

SEQ ID NO: 2902803 - RNA, 13 nt, Human
cccggcccccugg

SEQ ID NO: 2902804 - RNA, 21 nt, Human
cccggcccccuggucucuggu

SEQ ID NO: 2902805 - RNA, 22 nt, Human
cccagcaccucagccugcacag

SEQ ID NO: 2902806 - RNA, 14 nt, Human
cccagcaccugccu

SEQ ID NO: 2902807 - RNA, 16 nt, Human
cccagcaccugccucc

SEQ ID NO: 2902808 - RNA, 17 nt, Human
cccagcaccugccuccu

SEQ ID NO: 2902809 - RNA, 18 nt, Human
cccagcaccucagccugc

SEQ ID NO: 2902810 - RNA, 17 nt, Human
cccagcaccucagccug

SEQ ID NO: 2902811 - RNA, 21 nt, Human
cccacugguuccuucuuccug

SEQ ID NO: 2902812 - RNA, 21 nt, Human
cccacugggguccagggagca

SEQ ID NO: 2902813 - RNA, 16 nt, Human
cccacuggacucaccu

SEQ ID NO: 2902814 - RNA, 10 nt, Human
cccagccauu

SEQ ID NO: 2902815 - RNA, 22 nt, Human
cccaucacaggguugggcccag

SEQ ID NO: 2902816 - RNA, 21 nt, Human
cccaucacaggguugggccca

SEQ ID NO: 2902817 - RNA, 20 nt, Human
cccaucacguguacuggcuc

SEQ ID NO: 2902818 - RNA, 21 nt, Human
cccauccccuggacugggagg

SEQ ID NO: 2902819 - RNA, 17 nt, Human
cccaggcugagccucag

SEQ ID NO: 2902820 - RNA, 16 nt, Human
cccaggcugagccuca

SEQ ID NO: 2902821 - RNA, 15 nt, Human
cccaggcugagccuc

SEQ ID NO: 2902822 - RNA, 13 nt, Human
cccaggcuggagu

SEQ ID NO: 2902823 - RNA, 11 nt, Human
cccaggcugga

SEQ ID NO: 2902824 - RNA, 19 nt, Human
cccaggcuggacaugcuga

SEQ ID NO: 2902825 - RNA, 21 nt, Human
cccaggcuggacaugcugacu

SEQ ID NO: 2902826 - RNA, 22 nt, Human
cccaggcuggacaugcugacug

SEQ ID NO: 2902827 - RNA, 18 nt, Human
cccaggcugagccucagu

SEQ ID NO: 2902828 - RNA, 12 nt, Human
cccaucccugcc

SEQ ID NO: 2902829 - RNA, 13 nt, Human
cccaucccugccu

SEQ ID NO: 2902830 - RNA, 14 nt, Human
cccaucccugccug

SEQ ID NO: 2902831 - RNA, 15 nt, Human
cccaucccuccccag

SEQ ID NO: 2902832 - RNA, 16 nt, Human
cccaucccuccccagu

SEQ ID NO: 2902833 - RNA, 15 nt, Human
cccaucccugccugg

SEQ ID NO: 2902834 - RNA, 17 nt, Human
cccaucccugccugguc

SEQ ID NO: 2902835 - RNA, 18 nt, Human
cccaucccugccugguca

SEQ ID NO: 2902836 - RNA, 13 nt, Human
cccaucccugucu

SEQ ID NO: 2902837 - RNA, 16 nt, Human
cccaucccugucuuua

SEQ ID NO: 2902838 - RNA, 14 nt, Human
cccccuugaguggg

SEQ ID NO: 2902839 - RNA, 15 nt, Human
cccccuugccacccc

SEQ ID NO: 2902840 - RNA, 12 nt, Human
cccccuuuccug

SEQ ID NO: 2902841 - RNA, 20 nt, Human
cccccuuuccuggacacuca

SEQ ID NO: 2902842 - RNA, 16 nt, Human
ccccgaagggccccca

SEQ ID NO: 2902843 - RNA, 12 nt, Human
ccccgcagaccu

SEQ ID NO: 2902844 - RNA, 23 nt, Human
ccccgcaccuguacaguggaacc

SEQ ID NO: 2902845 - RNA, 13 nt, Human
ccccgcagaccuc

SEQ ID NO: 2902846 - RNA, 14 nt, Human
ccccgcagaccucc

SEQ ID NO: 2902847 - RNA, 17 nt, Human
ccccgcagaccucccca

SEQ ID NO: 2902848 - RNA, 17 nt, Human
ccccauggcugcacagu

SEQ ID NO: 2902849 - RNA, 24 nt, Human
ccccaugccuguccagccugggca

SEQ ID NO: 2902850 - RNA, 18 nt, Human
ccccaugccuguggcugc

SEQ ID NO: 2902851 - RNA, 15 nt, Human
ccccagcccagggug

SEQ ID NO: 2902852 - RNA, 23 nt, Human
ccccaugccuguccagccugggc

SEQ ID NO: 2902853 - RNA, 22 nt, Human
ccccaugccuguccagccuggg

SEQ ID NO: 2902854 - RNA, 21 nt, Human
ccccaugccuguccagccugg

SEQ ID NO: 2902855 - RNA, 20 nt, Human
ccccaugccuguccagccug

SEQ ID NO: 2902856 - RNA, 19 nt, Human
ccccaugccuguccagccu

SEQ ID NO: 2902857 - RNA, 18 nt, Human
ccccaugccuguccagcc

SEQ ID NO: 2902858 - RNA, 17 nt, Human
ccccauuagagucagcc

SEQ ID NO: 2902859 - RNA, 19 nt, Human
ccccauguuguaaugcugc

SEQ ID NO: 2902860 - RNA, 20 nt, Human
ccccauguuguaaugcugca

SEQ ID NO: 2902861 - RNA, 21 nt, Human
ccccauguuguaaugcugcac

SEQ ID NO: 2902862 - RNA, 22 nt, Human
ccccauguuguaaugcugcacu

SEQ ID NO: 2902863 - RNA, 23 nt, Human
ccccauguuguaaugcugcacuu

SEQ ID NO: 2902864 - RNA, 18 nt, Human
ccccauguguccugguuc

SEQ ID NO: 2902865 - RNA, 23 nt, Human
ccccauguguccugguucccguu

SEQ ID NO: 2902866 - RNA, 22 nt, Human
cccccuucucugcuccaccaca

SEQ ID NO: 2902867 - RNA, 14 nt, Human
ccccauguguccug

SEQ ID NO: 2902868 - RNA, 16 nt, Human
ccccauguguccuggu

SEQ ID NO: 2902869 - RNA, 20 nt, Human
ccccagauugcaacaggcug

SEQ ID NO: 2902870 - RNA, 11 nt, Human
ccccagcccag

SEQ ID NO: 2902871 - RNA, 15 nt, Human
ccccagauugcaaca

SEQ ID NO: 2902872 - RNA, 17 nt, Human
ccccagaggcuggguga

SEQ ID NO: 2902873 - RNA, 12 nt, Human
ccccagcccagg

SEQ ID NO: 2902874 - RNA, 13 nt, Human
ccccagcccaggg

SEQ ID NO: 2902875 - RNA, 12 nt, Human
ccccaugccugu

SEQ ID NO: 2902876 - RNA, 13 nt, Human
ccccaugccuguc

SEQ ID NO: 2902877 - RNA, 17 nt, Human
ccccaugccuguccagc

SEQ ID NO: 2902878 - RNA, 15 nt, Human
ccccaugccugucca

SEQ ID NO: 2902879 - RNA, 15 nt, Human
cccauucugccugcc

SEQ ID NO: 2902880 - RNA, 14 nt, Human
cccauucugccugc

SEQ ID NO: 2902881 - RNA, 19 nt, Human
cccauucugccugcccagg

SEQ ID NO: 2902882 - RNA, 14 nt, Human
cccauuucuccaga

SEQ ID NO: 2902883 - RNA, 15 nt, Human
cccauuucuccagaa

SEQ ID NO: 2902884 - RNA, 17 nt, Human
cccauuucuccagaacc

SEQ ID NO: 2902885 - RNA, 18 nt, Human
cccauuucuccagaaccc

SEQ ID NO: 2902886 - RNA, 18 nt, Human
cccauuugugccagagga

SEQ ID NO: 2902887 - RNA, 16 nt, Human
cccauuugugccagag

SEQ ID NO: 2902888 - RNA, 20 nt, Human
cccauuuuuauaucgaucuc

SEQ ID NO: 2902889 - RNA, 13 nt, Human
ccccagaggcugg

SEQ ID NO: 2902890 - RNA, 15 nt, Human
cggagacggaguccc

SEQ ID NO: 2902891 - RNA, 20 nt, Human
cggugugccugcagccccgc

SEQ ID NO: 2902892 - RNA, 17 nt, Human
cggugugccugcagccc

SEQ ID NO: 2902893 - RNA, 15 nt, Human
cggugugccugcagc

SEQ ID NO: 2902894 - RNA, 15 nt, Human
cggugucuuguucug

SEQ ID NO: 2902895 - RNA, 18 nt, Human
cggugucuuguucuguca

SEQ ID NO: 2902896 - RNA, 20 nt, Human
cgguuaugaaauucaccccc

SEQ ID NO: 2902897 - RNA, 14 nt, Human
cggugggcacuguu

SEQ ID NO: 2902898 - RNA, 14 nt, Human
cgguguccccagag

SEQ ID NO: 2902899 - RNA, 14 nt, Human
cgguugaaaccugu

SEQ ID NO: 2902900 - RNA, 16 nt, Human
cguaaguuuaaaggau

SEQ ID NO: 2902901 - RNA, 21 nt, Human
cgguuggagcgagcauccccc

SEQ ID NO: 2902902 - RNA, 14 nt, Human
cguaauaauuauua

SEQ ID NO: 2902903 - RNA, 21 nt, Human
cguaaugcuuagagaauguuc

SEQ ID NO: 2902904 - RNA, 13 nt, Human
cguaaugcuuaga

SEQ ID NO: 2902905 - RNA, 17 nt, Human
cguaauaauuauuauua

SEQ ID NO: 2902906 - RNA, 17 nt, Human
cguaaugacuuauugug

SEQ ID NO: 2902907 - RNA, 21 nt, Human
cuaacucaccagccccacugc

SEQ ID NO: 2902908 - RNA, 14 nt, Human
cuaacucaccagcc

SEQ ID NO: 2902909 - RNA, 17 nt, Human
cuaacucagaauuauuu

SEQ ID NO: 2902910 - RNA, 14 nt, Human
cuaacuccagugaa

SEQ ID NO: 2902911 - RNA, 14 nt, Human
cuaacuccugagaa

SEQ ID NO: 2902912 - RNA, 16 nt, Human
cuaacugaacuuugaa

SEQ ID NO: 2902913 - RNA, 17 nt, Human
cuaacugaacuuugaag

SEQ ID NO: 2902914 - RNA, 15 nt, Human
cuaacugaagagaca

SEQ ID NO: 2902915 - RNA, 14 nt, Human
cguuacagcucccc

SEQ ID NO: 2902916 - RNA, 19 nt, Human
cguuacucagggcuccucc

SEQ ID NO: 2902917 - RNA, 21 nt, Human
cguuacucagggcuccuccca

SEQ ID NO: 2902918 - RNA, 22 nt, Human
cguuacucagggcuccucccag

SEQ ID NO: 2902919 - RNA, 23 nt, Human
cguuacucagggcuccucccagc

SEQ ID NO: 2902920 - RNA, 14 nt, Human
cguuaccaggcagg

SEQ ID NO: 2902921 - RNA, 12 nt, Human
cguguuuguguu

SEQ ID NO: 2902922 - RNA, 15 nt, Human
cgugucgugggugug

SEQ ID NO: 2902923 - RNA, 12 nt, Human
cgugucugaauc

SEQ ID NO: 2902924 - RNA, 15 nt, Human
cgugucccucucgga

SEQ ID NO: 2902925 - RNA, 22 nt, Human
cguguccccuauccuacuuccc

SEQ ID NO: 2902926 - RNA, 13 nt, Human
cguguccccgggg

SEQ ID NO: 2902927 - RNA, 18 nt, Human
cguguccccggggcccag

SEQ ID NO: 2902928 - RNA, 17 nt, Human
cguguauugagauuucu

SEQ ID NO: 2902929 - RNA, 22 nt, Human
cguguauugagauuucuuaaau

SEQ ID NO: 2902930 - RNA, 21 nt, Human
cguguuuuauuccuguauguu

SEQ ID NO: 2902931 - RNA, 21 nt, Human
cuaaagaagguuucagaaaga

SEQ ID NO: 2902932 - RNA, 12 nt, Human
cuaaagaccaaa

SEQ ID NO: 2902933 - RNA, 15 nt, Human
cuaaagaccaaacuu

SEQ ID NO: 2902934 - RNA, 16 nt, Human
cuaaagaccaaacuuc

SEQ ID NO: 2902935 - RNA, 23 nt, Human
cuaaagaccaaacuucacucugg

SEQ ID NO: 2902936 - RNA, 14 nt, Human
cuaaagaagaucug

SEQ ID NO: 2902937 - RNA, 16 nt, Human
cuaaagaagaucugua

SEQ ID NO: 2902938 - RNA, 10 nt, Human
cuaaaguuau

SEQ ID NO: 2902939 - RNA, 11 nt, Human
cuaaaguuaua

SEQ ID NO: 2902940 - RNA, 13 nt, Human
cuaaaguuauauu

SEQ ID NO: 2902941 - RNA, 14 nt, Human
cuaaaguuauauuu

SEQ ID NO: 2902942 - RNA, 15 nt, Human
cuaaaguuauauuuc

SEQ ID NO: 2902943 - RNA, 16 nt, Human
cuaaaguuauauuuca

SEQ ID NO: 2902944 - RNA, 22 nt, Human
cuaaaguuauauuucagaugua

SEQ ID NO: 2902945 - RNA, 11 nt, Human
cuaaaguucua

SEQ ID NO: 2902946 - RNA, 12 nt, Human
cuaaaguucuaa

SEQ ID NO: 2902947 - RNA, 13 nt, Human
cuaaaguucuaag

SEQ ID NO: 2902948 - RNA, 14 nt, Human
cuaaaguucuaaga

SEQ ID NO: 2902949 - RNA, 15 nt, Human
cuaaaguucuaagau

SEQ ID NO: 2902950 - RNA, 17 nt, Human
cuaaaguucuaagauuc

SEQ ID NO: 2902951 - RNA, 18 nt, Human
cuaaaguucuaagauucu

SEQ ID NO: 2902952 - RNA, 19 nt, Human
cuaaaguucuaagauucug

SEQ ID NO: 2902953 - RNA, 20 nt, Human
cuaaaguucuaagauucuga

SEQ ID NO: 2902954 - RNA, 23 nt, Human
cuaacuagacaccaaaguucuaa

SEQ ID NO: 2902955 - RNA, 21 nt, Human
cuaacuagacaccaaaguucu

SEQ ID NO: 2902956 - RNA, 22 nt, Human
cuaacuagacaccaaaguucua

SEQ ID NO: 2902957 - RNA, 19 nt, Human
cguguaguguccauuuugu

SEQ ID NO: 2902958 - RNA, 15 nt, Human
cuaacuagacaccaa

SEQ ID NO: 2902959 - RNA, 17 nt, Human
cuaaaggauagaucaaa

SEQ ID NO: 2902960 - RNA, 19 nt, Human
cuaaaggauagaucaaagu

SEQ ID NO: 2902961 - RNA, 15 nt, Human
cuaaagguccacagg

SEQ ID NO: 2902962 - RNA, 19 nt, Human
cuaaagguccacaggucua

SEQ ID NO: 2902963 - RNA, 20 nt, Human
cuaaagguccacaggucuag

SEQ ID NO: 2902964 - RNA, 21 nt, Human
cuaaagguccacaggucuaga

SEQ ID NO: 2902965 - RNA, 14 nt, Human
cgcugggcacuucc

SEQ ID NO: 2902966 - RNA, 15 nt, Human
cgcugggcacuuccc

SEQ ID NO: 2902967 - RNA, 16 nt, Human
cgcugggcacuucccu

SEQ ID NO: 2902968 - RNA, 18 nt, Human
cgcugggcacuucccugc

SEQ ID NO: 2902969 - RNA, 19 nt, Human
cgcugggcacuucccugcu

SEQ ID NO: 2902970 - RNA, 20 nt, Human
cgcugggcacuucccugcug

SEQ ID NO: 2902971 - RNA, 21 nt, Human
cgcugggcacuucccugcugc

SEQ ID NO: 2902972 - RNA, 23 nt, Human
cgcugggcacuucccugcugccu

SEQ ID NO: 2902973 - RNA, 19 nt, Human
cgcaucuucccaaccccuu

SEQ ID NO: 2902974 - RNA, 23 nt, Human
cgcuggccccuuugggcccugca

SEQ ID NO: 2902975 - RNA, 15 nt, Human
cgcugcugcugcugc

SEQ ID NO: 2902976 - RNA, 20 nt, Human
cgcugcugcugcugcgcccu

SEQ ID NO: 2902977 - RNA, 22 nt, Human
cgccuucacuccggugugccug

SEQ ID NO: 2902978 - RNA, 22 nt, Human
cgccuuagcacuaccacuccug

SEQ ID NO: 2902979 - RNA, 14 nt, Human
cgccuuaagcugau

SEQ ID NO: 2902980 - RNA, 23 nt, Human
cgcuggaccuugaacuggguacu

SEQ ID NO: 2902981 - RNA, 19 nt, Human
cgcuggaccuugaacuggg

SEQ ID NO: 2902982 - RNA, 15 nt, Human
cgcugcuccuuggcu

SEQ ID NO: 2902983 - RNA, 20 nt, Human
cgccuguaguccuagccacu

SEQ ID NO: 2902984 - RNA, 15 nt, Human
cgccugugaugcugg

SEQ ID NO: 2902985 - RNA, 16 nt, Human
cgccugugaugcuggg

SEQ ID NO: 2902986 - RNA, 17 nt, Human
cgccugugaugcugggc

SEQ ID NO: 2902987 - RNA, 13 nt, Human
cgccugugcacac

SEQ ID NO: 2902988 - RNA, 14 nt, Human
cgccugugcacaca

SEQ ID NO: 2902989 - RNA, 15 nt, Human
cgccugugcacacac

SEQ ID NO: 2902990 - RNA, 16 nt, Human
cgccugugcacacaca

SEQ ID NO: 2902991 - RNA, 18 nt, Human
cgccuguggagcucagcc

SEQ ID NO: 2902992 - RNA, 19 nt, Human
cgccuguggagcucagccc

SEQ ID NO: 2902993 - RNA, 20 nt, Human
cgccuguagucccagcuacu

SEQ ID NO: 2902994 - RNA, 17 nt, Human
cgccuguaguccuagcc

SEQ ID NO: 2902995 - RNA, 23 nt, Human
cgauacccaggaccaagccacag

SEQ ID NO: 2902996 - RNA, 12 nt, Human
cgcauccagcaa

SEQ ID NO: 2902997 - RNA, 14 nt, Human
cgcauccagcaaga

SEQ ID NO: 2902998 - RNA, 19 nt, Human
cgaguagcugagauuauag

SEQ ID NO: 2902999 - RNA, 22 nt, Human
cgaguuguggaaagccucugcu

SEQ ID NO: 2903000 - RNA, 13 nt, Human
cgauaaggaagaa

SEQ ID NO: 2903001 - RNA, 15 nt, Human
cgauaaggaagaaac

SEQ ID NO: 2903002 - RNA, 16 nt, Human
cgauaaggaagaaaca

SEQ ID NO: 2903003 - RNA, 18 nt, Human
cgauacaccgggccugga

SEQ ID NO: 2903004 - RNA, 20 nt, Human
cgauacaccgggccuggaga

SEQ ID NO: 2903005 - RNA, 21 nt, Human
cgauacaccgggccuggagaa

SEQ ID NO: 2903006 - RNA, 21 nt, Human
cgaggugccuucuucagggcc

SEQ ID NO: 2903007 - RNA, 21 nt, Human
cucacuuuuuuuuuuuguuug

SEQ ID NO: 2903008 - RNA, 12 nt, Human
cucagaauauug

SEQ ID NO: 2903009 - RNA, 17 nt, Human
cucagaauaaggcaggc

SEQ ID NO: 2903010 - RNA, 19 nt, Human
cucagaauaaggcaggcau

SEQ ID NO: 2903011 - RNA, 22 nt, Human
cucagaagugaaaaucuuggag

SEQ ID NO: 2903012 - RNA, 12 nt, Human
cucagaaggcuu

SEQ ID NO: 2903013 - RNA, 21 nt, Human
cucaccuggggcugcuggccu

SEQ ID NO: 2903014 - RNA, 17 nt, Human
cucaccuggggcugcug

SEQ ID NO: 2903015 - RNA, 20 nt, Human
cucaccuggggcugcuggcc

SEQ ID NO: 2903016 - RNA, 14 nt, Human
cucaccuucugagu

SEQ ID NO: 2903017 - RNA, 21 nt, Human
cucaccuucugaguacagagu

SEQ ID NO: 2903018 - RNA, 20 nt, Human
cucacuuuccuccugaggcu

SEQ ID NO: 2903019 - RNA, 13 nt, Human
cucacuuuaaacc

SEQ ID NO: 2903020 - RNA, 16 nt, Human
cucacuuuaaaccugu

SEQ ID NO: 2903021 - RNA, 18 nt, Human
cucacuuggucugccagg

SEQ ID NO: 2903022 - RNA, 19 nt, Human
cucacuuggucugccaggc

SEQ ID NO: 2903023 - RNA, 20 nt, Human
cucacuuggucugccaggcc

SEQ ID NO: 2903024 - RNA, 21 nt, Human
cucaccucuggacuggcuaga

SEQ ID NO: 2903025 - RNA, 15 nt, Human
cucaccucuggacug

SEQ ID NO: 2903026 - RNA, 22 nt, Human
cucaccucuggacuggcuagag

SEQ ID NO: 2903027 - RNA, 19 nt, Human
cucaccugagucacccuac

SEQ ID NO: 2903028 - RNA, 13 nt, Human
cucaccucuaccc

SEQ ID NO: 2903029 - RNA, 15 nt, Human
cucaccucuacccaa

SEQ ID NO: 2903030 - RNA, 18 nt, Human
cucaccucuacccaaacc

SEQ ID NO: 2903031 - RNA, 19 nt, Human
cucaccucuacccaaaccc

SEQ ID NO: 2903032 - RNA, 14 nt, Human
cucaccucuggacu

SEQ ID NO: 2903033 - RNA, 16 nt, Human
cucaccucccccaucu

SEQ ID NO: 2903034 - RNA, 12 nt, Human
cucaccgcuucc

SEQ ID NO: 2903035 - RNA, 18 nt, Human
cucaccgcuucccuccug

SEQ ID NO: 2903036 - RNA, 12 nt, Human
cucaccuagagc

SEQ ID NO: 2903037 - RNA, 13 nt, Human
cucaccuagagcc

SEQ ID NO: 2903038 - RNA, 14 nt, Human
cucaccuagagcca

SEQ ID NO: 2903039 - RNA, 15 nt, Human
cucaccuagagccag

SEQ ID NO: 2903040 - RNA, 17 nt, Human
cucaccuagagccagac

SEQ ID NO: 2903041 - RNA, 18 nt, Human
cucaccuagagccagacc

SEQ ID NO: 2903042 - RNA, 19 nt, Human
cucaccuagagccagacca

SEQ ID NO: 2903043 - RNA, 20 nt, Human
cucaccuagagccagaccaa

SEQ ID NO: 2903044 - RNA, 14 nt, Human
cucacccuggggcu

SEQ ID NO: 2903045 - RNA, 15 nt, Human
cucacccugcuacac

SEQ ID NO: 2903046 - RNA, 19 nt, Human
cucaaaacccaucugggcu

SEQ ID NO: 2903047 - RNA, 20 nt, Human
cucaaaaauacaaaauaaaa

SEQ ID NO: 2903048 - RNA, 22 nt, Human
cucaaaacccaucugggcuccu

SEQ ID NO: 2903049 - RNA, 14 nt, Human
cucaaacuucuggc

SEQ ID NO: 2903050 - RNA, 16 nt, Human
cucaaacuucuggcuc

SEQ ID NO: 2903051 - RNA, 12 nt, Human
cucaaaguuuug

SEQ ID NO: 2903052 - RNA, 14 nt, Human
cucaaaguuuugaa

SEQ ID NO: 2903053 - RNA, 15 nt, Human
cucaaaguuuugaaa

SEQ ID NO: 2903054 - RNA, 17 nt, Human
cucaaaguuuugaaaag

SEQ ID NO: 2903055 - RNA, 18 nt, Human
cucaaaguuuugaaaagc

SEQ ID NO: 2903056 - RNA, 19 nt, Human
cucaaaguuuugaaaagcu

SEQ ID NO: 2903057 - RNA, 17 nt, Human
cuauguugcccaggcag

SEQ ID NO: 2903058 - RNA, 16 nt, Human
cuauguugcccaggca

SEQ ID NO: 2903059 - RNA, 19 nt, Human
cuauuuuguaaacucaaaa

SEQ ID NO: 2903060 - RNA, 19 nt, Human
cuaucuggaggccuuccag

SEQ ID NO: 2903061 - RNA, 20 nt, Human
cuaucuggaggccuuccagc

SEQ ID NO: 2903062 - RNA, 23 nt, Human
cuaucuggaggccuuccagcugc

SEQ ID NO: 2903063 - RNA, 24 nt, Human
cuaucuggccauauuuacuaccuu

SEQ ID NO: 2903064 - RNA, 12 nt, Human
cuaucugggccu

SEQ ID NO: 2903065 - RNA, 13 nt, Human
cuaucugggccug

SEQ ID NO: 2903066 - RNA, 21 nt, Human
cuaucucugugugcacaaaua

SEQ ID NO: 2903067 - RNA, 17 nt, Human
cuaucugauuuugugca

SEQ ID NO: 2903068 - RNA, 18 nt, Human
cuaucugauuuugugcaa

SEQ ID NO: 2903069 - RNA, 19 nt, Human
cuaucuccugacagaaggu

SEQ ID NO: 2903070 - RNA, 15 nt, Human
cuaucuccugacaga

SEQ ID NO: 2903071 - RNA, 14 nt, Human
cuaucuccugacag

SEQ ID NO: 2903072 - RNA, 12 nt, Human
cuaucuccugac

SEQ ID NO: 2903073 - RNA, 17 nt, Human
cuaucucugugugcaca

SEQ ID NO: 2903074 - RNA, 15 nt, Human
cuaucuccuagggcu

SEQ ID NO: 2903075 - RNA, 14 nt, Human
cuauguugcccagg

SEQ ID NO: 2903076 - RNA, 15 nt, Human
cuauguugcccaggc

SEQ ID NO: 2903077 - RNA, 22 nt, Human
cuauguguagggcgggaggaug

SEQ ID NO: 2903078 - RNA, 13 nt, Human
cuauguauuugca

SEQ ID NO: 2903079 - RNA, 17 nt, Human
cuaucucucaaaacuug

SEQ ID NO: 2903080 - RNA, 22 nt, Human
cuauguauuugcaguucaccug

SEQ ID NO: 2903081 - RNA, 19 nt, Human
cucacaacauggugucugg

SEQ ID NO: 2903082 - RNA, 21 nt, Human
cucaaaguuuugaaaagcuau

SEQ ID NO: 2903083 - RNA, 23 nt, Human
cucaaaguuuugaaaagcuauua

SEQ ID NO: 2903084 - RNA, 23 nt, Human
cucacaacuuaguguaauauacc

SEQ ID NO: 2903085 - RNA, 15 nt, Human
cucacacacccugag

SEQ ID NO: 2903086 - RNA, 16 nt, Human
cucacacacccugagg

SEQ ID NO: 2903087 - RNA, 17 nt, Human
cucacacacccugaggu

SEQ ID NO: 2903088 - RNA, 15 nt, Human
cuacuaauuccacac

SEQ ID NO: 2903089 - RNA, 12 nt, Human
cuacuaauucca

SEQ ID NO: 2903090 - RNA, 17 nt, Human
cuacuaauuccacaccu

SEQ ID NO: 2903091 - RNA, 20 nt, Human
cuacuaaggcuuuccuaccu

SEQ ID NO: 2903092 - RNA, 20 nt, Human
cuacuaaguucacauuagaa

SEQ ID NO: 2903093 - RNA, 19 nt, Human
cuaccuugaaaauaagaau

SEQ ID NO: 2903094 - RNA, 14 nt, Human
cuaccuugaaaaua

SEQ ID NO: 2903095 - RNA, 18 nt, Human
cuaccuuccaguuccuca

SEQ ID NO: 2903096 - RNA, 14 nt, Human
cuacuauaaagaga

SEQ ID NO: 2903097 - RNA, 15 nt, Human
cuacuauaaagagaa

SEQ ID NO: 2903098 - RNA, 17 nt, Human
cuacuauaaagagaaga

SEQ ID NO: 2903099 - RNA, 18 nt, Human
cuacuauggcugaguucu

SEQ ID NO: 2903100 - RNA, 12 nt, Human
cuacuauuuucu

SEQ ID NO: 2903101 - RNA, 13 nt, Human
cuagacacugcca

SEQ ID NO: 2903102 - RNA, 18 nt, Human
cuagacagauccccguuc

SEQ ID NO: 2903103 - RNA, 21 nt, Human
cuagacaccaaaguucuaaua

SEQ ID NO: 2903104 - RNA, 17 nt, Human
cuagacauggagguucu

SEQ ID NO: 2903105 - RNA, 18 nt, Human
cuagacauggagguucua

SEQ ID NO: 2903106 - RNA, 19 nt, Human
cuagacauggagguucuaa

SEQ ID NO: 2903107 - RNA, 20 nt, Human
cuagacauggagguucuaag

SEQ ID NO: 2903108 - RNA, 21 nt, Human
cuagacauggagguucuaagg

SEQ ID NO: 2903109 - RNA, 15 nt, Human
cuagacaccaaaguu

SEQ ID NO: 2903110 - RNA, 16 nt, Human
cuagacaccaaaguuc

SEQ ID NO: 2903111 - RNA, 17 nt, Human
cuagacaccaaaguucu

SEQ ID NO: 2903112 - RNA, 18 nt, Human
cuagacaccaaaguucua

SEQ ID NO: 2903113 - RNA, 19 nt, Human
cuagacaccaaaguucuaa

SEQ ID NO: 2903114 - RNA, 22 nt, Human
cuagacauggagguucuaaggc

SEQ ID NO: 2903115 - RNA, 23 nt, Human
cuagacauggagguucuaaggcc

SEQ ID NO: 2903116 - RNA, 13 nt, Human
cuagacauuacca

SEQ ID NO: 2903117 - RNA, 12 nt, Human
cuagaauggaua

SEQ ID NO: 2903118 - RNA, 19 nt, Human
cuagaaucugcaauucaaa

SEQ ID NO: 2903119 - RNA, 20 nt, Human
cuagaauuauaagucacaaa

SEQ ID NO: 2903120 - RNA, 18 nt, Human
cuagaaguuucccuuccu

SEQ ID NO: 2903121 - RNA, 19 nt, Human
cuagaaguuucccuuccuc

SEQ ID NO: 2903122 - RNA, 20 nt, Human
cuagaaguuucccuuccucc

SEQ ID NO: 2903123 - RNA, 22 nt, Human
cuagaaguuucccuuccuccau

SEQ ID NO: 2903124 - RNA, 16 nt, Human
cuagaauaaucuugcu

SEQ ID NO: 2903125 - RNA, 17 nt, Human
cuagaauaaucuugcuc

SEQ ID NO: 2903126 - RNA, 12 nt, Human
cuagaauacuuu

SEQ ID NO: 2903127 - RNA, 14 nt, Human
cuagaauacuuuuu

SEQ ID NO: 2903128 - RNA, 18 nt, Human
cuagaauacuuuuuaaaa

SEQ ID NO: 2903129 - RNA, 21 nt, Human
cuagaauuuaucacacuucug

SEQ ID NO: 2903130 - RNA, 20 nt, Human
cuagaauucuguauuggaua

SEQ ID NO: 2903131 - RNA, 19 nt, Human
cuaggccuggccagaugca

SEQ ID NO: 2903132 - RNA, 18 nt, Human
cuaggccuggccagaugc

SEQ ID NO: 2903133 - RNA, 15 nt, Human
cuaggccuggccaga

SEQ ID NO: 2903134 - RNA, 14 nt, Human
cuaggccuggccag

SEQ ID NO: 2903135 - RNA, 23 nt, Human
cuaggccucucaccucugugccu

SEQ ID NO: 2903136 - RNA, 15 nt, Human
cuaggcgugagaagc

SEQ ID NO: 2903137 - RNA, 13 nt, Human
cuaggccuggcca

SEQ ID NO: 2903138 - RNA, 22 nt, Human
cuagccaggaaguacuuccacc

SEQ ID NO: 2903139 - RNA, 23 nt, Human
cuagccaggaaguacuuccaccu

SEQ ID NO: 2903140 - RNA, 19 nt, Human
cuagccagugcuccaggca

SEQ ID NO: 2903141 - RNA, 20 nt, Human
cuagccagcacuuguauaua

SEQ ID NO: 2903142 - RNA, 12 nt, Human
cuagcccacccu

SEQ ID NO: 2903143 - RNA, 14 nt, Human
cuagcccacccugc

SEQ ID NO: 2903144 - RNA, 15 nt, Human
cuagcccacccugcu

SEQ ID NO: 2903145 - RNA, 17 nt, Human
cuagcccacccugcugc

SEQ ID NO: 2903146 - RNA, 18 nt, Human
cuagcccacccugcugcc

SEQ ID NO: 2903147 - RNA, 19 nt, Human
cuagcccacccugcugccu

SEQ ID NO: 2903148 - RNA, 20 nt, Human
cuagcccacccugcugccuu

SEQ ID NO: 2903149 - RNA, 21 nt, Human
cuagcccacccugcugccuuc

SEQ ID NO: 2903150 - RNA, 19 nt, Human
cuagcccagcgcucugccu

SEQ ID NO: 2903151 - RNA, 13 nt, Human
cuagcccaggaga

SEQ ID NO: 2903152 - RNA, 13 nt, Human
cuaggcucugccu

SEQ ID NO: 2903153 - RNA, 14 nt, Human
cuaggcucugccuu

SEQ ID NO: 2903154 - RNA, 15 nt, Human
cuaggcucugccuuc

SEQ ID NO: 2903155 - RNA, 20 nt, Human
cuaggcucagagaugugcac

SEQ ID NO: 2903156 - RNA, 13 nt, Human
cuaggcuccaccc

SEQ ID NO: 2903157 - RNA, 22 nt, Human
cuaggcucagagaugugcaccc

SEQ ID NO: 2903158 - RNA, 15 nt, Human
cuaggcucagcggcg

SEQ ID NO: 2903159 - RNA, 12 nt, Human
cuaggcucagag

SEQ ID NO: 2903160 - RNA, 13 nt, Human
cuaggcucagaga

SEQ ID NO: 2903161 - RNA, 15 nt, Human
cuaggcucagagaug

SEQ ID NO: 2903162 - RNA, 14 nt, Human
cuagggaagggugg

SEQ ID NO: 2903163 - RNA, 15 nt, Human
cuaggggucacugua

SEQ ID NO: 2903164 - RNA, 17 nt, Human
cuaggguggcccuugca

SEQ ID NO: 2903165 - RNA, 18 nt, Human
cuaguucccucugcucag

SEQ ID NO: 2903166 - RNA, 20 nt, Human
cuaguucccucugcucagcc

SEQ ID NO: 2903167 - RNA, 21 nt, Human
cuaguucccucugcucagcca

SEQ ID NO: 2903168 - RNA, 22 nt, Human
cuaguucccucugcucagccaa

SEQ ID NO: 2903169 - RNA, 13 nt, Human
cuaggguggcccu

SEQ ID NO: 2903170 - RNA, 15 nt, Human
cuaggguccugggga

SEQ ID NO: 2903171 - RNA, 14 nt, Human
cuaggguccugggg

SEQ ID NO: 2903172 - RNA, 13 nt, Human
cuaggguccuggg

SEQ ID NO: 2903173 - RNA, 20 nt, Human
cuaguuuucuccucccagga

SEQ ID NO: 2903174 - RNA, 13 nt, Human
cuaguuuuguuua

SEQ ID NO: 2903175 - RNA, 14 nt, Human
cuaguuuuuaguaa

SEQ ID NO: 2903176 - RNA, 19 nt, Human
cuaguuuuuaguaaucugu

SEQ ID NO: 2903177 - RNA, 22 nt, Human
cuaguuuuuaguaaucuguaca

SEQ ID NO: 2903178 - RNA, 23 nt, Human
cuaguuuuuaguaaucuguacau

SEQ ID NO: 2903179 - RNA, 16 nt, Human
cuauaaaaugucuuca

SEQ ID NO: 2903180 - RNA, 18 nt, Human
cuauaaaaugucuucaag

SEQ ID NO: 2903181 - RNA, 19 nt, Human
cuauaaaaugucuucaagg

SEQ ID NO: 2903182 - RNA, 20 nt, Human
cuauaaagcgauauacagau

SEQ ID NO: 2903183 - RNA, 18 nt, Human
cuauaaagcuagaugcuu

SEQ ID NO: 2903184 - RNA, 19 nt, Human
cuauaaagcuagaugcuuu

SEQ ID NO: 2903185 - RNA, 23 nt, Human
cuauaaagaagaacuugcaugga

SEQ ID NO: 2903186 - RNA, 13 nt, Human
cuauaaagagaag

SEQ ID NO: 2903187 - RNA, 19 nt, Human
cuauaaagagaagacgaaa

SEQ ID NO: 2903188 - RNA, 18 nt, Human
cuccagugccagcaauga

SEQ ID NO: 2903189 - RNA, 22 nt, Human
cuccagugcuguccaugcuucu

SEQ ID NO: 2903190 - RNA, 15 nt, Human
cuccauaaacagacu

SEQ ID NO: 2903191 - RNA, 14 nt, Human
cuccaguguacaua

SEQ ID NO: 2903192 - RNA, 21 nt, Human
cuccaguguacauaguguaau

SEQ ID NO: 2903193 - RNA, 22 nt, Human
cuccagggaauccaagccucca

SEQ ID NO: 2903194 - RNA, 18 nt, Human
cuccagggagauuuugag

SEQ ID NO: 2903195 - RNA, 22 nt, Human
cuccagggagccuagaagcugg

SEQ ID NO: 2903196 - RNA, 12 nt, Human
cucccagaggcg

SEQ ID NO: 2903197 - RNA, 14 nt, Human
cucccagaggucca

SEQ ID NO: 2903198 - RNA, 15 nt, Human
cucccagagguccag

SEQ ID NO: 2903199 - RNA, 16 nt, Human
cucccagagguccagc

SEQ ID NO: 2903200 - RNA, 17 nt, Human
cucccagagguccagcc

SEQ ID NO: 2903201 - RNA, 18 nt, Human
cucccagagguccagccc

SEQ ID NO: 2903202 - RNA, 19 nt, Human
cucccagagguccagccca

SEQ ID NO: 2903203 - RNA, 20 nt, Human
cucccagagguccagcccau

SEQ ID NO: 2903204 - RNA, 21 nt, Human
cucccagagguccagcccauc

SEQ ID NO: 2903205 - RNA, 22 nt, Human
cucccagagguccagcccaucu

SEQ ID NO: 2903206 - RNA, 23 nt, Human
cucccagagguccagcccaucuc

SEQ ID NO: 2903207 - RNA, 21 nt, Human
cucccagaucagucagagccc

SEQ ID NO: 2903208 - RNA, 13 nt, Human
cucccaccucagc

SEQ ID NO: 2903209 - RNA, 17 nt, Human
cucccaccucagccucc

SEQ ID NO: 2903210 - RNA, 16 nt, Human
cucccaccucagccuc

SEQ ID NO: 2903211 - RNA, 14 nt, Human
cucccaccucagcc

SEQ ID NO: 2903212 - RNA, 22 nt, Human
cuccaggcuguaucccaugagc

SEQ ID NO: 2903213 - RNA, 23 nt, Human
cuccaggcuguaucccaugagcc

SEQ ID NO: 2903214 - RNA, 21 nt, Human
cuccagggaauccaagccucc

SEQ ID NO: 2903215 - RNA, 20 nt, Human
cuccagggaauccaagccuc

SEQ ID NO: 2903216 - RNA, 19 nt, Human
cuccagggaauccaagccu

SEQ ID NO: 2903217 - RNA, 16 nt, Human
cuccagggaauccaag

SEQ ID NO: 2903218 - RNA, 17 nt, Human
cuccagaauuuggaaau

SEQ ID NO: 2903219 - RNA, 18 nt, Human
cuccagaauuuggaaauc

SEQ ID NO: 2903220 - RNA, 19 nt, Human
cuccagaauuuggaaaucc

SEQ ID NO: 2903221 - RNA, 20 nt, Human
cuccagaauuuggaaauccu

SEQ ID NO: 2903222 - RNA, 22 nt, Human
cuccagaauuuggaaauccuag

SEQ ID NO: 2903223 - RNA, 20 nt, Human
cucagacauguuuuccguga

SEQ ID NO: 2903224 - RNA, 19 nt, Human
cucagacauguuuuccgug

SEQ ID NO: 2903225 - RNA, 17 nt, Human
cucagaauguaaaagaa

SEQ ID NO: 2903226 - RNA, 14 nt, Human
cucagaauuauuuu

SEQ ID NO: 2903227 - RNA, 17 nt, Human
cucagaauuauuuuuaa

SEQ ID NO: 2903228 - RNA, 18 nt, Human
cuccggcuugaccuguuu

SEQ ID NO: 2903229 - RNA, 22 nt, Human
cuccgcuuucuacccagcgagc

SEQ ID NO: 2903230 - RNA, 23 nt, Human
cuccggugugccugcagccccgc

SEQ ID NO: 2903231 - RNA, 19 nt, Human
cuccggugugccugcagcc

SEQ ID NO: 2903232 - RNA, 18 nt, Human
cuccggugugccugcagc

SEQ ID NO: 2903233 - RNA, 13 nt, Human
cuccggugugccu

SEQ ID NO: 2903234 - RNA, 15 nt, Human
cuccuagagaacgca

SEQ ID NO: 2903235 - RNA, 18 nt, Human
cuccuagagaacgcagcc

SEQ ID NO: 2903236 - RNA, 20 nt, Human
cuccuagagaacgcagcccu

SEQ ID NO: 2903237 - RNA, 21 nt, Human
cuccuagagaacgcagcccua

SEQ ID NO: 2903238 - RNA, 20 nt, Human
cuccgcuuucuacccagcga

SEQ ID NO: 2903239 - RNA, 21 nt, Human
cuccgcuuucuacccagcgag

SEQ ID NO: 2903240 - RNA, 18 nt, Human
cucccucuguccaccagc

SEQ ID NO: 2903241 - RNA, 21 nt, Human
cucccuccccugcccuggucc

SEQ ID NO: 2903242 - RNA, 18 nt, Human
cucccuccccugcccugg

SEQ ID NO: 2903243 - RNA, 16 nt, Human
cucccuccccugcccu

SEQ ID NO: 2903244 - RNA, 18 nt, Human
cucccuccccugccauuu

SEQ ID NO: 2903245 - RNA, 15 nt, Human
cuccccaucccaugu

SEQ ID NO: 2903246 - RNA, 14 nt, Human
cucccucccaggac

SEQ ID NO: 2903247 - RNA, 13 nt, Human
cucccucccagga

SEQ ID NO: 2903248 - RNA, 15 nt, Human
cucccuccccugcca

SEQ ID NO: 2903249 - RNA, 14 nt, Human
cucccuccccugcc

SEQ ID NO: 2903250 - RNA, 11 nt, Human
cucccuccccu

SEQ ID NO: 2903251 - RNA, 16 nt, Human
cucccuccccgucuca

SEQ ID NO: 2903252 - RNA, 20 nt, Human
cucccuccccgucucauucc

SEQ ID NO: 2903253 - RNA, 17 nt, Human
cucccucccaggacucu

SEQ ID NO: 2903254 - RNA, 22 nt, Human
cuccccagucucucuuaaaguu

SEQ ID NO: 2903255 - RNA, 11 nt, Human
cuccccagugu

SEQ ID NO: 2903256 - RNA, 16 nt, Human
cuccccaguguauguc

SEQ ID NO: 2903257 - RNA, 11 nt, Human
cuccccaguuc

SEQ ID NO: 2903258 - RNA, 14 nt, Human
cuccccaucccaug

SEQ ID NO: 2903259 - RNA, 11 nt, Human
cucccagccug

SEQ ID NO: 2903260 - RNA, 13 nt, Human
cucccucuucuuu

SEQ ID NO: 2903261 - RNA, 14 nt, Human
cucccucuucuuuc

SEQ ID NO: 2903262 - RNA, 11 nt, Human
cucccucuugu

SEQ ID NO: 2903263 - RNA, 12 nt, Human
cucccucuuguu

SEQ ID NO: 2903264 - RNA, 17 nt, Human
cucccucuuguuuuguu

SEQ ID NO: 2903265 - RNA, 18 nt, Human
cucccucugauuuuucau

SEQ ID NO: 2903266 - RNA, 21 nt, Human
cucccucugaccugcaggcca

SEQ ID NO: 2903267 - RNA, 18 nt, Human
cucccucugaccugcagg

SEQ ID NO: 2903268 - RNA, 17 nt, Human
cucccucugaccugcag

SEQ ID NO: 2903269 - RNA, 14 nt, Human
cucccucugaccug

SEQ ID NO: 2903270 - RNA, 13 nt, Human
cucccucugaccu

SEQ ID NO: 2903271 - RNA, 22 nt, Human
cucccucucucuucugcuccac

SEQ ID NO: 2903272 - RNA, 21 nt, Human
cucccucucucuucugcucca

SEQ ID NO: 2903273 - RNA, 20 nt, Human
cucccucucucuucugcucc

SEQ ID NO: 2903274 - RNA, 17 nt, Human
cucccucucucuucugc

SEQ ID NO: 2903275 - RNA, 16 nt, Human
cucccucucucuucug

SEQ ID NO: 2903276 - RNA, 15 nt, Human
cucccucucucuucu

SEQ ID NO: 2903277 - RNA, 23 nt, Human
cucccuccccugcccugguccag

SEQ ID NO: 2903278 - RNA, 13 nt, Human
cucccucccgcac

SEQ ID NO: 2903279 - RNA, 12 nt, Human
cuccuuucugug

SEQ ID NO: 2903280 - RNA, 13 nt, Human
cuccuuucugugc

SEQ ID NO: 2903281 - RNA, 14 nt, Human
cuccuuucugugcc

SEQ ID NO: 2903282 - RNA, 16 nt, Human
cuccuuucugugcccu

SEQ ID NO: 2903283 - RNA, 17 nt, Human
cuccuuucugugcccua

SEQ ID NO: 2903284 - RNA, 18 nt, Human
cuccuuuccccuuccuuu

SEQ ID NO: 2903285 - RNA, 22 nt, Human
cuccuuuccccuuccuuuuaag

SEQ ID NO: 2903286 - RNA, 14 nt, Human
cuccuuucuccucc

SEQ ID NO: 2903287 - RNA, 22 nt, Human
cuccuuuagcgcccaguugggu

SEQ ID NO: 2903288 - RNA, 19 nt, Human
cuccuuucaccccagggcc

SEQ ID NO: 2903289 - RNA, 14 nt, Human
cuccuuucagggcc

SEQ ID NO: 2903290 - RNA, 17 nt, Human
cuccuuuagcgcccagu

SEQ ID NO: 2903291 - RNA, 16 nt, Human
cuccuuuagcgcccag

SEQ ID NO: 2903292 - RNA, 14 nt, Human
cuccuuucuuucua

SEQ ID NO: 2903293 - RNA, 19 nt, Human
cuccuuugaaaccugcucu

SEQ ID NO: 2903294 - RNA, 23 nt, Human
cuccuuugcugaggccuccagcu

SEQ ID NO: 2903295 - RNA, 20 nt, Human
cucgaaacacagaaaccuuu

SEQ ID NO: 2903296 - RNA, 13 nt, Human
cucgaacuccuga

SEQ ID NO: 2903297 - RNA, 19 nt, Human
cucgaaacacagaaaccuu

SEQ ID NO: 2903298 - RNA, 15 nt, Human
cucgaaacacagaaa

SEQ ID NO: 2903299 - RNA, 14 nt, Human
cucgaaacacagaa

SEQ ID NO: 2903300 - RNA, 12 nt, Human
cuccuuuuaugu

SEQ ID NO: 2903301 - RNA, 15 nt, Human
cuccuuuuaugugua

SEQ ID NO: 2903302 - RNA, 10 nt, Human
cuccuuuucu

SEQ ID NO: 2903303 - RNA, 11 nt, Human
cuccuuuucuu

SEQ ID NO: 2903304 - RNA, 16 nt, Human
cuccuuuucuuuuguu

SEQ ID NO: 2903305 - RNA, 17 nt, Human
cuccuuuucuuuuguua

SEQ ID NO: 2903306 - RNA, 18 nt, Human
cuccuuuucuuuuguuac

SEQ ID NO: 2903307 - RNA, 19 nt, Human
cuccuuuucuuuuguuacu

SEQ ID NO: 2903308 - RNA, 20 nt, Human
cuccuuuucuuuuguuacug

SEQ ID NO: 2903309 - RNA, 21 nt, Human
cuccuuuucuuuuguuacugu

SEQ ID NO: 2903310 - RNA, 22 nt, Human
cuccuuuucuuuuguuacuguu

SEQ ID NO: 2903311 - RNA, 23 nt, Human
cuccuuuucuuuuguuacuguuc

SEQ ID NO: 2903312 - RNA, 24 nt, Human
cuccuuuugaccuucauuucaugu

SEQ ID NO: 2903313 - RNA, 17 nt, Human
cucgaacuccugaccuu

SEQ ID NO: 2903314 - RNA, 16 nt, Human
cucgaacuccugaccu

SEQ ID NO: 2903315 - RNA, 14 nt, Human
cucgguugaaaccu

SEQ ID NO: 2903316 - RNA, 15 nt, Human
cucgguugaaaccug

SEQ ID NO: 2903317 - RNA, 18 nt, Human
cucguauaugucucaggu

SEQ ID NO: 2903318 - RNA, 14 nt, Human
cucguagccaucuc

SEQ ID NO: 2903319 - RNA, 20 nt, Human
cucguauaugucucaggucc

SEQ ID NO: 2903320 - RNA, 14 nt, Human
cucggggagccuua

SEQ ID NO: 2903321 - RNA, 13 nt, Human
cucggggagccuu

SEQ ID NO: 2903322 - RNA, 16 nt, Human
cucucuucugcuccac

SEQ ID NO: 2903323 - RNA, 18 nt, Human
cucucuucugcuccaccc

SEQ ID NO: 2903324 - RNA, 20 nt, Human
cucucuugccgaggagccag

SEQ ID NO: 2903325 - RNA, 17 nt, Human
cucucuucugcuccacc

SEQ ID NO: 2903326 - RNA, 12 nt, Human
cucucccuguug

SEQ ID NO: 2903327 - RNA, 13 nt, Human
cucucccuuaccc

SEQ ID NO: 2903328 - RNA, 16 nt, Human
cucuccgaccagacac

SEQ ID NO: 2903329 - RNA, 20 nt, Human
cucuccuccccaaggagaca

SEQ ID NO: 2903330 - RNA, 14 nt, Human
cucugaacacaggc

SEQ ID NO: 2903331 - RNA, 15 nt, Human
cucugaacacaggca

SEQ ID NO: 2903332 - RNA, 16 nt, Human
cucugaacacaggcag

SEQ ID NO: 2903333 - RNA, 17 nt, Human
cucugaacacaggcagc

SEQ ID NO: 2903334 - RNA, 18 nt, Human
cucugaacacaggcagcu

SEQ ID NO: 2903335 - RNA, 19 nt, Human
cucugaacacaggcagcuu

SEQ ID NO: 2903336 - RNA, 20 nt, Human
cucugaacacaggcagcuuu

SEQ ID NO: 2903337 - RNA, 22 nt, Human
cucugaacacaggcagcuuucu

SEQ ID NO: 2903338 - RNA, 16 nt, Human
cucugaaaguuguaca

SEQ ID NO: 2903339 - RNA, 17 nt, Human
cucugaaaguuguacau

SEQ ID NO: 2903340 - RNA, 18 nt, Human
cucugaaaguuguacaug

SEQ ID NO: 2903341 - RNA, 19 nt, Human
cucugaaaguuguacauga

SEQ ID NO: 2903342 - RNA, 22 nt, Human
cucugaaaguuguacaugaaau

SEQ ID NO: 2903343 - RNA, 15 nt, Human
cucugaaacccugga

SEQ ID NO: 2903344 - RNA, 13 nt, Human
cucucuuuuccug

SEQ ID NO: 2903345 - RNA, 12 nt, Human
cucucuuuucug

SEQ ID NO: 2903346 - RNA, 14 nt, Human
cucucuuuucugua

SEQ ID NO: 2903347 - RNA, 17 nt, Human
cucucuuuucuguacuu

SEQ ID NO: 2903348 - RNA, 18 nt, Human
cucucuuuucuguacuuc

SEQ ID NO: 2903349 - RNA, 19 nt, Human
cucucuuuucuguacuucc

SEQ ID NO: 2903350 - RNA, 22 nt, Human
cucucuuuucuguacuuccuga

SEQ ID NO: 2903351 - RNA, 20 nt, Human
cugaaaauauauaagcucag

SEQ ID NO: 2903352 - RNA, 15 nt, Human
cugaaaaucuaauau

SEQ ID NO: 2903353 - RNA, 16 nt, Human
cugaaaaucuaauauu

SEQ ID NO: 2903354 - RNA, 17 nt, Human
cugaaaaucuaauauua

SEQ ID NO: 2903355 - RNA, 20 nt, Human
cugaaaaucuaauauuaaaa

SEQ ID NO: 2903356 - RNA, 18 nt, Human
cugaaaauaccaucaggc

SEQ ID NO: 2903357 - RNA, 15 nt, Human
cugaaaauauaaaac

SEQ ID NO: 2903358 - RNA, 13 nt, Human
cugaaaagagagc

SEQ ID NO: 2903359 - RNA, 17 nt, Human
cugaaaagagagcagag

SEQ ID NO: 2903360 - RNA, 19 nt, Human
cugaaaagagagcagagaa

SEQ ID NO: 2903361 - RNA, 23 nt, Human
cugaaaagagagcagagaauaua

SEQ ID NO: 2903362 - RNA, 21 nt, Human
cugaaaaaugguaauuguugc

SEQ ID NO: 2903363 - RNA, 14 nt, Human
cugaaaaaaaguuu

SEQ ID NO: 2903364 - RNA, 15 nt, Human
cugaaaaaaaguuua

SEQ ID NO: 2903365 - RNA, 18 nt, Human
cugaaaaaaaguuuacaa

SEQ ID NO: 2903366 - RNA, 22 nt, Human
cugaaaaaacaccuagcuuuau

SEQ ID NO: 2903367 - RNA, 20 nt, Human
cugaaaaaaaguuuacaagu

SEQ ID NO: 2903368 - RNA, 21 nt, Human
cugaaaaaacaccuagcuuua

SEQ ID NO: 2903369 - RNA, 15 nt, Human
cugaaaaaguagauu

SEQ ID NO: 2903370 - RNA, 19 nt, Human
cugaaaaaguagauugagu

SEQ ID NO: 2903371 - RNA, 22 nt, Human
cucuugccacugccucuuccuc

SEQ ID NO: 2903372 - RNA, 15 nt, Human
cucuuuuugugaagu

SEQ ID NO: 2903373 - RNA, 17 nt, Human
cucuuuuuuguuuguuu

SEQ ID NO: 2903374 - RNA, 19 nt, Human
cucuuuuuuguuuguuucu

SEQ ID NO: 2903375 - RNA, 20 nt, Human
cucuuuuuuguuuguuucuu

SEQ ID NO: 2903376 - RNA, 21 nt, Human
cucuuuuuuguuuguuucuuu

SEQ ID NO: 2903377 - RNA, 13 nt, Human
cucuuuuuuuccu

SEQ ID NO: 2903378 - RNA, 15 nt, Human
cucuuuuuuacucau

SEQ ID NO: 2903379 - RNA, 16 nt, Human
cucuuuuuuacucauu

SEQ ID NO: 2903380 - RNA, 18 nt, Human
cucuuuuuuacucauuga

SEQ ID NO: 2903381 - RNA, 21 nt, Human
cucuuuuuuacucauugaaau

SEQ ID NO: 2903382 - RNA, 22 nt, Human
cucuuuuuuacucauugaaaug

SEQ ID NO: 2903383 - RNA, 16 nt, Human
cucuugccgaggagcc

SEQ ID NO: 2903384 - RNA, 20 nt, Human
cucuugccgaggagccaggc

SEQ ID NO: 2903385 - RNA, 21 nt, Human
cucuugccgaggagccaggca

SEQ ID NO: 2903386 - RNA, 21 nt, Human
cucuugauaccccccucuguc

SEQ ID NO: 2903387 - RNA, 18 nt, Human
cucuugauaccccccucu

SEQ ID NO: 2903388 - RNA, 19 nt, Human
cucuugauaccccccucug

SEQ ID NO: 2903389 - RNA, 17 nt, Human
cucuugaggccaggagu

SEQ ID NO: 2903390 - RNA, 16 nt, Human
cucuugaggccaggag

SEQ ID NO: 2903391 - RNA, 14 nt, Human
cucuugaggccagg

SEQ ID NO: 2903392 - RNA, 22 nt, Human
cucuugagcuggccucucuagc

SEQ ID NO: 2903393 - RNA, 16 nt, Human
cucuugagcuggccuc

SEQ ID NO: 2903394 - RNA, 15 nt, Human
cucuugagcuggccu

SEQ ID NO: 2903395 - RNA, 14 nt, Human
cucuugagcuggcc

SEQ ID NO: 2903396 - RNA, 13 nt, Human
cucuugagcuggc

SEQ ID NO: 2903397 - RNA, 20 nt, Human
cugacacaaaccugccuggg

SEQ ID NO: 2903398 - RNA, 12 nt, Human
cugacacaaagg

SEQ ID NO: 2903399 - RNA, 13 nt, Human
cugacacaaagga

SEQ ID NO: 2903400 - RNA, 14 nt, Human
cugacacaaaggaa

SEQ ID NO: 2903401 - RNA, 15 nt, Human
cugacacaaaggaag

SEQ ID NO: 2903402 - RNA, 14 nt, Human
cugacacaaaccug

SEQ ID NO: 2903403 - RNA, 16 nt, Human
cugacacaaaccugcc

SEQ ID NO: 2903404 - RNA, 18 nt, Human
cugacacaaaccugccug

SEQ ID NO: 2903405 - RNA, 19 nt, Human
cugacacaaaccugccugg

SEQ ID NO: 2903406 - RNA, 18 nt, Human
cugacacaggaugaaggc

SEQ ID NO: 2903407 - RNA, 10 nt, Human
cugacacagg

SEQ ID NO: 2903408 - RNA, 13 nt, Human
cugacacaggaaa

SEQ ID NO: 2903409 - RNA, 21 nt, Human
cugacacaggaaaccaacacc

SEQ ID NO: 2903410 - RNA, 14 nt, Human
cugacacucccacc

SEQ ID NO: 2903411 - RNA, 15 nt, Human
cugacacucccaccc

SEQ ID NO: 2903412 - RNA, 19 nt, Human
cugacacucccacccaguc

SEQ ID NO: 2903413 - RNA, 14 nt, Human
cugacagaaagcag

SEQ ID NO: 2903414 - RNA, 13 nt, Human
cugacagaaacca

SEQ ID NO: 2903415 - RNA, 22 nt, Human
cugacacugguauuccugccuc

SEQ ID NO: 2903416 - RNA, 16 nt, Human
cugacacuucaaggug

SEQ ID NO: 2903417 - RNA, 19 nt, Human
cugacacuucaaggugaca

SEQ ID NO: 2903418 - RNA, 23 nt, Human
cugacacacagcucuguccuggg

SEQ ID NO: 2903419 - RNA, 22 nt, Human
cugacacacagcucuguccugg

SEQ ID NO: 2903420 - RNA, 21 nt, Human
cugacacacagcucuguccug

SEQ ID NO: 2903421 - RNA, 20 nt, Human
cugacacacagcucuguccu

SEQ ID NO: 2903422 - RNA, 19 nt, Human
cugacacacagcucugucc

SEQ ID NO: 2903423 - RNA, 18 nt, Human
cugacacacagcucuguc

SEQ ID NO: 2903424 - RNA, 17 nt, Human
cugacacacagcucugu

SEQ ID NO: 2903425 - RNA, 16 nt, Human
cugacacacagcucug

SEQ ID NO: 2903426 - RNA, 15 nt, Human
cugacacacagcucu

SEQ ID NO: 2903427 - RNA, 13 nt, Human
cugacacacagcu

SEQ ID NO: 2903428 - RNA, 22 nt, Human
cugacaaugguguuauuugaaa

SEQ ID NO: 2903429 - RNA, 15 nt, Human
cugaagcccucccag

SEQ ID NO: 2903430 - RNA, 18 nt, Human
cugaagcccauuucuccg

SEQ ID NO: 2903431 - RNA, 15 nt, Human
cugaagcauguuuca

SEQ ID NO: 2903432 - RNA, 18 nt, Human
cugaagcauguuucaugu

SEQ ID NO: 2903433 - RNA, 20 nt, Human
cugaagcauguuucauguuu

SEQ ID NO: 2903434 - RNA, 23 nt, Human
cugaagcauguuucauguuuugu

SEQ ID NO: 2903435 - RNA, 16 nt, Human
cugaagccaaagccaa

SEQ ID NO: 2903436 - RNA, 13 nt, Human
cugaagccagccu

SEQ ID NO: 2903437 - RNA, 14 nt, Human
cugaagccagccuu

SEQ ID NO: 2903438 - RNA, 17 nt, Human
cugaagccagccuucuu

SEQ ID NO: 2903439 - RNA, 16 nt, Human
cugaaagcacaggaga

SEQ ID NO: 2903440 - RNA, 13 nt, Human
cugaagcauguuu

SEQ ID NO: 2903441 - RNA, 20 nt, Human
cugaccccgguggcggcccc

SEQ ID NO: 2903442 - RNA, 17 nt, Human
cugaccccucauagccc

SEQ ID NO: 2903443 - RNA, 21 nt, Human
cugaccccucauagcccucac

SEQ ID NO: 2903444 - RNA, 20 nt, Human
cugaccccucauagcccuca

SEQ ID NO: 2903445 - RNA, 12 nt, Human
cugaccccuccu

SEQ ID NO: 2903446 - RNA, 14 nt, Human
cugaccccuccuca

SEQ ID NO: 2903447 - RNA, 15 nt, Human
cugaccccuccucac

SEQ ID NO: 2903448 - RNA, 16 nt, Human
cugaccccuccucacu

SEQ ID NO: 2903449 - RNA, 17 nt, Human
cugaccccuccucacug

SEQ ID NO: 2903450 - RNA, 20 nt, Human
cugaccccuccucacuggcc

SEQ ID NO: 2903451 - RNA, 21 nt, Human
cugaggggaggaucacuggag

SEQ ID NO: 2903452 - RNA, 23 nt, Human
cugaggaauccagacccggcugc

SEQ ID NO: 2903453 - RNA, 19 nt, Human
cugaggggcaucugccccu

SEQ ID NO: 2903454 - RNA, 18 nt, Human
cugaggggcaucugcccc

SEQ ID NO: 2903455 - RNA, 20 nt, Human
cugaggggcaucugccccuc

SEQ ID NO: 2903456 - RNA, 23 nt, Human
cugaggggaggaucacuggagcc

SEQ ID NO: 2903457 - RNA, 22 nt, Human
cugaggggaggaucacuggagc

SEQ ID NO: 2903458 - RNA, 17 nt, Human
cugaggggcaucugccc

SEQ ID NO: 2903459 - RNA, 16 nt, Human
cugaggggcaucugcc

SEQ ID NO: 2903460 - RNA, 19 nt, Human
cugaggguguuucuuccug

SEQ ID NO: 2903461 - RNA, 20 nt, Human
cugaggguguuucuuccugc

SEQ ID NO: 2903462 - RNA, 14 nt, Human
cugaggucagggag

SEQ ID NO: 2903463 - RNA, 15 nt, Human
cugaggucagggagu

SEQ ID NO: 2903464 - RNA, 17 nt, Human
cugaggucagggagugc

SEQ ID NO: 2903465 - RNA, 19 nt, Human
cugaggucagggagugcug

SEQ ID NO: 2903466 - RNA, 20 nt, Human
cugaggguccccaccuggga

SEQ ID NO: 2903467 - RNA, 21 nt, Human
cugaggguccccaccugggac

SEQ ID NO: 2903468 - RNA, 16 nt, Human
cugagggucugggcgg

SEQ ID NO: 2903469 - RNA, 18 nt, Human
cugagggucugggcggcg

SEQ ID NO: 2903470 - RNA, 15 nt, Human
cugaggguccccacc

SEQ ID NO: 2903471 - RNA, 18 nt, Human
cugaggguccccaccugg

SEQ ID NO: 2903472 - RNA, 19 nt, Human
cugaggguccccaccuggg

SEQ ID NO: 2903473 - RNA, 18 nt, Human
cugacccuacucccuugc

SEQ ID NO: 2903474 - RNA, 20 nt, Human
cugacccuacucccuugccc

SEQ ID NO: 2903475 - RNA, 21 nt, Human
cugaggaaggaggggaagcug

SEQ ID NO: 2903476 - RNA, 22 nt, Human
cugaggaaggaggggaagcugc

SEQ ID NO: 2903477 - RNA, 23 nt, Human
cugaggaaggaggggaagcugca

SEQ ID NO: 2903478 - RNA, 22 nt, Human
cugagcuugcagagaugaggcc

SEQ ID NO: 2903479 - RNA, 14 nt, Human
cugagguuucaccc

SEQ ID NO: 2903480 - RNA, 21 nt, Human
cugagguuucacccuuaaccc

SEQ ID NO: 2903481 - RNA, 13 nt, Human
ccaccucccugcc

SEQ ID NO: 2903482 - RNA, 15 nt, Human
ccaccucccugccca

SEQ ID NO: 2903483 - RNA, 16 nt, Human
ccaccucccugcccag

SEQ ID NO: 2903484 - RNA, 17 nt, Human
ccaccucccugcccagg

SEQ ID NO: 2903485 - RNA, 18 nt, Human
ccaccucccugcccaggc

SEQ ID NO: 2903486 - RNA, 12 nt, Human
ccacccugcucu

SEQ ID NO: 2903487 - RNA, 11 nt, Human
ccacccugcuc

SEQ ID NO: 2903488 - RNA, 16 nt, Human
ccaccucuccauccug

SEQ ID NO: 2903489 - RNA, 14 nt, Human
ccaccucucuccuu

SEQ ID NO: 2903490 - RNA, 17 nt, Human
ccaccucucuccuuugc

SEQ ID NO: 2903491 - RNA, 15 nt, Human
ccaccucucuuuuuc

SEQ ID NO: 2903492 - RNA, 19 nt, Human
ccaccucucuccuuugcug

SEQ ID NO: 2903493 - RNA, 24 nt, Human
ccaccucucuccuuugcugaggcc

SEQ ID NO: 2903494 - RNA, 10 nt, Human
ccaccucugc

SEQ ID NO: 2903495 - RNA, 11 nt, Human
ccaccucugcg

SEQ ID NO: 2903496 - RNA, 13 nt, Human
ccaccucugcgga

SEQ ID NO: 2903497 - RNA, 18 nt, Human
ccaccucugcggacccca

SEQ ID NO: 2903498 - RNA, 20 nt, Human
ccaccuucaauuccugggcc

SEQ ID NO: 2903499 - RNA, 19 nt, Human
ccaccuucaauuccugggc

SEQ ID NO: 2903500 - RNA, 18 nt, Human
ccaccuucaauuccuggg

SEQ ID NO: 2903501 - RNA, 11 nt, Human
ccaccuguggg

SEQ ID NO: 2903502 - RNA, 12 nt, Human
ccaccugugggu

SEQ ID NO: 2903503 - RNA, 17 nt, Human
ccaccuucaauuccugg

SEQ ID NO: 2903504 - RNA, 21 nt, Human
ccaccugguacucccucucag

SEQ ID NO: 2903505 - RNA, 22 nt, Human
ccaccugggcauauccaccacc

SEQ ID NO: 2903506 - RNA, 19 nt, Human
ccaccucugugaccucagg

SEQ ID NO: 2903507 - RNA, 22 nt, Human
ccaccucugugaccucaggcac

SEQ ID NO: 2903508 - RNA, 23 nt, Human
ccaccucugugaccucaggcacu

SEQ ID NO: 2903509 - RNA, 14 nt, Human
ccaccucuguggca

SEQ ID NO: 2903510 - RNA, 21 nt, Human
ccaccucuguggcauugaaau

SEQ ID NO: 2903511 - RNA, 22 nt, Human
ccaccucugcggaccccagcug

SEQ ID NO: 2903512 - RNA, 19 nt, Human
ccaccucugcggaccccag

SEQ ID NO: 2903513 - RNA, 20 nt, Human
ccaccucugcggaccccagc

SEQ ID NO: 2903514 - RNA, 15 nt, Human
ccaccucugugaccu

SEQ ID NO: 2903515 - RNA, 18 nt, Human
ccaccucugucauuuguu

SEQ ID NO: 2903516 - RNA, 17 nt, Human
ccaccucugugaccuca

SEQ ID NO: 2903517 - RNA, 18 nt, Human
ccaccucugugaccucag

SEQ ID NO: 2903518 - RNA, 13 nt, Human
ccaccccuccaga

SEQ ID NO: 2903519 - RNA, 15 nt, Human
ccacccccaccccca

SEQ ID NO: 2903520 - RNA, 13 nt, Human
ccacccccagcuc

SEQ ID NO: 2903521 - RNA, 16 nt, Human
ccacccccagcucaau

SEQ ID NO: 2903522 - RNA, 18 nt, Human
ccacccccuucucugcuc

SEQ ID NO: 2903523 - RNA, 13 nt, Human
ccacccccuucuc

SEQ ID NO: 2903524 - RNA, 14 nt, Human
ccacccuccuuuca

SEQ ID NO: 2903525 - RNA, 14 nt, Human
ccaccccucccucu

SEQ ID NO: 2903526 - RNA, 11 nt, Human
ccaccccugcu

SEQ ID NO: 2903527 - RNA, 13 nt, Human
ccaccccuuagau

SEQ ID NO: 2903528 - RNA, 23 nt, Human
ccaccccuuagauugaaguaaac

SEQ ID NO: 2903529 - RNA, 15 nt, Human
ccacccucccuggag

SEQ ID NO: 2903530 - RNA, 16 nt, Human
ccacccucccuggagu

SEQ ID NO: 2903531 - RNA, 17 nt, Human
ccacccucccuggagug

SEQ ID NO: 2903532 - RNA, 12 nt, Human
ccacccuccugg

SEQ ID NO: 2903533 - RNA, 13 nt, Human
ccacccuccuggc

SEQ ID NO: 2903534 - RNA, 17 nt, Human
ccacccuccuggccuca

SEQ ID NO: 2903535 - RNA, 23 nt, Human
ccacccuccuggccucagacugc

SEQ ID NO: 2903536 - RNA, 18 nt, Human
ccagacauacgaaacaca

SEQ ID NO: 2903537 - RNA, 20 nt, Human
ccagacauacgaaacacaaa

SEQ ID NO: 2903538 - RNA, 22 nt, Human
ccagacauacgaaacacaaacc

SEQ ID NO: 2903539 - RNA, 19 nt, Human
ccagacaucaugaauuuua

SEQ ID NO: 2903540 - RNA, 21 nt, Human
ccagaccaacguuacucaggg

SEQ ID NO: 2903541 - RNA, 23 nt, Human
ccagaccaacguuacucagggcu

SEQ ID NO: 2903542 - RNA, 24 nt, Human
ccagaccccuggcuuuucacugcu

SEQ ID NO: 2903543 - RNA, 18 nt, Human
ccagaccccuggcuuuuc

SEQ ID NO: 2903544 - RNA, 16 nt, Human
ccagacagugugcugu

SEQ ID NO: 2903545 - RNA, 15 nt, Human
ccagacccggcugcg

SEQ ID NO: 2903546 - RNA, 14 nt, Human
ccagacccggcugc

SEQ ID NO: 2903547 - RNA, 14 nt, Human
ccagagaguggcuc

SEQ ID NO: 2903548 - RNA, 15 nt, Human
ccagagaguggcucc

SEQ ID NO: 2903549 - RNA, 16 nt, Human
ccagagaguggcuccu

SEQ ID NO: 2903550 - RNA, 18 nt, Human
ccagagaguggcuccucc

SEQ ID NO: 2903551 - RNA, 22 nt, Human
ccagagaguggcuccucccggu

SEQ ID NO: 2903552 - RNA, 20 nt, Human
ccagagcauuuccaacacca

SEQ ID NO: 2903553 - RNA, 14 nt, Human
ccagagaguccugu

SEQ ID NO: 2903554 - RNA, 21 nt, Human
ccagagcauuuccaacaccac

SEQ ID NO: 2903555 - RNA, 22 nt, Human
ccagagcauuuccaacaccaca

SEQ ID NO: 2903556 - RNA, 23 nt, Human
ccagagcauuuccaacaccacag

SEQ ID NO: 2903557 - RNA, 13 nt, Human
ccagagccacaca

SEQ ID NO: 2903558 - RNA, 14 nt, Human
ccagagccacacau

SEQ ID NO: 2903559 - RNA, 15 nt, Human
ccagagccacacaug

SEQ ID NO: 2903560 - RNA, 16 nt, Human
ccagagccacacaugg

SEQ ID NO: 2903561 - RNA, 19 nt, Human
ccagagccacacaugggca

SEQ ID NO: 2903562 - RNA, 16 nt, Human
ccagaaucuaaagcca

SEQ ID NO: 2903563 - RNA, 13 nt, Human
ccagaaucccagc

SEQ ID NO: 2903564 - RNA, 14 nt, Human
ccagaaucccagcc

SEQ ID NO: 2903565 - RNA, 15 nt, Human
ccagaaucccagccg

SEQ ID NO: 2903566 - RNA, 21 nt, Human
ccagaaucccucuacauggac

SEQ ID NO: 2903567 - RNA, 17 nt, Human
ccagaaugcuguacauc

SEQ ID NO: 2903568 - RNA, 16 nt, Human
ccagaaugcuguacau

SEQ ID NO: 2903569 - RNA, 16 nt, Human
ccagaagcuuccauag

SEQ ID NO: 2903570 - RNA, 20 nt, Human
ccagaagccucuggcuagag

SEQ ID NO: 2903571 - RNA, 19 nt, Human
ccagaagccucuggcuaga

SEQ ID NO: 2903572 - RNA, 16 nt, Human
ccagaagccucuggcu

SEQ ID NO: 2903573 - RNA, 15 nt, Human
ccagaagccucuggc

SEQ ID NO: 2903574 - RNA, 15 nt, Human
ccagaagcuuccaua

SEQ ID NO: 2903575 - RNA, 17 nt, Human
ccacugucacccuccac

SEQ ID NO: 2903576 - RNA, 18 nt, Human
ccacugggguccagggag

SEQ ID NO: 2903577 - RNA, 19 nt, Human
ccacugggguccagggagc

SEQ ID NO: 2903578 - RNA, 22 nt, Human
ccacugggguccagggagcagg

SEQ ID NO: 2903579 - RNA, 15 nt, Human
ccacugcucugguua

SEQ ID NO: 2903580 - RNA, 13 nt, Human
ccacugcucuggu

SEQ ID NO: 2903581 - RNA, 12 nt, Human
ccacugcucugg

SEQ ID NO: 2903582 - RNA, 11 nt, Human
ccacugcucug

SEQ ID NO: 2903583 - RNA, 20 nt, Human
ccacugcuuuuggucugugu

SEQ ID NO: 2903584 - RNA, 21 nt, Human
ccacugccuucgauacaccgg

SEQ ID NO: 2903585 - RNA, 18 nt, Human
ccacugcugcaguagggg

SEQ ID NO: 2903586 - RNA, 22 nt, Human
ccacugcuuuuggucuguguga

SEQ ID NO: 2903587 - RNA, 18 nt, Human
ccacugcauaccaaccug

SEQ ID NO: 2903588 - RNA, 14 nt, Human
ccaccuugcgggga

SEQ ID NO: 2903589 - RNA, 14 nt, Human
ccaccuucccaugc

SEQ ID NO: 2903590 - RNA, 23 nt, Human
ccaccugguacucccucucagga

SEQ ID NO: 2903591 - RNA, 20 nt, Human
ccacugccagcagcagcagg

SEQ ID NO: 2903592 - RNA, 20 nt, Human
ccacugccucuggaauugcu

SEQ ID NO: 2903593 - RNA, 16 nt, Human
ccacugccucuuccuc

SEQ ID NO: 2903594 - RNA, 23 nt, Human
ccacugccagcagcagcagguga

SEQ ID NO: 2903595 - RNA, 13 nt, Human
ccacugccucugc

SEQ ID NO: 2903596 - RNA, 14 nt, Human
ccacugccucugcc

SEQ ID NO: 2903597 - RNA, 15 nt, Human
ccacugccucugccu

SEQ ID NO: 2903598 - RNA, 16 nt, Human
ccacugccucugccuu

SEQ ID NO: 2903599 - RNA, 17 nt, Human
ccacugccucugccuua

SEQ ID NO: 2903600 - RNA, 18 nt, Human
ccacugccucugccuuag

SEQ ID NO: 2903601 - RNA, 21 nt, Human
ccacugccucugccuuagagg

SEQ ID NO: 2903602 - RNA, 13 nt, Human
ccacugccucuuc

SEQ ID NO: 2903603 - RNA, 17 nt, Human
ccacugccagcagcagc

SEQ ID NO: 2903604 - RNA, 16 nt, Human
ccacugccagcagcag

SEQ ID NO: 2903605 - RNA, 15 nt, Human
ccacugccagcagca

SEQ ID NO: 2903606 - RNA, 14 nt, Human
ccacugccagcagc

SEQ ID NO: 2903607 - RNA, 13 nt, Human
ccacugccagcag

SEQ ID NO: 2903608 - RNA, 19 nt, Human
ccacugcauaccaaccugg

SEQ ID NO: 2903609 - RNA, 13 nt, Human
ccagaacuucccu

SEQ ID NO: 2903610 - RNA, 14 nt, Human
ccagaacuucccug

SEQ ID NO: 2903611 - RNA, 15 nt, Human
ccagaacuucccuga

SEQ ID NO: 2903612 - RNA, 18 nt, Human
ccagaagaaaauucuccu

SEQ ID NO: 2903613 - RNA, 18 nt, Human
ccagaagaagagaagcug

SEQ ID NO: 2903614 - RNA, 19 nt, Human
ccagaagaagagaagcugc

SEQ ID NO: 2903615 - RNA, 20 nt, Human
ccagaagaagagaagcugcu

SEQ ID NO: 2903616 - RNA, 19 nt, Human
ccagaacucacuggggccu

SEQ ID NO: 2903617 - RNA, 19 nt, Human
ccagaaccaccccggcccc

SEQ ID NO: 2903618 - RNA, 13 nt, Human
ccagaacccauuu

SEQ ID NO: 2903619 - RNA, 16 nt, Human
ccagaaaaccccagca

SEQ ID NO: 2903620 - RNA, 15 nt, Human
ccagaaaaccccagc

SEQ ID NO: 2903621 - RNA, 19 nt, Human
ccagaaaaaaaaaaacuua

SEQ ID NO: 2903622 - RNA, 16 nt, Human
ccacugugccaugugc

SEQ ID NO: 2903623 - RNA, 15 nt, Human
ccacugugccaugug

SEQ ID NO: 2903624 - RNA, 19 nt, Human
ccacugugccaugugccag

SEQ ID NO: 2903625 - RNA, 16 nt, Human
ccacugguuccuucuu

SEQ ID NO: 2903626 - RNA, 20 nt, Human
ccacugugcaggugcuauug

SEQ ID NO: 2903627 - RNA, 13 nt, Human
ccacugugguggc

SEQ ID NO: 2903628 - RNA, 12 nt, Human
ccacuguguaua

SEQ ID NO: 2903629 - RNA, 15 nt, Human
ccacugugccuuugc

SEQ ID NO: 2903630 - RNA, 20 nt, Human
ccacugugccuuugcaaauc

SEQ ID NO: 2903631 - RNA, 21 nt, Human
ccacugugccuuugcaaauca

SEQ ID NO: 2903632 - RNA, 22 nt, Human
ccacugugccuuugcaaaucag

SEQ ID NO: 2903633 - RNA, 23 nt, Human
ccacuguuucucuugagcuggcc

SEQ ID NO: 2903634 - RNA, 15 nt, Human
ccacuguuucuugcu

SEQ ID NO: 2903635 - RNA, 17 nt, Human
ccacuguuucuugcuug

SEQ ID NO: 2903636 - RNA, 18 nt, Human
ccacuguuucuugcuugu

SEQ ID NO: 2903637 - RNA, 20 nt, Human
ccacuguuucuugcuuguac

SEQ ID NO: 2903638 - RNA, 22 nt, Human
ccacuguuucucuugagcuggc

SEQ ID NO: 2903639 - RNA, 21 nt, Human
ccacuguuucucuugagcugg

SEQ ID NO: 2903640 - RNA, 19 nt, Human
ccacuguuucucuugagcu

SEQ ID NO: 2903641 - RNA, 18 nt, Human
ccacuguuucucuugagc

SEQ ID NO: 2903642 - RNA, 17 nt, Human
ccacuguuucucuugag

SEQ ID NO: 2903643 - RNA, 12 nt, Human
ccacuuuuuaac

SEQ ID NO: 2903644 - RNA, 19 nt, Human
ccagccugcccaagcccag

SEQ ID NO: 2903645 - RNA, 20 nt, Human
ccagccugcccaagcccagg

SEQ ID NO: 2903646 - RNA, 22 nt, Human
ccagccugcccaagcccaggcc

SEQ ID NO: 2903647 - RNA, 23 nt, Human
ccagccugcccaagcccaggcca

SEQ ID NO: 2903648 - RNA, 13 nt, Human
ccagcgagcccug

SEQ ID NO: 2903649 - RNA, 16 nt, Human
ccagcucccucuauuu

SEQ ID NO: 2903650 - RNA, 19 nt, Human
ccagccuuuggccuuggcu

SEQ ID NO: 2903651 - RNA, 12 nt, Human
ccagcuccucau

SEQ ID NO: 2903652 - RNA, 23 nt, Human
ccagcuccucauccagggcucug

SEQ ID NO: 2903653 - RNA, 16 nt, Human
ccagccugggcgacag

SEQ ID NO: 2903654 - RNA, 19 nt, Human
ccagccugucccauggaca

SEQ ID NO: 2903655 - RNA, 23 nt, Human
ccagccugucccauggacacucc

SEQ ID NO: 2903656 - RNA, 19 nt, Human
ccagccugggcgacagagc

SEQ ID NO: 2903657 - RNA, 14 nt, Human
ccagccuggggccu

SEQ ID NO: 2903658 - RNA, 17 nt, Human
ccagccuggggccuggc

SEQ ID NO: 2903659 - RNA, 18 nt, Human
ccagccuggggccuggca

SEQ ID NO: 2903660 - RNA, 19 nt, Human
ccagccuggggccuggcag

SEQ ID NO: 2903661 - RNA, 20 nt, Human
ccagccuggggccuggcagg

SEQ ID NO: 2903662 - RNA, 23 nt, Human
ccagccugggcagccaggcugcc

SEQ ID NO: 2903663 - RNA, 22 nt, Human
ccagccugggcagccaggcugc

SEQ ID NO: 2903664 - RNA, 18 nt, Human
ccagccugggcaacaaag

SEQ ID NO: 2903665 - RNA, 18 nt, Human
ccagccugggcagccagg

SEQ ID NO: 2903666 - RNA, 16 nt, Human
ccagccugggcagcca

SEQ ID NO: 2903667 - RNA, 19 nt, Human
ccagccugggcaacagagc

SEQ ID NO: 2903668 - RNA, 13 nt, Human
ccagccugaggca

SEQ ID NO: 2903669 - RNA, 18 nt, Human
ccagccuggcuucuggag

SEQ ID NO: 2903670 - RNA, 17 nt, Human
ccagccuggcuucugga

SEQ ID NO: 2903671 - RNA, 15 nt, Human
ccagccuggcuucug

SEQ ID NO: 2903672 - RNA, 13 nt, Human
ccagccuggcuuc

SEQ ID NO: 2903673 - RNA, 20 nt, Human
ccagccuggcuucuggagcc

SEQ ID NO: 2903674 - RNA, 19 nt, Human
ccagccuggcuucuggagc

SEQ ID NO: 2903675 - RNA, 21 nt, Human
ccagccuggcuucuggagccc

SEQ ID NO: 2903676 - RNA, 16 nt, Human
ccagccugggaggcac

SEQ ID NO: 2903677 - RNA, 17 nt, Human
ccagccugggaggcaca

SEQ ID NO: 2903678 - RNA, 18 nt, Human
ccagccugggaggcacag

SEQ ID NO: 2903679 - RNA, 20 nt, Human
ccagccugggaggcacagca

SEQ ID NO: 2903680 - RNA, 23 nt, Human
ccagccugggaggcacagcaaac

SEQ ID NO: 2903681 - RNA, 15 nt, Human
ccagcccuggggcug

SEQ ID NO: 2903682 - RNA, 19 nt, Human
ccagcccuggggcugggcc

SEQ ID NO: 2903683 - RNA, 23 nt, Human
ccagccgccauugccaccaggag

SEQ ID NO: 2903684 - RNA, 20 nt, Human
ccagccgccauugccaccag

SEQ ID NO: 2903685 - RNA, 17 nt, Human
ccagccgcucuccugcc

SEQ ID NO: 2903686 - RNA, 18 nt, Human
ccagccgcucuccugcca

SEQ ID NO: 2903687 - RNA, 19 nt, Human
ccagccgcucuccugccac

SEQ ID NO: 2903688 - RNA, 20 nt, Human
ccagccgcucuccugccaca

SEQ ID NO: 2903689 - RNA, 21 nt, Human
ccagccgcucuccugccacau

SEQ ID NO: 2903690 - RNA, 16 nt, Human
ccagccggccaaugga

SEQ ID NO: 2903691 - RNA, 17 nt, Human
ccagccggccaauggaa

SEQ ID NO: 2903692 - RNA, 19 nt, Human
ccagccggccaauggaaac

SEQ ID NO: 2903693 - RNA, 22 nt, Human
ccagccggccaauggaaaccuc

SEQ ID NO: 2903694 - RNA, 19 nt, Human
ccagcccauggcccugugc

SEQ ID NO: 2903695 - RNA, 16 nt, Human
ccagcccaucucggag

SEQ ID NO: 2903696 - RNA, 17 nt, Human
ccagcccaucucggagc

SEQ ID NO: 2903697 - RNA, 20 nt, Human
ccagcccaucucggagcauc

SEQ ID NO: 2903698 - RNA, 14 nt, Human
ccagcccagggugg

SEQ ID NO: 2903699 - RNA, 13 nt, Human
ccagcccuggcuc

SEQ ID NO: 2903700 - RNA, 17 nt, Human
ccagcccuggcucugca

SEQ ID NO: 2903701 - RNA, 19 nt, Human
ccagccauuaccauggaga

SEQ ID NO: 2903702 - RNA, 21 nt, Human
ccagccauuaccauggagaca

SEQ ID NO: 2903703 - RNA, 12 nt, Human
ccagcccaaagg

SEQ ID NO: 2903704 - RNA, 21 nt, Human
ccagcccaaaggggacaggcc

SEQ ID NO: 2903705 - RNA, 22 nt, Human
ccagcccaaaggggacaggccu

SEQ ID NO: 2903706 - RNA, 23 nt, Human
ccagcccaaaggggacaggccuc

SEQ ID NO: 2903707 - RNA, 24 nt, Human
ccagcccaaaggggacaggccuca

SEQ ID NO: 2903708 - RNA, 18 nt, Human
ccagccaucaaaaugcuu

SEQ ID NO: 2903709 - RNA, 16 nt, Human
ccagccaucaaaaugc

SEQ ID NO: 2903710 - RNA, 21 nt, Human
ccagccauacuuaucucucug

SEQ ID NO: 2903711 - RNA, 22 nt, Human
ccagccauacuuaucucucugu

SEQ ID NO: 2903712 - RNA, 17 nt, Human
ccagcccacuucugcca

SEQ ID NO: 2903713 - RNA, 16 nt, Human
ccagcccacuucugcc

SEQ ID NO: 2903714 - RNA, 12 nt, Human
ccagcccaaucc

SEQ ID NO: 2903715 - RNA, 15 nt, Human
ccagcccaauccagg

SEQ ID NO: 2903716 - RNA, 18 nt, Human
ccagcccaauccagguac

SEQ ID NO: 2903717 - RNA, 12 nt, Human
ccagcccacauu

SEQ ID NO: 2903718 - RNA, 17 nt, Human
ccagcccagauugucuu

SEQ ID NO: 2903719 - RNA, 22 nt, Human
ccagauuguaucaugugcuaga

SEQ ID NO: 2903720 - RNA, 22 nt, Human
ccagauugcaacaggcugggcu

SEQ ID NO: 2903721 - RNA, 18 nt, Human
ccagauugcaacaggcug

SEQ ID NO: 2903722 - RNA, 23 nt, Human
ccagauugcaacaggcugggcuu

SEQ ID NO: 2903723 - RNA, 14 nt, Human
ccagagcccaccuu

SEQ ID NO: 2903724 - RNA, 16 nt, Human
ccagauugcaacaggc

SEQ ID NO: 2903725 - RNA, 14 nt, Human
ccagauugcaacag

SEQ ID NO: 2903726 - RNA, 19 nt, Human
ccagagcggaggcugugug

SEQ ID NO: 2903727 - RNA, 22 nt, Human
ccagagcggaggcugugugccu

SEQ ID NO: 2903728 - RNA, 19 nt, Human
ccagcaagugagagcuggg

SEQ ID NO: 2903729 - RNA, 18 nt, Human
ccagcaagugagagcugg

SEQ ID NO: 2903730 - RNA, 17 nt, Human
ccagcaagugagagcug

SEQ ID NO: 2903731 - RNA, 20 nt, Human
ccagcaacacagccugggcc

SEQ ID NO: 2903732 - RNA, 19 nt, Human
ccagcaacacagccugggc

SEQ ID NO: 2903733 - RNA, 17 nt, Human
ccagcaacacagccugg

SEQ ID NO: 2903734 - RNA, 16 nt, Human
ccagcaacacagccug

SEQ ID NO: 2903735 - RNA, 15 nt, Human
ccagcaacacagccu

SEQ ID NO: 2903736 - RNA, 14 nt, Human
ccagcaacacagcc

SEQ ID NO: 2903737 - RNA, 19 nt, Human
ccagcaccaacaccacggu

SEQ ID NO: 2903738 - RNA, 15 nt, Human
ccagcacacugggag

SEQ ID NO: 2903739 - RNA, 20 nt, Human
ccagcacacugggaggccga

SEQ ID NO: 2903740 - RNA, 22 nt, Human
ccagcaacacagccugggcccc

SEQ ID NO: 2903741 - RNA, 12 nt, Human
ccagcacaaaca

SEQ ID NO: 2903742 - RNA, 13 nt, Human
ccagcacaaacac

SEQ ID NO: 2903743 - RNA, 17 nt, Human
ccagcacaaacacaagg

SEQ ID NO: 2903744 - RNA, 20 nt, Human
ccagcacaaacacaagguca

SEQ ID NO: 2903745 - RNA, 21 nt, Human
ccagcaauucuccugccucag

SEQ ID NO: 2903746 - RNA, 18 nt, Human
ccagcaccucagccugca

SEQ ID NO: 2903747 - RNA, 15 nt, Human
ccagcaccugccucc

SEQ ID NO: 2903748 - RNA, 16 nt, Human
ccagcaccugccuccu

SEQ ID NO: 2903749 - RNA, 17 nt, Human
ccagcaccugccuccuc

SEQ ID NO: 2903750 - RNA, 17 nt, Human
ccagcaccucagccugc

SEQ ID NO: 2903751 - RNA, 15 nt, Human
ccagcaaaagguugu

SEQ ID NO: 2903752 - RNA, 15 nt, Human
ccagcaaacaaaaug

SEQ ID NO: 2903753 - RNA, 13 nt, Human
ccagauuuuuaau

SEQ ID NO: 2903754 - RNA, 21 nt, Human
ccagauuugcuaauuuauccu

SEQ ID NO: 2903755 - RNA, 24 nt, Human
ccagauuuuuuacagcugccugca

SEQ ID NO: 2903756 - RNA, 18 nt, Human
ccagauuuuucggaggcc

SEQ ID NO: 2903757 - RNA, 22 nt, Human
ccagauuuuucggaggccccac

SEQ ID NO: 2903758 - RNA, 13 nt, Human
ccagguagaaacu

SEQ ID NO: 2903759 - RNA, 19 nt, Human
ccagguacgcacagacagg

SEQ ID NO: 2903760 - RNA, 22 nt, Human
ccaggguggacuuagaaagcag

SEQ ID NO: 2903761 - RNA, 15 nt, Human
ccagggugcccagaa

SEQ ID NO: 2903762 - RNA, 22 nt, Human
ccagggugcccagaacuucccu

SEQ ID NO: 2903763 - RNA, 20 nt, Human
ccaggguggacuuagaaagc

SEQ ID NO: 2903764 - RNA, 21 nt, Human
ccaggguggacuuagaaagca

SEQ ID NO: 2903765 - RNA, 23 nt, Human
ccagggucuucccuaccucaggc

SEQ ID NO: 2903766 - RNA, 14 nt, Human
ccagggucuucccu

SEQ ID NO: 2903767 - RNA, 16 nt, Human
ccagggucucucccuc

SEQ ID NO: 2903768 - RNA, 18 nt, Human
ccagggucucucccucag

SEQ ID NO: 2903769 - RNA, 16 nt, Human
ccagggucugugugaa

SEQ ID NO: 2903770 - RNA, 20 nt, Human
ccagggucugugugaaugug

SEQ ID NO: 2903771 - RNA, 22 nt, Human
ccagggucugugugaauguggg

SEQ ID NO: 2903772 - RNA, 15 nt, Human
ccagggcccugcaga

SEQ ID NO: 2903773 - RNA, 16 nt, Human
ccagggccgaggaggu

SEQ ID NO: 2903774 - RNA, 14 nt, Human
ccagggcccugcag

SEQ ID NO: 2903775 - RNA, 16 nt, Human
ccagggccugagccug

SEQ ID NO: 2903776 - RNA, 14 nt, Human
ccagggccugagcc

SEQ ID NO: 2903777 - RNA, 23 nt, Human
ccagggccugcaggaccugccug

SEQ ID NO: 2903778 - RNA, 19 nt, Human
ccagggccugagccuggcc

SEQ ID NO: 2903779 - RNA, 18 nt, Human
ccagggccugagccuggc

SEQ ID NO: 2903780 - RNA, 17 nt, Human
ccagggccugagccugg

SEQ ID NO: 2903781 - RNA, 14 nt, Human
ccagcucccucuau

SEQ ID NO: 2903782 - RNA, 18 nt, Human
ccagggagccuuugguuc

SEQ ID NO: 2903783 - RNA, 22 nt, Human
ccagggagccuuugguucuggc

SEQ ID NO: 2903784 - RNA, 18 nt, Human
ccaggcugggcaaggagg

SEQ ID NO: 2903785 - RNA, 20 nt, Human
ccaggcugggcaaggaggcc

SEQ ID NO: 2903786 - RNA, 16 nt, Human
ccaggcuggucuaaaa

SEQ ID NO: 2903787 - RNA, 16 nt, Human
ccaggcugggugacag

SEQ ID NO: 2903788 - RNA, 17 nt, Human
ccaggcugggugacaga

SEQ ID NO: 2903789 - RNA, 17 nt, Human
ccaggcuggucuaaaac

SEQ ID NO: 2903790 - RNA, 20 nt, Human
ccaggcuggucuaaaacucc

SEQ ID NO: 2903791 - RNA, 22 nt, Human
ccagggagcuugaaaguuuuca

SEQ ID NO: 2903792 - RNA, 14 nt, Human
ccaggcuggucuca

SEQ ID NO: 2903793 - RNA, 17 nt, Human
ccagcucgcaccccccu

SEQ ID NO: 2903794 - RNA, 13 nt, Human
ccagcucuaaguc

SEQ ID NO: 2903795 - RNA, 16 nt, Human
ccaggccccugccacc

SEQ ID NO: 2903796 - RNA, 15 nt, Human
ccaggccccugccac

SEQ ID NO: 2903797 - RNA, 14 nt, Human
ccaggccccugcca

SEQ ID NO: 2903798 - RNA, 12 nt, Human
ccaggccagagg

SEQ ID NO: 2903799 - RNA, 16 nt, Human
ccaggcccgucugucc

SEQ ID NO: 2903800 - RNA, 17 nt, Human
ccaggcccgucugucca

SEQ ID NO: 2903801 - RNA, 18 nt, Human
ccaggcccgucuguccau

SEQ ID NO: 2903802 - RNA, 20 nt, Human
ccaggcccgucuguccaucu

SEQ ID NO: 2903803 - RNA, 22 nt, Human
ccaggcccgucuguccaucugc

SEQ ID NO: 2903804 - RNA, 23 nt, Human
ccaggcccgucuguccaucugcc

SEQ ID NO: 2903805 - RNA, 22 nt, Human
ccaucuaugucccuugcuguga

SEQ ID NO: 2903806 - RNA, 20 nt, Human
ccaucuaugucccuugcugu

SEQ ID NO: 2903807 - RNA, 14 nt, Human
ccaucucucccucc

SEQ ID NO: 2903808 - RNA, 23 nt, Human
ccaucucucccuccccugccauu

SEQ ID NO: 2903809 - RNA, 17 nt, Human
ccaucucucccuccccu

SEQ ID NO: 2903810 - RNA, 23 nt, Human
ccagugugacaaggauugcuacu

SEQ ID NO: 2903811 - RNA, 14 nt, Human
ccagugugacaagg

SEQ ID NO: 2903812 - RNA, 12 nt, Human
ccaguguggaac

SEQ ID NO: 2903813 - RNA, 22 nt, Human
ccagugugaucccaagugccag

SEQ ID NO: 2903814 - RNA, 15 nt, Human
ccagugugcugaugg

SEQ ID NO: 2903815 - RNA, 19 nt, Human
ccagugugcugaugggcgu

SEQ ID NO: 2903816 - RNA, 15 nt, Human
ccagugugaucccaa

SEQ ID NO: 2903817 - RNA, 21 nt, Human
ccauaugccuuggggaggaca

SEQ ID NO: 2903818 - RNA, 22 nt, Human
ccauaugccuuggggaggacaa

SEQ ID NO: 2903819 - RNA, 13 nt, Human
ccaucaugucugg

SEQ ID NO: 2903820 - RNA, 12 nt, Human
ccaucaugucug

SEQ ID NO: 2903821 - RNA, 16 nt, Human
ccaucaugcccggucc

SEQ ID NO: 2903822 - RNA, 22 nt, Human
ccaucaugcccggucccacccc

SEQ ID NO: 2903823 - RNA, 14 nt, Human
ccaggugcaguggc

SEQ ID NO: 2903824 - RNA, 22 nt, Human
ccaggugcaguggcucacgccu

SEQ ID NO: 2903825 - RNA, 15 nt, Human
ccagguggaaggcag

SEQ ID NO: 2903826 - RNA, 19 nt, Human
ccagguggaaggcagacag

SEQ ID NO: 2903827 - RNA, 20 nt, Human
ccagguggaaggcagacagc

SEQ ID NO: 2903828 - RNA, 16 nt, Human
ccagguggccacucca

SEQ ID NO: 2903829 - RNA, 21 nt, Human
ccagguggccacuccagaccc

SEQ ID NO: 2903830 - RNA, 14 nt, Human
ccagguagaaacuu

SEQ ID NO: 2903831 - RNA, 13 nt, Human
ccagguagcuggg

SEQ ID NO: 2903832 - RNA, 14 nt, Human
ccagguagcuggga

SEQ ID NO: 2903833 - RNA, 16 nt, Human
ccagguagcugggauu

SEQ ID NO: 2903834 - RNA, 20 nt, Human
ccagguagcugggauuacag

SEQ ID NO: 2903835 - RNA, 14 nt, Human
ccagguauggcucu

SEQ ID NO: 2903836 - RNA, 15 nt, Human
ccagguauggcucug

SEQ ID NO: 2903837 - RNA, 17 nt, Human
ccagguauggcucugca

SEQ ID NO: 2903838 - RNA, 22 nt, Human
ccagguauagagaaaggucuau

SEQ ID NO: 2903839 - RNA, 17 nt, Human
ccagguuucuggucucu

SEQ ID NO: 2903840 - RNA, 22 nt, Human
ccagguuucuggucucuaggcu

SEQ ID NO: 2903841 - RNA, 16 nt, Human
ccagguuucuaugugu

SEQ ID NO: 2903842 - RNA, 23 nt, Human
ccagugaauucuugaaggaaaau

SEQ ID NO: 2903843 - RNA, 17 nt, Human
ccagugaccccugaccu

SEQ ID NO: 2903844 - RNA, 18 nt, Human
ccagugaccugcugggua

SEQ ID NO: 2903845 - RNA, 20 nt, Human
ccagugaccugcuggguaaa

SEQ ID NO: 2903846 - RNA, 22 nt, Human
ccagugaccugcuggguaaacu

SEQ ID NO: 2903847 - RNA, 21 nt, Human
ccagugagaugagggaugggc

SEQ ID NO: 2903848 - RNA, 13 nt, Human
ccagugagaugca

SEQ ID NO: 2903849 - RNA, 14 nt, Human
ccagugagaugcau

SEQ ID NO: 2903850 - RNA, 17 nt, Human
ccagugagaugcauucu

SEQ ID NO: 2903851 - RNA, 21 nt, Human
ccagugagaugcauucuuggu

SEQ ID NO: 2903852 - RNA, 13 nt, Human
ccagugcaggcug

SEQ ID NO: 2903853 - RNA, 15 nt, Human
ccagugcaggcuggc

SEQ ID NO: 2903854 - RNA, 16 nt, Human
ccagugcaggcuggcc

SEQ ID NO: 2903855 - RNA, 17 nt, Human
ccagugcaggcuggcca

SEQ ID NO: 2903856 - RNA, 18 nt, Human
ccagugcaggcuggccag

SEQ ID NO: 2903857 - RNA, 19 nt, Human
ccagugcaggcuggccagc

SEQ ID NO: 2903858 - RNA, 20 nt, Human
ccagugcaggcuggccagcc

SEQ ID NO: 2903859 - RNA, 21 nt, Human
ccagugcaggcuggccagccg

SEQ ID NO: 2903860 - RNA, 22 nt, Human
ccagugcaggcuggccagccgc

SEQ ID NO: 2903861 - RNA, 12 nt, Human
ccagugccaagg

SEQ ID NO: 2903862 - RNA, 13 nt, Human
ccagugccaagga

SEQ ID NO: 2903863 - RNA, 14 nt, Human
ccagugccaaggac

SEQ ID NO: 2903864 - RNA, 16 nt, Human
ccagugccaaggaccu

SEQ ID NO: 2903865 - RNA, 19 nt, Human
ccagugcccaaagucugug

SEQ ID NO: 2903866 - RNA, 22 nt, Human
ccagugcccaaagucuguguga

SEQ ID NO: 2903867 - RNA, 23 nt, Human
ccagugagggacgucagacuugg

SEQ ID NO: 2903868 - RNA, 19 nt, Human
ccagugagucucuggggca

SEQ ID NO: 2903869 - RNA, 22 nt, Human
ccagugagggacgucagacuug

SEQ ID NO: 2903870 - RNA, 21 nt, Human
ccaguggccacucagcuuccu

SEQ ID NO: 2903871 - RNA, 19 nt, Human
ccaguggccuuaccccugc

SEQ ID NO: 2903872 - RNA, 22 nt, Human
ccaguggccuuaccccugccuu

SEQ ID NO: 2903873 - RNA, 15 nt, Human
ccaguggccacucag

SEQ ID NO: 2903874 - RNA, 16 nt, Human
ccaguggccacucagc

SEQ ID NO: 2903875 - RNA, 17 nt, Human
ccaguggccacucagcu

SEQ ID NO: 2903876 - RNA, 20 nt, Human
ccaguggcguuguugcaugu

SEQ ID NO: 2903877 - RNA, 13 nt, Human
ccaguggcugcug

SEQ ID NO: 2903878 - RNA, 14 nt, Human
ccaguggcugcugc

SEQ ID NO: 2903879 - RNA, 15 nt, Human
ccaguggcugcugcc

SEQ ID NO: 2903880 - RNA, 16 nt, Human
ccaguggcugcugccc

SEQ ID NO: 2903881 - RNA, 17 nt, Human
ccaguggcugcugccca

SEQ ID NO: 2903882 - RNA, 21 nt, Human
ccauuugcguuccaugaugcu

SEQ ID NO: 2903883 - RNA, 18 nt, Human
ccauuugcuacuguacau

SEQ ID NO: 2903884 - RNA, 20 nt, Human
ccauuugcuacuguacauaa

SEQ ID NO: 2903885 - RNA, 16 nt, Human
ccauuugcuuuuucac

SEQ ID NO: 2903886 - RNA, 18 nt, Human
ccauuuuccuacaggcag

SEQ ID NO: 2903887 - RNA, 22 nt, Human
ccauuuuccuacaggcagucuc

SEQ ID NO: 2903888 - RNA, 23 nt, Human
ccauuuuccuacaggcagucucu

SEQ ID NO: 2903889 - RNA, 22 nt, Human
ccauuuuauaaagugcuugugu

SEQ ID NO: 2903890 - RNA, 15 nt, Human
ccauucugccugccc

SEQ ID NO: 2903891 - RNA, 15 nt, Human
ccauucugcccugug

SEQ ID NO: 2903892 - RNA, 22 nt, Human
ccauucugccgcccccuccuga

SEQ ID NO: 2903893 - RNA, 22 nt, Human
ccauuugccaauuuuccuacuc

SEQ ID NO: 2903894 - RNA, 13 nt, Human
ccauuugaagugu

SEQ ID NO: 2903895 - RNA, 20 nt, Human
ccauuugaggauuuagaagu

SEQ ID NO: 2903896 - RNA, 12 nt, Human
ccauuugauacc

SEQ ID NO: 2903897 - RNA, 19 nt, Human
ccauuugauaccccugggg

SEQ ID NO: 2903898 - RNA, 21 nt, Human
ccauuugauaccccuggggaa

SEQ ID NO: 2903899 - RNA, 17 nt, Human
ccauuugauuuuucuaa

SEQ ID NO: 2903900 - RNA, 15 nt, Human
ccauucucaucugca

SEQ ID NO: 2903901 - RNA, 16 nt, Human
ccauucucaucugcac

SEQ ID NO: 2903902 - RNA, 18 nt, Human
ccauucucaucugcaccc

SEQ ID NO: 2903903 - RNA, 22 nt, Human
ccauucucaucugcacccuucu

SEQ ID NO: 2903904 - RNA, 12 nt, Human
ccauucuaugug

SEQ ID NO: 2903905 - RNA, 17 nt, Human
ccauucuauuuuagaau

SEQ ID NO: 2903906 - RNA, 18 nt, Human
ccauucgcgcucugcuca

SEQ ID NO: 2903907 - RNA, 16 nt, Human
ccauuagagucagccu

SEQ ID NO: 2903908 - RNA, 14 nt, Human
ccauuaucccugaa

SEQ ID NO: 2903909 - RNA, 21 nt, Human
ccauuaucccugaaucccccu

SEQ ID NO: 2903910 - RNA, 14 nt, Human
ccauuaaaacugcu

SEQ ID NO: 2903911 - RNA, 15 nt, Human
ccauuaaaacugcuu

SEQ ID NO: 2903912 - RNA, 16 nt, Human
ccauuaaaacugcuuu

SEQ ID NO: 2903913 - RNA, 15 nt, Human
ccauguuaacaugac

SEQ ID NO: 2903914 - RNA, 22 nt, Human
ccauguuaauuucaugugucaa

SEQ ID NO: 2903915 - RNA, 22 nt, Human
ccauguucacaccgcugcacuc

SEQ ID NO: 2903916 - RNA, 14 nt, Human
ccauguucugcccc

SEQ ID NO: 2903917 - RNA, 16 nt, Human
ccauguucugccccca

SEQ ID NO: 2903918 - RNA, 17 nt, Human
ccauguucugcccccag

SEQ ID NO: 2903919 - RNA, 18 nt, Human
ccauguucugcccccagc

SEQ ID NO: 2903920 - RNA, 19 nt, Human
ccauguucugcccccagcc

SEQ ID NO: 2903921 - RNA, 20 nt, Human
ccauguucugcccccagccc

SEQ ID NO: 2903922 - RNA, 21 nt, Human
ccauguucugcccccagccca

SEQ ID NO: 2903923 - RNA, 22 nt, Human
ccauguucugcccccagcccaa

SEQ ID NO: 2903924 - RNA, 15 nt, Human
ccauuaaaguucuca

SEQ ID NO: 2903925 - RNA, 15 nt, Human
ccauuaaaugaauau

SEQ ID NO: 2903926 - RNA, 16 nt, Human
ccauuaaaugaauauu

SEQ ID NO: 2903927 - RNA, 17 nt, Human
ccauuaaaugaauauuu

SEQ ID NO: 2903928 - RNA, 19 nt, Human
ccauuaaaugaauauuuug

SEQ ID NO: 2903929 - RNA, 13 nt, Human
ccauuaaagucug

SEQ ID NO: 2903930 - RNA, 14 nt, Human
ccauuaaagucuga

SEQ ID NO: 2903931 - RNA, 15 nt, Human
ccauuaaagucugaa

SEQ ID NO: 2903932 - RNA, 16 nt, Human
ccauuaaagucugaau

SEQ ID NO: 2903933 - RNA, 14 nt, Human
ccauuaccauggag

SEQ ID NO: 2903934 - RNA, 16 nt, Human
ccauuaaucauuuccc

SEQ ID NO: 2903935 - RNA, 18 nt, Human
ccauuaaucauuucccca

SEQ ID NO: 2903936 - RNA, 14 nt, Human
ccauguguccuggu

SEQ ID NO: 2903937 - RNA, 20 nt, Human
ccaugugucacuugugcuuu

SEQ ID NO: 2903938 - RNA, 20 nt, Human
ccaucuucgggaccaggauu

SEQ ID NO: 2903939 - RNA, 17 nt, Human
ccauguguccugguucc

SEQ ID NO: 2903940 - RNA, 15 nt, Human
ccaucuguguccugg

SEQ ID NO: 2903941 - RNA, 17 nt, Human
ccaucuaguacuugaaa

SEQ ID NO: 2903942 - RNA, 15 nt, Human
ccaucuuacuugagc

SEQ ID NO: 2903943 - RNA, 15 nt, Human
ccaucuuaguuugga

SEQ ID NO: 2903944 - RNA, 14 nt, Human
ccaucuucacccag

SEQ ID NO: 2903945 - RNA, 16 nt, Human
ccaucuucacccaggc

SEQ ID NO: 2903946 - RNA, 21 nt, Human
ccaucuucacccaggccuaug

SEQ ID NO: 2903947 - RNA, 18 nt, Human
ccaucuucgggaccagga

SEQ ID NO: 2903948 - RNA, 16 nt, Human
ccaucuguacuugguc

SEQ ID NO: 2903949 - RNA, 20 nt, Human
ccaucuguacuugguccaac

SEQ ID NO: 2903950 - RNA, 19 nt, Human
ccaucugucuaaagauaga

SEQ ID NO: 2903951 - RNA, 16 nt, Human
ccaucugugcacgcag

SEQ ID NO: 2903952 - RNA, 12 nt, Human
ccaucugugcau

SEQ ID NO: 2903953 - RNA, 13 nt, Human
ccaucugugcauu

SEQ ID NO: 2903954 - RNA, 14 nt, Human
ccaucugugcauuc

SEQ ID NO: 2903955 - RNA, 20 nt, Human
ccaucucucuacuccuaccu

SEQ ID NO: 2903956 - RNA, 18 nt, Human
ccaucucugauuuucaaa

SEQ ID NO: 2903957 - RNA, 23 nt, Human
ccaucucugauuuucaaagcuuu

SEQ ID NO: 2903958 - RNA, 12 nt, Human
ccaucucuggau

SEQ ID NO: 2903959 - RNA, 15 nt, Human
ccaucucuggaugcc

SEQ ID NO: 2903960 - RNA, 18 nt, Human
ccaucucuggaugccuga

SEQ ID NO: 2903961 - RNA, 22 nt, Human
ccaucucuggaugccugauugc

SEQ ID NO: 2903962 - RNA, 23 nt, Human
ccauuuucuuauugcgcugcuac

SEQ ID NO: 2903963 - RNA, 14 nt, Human
ccauuuugugaaug

SEQ ID NO: 2903964 - RNA, 13 nt, Human
ccauuuugugaau

SEQ ID NO: 2903965 - RNA, 12 nt, Human
ccauuuugugaa

SEQ ID NO: 2903966 - RNA, 13 nt, Human
ccauuuugugaag

SEQ ID NO: 2903967 - RNA, 14 nt, Human
ccauuuugugaagc

SEQ ID NO: 2903968 - RNA, 15 nt, Human
ccauuuugugaagcc

SEQ ID NO: 2903969 - RNA, 16 nt, Human
ccauuuugugaagccc

SEQ ID NO: 2903970 - RNA, 18 nt, Human
ccauuuugugaagcccug

SEQ ID NO: 2903971 - RNA, 19 nt, Human
ccauuuugugaagcccugu

SEQ ID NO: 2903972 - RNA, 17 nt, Human
ccauuuuuuaaggaaac

SEQ ID NO: 2903973 - RNA, 19 nt, Human
ccauuuuuuaaggaaacaa

SEQ ID NO: 2903974 - RNA, 19 nt, Human
ccauuuuucuuccaggaug

SEQ ID NO: 2903975 - RNA, 22 nt, Human
ccauuuuucuuccaggauggug

SEQ ID NO: 2903976 - RNA, 14 nt, Human
cccaaaacaaaguc

SEQ ID NO: 2903977 - RNA, 17 nt, Human
cccaaaacaaagucuuu

SEQ ID NO: 2903978 - RNA, 14 nt, Human
cccaacccccaccc

SEQ ID NO: 2903979 - RNA, 13 nt, Human
cccaacccccacc

SEQ ID NO: 2903980 - RNA, 12 nt, Human
cccaacccccac

SEQ ID NO: 2903981 - RNA, 23 nt, Human
cccaaccccuuaagcccuggccc

SEQ ID NO: 2903982 - RNA, 12 nt, Human
cccaaccagugc

SEQ ID NO: 2903983 - RNA, 17 nt, Human
cccaaccagugccaagg

SEQ ID NO: 2903984 - RNA, 18 nt, Human
cccaaccagugccaagga

SEQ ID NO: 2903985 - RNA, 14 nt, Human
cccaacauauaaaa

SEQ ID NO: 2903986 - RNA, 19 nt, Human
cccaacauauaaaauaaug

SEQ ID NO: 2903987 - RNA, 18 nt, Human
cccaaccccaagccagcc

SEQ ID NO: 2903988 - RNA, 19 nt, Human
cccaacagcgacauagccc

SEQ ID NO: 2903989 - RNA, 23 nt, Human
cccaacagcgacauagcccaucc

SEQ ID NO: 2903990 - RNA, 13 nt, Human
cccacaggaucag

SEQ ID NO: 2903991 - RNA, 17 nt, Human
cccacaggaucagucug

SEQ ID NO: 2903992 - RNA, 23 nt, Human
cccacagacucaaaugcucagac

SEQ ID NO: 2903993 - RNA, 13 nt, Human
cccacagacucaa

SEQ ID NO: 2903994 - RNA, 19 nt, Human
cccacagcacagcucccug

SEQ ID NO: 2903995 - RNA, 22 nt, Human
cccacagcacagcucccugcca

SEQ ID NO: 2903996 - RNA, 16 nt, Human
cccacaggcccuuccu

SEQ ID NO: 2903997 - RNA, 18 nt, Human
cccacaggcccuuccucu

SEQ ID NO: 2903998 - RNA, 19 nt, Human
cccacauccaacuccagca

SEQ ID NO: 2903999 - RNA, 18 nt, Human
cccacauccaacuccagc

SEQ ID NO: 2904000 - RNA, 19 nt, Human
cccacauagugaugguucc

SEQ ID NO: 2904001 - RNA, 23 nt, Human
cccaaguagcugggauuacaggu

SEQ ID NO: 2904002 - RNA, 20 nt, Human
cccaaguaagaggcuggagu

SEQ ID NO: 2904003 - RNA, 18 nt, Human
cccaaguagucugcucac

SEQ ID NO: 2904004 - RNA, 19 nt, Human
cccaaguagucugcucaca

SEQ ID NO: 2904005 - RNA, 20 nt, Human
cccaaguagucugcucacag

SEQ ID NO: 2904006 - RNA, 19 nt, Human
cccacacuuguuccagcuc

SEQ ID NO: 2904007 - RNA, 17 nt, Human
cccacacuuguuccagc

SEQ ID NO: 2904008 - RNA, 16 nt, Human
cccaaguggcagagcu

SEQ ID NO: 2904009 - RNA, 18 nt, Human
cccaagugccagucuugu

SEQ ID NO: 2904010 - RNA, 15 nt, Human
cccaagugccagucu

SEQ ID NO: 2904011 - RNA, 19 nt, Human
cccaagugcacuuucuaau

SEQ ID NO: 2904012 - RNA, 15 nt, Human
cccaccuuggcugca

SEQ ID NO: 2904013 - RNA, 14 nt, Human
cccaccuuggcugc

SEQ ID NO: 2904014 - RNA, 22 nt, Human
cccaccuuggcucaaguccucu

SEQ ID NO: 2904015 - RNA, 15 nt, Human
cccaccuuggcucaa

SEQ ID NO: 2904016 - RNA, 17 nt, Human
cccacgcccuccccucc

SEQ ID NO: 2904017 - RNA, 16 nt, Human
cccacgccgggaacca

SEQ ID NO: 2904018 - RNA, 22 nt, Human
cccaccuucaauuccugggccc

SEQ ID NO: 2904019 - RNA, 14 nt, Human
cccacgccuuaucc

SEQ ID NO: 2904020 - RNA, 12 nt, Human
cccacgugggag

SEQ ID NO: 2904021 - RNA, 18 nt, Human
cccacgugucuuccacuu

SEQ ID NO: 2904022 - RNA, 19 nt, Human
cccacgugucuuccacuuu

SEQ ID NO: 2904023 - RNA, 12 nt, Human
cccagaauccca

SEQ ID NO: 2904024 - RNA, 14 nt, Human
cccagaaucccagc

SEQ ID NO: 2904025 - RNA, 15 nt, Human
cccagaaucccagcc

SEQ ID NO: 2904026 - RNA, 16 nt, Human
cccagaaucccagccg

SEQ ID NO: 2904027 - RNA, 19 nt, Human
cccagaaucccagccggcc

SEQ ID NO: 2904028 - RNA, 20 nt, Human
cccagaaucccagccggcca

SEQ ID NO: 2904029 - RNA, 17 nt, Human
cccacgggaccuggggc

SEQ ID NO: 2904030 - RNA, 19 nt, Human
cccacggggccucgggacc

SEQ ID NO: 2904031 - RNA, 17 nt, Human
cccacgucacguguagu

SEQ ID NO: 2904032 - RNA, 15 nt, Human
cccacggcuaagagg

SEQ ID NO: 2904033 - RNA, 18 nt, Human
cccacggcuaagaggcug

SEQ ID NO: 2904034 - RNA, 19 nt, Human
cccacggcuaagaggcugc

SEQ ID NO: 2904035 - RNA, 21 nt, Human
cccaccucagccucccaaagu

SEQ ID NO: 2904036 - RNA, 12 nt, Human
cccaccuuggcu

SEQ ID NO: 2904037 - RNA, 21 nt, Human
cccaccuucaauuccugggcc

SEQ ID NO: 2904038 - RNA, 20 nt, Human
cccaccuucaauuccugggc

SEQ ID NO: 2904039 - RNA, 19 nt, Human
cccaccuucaauuccuggg

SEQ ID NO: 2904040 - RNA, 13 nt, Human
cccaccugggacc

SEQ ID NO: 2904041 - RNA, 18 nt, Human
cccaccucagccucccaa

SEQ ID NO: 2904042 - RNA, 15 nt, Human
cccaccucagccucc

SEQ ID NO: 2904043 - RNA, 14 nt, Human
cccaccucagccuc

SEQ ID NO: 2904044 - RNA, 12 nt, Human
cccaccucagcc

SEQ ID NO: 2904045 - RNA, 21 nt, Human
cccaccuagaacacuaacuca

SEQ ID NO: 2904046 - RNA, 16 nt, Human
cccaccuaugugccaa

SEQ ID NO: 2904047 - RNA, 13 nt, Human
cccaccucacccc

SEQ ID NO: 2904048 - RNA, 18 nt, Human
cccaccgguccagcuggc

SEQ ID NO: 2904049 - RNA, 21 nt, Human
cccaccgguccagcuggccug

SEQ ID NO: 2904050 - RNA, 18 nt, Human
cccacaugaggacaugau

SEQ ID NO: 2904051 - RNA, 19 nt, Human
cccucugccaccagagacc

SEQ ID NO: 2904052 - RNA, 14 nt, Human
cccucugccaccag

SEQ ID NO: 2904053 - RNA, 14 nt, Human
cccucugcccugcg

SEQ ID NO: 2904054 - RNA, 13 nt, Human
cccucugcccugc

SEQ ID NO: 2904055 - RNA, 12 nt, Human
cccucugcccug

SEQ ID NO: 2904056 - RNA, 11 nt, Human
cccucucccug

SEQ ID NO: 2904057 - RNA, 16 nt, Human
cccucucccucuaggc

SEQ ID NO: 2904058 - RNA, 17 nt, Human
cccucucccucuaggcu

SEQ ID NO: 2904059 - RNA, 18 nt, Human
cccucuccccaccccuac

SEQ ID NO: 2904060 - RNA, 20 nt, Human
cccucuccccaccccuaccc

SEQ ID NO: 2904061 - RNA, 23 nt, Human
cccucgugguccccaacagcgac

SEQ ID NO: 2904062 - RNA, 15 nt, Human
cccucucaucucagg

SEQ ID NO: 2904063 - RNA, 16 nt, Human
cccucucaucucaggu

SEQ ID NO: 2904064 - RNA, 20 nt, Human
cccucucaucucagguagaa

SEQ ID NO: 2904065 - RNA, 18 nt, Human
cccucgugguccccaaca

SEQ ID NO: 2904066 - RNA, 20 nt, Human
cccucgugguccccaacagc

SEQ ID NO: 2904067 - RNA, 17 nt, Human
cccucuuuggcuccccu

SEQ ID NO: 2904068 - RNA, 15 nt, Human
cccucuuguuuuguu

SEQ ID NO: 2904069 - RNA, 20 nt, Human
cccucuuguuuuguuugucu

SEQ ID NO: 2904070 - RNA, 21 nt, Human
cccucuuguuuuguuugucuc

SEQ ID NO: 2904071 - RNA, 22 nt, Human
cccucuuguuuuguuugucucu

SEQ ID NO: 2904072 - RNA, 13 nt, Human
cccucuuucucuu

SEQ ID NO: 2904073 - RNA, 14 nt, Human
cccucuuucucuuu

SEQ ID NO: 2904074 - RNA, 15 nt, Human
cccucuuucucuuuc

SEQ ID NO: 2904075 - RNA, 16 nt, Human
cccucuuucucuuucu

SEQ ID NO: 2904076 - RNA, 18 nt, Human
cccucuuucucuuucuuc

SEQ ID NO: 2904077 - RNA, 19 nt, Human
cccucuuucucuuucuucc

SEQ ID NO: 2904078 - RNA, 21 nt, Human
cccucuuucucuuucuuccuu

SEQ ID NO: 2904079 - RNA, 22 nt, Human
cccucuuucucuuucuuccuuu

SEQ ID NO: 2904080 - RNA, 19 nt, Human
cccucuuuggcuccccugu

SEQ ID NO: 2904081 - RNA, 20 nt, Human
cccucuuuggcuccccugua

SEQ ID NO: 2904082 - RNA, 21 nt, Human
cccucuuuggcuccccuguac

SEQ ID NO: 2904083 - RNA, 12 nt, Human
cccucuuuucuu

SEQ ID NO: 2904084 - RNA, 13 nt, Human
cccucuuuucuua

SEQ ID NO: 2904085 - RNA, 16 nt, Human
cccucuuuucuuacuc

SEQ ID NO: 2904086 - RNA, 21 nt, Human
cccucuuuucuuacuccuccu

SEQ ID NO: 2904087 - RNA, 22 nt, Human
cccucuuuucuuacuccuccuc

SEQ ID NO: 2904088 - RNA, 23 nt, Human
cccucuuuucuuacuccuccucu

SEQ ID NO: 2904089 - RNA, 21 nt, Human
cccucuuuuguuaaauaauau

SEQ ID NO: 2904090 - RNA, 20 nt, Human
cccucuucuuucagacuugc

SEQ ID NO: 2904091 - RNA, 24 nt, Human
cccucuucuuucagacuugccaug

SEQ ID NO: 2904092 - RNA, 15 nt, Human
cccucuucugagcac

SEQ ID NO: 2904093 - RNA, 14 nt, Human
cccucuucugagca

SEQ ID NO: 2904094 - RNA, 15 nt, Human
cccucuuccugugau

SEQ ID NO: 2904095 - RNA, 14 nt, Human
cccucuuccuguga

SEQ ID NO: 2904096 - RNA, 11 nt, Human
cccucuuccug

SEQ ID NO: 2904097 - RNA, 12 nt, Human
cccucuuccuga

SEQ ID NO: 2904098 - RNA, 15 nt, Human
cccucuuccugacga

SEQ ID NO: 2904099 - RNA, 20 nt, Human
cccucuuccugacgaaacug

SEQ ID NO: 2904100 - RNA, 21 nt, Human
cccucuguucugcacacagca

SEQ ID NO: 2904101 - RNA, 20 nt, Human
cccucuguucugcacacagc

SEQ ID NO: 2904102 - RNA, 12 nt, Human
cccucuggcucc

SEQ ID NO: 2904103 - RNA, 17 nt, Human
cccucuggcuccagcug

SEQ ID NO: 2904104 - RNA, 16 nt, Human
cccucuggcuccagcu

SEQ ID NO: 2904105 - RNA, 12 nt, Human
cccucuggccgc

SEQ ID NO: 2904106 - RNA, 22 nt, Human
cccucuggcuccagcuggccgg

SEQ ID NO: 2904107 - RNA, 12 nt, Human
cccucugggaac

SEQ ID NO: 2904108 - RNA, 14 nt, Human
cccucugggaaccu

SEQ ID NO: 2904109 - RNA, 15 nt, Human
cccucugggaaccuc

SEQ ID NO: 2904110 - RNA, 16 nt, Human
cccucugggaaccucc

SEQ ID NO: 2904111 - RNA, 19 nt, Human
cccucugggaaccucccag

SEQ ID NO: 2904112 - RNA, 20 nt, Human
cccucugggaaccucccaga

SEQ ID NO: 2904113 - RNA, 21 nt, Human
cccucugggaaccucccagag

SEQ ID NO: 2904114 - RNA, 22 nt, Human
cccucugggaaccucccagagg

SEQ ID NO: 2904115 - RNA, 13 nt, Human
cccuccccugcug

SEQ ID NO: 2904116 - RNA, 14 nt, Human
cccuccccugcugc

SEQ ID NO: 2904117 - RNA, 14 nt, Human
cccuccccugcccu

SEQ ID NO: 2904118 - RNA, 13 nt, Human
cccuccccugccc

SEQ ID NO: 2904119 - RNA, 16 nt, Human
cccuccccugcugcag

SEQ ID NO: 2904120 - RNA, 15 nt, Human
cccuccccuggggac

SEQ ID NO: 2904121 - RNA, 14 nt, Human
cccuccccuucucu

SEQ ID NO: 2904122 - RNA, 10 nt, Human
cccucccaga

SEQ ID NO: 2904123 - RNA, 19 nt, Human
cccucccaccucugugacc

SEQ ID NO: 2904124 - RNA, 13 nt, Human
cccucccaccucu

SEQ ID NO: 2904125 - RNA, 14 nt, Human
cccucccaccucug

SEQ ID NO: 2904126 - RNA, 15 nt, Human
cccucccaccucugu

SEQ ID NO: 2904127 - RNA, 17 nt, Human
cccucccaccucuguga

SEQ ID NO: 2904128 - RNA, 13 nt, Human
cccuccccugcca

SEQ ID NO: 2904129 - RNA, 13 nt, Human
cccucccagaggc

SEQ ID NO: 2904130 - RNA, 15 nt, Human
cccucccaccuccag

SEQ ID NO: 2904131 - RNA, 13 nt, Human
cccucccaccccc

SEQ ID NO: 2904132 - RNA, 12 nt, Human
cccucccacccc

SEQ ID NO: 2904133 - RNA, 14 nt, Human
cccgcucagcccuc

SEQ ID NO: 2904134 - RNA, 12 nt, Human
cccgcucagccc

SEQ ID NO: 2904135 - RNA, 13 nt, Human
cccgcucagcccu

SEQ ID NO: 2904136 - RNA, 23 nt, Human
cccucccgccccuucccacucac

SEQ ID NO: 2904137 - RNA, 14 nt, Human
cccucccugccccu

SEQ ID NO: 2904138 - RNA, 14 nt, Human
cccucccuggcucc

SEQ ID NO: 2904139 - RNA, 12 nt, Human
cccucccuggag

SEQ ID NO: 2904140 - RNA, 13 nt, Human
cccucccuggagu

SEQ ID NO: 2904141 - RNA, 14 nt, Human
cccucccuggagug

SEQ ID NO: 2904142 - RNA, 19 nt, Human
cccucccuggcucccauga

SEQ ID NO: 2904143 - RNA, 16 nt, Human
cccucccuggcuccca

SEQ ID NO: 2904144 - RNA, 12 nt, Human
cccuucccugca

SEQ ID NO: 2904145 - RNA, 16 nt, Human
cccuugcccuagauag

SEQ ID NO: 2904146 - RNA, 14 nt, Human
cccuugcuguaugc

SEQ ID NO: 2904147 - RNA, 21 nt, Human
cccuugcuguaugcugaucau

SEQ ID NO: 2904148 - RNA, 18 nt, Human
cccuugcucuccccugcc

SEQ ID NO: 2904149 - RNA, 11 nt, Human
cccuugcuuuu

SEQ ID NO: 2904150 - RNA, 14 nt, Human
cccuugcuuuuccc

SEQ ID NO: 2904151 - RNA, 17 nt, Human
cccuugcuuuucccucu

SEQ ID NO: 2904152 - RNA, 18 nt, Human
cccuugcuuuucccucuu

SEQ ID NO: 2904153 - RNA, 21 nt, Human
cccuugcuuuucccucuuuuc

SEQ ID NO: 2904154 - RNA, 19 nt, Human
cccuugcucuccccugccc

SEQ ID NO: 2904155 - RNA, 22 nt, Human
cccuucaacguuucuucacuuu

SEQ ID NO: 2904156 - RNA, 18 nt, Human
cccuucccaaucagcacu

SEQ ID NO: 2904157 - RNA, 14 nt, Human
cccuuccccucccu

SEQ ID NO: 2904158 - RNA, 12 nt, Human
cccuuccccucc

SEQ ID NO: 2904159 - RNA, 19 nt, Human
cccuuccccucccuggcuc

SEQ ID NO: 2904160 - RNA, 17 nt, Human
cccuuccccucccuggc

SEQ ID NO: 2904161 - RNA, 16 nt, Human
cccuuccccucccugg

SEQ ID NO: 2904162 - RNA, 15 nt, Human
cccuuccccucccug

SEQ ID NO: 2904163 - RNA, 13 nt, Human
cccuucccugcac

SEQ ID NO: 2904164 - RNA, 13 nt, Human
cccuuccccuccu

SEQ ID NO: 2904165 - RNA, 22 nt, Human
cccuuccccucccuggcuccca

SEQ ID NO: 2904166 - RNA, 22 nt, Human
cccuugaggaaacaacagcuuu

SEQ ID NO: 2904167 - RNA, 13 nt, Human
cccuugagggaga

SEQ ID NO: 2904168 - RNA, 18 nt, Human
cccuugccaccccacccu

SEQ ID NO: 2904169 - RNA, 15 nt, Human
cccuugccacuuugc

SEQ ID NO: 2904170 - RNA, 16 nt, Human
cccuugccacuuugca

SEQ ID NO: 2904171 - RNA, 17 nt, Human
cccuugccacuuugcac

SEQ ID NO: 2904172 - RNA, 12 nt, Human
cccuugagcccu

SEQ ID NO: 2904173 - RNA, 13 nt, Human
cccuugagcccuc

SEQ ID NO: 2904174 - RNA, 14 nt, Human
cccuugagcccucc

SEQ ID NO: 2904175 - RNA, 15 nt, Human
cccuugagcccuccc

SEQ ID NO: 2904176 - RNA, 18 nt, Human
cccuugagcccuccccag

SEQ ID NO: 2904177 - RNA, 16 nt, Human
cccuucccuguccuug

SEQ ID NO: 2904178 - RNA, 14 nt, Human
cccuucccuuccac

SEQ ID NO: 2904179 - RNA, 17 nt, Human
cccuucccuuccacugc

SEQ ID NO: 2904180 - RNA, 19 nt, Human
cccuucccuuccacugccu

SEQ ID NO: 2904181 - RNA, 13 nt, Human
cccuucccuuccc

SEQ ID NO: 2904182 - RNA, 20 nt, Human
cccuuaucugugcucaggac

SEQ ID NO: 2904183 - RNA, 16 nt, Human
cccuuaucugugcuca

SEQ ID NO: 2904184 - RNA, 14 nt, Human
cccuucaaccauuc

SEQ ID NO: 2904185 - RNA, 18 nt, Human
cccuuccaaauaauaaag

SEQ ID NO: 2904186 - RNA, 20 nt, Human
cccuuccaaauaauaaaguc

SEQ ID NO: 2904187 - RNA, 16 nt, Human
cccuucacauuuuuua

SEQ ID NO: 2904188 - RNA, 18 nt, Human
cccuucaaccauucccca

SEQ ID NO: 2904189 - RNA, 12 nt, Human
cccuuauuuuca

SEQ ID NO: 2904190 - RNA, 20 nt, Human
cccuuccaugucgccucugc

SEQ ID NO: 2904191 - RNA, 20 nt, Human
cccuuccagaucacugccac

SEQ ID NO: 2904192 - RNA, 13 nt, Human
cccuuccagauca

SEQ ID NO: 2904193 - RNA, 12 nt, Human
cccuuccacugc

SEQ ID NO: 2904194 - RNA, 13 nt, Human
cccuuccacugcc

SEQ ID NO: 2904195 - RNA, 14 nt, Human
cccuuccacugccu

SEQ ID NO: 2904196 - RNA, 16 nt, Human
cccuuccacugccucu

SEQ ID NO: 2904197 - RNA, 18 nt, Human
cccuuccacugccucugc

SEQ ID NO: 2904198 - RNA, 20 nt, Human
cccuuccacugccucugccu

SEQ ID NO: 2904199 - RNA, 12 nt, Human
cccuuccagaca

SEQ ID NO: 2904200 - RNA, 13 nt, Human
cccuuccagacau

SEQ ID NO: 2904201 - RNA, 14 nt, Human
cccuuagcagggaa

SEQ ID NO: 2904202 - RNA, 16 nt, Human
cccuuagaaaaugugu

SEQ ID NO: 2904203 - RNA, 16 nt, Human
cccuuacuucuugccc

SEQ ID NO: 2904204 - RNA, 13 nt, Human
cccuuaccuuccc

SEQ ID NO: 2904205 - RNA, 20 nt, Human
cccuuagaaguuuguuguga

SEQ ID NO: 2904206 - RNA, 23 nt, Human
cccuuagcagggaaacagcuaau

SEQ ID NO: 2904207 - RNA, 22 nt, Human
cccuuauaguuugggcuucagc

SEQ ID NO: 2904208 - RNA, 14 nt, Human
cccuuagccucccu

SEQ ID NO: 2904209 - RNA, 17 nt, Human
cccuuagccucccugaa

SEQ ID NO: 2904210 - RNA, 12 nt, Human
cccuuagucccc

SEQ ID NO: 2904211 - RNA, 15 nt, Human
cccuuagucccccaa

SEQ ID NO: 2904212 - RNA, 18 nt, Human
cccuuagucccccaacuc

SEQ ID NO: 2904213 - RNA, 23 nt, Human
cccuuagucccccaacucugagc

SEQ ID NO: 2904214 - RNA, 14 nt, Human
cccuuaacccaagg

SEQ ID NO: 2904215 - RNA, 15 nt, Human
cccuuaacccaagga

SEQ ID NO: 2904216 - RNA, 16 nt, Human
cccuuaacccaaggag

SEQ ID NO: 2904217 - RNA, 17 nt, Human
cccuuaacccaaggagc

SEQ ID NO: 2904218 - RNA, 20 nt, Human
cccuuaacccaaggagcaca

SEQ ID NO: 2904219 - RNA, 22 nt, Human
cccuuaacccaaggagcacagg

SEQ ID NO: 2904220 - RNA, 15 nt, Human
cccuuaagcccuggc

SEQ ID NO: 2904221 - RNA, 12 nt, Human
cccuguucuucc

SEQ ID NO: 2904222 - RNA, 13 nt, Human
cccuguucuuccu

SEQ ID NO: 2904223 - RNA, 14 nt, Human
cccuguucuuccuc

SEQ ID NO: 2904224 - RNA, 16 nt, Human
cccuguucuuccucca

SEQ ID NO: 2904225 - RNA, 20 nt, Human
cccuguucuuccuccagcug

SEQ ID NO: 2904226 - RNA, 21 nt, Human
cccuguucuuccuccagcugc

SEQ ID NO: 2904227 - RNA, 14 nt, Human
cccuuaaaauagaa

SEQ ID NO: 2904228 - RNA, 18 nt, Human
cccugcuuuagagcuagg

SEQ ID NO: 2904229 - RNA, 11 nt, Human
cccuguucuaa

SEQ ID NO: 2904230 - RNA, 12 nt, Human
cccuguucuaag

SEQ ID NO: 2904231 - RNA, 21 nt, Human
cccuguucuaagggggagggg

SEQ ID NO: 2904232 - RNA, 23 nt, Human
cccuguucuaagggggaggggaa

SEQ ID NO: 2904233 - RNA, 15 nt, Human
cccuggugcugccac

SEQ ID NO: 2904234 - RNA, 15 nt, Human
cccuggugccuggcu

SEQ ID NO: 2904235 - RNA, 16 nt, Human
cccuggugccuggcuc

SEQ ID NO: 2904236 - RNA, 13 nt, Human
cccuggggccugg

SEQ ID NO: 2904237 - RNA, 20 nt, Human
cccuggggacagcaagggcu

SEQ ID NO: 2904238 - RNA, 15 nt, Human
cccuggggccuagac

SEQ ID NO: 2904239 - RNA, 14 nt, Human
cccuggggccugga

SEQ ID NO: 2904240 - RNA, 17 nt, Human
cccuggggccuggaccu

SEQ ID NO: 2904241 - RNA, 23 nt, Human
cccuggggccuggaccugccucc

SEQ ID NO: 2904242 - RNA, 18 nt, Human
cccuggggccuggaccug

SEQ ID NO: 2904243 - RNA, 21 nt, Human
cccuggggccuggaccugccu

SEQ ID NO: 2904244 - RNA, 13 nt, Human
cccuggugcugcc

SEQ ID NO: 2904245 - RNA, 14 nt, Human
cccuggugcugcca

SEQ ID NO: 2904246 - RNA, 13 nt, Human
cccugguggcagu

SEQ ID NO: 2904247 - RNA, 14 nt, Human
cccugguggcagug

SEQ ID NO: 2904248 - RNA, 17 nt, Human
cccugcugcugucaccu

SEQ ID NO: 2904249 - RNA, 19 nt, Human
cccugcugcugucaccucu

SEQ ID NO: 2904250 - RNA, 22 nt, Human
cccugcuucagauguggagcca

SEQ ID NO: 2904251 - RNA, 23 nt, Human
cccugcuucagauguggagccag

SEQ ID NO: 2904252 - RNA, 19 nt, Human
cccuggggacagcaagggc

SEQ ID NO: 2904253 - RNA, 17 nt, Human
cccuggggacagcaagg

SEQ ID NO: 2904254 - RNA, 21 nt, Human
cccugcucuccgaccagacac

SEQ ID NO: 2904255 - RNA, 22 nt, Human
cccugcucuccgaccagacacc

SEQ ID NO: 2904256 - RNA, 21 nt, Human
cccugcugagucccaggcuga

SEQ ID NO: 2904257 - RNA, 12 nt, Human
cccugcuccugc

SEQ ID NO: 2904258 - RNA, 13 nt, Human
cccugcuccugca

SEQ ID NO: 2904259 - RNA, 14 nt, Human
cccugcuccugcag

SEQ ID NO: 2904260 - RNA, 15 nt, Human
cccugcuccugcagc

SEQ ID NO: 2904261 - RNA, 16 nt, Human
cccugcuccugcagca

SEQ ID NO: 2904262 - RNA, 18 nt, Human
cccugcuccugcagcaug

SEQ ID NO: 2904263 - RNA, 23 nt, Human
cccugcugccgccucccagccug

SEQ ID NO: 2904264 - RNA, 22 nt, Human
cccugcugccgccucccagccu

SEQ ID NO: 2904265 - RNA, 20 nt, Human
cccugcugccgccucccagc

SEQ ID NO: 2904266 - RNA, 13 nt, Human
cccugcugccuuc

SEQ ID NO: 2904267 - RNA, 19 nt, Human
cccugcugccuucugacgg

SEQ ID NO: 2904268 - RNA, 19 nt, Human
cccugcugccgccucccag

SEQ ID NO: 2904269 - RNA, 11 nt, Human
cccugcugccc

SEQ ID NO: 2904270 - RNA, 12 nt, Human
cccugcugccca

SEQ ID NO: 2904271 - RNA, 13 nt, Human
cccugcugcccaa

SEQ ID NO: 2904272 - RNA, 21 nt, Human
cccugcugcccaaucuccauc

SEQ ID NO: 2904273 - RNA, 16 nt, Human
cccugcugcaggggcu

SEQ ID NO: 2904274 - RNA, 19 nt, Human
cccugcugcaggggcucug

SEQ ID NO: 2904275 - RNA, 21 nt, Human
cccugcugcaggggcucugga

SEQ ID NO: 2904276 - RNA, 22 nt, Human
cccugcugcaggggcucuggag

SEQ ID NO: 2904277 - RNA, 23 nt, Human
cccugcugagucccaggcugagc

SEQ ID NO: 2904278 - RNA, 19 nt, Human
cccugcucccucucccccu

SEQ ID NO: 2904279 - RNA, 13 nt, Human
cccugcugcaggg

SEQ ID NO: 2904280 - RNA, 15 nt, Human
cccugcugcaggggc

SEQ ID NO: 2904281 - RNA, 21 nt, Human
cccugcgaaggggcccugguc

SEQ ID NO: 2904282 - RNA, 15 nt, Human
cccugcgccugugau

SEQ ID NO: 2904283 - RNA, 22 nt, Human
cccugcgccugugaugcugggc

SEQ ID NO: 2904284 - RNA, 20 nt, Human
cccugcgaaggggcccuggu

SEQ ID NO: 2904285 - RNA, 19 nt, Human
cccugcgaaggggcccugg

SEQ ID NO: 2904286 - RNA, 17 nt, Human
cccugcgaaggggcccu

SEQ ID NO: 2904287 - RNA, 18 nt, Human
cccugccuuugggagcag

SEQ ID NO: 2904288 - RNA, 19 nt, Human
cccugccuuugggagcagg

SEQ ID NO: 2904289 - RNA, 13 nt, Human
cccugccugguca

SEQ ID NO: 2904290 - RNA, 21 nt, Human
cccugcgggucacaggaggga

SEQ ID NO: 2904291 - RNA, 19 nt, Human
cccugcgggucacaggagg

SEQ ID NO: 2904292 - RNA, 19 nt, Human
cccugcuccagaagauagc

SEQ ID NO: 2904293 - RNA, 12 nt, Human
cccugcucccuc

SEQ ID NO: 2904294 - RNA, 11 nt, Human
cccugcucccu

SEQ ID NO: 2904295 - RNA, 16 nt, Human
cccugcuacccuagau

SEQ ID NO: 2904296 - RNA, 12 nt, Human
cccugcaucccc

SEQ ID NO: 2904297 - RNA, 13 nt, Human
cccugcauccccu

SEQ ID NO: 2904298 - RNA, 15 nt, Human
cccugcccugugggg

SEQ ID NO: 2904299 - RNA, 19 nt, Human
cccugaggagccaggccgg

SEQ ID NO: 2904300 - RNA, 14 nt, Human
cccugaggagccag

SEQ ID NO: 2904301 - RNA, 20 nt, Human
cccugcagaugccacccuag

SEQ ID NO: 2904302 - RNA, 14 nt, Human
cccugcagcacgga

SEQ ID NO: 2904303 - RNA, 19 nt, Human
cccugcagcacggacaaua

SEQ ID NO: 2904304 - RNA, 21 nt, Human
cccugcagcacggacaauaaa

SEQ ID NO: 2904305 - RNA, 22 nt, Human
cccugcagcacggacaauaaac

SEQ ID NO: 2904306 - RNA, 14 nt, Human
cccugcagccagcu

SEQ ID NO: 2904307 - RNA, 15 nt, Human
cccugcagaugccac

SEQ ID NO: 2904308 - RNA, 18 nt, Human
cccugcagaugccacccu

SEQ ID NO: 2904309 - RNA, 17 nt, Human
cccugcagcuaguccua

SEQ ID NO: 2904310 - RNA, 13 nt, Human
cccugcaguguuc

SEQ ID NO: 2904311 - RNA, 20 nt, Human
cccugcaguguucgcuuggc

SEQ ID NO: 2904312 - RNA, 21 nt, Human
cccugcaguguucgcuuggcu

SEQ ID NO: 2904313 - RNA, 18 nt, Human
ccuacaggagugagcacu

SEQ ID NO: 2904314 - RNA, 14 nt, Human
ccuaaccugugucu

SEQ ID NO: 2904315 - RNA, 17 nt, Human
ccuaaccugugucugcg

SEQ ID NO: 2904316 - RNA, 18 nt, Human
ccuaaccugugucugcga

SEQ ID NO: 2904317 - RNA, 15 nt, Human
ccuacaggcagucuc

SEQ ID NO: 2904318 - RNA, 21 nt, Human
ccuacaggcagucucucucuu

SEQ ID NO: 2904319 - RNA, 19 nt, Human
ccguugauguuggcuggga

SEQ ID NO: 2904320 - RNA, 13 nt, Human
ccguugccaaccg

SEQ ID NO: 2904321 - RNA, 18 nt, Human
ccguugauguuggcuggg

SEQ ID NO: 2904322 - RNA, 14 nt, Human
ccuaaccccuucca

SEQ ID NO: 2904323 - RNA, 16 nt, Human
ccuaaccccuuccaga

SEQ ID NO: 2904324 - RNA, 15 nt, Human
ccuaaccccuuccag

SEQ ID NO: 2904325 - RNA, 18 nt, Human
ccuaaccccuuccagauc

SEQ ID NO: 2904326 - RNA, 18 nt, Human
ccguuccugacaucacag

SEQ ID NO: 2904327 - RNA, 19 nt, Human
ccguuccugacaucacagc

SEQ ID NO: 2904328 - RNA, 22 nt, Human
ccguuccugacaucacagcagc

SEQ ID NO: 2904329 - RNA, 23 nt, Human
ccguuccugacaucacagcagcc

SEQ ID NO: 2904330 - RNA, 24 nt, Human
ccguuccugacaucacagcagccu

SEQ ID NO: 2904331 - RNA, 11 nt, Human
ccguggcuucc

SEQ ID NO: 2904332 - RNA, 18 nt, Human
ccgugcauuagcacagau

SEQ ID NO: 2904333 - RNA, 22 nt, Human
ccgugcauuagcacagauuuua

SEQ ID NO: 2904334 - RNA, 11 nt, Human
ccgugccaaag

SEQ ID NO: 2904335 - RNA, 19 nt, Human
ccgugccaaagucucccuu

SEQ ID NO: 2904336 - RNA, 20 nt, Human
ccgugccaaagucucccuuc

SEQ ID NO: 2904337 - RNA, 15 nt, Human
ccguggcccugcccu

SEQ ID NO: 2904338 - RNA, 16 nt, Human
ccguggcccugcccuc

SEQ ID NO: 2904339 - RNA, 20 nt, Human
ccguggcccugcccucuccu

SEQ ID NO: 2904340 - RNA, 18 nt, Human
ccuaggugacagagugag

SEQ ID NO: 2904341 - RNA, 16 nt, Human
ccuaguccagugaccu

SEQ ID NO: 2904342 - RNA, 13 nt, Human
ccuaguacugccc

SEQ ID NO: 2904343 - RNA, 16 nt, Human
ccuagguucccggucc

SEQ ID NO: 2904344 - RNA, 18 nt, Human
ccuagguucccggucccg

SEQ ID NO: 2904345 - RNA, 19 nt, Human
ccuagguucccggucccga

SEQ ID NO: 2904346 - RNA, 20 nt, Human
ccuagguucccggucccgag

SEQ ID NO: 2904347 - RNA, 21 nt, Human
ccuagguucccggucccgagu

SEQ ID NO: 2904348 - RNA, 18 nt, Human
ccuagguucccuguucuu

SEQ ID NO: 2904349 - RNA, 20 nt, Human
ccuagguucccuguucuucc

SEQ ID NO: 2904350 - RNA, 21 nt, Human
ccuagguucccuguucuuccu

SEQ ID NO: 2904351 - RNA, 22 nt, Human
ccuagguucccuguucuuccuc

SEQ ID NO: 2904352 - RNA, 20 nt, Human
ccuacucccugcagaugcca

SEQ ID NO: 2904353 - RNA, 11 nt, Human
ccuacuccuga

SEQ ID NO: 2904354 - RNA, 13 nt, Human
ccuacuccugacu

SEQ ID NO: 2904355 - RNA, 20 nt, Human
ccuacuccugacuccuaccu

SEQ ID NO: 2904356 - RNA, 23 nt, Human
ccuaggccacaccaucuccuuuc

SEQ ID NO: 2904357 - RNA, 16 nt, Human
ccuaccgagucucuuc

SEQ ID NO: 2904358 - RNA, 17 nt, Human
ccuaccgagucucuucu

SEQ ID NO: 2904359 - RNA, 20 nt, Human
ccuacgucaaacaugaagug

SEQ ID NO: 2904360 - RNA, 13 nt, Human
ccuacggaccagg

SEQ ID NO: 2904361 - RNA, 19 nt, Human
ccuaccgagucucuucucc

SEQ ID NO: 2904362 - RNA, 20 nt, Human
ccuaccgagucucuucucca

SEQ ID NO: 2904363 - RNA, 15 nt, Human
ccuacucccugcaga

SEQ ID NO: 2904364 - RNA, 17 nt, Human
ccuacucauugggguuc

SEQ ID NO: 2904365 - RNA, 13 nt, Human
ccuacucccugca

SEQ ID NO: 2904366 - RNA, 16 nt, Human
ccuacuaucacugaac

SEQ ID NO: 2904367 - RNA, 21 nt, Human
ccuacgucaaacaugaagugu

SEQ ID NO: 2904368 - RNA, 14 nt, Human
ccguggcuucccgc

SEQ ID NO: 2904369 - RNA, 14 nt, Human
ccgccugcccucau

SEQ ID NO: 2904370 - RNA, 16 nt, Human
ccgccugcccucaugg

SEQ ID NO: 2904371 - RNA, 17 nt, Human
ccgccugacagaaacca

SEQ ID NO: 2904372 - RNA, 12 nt, Human
ccgccugcccac

SEQ ID NO: 2904373 - RNA, 13 nt, Human
ccgccugcccacc

SEQ ID NO: 2904374 - RNA, 14 nt, Human
ccgccugcccaccu

SEQ ID NO: 2904375 - RNA, 16 nt, Human
ccgccugcccaccugc

SEQ ID NO: 2904376 - RNA, 17 nt, Human
ccgccugcccaccugcc

SEQ ID NO: 2904377 - RNA, 20 nt, Human
ccgccugcccaccugccugg

SEQ ID NO: 2904378 - RNA, 21 nt, Human
ccgccugcccaccugccuggc

SEQ ID NO: 2904379 - RNA, 22 nt, Human
ccgccugcccaccugccuggcc

SEQ ID NO: 2904380 - RNA, 16 nt, Human
ccgaccuuagauuuag

SEQ ID NO: 2904381 - RNA, 15 nt, Human
ccgccucccagccug

SEQ ID NO: 2904382 - RNA, 18 nt, Human
ccggagcugccccucucu

SEQ ID NO: 2904383 - RNA, 19 nt, Human
ccggagcugccccucucug

SEQ ID NO: 2904384 - RNA, 20 nt, Human
ccggagcugccccucucugg

SEQ ID NO: 2904385 - RNA, 21 nt, Human
ccggagcugccccucucuggg

SEQ ID NO: 2904386 - RNA, 22 nt, Human
ccggagcugccccucucugggc

SEQ ID NO: 2904387 - RNA, 23 nt, Human
ccggagcugccccucucugggcc

SEQ ID NO: 2904388 - RNA, 15 nt, Human
ccggaggggccuggc

SEQ ID NO: 2904389 - RNA, 16 nt, Human
ccggaggggccuggca

SEQ ID NO: 2904390 - RNA, 14 nt, Human
ccggaggaaaucug

SEQ ID NO: 2904391 - RNA, 17 nt, Human
ccggagggaagggacgg

SEQ ID NO: 2904392 - RNA, 14 nt, Human
ccggaggggccugg

SEQ ID NO: 2904393 - RNA, 23 nt, Human
ccgcugccgugccgccugcacuc

SEQ ID NO: 2904394 - RNA, 14 nt, Human
ccgcugcuccacgc

SEQ ID NO: 2904395 - RNA, 15 nt, Human
ccgcugcuccacgcg

SEQ ID NO: 2904396 - RNA, 17 nt, Human
ccgcugcuccacgcgcu

SEQ ID NO: 2904397 - RNA, 18 nt, Human
ccgcugcuccuuggcuua

SEQ ID NO: 2904398 - RNA, 11 nt, Human
ccgcugcugcu

SEQ ID NO: 2904399 - RNA, 14 nt, Human
ccgcugcugcugcu

SEQ ID NO: 2904400 - RNA, 16 nt, Human
ccgcugcugcugcugc

SEQ ID NO: 2904401 - RNA, 18 nt, Human
ccgcucuacaucuucugc

SEQ ID NO: 2904402 - RNA, 19 nt, Human
ccgcucuacaucuucugcc

SEQ ID NO: 2904403 - RNA, 13 nt, Human
ccgggccacagag

SEQ ID NO: 2904404 - RNA, 22 nt, Human
ccgggcacucagaagacacuga

SEQ ID NO: 2904405 - RNA, 20 nt, Human
ccgggcacucagaagacacu

SEQ ID NO: 2904406 - RNA, 17 nt, Human
ccggcucuacgggggcc

SEQ ID NO: 2904407 - RNA, 21 nt, Human
ccggcuccaggcuccuuuagc

SEQ ID NO: 2904408 - RNA, 16 nt, Human
ccggcuccaggcuccu

SEQ ID NO: 2904409 - RNA, 23 nt, Human
ccggcucgagcaguccugccuca

SEQ ID NO: 2904410 - RNA, 21 nt, Human
ccgggguggagcaugggccug

SEQ ID NO: 2904411 - RNA, 15 nt, Human
ccgagcaaagaucaa

SEQ ID NO: 2904412 - RNA, 20 nt, Human
ccgagaucgugccauugcac

SEQ ID NO: 2904413 - RNA, 23 nt, Human
ccgacugcacagcggccccugca

SEQ ID NO: 2904414 - RNA, 21 nt, Human
ccgagaucacgccacugcacu

SEQ ID NO: 2904415 - RNA, 13 nt, Human
ccgacgcccaccc

SEQ ID NO: 2904416 - RNA, 16 nt, Human
ccgacgcgucuccugu

SEQ ID NO: 2904417 - RNA, 17 nt, Human
ccgacgcgucuccuguu

SEQ ID NO: 2904418 - RNA, 12 nt, Human
cccuuggaagag

SEQ ID NO: 2904419 - RNA, 17 nt, Human
ccgcacuuuccacuucu

SEQ ID NO: 2904420 - RNA, 21 nt, Human
ccgcacuuuccacuucuuccu

SEQ ID NO: 2904421 - RNA, 22 nt, Human
ccgcacuuuccacuucuuccuu

SEQ ID NO: 2904422 - RNA, 14 nt, Human
ccgcagaagcccug

SEQ ID NO: 2904423 - RNA, 19 nt, Human
ccgagucucuucuccacug

SEQ ID NO: 2904424 - RNA, 20 nt, Human
ccgagucucuucuccacugg

SEQ ID NO: 2904425 - RNA, 14 nt, Human
ccgccucccagccu

SEQ ID NO: 2904426 - RNA, 16 nt, Human
ccgccuaguuuacugu

SEQ ID NO: 2904427 - RNA, 18 nt, Human
ccgccuaguuuacuguuu

SEQ ID NO: 2904428 - RNA, 14 nt, Human
ccgccucaaaaugu

SEQ ID NO: 2904429 - RNA, 15 nt, Human
ccgccucaaaaugug

SEQ ID NO: 2904430 - RNA, 16 nt, Human
ccgaguagcugggacu

SEQ ID NO: 2904431 - RNA, 14 nt, Human
ccgaguagcuggga

SEQ ID NO: 2904432 - RNA, 14 nt, Human
ccgagucucuucuc

SEQ ID NO: 2904433 - RNA, 20 nt, Human
ccgaguagcugagauuauag

SEQ ID NO: 2904434 - RNA, 16 nt, Human
ccgagucucuucucca

SEQ ID NO: 2904435 - RNA, 18 nt, Human
ccgagucucuucuccacu

SEQ ID NO: 2904436 - RNA, 13 nt, Human
ccgagcugucccc

SEQ ID NO: 2904437 - RNA, 14 nt, Human
ccgagcuguuuaug

SEQ ID NO: 2904438 - RNA, 16 nt, Human
ccgaggagccaggcaa

SEQ ID NO: 2904439 - RNA, 17 nt, Human
ccgaggguccuggcucc

SEQ ID NO: 2904440 - RNA, 23 nt, Human
ccgaggguccuggcuccugaggg

SEQ ID NO: 2904441 - RNA, 17 nt, Human
ccgaggguugauuaagg

SEQ ID NO: 2904442 - RNA, 21 nt, Human
ccgaggguugauuaaggcagu

SEQ ID NO: 2904443 - RNA, 22 nt, Human
ccgaggguugauuaaggcagua

SEQ ID NO: 2904444 - RNA, 17 nt, Human
ccgaggugguuuuaaag

SEQ ID NO: 2904445 - RNA, 13 nt, Human
ccgaguacagucu

SEQ ID NO: 2904446 - RNA, 14 nt, Human
ccgaguacagucug

SEQ ID NO: 2904447 - RNA, 21 nt, Human
ccgaggguccuggcuccugag

SEQ ID NO: 2904448 - RNA, 19 nt, Human
ccgaggguccuggcuccug

SEQ ID NO: 2904449 - RNA, 20 nt, Human
ccgcucuacaucuucugccu

SEQ ID NO: 2904450 - RNA, 14 nt, Human
ccgcucuccugcca

SEQ ID NO: 2904451 - RNA, 15 nt, Human
ccgcucuccugccac

SEQ ID NO: 2904452 - RNA, 16 nt, Human
ccgcucuccugccaca

SEQ ID NO: 2904453 - RNA, 17 nt, Human
ccgcucuccugccacau

SEQ ID NO: 2904454 - RNA, 13 nt, Human
ccgcucucuuccu

SEQ ID NO: 2904455 - RNA, 14 nt, Human
ccgcucucuuccug

SEQ ID NO: 2904456 - RNA, 15 nt, Human
ccgcucucuuccugc

SEQ ID NO: 2904457 - RNA, 16 nt, Human
ccgcucucuuccugcc

SEQ ID NO: 2904458 - RNA, 17 nt, Human
ccgcucucuuccugccc

SEQ ID NO: 2904459 - RNA, 13 nt, Human
ccccuccuucaga

SEQ ID NO: 2904460 - RNA, 11 nt, Human
ccccuccuggg

SEQ ID NO: 2904461 - RNA, 14 nt, Human
ccccuccuggggcc

SEQ ID NO: 2904462 - RNA, 15 nt, Human
ccccuccuggggcca

SEQ ID NO: 2904463 - RNA, 18 nt, Human
ccccuccuggggccaggc

SEQ ID NO: 2904464 - RNA, 20 nt, Human
ccccuccugaaccgcacagc

SEQ ID NO: 2904465 - RNA, 12 nt, Human
ccccuccuucuc

SEQ ID NO: 2904466 - RNA, 12 nt, Human
ccccucucacca

SEQ ID NO: 2904467 - RNA, 21 nt, Human
ccccucgcuuggacggcuggg

SEQ ID NO: 2904468 - RNA, 16 nt, Human
ccccucucaggagcca

SEQ ID NO: 2904469 - RNA, 17 nt, Human
ccccucucaggagccau

SEQ ID NO: 2904470 - RNA, 15 nt, Human
ccccucuccuucuua

SEQ ID NO: 2904471 - RNA, 17 nt, Human
ccccuccucucugcccu

SEQ ID NO: 2904472 - RNA, 15 nt, Human
ccccuccucucugcc

SEQ ID NO: 2904473 - RNA, 21 nt, Human
ccccuccucuagcuguggggg

SEQ ID NO: 2904474 - RNA, 19 nt, Human
ccccuccuaguuugggagg

SEQ ID NO: 2904475 - RNA, 12 nt, Human
ccccuccucacu

SEQ ID NO: 2904476 - RNA, 13 nt, Human
ccccuccucacug

SEQ ID NO: 2904477 - RNA, 23 nt, Human
ccccuccucacuggccaucccuc

SEQ ID NO: 2904478 - RNA, 18 nt, Human
ccccuccuccuggacucc

SEQ ID NO: 2904479 - RNA, 22 nt, Human
ccccuccuccuggacuccugca

SEQ ID NO: 2904480 - RNA, 17 nt, Human
ccccuccucuagcugug

SEQ ID NO: 2904481 - RNA, 19 nt, Human
ccccuccucuagcuguggg

SEQ ID NO: 2904482 - RNA, 15 nt, Human
ccccucaggacugca

SEQ ID NO: 2904483 - RNA, 12 nt, Human
ccccucacucug

SEQ ID NO: 2904484 - RNA, 14 nt, Human
ccccucacucuggc

SEQ ID NO: 2904485 - RNA, 14 nt, Human
ccccucaccuccuc

SEQ ID NO: 2904486 - RNA, 12 nt, Human
ccccucaccucc

SEQ ID NO: 2904487 - RNA, 13 nt, Human
ccccucaccuccu

SEQ ID NO: 2904488 - RNA, 16 nt, Human
ccccucaguugugcag

SEQ ID NO: 2904489 - RNA, 17 nt, Human
ccccucaguugugcagc

SEQ ID NO: 2904490 - RNA, 18 nt, Human
ccccucaguugugcagcu

SEQ ID NO: 2904491 - RNA, 23 nt, Human
ccccuccaaucccaccaacccuc

SEQ ID NO: 2904492 - RNA, 20 nt, Human
ccccucauagcccucacccu

SEQ ID NO: 2904493 - RNA, 12 nt, Human
ccccuccacugu

SEQ ID NO: 2904494 - RNA, 12 nt, Human
ccccuccaugug

SEQ ID NO: 2904495 - RNA, 11 nt, Human
ccccuccagga

SEQ ID NO: 2904496 - RNA, 14 nt, Human
ccccuccacuguca

SEQ ID NO: 2904497 - RNA, 13 nt, Human
ccccuccagccuu

SEQ ID NO: 2904498 - RNA, 14 nt, Human
ccccucccaccucc

SEQ ID NO: 2904499 - RNA, 12 nt, Human
ccccucccaggg

SEQ ID NO: 2904500 - RNA, 12 nt, Human
ccccucccagag

SEQ ID NO: 2904501 - RNA, 13 nt, Human
ccccucccagagg

SEQ ID NO: 2904502 - RNA, 14 nt, Human
ccccucccagaggc

SEQ ID NO: 2904503 - RNA, 13 nt, Human
ccccucccuguca

SEQ ID NO: 2904504 - RNA, 22 nt, Human
ccccucccuggcucccaugacc

SEQ ID NO: 2904505 - RNA, 15 nt, Human
ccccucccuucaacc

SEQ ID NO: 2904506 - RNA, 15 nt, Human
ccccucccuggcucc

SEQ ID NO: 2904507 - RNA, 14 nt, Human
ccccucccuggcuc

SEQ ID NO: 2904508 - RNA, 13 nt, Human
ccccucccuggcu

SEQ ID NO: 2904509 - RNA, 12 nt, Human
ccccucccuggc

SEQ ID NO: 2904510 - RNA, 13 nt, Human
ccccucccucugu

SEQ ID NO: 2904511 - RNA, 14 nt, Human
ccccucccucuguc

SEQ ID NO: 2904512 - RNA, 13 nt, Human
ccccuaguucccu

SEQ ID NO: 2904513 - RNA, 15 nt, Human
ccccuaguucccucu

SEQ ID NO: 2904514 - RNA, 23 nt, Human
ccccuagcuuuauauauggacau

SEQ ID NO: 2904515 - RNA, 20 nt, Human
ccccgguggcggccccagca

SEQ ID NO: 2904516 - RNA, 20 nt, Human
ccccuagcccaggagagaga

SEQ ID NO: 2904517 - RNA, 18 nt, Human
ccccuagcccaggagaga

SEQ ID NO: 2904518 - RNA, 18 nt, Human
ccccgguggcggccccag

SEQ ID NO: 2904519 - RNA, 14 nt, Human
ccccuauccuuggc

SEQ ID NO: 2904520 - RNA, 15 nt, Human
ccccuauccuuggca

SEQ ID NO: 2904521 - RNA, 20 nt, Human
ccccuauccuuggcaccaaa

SEQ ID NO: 2904522 - RNA, 19 nt, Human
ccccuauggaauuuauaau

SEQ ID NO: 2904523 - RNA, 18 nt, Human
ccccucaaaucguccagc

SEQ ID NO: 2904524 - RNA, 13 nt, Human
ccccucacagccu

SEQ ID NO: 2904525 - RNA, 19 nt, Human
ccccucaaccuccugugga

SEQ ID NO: 2904526 - RNA, 21 nt, Human
ccccucaaccuccuguggaac

SEQ ID NO: 2904527 - RNA, 14 nt, Human
ccccucacagccuc

SEQ ID NO: 2904528 - RNA, 17 nt, Human
ccccucacagccucuga

SEQ ID NO: 2904529 - RNA, 18 nt, Human
ccccucacagccucugac

SEQ ID NO: 2904530 - RNA, 20 nt, Human
ccccucacagccucugaccc

SEQ ID NO: 2904531 - RNA, 17 nt, Human
ccccggcuuccuuuccc

SEQ ID NO: 2904532 - RNA, 21 nt, Human
ccccggcccugggcucggagg

SEQ ID NO: 2904533 - RNA, 15 nt, Human
ccccgggcucucugc

SEQ ID NO: 2904534 - RNA, 13 nt, Human
ccccggcccuggg

SEQ ID NO: 2904535 - RNA, 12 nt, Human
ccccggcccugg

SEQ ID NO: 2904536 - RNA, 14 nt, Human
ccccggggcccagg

SEQ ID NO: 2904537 - RNA, 18 nt, Human
ccccgggcucucugcugu

SEQ ID NO: 2904538 - RNA, 17 nt, Human
ccccgggcucucugcug

SEQ ID NO: 2904539 - RNA, 16 nt, Human
ccccgggcucucugcu

SEQ ID NO: 2904540 - RNA, 20 nt, Human
ccccggucaccuagcaagcu

SEQ ID NO: 2904541 - RNA, 20 nt, Human
cccccugguggacaguccug

SEQ ID NO: 2904542 - RNA, 19 nt, Human
cccccugguggacaguccu

SEQ ID NO: 2904543 - RNA, 15 nt, Human
cccccuggucucugg

SEQ ID NO: 2904544 - RNA, 13 nt, Human
cccccugggcucu

SEQ ID NO: 2904545 - RNA, 11 nt, Human
cccccugggcu

SEQ ID NO: 2904546 - RNA, 23 nt, Human
cccccugguggacaguccuggga

SEQ ID NO: 2904547 - RNA, 21 nt, Human
cccccugguggacaguccugg

SEQ ID NO: 2904548 - RNA, 16 nt, Human
cccccuggucucuggu

SEQ ID NO: 2904549 - RNA, 12 nt, Human
cccccagccugc

SEQ ID NO: 2904550 - RNA, 15 nt, Human
cccccagccuaugag

SEQ ID NO: 2904551 - RNA, 20 nt, Human
cccccagccuaugagcaucc

SEQ ID NO: 2904552 - RNA, 23 nt, Human
cccccagccuaugagcauccuga

SEQ ID NO: 2904553 - RNA, 14 nt, Human
cccccagcucaggg

SEQ ID NO: 2904554 - RNA, 21 nt, Human
cccccagcucaggggcagcuc

SEQ ID NO: 2904555 - RNA, 15 nt, Human
cccccagccucuggc

SEQ ID NO: 2904556 - RNA, 14 nt, Human
cccccucccagagg

SEQ ID NO: 2904557 - RNA, 15 nt, Human
cccccucccagaggc

SEQ ID NO: 2904558 - RNA, 13 nt, Human
cccccucccaggg

SEQ ID NO: 2904559 - RNA, 19 nt, Human
cccccuaaaccccuguccc

SEQ ID NO: 2904560 - RNA, 16 nt, Human
cccccuauccuuggca

SEQ ID NO: 2904561 - RNA, 21 nt, Human
cccccucaucucauucaaacc

SEQ ID NO: 2904562 - RNA, 19 nt, Human
cccccugcaaagcccagcu

SEQ ID NO: 2904563 - RNA, 18 nt, Human
cccccugcaaagcccagc

SEQ ID NO: 2904564 - RNA, 16 nt, Human
cccccugccccccagc

SEQ ID NO: 2904565 - RNA, 22 nt, Human
cccccugagauccccugagccc

SEQ ID NO: 2904566 - RNA, 11 nt, Human
cccccugcagc

SEQ ID NO: 2904567 - RNA, 12 nt, Human
cccccugcagcu

SEQ ID NO: 2904568 - RNA, 13 nt, Human
cccccugcagcua

SEQ ID NO: 2904569 - RNA, 21 nt, Human
cccccugcaaagcccagcuug

SEQ ID NO: 2904570 - RNA, 21 nt, Human
cccccucuggcuccagcuggc

SEQ ID NO: 2904571 - RNA, 16 nt, Human
cccccucugucuugug

SEQ ID NO: 2904572 - RNA, 19 nt, Human
cccccucuggcuccagcug

SEQ ID NO: 2904573 - RNA, 12 nt, Human
cccccucuggcu

SEQ ID NO: 2904574 - RNA, 21 nt, Human
ccccaggcccacucagggguc

SEQ ID NO: 2904575 - RNA, 22 nt, Human
ccccaggcccacucagggguca

SEQ ID NO: 2904576 - RNA, 15 nt, Human
ccccaggccucugug

SEQ ID NO: 2904577 - RNA, 17 nt, Human
ccccaggccucuguguc

SEQ ID NO: 2904578 - RNA, 11 nt, Human
ccccagggcac

SEQ ID NO: 2904579 - RNA, 19 nt, Human
ccccaggcuggacaugcug

SEQ ID NO: 2904580 - RNA, 22 nt, Human
ccccaggcuggacaugcugacu

SEQ ID NO: 2904581 - RNA, 11 nt, Human
ccccaguccca

SEQ ID NO: 2904582 - RNA, 20 nt, Human
ccccagugcccacaggauca

SEQ ID NO: 2904583 - RNA, 16 nt, Human
ccccagugcccacagg

SEQ ID NO: 2904584 - RNA, 15 nt, Human
ccccagugcccacag

SEQ ID NO: 2904585 - RNA, 14 nt, Human
ccccagugcccaca

SEQ ID NO: 2904586 - RNA, 16 nt, Human
ccccauaacucaaugg

SEQ ID NO: 2904587 - RNA, 15 nt, Human
ccccaguucgccugg

SEQ ID NO: 2904588 - RNA, 21 nt, Human
ccccaguucgccuggagcccu

SEQ ID NO: 2904589 - RNA, 14 nt, Human
ccccauagccaccc

SEQ ID NO: 2904590 - RNA, 12 nt, Human
ccccauagccac

SEQ ID NO: 2904591 - RNA, 22 nt, Human
ccccauaauuuuuuuuuuccuu

SEQ ID NO: 2904592 - RNA, 15 nt, Human
cccccacccccagcu

SEQ ID NO: 2904593 - RNA, 17 nt, Human
cccccacccccagcuca

SEQ ID NO: 2904594 - RNA, 19 nt, Human
cccccaccgguccagcugg

SEQ ID NO: 2904595 - RNA, 18 nt, Human
cccccaccgguccagcug

SEQ ID NO: 2904596 - RNA, 16 nt, Human
cccccaccgguccagc

SEQ ID NO: 2904597 - RNA, 21 nt, Human
cccccaccgguccagcuggcc

SEQ ID NO: 2904598 - RNA, 20 nt, Human
cccccaccgguccagcuggc

SEQ ID NO: 2904599 - RNA, 16 nt, Human
ccccaucccacacccu

SEQ ID NO: 2904600 - RNA, 17 nt, Human
cccccacaccucaguuc

SEQ ID NO: 2904601 - RNA, 14 nt, Human
cccccaccacacau

SEQ ID NO: 2904602 - RNA, 15 nt, Human
cccccaccacuagga

SEQ ID NO: 2904603 - RNA, 14 nt, Human
cccccacccccagc

SEQ ID NO: 2904604 - RNA, 20 nt, Human
ccccugcugguucaggguug

SEQ ID NO: 2904605 - RNA, 15 nt, Human
ccccugcugguucag

SEQ ID NO: 2904606 - RNA, 13 nt, Human
ccccugcugguuc

SEQ ID NO: 2904607 - RNA, 11 nt, Human
ccccugcuggu

SEQ ID NO: 2904608 - RNA, 14 nt, Human
ccccugcugcuguc

SEQ ID NO: 2904609 - RNA, 20 nt, Human
ccccugcugcugucaccucu

SEQ ID NO: 2904610 - RNA, 21 nt, Human
ccccugcugcugucaccucuc

SEQ ID NO: 2904611 - RNA, 14 nt, Human
ccccugcuggcucu

SEQ ID NO: 2904612 - RNA, 21 nt, Human
ccccugcuggcucuucugccc

SEQ ID NO: 2904613 - RNA, 19 nt, Human
ccccugcugcaggggcucu

SEQ ID NO: 2904614 - RNA, 22 nt, Human
ccccugcugcaggggcucugga

SEQ ID NO: 2904615 - RNA, 23 nt, Human
ccccugcugcaggggcucuggag

SEQ ID NO: 2904616 - RNA, 12 nt, Human
ccccugccuugc

SEQ ID NO: 2904617 - RNA, 15 nt, Human
ccccugccuuuggga

SEQ ID NO: 2904618 - RNA, 19 nt, Human
ccccugccuuugggagcag

SEQ ID NO: 2904619 - RNA, 12 nt, Human
ccccuggccucu

SEQ ID NO: 2904620 - RNA, 15 nt, Human
ccccuggacugggag

SEQ ID NO: 2904621 - RNA, 20 nt, Human
ccccuggaggcacugaagug

SEQ ID NO: 2904622 - RNA, 22 nt, Human
ccccugcuggcucuucugccca

SEQ ID NO: 2904623 - RNA, 23 nt, Human
ccccugcuucagauguggagcca

SEQ ID NO: 2904624 - RNA, 19 nt, Human
ccccugcccggcugcggaa

SEQ ID NO: 2904625 - RNA, 17 nt, Human
ccccugcccggcugcgg

SEQ ID NO: 2904626 - RNA, 13 nt, Human
ccccugcccugcu

SEQ ID NO: 2904627 - RNA, 23 nt, Human
ccccugcccuccccucucugcac

SEQ ID NO: 2904628 - RNA, 18 nt, Human
ccccucugaccugcacug

SEQ ID NO: 2904629 - RNA, 15 nt, Human
ccccucugaccugca

SEQ ID NO: 2904630 - RNA, 11 nt, Human
ccccucucugg

SEQ ID NO: 2904631 - RNA, 12 nt, Human
ccccucucuggg

SEQ ID NO: 2904632 - RNA, 13 nt, Human
ccccucucugggc

SEQ ID NO: 2904633 - RNA, 20 nt, Human
ccccucugaaaguuguacau

SEQ ID NO: 2904634 - RNA, 12 nt, Human
ccccucugcccu

SEQ ID NO: 2904635 - RNA, 13 nt, Human
ccccucugcccug

SEQ ID NO: 2904636 - RNA, 10 nt, Human
ccccugccug

SEQ ID NO: 2904637 - RNA, 11 nt, Human
ccccugccugc

SEQ ID NO: 2904638 - RNA, 12 nt, Human
ccccugccugcc

SEQ ID NO: 2904639 - RNA, 13 nt, Human
ccccugccugcca

SEQ ID NO: 2904640 - RNA, 14 nt, Human
ccccugccugccau

SEQ ID NO: 2904641 - RNA, 15 nt, Human
ccccugccugccaug

SEQ ID NO: 2904642 - RNA, 16 nt, Human
ccccugccugccaugu

SEQ ID NO: 2904643 - RNA, 17 nt, Human
ccccugcccugguccag

SEQ ID NO: 2904644 - RNA, 13 nt, Human
ccccugcccuggu

SEQ ID NO: 2904645 - RNA, 15 nt, Human
ccccugcccugcugc

SEQ ID NO: 2904646 - RNA, 14 nt, Human
ccccugcccugcug

SEQ ID NO: 2904647 - RNA, 12 nt, Human
ccccugcccugu

SEQ ID NO: 2904648 - RNA, 15 nt, Human
ccccugcccuguggg

SEQ ID NO: 2904649 - RNA, 14 nt, Human
ccccugcccugugg

SEQ ID NO: 2904650 - RNA, 13 nt, Human
cccgcuaaggaag

SEQ ID NO: 2904651 - RNA, 15 nt, Human
cccgcuaaggaagau

SEQ ID NO: 2904652 - RNA, 13 nt, Human
cccgcagcccugg

SEQ ID NO: 2904653 - RNA, 21 nt, Human
cccgcagaccuccccagcccc

SEQ ID NO: 2904654 - RNA, 14 nt, Human
cccgcagaccucug

SEQ ID NO: 2904655 - RNA, 15 nt, Human
cccgcagaccucugg

SEQ ID NO: 2904656 - RNA, 17 nt, Human
cccgcagaccucuggau

SEQ ID NO: 2904657 - RNA, 21 nt, Human
cccgcagaccucuggauuagg

SEQ ID NO: 2904658 - RNA, 16 nt, Human
cccgcagcccuggcag

SEQ ID NO: 2904659 - RNA, 15 nt, Human
cccgccaaaagcugc

SEQ ID NO: 2904660 - RNA, 14 nt, Human
cccgccacacagac

SEQ ID NO: 2904661 - RNA, 13 nt, Human
cccgcccagcugc

SEQ ID NO: 2904662 - RNA, 15 nt, Human
cccgacagccuggca

SEQ ID NO: 2904663 - RNA, 18 nt, Human
cccgacagccuggcacag

SEQ ID NO: 2904664 - RNA, 12 nt, Human
cccgcagaccuc

SEQ ID NO: 2904665 - RNA, 14 nt, Human
cccgcagaccuccc

SEQ ID NO: 2904666 - RNA, 18 nt, Human
cccgcagaccuccccagc

SEQ ID NO: 2904667 - RNA, 19 nt, Human
cccgcagaccuccccagcc

SEQ ID NO: 2904668 - RNA, 20 nt, Human
cccgcagaccuccccagccc

SEQ ID NO: 2904669 - RNA, 19 nt, Human
cccgcaccccccaagcugu

SEQ ID NO: 2904670 - RNA, 15 nt, Human
cccgcaccuguacag

SEQ ID NO: 2904671 - RNA, 14 nt, Human
cccgcaccugucug

SEQ ID NO: 2904672 - RNA, 14 nt, Human
cccgagcugucccc

SEQ ID NO: 2904673 - RNA, 14 nt, Human
cccgagcuguuuau

SEQ ID NO: 2904674 - RNA, 22 nt, Human
cccgaauagcugggacuacagg

SEQ ID NO: 2904675 - RNA, 14 nt, Human
cccgacagccuggc

SEQ ID NO: 2904676 - RNA, 22 nt, Human
ccccuuccagaucacugccaca

SEQ ID NO: 2904677 - RNA, 11 nt, Human
ccccuguucua

SEQ ID NO: 2904678 - RNA, 13 nt, Human
ccccuguucuaag

SEQ ID NO: 2904679 - RNA, 17 nt, Human
ccccuuccaaauaauaa

SEQ ID NO: 2904680 - RNA, 15 nt, Human
ccccuguucacucua

SEQ ID NO: 2904681 - RNA, 14 nt, Human
ccccuggccucugu

SEQ ID NO: 2904682 - RNA, 18 nt, Human
ccccuggcuuuucacugc

SEQ ID NO: 2904683 - RNA, 23 nt, Human
ccccuggcuguacugcucaggcu

SEQ ID NO: 2904684 - RNA, 17 nt, Human
ccccuggcuguuuggac

SEQ ID NO: 2904685 - RNA, 20 nt, Human
ccccuggcuuuucacugcug

SEQ ID NO: 2904686 - RNA, 22 nt, Human
ccccuggggucucugcugcauu

SEQ ID NO: 2904687 - RNA, 20 nt, Human
ccccugggucagucuggugg

SEQ ID NO: 2904688 - RNA, 21 nt, Human
ccccugggucagucugguggg

SEQ ID NO: 2904689 - RNA, 23 nt, Human
ccccugguggacaguccugggag

SEQ ID NO: 2904690 - RNA, 22 nt, Human
ccccugguggacaguccuggga

SEQ ID NO: 2904691 - RNA, 21 nt, Human
ccccugguggacaguccuggg

SEQ ID NO: 2904692 - RNA, 20 nt, Human
ccccugguggacaguccugg

SEQ ID NO: 2904693 - RNA, 19 nt, Human
ccccugguggacaguccug

SEQ ID NO: 2904694 - RNA, 15 nt, Human
ccccugguggacagu

SEQ ID NO: 2904695 - RNA, 15 nt, Human
ccccuggucucuggu

SEQ ID NO: 2904696 - RNA, 13 nt, Human
cccauggaauauu

SEQ ID NO: 2904697 - RNA, 17 nt, Human
cccauggaauauuucca

SEQ ID NO: 2904698 - RNA, 15 nt, Human
cccauggacacucca

SEQ ID NO: 2904699 - RNA, 16 nt, Human
cccauggacacuccag

SEQ ID NO: 2904700 - RNA, 20 nt, Human
cccauggacacuccagugcc

SEQ ID NO: 2904701 - RNA, 21 nt, Human
cccauggacacuccagugcca

SEQ ID NO: 2904702 - RNA, 18 nt, Human
cccaugcccaccugccca

SEQ ID NO: 2904703 - RNA, 15 nt, Human
cccaugcccaccugc

SEQ ID NO: 2904704 - RNA, 14 nt, Human
cccaugcccaccug

SEQ ID NO: 2904705 - RNA, 21 nt, Human
cccaugccaaagcuagggugg

SEQ ID NO: 2904706 - RNA, 17 nt, Human
cccaugccacguuccac

SEQ ID NO: 2904707 - RNA, 18 nt, Human
cccaugccacguuccaca

SEQ ID NO: 2904708 - RNA, 22 nt, Human
cccaugccacguuccacaguug

SEQ ID NO: 2904709 - RNA, 14 nt, Human
cccaugcaggcccu

SEQ ID NO: 2904710 - RNA, 19 nt, Human
cccaugcaggcccuuugaa

SEQ ID NO: 2904711 - RNA, 22 nt, Human
cccaugagccucagcauccugg

SEQ ID NO: 2904712 - RNA, 20 nt, Human
cccaugaccuuauccuuccu

SEQ ID NO: 2904713 - RNA, 22 nt, Human
cccaugaccuuauccuuccucu

SEQ ID NO: 2904714 - RNA, 22 nt, Human
cccaugacuuuauauggaugau

SEQ ID NO: 2904715 - RNA, 21 nt, Human
cccaugagacccuggugccug

SEQ ID NO: 2904716 - RNA, 14 nt, Human
cccaugagccucag

SEQ ID NO: 2904717 - RNA, 19 nt, Human
cccaugacccaggcugggc

SEQ ID NO: 2904718 - RNA, 17 nt, Human
cccaugacccaggcugg

SEQ ID NO: 2904719 - RNA, 18 nt, Human
cccaugacccaggcuggg

SEQ ID NO: 2904720 - RNA, 22 nt, Human
cccaucuggguccuugcacccc

SEQ ID NO: 2904721 - RNA, 16 nt, Human
cccaucugucggccua

SEQ ID NO: 2904722 - RNA, 14 nt, Human
cccaucugucuaaa

SEQ ID NO: 2904723 - RNA, 19 nt, Human
cccaugaccauacugaggg

SEQ ID NO: 2904724 - RNA, 14 nt, Human
cccaguugggugga

SEQ ID NO: 2904725 - RNA, 15 nt, Human
cccaucucccacccu

SEQ ID NO: 2904726 - RNA, 23 nt, Human
cccaucucccacccuguaccuca

SEQ ID NO: 2904727 - RNA, 20 nt, Human
cccaucucgcucccucccag

SEQ ID NO: 2904728 - RNA, 22 nt, Human
cccaucucgcucccucccagga

SEQ ID NO: 2904729 - RNA, 21 nt, Human
cccaucucgcucccucccagg

SEQ ID NO: 2904730 - RNA, 23 nt, Human
cccaucucucccuccccugccau

SEQ ID NO: 2904731 - RNA, 14 nt, Human
cccaucucuucugg

SEQ ID NO: 2904732 - RNA, 21 nt, Human
cccaucucucccuccccugcc

SEQ ID NO: 2904733 - RNA, 18 nt, Human
cccaucucucccuccccu

SEQ ID NO: 2904734 - RNA, 13 nt, Human
cccaucucucccu

SEQ ID NO: 2904735 - RNA, 23 nt, Human
cccaucucgcucccucccaggac

SEQ ID NO: 2904736 - RNA, 13 nt, Human
cccaucucggagc

SEQ ID NO: 2904737 - RNA, 18 nt, Human
cccaucucggagcauccc

SEQ ID NO: 2904738 - RNA, 18 nt, Human
cccaucuggguccuugca

SEQ ID NO: 2904739 - RNA, 11 nt, Human
cccagagacuu

SEQ ID NO: 2904740 - RNA, 21 nt, Human
cccagagacuuuguagauccu

SEQ ID NO: 2904741 - RNA, 19 nt, Human
cccagagacuuuguagauc

SEQ ID NO: 2904742 - RNA, 22 nt, Human
cccaguucaggagucccaagga

SEQ ID NO: 2904743 - RNA, 19 nt, Human
cccaguucgccuggagccc

SEQ ID NO: 2904744 - RNA, 20 nt, Human
cccaguucgccuggagcccu

SEQ ID NO: 2904745 - RNA, 21 nt, Human
cccaguucgccuggagcccuc

SEQ ID NO: 2904746 - RNA, 13 nt, Human
cccagagaacagc

SEQ ID NO: 2904747 - RNA, 17 nt, Human
cccagagaacagcgaag

SEQ ID NO: 2904748 - RNA, 20 nt, Human
cccagagaccaggcuguguc

SEQ ID NO: 2904749 - RNA, 15 nt, Human
ccccacccucccugg

SEQ ID NO: 2904750 - RNA, 16 nt, Human
ccccacccucccugga

SEQ ID NO: 2904751 - RNA, 18 nt, Human
ccccacccucccuggagu

SEQ ID NO: 2904752 - RNA, 12 nt, Human
ccccacccuccu

SEQ ID NO: 2904753 - RNA, 15 nt, Human
ccccacccuccuggc

SEQ ID NO: 2904754 - RNA, 21 nt, Human
ccccacccuccuggccucaga

SEQ ID NO: 2904755 - RNA, 22 nt, Human
ccccacccuccuggccucagac

SEQ ID NO: 2904756 - RNA, 13 nt, Human
ccccacccaggag

SEQ ID NO: 2904757 - RNA, 12 nt, Human
ccccacccagga

SEQ ID NO: 2904758 - RNA, 14 nt, Human
ccccaccccacacu

SEQ ID NO: 2904759 - RNA, 16 nt, Human
ccccaccccacacuug

SEQ ID NO: 2904760 - RNA, 13 nt, Human
ccccacccccagc

SEQ ID NO: 2904761 - RNA, 16 nt, Human
ccccacccccagcuca

SEQ ID NO: 2904762 - RNA, 17 nt, Human
ccccacccccagcucaa

SEQ ID NO: 2904763 - RNA, 20 nt, Human
ccccacccccagcucaaugg

SEQ ID NO: 2904764 - RNA, 18 nt, Human
cccauucagagacugucc

SEQ ID NO: 2904765 - RNA, 18 nt, Human
cccauuccaaagcuuuau

SEQ ID NO: 2904766 - RNA, 22 nt, Human
cccauggacacuccagugccag

SEQ ID NO: 2904767 - RNA, 13 nt, Human
ccccaaucccagc

SEQ ID NO: 2904768 - RNA, 19 nt, Human
ccccaaugagacuugccuu

SEQ ID NO: 2904769 - RNA, 19 nt, Human
ccccaaguagucugcucac

SEQ ID NO: 2904770 - RNA, 20 nt, Human
ccccaaguagucugcucaca

SEQ ID NO: 2904771 - RNA, 16 nt, Human
ccccacaccucaguuc

SEQ ID NO: 2904772 - RNA, 14 nt, Human
ccccacaccucagu

SEQ ID NO: 2904773 - RNA, 12 nt, Human
ccccacacagcu

SEQ ID NO: 2904774 - RNA, 17 nt, Human
ccccacacagcuacagc

SEQ ID NO: 2904775 - RNA, 12 nt, Human
ccccacaacuuu

SEQ ID NO: 2904776 - RNA, 22 nt, Human
ccccaccgguccagcuggccug

SEQ ID NO: 2904777 - RNA, 21 nt, Human
ccccaccgguccagcuggccu

SEQ ID NO: 2904778 - RNA, 19 nt, Human
ccccaccgguccagcuggc

SEQ ID NO: 2904779 - RNA, 18 nt, Human
ccccaccgguccagcugg

SEQ ID NO: 2904780 - RNA, 17 nt, Human
ccccaccgguccagcug

SEQ ID NO: 2904781 - RNA, 13 nt, Human
ccccacccuguuu

SEQ ID NO: 2904782 - RNA, 20 nt, Human
ccccacccuguuuggauuuu

SEQ ID NO: 2904783 - RNA, 12 nt, Human
ccccaccugcag

SEQ ID NO: 2904784 - RNA, 13 nt, Human
ccccaccugcagg

SEQ ID NO: 2904785 - RNA, 12 nt, Human
ccccaccugcca

SEQ ID NO: 2904786 - RNA, 21 nt, Human
ccccaccuucaauuccugggc

SEQ ID NO: 2904787 - RNA, 11 nt, Human
ccccaccuggg

SEQ ID NO: 2904788 - RNA, 14 nt, Human
ccccacgcccuccc

SEQ ID NO: 2904789 - RNA, 17 nt, Human
ccccacgagggucagga

SEQ ID NO: 2904790 - RNA, 18 nt, Human
ccccacucuccccacacu

SEQ ID NO: 2904791 - RNA, 15 nt, Human
ccccacucuccccac

SEQ ID NO: 2904792 - RNA, 12 nt, Human
ccccacucuccc

SEQ ID NO: 2904793 - RNA, 21 nt, Human
ccccacggggccucgggaccu

SEQ ID NO: 2904794 - RNA, 22 nt, Human
ccccacggggccucgggaccuc

SEQ ID NO: 2904795 - RNA, 18 nt, Human
ccccacucaccagugucc

SEQ ID NO: 2904796 - RNA, 14 nt, Human
ccccacuccccacc

SEQ ID NO: 2904797 - RNA, 18 nt, Human
cucauuugucacacacuu

SEQ ID NO: 2904798 - RNA, 21 nt, Human
cucauuugucacacacuuugg

SEQ ID NO: 2904799 - RNA, 17 nt, Human
cucauuuguuaaaauua

SEQ ID NO: 2904800 - RNA, 15 nt, Human
cucauuuguuuuucu

SEQ ID NO: 2904801 - RNA, 16 nt, Human
cucauuucaggagcag

SEQ ID NO: 2904802 - RNA, 21 nt, Human
cucauuucaggagcagccuca

SEQ ID NO: 2904803 - RNA, 16 nt, Human
cucauuuuaguugccu

SEQ ID NO: 2904804 - RNA, 20 nt, Human
cucauuuucuauaacagaua

SEQ ID NO: 2904805 - RNA, 13 nt, Human
cucauuuuaaugu

SEQ ID NO: 2904806 - RNA, 15 nt, Human
cucauuuuaauguaa

SEQ ID NO: 2904807 - RNA, 21 nt, Human
cucauuuuaauguaaagauuu

SEQ ID NO: 2904808 - RNA, 23 nt, Human
cucauuuuugccauacaucaguu

SEQ ID NO: 2904809 - RNA, 21 nt, Human
cucauaaaaagccugcaauuu

SEQ ID NO: 2904810 - RNA, 12 nt, Human
cucauuccugua

SEQ ID NO: 2904811 - RNA, 22 nt, Human
cucaguuugugugucuuaauua

SEQ ID NO: 2904812 - RNA, 20 nt, Human
cucaguugugacuaacuaga

SEQ ID NO: 2904813 - RNA, 12 nt, Human
cucaguugugca

SEQ ID NO: 2904814 - RNA, 14 nt, Human
cucaguugugcagc

SEQ ID NO: 2904815 - RNA, 15 nt, Human
cucaguugugcagcu

SEQ ID NO: 2904816 - RNA, 21 nt, Human
cucaguugugcagcuuuuggu

SEQ ID NO: 2904817 - RNA, 17 nt, Human
cucaguugcuaaacacu

SEQ ID NO: 2904818 - RNA, 18 nt, Human
cucaguugcuaaacacug

SEQ ID NO: 2904819 - RNA, 13 nt, Human
cucaguuggaaau

SEQ ID NO: 2904820 - RNA, 14 nt, Human
cucaguuggaaaua

SEQ ID NO: 2904821 - RNA, 21 nt, Human
cucaguuggaaauaauaaaag

SEQ ID NO: 2904822 - RNA, 22 nt, Human
cucaguucccuuggccucagaa

SEQ ID NO: 2904823 - RNA, 15 nt, Human
cucauugcugagccu

SEQ ID NO: 2904824 - RNA, 16 nt, Human
cucauugcugagccuc

SEQ ID NO: 2904825 - RNA, 17 nt, Human
cuccagauguuuccaga

SEQ ID NO: 2904826 - RNA, 20 nt, Human
cuccagaguggggaugacau

SEQ ID NO: 2904827 - RNA, 20 nt, Human
cuccagaggggcucagguca

SEQ ID NO: 2904828 - RNA, 21 nt, Human
cuccagauagcucauuucauu

SEQ ID NO: 2904829 - RNA, 19 nt, Human
cuccagagcaacgaccagg

SEQ ID NO: 2904830 - RNA, 21 nt, Human
cuccagaccccuggcuuuuca

SEQ ID NO: 2904831 - RNA, 14 nt, Human
cuccacuggaugga

SEQ ID NO: 2904832 - RNA, 14 nt, Human
cuccagauuuuuaa

SEQ ID NO: 2904833 - RNA, 16 nt, Human
cuccagauuuuuaaua

SEQ ID NO: 2904834 - RNA, 20 nt, Human
cuccagauuuuucggaggcc

SEQ ID NO: 2904835 - RNA, 23 nt, Human
cuccagauuuuucggaggcccca

SEQ ID NO: 2904836 - RNA, 19 nt, Human
cuccagauguuuccagacu

SEQ ID NO: 2904837 - RNA, 18 nt, Human
cuccagcucaccagcccc

SEQ ID NO: 2904838 - RNA, 16 nt, Human
cuccagcucaccagcc

SEQ ID NO: 2904839 - RNA, 15 nt, Human
cuccagcucaccagc

SEQ ID NO: 2904840 - RNA, 16 nt, Human
cuccagcaacacagcc

SEQ ID NO: 2904841 - RNA, 14 nt, Human
cuccagcucaccag

SEQ ID NO: 2904842 - RNA, 23 nt, Human
cuccaccagcaucaccugccugu

SEQ ID NO: 2904843 - RNA, 22 nt, Human
cuccaccagcaucaccugccug

SEQ ID NO: 2904844 - RNA, 20 nt, Human
cuccaccagcaucaccugcc

SEQ ID NO: 2904845 - RNA, 12 nt, Human
cuccaccaccgc

SEQ ID NO: 2904846 - RNA, 13 nt, Human
cuccaccaccgcc

SEQ ID NO: 2904847 - RNA, 14 nt, Human
cuccaccaccgccc

SEQ ID NO: 2904848 - RNA, 19 nt, Human
cuccaccaccgcccgucug

SEQ ID NO: 2904849 - RNA, 20 nt, Human
cuccaccaccgcccgucugu

SEQ ID NO: 2904850 - RNA, 22 nt, Human
cuccaccaccgcccgucugugu

SEQ ID NO: 2904851 - RNA, 16 nt, Human
cuccaccccagccccc

SEQ ID NO: 2904852 - RNA, 17 nt, Human
cuccaccccagccccca

SEQ ID NO: 2904853 - RNA, 16 nt, Human
cuccacccuuggccug

SEQ ID NO: 2904854 - RNA, 15 nt, Human
cuccacccuuggccu

SEQ ID NO: 2904855 - RNA, 14 nt, Human
cuccacccuuggcc

SEQ ID NO: 2904856 - RNA, 13 nt, Human
cuccacccuuggc

SEQ ID NO: 2904857 - RNA, 21 nt, Human
cuccacccuuggccugucuca

SEQ ID NO: 2904858 - RNA, 17 nt, Human
cuccacccuuggccugu

SEQ ID NO: 2904859 - RNA, 15 nt, Human
cuccaccuagacugu

SEQ ID NO: 2904860 - RNA, 12 nt, Human
cuccaccuacca

SEQ ID NO: 2904861 - RNA, 13 nt, Human
cuccacugccuuc

SEQ ID NO: 2904862 - RNA, 14 nt, Human
cuccacugccuucg

SEQ ID NO: 2904863 - RNA, 15 nt, Human
cuccacugccuucga

SEQ ID NO: 2904864 - RNA, 16 nt, Human
cuccacugccuucgau

SEQ ID NO: 2904865 - RNA, 13 nt, Human
cuccacuggaugg

SEQ ID NO: 2904866 - RNA, 11 nt, Human
cuccccagccc

SEQ ID NO: 2904867 - RNA, 15 nt, Human
cuccccacgcccucc

SEQ ID NO: 2904868 - RNA, 23 nt, Human
cuccccacggggccucgggaccu

SEQ ID NO: 2904869 - RNA, 13 nt, Human
cuccccucugaaa

SEQ ID NO: 2904870 - RNA, 22 nt, Human
cuccccucugaaaguuguacau

SEQ ID NO: 2904871 - RNA, 23 nt, Human
cuccccucugaaaguuguacaug

SEQ ID NO: 2904872 - RNA, 22 nt, Human
cucccuucaaccauuccccaug

SEQ ID NO: 2904873 - RNA, 23 nt, Human
cucccuucaaccauuccccaugg

SEQ ID NO: 2904874 - RNA, 21 nt, Human
cucccuucaaccauuccccau

SEQ ID NO: 2904875 - RNA, 23 nt, Human
cucccuggaguguggcugaggag

SEQ ID NO: 2904876 - RNA, 11 nt, Human
cucccuggagu

SEQ ID NO: 2904877 - RNA, 12 nt, Human
cucccuggagug

SEQ ID NO: 2904878 - RNA, 22 nt, Human
cucccuggaguguggcugagga

SEQ ID NO: 2904879 - RNA, 19 nt, Human
cucccgaauagcugggacu

SEQ ID NO: 2904880 - RNA, 14 nt, Human
cuccccuguaccuu

SEQ ID NO: 2904881 - RNA, 23 nt, Human
cuccccuggggacagcaagggcu

SEQ ID NO: 2904882 - RNA, 23 nt, Human
cucccgaauagcugggacuacag

SEQ ID NO: 2904883 - RNA, 20 nt, Human
cucccgaauagcugggacua

SEQ ID NO: 2904884 - RNA, 16 nt, Human
cucccgaccucaggug

SEQ ID NO: 2904885 - RNA, 14 nt, Human
cucccucaacccca

SEQ ID NO: 2904886 - RNA, 17 nt, Human
cuccaugcugccuccag

SEQ ID NO: 2904887 - RNA, 14 nt, Human
cuccauggcaucuu

SEQ ID NO: 2904888 - RNA, 13 nt, Human
cuccaugcugccu

SEQ ID NO: 2904889 - RNA, 14 nt, Human
cuccaugcugccuc

SEQ ID NO: 2904890 - RNA, 15 nt, Human
cuccaugcugccucc

SEQ ID NO: 2904891 - RNA, 16 nt, Human
cuccaugcugccucca

SEQ ID NO: 2904892 - RNA, 14 nt, Human
cuccagcugcacca

SEQ ID NO: 2904893 - RNA, 17 nt, Human
cuccagcugcaccagag

SEQ ID NO: 2904894 - RNA, 23 nt, Human
cuccagcuggccgggagccugau

SEQ ID NO: 2904895 - RNA, 22 nt, Human
cuccagcuggccgggagccuga

SEQ ID NO: 2904896 - RNA, 15 nt, Human
cuccagcugggcucu

SEQ ID NO: 2904897 - RNA, 19 nt, Human
cuccagcugggcucugcaa

SEQ ID NO: 2904898 - RNA, 20 nt, Human
cuccagcugggcucugcaau

SEQ ID NO: 2904899 - RNA, 23 nt, Human
cucccaaagugcugggauuacag

SEQ ID NO: 2904900 - RNA, 16 nt, Human
cucccaaagugcuggg

SEQ ID NO: 2904901 - RNA, 20 nt, Human
cucccaaagugcugagauua

SEQ ID NO: 2904902 - RNA, 22 nt, Human
cucccaaagugcugagauuaca

SEQ ID NO: 2904903 - RNA, 19 nt, Human
cucccagggccagggcccu

SEQ ID NO: 2904904 - RNA, 15 nt, Human
cucccaucaccucua

SEQ ID NO: 2904905 - RNA, 13 nt, Human
cucccaggcucuc

SEQ ID NO: 2904906 - RNA, 12 nt, Human
cucccaggcucu

SEQ ID NO: 2904907 - RNA, 16 nt, Human
cucccagggccagggc

SEQ ID NO: 2904908 - RNA, 20 nt, Human
cucccaggcgccccuucccc

SEQ ID NO: 2904909 - RNA, 22 nt, Human
cucccaggcgccccuucccccu

SEQ ID NO: 2904910 - RNA, 17 nt, Human
cucccaggcgccccuuc

SEQ ID NO: 2904911 - RNA, 19 nt, Human
cucccaggcgccccuuccc

SEQ ID NO: 2904912 - RNA, 12 nt, Human
cuccccacgccc

SEQ ID NO: 2904913 - RNA, 23 nt, Human
cuccccaccuucaauuccugggc

SEQ ID NO: 2904914 - RNA, 21 nt, Human
cuccccaccuucaauuccugg

SEQ ID NO: 2904915 - RNA, 12 nt, Human
cuccccaccccu

SEQ ID NO: 2904916 - RNA, 14 nt, Human
cuccccacccgccc

SEQ ID NO: 2904917 - RNA, 16 nt, Human
cuccccacccuccugg

SEQ ID NO: 2904918 - RNA, 17 nt, Human
cuccccacccuccuggc

SEQ ID NO: 2904919 - RNA, 23 nt, Human
cuccccacccuccuggccucaga

SEQ ID NO: 2904920 - RNA, 19 nt, Human
cucccaucaugcccggucc

SEQ ID NO: 2904921 - RNA, 23 nt, Human
cucccaucaugcccggucccacc

SEQ ID NO: 2904922 - RNA, 21 nt, Human
cucccaucauuacccuucccu

SEQ ID NO: 2904923 - RNA, 23 nt, Human
cucccaucauuacccuucccugc

SEQ ID NO: 2904924 - RNA, 13 nt, Human
cucccauccccug

SEQ ID NO: 2904925 - RNA, 15 nt, Human
cucccauccccugga

SEQ ID NO: 2904926 - RNA, 16 nt, Human
cucccauccccuggac

SEQ ID NO: 2904927 - RNA, 14 nt, Human
cucccauguaugga

SEQ ID NO: 2904928 - RNA, 22 nt, Human
cucagcuuugagaagccuucag

SEQ ID NO: 2904929 - RNA, 11 nt, Human
cucaggaaaga

SEQ ID NO: 2904930 - RNA, 15 nt, Human
cucaggaaagaauag

SEQ ID NO: 2904931 - RNA, 20 nt, Human
cucaggaaagaauagaaaga

SEQ ID NO: 2904932 - RNA, 21 nt, Human
cucaggaaagaauagaaagaa

SEQ ID NO: 2904933 - RNA, 12 nt, Human
cucagcuuugag

SEQ ID NO: 2904934 - RNA, 16 nt, Human
cucagcuuccuaccca

SEQ ID NO: 2904935 - RNA, 22 nt, Human
cucagcuuccuacccacaccuc

SEQ ID NO: 2904936 - RNA, 14 nt, Human
cucagcuuccuacc

SEQ ID NO: 2904937 - RNA, 21 nt, Human
cucagcuuugagaagccuuca

SEQ ID NO: 2904938 - RNA, 16 nt, Human
cucagcuuugagaagc

SEQ ID NO: 2904939 - RNA, 13 nt, Human
cucagcuuugaga

SEQ ID NO: 2904940 - RNA, 21 nt, Human
cucagcuuuuugucuuuucug

SEQ ID NO: 2904941 - RNA, 17 nt, Human
cucagcuuuuugucuuu

SEQ ID NO: 2904942 - RNA, 15 nt, Human
cucaggaacuagacu

SEQ ID NO: 2904943 - RNA, 19 nt, Human
cucagcucggggagccuua

SEQ ID NO: 2904944 - RNA, 18 nt, Human
cucagcucggggagccuu

SEQ ID NO: 2904945 - RNA, 15 nt, Human
cucagcucggggagc

SEQ ID NO: 2904946 - RNA, 18 nt, Human
cucagcucuuggcuccac

SEQ ID NO: 2904947 - RNA, 17 nt, Human
cucagcucuuggcucca

SEQ ID NO: 2904948 - RNA, 16 nt, Human
cucagcugucuguggc

SEQ ID NO: 2904949 - RNA, 18 nt, Human
cucagcugucuguggcuu

SEQ ID NO: 2904950 - RNA, 23 nt, Human
cucagcuggaugauggucuucag

SEQ ID NO: 2904951 - RNA, 14 nt, Human
cucagcuuaucucu

SEQ ID NO: 2904952 - RNA, 20 nt, Human
cucagcuuaucucuuuuaua

SEQ ID NO: 2904953 - RNA, 20 nt, Human
cucagcucuuggcuccacug

SEQ ID NO: 2904954 - RNA, 23 nt, Human
cucagcugaaugccuccuguggg

SEQ ID NO: 2904955 - RNA, 12 nt, Human
cucagcugccuc

SEQ ID NO: 2904956 - RNA, 16 nt, Human
cucagcugccucacuu

SEQ ID NO: 2904957 - RNA, 14 nt, Human
cucagcugccucac

SEQ ID NO: 2904958 - RNA, 18 nt, Human
cucagcugccucacuucc

SEQ ID NO: 2904959 - RNA, 12 nt, Human
cucaggaccagg

SEQ ID NO: 2904960 - RNA, 14 nt, Human
cucaggaccaggca

SEQ ID NO: 2904961 - RNA, 21 nt, Human
cucaggacucagaagccucug

SEQ ID NO: 2904962 - RNA, 16 nt, Human
cucaggacucagaagc

SEQ ID NO: 2904963 - RNA, 14 nt, Human
cucaggacucagaa

SEQ ID NO: 2904964 - RNA, 15 nt, Human
cucaggaccaggcaa

SEQ ID NO: 2904965 - RNA, 16 nt, Human
cucaggacugcaacag

SEQ ID NO: 2904966 - RNA, 17 nt, Human
cucaggacugcaacagg

SEQ ID NO: 2904967 - RNA, 19 nt, Human
cucaggacugcaacaggcu

SEQ ID NO: 2904968 - RNA, 20 nt, Human
cucagggccaugccugcccc

SEQ ID NO: 2904969 - RNA, 18 nt, Human
cucaggaggcugaggcag

SEQ ID NO: 2904970 - RNA, 20 nt, Human
cucaggaggcgcccuuggcu

SEQ ID NO: 2904971 - RNA, 14 nt, Human
cucaggaggcugag

SEQ ID NO: 2904972 - RNA, 17 nt, Human
cucaggaggcugaggca

SEQ ID NO: 2904973 - RNA, 15 nt, Human
cucaggaggcugagg

SEQ ID NO: 2904974 - RNA, 19 nt, Human
cucaggaggcgcccuuggc

SEQ ID NO: 2904975 - RNA, 12 nt, Human
cucaggagccau

SEQ ID NO: 2904976 - RNA, 16 nt, Human
cucaggagccucugcu

SEQ ID NO: 2904977 - RNA, 23 nt, Human
cucaggugauccacccaccucag

SEQ ID NO: 2904978 - RNA, 22 nt, Human
cucaggugauccacccaccuca

SEQ ID NO: 2904979 - RNA, 19 nt, Human
cucaguucccuuggccuca

SEQ ID NO: 2904980 - RNA, 21 nt, Human
cucaguucccuuggccucaga

SEQ ID NO: 2904981 - RNA, 20 nt, Human
cucaguucccuuggccucag

SEQ ID NO: 2904982 - RNA, 13 nt, Human
cucagggucucug

SEQ ID NO: 2904983 - RNA, 14 nt, Human
cucagggucucugc

SEQ ID NO: 2904984 - RNA, 16 nt, Human
cucagggucucugcug

SEQ ID NO: 2904985 - RNA, 17 nt, Human
cucagggucucugcugc

SEQ ID NO: 2904986 - RNA, 18 nt, Human
cucagggucucugcugcc

SEQ ID NO: 2904987 - RNA, 19 nt, Human
cucagggucucugcugccg

SEQ ID NO: 2904988 - RNA, 15 nt, Human
cucagggugcagagg

SEQ ID NO: 2904989 - RNA, 16 nt, Human
cucagggugcagaggu

SEQ ID NO: 2904990 - RNA, 20 nt, Human
cucagguaaucgaccugccu

SEQ ID NO: 2904991 - RNA, 24 nt, Human
cucagguaaucgaccugccucggc

SEQ ID NO: 2904992 - RNA, 22 nt, Human
cucagguaaucgaccugccucg

SEQ ID NO: 2904993 - RNA, 23 nt, Human
cucagaugucccuugaugcacag

SEQ ID NO: 2904994 - RNA, 18 nt, Human
cucagaugcaguuuggag

SEQ ID NO: 2904995 - RNA, 13 nt, Human
cucagaugcucaa

SEQ ID NO: 2904996 - RNA, 14 nt, Human
cucagaugcucaaa

SEQ ID NO: 2904997 - RNA, 15 nt, Human
cucagaugcucaaag

SEQ ID NO: 2904998 - RNA, 19 nt, Human
cucagaugcucaaaguugu

SEQ ID NO: 2904999 - RNA, 21 nt, Human
cucagaugcucaaaguuguuu

SEQ ID NO: 2905000 - RNA, 22 nt, Human
cucagagaugugcacccauggg

SEQ ID NO: 2905001 - RNA, 18 nt, Human
cucagaguauggagcuca

SEQ ID NO: 2905002 - RNA, 16 nt, Human
cucagaguauggagcu

SEQ ID NO: 2905003 - RNA, 17 nt, Human
cucagaguauggagcuc

SEQ ID NO: 2905004 - RNA, 19 nt, Human
cucagagguagggcugcca

SEQ ID NO: 2905005 - RNA, 23 nt, Human
cucagagguuuaccuagagaaca

SEQ ID NO: 2905006 - RNA, 13 nt, Human
cucagagggggac

SEQ ID NO: 2905007 - RNA, 17 nt, Human
cucagagggggacugcu

SEQ ID NO: 2905008 - RNA, 18 nt, Human
cucagagggggacugcug

SEQ ID NO: 2905009 - RNA, 19 nt, Human
cucagagggggacugcugc

SEQ ID NO: 2905010 - RNA, 19 nt, Human
cucacuguugcccaggcug

SEQ ID NO: 2905011 - RNA, 18 nt, Human
cucacuguugcccaggcu

SEQ ID NO: 2905012 - RNA, 17 nt, Human
cucacuguugcccaggc

SEQ ID NO: 2905013 - RNA, 16 nt, Human
cucacuguugcccagg

SEQ ID NO: 2905014 - RNA, 21 nt, Human
cucacuguugaauuuucucua

SEQ ID NO: 2905015 - RNA, 20 nt, Human
cucagagaugugcacccaug

SEQ ID NO: 2905016 - RNA, 19 nt, Human
cucagagauauugugagga

SEQ ID NO: 2905017 - RNA, 15 nt, Human
cucagagccaccccu

SEQ ID NO: 2905018 - RNA, 15 nt, Human
cucacuguugaauuu

SEQ ID NO: 2905019 - RNA, 21 nt, Human
cucacuguucuauucaucuca

SEQ ID NO: 2905020 - RNA, 16 nt, Human
cucacuggggccuaca

SEQ ID NO: 2905021 - RNA, 18 nt, Human
cucacuggggccuacagc

SEQ ID NO: 2905022 - RNA, 13 nt, Human
cucacuggggccu

SEQ ID NO: 2905023 - RNA, 16 nt, Human
cucacuggccaucccu

SEQ ID NO: 2905024 - RNA, 21 nt, Human
cucacuggccaucccucgugg

SEQ ID NO: 2905025 - RNA, 14 nt, Human
cucacuggccaucc

SEQ ID NO: 2905026 - RNA, 23 nt, Human
cucacugcucccugaagccagcc

SEQ ID NO: 2905027 - RNA, 19 nt, Human
cucacugcucccugaagcc

SEQ ID NO: 2905028 - RNA, 20 nt, Human
cucacugcucccugaagcca

SEQ ID NO: 2905029 - RNA, 15 nt, Human
cucacugcucccuga

SEQ ID NO: 2905030 - RNA, 17 nt, Human
cucacugcucccugaag

SEQ ID NO: 2905031 - RNA, 19 nt, Human
cucacugugguaaaugcca

SEQ ID NO: 2905032 - RNA, 20 nt, Human
cucacugugguaaaugccac

SEQ ID NO: 2905033 - RNA, 22 nt, Human
cucacugugguaaaugccacac

SEQ ID NO: 2905034 - RNA, 19 nt, Human
cucacugugucacccaggc

SEQ ID NO: 2905035 - RNA, 15 nt, Human
cucacuguugcccag

SEQ ID NO: 2905036 - RNA, 14 nt, Human
cucacuguugccca

SEQ ID NO: 2905037 - RNA, 14 nt, Human
cucacugcagccuc

SEQ ID NO: 2905038 - RNA, 20 nt, Human
cucacugcauccuccgccuc

SEQ ID NO: 2905039 - RNA, 16 nt, Human
cucacugcagccucaa

SEQ ID NO: 2905040 - RNA, 15 nt, Human
cucacugcagccuca

SEQ ID NO: 2905041 - RNA, 20 nt, Human
cucacagaugugacuguaua

SEQ ID NO: 2905042 - RNA, 19 nt, Human
cucacagauugcugccuca

SEQ ID NO: 2905043 - RNA, 15 nt, Human
cucacagcacaugcu

SEQ ID NO: 2905044 - RNA, 19 nt, Human
cucacagcacaugcuggcc

SEQ ID NO: 2905045 - RNA, 20 nt, Human
cucacagcacaugcuggcca

SEQ ID NO: 2905046 - RNA, 21 nt, Human
cucacagcacaugcuggccag

SEQ ID NO: 2905047 - RNA, 22 nt, Human
cucacagcacaugcuggccagc

SEQ ID NO: 2905048 - RNA, 22 nt, Human
cucagcauccuggcacccggcc

SEQ ID NO: 2905049 - RNA, 21 nt, Human
cucagcauccuggcacccggc

SEQ ID NO: 2905050 - RNA, 13 nt, Human
cucagcauccugg

SEQ ID NO: 2905051 - RNA, 15 nt, Human
cucagauuauuuaaa

SEQ ID NO: 2905052 - RNA, 16 nt, Human
cucagccccgagcugu

SEQ ID NO: 2905053 - RNA, 19 nt, Human
cucagccccgagcuguccc

SEQ ID NO: 2905054 - RNA, 13 nt, Human
cucagcccagaag

SEQ ID NO: 2905055 - RNA, 20 nt, Human
cucagcccagaagaaaauuc

SEQ ID NO: 2905056 - RNA, 21 nt, Human
cucagcccacauagugauggu

SEQ ID NO: 2905057 - RNA, 20 nt, Human
cucagccccugauccuguga

SEQ ID NO: 2905058 - RNA, 22 nt, Human
cucagccccugauccugugaag

SEQ ID NO: 2905059 - RNA, 23 nt, Human
cucagccccugauccugugaagu

SEQ ID NO: 2905060 - RNA, 11 nt, Human
cucagccccua

SEQ ID NO: 2905061 - RNA, 12 nt, Human
cucagccccuag

SEQ ID NO: 2905062 - RNA, 14 nt, Human
cucagccccuagga

SEQ ID NO: 2905063 - RNA, 15 nt, Human
cucagccccuaggag

SEQ ID NO: 2905064 - RNA, 23 nt, Human
cucagccccuaggaguauauuuc

SEQ ID NO: 2905065 - RNA, 14 nt, Human
cucagcccucccug

SEQ ID NO: 2905066 - RNA, 19 nt, Human
cucagcccucccugccccu

SEQ ID NO: 2905067 - RNA, 20 nt, Human
cucagcccucccugccccuc

SEQ ID NO: 2905068 - RNA, 21 nt, Human
cucagcccucccugccccucc

SEQ ID NO: 2905069 - RNA, 21 nt, Human
cucagcggggacagcuccuuc

SEQ ID NO: 2905070 - RNA, 20 nt, Human
cucagcggggacagcuccuu

SEQ ID NO: 2905071 - RNA, 19 nt, Human
cucagcggggacagcuccu

SEQ ID NO: 2905072 - RNA, 18 nt, Human
cucagcggggacagcucc

SEQ ID NO: 2905073 - RNA, 16 nt, Human
cucagcggggacagcu

SEQ ID NO: 2905074 - RNA, 15 nt, Human
cucagcggggacagc

SEQ ID NO: 2905075 - RNA, 14 nt, Human
cucagcggggacag

SEQ ID NO: 2905076 - RNA, 11 nt, Human
cucagcccuga

SEQ ID NO: 2905077 - RNA, 23 nt, Human
cucagcggggacagcuccuucug

SEQ ID NO: 2905078 - RNA, 13 nt, Human
cucagcggggaca

SEQ ID NO: 2905079 - RNA, 23 nt, Human
cucagcguuuuuuuguuuuuaau

SEQ ID NO: 2905080 - RNA, 19 nt, Human
cucagcuacccacuauccu

SEQ ID NO: 2905081 - RNA, 21 nt, Human
cucagcuacccacuauccuuc

SEQ ID NO: 2905082 - RNA, 15 nt, Human
cucagcauuucuuuu

SEQ ID NO: 2905083 - RNA, 15 nt, Human
cucagcucagcgcca

SEQ ID NO: 2905084 - RNA, 16 nt, Human
cucagcucagcgccag

SEQ ID NO: 2905085 - RNA, 17 nt, Human
cucagcucagcgccagc

SEQ ID NO: 2905086 - RNA, 13 nt, Human
cucagcucagcgc

SEQ ID NO: 2905087 - RNA, 19 nt, Human
cucagcucccaaggcucug

SEQ ID NO: 2905088 - RNA, 15 nt, Human
cucagcucccaaggc

SEQ ID NO: 2905089 - RNA, 19 nt, Human
cucagcuccagguggcucu

SEQ ID NO: 2905090 - RNA, 20 nt, Human
cucagcuccagguggcucug

SEQ ID NO: 2905091 - RNA, 12 nt, Human
cucagcucccca

SEQ ID NO: 2905092 - RNA, 14 nt, Human
cucagcuccccaga

SEQ ID NO: 2905093 - RNA, 16 nt, Human
cucagcuccccagagu

SEQ ID NO: 2905094 - RNA, 19 nt, Human
cucagcuccccagaguccu

SEQ ID NO: 2905095 - RNA, 13 nt, Human
cuauaaugugugu

SEQ ID NO: 2905096 - RNA, 16 nt, Human
cuauaauguguguaug

SEQ ID NO: 2905097 - RNA, 21 nt, Human
cuauagccuaggugacagagu

SEQ ID NO: 2905098 - RNA, 20 nt, Human
cuauagccuaggugacagag

SEQ ID NO: 2905099 - RNA, 18 nt, Human
cuauagccuaggugacag

SEQ ID NO: 2905100 - RNA, 19 nt, Human
cuauagccuaggugacaga

SEQ ID NO: 2905101 - RNA, 15 nt, Human
cuauaccugugccuc

SEQ ID NO: 2905102 - RNA, 14 nt, Human
cuauaccugugccu

SEQ ID NO: 2905103 - RNA, 19 nt, Human
cuauaccugugccucggcu

SEQ ID NO: 2905104 - RNA, 11 nt, Human
cuauacuugaa

SEQ ID NO: 2905105 - RNA, 14 nt, Human
cuauacuugaacaa

SEQ ID NO: 2905106 - RNA, 15 nt, Human
cuauacuugaacaaa

SEQ ID NO: 2905107 - RNA, 16 nt, Human
cuauacuugaacaaaa

SEQ ID NO: 2905108 - RNA, 17 nt, Human
cuauacuugaacaaaag

SEQ ID NO: 2905109 - RNA, 20 nt, Human
cuauacuugaacaaaagggu

SEQ ID NO: 2905110 - RNA, 21 nt, Human
cuauacuugaacaaaaggguc

SEQ ID NO: 2905111 - RNA, 22 nt, Human
cuauacuugaacaaaaggguca

SEQ ID NO: 2905112 - RNA, 14 nt, Human
cuauauagagaugu

SEQ ID NO: 2905113 - RNA, 13 nt, Human
cuauaguucuaga

SEQ ID NO: 2905114 - RNA, 11 nt, Human
cuauauacaug

SEQ ID NO: 2905115 - RNA, 13 nt, Human
cuauauacaugug

SEQ ID NO: 2905116 - RNA, 16 nt, Human
cuauauacaugugugu

SEQ ID NO: 2905117 - RNA, 17 nt, Human
cuauauacaugugugua

SEQ ID NO: 2905118 - RNA, 19 nt, Human
cuauauacauguguguaua

SEQ ID NO: 2905119 - RNA, 22 nt, Human
cuauauacauguguguauauau

SEQ ID NO: 2905120 - RNA, 17 nt, Human
cuauauagaaugcugca

SEQ ID NO: 2905121 - RNA, 18 nt, Human
cuauauagaaugcugcac

SEQ ID NO: 2905122 - RNA, 14 nt, Human
cuauaguucuagac

SEQ ID NO: 2905123 - RNA, 15 nt, Human
cuauaguucuagaca

SEQ ID NO: 2905124 - RNA, 19 nt, Human
cuauaguuuaaaacacauu

SEQ ID NO: 2905125 - RNA, 19 nt, Human
cuauagccuggacuuuccu

SEQ ID NO: 2905126 - RNA, 17 nt, Human
cuauagcuaaguacaca

SEQ ID NO: 2905127 - RNA, 15 nt, Human
cuauagcuaaguaca

SEQ ID NO: 2905128 - RNA, 19 nt, Human
cuaugaugugaaacacuuu

SEQ ID NO: 2905129 - RNA, 23 nt, Human
cuaugaugugaaacacuuugccu

SEQ ID NO: 2905130 - RNA, 15 nt, Human
cuaugaaugcuuugc

SEQ ID NO: 2905131 - RNA, 22 nt, Human
cuaugaucccagcacuuuggga

SEQ ID NO: 2905132 - RNA, 16 nt, Human
cuaugaacugaaggca

SEQ ID NO: 2905133 - RNA, 15 nt, Human
cuauauagagauguu

SEQ ID NO: 2905134 - RNA, 23 nt, Human
cuauaguauuugauucaaaauau

SEQ ID NO: 2905135 - RNA, 12 nt, Human
cuaugaacaacu

SEQ ID NO: 2905136 - RNA, 19 nt, Human
cuaugaaguaaagaacugc

SEQ ID NO: 2905137 - RNA, 17 nt, Human
cuaugaacuucucucag

SEQ ID NO: 2905138 - RNA, 20 nt, Human
cuaugccagcucagucccau

SEQ ID NO: 2905139 - RNA, 17 nt, Human
cuaugccccaaauauag

SEQ ID NO: 2905140 - RNA, 19 nt, Human
cuaugccagcucaguccca

SEQ ID NO: 2905141 - RNA, 14 nt, Human
cuaugccugugucu

SEQ ID NO: 2905142 - RNA, 12 nt, Human
cuaugcacauau

SEQ ID NO: 2905143 - RNA, 19 nt, Human
cuaugauuuggaaaauaaa

SEQ ID NO: 2905144 - RNA, 15 nt, Human
cuaugauuuggaaaa

SEQ ID NO: 2905145 - RNA, 22 nt, Human
cuauggggagaggaacuccuug

SEQ ID NO: 2905146 - RNA, 19 nt, Human
cuaugggagccccaggguc

SEQ ID NO: 2905147 - RNA, 17 nt, Human
cuaugggagccccaggg

SEQ ID NO: 2905148 - RNA, 14 nt, Human
cuauguauauacau

SEQ ID NO: 2905149 - RNA, 21 nt, Human
cuauguaagaauucagaagac

SEQ ID NO: 2905150 - RNA, 17 nt, Human
cuauguacuaguacugu

SEQ ID NO: 2905151 - RNA, 18 nt, Human
cuauguacuaguacugug

SEQ ID NO: 2905152 - RNA, 19 nt, Human
cuauguacuaguacugugu

SEQ ID NO: 2905153 - RNA, 20 nt, Human
cuauguacuaguacugugua

SEQ ID NO: 2905154 - RNA, 23 nt, Human
cuauguacuaguacuguguacug

SEQ ID NO: 2905155 - RNA, 14 nt, Human
cuauguaggaaaaa

SEQ ID NO: 2905156 - RNA, 15 nt, Human
cuauguaggaaaaaa

SEQ ID NO: 2905157 - RNA, 19 nt, Human
cuauguaggaaaaaaauag

SEQ ID NO: 2905158 - RNA, 18 nt, Human
cuauuauguuguuagaga

SEQ ID NO: 2905159 - RNA, 20 nt, Human
cuauuauguuguuagagaaa

SEQ ID NO: 2905160 - RNA, 22 nt, Human
cuauuauuuucacuguagaaug

SEQ ID NO: 2905161 - RNA, 20 nt, Human
cuauuauuuucacuguagaa

SEQ ID NO: 2905162 - RNA, 21 nt, Human
cuauucaggagaguagaacag

SEQ ID NO: 2905163 - RNA, 15 nt, Human
cuauuauaauuuaau

SEQ ID NO: 2905164 - RNA, 21 nt, Human
cuauuauaauuuaaugcaugu

SEQ ID NO: 2905165 - RNA, 17 nt, Human
cuauuauaauuuaaugc

SEQ ID NO: 2905166 - RNA, 16 nt, Human
cuauuauaauuuaaug

SEQ ID NO: 2905167 - RNA, 12 nt, Human
cuauucucucuu

SEQ ID NO: 2905168 - RNA, 16 nt, Human
cuauucugagaaaaca

SEQ ID NO: 2905169 - RNA, 15 nt, Human
cuauucugagaaaac

SEQ ID NO: 2905170 - RNA, 17 nt, Human
cuauucugagaaaacaa

SEQ ID NO: 2905171 - RNA, 19 nt, Human
cuauucuguguugcauuau

SEQ ID NO: 2905172 - RNA, 24 nt, Human
cuauucuguguugcauuauucauu

SEQ ID NO: 2905173 - RNA, 18 nt, Human
cuauugauuuuuacuuca

SEQ ID NO: 2905174 - RNA, 14 nt, Human
cuauugauacucuu

SEQ ID NO: 2905175 - RNA, 18 nt, Human
cuauugauacucuuucua

SEQ ID NO: 2905176 - RNA, 14 nt, Human
cuauugacuucaau

SEQ ID NO: 2905177 - RNA, 16 nt, Human
cuauugacuucaauga

SEQ ID NO: 2905178 - RNA, 13 nt, Human
cuauugacuucaa

SEQ ID NO: 2905179 - RNA, 19 nt, Human
cuauuuauuuuccuaaaga

SEQ ID NO: 2905180 - RNA, 18 nt, Human
cuauuuauuuuccuaaag

SEQ ID NO: 2905181 - RNA, 21 nt, Human
cuauuuauuuuccuaaagaga

SEQ ID NO: 2905182 - RNA, 14 nt, Human
cuauuuauuuuuac

SEQ ID NO: 2905183 - RNA, 17 nt, Human
cuauuuauuuuccuaaa

SEQ ID NO: 2905184 - RNA, 16 nt, Human
cuauuuauuuuccuaa

SEQ ID NO: 2905185 - RNA, 13 nt, Human
cuauuuauuuucc

SEQ ID NO: 2905186 - RNA, 21 nt, Human
cuauuuauuaauauuuaacau

SEQ ID NO: 2905187 - RNA, 22 nt, Human
cuauuuauuaaguucucaaugu

SEQ ID NO: 2905188 - RNA, 21 nt, Human
cuauuucuuuauauuuaucca

SEQ ID NO: 2905189 - RNA, 19 nt, Human
cuauuugaaaugaauuccu

SEQ ID NO: 2905190 - RNA, 21 nt, Human
cuauuucugggucuuuugcua

SEQ ID NO: 2905191 - RNA, 22 nt, Human
cuauuucugggucuuuugcuac

SEQ ID NO: 2905192 - RNA, 18 nt, Human
cucaaccccaccacuucu

SEQ ID NO: 2905193 - RNA, 12 nt, Human
cucaaauuugga

SEQ ID NO: 2905194 - RNA, 22 nt, Human
cucaagcagcgaccgcccccuc

SEQ ID NO: 2905195 - RNA, 12 nt, Human
cucaagcacuga

SEQ ID NO: 2905196 - RNA, 14 nt, Human
cucaagcacugaua

SEQ ID NO: 2905197 - RNA, 17 nt, Human
cucaagcccgcggggac

SEQ ID NO: 2905198 - RNA, 23 nt, Human
cucaagcagcgaccgcccccucc

SEQ ID NO: 2905199 - RNA, 15 nt, Human
cucaagggacaagga

SEQ ID NO: 2905200 - RNA, 17 nt, Human
cucaagggacaaggaca

SEQ ID NO: 2905201 - RNA, 20 nt, Human
cucaagggacaaggacacgc

SEQ ID NO: 2905202 - RNA, 14 nt, Human
cucaagggcaugag

SEQ ID NO: 2905203 - RNA, 21 nt, Human
cucaagggcuagcaucccuga

SEQ ID NO: 2905204 - RNA, 21 nt, Human
cucacaccgcgucuggugaca

SEQ ID NO: 2905205 - RNA, 16 nt, Human
cucacaccucacucuu

SEQ ID NO: 2905206 - RNA, 19 nt, Human
cucacaccucacucuuuau

SEQ ID NO: 2905207 - RNA, 14 nt, Human
cucaagguuuuagg

SEQ ID NO: 2905208 - RNA, 19 nt, Human
cucaagguuuuagguucua

SEQ ID NO: 2905209 - RNA, 23 nt, Human
cucaagguuuuagguucuaaagu

SEQ ID NO: 2905210 - RNA, 20 nt, Human
cucaagguuuuagguucuaa

SEQ ID NO: 2905211 - RNA, 22 nt, Human
cucaagguuuuagguucuaaag

SEQ ID NO: 2905212 - RNA, 23 nt, Human
cucacacugguucucaaugaaaa

SEQ ID NO: 2905213 - RNA, 20 nt, Human
cucacacuuacuguaagaca

SEQ ID NO: 2905214 - RNA, 21 nt, Human
cucacacuuacuguaagacau

SEQ ID NO: 2905215 - RNA, 22 nt, Human
cucacacuuacuguaagacauu

SEQ ID NO: 2905216 - RNA, 17 nt, Human
cucacagaacccuugga

SEQ ID NO: 2905217 - RNA, 21 nt, Human
cucacacugguucucaaugaa

SEQ ID NO: 2905218 - RNA, 22 nt, Human
cucacaccuguaaucccagcac

SEQ ID NO: 2905219 - RNA, 11 nt, Human
cuauugguaaa

SEQ ID NO: 2905220 - RNA, 9 nt, Human
cuauuuaag

SEQ ID NO: 2905221 - RNA, 12 nt, Human
cuauuuaauauu

SEQ ID NO: 2905222 - RNA, 14 nt, Human
cuauuuaauauuua

SEQ ID NO: 2905223 - RNA, 22 nt, Human
cuauuuaugugauccuuuugga

SEQ ID NO: 2905224 - RNA, 13 nt, Human
cuauuuauuaaua

SEQ ID NO: 2905225 - RNA, 15 nt, Human
cuauuuaauauuuau

SEQ ID NO: 2905226 - RNA, 14 nt, Human
cuauuuauuaauau

SEQ ID NO: 2905227 - RNA, 15 nt, Human
cuauuuauuaauauu

SEQ ID NO: 2905228 - RNA, 17 nt, Human
cuauuuauuaauauuua

SEQ ID NO: 2905229 - RNA, 20 nt, Human
cuauuuauuaauauuuaaca

SEQ ID NO: 2905230 - RNA, 22 nt, Human
cuauuuaacuggcuucagccuc

SEQ ID NO: 2905231 - RNA, 15 nt, Human
cuauuuaaagccucc

SEQ ID NO: 2905232 - RNA, 18 nt, Human
cuauuuaaacuuauaaau

SEQ ID NO: 2905233 - RNA, 20 nt, Human
cuauuuaaacuuauaaauca

SEQ ID NO: 2905234 - RNA, 21 nt, Human
cuauuggaggaucaguuuuuu

SEQ ID NO: 2905235 - RNA, 18 nt, Human
cuauucugccacuccuga

SEQ ID NO: 2905236 - RNA, 12 nt, Human
cuauugcccagg

SEQ ID NO: 2905237 - RNA, 19 nt, Human
cuauugcauuuauauguac

SEQ ID NO: 2905238 - RNA, 12 nt, Human
cuauugccuucu

SEQ ID NO: 2905239 - RNA, 19 nt, Human
cuauugccuucuuugaaga

SEQ ID NO: 2905240 - RNA, 20 nt, Human
cuauugccuucuuugaagaa

SEQ ID NO: 2905241 - RNA, 21 nt, Human
cuauugcaaagguuccaacug

SEQ ID NO: 2905242 - RNA, 22 nt, Human
cuauugcaaagguuccaacugu

SEQ ID NO: 2905243 - RNA, 20 nt, Human
cuauugcagcaauuaaaaau

SEQ ID NO: 2905244 - RNA, 17 nt, Human
cuauugcauuuauaugu

SEQ ID NO: 2905245 - RNA, 14 nt, Human
cuauugcauuuaua

SEQ ID NO: 2905246 - RNA, 12 nt, Human
cuagauaaaagc

SEQ ID NO: 2905247 - RNA, 17 nt, Human
cuagauaccuaaaacau

SEQ ID NO: 2905248 - RNA, 24 nt, Human
cuagauaccuaaaacauaagauca

SEQ ID NO: 2905249 - RNA, 16 nt, Human
cuagagggaccucucc

SEQ ID NO: 2905250 - RNA, 15 nt, Human
cuagagggaccucuc

SEQ ID NO: 2905251 - RNA, 14 nt, Human
cuagagggaccucu

SEQ ID NO: 2905252 - RNA, 23 nt, Human
cuagaggccagccccacccagga

SEQ ID NO: 2905253 - RNA, 22 nt, Human
cuagaggccagccccacccagg

SEQ ID NO: 2905254 - RNA, 14 nt, Human
cuagagccugccug

SEQ ID NO: 2905255 - RNA, 21 nt, Human
cuagaggccagccccacccag

SEQ ID NO: 2905256 - RNA, 14 nt, Human
cuagagccagacca

SEQ ID NO: 2905257 - RNA, 15 nt, Human
cuagagccagaccaa

SEQ ID NO: 2905258 - RNA, 11 nt, Human
cuagagccugc

SEQ ID NO: 2905259 - RNA, 12 nt, Human
cuagagccugcc

SEQ ID NO: 2905260 - RNA, 13 nt, Human
cuagagccugccu

SEQ ID NO: 2905261 - RNA, 16 nt, Human
cuagagaacagguggu

SEQ ID NO: 2905262 - RNA, 19 nt, Human
cuagagaauguuagaggau

SEQ ID NO: 2905263 - RNA, 15 nt, Human
cuagagaaugcacag

SEQ ID NO: 2905264 - RNA, 16 nt, Human
cuagagaaugcacaga

SEQ ID NO: 2905265 - RNA, 21 nt, Human
cuagagaaugcacagauauac

SEQ ID NO: 2905266 - RNA, 14 nt, Human
cuagagaagauaau

SEQ ID NO: 2905267 - RNA, 15 nt, Human
cuagagaagauaauu

SEQ ID NO: 2905268 - RNA, 16 nt, Human
cuagagaagauaauug

SEQ ID NO: 2905269 - RNA, 17 nt, Human
cuagagaagauaauugu

SEQ ID NO: 2905270 - RNA, 18 nt, Human
cuagagaagauaauuguu

SEQ ID NO: 2905271 - RNA, 20 nt, Human
cuagagaagauaauuguuga

SEQ ID NO: 2905272 - RNA, 21 nt, Human
cuagagaagauaauuguugaa

SEQ ID NO: 2905273 - RNA, 21 nt, Human
cuagagcagcccaaauuuuuc

SEQ ID NO: 2905274 - RNA, 22 nt, Human
cuagagcagcccaaauuuuucu

SEQ ID NO: 2905275 - RNA, 21 nt, Human
cuagagaugugcaauugauuu

SEQ ID NO: 2905276 - RNA, 12 nt, Human
cuagacuuucug

SEQ ID NO: 2905277 - RNA, 16 nt, Human
cuagacuuuaggcuuu

SEQ ID NO: 2905278 - RNA, 18 nt, Human
cuagacuuuaggcuuuca

SEQ ID NO: 2905279 - RNA, 21 nt, Human
cuagacuuuaggcuuucagcu

SEQ ID NO: 2905280 - RNA, 22 nt, Human
cuagacuuuaggcuuucagcuu

SEQ ID NO: 2905281 - RNA, 13 nt, Human
cuagacuuucugu

SEQ ID NO: 2905282 - RNA, 14 nt, Human
cuagacuuucuguu

SEQ ID NO: 2905283 - RNA, 15 nt, Human
cuagagaacgcagcc

SEQ ID NO: 2905284 - RNA, 16 nt, Human
cuagagaacgcagccc

SEQ ID NO: 2905285 - RNA, 17 nt, Human
cuagagaacgcagcccu

SEQ ID NO: 2905286 - RNA, 18 nt, Human
cuagagaacgcagcccua

SEQ ID NO: 2905287 - RNA, 15 nt, Human
cuagacucuagacaa

SEQ ID NO: 2905288 - RNA, 18 nt, Human
cuagacucccaagcugga

SEQ ID NO: 2905289 - RNA, 20 nt, Human
cuacuguccuacccacccuc

SEQ ID NO: 2905290 - RNA, 13 nt, Human
cuacuguacauaa

SEQ ID NO: 2905291 - RNA, 20 nt, Human
cuacuguacauaaacaauga

SEQ ID NO: 2905292 - RNA, 20 nt, Human
cuacugucucacugaaacau

SEQ ID NO: 2905293 - RNA, 17 nt, Human
cuacugucuuuggaaaa

SEQ ID NO: 2905294 - RNA, 21 nt, Human
cuacuuaccuaccacaugcca

SEQ ID NO: 2905295 - RNA, 13 nt, Human
cuacuuaagagaa

SEQ ID NO: 2905296 - RNA, 20 nt, Human
cuacuguucuaaagcucuga

SEQ ID NO: 2905297 - RNA, 22 nt, Human
cuacuguucuaaagcucugaca

SEQ ID NO: 2905298 - RNA, 12 nt, Human
cuacuguucuaa

SEQ ID NO: 2905299 - RNA, 14 nt, Human
cuacuguucuaaag

SEQ ID NO: 2905300 - RNA, 15 nt, Human
cuacuguucuaaagc

SEQ ID NO: 2905301 - RNA, 18 nt, Human
cuacuguucuaaagcucu

SEQ ID NO: 2905302 - RNA, 17 nt, Human
cuacuuagcaugucccu

SEQ ID NO: 2905303 - RNA, 12 nt, Human
cuacuuagcauc

SEQ ID NO: 2905304 - RNA, 19 nt, Human
cuacuuagcauccuaagaa

SEQ ID NO: 2905305 - RNA, 20 nt, Human
cuacuuagcauccuaagaaa

SEQ ID NO: 2905306 - RNA, 22 nt, Human
cuacuuagcauccuaagaaaua

SEQ ID NO: 2905307 - RNA, 23 nt, Human
cuacuuagcauccuaagaaauau

SEQ ID NO: 2905308 - RNA, 16 nt, Human
cuagaaacagaucuug

SEQ ID NO: 2905309 - RNA, 14 nt, Human
cuagaaacccaagc

SEQ ID NO: 2905310 - RNA, 17 nt, Human
cuagaaacccaagcucc

SEQ ID NO: 2905311 - RNA, 18 nt, Human
cuagaaacccaagcuccu

SEQ ID NO: 2905312 - RNA, 21 nt, Human
cuagaaacccaagcuccuccu

SEQ ID NO: 2905313 - RNA, 23 nt, Human
cuagaaacccaagcuccuccucg

SEQ ID NO: 2905314 - RNA, 21 nt, Human
cuagaaacgaguuggugucuu

SEQ ID NO: 2905315 - RNA, 22 nt, Human
cuagaaaacuugacuccauuuc

SEQ ID NO: 2905316 - RNA, 18 nt, Human
cuagaaaagcugaucaua

SEQ ID NO: 2905317 - RNA, 22 nt, Human
cuagaaaacaaugcaaaaccuu

SEQ ID NO: 2905318 - RNA, 16 nt, Human
cuagaaaacauuuuuu

SEQ ID NO: 2905319 - RNA, 23 nt, Human
cuagaaaacauuuuuuuuuuaaa

SEQ ID NO: 2905320 - RNA, 11 nt, Human
cuaccucagcc

SEQ ID NO: 2905321 - RNA, 13 nt, Human
cuaccucaggcag

SEQ ID NO: 2905322 - RNA, 15 nt, Human
cuaccucagccuaga

SEQ ID NO: 2905323 - RNA, 14 nt, Human
cuaccucagccuag

SEQ ID NO: 2905324 - RNA, 12 nt, Human
cuaccucagccu

SEQ ID NO: 2905325 - RNA, 20 nt, Human
cuaccucaggcaggaagggc

SEQ ID NO: 2905326 - RNA, 14 nt, Human
cuaccucaggcagg

SEQ ID NO: 2905327 - RNA, 17 nt, Human
cuaccucaggcagcuca

SEQ ID NO: 2905328 - RNA, 18 nt, Human
cuaccucaggcagcucaa

SEQ ID NO: 2905329 - RNA, 23 nt, Human
cuaccucaggcaggaagggcagg

SEQ ID NO: 2905330 - RNA, 13 nt, Human
cuaccgaguucaa

SEQ ID NO: 2905331 - RNA, 14 nt, Human
cuaccgaguucaag

SEQ ID NO: 2905332 - RNA, 23 nt, Human
cuaccgccccaaaguaaaagaaa

SEQ ID NO: 2905333 - RNA, 23 nt, Human
cuaccgagucucuucuccacugg

SEQ ID NO: 2905334 - RNA, 21 nt, Human
cuaccgagucucuucuccacu

SEQ ID NO: 2905335 - RNA, 22 nt, Human
cuaccgagucucuucuccacug

SEQ ID NO: 2905336 - RNA, 18 nt, Human
cuacccuuuuucuccagc

SEQ ID NO: 2905337 - RNA, 19 nt, Human
cuacccuuuuucuccagcu

SEQ ID NO: 2905338 - RNA, 17 nt, Human
cuaccgagucucuucuc

SEQ ID NO: 2905339 - RNA, 19 nt, Human
cuaccgagucucuucucca

SEQ ID NO: 2905340 - RNA, 11 nt, Human
cuacuccugac

SEQ ID NO: 2905341 - RNA, 12 nt, Human
cuacuccugacu

SEQ ID NO: 2905342 - RNA, 13 nt, Human
cuacuccugacuc

SEQ ID NO: 2905343 - RNA, 14 nt, Human
cuacucccugcaga

SEQ ID NO: 2905344 - RNA, 13 nt, Human
cuacucccugcag

SEQ ID NO: 2905345 - RNA, 11 nt, Human
cuaccucccuc

SEQ ID NO: 2905346 - RNA, 12 nt, Human
cuaccucccucc

SEQ ID NO: 2905347 - RNA, 13 nt, Human
cuaccucccuccc

SEQ ID NO: 2905348 - RNA, 23 nt, Human
cuaccucccuccccgucucauuc

SEQ ID NO: 2905349 - RNA, 18 nt, Human
cuacucccugcagaugcc

SEQ ID NO: 2905350 - RNA, 17 nt, Human
cuacucccugcagaugc

SEQ ID NO: 2905351 - RNA, 22 nt, Human
cuacucccugcagaugccaccc

SEQ ID NO: 2905352 - RNA, 16 nt, Human
cuacuccuaccucagc

SEQ ID NO: 2905353 - RNA, 15 nt, Human
cuacuccuaccucag

SEQ ID NO: 2905354 - RNA, 21 nt, Human
cuacuccuaccucagccuaga

SEQ ID NO: 2905355 - RNA, 18 nt, Human
cuacuccuaccucagccu

SEQ ID NO: 2905356 - RNA, 17 nt, Human
cuacuccuaccucagcc

SEQ ID NO: 2905357 - RNA, 12 nt, Human
cuacucuguguc

SEQ ID NO: 2905358 - RNA, 14 nt, Human
cuacugcagcuuua

SEQ ID NO: 2905359 - RNA, 16 nt, Human
cuacugauuuuuguga

SEQ ID NO: 2905360 - RNA, 23 nt, Human
cuacucucacacugguucucaau

SEQ ID NO: 2905361 - RNA, 21 nt, Human
cuacucucacacugguucuca

SEQ ID NO: 2905362 - RNA, 16 nt, Human
cuaccacucacaugac

SEQ ID NO: 2905363 - RNA, 20 nt, Human
cuacucgcuugcuagaagua

SEQ ID NO: 2905364 - RNA, 19 nt, Human
cuacuguccuacccacccu

SEQ ID NO: 2905365 - RNA, 17 nt, Human
cuacuggcauaguuuca

SEQ ID NO: 2905366 - RNA, 18 nt, Human
cuacuggcauaguuucau

SEQ ID NO: 2905367 - RNA, 14 nt, Human
cuacugggugucau

SEQ ID NO: 2905368 - RNA, 16 nt, Human
cuacugggugucauuu

SEQ ID NO: 2905369 - RNA, 18 nt, Human
cuacugggugucauuuca

SEQ ID NO: 2905370 - RNA, 19 nt, Human
cuacugggugucauuucau

SEQ ID NO: 2905371 - RNA, 23 nt, Human
cuacugggugucauuucauucca

SEQ ID NO: 2905372 - RNA, 17 nt, Human
cuacugcagcuuuacau

SEQ ID NO: 2905373 - RNA, 19 nt, Human
cuagcuuuauauauggaca

SEQ ID NO: 2905374 - RNA, 20 nt, Human
cuagcuuuauauauggacau

SEQ ID NO: 2905375 - RNA, 21 nt, Human
cuagcuuuauauauggacaug

SEQ ID NO: 2905376 - RNA, 22 nt, Human
cuagcuuuauauauggacaugg

SEQ ID NO: 2905377 - RNA, 23 nt, Human
cuagcuuuauauauggacauggc

SEQ ID NO: 2905378 - RNA, 14 nt, Human
cuagcuuuuaggaa

SEQ ID NO: 2905379 - RNA, 15 nt, Human
cuagcuuuuaggaaa

SEQ ID NO: 2905380 - RNA, 20 nt, Human
cuagcuugggaggcuucccc

SEQ ID NO: 2905381 - RNA, 14 nt, Human
cuagcugugcaaga

SEQ ID NO: 2905382 - RNA, 13 nt, Human
cuagcuggagccu

SEQ ID NO: 2905383 - RNA, 16 nt, Human
cuagcuaucaagaggc

SEQ ID NO: 2905384 - RNA, 15 nt, Human
cuagcuaugugaccu

SEQ ID NO: 2905385 - RNA, 20 nt, Human
cuagcugccuagcaagcugg

SEQ ID NO: 2905386 - RNA, 21 nt, Human
cuagcugccuagcaagcuggc

SEQ ID NO: 2905387 - RNA, 22 nt, Human
cuagcugccuagcaagcuggcc

SEQ ID NO: 2905388 - RNA, 14 nt, Human
cuagcugugggggu

SEQ ID NO: 2905389 - RNA, 21 nt, Human
cuagccuuagaagucacacag

SEQ ID NO: 2905390 - RNA, 14 nt, Human
cuagauaugaauau

SEQ ID NO: 2905391 - RNA, 22 nt, Human
cuagauaugaauauauggcauu

SEQ ID NO: 2905392 - RNA, 24 nt, Human
cuagauaugaauauauggcauuug

SEQ ID NO: 2905393 - RNA, 14 nt, Human
cuagauauuuuccu

SEQ ID NO: 2905394 - RNA, 12 nt, Human
cuagauaguuua

SEQ ID NO: 2905395 - RNA, 23 nt, Human
cuagccuuagaagucacacagua

SEQ ID NO: 2905396 - RNA, 22 nt, Human
cuagccuuagaagucacacagu

SEQ ID NO: 2905397 - RNA, 15 nt, Human
cuagccuuuggcucu

SEQ ID NO: 2905398 - RNA, 16 nt, Human
cuagccuuuggcucug

SEQ ID NO: 2905399 - RNA, 22 nt, Human
cuagccuuaaucagguccucag

SEQ ID NO: 2905400 - RNA, 22 nt, Human
cuagcuaauguaauaacuguga

SEQ ID NO: 2905401 - RNA, 16 nt, Human
cuagccuguuucuucc

SEQ ID NO: 2905402 - RNA, 21 nt, Human
cuagccuuuggcucuggagac

SEQ ID NO: 2905403 - RNA, 23 nt, Human
cuagccuuuggcucuggagacag

SEQ ID NO: 2905404 - RNA, 17 nt, Human
cuagccuuuggcucugg

SEQ ID NO: 2905405 - RNA, 18 nt, Human
cuagccuuuggcucugga

SEQ ID NO: 2905406 - RNA, 19 nt, Human
cuagccuuuggcucuggag

SEQ ID NO: 2905407 - RNA, 20 nt, Human
cuagccuuuggcucuggaga

SEQ ID NO: 2905408 - RNA, 22 nt, Human
cuagcggaguuccagcaaacaa

SEQ ID NO: 2905409 - RNA, 22 nt, Human
cuagcgcguugccugucgcuuu

SEQ ID NO: 2905410 - RNA, 11 nt, Human
cuaauaaauac

SEQ ID NO: 2905411 - RNA, 13 nt, Human
cuaauaaauacau

SEQ ID NO: 2905412 - RNA, 15 nt, Human
cuaauaaauacauac

SEQ ID NO: 2905413 - RNA, 12 nt, Human
cuaauaaauuau

SEQ ID NO: 2905414 - RNA, 17 nt, Human
cuaauaaauuauacaaa

SEQ ID NO: 2905415 - RNA, 19 nt, Human
cuaauaaugagcuauuaaa

SEQ ID NO: 2905416 - RNA, 20 nt, Human
cuaauaaugagcuauuaaaa

SEQ ID NO: 2905417 - RNA, 22 nt, Human
cuaauaaugagcuauuaaaacu

SEQ ID NO: 2905418 - RNA, 14 nt, Human
cuaauaauuucuaa

SEQ ID NO: 2905419 - RNA, 15 nt, Human
cuaauaauuucuaau

SEQ ID NO: 2905420 - RNA, 16 nt, Human
cuaauaauuucuaaug

SEQ ID NO: 2905421 - RNA, 17 nt, Human
cuaauaauuucuaaugu

SEQ ID NO: 2905422 - RNA, 18 nt, Human
cuaauaauuucuaauguu

SEQ ID NO: 2905423 - RNA, 13 nt, Human
cuaauaccucugu

SEQ ID NO: 2905424 - RNA, 15 nt, Human
cuaauaccucugugu

SEQ ID NO: 2905425 - RNA, 16 nt, Human
cuaauaccucugugug

SEQ ID NO: 2905426 - RNA, 17 nt, Human
cuaauaccucugugugc

SEQ ID NO: 2905427 - RNA, 23 nt, Human
cuaauagcggguuacuuucacau

SEQ ID NO: 2905428 - RNA, 13 nt, Human
cuaauauauauga

SEQ ID NO: 2905429 - RNA, 18 nt, Human
cuaauauauaugaauaaa

SEQ ID NO: 2905430 - RNA, 11 nt, Human
cuaauauauuu

SEQ ID NO: 2905431 - RNA, 15 nt, Human
cuaauauauaugaau

SEQ ID NO: 2905432 - RNA, 17 nt, Human
cuaauauauaugaauaa

SEQ ID NO: 2905433 - RNA, 15 nt, Human
cuaauauauuuuuau

SEQ ID NO: 2905434 - RNA, 12 nt, Human
cuaauauauuuu

SEQ ID NO: 2905435 - RNA, 21 nt, Human
cuaauauauuuuuauauuuag

SEQ ID NO: 2905436 - RNA, 15 nt, Human
cuaauaucaaaugca

SEQ ID NO: 2905437 - RNA, 23 nt, Human
cuaauaucaaaugcaguauauuu

SEQ ID NO: 2905438 - RNA, 14 nt, Human
cuaagauucuaaag

SEQ ID NO: 2905439 - RNA, 15 nt, Human
cuaagauucuaaagg

SEQ ID NO: 2905440 - RNA, 11 nt, Human
cuaagauucua

SEQ ID NO: 2905441 - RNA, 12 nt, Human
cuaagauucuaa

SEQ ID NO: 2905442 - RNA, 13 nt, Human
cuaagauucuaaa

SEQ ID NO: 2905443 - RNA, 12 nt, Human
cuaagcugcagc

SEQ ID NO: 2905444 - RNA, 13 nt, Human
cuaagcugcagcu

SEQ ID NO: 2905445 - RNA, 14 nt, Human
cuaagcugcagcuu

SEQ ID NO: 2905446 - RNA, 16 nt, Human
cuaagcugcagcuucc

SEQ ID NO: 2905447 - RNA, 17 nt, Human
cuaagcugcagcuuccu

SEQ ID NO: 2905448 - RNA, 19 nt, Human
cuaagcugcagcuuccugu

SEQ ID NO: 2905449 - RNA, 18 nt, Human
cuaagaugugauauucua

SEQ ID NO: 2905450 - RNA, 19 nt, Human
cuaagaugugauauucuaa

SEQ ID NO: 2905451 - RNA, 20 nt, Human
cuaagaugugauauucuaag

SEQ ID NO: 2905452 - RNA, 21 nt, Human
cuaagaugugauauucuaaga

SEQ ID NO: 2905453 - RNA, 22 nt, Human
cuaagaugugauauucuaagac

SEQ ID NO: 2905454 - RNA, 23 nt, Human
cuaagaugugauauucuaagacu

SEQ ID NO: 2905455 - RNA, 22 nt, Human
cuaaggaccugaaauuccaaag

SEQ ID NO: 2905456 - RNA, 19 nt, Human
cuaaggaccugaaauucca

SEQ ID NO: 2905457 - RNA, 20 nt, Human
cuaaggaccugaaauuccaa

SEQ ID NO: 2905458 - RNA, 15 nt, Human
cuaaggaaccuuccu

SEQ ID NO: 2905459 - RNA, 14 nt, Human
cuaaggaaccuucc

SEQ ID NO: 2905460 - RNA, 18 nt, Human
cuaaggcucuaugagucu

SEQ ID NO: 2905461 - RNA, 21 nt, Human
cuaaggcguggagcugccuga

SEQ ID NO: 2905462 - RNA, 22 nt, Human
cuaaggcguggagcugccugau

SEQ ID NO: 2905463 - RNA, 17 nt, Human
cuaaggcguggagcugc

SEQ ID NO: 2905464 - RNA, 18 nt, Human
cuaaggcguggagcugcc

SEQ ID NO: 2905465 - RNA, 19 nt, Human
cuaaggcguggagcugccu

SEQ ID NO: 2905466 - RNA, 20 nt, Human
cuaaggcguggagcugccug

SEQ ID NO: 2905467 - RNA, 13 nt, Human
cuaaggccuacuu

SEQ ID NO: 2905468 - RNA, 14 nt, Human
cuaaggccuaggau

SEQ ID NO: 2905469 - RNA, 19 nt, Human
cuaaggccuaggauucuaa

SEQ ID NO: 2905470 - RNA, 16 nt, Human
cuaaggcguggagcug

SEQ ID NO: 2905471 - RNA, 22 nt, Human
cuaaggccuaggauucuaaaau

SEQ ID NO: 2905472 - RNA, 20 nt, Human
cuaaggccuaggauucuaaa

SEQ ID NO: 2905473 - RNA, 21 nt, Human
cuaaggccuaggauucuaaaa

SEQ ID NO: 2905474 - RNA, 17 nt, Human
cuaagguucuaaggccu

SEQ ID NO: 2905475 - RNA, 15 nt, Human
cuaagguucuaaggc

SEQ ID NO: 2905476 - RNA, 16 nt, Human
cuaagguucuaaggcc

SEQ ID NO: 2905477 - RNA, 15 nt, Human
cuaaggcucugagag

SEQ ID NO: 2905478 - RNA, 19 nt, Human
cuaaggcucugagagucua

SEQ ID NO: 2905479 - RNA, 13 nt, Human
cuaagguucuaag

SEQ ID NO: 2905480 - RNA, 14 nt, Human
cuaagguucuaagg

SEQ ID NO: 2905481 - RNA, 19 nt, Human
cuaaggcucuaugagucua

SEQ ID NO: 2905482 - RNA, 20 nt, Human
cuaaggcucuaugagucuag

SEQ ID NO: 2905483 - RNA, 21 nt, Human
cuaaggcucuaugagucuaga

SEQ ID NO: 2905484 - RNA, 22 nt, Human
cuaaggcucuaugagucuagau

SEQ ID NO: 2905485 - RNA, 23 nt, Human
cuaaggcucuaugagucuagaug

SEQ ID NO: 2905486 - RNA, 11 nt, Human
cuaaggcucug

SEQ ID NO: 2905487 - RNA, 13 nt, Human
cuaaggcucugag

SEQ ID NO: 2905488 - RNA, 14 nt, Human
cuaaggcucugaga

SEQ ID NO: 2905489 - RNA, 14 nt, Human
cuacacuccagccu

SEQ ID NO: 2905490 - RNA, 13 nt, Human
cuaauucauuuau

SEQ ID NO: 2905491 - RNA, 14 nt, Human
cuaauuccacagcu

SEQ ID NO: 2905492 - RNA, 17 nt, Human
cuaauuccacaccuuuu

SEQ ID NO: 2905493 - RNA, 15 nt, Human
cuaauuccacaccuu

SEQ ID NO: 2905494 - RNA, 19 nt, Human
cuaauucagccauguacag

SEQ ID NO: 2905495 - RNA, 20 nt, Human
cuaauucagccauguacaga

SEQ ID NO: 2905496 - RNA, 16 nt, Human
cuaauuccacagcugc

SEQ ID NO: 2905497 - RNA, 15 nt, Human
cuaauuccacagcug

SEQ ID NO: 2905498 - RNA, 15 nt, Human
cuaauuccuuucuau

SEQ ID NO: 2905499 - RNA, 16 nt, Human
cuaauucgaugaaggc

SEQ ID NO: 2905500 - RNA, 17 nt, Human
cuaauucgaugaaggcu

SEQ ID NO: 2905501 - RNA, 22 nt, Human
cuacacacugucaugcuucauc

SEQ ID NO: 2905502 - RNA, 13 nt, Human
cuacacauuuuua

SEQ ID NO: 2905503 - RNA, 14 nt, Human
cuacacauuuuuaa

SEQ ID NO: 2905504 - RNA, 17 nt, Human
cuacacauuuuuaaauu

SEQ ID NO: 2905505 - RNA, 19 nt, Human
cuacacauuuuuaaauugu

SEQ ID NO: 2905506 - RNA, 12 nt, Human
cuacaccacaca

SEQ ID NO: 2905507 - RNA, 14 nt, Human
cuacaccacacaca

SEQ ID NO: 2905508 - RNA, 15 nt, Human
cuacaccacacacaa

SEQ ID NO: 2905509 - RNA, 16 nt, Human
cuacaccacacacaac

SEQ ID NO: 2905510 - RNA, 19 nt, Human
cuacaccacacacaacagc

SEQ ID NO: 2905511 - RNA, 21 nt, Human
cuacaccacacacaacagcca

SEQ ID NO: 2905512 - RNA, 14 nt, Human
cuacacagggaugu

SEQ ID NO: 2905513 - RNA, 21 nt, Human
cuacacagggauguacaaggc

SEQ ID NO: 2905514 - RNA, 19 nt, Human
cuacacagugggaacucug

SEQ ID NO: 2905515 - RNA, 20 nt, Human
cuacacagugggaacucuga

SEQ ID NO: 2905516 - RNA, 21 nt, Human
cuacacagugggaacucugac

SEQ ID NO: 2905517 - RNA, 22 nt, Human
cuacacagugggaacucugaca

SEQ ID NO: 2905518 - RNA, 23 nt, Human
cuacacagugggaacucugacaa

SEQ ID NO: 2905519 - RNA, 18 nt, Human
cuaauuaggguacauuua

SEQ ID NO: 2905520 - RNA, 19 nt, Human
cuaauuaggguacauuuau

SEQ ID NO: 2905521 - RNA, 20 nt, Human
cuaauuaggguacauuuaua

SEQ ID NO: 2905522 - RNA, 22 nt, Human
cuaauuauacccccugcaaagc

SEQ ID NO: 2905523 - RNA, 19 nt, Human
cuaauggguauuuaaacaa

SEQ ID NO: 2905524 - RNA, 14 nt, Human
cuaauguaaaauga

SEQ ID NO: 2905525 - RNA, 16 nt, Human
cuaauguaaaaugauu

SEQ ID NO: 2905526 - RNA, 20 nt, Human
cuaauuacgauaaggaagaa

SEQ ID NO: 2905527 - RNA, 22 nt, Human
cuaauuacgauaaggaagaaac

SEQ ID NO: 2905528 - RNA, 13 nt, Human
cuaaugggacacu

SEQ ID NO: 2905529 - RNA, 12 nt, Human
cuaaugggacac

SEQ ID NO: 2905530 - RNA, 23 nt, Human
cuaaugcugcagauuugggcugg

SEQ ID NO: 2905531 - RNA, 23 nt, Human
cuaaugcgcaggcuggcccugcc

SEQ ID NO: 2905532 - RNA, 22 nt, Human
cuaaugcgcaggcuggcccugc

SEQ ID NO: 2905533 - RNA, 18 nt, Human
cuaauauguaacaagcca

SEQ ID NO: 2905534 - RNA, 13 nt, Human
cuaauauggcaaa

SEQ ID NO: 2905535 - RNA, 17 nt, Human
cuaauauccccaaauua

SEQ ID NO: 2905536 - RNA, 22 nt, Human
cuaauauccccaaauuagggca

SEQ ID NO: 2905537 - RNA, 20 nt, Human
cuaaucagcauucucacucc

SEQ ID NO: 2905538 - RNA, 21 nt, Human
cuaaucagcauucucacuccu

SEQ ID NO: 2905539 - RNA, 20 nt, Human
cuaauauggccacaguaguc

SEQ ID NO: 2905540 - RNA, 15 nt, Human
cuaauccaacccaug

SEQ ID NO: 2905541 - RNA, 13 nt, Human
cuaauccaaccca

SEQ ID NO: 2905542 - RNA, 20 nt, Human
cuaaugcgcaggcuggcccu

SEQ ID NO: 2905543 - RNA, 19 nt, Human
cuaaugcgcaggcuggccc

SEQ ID NO: 2905544 - RNA, 16 nt, Human
cuaaugcgcaggcugg

SEQ ID NO: 2905545 - RNA, 15 nt, Human
cuaaugcgcaggcug

SEQ ID NO: 2905546 - RNA, 18 nt, Human
cgggacaccugcccugcc

SEQ ID NO: 2905547 - RNA, 21 nt, Human
cgggaggauguucugggacac

SEQ ID NO: 2905548 - RNA, 23 nt, Human
cgggaggauguucugggacacag

SEQ ID NO: 2905549 - RNA, 14 nt, Human
cguuuguaugugug

SEQ ID NO: 2905550 - RNA, 15 nt, Human
cguuuguaugugugu

SEQ ID NO: 2905551 - RNA, 17 nt, Human
cguuuggaagauccugu

SEQ ID NO: 2905552 - RNA, 19 nt, Human
cguuuggaagauccuguga

SEQ ID NO: 2905553 - RNA, 22 nt, Human
cguuuggaagauccugugagga

SEQ ID NO: 2905554 - RNA, 20 nt, Human
cgggaggcagagguuguagu

SEQ ID NO: 2905555 - RNA, 14 nt, Human
cgggaggcagaguu

SEQ ID NO: 2905556 - RNA, 16 nt, Human
cgggaggcagaguuug

SEQ ID NO: 2905557 - RNA, 20 nt, Human
cguuuguuccccaagacauu

SEQ ID NO: 2905558 - RNA, 17 nt, Human
cuaaaaacaaacccuuu

SEQ ID NO: 2905559 - RNA, 15 nt, Human
cuaaaaagauuagca

SEQ ID NO: 2905560 - RNA, 16 nt, Human
cuaaaaagauuagcaa

SEQ ID NO: 2905561 - RNA, 22 nt, Human
cuaaaaaacauaaauuucuuua

SEQ ID NO: 2905562 - RNA, 17 nt, Human
cuaaaaaacagaggcca

SEQ ID NO: 2905563 - RNA, 11 nt, Human
cuaaaaaacag

SEQ ID NO: 2905564 - RNA, 19 nt, Human
cuaaaagugggcuugauuc

SEQ ID NO: 2905565 - RNA, 23 nt, Human
cuaaaagugggcuugauucugca

SEQ ID NO: 2905566 - RNA, 12 nt, Human
cuaaaaguguca

SEQ ID NO: 2905567 - RNA, 13 nt, Human
cuaaaagugucac

SEQ ID NO: 2905568 - RNA, 11 nt, Human
cuaaaaauaaa

SEQ ID NO: 2905569 - RNA, 15 nt, Human
cuaaaaauaaaccaa

SEQ ID NO: 2905570 - RNA, 20 nt, Human
cuaaaagugggcuugauucu

SEQ ID NO: 2905571 - RNA, 22 nt, Human
cuaaaauaagggcagagucaca

SEQ ID NO: 2905572 - RNA, 14 nt, Human
cuaaaauacauuua

SEQ ID NO: 2905573 - RNA, 22 nt, Human
cuaaaauacauuuaaaacuuac

SEQ ID NO: 2905574 - RNA, 18 nt, Human
cuaaaaugugauguucua

SEQ ID NO: 2905575 - RNA, 19 nt, Human
cuaaaaugugauguucuaa

SEQ ID NO: 2905576 - RNA, 20 nt, Human
cuaaaaugugauguucuaag

SEQ ID NO: 2905577 - RNA, 21 nt, Human
cuaaaaugugauguucuaagg

SEQ ID NO: 2905578 - RNA, 22 nt, Human
cuaaaaugugauguucuaaggc

SEQ ID NO: 2905579 - RNA, 23 nt, Human
cuaaaaugugauguucuaaggcu

SEQ ID NO: 2905580 - RNA, 13 nt, Human
cuaaacugccccc

SEQ ID NO: 2905581 - RNA, 12 nt, Human
cuaaacugcccc

SEQ ID NO: 2905582 - RNA, 12 nt, Human
cuaaaaugcuuc

SEQ ID NO: 2905583 - RNA, 13 nt, Human
cuaaaaugcuuca

SEQ ID NO: 2905584 - RNA, 17 nt, Human
cuaaaaucuuauaguuc

SEQ ID NO: 2905585 - RNA, 19 nt, Human
cuaaaaucuuauaguucua

SEQ ID NO: 2905586 - RNA, 21 nt, Human
cuaaaaucuuauaguucuagg

SEQ ID NO: 2905587 - RNA, 22 nt, Human
cuaaaaucuuauaguucuaggc

SEQ ID NO: 2905588 - RNA, 14 nt, Human
cuaaaaucuuggaa

SEQ ID NO: 2905589 - RNA, 16 nt, Human
cuaaaaucuuggaagu

SEQ ID NO: 2905590 - RNA, 18 nt, Human
cuaaaauauauaauuuau

SEQ ID NO: 2905591 - RNA, 11 nt, Human
cuaaaauauau

SEQ ID NO: 2905592 - RNA, 14 nt, Human
cuaaaauauuuauu

SEQ ID NO: 2905593 - RNA, 23 nt, Human
cuaaaauauuuauuuuuuuuaag

SEQ ID NO: 2905594 - RNA, 15 nt, Human
cuaaaauauuuauuu

SEQ ID NO: 2905595 - RNA, 22 nt, Human
cuaaaugaaaaucgugacaaca

SEQ ID NO: 2905596 - RNA, 15 nt, Human
cuaaaucucuaauau

SEQ ID NO: 2905597 - RNA, 18 nt, Human
cuaaauaagaaaauaaca

SEQ ID NO: 2905598 - RNA, 17 nt, Human
cuaaauacuugcuccau

SEQ ID NO: 2905599 - RNA, 20 nt, Human
cuaaauaaucuuacucuaga

SEQ ID NO: 2905600 - RNA, 21 nt, Human
cuaaauaaucuuacucuagau

SEQ ID NO: 2905601 - RNA, 21 nt, Human
cuaaacugcccccucugcccu

SEQ ID NO: 2905602 - RNA, 18 nt, Human
cuaaauaaaaguuuuaca

SEQ ID NO: 2905603 - RNA, 20 nt, Human
cuaaauaaaaguuuuacaaa

SEQ ID NO: 2905604 - RNA, 22 nt, Human
cuaaauaaaaguuuuacaaagg

SEQ ID NO: 2905605 - RNA, 15 nt, Human
cuaagagaaugaauu

SEQ ID NO: 2905606 - RNA, 20 nt, Human
cuaagagccauuuaggggcc

SEQ ID NO: 2905607 - RNA, 11 nt, Human
cuaagagccau

SEQ ID NO: 2905608 - RNA, 16 nt, Human
cuaagagauucugauu

SEQ ID NO: 2905609 - RNA, 18 nt, Human
cuaagagauucugauuug

SEQ ID NO: 2905610 - RNA, 14 nt, Human
cuaaccccuuccag

SEQ ID NO: 2905611 - RNA, 13 nt, Human
cuaaccccuucca

SEQ ID NO: 2905612 - RNA, 19 nt, Human
cuaaccccuuccagaucac

SEQ ID NO: 2905613 - RNA, 24 nt, Human
cuaacagcauccccaaaacaaagu

SEQ ID NO: 2905614 - RNA, 21 nt, Human
cuaaccagggaagcugucccu

SEQ ID NO: 2905615 - RNA, 17 nt, Human
cuaaccccaacgcacag

SEQ ID NO: 2905616 - RNA, 18 nt, Human
cuaaccccaacgcacagg

SEQ ID NO: 2905617 - RNA, 19 nt, Human
cuaaccccaacgcacagga

SEQ ID NO: 2905618 - RNA, 22 nt, Human
cuaaccccaacgcacaggaaaa

SEQ ID NO: 2905619 - RNA, 22 nt, Human
cuaaccucaagugauccuccca

SEQ ID NO: 2905620 - RNA, 23 nt, Human
cuaacccuauacuguaguauucu

SEQ ID NO: 2905621 - RNA, 11 nt, Human
cuaagaggcug

SEQ ID NO: 2905622 - RNA, 12 nt, Human
cuaagaggcugc

SEQ ID NO: 2905623 - RNA, 16 nt, Human
cuaagauaguaacaau

SEQ ID NO: 2905624 - RNA, 14 nt, Human
cuaagaggcugcug

SEQ ID NO: 2905625 - RNA, 22 nt, Human
cuaagagugcugggcauuuuua

SEQ ID NO: 2905626 - RNA, 20 nt, Human
cuaagaucuuagauucucug

SEQ ID NO: 2905627 - RNA, 16 nt, Human
cuaagaucuuagauuc

SEQ ID NO: 2905628 - RNA, 17 nt, Human
cuaagaucuuagauucu

SEQ ID NO: 2905629 - RNA, 12 nt, Human
cuaagaucuuag

SEQ ID NO: 2905630 - RNA, 14 nt, Human
cuaagaucuuagau

SEQ ID NO: 2905631 - RNA, 13 nt, Human
cuaaaugaagugc

SEQ ID NO: 2905632 - RNA, 14 nt, Human
cuaaauuccacacu

SEQ ID NO: 2905633 - RNA, 15 nt, Human
cuaaauucuuuauuu

SEQ ID NO: 2905634 - RNA, 17 nt, Human
cuaaauucuuuauuucu

SEQ ID NO: 2905635 - RNA, 19 nt, Human
cuaaauucuuuauuucugu

SEQ ID NO: 2905636 - RNA, 21 nt, Human
cuaaauucuuuauuucuguca

SEQ ID NO: 2905637 - RNA, 20 nt, Human
cuaaauuuggggacagauuc

SEQ ID NO: 2905638 - RNA, 23 nt, Human
cuaaauuuggggacagauucagu

SEQ ID NO: 2905639 - RNA, 13 nt, Human
cuaaauuuucuga

SEQ ID NO: 2905640 - RNA, 15 nt, Human
cuaaauuuucugaaa

SEQ ID NO: 2905641 - RNA, 16 nt, Human
cuaaauuuucugaaac

SEQ ID NO: 2905642 - RNA, 16 nt, Human
cuaacaaaagaugaaa

SEQ ID NO: 2905643 - RNA, 17 nt, Human
cuaacaaaagaugaaag

SEQ ID NO: 2905644 - RNA, 19 nt, Human
cuaacaaaagaugaaagca

SEQ ID NO: 2905645 - RNA, 20 nt, Human
cuaacaaaagaugaaagcag

SEQ ID NO: 2905646 - RNA, 14 nt, Human
cuaacacuuacccc

SEQ ID NO: 2905647 - RNA, 16 nt, Human
cuaacacuuaccccau

SEQ ID NO: 2905648 - RNA, 23 nt, Human
cuaacacuuaccccauggcugca

SEQ ID NO: 2905649 - RNA, 14 nt, Human
cuaaccacgcugga

SEQ ID NO: 2905650 - RNA, 12 nt, Human
cuaaccacgcug

SEQ ID NO: 2905651 - RNA, 15 nt, Human
cuaacauuauuuauu

SEQ ID NO: 2905652 - RNA, 18 nt, Human
cuaacauuuuaaauaaaa

SEQ ID NO: 2905653 - RNA, 21 nt, Human
cuaacauuuuaaauaaaagaa

SEQ ID NO: 2905654 - RNA, 21 nt, Human
cuaacauuuuugauaaagccu

SEQ ID NO: 2905655 - RNA, 21 nt, Human
cuaaccaaaagacaccagcca

SEQ ID NO: 2905656 - RNA, 22 nt, Human
cuaaccaaaucucucaaaucug

SEQ ID NO: 2905657 - RNA, 19 nt, Human
cuaccaugaacagaaaaca

SEQ ID NO: 2905658 - RNA, 21 nt, Human
cuaccauugcuguucuacuuu

SEQ ID NO: 2905659 - RNA, 19 nt, Human
cuacccaaaacaagccugg

SEQ ID NO: 2905660 - RNA, 16 nt, Human
cuacccaaacccuagg

SEQ ID NO: 2905661 - RNA, 17 nt, Human
cuacccaaacccuaggu

SEQ ID NO: 2905662 - RNA, 13 nt, Human
cuaccauuucaga

SEQ ID NO: 2905663 - RNA, 12 nt, Human
cuaccauuucag

SEQ ID NO: 2905664 - RNA, 19 nt, Human
cuaccaagcuauccuggcu

SEQ ID NO: 2905665 - RNA, 18 nt, Human
cuaccaaggcauaucaug

SEQ ID NO: 2905666 - RNA, 15 nt, Human
cuaccaaagcaccuu

SEQ ID NO: 2905667 - RNA, 18 nt, Human
cuaccacaugccaagcac

SEQ ID NO: 2905668 - RNA, 19 nt, Human
cuaccaaugccaagauaau

SEQ ID NO: 2905669 - RNA, 22 nt, Human
cuacauuauaaaugucucuuua

SEQ ID NO: 2905670 - RNA, 12 nt, Human
cuaccaaaaugg

SEQ ID NO: 2905671 - RNA, 14 nt, Human
cuaccaaagcaccu

SEQ ID NO: 2905672 - RNA, 12 nt, Human
cuacauucauuu

SEQ ID NO: 2905673 - RNA, 14 nt, Human
cuacauuuuuucau

SEQ ID NO: 2905674 - RNA, 16 nt, Human
cuacauuuuuucauca

SEQ ID NO: 2905675 - RNA, 22 nt, Human
cuacauugaguagacacauuua

SEQ ID NO: 2905676 - RNA, 17 nt, Human
cuacauuauaaacgcuu

SEQ ID NO: 2905677 - RNA, 23 nt, Human
cuacauuauugcuuauugcuuag

SEQ ID NO: 2905678 - RNA, 17 nt, Human
cuacccagcgagcccug

SEQ ID NO: 2905679 - RNA, 15 nt, Human
cuacccagcgagccc

SEQ ID NO: 2905680 - RNA, 21 nt, Human
cuacccagagauugcuucuca

SEQ ID NO: 2905681 - RNA, 16 nt, Human
cuacccacaccucugc

SEQ ID NO: 2905682 - RNA, 18 nt, Human
cuacccacaccucugcca

SEQ ID NO: 2905683 - RNA, 19 nt, Human
cuacccacaccucugccag

SEQ ID NO: 2905684 - RNA, 20 nt, Human
cuacccacaccucugccaga

SEQ ID NO: 2905685 - RNA, 18 nt, Human
cuacccagcgagcccugg

SEQ ID NO: 2905686 - RNA, 17 nt, Human
cuacccuccugcacugu

SEQ ID NO: 2905687 - RNA, 19 nt, Human
cuacccuccugcacuguuu

SEQ ID NO: 2905688 - RNA, 16 nt, Human
cuacccuuuuucucca

SEQ ID NO: 2905689 - RNA, 14 nt, Human
cuacccuguguaua

SEQ ID NO: 2905690 - RNA, 13 nt, Human
cuacccuuaauua

SEQ ID NO: 2905691 - RNA, 19 nt, Human
cuacccuuaauuacuuaaa

SEQ ID NO: 2905692 - RNA, 12 nt, Human
cuacccucccac

SEQ ID NO: 2905693 - RNA, 17 nt, Human
cuacccccuaagagcca

SEQ ID NO: 2905694 - RNA, 14 nt, Human
cuacccucccccag

SEQ ID NO: 2905695 - RNA, 19 nt, Human
cuacccucccacccccuuc

SEQ ID NO: 2905696 - RNA, 16 nt, Human
cuacccucccaccccc

SEQ ID NO: 2905697 - RNA, 14 nt, Human
cuacccucccaccc

SEQ ID NO: 2905698 - RNA, 13 nt, Human
cuacccucccacc

SEQ ID NO: 2905699 - RNA, 17 nt, Human
cuacagaggccaugggc

SEQ ID NO: 2905700 - RNA, 20 nt, Human
cuacagaggccaugggccuc

SEQ ID NO: 2905701 - RNA, 18 nt, Human
cuacagaggccaugggcc

SEQ ID NO: 2905702 - RNA, 22 nt, Human
cuacagaggccaugggccuccu

SEQ ID NO: 2905703 - RNA, 15 nt, Human
cuacacugacacugg

SEQ ID NO: 2905704 - RNA, 16 nt, Human
cuacacugacacuggu

SEQ ID NO: 2905705 - RNA, 13 nt, Human
cuacacugaggag

SEQ ID NO: 2905706 - RNA, 14 nt, Human
cuacacugcaauca

SEQ ID NO: 2905707 - RNA, 21 nt, Human
cuacacugcaaucauauguga

SEQ ID NO: 2905708 - RNA, 14 nt, Human
cuacacugggugcu

SEQ ID NO: 2905709 - RNA, 19 nt, Human
cuacagcuuugaucccuga

SEQ ID NO: 2905710 - RNA, 11 nt, Human
cuacagcuuuc

SEQ ID NO: 2905711 - RNA, 17 nt, Human
cuacagcuuucuugcuc

SEQ ID NO: 2905712 - RNA, 19 nt, Human
cuacagcuuucuugcuccc

SEQ ID NO: 2905713 - RNA, 20 nt, Human
cuacagcuuucuugcucccu

SEQ ID NO: 2905714 - RNA, 23 nt, Human
cuacagcuuucuugcucccuuca

SEQ ID NO: 2905715 - RNA, 21 nt, Human
cuacagcuaaucagcauucuc

SEQ ID NO: 2905716 - RNA, 22 nt, Human
cuacagcuaaucagcauucuca

SEQ ID NO: 2905717 - RNA, 11 nt, Human
cuacagcucuu

SEQ ID NO: 2905718 - RNA, 19 nt, Human
cuacagcucuuaaauguag

SEQ ID NO: 2905719 - RNA, 13 nt, Human
cuacagcuaugaa

SEQ ID NO: 2905720 - RNA, 14 nt, Human
cuacagcuaugaag

SEQ ID NO: 2905721 - RNA, 16 nt, Human
cuacagcuaugaagaa

SEQ ID NO: 2905722 - RNA, 17 nt, Human
cuacagcuaugaagaaa

SEQ ID NO: 2905723 - RNA, 23 nt, Human
cuacagaugauagaggauuuuau

SEQ ID NO: 2905724 - RNA, 22 nt, Human
cuacagauagagaguuguugug

SEQ ID NO: 2905725 - RNA, 15 nt, Human
cuacagcacuacugg

SEQ ID NO: 2905726 - RNA, 19 nt, Human
cuacagcacuacugggugu

SEQ ID NO: 2905727 - RNA, 20 nt, Human
cuacagcacuacuggguguc

SEQ ID NO: 2905728 - RNA, 21 nt, Human
cuacagcacuacuggguguca

SEQ ID NO: 2905729 - RNA, 22 nt, Human
cuacagcacuacugggugucau

SEQ ID NO: 2905730 - RNA, 23 nt, Human
cuacagcacuacugggugucauu

SEQ ID NO: 2905731 - RNA, 18 nt, Human
cuacagcuaaucagcauu

SEQ ID NO: 2905732 - RNA, 19 nt, Human
cuacagcuaaucagcauuc

SEQ ID NO: 2905733 - RNA, 16 nt, Human
cuacaggagugagcac

SEQ ID NO: 2905734 - RNA, 15 nt, Human
cuacaggagugagca

SEQ ID NO: 2905735 - RNA, 14 nt, Human
cuacaggagugagc

SEQ ID NO: 2905736 - RNA, 22 nt, Human
cuacaggaagcaccccaugcca

SEQ ID NO: 2905737 - RNA, 20 nt, Human
cuacaggaagcaccccaugc

SEQ ID NO: 2905738 - RNA, 18 nt, Human
cuacaggaagcaccccau

SEQ ID NO: 2905739 - RNA, 17 nt, Human
cuacaggcacccaccau

SEQ ID NO: 2905740 - RNA, 15 nt, Human
cuacaggcacccacc

SEQ ID NO: 2905741 - RNA, 17 nt, Human
cuacaggcagucucucu

SEQ ID NO: 2905742 - RNA, 18 nt, Human
cuacaggcagucucucuc

SEQ ID NO: 2905743 - RNA, 20 nt, Human
cuacaggcagucucucucuu

SEQ ID NO: 2905744 - RNA, 14 nt, Human
cuacaggugugagu

SEQ ID NO: 2905745 - RNA, 16 nt, Human
cuacaggugugaguca

SEQ ID NO: 2905746 - RNA, 16 nt, Human
ccuuccuucccgccag

SEQ ID NO: 2905747 - RNA, 17 nt, Human
ccuucgugaacaucccc

SEQ ID NO: 2905748 - RNA, 22 nt, Human
ccuucgugaacauccccuccca

SEQ ID NO: 2905749 - RNA, 19 nt, Human
ccuucgguggaagagcuca

SEQ ID NO: 2905750 - RNA, 20 nt, Human
ccuucgguggaagagcucaa

SEQ ID NO: 2905751 - RNA, 14 nt, Human
ccuucguaucccga

SEQ ID NO: 2905752 - RNA, 22 nt, Human
ccuucguaucccgagucuggga

SEQ ID NO: 2905753 - RNA, 19 nt, Human
ccuuccuggggcaucuggc

SEQ ID NO: 2905754 - RNA, 19 nt, Human
ccuuccaucccuacccccu

SEQ ID NO: 2905755 - RNA, 12 nt, Human
ccuuccaucccu

SEQ ID NO: 2905756 - RNA, 18 nt, Human
ccuuccaugucgccucug

SEQ ID NO: 2905757 - RNA, 12 nt, Human
ccuuccagcucc

SEQ ID NO: 2905758 - RNA, 13 nt, Human
ccuuccagcuccu

SEQ ID NO: 2905759 - RNA, 15 nt, Human
ccuuccagcuccugu

SEQ ID NO: 2905760 - RNA, 16 nt, Human
ccuuccagcuccugua

SEQ ID NO: 2905761 - RNA, 13 nt, Human
ccuuccaggcccc

SEQ ID NO: 2905762 - RNA, 17 nt, Human
ccuuccagcuccuguaa

SEQ ID NO: 2905763 - RNA, 12 nt, Human
ccuuccagcugc

SEQ ID NO: 2905764 - RNA, 13 nt, Human
ccuuccagcugcu

SEQ ID NO: 2905765 - RNA, 14 nt, Human
ccuuccagcugcug

SEQ ID NO: 2905766 - RNA, 15 nt, Human
ccuuccagcugcugu

SEQ ID NO: 2905767 - RNA, 16 nt, Human
ccuuccagcugcuguc

SEQ ID NO: 2905768 - RNA, 16 nt, Human
ccuuccaggaccccug

SEQ ID NO: 2905769 - RNA, 14 nt, Human
ccuuccauacauuu

SEQ ID NO: 2905770 - RNA, 21 nt, Human
ccuucuccuccccacccgccc

SEQ ID NO: 2905771 - RNA, 16 nt, Human
ccuucucccucauuuc

SEQ ID NO: 2905772 - RNA, 13 nt, Human
ccuucgugccccc

SEQ ID NO: 2905773 - RNA, 19 nt, Human
ccuucguuuacuaugccug

SEQ ID NO: 2905774 - RNA, 17 nt, Human
ccuucguuuacuaugcc

SEQ ID NO: 2905775 - RNA, 23 nt, Human
ccuucguuuacuaugccuguguc

SEQ ID NO: 2905776 - RNA, 22 nt, Human
ccuucguuuacuaugccugugu

SEQ ID NO: 2905777 - RNA, 20 nt, Human
ccuucguuuacuaugccugu

SEQ ID NO: 2905778 - RNA, 18 nt, Human
ccuucuccaccccagccc

SEQ ID NO: 2905779 - RNA, 14 nt, Human
ccuucucacagcac

SEQ ID NO: 2905780 - RNA, 20 nt, Human
ccuguggaugagcccucaga

SEQ ID NO: 2905781 - RNA, 21 nt, Human
ccuguggaugaucaauccuuu

SEQ ID NO: 2905782 - RNA, 13 nt, Human
ccuguggcugugg

SEQ ID NO: 2905783 - RNA, 16 nt, Human
ccuguggcuguggaga

SEQ ID NO: 2905784 - RNA, 19 nt, Human
ccugugggaccccaggccc

SEQ ID NO: 2905785 - RNA, 12 nt, Human
ccuguggcugcg

SEQ ID NO: 2905786 - RNA, 18 nt, Human
ccuguggcugcgcuuccu

SEQ ID NO: 2905787 - RNA, 13 nt, Human
ccuguccucacug

SEQ ID NO: 2905788 - RNA, 21 nt, Human
ccuguccuaaggaaccuuccu

SEQ ID NO: 2905789 - RNA, 14 nt, Human
ccuguccucacugc

SEQ ID NO: 2905790 - RNA, 15 nt, Human
ccuguccucacugcu

SEQ ID NO: 2905791 - RNA, 12 nt, Human
ccuguccucacu

SEQ ID NO: 2905792 - RNA, 18 nt, Human
ccuguccuaaggaaccuu

SEQ ID NO: 2905793 - RNA, 17 nt, Human
ccuguccuaaggaaccu

SEQ ID NO: 2905794 - RNA, 20 nt, Human
ccugucccucccaccucugu

SEQ ID NO: 2905795 - RNA, 21 nt, Human
ccugucccucccaccucugug

SEQ ID NO: 2905796 - RNA, 16 nt, Human
ccugucccucccaccu

SEQ ID NO: 2905797 - RNA, 17 nt, Human
ccugucccucccaccuc

SEQ ID NO: 2905798 - RNA, 18 nt, Human
ccugucccucccaccucu

SEQ ID NO: 2905799 - RNA, 19 nt, Human
ccugucccucccaccucug

SEQ ID NO: 2905800 - RNA, 15 nt, Human
ccuguggagcucagc

SEQ ID NO: 2905801 - RNA, 16 nt, Human
ccuguggagcucagcc

SEQ ID NO: 2905802 - RNA, 17 nt, Human
ccuguggagcucagccc

SEQ ID NO: 2905803 - RNA, 18 nt, Human
ccuguggagcucagcccc

SEQ ID NO: 2905804 - RNA, 19 nt, Human
ccuguggagcucagccccg

SEQ ID NO: 2905805 - RNA, 14 nt, Human
ccuguggagacugg

SEQ ID NO: 2905806 - RNA, 11 nt, Human
ccuguggagac

SEQ ID NO: 2905807 - RNA, 15 nt, Human
ccugugccugacccu

SEQ ID NO: 2905808 - RNA, 16 nt, Human
ccuguccucacugcuc

SEQ ID NO: 2905809 - RNA, 13 nt, Human
ccuuccagaucac

SEQ ID NO: 2905810 - RNA, 20 nt, Human
ccuuccagaucacugccaca

SEQ ID NO: 2905811 - RNA, 20 nt, Human
ccuucauugauuuccugugu

SEQ ID NO: 2905812 - RNA, 21 nt, Human
ccuucauugauuuccuguguc

SEQ ID NO: 2905813 - RNA, 22 nt, Human
ccuucauugauuuccuguguca

SEQ ID NO: 2905814 - RNA, 21 nt, Human
ccuucauuaccuuuuuugaua

SEQ ID NO: 2905815 - RNA, 19 nt, Human
ccuucauucugagaccaaa

SEQ ID NO: 2905816 - RNA, 21 nt, Human
ccuguggggucaacccuucug

SEQ ID NO: 2905817 - RNA, 23 nt, Human
ccuguggggucaacccuucugga

SEQ ID NO: 2905818 - RNA, 17 nt, Human
ccuguggguguagccag

SEQ ID NO: 2905819 - RNA, 18 nt, Human
ccuguggguguagccagg

SEQ ID NO: 2905820 - RNA, 23 nt, Human
ccuguggguguagccagguaugg

SEQ ID NO: 2905821 - RNA, 16 nt, Human
ccuucauggccccagc

SEQ ID NO: 2905822 - RNA, 13 nt, Human
ccuucaucuuuua

SEQ ID NO: 2905823 - RNA, 16 nt, Human
ccuuggagagacacag

SEQ ID NO: 2905824 - RNA, 17 nt, Human
ccuuggagagacacagc

SEQ ID NO: 2905825 - RNA, 19 nt, Human
ccuuggagagacacagcgu

SEQ ID NO: 2905826 - RNA, 16 nt, Human
ccuuggagcuuacaua

SEQ ID NO: 2905827 - RNA, 18 nt, Human
ccuugaggaaacaacagc

SEQ ID NO: 2905828 - RNA, 22 nt, Human
ccuuggcucaaguccucuuuuc

SEQ ID NO: 2905829 - RNA, 19 nt, Human
ccuuggccugucucauccc

SEQ ID NO: 2905830 - RNA, 15 nt, Human
ccuuggccugucuca

SEQ ID NO: 2905831 - RNA, 13 nt, Human
ccuuggccucaga

SEQ ID NO: 2905832 - RNA, 11 nt, Human
ccuuggccuca

SEQ ID NO: 2905833 - RNA, 14 nt, Human
ccuuggccucagaa

SEQ ID NO: 2905834 - RNA, 16 nt, Human
ccuuggccggcugugc

SEQ ID NO: 2905835 - RNA, 19 nt, Human
ccuuggccggcugugcuca

SEQ ID NO: 2905836 - RNA, 20 nt, Human
ccuuggccggcugugcucag

SEQ ID NO: 2905837 - RNA, 21 nt, Human
ccuuggccggcugugcucaga

SEQ ID NO: 2905838 - RNA, 23 nt, Human
ccuuggccggcugugcucagaga

SEQ ID NO: 2905839 - RNA, 15 nt, Human
ccuuggccuagccca

SEQ ID NO: 2905840 - RNA, 20 nt, Human
ccuuggccuagcccacccug

SEQ ID NO: 2905841 - RNA, 22 nt, Human
ccuuggccuagcccacccugcu

SEQ ID NO: 2905842 - RNA, 23 nt, Human
ccuuggccuagcccacccugcug

SEQ ID NO: 2905843 - RNA, 21 nt, Human
ccuugacagggcacaccgggc

SEQ ID NO: 2905844 - RNA, 18 nt, Human
ccuugacagggcacaccg

SEQ ID NO: 2905845 - RNA, 21 nt, Human
ccuugagagaccaggcaaagc

SEQ ID NO: 2905846 - RNA, 18 nt, Human
ccuugagagaccaggcaa

SEQ ID NO: 2905847 - RNA, 20 nt, Human
ccuugagagaccaggcaaag

SEQ ID NO: 2905848 - RNA, 21 nt, Human
ccuugagaguaucaggucucc

SEQ ID NO: 2905849 - RNA, 11 nt, Human
ccuugagcccu

SEQ ID NO: 2905850 - RNA, 18 nt, Human
ccuugagcccuccccagg

SEQ ID NO: 2905851 - RNA, 20 nt, Human
ccuugagcccuccccaggaa

SEQ ID NO: 2905852 - RNA, 16 nt, Human
ccuugagagaccaggc

SEQ ID NO: 2905853 - RNA, 14 nt, Human
ccuugacaucaguu

SEQ ID NO: 2905854 - RNA, 15 nt, Human
ccuugacaucaguuc

SEQ ID NO: 2905855 - RNA, 23 nt, Human
ccuugacauuguagagcuucugg

SEQ ID NO: 2905856 - RNA, 17 nt, Human
ccuugguucccuugugu

SEQ ID NO: 2905857 - RNA, 18 nt, Human
ccuugggcugcuccucau

SEQ ID NO: 2905858 - RNA, 19 nt, Human
ccuuggggaggacaaaacu

SEQ ID NO: 2905859 - RNA, 20 nt, Human
ccuuggggaggacaaaacuu

SEQ ID NO: 2905860 - RNA, 22 nt, Human
ccuuggggaggacaaaacuucu

SEQ ID NO: 2905861 - RNA, 17 nt, Human
ccuugguggcaagagcc

SEQ ID NO: 2905862 - RNA, 17 nt, Human
ccuugggcugcuccuca

SEQ ID NO: 2905863 - RNA, 15 nt, Human
ccuugggcugcuccu

SEQ ID NO: 2905864 - RNA, 14 nt, Human
ccuugggcugcucc

SEQ ID NO: 2905865 - RNA, 18 nt, Human
ccuuggcuugcccacgug

SEQ ID NO: 2905866 - RNA, 16 nt, Human
ccuuggcugcagggag

SEQ ID NO: 2905867 - RNA, 14 nt, Human
ccuuggcugcaggg

SEQ ID NO: 2905868 - RNA, 23 nt, Human
ccuuggccugucucauccccagg

SEQ ID NO: 2905869 - RNA, 22 nt, Human
ccuuggccugucucauccccag

SEQ ID NO: 2905870 - RNA, 17 nt, Human
ccuuggcuucugugaug

SEQ ID NO: 2905871 - RNA, 13 nt, Human
ccuuggcuugccc

SEQ ID NO: 2905872 - RNA, 16 nt, Human
ccuuggcuugcccacg

SEQ ID NO: 2905873 - RNA, 15 nt, Human
ccuuggcuugcccac

SEQ ID NO: 2905874 - RNA, 12 nt, Human
ccuuggcuggug

SEQ ID NO: 2905875 - RNA, 13 nt, Human
ccuuggcuggugc

SEQ ID NO: 2905876 - RNA, 14 nt, Human
ccuuggcuggugca

SEQ ID NO: 2905877 - RNA, 21 nt, Human
ccuuggcugugaggccccugg

SEQ ID NO: 2905878 - RNA, 21 nt, Human
ccuuggcuguuggcagugagu

SEQ ID NO: 2905879 - RNA, 17 nt, Human
ccuuggcuuaccugacc

SEQ ID NO: 2905880 - RNA, 18 nt, Human
ccuuggcuuaccugaccu

SEQ ID NO: 2905881 - RNA, 19 nt, Human
ccuugucuccuacuccuga

SEQ ID NO: 2905882 - RNA, 20 nt, Human
ccuugucuccuacuccugac

SEQ ID NO: 2905883 - RNA, 17 nt, Human
ccuugucugaacuggag

SEQ ID NO: 2905884 - RNA, 17 nt, Human
ccuugugaccuucucua

SEQ ID NO: 2905885 - RNA, 22 nt, Human
ccuuguggccugggccuccuca

SEQ ID NO: 2905886 - RNA, 16 nt, Human
ccuuguggccugggcc

SEQ ID NO: 2905887 - RNA, 12 nt, Human
ccuuguggcaga

SEQ ID NO: 2905888 - RNA, 13 nt, Human
ccuuguggcagag

SEQ ID NO: 2905889 - RNA, 16 nt, Human
ccuuguggcagaggau

SEQ ID NO: 2905890 - RNA, 15 nt, Human
ccuuugguucuggcc

SEQ ID NO: 2905891 - RNA, 20 nt, Human
ccuuugguucuggccagaau

SEQ ID NO: 2905892 - RNA, 21 nt, Human
ccuuuguaaauugucagaugc

SEQ ID NO: 2905893 - RNA, 14 nt, Human
ccuuugguucuggc

SEQ ID NO: 2905894 - RNA, 14 nt, Human
ccuuugggagcagg

SEQ ID NO: 2905895 - RNA, 14 nt, Human
ccuuugggcccugc

SEQ ID NO: 2905896 - RNA, 15 nt, Human
ccuuugggcccugca

SEQ ID NO: 2905897 - RNA, 16 nt, Human
ccuuugggcccugcau

SEQ ID NO: 2905898 - RNA, 17 nt, Human
ccuuugggcccugcaug

SEQ ID NO: 2905899 - RNA, 18 nt, Human
ccuuugggcccugcaugu

SEQ ID NO: 2905900 - RNA, 23 nt, Human
ccuuugggccucugcuucucuca

SEQ ID NO: 2905901 - RNA, 18 nt, Human
ccuuugucaucuuucuuc

SEQ ID NO: 2905902 - RNA, 17 nt, Human
ccuuugguccugucccc

SEQ ID NO: 2905903 - RNA, 23 nt, Human
ccuuugucaucuuucuucuauuu

SEQ ID NO: 2905904 - RNA, 12 nt, Human
ccuuugucuuuc

SEQ ID NO: 2905905 - RNA, 15 nt, Human
ccuuugucuuucaaa

SEQ ID NO: 2905906 - RNA, 13 nt, Human
ccuuuuaacauuu

SEQ ID NO: 2905907 - RNA, 14 nt, Human
ccuuuuaacauuuu

SEQ ID NO: 2905908 - RNA, 15 nt, Human
ccuuuuaacauuuug

SEQ ID NO: 2905909 - RNA, 20 nt, Human
ccuuuuaacauuuuguucuu

SEQ ID NO: 2905910 - RNA, 12 nt, Human
ccuuuuuucaaa

SEQ ID NO: 2905911 - RNA, 13 nt, Human
ccuuuguuucuug

SEQ ID NO: 2905912 - RNA, 14 nt, Human
ccuuuguuucuugu

SEQ ID NO: 2905913 - RNA, 23 nt, Human
ccuuuguuuugauguuuguggcc

SEQ ID NO: 2905914 - RNA, 16 nt, Human
ccuuuuaaaguguuuc

SEQ ID NO: 2905915 - RNA, 19 nt, Human
ccuuuuaaaguguuucagc

SEQ ID NO: 2905916 - RNA, 13 nt, Human
ccuuuguguuucu

SEQ ID NO: 2905917 - RNA, 19 nt, Human
ccuuuguguguacucacug

SEQ ID NO: 2905918 - RNA, 20 nt, Human
ccuuuguguguacucacuga

SEQ ID NO: 2905919 - RNA, 22 nt, Human
ccuuugugguuuuauggagacc

SEQ ID NO: 2905920 - RNA, 16 nt, Human
cgaauagcugggacua

SEQ ID NO: 2905921 - RNA, 15 nt, Human
cgaauagcugggacu

SEQ ID NO: 2905922 - RNA, 14 nt, Human
cgaagggcccccac

SEQ ID NO: 2905923 - RNA, 16 nt, Human
cgaaggugcuggaggu

SEQ ID NO: 2905924 - RNA, 15 nt, Human
cgaaguagcuugcuc

SEQ ID NO: 2905925 - RNA, 21 nt, Human
cgaaguagcuugcucccugug

SEQ ID NO: 2905926 - RNA, 18 nt, Human
cgaagucaagcucaacag

SEQ ID NO: 2905927 - RNA, 13 nt, Human
cgaaggugcugga

SEQ ID NO: 2905928 - RNA, 13 nt, Human
cgaaggggcccug

SEQ ID NO: 2905929 - RNA, 23 nt, Human
cgaagcgcgccacucgcuucccc

SEQ ID NO: 2905930 - RNA, 18 nt, Human
cgaaucagcuauuuacug

SEQ ID NO: 2905931 - RNA, 15 nt, Human
cgaaguccuauggaa

SEQ ID NO: 2905932 - RNA, 16 nt, Human
cgaaguccuauggaaa

SEQ ID NO: 2905933 - RNA, 17 nt, Human
cgaaguccuauggaaac

SEQ ID NO: 2905934 - RNA, 20 nt, Human
cgaaguccuauggaaacccg

SEQ ID NO: 2905935 - RNA, 19 nt, Human
cgaaguggacuggccccug

SEQ ID NO: 2905936 - RNA, 17 nt, Human
cgaaucuacuaauucca

SEQ ID NO: 2905937 - RNA, 18 nt, Human
cgaauccccucccuguca

SEQ ID NO: 2905938 - RNA, 16 nt, Human
cgaauccaagcucccu

SEQ ID NO: 2905939 - RNA, 18 nt, Human
cgaauccaagcucccugc

SEQ ID NO: 2905940 - RNA, 22 nt, Human
cgaauccaagcucccugcccca

SEQ ID NO: 2905941 - RNA, 20 nt, Human
cgagaccccggcuuccuuuc

SEQ ID NO: 2905942 - RNA, 17 nt, Human
cgagacccaagggcaga

SEQ ID NO: 2905943 - RNA, 16 nt, Human
cgaauuaauagcuuuu

SEQ ID NO: 2905944 - RNA, 14 nt, Human
cgaauuaauagcuu

SEQ ID NO: 2905945 - RNA, 19 nt, Human
cgaauccccucccugucaa

SEQ ID NO: 2905946 - RNA, 15 nt, Human
cgaaugaaaagacaa

SEQ ID NO: 2905947 - RNA, 12 nt, Human
cgaauggacuuu

SEQ ID NO: 2905948 - RNA, 20 nt, Human
cgaauggacuuuggaagcag

SEQ ID NO: 2905949 - RNA, 16 nt, Human
cgaagcgcgccacucg

SEQ ID NO: 2905950 - RNA, 11 nt, Human
cgaagcgcgcc

SEQ ID NO: 2905951 - RNA, 19 nt, Human
cgaacauccaaccuuccca

SEQ ID NO: 2905952 - RNA, 22 nt, Human
cgaacacccucgaagcgcgcca

SEQ ID NO: 2905953 - RNA, 21 nt, Human
cgaacacccucgaagcgcgcc

SEQ ID NO: 2905954 - RNA, 18 nt, Human
cgaacacccucgaagcgc

SEQ ID NO: 2905955 - RNA, 11 nt, Human
cgaacaaaaca

SEQ ID NO: 2905956 - RNA, 23 nt, Human
cgaaagggacuuggaagcuccgc

SEQ ID NO: 2905957 - RNA, 23 nt, Human
ccuuuuuugauaaaguuucucag

SEQ ID NO: 2905958 - RNA, 14 nt, Human
ccuuuuuuguaguu

SEQ ID NO: 2905959 - RNA, 17 nt, Human
ccuuuuuugucccccaa

SEQ ID NO: 2905960 - RNA, 23 nt, Human
ccuuuuuugucccccaacuugag

SEQ ID NO: 2905961 - RNA, 22 nt, Human
ccuuuuuuguuuuuucaaaaua

SEQ ID NO: 2905962 - RNA, 23 nt, Human
ccuuuuuuguuuuuucaaaauag

SEQ ID NO: 2905963 - RNA, 11 nt, Human
cgaaauaacaa

SEQ ID NO: 2905964 - RNA, 16 nt, Human
cgaaauaacaauguua

SEQ ID NO: 2905965 - RNA, 17 nt, Human
cgaaauaacaauguuaa

SEQ ID NO: 2905966 - RNA, 20 nt, Human
cgaaauaacaauguuaagga

SEQ ID NO: 2905967 - RNA, 17 nt, Human
cgcguugccugucgcuu

SEQ ID NO: 2905968 - RNA, 15 nt, Human
cgcguuuagaccaag

SEQ ID NO: 2905969 - RNA, 15 nt, Human
cgcggggacauuggg

SEQ ID NO: 2905970 - RNA, 13 nt, Human
cgccuuuuguaua

SEQ ID NO: 2905971 - RNA, 14 nt, Human
cgccuuuuguauac

SEQ ID NO: 2905972 - RNA, 15 nt, Human
cgccuuuuguauaca

SEQ ID NO: 2905973 - RNA, 16 nt, Human
cgccuuuuguauacau

SEQ ID NO: 2905974 - RNA, 19 nt, Human
cgcgaaaccaauuccucau

SEQ ID NO: 2905975 - RNA, 19 nt, Human
cgccuugucuccuacuccu

SEQ ID NO: 2905976 - RNA, 21 nt, Human
cgccuugucuccuacuccuga

SEQ ID NO: 2905977 - RNA, 22 nt, Human
cgccuuccgccccuucccuucc

SEQ ID NO: 2905978 - RNA, 13 nt, Human
cgccuuccuugac

SEQ ID NO: 2905979 - RNA, 19 nt, Human
cgccuuccuugaccuuccu

SEQ ID NO: 2905980 - RNA, 12 nt, Human
cgcccagucugg

SEQ ID NO: 2905981 - RNA, 13 nt, Human
cgccccuuccccc

SEQ ID NO: 2905982 - RNA, 13 nt, Human
cgcccaacuccac

SEQ ID NO: 2905983 - RNA, 15 nt, Human
cgcccgagcuguuua

SEQ ID NO: 2905984 - RNA, 21 nt, Human
cgcccagucuggaaugcagug

SEQ ID NO: 2905985 - RNA, 14 nt, Human
cgcccgccccugca

SEQ ID NO: 2905986 - RNA, 15 nt, Human
cgcccgccccugcag

SEQ ID NO: 2905987 - RNA, 16 nt, Human
cgcccgccccugcagc

SEQ ID NO: 2905988 - RNA, 17 nt, Human
cgcccgccccugcagca

SEQ ID NO: 2905989 - RNA, 18 nt, Human
cgcccgccccugcagcac

SEQ ID NO: 2905990 - RNA, 18 nt, Human
cgcccggcuaauuuuugu

SEQ ID NO: 2905991 - RNA, 19 nt, Human
cgcccagucuggaaugcag

SEQ ID NO: 2905992 - RNA, 13 nt, Human
cgcccagucugga

SEQ ID NO: 2905993 - RNA, 12 nt, Human
cgcccaaggccc

SEQ ID NO: 2905994 - RNA, 18 nt, Human
cgcccaacuaauuuuugu

SEQ ID NO: 2905995 - RNA, 22 nt, Human
cgcacuucagaauuccauaucu

SEQ ID NO: 2905996 - RNA, 13 nt, Human
cgcagcccugcuu

SEQ ID NO: 2905997 - RNA, 15 nt, Human
cgcagcccugcuuug

SEQ ID NO: 2905998 - RNA, 24 nt, Human
cgcagcccugcuuugggcugcccu

SEQ ID NO: 2905999 - RNA, 11 nt, Human
cgcagccugag

SEQ ID NO: 2906000 - RNA, 12 nt, Human
cgcagccugagu

SEQ ID NO: 2906001 - RNA, 23 nt, Human
cgcagcccuggcagggggcaugc

SEQ ID NO: 2906002 - RNA, 16 nt, Human
cgcagcccuggcaggg

SEQ ID NO: 2906003 - RNA, 16 nt, Human
cgcagccucccucuga

SEQ ID NO: 2906004 - RNA, 12 nt, Human
cgcagcugaagu

SEQ ID NO: 2906005 - RNA, 13 nt, Human
cgcagcuggacuc

SEQ ID NO: 2906006 - RNA, 17 nt, Human
cgcagcuggacucugca

SEQ ID NO: 2906007 - RNA, 14 nt, Human
cgccauugccacca

SEQ ID NO: 2906008 - RNA, 17 nt, Human
cgccauugccaccagga

SEQ ID NO: 2906009 - RNA, 16 nt, Human
cgccauugccaccagg

SEQ ID NO: 2906010 - RNA, 18 nt, Human
cgccauugccaccaggag

SEQ ID NO: 2906011 - RNA, 13 nt, Human
cgccauuuaaaag

SEQ ID NO: 2906012 - RNA, 21 nt, Human
cgcucccucccaggacucuga

SEQ ID NO: 2906013 - RNA, 13 nt, Human
cgcucccucccag

SEQ ID NO: 2906014 - RNA, 20 nt, Human
cgcucccucccaggacucug

SEQ ID NO: 2906015 - RNA, 15 nt, Human
cgcucccucccagga

SEQ ID NO: 2906016 - RNA, 12 nt, Human
cgcuaccucccu

SEQ ID NO: 2906017 - RNA, 13 nt, Human
cgcuaccucccuc

SEQ ID NO: 2906018 - RNA, 10 nt, Human
cgcuccaggu

SEQ ID NO: 2906019 - RNA, 11 nt, Human
cgcuccaggua

SEQ ID NO: 2906020 - RNA, 16 nt, Human
cgcugugagccccugg

SEQ ID NO: 2906021 - RNA, 19 nt, Human
cgcugugagccccuggucc

SEQ ID NO: 2906022 - RNA, 20 nt, Human
cgcugugcuaucaugaugga

SEQ ID NO: 2906023 - RNA, 15 nt, Human
cgcuucugccuuuuc

SEQ ID NO: 2906024 - RNA, 20 nt, Human
cgcuucuguguaucucuuuc

SEQ ID NO: 2906025 - RNA, 12 nt, Human
cgcuucugacug

SEQ ID NO: 2906026 - RNA, 20 nt, Human
cgcuucccccauagccaccc

SEQ ID NO: 2906027 - RNA, 15 nt, Human
cgcuucccuccugcc

SEQ ID NO: 2906028 - RNA, 16 nt, Human
cgcuucccuccugccc

SEQ ID NO: 2906029 - RNA, 18 nt, Human
cgcuucccuccugcccgc

SEQ ID NO: 2906030 - RNA, 18 nt, Human
cgcuucccccauagccac

SEQ ID NO: 2906031 - RNA, 16 nt, Human
cgcuucgacuuuucuu

SEQ ID NO: 2906032 - RNA, 21 nt, Human
cgcuguuuuuguugugugugc

SEQ ID NO: 2906033 - RNA, 16 nt, Human
cgcuucccccauagcc

SEQ ID NO: 2906034 - RNA, 13 nt, Human
cgcuucccccaua

SEQ ID NO: 2906035 - RNA, 22 nt, Human
cggacagccacggccaggccag

SEQ ID NO: 2906036 - RNA, 21 nt, Human
cggacagccacggccaggcca

SEQ ID NO: 2906037 - RNA, 16 nt, Human
cggacuuagcugggag

SEQ ID NO: 2906038 - RNA, 17 nt, Human
cggacuuagcugggaga

SEQ ID NO: 2906039 - RNA, 17 nt, Human
cggaauaguuggcuagg

SEQ ID NO: 2906040 - RNA, 16 nt, Human
cggaauaguuggcuag

SEQ ID NO: 2906041 - RNA, 14 nt, Human
cggaauaguuggcu

SEQ ID NO: 2906042 - RNA, 21 nt, Human
cggaaucacucuguccuugga

SEQ ID NO: 2906043 - RNA, 20 nt, Human
cggacagccacggccaggcc

SEQ ID NO: 2906044 - RNA, 16 nt, Human
cgcuuucuacccagcg

SEQ ID NO: 2906045 - RNA, 14 nt, Human
cgcuuucuacccag

SEQ ID NO: 2906046 - RNA, 18 nt, Human
cgcuuguggggacccagg

SEQ ID NO: 2906047 - RNA, 19 nt, Human
cgcuuguggggacccaggc

SEQ ID NO: 2906048 - RNA, 20 nt, Human
cgcuuguggggacccaggcu

SEQ ID NO: 2906049 - RNA, 21 nt, Human
cgcuuguggggacccaggcuc

SEQ ID NO: 2906050 - RNA, 22 nt, Human
cgcuuguggggacccaggcucc

SEQ ID NO: 2906051 - RNA, 13 nt, Human
cgcuuuauuuucu

SEQ ID NO: 2906052 - RNA, 16 nt, Human
cgggaaggucaccagc

SEQ ID NO: 2906053 - RNA, 17 nt, Human
cgggaaggucaccagca

SEQ ID NO: 2906054 - RNA, 15 nt, Human
cgggacaccugcccu

SEQ ID NO: 2906055 - RNA, 20 nt, Human
cgggaaggucaccagcacca

SEQ ID NO: 2906056 - RNA, 17 nt, Human
cgggaauaaccuuccau

SEQ ID NO: 2906057 - RNA, 10 nt, Human
cgggaauauu

SEQ ID NO: 2906058 - RNA, 15 nt, Human
cgggaauauuguuuc

SEQ ID NO: 2906059 - RNA, 16 nt, Human
cgggaauauuguuucu

SEQ ID NO: 2906060 - RNA, 17 nt, Human
cgggaauauuguuucuu

SEQ ID NO: 2906061 - RNA, 12 nt, Human
cgggaagcggag

SEQ ID NO: 2906062 - RNA, 15 nt, Human
cggcuucaugccagc

SEQ ID NO: 2906063 - RNA, 16 nt, Human
cggcuucaugccagcu

SEQ ID NO: 2906064 - RNA, 14 nt, Human
cgggaaccaagcag

SEQ ID NO: 2906065 - RNA, 16 nt, Human
cgggaaccaagcagga

SEQ ID NO: 2906066 - RNA, 15 nt, Human
cggcuuccuuuccca

SEQ ID NO: 2906067 - RNA, 14 nt, Human
cggcuuccuuuccc

SEQ ID NO: 2906068 - RNA, 19 nt, Human
cggcuucaugccagcuacu

SEQ ID NO: 2906069 - RNA, 16 nt, Human
cggcuuuucucagcug

SEQ ID NO: 2906070 - RNA, 19 nt, Human
cggcuuccuuucccaagcc

SEQ ID NO: 2906071 - RNA, 20 nt, Human
cggcuucguuagaccgcucu

SEQ ID NO: 2906072 - RNA, 15 nt, Human
cgggaacagacaaca

SEQ ID NO: 2906073 - RNA, 16 nt, Human
cggccugaugcucccu

SEQ ID NO: 2906074 - RNA, 15 nt, Human
cggccugaugcuccc

SEQ ID NO: 2906075 - RNA, 15 nt, Human
cggccgcuccaccag

SEQ ID NO: 2906076 - RNA, 15 nt, Human
cggccucccaaagug

SEQ ID NO: 2906077 - RNA, 21 nt, Human
cggccuccguccaggagccug

SEQ ID NO: 2906078 - RNA, 22 nt, Human
cggccuccguccaggagccugg

SEQ ID NO: 2906079 - RNA, 19 nt, Human
cggccuccuaaagugcugg

SEQ ID NO: 2906080 - RNA, 20 nt, Human
cggccuccuaaagugcuggg

SEQ ID NO: 2906081 - RNA, 23 nt, Human
cggccuccucuucaccccggcag

SEQ ID NO: 2906082 - RNA, 22 nt, Human
cggcccugggcucggaggcugc

SEQ ID NO: 2906083 - RNA, 22 nt, Human
cggcccuccuacccugcgccca

SEQ ID NO: 2906084 - RNA, 13 nt, Human
cggcccugggcuc

SEQ ID NO: 2906085 - RNA, 18 nt, Human
cggcccugggcucggagg

SEQ ID NO: 2906086 - RNA, 20 nt, Human
cggcccuccuacccugcgcc

SEQ ID NO: 2906087 - RNA, 23 nt, Human
cggcccuccuacccugcgcccag

SEQ ID NO: 2906088 - RNA, 12 nt, Human
cggcccugcaau

SEQ ID NO: 2906089 - RNA, 22 nt, Human
cggcccugcaauguaucccuuc

SEQ ID NO: 2906090 - RNA, 17 nt, Human
cggcccugcagccagcu

SEQ ID NO: 2906091 - RNA, 19 nt, Human
cggcccugcagccagcuca

SEQ ID NO: 2906092 - RNA, 11 nt, Human
cggccaggcca

SEQ ID NO: 2906093 - RNA, 15 nt, Human
cggaucaucaacaag

SEQ ID NO: 2906094 - RNA, 19 nt, Human
cggaucaucaacaagauuu

SEQ ID NO: 2906095 - RNA, 21 nt, Human
cggaucaucaacaagauuucc

SEQ ID NO: 2906096 - RNA, 19 nt, Human
cggaguguguaugccaaga

SEQ ID NO: 2906097 - RNA, 22 nt, Human
cggaguuuugcucuuguagccc

SEQ ID NO: 2906098 - RNA, 13 nt, Human
cggaucagagcag

SEQ ID NO: 2906099 - RNA, 18 nt, Human
cggaucagagcaggaccu

SEQ ID NO: 2906100 - RNA, 19 nt, Human
cggaucagagcaggaccuc

SEQ ID NO: 2906101 - RNA, 22 nt, Human
cggaucagagcaggaccucccu

SEQ ID NO: 2906102 - RNA, 20 nt, Human
cggccaggccagagggagug

SEQ ID NO: 2906103 - RNA, 12 nt, Human
cggccaggccag

SEQ ID NO: 2906104 - RNA, 22 nt, Human
cggccagccccggcccugggcu

SEQ ID NO: 2906105 - RNA, 14 nt, Human
cggauccuaagcau

SEQ ID NO: 2906106 - RNA, 12 nt, Human
cggcccuaaggg

SEQ ID NO: 2906107 - RNA, 14 nt, Human
cggcccuagcccag

SEQ ID NO: 2906108 - RNA, 18 nt, Human
cggcccuagcccagcgcu

SEQ ID NO: 2906109 - RNA, 18 nt, Human
cggcccucaucuaugagg

SEQ ID NO: 2906110 - RNA, 13 nt, Human
cgaggcaggcaga

SEQ ID NO: 2906111 - RNA, 14 nt, Human
cgaggauuuuaauu

SEQ ID NO: 2906112 - RNA, 23 nt, Human
cgaggauuuuaauuuuuuuuagu

SEQ ID NO: 2906113 - RNA, 11 nt, Human
cgaggcccugc

SEQ ID NO: 2906114 - RNA, 12 nt, Human
cgaggcccugca

SEQ ID NO: 2906115 - RNA, 13 nt, Human
cgaggcccugcau

SEQ ID NO: 2906116 - RNA, 14 nt, Human
cgaggcccugcaug

SEQ ID NO: 2906117 - RNA, 15 nt, Human
cgaggcccugcaugg

SEQ ID NO: 2906118 - RNA, 23 nt, Human
cgaugaauuuggagacucugugg

SEQ ID NO: 2906119 - RNA, 16 nt, Human
cgaugauucaggugca

SEQ ID NO: 2906120 - RNA, 17 nt, Human
cgaugauucaggugcag

SEQ ID NO: 2906121 - RNA, 20 nt, Human
cgaugauucaggugcagagg

SEQ ID NO: 2906122 - RNA, 21 nt, Human
cgaugauucaggugcagagga

SEQ ID NO: 2906123 - RNA, 16 nt, Human
cgaggacagggaggug

SEQ ID NO: 2906124 - RNA, 21 nt, Human
cgaggacaugaaacuccaccu

SEQ ID NO: 2906125 - RNA, 16 nt, Human
cgaggaggugccugga

SEQ ID NO: 2906126 - RNA, 23 nt, Human
cgaggaggugccuggagugccca

SEQ ID NO: 2906127 - RNA, 20 nt, Human
cgaggacuuugauugcacau

SEQ ID NO: 2906128 - RNA, 17 nt, Human
cgaggagccaggcaacu

SEQ ID NO: 2906129 - RNA, 19 nt, Human
cgagcccugguggcagugg

SEQ ID NO: 2906130 - RNA, 19 nt, Human
cgagaggccaaaggcuggu

SEQ ID NO: 2906131 - RNA, 14 nt, Human
cgagacugcaaugu

SEQ ID NO: 2906132 - RNA, 15 nt, Human
cgagagaggagccag

SEQ ID NO: 2906133 - RNA, 16 nt, Human
cgagagaggagccaga

SEQ ID NO: 2906134 - RNA, 20 nt, Human
cgagagaggagccagacaga

SEQ ID NO: 2906135 - RNA, 21 nt, Human
cgagagaggagccagacagac

SEQ ID NO: 2906136 - RNA, 14 nt, Human
cgaggacagggagg

SEQ ID NO: 2906137 - RNA, 18 nt, Human
cgagcccugguggcagug

SEQ ID NO: 2906138 - RNA, 23 nt, Human
cgagcccuguggaugagcccuca

SEQ ID NO: 2906139 - RNA, 14 nt, Human
cgcagaugauccau

SEQ ID NO: 2906140 - RNA, 17 nt, Human
cgcagaugugcagcaga

SEQ ID NO: 2906141 - RNA, 18 nt, Human
cgcagaugugcagcagau

SEQ ID NO: 2906142 - RNA, 19 nt, Human
cgcagaugugcagcagauu

SEQ ID NO: 2906143 - RNA, 20 nt, Human
cgcagaugugcagcagauug

SEQ ID NO: 2906144 - RNA, 16 nt, Human
cgcagcaggaggccag

SEQ ID NO: 2906145 - RNA, 18 nt, Human
cgcagcaggaggccaggc

SEQ ID NO: 2906146 - RNA, 17 nt, Human
cgcagcaggaggccagg

SEQ ID NO: 2906147 - RNA, 20 nt, Human
cgcacggccccgaagggccc

SEQ ID NO: 2906148 - RNA, 22 nt, Human
cgcacuacaugugguuuauaga

SEQ ID NO: 2906149 - RNA, 17 nt, Human
cgcaccugcccccuggu

SEQ ID NO: 2906150 - RNA, 16 nt, Human
cgcaccugcccccugg

SEQ ID NO: 2906151 - RNA, 11 nt, Human
cgcacgcacac

SEQ ID NO: 2906152 - RNA, 13 nt, Human
cgcaccuguacag

SEQ ID NO: 2906153 - RNA, 14 nt, Human
cgcaccuguacagu

SEQ ID NO: 2906154 - RNA, 13 nt, Human
cgcacgcacacac

SEQ ID NO: 2906155 - RNA, 14 nt, Human
cgcacgcacacaca

SEQ ID NO: 2906156 - RNA, 15 nt, Human
cgcacgcacacacac

SEQ ID NO: 2906157 - RNA, 16 nt, Human
cgcacgcacacacaca

SEQ ID NO: 2906158 - RNA, 18 nt, Human
cgaugguacgugacccuc

SEQ ID NO: 2906159 - RNA, 16 nt, Human
cgcaccuaccaucagg

SEQ ID NO: 2906160 - RNA, 19 nt, Human
cgcaccuaccaucagggac

SEQ ID NO: 2906161 - RNA, 22 nt, Human
cgaugggagggauggcccuucc

SEQ ID NO: 2906162 - RNA, 14 nt, Human
cgaugcuuuaccaa

SEQ ID NO: 2906163 - RNA, 21 nt, Human
cgaugcuuuaccaaacagcaa

SEQ ID NO: 2906164 - RNA, 22 nt, Human
cgaugcuuuaccaaacagcaaa

SEQ ID NO: 2906165 - RNA, 23 nt, Human
ccugggcagccaggcugccaagg

SEQ ID NO: 2906166 - RNA, 13 nt, Human
ccugggguuguca

SEQ ID NO: 2906167 - RNA, 20 nt, Human
ccuggguaaaugcagcguga

SEQ ID NO: 2906168 - RNA, 21 nt, Human
ccugggguggggauagggagc

SEQ ID NO: 2906169 - RNA, 22 nt, Human
ccuggguaaaugcagcgugaag

SEQ ID NO: 2906170 - RNA, 18 nt, Human
ccuggguacugaaagccu

SEQ ID NO: 2906171 - RNA, 14 nt, Human
ccugggucagucug

SEQ ID NO: 2906172 - RNA, 15 nt, Human
ccugggucagucugg

SEQ ID NO: 2906173 - RNA, 19 nt, Human
ccugggucagucugguggg

SEQ ID NO: 2906174 - RNA, 21 nt, Human
ccugggucagucuggugggag

SEQ ID NO: 2906175 - RNA, 22 nt, Human
ccugggucagucuggugggagg

SEQ ID NO: 2906176 - RNA, 13 nt, Human
ccugggaggcaca

SEQ ID NO: 2906177 - RNA, 16 nt, Human
ccugggaggcacagca

SEQ ID NO: 2906178 - RNA, 18 nt, Human
ccugggagugagcugguu

SEQ ID NO: 2906179 - RNA, 19 nt, Human
ccugggcagccaggcugcc

SEQ ID NO: 2906180 - RNA, 18 nt, Human
ccugggcagccaggcugc

SEQ ID NO: 2906181 - RNA, 17 nt, Human
ccugggcagccaggcug

SEQ ID NO: 2906182 - RNA, 15 nt, Human
ccugggagguggagg

SEQ ID NO: 2906183 - RNA, 18 nt, Human
ccugggaguggguggagg

SEQ ID NO: 2906184 - RNA, 16 nt, Human
ccugggagugagcugg

SEQ ID NO: 2906185 - RNA, 17 nt, Human
ccugggagaaccucagg

SEQ ID NO: 2906186 - RNA, 13 nt, Human
ccuggccacugcu

SEQ ID NO: 2906187 - RNA, 23 nt, Human
ccugggacaguuuaucaugaagc

SEQ ID NO: 2906188 - RNA, 19 nt, Human
ccugggagaaccucaggcu

SEQ ID NO: 2906189 - RNA, 18 nt, Human
ccugggagaaccucaggc

SEQ ID NO: 2906190 - RNA, 14 nt, Human
ccugggagacagac

SEQ ID NO: 2906191 - RNA, 15 nt, Human
ccugggagacagacc

SEQ ID NO: 2906192 - RNA, 13 nt, Human
ccuggcccauaga

SEQ ID NO: 2906193 - RNA, 18 nt, Human
ccuggcccauagaaacau

SEQ ID NO: 2906194 - RNA, 22 nt, Human
ccuggcccauagaaacaugaca

SEQ ID NO: 2906195 - RNA, 23 nt, Human
ccuggcccauagaaacaugacac

SEQ ID NO: 2906196 - RNA, 24 nt, Human
ccuggcccauagaaacaugacacu

SEQ ID NO: 2906197 - RNA, 21 nt, Human
ccuggcucccaugaccauacu

SEQ ID NO: 2906198 - RNA, 22 nt, Human
ccuggcucccaugaccauacug

SEQ ID NO: 2906199 - RNA, 15 nt, Human
ccuggcucccaugac

SEQ ID NO: 2906200 - RNA, 14 nt, Human
ccuggcucccauga

SEQ ID NO: 2906201 - RNA, 21 nt, Human
ccuggcuccguccaggagccu

SEQ ID NO: 2906202 - RNA, 15 nt, Human
ccuggcuccugaggg

SEQ ID NO: 2906203 - RNA, 23 nt, Human
ccuggcuccugaggggcaucugc

SEQ ID NO: 2906204 - RNA, 23 nt, Human
ccuggcuucuggagcccuugggu

SEQ ID NO: 2906205 - RNA, 22 nt, Human
ccuggcuucuggagcccuuggg

SEQ ID NO: 2906206 - RNA, 21 nt, Human
ccuggcuucuggagcccuugg

SEQ ID NO: 2906207 - RNA, 20 nt, Human
ccuggcuucuggagcccuug

SEQ ID NO: 2906208 - RNA, 16 nt, Human
ccuggcuuguuuauuu

SEQ ID NO: 2906209 - RNA, 17 nt, Human
ccuggcuucuggagccc

SEQ ID NO: 2906210 - RNA, 22 nt, Human
ccuggcuucuuucucucagccu

SEQ ID NO: 2906211 - RNA, 17 nt, Human
ccuggcuuuucacugcu

SEQ ID NO: 2906212 - RNA, 16 nt, Human
ccuggcuuuucacugc

SEQ ID NO: 2906213 - RNA, 22 nt, Human
ccugggaaggccucuuggagac

SEQ ID NO: 2906214 - RNA, 18 nt, Human
ccuggcacccggccccug

SEQ ID NO: 2906215 - RNA, 21 nt, Human
ccuggcacccggccccugcug

SEQ ID NO: 2906216 - RNA, 20 nt, Human
ccuggcacccggccccugcu

SEQ ID NO: 2906217 - RNA, 19 nt, Human
ccuggcacccggccccugc

SEQ ID NO: 2906218 - RNA, 16 nt, Human
ccuggagaacuagaga

SEQ ID NO: 2906219 - RNA, 16 nt, Human
ccuggagacccacccc

SEQ ID NO: 2906220 - RNA, 21 nt, Human
ccuggagacccaccccaccug

SEQ ID NO: 2906221 - RNA, 22 nt, Human
ccuggagacccaccccaccugc

SEQ ID NO: 2906222 - RNA, 12 nt, Human
ccuggagaacua

SEQ ID NO: 2906223 - RNA, 13 nt, Human
ccuggagaacuag

SEQ ID NO: 2906224 - RNA, 21 nt, Human
ccugcuaauuccccagauugc

SEQ ID NO: 2906225 - RNA, 17 nt, Human
ccugcuaauuccccaga

SEQ ID NO: 2906226 - RNA, 12 nt, Human
ccugcccuggaa

SEQ ID NO: 2906227 - RNA, 20 nt, Human
ccuggcagggaggucaggcc

SEQ ID NO: 2906228 - RNA, 21 nt, Human
ccuggcagggaggucaggccc

SEQ ID NO: 2906229 - RNA, 22 nt, Human
ccuggcagggaggucaggcccu

SEQ ID NO: 2906230 - RNA, 23 nt, Human
ccuggcagggaggucaggcccug

SEQ ID NO: 2906231 - RNA, 22 nt, Human
ccuggcagggucauccugugcu

SEQ ID NO: 2906232 - RNA, 23 nt, Human
ccuggcagggucauccugugcuc

SEQ ID NO: 2906233 - RNA, 22 nt, Human
ccuggcaggaugacccugcgaa

SEQ ID NO: 2906234 - RNA, 17 nt, Human
ccuggagacguggaacc

SEQ ID NO: 2906235 - RNA, 22 nt, Human
ccuggagacguggaaccucugu

SEQ ID NO: 2906236 - RNA, 19 nt, Human
ccuggcauuauguccacug

SEQ ID NO: 2906237 - RNA, 17 nt, Human
ccuggcauucuuguaca

SEQ ID NO: 2906238 - RNA, 18 nt, Human
ccuggcauucuuguacag

SEQ ID NO: 2906239 - RNA, 19 nt, Human
ccuggcauucuuguacagu

SEQ ID NO: 2906240 - RNA, 20 nt, Human
ccuggcauucuuguacagug

SEQ ID NO: 2906241 - RNA, 13 nt, Human
ccuggcauuucac

SEQ ID NO: 2906242 - RNA, 14 nt, Human
ccuggccaacaugg

SEQ ID NO: 2906243 - RNA, 13 nt, Human
ccuggccaccucu

SEQ ID NO: 2906244 - RNA, 14 nt, Human
ccuggccaccucuc

SEQ ID NO: 2906245 - RNA, 15 nt, Human
ccuggccaccucucu

SEQ ID NO: 2906246 - RNA, 20 nt, Human
ccuggccagaugcaccagcc

SEQ ID NO: 2906247 - RNA, 18 nt, Human
ccuggccaccucucuccu

SEQ ID NO: 2906248 - RNA, 23 nt, Human
ccuggccagaugcaccagcccuu

SEQ ID NO: 2906249 - RNA, 21 nt, Human
ccuggccagaugcaccagccc

SEQ ID NO: 2906250 - RNA, 15 nt, Human
ccuggccagccuaca

SEQ ID NO: 2906251 - RNA, 13 nt, Human
ccuggccacgccc

SEQ ID NO: 2906252 - RNA, 16 nt, Human
ccuggccagauggccc

SEQ ID NO: 2906253 - RNA, 19 nt, Human
ccuggccagauggcccgga

SEQ ID NO: 2906254 - RNA, 13 nt, Human
ccugucccuccca

SEQ ID NO: 2906255 - RNA, 14 nt, Human
ccugucccucccac

SEQ ID NO: 2906256 - RNA, 15 nt, Human
ccugucccucccacc

SEQ ID NO: 2906257 - RNA, 15 nt, Human
ccuguccccaucugu

SEQ ID NO: 2906258 - RNA, 16 nt, Human
ccuguccccaucuguc

SEQ ID NO: 2906259 - RNA, 21 nt, Human
ccuguccccaucugucggccu

SEQ ID NO: 2906260 - RNA, 16 nt, Human
ccuguaccucauccca

SEQ ID NO: 2906261 - RNA, 18 nt, Human
ccugucccacccccaccc

SEQ ID NO: 2906262 - RNA, 15 nt, Human
ccugucccaccccca

SEQ ID NO: 2906263 - RNA, 17 nt, Human
ccugucccacccccacc

SEQ ID NO: 2906264 - RNA, 16 nt, Human
ccugucccauggacac

SEQ ID NO: 2906265 - RNA, 19 nt, Human
ccugucccauggacacucc

SEQ ID NO: 2906266 - RNA, 23 nt, Human
ccugucccauggacacuccagug

SEQ ID NO: 2906267 - RNA, 16 nt, Human
ccugucccaugcaggc

SEQ ID NO: 2906268 - RNA, 19 nt, Human
ccugucccaugcaggcccu

SEQ ID NO: 2906269 - RNA, 12 nt, Human
ccuguauacuuu

SEQ ID NO: 2906270 - RNA, 13 nt, Human
ccuguauacuuua

SEQ ID NO: 2906271 - RNA, 14 nt, Human
ccuguauacuuuag

SEQ ID NO: 2906272 - RNA, 12 nt, Human
ccuguauaguua

SEQ ID NO: 2906273 - RNA, 22 nt, Human
ccuguauaguuaggauagcauu

SEQ ID NO: 2906274 - RNA, 14 nt, Human
ccuguaucuuucua

SEQ ID NO: 2906275 - RNA, 21 nt, Human
ccuguaucuuucuaugcugcu

SEQ ID NO: 2906276 - RNA, 18 nt, Human
ccuguccaucagccagga

SEQ ID NO: 2906277 - RNA, 11 nt, Human
ccugucccacc

SEQ ID NO: 2906278 - RNA, 13 nt, Human
ccugucccacccc

SEQ ID NO: 2906279 - RNA, 11 nt, Human
ccuguacaguc

SEQ ID NO: 2906280 - RNA, 12 nt, Human
ccuguacagucu

SEQ ID NO: 2906281 - RNA, 14 nt, Human
ccuguacagucugu

SEQ ID NO: 2906282 - RNA, 16 nt, Human
ccuguacagucugucu

SEQ ID NO: 2906283 - RNA, 17 nt, Human
ccuguacagucugucuu

SEQ ID NO: 2906284 - RNA, 19 nt, Human
ccuguacagucugucuucu

SEQ ID NO: 2906285 - RNA, 20 nt, Human
ccuguacagucugucuucug

SEQ ID NO: 2906286 - RNA, 22 nt, Human
ccuguacagucugucuucugua

SEQ ID NO: 2906287 - RNA, 16 nt, Human
ccuggugaauggccuu

SEQ ID NO: 2906288 - RNA, 20 nt, Human
ccuggugaauggccuuccuu

SEQ ID NO: 2906289 - RNA, 20 nt, Human
ccuguagaauagccuguggc

SEQ ID NO: 2906290 - RNA, 21 nt, Human
ccuguagaauagccuguggcc

SEQ ID NO: 2906291 - RNA, 20 nt, Human
ccuguacuguucugugucuu

SEQ ID NO: 2906292 - RNA, 17 nt, Human
ccuguaccccagcacuu

SEQ ID NO: 2906293 - RNA, 14 nt, Human
ccuguaccccagca

SEQ ID NO: 2906294 - RNA, 14 nt, Human
ccugguggcagugg

SEQ ID NO: 2906295 - RNA, 13 nt, Human
ccugguggcagug

SEQ ID NO: 2906296 - RNA, 16 nt, Human
ccuggucuuuccucug

SEQ ID NO: 2906297 - RNA, 24 nt, Human
ccuguagcccacucugcucgccuu

SEQ ID NO: 2906298 - RNA, 23 nt, Human
ccuguagcccacucugcucgccu

SEQ ID NO: 2906299 - RNA, 22 nt, Human
ccuguagcccacucugcucgcc

SEQ ID NO: 2906300 - RNA, 19 nt, Human
ccuguagcccacucugcuc

SEQ ID NO: 2906301 - RNA, 23 nt, Human
ccuguaguugcguggacucugca

SEQ ID NO: 2906302 - RNA, 17 nt, Human
ccuguaguuuuauuuua

SEQ ID NO: 2906303 - RNA, 19 nt, Human
ccuguaguuuuauuuuaug

SEQ ID NO: 2906304 - RNA, 17 nt, Human
ccuguauaacccuguua

SEQ ID NO: 2906305 - RNA, 13 nt, Human
ccuguauaagcac

SEQ ID NO: 2906306 - RNA, 17 nt, Human
ccuguauaagcacugaa

SEQ ID NO: 2906307 - RNA, 21 nt, Human
ccuguaguugcguggacucug

SEQ ID NO: 2906308 - RNA, 20 nt, Human
ccuguaguugcguggacucu

SEQ ID NO: 2906309 - RNA, 13 nt, Human
ccuguagcaguga

SEQ ID NO: 2906310 - RNA, 16 nt, Human
ccuguagcccacucug

SEQ ID NO: 2906311 - RNA, 12 nt, Human
ccuguagcccac

SEQ ID NO: 2906312 - RNA, 21 nt, Human
ccuguagcagugagaaaaagc

SEQ ID NO: 2906313 - RNA, 18 nt, Human
ccugguggcagcugcggu

SEQ ID NO: 2906314 - RNA, 17 nt, Human
ccugguggcagcugcgg

SEQ ID NO: 2906315 - RNA, 16 nt, Human
ccugguggcagcugcg

SEQ ID NO: 2906316 - RNA, 15 nt, Human
ccugguggcagcugc

SEQ ID NO: 2906317 - RNA, 14 nt, Human
ccugguggcagcug

SEQ ID NO: 2906318 - RNA, 23 nt, Human
ccuggguccaggggaggccuucc

SEQ ID NO: 2906319 - RNA, 18 nt, Human
ccuggggucucugcugca

SEQ ID NO: 2906320 - RNA, 18 nt, Human
ccugguccuuccaggccc

SEQ ID NO: 2906321 - RNA, 15 nt, Human
ccugguccuuccagg

SEQ ID NO: 2906322 - RNA, 14 nt, Human
ccugguccugaggg

SEQ ID NO: 2906323 - RNA, 20 nt, Human
ccuggguuccaauccuggcu

SEQ ID NO: 2906324 - RNA, 18 nt, Human
ccuggguuccaauccugg

SEQ ID NO: 2906325 - RNA, 13 nt, Human
ccuggucucuggu

SEQ ID NO: 2906326 - RNA, 14 nt, Human
ccuggucucugguc

SEQ ID NO: 2906327 - RNA, 19 nt, Human
ccugguccuuccaggcccc

SEQ ID NO: 2906328 - RNA, 23 nt, Human
ccugguccugaggguccccaccu

SEQ ID NO: 2906329 - RNA, 15 nt, Human
ccugccccucucccg

SEQ ID NO: 2906330 - RNA, 16 nt, Human
ccugccccucucccgc

SEQ ID NO: 2906331 - RNA, 12 nt, Human
ccugccccucuu

SEQ ID NO: 2906332 - RNA, 14 nt, Human
ccugccccucuuuc

SEQ ID NO: 2906333 - RNA, 15 nt, Human
ccugccccucuuucu

SEQ ID NO: 2906334 - RNA, 17 nt, Human
ccugccccucuuucucu

SEQ ID NO: 2906335 - RNA, 18 nt, Human
ccugccccucuuucucuu

SEQ ID NO: 2906336 - RNA, 19 nt, Human
ccugccccucuuucucuuu

SEQ ID NO: 2906337 - RNA, 20 nt, Human
ccugccccucuuucucuuuc

SEQ ID NO: 2906338 - RNA, 23 nt, Human
ccugccccucuuucucuuucuuc

SEQ ID NO: 2906339 - RNA, 22 nt, Human
ccugccccuccucucugcccua

SEQ ID NO: 2906340 - RNA, 21 nt, Human
ccugccccuccucucugcccu

SEQ ID NO: 2906341 - RNA, 20 nt, Human
ccugccccuccucucugccc

SEQ ID NO: 2906342 - RNA, 19 nt, Human
ccugccccuccucucugcc

SEQ ID NO: 2906343 - RNA, 15 nt, Human
ccugccccucccuuc

SEQ ID NO: 2906344 - RNA, 16 nt, Human
ccugccccucccuuca

SEQ ID NO: 2906345 - RNA, 18 nt, Human
ccugccccucccuucaac

SEQ ID NO: 2906346 - RNA, 18 nt, Human
ccugccccuccucucugc

SEQ ID NO: 2906347 - RNA, 16 nt, Human
ccugcccccuggugga

SEQ ID NO: 2906348 - RNA, 15 nt, Human
ccugcccccuggugg

SEQ ID NO: 2906349 - RNA, 14 nt, Human
ccugcccccuggug

SEQ ID NO: 2906350 - RNA, 13 nt, Human
ccugcccccuggu

SEQ ID NO: 2906351 - RNA, 14 nt, Human
ccugccccucccuu

SEQ ID NO: 2906352 - RNA, 21 nt, Human
ccugcccucauggccccucug

SEQ ID NO: 2906353 - RNA, 23 nt, Human
ccugcccucauggccccucugac

SEQ ID NO: 2906354 - RNA, 14 nt, Human
ccugcccguucuug

SEQ ID NO: 2906355 - RNA, 15 nt, Human
ccugcccguguacau

SEQ ID NO: 2906356 - RNA, 16 nt, Human
ccugcccguguacaua

SEQ ID NO: 2906357 - RNA, 17 nt, Human
ccugcccguguacauag

SEQ ID NO: 2906358 - RNA, 23 nt, Human
ccugcccguaaacacgccugcaa

SEQ ID NO: 2906359 - RNA, 22 nt, Human
ccugcccgggcgcggccagccc

SEQ ID NO: 2906360 - RNA, 16 nt, Human
ccugcccggcugcgga

SEQ ID NO: 2906361 - RNA, 14 nt, Human
ccugcccggcugcg

SEQ ID NO: 2906362 - RNA, 10 nt, Human
ccugcccggg

SEQ ID NO: 2906363 - RNA, 16 nt, Human
ccugccccuuccuuua

SEQ ID NO: 2906364 - RNA, 13 nt, Human
ccugcccgcacag

SEQ ID NO: 2906365 - RNA, 15 nt, Human
ccugcccgcacagca

SEQ ID NO: 2906366 - RNA, 16 nt, Human
ccugcccgcacagcag

SEQ ID NO: 2906367 - RNA, 17 nt, Human
ccugcccgcacagcagc

SEQ ID NO: 2906368 - RNA, 20 nt, Human
ccugcccgcacagcagccug

SEQ ID NO: 2906369 - RNA, 22 nt, Human
ccugcccgcacagcagccugcu

SEQ ID NO: 2906370 - RNA, 18 nt, Human
ccugcccgcagaccucug

SEQ ID NO: 2906371 - RNA, 19 nt, Human
ccugcccgcagaccucugg

SEQ ID NO: 2906372 - RNA, 20 nt, Human
ccugcccgcagaccucugga

SEQ ID NO: 2906373 - RNA, 22 nt, Human
ccugcccguaaacacgccugca

SEQ ID NO: 2906374 - RNA, 21 nt, Human
ccugcccguaaacacgccugc

SEQ ID NO: 2906375 - RNA, 20 nt, Human
ccugcccguaaacacgccug

SEQ ID NO: 2906376 - RNA, 15 nt, Human
ccugcccguaaacac

SEQ ID NO: 2906377 - RNA, 12 nt, Human
ccugcccccugg

SEQ ID NO: 2906378 - RNA, 18 nt, Human
ccugccccccagccucug

SEQ ID NO: 2906379 - RNA, 22 nt, Human
ccugccccccagccucuggcau

SEQ ID NO: 2906380 - RNA, 16 nt, Human
ccugccaccacuauaa

SEQ ID NO: 2906381 - RNA, 14 nt, Human
ccugccccccagcc

SEQ ID NO: 2906382 - RNA, 15 nt, Human
ccugccccccagccu

SEQ ID NO: 2906383 - RNA, 17 nt, Human
ccugccccccagccucu

SEQ ID NO: 2906384 - RNA, 12 nt, Human
ccugccugugcu

SEQ ID NO: 2906385 - RNA, 22 nt, Human
ccugccuguucccauucuugca

SEQ ID NO: 2906386 - RNA, 16 nt, Human
ccugccuguagcccac

SEQ ID NO: 2906387 - RNA, 11 nt, Human
ccugccucagc

SEQ ID NO: 2906388 - RNA, 12 nt, Human
ccugccucagcc

SEQ ID NO: 2906389 - RNA, 14 nt, Human
ccugccucagccuc

SEQ ID NO: 2906390 - RNA, 13 nt, Human
ccugccucagccu

SEQ ID NO: 2906391 - RNA, 15 nt, Human
ccugcccugguccag

SEQ ID NO: 2906392 - RNA, 23 nt, Human
ccugcccugguuuccugcccugg

SEQ ID NO: 2906393 - RNA, 12 nt, Human
ccugcccugguc

SEQ ID NO: 2906394 - RNA, 20 nt, Human
ccugcccugcugccgccucc

SEQ ID NO: 2906395 - RNA, 14 nt, Human
ccugcccugguuuc

SEQ ID NO: 2906396 - RNA, 22 nt, Human
ccugcccugggaggcagugaug

SEQ ID NO: 2906397 - RNA, 20 nt, Human
ccugcccugggaggcaguga

SEQ ID NO: 2906398 - RNA, 22 nt, Human
ccugcccugguuuccugcccug

SEQ ID NO: 2906399 - RNA, 21 nt, Human
ccugcccugguuuccugcccu

SEQ ID NO: 2906400 - RNA, 20 nt, Human
ccugcccugguuuccugccc

SEQ ID NO: 2906401 - RNA, 19 nt, Human
ccugcccugguuuccugcc

SEQ ID NO: 2906402 - RNA, 13 nt, Human
ccugcccugagga

SEQ ID NO: 2906403 - RNA, 13 nt, Human
ccugcccuccccu

SEQ ID NO: 2906404 - RNA, 13 nt, Human
ccugcccugcugc

SEQ ID NO: 2906405 - RNA, 15 nt, Human
ccugcccugccccca

SEQ ID NO: 2906406 - RNA, 15 nt, Human
ccugcccugggaggc

SEQ ID NO: 2906407 - RNA, 14 nt, Human
ccugcccugggagg

SEQ ID NO: 2906408 - RNA, 12 nt, Human
ccugcccuggga

SEQ ID NO: 2906409 - RNA, 10 nt, Human
ccugcccugg

SEQ ID NO: 2906410 - RNA, 14 nt, Human
ccugaggcugagac

SEQ ID NO: 2906411 - RNA, 21 nt, Human
ccugaggcugagacugcggga

SEQ ID NO: 2906412 - RNA, 21 nt, Human
ccugauauuucccuccccugg

SEQ ID NO: 2906413 - RNA, 19 nt, Human
ccugaagucacacagugag

SEQ ID NO: 2906414 - RNA, 20 nt, Human
ccugaagucacacagugagu

SEQ ID NO: 2906415 - RNA, 19 nt, Human
ccugaaguaagcaaagacu

SEQ ID NO: 2906416 - RNA, 22 nt, Human
ccugagcccuacucccugcaga

SEQ ID NO: 2906417 - RNA, 21 nt, Human
ccugagcccuacucccugcag

SEQ ID NO: 2906418 - RNA, 19 nt, Human
ccugagcccuacucccugc

SEQ ID NO: 2906419 - RNA, 17 nt, Human
ccugagcccuacucccu

SEQ ID NO: 2906420 - RNA, 14 nt, Human
ccugagccccgccc

SEQ ID NO: 2906421 - RNA, 18 nt, Human
ccugagccccgcccucuu

SEQ ID NO: 2906422 - RNA, 20 nt, Human
ccugagccccgcccucuucc

SEQ ID NO: 2906423 - RNA, 21 nt, Human
ccugagccccgcccucuuccu

SEQ ID NO: 2906424 - RNA, 22 nt, Human
ccugagccccgcccucuuccug

SEQ ID NO: 2906425 - RNA, 23 nt, Human
ccugagccccgcccucuuccuga

SEQ ID NO: 2906426 - RNA, 21 nt, Human
ccugagccccagggugcccag

SEQ ID NO: 2906427 - RNA, 23 nt, Human
ccugagccccagggugcccagaa

SEQ ID NO: 2906428 - RNA, 13 nt, Human
ccugagcucacuc

SEQ ID NO: 2906429 - RNA, 17 nt, Human
ccugagcgccugggucc

SEQ ID NO: 2906430 - RNA, 21 nt, Human
ccugagcgccuggauuucugg

SEQ ID NO: 2906431 - RNA, 16 nt, Human
ccugagccuggccagc

SEQ ID NO: 2906432 - RNA, 15 nt, Human
ccugagccuggccag

SEQ ID NO: 2906433 - RNA, 14 nt, Human
ccugagccuggcca

SEQ ID NO: 2906434 - RNA, 13 nt, Human
ccugagccuggcc

SEQ ID NO: 2906435 - RNA, 12 nt, Human
ccugagccuggc

SEQ ID NO: 2906436 - RNA, 13 nt, Human
ccugccacccugg

SEQ ID NO: 2906437 - RNA, 12 nt, Human
ccugccacccug

SEQ ID NO: 2906438 - RNA, 14 nt, Human
ccugccacccuggg

SEQ ID NO: 2906439 - RNA, 22 nt, Human
ccugccacccuggggagaaagu

SEQ ID NO: 2906440 - RNA, 16 nt, Human
ccugccacccugggga

SEQ ID NO: 2906441 - RNA, 13 nt, Human
ccugccaccuccc

SEQ ID NO: 2906442 - RNA, 14 nt, Human
ccugccaccucccu

SEQ ID NO: 2906443 - RNA, 16 nt, Human
ccugccaccucccuga

SEQ ID NO: 2906444 - RNA, 13 nt, Human
ccugccacccugu

SEQ ID NO: 2906445 - RNA, 14 nt, Human
ccugccacccugua

SEQ ID NO: 2906446 - RNA, 16 nt, Human
ccugccacccuguagc

SEQ ID NO: 2906447 - RNA, 19 nt, Human
ccugccaccacgcccggcu

SEQ ID NO: 2906448 - RNA, 15 nt, Human
ccugccaccacgccc

SEQ ID NO: 2906449 - RNA, 16 nt, Human
ccugcauuucugaguu

SEQ ID NO: 2906450 - RNA, 18 nt, Human
ccugccacauuagaacuu

SEQ ID NO: 2906451 - RNA, 19 nt, Human
ccugccacauuagaacuuc

SEQ ID NO: 2906452 - RNA, 14 nt, Human
ccugcauuucugag

SEQ ID NO: 2906453 - RNA, 12 nt, Human
ccugcauuguua

SEQ ID NO: 2906454 - RNA, 23 nt, Human
ccugcauuugugaaaugauggug

SEQ ID NO: 2906455 - RNA, 20 nt, Human
ccugcacagugucccccagg

SEQ ID NO: 2906456 - RNA, 14 nt, Human
ccugcacuggggag

SEQ ID NO: 2906457 - RNA, 21 nt, Human
ccugcacuggggagcccgucu

SEQ ID NO: 2906458 - RNA, 19 nt, Human
ccugcacagugucccccag

SEQ ID NO: 2906459 - RNA, 23 nt, Human
ccugcacaaagcccuuccauguc

SEQ ID NO: 2906460 - RNA, 21 nt, Human
ccugcacacgcuccuuccucu

SEQ ID NO: 2906461 - RNA, 10 nt, Human
ccugcacaca

SEQ ID NO: 2906462 - RNA, 11 nt, Human
ccugcacacaa

SEQ ID NO: 2906463 - RNA, 12 nt, Human
ccugcacacaag

SEQ ID NO: 2906464 - RNA, 22 nt, Human
ccugcacacaagcccacagcac

SEQ ID NO: 2906465 - RNA, 23 nt, Human
ccugcacacaagcccacagcaca

SEQ ID NO: 2906466 - RNA, 17 nt, Human
ccugaucacuagccugu

SEQ ID NO: 2906467 - RNA, 22 nt, Human
ccugcacaaagcccuuccaugu

SEQ ID NO: 2906468 - RNA, 20 nt, Human
ccugcacaaagcccuuccau

SEQ ID NO: 2906469 - RNA, 18 nt, Human
ccugcaaagcccagcuug

SEQ ID NO: 2906470 - RNA, 17 nt, Human
ccugcaaagcccagcuu

SEQ ID NO: 2906471 - RNA, 14 nt, Human
ccugcaaagcccag

SEQ ID NO: 2906472 - RNA, 16 nt, Human
ccugcaaagcccagcu

SEQ ID NO: 2906473 - RNA, 15 nt, Human
ccugcaaagcccagc

SEQ ID NO: 2906474 - RNA, 17 nt, Human
ccugaagccagccuucu

SEQ ID NO: 2906475 - RNA, 18 nt, Human
ccugaagccagccuucuu

SEQ ID NO: 2906476 - RNA, 12 nt, Human
ccugaagccagc

SEQ ID NO: 2906477 - RNA, 14 nt, Human
ccugaagccagccu

SEQ ID NO: 2906478 - RNA, 15 nt, Human
ccugaagccagccuu

SEQ ID NO: 2906479 - RNA, 16 nt, Human
ccugaagccagccuuc

SEQ ID NO: 2906480 - RNA, 12 nt, Human
ccugaagacuga

SEQ ID NO: 2906481 - RNA, 14 nt, Human
ccugaagacugagg

SEQ ID NO: 2906482 - RNA, 15 nt, Human
ccugaagacugagga

SEQ ID NO: 2906483 - RNA, 21 nt, Human
ccugaagaguccucugaauga

SEQ ID NO: 2906484 - RNA, 20 nt, Human
ccugaaaccuaguacugccc

SEQ ID NO: 2906485 - RNA, 21 nt, Human
ccuaugaaguaaagaacugca

SEQ ID NO: 2906486 - RNA, 16 nt, Human
ccuaugaaugcuuugc

SEQ ID NO: 2906487 - RNA, 15 nt, Human
ccuaugagcauccug

SEQ ID NO: 2906488 - RNA, 16 nt, Human
ccuaugagcauccuga

SEQ ID NO: 2906489 - RNA, 20 nt, Human
ccuaugagcauccugagccc

SEQ ID NO: 2906490 - RNA, 21 nt, Human
ccuaugagcauccugagcccc

SEQ ID NO: 2906491 - RNA, 22 nt, Human
ccuaugagcauccugagccccg

SEQ ID NO: 2906492 - RNA, 15 nt, Human
ccuagucccuucccc

SEQ ID NO: 2906493 - RNA, 14 nt, Human
ccuagucccuuccc

SEQ ID NO: 2906494 - RNA, 19 nt, Human
ccuagucccuuccccuccc

SEQ ID NO: 2906495 - RNA, 16 nt, Human
ccuagucccuuccccu

SEQ ID NO: 2906496 - RNA, 21 nt, Human
ccuagucccuuccccucccug

SEQ ID NO: 2906497 - RNA, 15 nt, Human
ccuaugaucccagca

SEQ ID NO: 2906498 - RNA, 14 nt, Human
ccuaugaucccagc

SEQ ID NO: 2906499 - RNA, 13 nt, Human
ccuaugaucccag

SEQ ID NO: 2906500 - RNA, 12 nt, Human
ccucuuccccac

SEQ ID NO: 2906501 - RNA, 11 nt, Human
ccucuucccca

SEQ ID NO: 2906502 - RNA, 21 nt, Human
ccucuuccugugauccaccca

SEQ ID NO: 2906503 - RNA, 13 nt, Human
ccucuuccuguga

SEQ ID NO: 2906504 - RNA, 11 nt, Human
ccucuuccuga

SEQ ID NO: 2906505 - RNA, 22 nt, Human
ccucuuccccagaaaggagacu

SEQ ID NO: 2906506 - RNA, 14 nt, Human
ccucuuccccagaa

SEQ ID NO: 2906507 - RNA, 13 nt, Human
ccucuuccccaga

SEQ ID NO: 2906508 - RNA, 15 nt, Human
ccucuucccccuucc

SEQ ID NO: 2906509 - RNA, 22 nt, Human
ccugaaaauguuuuucugccag

SEQ ID NO: 2906510 - RNA, 21 nt, Human
ccugaaaauguuuuucugcca

SEQ ID NO: 2906511 - RNA, 23 nt, Human
ccugaaaauguuuuucugccagg

SEQ ID NO: 2906512 - RNA, 19 nt, Human
ccugaaacacgaaacuugu

SEQ ID NO: 2906513 - RNA, 22 nt, Human
ccugaaaaguaacuuggcuuuc

SEQ ID NO: 2906514 - RNA, 20 nt, Human
ccucuuccugacgaaacugg

SEQ ID NO: 2906515 - RNA, 13 nt, Human
ccucuucggcccu

SEQ ID NO: 2906516 - RNA, 15 nt, Human
ccucuucggcccuca

SEQ ID NO: 2906517 - RNA, 16 nt, Human
ccucuucggcccucag

SEQ ID NO: 2906518 - RNA, 18 nt, Human
ccucuucuauuuuguaaa

SEQ ID NO: 2906519 - RNA, 17 nt, Human
ccucuucuauuuuguaa

SEQ ID NO: 2906520 - RNA, 13 nt, Human
gaaacacagaaac

SEQ ID NO: 2906521 - RNA, 16 nt, Human
gaaacauuuuuuaaaa

SEQ ID NO: 2906522 - RNA, 20 nt, Human
gaaaaugauacgcaacauaa

SEQ ID NO: 2906523 - RNA, 22 nt, Human
gaaaaugaauaucuauuaauau

SEQ ID NO: 2906524 - RNA, 18 nt, Human
gaaaaugaguugugaaag

SEQ ID NO: 2906525 - RNA, 21 nt, Human
gaaaaugaguugugaaaguuu

SEQ ID NO: 2906526 - RNA, 17 nt, Human
gaaacaagugaaagcau

SEQ ID NO: 2906527 - RNA, 15 nt, Human
gaaacaauaaagaga

SEQ ID NO: 2906528 - RNA, 14 nt, Human
gaaaccacagcugc

SEQ ID NO: 2906529 - RNA, 15 nt, Human
gaaaccacagcugcu

SEQ ID NO: 2906530 - RNA, 22 nt, Human
gaaaccaauuccucauccucag

SEQ ID NO: 2906531 - RNA, 20 nt, Human
gaaaccacagcugcuggaga

SEQ ID NO: 2906532 - RNA, 17 nt, Human
gaaaccacagcugcugg

SEQ ID NO: 2906533 - RNA, 18 nt, Human
gaaaccacagcugcugga

SEQ ID NO: 2906534 - RNA, 20 nt, Human
gaaacuccaccuugcgggga

SEQ ID NO: 2906535 - RNA, 12 nt, Human
gaaaccugugaa

SEQ ID NO: 2906536 - RNA, 14 nt, Human
gaaacuagaaaugu

SEQ ID NO: 2906537 - RNA, 20 nt, Human
gaaacuaauugacuuuagaa

SEQ ID NO: 2906538 - RNA, 21 nt, Human
gaaacuaauugacuuuagaaa

SEQ ID NO: 2906539 - RNA, 13 nt, Human
gaaaccuuaauau

SEQ ID NO: 2906540 - RNA, 19 nt, Human
gaaaccugcucuguaggag

SEQ ID NO: 2906541 - RNA, 16 nt, Human
gaaacgucuucuaaac

SEQ ID NO: 2906542 - RNA, 21 nt, Human
gaaaccgccuaguuuacuguu

SEQ ID NO: 2906543 - RNA, 21 nt, Human
gaaacccuggaccaguggucu

SEQ ID NO: 2906544 - RNA, 14 nt, Human
gaaacccuggacca

SEQ ID NO: 2906545 - RNA, 16 nt, Human
gaaaccugggauucag

SEQ ID NO: 2906546 - RNA, 12 nt, Human
gaaaccugggcu

SEQ ID NO: 2906547 - RNA, 18 nt, Human
gaaaccugggcucugguu

SEQ ID NO: 2906548 - RNA, 18 nt, Human
gaaaccuguauaacccug

SEQ ID NO: 2906549 - RNA, 20 nt, Human
gaaaccuguauaacccuguu

SEQ ID NO: 2906550 - RNA, 21 nt, Human
gaaaccuguauaacccuguua

SEQ ID NO: 2906551 - RNA, 13 nt, Human
gaaaccuguaucu

SEQ ID NO: 2906552 - RNA, 14 nt, Human
gaaaccuguaucuu

SEQ ID NO: 2906553 - RNA, 15 nt, Human
gaaaccuguaucuuu

SEQ ID NO: 2906554 - RNA, 18 nt, Human
gaaaccuguaucuuucua

SEQ ID NO: 2906555 - RNA, 23 nt, Human
gaaaccuguaucuuucuaugcug

SEQ ID NO: 2906556 - RNA, 13 nt, Human
gaaaccugaaaaa

SEQ ID NO: 2906557 - RNA, 18 nt, Human
gaaaccugaaaaaaaguu

SEQ ID NO: 2906558 - RNA, 21 nt, Human
gaaaccuacacacugucaugc

SEQ ID NO: 2906559 - RNA, 18 nt, Human
gaaaccuaguacugcccc

SEQ ID NO: 2906560 - RNA, 16 nt, Human
gaaaccucuacauauu

SEQ ID NO: 2906561 - RNA, 17 nt, Human
gaaaccuaguacugccc

SEQ ID NO: 2906562 - RNA, 13 nt, Human
gaaacccaagcuc

SEQ ID NO: 2906563 - RNA, 14 nt, Human
gaaacccaagcucc

SEQ ID NO: 2906564 - RNA, 17 nt, Human
gaaacccaagcuccucc

SEQ ID NO: 2906565 - RNA, 18 nt, Human
gaaacccaagcuccuccu

SEQ ID NO: 2906566 - RNA, 23 nt, Human
gaaacccaagcuccuccucggaa

SEQ ID NO: 2906567 - RNA, 19 nt, Human
gaaaccaguguagccuugc

SEQ ID NO: 2906568 - RNA, 16 nt, Human
gaaacccauaggccca

SEQ ID NO: 2906569 - RNA, 18 nt, Human
gaaacccauaggcccaca

SEQ ID NO: 2906570 - RNA, 19 nt, Human
gaaacccauaggcccacac

SEQ ID NO: 2906571 - RNA, 21 nt, Human
gaaacccauaggcccacacac

SEQ ID NO: 2906572 - RNA, 22 nt, Human
gaaacccauaggcccacacaca

SEQ ID NO: 2906573 - RNA, 23 nt, Human
gaaacccauaggcccacacacag

SEQ ID NO: 2906574 - RNA, 15 nt, Human
gaaacccgaggguug

SEQ ID NO: 2906575 - RNA, 18 nt, Human
gaaacccgaggguugauu

SEQ ID NO: 2906576 - RNA, 14 nt, Human
gaaacccucuguca

SEQ ID NO: 2906577 - RNA, 19 nt, Human
gaaaccccuucucugugac

SEQ ID NO: 2906578 - RNA, 20 nt, Human
gaaaccccuucucugugacc

SEQ ID NO: 2906579 - RNA, 23 nt, Human
gaaacucuuaucucagucaugca

SEQ ID NO: 2906580 - RNA, 20 nt, Human
gaaacucuugcuauugaauu

SEQ ID NO: 2906581 - RNA, 22 nt, Human
gaaacucuugcuauugaauuga

SEQ ID NO: 2906582 - RNA, 14 nt, Human
gaaagacuuccaaa

SEQ ID NO: 2906583 - RNA, 16 nt, Human
gaaagacuuccaaaga

SEQ ID NO: 2906584 - RNA, 20 nt, Human
gaaagacuuccaaagaaugu

SEQ ID NO: 2906585 - RNA, 21 nt, Human
gaaacuccaccuugcggggau

SEQ ID NO: 2906586 - RNA, 14 nt, Human
gaaacucuuaucuc

SEQ ID NO: 2906587 - RNA, 15 nt, Human
gaaacucuuaucuca

SEQ ID NO: 2906588 - RNA, 16 nt, Human
gaaacucuuaucucag

SEQ ID NO: 2906589 - RNA, 20 nt, Human
gaaacucuuaucucagucau

SEQ ID NO: 2906590 - RNA, 21 nt, Human
gaaacucuuaucucagucaug

SEQ ID NO: 2906591 - RNA, 18 nt, Human
gaaacucccauguaugga

SEQ ID NO: 2906592 - RNA, 14 nt, Human
gaaagagaaggugg

SEQ ID NO: 2906593 - RNA, 15 nt, Human
gaaagagaagguggg

SEQ ID NO: 2906594 - RNA, 22 nt, Human
gaaagcagauaccucacccugc

SEQ ID NO: 2906595 - RNA, 20 nt, Human
gaaagcagauaccucacccu

SEQ ID NO: 2906596 - RNA, 12 nt, Human
gaaagcaggggc

SEQ ID NO: 2906597 - RNA, 13 nt, Human
gaaagcaggggcu

SEQ ID NO: 2906598 - RNA, 14 nt, Human
gaaagcaggggcua

SEQ ID NO: 2906599 - RNA, 19 nt, Human
gaaagcaggggcuacaaga

SEQ ID NO: 2906600 - RNA, 23 nt, Human
gaaagcaggggcuacaagaggga

SEQ ID NO: 2906601 - RNA, 15 nt, Human
gaaagcaguugaaau

SEQ ID NO: 2906602 - RNA, 23 nt, Human
gaaagcauauggguuagauguug

SEQ ID NO: 2906603 - RNA, 17 nt, Human
gaaagcaucaccucagg

SEQ ID NO: 2906604 - RNA, 16 nt, Human
gaaagcaucaccucag

SEQ ID NO: 2906605 - RNA, 19 nt, Human
gaaagcaucaccucaggcc

SEQ ID NO: 2906606 - RNA, 18 nt, Human
gaaagcaucaccucaggc

SEQ ID NO: 2906607 - RNA, 18 nt, Human
gaaagccccagcacuaac

SEQ ID NO: 2906608 - RNA, 14 nt, Human
gaaagccccagcac

SEQ ID NO: 2906609 - RNA, 13 nt, Human
gaaagcucuagaa

SEQ ID NO: 2906610 - RNA, 18 nt, Human
gaaagcucuguugcaauu

SEQ ID NO: 2906611 - RNA, 12 nt, Human
gaaagcucuaga

SEQ ID NO: 2906612 - RNA, 17 nt, Human
gaaagcugagaacuccu

SEQ ID NO: 2906613 - RNA, 19 nt, Human
gaaagcugagaacuccuga

SEQ ID NO: 2906614 - RNA, 21 nt, Human
gaaagcugagaacuccugacu

SEQ ID NO: 2906615 - RNA, 22 nt, Human
gaaagcugagaacuccugacug

SEQ ID NO: 2906616 - RNA, 21 nt, Human
gaaagcugguaaacuauuugu

SEQ ID NO: 2906617 - RNA, 17 nt, Human
gaaagcugugaacaggc

SEQ ID NO: 2906618 - RNA, 24 nt, Human
gaaagcugugaacaggcugggcug

SEQ ID NO: 2906619 - RNA, 17 nt, Human
gaaagcuucaaacugca

SEQ ID NO: 2906620 - RNA, 16 nt, Human
gaaagccuuagggaag

SEQ ID NO: 2906621 - RNA, 16 nt, Human
gaaagccucugcugcc

SEQ ID NO: 2906622 - RNA, 22 nt, Human
gaaagccuguaagccugcaagc

SEQ ID NO: 2906623 - RNA, 15 nt, Human
gaaagccucugcugc

SEQ ID NO: 2906624 - RNA, 18 nt, Human
gaaagccucacugauaua

SEQ ID NO: 2906625 - RNA, 20 nt, Human
gaaaaugaauaucuauuaau

SEQ ID NO: 2906626 - RNA, 14 nt, Human
gaaaaugaaaaaca

SEQ ID NO: 2906627 - RNA, 14 nt, Human
gaaaaucuaauauu

SEQ ID NO: 2906628 - RNA, 20 nt, Human
gaaaaucuaauauuaaaaau

SEQ ID NO: 2906629 - RNA, 21 nt, Human
gaaaaucuaauauuaaaaaua

SEQ ID NO: 2906630 - RNA, 23 nt, Human
gaaaaucuaauauuaaaaauaug

SEQ ID NO: 2906631 - RNA, 21 nt, Human
gaaaauauuauguguuuccau

SEQ ID NO: 2906632 - RNA, 19 nt, Human
gaaaagugcauauuuaucc

SEQ ID NO: 2906633 - RNA, 20 nt, Human
gaaaagugcauauuuaucca

SEQ ID NO: 2906634 - RNA, 10 nt, Human
gaaaaguuau

SEQ ID NO: 2906635 - RNA, 16 nt, Human
gaaaagucguuuucca

SEQ ID NO: 2906636 - RNA, 14 nt, Human
gaaaagcuucuuaa

SEQ ID NO: 2906637 - RNA, 16 nt, Human
gaaaagcuucuuaauu

SEQ ID NO: 2906638 - RNA, 18 nt, Human
gaaaagcuucuuaauuaa

SEQ ID NO: 2906639 - RNA, 22 nt, Human
gaaaagcuucuuaauuaauuug

SEQ ID NO: 2906640 - RNA, 23 nt, Human
gaaaagcuucuuaauuaauuuga

SEQ ID NO: 2906641 - RNA, 14 nt, Human
gaaaaggaaaagaa

SEQ ID NO: 2906642 - RNA, 15 nt, Human
gaaaaggaaaagaaa

SEQ ID NO: 2906643 - RNA, 16 nt, Human
gaaaaggaaaagaaaa

SEQ ID NO: 2906644 - RNA, 17 nt, Human
gaaaaggaaaagaaaaa

SEQ ID NO: 2906645 - RNA, 18 nt, Human
gaaaaggaaaagaaaaaa

SEQ ID NO: 2906646 - RNA, 19 nt, Human
gaaaagcugcugacagugu

SEQ ID NO: 2906647 - RNA, 21 nt, Human
gaaaacagucaaccaacccca

SEQ ID NO: 2906648 - RNA, 21 nt, Human
gaaaacagaacaucauuagaa

SEQ ID NO: 2906649 - RNA, 18 nt, Human
cuuuuuguaagugagugu

SEQ ID NO: 2906650 - RNA, 19 nt, Human
cuuuuuguaagugagugug

SEQ ID NO: 2906651 - RNA, 23 nt, Human
cuuuuugguguauagaaguuugu

SEQ ID NO: 2906652 - RNA, 15 nt, Human
cuuuuucuuuuguaa

SEQ ID NO: 2906653 - RNA, 16 nt, Human
cuuuuucuuuuguaag

SEQ ID NO: 2906654 - RNA, 17 nt, Human
cuuuuucuuuuguaagu

SEQ ID NO: 2906655 - RNA, 18 nt, Human
cuuuuucuuuuguaagug

SEQ ID NO: 2906656 - RNA, 13 nt, Human
cuuuuugaaauga

SEQ ID NO: 2906657 - RNA, 15 nt, Human
cuuuuugaaaugaaa

SEQ ID NO: 2906658 - RNA, 17 nt, Human
cuuuuugaaaugaaauu

SEQ ID NO: 2906659 - RNA, 18 nt, Human
cuuuuugaaaugaaauuu

SEQ ID NO: 2906660 - RNA, 22 nt, Human
cuuuuugaaaugaaauuuaaac

SEQ ID NO: 2906661 - RNA, 13 nt, Human
cuuuuugugaaga

SEQ ID NO: 2906662 - RNA, 18 nt, Human
cuuuuugugaaguuaggu

SEQ ID NO: 2906663 - RNA, 21 nt, Human
gaaaaagcuccuguccuccca

SEQ ID NO: 2906664 - RNA, 11 nt, Human
gaaaaagcucc

SEQ ID NO: 2906665 - RNA, 20 nt, Human
gaaaaagcuccaugugccuc

SEQ ID NO: 2906666 - RNA, 19 nt, Human
cuuuuguuacuguucuugc

SEQ ID NO: 2906667 - RNA, 20 nt, Human
cuuuuguuacuguucuugcu

SEQ ID NO: 2906668 - RNA, 21 nt, Human
cuuuuguuacuguucuugcug

SEQ ID NO: 2906669 - RNA, 22 nt, Human
cuuuuguuacuguucuugcugc

SEQ ID NO: 2906670 - RNA, 23 nt, Human
cuuuuguuacuguucuugcugcu

SEQ ID NO: 2906671 - RNA, 22 nt, Human
cuuuuguucagggcugugaucg

SEQ ID NO: 2906672 - RNA, 14 nt, Human
cuuuguuauaccau

SEQ ID NO: 2906673 - RNA, 14 nt, Human
cuuuguguuucuau

SEQ ID NO: 2906674 - RNA, 16 nt, Human
cuuuguuaagguccug

SEQ ID NO: 2906675 - RNA, 23 nt, Human
cuuuguguuucuauugacuucaa

SEQ ID NO: 2906676 - RNA, 17 nt, Human
cuuuguguuugguuuac

SEQ ID NO: 2906677 - RNA, 18 nt, Human
cuuuguguuugguuuaca

SEQ ID NO: 2906678 - RNA, 19 nt, Human
cuuuguguuugguuuacau

SEQ ID NO: 2906679 - RNA, 20 nt, Human
cuuuguguuugguuuacauu

SEQ ID NO: 2906680 - RNA, 21 nt, Human
cuuuguguuugguuuacauuu

SEQ ID NO: 2906681 - RNA, 22 nt, Human
cuuuguguuugguuuacauuua

SEQ ID NO: 2906682 - RNA, 14 nt, Human
cuuuguuaaaaaaa

SEQ ID NO: 2906683 - RNA, 18 nt, Human
cuuuguguguacucacug

SEQ ID NO: 2906684 - RNA, 20 nt, Human
cuuuguggauucugaggccc

SEQ ID NO: 2906685 - RNA, 18 nt, Human
cuuuguguagcuuugcuc

SEQ ID NO: 2906686 - RNA, 22 nt, Human
cuuuguguauuuuucaauaaua

SEQ ID NO: 2906687 - RNA, 11 nt, Human
cuuuguguugg

SEQ ID NO: 2906688 - RNA, 20 nt, Human
cuuuguguugggagggauua

SEQ ID NO: 2906689 - RNA, 13 nt, Human
cuuuguguuguaa

SEQ ID NO: 2906690 - RNA, 14 nt, Human
cuuuguguuguaau

SEQ ID NO: 2906691 - RNA, 15 nt, Human
cuuuguguuguaauu

SEQ ID NO: 2906692 - RNA, 17 nt, Human
cuuuguguuguaauucu

SEQ ID NO: 2906693 - RNA, 22 nt, Human
cuuuguguuguaauucuucagu

SEQ ID NO: 2906694 - RNA, 19 nt, Human
cuuuguggaccaauuauug

SEQ ID NO: 2906695 - RNA, 13 nt, Human
cuuuuucugauua

SEQ ID NO: 2906696 - RNA, 16 nt, Human
cuuuuucugauuagcu

SEQ ID NO: 2906697 - RNA, 18 nt, Human
cuuuuucugauuagcuuu

SEQ ID NO: 2906698 - RNA, 19 nt, Human
cuuuuucugauuagcuuug

SEQ ID NO: 2906699 - RNA, 21 nt, Human
cuuuuucugauuagcuuugug

SEQ ID NO: 2906700 - RNA, 22 nt, Human
cuuuuucugauuagcuuugugu

SEQ ID NO: 2906701 - RNA, 20 nt, Human
cuuuuuauuuauauguacug

SEQ ID NO: 2906702 - RNA, 19 nt, Human
cuuuuuauuuauauguacu

SEQ ID NO: 2906703 - RNA, 13 nt, Human
cuuuuuauuuaua

SEQ ID NO: 2906704 - RNA, 19 nt, Human
cuuuuuauugaaucuauuu

SEQ ID NO: 2906705 - RNA, 14 nt, Human
cuuuuucuguugua

SEQ ID NO: 2906706 - RNA, 15 nt, Human
cuuuuucuguuguaa

SEQ ID NO: 2906707 - RNA, 16 nt, Human
cuuuuucuguuguaac

SEQ ID NO: 2906708 - RNA, 17 nt, Human
cuuuuucuguuguaacu

SEQ ID NO: 2906709 - RNA, 18 nt, Human
cuuuuucuguuguaacuu

SEQ ID NO: 2906710 - RNA, 14 nt, Human
cuuuuucuuccuca

SEQ ID NO: 2906711 - RNA, 13 nt, Human
cuuuuucuuccuc

SEQ ID NO: 2906712 - RNA, 13 nt, Human
cuuuuuauugaau

SEQ ID NO: 2906713 - RNA, 14 nt, Human
cuuuuuauugaauc

SEQ ID NO: 2906714 - RNA, 12 nt, Human
cuuuuuauuuau

SEQ ID NO: 2906715 - RNA, 15 nt, Human
cuuuuuauugaaucu

SEQ ID NO: 2906716 - RNA, 17 nt, Human
cuuuuuauugaaucuau

SEQ ID NO: 2906717 - RNA, 13 nt, Human
cuuuuguucgcau

SEQ ID NO: 2906718 - RNA, 16 nt, Human
cuuguaaauagcucag

SEQ ID NO: 2906719 - RNA, 13 nt, Human
cuuguacaugugu

SEQ ID NO: 2906720 - RNA, 18 nt, Human
cuuguaaauagcucaggu

SEQ ID NO: 2906721 - RNA, 17 nt, Human
cuuguaaauagcucagg

SEQ ID NO: 2906722 - RNA, 18 nt, Human
cuugucaagccugugcaa

SEQ ID NO: 2906723 - RNA, 19 nt, Human
cuugucaagccugugcaaa

SEQ ID NO: 2906724 - RNA, 23 nt, Human
cuugucaagccugugcaaaaaaa

SEQ ID NO: 2906725 - RNA, 15 nt, Human
cuuguauaguguaaa

SEQ ID NO: 2906726 - RNA, 16 nt, Human
cuuguauaguguaaaa

SEQ ID NO: 2906727 - RNA, 17 nt, Human
cuuguauaguguaaaau

SEQ ID NO: 2906728 - RNA, 19 nt, Human
cuuguauaagauccuagau

SEQ ID NO: 2906729 - RNA, 20 nt, Human
cuuguauauacgcaucuaua

SEQ ID NO: 2906730 - RNA, 23 nt, Human
cuuguacauguguagccugugca

SEQ ID NO: 2906731 - RNA, 22 nt, Human
cuuguacccccagguggaaggc

SEQ ID NO: 2906732 - RNA, 18 nt, Human
cuuguaccucuggcugac

SEQ ID NO: 2906733 - RNA, 20 nt, Human
cuuguaccucuggcugacua

SEQ ID NO: 2906734 - RNA, 23 nt, Human
cuuguaccucuggcugacuaaau

SEQ ID NO: 2906735 - RNA, 21 nt, Human
cuuguaguuuaccucuuuaaa

SEQ ID NO: 2906736 - RNA, 13 nt, Human
cuuguauaaaugu

SEQ ID NO: 2906737 - RNA, 14 nt, Human
cuuguauaaaugua

SEQ ID NO: 2906738 - RNA, 15 nt, Human
cuuguauaaauguau

SEQ ID NO: 2906739 - RNA, 17 nt, Human
cuuguauaaauguauau

SEQ ID NO: 2906740 - RNA, 18 nt, Human
cuuguauaaauguauaua

SEQ ID NO: 2906741 - RNA, 19 nt, Human
cuuguauaaauguauauac

SEQ ID NO: 2906742 - RNA, 21 nt, Human
cuuguauaaauguauauacac

SEQ ID NO: 2906743 - RNA, 23 nt, Human
cuuguauaaauguauauacacau

SEQ ID NO: 2906744 - RNA, 14 nt, Human
cuuguacaugugua

SEQ ID NO: 2906745 - RNA, 19 nt, Human
cuuguacauguguagccug

SEQ ID NO: 2906746 - RNA, 20 nt, Human
cuuguacauguguagccugu

SEQ ID NO: 2906747 - RNA, 22 nt, Human
cuuguacauguguagccugugc

SEQ ID NO: 2906748 - RNA, 22 nt, Human
cuuguagcuguaaaacgcuguc

SEQ ID NO: 2906749 - RNA, 21 nt, Human
cuuguaggagcugagguuuca

SEQ ID NO: 2906750 - RNA, 20 nt, Human
cuugugguuuucaaauugga

SEQ ID NO: 2906751 - RNA, 16 nt, Human
cuuguguaauuuaugu

SEQ ID NO: 2906752 - RNA, 18 nt, Human
cuuguguaauuuauguga

SEQ ID NO: 2906753 - RNA, 20 nt, Human
cuuguguaauuuaugugaaa

SEQ ID NO: 2906754 - RNA, 21 nt, Human
cuugucccacgugucuuccac

SEQ ID NO: 2906755 - RNA, 22 nt, Human
cuugucccacgugucuuccacu

SEQ ID NO: 2906756 - RNA, 15 nt, Human
cuuguccacccaccu

SEQ ID NO: 2906757 - RNA, 20 nt, Human
cuuguuauauuaagcagaaa

SEQ ID NO: 2906758 - RNA, 13 nt, Human
cuuguuauuguga

SEQ ID NO: 2906759 - RNA, 14 nt, Human
cuuguuauugugaa

SEQ ID NO: 2906760 - RNA, 15 nt, Human
cuuguuauugugaau

SEQ ID NO: 2906761 - RNA, 16 nt, Human
cuuguuauugugaaug

SEQ ID NO: 2906762 - RNA, 17 nt, Human
cuuguuauugugaauga

SEQ ID NO: 2906763 - RNA, 18 nt, Human
cuuguuauugugaaugau

SEQ ID NO: 2906764 - RNA, 15 nt, Human
cuuguuccaaggcca

SEQ ID NO: 2906765 - RNA, 16 nt, Human
cuuguuccaaggccag

SEQ ID NO: 2906766 - RNA, 17 nt, Human
cuuguuccaaggccagg

SEQ ID NO: 2906767 - RNA, 18 nt, Human
cuuguuccaaugccacau

SEQ ID NO: 2906768 - RNA, 21 nt, Human
cuuguuccaaugccacauacu

SEQ ID NO: 2906769 - RNA, 20 nt, Human
cuuguuccagcccuauucug

SEQ ID NO: 2906770 - RNA, 13 nt, Human
cuuguuccagcuc

SEQ ID NO: 2906771 - RNA, 14 nt, Human
cuuuaaaagugauc

SEQ ID NO: 2906772 - RNA, 22 nt, Human
cuuuaaaagagagagagagaaa

SEQ ID NO: 2906773 - RNA, 21 nt, Human
cuuguuccccacugacagccu

SEQ ID NO: 2906774 - RNA, 16 nt, Human
cuuguuccagcucuuu

SEQ ID NO: 2906775 - RNA, 14 nt, Human
cuuguucccucucc

SEQ ID NO: 2906776 - RNA, 17 nt, Human
cuuuaaacaguauuuca

SEQ ID NO: 2906777 - RNA, 18 nt, Human
cuuuaaacaguauuucau

SEQ ID NO: 2906778 - RNA, 18 nt, Human
cuuuacggacacccccuc

SEQ ID NO: 2906779 - RNA, 21 nt, Human
cuuuacguguuuaaaaaaaag

SEQ ID NO: 2906780 - RNA, 22 nt, Human
cuuuacguguuuaaaaaaaagc

SEQ ID NO: 2906781 - RNA, 13 nt, Human
cuuuacucccaag

SEQ ID NO: 2906782 - RNA, 22 nt, Human
cuuuacucccaagacuucauug

SEQ ID NO: 2906783 - RNA, 14 nt, Human
cuuuacuccucaca

SEQ ID NO: 2906784 - RNA, 17 nt, Human
cuuuacuccucacacuu

SEQ ID NO: 2906785 - RNA, 18 nt, Human
cuuuacuccucacacuua

SEQ ID NO: 2906786 - RNA, 19 nt, Human
cuuuacuccucacacuuac

SEQ ID NO: 2906787 - RNA, 14 nt, Human
cuuuacugacccug

SEQ ID NO: 2906788 - RNA, 16 nt, Human
cuuuacugacccuggg

SEQ ID NO: 2906789 - RNA, 19 nt, Human
cuuuacugacccuggggcu

SEQ ID NO: 2906790 - RNA, 23 nt, Human
cuuuagcaaaaaaaacccaugug

SEQ ID NO: 2906791 - RNA, 18 nt, Human
cuuuagccccucccaagc

SEQ ID NO: 2906792 - RNA, 22 nt, Human
cuuuagccccucccaagcuggc

SEQ ID NO: 2906793 - RNA, 23 nt, Human
cuuuagccccucccaagcuggcu

SEQ ID NO: 2906794 - RNA, 19 nt, Human
cuuuaugauaauagauucu

SEQ ID NO: 2906795 - RNA, 20 nt, Human
cuuuaugauaauagauucuc

SEQ ID NO: 2906796 - RNA, 16 nt, Human
cuuuaugauuuucaua

SEQ ID NO: 2906797 - RNA, 18 nt, Human
cuuuaugauuuucauaac

SEQ ID NO: 2906798 - RNA, 21 nt, Human
cuuuaugauuuucauaacuua

SEQ ID NO: 2906799 - RNA, 22 nt, Human
cuuuaugaaugaaaaaacaguc

SEQ ID NO: 2906800 - RNA, 13 nt, Human
cuuuaucuguucu

SEQ ID NO: 2906801 - RNA, 18 nt, Human
cuuuaucuguucuugcua

SEQ ID NO: 2906802 - RNA, 19 nt, Human
cuuuaucaccuggcuuguu

SEQ ID NO: 2906803 - RNA, 20 nt, Human
cuuuaucaccuggcuuguuu

SEQ ID NO: 2906804 - RNA, 22 nt, Human
cuuuaucaccuggcuuguuuau

SEQ ID NO: 2906805 - RNA, 13 nt, Human
cuuuaucacuuuu

SEQ ID NO: 2906806 - RNA, 17 nt, Human
cuuuaucacuuuuugaa

SEQ ID NO: 2906807 - RNA, 18 nt, Human
cuuuaucacuuuuugaac

SEQ ID NO: 2906808 - RNA, 22 nt, Human
cuuuaucacuuuuugaacuaag

SEQ ID NO: 2906809 - RNA, 13 nt, Human
cuuuauauuuagu

SEQ ID NO: 2906810 - RNA, 15 nt, Human
cuuuauauuuaucca

SEQ ID NO: 2906811 - RNA, 18 nt, Human
cuuuauauuuauccacua

SEQ ID NO: 2906812 - RNA, 12 nt, Human
cuuuauauuuag

SEQ ID NO: 2906813 - RNA, 21 nt, Human
cuuuaucuaauaccucugugu

SEQ ID NO: 2906814 - RNA, 22 nt, Human
cuuuaucuaauaccucugugug

SEQ ID NO: 2906815 - RNA, 15 nt, Human
cuuuagcgcccaguu

SEQ ID NO: 2906816 - RNA, 14 nt, Human
cuuuagcgcccagu

SEQ ID NO: 2906817 - RNA, 20 nt, Human
cuuuauagugcacaaaauga

SEQ ID NO: 2906818 - RNA, 21 nt, Human
cuuuauagugcacaaaaugaa

SEQ ID NO: 2906819 - RNA, 16 nt, Human
cuuuauauacaauaau

SEQ ID NO: 2906820 - RNA, 19 nt, Human
cuuuauauacaauaaugga

SEQ ID NO: 2906821 - RNA, 21 nt, Human
cuuuauauacaauaauggaaa

SEQ ID NO: 2906822 - RNA, 22 nt, Human
cuuuauauacaauaauggaaaa

SEQ ID NO: 2906823 - RNA, 23 nt, Human
cuuuauauacaauaauggaaaaa

SEQ ID NO: 2906824 - RNA, 15 nt, Human
cuuuauauauggaca

SEQ ID NO: 2906825 - RNA, 16 nt, Human
cuuuauauauggacau

SEQ ID NO: 2906826 - RNA, 12 nt, Human
cuuuauacauua

SEQ ID NO: 2906827 - RNA, 14 nt, Human
cuuuauacauuagu

SEQ ID NO: 2906828 - RNA, 19 nt, Human
cuuuauacauuaguaaaug

SEQ ID NO: 2906829 - RNA, 20 nt, Human
cuuuauacauuaguaaaugu

SEQ ID NO: 2906830 - RNA, 22 nt, Human
cuuuauacauuaguaaaugucu

SEQ ID NO: 2906831 - RNA, 23 nt, Human
cuuuauacauuaguaaaugucuu

SEQ ID NO: 2906832 - RNA, 16 nt, Human
cuuucugcuuguguua

SEQ ID NO: 2906833 - RNA, 13 nt, Human
cuuucucuuucuc

SEQ ID NO: 2906834 - RNA, 13 nt, Human
cuuucucucuucc

SEQ ID NO: 2906835 - RNA, 15 nt, Human
cuuucucucuucccu

SEQ ID NO: 2906836 - RNA, 20 nt, Human
cuuucucucagccuuacauu

SEQ ID NO: 2906837 - RNA, 21 nt, Human
cuuucucucagccuuacauuu

SEQ ID NO: 2906838 - RNA, 22 nt, Human
cuuucucucagccuuacauuug

SEQ ID NO: 2906839 - RNA, 13 nt, Human
cuuucucucccca

SEQ ID NO: 2906840 - RNA, 14 nt, Human
cuuucucuccccaa

SEQ ID NO: 2906841 - RNA, 17 nt, Human
cuuucucuccccaaccc

SEQ ID NO: 2906842 - RNA, 18 nt, Human
cuuucucuccccaacccc

SEQ ID NO: 2906843 - RNA, 13 nt, Human
cuuucuguaaacu

SEQ ID NO: 2906844 - RNA, 17 nt, Human
cuuucuguaccauuuau

SEQ ID NO: 2906845 - RNA, 13 nt, Human
cuuucuguauaua

SEQ ID NO: 2906846 - RNA, 11 nt, Human
cuuucuuccuc

SEQ ID NO: 2906847 - RNA, 14 nt, Human
cuuucugggccaag

SEQ ID NO: 2906848 - RNA, 20 nt, Human
cuuucugggcaccggggccu

SEQ ID NO: 2906849 - RNA, 16 nt, Human
cuuucuguaaccauaa

SEQ ID NO: 2906850 - RNA, 13 nt, Human
cuuucuggcucuc

SEQ ID NO: 2906851 - RNA, 12 nt, Human
cuuucccuuccu

SEQ ID NO: 2906852 - RNA, 14 nt, Human
cuuucccuuccucu

SEQ ID NO: 2906853 - RNA, 16 nt, Human
cuuucccuuccucuuc

SEQ ID NO: 2906854 - RNA, 17 nt, Human
cuuucccuuccucuucg

SEQ ID NO: 2906855 - RNA, 17 nt, Human
cuuucccuucaguaccc

SEQ ID NO: 2906856 - RNA, 13 nt, Human
cuuuccaguuaag

SEQ ID NO: 2906857 - RNA, 20 nt, Human
cuuuaugguccuaaaagcaa

SEQ ID NO: 2906858 - RNA, 22 nt, Human
cuuuaugguccuaaaagcaaaa

SEQ ID NO: 2906859 - RNA, 23 nt, Human
cuuuaucacaaccaccguuacaa

SEQ ID NO: 2906860 - RNA, 12 nt, Human
cuuuccauuuug

SEQ ID NO: 2906861 - RNA, 17 nt, Human
cuuuccccuuccuuuua

SEQ ID NO: 2906862 - RNA, 18 nt, Human
cuuuccccuuccuuuuaa

SEQ ID NO: 2906863 - RNA, 15 nt, Human
cuuugucugaaaaau

SEQ ID NO: 2906864 - RNA, 13 nt, Human
cuuugucuuucaa

SEQ ID NO: 2906865 - RNA, 14 nt, Human
cuuugucuuucaaa

SEQ ID NO: 2906866 - RNA, 16 nt, Human
cuuugucuuucaaacu

SEQ ID NO: 2906867 - RNA, 19 nt, Human
cuuuggcuauuagagauca

SEQ ID NO: 2906868 - RNA, 13 nt, Human
cuuuggccugagu

SEQ ID NO: 2906869 - RNA, 14 nt, Human
cuuuggccugaguu

SEQ ID NO: 2906870 - RNA, 15 nt, Human
cuuugcgccugugac

SEQ ID NO: 2906871 - RNA, 23 nt, Human
cuuugccuugggcugcuccucau

SEQ ID NO: 2906872 - RNA, 16 nt, Human
cuuugucaaaaggaag

SEQ ID NO: 2906873 - RNA, 18 nt, Human
cuuugucaucuuucuucu

SEQ ID NO: 2906874 - RNA, 13 nt, Human
cuuuggcucugga

SEQ ID NO: 2906875 - RNA, 14 nt, Human
cuuuggcucuggag

SEQ ID NO: 2906876 - RNA, 15 nt, Human
cuuuggcucuggaga

SEQ ID NO: 2906877 - RNA, 13 nt, Human
cuuuggcuccccu

SEQ ID NO: 2906878 - RNA, 15 nt, Human
cuuuggcuccccugu

SEQ ID NO: 2906879 - RNA, 20 nt, Human
cuuugcagacaggcaagcac

SEQ ID NO: 2906880 - RNA, 13 nt, Human
cuuugcagggcag

SEQ ID NO: 2906881 - RNA, 14 nt, Human
cuuugcagggcagc

SEQ ID NO: 2906882 - RNA, 15 nt, Human
cuuugcagggcagcc

SEQ ID NO: 2906883 - RNA, 17 nt, Human
cuuugcagggcagcccc

SEQ ID NO: 2906884 - RNA, 18 nt, Human
cuuugcagggcagcccca

SEQ ID NO: 2906885 - RNA, 19 nt, Human
cuuugcagggcagccccac

SEQ ID NO: 2906886 - RNA, 16 nt, Human
cuuugcagacaggcaa

SEQ ID NO: 2906887 - RNA, 22 nt, Human
cuuugccuugggcugcuccuca

SEQ ID NO: 2906888 - RNA, 19 nt, Human
cuuugccuugggcugcucc

SEQ ID NO: 2906889 - RNA, 18 nt, Human
cuuugccuugggcugcuc

SEQ ID NO: 2906890 - RNA, 16 nt, Human
cuuugccuugggcugc

SEQ ID NO: 2906891 - RNA, 13 nt, Human
cuuugccuugggc

SEQ ID NO: 2906892 - RNA, 15 nt, Human
cuuugccuucuuuug

SEQ ID NO: 2906893 - RNA, 13 nt, Human
cuuugccuccccg

SEQ ID NO: 2906894 - RNA, 14 nt, Human
cuuugccuccugug

SEQ ID NO: 2906895 - RNA, 22 nt, Human
cuuugccuccuguguacugugu

SEQ ID NO: 2906896 - RNA, 11 nt, Human
cuuugccuggu

SEQ ID NO: 2906897 - RNA, 12 nt, Human
cuuugccuccag

SEQ ID NO: 2906898 - RNA, 21 nt, Human
cuuugccuccagaagcacugg

SEQ ID NO: 2906899 - RNA, 12 nt, Human
cuuucuuccucu

SEQ ID NO: 2906900 - RNA, 13 nt, Human
cuuucuuccucug

SEQ ID NO: 2906901 - RNA, 14 nt, Human
cuuucuuccucugc

SEQ ID NO: 2906902 - RNA, 15 nt, Human
cuuucuuccucugcu

SEQ ID NO: 2906903 - RNA, 13 nt, Human
cuuauuuagagau

SEQ ID NO: 2906904 - RNA, 19 nt, Human
cuuauuuauguuaaaagau

SEQ ID NO: 2906905 - RNA, 19 nt, Human
cuuaucucagucaugcaua

SEQ ID NO: 2906906 - RNA, 20 nt, Human
cuuaucucagucaugcauaa

SEQ ID NO: 2906907 - RNA, 13 nt, Human
cuuauccuuccuc

SEQ ID NO: 2906908 - RNA, 18 nt, Human
cuuauccuuccucuccuu

SEQ ID NO: 2906909 - RNA, 13 nt, Human
cuuauccugcauu

SEQ ID NO: 2906910 - RNA, 14 nt, Human
cuuauccugcauug

SEQ ID NO: 2906911 - RNA, 17 nt, Human
cuuauccugcauuguua

SEQ ID NO: 2906912 - RNA, 19 nt, Human
cuuauccuucaucuuuuaa

SEQ ID NO: 2906913 - RNA, 22 nt, Human
cuuauccuucaucuuuuaaaga

SEQ ID NO: 2906914 - RNA, 20 nt, Human
cuuauuuuaagcauugugag

SEQ ID NO: 2906915 - RNA, 12 nt, Human
cuuauuuuaaug

SEQ ID NO: 2906916 - RNA, 16 nt, Human
cuuauuuuaaugugau

SEQ ID NO: 2906917 - RNA, 17 nt, Human
cuuauuuuaaugugaug

SEQ ID NO: 2906918 - RNA, 15 nt, Human
cuuauuuuauuucca

SEQ ID NO: 2906919 - RNA, 20 nt, Human
cuuauuuuauuuccaucaug

SEQ ID NO: 2906920 - RNA, 15 nt, Human
cuuauuugcuucauu

SEQ ID NO: 2906921 - RNA, 17 nt, Human
cuuauuugcuucauugu

SEQ ID NO: 2906922 - RNA, 23 nt, Human
cuucaacauaacccacuugucac

SEQ ID NO: 2906923 - RNA, 17 nt, Human
cuucaaagcaaaugucu

SEQ ID NO: 2906924 - RNA, 22 nt, Human
cuucaaaauguuaucuucucaa

SEQ ID NO: 2906925 - RNA, 23 nt, Human
cuucaaaauguuaucuucucaag

SEQ ID NO: 2906926 - RNA, 20 nt, Human
cuucaaaauguuaucuucuc

SEQ ID NO: 2906927 - RNA, 15 nt, Human
cuucaaaauguauau

SEQ ID NO: 2906928 - RNA, 19 nt, Human
cuucaaaauguauauauuu

SEQ ID NO: 2906929 - RNA, 20 nt, Human
cuucaaaauguauauauuua

SEQ ID NO: 2906930 - RNA, 15 nt, Human
cuucaauuaauaaaa

SEQ ID NO: 2906931 - RNA, 16 nt, Human
cuucaauuccugggcc

SEQ ID NO: 2906932 - RNA, 15 nt, Human
cuucaauuccugggc

SEQ ID NO: 2906933 - RNA, 13 nt, Human
cuucaaucccagc

SEQ ID NO: 2906934 - RNA, 14 nt, Human
cuucaaucccagcc

SEQ ID NO: 2906935 - RNA, 18 nt, Human
cuucaaugggcucuucca

SEQ ID NO: 2906936 - RNA, 19 nt, Human
cuucaaugggcucuuccaa

SEQ ID NO: 2906937 - RNA, 19 nt, Human
cuucaaguuagcucaggag

SEQ ID NO: 2906938 - RNA, 18 nt, Human
cuucaaguuagcucagga

SEQ ID NO: 2906939 - RNA, 17 nt, Human
cuucaaguuagcucagg

SEQ ID NO: 2906940 - RNA, 16 nt, Human
cuucaaguuagcucag

SEQ ID NO: 2906941 - RNA, 15 nt, Human
cuucaauaaaucuuu

SEQ ID NO: 2906942 - RNA, 20 nt, Human
cuucaauaaaucuuuggaaa

SEQ ID NO: 2906943 - RNA, 20 nt, Human
cuucaaguuagcucaggagg

SEQ ID NO: 2906944 - RNA, 16 nt, Human
cuucaauaauugucca

SEQ ID NO: 2906945 - RNA, 19 nt, Human
cuucaauaguucaaggaac

SEQ ID NO: 2906946 - RNA, 17 nt, Human
cuucacaguagagccag

SEQ ID NO: 2906947 - RNA, 14 nt, Human
cuucacauuaaaaa

SEQ ID NO: 2906948 - RNA, 15 nt, Human
cuucacauuaaaaaa

SEQ ID NO: 2906949 - RNA, 17 nt, Human
cuucacauuaaaaaaug

SEQ ID NO: 2906950 - RNA, 21 nt, Human
cuucacauuccccuggggacc

SEQ ID NO: 2906951 - RNA, 22 nt, Human
cuucacauuccccuggggaccc

SEQ ID NO: 2906952 - RNA, 15 nt, Human
cuucacaguagagcc

SEQ ID NO: 2906953 - RNA, 16 nt, Human
cuucacagcucugugu

SEQ ID NO: 2906954 - RNA, 19 nt, Human
cuucaaggcuucagucuca

SEQ ID NO: 2906955 - RNA, 16 nt, Human
cuucaaggcuuccacu

SEQ ID NO: 2906956 - RNA, 15 nt, Human
cuucaaggugacaga

SEQ ID NO: 2906957 - RNA, 23 nt, Human
cuucaaggugacagaaggaccag

SEQ ID NO: 2906958 - RNA, 15 nt, Human
cuucaacauuuacau

SEQ ID NO: 2906959 - RNA, 16 nt, Human
cuucaacguuucuuca

SEQ ID NO: 2906960 - RNA, 17 nt, Human
cuucaacguuucuucac

SEQ ID NO: 2906961 - RNA, 19 nt, Human
cuucaacguuucuucacuu

SEQ ID NO: 2906962 - RNA, 21 nt, Human
cuucaacguuucuucacuuuu

SEQ ID NO: 2906963 - RNA, 22 nt, Human
cuucaacguuucuucacuuuug

SEQ ID NO: 2906964 - RNA, 20 nt, Human
cuucaaccauuccccauggg

SEQ ID NO: 2906965 - RNA, 13 nt, Human
cuucaacauccug

SEQ ID NO: 2906966 - RNA, 16 nt, Human
cuucaacauccugcca

SEQ ID NO: 2906967 - RNA, 17 nt, Human
cuucaacauccugccag

SEQ ID NO: 2906968 - RNA, 18 nt, Human
cuucaacauccugccagc

SEQ ID NO: 2906969 - RNA, 20 nt, Human
cuucaacauccugccagccc

SEQ ID NO: 2906970 - RNA, 21 nt, Human
cuucaacauccugccagcccc

SEQ ID NO: 2906971 - RNA, 16 nt, Human
cuucaaccauucccca

SEQ ID NO: 2906972 - RNA, 15 nt, Human
cuguucucuucuuca

SEQ ID NO: 2906973 - RNA, 16 nt, Human
cuguucucuucuucau

SEQ ID NO: 2906974 - RNA, 13 nt, Human
cuguucugcacug

SEQ ID NO: 2906975 - RNA, 14 nt, Human
cuguucugcacuga

SEQ ID NO: 2906976 - RNA, 15 nt, Human
cuguucugcacugaa

SEQ ID NO: 2906977 - RNA, 16 nt, Human
cuguucugcacugaaa

SEQ ID NO: 2906978 - RNA, 17 nt, Human
cuguucugcacugaaaa

SEQ ID NO: 2906979 - RNA, 18 nt, Human
cuguucugcacugaaaag

SEQ ID NO: 2906980 - RNA, 14 nt, Human
cuguucugcagaca

SEQ ID NO: 2906981 - RNA, 20 nt, Human
cuguucugggugcagcugag

SEQ ID NO: 2906982 - RNA, 21 nt, Human
cuguguggccacuucugucca

SEQ ID NO: 2906983 - RNA, 14 nt, Human
cuguucugggcucu

SEQ ID NO: 2906984 - RNA, 16 nt, Human
cuguucugcacacagc

SEQ ID NO: 2906985 - RNA, 21 nt, Human
cuguucucuugggaacugaac

SEQ ID NO: 2906986 - RNA, 17 nt, Human
cuuagugguuccccacc

SEQ ID NO: 2906987 - RNA, 13 nt, Human
cuuagugggccag

SEQ ID NO: 2906988 - RNA, 14 nt, Human
cuuagugggccagg

SEQ ID NO: 2906989 - RNA, 17 nt, Human
cuuagugggccagggcu

SEQ ID NO: 2906990 - RNA, 18 nt, Human
cuuagugggccagggcug

SEQ ID NO: 2906991 - RNA, 21 nt, Human
cuuagugggccagggcugccc

SEQ ID NO: 2906992 - RNA, 23 nt, Human
cuuagugggccagggcugcccug

SEQ ID NO: 2906993 - RNA, 20 nt, Human
cuuagucucaguuugugugu

SEQ ID NO: 2906994 - RNA, 23 nt, Human
cuuagucucaguuugugugucuu

SEQ ID NO: 2906995 - RNA, 12 nt, Human
cuuagucucagu

SEQ ID NO: 2906996 - RNA, 13 nt, Human
cuuagucucaguu

SEQ ID NO: 2906997 - RNA, 18 nt, Human
cuuagucucaguuugugu

SEQ ID NO: 2906998 - RNA, 19 nt, Human
cuuagucucaguuugugug

SEQ ID NO: 2906999 - RNA, 21 nt, Human
cuuauccuaaaacaaauaguu

SEQ ID NO: 2907000 - RNA, 21 nt, Human
cuuauccuagcacaugcuuca

SEQ ID NO: 2907001 - RNA, 15 nt, Human
cuuauccagcuggug

SEQ ID NO: 2907002 - RNA, 15 nt, Human
cuuauccauaaaaaa

SEQ ID NO: 2907003 - RNA, 21 nt, Human
cuuauccauaaaaaaaaauag

SEQ ID NO: 2907004 - RNA, 15 nt, Human
cuuaucccugcccau

SEQ ID NO: 2907005 - RNA, 16 nt, Human
cuuaucccugcccauu

SEQ ID NO: 2907006 - RNA, 19 nt, Human
cuuaucccugcccauuuca

SEQ ID NO: 2907007 - RNA, 22 nt, Human
cuuaucccugcccauuucauau

SEQ ID NO: 2907008 - RNA, 21 nt, Human
cuuaucacugcauuauucucu

SEQ ID NO: 2907009 - RNA, 12 nt, Human
cuuaucagagcu

SEQ ID NO: 2907010 - RNA, 13 nt, Human
cuuaucagagcua

SEQ ID NO: 2907011 - RNA, 22 nt, Human
cuuaucagcuacuuaagagaaa

SEQ ID NO: 2907012 - RNA, 23 nt, Human
cuuaucagcuacuuaagagaaau

SEQ ID NO: 2907013 - RNA, 21 nt, Human
cuuaucauccacauuguuuua

SEQ ID NO: 2907014 - RNA, 15 nt, Human
cuuaucauccacauu

SEQ ID NO: 2907015 - RNA, 19 nt, Human
cuuaucauccacauuguuu

SEQ ID NO: 2907016 - RNA, 19 nt, Human
cuuaguuuggauucuuaug

SEQ ID NO: 2907017 - RNA, 22 nt, Human
cuuaguuuggauucuuauguag

SEQ ID NO: 2907018 - RNA, 21 nt, Human
cuuaguguuuuaaaacaccuc

SEQ ID NO: 2907019 - RNA, 16 nt, Human
cuuaguuaucagcuuu

SEQ ID NO: 2907020 - RNA, 19 nt, Human
cuuauauagcagcaaaaau

SEQ ID NO: 2907021 - RNA, 21 nt, Human
cuuauauagcagcaaaaauau

SEQ ID NO: 2907022 - RNA, 15 nt, Human
cuuauagcacuuuga

SEQ ID NO: 2907023 - RNA, 17 nt, Human
cuuauagcacuuugaaa

SEQ ID NO: 2907024 - RNA, 20 nt, Human
cuuauagcacuuugaaauac

SEQ ID NO: 2907025 - RNA, 22 nt, Human
cuuauagcacuuugaaauaccu

SEQ ID NO: 2907026 - RNA, 16 nt, Human
cuuauaguucuaggca

SEQ ID NO: 2907027 - RNA, 16 nt, Human
cuuauaguuugggcuu

SEQ ID NO: 2907028 - RNA, 17 nt, Human
cuuauaguuugggcuuc

SEQ ID NO: 2907029 - RNA, 20 nt, Human
cuuauaguuugggcuucagc

SEQ ID NO: 2907030 - RNA, 23 nt, Human
cuuauaguuugggcuucagccua

SEQ ID NO: 2907031 - RNA, 19 nt, Human
cuuauacgcuuuucuuugu

SEQ ID NO: 2907032 - RNA, 15 nt, Human
cuuauacuguacaau

SEQ ID NO: 2907033 - RNA, 16 nt, Human
cuuauacuguacaaua

SEQ ID NO: 2907034 - RNA, 18 nt, Human
cuuauacuguacaauaaa

SEQ ID NO: 2907035 - RNA, 19 nt, Human
cuuauacuguacaauaaaa

SEQ ID NO: 2907036 - RNA, 14 nt, Human
cuuauagacaacau

SEQ ID NO: 2907037 - RNA, 15 nt, Human
cuucagggagugagg

SEQ ID NO: 2907038 - RNA, 14 nt, Human
cuucagggcaggug

SEQ ID NO: 2907039 - RNA, 15 nt, Human
cuucagggcaggugg

SEQ ID NO: 2907040 - RNA, 16 nt, Human
cuucagggcagguggg

SEQ ID NO: 2907041 - RNA, 13 nt, Human
cuucagggccugg

SEQ ID NO: 2907042 - RNA, 15 nt, Human
cuucagggccugguu

SEQ ID NO: 2907043 - RNA, 15 nt, Human
cuucaggcugccuaa

SEQ ID NO: 2907044 - RNA, 21 nt, Human
cuucaggcuuccugcaauuuu

SEQ ID NO: 2907045 - RNA, 22 nt, Human
cuucaggcucuucuccuuucac

SEQ ID NO: 2907046 - RNA, 19 nt, Human
cuucaccuaagucucugug

SEQ ID NO: 2907047 - RNA, 18 nt, Human
cuucaccuaagucucugu

SEQ ID NO: 2907048 - RNA, 19 nt, Human
cuucaggcucuucuccuuu

SEQ ID NO: 2907049 - RNA, 18 nt, Human
cuucaccccaaucccagc

SEQ ID NO: 2907050 - RNA, 14 nt, Human
cuucacccaggccu

SEQ ID NO: 2907051 - RNA, 15 nt, Human
cuucacccaggccua

SEQ ID NO: 2907052 - RNA, 17 nt, Human
cuucacccaggccuaug

SEQ ID NO: 2907053 - RNA, 21 nt, Human
cuucacccaggccuauguuga

SEQ ID NO: 2907054 - RNA, 19 nt, Human
cuucaccagagcauuucca

SEQ ID NO: 2907055 - RNA, 15 nt, Human
cuucaccccccacuc

SEQ ID NO: 2907056 - RNA, 14 nt, Human
cuucaccccggcag

SEQ ID NO: 2907057 - RNA, 15 nt, Human
cuucaccccggcagg

SEQ ID NO: 2907058 - RNA, 17 nt, Human
cuucaccccggcaggcc

SEQ ID NO: 2907059 - RNA, 18 nt, Human
cuucaccccggcaggccc

SEQ ID NO: 2907060 - RNA, 19 nt, Human
cuucaccccggcaggcccu

SEQ ID NO: 2907061 - RNA, 20 nt, Human
cuucaccccggcaggcccug

SEQ ID NO: 2907062 - RNA, 21 nt, Human
cuucaccccggcaggcccugc

SEQ ID NO: 2907063 - RNA, 22 nt, Human
cuucaccccggcaggcccugca

SEQ ID NO: 2907064 - RNA, 23 nt, Human
cuucaccccggcaggcccugcag

SEQ ID NO: 2907065 - RNA, 14 nt, Human
cuucaccccagugg

SEQ ID NO: 2907066 - RNA, 19 nt, Human
cuucaccccaguggccacu

SEQ ID NO: 2907067 - RNA, 23 nt, Human
cuucaccccaguggccacucagc

SEQ ID NO: 2907068 - RNA, 15 nt, Human
cuucacccugaguuu

SEQ ID NO: 2907069 - RNA, 16 nt, Human
cuucaguggcagcugc

SEQ ID NO: 2907070 - RNA, 15 nt, Human
cuucaguggcagcug

SEQ ID NO: 2907071 - RNA, 14 nt, Human
cuucaguggcagcu

SEQ ID NO: 2907072 - RNA, 13 nt, Human
cuucaguggcagc

SEQ ID NO: 2907073 - RNA, 19 nt, Human
cuucaguacccucucagcu

SEQ ID NO: 2907074 - RNA, 22 nt, Human
cuucaguacccucucagcucca

SEQ ID NO: 2907075 - RNA, 23 nt, Human
cuucaguacccucucagcuccag

SEQ ID NO: 2907076 - RNA, 17 nt, Human
cuucaguggcagcugcu

SEQ ID NO: 2907077 - RNA, 19 nt, Human
cuucauucaauauugacau

SEQ ID NO: 2907078 - RNA, 20 nt, Human
cuucauucaauauugacauu

SEQ ID NO: 2907079 - RNA, 22 nt, Human
cuucauucaauauugacauuug

SEQ ID NO: 2907080 - RNA, 17 nt, Human
cuucauuccuuccacua

SEQ ID NO: 2907081 - RNA, 13 nt, Human
cuucauucuauca

SEQ ID NO: 2907082 - RNA, 18 nt, Human
cuucauucuaucaagccc

SEQ ID NO: 2907083 - RNA, 13 nt, Human
cuucauucuccuu

SEQ ID NO: 2907084 - RNA, 22 nt, Human
cuucauucuccuuguuguuggu

SEQ ID NO: 2907085 - RNA, 12 nt, Human
cuucauucucgu

SEQ ID NO: 2907086 - RNA, 14 nt, Human
cuucauucucguga

SEQ ID NO: 2907087 - RNA, 22 nt, Human
cuucauucucgugagucauuua

SEQ ID NO: 2907088 - RNA, 18 nt, Human
cuucauucugagaccaaa

SEQ ID NO: 2907089 - RNA, 15 nt, Human
cuucauucugcaggg

SEQ ID NO: 2907090 - RNA, 14 nt, Human
cuucauugagaguu

SEQ ID NO: 2907091 - RNA, 17 nt, Human
cuucaguggagaauuau

SEQ ID NO: 2907092 - RNA, 21 nt, Human
cuucauugagaguuuugucuu

SEQ ID NO: 2907093 - RNA, 22 nt, Human
cuucauuguacuaccuguguau

SEQ ID NO: 2907094 - RNA, 23 nt, Human
cuucauuguacuaccuguguaua

SEQ ID NO: 2907095 - RNA, 15 nt, Human
cuucauugucccucu

SEQ ID NO: 2907096 - RNA, 16 nt, Human
cuucauugucccucuu

SEQ ID NO: 2907097 - RNA, 17 nt, Human
cuucauugucccucuuc

SEQ ID NO: 2907098 - RNA, 19 nt, Human
cuucauugucccucuucac

SEQ ID NO: 2907099 - RNA, 20 nt, Human
cuucauugucccucuucacu

SEQ ID NO: 2907100 - RNA, 21 nt, Human
cuucauugucccucuucacuc

SEQ ID NO: 2907101 - RNA, 23 nt, Human
cuucauugagaguuuugucuuga

SEQ ID NO: 2907102 - RNA, 17 nt, Human
cuucauugauuuccugu

SEQ ID NO: 2907103 - RNA, 18 nt, Human
cuucauugauuuccugug

SEQ ID NO: 2907104 - RNA, 20 nt, Human
cuucauugauuuccuguguc

SEQ ID NO: 2907105 - RNA, 21 nt, Human
cuucauugauuuccuguguca

SEQ ID NO: 2907106 - RNA, 13 nt, Human
cuucauuuaaaaa

SEQ ID NO: 2907107 - RNA, 14 nt, Human
cuucauuuaaaaaa

SEQ ID NO: 2907108 - RNA, 19 nt, Human
cuucauuuaaaaaaaucac

SEQ ID NO: 2907109 - RNA, 9 nt, Human
cuucagggc

SEQ ID NO: 2907110 - RNA, 15 nt, Human
cuuccaggaccccug

SEQ ID NO: 2907111 - RNA, 17 nt, Human
cuuccaggaccccuggg

SEQ ID NO: 2907112 - RNA, 17 nt, Human
cuuccaggaugguguua

SEQ ID NO: 2907113 - RNA, 19 nt, Human
cuuccaggcccccaccacu

SEQ ID NO: 2907114 - RNA, 19 nt, Human
cuuccagggacgaagaaga

SEQ ID NO: 2907115 - RNA, 16 nt, Human
cuuccaggcccccacc

SEQ ID NO: 2907116 - RNA, 22 nt, Human
cuuccagggacgaagaagagcc

SEQ ID NO: 2907117 - RNA, 15 nt, Human
cuuccaggggaaccu

SEQ ID NO: 2907118 - RNA, 19 nt, Human
cuuccaggggaaccugcca

SEQ ID NO: 2907119 - RNA, 16 nt, Human
cuuccaggggaaccug

SEQ ID NO: 2907120 - RNA, 12 nt, Human
cuuccccucacu

SEQ ID NO: 2907121 - RNA, 16 nt, Human
cuuccccucccuggcu

SEQ ID NO: 2907122 - RNA, 14 nt, Human
cuuccccucccugg

SEQ ID NO: 2907123 - RNA, 13 nt, Human
cuucccccuucca

SEQ ID NO: 2907124 - RNA, 16 nt, Human
cuucccccuuuuuugu

SEQ ID NO: 2907125 - RNA, 18 nt, Human
cuucccccuuuuuugucc

SEQ ID NO: 2907126 - RNA, 20 nt, Human
cuuccccucccuggcuccca

SEQ ID NO: 2907127 - RNA, 18 nt, Human
cuuccccucccuggcucc

SEQ ID NO: 2907128 - RNA, 13 nt, Human
cuuccccuucccu

SEQ ID NO: 2907129 - RNA, 23 nt, Human
cuucccaguucaggagucccaag

SEQ ID NO: 2907130 - RNA, 20 nt, Human
cuucccaguggcugcugccc

SEQ ID NO: 2907131 - RNA, 20 nt, Human
cuucccauaccacccaaugc

SEQ ID NO: 2907132 - RNA, 22 nt, Human
cuucccaguucaggagucccaa

SEQ ID NO: 2907133 - RNA, 18 nt, Human
cuucccaguggcugcugc

SEQ ID NO: 2907134 - RNA, 19 nt, Human
cuucccaguggcugcugcc

SEQ ID NO: 2907135 - RNA, 15 nt, Human
cuucccaguggcugc

SEQ ID NO: 2907136 - RNA, 17 nt, Human
cuucccaguggcugcug

SEQ ID NO: 2907137 - RNA, 13 nt, Human
cuuccagggggaa

SEQ ID NO: 2907138 - RNA, 20 nt, Human
cuuccagggggaaggccaag

SEQ ID NO: 2907139 - RNA, 15 nt, Human
cuucccaucgcuguc

SEQ ID NO: 2907140 - RNA, 15 nt, Human
cuucccaugacccag

SEQ ID NO: 2907141 - RNA, 17 nt, Human
cuucccaugacccaggc

SEQ ID NO: 2907142 - RNA, 19 nt, Human
cuucccaugacccaggcug

SEQ ID NO: 2907143 - RNA, 20 nt, Human
cuucccaugacccaggcugg

SEQ ID NO: 2907144 - RNA, 21 nt, Human
cuucccaugacccaggcuggg

SEQ ID NO: 2907145 - RNA, 16 nt, Human
cuucccccucccaggg

SEQ ID NO: 2907146 - RNA, 16 nt, Human
cuucccuaaaaucagg

SEQ ID NO: 2907147 - RNA, 16 nt, Human
cuucccuaacacuuac

SEQ ID NO: 2907148 - RNA, 23 nt, Human
cuucccgcucagcccucccugcc

SEQ ID NO: 2907149 - RNA, 18 nt, Human
cuucccgcucagcccucc

SEQ ID NO: 2907150 - RNA, 19 nt, Human
cuucccgcucagcccuccc

SEQ ID NO: 2907151 - RNA, 13 nt, Human
cuucccuuucugc

SEQ ID NO: 2907152 - RNA, 12 nt, Human
cuucccuugcca

SEQ ID NO: 2907153 - RNA, 14 nt, Human
cuucccuugccacu

SEQ ID NO: 2907154 - RNA, 15 nt, Human
cuucccuugccacuu

SEQ ID NO: 2907155 - RNA, 16 nt, Human
cuucccuugccacuuu

SEQ ID NO: 2907156 - RNA, 17 nt, Human
cuucccuugccacuuug

SEQ ID NO: 2907157 - RNA, 18 nt, Human
cuucccuugccacuuugc

SEQ ID NO: 2907158 - RNA, 19 nt, Human
cuucccuugccacuuugca

SEQ ID NO: 2907159 - RNA, 20 nt, Human
cuucccuugccacuuugcac

SEQ ID NO: 2907160 - RNA, 15 nt, Human
cuucccuuccacugc

SEQ ID NO: 2907161 - RNA, 16 nt, Human
cuucccuuccacugcc

SEQ ID NO: 2907162 - RNA, 17 nt, Human
cuucccuuccacugccu

SEQ ID NO: 2907163 - RNA, 20 nt, Human
cuucccuuccacugccucug

SEQ ID NO: 2907164 - RNA, 22 nt, Human
cuucccuuccacugccucugcc

SEQ ID NO: 2907165 - RNA, 23 nt, Human
cuucccuuccacugccucugccu

SEQ ID NO: 2907166 - RNA, 13 nt, Human
cuuccucccucau

SEQ ID NO: 2907167 - RNA, 13 nt, Human
cuuccuccagcug

SEQ ID NO: 2907168 - RNA, 15 nt, Human
cuuccuccagcugca

SEQ ID NO: 2907169 - RNA, 17 nt, Human
cuuccuccagcugcacc

SEQ ID NO: 2907170 - RNA, 18 nt, Human
cuuccuccagcugcacca

SEQ ID NO: 2907171 - RNA, 20 nt, Human
cuuccuccagcugcaccaga

SEQ ID NO: 2907172 - RNA, 22 nt, Human
cuuccuccagcugcaccagagc

SEQ ID NO: 2907173 - RNA, 23 nt, Human
cuuccucauccaccccaucccuc

SEQ ID NO: 2907174 - RNA, 18 nt, Human
cuuccucauccaccccau

SEQ ID NO: 2907175 - RNA, 22 nt, Human
cuuccucauccaccccaucccu

SEQ ID NO: 2907176 - RNA, 15 nt, Human
cuuccuaagccugug

SEQ ID NO: 2907177 - RNA, 16 nt, Human
cuuccuaagccugugg

SEQ ID NO: 2907178 - RNA, 18 nt, Human
cuuccuaagccuguggcu

SEQ ID NO: 2907179 - RNA, 20 nt, Human
cuuccuaagccuguggcugu

SEQ ID NO: 2907180 - RNA, 16 nt, Human
cuucccuuuccccagc

SEQ ID NO: 2907181 - RNA, 19 nt, Human
cuuccgguagggaggcagc

SEQ ID NO: 2907182 - RNA, 20 nt, Human
cuuccgguagggaggcagcc

SEQ ID NO: 2907183 - RNA, 21 nt, Human
cuuccgguagggaggcagccu

SEQ ID NO: 2907184 - RNA, 22 nt, Human
cuuccgguagggaggcagccuc

SEQ ID NO: 2907185 - RNA, 23 nt, Human
cuuccgguagggaggcagccucc

SEQ ID NO: 2907186 - RNA, 19 nt, Human
cuuccuaauuccacagcug

SEQ ID NO: 2907187 - RNA, 18 nt, Human
cuuccuaauuccacagcu

SEQ ID NO: 2907188 - RNA, 17 nt, Human
cuuccuaauuccacagc

SEQ ID NO: 2907189 - RNA, 13 nt, Human
cuuccuaauucca

SEQ ID NO: 2907190 - RNA, 21 nt, Human
cuucuguccuacucuguguca

SEQ ID NO: 2907191 - RNA, 19 nt, Human
cuucuguccuacucugugu

SEQ ID NO: 2907192 - RNA, 18 nt, Human
cuucuguccuacucugug

SEQ ID NO: 2907193 - RNA, 17 nt, Human
cuucuguccuacucugu

SEQ ID NO: 2907194 - RNA, 16 nt, Human
cuucuguccuacucug

SEQ ID NO: 2907195 - RNA, 20 nt, Human
cuucuguacgucugacaggc

SEQ ID NO: 2907196 - RNA, 18 nt, Human
cuucuguacgucugacag

SEQ ID NO: 2907197 - RNA, 15 nt, Human
cuucuguacgucuga

SEQ ID NO: 2907198 - RNA, 14 nt, Human
cuucuguacgucug

SEQ ID NO: 2907199 - RNA, 21 nt, Human
cuucuguacgucugacaggca

SEQ ID NO: 2907200 - RNA, 19 nt, Human
cuucugguuuaaacuuguu

SEQ ID NO: 2907201 - RNA, 15 nt, Human
cuucugucccucaca

SEQ ID NO: 2907202 - RNA, 14 nt, Human
cuucugucccucac

SEQ ID NO: 2907203 - RNA, 18 nt, Human
cuucuguauacuguggag

SEQ ID NO: 2907204 - RNA, 12 nt, Human
cuucuguauaua

SEQ ID NO: 2907205 - RNA, 16 nt, Human
cuucuguauauaaaug

SEQ ID NO: 2907206 - RNA, 17 nt, Human
cuucuguauauaaaugg

SEQ ID NO: 2907207 - RNA, 18 nt, Human
cuucuguauauaaauggg

SEQ ID NO: 2907208 - RNA, 20 nt, Human
cuucuguauauaaaugggaa

SEQ ID NO: 2907209 - RNA, 21 nt, Human
cuucuguauauaaaugggaac

SEQ ID NO: 2907210 - RNA, 13 nt, Human
cuucugcuucagc

SEQ ID NO: 2907211 - RNA, 23 nt, Human
cuucugcuccacccuuggccugu

SEQ ID NO: 2907212 - RNA, 21 nt, Human
cuucugcuccacccuuggccu

SEQ ID NO: 2907213 - RNA, 19 nt, Human
cuucugcuccacccuuggc

SEQ ID NO: 2907214 - RNA, 17 nt, Human
cuucugcuccacccuug

SEQ ID NO: 2907215 - RNA, 15 nt, Human
cuucugcuccacccu

SEQ ID NO: 2907216 - RNA, 18 nt, Human
cuucugccuuagucucag

SEQ ID NO: 2907217 - RNA, 23 nt, Human
cuucugcccaauuggaggaaagc

SEQ ID NO: 2907218 - RNA, 18 nt, Human
cuucugcccucccuggag

SEQ ID NO: 2907219 - RNA, 14 nt, Human
cuucuggggcaggc

SEQ ID NO: 2907220 - RNA, 20 nt, Human
cuucuggggcaggcugggcc

SEQ ID NO: 2907221 - RNA, 19 nt, Human
cuucuggggcaggcugggc

SEQ ID NO: 2907222 - RNA, 16 nt, Human
cuucuggggcaggcug

SEQ ID NO: 2907223 - RNA, 15 nt, Human
cuucuggggcaggcu

SEQ ID NO: 2907224 - RNA, 22 nt, Human
cuucuggggcaggcugggccau

SEQ ID NO: 2907225 - RNA, 11 nt, Human
cuucugggguc

SEQ ID NO: 2907226 - RNA, 16 nt, Human
cuucugggguccccag

SEQ ID NO: 2907227 - RNA, 17 nt, Human
cuucugggguccccagg

SEQ ID NO: 2907228 - RNA, 19 nt, Human
cuucugggguccccagggc

SEQ ID NO: 2907229 - RNA, 20 nt, Human
cuucugggguccccagggcu

SEQ ID NO: 2907230 - RNA, 21 nt, Human
cuucuggggcaggcugggcca

SEQ ID NO: 2907231 - RNA, 23 nt, Human
cuucuggguuccuuccucugagc

SEQ ID NO: 2907232 - RNA, 17 nt, Human
cuucuggguuccuuccu

SEQ ID NO: 2907233 - RNA, 16 nt, Human
cuucuggguuccuucc

SEQ ID NO: 2907234 - RNA, 14 nt, Human
cuucugguugaugc

SEQ ID NO: 2907235 - RNA, 13 nt, Human
cuucucucccugc

SEQ ID NO: 2907236 - RNA, 15 nt, Human
cuucucucccugcca

SEQ ID NO: 2907237 - RNA, 21 nt, Human
cuucuccuggaguugcauuga

SEQ ID NO: 2907238 - RNA, 12 nt, Human
cuucucugaaca

SEQ ID NO: 2907239 - RNA, 13 nt, Human
cuucucugaacac

SEQ ID NO: 2907240 - RNA, 15 nt, Human
cuucucugaacacag

SEQ ID NO: 2907241 - RNA, 16 nt, Human
cuucucugaacacagg

SEQ ID NO: 2907242 - RNA, 17 nt, Human
cuucucugaacacaggc

SEQ ID NO: 2907243 - RNA, 18 nt, Human
cuucucugaacacaggca

SEQ ID NO: 2907244 - RNA, 19 nt, Human
cuucucugaacacaggcag

SEQ ID NO: 2907245 - RNA, 20 nt, Human
cuucucugaacacaggcagc

SEQ ID NO: 2907246 - RNA, 21 nt, Human
cuucucugaacacaggcagcu

SEQ ID NO: 2907247 - RNA, 22 nt, Human
cuucucugaacacaggcagcuu

SEQ ID NO: 2907248 - RNA, 23 nt, Human
cuucucugaacacaggcagcuuu

SEQ ID NO: 2907249 - RNA, 13 nt, Human
cuucucugaagga

SEQ ID NO: 2907250 - RNA, 22 nt, Human
cuuccugggucuucagcauucc

SEQ ID NO: 2907251 - RNA, 18 nt, Human
cuucuccuccccacccgc

SEQ ID NO: 2907252 - RNA, 13 nt, Human
cuucuccacugga

SEQ ID NO: 2907253 - RNA, 14 nt, Human
cuucuccacuggau

SEQ ID NO: 2907254 - RNA, 15 nt, Human
cuucuccacuggaug

SEQ ID NO: 2907255 - RNA, 23 nt, Human
cuuccuggggcaucuggcgaauc

SEQ ID NO: 2907256 - RNA, 20 nt, Human
cuuccuggggcaucuggcga

SEQ ID NO: 2907257 - RNA, 13 nt, Human
cuucuccaggcug

SEQ ID NO: 2907258 - RNA, 12 nt, Human
cuucuccaggcu

SEQ ID NO: 2907259 - RNA, 13 nt, Human
cuucuccagauuu

SEQ ID NO: 2907260 - RNA, 17 nt, Human
cuucuccacuggaugga

SEQ ID NO: 2907261 - RNA, 13 nt, Human
cuucuccguccuc

SEQ ID NO: 2907262 - RNA, 22 nt, Human
cuucucccucauuucaggagca

SEQ ID NO: 2907263 - RNA, 14 nt, Human
cuucuguucugcag

SEQ ID NO: 2907264 - RNA, 13 nt, Human
cuucuugucagac

SEQ ID NO: 2907265 - RNA, 14 nt, Human
cuucuugucagaca

SEQ ID NO: 2907266 - RNA, 16 nt, Human
cuucuugucagacaua

SEQ ID NO: 2907267 - RNA, 18 nt, Human
cuucuugucagacauaaa

SEQ ID NO: 2907268 - RNA, 19 nt, Human
cuucuugucagacauaaag

SEQ ID NO: 2907269 - RNA, 20 nt, Human
cuucuugucagacauaaagc

SEQ ID NO: 2907270 - RNA, 21 nt, Human
cuucuugucagacauaaagcc

SEQ ID NO: 2907271 - RNA, 22 nt, Human
cuucuugucagacauaaagcca

SEQ ID NO: 2907272 - RNA, 12 nt, Human
cuucuugugaag

SEQ ID NO: 2907273 - RNA, 13 nt, Human
cuucuugugaagg

SEQ ID NO: 2907274 - RNA, 13 nt, Human
cuucuuguucccc

SEQ ID NO: 2907275 - RNA, 20 nt, Human
cuucuuuaaucacuuaacau

SEQ ID NO: 2907276 - RNA, 21 nt, Human
cuucuuggggguaagcugauu

SEQ ID NO: 2907277 - RNA, 13 nt, Human
cuucuguguaucu

SEQ ID NO: 2907278 - RNA, 22 nt, Human
cuucuguguaucucuuucacau

SEQ ID NO: 2907279 - RNA, 14 nt, Human
cuucuguguuuaua

SEQ ID NO: 2907280 - RNA, 11 nt, Human
cuucuguguuu

SEQ ID NO: 2907281 - RNA, 15 nt, Human
cuucuguggcucaca

SEQ ID NO: 2907282 - RNA, 22 nt, Human
cuucuguggcucacagaacccu

SEQ ID NO: 2907283 - RNA, 14 nt, Human
cuucugugaaagua

SEQ ID NO: 2907284 - RNA, 19 nt, Human
cuucugugagacccccaca

SEQ ID NO: 2907285 - RNA, 16 nt, Human
cuucuguccugugagg

SEQ ID NO: 2907286 - RNA, 14 nt, Human
cuucugugaugagc

SEQ ID NO: 2907287 - RNA, 22 nt, Human
cuucugugagacccccacaccu

SEQ ID NO: 2907288 - RNA, 21 nt, Human
cuucugugagacccccacacc

SEQ ID NO: 2907289 - RNA, 20 nt, Human
cuucugugagacccccacac

SEQ ID NO: 2907290 - RNA, 19 nt, Human
cuucugugaugagcugauc

SEQ ID NO: 2907291 - RNA, 16 nt, Human
cuucugugaugagcug

SEQ ID NO: 2907292 - RNA, 15 nt, Human
cuucugugaugagcu

SEQ ID NO: 2907293 - RNA, 17 nt, Human
cuucugugaugagcuga

SEQ ID NO: 2907294 - RNA, 13 nt, Human
cuucuguggcuca

SEQ ID NO: 2907295 - RNA, 17 nt, Human
cuucuuuuuuugugaug

SEQ ID NO: 2907296 - RNA, 16 nt, Human
cuucuuuuuuuucauu

SEQ ID NO: 2907297 - RNA, 12 nt, Human
cuugaaaaauac

SEQ ID NO: 2907298 - RNA, 20 nt, Human
cuugaaaaauacuuuuccuu

SEQ ID NO: 2907299 - RNA, 21 nt, Human
cuugaaaaauacuuuuccuua

SEQ ID NO: 2907300 - RNA, 15 nt, Human
cuugaaaaggguguu

SEQ ID NO: 2907301 - RNA, 16 nt, Human
cuugaaaauaagaaua

SEQ ID NO: 2907302 - RNA, 11 nt, Human
cuugaacaaaa

SEQ ID NO: 2907303 - RNA, 14 nt, Human
cuugaacaaaaggg

SEQ ID NO: 2907304 - RNA, 15 nt, Human
cuugaacaaaagggu

SEQ ID NO: 2907305 - RNA, 17 nt, Human
cuugaacaaaaggguca

SEQ ID NO: 2907306 - RNA, 19 nt, Human
cuugaacaaaagggucaga

SEQ ID NO: 2907307 - RNA, 20 nt, Human
cuugaacaaaagggucagag

SEQ ID NO: 2907308 - RNA, 22 nt, Human
cuugaacaaaagggucagagga

SEQ ID NO: 2907309 - RNA, 17 nt, Human
cuugaacaaaaucuguu

SEQ ID NO: 2907310 - RNA, 18 nt, Human
cuugaacaaaaucuguug

SEQ ID NO: 2907311 - RNA, 20 nt, Human
cuugaacaaaaucuguugcc

SEQ ID NO: 2907312 - RNA, 14 nt, Human
cuugaaagaauuuu

SEQ ID NO: 2907313 - RNA, 17 nt, Human
cuugaaagaauuuuccu

SEQ ID NO: 2907314 - RNA, 22 nt, Human
cuugaaaauaagaauagaaaua

SEQ ID NO: 2907315 - RNA, 20 nt, Human
cuugaaaauauaugauggcu

SEQ ID NO: 2907316 - RNA, 23 nt, Human
cuugaaaauauuuuuuauauaua

SEQ ID NO: 2907317 - RNA, 20 nt, Human
cuugaggguugggcuggugu

SEQ ID NO: 2907318 - RNA, 19 nt, Human
cuugaggguugggcuggug

SEQ ID NO: 2907319 - RNA, 21 nt, Human
cuugaggguugggcugguguc

SEQ ID NO: 2907320 - RNA, 12 nt, Human
cuugagcuggcc

SEQ ID NO: 2907321 - RNA, 13 nt, Human
cuugagcuggccu

SEQ ID NO: 2907322 - RNA, 23 nt, Human
cuugagcuggccucucuagcaca

SEQ ID NO: 2907323 - RNA, 17 nt, Human
cuugagcuggccucucu

SEQ ID NO: 2907324 - RNA, 16 nt, Human
cuugagcuggccucuc

SEQ ID NO: 2907325 - RNA, 14 nt, Human
cuugagcuggccuc

SEQ ID NO: 2907326 - RNA, 20 nt, Human
cuugagcuuggcagcugaac

SEQ ID NO: 2907327 - RNA, 12 nt, Human
cuugagcuuggc

SEQ ID NO: 2907328 - RNA, 20 nt, Human
cuugaggaaacaacagcuuu

SEQ ID NO: 2907329 - RNA, 18 nt, Human
cuugaggaaacaacagcu

SEQ ID NO: 2907330 - RNA, 13 nt, Human
cuugaggaaacaa

SEQ ID NO: 2907331 - RNA, 21 nt, Human
cuugagcuuggcagcugaacu

SEQ ID NO: 2907332 - RNA, 19 nt, Human
cuugacuucaguuauuggu

SEQ ID NO: 2907333 - RNA, 17 nt, Human
cuugacuugauuagugc

SEQ ID NO: 2907334 - RNA, 19 nt, Human
cuugacuuugaacuaauga

SEQ ID NO: 2907335 - RNA, 15 nt, Human
cuugacucaggauuu

SEQ ID NO: 2907336 - RNA, 16 nt, Human
cuugacucaggauuua

SEQ ID NO: 2907337 - RNA, 21 nt, Human
cuugacucccaaguuuccaua

SEQ ID NO: 2907338 - RNA, 18 nt, Human
cuugaccuguuucucugc

SEQ ID NO: 2907339 - RNA, 12 nt, Human
cuugaccuuccu

SEQ ID NO: 2907340 - RNA, 13 nt, Human
cuugaccuuccuc

SEQ ID NO: 2907341 - RNA, 14 nt, Human
cuugaccuuccucu

SEQ ID NO: 2907342 - RNA, 17 nt, Human
cuugaccuuccucuggg

SEQ ID NO: 2907343 - RNA, 18 nt, Human
cuugaccuuccucugggg

SEQ ID NO: 2907344 - RNA, 21 nt, Human
cuugaccuuccucuggggcuc

SEQ ID NO: 2907345 - RNA, 22 nt, Human
cuugaccuuccucuggggcucu

SEQ ID NO: 2907346 - RNA, 15 nt, Human
cuugaccuuguagag

SEQ ID NO: 2907347 - RNA, 13 nt, Human
cuugaccuuugua

SEQ ID NO: 2907348 - RNA, 14 nt, Human
cuugaccuuuguac

SEQ ID NO: 2907349 - RNA, 16 nt, Human
cuugaccuuuguacag

SEQ ID NO: 2907350 - RNA, 17 nt, Human
cuugaccuuuguacagc

SEQ ID NO: 2907351 - RNA, 21 nt, Human
cuugaccuuuguacagcccag

SEQ ID NO: 2907352 - RNA, 22 nt, Human
cuugaccuuuguacagcccaga

SEQ ID NO: 2907353 - RNA, 13 nt, Human
cuugaccucaggu

SEQ ID NO: 2907354 - RNA, 13 nt, Human
cuugaacuccugg

SEQ ID NO: 2907355 - RNA, 16 nt, Human
cuugaacuccugaccu

SEQ ID NO: 2907356 - RNA, 13 nt, Human
cuugaacuccuga

SEQ ID NO: 2907357 - RNA, 18 nt, Human
cuugaaccuaugaagcaa

SEQ ID NO: 2907358 - RNA, 15 nt, Human
cuugaaccugggagg

SEQ ID NO: 2907359 - RNA, 16 nt, Human
cuugaaccugggaggu

SEQ ID NO: 2907360 - RNA, 19 nt, Human
cuugaaccugggaggugga

SEQ ID NO: 2907361 - RNA, 16 nt, Human
cuugaaccugugagua

SEQ ID NO: 2907362 - RNA, 21 nt, Human
cuugaaccugugaguaaauau

SEQ ID NO: 2907363 - RNA, 18 nt, Human
cuugaacuccugaccuca

SEQ ID NO: 2907364 - RNA, 11 nt, Human
cugcccugcug

SEQ ID NO: 2907365 - RNA, 17 nt, Human
cugcccucuccuuccuu

SEQ ID NO: 2907366 - RNA, 18 nt, Human
cugcccucuccuuccuua

SEQ ID NO: 2907367 - RNA, 20 nt, Human
cugcccugcgggucacagga

SEQ ID NO: 2907368 - RNA, 12 nt, Human
cugcccucaugg

SEQ ID NO: 2907369 - RNA, 14 nt, Human
cugcccuucuuccc

SEQ ID NO: 2907370 - RNA, 18 nt, Human
cugcccuucuuccccuuc

SEQ ID NO: 2907371 - RNA, 22 nt, Human
cugcccugcugccgccucccag

SEQ ID NO: 2907372 - RNA, 21 nt, Human
cugcccugcugccgccuccca

SEQ ID NO: 2907373 - RNA, 22 nt, Human
cugcccugcugagucccaggcu

SEQ ID NO: 2907374 - RNA, 17 nt, Human
cugcccuggaacauccu

SEQ ID NO: 2907375 - RNA, 22 nt, Human
cugcccuggaacauccuuugca

SEQ ID NO: 2907376 - RNA, 23 nt, Human
cugcccuggaacauccuuugcag

SEQ ID NO: 2907377 - RNA, 17 nt, Human
cugcccuggcaggguca

SEQ ID NO: 2907378 - RNA, 13 nt, Human
cucccuucagccc

SEQ ID NO: 2907379 - RNA, 16 nt, Human
cucccuucagccccca

SEQ ID NO: 2907380 - RNA, 18 nt, Human
cucccuucagcccccagc

SEQ ID NO: 2907381 - RNA, 19 nt, Human
cugcccucauggccccucu

SEQ ID NO: 2907382 - RNA, 20 nt, Human
cugcccucauuacugggccu

SEQ ID NO: 2907383 - RNA, 21 nt, Human
cugcccucauuacugggccuu

SEQ ID NO: 2907384 - RNA, 23 nt, Human
cugcccucauuacugggccuuag

SEQ ID NO: 2907385 - RNA, 15 nt, Human
cugccgugccgccug

SEQ ID NO: 2907386 - RNA, 17 nt, Human
cugccgucucuggagcg

SEQ ID NO: 2907387 - RNA, 20 nt, Human
cugccgugcauuagcacaga

SEQ ID NO: 2907388 - RNA, 15 nt, Human
cugccgucucuggag

SEQ ID NO: 2907389 - RNA, 14 nt, Human
cugccgucucugga

SEQ ID NO: 2907390 - RNA, 19 nt, Human
cugccgugccgccugcacu

SEQ ID NO: 2907391 - RNA, 17 nt, Human
cugccgugccgccugca

SEQ ID NO: 2907392 - RNA, 14 nt, Human
cugccgguuugaaa

SEQ ID NO: 2907393 - RNA, 20 nt, Human
cugccgguuugaaaauaugc

SEQ ID NO: 2907394 - RNA, 21 nt, Human
cugccgguaaacacgccugca

SEQ ID NO: 2907395 - RNA, 18 nt, Human
cugccgguaaacacgccu

SEQ ID NO: 2907396 - RNA, 12 nt, Human
cugcccuugggc

SEQ ID NO: 2907397 - RNA, 13 nt, Human
cugcccuugggcc

SEQ ID NO: 2907398 - RNA, 21 nt, Human
cugcccuuucugggcaccggg

SEQ ID NO: 2907399 - RNA, 15 nt, Human
cugccuaagacaugu

SEQ ID NO: 2907400 - RNA, 16 nt, Human
cugccucccauucuga

SEQ ID NO: 2907401 - RNA, 23 nt, Human
cugccucugacacacagcucugu

SEQ ID NO: 2907402 - RNA, 22 nt, Human
cugccucugacacacagcucug

SEQ ID NO: 2907403 - RNA, 15 nt, Human
cugccucugacacac

SEQ ID NO: 2907404 - RNA, 22 nt, Human
cugccgugccgccugcacuccu

SEQ ID NO: 2907405 - RNA, 13 nt, Human
cugccucugccuu

SEQ ID NO: 2907406 - RNA, 14 nt, Human
cugccucugccuua

SEQ ID NO: 2907407 - RNA, 15 nt, Human
cugccucugccuuag

SEQ ID NO: 2907408 - RNA, 12 nt, Human
cugccucugcca

SEQ ID NO: 2907409 - RNA, 13 nt, Human
cugccucugccac

SEQ ID NO: 2907410 - RNA, 14 nt, Human
cugccucugccaca

SEQ ID NO: 2907411 - RNA, 16 nt, Human
cugccucugccacacu

SEQ ID NO: 2907412 - RNA, 20 nt, Human
cugccucugccacacucuga

SEQ ID NO: 2907413 - RNA, 21 nt, Human
cugccucugccacacucugac

SEQ ID NO: 2907414 - RNA, 12 nt, Human
cugccucugccu

SEQ ID NO: 2907415 - RNA, 17 nt, Human
cugccugcccaggcccc

SEQ ID NO: 2907416 - RNA, 16 nt, Human
cugccugcccaggccc

SEQ ID NO: 2907417 - RNA, 15 nt, Human
cugccugaagucaca

SEQ ID NO: 2907418 - RNA, 22 nt, Human
cugccuugaagccacugaagcu

SEQ ID NO: 2907419 - RNA, 15 nt, Human
cugccuuggcucaga

SEQ ID NO: 2907420 - RNA, 17 nt, Human
cugccuuggcucagaca

SEQ ID NO: 2907421 - RNA, 18 nt, Human
cugccuuggcucagacau

SEQ ID NO: 2907422 - RNA, 22 nt, Human
cugccuuggcucagacauguuu

SEQ ID NO: 2907423 - RNA, 14 nt, Human
cugccuuggcucag

SEQ ID NO: 2907424 - RNA, 14 nt, Human
cugccuuggccucc

SEQ ID NO: 2907425 - RNA, 17 nt, Human
cugccuuggccucccaa

SEQ ID NO: 2907426 - RNA, 23 nt, Human
cugccuuggacuguguuuuuccu

SEQ ID NO: 2907427 - RNA, 12 nt, Human
cugccuugccuu

SEQ ID NO: 2907428 - RNA, 13 nt, Human
cugccuugccuuu

SEQ ID NO: 2907429 - RNA, 14 nt, Human
cugccuugccuuua

SEQ ID NO: 2907430 - RNA, 16 nt, Human
cugccuugcuguuggu

SEQ ID NO: 2907431 - RNA, 21 nt, Human
cugccuugcuguuggucaugu

SEQ ID NO: 2907432 - RNA, 20 nt, Human
cugccugcccaggccccugc

SEQ ID NO: 2907433 - RNA, 15 nt, Human
cugccuggccaggca

SEQ ID NO: 2907434 - RNA, 13 nt, Human
cugccuggccagg

SEQ ID NO: 2907435 - RNA, 12 nt, Human
cugccuggccag

SEQ ID NO: 2907436 - RNA, 21 nt, Human
cugccuggccacugcucccua

SEQ ID NO: 2907437 - RNA, 21 nt, Human
cugccuggccaggcagaucug

SEQ ID NO: 2907438 - RNA, 17 nt, Human
cugccuggccaggcaga

SEQ ID NO: 2907439 - RNA, 16 nt, Human
cugccuggccaggcag

SEQ ID NO: 2907440 - RNA, 13 nt, Human
cugccuggccccu

SEQ ID NO: 2907441 - RNA, 15 nt, Human
cugccuggccggcca

SEQ ID NO: 2907442 - RNA, 17 nt, Human
cugccuggccggccagc

SEQ ID NO: 2907443 - RNA, 18 nt, Human
cugccuggccggccagcc

SEQ ID NO: 2907444 - RNA, 19 nt, Human
cugccuggccggccagcca

SEQ ID NO: 2907445 - RNA, 22 nt, Human
cugccuggccggccagccagcc

SEQ ID NO: 2907446 - RNA, 21 nt, Human
cugcucuccucuugccacugc

SEQ ID NO: 2907447 - RNA, 17 nt, Human
cugcugaaggaauaaau

SEQ ID NO: 2907448 - RNA, 18 nt, Human
cugcugaaggaauaaauu

SEQ ID NO: 2907449 - RNA, 18 nt, Human
cugcugaagacuugcccc

SEQ ID NO: 2907450 - RNA, 19 nt, Human
cugcugcaggggcucugga

SEQ ID NO: 2907451 - RNA, 11 nt, Human
cugcugcaggg

SEQ ID NO: 2907452 - RNA, 12 nt, Human
cugcugcagggg

SEQ ID NO: 2907453 - RNA, 13 nt, Human
cugcugcaggggc

SEQ ID NO: 2907454 - RNA, 14 nt, Human
cugcugcaggggcu

SEQ ID NO: 2907455 - RNA, 16 nt, Human
cugcugcaggggcucu

SEQ ID NO: 2907456 - RNA, 17 nt, Human
cugcugcaggggcucug

SEQ ID NO: 2907457 - RNA, 18 nt, Human
cugcugcaggggcucugg

SEQ ID NO: 2907458 - RNA, 16 nt, Human
cugcugcauggggugg

SEQ ID NO: 2907459 - RNA, 20 nt, Human
cugcugcauuugugucaucu

SEQ ID NO: 2907460 - RNA, 22 nt, Human
cugcugccauggcgugucccuc

SEQ ID NO: 2907461 - RNA, 14 nt, Human
cugcugcccaaucu

SEQ ID NO: 2907462 - RNA, 12 nt, Human
cugcugcccagg

SEQ ID NO: 2907463 - RNA, 13 nt, Human
cugcugcccaggc

SEQ ID NO: 2907464 - RNA, 19 nt, Human
cugcugcccaggcugugca

SEQ ID NO: 2907465 - RNA, 22 nt, Human
cugcugcccagccuccaagcuc

SEQ ID NO: 2907466 - RNA, 12 nt, Human
cugcugcccagc

SEQ ID NO: 2907467 - RNA, 15 nt, Human
cugcugcccagccuc

SEQ ID NO: 2907468 - RNA, 19 nt, Human
cugcucuccgaccagacac

SEQ ID NO: 2907469 - RNA, 14 nt, Human
cugcucuccucuug

SEQ ID NO: 2907470 - RNA, 20 nt, Human
cugcucuccucuugccacug

SEQ ID NO: 2907471 - RNA, 14 nt, Human
cugcuccucauggu

SEQ ID NO: 2907472 - RNA, 13 nt, Human
cugcuccucaugg

SEQ ID NO: 2907473 - RNA, 11 nt, Human
cugcuccucca

SEQ ID NO: 2907474 - RNA, 12 nt, Human
cugcuccaggcc

SEQ ID NO: 2907475 - RNA, 13 nt, Human
cugcuccaggccu

SEQ ID NO: 2907476 - RNA, 14 nt, Human
cugcuccaggccug

SEQ ID NO: 2907477 - RNA, 15 nt, Human
cugcuccaggccugc

SEQ ID NO: 2907478 - RNA, 19 nt, Human
cugcuccaggccugcagca

SEQ ID NO: 2907479 - RNA, 12 nt, Human
cugcuccaggga

SEQ ID NO: 2907480 - RNA, 14 nt, Human
cugccuuguuugga

SEQ ID NO: 2907481 - RNA, 12 nt, Human
cugcgaaguccu

SEQ ID NO: 2907482 - RNA, 14 nt, Human
cugcgaaguccuau

SEQ ID NO: 2907483 - RNA, 22 nt, Human
cugcgaaguccuauggaaaccc

SEQ ID NO: 2907484 - RNA, 23 nt, Human
cugcugguucaggguuggccccu

SEQ ID NO: 2907485 - RNA, 15 nt, Human
cugcugguucagggu

SEQ ID NO: 2907486 - RNA, 13 nt, Human
cugcugguucagg

SEQ ID NO: 2907487 - RNA, 12 nt, Human
cugcuggcucuu

SEQ ID NO: 2907488 - RNA, 19 nt, Human
cugcuggcucuucugccca

SEQ ID NO: 2907489 - RNA, 21 nt, Human
cugcugguuaacuuguuuggc

SEQ ID NO: 2907490 - RNA, 14 nt, Human
cugcugcugucccu

SEQ ID NO: 2907491 - RNA, 12 nt, Human
cugcugcugccu

SEQ ID NO: 2907492 - RNA, 20 nt, Human
cugcugccgccccacccaga

SEQ ID NO: 2907493 - RNA, 17 nt, Human
cugcugcgcccuuaccu

SEQ ID NO: 2907494 - RNA, 20 nt, Human
cugcugcgcccuuaccuucc

SEQ ID NO: 2907495 - RNA, 21 nt, Human
cugcugcgcccuuaccuuccc

SEQ ID NO: 2907496 - RNA, 19 nt, Human
cugcugccgccucccagcc

SEQ ID NO: 2907497 - RNA, 17 nt, Human
cugcugccgccucccag

SEQ ID NO: 2907498 - RNA, 14 nt, Human
cugcugccgccucc

SEQ ID NO: 2907499 - RNA, 19 nt, Human
cugcugccgccccacccag

SEQ ID NO: 2907500 - RNA, 23 nt, Human
cugcugcccuuaggccacauggg

SEQ ID NO: 2907501 - RNA, 15 nt, Human
cugcuggcccagcca

SEQ ID NO: 2907502 - RNA, 22 nt, Human
cugcuggcccagccaaacccug

SEQ ID NO: 2907503 - RNA, 16 nt, Human
cugcuggcccagccaa

SEQ ID NO: 2907504 - RNA, 15 nt, Human
cugcuggcaucaaga

SEQ ID NO: 2907505 - RNA, 21 nt, Human
cugcuggaguuucauguacaa

SEQ ID NO: 2907506 - RNA, 20 nt, Human
cugcuggaguuucauguaca

SEQ ID NO: 2907507 - RNA, 15 nt, Human
cugcuggaaacagac

SEQ ID NO: 2907508 - RNA, 15 nt, Human
cugcugcugucaccu

SEQ ID NO: 2907509 - RNA, 20 nt, Human
cuggagugcagugagccgag

SEQ ID NO: 2907510 - RNA, 19 nt, Human
cuggcacccggccccugcu

SEQ ID NO: 2907511 - RNA, 14 nt, Human
cuggagugcagugg

SEQ ID NO: 2907512 - RNA, 19 nt, Human
cuggagugcccacccuggg

SEQ ID NO: 2907513 - RNA, 22 nt, Human
cuggagugcccacccugggaga

SEQ ID NO: 2907514 - RNA, 21 nt, Human
cuggcacccggccccugcugg

SEQ ID NO: 2907515 - RNA, 20 nt, Human
cuggcacccggccccugcug

SEQ ID NO: 2907516 - RNA, 14 nt, Human
cuggcacuuggaga

SEQ ID NO: 2907517 - RNA, 23 nt, Human
cuggcagaaagggaacagaaagg

SEQ ID NO: 2907518 - RNA, 21 nt, Human
cuggcacuuggagacuuguau

SEQ ID NO: 2907519 - RNA, 23 nt, Human
cuggccaucccucguggucccca

SEQ ID NO: 2907520 - RNA, 17 nt, Human
cuggccaucccucgugg

SEQ ID NO: 2907521 - RNA, 15 nt, Human
cuggcauaguuucau

SEQ ID NO: 2907522 - RNA, 17 nt, Human
cuggccaguuggaacca

SEQ ID NO: 2907523 - RNA, 23 nt, Human
cuggcccagccaaacccugucug

SEQ ID NO: 2907524 - RNA, 20 nt, Human
cuggcccagccaaacccugu

SEQ ID NO: 2907525 - RNA, 17 nt, Human
cuggcccagccaaaccc

SEQ ID NO: 2907526 - RNA, 13 nt, Human
cuggcccagccaa

SEQ ID NO: 2907527 - RNA, 14 nt, Human
cuggccagaugcac

SEQ ID NO: 2907528 - RNA, 17 nt, Human
cuggccacugcucccua

SEQ ID NO: 2907529 - RNA, 13 nt, Human
cuggccagacucg

SEQ ID NO: 2907530 - RNA, 13 nt, Human
cuggccagaaugc

SEQ ID NO: 2907531 - RNA, 22 nt, Human
cuggcaucaagaggugggaggg

SEQ ID NO: 2907532 - RNA, 22 nt, Human
cuggcaguuuugacaucagcca

SEQ ID NO: 2907533 - RNA, 23 nt, Human
cuggcaucaagaggugggagggc

SEQ ID NO: 2907534 - RNA, 16 nt, Human
cuggcagaagggagca

SEQ ID NO: 2907535 - RNA, 13 nt, Human
cuggccuggccug

SEQ ID NO: 2907536 - RNA, 14 nt, Human
cuggccuggccugg

SEQ ID NO: 2907537 - RNA, 15 nt, Human
cuggccuggccuggc

SEQ ID NO: 2907538 - RNA, 16 nt, Human
cuggccuggccuggcc

SEQ ID NO: 2907539 - RNA, 17 nt, Human
cuggccuggccuggccc

SEQ ID NO: 2907540 - RNA, 18 nt, Human
cuggccuggccuggcccu

SEQ ID NO: 2907541 - RNA, 13 nt, Human
cuggccuggcccu

SEQ ID NO: 2907542 - RNA, 14 nt, Human
cuggccuggcccug

SEQ ID NO: 2907543 - RNA, 15 nt, Human
cuggccuggcccugc

SEQ ID NO: 2907544 - RNA, 16 nt, Human
cuggccuggcccugcc

SEQ ID NO: 2907545 - RNA, 19 nt, Human
cuggccuggcccugcccug

SEQ ID NO: 2907546 - RNA, 21 nt, Human
cuggccuggcccugcccugag

SEQ ID NO: 2907547 - RNA, 23 nt, Human
cuggccuggcccugcccugagga

SEQ ID NO: 2907548 - RNA, 18 nt, Human
cuggccuggcacacauca

SEQ ID NO: 2907549 - RNA, 22 nt, Human
cuggccuggcacacaucaggag

SEQ ID NO: 2907550 - RNA, 11 nt, Human
cuggccuggcc

SEQ ID NO: 2907551 - RNA, 13 nt, Human
cuggccuggcaca

SEQ ID NO: 2907552 - RNA, 14 nt, Human
cuggccuggcacac

SEQ ID NO: 2907553 - RNA, 16 nt, Human
cuggccuggcacacau

SEQ ID NO: 2907554 - RNA, 17 nt, Human
cuggccuggcacacauc

SEQ ID NO: 2907555 - RNA, 22 nt, Human
cuggccuggacuguuuucucuc

SEQ ID NO: 2907556 - RNA, 14 nt, Human
cuggccuggacugu

SEQ ID NO: 2907557 - RNA, 18 nt, Human
cuggccuggacuguuuuc

SEQ ID NO: 2907558 - RNA, 16 nt, Human
cuggcccauagaaaca

SEQ ID NO: 2907559 - RNA, 17 nt, Human
cuggcccauagaaacau

SEQ ID NO: 2907560 - RNA, 21 nt, Human
cuggcccauagaaacaugaca

SEQ ID NO: 2907561 - RNA, 23 nt, Human
cuggcccauagaaacaugacacu

SEQ ID NO: 2907562 - RNA, 19 nt, Human
cuggccuugaaaccaccuu

SEQ ID NO: 2907563 - RNA, 15 nt, Human
cuggcgugcaguggu

SEQ ID NO: 2907564 - RNA, 14 nt, Human
cuggcgugcagugg

SEQ ID NO: 2907565 - RNA, 18 nt, Human
cuggcgucaugcaaaguc

SEQ ID NO: 2907566 - RNA, 19 nt, Human
cuggcgucaugcaaaguca

SEQ ID NO: 2907567 - RNA, 22 nt, Human
cuggcuagaggccagccccacc

SEQ ID NO: 2907568 - RNA, 21 nt, Human
cuggcuagaggccagccccac

SEQ ID NO: 2907569 - RNA, 20 nt, Human
cuggcuagaggccagcccca

SEQ ID NO: 2907570 - RNA, 18 nt, Human
cuggcguggauuaaacuu

SEQ ID NO: 2907571 - RNA, 19 nt, Human
cuggcguggauuaaacuua

SEQ ID NO: 2907572 - RNA, 20 nt, Human
cuggcuaaagauaauugcua

SEQ ID NO: 2907573 - RNA, 14 nt, Human
cuggcuaacaaggc

SEQ ID NO: 2907574 - RNA, 15 nt, Human
cuggcucuucugccc

SEQ ID NO: 2907575 - RNA, 16 nt, Human
cuggcucuucugccca

SEQ ID NO: 2907576 - RNA, 17 nt, Human
cuggcucuucugcccaa

SEQ ID NO: 2907577 - RNA, 19 nt, Human
cuggagcaaucacagauga

SEQ ID NO: 2907578 - RNA, 22 nt, Human
cuggagcccuaaccccuuccag

SEQ ID NO: 2907579 - RNA, 20 nt, Human
cuggagcccuccgccuucac

SEQ ID NO: 2907580 - RNA, 15 nt, Human
cuggagccuggugcc

SEQ ID NO: 2907581 - RNA, 16 nt, Human
cuggagccuggugccc

SEQ ID NO: 2907582 - RNA, 17 nt, Human
cuggagccuggugcccu

SEQ ID NO: 2907583 - RNA, 15 nt, Human
cuggagcccuugggu

SEQ ID NO: 2907584 - RNA, 23 nt, Human
cuggagccuccacugccucugga

SEQ ID NO: 2907585 - RNA, 16 nt, Human
cuggagccugagucag

SEQ ID NO: 2907586 - RNA, 18 nt, Human
cuggagccugagucaggg

SEQ ID NO: 2907587 - RNA, 19 nt, Human
cuggagccugagucagggc

SEQ ID NO: 2907588 - RNA, 22 nt, Human
cuggagccugagucagggccca

SEQ ID NO: 2907589 - RNA, 23 nt, Human
cuggagccugagucagggcccag

SEQ ID NO: 2907590 - RNA, 14 nt, Human
cuggagcccuaacc

SEQ ID NO: 2907591 - RNA, 15 nt, Human
cuggagcccaggagu

SEQ ID NO: 2907592 - RNA, 13 nt, Human
cuggagcccagga

SEQ ID NO: 2907593 - RNA, 12 nt, Human
cuggagcccagg

SEQ ID NO: 2907594 - RNA, 17 nt, Human
cuggagugcagugagcc

SEQ ID NO: 2907595 - RNA, 16 nt, Human
cuggagugcagugagc

SEQ ID NO: 2907596 - RNA, 15 nt, Human
cuggagugcagugag

SEQ ID NO: 2907597 - RNA, 14 nt, Human
cuggagugcaguga

SEQ ID NO: 2907598 - RNA, 12 nt, Human
cuggagucugga

SEQ ID NO: 2907599 - RNA, 13 nt, Human
cuggagucuggag

SEQ ID NO: 2907600 - RNA, 18 nt, Human
cuggagucuggagugggc

SEQ ID NO: 2907601 - RNA, 16 nt, Human
cuggagugagcacuca

SEQ ID NO: 2907602 - RNA, 16 nt, Human
cuggagggguguggcu

SEQ ID NO: 2907603 - RNA, 20 nt, Human
cuggagggguguggcuccuu

SEQ ID NO: 2907604 - RNA, 22 nt, Human
cuggaggugggagcaggagauu

SEQ ID NO: 2907605 - RNA, 16 nt, Human
cuggagguggggcgag

SEQ ID NO: 2907606 - RNA, 20 nt, Human
cuggagguggggcgaggcag

SEQ ID NO: 2907607 - RNA, 21 nt, Human
cuggagguggggcgaggcagg

SEQ ID NO: 2907608 - RNA, 23 nt, Human
cuggagguggggcgaggcaggcc

SEQ ID NO: 2907609 - RNA, 14 nt, Human
cuggaggugggagc

SEQ ID NO: 2907610 - RNA, 16 nt, Human
cuggaggugggagcag

SEQ ID NO: 2907611 - RNA, 17 nt, Human
cuggaggugggagcagg

SEQ ID NO: 2907612 - RNA, 18 nt, Human
cuggaggugggagcagga

SEQ ID NO: 2907613 - RNA, 19 nt, Human
cuggaggugggagcaggag

SEQ ID NO: 2907614 - RNA, 20 nt, Human
cuggaggugggagcaggaga

SEQ ID NO: 2907615 - RNA, 21 nt, Human
cuggaggugggagcaggagau

SEQ ID NO: 2907616 - RNA, 17 nt, Human
cuggacaggcauguucu

SEQ ID NO: 2907617 - RNA, 14 nt, Human
cuggacaggcaugu

SEQ ID NO: 2907618 - RNA, 23 nt, Human
cuggacaggcauguucucugagg

SEQ ID NO: 2907619 - RNA, 15 nt, Human
cuggacacucagacc

SEQ ID NO: 2907620 - RNA, 16 nt, Human
cuggacacucagaccu

SEQ ID NO: 2907621 - RNA, 13 nt, Human
cuggacaggcucu

SEQ ID NO: 2907622 - RNA, 15 nt, Human
cuggacaggcucugc

SEQ ID NO: 2907623 - RNA, 19 nt, Human
cuggacaggcucugcuucu

SEQ ID NO: 2907624 - RNA, 20 nt, Human
cuggacaggcucugcuucuc

SEQ ID NO: 2907625 - RNA, 21 nt, Human
cuggaccaguggucucacaug

SEQ ID NO: 2907626 - RNA, 19 nt, Human
cugcuuccgguagggaggc

SEQ ID NO: 2907627 - RNA, 22 nt, Human
cugcuuccgguagggaggcagc

SEQ ID NO: 2907628 - RNA, 23 nt, Human
cugcuuccgguagggaggcagcc

SEQ ID NO: 2907629 - RNA, 11 nt, Human
cugcuucccac

SEQ ID NO: 2907630 - RNA, 16 nt, Human
cugcuucccaccuccc

SEQ ID NO: 2907631 - RNA, 19 nt, Human
cugcuucccaccucccugc

SEQ ID NO: 2907632 - RNA, 20 nt, Human
cugcuucccaccucccugcc

SEQ ID NO: 2907633 - RNA, 21 nt, Human
cugcuucccaccucccugccc

SEQ ID NO: 2907634 - RNA, 22 nt, Human
cugcuucccaccucccugccca

SEQ ID NO: 2907635 - RNA, 24 nt, Human
cugcuucccaccucccugcccagg

SEQ ID NO: 2907636 - RNA, 12 nt, Human
cugcuucccagg

SEQ ID NO: 2907637 - RNA, 13 nt, Human
cugcuucccaggu

SEQ ID NO: 2907638 - RNA, 23 nt, Human
cugcuucccagguucaagcgauu

SEQ ID NO: 2907639 - RNA, 17 nt, Human
cuggacaccgggccagu

SEQ ID NO: 2907640 - RNA, 22 nt, Human
cuggacaccgggccaguaucua

SEQ ID NO: 2907641 - RNA, 15 nt, Human
cuggacaagcagagg

SEQ ID NO: 2907642 - RNA, 18 nt, Human
cuggacaagcagaggugg

SEQ ID NO: 2907643 - RNA, 20 nt, Human
cuggaccuugaacuggguac

SEQ ID NO: 2907644 - RNA, 17 nt, Human
cuggaccuugaacuggg

SEQ ID NO: 2907645 - RNA, 21 nt, Human
cuggaccuugaacuggguacu

SEQ ID NO: 2907646 - RNA, 14 nt, Human
cuggacggaagugg

SEQ ID NO: 2907647 - RNA, 17 nt, Human
cuggacggaaguggugg

SEQ ID NO: 2907648 - RNA, 20 nt, Human
cuggaccugccuccugccug

SEQ ID NO: 2907649 - RNA, 15 nt, Human
cuggaccugccuccu

SEQ ID NO: 2907650 - RNA, 17 nt, Human
cuggaccugccuccugc

SEQ ID NO: 2907651 - RNA, 21 nt, Human
cuggaccugccuccugccugc

SEQ ID NO: 2907652 - RNA, 15 nt, Human
cuggaccugguggcu

SEQ ID NO: 2907653 - RNA, 13 nt, Human
cuggacuccggcc

SEQ ID NO: 2907654 - RNA, 15 nt, Human
cuggacuccggcccu

SEQ ID NO: 2907655 - RNA, 14 nt, Human
cuggacuccucugu

SEQ ID NO: 2907656 - RNA, 17 nt, Human
cuggacuccucugucca

SEQ ID NO: 2907657 - RNA, 18 nt, Human
cuggacuccggcccuccu

SEQ ID NO: 2907658 - RNA, 22 nt, Human
cuggagauacugguggaaguuc

SEQ ID NO: 2907659 - RNA, 18 nt, Human
cuggacuccucuguccag

SEQ ID NO: 2907660 - RNA, 19 nt, Human
cuggacuccucuguccagg

SEQ ID NO: 2907661 - RNA, 16 nt, Human
cuggaccuugaacugg

SEQ ID NO: 2907662 - RNA, 12 nt, Human
cuggaccugccu

SEQ ID NO: 2907663 - RNA, 15 nt, Human
cuguaucuuucuaug

SEQ ID NO: 2907664 - RNA, 23 nt, Human
cuguaucccaugagccucagcau

SEQ ID NO: 2907665 - RNA, 19 nt, Human
cuguaugaaagauuguggg

SEQ ID NO: 2907666 - RNA, 18 nt, Human
cuguaucuguguagacua

SEQ ID NO: 2907667 - RNA, 14 nt, Human
cuguaucuguguag

SEQ ID NO: 2907668 - RNA, 13 nt, Human
cuguaucugugua

SEQ ID NO: 2907669 - RNA, 12 nt, Human
cugucaagaaga

SEQ ID NO: 2907670 - RNA, 14 nt, Human
cugucaagaagaug

SEQ ID NO: 2907671 - RNA, 11 nt, Human
cuguccagaga

SEQ ID NO: 2907672 - RNA, 19 nt, Human
cugucaaugauuauuuuca

SEQ ID NO: 2907673 - RNA, 20 nt, Human
cugucaaugauuauuuucau

SEQ ID NO: 2907674 - RNA, 21 nt, Human
cugucaagugggaucugucac

SEQ ID NO: 2907675 - RNA, 19 nt, Human
cugucaaguuccuuugggu

SEQ ID NO: 2907676 - RNA, 19 nt, Human
cugucaagaguaguuauau

SEQ ID NO: 2907677 - RNA, 22 nt, Human
cugucaagaguaguuauauaau

SEQ ID NO: 2907678 - RNA, 17 nt, Human
cuguccagccugggcag

SEQ ID NO: 2907679 - RNA, 15 nt, Human
cuguccagccugggc

SEQ ID NO: 2907680 - RNA, 13 nt, Human
cuguccagccugg

SEQ ID NO: 2907681 - RNA, 17 nt, Human
cuguccagcagucacuu

SEQ ID NO: 2907682 - RNA, 19 nt, Human
cuguccagcagucacuucg

SEQ ID NO: 2907683 - RNA, 18 nt, Human
cuguccagccugggcagc

SEQ ID NO: 2907684 - RNA, 23 nt, Human
cuguccaggcacugcugcccagc

SEQ ID NO: 2907685 - RNA, 12 nt, Human
cuguauacuuua

SEQ ID NO: 2907686 - RNA, 13 nt, Human
cuguauacuuuag

SEQ ID NO: 2907687 - RNA, 16 nt, Human
cuguauacuuuaguau

SEQ ID NO: 2907688 - RNA, 19 nt, Human
cuguauacaacccuggcau

SEQ ID NO: 2907689 - RNA, 18 nt, Human
cuguaguuaggaaauaaa

SEQ ID NO: 2907690 - RNA, 20 nt, Human
cuguauaaauaggagaggau

SEQ ID NO: 2907691 - RNA, 17 nt, Human
cuguaguuaggaaauaa

SEQ ID NO: 2907692 - RNA, 16 nt, Human
cuguauaacccuguua

SEQ ID NO: 2907693 - RNA, 17 nt, Human
cuguauaacccuguuac

SEQ ID NO: 2907694 - RNA, 18 nt, Human
cuguauaacccuguuaca

SEQ ID NO: 2907695 - RNA, 14 nt, Human
cuguauaagcacug

SEQ ID NO: 2907696 - RNA, 15 nt, Human
cuguauaagcacuga

SEQ ID NO: 2907697 - RNA, 19 nt, Human
cuguauaagcacugaaaaa

SEQ ID NO: 2907698 - RNA, 21 nt, Human
cuguauaagcacugaaaaaca

SEQ ID NO: 2907699 - RNA, 21 nt, Human
cuguauaaauaggagaggaug

SEQ ID NO: 2907700 - RNA, 17 nt, Human
cuguauauuuuaagaag

SEQ ID NO: 2907701 - RNA, 17 nt, Human
cuguaucaagucauggc

SEQ ID NO: 2907702 - RNA, 15 nt, Human
cuguauauacuuuuu

SEQ ID NO: 2907703 - RNA, 14 nt, Human
cuguauauacuuuu

SEQ ID NO: 2907704 - RNA, 16 nt, Human
cuguauagacaguuug

SEQ ID NO: 2907705 - RNA, 17 nt, Human
cuguauagacaguuugu

SEQ ID NO: 2907706 - RNA, 18 nt, Human
cuguauagacaguuugua

SEQ ID NO: 2907707 - RNA, 20 nt, Human
cuguauagacaguuuguaaa

SEQ ID NO: 2907708 - RNA, 21 nt, Human
cuguauagacaguuuguaaau

SEQ ID NO: 2907709 - RNA, 22 nt, Human
cuguauagacaguuuguaaaug

SEQ ID NO: 2907710 - RNA, 23 nt, Human
cuguauagacaguuuguaaaugu

SEQ ID NO: 2907711 - RNA, 15 nt, Human
cuguacacugacuug

SEQ ID NO: 2907712 - RNA, 17 nt, Human
cuguacacugacuugag

SEQ ID NO: 2907713 - RNA, 21 nt, Human
cuguacacugacuugagacca

SEQ ID NO: 2907714 - RNA, 18 nt, Human
cuguacacguguccugua

SEQ ID NO: 2907715 - RNA, 16 nt, Human
cuguacacguguccug

SEQ ID NO: 2907716 - RNA, 17 nt, Human
cuguacacguguccugu

SEQ ID NO: 2907717 - RNA, 11 nt, Human
cuguacaauaa

SEQ ID NO: 2907718 - RNA, 22 nt, Human
cuguagucccagcuacucggga

SEQ ID NO: 2907719 - RNA, 22 nt, Human
cuguaguccuagccacucagga

SEQ ID NO: 2907720 - RNA, 20 nt, Human
cuguaguccuagccacucag

SEQ ID NO: 2907721 - RNA, 23 nt, Human
cuguaguccuagccacucaggag

SEQ ID NO: 2907722 - RNA, 15 nt, Human
cuguaguuaggaaau

SEQ ID NO: 2907723 - RNA, 14 nt, Human
cuguaguuaggaaa

SEQ ID NO: 2907724 - RNA, 13 nt, Human
cuguaguuaggaa

SEQ ID NO: 2907725 - RNA, 14 nt, Human
cuguccuacccacc

SEQ ID NO: 2907726 - RNA, 20 nt, Human
cuguccggaaugccacccac

SEQ ID NO: 2907727 - RNA, 20 nt, Human
cuguccuaaggaaccuuccu

SEQ ID NO: 2907728 - RNA, 17 nt, Human
cuguccuaaggaaccuu

SEQ ID NO: 2907729 - RNA, 21 nt, Human
cuguccggaaugccacccaca

SEQ ID NO: 2907730 - RNA, 22 nt, Human
cugucucaagagggcacuggug

SEQ ID NO: 2907731 - RNA, 23 nt, Human
cugucucaaaaaaacacaaaagu

SEQ ID NO: 2907732 - RNA, 12 nt, Human
cuguccuccaag

SEQ ID NO: 2907733 - RNA, 16 nt, Human
cugucuagucucuccu

SEQ ID NO: 2907734 - RNA, 18 nt, Human
cugucuagucucuccugu

SEQ ID NO: 2907735 - RNA, 19 nt, Human
cugucuagucucuccugua

SEQ ID NO: 2907736 - RNA, 14 nt, Human
cugucuagcaugcc

SEQ ID NO: 2907737 - RNA, 15 nt, Human
cugucuagcaugcca

SEQ ID NO: 2907738 - RNA, 18 nt, Human
cugucuagcaugccaaca

SEQ ID NO: 2907739 - RNA, 21 nt, Human
cugucuagcaugccaacaaga

SEQ ID NO: 2907740 - RNA, 12 nt, Human
cugucuagagua

SEQ ID NO: 2907741 - RNA, 15 nt, Human
cuguccccgcagccc

SEQ ID NO: 2907742 - RNA, 22 nt, Human
cuguccauauuuauagguaccc

SEQ ID NO: 2907743 - RNA, 16 nt, Human
cuguccaucagccagg

SEQ ID NO: 2907744 - RNA, 12 nt, Human
cuguccaucugc

SEQ ID NO: 2907745 - RNA, 13 nt, Human
cuguccaucugcc

SEQ ID NO: 2907746 - RNA, 15 nt, Human
cuguccaucugcccg

SEQ ID NO: 2907747 - RNA, 17 nt, Human
cuguccaucugcccgcc

SEQ ID NO: 2907748 - RNA, 22 nt, Human
cuguccaucugcccgccugccc

SEQ ID NO: 2907749 - RNA, 15 nt, Human
cugucccugaaaccu

SEQ ID NO: 2907750 - RNA, 15 nt, Human
cugucccugcccuuc

SEQ ID NO: 2907751 - RNA, 16 nt, Human
cugucccugcccuucu

SEQ ID NO: 2907752 - RNA, 13 nt, Human
cugucccuccugg

SEQ ID NO: 2907753 - RNA, 14 nt, Human
cugucccuccuggu

SEQ ID NO: 2907754 - RNA, 15 nt, Human
cugucccuccuggug

SEQ ID NO: 2907755 - RNA, 19 nt, Human
cugucccuccuggugucac

SEQ ID NO: 2907756 - RNA, 23 nt, Human
cuguccccgcagcccuggcaggg

SEQ ID NO: 2907757 - RNA, 18 nt, Human
cuguccccguguugcaug

SEQ ID NO: 2907758 - RNA, 17 nt, Human
cuguccccgcagcccug

SEQ ID NO: 2907759 - RNA, 22 nt, Human
cuguccccuggggucucugcug

SEQ ID NO: 2907760 - RNA, 15 nt, Human
cuguccccuuggcag

SEQ ID NO: 2907761 - RNA, 14 nt, Human
cuguaauaauaccu

SEQ ID NO: 2907762 - RNA, 15 nt, Human
cuguaauaauaccuc

SEQ ID NO: 2907763 - RNA, 16 nt, Human
cuguaauaauaccuca

SEQ ID NO: 2907764 - RNA, 17 nt, Human
cuguaauaauaccucaa

SEQ ID NO: 2907765 - RNA, 22 nt, Human
cuguaauaauaccucaauguuu

SEQ ID NO: 2907766 - RNA, 23 nt, Human
cuguaauaauaccucaauguuug

SEQ ID NO: 2907767 - RNA, 13 nt, Human
cugguuccucccc

SEQ ID NO: 2907768 - RNA, 17 nt, Human
cugguggcucuuugggc

SEQ ID NO: 2907769 - RNA, 22 nt, Human
cuggugggaggggcgcccaccu

SEQ ID NO: 2907770 - RNA, 12 nt, Human
cugguuccuccc

SEQ ID NO: 2907771 - RNA, 21 nt, Human
cugguucccguuucuccaccu

SEQ ID NO: 2907772 - RNA, 23 nt, Human
cuggugggaggggcgcccaccuc

SEQ ID NO: 2907773 - RNA, 18 nt, Human
cugguucccguuucucca

SEQ ID NO: 2907774 - RNA, 23 nt, Human
cuguaauuuuuauuuucacccuc

SEQ ID NO: 2907775 - RNA, 12 nt, Human
cuguacaaaggg

SEQ ID NO: 2907776 - RNA, 20 nt, Human
cuguaaucgcccuacuauuc

SEQ ID NO: 2907777 - RNA, 14 nt, Human
cugguggcagcugc

SEQ ID NO: 2907778 - RNA, 13 nt, Human
cugguggcagcug

SEQ ID NO: 2907779 - RNA, 20 nt, Human
cugguggcccgacagccugg

SEQ ID NO: 2907780 - RNA, 21 nt, Human
cugguggcccgacagccuggc

SEQ ID NO: 2907781 - RNA, 22 nt, Human
cugguggcccgacagccuggca

SEQ ID NO: 2907782 - RNA, 23 nt, Human
cugguggcccgacagccuggcac

SEQ ID NO: 2907783 - RNA, 12 nt, Human
cuggugcugcca

SEQ ID NO: 2907784 - RNA, 13 nt, Human
cuggugcugccac

SEQ ID NO: 2907785 - RNA, 20 nt, Human
cuggugcugccacacuucag

SEQ ID NO: 2907786 - RNA, 22 nt, Human
cuggugcugccacacuucaggc

SEQ ID NO: 2907787 - RNA, 19 nt, Human
cugguccugagggucccca

SEQ ID NO: 2907788 - RNA, 16 nt, Human
cugguccugagggucc

SEQ ID NO: 2907789 - RNA, 20 nt, Human
cugguccggacacuccuaga

SEQ ID NO: 2907790 - RNA, 21 nt, Human
cugguccggacacuccuagag

SEQ ID NO: 2907791 - RNA, 22 nt, Human
cugguccggacacuccuagaga

SEQ ID NO: 2907792 - RNA, 21 nt, Human
cuggucccuugcagcuaguuu

SEQ ID NO: 2907793 - RNA, 17 nt, Human
cuggucccuugcagcua

SEQ ID NO: 2907794 - RNA, 19 nt, Human
cuggucacagccuccucug

SEQ ID NO: 2907795 - RNA, 16 nt, Human
cugguccggacacucc

SEQ ID NO: 2907796 - RNA, 17 nt, Human
cuggucaaacaaacucu

SEQ ID NO: 2907797 - RNA, 21 nt, Human
cugguacucccucucaggauc

SEQ ID NO: 2907798 - RNA, 23 nt, Human
cuggucaaacaaacucucugaac

SEQ ID NO: 2907799 - RNA, 13 nt, Human
cuggucaaagaaa

SEQ ID NO: 2907800 - RNA, 18 nt, Human
cuggucaaacaaacucuc

SEQ ID NO: 2907801 - RNA, 19 nt, Human
cuggucaaucaacacuacc

SEQ ID NO: 2907802 - RNA, 16 nt, Human
cuggucacacacaggu

SEQ ID NO: 2907803 - RNA, 19 nt, Human
cuggucacacacagguguu

SEQ ID NO: 2907804 - RNA, 15 nt, Human
cuggucacagccucc

SEQ ID NO: 2907805 - RNA, 16 nt, Human
cuggucacagccuccu

SEQ ID NO: 2907806 - RNA, 17 nt, Human
cuggucacagccuccuc

SEQ ID NO: 2907807 - RNA, 18 nt, Human
cuggucacagccuccucu

SEQ ID NO: 2907808 - RNA, 18 nt, Human
cuggucacaggacucugc

SEQ ID NO: 2907809 - RNA, 20 nt, Human
cugggggacccaauguagga

SEQ ID NO: 2907810 - RNA, 20 nt, Human
cugggggaaugagcccagag

SEQ ID NO: 2907811 - RNA, 21 nt, Human
cugggggaaugagcccagaga

SEQ ID NO: 2907812 - RNA, 17 nt, Human
cugggggcaacuggcca

SEQ ID NO: 2907813 - RNA, 18 nt, Human
cugggggaguuuuccucu

SEQ ID NO: 2907814 - RNA, 12 nt, Human
cugggggcagga

SEQ ID NO: 2907815 - RNA, 19 nt, Human
cugggggcaggagggcccu

SEQ ID NO: 2907816 - RNA, 14 nt, Human
cugggggcaggagg

SEQ ID NO: 2907817 - RNA, 24 nt, Human
cugggcuucaguggcagcugcuuu

SEQ ID NO: 2907818 - RNA, 16 nt, Human
cuggcugccccaaccu

SEQ ID NO: 2907819 - RNA, 18 nt, Human
cuggcugccccaaccugc

SEQ ID NO: 2907820 - RNA, 13 nt, Human
cuggcugcaguga

SEQ ID NO: 2907821 - RNA, 19 nt, Human
cuggcugccccaaccugcu

SEQ ID NO: 2907822 - RNA, 20 nt, Human
cuggcugccccaaccugcug

SEQ ID NO: 2907823 - RNA, 13 nt, Human
cuggggcuggcuu

SEQ ID NO: 2907824 - RNA, 14 nt, Human
cuggggcuggcuuu

SEQ ID NO: 2907825 - RNA, 12 nt, Human
cuggggcugggc

SEQ ID NO: 2907826 - RNA, 13 nt, Human
cuggggcugggcc

SEQ ID NO: 2907827 - RNA, 14 nt, Human
cuggggcugggccc

SEQ ID NO: 2907828 - RNA, 19 nt, Human
cuggggcuguugaagucac

SEQ ID NO: 2907829 - RNA, 12 nt, Human
cuggggcugcug

SEQ ID NO: 2907830 - RNA, 14 nt, Human
cuggggcugcuggc

SEQ ID NO: 2907831 - RNA, 15 nt, Human
cuggggcugcuggcc

SEQ ID NO: 2907832 - RNA, 16 nt, Human
cuggggcugcuggccu

SEQ ID NO: 2907833 - RNA, 15 nt, Human
cugggguccagggag

SEQ ID NO: 2907834 - RNA, 16 nt, Human
cugggguccagggagc

SEQ ID NO: 2907835 - RNA, 19 nt, Human
cuggggucacccucuccag

SEQ ID NO: 2907836 - RNA, 12 nt, Human
cuggggucccca

SEQ ID NO: 2907837 - RNA, 13 nt, Human
cugggguccccag

SEQ ID NO: 2907838 - RNA, 14 nt, Human
cugggguccccagg

SEQ ID NO: 2907839 - RNA, 16 nt, Human
cugggguccccagggc

SEQ ID NO: 2907840 - RNA, 17 nt, Human
cugggguccccagggcu

SEQ ID NO: 2907841 - RNA, 17 nt, Human
cuggguacugaaagccu

SEQ ID NO: 2907842 - RNA, 18 nt, Human
cuggguacugaaagccuu

SEQ ID NO: 2907843 - RNA, 14 nt, Human
cugguacucaagcc

SEQ ID NO: 2907844 - RNA, 16 nt, Human
cugguacccuccuggc

SEQ ID NO: 2907845 - RNA, 18 nt, Human
cugguacucccucucagg

SEQ ID NO: 2907846 - RNA, 19 nt, Human
cugguacucccucucagga

SEQ ID NO: 2907847 - RNA, 20 nt, Human
cugguacucccucucaggau

SEQ ID NO: 2907848 - RNA, 14 nt, Human
cugguacccuccug

SEQ ID NO: 2907849 - RNA, 15 nt, Human
cugguacccuccugg

SEQ ID NO: 2907850 - RNA, 19 nt, Human
cuguguuuauaaaauauaa

SEQ ID NO: 2907851 - RNA, 17 nt, Human
cuguguuuauaaaauau

SEQ ID NO: 2907852 - RNA, 16 nt, Human
cuguguuuauaaaaua

SEQ ID NO: 2907853 - RNA, 18 nt, Human
cuguguuuuauaaaauag

SEQ ID NO: 2907854 - RNA, 12 nt, Human
cuguuaaaaucu

SEQ ID NO: 2907855 - RNA, 19 nt, Human
cuguuaaaaucuauucugu

SEQ ID NO: 2907856 - RNA, 11 nt, Human
cuguuaaacug

SEQ ID NO: 2907857 - RNA, 12 nt, Human
cuguuaaacugu

SEQ ID NO: 2907858 - RNA, 13 nt, Human
cuguuaaacuguu

SEQ ID NO: 2907859 - RNA, 14 nt, Human
cuguuaaacuguua

SEQ ID NO: 2907860 - RNA, 15 nt, Human
cuguuaaacuguuag

SEQ ID NO: 2907861 - RNA, 19 nt, Human
cuguuaaacuguuagcacu

SEQ ID NO: 2907862 - RNA, 20 nt, Human
cugugugugcgccuacagga

SEQ ID NO: 2907863 - RNA, 18 nt, Human
cugugugugcgccuacag

SEQ ID NO: 2907864 - RNA, 11 nt, Human
cugugugguug

SEQ ID NO: 2907865 - RNA, 12 nt, Human
cuguguguguga

SEQ ID NO: 2907866 - RNA, 16 nt, Human
cugugugugugaauga

SEQ ID NO: 2907867 - RNA, 14 nt, Human
cugugugugugaau

SEQ ID NO: 2907868 - RNA, 18 nt, Human
cugugugugugaaugaac

SEQ ID NO: 2907869 - RNA, 17 nt, Human
cugugugugugaaugaa

SEQ ID NO: 2907870 - RNA, 21 nt, Human
cugugugugugaaugaacacu

SEQ ID NO: 2907871 - RNA, 19 nt, Human
cuguguuguugcuucuugu

SEQ ID NO: 2907872 - RNA, 23 nt, Human
cuguguuguugcuucuugugaag

SEQ ID NO: 2907873 - RNA, 18 nt, Human
cuguguuuaauuucuuca

SEQ ID NO: 2907874 - RNA, 21 nt, Human
cuguguuuaauuucuucaaaa

SEQ ID NO: 2907875 - RNA, 14 nt, Human
cuguguuuaauuug

SEQ ID NO: 2907876 - RNA, 16 nt, Human
cuguguuuaauuugac

SEQ ID NO: 2907877 - RNA, 23 nt, Human
cugugucuugcaauggcagccuu

SEQ ID NO: 2907878 - RNA, 22 nt, Human
cugugucuugcaauggcagccu

SEQ ID NO: 2907879 - RNA, 20 nt, Human
cugugucuugcaauggcagc

SEQ ID NO: 2907880 - RNA, 21 nt, Human
cugugucuugcaauggcagcc

SEQ ID NO: 2907881 - RNA, 14 nt, Human
cuguggggaaaggg

SEQ ID NO: 2907882 - RNA, 23 nt, Human
cugugggcgugagaccugccccu

SEQ ID NO: 2907883 - RNA, 19 nt, Human
cuguggggccuugguuccc

SEQ ID NO: 2907884 - RNA, 18 nt, Human
cugugugcuccuccuugg

SEQ ID NO: 2907885 - RNA, 23 nt, Human
cugugugcuccuccuuggugccu

SEQ ID NO: 2907886 - RNA, 12 nt, Human
cuguguggaacu

SEQ ID NO: 2907887 - RNA, 17 nt, Human
cuguucauacacuaacc

SEQ ID NO: 2907888 - RNA, 21 nt, Human
cuguucauacacuaaccaaau

SEQ ID NO: 2907889 - RNA, 20 nt, Human
cuguucccauguagcccccu

SEQ ID NO: 2907890 - RNA, 18 nt, Human
cuguucccauucuugcau

SEQ ID NO: 2907891 - RNA, 17 nt, Human
cuguucccaccugcugg

SEQ ID NO: 2907892 - RNA, 22 nt, Human
cuguuacccaggguggagugca

SEQ ID NO: 2907893 - RNA, 16 nt, Human
cuguuaccgccugucu

SEQ ID NO: 2907894 - RNA, 17 nt, Human
cuguuaccgccugucuc

SEQ ID NO: 2907895 - RNA, 15 nt, Human
cuguuaccauucaca

SEQ ID NO: 2907896 - RNA, 20 nt, Human
cuguuacauaacaagaaaau

SEQ ID NO: 2907897 - RNA, 21 nt, Human
cuguuacauaacaagaaaauc

SEQ ID NO: 2907898 - RNA, 23 nt, Human
cuguuacauaacaagaaaaucaa

SEQ ID NO: 2907899 - RNA, 15 nt, Human
cuguucucuugggaa

SEQ ID NO: 2907900 - RNA, 16 nt, Human
cuguucucccuucggu

SEQ ID NO: 2907901 - RNA, 16 nt, Human
cuguucuaaagcucug

SEQ ID NO: 2907902 - RNA, 19 nt, Human
cuguucuacccguuccaaa

SEQ ID NO: 2907903 - RNA, 20 nt, Human
cuguucuacccguuccaaaa

SEQ ID NO: 2907904 - RNA, 22 nt, Human
cuguucuagcacuucaucuggc

SEQ ID NO: 2907905 - RNA, 12 nt, Human
cuguucuaaagc

SEQ ID NO: 2907906 - RNA, 17 nt, Human
cuguucuaaagcucuga

SEQ ID NO: 2907907 - RNA, 15 nt, Human
cuguucuaacaugua

SEQ ID NO: 2907908 - RNA, 16 nt, Human
cuguucuaacauguaa

SEQ ID NO: 2907909 - RNA, 12 nt, Human
cuguucuaaggg

SEQ ID NO: 2907910 - RNA, 22 nt, Human
cuguucuaagggggaggggaag

SEQ ID NO: 2907911 - RNA, 15 nt, Human
cuguuccuuagaccu

SEQ ID NO: 2907912 - RNA, 16 nt, Human
cuguuccuuagaccuu

SEQ ID NO: 2907913 - RNA, 21 nt, Human
cuguuccucucuuuuccuguu

SEQ ID NO: 2907914 - RNA, 16 nt, Human
cugugggcgggcccag

SEQ ID NO: 2907915 - RNA, 17 nt, Human
cugugggcgggcccagc

SEQ ID NO: 2907916 - RNA, 18 nt, Human
cugugggcgggcccagca

SEQ ID NO: 2907917 - RNA, 19 nt, Human
cugugggcgggcccagcac

SEQ ID NO: 2907918 - RNA, 22 nt, Human
cugugggcgugagaccugcccc

SEQ ID NO: 2907919 - RNA, 21 nt, Human
cugugggcgugagaccugccc

SEQ ID NO: 2907920 - RNA, 14 nt, Human
cuguggcugcgcuu

SEQ ID NO: 2907921 - RNA, 16 nt, Human
cuguggccugggcaag

SEQ ID NO: 2907922 - RNA, 22 nt, Human
cuguggccacauuuucagccaa

SEQ ID NO: 2907923 - RNA, 16 nt, Human
cuguggcauugaaaug

SEQ ID NO: 2907924 - RNA, 14 nt, Human
cuguggccugggca

SEQ ID NO: 2907925 - RNA, 13 nt, Human
cuguggccugggc

SEQ ID NO: 2907926 - RNA, 11 nt, Human
cuguggccugg

SEQ ID NO: 2907927 - RNA, 21 nt, Human
cuguggcacuugccuggguca

SEQ ID NO: 2907928 - RNA, 20 nt, Human
cuguggcacuugccuggguc

SEQ ID NO: 2907929 - RNA, 19 nt, Human
cuguggcacuugccugggu

SEQ ID NO: 2907930 - RNA, 17 nt, Human
cuguggcacuugccugg

SEQ ID NO: 2907931 - RNA, 16 nt, Human
cuguggcacuugccug

SEQ ID NO: 2907932 - RNA, 17 nt, Human
cuguggcaucuuugccu

SEQ ID NO: 2907933 - RNA, 22 nt, Human
cuguggaaaagaaacacgcacu

SEQ ID NO: 2907934 - RNA, 15 nt, Human
cuguggcacuugccu

SEQ ID NO: 2907935 - RNA, 16 nt, Human
cuguggaugccagggc

SEQ ID NO: 2907936 - RNA, 20 nt, Human
cuguggaugagcccucagaa

SEQ ID NO: 2907937 - RNA, 19 nt, Human
cuguggaugagcccucaga

SEQ ID NO: 2907938 - RNA, 23 nt, Human
cugugccucggcuuuucucagcu

SEQ ID NO: 2907939 - RNA, 22 nt, Human
cugugccucggcuuuucucagc

SEQ ID NO: 2907940 - RNA, 17 nt, Human
cugugccucugccuguc

SEQ ID NO: 2907941 - RNA, 13 nt, Human
cugugccucggcu

SEQ ID NO: 2907942 - RNA, 19 nt, Human
cugugcugcuguuacuguu

SEQ ID NO: 2907943 - RNA, 20 nt, Human
cugugcugcuguuacuguua

SEQ ID NO: 2907944 - RNA, 21 nt, Human
cugugcuguggaagcaacagg

SEQ ID NO: 2907945 - RNA, 17 nt, Human
cugugcuucaauuaaua

SEQ ID NO: 2907946 - RNA, 18 nt, Human
cugugcuucaauuaauaa

SEQ ID NO: 2907947 - RNA, 12 nt, Human
cugugcugugga

SEQ ID NO: 2907948 - RNA, 15 nt, Human
cugugcuguggaagc

SEQ ID NO: 2907949 - RNA, 13 nt, Human
cugugcuggggga

SEQ ID NO: 2907950 - RNA, 23 nt, Human
cugugcugggggaaugagcccag

SEQ ID NO: 2907951 - RNA, 19 nt, Human
cuguggaaaagaaacacgc

SEQ ID NO: 2907952 - RNA, 17 nt, Human
cugugcuuuuaaaugca

SEQ ID NO: 2907953 - RNA, 23 nt, Human
cugucucaagagggcacuggugg

SEQ ID NO: 2907954 - RNA, 12 nt, Human
cugucucagccu

SEQ ID NO: 2907955 - RNA, 14 nt, Human
cugucucagacuuu

SEQ ID NO: 2907956 - RNA, 20 nt, Human
cugucucagacuuuuguaca

SEQ ID NO: 2907957 - RNA, 21 nt, Human
cugucucagacuuuuguacau

SEQ ID NO: 2907958 - RNA, 22 nt, Human
cugucucagacuuuuguacauc

SEQ ID NO: 2907959 - RNA, 17 nt, Human
cugucucagccucccag

SEQ ID NO: 2907960 - RNA, 16 nt, Human
cugucucagccuccca

SEQ ID NO: 2907961 - RNA, 15 nt, Human
cugucucagccuccc

SEQ ID NO: 2907962 - RNA, 14 nt, Human
cugucucagccucc

SEQ ID NO: 2907963 - RNA, 16 nt, Human
cugugagguuucccaa

SEQ ID NO: 2907964 - RNA, 17 nt, Human
cugugagguuucccaau

SEQ ID NO: 2907965 - RNA, 22 nt, Human
cugugagguuucccaauggugu

SEQ ID NO: 2907966 - RNA, 15 nt, Human
cugugaguaaauauu

SEQ ID NO: 2907967 - RNA, 17 nt, Human
cugugaguaaauauuga

SEQ ID NO: 2907968 - RNA, 18 nt, Human
cugugaguaaauauugag

SEQ ID NO: 2907969 - RNA, 20 nt, Human
cugugagucuuugguucuaa

SEQ ID NO: 2907970 - RNA, 23 nt, Human
cugugagucuuugguucuaagga

SEQ ID NO: 2907971 - RNA, 21 nt, Human
cugugagucuuugguucuaag

SEQ ID NO: 2907972 - RNA, 22 nt, Human
cugugagucuuugguucuaagg

SEQ ID NO: 2907973 - RNA, 13 nt, Human
cugugaucauuua

SEQ ID NO: 2907974 - RNA, 15 nt, Human
cugugaucauuuauu

SEQ ID NO: 2907975 - RNA, 19 nt, Human
cugugaucauuuauuuuaa

SEQ ID NO: 2907976 - RNA, 13 nt, Human
cugugaucuuauu

SEQ ID NO: 2907977 - RNA, 14 nt, Human
cugugaucuuauuu

SEQ ID NO: 2907978 - RNA, 15 nt, Human
cugugaucuuauuuu

SEQ ID NO: 2907979 - RNA, 17 nt, Human
cugugaucuuauuuuuc

SEQ ID NO: 2907980 - RNA, 18 nt, Human
cugugaucuuauuuuucu

SEQ ID NO: 2907981 - RNA, 17 nt, Human
cugugaucuuuuaaagu

SEQ ID NO: 2907982 - RNA, 18 nt, Human
cugugaucuuuuaaagug

SEQ ID NO: 2907983 - RNA, 17 nt, Human
cugugaguuuaaagcaa

SEQ ID NO: 2907984 - RNA, 21 nt, Human
cugugauacagaacucuuaaa

SEQ ID NO: 2907985 - RNA, 19 nt, Human
cugugauaguucacccccu

SEQ ID NO: 2907986 - RNA, 18 nt, Human
cugugccaugugccaggu

SEQ ID NO: 2907987 - RNA, 16 nt, Human
cugugccaugugccag

SEQ ID NO: 2907988 - RNA, 17 nt, Human
cugugcauguaugucuu

SEQ ID NO: 2907989 - RNA, 14 nt, Human
cugugcauucuccu

SEQ ID NO: 2907990 - RNA, 15 nt, Human
cugugcauucuccug

SEQ ID NO: 2907991 - RNA, 20 nt, Human
cugugcauucuccuggaugc

SEQ ID NO: 2907992 - RNA, 15 nt, Human
cugugcauugggauu

SEQ ID NO: 2907993 - RNA, 17 nt, Human
cugugcauuucugguug

SEQ ID NO: 2907994 - RNA, 13 nt, Human
cugugccuccuca

SEQ ID NO: 2907995 - RNA, 16 nt, Human
cugugccuccucaccc

SEQ ID NO: 2907996 - RNA, 15 nt, Human
cugugccuccucacc

SEQ ID NO: 2907997 - RNA, 21 nt, Human
cugugcaacgccgugggcugc

SEQ ID NO: 2907998 - RNA, 18 nt, Human
cugugcaacgccgugggc

SEQ ID NO: 2907999 - RNA, 19 nt, Human
cugugauccacccaacccu

SEQ ID NO: 2908000 - RNA, 17 nt, Human
cugugcaacgccguggg

SEQ ID NO: 2908001 - RNA, 16 nt, Human
cugugcauagugcugg

SEQ ID NO: 2908002 - RNA, 18 nt, Human
cugugcauagugcuggga

SEQ ID NO: 2908003 - RNA, 15 nt, Human
cugugcauguauguc

SEQ ID NO: 2908004 - RNA, 16 nt, Human
cugugcauguaugucu

SEQ ID NO: 2908005 - RNA, 11 nt, Human
cugugcacaca

SEQ ID NO: 2908006 - RNA, 12 nt, Human
cugugcacacac

SEQ ID NO: 2908007 - RNA, 15 nt, Human
cugugcacacacaca

SEQ ID NO: 2908008 - RNA, 20 nt, Human
cugugcacacacacacacau

SEQ ID NO: 2908009 - RNA, 21 nt, Human
cugugcacacacacacacaug

SEQ ID NO: 2908010 - RNA, 18 nt, Human
gaauucuugaaggaaaau

SEQ ID NO: 2908011 - RNA, 21 nt, Human
gaauucuuaugcuuauaauau

SEQ ID NO: 2908012 - RNA, 11 nt, Human
gaauucuuccu

SEQ ID NO: 2908013 - RNA, 17 nt, Human
gaauugaccaucugcuu

SEQ ID NO: 2908014 - RNA, 18 nt, Human
gaauugaccaucugcuuu

SEQ ID NO: 2908015 - RNA, 18 nt, Human
gaauugauuugcauugaa

SEQ ID NO: 2908016 - RNA, 22 nt, Human
gaauugauuugcauugaacaca

SEQ ID NO: 2908017 - RNA, 14 nt, Human
gaauugcagaguac

SEQ ID NO: 2908018 - RNA, 13 nt, Human
gaauugcauugac

SEQ ID NO: 2908019 - RNA, 12 nt, Human
gaauugcauuga

SEQ ID NO: 2908020 - RNA, 13 nt, Human
gaauguuuccggg

SEQ ID NO: 2908021 - RNA, 15 nt, Human
gaauguuucuuaacu

SEQ ID NO: 2908022 - RNA, 23 nt, Human
gaauguuucuuaacuauaaauau

SEQ ID NO: 2908023 - RNA, 14 nt, Human
gaauguuuauuccu

SEQ ID NO: 2908024 - RNA, 15 nt, Human
gaauguuaagcagau

SEQ ID NO: 2908025 - RNA, 14 nt, Human
gaauguuagagcac

SEQ ID NO: 2908026 - RNA, 13 nt, Human
gaauguuaauuuu

SEQ ID NO: 2908027 - RNA, 22 nt, Human
gaauguuaauuuuuugguacaa

SEQ ID NO: 2908028 - RNA, 23 nt, Human
gaauguuaauuuuuugguacaaa

SEQ ID NO: 2908029 - RNA, 19 nt, Human
gaauguuaagaauugacca

SEQ ID NO: 2908030 - RNA, 18 nt, Human
gaauguugguuuacuuuc

SEQ ID NO: 2908031 - RNA, 20 nt, Human
gaauguugguuuacuuucaa

SEQ ID NO: 2908032 - RNA, 22 nt, Human
gaauguugguuuacuuucaaau

SEQ ID NO: 2908033 - RNA, 21 nt, Human
gaauguuuaaagaucaugaca

SEQ ID NO: 2908034 - RNA, 21 nt, Human
gaauggccugccuugaagcca

SEQ ID NO: 2908035 - RNA, 14 nt, Human
gaauggcguccgug

SEQ ID NO: 2908036 - RNA, 17 nt, Human
gaauggccugccuugaa

SEQ ID NO: 2908037 - RNA, 14 nt, Human
gaauguacucuguu

SEQ ID NO: 2908038 - RNA, 21 nt, Human
gaauguagcagccccgggagg

SEQ ID NO: 2908039 - RNA, 23 nt, Human
gaauguagcagccccgggagggc

SEQ ID NO: 2908040 - RNA, 23 nt, Human
gaauguauuuauuugggagaccg

SEQ ID NO: 2908041 - RNA, 16 nt, Human
gaaugucuuuugaaua

SEQ ID NO: 2908042 - RNA, 17 nt, Human
gaaucugauuuuuauga

SEQ ID NO: 2908043 - RNA, 17 nt, Human
gaaugucccuuuuccua

SEQ ID NO: 2908044 - RNA, 14 nt, Human
gaaugugaaagcac

SEQ ID NO: 2908045 - RNA, 14 nt, Human
gaauguuaagcaga

SEQ ID NO: 2908046 - RNA, 12 nt, Human
gaaugugucagg

SEQ ID NO: 2908047 - RNA, 13 nt, Human
gaauguguuucaa

SEQ ID NO: 2908048 - RNA, 18 nt, Human
gaauguguuucaaacugu

SEQ ID NO: 2908049 - RNA, 19 nt, Human
gaauguguuucaaacugua

SEQ ID NO: 2908050 - RNA, 18 nt, Human
gaauguggcuugagaaau

SEQ ID NO: 2908051 - RNA, 15 nt, Human
gaaugugggcacugg

SEQ ID NO: 2908052 - RNA, 20 nt, Human
gaaugugggcacuggcccag

SEQ ID NO: 2908053 - RNA, 21 nt, Human
gaaugugggcacuggcccagg

SEQ ID NO: 2908054 - RNA, 13 nt, Human
gaauguggucuca

SEQ ID NO: 2908055 - RNA, 14 nt, Human
gaauguggucucag

SEQ ID NO: 2908056 - RNA, 15 nt, Human
gaauguggucucagg

SEQ ID NO: 2908057 - RNA, 16 nt, Human
gaauguggucucagga

SEQ ID NO: 2908058 - RNA, 17 nt, Human
gaauguggucucaggau

SEQ ID NO: 2908059 - RNA, 22 nt, Human
gaauguggccccugaacaagaa

SEQ ID NO: 2908060 - RNA, 18 nt, Human
gaauguguacaaagugua

SEQ ID NO: 2908061 - RNA, 13 nt, Human
gaaucuauauuua

SEQ ID NO: 2908062 - RNA, 15 nt, Human
gaaucuacuaauucc

SEQ ID NO: 2908063 - RNA, 14 nt, Human
gaauccuuugccug

SEQ ID NO: 2908064 - RNA, 19 nt, Human
gaauccuuuggugccaacu

SEQ ID NO: 2908065 - RNA, 13 nt, Human
gaauccuuuugua

SEQ ID NO: 2908066 - RNA, 22 nt, Human
gaaucuacccccagauccaagc

SEQ ID NO: 2908067 - RNA, 18 nt, Human
gaaucuacccccagaucc

SEQ ID NO: 2908068 - RNA, 20 nt, Human
gaauccagacccggcugcgu

SEQ ID NO: 2908069 - RNA, 18 nt, Human
gaauccagacccggcugc

SEQ ID NO: 2908070 - RNA, 18 nt, Human
gaaucccacccacaugug

SEQ ID NO: 2908071 - RNA, 22 nt, Human
gaaucccacccacaugugacac

SEQ ID NO: 2908072 - RNA, 16 nt, Human
gaaucccaaauuugau

SEQ ID NO: 2908073 - RNA, 19 nt, Human
gaaucccaaauuugauuga

SEQ ID NO: 2908074 - RNA, 17 nt, Human
gaaucccaaauuugauu

SEQ ID NO: 2908075 - RNA, 17 nt, Human
gaaucaugucaggccug

SEQ ID NO: 2908076 - RNA, 20 nt, Human
gaaucaugucaggccugugu

SEQ ID NO: 2908077 - RNA, 21 nt, Human
gaaucaugucaggccugugug

SEQ ID NO: 2908078 - RNA, 19 nt, Human
gaaucauacuuagcaaagu

SEQ ID NO: 2908079 - RNA, 19 nt, Human
gaaucaguuuccaauuauu

SEQ ID NO: 2908080 - RNA, 22 nt, Human
gaaucaguuuccaauuauuuga

SEQ ID NO: 2908081 - RNA, 13 nt, Human
gaaaggccugcac

SEQ ID NO: 2908082 - RNA, 14 nt, Human
gaaaggccugcaca

SEQ ID NO: 2908083 - RNA, 15 nt, Human
gaaaggccugcacac

SEQ ID NO: 2908084 - RNA, 16 nt, Human
gaaaggccugcacaca

SEQ ID NO: 2908085 - RNA, 19 nt, Human
gaaaggcucagucucagga

SEQ ID NO: 2908086 - RNA, 18 nt, Human
gaaaggcucagucucagg

SEQ ID NO: 2908087 - RNA, 14 nt, Human
gaaaggcucagucu

SEQ ID NO: 2908088 - RNA, 22 nt, Human
gaaaggcucagucucaggagca

SEQ ID NO: 2908089 - RNA, 21 nt, Human
gaaaggcucagucucaggagc

SEQ ID NO: 2908090 - RNA, 12 nt, Human
gaaucagcuucu

SEQ ID NO: 2908091 - RNA, 14 nt, Human
gaaugcuguguuaa

SEQ ID NO: 2908092 - RNA, 18 nt, Human
gaaugcuuauagguggcc

SEQ ID NO: 2908093 - RNA, 12 nt, Human
gaaugcuucuca

SEQ ID NO: 2908094 - RNA, 22 nt, Human
gaaugcuuauagguggccucuc

SEQ ID NO: 2908095 - RNA, 16 nt, Human
gaauggcagcugccac

SEQ ID NO: 2908096 - RNA, 13 nt, Human
gaauggcagcugc

SEQ ID NO: 2908097 - RNA, 15 nt, Human
gaaugcacagauaua

SEQ ID NO: 2908098 - RNA, 16 nt, Human
gaaugcacagauauac

SEQ ID NO: 2908099 - RNA, 17 nt, Human
gaaugcacagauauacu

SEQ ID NO: 2908100 - RNA, 22 nt, Human
gaaugcacagauauacuuugug

SEQ ID NO: 2908101 - RNA, 13 nt, Human
gaaugcuguguua

SEQ ID NO: 2908102 - RNA, 15 nt, Human
gaaugcuguauaugu

SEQ ID NO: 2908103 - RNA, 21 nt, Human
gaaugaaagggcccagagagg

SEQ ID NO: 2908104 - RNA, 22 nt, Human
gaaucugcaauucaaaaguucc

SEQ ID NO: 2908105 - RNA, 13 nt, Human
gaaucugcucacu

SEQ ID NO: 2908106 - RNA, 15 nt, Human
gaaucugcucacuuu

SEQ ID NO: 2908107 - RNA, 16 nt, Human
gaaucugcucacuuua

SEQ ID NO: 2908108 - RNA, 17 nt, Human
gaaucucccacuccagc

SEQ ID NO: 2908109 - RNA, 18 nt, Human
gaaucucccacuccagcg

SEQ ID NO: 2908110 - RNA, 15 nt, Human
gaaucugcaauucaa

SEQ ID NO: 2908111 - RNA, 21 nt, Human
gaaucugcaauucaaaaguuc

SEQ ID NO: 2908112 - RNA, 20 nt, Human
gaaugaacacucuuuugcuu

SEQ ID NO: 2908113 - RNA, 23 nt, Human
gaaugaaauccugcuucagugua

SEQ ID NO: 2908114 - RNA, 13 nt, Human
gacaacugugacu

SEQ ID NO: 2908115 - RNA, 13 nt, Human
gacaagaaaauca

SEQ ID NO: 2908116 - RNA, 15 nt, Human
gacaagaaaaucagg

SEQ ID NO: 2908117 - RNA, 12 nt, Human
gacaacugugac

SEQ ID NO: 2908118 - RNA, 12 nt, Human
gacaacagaagc

SEQ ID NO: 2908119 - RNA, 16 nt, Human
gacaacagacuucuga

SEQ ID NO: 2908120 - RNA, 19 nt, Human
gacaaccauauuuagcagu

SEQ ID NO: 2908121 - RNA, 12 nt, Human
gacaaccaugac

SEQ ID NO: 2908122 - RNA, 19 nt, Human
gacaacacugggaaacaga

SEQ ID NO: 2908123 - RNA, 16 nt, Human
gacaacacagccuaua

SEQ ID NO: 2908124 - RNA, 22 nt, Human
gacaacagaagucaugaagccc

SEQ ID NO: 2908125 - RNA, 17 nt, Human
gacaacagaagucauga

SEQ ID NO: 2908126 - RNA, 14 nt, Human
gacaacagaaguca

SEQ ID NO: 2908127 - RNA, 12 nt, Human
gacaacagaagu

SEQ ID NO: 2908128 - RNA, 16 nt, Human
gacaaauguaaacauu

SEQ ID NO: 2908129 - RNA, 11 nt, Human
gacaaauguga

SEQ ID NO: 2908130 - RNA, 13 nt, Human
gacaaaugugaag

SEQ ID NO: 2908131 - RNA, 16 nt, Human
gacaaaugugaagaug

SEQ ID NO: 2908132 - RNA, 18 nt, Human
gacaaaugugaagaugca

SEQ ID NO: 2908133 - RNA, 12 nt, Human
gacaaaucugug

SEQ ID NO: 2908134 - RNA, 14 nt, Human
gacaaaucugugua

SEQ ID NO: 2908135 - RNA, 20 nt, Human
gacaaaucuguguauauuau

SEQ ID NO: 2908136 - RNA, 22 nt, Human
gacaaauguguaucggaugcuu

SEQ ID NO: 2908137 - RNA, 19 nt, Human
gacaaauugagacagugca

SEQ ID NO: 2908138 - RNA, 15 nt, Human
gacaaauugcacaga

SEQ ID NO: 2908139 - RNA, 16 nt, Human
gacaaauugcacagaa

SEQ ID NO: 2908140 - RNA, 21 nt, Human
gaauuucuucaacucccugcc

SEQ ID NO: 2908141 - RNA, 19 nt, Human
gaauuucuucacuguugaa

SEQ ID NO: 2908142 - RNA, 12 nt, Human
gaauuucuuggu

SEQ ID NO: 2908143 - RNA, 21 nt, Human
gaauuucuugguaagaagccg

SEQ ID NO: 2908144 - RNA, 11 nt, Human
gaauuucuugu

SEQ ID NO: 2908145 - RNA, 20 nt, Human
gaauuucuucacuguugaaa

SEQ ID NO: 2908146 - RNA, 14 nt, Human
gaauuugcccuggg

SEQ ID NO: 2908147 - RNA, 23 nt, Human
gaauuugcccugggaaaccccuu

SEQ ID NO: 2908148 - RNA, 19 nt, Human
gaauuuggccugcacuaau

SEQ ID NO: 2908149 - RNA, 19 nt, Human
gaauuugggacccugcuuu

SEQ ID NO: 2908150 - RNA, 20 nt, Human
gaauuugggacccugcuuua

SEQ ID NO: 2908151 - RNA, 21 nt, Human
gaauuugggacccugcuuuag

SEQ ID NO: 2908152 - RNA, 23 nt, Human
gaauuugggacccugcuuuagag

SEQ ID NO: 2908153 - RNA, 19 nt, Human
gaauuuggagacucugugg

SEQ ID NO: 2908154 - RNA, 13 nt, Human
gaauuugcugggg

SEQ ID NO: 2908155 - RNA, 13 nt, Human
gaauuuggaaauc

SEQ ID NO: 2908156 - RNA, 14 nt, Human
gaauuuggaaaucc

SEQ ID NO: 2908157 - RNA, 21 nt, Human
gacaaaucaacagaagcauuu

SEQ ID NO: 2908158 - RNA, 23 nt, Human
gacaaaucaacagaagcauuugu

SEQ ID NO: 2908159 - RNA, 19 nt, Human
gaauuucuaucuaaaugau

SEQ ID NO: 2908160 - RNA, 17 nt, Human
gaauuucuaaaaaacag

SEQ ID NO: 2908161 - RNA, 18 nt, Human
gaauuucuaaaaagauua

SEQ ID NO: 2908162 - RNA, 12 nt, Human
gaauuucuaaaa

SEQ ID NO: 2908163 - RNA, 15 nt, Human
gaauugcguuggucu

SEQ ID NO: 2908164 - RNA, 22 nt, Human
gaauuggaccauccuauuuaac

SEQ ID NO: 2908165 - RNA, 16 nt, Human
gaauugggagcuuggg

SEQ ID NO: 2908166 - RNA, 17 nt, Human
gaauugggagcuuggga

SEQ ID NO: 2908167 - RNA, 16 nt, Human
gaauugggcggcucug

SEQ ID NO: 2908168 - RNA, 17 nt, Human
gaauugggcggcucuga

SEQ ID NO: 2908169 - RNA, 20 nt, Human
gaauugggcggcucugaagc

SEQ ID NO: 2908170 - RNA, 16 nt, Human
gacaagaaaucccugu

SEQ ID NO: 2908171 - RNA, 21 nt, Human
gacaagacaaaccaagucgga

SEQ ID NO: 2908172 - RNA, 15 nt, Human
gacaagaaaucccug

SEQ ID NO: 2908173 - RNA, 17 nt, Human
gacaaggaaaggcaaau

SEQ ID NO: 2908174 - RNA, 19 nt, Human
gacaaggaaaggcaaaugc

SEQ ID NO: 2908175 - RNA, 19 nt, Human
gacaaggauugcuacuguc

SEQ ID NO: 2908176 - RNA, 18 nt, Human
gacaaggauugcuacugu

SEQ ID NO: 2908177 - RNA, 17 nt, Human
gacacaaaacuccgccc

SEQ ID NO: 2908178 - RNA, 18 nt, Human
gacacaaaacuccgcccc

SEQ ID NO: 2908179 - RNA, 21 nt, Human
gacacaaaacuccgcccccag

SEQ ID NO: 2908180 - RNA, 22 nt, Human
gacacaaaacuccgcccccagc

SEQ ID NO: 2908181 - RNA, 23 nt, Human
gacacaaaacuccgcccccagcc

SEQ ID NO: 2908182 - RNA, 19 nt, Human
gacaaauucauauucuuuu

SEQ ID NO: 2908183 - RNA, 22 nt, Human
gacaaugcaccuagcugugcaa

SEQ ID NO: 2908184 - RNA, 17 nt, Human
gacaaugucugcagccc

SEQ ID NO: 2908185 - RNA, 19 nt, Human
gacaaugucugcagcccug

SEQ ID NO: 2908186 - RNA, 18 nt, Human
gacacaaaccugccuggg

SEQ ID NO: 2908187 - RNA, 20 nt, Human
gacacaaaccugccuggguu

SEQ ID NO: 2908188 - RNA, 14 nt, Human
gacacaaaggaagu

SEQ ID NO: 2908189 - RNA, 13 nt, Human
gacacaaaugcau

SEQ ID NO: 2908190 - RNA, 14 nt, Human
gacacaaaugcaug

SEQ ID NO: 2908191 - RNA, 17 nt, Human
gacacaaaccugccugg

SEQ ID NO: 2908192 - RNA, 14 nt, Human
gacacaaaccugcc

SEQ ID NO: 2908193 - RNA, 13 nt, Human
gacacaacuauuu

SEQ ID NO: 2908194 - RNA, 19 nt, Human
gacacaggcccggcuccag

SEQ ID NO: 2908195 - RNA, 21 nt, Human
gacacaggcccggcuccaggc

SEQ ID NO: 2908196 - RNA, 20 nt, Human
gacacaggcccggcuccagg

SEQ ID NO: 2908197 - RNA, 14 nt, Human
gacacaacaacucc

SEQ ID NO: 2908198 - RNA, 23 nt, Human
gacacauccgccuuuuguauaca

SEQ ID NO: 2908199 - RNA, 19 nt, Human
gacaccagagcagaugcag

SEQ ID NO: 2908200 - RNA, 22 nt, Human
gacaccagagcagaugcagaga

SEQ ID NO: 2908201 - RNA, 19 nt, Human
gacaccacacccagccuca

SEQ ID NO: 2908202 - RNA, 20 nt, Human
gacaccacacccagccucag

SEQ ID NO: 2908203 - RNA, 21 nt, Human
gacaccacacccagccucagu

SEQ ID NO: 2908204 - RNA, 12 nt, Human
gacaccagagca

SEQ ID NO: 2908205 - RNA, 13 nt, Human
gacaccagagcag

SEQ ID NO: 2908206 - RNA, 14 nt, Human
gacaccagagcaga

SEQ ID NO: 2908207 - RNA, 15 nt, Human
gacaccagagcagau

SEQ ID NO: 2908208 - RNA, 18 nt, Human
gacaccagagcagaugca

SEQ ID NO: 2908209 - RNA, 14 nt, Human
gacacauuuaagga

SEQ ID NO: 2908210 - RNA, 15 nt, Human
gacacauuuaaggau

SEQ ID NO: 2908211 - RNA, 15 nt, Human
gacaccaaagccacc

SEQ ID NO: 2908212 - RNA, 14 nt, Human
gacaccacacccag

SEQ ID NO: 2908213 - RNA, 14 nt, Human
gacaccaaaguucu

SEQ ID NO: 2908214 - RNA, 15 nt, Human
gacaccaaaguucua

SEQ ID NO: 2908215 - RNA, 23 nt, Human
gacaccaaccgacaggcccuggc

SEQ ID NO: 2908216 - RNA, 15 nt, Human
gacaccacacccagc

SEQ ID NO: 2908217 - RNA, 16 nt, Human
gacaccacacccagcc

SEQ ID NO: 2908218 - RNA, 17 nt, Human
gacaccacacccagccu

SEQ ID NO: 2908219 - RNA, 18 nt, Human
gacaccacacccagccuc

SEQ ID NO: 2908220 - RNA, 16 nt, Human
gacccaaggaaaacug

SEQ ID NO: 2908221 - RNA, 18 nt, Human
gacccaaggaaaacugca

SEQ ID NO: 2908222 - RNA, 18 nt, Human
gacccaauguaggagcug

SEQ ID NO: 2908223 - RNA, 12 nt, Human
gacccccaacca

SEQ ID NO: 2908224 - RNA, 19 nt, Human
gacccaauguaggagcugc

SEQ ID NO: 2908225 - RNA, 13 nt, Human
gacccccacaccu

SEQ ID NO: 2908226 - RNA, 21 nt, Human
gacccccaaccaaguggcucc

SEQ ID NO: 2908227 - RNA, 15 nt, Human
gacccccacaccuca

SEQ ID NO: 2908228 - RNA, 21 nt, Human
gaccccuccaugugggcuagu

SEQ ID NO: 2908229 - RNA, 18 nt, Human
gaccccuccaugugggcu

SEQ ID NO: 2908230 - RNA, 14 nt, Human
gaccccuccaugug

SEQ ID NO: 2908231 - RNA, 18 nt, Human
gacccugcaaacagaaca

SEQ ID NO: 2908232 - RNA, 19 nt, Human
gacccugcaaacagaacag

SEQ ID NO: 2908233 - RNA, 20 nt, Human
gacccugcaaacagaacagg

SEQ ID NO: 2908234 - RNA, 22 nt, Human
gacccugcaaacagaacagggu

SEQ ID NO: 2908235 - RNA, 21 nt, Human
gacccugcgaaggggcccugg

SEQ ID NO: 2908236 - RNA, 12 nt, Human
gaccgcccccuc

SEQ ID NO: 2908237 - RNA, 14 nt, Human
gaccgcccccuccu

SEQ ID NO: 2908238 - RNA, 22 nt, Human
gaccgcccuccgcgaaaauagu

SEQ ID NO: 2908239 - RNA, 15 nt, Human
gaccgcccccuccuc

SEQ ID NO: 2908240 - RNA, 16 nt, Human
gaccgcccccuccucu

SEQ ID NO: 2908241 - RNA, 20 nt, Human
gaccgcuuguggggacccag

SEQ ID NO: 2908242 - RNA, 21 nt, Human
gaccgcuuguggggacccagg

SEQ ID NO: 2908243 - RNA, 22 nt, Human
gaccgcuuguggggacccaggc

SEQ ID NO: 2908244 - RNA, 17 nt, Human
gacccuggugccuggcu

SEQ ID NO: 2908245 - RNA, 18 nt, Human
gacccuggugccuggcuc

SEQ ID NO: 2908246 - RNA, 22 nt, Human
gacccugcgaaggggcccuggu

SEQ ID NO: 2908247 - RNA, 16 nt, Human
gacccugcuuuagagc

SEQ ID NO: 2908248 - RNA, 14 nt, Human
gacccuggggcugg

SEQ ID NO: 2908249 - RNA, 16 nt, Human
gacccuggggcuggcu

SEQ ID NO: 2908250 - RNA, 24 nt, Human
gaccagacaccuugacagggcaca

SEQ ID NO: 2908251 - RNA, 21 nt, Human
gaccacugcaugagcuuuuau

SEQ ID NO: 2908252 - RNA, 15 nt, Human
gaccacuuccagggg

SEQ ID NO: 2908253 - RNA, 23 nt, Human
gaccacuuccaggggaaccugcc

SEQ ID NO: 2908254 - RNA, 22 nt, Human
gaccacuuccaggggaaccugc

SEQ ID NO: 2908255 - RNA, 12 nt, Human
gaccacugcaug

SEQ ID NO: 2908256 - RNA, 16 nt, Human
gaccacuguuucuugc

SEQ ID NO: 2908257 - RNA, 18 nt, Human
gaccacuguuucuugcuu

SEQ ID NO: 2908258 - RNA, 19 nt, Human
gaccacuguuucuugcuug

SEQ ID NO: 2908259 - RNA, 20 nt, Human
gaccacuguuucuugcuugu

SEQ ID NO: 2908260 - RNA, 18 nt, Human
gaccaccccgccugcccu

SEQ ID NO: 2908261 - RNA, 19 nt, Human
gacauggcuuucagaaaac

SEQ ID NO: 2908262 - RNA, 20 nt, Human
gacauggcuuucagaaaacg

SEQ ID NO: 2908263 - RNA, 19 nt, Human
gaccaccccgccugcccuc

SEQ ID NO: 2908264 - RNA, 20 nt, Human
gaccaccccgccugcccuca

SEQ ID NO: 2908265 - RNA, 13 nt, Human
gaccaccugccca

SEQ ID NO: 2908266 - RNA, 14 nt, Human
gaccaccugcccaa

SEQ ID NO: 2908267 - RNA, 21 nt, Human
gaccagccuccaugcugccuc

SEQ ID NO: 2908268 - RNA, 22 nt, Human
gaccagccuccaugcugccucc

SEQ ID NO: 2908269 - RNA, 20 nt, Human
gaccagccuccaugcugccu

SEQ ID NO: 2908270 - RNA, 13 nt, Human
gaccauuuaacau

SEQ ID NO: 2908271 - RNA, 17 nt, Human
gaccauuuaacaugcaa

SEQ ID NO: 2908272 - RNA, 13 nt, Human
gaccagccuggcc

SEQ ID NO: 2908273 - RNA, 18 nt, Human
gaccagccuggccaacau

SEQ ID NO: 2908274 - RNA, 12 nt, Human
gaccagccuggc

SEQ ID NO: 2908275 - RNA, 11 nt, Human
gaccagccugg

SEQ ID NO: 2908276 - RNA, 16 nt, Human
gacagggaggugaccc

SEQ ID NO: 2908277 - RNA, 14 nt, Human
gacagggaugagca

SEQ ID NO: 2908278 - RNA, 21 nt, Human
gacagggaugagcauggagcu

SEQ ID NO: 2908279 - RNA, 23 nt, Human
gacagggaugagcauggagcugg

SEQ ID NO: 2908280 - RNA, 23 nt, Human
gacagggcacaccgggcacucag

SEQ ID NO: 2908281 - RNA, 24 nt, Human
gacagggcacaccgggcacucaga

SEQ ID NO: 2908282 - RNA, 19 nt, Human
gacagugcuucagccugag

SEQ ID NO: 2908283 - RNA, 18 nt, Human
gacagugcuucagccuga

SEQ ID NO: 2908284 - RNA, 20 nt, Human
gacagugcuucagccugagg

SEQ ID NO: 2908285 - RNA, 20 nt, Human
gacaguggauugcauuucuu

SEQ ID NO: 2908286 - RNA, 17 nt, Human
gacagugcuucagccug

SEQ ID NO: 2908287 - RNA, 16 nt, Human
gacagggaagagcaga

SEQ ID NO: 2908288 - RNA, 23 nt, Human
gacaggacagugcuucagccuga

SEQ ID NO: 2908289 - RNA, 22 nt, Human
gacaggacagugcuucagccug

SEQ ID NO: 2908290 - RNA, 14 nt, Human
gacaggacagugcu

SEQ ID NO: 2908291 - RNA, 23 nt, Human
gacaguguugaaaauguucagaa

SEQ ID NO: 2908292 - RNA, 14 nt, Human
gacauccuguauaa

SEQ ID NO: 2908293 - RNA, 19 nt, Human
gacauccuguauaagcacu

SEQ ID NO: 2908294 - RNA, 21 nt, Human
gacauccuguauaagcacuga

SEQ ID NO: 2908295 - RNA, 13 nt, Human
gacaucucagggg

SEQ ID NO: 2908296 - RNA, 15 nt, Human
gacaucucaggggcc

SEQ ID NO: 2908297 - RNA, 16 nt, Human
gacaucucaggggcca

SEQ ID NO: 2908298 - RNA, 17 nt, Human
gacaucucaggggccag

SEQ ID NO: 2908299 - RNA, 18 nt, Human
gacaucucaggggccaga

SEQ ID NO: 2908300 - RNA, 16 nt, Human
gacauccguugugcuu

SEQ ID NO: 2908301 - RNA, 23 nt, Human
gacauccccccgccaaaagcugc

SEQ ID NO: 2908302 - RNA, 22 nt, Human
gacauccauguuuguaaaacua

SEQ ID NO: 2908303 - RNA, 23 nt, Human
gacauccauguuuguaaaacuac

SEQ ID NO: 2908304 - RNA, 19 nt, Human
gacaugagugcgugcucag

SEQ ID NO: 2908305 - RNA, 22 nt, Human
gacaucucaggggccagaggaa

SEQ ID NO: 2908306 - RNA, 20 nt, Human
gacaucucaggggccagagg

SEQ ID NO: 2908307 - RNA, 13 nt, Human
gacaucucugcac

SEQ ID NO: 2908308 - RNA, 21 nt, Human
gacaugauggagcgcaccugc

SEQ ID NO: 2908309 - RNA, 20 nt, Human
gacaugauuagcagaagaaa

SEQ ID NO: 2908310 - RNA, 13 nt, Human
gacaugaugcuuu

SEQ ID NO: 2908311 - RNA, 19 nt, Human
gacaugaugcuuuuacuga

SEQ ID NO: 2908312 - RNA, 14 nt, Human
gacaugauuuccuu

SEQ ID NO: 2908313 - RNA, 20 nt, Human
gacaugauuuccuugaaugu

SEQ ID NO: 2908314 - RNA, 19 nt, Human
gacaugauuuccuugaaug

SEQ ID NO: 2908315 - RNA, 17 nt, Human
gacaugauuuccuugaa

SEQ ID NO: 2908316 - RNA, 16 nt, Human
gacaugauuuccuuga

SEQ ID NO: 2908317 - RNA, 18 nt, Human
gacaugccuauaugagaa

SEQ ID NO: 2908318 - RNA, 22 nt, Human
gacaugccuauaugagaagaau

SEQ ID NO: 2908319 - RNA, 14 nt, Human
gacaugcacucagc

SEQ ID NO: 2908320 - RNA, 12 nt, Human
gacaugcacuga

SEQ ID NO: 2908321 - RNA, 13 nt, Human
gacaugcacugac

SEQ ID NO: 2908322 - RNA, 14 nt, Human
gacaugcacugacc

SEQ ID NO: 2908323 - RNA, 15 nt, Human
gacaugcacugaccc

SEQ ID NO: 2908324 - RNA, 16 nt, Human
gacaugcacugacccu

SEQ ID NO: 2908325 - RNA, 20 nt, Human
gacaugcacugacccuucca

SEQ ID NO: 2908326 - RNA, 24 nt, Human
gacaugauuuccuugaauguggcu

SEQ ID NO: 2908327 - RNA, 22 nt, Human
gacaugauuuccuugaaugugg

SEQ ID NO: 2908328 - RNA, 12 nt, Human
gacagaggcagc

SEQ ID NO: 2908329 - RNA, 13 nt, Human
gacagagccaugc

SEQ ID NO: 2908330 - RNA, 19 nt, Human
gacagagccaugcugggaa

SEQ ID NO: 2908331 - RNA, 16 nt, Human
gacagaggcagcccca

SEQ ID NO: 2908332 - RNA, 14 nt, Human
gacagaggcagccc

SEQ ID NO: 2908333 - RNA, 15 nt, Human
gacacccauuuucac

SEQ ID NO: 2908334 - RNA, 14 nt, Human
gacagagucucacu

SEQ ID NO: 2908335 - RNA, 17 nt, Human
gacagaggcagccccau

SEQ ID NO: 2908336 - RNA, 21 nt, Human
gacagccacggccaggccaga

SEQ ID NO: 2908337 - RNA, 20 nt, Human
gacagccacggccaggccag

SEQ ID NO: 2908338 - RNA, 20 nt, Human
gacagcuuuccccucauuuu

SEQ ID NO: 2908339 - RNA, 19 nt, Human
gacagccacggccaggcca

SEQ ID NO: 2908340 - RNA, 18 nt, Human
gacagccacggccaggcc

SEQ ID NO: 2908341 - RNA, 17 nt, Human
gacagccacggccaggc

SEQ ID NO: 2908342 - RNA, 14 nt, Human
gacagccacggcca

SEQ ID NO: 2908343 - RNA, 22 nt, Human
gacagagugagacucugucuca

SEQ ID NO: 2908344 - RNA, 20 nt, Human
gacagagugagacucugucu

SEQ ID NO: 2908345 - RNA, 16 nt, Human
gacagaguaugaacac

SEQ ID NO: 2908346 - RNA, 18 nt, Human
gacagagggucacagugu

SEQ ID NO: 2908347 - RNA, 20 nt, Human
gacagagggucacaguguuu

SEQ ID NO: 2908348 - RNA, 22 nt, Human
gacugaguccucguagccaucu

SEQ ID NO: 2908349 - RNA, 21 nt, Human
gacugcagguuggaccccaga

SEQ ID NO: 2908350 - RNA, 22 nt, Human
gacugcagguuggaccccagag

SEQ ID NO: 2908351 - RNA, 23 nt, Human
gacugcagguuggaccccagaga

SEQ ID NO: 2908352 - RNA, 17 nt, Human
gacugcacccaggaggg

SEQ ID NO: 2908353 - RNA, 18 nt, Human
gacugcacccaggagggg

SEQ ID NO: 2908354 - RNA, 21 nt, Human
gacugcauguaccauuugcau

SEQ ID NO: 2908355 - RNA, 23 nt, Human
gacugcauguaccauuugcaugg

SEQ ID NO: 2908356 - RNA, 13 nt, Human
gacucucugugac

SEQ ID NO: 2908357 - RNA, 12 nt, Human
gacucucuguga

SEQ ID NO: 2908358 - RNA, 22 nt, Human
gacuccuggucugaaaauguug

SEQ ID NO: 2908359 - RNA, 16 nt, Human
gacucuagaguccaag

SEQ ID NO: 2908360 - RNA, 18 nt, Human
gacucuagaguccaaggu

SEQ ID NO: 2908361 - RNA, 19 nt, Human
gacucuagaguccaagguu

SEQ ID NO: 2908362 - RNA, 15 nt, Human
gacucucagcccaga

SEQ ID NO: 2908363 - RNA, 16 nt, Human
gacucucagcccagaa

SEQ ID NO: 2908364 - RNA, 17 nt, Human
gacucucagcccagaag

SEQ ID NO: 2908365 - RNA, 19 nt, Human
gacucucagcccagaagaa

SEQ ID NO: 2908366 - RNA, 21 nt, Human
gacucucagcccagaagaaaa

SEQ ID NO: 2908367 - RNA, 17 nt, Human
gacuggaccugguggcu

SEQ ID NO: 2908368 - RNA, 18 nt, Human
gacuggaccugguggcua

SEQ ID NO: 2908369 - RNA, 18 nt, Human
gacuggaagcacagcuuc

SEQ ID NO: 2908370 - RNA, 20 nt, Human
gacuggaagcuaauuugcau

SEQ ID NO: 2908371 - RNA, 21 nt, Human
gacuggaagcuaauuugcauu

SEQ ID NO: 2908372 - RNA, 13 nt, Human
gacuggaaguuca

SEQ ID NO: 2908373 - RNA, 19 nt, Human
gacuggaaguucauaccua

SEQ ID NO: 2908374 - RNA, 21 nt, Human
gacuggaaguucauaccuaag

SEQ ID NO: 2908375 - RNA, 14 nt, Human
gacuggggggcuug

SEQ ID NO: 2908376 - RNA, 15 nt, Human
gacuggggugggagg

SEQ ID NO: 2908377 - RNA, 16 nt, Human
gacuggggugggaggu

SEQ ID NO: 2908378 - RNA, 20 nt, Human
gacuggggaugugggaggga

SEQ ID NO: 2908379 - RNA, 23 nt, Human
gacuggggaugugggagggagca

SEQ ID NO: 2908380 - RNA, 16 nt, Human
gacuggggauguggga

SEQ ID NO: 2908381 - RNA, 17 nt, Human
gacuggggaugugggag

SEQ ID NO: 2908382 - RNA, 18 nt, Human
gacuggggaugugggagg

SEQ ID NO: 2908383 - RNA, 13 nt, Human
gacugggagguag

SEQ ID NO: 2908384 - RNA, 16 nt, Human
gacuggaagcacagcu

SEQ ID NO: 2908385 - RNA, 15 nt, Human
gacuggaagcacagc

SEQ ID NO: 2908386 - RNA, 14 nt, Human
gacuggaagcacag

SEQ ID NO: 2908387 - RNA, 14 nt, Human
gacugcugggacug

SEQ ID NO: 2908388 - RNA, 12 nt, Human
gacugcugggac

SEQ ID NO: 2908389 - RNA, 12 nt, Human
gacugccucugc

SEQ ID NO: 2908390 - RNA, 13 nt, Human
gacugccucugcc

SEQ ID NO: 2908391 - RNA, 14 nt, Human
gacugccucugcca

SEQ ID NO: 2908392 - RNA, 15 nt, Human
gacugccucugccac

SEQ ID NO: 2908393 - RNA, 14 nt, Human
gacugcugcugccu

SEQ ID NO: 2908394 - RNA, 16 nt, Human
gacugcugcugccugg

SEQ ID NO: 2908395 - RNA, 17 nt, Human
gacugcugcugccuggc

SEQ ID NO: 2908396 - RNA, 19 nt, Human
gacugcugcugccuggcca

SEQ ID NO: 2908397 - RNA, 21 nt, Human
gacugcugcugccuggccacu

SEQ ID NO: 2908398 - RNA, 22 nt, Human
gacugcugcugccuggccacug

SEQ ID NO: 2908399 - RNA, 19 nt, Human
gacugcugggacuggccag

SEQ ID NO: 2908400 - RNA, 15 nt, Human
gacuccggcccuccu

SEQ ID NO: 2908401 - RNA, 17 nt, Human
gacucagcuccccagag

SEQ ID NO: 2908402 - RNA, 18 nt, Human
gacucagcuccccagagu

SEQ ID NO: 2908403 - RNA, 20 nt, Human
gacucagcuccccagagucc

SEQ ID NO: 2908404 - RNA, 17 nt, Human
gacuccuaggcaggaca

SEQ ID NO: 2908405 - RNA, 19 nt, Human
gacuccuaggcaggacaug

SEQ ID NO: 2908406 - RNA, 16 nt, Human
gacuccuaccugcccu

SEQ ID NO: 2908407 - RNA, 17 nt, Human
gacuccuaccugcccug

SEQ ID NO: 2908408 - RNA, 18 nt, Human
gacuccuaccugcccugg

SEQ ID NO: 2908409 - RNA, 19 nt, Human
gacuccuaccugcccugga

SEQ ID NO: 2908410 - RNA, 22 nt, Human
gacuccggcccuccuacccugc

SEQ ID NO: 2908411 - RNA, 14 nt, Human
gacuccucugucca

SEQ ID NO: 2908412 - RNA, 11 nt, Human
gacuccucugu

SEQ ID NO: 2908413 - RNA, 23 nt, Human
gacuccuaggcaggacaugcuga

SEQ ID NO: 2908414 - RNA, 13 nt, Human
gacuccuccccac

SEQ ID NO: 2908415 - RNA, 19 nt, Human
gacuccuccccacccuccu

SEQ ID NO: 2908416 - RNA, 20 nt, Human
gacuccuccccacccuccug

SEQ ID NO: 2908417 - RNA, 21 nt, Human
gacuccuccccacccuccugg

SEQ ID NO: 2908418 - RNA, 22 nt, Human
gacuccuccccacccuccuggc

SEQ ID NO: 2908419 - RNA, 16 nt, Human
gacuccuccuuucucc

SEQ ID NO: 2908420 - RNA, 23 nt, Human
gacuccugcacacgcuccuuccu

SEQ ID NO: 2908421 - RNA, 22 nt, Human
gacuccuugagagaccaggcaa

SEQ ID NO: 2908422 - RNA, 16 nt, Human
gacuccugugcaacuu

SEQ ID NO: 2908423 - RNA, 19 nt, Human
gacucagaagccucugggu

SEQ ID NO: 2908424 - RNA, 13 nt, Human
gacucagcccuga

SEQ ID NO: 2908425 - RNA, 11 nt, Human
gacucagcccu

SEQ ID NO: 2908426 - RNA, 11 nt, Human
gacucagagaa

SEQ ID NO: 2908427 - RNA, 23 nt, Human
gacuagagggaccucucccaggg

SEQ ID NO: 2908428 - RNA, 20 nt, Human
gacuagagggaccucuccca

SEQ ID NO: 2908429 - RNA, 19 nt, Human
gacuagagggaccucuccc

SEQ ID NO: 2908430 - RNA, 17 nt, Human
gacuagagggaccucuc

SEQ ID NO: 2908431 - RNA, 21 nt, Human
gacuagaugauggaugccaau

SEQ ID NO: 2908432 - RNA, 16 nt, Human
gacuagaugauggaug

SEQ ID NO: 2908433 - RNA, 14 nt, Human
gacuagaugaugga

SEQ ID NO: 2908434 - RNA, 15 nt, Human
gacucauucuucugu

SEQ ID NO: 2908435 - RNA, 14 nt, Human
gacucauucuucug

SEQ ID NO: 2908436 - RNA, 16 nt, Human
gacucagcccugaggu

SEQ ID NO: 2908437 - RNA, 18 nt, Human
gacucagccugcaguuaa

SEQ ID NO: 2908438 - RNA, 15 nt, Human
gacucagcccugagg

SEQ ID NO: 2908439 - RNA, 14 nt, Human
gacucagcucccca

SEQ ID NO: 2908440 - RNA, 21 nt, Human
gacuacaggugugagucacca

SEQ ID NO: 2908441 - RNA, 18 nt, Human
gacuacaggugugaguca

SEQ ID NO: 2908442 - RNA, 17 nt, Human
gaccucaagugaucugc

SEQ ID NO: 2908443 - RNA, 16 nt, Human
gaccucacagugaccc

SEQ ID NO: 2908444 - RNA, 18 nt, Human
gaccucacagugacccuu

SEQ ID NO: 2908445 - RNA, 20 nt, Human
gaccucacagugacccuucc

SEQ ID NO: 2908446 - RNA, 14 nt, Human
gacuacauuuagag

SEQ ID NO: 2908447 - RNA, 13 nt, Human
gacuacaggugug

SEQ ID NO: 2908448 - RNA, 15 nt, Human
gaccuacuguucuaa

SEQ ID NO: 2908449 - RNA, 17 nt, Human
gaccuacuguucuaaag

SEQ ID NO: 2908450 - RNA, 16 nt, Human
gaccuaggcaguaggc

SEQ ID NO: 2908451 - RNA, 18 nt, Human
gaccuacuguucuaaagc

SEQ ID NO: 2908452 - RNA, 14 nt, Human
gacuucggaccgcu

SEQ ID NO: 2908453 - RNA, 17 nt, Human
gacuucggaccgcuugu

SEQ ID NO: 2908454 - RNA, 19 nt, Human
gacuucuaauaucauucac

SEQ ID NO: 2908455 - RNA, 14 nt, Human
gacuucuccagguc

SEQ ID NO: 2908456 - RNA, 22 nt, Human
gacuucuccaggucucacgggc

SEQ ID NO: 2908457 - RNA, 14 nt, Human
gacuucugcuggca

SEQ ID NO: 2908458 - RNA, 16 nt, Human
gacuuccuugagacac

SEQ ID NO: 2908459 - RNA, 20 nt, Human
gacuuccuugagacacggag

SEQ ID NO: 2908460 - RNA, 14 nt, Human
gacuuccuugagac

SEQ ID NO: 2908461 - RNA, 15 nt, Human
gacuuccuugagaca

SEQ ID NO: 2908462 - RNA, 14 nt, Human
gacugggggccaga

SEQ ID NO: 2908463 - RNA, 19 nt, Human
gacuuaaaauauuccugca

SEQ ID NO: 2908464 - RNA, 20 nt, Human
gacuuaagcaaaagaaaaag

SEQ ID NO: 2908465 - RNA, 17 nt, Human
gacuugaacuuuccugg

SEQ ID NO: 2908466 - RNA, 18 nt, Human
gacuuguagcauauucuu

SEQ ID NO: 2908467 - RNA, 20 nt, Human
gacuuggggagauggaguuc

SEQ ID NO: 2908468 - RNA, 22 nt, Human
gacuugggggaacgaugugucu

SEQ ID NO: 2908469 - RNA, 20 nt, Human
gacuugggucucauuuagaa

SEQ ID NO: 2908470 - RNA, 21 nt, Human
gacuugccagagccgggcaca

SEQ ID NO: 2908471 - RNA, 23 nt, Human
gacuugccaugugacucuggcuu

SEQ ID NO: 2908472 - RNA, 16 nt, Human
gacuugccuccguguc

SEQ ID NO: 2908473 - RNA, 17 nt, Human
gacuugccuccguguca

SEQ ID NO: 2908474 - RNA, 22 nt, Human
gacuugccuuccuaagccugug

SEQ ID NO: 2908475 - RNA, 18 nt, Human
gacuugcaugaagagaag

SEQ ID NO: 2908476 - RNA, 22 nt, Human
gacuugccaacaccacagaaau

SEQ ID NO: 2908477 - RNA, 17 nt, Human
gacuuggcaacagaagc

SEQ ID NO: 2908478 - RNA, 19 nt, Human
gacuuggcaacagaagcag

SEQ ID NO: 2908479 - RNA, 21 nt, Human
gagaagcacacucuggucuug

SEQ ID NO: 2908480 - RNA, 19 nt, Human
gagaagcauauagaggcaa

SEQ ID NO: 2908481 - RNA, 18 nt, Human
gagaagcauauagaggca

SEQ ID NO: 2908482 - RNA, 19 nt, Human
gagaagagagaaauagccu

SEQ ID NO: 2908483 - RNA, 12 nt, Human
gagaagagagga

SEQ ID NO: 2908484 - RNA, 15 nt, Human
gagaagagaggagag

SEQ ID NO: 2908485 - RNA, 16 nt, Human
gagaagagaggagagg

SEQ ID NO: 2908486 - RNA, 11 nt, Human
gagaacugaaa

SEQ ID NO: 2908487 - RNA, 16 nt, Human
gagaacugaaaagaga

SEQ ID NO: 2908488 - RNA, 18 nt, Human
gagaacugaaaagagagc

SEQ ID NO: 2908489 - RNA, 13 nt, Human
gagaacuccugac

SEQ ID NO: 2908490 - RNA, 15 nt, Human
gagaacuccugacug

SEQ ID NO: 2908491 - RNA, 23 nt, Human
gagaacucaucccuaaugcugca

SEQ ID NO: 2908492 - RNA, 14 nt, Human
gagaacgcagcccu

SEQ ID NO: 2908493 - RNA, 15 nt, Human
gagaacgcagcccua

SEQ ID NO: 2908494 - RNA, 16 nt, Human
gagaacgcagcccuag

SEQ ID NO: 2908495 - RNA, 24 nt, Human
gagaacgcagcccuagagccugcc

SEQ ID NO: 2908496 - RNA, 16 nt, Human
gagaacuaaagguggc

SEQ ID NO: 2908497 - RNA, 17 nt, Human
gagaacuuuccauuuug

SEQ ID NO: 2908498 - RNA, 15 nt, Human
gagaacuguggccgu

SEQ ID NO: 2908499 - RNA, 21 nt, Human
gagaacuuaaguggcuaaaga

SEQ ID NO: 2908500 - RNA, 20 nt, Human
gagaacuuauggccacagcc

SEQ ID NO: 2908501 - RNA, 14 nt, Human
gagaaccucaggcu

SEQ ID NO: 2908502 - RNA, 19 nt, Human
gagaaccuaacuguaucuu

SEQ ID NO: 2908503 - RNA, 13 nt, Human
gagaacgcagccc

SEQ ID NO: 2908504 - RNA, 11 nt, Human
gagaaauuauu

SEQ ID NO: 2908505 - RNA, 12 nt, Human
gagaaauucugu

SEQ ID NO: 2908506 - RNA, 14 nt, Human
gagaaauucuguua

SEQ ID NO: 2908507 - RNA, 16 nt, Human
gagaaauucuguuaaa

SEQ ID NO: 2908508 - RNA, 17 nt, Human
gagaaauucuguuaaaa

SEQ ID NO: 2908509 - RNA, 20 nt, Human
gagaaauucuguuaaaaucu

SEQ ID NO: 2908510 - RNA, 22 nt, Human
gagaaauucuguuaaaaucuau

SEQ ID NO: 2908511 - RNA, 11 nt, Human
gagaaauguaa

SEQ ID NO: 2908512 - RNA, 13 nt, Human
gagaaauguaaug

SEQ ID NO: 2908513 - RNA, 17 nt, Human
gagaaauguaaugcgau

SEQ ID NO: 2908514 - RNA, 23 nt, Human
gagaaauguaaugcgauuuuauu

SEQ ID NO: 2908515 - RNA, 16 nt, Human
gagaaagguugaagca

SEQ ID NO: 2908516 - RNA, 20 nt, Human
gagaaagccaggcagguagc

SEQ ID NO: 2908517 - RNA, 15 nt, Human
gagaaagccaggcag

SEQ ID NO: 2908518 - RNA, 16 nt, Human
gagaaagccaggcagg

SEQ ID NO: 2908519 - RNA, 18 nt, Human
gagaaaggccugcacaca

SEQ ID NO: 2908520 - RNA, 19 nt, Human
gagaaaggccugcacacaa

SEQ ID NO: 2908521 - RNA, 15 nt, Human
gagaaagggacaaug

SEQ ID NO: 2908522 - RNA, 18 nt, Human
gagaaaagcacacuugua

SEQ ID NO: 2908523 - RNA, 13 nt, Human
gagaaaaggaaaa

SEQ ID NO: 2908524 - RNA, 16 nt, Human
gagaaaaggaaaagaa

SEQ ID NO: 2908525 - RNA, 19 nt, Human
gagaaaaggaaaagaaaaa

SEQ ID NO: 2908526 - RNA, 20 nt, Human
gagaauggcgugaacccggg

SEQ ID NO: 2908527 - RNA, 12 nt, Human
gagacaggaagg

SEQ ID NO: 2908528 - RNA, 12 nt, Human
gagaaugcacag

SEQ ID NO: 2908529 - RNA, 16 nt, Human
gagaaugcacagauau

SEQ ID NO: 2908530 - RNA, 17 nt, Human
gagaaugcacagauaua

SEQ ID NO: 2908531 - RNA, 19 nt, Human
gagaauggaaaccacaacu

SEQ ID NO: 2908532 - RNA, 22 nt, Human
gagaauggaaaccacaacuuuu

SEQ ID NO: 2908533 - RNA, 23 nt, Human
gagaauggcccaguccucuccca

SEQ ID NO: 2908534 - RNA, 18 nt, Human
gagacaguucaagaaagc

SEQ ID NO: 2908535 - RNA, 22 nt, Human
gagacaggguuuugccauguug

SEQ ID NO: 2908536 - RNA, 17 nt, Human
gagacagugcacaugaa

SEQ ID NO: 2908537 - RNA, 16 nt, Human
gagacagucaccccag

SEQ ID NO: 2908538 - RNA, 16 nt, Human
gagacaguucaagaaa

SEQ ID NO: 2908539 - RNA, 17 nt, Human
gagacaguuauuuauag

SEQ ID NO: 2908540 - RNA, 18 nt, Human
gagacaguuauuuauagu

SEQ ID NO: 2908541 - RNA, 19 nt, Human
gagacaggguuucaccaug

SEQ ID NO: 2908542 - RNA, 17 nt, Human
gagacaguccagccugg

SEQ ID NO: 2908543 - RNA, 13 nt, Human
gagacucugucuc

SEQ ID NO: 2908544 - RNA, 16 nt, Human
gagacucuagggucca

SEQ ID NO: 2908545 - RNA, 20 nt, Human
gagacucuaggguccagugg

SEQ ID NO: 2908546 - RNA, 19 nt, Human
gagacucuaggguccagug

SEQ ID NO: 2908547 - RNA, 16 nt, Human
gagacaguuucuuagc

SEQ ID NO: 2908548 - RNA, 20 nt, Human
gagagaaagugggugagaug

SEQ ID NO: 2908549 - RNA, 22 nt, Human
gagagaaagugggugagaugcu

SEQ ID NO: 2908550 - RNA, 15 nt, Human
gagagaaagugggug

SEQ ID NO: 2908551 - RNA, 17 nt, Human
gagagaaagugggugag

SEQ ID NO: 2908552 - RNA, 18 nt, Human
gagagaaagugggugaga

SEQ ID NO: 2908553 - RNA, 16 nt, Human
gagagaaagccaggca

SEQ ID NO: 2908554 - RNA, 13 nt, Human
gagagaaaauaua

SEQ ID NO: 2908555 - RNA, 17 nt, Human
gagagaaaauauaugua

SEQ ID NO: 2908556 - RNA, 21 nt, Human
gagagaaaauauauguauuuu

SEQ ID NO: 2908557 - RNA, 13 nt, Human
gagagaaacaaac

SEQ ID NO: 2908558 - RNA, 21 nt, Human
gagagaaagccaggcagguag

SEQ ID NO: 2908559 - RNA, 18 nt, Human
gagagaaagccaggcagg

SEQ ID NO: 2908560 - RNA, 19 nt, Human
gagagaaagccaggcaggu

SEQ ID NO: 2908561 - RNA, 13 nt, Human
gagacugucccug

SEQ ID NO: 2908562 - RNA, 22 nt, Human
gagacugucccugaaaccuagu

SEQ ID NO: 2908563 - RNA, 16 nt, Human
gagacugguccugugu

SEQ ID NO: 2908564 - RNA, 23 nt, Human
gagacugguccugugugcaguga

SEQ ID NO: 2908565 - RNA, 14 nt, Human
gagacuggggggcu

SEQ ID NO: 2908566 - RNA, 16 nt, Human
gagacuggggggcuug

SEQ ID NO: 2908567 - RNA, 18 nt, Human
gagacuggggggcuugaa

SEQ ID NO: 2908568 - RNA, 19 nt, Human
gagacuggggggcuugaaa

SEQ ID NO: 2908569 - RNA, 21 nt, Human
gagacagcugauacuucauuu

SEQ ID NO: 2908570 - RNA, 18 nt, Human
gagagacacagcgucccu

SEQ ID NO: 2908571 - RNA, 13 nt, Human
gagagaaauucug

SEQ ID NO: 2908572 - RNA, 14 nt, Human
gagagaaauucugu

SEQ ID NO: 2908573 - RNA, 16 nt, Human
gagagaaauucuguua

SEQ ID NO: 2908574 - RNA, 23 nt, Human
gagagaaauucuguuaaaaucua

SEQ ID NO: 2908575 - RNA, 14 nt, Human
gagagaccaggcaa

SEQ ID NO: 2908576 - RNA, 16 nt, Human
gagagaccaggcaaag

SEQ ID NO: 2908577 - RNA, 11 nt, Human
gagagagaaaa

SEQ ID NO: 2908578 - RNA, 13 nt, Human
gagagagaaaaaa

SEQ ID NO: 2908579 - RNA, 19 nt, Human
gagagagaaacaaacuuuu

SEQ ID NO: 2908580 - RNA, 19 nt, Human
gagagacucccaugaagcc

SEQ ID NO: 2908581 - RNA, 20 nt, Human
gagagacucccaugaagccu

SEQ ID NO: 2908582 - RNA, 21 nt, Human
gagagacucccaugaagccuu

SEQ ID NO: 2908583 - RNA, 15 nt, Human
gagagagagagagaa

SEQ ID NO: 2908584 - RNA, 9 nt, Human
gagagagag

SEQ ID NO: 2908585 - RNA, 10 nt, Human
gagagagaga

SEQ ID NO: 2908586 - RNA, 14 nt, Human
gagagagagaaauu

SEQ ID NO: 2908587 - RNA, 11 nt, Human
gagagagagag

SEQ ID NO: 2908588 - RNA, 12 nt, Human
gagagagagaga

SEQ ID NO: 2908589 - RNA, 13 nt, Human
gagagagagagaa

SEQ ID NO: 2908590 - RNA, 14 nt, Human
gagagagagagaaa

SEQ ID NO: 2908591 - RNA, 13 nt, Human
gagagagagagag

SEQ ID NO: 2908592 - RNA, 12 nt, Human
gagagagaaagc

SEQ ID NO: 2908593 - RNA, 15 nt, Human
gagagagaaagccag

SEQ ID NO: 2908594 - RNA, 18 nt, Human
gagagagaaagccaggca

SEQ ID NO: 2908595 - RNA, 11 nt, Human
gagagagaaau

SEQ ID NO: 2908596 - RNA, 20 nt, Human
gagagagaaauucuguuaaa

SEQ ID NO: 2908597 - RNA, 19 nt, Human
gagagagcuucuguugcug

SEQ ID NO: 2908598 - RNA, 16 nt, Human
gagagauagccugugg

SEQ ID NO: 2908599 - RNA, 18 nt, Human
gagagauagccuguggcc

SEQ ID NO: 2908600 - RNA, 20 nt, Human
gagagauagccuguggcccu

SEQ ID NO: 2908601 - RNA, 14 nt, Human
gagagauauaucug

SEQ ID NO: 2908602 - RNA, 17 nt, Human
gagagauauaucugaaa

SEQ ID NO: 2908603 - RNA, 18 nt, Human
gagagauauaucugaaaa

SEQ ID NO: 2908604 - RNA, 18 nt, Human
gagagaugggagcuccuc

SEQ ID NO: 2908605 - RNA, 15 nt, Human
gagagcaacauuuua

SEQ ID NO: 2908606 - RNA, 15 nt, Human
gagagauucugugau

SEQ ID NO: 2908607 - RNA, 17 nt, Human
gagagcaaagugaccug

SEQ ID NO: 2908608 - RNA, 13 nt, Human
gagagcaacucug

SEQ ID NO: 2908609 - RNA, 17 nt, Human
gagagcaacucugagau

SEQ ID NO: 2908610 - RNA, 13 nt, Human
gagagcagagaau

SEQ ID NO: 2908611 - RNA, 14 nt, Human
gagagcagagaaua

SEQ ID NO: 2908612 - RNA, 17 nt, Human
gagagcagagaauauaa

SEQ ID NO: 2908613 - RNA, 20 nt, Human
gagagcaacucugagaucua

SEQ ID NO: 2908614 - RNA, 21 nt, Human
gagagcagcuuuaaacucagg

SEQ ID NO: 2908615 - RNA, 23 nt, Human
gagagcagcuuuaaacucaggga

SEQ ID NO: 2908616 - RNA, 15 nt, Human
gagagccccuggggc

SEQ ID NO: 2908617 - RNA, 17 nt, Human
gagagccccuggggccu

SEQ ID NO: 2908618 - RNA, 20 nt, Human
gagagccccuggggccuaga

SEQ ID NO: 2908619 - RNA, 20 nt, Human
gagagcccggcgccccugcc

SEQ ID NO: 2908620 - RNA, 13 nt, Human
gagagcccagcca

SEQ ID NO: 2908621 - RNA, 16 nt, Human
gagagcccuucauuug

SEQ ID NO: 2908622 - RNA, 14 nt, Human
gagauacuggugga

SEQ ID NO: 2908623 - RNA, 15 nt, Human
gagauacugguggaa

SEQ ID NO: 2908624 - RNA, 14 nt, Human
gagagugucaacca

SEQ ID NO: 2908625 - RNA, 18 nt, Human
gagagugucaaccagaca

SEQ ID NO: 2908626 - RNA, 20 nt, Human
gagagugucaaccagacaga

SEQ ID NO: 2908627 - RNA, 22 nt, Human
gagagugucaaccagacagagg

SEQ ID NO: 2908628 - RNA, 23 nt, Human
gagagugucaaccagacagaggg

SEQ ID NO: 2908629 - RNA, 16 nt, Human
gagaguggcuccuccc

SEQ ID NO: 2908630 - RNA, 21 nt, Human
gagaguggcuccucccggugc

SEQ ID NO: 2908631 - RNA, 15 nt, Human
gagaguagaacagau

SEQ ID NO: 2908632 - RNA, 22 nt, Human
gagaguauuuuuauacaaaccu

SEQ ID NO: 2908633 - RNA, 17 nt, Human
gagaguauuuuuauaca

SEQ ID NO: 2908634 - RNA, 13 nt, Human
gagagucuagauu

SEQ ID NO: 2908635 - RNA, 13 nt, Human
gagaguggcuccu

SEQ ID NO: 2908636 - RNA, 16 nt, Human
gagagucuagauucuc

SEQ ID NO: 2908637 - RNA, 23 nt, Human
gagagucuagcacucauuuucua

SEQ ID NO: 2908638 - RNA, 19 nt, Human
gagaggggaacagacugga

SEQ ID NO: 2908639 - RNA, 13 nt, Human
gagccacaaaaga

SEQ ID NO: 2908640 - RNA, 18 nt, Human
gagccacacaugggcauc

SEQ ID NO: 2908641 - RNA, 14 nt, Human
gagccacagcagca

SEQ ID NO: 2908642 - RNA, 16 nt, Human
gagccacagcagcauu

SEQ ID NO: 2908643 - RNA, 17 nt, Human
gagccacagcagcauuu

SEQ ID NO: 2908644 - RNA, 20 nt, Human
gagccacagcagcauuuuua

SEQ ID NO: 2908645 - RNA, 20 nt, Human
gagccaauguuuuccaccca

SEQ ID NO: 2908646 - RNA, 19 nt, Human
gagccaauuuaaagaaaac

SEQ ID NO: 2908647 - RNA, 23 nt, Human
gagcauuuccaacaccacagaca

SEQ ID NO: 2908648 - RNA, 20 nt, Human
gagcauuuugauaccagaag

SEQ ID NO: 2908649 - RNA, 21 nt, Human
gagcauuagauuucucauuug

SEQ ID NO: 2908650 - RNA, 15 nt, Human
gagcauuagauuucu

SEQ ID NO: 2908651 - RNA, 15 nt, Human
gagcagagaauauaa

SEQ ID NO: 2908652 - RNA, 17 nt, Human
gagcauguuuuguauac

SEQ ID NO: 2908653 - RNA, 18 nt, Human
gagcauguuuuguauaca

SEQ ID NO: 2908654 - RNA, 20 nt, Human
gagcauguuuuguauacaaa

SEQ ID NO: 2908655 - RNA, 22 nt, Human
gagcaggaccucugaaacccug

SEQ ID NO: 2908656 - RNA, 12 nt, Human
gagcaggaccuc

SEQ ID NO: 2908657 - RNA, 13 nt, Human
gagcaggaccucc

SEQ ID NO: 2908658 - RNA, 20 nt, Human
gagcaggaccucccuuccga

SEQ ID NO: 2908659 - RNA, 22 nt, Human
gagcaggaagcauucagagagc

SEQ ID NO: 2908660 - RNA, 17 nt, Human
gagcagcuuuaaacuca

SEQ ID NO: 2908661 - RNA, 18 nt, Human
gagcagcuuuaaacucag

SEQ ID NO: 2908662 - RNA, 21 nt, Human
gagcagcuuuaaacucaggga

SEQ ID NO: 2908663 - RNA, 22 nt, Human
gagcagcuuuaaacucagggac

SEQ ID NO: 2908664 - RNA, 23 nt, Human
gagcagcuuuaaacucagggaca

SEQ ID NO: 2908665 - RNA, 16 nt, Human
gagcaggaagcauuca

SEQ ID NO: 2908666 - RNA, 23 nt, Human
gagcaggaagcauucagagagca

SEQ ID NO: 2908667 - RNA, 14 nt, Human
gagcaggaaggccu

SEQ ID NO: 2908668 - RNA, 15 nt, Human
gagcaggaaggccug

SEQ ID NO: 2908669 - RNA, 17 nt, Human
gagcaggaaggccuggg

SEQ ID NO: 2908670 - RNA, 18 nt, Human
gagcaggaaggccugggu

SEQ ID NO: 2908671 - RNA, 19 nt, Human
gagccaccacaccuggcua

SEQ ID NO: 2908672 - RNA, 23 nt, Human
gagccaccacaccuggcuaauuu

SEQ ID NO: 2908673 - RNA, 14 nt, Human
gagccagggucuca

SEQ ID NO: 2908674 - RNA, 15 nt, Human
gagccagccacacuu

SEQ ID NO: 2908675 - RNA, 19 nt, Human
gagccagggucucacuaug

SEQ ID NO: 2908676 - RNA, 18 nt, Human
gagccaguaaacagagga

SEQ ID NO: 2908677 - RNA, 19 nt, Human
gagccauauaaguuugaag

SEQ ID NO: 2908678 - RNA, 18 nt, Human
gagcccugguggcagugg

SEQ ID NO: 2908679 - RNA, 23 nt, Human
gagcccaggaguucgaggcugca

SEQ ID NO: 2908680 - RNA, 12 nt, Human
gagcccaggagu

SEQ ID NO: 2908681 - RNA, 11 nt, Human
gagcccaggag

SEQ ID NO: 2908682 - RNA, 20 nt, Human
gagcccagcccuguucuggg

SEQ ID NO: 2908683 - RNA, 15 nt, Human
gagcccagcccuccc

SEQ ID NO: 2908684 - RNA, 22 nt, Human
gagcccagccauuaccauggag

SEQ ID NO: 2908685 - RNA, 23 nt, Human
gagcccagagguaacagaacagc

SEQ ID NO: 2908686 - RNA, 20 nt, Human
gagcccagauugugccacug

SEQ ID NO: 2908687 - RNA, 22 nt, Human
gagcccagauugugccacugcu

SEQ ID NO: 2908688 - RNA, 14 nt, Human
gagcccagagaaca

SEQ ID NO: 2908689 - RNA, 16 nt, Human
gagcccagagaacagc

SEQ ID NO: 2908690 - RNA, 21 nt, Human
gagcccagagguaacagaaca

SEQ ID NO: 2908691 - RNA, 22 nt, Human
gagcccagagguaacagaacag

SEQ ID NO: 2908692 - RNA, 18 nt, Human
gagcccagcccuccccau

SEQ ID NO: 2908693 - RNA, 18 nt, Human
gagcccagcccuguucug

SEQ ID NO: 2908694 - RNA, 17 nt, Human
gagcccagcccuguucu

SEQ ID NO: 2908695 - RNA, 15 nt, Human
gagcacuaaggugug

SEQ ID NO: 2908696 - RNA, 21 nt, Human
gagcacuaaggugugcucuga

SEQ ID NO: 2908697 - RNA, 21 nt, Human
gagaugagggaugggccuggc

SEQ ID NO: 2908698 - RNA, 19 nt, Human
gagcacaaaaccuguccua

SEQ ID NO: 2908699 - RNA, 14 nt, Human
gagcacaaacauuu

SEQ ID NO: 2908700 - RNA, 15 nt, Human
gagcacaaacauuuu

SEQ ID NO: 2908701 - RNA, 16 nt, Human
gagcacaaacauuuuu

SEQ ID NO: 2908702 - RNA, 18 nt, Human
gagcacaaacauuuuuca

SEQ ID NO: 2908703 - RNA, 16 nt, Human
gagcaauauuuaugga

SEQ ID NO: 2908704 - RNA, 23 nt, Human
gagcaauauuuauggaugcaaca

SEQ ID NO: 2908705 - RNA, 13 nt, Human
gagcaacauuuua

SEQ ID NO: 2908706 - RNA, 20 nt, Human
gagcaacagagugagacccu

SEQ ID NO: 2908707 - RNA, 15 nt, Human
gagcaaccucucacu

SEQ ID NO: 2908708 - RNA, 16 nt, Human
gagcaaccucucacuc

SEQ ID NO: 2908709 - RNA, 19 nt, Human
gagcaaccucucacucccc

SEQ ID NO: 2908710 - RNA, 20 nt, Human
gagcaaccucucacucccca

SEQ ID NO: 2908711 - RNA, 21 nt, Human
gagcaaccucucacuccccau

SEQ ID NO: 2908712 - RNA, 20 nt, Human
gagcaacgaccagggccgag

SEQ ID NO: 2908713 - RNA, 23 nt, Human
gagaucaaccccuucgcuccugu

SEQ ID NO: 2908714 - RNA, 13 nt, Human
gagauacuuuuuc

SEQ ID NO: 2908715 - RNA, 18 nt, Human
gagauacuuuuucuuuug

SEQ ID NO: 2908716 - RNA, 23 nt, Human
gagauacuuuuucuuuuguaagu

SEQ ID NO: 2908717 - RNA, 18 nt, Human
gagaucacgccacugcac

SEQ ID NO: 2908718 - RNA, 16 nt, Human
gagaucacgccacugc

SEQ ID NO: 2908719 - RNA, 19 nt, Human
gagaucacgccacugcacu

SEQ ID NO: 2908720 - RNA, 21 nt, Human
gagauaccaagaugccaucug

SEQ ID NO: 2908721 - RNA, 16 nt, Human
gagaugacugaguccu

SEQ ID NO: 2908722 - RNA, 13 nt, Human
gagaugacugagu

SEQ ID NO: 2908723 - RNA, 19 nt, Human
gagaucccauccccuuguc

SEQ ID NO: 2908724 - RNA, 15 nt, Human
gagauccccugagcc

SEQ ID NO: 2908725 - RNA, 22 nt, Human
gagcaaaggcugagaacacugu

SEQ ID NO: 2908726 - RNA, 13 nt, Human
gagcaaaggcuga

SEQ ID NO: 2908727 - RNA, 16 nt, Human
gagcaaaggcugagaa

SEQ ID NO: 2908728 - RNA, 21 nt, Human
gagaugacugaguccucguag

SEQ ID NO: 2908729 - RNA, 17 nt, Human
gagaugaggccgccaug

SEQ ID NO: 2908730 - RNA, 15 nt, Human
gauaaaugauagaca

SEQ ID NO: 2908731 - RNA, 15 nt, Human
gaguugaggaacugu

SEQ ID NO: 2908732 - RNA, 16 nt, Human
gaguugaggaacugua

SEQ ID NO: 2908733 - RNA, 19 nt, Human
gaguugaggaacuguacag

SEQ ID NO: 2908734 - RNA, 14 nt, Human
gaguucauccaggc

SEQ ID NO: 2908735 - RNA, 13 nt, Human
gaguucaucccag

SEQ ID NO: 2908736 - RNA, 20 nt, Human
gaguucauacccuguuacca

SEQ ID NO: 2908737 - RNA, 17 nt, Human
gaguguuugggggacgu

SEQ ID NO: 2908738 - RNA, 23 nt, Human
gaguguuugggggacguuucuca

SEQ ID NO: 2908739 - RNA, 22 nt, Human
gaguuaaauagaguauaugcac

SEQ ID NO: 2908740 - RNA, 22 nt, Human
gaguguugggcaugugaucacg

SEQ ID NO: 2908741 - RNA, 15 nt, Human
gaguguuuaauaaag

SEQ ID NO: 2908742 - RNA, 13 nt, Human
gaguuaagaagcu

SEQ ID NO: 2908743 - RNA, 14 nt, Human
gaguuaagaagcug

SEQ ID NO: 2908744 - RNA, 16 nt, Human
gaguuaagaagcuguu

SEQ ID NO: 2908745 - RNA, 21 nt, Human
gaguuaagaagcuguuguaca

SEQ ID NO: 2908746 - RNA, 12 nt, Human
gagugugcugcu

SEQ ID NO: 2908747 - RNA, 15 nt, Human
gagugugcugcugua

SEQ ID NO: 2908748 - RNA, 23 nt, Human
gagugugcugcuguaagaaaucu

SEQ ID NO: 2908749 - RNA, 16 nt, Human
gaguguggcugaggag

SEQ ID NO: 2908750 - RNA, 15 nt, Human
gaguguggacucugg

SEQ ID NO: 2908751 - RNA, 18 nt, Human
gaguguacuuaacuauuc

SEQ ID NO: 2908752 - RNA, 17 nt, Human
gaguguaauguuuguua

SEQ ID NO: 2908753 - RNA, 15 nt, Human
gaguggugcagacag

SEQ ID NO: 2908754 - RNA, 16 nt, Human
gaguggugcagacaga

SEQ ID NO: 2908755 - RNA, 20 nt, Human
gaguguagaagcauuccuuc

SEQ ID NO: 2908756 - RNA, 17 nt, Human
gagugucucugauaaaa

SEQ ID NO: 2908757 - RNA, 17 nt, Human
gagugucaaccagacag

SEQ ID NO: 2908758 - RNA, 18 nt, Human
gagugucaaccagacaga

SEQ ID NO: 2908759 - RNA, 20 nt, Human
gagugucaaccagacagagg

SEQ ID NO: 2908760 - RNA, 21 nt, Human
gagugucaaccagacagaggg

SEQ ID NO: 2908761 - RNA, 11 nt, Human
gaguguagaag

SEQ ID NO: 2908762 - RNA, 13 nt, Human
gaguguagaagca

SEQ ID NO: 2908763 - RNA, 14 nt, Human
gaguguagaagcau

SEQ ID NO: 2908764 - RNA, 15 nt, Human
gaguguagaagcauu

SEQ ID NO: 2908765 - RNA, 16 nt, Human
gaguguagaagcauuc

SEQ ID NO: 2908766 - RNA, 17 nt, Human
gagugacagaggcagcc

SEQ ID NO: 2908767 - RNA, 21 nt, Human
gagugggguuaucucuguguu

SEQ ID NO: 2908768 - RNA, 15 nt, Human
gagugggugacaaga

SEQ ID NO: 2908769 - RNA, 19 nt, Human
gagugggugacaagagccu

SEQ ID NO: 2908770 - RNA, 20 nt, Human
gagugggugacaagagccug

SEQ ID NO: 2908771 - RNA, 21 nt, Human
gagugggugacaagagccuga

SEQ ID NO: 2908772 - RNA, 15 nt, Human
gaguggguggaggca

SEQ ID NO: 2908773 - RNA, 14 nt, Human
gauaugauuggcaa

SEQ ID NO: 2908774 - RNA, 23 nt, Human
gauaugauuguuucucaaaucuu

SEQ ID NO: 2908775 - RNA, 20 nt, Human
gaucaauuauaguuucugag

SEQ ID NO: 2908776 - RNA, 21 nt, Human
gaucaauuauaguuucugagg

SEQ ID NO: 2908777 - RNA, 21 nt, Human
gauaugaagagcaacugggac

SEQ ID NO: 2908778 - RNA, 14 nt, Human
gauaugaauauaug

SEQ ID NO: 2908779 - RNA, 17 nt, Human
gauaugaauauauggca

SEQ ID NO: 2908780 - RNA, 23 nt, Human
gauaugaauauauggcauuugca

SEQ ID NO: 2908781 - RNA, 22 nt, Human
gauaugaguauacaauauauaa

SEQ ID NO: 2908782 - RNA, 14 nt, Human
gauaucuuuucuuu

SEQ ID NO: 2908783 - RNA, 16 nt, Human
gauaucuuuucuuuag

SEQ ID NO: 2908784 - RNA, 22 nt, Human
gauaucuuuucuuuagagaacu

SEQ ID NO: 2908785 - RNA, 16 nt, Human
gaucacggcucacugc

SEQ ID NO: 2908786 - RNA, 15 nt, Human
gaucacggcucacug

SEQ ID NO: 2908787 - RNA, 16 nt, Human
gaucacagcagcuucu

SEQ ID NO: 2908788 - RNA, 15 nt, Human
gaucacacuauuuua

SEQ ID NO: 2908789 - RNA, 18 nt, Human
gaucacggcucacugcag

SEQ ID NO: 2908790 - RNA, 17 nt, Human
gaucacuggagcccagg

SEQ ID NO: 2908791 - RNA, 18 nt, Human
gaucacuggagcccagga

SEQ ID NO: 2908792 - RNA, 18 nt, Human
gaucagaaaaauggagca

SEQ ID NO: 2908793 - RNA, 22 nt, Human
gaucagaaaaauggagcaaagu

SEQ ID NO: 2908794 - RNA, 14 nt, Human
gauagccuguggcc

SEQ ID NO: 2908795 - RNA, 16 nt, Human
gauagccuguggcccu

SEQ ID NO: 2908796 - RNA, 19 nt, Human
gauauaacuauugcccagg

SEQ ID NO: 2908797 - RNA, 12 nt, Human
gauauaaauucu

SEQ ID NO: 2908798 - RNA, 13 nt, Human
gauauaaauucug

SEQ ID NO: 2908799 - RNA, 14 nt, Human
gauauaaauucugu

SEQ ID NO: 2908800 - RNA, 13 nt, Human
gauagcugcaugu

SEQ ID NO: 2908801 - RNA, 19 nt, Human
gauagcugcauguggcuuu

SEQ ID NO: 2908802 - RNA, 22 nt, Human
gauagcuaacauuuuaaauaaa

SEQ ID NO: 2908803 - RNA, 23 nt, Human
gauagcuucaccccaaucccagc

SEQ ID NO: 2908804 - RNA, 16 nt, Human
gauagcuaacauuuua

SEQ ID NO: 2908805 - RNA, 18 nt, Human
gauagcuaacauuuuaaa

SEQ ID NO: 2908806 - RNA, 20 nt, Human
gauagcuaacauuuuaaaua

SEQ ID NO: 2908807 - RNA, 23 nt, Human
gauacaggaaaagcugcugacag

SEQ ID NO: 2908808 - RNA, 21 nt, Human
gauacaggaaaagcugcugac

SEQ ID NO: 2908809 - RNA, 19 nt, Human
gauacaggaaaagcugcug

SEQ ID NO: 2908810 - RNA, 17 nt, Human
gauaagaccaccaccuc

SEQ ID NO: 2908811 - RNA, 15 nt, Human
gauagauuugaccuc

SEQ ID NO: 2908812 - RNA, 15 nt, Human
gauagauuuggaaua

SEQ ID NO: 2908813 - RNA, 16 nt, Human
gauagauuuggaauag

SEQ ID NO: 2908814 - RNA, 20 nt, Human
gauacaggaaaagcugcuga

SEQ ID NO: 2908815 - RNA, 21 nt, Human
gauaacuuagguggcaagcug

SEQ ID NO: 2908816 - RNA, 22 nt, Human
gagucuuugguucuaaggaccu

SEQ ID NO: 2908817 - RNA, 14 nt, Human
gagucuuugguucu

SEQ ID NO: 2908818 - RNA, 19 nt, Human
gagucuugguuucucucua

SEQ ID NO: 2908819 - RNA, 22 nt, Human
gagucuugguuucucucuacag

SEQ ID NO: 2908820 - RNA, 22 nt, Human
gagucuuugaagcugaaaauau

SEQ ID NO: 2908821 - RNA, 15 nt, Human
gagucuuugguucua

SEQ ID NO: 2908822 - RNA, 16 nt, Human
gagucuuugguucuaa

SEQ ID NO: 2908823 - RNA, 17 nt, Human
gagucuuugguucuaag

SEQ ID NO: 2908824 - RNA, 18 nt, Human
gagucuuugguucuaagg

SEQ ID NO: 2908825 - RNA, 16 nt, Human
gagugacagaggcagc

SEQ ID NO: 2908826 - RNA, 15 nt, Human
gagugacagaggcag

SEQ ID NO: 2908827 - RNA, 14 nt, Human
gagugacagaggca

SEQ ID NO: 2908828 - RNA, 17 nt, Human
gagugaaugccagugug

SEQ ID NO: 2908829 - RNA, 13 nt, Human
gagucuagauuca

SEQ ID NO: 2908830 - RNA, 17 nt, Human
gagucuagauucaaagg

SEQ ID NO: 2908831 - RNA, 21 nt, Human
gagucuagauucaaagguucu

SEQ ID NO: 2908832 - RNA, 22 nt, Human
gagucuagauucaaagguucua

SEQ ID NO: 2908833 - RNA, 23 nt, Human
gagucuagauucaaagguucuag

SEQ ID NO: 2908834 - RNA, 13 nt, Human
gagucuagauucu

SEQ ID NO: 2908835 - RNA, 14 nt, Human
gagucuagauucuc

SEQ ID NO: 2908836 - RNA, 16 nt, Human
gagucuagcacucauu

SEQ ID NO: 2908837 - RNA, 20 nt, Human
gagucuagcacucauuuucu

SEQ ID NO: 2908838 - RNA, 22 nt, Human
gagucuagcacucauuuucuau

SEQ ID NO: 2908839 - RNA, 20 nt, Human
gagucuguugugugucaugc

SEQ ID NO: 2908840 - RNA, 11 nt, Human
gagucugggac

SEQ ID NO: 2908841 - RNA, 12 nt, Human
gagucugucuca

SEQ ID NO: 2908842 - RNA, 22 nt, Human
gagucuguugugugucaugcca

SEQ ID NO: 2908843 - RNA, 15 nt, Human
gagucuugcuauauu

SEQ ID NO: 2908844 - RNA, 20 nt, Human
gagucuugcuauauugccca

SEQ ID NO: 2908845 - RNA, 14 nt, Human
gagucgaggacagg

SEQ ID NO: 2908846 - RNA, 13 nt, Human
gaguccucugaau

SEQ ID NO: 2908847 - RNA, 19 nt, Human
gaguccgaaagggacuugg

SEQ ID NO: 2908848 - RNA, 14 nt, Human
gaguauuggucucc

SEQ ID NO: 2908849 - RNA, 17 nt, Human
gaguccucacucccagu

SEQ ID NO: 2908850 - RNA, 16 nt, Human
gaguccucacucccag

SEQ ID NO: 2908851 - RNA, 16 nt, Human
gagucgaggacaggga

SEQ ID NO: 2908852 - RNA, 15 nt, Human
gagucgaggacaggg

SEQ ID NO: 2908853 - RNA, 22 nt, Human
gagucuaaagauggaguuucua

SEQ ID NO: 2908854 - RNA, 13 nt, Human
gagucuaaagaug

SEQ ID NO: 2908855 - RNA, 21 nt, Human
gagucuaaagauggaguuucu

SEQ ID NO: 2908856 - RNA, 20 nt, Human
gagucuagaaguuguuuguc

SEQ ID NO: 2908857 - RNA, 11 nt, Human
gagucuagaug

SEQ ID NO: 2908858 - RNA, 16 nt, Human
gagucuagauguuuau

SEQ ID NO: 2908859 - RNA, 11 nt, Human
gagucuagauu

SEQ ID NO: 2908860 - RNA, 11 nt, Human
gagucuaaaga

SEQ ID NO: 2908861 - RNA, 12 nt, Human
gagucuaaagau

SEQ ID NO: 2908862 - RNA, 14 nt, Human
gaguccuuaaaaug

SEQ ID NO: 2908863 - RNA, 17 nt, Human
gaguaucaggucuccca

SEQ ID NO: 2908864 - RNA, 15 nt, Human
gaguaucagaauuga

SEQ ID NO: 2908865 - RNA, 22 nt, Human
gaguaucagaauugaaacacuu

SEQ ID NO: 2908866 - RNA, 23 nt, Human
gaguaaugcauacagaaauauaa

SEQ ID NO: 2908867 - RNA, 17 nt, Human
gaguagggcuuaguguu

SEQ ID NO: 2908868 - RNA, 21 nt, Human
gaguaguugauguugcauuuu

SEQ ID NO: 2908869 - RNA, 15 nt, Human
gaguauaagaaaugc

SEQ ID NO: 2908870 - RNA, 17 nt, Human
gaguauaagaaaugcau

SEQ ID NO: 2908871 - RNA, 18 nt, Human
gaguauaagaaaugcaua

SEQ ID NO: 2908872 - RNA, 18 nt, Human
gaguauacaauauauaaa

SEQ ID NO: 2908873 - RNA, 19 nt, Human
gaguauacaauauauaaaa

SEQ ID NO: 2908874 - RNA, 20 nt, Human
gaguaguugauguugcauuu

SEQ ID NO: 2908875 - RNA, 14 nt, Human
gaguaguguggaau

SEQ ID NO: 2908876 - RNA, 23 nt, Human
gaguaguuauauaauuguugaac

SEQ ID NO: 2908877 - RNA, 12 nt, Human
gaguauaugcac

SEQ ID NO: 2908878 - RNA, 14 nt, Human
gaguauaugcacuu

SEQ ID NO: 2908879 - RNA, 17 nt, Human
gaguaauaguaaacaca

SEQ ID NO: 2908880 - RNA, 21 nt, Human
gaguaacuauuauuauaggua

SEQ ID NO: 2908881 - RNA, 18 nt, Human
gaguaagaaauuucaggu

SEQ ID NO: 2908882 - RNA, 20 nt, Human
gaguaagaaauuucagguug

SEQ ID NO: 2908883 - RNA, 13 nt, Human
gaguaagacauug

SEQ ID NO: 2908884 - RNA, 22 nt, Human
gaguagcugggacuacaggcac

SEQ ID NO: 2908885 - RNA, 19 nt, Human
gaguagcugggacuacagg

SEQ ID NO: 2908886 - RNA, 18 nt, Human
gaguagauggugaaauuu

SEQ ID NO: 2908887 - RNA, 18 nt, Human
gaguagauauuacuuuau

SEQ ID NO: 2908888 - RNA, 17 nt, Human
gaguagaugcgcagccc

SEQ ID NO: 2908889 - RNA, 17 nt, Human
gaguagaaauaaaagug

SEQ ID NO: 2908890 - RNA, 14 nt, Human
gaguagaauugcau

SEQ ID NO: 2908891 - RNA, 17 nt, Human
gaguagaauugcauuga

SEQ ID NO: 2908892 - RNA, 15 nt, Human
gaguagacacauuua

SEQ ID NO: 2908893 - RNA, 18 nt, Human
gaguagacacauuuaagg

SEQ ID NO: 2908894 - RNA, 22 nt, Human
gagguuuauagaaagauagaua

SEQ ID NO: 2908895 - RNA, 14 nt, Human
gagguugggugggc

SEQ ID NO: 2908896 - RNA, 22 nt, Human
gagguugguuuaaugcaauaga

SEQ ID NO: 2908897 - RNA, 13 nt, Human
gagguuguaguga

SEQ ID NO: 2908898 - RNA, 18 nt, Human
gagguuguagugagccca

SEQ ID NO: 2908899 - RNA, 19 nt, Human
gagguuucccaaugguguu

SEQ ID NO: 2908900 - RNA, 22 nt, Human
gagguuucaccaugauggccag

SEQ ID NO: 2908901 - RNA, 21 nt, Human
gagguuucacccuuaacccaa

SEQ ID NO: 2908902 - RNA, 19 nt, Human
gagguugcagggagccgag

SEQ ID NO: 2908903 - RNA, 14 nt, Human
gagguucuaaggcc

SEQ ID NO: 2908904 - RNA, 13 nt, Human
gagguugcaggga

SEQ ID NO: 2908905 - RNA, 20 nt, Human
gaggucagagccugcaguua

SEQ ID NO: 2908906 - RNA, 17 nt, Human
gaggucagagccugcag

SEQ ID NO: 2908907 - RNA, 18 nt, Human
gagguggggcgaggcagg

SEQ ID NO: 2908908 - RNA, 19 nt, Human
gagguggggcgaggcaggc

SEQ ID NO: 2908909 - RNA, 20 nt, Human
gaggugguggaguggaguga

SEQ ID NO: 2908910 - RNA, 12 nt, Human
gaggugguuuua

SEQ ID NO: 2908911 - RNA, 22 nt, Human
gaggugguaguaaaacacagag

SEQ ID NO: 2908912 - RNA, 23 nt, Human
gaggugguaguaaaacacagagg

SEQ ID NO: 2908913 - RNA, 22 nt, Human
gagcccuguccugccuaaggcu

SEQ ID NO: 2908914 - RNA, 18 nt, Human
gagcccuuaucugugcuc

SEQ ID NO: 2908915 - RNA, 22 nt, Human
gagcccuguggaugagcccuca

SEQ ID NO: 2908916 - RNA, 21 nt, Human
gagcccuguggaugagcccuc

SEQ ID NO: 2908917 - RNA, 18 nt, Human
gagcccuguggaugagcc

SEQ ID NO: 2908918 - RNA, 19 nt, Human
gagcccuuaucugugcuca

SEQ ID NO: 2908919 - RNA, 17 nt, Human
gaggaucccucucugga

SEQ ID NO: 2908920 - RNA, 14 nt, Human
gaggaucaguuuuu

SEQ ID NO: 2908921 - RNA, 19 nt, Human
gaggaucacuggagcccag

SEQ ID NO: 2908922 - RNA, 20 nt, Human
gaggaucacuggagcccagg

SEQ ID NO: 2908923 - RNA, 22 nt, Human
gaggcagacuucccugaaugua

SEQ ID NO: 2908924 - RNA, 17 nt, Human
gaggauuguugaaucua

SEQ ID NO: 2908925 - RNA, 16 nt, Human
gaggcaaagcuggcuc

SEQ ID NO: 2908926 - RNA, 15 nt, Human
gaggcaagcaagcuc

SEQ ID NO: 2908927 - RNA, 20 nt, Human
gaggcaaagcuggcucaccu

SEQ ID NO: 2908928 - RNA, 23 nt, Human
gaggcaaccugauuguaaacuuc

SEQ ID NO: 2908929 - RNA, 19 nt, Human
gaggcaaugucaggaacag

SEQ ID NO: 2908930 - RNA, 12 nt, Human
gaggauuuagaa

SEQ ID NO: 2908931 - RNA, 22 nt, Human
gaggauuuagaagugucauguu

SEQ ID NO: 2908932 - RNA, 22 nt, Human
gaggaugagcucuacccagggc

SEQ ID NO: 2908933 - RNA, 18 nt, Human
gaggaugagagcccagag

SEQ ID NO: 2908934 - RNA, 20 nt, Human
gaggaugagagcccagaggu

SEQ ID NO: 2908935 - RNA, 14 nt, Human
gaggaugagagccc

SEQ ID NO: 2908936 - RNA, 15 nt, Human
gaggaugagagccca

SEQ ID NO: 2908937 - RNA, 16 nt, Human
gaggaugagagcccag

SEQ ID NO: 2908938 - RNA, 17 nt, Human
gaggaugagagcccaga

SEQ ID NO: 2908939 - RNA, 23 nt, Human
gaggccaugggccuccugugugu

SEQ ID NO: 2908940 - RNA, 21 nt, Human
gaggccaugggccuccugugu

SEQ ID NO: 2908941 - RNA, 20 nt, Human
gaggccaugggccuccugug

SEQ ID NO: 2908942 - RNA, 18 nt, Human
gaggccaugggccuccug

SEQ ID NO: 2908943 - RNA, 17 nt, Human
gaggccaugggccuccu

SEQ ID NO: 2908944 - RNA, 14 nt, Human
gaggccaugggccu

SEQ ID NO: 2908945 - RNA, 18 nt, Human
gaggcagccccauucugc

SEQ ID NO: 2908946 - RNA, 19 nt, Human
gaggcagccccauucugcc

SEQ ID NO: 2908947 - RNA, 22 nt, Human
gaggcagagagcggucucaggc

SEQ ID NO: 2908948 - RNA, 11 nt, Human
gaggcagagag

SEQ ID NO: 2908949 - RNA, 12 nt, Human
gaggcagagagc

SEQ ID NO: 2908950 - RNA, 13 nt, Human
gaggcagagagcg

SEQ ID NO: 2908951 - RNA, 15 nt, Human
gaggcagagagcggu

SEQ ID NO: 2908952 - RNA, 9 nt, Human
gaggcaggg

SEQ ID NO: 2908953 - RNA, 20 nt, Human
gaggcagccccauucugccu

SEQ ID NO: 2908954 - RNA, 19 nt, Human
gaggcagggcaaaugacau

SEQ ID NO: 2908955 - RNA, 23 nt, Human
gaggcagggcaaaugacaugcac

SEQ ID NO: 2908956 - RNA, 19 nt, Human
gaggccuucucugaaggac

SEQ ID NO: 2908957 - RNA, 18 nt, Human
gaggccuucucugaagga

SEQ ID NO: 2908958 - RNA, 15 nt, Human
gaggccuugagaggc

SEQ ID NO: 2908959 - RNA, 16 nt, Human
gaggccuucucugaag

SEQ ID NO: 2908960 - RNA, 18 nt, Human
gaggccuacucuuccauc

SEQ ID NO: 2908961 - RNA, 22 nt, Human
gaggcgcccuuggcuucuguga

SEQ ID NO: 2908962 - RNA, 13 nt, Human
gaggcuggcaggu

SEQ ID NO: 2908963 - RNA, 12 nt, Human
gaggcuggcagg

SEQ ID NO: 2908964 - RNA, 15 nt, Human
gaggccccacugaug

SEQ ID NO: 2908965 - RNA, 18 nt, Human
gaggccccacugaugcug

SEQ ID NO: 2908966 - RNA, 19 nt, Human
gagggugggggccaccugc

SEQ ID NO: 2908967 - RNA, 22 nt, Human
gagggugggggccaccugccug

SEQ ID NO: 2908968 - RNA, 14 nt, Human
gaggguugggcugg

SEQ ID NO: 2908969 - RNA, 15 nt, Human
gaggguugggcuggu

SEQ ID NO: 2908970 - RNA, 18 nt, Human
gaggguugauuaaggcag

SEQ ID NO: 2908971 - RNA, 13 nt, Human
gaggguugugcua

SEQ ID NO: 2908972 - RNA, 15 nt, Human
gagguaaagauaugg

SEQ ID NO: 2908973 - RNA, 13 nt, Human
gagguaacagaac

SEQ ID NO: 2908974 - RNA, 14 nt, Human
gagguaacagaaca

SEQ ID NO: 2908975 - RNA, 15 nt, Human
gagguaacagaacag

SEQ ID NO: 2908976 - RNA, 16 nt, Human
gagguaacagaacagc

SEQ ID NO: 2908977 - RNA, 17 nt, Human
gagguaacagaacagcu

SEQ ID NO: 2908978 - RNA, 18 nt, Human
gagguaacagaacagcuu

SEQ ID NO: 2908979 - RNA, 21 nt, Human
gagguaacagaacagcuucag

SEQ ID NO: 2908980 - RNA, 21 nt, Human
gaggguuuuagguagaaaaac

SEQ ID NO: 2908981 - RNA, 16 nt, Human
gagguaagggaggagg

SEQ ID NO: 2908982 - RNA, 12 nt, Human
gagguaaguuuu

SEQ ID NO: 2908983 - RNA, 19 nt, Human
gagguauuuaucuuuacuu

SEQ ID NO: 2908984 - RNA, 14 nt, Human
gagguauauuggaa

SEQ ID NO: 2908985 - RNA, 17 nt, Human
gagguacuagaaugcuu

SEQ ID NO: 2908986 - RNA, 20 nt, Human
gagguagaccaggauuucua

SEQ ID NO: 2908987 - RNA, 21 nt, Human
gagguagaccaggauuucuaa

SEQ ID NO: 2908988 - RNA, 13 nt, Human
gaggucagagccu

SEQ ID NO: 2908989 - RNA, 12 nt, Human
gaggucagagcc

SEQ ID NO: 2908990 - RNA, 19 nt, Human
gaggucaaggcugcaguga

SEQ ID NO: 2908991 - RNA, 22 nt, Human
gagggugucccaaaaagaaagg

SEQ ID NO: 2908992 - RNA, 21 nt, Human
gaggguggugaccucugccug

SEQ ID NO: 2908993 - RNA, 14 nt, Human
gaggguggugaccu

SEQ ID NO: 2908994 - RNA, 17 nt, Human
gagggucuauggggaga

SEQ ID NO: 2908995 - RNA, 15 nt, Human
gagggugagugcaag

SEQ ID NO: 2908996 - RNA, 19 nt, Human
gagggugggagagcccagc

SEQ ID NO: 2908997 - RNA, 18 nt, Human
gagggugggagagcccag

SEQ ID NO: 2908998 - RNA, 14 nt, Human
gagggucugaggaa

SEQ ID NO: 2908999 - RNA, 13 nt, Human
gagggucugagga

SEQ ID NO: 2909000 - RNA, 21 nt, Human
gaggguccuggcuccugaggg

SEQ ID NO: 2909001 - RNA, 17 nt, Human
gaggguccuggcuccug

SEQ ID NO: 2909002 - RNA, 22 nt, Human
gagggucugggaaaugagcagg

SEQ ID NO: 2909003 - RNA, 15 nt, Human
gaggguacagcuggg

SEQ ID NO: 2909004 - RNA, 17 nt, Human
gaggguacagcugggcu

SEQ ID NO: 2909005 - RNA, 19 nt, Human
gagggucaggacugugacu

SEQ ID NO: 2909006 - RNA, 19 nt, Human
gaggguccccaccugggac

SEQ ID NO: 2909007 - RNA, 15 nt, Human
gaggguccuggcucc

SEQ ID NO: 2909008 - RNA, 13 nt, Human
gagggaggaccug

SEQ ID NO: 2909009 - RNA, 14 nt, Human
gagggaggaccugg

SEQ ID NO: 2909010 - RNA, 15 nt, Human
gagggaggaccuggg

SEQ ID NO: 2909011 - RNA, 12 nt, Human
gagggagcagac

SEQ ID NO: 2909012 - RNA, 20 nt, Human
gagggagcagacaggaggaa

SEQ ID NO: 2909013 - RNA, 17 nt, Human
gaggcugugugccuggg

SEQ ID NO: 2909014 - RNA, 20 nt, Human
gaggcugugugccuggggga

SEQ ID NO: 2909015 - RNA, 13 nt, Human
gagggagaaggga

SEQ ID NO: 2909016 - RNA, 21 nt, Human
gagggagacacuggccccuca

SEQ ID NO: 2909017 - RNA, 20 nt, Human
gagggagggggaaggcaggg

SEQ ID NO: 2909018 - RNA, 16 nt, Human
gagggagugacagagg

SEQ ID NO: 2909019 - RNA, 18 nt, Human
gagggagugacagaggca

SEQ ID NO: 2909020 - RNA, 22 nt, Human
gagggagugacagaggcagccc

SEQ ID NO: 2909021 - RNA, 21 nt, Human
gagggagugacagaggcagcc

SEQ ID NO: 2909022 - RNA, 13 nt, Human
gagggagggggcu

SEQ ID NO: 2909023 - RNA, 17 nt, Human
gagggaugcugccugag

SEQ ID NO: 2909024 - RNA, 15 nt, Human
gagggaugcugccug

SEQ ID NO: 2909025 - RNA, 21 nt, Human
gagggguguggcuccuuccca

SEQ ID NO: 2909026 - RNA, 21 nt, Human
gagggggcuauagcuacagga

SEQ ID NO: 2909027 - RNA, 14 nt, Human
gagggggacugcug

SEQ ID NO: 2909028 - RNA, 20 nt, Human
gagggggacugcugcugccu

SEQ ID NO: 2909029 - RNA, 21 nt, Human
gagggggacugcugcugccug

SEQ ID NO: 2909030 - RNA, 14 nt, Human
gagggggagaaaag

SEQ ID NO: 2909031 - RNA, 19 nt, Human
gagggauuucuuugcugua

SEQ ID NO: 2909032 - RNA, 12 nt, Human
gagggcacacac

SEQ ID NO: 2909033 - RNA, 13 nt, Human
gagggaugggccu

SEQ ID NO: 2909034 - RNA, 14 nt, Human
gagggaugggccug

SEQ ID NO: 2909035 - RNA, 15 nt, Human
gagggaugggccugg

SEQ ID NO: 2909036 - RNA, 16 nt, Human
gagggaugggccuggc

SEQ ID NO: 2909037 - RNA, 20 nt, Human
gagggaugcugccugaguca

SEQ ID NO: 2909038 - RNA, 15 nt, Human
gagggcacacacugu

SEQ ID NO: 2909039 - RNA, 14 nt, Human
gagggcagcugcua

SEQ ID NO: 2909040 - RNA, 17 nt, Human
gagggcauccauaccag

SEQ ID NO: 2909041 - RNA, 18 nt, Human
gagggcauccauaccagc

SEQ ID NO: 2909042 - RNA, 13 nt, Human
gagggcagcugcu

SEQ ID NO: 2909043 - RNA, 17 nt, Human
gaggggcuuucuggaga

SEQ ID NO: 2909044 - RNA, 18 nt, Human
gagggccaagacuuggca

SEQ ID NO: 2909045 - RNA, 23 nt, Human
gaggggcucucagcucagcgcca

SEQ ID NO: 2909046 - RNA, 17 nt, Human
gaggggcugugggcgug

SEQ ID NO: 2909047 - RNA, 14 nt, Human
gcacgcacacacac

SEQ ID NO: 2909048 - RNA, 15 nt, Human
gcacgcacacacaca

SEQ ID NO: 2909049 - RNA, 10 nt, Human
gcacgcacac

SEQ ID NO: 2909050 - RNA, 11 nt, Human
gcacgcacaca

SEQ ID NO: 2909051 - RNA, 12 nt, Human
gcacgcacacac

SEQ ID NO: 2909052 - RNA, 13 nt, Human
gcacgcacacaca

SEQ ID NO: 2909053 - RNA, 12 nt, Human
gcacugcugccc

SEQ ID NO: 2909054 - RNA, 14 nt, Human
gcacugcugcccag

SEQ ID NO: 2909055 - RNA, 15 nt, Human
gcacugcugcccagc

SEQ ID NO: 2909056 - RNA, 18 nt, Human
gcacugcugcccagccuc

SEQ ID NO: 2909057 - RNA, 20 nt, Human
gcacugcugcccagccucca

SEQ ID NO: 2909058 - RNA, 23 nt, Human
gcacuggaguggcucgccaggcc

SEQ ID NO: 2909059 - RNA, 18 nt, Human
gcacuggguugacuuuca

SEQ ID NO: 2909060 - RNA, 14 nt, Human
gcacugguggcccg

SEQ ID NO: 2909061 - RNA, 12 nt, Human
gcacuggcccag

SEQ ID NO: 2909062 - RNA, 23 nt, Human
gcacuggggagcccgucucagug

SEQ ID NO: 2909063 - RNA, 20 nt, Human
gcagacacgccuuccccuca

SEQ ID NO: 2909064 - RNA, 17 nt, Human
gcagacagaagucuccu

SEQ ID NO: 2909065 - RNA, 20 nt, Human
gcagacagaagucuccucaa

SEQ ID NO: 2909066 - RNA, 13 nt, Human
gcagacagacaau

SEQ ID NO: 2909067 - RNA, 14 nt, Human
gcagacaggaggaa

SEQ ID NO: 2909068 - RNA, 15 nt, Human
gcagacagcaggcag

SEQ ID NO: 2909069 - RNA, 18 nt, Human
gcagacagcaggcagcgc

SEQ ID NO: 2909070 - RNA, 12 nt, Human
gcagacaggcaa

SEQ ID NO: 2909071 - RNA, 14 nt, Human
gcagacaggcaagc

SEQ ID NO: 2909072 - RNA, 13 nt, Human
gcagacaggcaag

SEQ ID NO: 2909073 - RNA, 13 nt, Human
gcacugugcucag

SEQ ID NO: 2909074 - RNA, 14 nt, Human
gcacugugcucagg

SEQ ID NO: 2909075 - RNA, 16 nt, Human
gcacugugcucagggc

SEQ ID NO: 2909076 - RNA, 18 nt, Human
gcacugugcucagggcua

SEQ ID NO: 2909077 - RNA, 19 nt, Human
gcagaaggauuuuuuaaag

SEQ ID NO: 2909078 - RNA, 18 nt, Human
gcaccuuaccaacuuucu

SEQ ID NO: 2909079 - RNA, 19 nt, Human
gcaccuuaccaacuuucug

SEQ ID NO: 2909080 - RNA, 14 nt, Human
gcaccuugugucug

SEQ ID NO: 2909081 - RNA, 20 nt, Human
gcaccaucacaauacagaua

SEQ ID NO: 2909082 - RNA, 21 nt, Human
gcaccuguacucaggaggcug

SEQ ID NO: 2909083 - RNA, 19 nt, Human
gcaccuguacucaggaggc

SEQ ID NO: 2909084 - RNA, 12 nt, Human
gcaccuguacag

SEQ ID NO: 2909085 - RNA, 13 nt, Human
gcaccuguacagu

SEQ ID NO: 2909086 - RNA, 22 nt, Human
gcaccuguacaguggaaccguu

SEQ ID NO: 2909087 - RNA, 23 nt, Human
gcaccuguacaguggaaccguug

SEQ ID NO: 2909088 - RNA, 17 nt, Human
gcaccccccuguucuaa

SEQ ID NO: 2909089 - RNA, 18 nt, Human
gcaccccccuguucuaag

SEQ ID NO: 2909090 - RNA, 19 nt, Human
gcaccccccuguucuaagg

SEQ ID NO: 2909091 - RNA, 20 nt, Human
gcaccccccuguucuaaggg

SEQ ID NO: 2909092 - RNA, 21 nt, Human
gcaccccccuguucuaagggg

SEQ ID NO: 2909093 - RNA, 14 nt, Human
gcaccccccaagcu

SEQ ID NO: 2909094 - RNA, 19 nt, Human
gcacagauaaaaaguggaa

SEQ ID NO: 2909095 - RNA, 20 nt, Human
gcacagauaaaaaguggaau

SEQ ID NO: 2909096 - RNA, 17 nt, Human
gcacagauauacuuugu

SEQ ID NO: 2909097 - RNA, 19 nt, Human
gcacagauauacuuugugg

SEQ ID NO: 2909098 - RNA, 16 nt, Human
gcacagugaagugcug

SEQ ID NO: 2909099 - RNA, 13 nt, Human
gcacaguccagga

SEQ ID NO: 2909100 - RNA, 16 nt, Human
gcacaguccaggaaca

SEQ ID NO: 2909101 - RNA, 21 nt, Human
gcacaggugggcuucccagug

SEQ ID NO: 2909102 - RNA, 20 nt, Human
gcacaggugggcuucccagu

SEQ ID NO: 2909103 - RNA, 15 nt, Human
gcacaggucccaccu

SEQ ID NO: 2909104 - RNA, 17 nt, Human
gcacaggucccaccucc

SEQ ID NO: 2909105 - RNA, 19 nt, Human
gcacaggucccaccuccag

SEQ ID NO: 2909106 - RNA, 21 nt, Human
gcacaggucccaccuccagcc

SEQ ID NO: 2909107 - RNA, 22 nt, Human
gcacaggucccaccuccagccc

SEQ ID NO: 2909108 - RNA, 23 nt, Human
gcacaggucccaccuccagcccg

SEQ ID NO: 2909109 - RNA, 19 nt, Human
gcacaggucgggcgcagga

SEQ ID NO: 2909110 - RNA, 20 nt, Human
gcacaggucgggcgcaggau

SEQ ID NO: 2909111 - RNA, 23 nt, Human
gcacauuuaagagacagucaccc

SEQ ID NO: 2909112 - RNA, 17 nt, Human
gcacauuuaagagacag

SEQ ID NO: 2909113 - RNA, 21 nt, Human
gcacauuuaagagacagucac

SEQ ID NO: 2909114 - RNA, 14 nt, Human
gcacacuuccagac

SEQ ID NO: 2909115 - RNA, 14 nt, Human
gcaccagucccugu

SEQ ID NO: 2909116 - RNA, 18 nt, Human
gcacauugagcugugcaa

SEQ ID NO: 2909117 - RNA, 17 nt, Human
gcacauuggaaagcaca

SEQ ID NO: 2909118 - RNA, 18 nt, Human
gcacauuguuguuuuuuu

SEQ ID NO: 2909119 - RNA, 14 nt, Human
gcacauugagcugu

SEQ ID NO: 2909120 - RNA, 15 nt, Human
gcacagugcaucuca

SEQ ID NO: 2909121 - RNA, 18 nt, Human
gcacagugcaucucagcc

SEQ ID NO: 2909122 - RNA, 13 nt, Human
gcacagugcaucu

SEQ ID NO: 2909123 - RNA, 14 nt, Human
gcacacuuggccca

SEQ ID NO: 2909124 - RNA, 20 nt, Human
gcacacuuggcccaaguggc

SEQ ID NO: 2909125 - RNA, 20 nt, Human
gcacaccgggcacucagaag

SEQ ID NO: 2909126 - RNA, 14 nt, Human
gcacacgccuccca

SEQ ID NO: 2909127 - RNA, 17 nt, Human
gcacacgccucccacug

SEQ ID NO: 2909128 - RNA, 19 nt, Human
gcacacgccucccacuggg

SEQ ID NO: 2909129 - RNA, 16 nt, Human
gcacacgcguuauagu

SEQ ID NO: 2909130 - RNA, 20 nt, Human
gcacacgcguuauaguaacu

SEQ ID NO: 2909131 - RNA, 20 nt, Human
gcacacucauccccucacuu

SEQ ID NO: 2909132 - RNA, 13 nt, Human
gcacacucugcca

SEQ ID NO: 2909133 - RNA, 19 nt, Human
gcacacucugccagcaaag

SEQ ID NO: 2909134 - RNA, 20 nt, Human
gcacacucugccagcaaaga

SEQ ID NO: 2909135 - RNA, 16 nt, Human
gcacacucuggucuug

SEQ ID NO: 2909136 - RNA, 16 nt, Human
gcacaaauauuuauuu

SEQ ID NO: 2909137 - RNA, 15 nt, Human
gcacaaauauuuauu

SEQ ID NO: 2909138 - RNA, 14 nt, Human
gcacaaauauuuau

SEQ ID NO: 2909139 - RNA, 17 nt, Human
gcacaagaaucacuuga

SEQ ID NO: 2909140 - RNA, 18 nt, Human
gcacaagaaucacuugaa

SEQ ID NO: 2909141 - RNA, 19 nt, Human
gcacaagaaucacuugaac

SEQ ID NO: 2909142 - RNA, 17 nt, Human
gcacaaccugcaucuuu

SEQ ID NO: 2909143 - RNA, 22 nt, Human
gcacaacugcaauaacuucuga

SEQ ID NO: 2909144 - RNA, 14 nt, Human
gcacaagcagagug

SEQ ID NO: 2909145 - RNA, 21 nt, Human
gcacaagcagagugcacagcu

SEQ ID NO: 2909146 - RNA, 22 nt, Human
gcacaagcagagugcacagcug

SEQ ID NO: 2909147 - RNA, 23 nt, Human
gcacaagcagagugcacagcugu

SEQ ID NO: 2909148 - RNA, 22 nt, Human
gcacaagccacaagucuuccag

SEQ ID NO: 2909149 - RNA, 12 nt, Human
gcacagagaagc

SEQ ID NO: 2909150 - RNA, 14 nt, Human
gcacagagaagcug

SEQ ID NO: 2909151 - RNA, 11 nt, Human
gcacagacagg

SEQ ID NO: 2909152 - RNA, 22 nt, Human
gcacagacagguuuucacauaa

SEQ ID NO: 2909153 - RNA, 17 nt, Human
gcacagaagcacaugca

SEQ ID NO: 2909154 - RNA, 13 nt, Human
gcacagaaguccu

SEQ ID NO: 2909155 - RNA, 15 nt, Human
gcacagaaguccugu

SEQ ID NO: 2909156 - RNA, 16 nt, Human
gcacagaaguccugua

SEQ ID NO: 2909157 - RNA, 17 nt, Human
gcacagaaguccuguau

SEQ ID NO: 2909158 - RNA, 18 nt, Human
gcacagaaguccuguaug

SEQ ID NO: 2909159 - RNA, 19 nt, Human
gcacagaaguccuguaugu

SEQ ID NO: 2909160 - RNA, 12 nt, Human
gcacagaauaug

SEQ ID NO: 2909161 - RNA, 23 nt, Human
gcaauuuuuccaugaaguuugaa

SEQ ID NO: 2909162 - RNA, 18 nt, Human
gcaauuuugcauuugaau

SEQ ID NO: 2909163 - RNA, 14 nt, Human
gcaauuuuguaacg

SEQ ID NO: 2909164 - RNA, 22 nt, Human
gcaauuuucuaagcaauuucuu

SEQ ID NO: 2909165 - RNA, 13 nt, Human
gcacaaauauuua

SEQ ID NO: 2909166 - RNA, 16 nt, Human
gcacaaagggcccaga

SEQ ID NO: 2909167 - RNA, 20 nt, Human
gcacaaaaugauggcagugg

SEQ ID NO: 2909168 - RNA, 11 nt, Human
gcacaaaauga

SEQ ID NO: 2909169 - RNA, 23 nt, Human
gcacaaaaugaaugaggucuggg

SEQ ID NO: 2909170 - RNA, 14 nt, Human
gcacaaacacaagg

SEQ ID NO: 2909171 - RNA, 16 nt, Human
gcacaaacacaagguc

SEQ ID NO: 2909172 - RNA, 17 nt, Human
gcacaaacacaagguca

SEQ ID NO: 2909173 - RNA, 18 nt, Human
gcacaaacucaccaucug

SEQ ID NO: 2909174 - RNA, 22 nt, Human
gcacaaacuuuaggguaaaaau

SEQ ID NO: 2909175 - RNA, 13 nt, Human
gcacaaacauuuu

SEQ ID NO: 2909176 - RNA, 14 nt, Human
gcacaaacauuuuu

SEQ ID NO: 2909177 - RNA, 16 nt, Human
gcacaaacauuuuuca

SEQ ID NO: 2909178 - RNA, 17 nt, Human
gcacaaacauuuuucaa

SEQ ID NO: 2909179 - RNA, 18 nt, Human
gcacaaacauuuuucaac

SEQ ID NO: 2909180 - RNA, 14 nt, Human
gcaauuucauaugc

SEQ ID NO: 2909181 - RNA, 17 nt, Human
gcaauuuauuaaaauga

SEQ ID NO: 2909182 - RNA, 13 nt, Human
gcaauuucaaggu

SEQ ID NO: 2909183 - RNA, 18 nt, Human
gcaauuucaagguucuaa

SEQ ID NO: 2909184 - RNA, 18 nt, Human
gcaauuuccuuuuuuguu

SEQ ID NO: 2909185 - RNA, 18 nt, Human
gcaauuggaacaaaguga

SEQ ID NO: 2909186 - RNA, 13 nt, Human
gcaauugucuauu

SEQ ID NO: 2909187 - RNA, 22 nt, Human
gcaauugucuauuuaucuuuua

SEQ ID NO: 2909188 - RNA, 13 nt, Human
gcaauuuaaaugu

SEQ ID NO: 2909189 - RNA, 16 nt, Human
gcaauuuauacaauau

SEQ ID NO: 2909190 - RNA, 19 nt, Human
gcaauuuauacaauaucau

SEQ ID NO: 2909191 - RNA, 23 nt, Human
gcaauuuaauauuuugcacaguu

SEQ ID NO: 2909192 - RNA, 18 nt, Human
gcaauuuaaauguuauga

SEQ ID NO: 2909193 - RNA, 19 nt, Human
gcaauuuaacuagacacag

SEQ ID NO: 2909194 - RNA, 15 nt, Human
gcaauugauuucuuu

SEQ ID NO: 2909195 - RNA, 17 nt, Human
gcaauuccgcauuuaau

SEQ ID NO: 2909196 - RNA, 20 nt, Human
gcaauucuccugccucagcc

SEQ ID NO: 2909197 - RNA, 19 nt, Human
gcaauucuccugccucagc

SEQ ID NO: 2909198 - RNA, 18 nt, Human
gcaauucuccugccucag

SEQ ID NO: 2909199 - RNA, 17 nt, Human
gcaauucuccugccuca

SEQ ID NO: 2909200 - RNA, 16 nt, Human
gcaauucuccugccuc

SEQ ID NO: 2909201 - RNA, 15 nt, Human
gcaauucuccugccu

SEQ ID NO: 2909202 - RNA, 14 nt, Human
gcaauucuccugcc

SEQ ID NO: 2909203 - RNA, 20 nt, Human
gcaaugucaggaacagaagg

SEQ ID NO: 2909204 - RNA, 22 nt, Human
gcaaugucaggaacagaaggau

SEQ ID NO: 2909205 - RNA, 15 nt, Human
gcaauguaucccuuc

SEQ ID NO: 2909206 - RNA, 22 nt, Human
gcaauguaucccuucucacagc

SEQ ID NO: 2909207 - RNA, 15 nt, Human
gcaaugugggcagag

SEQ ID NO: 2909208 - RNA, 16 nt, Human
gcaauuaggauuuuga

SEQ ID NO: 2909209 - RNA, 19 nt, Human
gcaauuaggauuuugaugu

SEQ ID NO: 2909210 - RNA, 19 nt, Human
gcaauuagguuuuuccuua

SEQ ID NO: 2909211 - RNA, 15 nt, Human
gcaauuccgcauuua

SEQ ID NO: 2909212 - RNA, 21 nt, Human
gcaauuccccucugcugcugu

SEQ ID NO: 2909213 - RNA, 14 nt, Human
gcaauuccccucug

SEQ ID NO: 2909214 - RNA, 18 nt, Human
gcaauuccccucugcugc

SEQ ID NO: 2909215 - RNA, 16 nt, Human
gcaauucaaaaguucc

SEQ ID NO: 2909216 - RNA, 22 nt, Human
gcaauucaaaaguuccaagagu

SEQ ID NO: 2909217 - RNA, 14 nt, Human
gcaauucauaaaaa

SEQ ID NO: 2909218 - RNA, 14 nt, Human
gcaauucaucccag

SEQ ID NO: 2909219 - RNA, 11 nt, Human
gcaauuccaau

SEQ ID NO: 2909220 - RNA, 22 nt, Human
gcaacgccgugggcugcguccu

SEQ ID NO: 2909221 - RNA, 15 nt, Human
gcaacacagccuggg

SEQ ID NO: 2909222 - RNA, 22 nt, Human
gcaaccuuucaccuuuguguau

SEQ ID NO: 2909223 - RNA, 23 nt, Human
gcaaccuuucaccuuuguguauu

SEQ ID NO: 2909224 - RNA, 20 nt, Human
gcaacgaccagggccgagga

SEQ ID NO: 2909225 - RNA, 22 nt, Human
gcaacgaccagggccgaggagg

SEQ ID NO: 2909226 - RNA, 14 nt, Human
gcaacacagccugg

SEQ ID NO: 2909227 - RNA, 15 nt, Human
gcaacacagaggaau

SEQ ID NO: 2909228 - RNA, 16 nt, Human
gcaacacagaggaauu

SEQ ID NO: 2909229 - RNA, 22 nt, Human
gcaacguuuacaccgacuagcc

SEQ ID NO: 2909230 - RNA, 22 nt, Human
gcaacuacccaaaacaagccug

SEQ ID NO: 2909231 - RNA, 15 nt, Human
gcaauggcagccuug

SEQ ID NO: 2909232 - RNA, 14 nt, Human
gcaaugggcacugg

SEQ ID NO: 2909233 - RNA, 16 nt, Human
gcaaugggcacuggga

SEQ ID NO: 2909234 - RNA, 23 nt, Human
gcaauggugucaguauccaggcu

SEQ ID NO: 2909235 - RNA, 22 nt, Human
gcaauggugucaguauccaggc

SEQ ID NO: 2909236 - RNA, 16 nt, Human
gaugccccagagcugu

SEQ ID NO: 2909237 - RNA, 12 nt, Human
gaugccccagag

SEQ ID NO: 2909238 - RNA, 16 nt, Human
gaugccccgucccccu

SEQ ID NO: 2909239 - RNA, 17 nt, Human
gaugcugacuguacucc

SEQ ID NO: 2909240 - RNA, 20 nt, Human
gaugcugacuguacuccucc

SEQ ID NO: 2909241 - RNA, 15 nt, Human
gaugcucuucugugg

SEQ ID NO: 2909242 - RNA, 23 nt, Human
gaugcucccuccccugcccuggu

SEQ ID NO: 2909243 - RNA, 21 nt, Human
gaugccaucuguguccugguu

SEQ ID NO: 2909244 - RNA, 20 nt, Human
gaugccaucuguguccuggu

SEQ ID NO: 2909245 - RNA, 18 nt, Human
gaugccaucuguguccug

SEQ ID NO: 2909246 - RNA, 17 nt, Human
gaugccaucuguguccu

SEQ ID NO: 2909247 - RNA, 16 nt, Human
gaugccaucugugucc

SEQ ID NO: 2909248 - RNA, 23 nt, Human
gaugcccagagggcccaggcagg

SEQ ID NO: 2909249 - RNA, 22 nt, Human
gaugcccagagggcccaggcag

SEQ ID NO: 2909250 - RNA, 20 nt, Human
gaugccauucuuccuugcaa

SEQ ID NO: 2909251 - RNA, 18 nt, Human
gaugcccagagggcccag

SEQ ID NO: 2909252 - RNA, 20 nt, Human
gaugcccagagggcccaggc

SEQ ID NO: 2909253 - RNA, 19 nt, Human
gaugcccagagggcccagg

SEQ ID NO: 2909254 - RNA, 17 nt, Human
gaugccagggccgacca

SEQ ID NO: 2909255 - RNA, 11 nt, Human
gaugccaggac

SEQ ID NO: 2909256 - RNA, 15 nt, Human
gaugccauccucuuu

SEQ ID NO: 2909257 - RNA, 22 nt, Human
gaucagaccuuggaucagauga

SEQ ID NO: 2909258 - RNA, 15 nt, Human
gaucagagcaggacc

SEQ ID NO: 2909259 - RNA, 16 nt, Human
gaucagagcaggaccu

SEQ ID NO: 2909260 - RNA, 17 nt, Human
gaucagagcaggaccuc

SEQ ID NO: 2909261 - RNA, 23 nt, Human
gaucagagcaggaccucccuucc

SEQ ID NO: 2909262 - RNA, 22 nt, Human
gaugggugggugggguauuuuu

SEQ ID NO: 2909263 - RNA, 21 nt, Human
gaugggcaacccccagccugc

SEQ ID NO: 2909264 - RNA, 20 nt, Human
gaugggcaacccccagccug

SEQ ID NO: 2909265 - RNA, 23 nt, Human
gaugggagcuccucuccuggagg

SEQ ID NO: 2909266 - RNA, 20 nt, Human
gaugggaggaaagagagcag

SEQ ID NO: 2909267 - RNA, 20 nt, Human
gauggcccggaugcugcuuc

SEQ ID NO: 2909268 - RNA, 22 nt, Human
gauggcccuuccuccuccacca

SEQ ID NO: 2909269 - RNA, 23 nt, Human
gauggcccuuccuccuccaccac

SEQ ID NO: 2909270 - RNA, 21 nt, Human
gauggccgcagggcugugcac

SEQ ID NO: 2909271 - RNA, 13 nt, Human
gauggccaggcug

SEQ ID NO: 2909272 - RNA, 21 nt, Human
gauggcaggauggccuggcca

SEQ ID NO: 2909273 - RNA, 22 nt, Human
gauggcaggauggccuggccag

SEQ ID NO: 2909274 - RNA, 12 nt, Human
gauguucuaagg

SEQ ID NO: 2909275 - RNA, 18 nt, Human
gauguugaagaauacagu

SEQ ID NO: 2909276 - RNA, 20 nt, Human
gauguugaagaauacaguua

SEQ ID NO: 2909277 - RNA, 14 nt, Human
gauguucauuuaga

SEQ ID NO: 2909278 - RNA, 15 nt, Human
gauguugccaugugu

SEQ ID NO: 2909279 - RNA, 13 nt, Human
gauguugccaugu

SEQ ID NO: 2909280 - RNA, 17 nt, Human
gauguugccauguguuu

SEQ ID NO: 2909281 - RNA, 14 nt, Human
gauguuggcuggga

SEQ ID NO: 2909282 - RNA, 15 nt, Human
gauguuggcugggaa

SEQ ID NO: 2909283 - RNA, 19 nt, Human
gauguugccauguguuuua

SEQ ID NO: 2909284 - RNA, 16 nt, Human
gauguugagaaaccug

SEQ ID NO: 2909285 - RNA, 23 nt, Human
gauguuuacagguggacacacaa

SEQ ID NO: 2909286 - RNA, 14 nt, Human
gauguuuauucuuc

SEQ ID NO: 2909287 - RNA, 18 nt, Human
gauguuuuuaaaaguuuc

SEQ ID NO: 2909288 - RNA, 23 nt, Human
gauuacaagcgugagccacugca

SEQ ID NO: 2909289 - RNA, 16 nt, Human
gauuaaauaagauucu

SEQ ID NO: 2909290 - RNA, 17 nt, Human
gauuaaauaagauucua

SEQ ID NO: 2909291 - RNA, 13 nt, Human
gauuacagaggaa

SEQ ID NO: 2909292 - RNA, 10 nt, Human
gauuacaggc

SEQ ID NO: 2909293 - RNA, 18 nt, Human
gauuacaggcaugugcca

SEQ ID NO: 2909294 - RNA, 18 nt, Human
gauuacaggcgugagcca

SEQ ID NO: 2909295 - RNA, 18 nt, Human
gauuaaauaagauucuaa

SEQ ID NO: 2909296 - RNA, 20 nt, Human
gauuacaggcaugagccacu

SEQ ID NO: 2909297 - RNA, 17 nt, Human
gauuacaggcuccugcc

SEQ ID NO: 2909298 - RNA, 20 nt, Human
gauuacaggcgugagccacc

SEQ ID NO: 2909299 - RNA, 22 nt, Human
gauguuuuuaaaaguuucaaug

SEQ ID NO: 2909300 - RNA, 20 nt, Human
gauguuuuuaaaaguuucaa

SEQ ID NO: 2909301 - RNA, 21 nt, Human
gauguuuuuaaaaguuucaau

SEQ ID NO: 2909302 - RNA, 22 nt, Human
gauuacaagcgugagccacugc

SEQ ID NO: 2909303 - RNA, 22 nt, Human
gauguuuugguagauuaaauau

SEQ ID NO: 2909304 - RNA, 12 nt, Human
gauuaaacuuau

SEQ ID NO: 2909305 - RNA, 14 nt, Human
gauuaaacuuauga

SEQ ID NO: 2909306 - RNA, 15 nt, Human
gauuaaacuuaugaa

SEQ ID NO: 2909307 - RNA, 17 nt, Human
gauuaaacuuaugaaug

SEQ ID NO: 2909308 - RNA, 18 nt, Human
gauuaaacuuaugaaugu

SEQ ID NO: 2909309 - RNA, 16 nt, Human
gaugguacgugacccu

SEQ ID NO: 2909310 - RNA, 19 nt, Human
gaugguacgugacccucug

SEQ ID NO: 2909311 - RNA, 20 nt, Human
gaugguacgugacccucugc

SEQ ID NO: 2909312 - RNA, 18 nt, Human
gauggguuuuaugagaug

SEQ ID NO: 2909313 - RNA, 15 nt, Human
gauggucacuuaaaa

SEQ ID NO: 2909314 - RNA, 24 nt, Human
gaugguccuggggcucugugcagg

SEQ ID NO: 2909315 - RNA, 13 nt, Human
gauggucuggucu

SEQ ID NO: 2909316 - RNA, 17 nt, Human
gauggucuggucuaugu

SEQ ID NO: 2909317 - RNA, 21 nt, Human
gaugguccuggggcucugugc

SEQ ID NO: 2909318 - RNA, 15 nt, Human
gaugguccuggggcu

SEQ ID NO: 2909319 - RNA, 13 nt, Human
gaugguccugggg

SEQ ID NO: 2909320 - RNA, 20 nt, Human
gaugguguuacugcaguuga

SEQ ID NO: 2909321 - RNA, 17 nt, Human
gaugguuauuuucuuuu

SEQ ID NO: 2909322 - RNA, 13 nt, Human
gaugguuccccug

SEQ ID NO: 2909323 - RNA, 18 nt, Human
gaugguuccccuguucac

SEQ ID NO: 2909324 - RNA, 21 nt, Human
gaugguuccccuguucacucu

SEQ ID NO: 2909325 - RNA, 23 nt, Human
gaugguuauuuucuuuucuuuca

SEQ ID NO: 2909326 - RNA, 11 nt, Human
gauguggagcc

SEQ ID NO: 2909327 - RNA, 12 nt, Human
gauguggagcca

SEQ ID NO: 2909328 - RNA, 13 nt, Human
gauguggagccag

SEQ ID NO: 2909329 - RNA, 14 nt, Human
gauguggagccagg

SEQ ID NO: 2909330 - RNA, 15 nt, Human
gauguggagccaggc

SEQ ID NO: 2909331 - RNA, 16 nt, Human
gauguggagccaggcg

SEQ ID NO: 2909332 - RNA, 18 nt, Human
gauguggagccaggcgug

SEQ ID NO: 2909333 - RNA, 14 nt, Human
gauguuaguguuuu

SEQ ID NO: 2909334 - RNA, 18 nt, Human
gauguuaguguuuuaaga

SEQ ID NO: 2909335 - RNA, 16 nt, Human
gaugugguuuucuuaa

SEQ ID NO: 2909336 - RNA, 20 nt, Human
gaugugggggaagaccuggc

SEQ ID NO: 2909337 - RNA, 22 nt, Human
gaugugggagggagcagacagg

SEQ ID NO: 2909338 - RNA, 16 nt, Human
gaugugggggaagacc

SEQ ID NO: 2909339 - RNA, 23 nt, Human
gaugugggagggagcagacagga

SEQ ID NO: 2909340 - RNA, 12 nt, Human
gcaaauguguac

SEQ ID NO: 2909341 - RNA, 16 nt, Human
gcaaauguuuaaacau

SEQ ID NO: 2909342 - RNA, 17 nt, Human
gcaaauguuuaaacauu

SEQ ID NO: 2909343 - RNA, 12 nt, Human
gcaaauucuuuu

SEQ ID NO: 2909344 - RNA, 16 nt, Human
gcaaauucuuuugaau

SEQ ID NO: 2909345 - RNA, 17 nt, Human
gcaaauucuuuugaauu

SEQ ID NO: 2909346 - RNA, 20 nt, Human
gcaaauucuuuugaauuguu

SEQ ID NO: 2909347 - RNA, 15 nt, Human
gcaaauguggcuccu

SEQ ID NO: 2909348 - RNA, 20 nt, Human
gcaaagggagcacuggguug

SEQ ID NO: 2909349 - RNA, 18 nt, Human
gcaaagggagcacugggu

SEQ ID NO: 2909350 - RNA, 22 nt, Human
gcaacaagaccaccacuucgaa

SEQ ID NO: 2909351 - RNA, 21 nt, Human
gcaaauuuuuauuuuuuagug

SEQ ID NO: 2909352 - RNA, 12 nt, Human
gcaaauuucaaa

SEQ ID NO: 2909353 - RNA, 16 nt, Human
gcaaauuucaaaagac

SEQ ID NO: 2909354 - RNA, 20 nt, Human
gcaaauuucaaaagacaugu

SEQ ID NO: 2909355 - RNA, 22 nt, Human
gcaaauuucaaaagacauguug

SEQ ID NO: 2909356 - RNA, 23 nt, Human
gcaaauuucaaaagacauguugu

SEQ ID NO: 2909357 - RNA, 22 nt, Human
gcaaaccacacuggacuccggc

SEQ ID NO: 2909358 - RNA, 12 nt, Human
gcaaagaucaaa

SEQ ID NO: 2909359 - RNA, 14 nt, Human
gcaaagaucaaaau

SEQ ID NO: 2909360 - RNA, 15 nt, Human
gcaaagaucaaaaua

SEQ ID NO: 2909361 - RNA, 16 nt, Human
gcaaagaucaaaauaa

SEQ ID NO: 2909362 - RNA, 18 nt, Human
gcaaagaucaaaauaaaa

SEQ ID NO: 2909363 - RNA, 21 nt, Human
gcaaagcugaugacaacuucc

SEQ ID NO: 2909364 - RNA, 16 nt, Human
gcaaagcucuguggcc

SEQ ID NO: 2909365 - RNA, 19 nt, Human
gcaaagcucuguggccaca

SEQ ID NO: 2909366 - RNA, 13 nt, Human
gcaaaggcuggga

SEQ ID NO: 2909367 - RNA, 15 nt, Human
gcaaaccacacugga

SEQ ID NO: 2909368 - RNA, 17 nt, Human
gcaaaccacacuggacu

SEQ ID NO: 2909369 - RNA, 18 nt, Human
gcaaaccacacuggacuc

SEQ ID NO: 2909370 - RNA, 20 nt, Human
gcaaaccacacuggacuccg

SEQ ID NO: 2909371 - RNA, 14 nt, Human
gauuuuuaauuaaa

SEQ ID NO: 2909372 - RNA, 20 nt, Human
gauuuuuaauuaaaaacuag

SEQ ID NO: 2909373 - RNA, 22 nt, Human
gauuuuuaauuaaaaacuagua

SEQ ID NO: 2909374 - RNA, 16 nt, Human
gcaaaccaagagauug

SEQ ID NO: 2909375 - RNA, 18 nt, Human
gcaaaccaagagauugcu

SEQ ID NO: 2909376 - RNA, 20 nt, Human
gcaaaccaagagauugcuaa

SEQ ID NO: 2909377 - RNA, 21 nt, Human
gcaaaccaagagauugcuaau

SEQ ID NO: 2909378 - RNA, 22 nt, Human
gcaaaccaagagauugcuaauu

SEQ ID NO: 2909379 - RNA, 12 nt, Human
gauuuugauaac

SEQ ID NO: 2909380 - RNA, 13 nt, Human
gauuuugauaacu

SEQ ID NO: 2909381 - RNA, 17 nt, Human
gauuuugagguaaagau

SEQ ID NO: 2909382 - RNA, 13 nt, Human
gauuuugccugug

SEQ ID NO: 2909383 - RNA, 17 nt, Human
gauuuuguaagaaguuu

SEQ ID NO: 2909384 - RNA, 21 nt, Human
gauuuugggguuguguuguca

SEQ ID NO: 2909385 - RNA, 21 nt, Human
gauuuugguauuacacuguau

SEQ ID NO: 2909386 - RNA, 19 nt, Human
gauuuugauccaagcuggu

SEQ ID NO: 2909387 - RNA, 19 nt, Human
gauuuuaugaucaguguug

SEQ ID NO: 2909388 - RNA, 21 nt, Human
gauuuuaggagcuaaggcucu

SEQ ID NO: 2909389 - RNA, 20 nt, Human
gauuuuagcuaggauuugaa

SEQ ID NO: 2909390 - RNA, 24 nt, Human
gauuuuagcuaggauuugaacacu

SEQ ID NO: 2909391 - RNA, 19 nt, Human
gauuuuaggagcuaaggcu

SEQ ID NO: 2909392 - RNA, 11 nt, Human
gauuugcaaua

SEQ ID NO: 2909393 - RNA, 19 nt, Human
gauuugcauauucauucau

SEQ ID NO: 2909394 - RNA, 15 nt, Human
gauuugcauugaaca

SEQ ID NO: 2909395 - RNA, 20 nt, Human
gauuuuaauggauuguuaau

SEQ ID NO: 2909396 - RNA, 23 nt, Human
gauuuuaauggauuguuaauuuc

SEQ ID NO: 2909397 - RNA, 14 nt, Human
gauuuuaauuguca

SEQ ID NO: 2909398 - RNA, 15 nt, Human
gauuuuaauugucau

SEQ ID NO: 2909399 - RNA, 16 nt, Human
gauuuuaauugucaug

SEQ ID NO: 2909400 - RNA, 11 nt, Human
gauuuccugug

SEQ ID NO: 2909401 - RNA, 13 nt, Human
gauuuccuguguc

SEQ ID NO: 2909402 - RNA, 13 nt, Human
gauuuccuugaau

SEQ ID NO: 2909403 - RNA, 22 nt, Human
gauuuccuugaauguggcuuga

SEQ ID NO: 2909404 - RNA, 15 nt, Human
gauuuccuugugcaa

SEQ ID NO: 2909405 - RNA, 17 nt, Human
gauuuccuugaaugugg

SEQ ID NO: 2909406 - RNA, 16 nt, Human
gauuugagcucagccc

SEQ ID NO: 2909407 - RNA, 18 nt, Human
gauuugaugcuguuugac

SEQ ID NO: 2909408 - RNA, 18 nt, Human
gauuugaagaacauguga

SEQ ID NO: 2909409 - RNA, 14 nt, Human
gauuucuaaucaaa

SEQ ID NO: 2909410 - RNA, 16 nt, Human
gauuucuaaucaaaag

SEQ ID NO: 2909411 - RNA, 13 nt, Human
gauuugacauugc

SEQ ID NO: 2909412 - RNA, 12 nt, Human
gauuugaccucc

SEQ ID NO: 2909413 - RNA, 13 nt, Human
gauuugaccuccu

SEQ ID NO: 2909414 - RNA, 17 nt, Human
gauuugaccuccucccu

SEQ ID NO: 2909415 - RNA, 20 nt, Human
gauuugaccuccucccuguu

SEQ ID NO: 2909416 - RNA, 20 nt, Human
gauuugaagaacaugugaga

SEQ ID NO: 2909417 - RNA, 19 nt, Human
gauuugaagaacaugugag

SEQ ID NO: 2909418 - RNA, 15 nt, Human
gauuggggaauuaaa

SEQ ID NO: 2909419 - RNA, 19 nt, Human
gauugcgguuuacagcuau

SEQ ID NO: 2909420 - RNA, 13 nt, Human
gauuguaaaaaaa

SEQ ID NO: 2909421 - RNA, 23 nt, Human
gauugggggggccaaaaggaaaa

SEQ ID NO: 2909422 - RNA, 23 nt, Human
gauuguaaaauagcuuguauagu

SEQ ID NO: 2909423 - RNA, 22 nt, Human
gauuguaaaccgcuuuggccug

SEQ ID NO: 2909424 - RNA, 23 nt, Human
gauuguaaaccgcuuuggccuga

SEQ ID NO: 2909425 - RNA, 13 nt, Human
gauuguaaacuuc

SEQ ID NO: 2909426 - RNA, 18 nt, Human
gauuguaaaaaaaaaugc

SEQ ID NO: 2909427 - RNA, 22 nt, Human
gauuguaaaaaaaaaugccuuu

SEQ ID NO: 2909428 - RNA, 12 nt, Human
gauuguaaaaua

SEQ ID NO: 2909429 - RNA, 20 nt, Human
gauuguaaaauagcuuguau

SEQ ID NO: 2909430 - RNA, 18 nt, Human
gauuacagggaugagcca

SEQ ID NO: 2909431 - RNA, 20 nt, Human
gauuacagggaugagccacc

SEQ ID NO: 2909432 - RNA, 21 nt, Human
gauuacaggcuccugccacca

SEQ ID NO: 2909433 - RNA, 18 nt, Human
gauuacaggcuccugcca

SEQ ID NO: 2909434 - RNA, 18 nt, Human
gauucacaaugaaaugcu

SEQ ID NO: 2909435 - RNA, 22 nt, Human
gauucacaaugaaaugcucucc

SEQ ID NO: 2909436 - RNA, 21 nt, Human
gauucuauuuauauguacaug

SEQ ID NO: 2909437 - RNA, 20 nt, Human
gauucuauuuauauguacau

SEQ ID NO: 2909438 - RNA, 15 nt, Human
gauucuauuuauaug

SEQ ID NO: 2909439 - RNA, 12 nt, Human
gauucucagggu

SEQ ID NO: 2909440 - RNA, 17 nt, Human
gauucucagggucucug

SEQ ID NO: 2909441 - RNA, 19 nt, Human
gauucucagggucucugcu

SEQ ID NO: 2909442 - RNA, 23 nt, Human
gauucucagggucucugcugccg

SEQ ID NO: 2909443 - RNA, 21 nt, Human
gauucucagggucucugcugc

SEQ ID NO: 2909444 - RNA, 22 nt, Human
gauucucagggucucugcugcc

SEQ ID NO: 2909445 - RNA, 14 nt, Human
gauucuccugccuc

SEQ ID NO: 2909446 - RNA, 16 nt, Human
gauucucaugccucag

SEQ ID NO: 2909447 - RNA, 13 nt, Human
gauugagaaggag

SEQ ID NO: 2909448 - RNA, 16 nt, Human
gauugagaaggagaga

SEQ ID NO: 2909449 - RNA, 17 nt, Human
gauugagaaggagagaa

SEQ ID NO: 2909450 - RNA, 18 nt, Human
gauugagaaggagagaaa

SEQ ID NO: 2909451 - RNA, 15 nt, Human
gauugauaauugcau

SEQ ID NO: 2909452 - RNA, 17 nt, Human
gauugauuugaagaaca

SEQ ID NO: 2909453 - RNA, 15 nt, Human
gauugauuugaagaa

SEQ ID NO: 2909454 - RNA, 19 nt, Human
gauugagaaggagagaaag

SEQ ID NO: 2909455 - RNA, 14 nt, Human
gauugagaaguuca

SEQ ID NO: 2909456 - RNA, 19 nt, Human
gauugcagguggaacucag

SEQ ID NO: 2909457 - RNA, 17 nt, Human
ggcaacccccagccugc

SEQ ID NO: 2909458 - RNA, 16 nt, Human
ggcaacccccagccug

SEQ ID NO: 2909459 - RNA, 18 nt, Human
ggauuggauuauuuaaua

SEQ ID NO: 2909460 - RNA, 15 nt, Human
ggauugcugccacuu

SEQ ID NO: 2909461 - RNA, 16 nt, Human
ggauuggauuauuuaa

SEQ ID NO: 2909462 - RNA, 22 nt, Human
ggauuggauuauuuaauaacau

SEQ ID NO: 2909463 - RNA, 15 nt, Human
ggauuggcacuguuu

SEQ ID NO: 2909464 - RNA, 17 nt, Human
ggauugcuacuguccua

SEQ ID NO: 2909465 - RNA, 17 nt, Human
ggauugcuugagcccag

SEQ ID NO: 2909466 - RNA, 14 nt, Human
ggauugcugccacu

SEQ ID NO: 2909467 - RNA, 16 nt, Human
ggauugcuaugaauga

SEQ ID NO: 2909468 - RNA, 19 nt, Human
ggauugcaauaucugaagc

SEQ ID NO: 2909469 - RNA, 23 nt, Human
ggauuacaagcgugagccacugc

SEQ ID NO: 2909470 - RNA, 19 nt, Human
ggauuacaggcuccugcca

SEQ ID NO: 2909471 - RNA, 21 nt, Human
ggauggagcccaggcgggagc

SEQ ID NO: 2909472 - RNA, 19 nt, Human
ggauuacaggcaugugcca

SEQ ID NO: 2909473 - RNA, 19 nt, Human
ggauuacaggcgugagcca

SEQ ID NO: 2909474 - RNA, 22 nt, Human
ggcacccggccccugcugguuc

SEQ ID NO: 2909475 - RNA, 18 nt, Human
ggcaccggggccucggac

SEQ ID NO: 2909476 - RNA, 12 nt, Human
ggcacccucugg

SEQ ID NO: 2909477 - RNA, 15 nt, Human
ggcacccucuggccg

SEQ ID NO: 2909478 - RNA, 20 nt, Human
ggcacccucuggccgccuag

SEQ ID NO: 2909479 - RNA, 19 nt, Human
ggcacccuguggcccuggc

SEQ ID NO: 2909480 - RNA, 23 nt, Human
ggcacccaccaucaugucuggcu

SEQ ID NO: 2909481 - RNA, 13 nt, Human
ggcacccacccug

SEQ ID NO: 2909482 - RNA, 14 nt, Human
ggcacccacccugg

SEQ ID NO: 2909483 - RNA, 18 nt, Human
ggcaaugucaggaacaga

SEQ ID NO: 2909484 - RNA, 18 nt, Human
ggcaacccccagccugcu

SEQ ID NO: 2909485 - RNA, 22 nt, Human
ggauuguaaaaaaaaaugccuu

SEQ ID NO: 2909486 - RNA, 23 nt, Human
ggauuguaaaaaaaaaugccuuu

SEQ ID NO: 2909487 - RNA, 21 nt, Human
ggcaauauagcaagaucccau

SEQ ID NO: 2909488 - RNA, 23 nt, Human
ggcaaugcuggcuguuggcuggg

SEQ ID NO: 2909489 - RNA, 15 nt, Human
ggcaaugcuggcugu

SEQ ID NO: 2909490 - RNA, 14 nt, Human
ggcaaugcuggcug

SEQ ID NO: 2909491 - RNA, 15 nt, Human
ggcaaucaauguuca

SEQ ID NO: 2909492 - RNA, 15 nt, Human
ggcaaugauggcaau

SEQ ID NO: 2909493 - RNA, 19 nt, Human
ggauuacaagcgugagcca

SEQ ID NO: 2909494 - RNA, 14 nt, Human
ggaugcugccugag

SEQ ID NO: 2909495 - RNA, 21 nt, Human
ggaugcaacacgcauggucaa

SEQ ID NO: 2909496 - RNA, 21 nt, Human
ggaugcauguuuuccagcucc

SEQ ID NO: 2909497 - RNA, 15 nt, Human
ggauacugcagggcc

SEQ ID NO: 2909498 - RNA, 16 nt, Human
ggauacugcagggcca

SEQ ID NO: 2909499 - RNA, 21 nt, Human
ggauacugcagggccaggacu

SEQ ID NO: 2909500 - RNA, 18 nt, Human
ggauacaaccucccucuu

SEQ ID NO: 2909501 - RNA, 22 nt, Human
ggauacaaccucccucuuguuu

SEQ ID NO: 2909502 - RNA, 20 nt, Human
ggauacagcaguagacauuu

SEQ ID NO: 2909503 - RNA, 17 nt, Human
ggagaugccauccucuu

SEQ ID NO: 2909504 - RNA, 12 nt, Human
ggagugcaguga

SEQ ID NO: 2909505 - RNA, 14 nt, Human
ggagugcagugagc

SEQ ID NO: 2909506 - RNA, 20 nt, Human
ggagugcaaugacacagucu

SEQ ID NO: 2909507 - RNA, 20 nt, Human
ggauauccuuaucagagcua

SEQ ID NO: 2909508 - RNA, 22 nt, Human
ggauauccuuaucagagcuaag

SEQ ID NO: 2909509 - RNA, 16 nt, Human
ggauaguaugagcccu

SEQ ID NO: 2909510 - RNA, 18 nt, Human
ggauaguauuuuuaucca

SEQ ID NO: 2909511 - RNA, 11 nt, Human
ggauauuuaag

SEQ ID NO: 2909512 - RNA, 12 nt, Human
ggauauuuaagg

SEQ ID NO: 2909513 - RNA, 19 nt, Human
ggauauuuguacuguuuaa

SEQ ID NO: 2909514 - RNA, 22 nt, Human
ggaucaaaccccgaccaccugc

SEQ ID NO: 2909515 - RNA, 16 nt, Human
ggaucaaaguucugcu

SEQ ID NO: 2909516 - RNA, 23 nt, Human
ggaucaaaguucugcuuucuccc

SEQ ID NO: 2909517 - RNA, 21 nt, Human
ggcauggcuuuauuuguuuuu

SEQ ID NO: 2909518 - RNA, 23 nt, Human
ggcauggcuuuauuuguuuuuuu

SEQ ID NO: 2909519 - RNA, 20 nt, Human
ggccacaugggagcagucca

SEQ ID NO: 2909520 - RNA, 18 nt, Human
ggccaccaaagcugccca

SEQ ID NO: 2909521 - RNA, 17 nt, Human
ggccaccaaagcugccc

SEQ ID NO: 2909522 - RNA, 16 nt, Human
ggccaccaaagcugcc

SEQ ID NO: 2909523 - RNA, 15 nt, Human
ggccaccaaagcugc

SEQ ID NO: 2909524 - RNA, 13 nt, Human
ggccaccaaagcu

SEQ ID NO: 2909525 - RNA, 14 nt, Human
ggccacauuuaaua

SEQ ID NO: 2909526 - RNA, 20 nt, Human
ggccacauuuucagccaaag

SEQ ID NO: 2909527 - RNA, 18 nt, Human
ggccacgugauguggagg

SEQ ID NO: 2909528 - RNA, 18 nt, Human
ggccaccaggugccuuuc

SEQ ID NO: 2909529 - RNA, 17 nt, Human
ggccacuccagaccccu

SEQ ID NO: 2909530 - RNA, 16 nt, Human
ggccaugggccuccug

SEQ ID NO: 2909531 - RNA, 19 nt, Human
ggccaggccgggccuguac

SEQ ID NO: 2909532 - RNA, 11 nt, Human
ggccaggcugc

SEQ ID NO: 2909533 - RNA, 15 nt, Human
ggccaggcugcucuu

SEQ ID NO: 2909534 - RNA, 14 nt, Human
ggccaggcugcucu

SEQ ID NO: 2909535 - RNA, 23 nt, Human
ggccauguccaaagaggcugccc

SEQ ID NO: 2909536 - RNA, 22 nt, Human
ggccauguccaaagaggcugcc

SEQ ID NO: 2909537 - RNA, 16 nt, Human
ggccauguccaaagag

SEQ ID NO: 2909538 - RNA, 15 nt, Human
ggccauguccaaaga

SEQ ID NO: 2909539 - RNA, 13 nt, Human
ggccauguccaaa

SEQ ID NO: 2909540 - RNA, 20 nt, Human
ggccauucugccgcccccuc

SEQ ID NO: 2909541 - RNA, 14 nt, Human
ggccauucugccgc

SEQ ID NO: 2909542 - RNA, 14 nt, Human
ggccauuaggaaac

SEQ ID NO: 2909543 - RNA, 17 nt, Human
ggccauuaggaaacugu

SEQ ID NO: 2909544 - RNA, 15 nt, Human
ggccagccuggggcc

SEQ ID NO: 2909545 - RNA, 18 nt, Human
ggccagccuggggccugg

SEQ ID NO: 2909546 - RNA, 19 nt, Human
ggccagccuggggccuggc

SEQ ID NO: 2909547 - RNA, 20 nt, Human
ggccagccuggggccuggca

SEQ ID NO: 2909548 - RNA, 21 nt, Human
ggccagccuggggccuggcag

SEQ ID NO: 2909549 - RNA, 22 nt, Human
ggccagccuggggccuggcagg

SEQ ID NO: 2909550 - RNA, 15 nt, Human
ggcacuagccuuugg

SEQ ID NO: 2909551 - RNA, 20 nt, Human
ggcacuagccuuuggcucug

SEQ ID NO: 2909552 - RNA, 21 nt, Human
ggcacuagccuuuggcucugg

SEQ ID NO: 2909553 - RNA, 20 nt, Human
ggcacggucuucccucuucc

SEQ ID NO: 2909554 - RNA, 14 nt, Human
ggcacuagccuuug

SEQ ID NO: 2909555 - RNA, 23 nt, Human
ggcacuaacguugagccccugga

SEQ ID NO: 2909556 - RNA, 17 nt, Human
ggcagcuugaggguugg

SEQ ID NO: 2909557 - RNA, 22 nt, Human
ggcagcugcuuuugucuauggg

SEQ ID NO: 2909558 - RNA, 23 nt, Human
ggcagcucauagaguccccccuc

SEQ ID NO: 2909559 - RNA, 15 nt, Human
ggcagcucaucucug

SEQ ID NO: 2909560 - RNA, 16 nt, Human
ggcagugggagcugcc

SEQ ID NO: 2909561 - RNA, 23 nt, Human
ggcaucuuugccuugggcugcuc

SEQ ID NO: 2909562 - RNA, 22 nt, Human
ggcaucuuugccuugggcugcu

SEQ ID NO: 2909563 - RNA, 21 nt, Human
ggcagugggacagggcauggc

SEQ ID NO: 2909564 - RNA, 14 nt, Human
ggcagugggagcug

SEQ ID NO: 2909565 - RNA, 13 nt, Human
ggcagugggagcu

SEQ ID NO: 2909566 - RNA, 20 nt, Human
ggcagggucucacucugucg

SEQ ID NO: 2909567 - RNA, 19 nt, Human
ggcagggucucacucuguc

SEQ ID NO: 2909568 - RNA, 14 nt, Human
ggcagggugacccu

SEQ ID NO: 2909569 - RNA, 14 nt, Human
ggcagguagccagg

SEQ ID NO: 2909570 - RNA, 15 nt, Human
ggcagguagccaggg

SEQ ID NO: 2909571 - RNA, 23 nt, Human
ggcaugaaguuuccuuggcuggu

SEQ ID NO: 2909572 - RNA, 22 nt, Human
ggcaugaaguuuccuuggcugg

SEQ ID NO: 2909573 - RNA, 21 nt, Human
ggcaucuuugccuugggcugc

SEQ ID NO: 2909574 - RNA, 20 nt, Human
ggcaugaagagcaaaaauau

SEQ ID NO: 2909575 - RNA, 13 nt, Human
ggcaucuuugggg

SEQ ID NO: 2909576 - RNA, 16 nt, Human
ggcaucuuuggggagg

SEQ ID NO: 2909577 - RNA, 16 nt, Human
ggcaugcggucgggca

SEQ ID NO: 2909578 - RNA, 13 nt, Human
ggcaugccuugug

SEQ ID NO: 2909579 - RNA, 14 nt, Human
ggcaugccuugugc

SEQ ID NO: 2909580 - RNA, 17 nt, Human
ggcaugcggucgggcag

SEQ ID NO: 2909581 - RNA, 12 nt, Human
ggcaugcugggg

SEQ ID NO: 2909582 - RNA, 14 nt, Human
ggcaugcuggggca

SEQ ID NO: 2909583 - RNA, 13 nt, Human
ggcaugcuggggc

SEQ ID NO: 2909584 - RNA, 16 nt, Human
ggcaugcuggggcaag

SEQ ID NO: 2909585 - RNA, 12 nt, Human
ggcauggcccug

SEQ ID NO: 2909586 - RNA, 17 nt, Human
ggcauggcccugggguc

SEQ ID NO: 2909587 - RNA, 13 nt, Human
ggcauggcccugg

SEQ ID NO: 2909588 - RNA, 16 nt, Human
ggcauggcccuggggu

SEQ ID NO: 2909589 - RNA, 17 nt, Human
ggcauggccagguggcc

SEQ ID NO: 2909590 - RNA, 18 nt, Human
ggcauggccagguggcca

SEQ ID NO: 2909591 - RNA, 22 nt, Human
ggccucggacuuagcugggaga

SEQ ID NO: 2909592 - RNA, 16 nt, Human
ggccucgggacaccug

SEQ ID NO: 2909593 - RNA, 22 nt, Human
ggccucgggacaccugcccugc

SEQ ID NO: 2909594 - RNA, 23 nt, Human
ggccucgggacaccugcccugcc

SEQ ID NO: 2909595 - RNA, 16 nt, Human
ggccucgggaccucag

SEQ ID NO: 2909596 - RNA, 20 nt, Human
ggccucaaaggcccgcucua

SEQ ID NO: 2909597 - RNA, 17 nt, Human
ggccucggacuuagcug

SEQ ID NO: 2909598 - RNA, 20 nt, Human
ggccucggacuuagcuggga

SEQ ID NO: 2909599 - RNA, 18 nt, Human
ggccucaaaggcccgcuc

SEQ ID NO: 2909600 - RNA, 19 nt, Human
ggccucaaaggcccgcucu

SEQ ID NO: 2909601 - RNA, 21 nt, Human
ggccuaugcacauauggacuc

SEQ ID NO: 2909602 - RNA, 20 nt, Human
ggccuaugcacauauggacu

SEQ ID NO: 2909603 - RNA, 13 nt, Human
ggccuaucuccua

SEQ ID NO: 2909604 - RNA, 18 nt, Human
ggccuaucuccuagggcu

SEQ ID NO: 2909605 - RNA, 14 nt, Human
ggccucuguguccu

SEQ ID NO: 2909606 - RNA, 20 nt, Human
ggccucuguguccuucccug

SEQ ID NO: 2909607 - RNA, 19 nt, Human
ggccucuuccgugacguca

SEQ ID NO: 2909608 - RNA, 16 nt, Human
ggccucugugccuucu

SEQ ID NO: 2909609 - RNA, 16 nt, Human
ggccuagcccacccug

SEQ ID NO: 2909610 - RNA, 17 nt, Human
ggccuagcccacccugc

SEQ ID NO: 2909611 - RNA, 18 nt, Human
ggccuagcccacccugcu

SEQ ID NO: 2909612 - RNA, 22 nt, Human
ggccuagcccacccugcugccu

SEQ ID NO: 2909613 - RNA, 23 nt, Human
ggccuaaucucauaccucugacc

SEQ ID NO: 2909614 - RNA, 15 nt, Human
ggccuaggauucuaa

SEQ ID NO: 2909615 - RNA, 13 nt, Human
ggccuaggauucu

SEQ ID NO: 2909616 - RNA, 20 nt, Human
ggccuacagcuuugaucccu

SEQ ID NO: 2909617 - RNA, 23 nt, Human
ggccuacagcuuugaucccugac

SEQ ID NO: 2909618 - RNA, 15 nt, Human
ggccggugugggcug

SEQ ID NO: 2909619 - RNA, 16 nt, Human
ggcccugucccuccca

SEQ ID NO: 2909620 - RNA, 17 nt, Human
ggcccugucccucccac

SEQ ID NO: 2909621 - RNA, 18 nt, Human
ggcccugucccucccacc

SEQ ID NO: 2909622 - RNA, 20 nt, Human
ggcccugucccucccaccuc

SEQ ID NO: 2909623 - RNA, 21 nt, Human
ggcccugucccucccaccucu

SEQ ID NO: 2909624 - RNA, 22 nt, Human
ggcccugucccucccaccucug

SEQ ID NO: 2909625 - RNA, 23 nt, Human
ggcccugucccucccaccucugu

SEQ ID NO: 2909626 - RNA, 16 nt, Human
ggcccugggcucggag

SEQ ID NO: 2909627 - RNA, 18 nt, Human
ggcccugggcucggaggc

SEQ ID NO: 2909628 - RNA, 21 nt, Human
ggcccugggcucggaggcugc

SEQ ID NO: 2909629 - RNA, 15 nt, Human
ggcccugucccuccc

SEQ ID NO: 2909630 - RNA, 17 nt, Human
ggcccugguccuuccag

SEQ ID NO: 2909631 - RNA, 22 nt, Human
ggcccuggugcgaauggacuuu

SEQ ID NO: 2909632 - RNA, 15 nt, Human
ggcccugguccuucc

SEQ ID NO: 2909633 - RNA, 12 nt, Human
ggcccugguccu

SEQ ID NO: 2909634 - RNA, 15 nt, Human
ggcccugggguccca

SEQ ID NO: 2909635 - RNA, 22 nt, Human
ggcccugcaauguaucccuucu

SEQ ID NO: 2909636 - RNA, 16 nt, Human
ggcccugcagccagcu

SEQ ID NO: 2909637 - RNA, 17 nt, Human
ggcccugcagccagcuc

SEQ ID NO: 2909638 - RNA, 20 nt, Human
ggcccugcccugguuuccug

SEQ ID NO: 2909639 - RNA, 13 nt, Human
ggcccugcccugg

SEQ ID NO: 2909640 - RNA, 12 nt, Human
ggcccugcccug

SEQ ID NO: 2909641 - RNA, 15 nt, Human
ggcccugcccucucc

SEQ ID NO: 2909642 - RNA, 21 nt, Human
ggcccugcccucuccuuccuu

SEQ ID NO: 2909643 - RNA, 15 nt, Human
ggcccugcaguguuc

SEQ ID NO: 2909644 - RNA, 22 nt, Human
ggcccugcaguguucgcuuggc

SEQ ID NO: 2909645 - RNA, 23 nt, Human
ggcccugcaguguucgcuuggcu

SEQ ID NO: 2909646 - RNA, 10 nt, Human
ggcccugcau

SEQ ID NO: 2909647 - RNA, 11 nt, Human
ggcccugcaug

SEQ ID NO: 2909648 - RNA, 11 nt, Human
ggcccugcccu

SEQ ID NO: 2909649 - RNA, 17 nt, Human
ggcccugcccuggcagg

SEQ ID NO: 2909650 - RNA, 14 nt, Human
ggcccugcccugag

SEQ ID NO: 2909651 - RNA, 18 nt, Human
ggcccugcccugaggaag

SEQ ID NO: 2909652 - RNA, 19 nt, Human
ggcccugcccugaggaagg

SEQ ID NO: 2909653 - RNA, 22 nt, Human
ggcccugcccugguuuccugcc

SEQ ID NO: 2909654 - RNA, 15 nt, Human
ggcccugcuccugca

SEQ ID NO: 2909655 - RNA, 17 nt, Human
ggcccugcuccugcagc

SEQ ID NO: 2909656 - RNA, 18 nt, Human
ggcccugcuccugcagca

SEQ ID NO: 2909657 - RNA, 21 nt, Human
ggcccugcuccugcagcaugg

SEQ ID NO: 2909658 - RNA, 13 nt, Human
ggcccugcugccc

SEQ ID NO: 2909659 - RNA, 14 nt, Human
ggcccugcugccca

SEQ ID NO: 2909660 - RNA, 15 nt, Human
ggcccuggaacucua

SEQ ID NO: 2909661 - RNA, 15 nt, Human
ggcccuggcucugcu

SEQ ID NO: 2909662 - RNA, 18 nt, Human
ggcccuggcucugcuguc

SEQ ID NO: 2909663 - RNA, 19 nt, Human
ggcccuggcugagggcagc

SEQ ID NO: 2909664 - RNA, 22 nt, Human
ggcccuggcucccacaggcccu

SEQ ID NO: 2909665 - RNA, 13 nt, Human
ggcccuggcuccc

SEQ ID NO: 2909666 - RNA, 17 nt, Human
ggcccucucccuuaccc

SEQ ID NO: 2909667 - RNA, 11 nt, Human
ggcccagagag

SEQ ID NO: 2909668 - RNA, 21 nt, Human
ggccauucuuuuuuucuuggc

SEQ ID NO: 2909669 - RNA, 13 nt, Human
ggcccaaggcggc

SEQ ID NO: 2909670 - RNA, 14 nt, Human
ggcccaaggcggcc

SEQ ID NO: 2909671 - RNA, 22 nt, Human
ggcccacgccuguaaucccagc

SEQ ID NO: 2909672 - RNA, 17 nt, Human
ggcccacgugguugggg

SEQ ID NO: 2909673 - RNA, 23 nt, Human
ggcccacucaggggucacugagg

SEQ ID NO: 2909674 - RNA, 11 nt, Human
ggcccacacac

SEQ ID NO: 2909675 - RNA, 12 nt, Human
ggcccacacaca

SEQ ID NO: 2909676 - RNA, 17 nt, Human
ggcccaaggcggccccu

SEQ ID NO: 2909677 - RNA, 21 nt, Human
ggcccaaggcggccccucccg

SEQ ID NO: 2909678 - RNA, 16 nt, Human
ggcuccaggcuccuuu

SEQ ID NO: 2909679 - RNA, 14 nt, Human
ggcuccauauauau

SEQ ID NO: 2909680 - RNA, 17 nt, Human
ggcucccacaggcccuu

SEQ ID NO: 2909681 - RNA, 11 nt, Human
ggcuccaugcu

SEQ ID NO: 2909682 - RNA, 18 nt, Human
ggcuccaugcuccucacu

SEQ ID NO: 2909683 - RNA, 18 nt, Human
ggcucccacaggcccuuc

SEQ ID NO: 2909684 - RNA, 19 nt, Human
ggcucccacaggcccuucc

SEQ ID NO: 2909685 - RNA, 11 nt, Human
ggcuccaggcu

SEQ ID NO: 2909686 - RNA, 15 nt, Human
ggcuccaggcuccuu

SEQ ID NO: 2909687 - RNA, 12 nt, Human
ggcuccagcugg

SEQ ID NO: 2909688 - RNA, 21 nt, Human
ggcucaaguccucuuuucuga

SEQ ID NO: 2909689 - RNA, 15 nt, Human
ggcucaaguccucuu

SEQ ID NO: 2909690 - RNA, 13 nt, Human
ggcucacaccugu

SEQ ID NO: 2909691 - RNA, 16 nt, Human
ggcucacaccuguaau

SEQ ID NO: 2909692 - RNA, 19 nt, Human
ggcuagaguccucacuccc

SEQ ID NO: 2909693 - RNA, 18 nt, Human
ggcuagaguccucacucc

SEQ ID NO: 2909694 - RNA, 14 nt, Human
ggcuagaguccuca

SEQ ID NO: 2909695 - RNA, 13 nt, Human
ggcuagaguccuc

SEQ ID NO: 2909696 - RNA, 16 nt, Human
ggcuaggaccccucca

SEQ ID NO: 2909697 - RNA, 20 nt, Human
ggcuagaguccucacuccca

SEQ ID NO: 2909698 - RNA, 14 nt, Human
ggcuagcuggagcc

SEQ ID NO: 2909699 - RNA, 15 nt, Human
ggcuagcuggagccu

SEQ ID NO: 2909700 - RNA, 16 nt, Human
ggcuagcuggagccug

SEQ ID NO: 2909701 - RNA, 17 nt, Human
ggcuagcuggagccugg

SEQ ID NO: 2909702 - RNA, 22 nt, Human
ggcuaggaccccuccauguggg

SEQ ID NO: 2909703 - RNA, 19 nt, Human
ggcuaugggggcacugagg

SEQ ID NO: 2909704 - RNA, 17 nt, Human
ggcuauggacacagggu

SEQ ID NO: 2909705 - RNA, 17 nt, Human
ggcuaugguguggacug

SEQ ID NO: 2909706 - RNA, 19 nt, Human
ggcucaagcgauucuccug

SEQ ID NO: 2909707 - RNA, 15 nt, Human
ggcuaguugggcuuc

SEQ ID NO: 2909708 - RNA, 16 nt, Human
ggcuaguugggcuucc

SEQ ID NO: 2909709 - RNA, 19 nt, Human
ggcuauagcuacaggaagc

SEQ ID NO: 2909710 - RNA, 14 nt, Human
ggccuggggccuga

SEQ ID NO: 2909711 - RNA, 15 nt, Human
ggccuggggccugag

SEQ ID NO: 2909712 - RNA, 16 nt, Human
ggccuggggccugaga

SEQ ID NO: 2909713 - RNA, 17 nt, Human
ggccuggggccugagag

SEQ ID NO: 2909714 - RNA, 18 nt, Human
ggccuggggccugagaga

SEQ ID NO: 2909715 - RNA, 20 nt, Human
ggccugucucauccccaggg

SEQ ID NO: 2909716 - RNA, 19 nt, Human
ggccugucucauccccagg

SEQ ID NO: 2909717 - RNA, 18 nt, Human
ggccugucucauccccag

SEQ ID NO: 2909718 - RNA, 17 nt, Human
ggccugucucaucccca

SEQ ID NO: 2909719 - RNA, 23 nt, Human
ggccugaagaguccucugaauga

SEQ ID NO: 2909720 - RNA, 22 nt, Human
ggccugaaugcuuauagguggc

SEQ ID NO: 2909721 - RNA, 13 nt, Human
ggccuggccuggc

SEQ ID NO: 2909722 - RNA, 14 nt, Human
ggccuggccuggcc

SEQ ID NO: 2909723 - RNA, 16 nt, Human
ggccuggccuggcccu

SEQ ID NO: 2909724 - RNA, 17 nt, Human
ggccuggccuggcccug

SEQ ID NO: 2909725 - RNA, 18 nt, Human
ggccuggccuggcccugc

SEQ ID NO: 2909726 - RNA, 19 nt, Human
ggccugaagaguccucuga

SEQ ID NO: 2909727 - RNA, 13 nt, Human
ggccugaagaguc

SEQ ID NO: 2909728 - RNA, 22 nt, Human
ggccugaaaggagcccuuaucu

SEQ ID NO: 2909729 - RNA, 16 nt, Human
ggccugaaaggagccc

SEQ ID NO: 2909730 - RNA, 12 nt, Human
ggcgccuggccu

SEQ ID NO: 2909731 - RNA, 16 nt, Human
ggcgccuggccuccag

SEQ ID NO: 2909732 - RNA, 14 nt, Human
ggcgcggccagccc

SEQ ID NO: 2909733 - RNA, 14 nt, Human
ggccugucugugac

SEQ ID NO: 2909734 - RNA, 16 nt, Human
ggccuguggaaugagu

SEQ ID NO: 2909735 - RNA, 18 nt, Human
ggccuguggaaugagugu

SEQ ID NO: 2909736 - RNA, 19 nt, Human
ggccuguggaaugagugug

SEQ ID NO: 2909737 - RNA, 22 nt, Human
ggccuguggaaugagugugcau

SEQ ID NO: 2909738 - RNA, 23 nt, Human
ggccugucucauccccagggguc

SEQ ID NO: 2909739 - RNA, 22 nt, Human
ggcgccgcaaaccacacuggac

SEQ ID NO: 2909740 - RNA, 19 nt, Human
ggcgccgcaaaccacacug

SEQ ID NO: 2909741 - RNA, 20 nt, Human
ggcgccgcaaaccacacugg

SEQ ID NO: 2909742 - RNA, 13 nt, Human
ggcggccccagca

SEQ ID NO: 2909743 - RNA, 17 nt, Human
ggcggccccucccgccc

SEQ ID NO: 2909744 - RNA, 16 nt, Human
ggcggcgggcggcugg

SEQ ID NO: 2909745 - RNA, 20 nt, Human
ggcggaucaucuaauucucu

SEQ ID NO: 2909746 - RNA, 20 nt, Human
ggcggcacaggucgggcgca

SEQ ID NO: 2909747 - RNA, 21 nt, Human
ggcggagcuugcagugagccg

SEQ ID NO: 2909748 - RNA, 20 nt, Human
ggcggagcuugcagugagcc

SEQ ID NO: 2909749 - RNA, 23 nt, Human
ggcggagcuggccccgccgccug

SEQ ID NO: 2909750 - RNA, 17 nt, Human
ggcggagcuggccccgc

SEQ ID NO: 2909751 - RNA, 20 nt, Human
ggcggagcuggccccgccgc

SEQ ID NO: 2909752 - RNA, 13 nt, Human
ggcggagcuggcc

SEQ ID NO: 2909753 - RNA, 13 nt, Human
ggcggagccggcc

SEQ ID NO: 2909754 - RNA, 14 nt, Human
ggcggagcuggccc

SEQ ID NO: 2909755 - RNA, 15 nt, Human
ggcggagcuggcccc

SEQ ID NO: 2909756 - RNA, 16 nt, Human
ggcgcggccagccccg

SEQ ID NO: 2909757 - RNA, 20 nt, Human
ggcgcuggguauuggaaaug

SEQ ID NO: 2909758 - RNA, 22 nt, Human
ggcggaaagccuguaagccugc

SEQ ID NO: 2909759 - RNA, 19 nt, Human
ggacgcuccgcugccgugc

SEQ ID NO: 2909760 - RNA, 16 nt, Human
ggacugcugcugccug

SEQ ID NO: 2909761 - RNA, 17 nt, Human
ggacugcugcugccugg

SEQ ID NO: 2909762 - RNA, 18 nt, Human
ggacugcugcugccuggc

SEQ ID NO: 2909763 - RNA, 20 nt, Human
ggacugcugcugccuggcca

SEQ ID NO: 2909764 - RNA, 23 nt, Human
ggacuggcuagaguccucacucc

SEQ ID NO: 2909765 - RNA, 22 nt, Human
ggacuggcuagaguccucacuc

SEQ ID NO: 2909766 - RNA, 20 nt, Human
ggacuggcuagaguccucac

SEQ ID NO: 2909767 - RNA, 19 nt, Human
ggacuggcuagaguccuca

SEQ ID NO: 2909768 - RNA, 16 nt, Human
ggacuggccccugggu

SEQ ID NO: 2909769 - RNA, 17 nt, Human
ggacuggccccuggguc

SEQ ID NO: 2909770 - RNA, 14 nt, Human
ggacuggccccugg

SEQ ID NO: 2909771 - RNA, 15 nt, Human
ggacuggccccuggg

SEQ ID NO: 2909772 - RNA, 18 nt, Human
ggacuggccucugcugau

SEQ ID NO: 2909773 - RNA, 19 nt, Human
ggacuguggcacuugccug

SEQ ID NO: 2909774 - RNA, 14 nt, Human
ggagacagccccag

SEQ ID NO: 2909775 - RNA, 15 nt, Human
ggagacagccccaga

SEQ ID NO: 2909776 - RNA, 12 nt, Human
ggagaggagaga

SEQ ID NO: 2909777 - RNA, 16 nt, Human
ggagaggaacuccuug

SEQ ID NO: 2909778 - RNA, 17 nt, Human
ggagaggaacuccuugg

SEQ ID NO: 2909779 - RNA, 15 nt, Human
ggagaggaagagaca

SEQ ID NO: 2909780 - RNA, 19 nt, Human
ggagacagccccagagcag

SEQ ID NO: 2909781 - RNA, 17 nt, Human
ggagacagccccagagc

SEQ ID NO: 2909782 - RNA, 13 nt, Human
ggagaggaugaga

SEQ ID NO: 2909783 - RNA, 20 nt, Human
ggagaggaugagagcccaga

SEQ ID NO: 2909784 - RNA, 13 nt, Human
ggagaggagagag

SEQ ID NO: 2909785 - RNA, 14 nt, Human
ggagaggagagagg

SEQ ID NO: 2909786 - RNA, 15 nt, Human
ggagaggagagaggc

SEQ ID NO: 2909787 - RNA, 18 nt, Human
ggagaggagagaggcaga

SEQ ID NO: 2909788 - RNA, 15 nt, Human
ggagacaagaaaucc

SEQ ID NO: 2909789 - RNA, 18 nt, Human
ggagacaagaaaucccug

SEQ ID NO: 2909790 - RNA, 21 nt, Human
ggagacaaugucugcagcccu

SEQ ID NO: 2909791 - RNA, 20 nt, Human
ggagacacuggccccucaaa

SEQ ID NO: 2909792 - RNA, 17 nt, Human
ggagacacuggccccuc

SEQ ID NO: 2909793 - RNA, 21 nt, Human
ggagacacaacaacuccuagg

SEQ ID NO: 2909794 - RNA, 12 nt, Human
ggagacacagau

SEQ ID NO: 2909795 - RNA, 13 nt, Human
ggagacacagaug

SEQ ID NO: 2909796 - RNA, 18 nt, Human
ggagauacugguggaagu

SEQ ID NO: 2909797 - RNA, 12 nt, Human
ggagagugucaa

SEQ ID NO: 2909798 - RNA, 19 nt, Human
ggagagugucaaccagaca

SEQ ID NO: 2909799 - RNA, 20 nt, Human
ggagagugucaaccagacag

SEQ ID NO: 2909800 - RNA, 21 nt, Human
ggagagugucaaccagacaga

SEQ ID NO: 2909801 - RNA, 22 nt, Human
ggagagugucaaccagacagag

SEQ ID NO: 2909802 - RNA, 18 nt, Human
ggagaguggccauucuuu

SEQ ID NO: 2909803 - RNA, 21 nt, Human
ggagaguggccauucuuuuuu

SEQ ID NO: 2909804 - RNA, 22 nt, Human
ggagaguacauugaaggccugg

SEQ ID NO: 2909805 - RNA, 21 nt, Human
ggagaggaugagagcccagag

SEQ ID NO: 2909806 - RNA, 22 nt, Human
ggagaggaugagagcccagagg

SEQ ID NO: 2909807 - RNA, 23 nt, Human
ggagaugaaaucuuacagcuggg

SEQ ID NO: 2909808 - RNA, 12 nt, Human
ggagauauuuaa

SEQ ID NO: 2909809 - RNA, 20 nt, Human
ggagaucaaggagaggaggc

SEQ ID NO: 2909810 - RNA, 21 nt, Human
ggagaucagaaaaauggagca

SEQ ID NO: 2909811 - RNA, 14 nt, Human
ggagauagggaaag

SEQ ID NO: 2909812 - RNA, 23 nt, Human
ggacauuuauuaguaucuuccau

SEQ ID NO: 2909813 - RNA, 20 nt, Human
ggacauugcggacagccacg

SEQ ID NO: 2909814 - RNA, 12 nt, Human
ggacauucuugu

SEQ ID NO: 2909815 - RNA, 21 nt, Human
ggacauguuuuuguuuucuuu

SEQ ID NO: 2909816 - RNA, 15 nt, Human
ggacauuaugugugc

SEQ ID NO: 2909817 - RNA, 18 nt, Human
ggacauggccccugugag

SEQ ID NO: 2909818 - RNA, 21 nt, Human
ggacagccacggccaggccag

SEQ ID NO: 2909819 - RNA, 20 nt, Human
ggacagccacggccaggcca

SEQ ID NO: 2909820 - RNA, 19 nt, Human
ggacagccacggccaggcc

SEQ ID NO: 2909821 - RNA, 15 nt, Human
ggacagccacggcca

SEQ ID NO: 2909822 - RNA, 16 nt, Human
ggacagauucagucuu

SEQ ID NO: 2909823 - RNA, 18 nt, Human
ggacagauucagucuugc

SEQ ID NO: 2909824 - RNA, 20 nt, Human
ggacagauucagucuugccu

SEQ ID NO: 2909825 - RNA, 22 nt, Human
ggacagauucagucuugccuua

SEQ ID NO: 2909826 - RNA, 21 nt, Human
ggacagagguuaucuguccca

SEQ ID NO: 2909827 - RNA, 16 nt, Human
ggacagaguaugaaca

SEQ ID NO: 2909828 - RNA, 15 nt, Human
ggacgccacccagca

SEQ ID NO: 2909829 - RNA, 24 nt, Human
ggacgccgggccggcccuagccca

SEQ ID NO: 2909830 - RNA, 17 nt, Human
ggaccuugaacugggua

SEQ ID NO: 2909831 - RNA, 15 nt, Human
ggaccuugaacuggg

SEQ ID NO: 2909832 - RNA, 11 nt, Human
ggaccucaucc

SEQ ID NO: 2909833 - RNA, 18 nt, Human
ggaccucauccaaacaau

SEQ ID NO: 2909834 - RNA, 11 nt, Human
ggaccucccuu

SEQ ID NO: 2909835 - RNA, 13 nt, Human
ggaccucccuucc

SEQ ID NO: 2909836 - RNA, 17 nt, Human
ggaccucccuuccgacc

SEQ ID NO: 2909837 - RNA, 20 nt, Human
ggaccucccuuccgacccuc

SEQ ID NO: 2909838 - RNA, 15 nt, Human
ggaccuccucuuccc

SEQ ID NO: 2909839 - RNA, 16 nt, Human
ggaccuccucuucccc

SEQ ID NO: 2909840 - RNA, 23 nt, Human
ggaccuccucuucccccuuccaa

SEQ ID NO: 2909841 - RNA, 21 nt, Human
ggaccacugcaugagcuuuua

SEQ ID NO: 2909842 - RNA, 18 nt, Human
ggaccacuguuucuugcu

SEQ ID NO: 2909843 - RNA, 19 nt, Human
ggaccacuguuucuugcuu

SEQ ID NO: 2909844 - RNA, 21 nt, Human
ggaccacuguuucuugcuugu

SEQ ID NO: 2909845 - RNA, 13 nt, Human
ggaccacucagcc

SEQ ID NO: 2909846 - RNA, 16 nt, Human
ggaccacucagccccu

SEQ ID NO: 2909847 - RNA, 17 nt, Human
ggaccacucagccccua

SEQ ID NO: 2909848 - RNA, 21 nt, Human
ggaccacucagccccuaggag

SEQ ID NO: 2909849 - RNA, 21 nt, Human
ggaccaauaaaauuucuaaga

SEQ ID NO: 2909850 - RNA, 16 nt, Human
ggaauuucuuguuucu

SEQ ID NO: 2909851 - RNA, 23 nt, Human
ggaauuuaagagcaguccauuuc

SEQ ID NO: 2909852 - RNA, 13 nt, Human
ggaauuuauaauu

SEQ ID NO: 2909853 - RNA, 21 nt, Human
ggaauuuguucaaguuuuggg

SEQ ID NO: 2909854 - RNA, 17 nt, Human
ggaauuuuugcuugacu

SEQ ID NO: 2909855 - RNA, 14 nt, Human
ggacaaaacuucuu

SEQ ID NO: 2909856 - RNA, 21 nt, Human
ggacaaaacuucuugucagac

SEQ ID NO: 2909857 - RNA, 15 nt, Human
ggacaaaguauuuga

SEQ ID NO: 2909858 - RNA, 12 nt, Human
ggacaaauguga

SEQ ID NO: 2909859 - RNA, 19 nt, Human
ggacaaaugugaagaugca

SEQ ID NO: 2909860 - RNA, 14 nt, Human
ggacaaauugagac

SEQ ID NO: 2909861 - RNA, 17 nt, Human
ggacaaauugagacagu

SEQ ID NO: 2909862 - RNA, 20 nt, Human
ggacaaauugagacagugca

SEQ ID NO: 2909863 - RNA, 19 nt, Human
ggaauugauuugcauugaa

SEQ ID NO: 2909864 - RNA, 18 nt, Human
ggaauugauuugcauuga

SEQ ID NO: 2909865 - RNA, 17 nt, Human
ggaauugauuugcauug

SEQ ID NO: 2909866 - RNA, 15 nt, Human
ggaauugauuugcau

SEQ ID NO: 2909867 - RNA, 19 nt, Human
ggaauguuugccucugccu

SEQ ID NO: 2909868 - RNA, 19 nt, Human
ggaauuagcuuggggccag

SEQ ID NO: 2909869 - RNA, 20 nt, Human
ggaauuagcuuggggccagg

SEQ ID NO: 2909870 - RNA, 22 nt, Human
ggaauuagcuuggggccaggga

SEQ ID NO: 2909871 - RNA, 22 nt, Human
ggaauuaaguuaucuuuaaaau

SEQ ID NO: 2909872 - RNA, 19 nt, Human
ggaauuacauguaaaacau

SEQ ID NO: 2909873 - RNA, 12 nt, Human
ggaaugcagugg

SEQ ID NO: 2909874 - RNA, 23 nt, Human
ggaaugccugagugccuggccaa

SEQ ID NO: 2909875 - RNA, 14 nt, Human
ggaaugccugagug

SEQ ID NO: 2909876 - RNA, 18 nt, Human
ggaaugccugagugccug

SEQ ID NO: 2909877 - RNA, 19 nt, Human
ggaaugccugagugccugg

SEQ ID NO: 2909878 - RNA, 14 nt, Human
ggaaugcuguguua

SEQ ID NO: 2909879 - RNA, 15 nt, Human
ggaauguguggccug

SEQ ID NO: 2909880 - RNA, 18 nt, Human
ggaagugacauuguguca

SEQ ID NO: 2909881 - RNA, 20 nt, Human
ggaagugguggcuguggaag

SEQ ID NO: 2909882 - RNA, 17 nt, Human
ggaaguccaauguggca

SEQ ID NO: 2909883 - RNA, 16 nt, Human
ggaaguccaauguggc

SEQ ID NO: 2909884 - RNA, 15 nt, Human
ggaaguccaaugugg

SEQ ID NO: 2909885 - RNA, 23 nt, Human
ggaagugaagagggagaagggau

SEQ ID NO: 2909886 - RNA, 20 nt, Human
ggaagugaagacuggaagcu

SEQ ID NO: 2909887 - RNA, 13 nt, Human
ggaaguccucugg

SEQ ID NO: 2909888 - RNA, 14 nt, Human
ggaaguccucuggg

SEQ ID NO: 2909889 - RNA, 14 nt, Human
ggaaguaguccuug

SEQ ID NO: 2909890 - RNA, 16 nt, Human
ggaaguaguccuuggc

SEQ ID NO: 2909891 - RNA, 18 nt, Human
ggaaguaguccuuggcau

SEQ ID NO: 2909892 - RNA, 22 nt, Human
ggaaggccucuuggagaccuua

SEQ ID NO: 2909893 - RNA, 13 nt, Human
ggaaggguggugg

SEQ ID NO: 2909894 - RNA, 18 nt, Human
ggaaggguuuguggcugg

SEQ ID NO: 2909895 - RNA, 11 nt, Human
ggaaggugggg

SEQ ID NO: 2909896 - RNA, 13 nt, Human
ggaaggucucauu

SEQ ID NO: 2909897 - RNA, 16 nt, Human
ggaagguggggacagg

SEQ ID NO: 2909898 - RNA, 23 nt, Human
ggaaguaacaguaacgcagggga

SEQ ID NO: 2909899 - RNA, 18 nt, Human
ggaaguacaugaauacaa

SEQ ID NO: 2909900 - RNA, 19 nt, Human
ggaagggggggcuacauua

SEQ ID NO: 2909901 - RNA, 20 nt, Human
ggaagggggggcuacauuau

SEQ ID NO: 2909902 - RNA, 21 nt, Human
ggaagggggggcuacauuaua

SEQ ID NO: 2909903 - RNA, 17 nt, Human
ggaaggggacccccgcc

SEQ ID NO: 2909904 - RNA, 22 nt, Human
ggaaggggacccccgcccccug

SEQ ID NO: 2909905 - RNA, 16 nt, Human
ggaaggggacccccgc

SEQ ID NO: 2909906 - RNA, 21 nt, Human
ggaagggcaggaaggagagcc

SEQ ID NO: 2909907 - RNA, 15 nt, Human
ggaagggcaggaagg

SEQ ID NO: 2909908 - RNA, 12 nt, Human
ggaagggcagga

SEQ ID NO: 2909909 - RNA, 14 nt, Human
ggaagggcaaaacc

SEQ ID NO: 2909910 - RNA, 17 nt, Human
ggaaggcuggcugggca

SEQ ID NO: 2909911 - RNA, 14 nt, Human
ggaaggcuggcugg

SEQ ID NO: 2909912 - RNA, 17 nt, Human
ggaaggcugagaggaga

SEQ ID NO: 2909913 - RNA, 12 nt, Human
ggaaggccugac

SEQ ID NO: 2909914 - RNA, 20 nt, Human
ggaaggccugacuucugcug

SEQ ID NO: 2909915 - RNA, 12 nt, Human
ggaaggccuggg

SEQ ID NO: 2909916 - RNA, 13 nt, Human
ggaaggccugggu

SEQ ID NO: 2909917 - RNA, 14 nt, Human
ggaaggccugggug

SEQ ID NO: 2909918 - RNA, 21 nt, Human
ggaaggcucuucuccccagag

SEQ ID NO: 2909919 - RNA, 22 nt, Human
ggaaggccaaggggagucaccu

SEQ ID NO: 2909920 - RNA, 14 nt, Human
ggaaccucugucuc

SEQ ID NO: 2909921 - RNA, 15 nt, Human
ggaaccucugucuca

SEQ ID NO: 2909922 - RNA, 23 nt, Human
ggaaccucugucucauccuccug

SEQ ID NO: 2909923 - RNA, 19 nt, Human
ggaaccugaggccugaagg

SEQ ID NO: 2909924 - RNA, 15 nt, Human
ggaaccugcaaaaaa

SEQ ID NO: 2909925 - RNA, 16 nt, Human
ggaaccugcaaaaaau

SEQ ID NO: 2909926 - RNA, 13 nt, Human
ggaaccugacccc

SEQ ID NO: 2909927 - RNA, 13 nt, Human
ggaacgcagauga

SEQ ID NO: 2909928 - RNA, 14 nt, Human
ggaacgaugugucu

SEQ ID NO: 2909929 - RNA, 15 nt, Human
ggaacgaugugucug

SEQ ID NO: 2909930 - RNA, 21 nt, Human
ggaaccuuccuuccugcuuga

SEQ ID NO: 2909931 - RNA, 13 nt, Human
ggaaccuugcugu

SEQ ID NO: 2909932 - RNA, 15 nt, Human
ggaaccuugcugucc

SEQ ID NO: 2909933 - RNA, 16 nt, Human
ggaaccuugcuguccu

SEQ ID NO: 2909934 - RNA, 17 nt, Human
ggaaccuugcuguccug

SEQ ID NO: 2909935 - RNA, 22 nt, Human
ggaaccuguccuaaggaaccuu

SEQ ID NO: 2909936 - RNA, 13 nt, Human
ggaaccugccaug

SEQ ID NO: 2909937 - RNA, 11 nt, Human
ggaaccugcca

SEQ ID NO: 2909938 - RNA, 20 nt, Human
ggaaccuuccuuccugcuug

SEQ ID NO: 2909939 - RNA, 19 nt, Human
ggaaccuuccuuccugcuu

SEQ ID NO: 2909940 - RNA, 16 nt, Human
ggaaccuuccuuccug

SEQ ID NO: 2909941 - RNA, 13 nt, Human
ggaaggauuguaa

SEQ ID NO: 2909942 - RNA, 16 nt, Human
ggaaggauuguaaaaa

SEQ ID NO: 2909943 - RNA, 23 nt, Human
ggaaggauuguaaaaaaaaaugc

SEQ ID NO: 2909944 - RNA, 13 nt, Human
ggaaggcagacag

SEQ ID NO: 2909945 - RNA, 14 nt, Human
ggaaggcagacagc

SEQ ID NO: 2909946 - RNA, 17 nt, Human
ggaaggcagacagcagg

SEQ ID NO: 2909947 - RNA, 18 nt, Human
ggaaggcagacagcaggc

SEQ ID NO: 2909948 - RNA, 22 nt, Human
ggaaggcagacagcaggcagcg

SEQ ID NO: 2909949 - RNA, 14 nt, Human
ggaaggcagggagg

SEQ ID NO: 2909950 - RNA, 19 nt, Human
ggaaaggcucagucucagg

SEQ ID NO: 2909951 - RNA, 20 nt, Human
ggaaaggcucagucucagga

SEQ ID NO: 2909952 - RNA, 23 nt, Human
ggaaaggcucagucucaggagca

SEQ ID NO: 2909953 - RNA, 23 nt, Human
ggaacagcuaugggagccccagg

SEQ ID NO: 2909954 - RNA, 14 nt, Human
ggaaauagcuaaua

SEQ ID NO: 2909955 - RNA, 18 nt, Human
ggaaauacccuucuuuua

SEQ ID NO: 2909956 - RNA, 23 nt, Human
ggaaauacccuucuuuuaugagc

SEQ ID NO: 2909957 - RNA, 20 nt, Human
ggaaauaauaaagaugcucu

SEQ ID NO: 2909958 - RNA, 22 nt, Human
ggaaauaaaaccuuucaaauuu

SEQ ID NO: 2909959 - RNA, 19 nt, Human
ggaaaguucagaguuuucu

SEQ ID NO: 2909960 - RNA, 21 nt, Human
ggaaaguuuacccaugaagau

SEQ ID NO: 2909961 - RNA, 20 nt, Human
ggaaauaaaaccuuucaaau

SEQ ID NO: 2909962 - RNA, 19 nt, Human
ggaaauaaaaccuuucaaa

SEQ ID NO: 2909963 - RNA, 18 nt, Human
ggaaauaaaaccuuucaa

SEQ ID NO: 2909964 - RNA, 16 nt, Human
ggaaauaaaaccuuuc

SEQ ID NO: 2909965 - RNA, 15 nt, Human
ggaaauaaaaccuuu

SEQ ID NO: 2909966 - RNA, 20 nt, Human
ggaacccagcaguucuguua

SEQ ID NO: 2909967 - RNA, 18 nt, Human
ggaaccaugaagacagga

SEQ ID NO: 2909968 - RNA, 15 nt, Human
ggaaccaagcaggag

SEQ ID NO: 2909969 - RNA, 20 nt, Human
ggaacagcuaugggagcccc

SEQ ID NO: 2909970 - RNA, 13 nt, Human
ggaacauaaaaag

SEQ ID NO: 2909971 - RNA, 16 nt, Human
ggaacauuuauuuuau

SEQ ID NO: 2909972 - RNA, 17 nt, Human
ggaacauuuauuuuaug

SEQ ID NO: 2909973 - RNA, 18 nt, Human
ggaacauuuauuuuauga

SEQ ID NO: 2909974 - RNA, 21 nt, Human
ggaacauuuauuuuaugagaa

SEQ ID NO: 2909975 - RNA, 23 nt, Human
ggaacauuuauuuuaugagaaau

SEQ ID NO: 2909976 - RNA, 18 nt, Human
ggaacauuucuguaaaua

SEQ ID NO: 2909977 - RNA, 19 nt, Human
ggaacauuucuguaaauac

SEQ ID NO: 2909978 - RNA, 21 nt, Human
ggaacauuucuguaaauacca

SEQ ID NO: 2909979 - RNA, 22 nt, Human
ggaacauuucuguaaauaccau

SEQ ID NO: 2909980 - RNA, 15 nt, Human
ggaacaucaucaagg

SEQ ID NO: 2909981 - RNA, 22 nt, Human
ggaacaucaucaaggcacugcc

SEQ ID NO: 2909982 - RNA, 18 nt, Human
ggaacauaaaaaggacau

SEQ ID NO: 2909983 - RNA, 23 nt, Human
ggaacaucaucaaggcacugccu

SEQ ID NO: 2909984 - RNA, 15 nt, Human
ggaacauccuuugca

SEQ ID NO: 2909985 - RNA, 20 nt, Human
ggaacauccuuugcagggca

SEQ ID NO: 2909986 - RNA, 21 nt, Human
ggaacauccuuugcagggcag

SEQ ID NO: 2909987 - RNA, 22 nt, Human
ggaacauccuuugcagggcagc

SEQ ID NO: 2909988 - RNA, 23 nt, Human
ggaacauccuuugcagggcagcc

SEQ ID NO: 2909989 - RNA, 15 nt, Human
gcuuuguaugcacuu

SEQ ID NO: 2909990 - RNA, 14 nt, Human
gcuuuguccccugc

SEQ ID NO: 2909991 - RNA, 15 nt, Human
gcuuuguccccugcu

SEQ ID NO: 2909992 - RNA, 16 nt, Human
gcuuuguccccugcuu

SEQ ID NO: 2909993 - RNA, 21 nt, Human
gcuuuguccccugcuucagau

SEQ ID NO: 2909994 - RNA, 18 nt, Human
gcuuucaaagcauuuaca

SEQ ID NO: 2909995 - RNA, 18 nt, Human
gcuuucagaaaacgggaa

SEQ ID NO: 2909996 - RNA, 19 nt, Human
gcuuucagaaaacgggaag

SEQ ID NO: 2909997 - RNA, 19 nt, Human
gcuuugugugaaggcagag

SEQ ID NO: 2909998 - RNA, 18 nt, Human
gcuuugucuggaagaaag

SEQ ID NO: 2909999 - RNA, 14 nt, Human
gcuuugucugucgu

SEQ ID NO: 2910000 - RNA, 15 nt, Human
gcuuuguugcacuga

SEQ ID NO: 2910001 - RNA, 16 nt, Human
gcuuuguugcacugaa

SEQ ID NO: 2910002 - RNA, 13 nt, Human
gcuuuguguugua

SEQ ID NO: 2910003 - RNA, 15 nt, Human
gcuuuguguuguaau

SEQ ID NO: 2910004 - RNA, 22 nt, Human
gcuuuguguuguaauucuucag

SEQ ID NO: 2910005 - RNA, 13 nt, Human
gcuuuguguuugg

SEQ ID NO: 2910006 - RNA, 19 nt, Human
gcuuuguguuugguuuaca

SEQ ID NO: 2910007 - RNA, 20 nt, Human
gcuuuguguuugguuuacau

SEQ ID NO: 2910008 - RNA, 21 nt, Human
gcuuuguguuugguuuacauu

SEQ ID NO: 2910009 - RNA, 22 nt, Human
gcuuuguguuugguuuacauuu

SEQ ID NO: 2910010 - RNA, 23 nt, Human
gcuuuguguuugguuuacauuua

SEQ ID NO: 2910011 - RNA, 15 nt, Human
gcuuuguuaaaaaaa

SEQ ID NO: 2910012 - RNA, 23 nt, Human
gcuuuguuaaaaaaaaaaagauu

SEQ ID NO: 2910013 - RNA, 20 nt, Human
gcuugaggguugggcuggug

SEQ ID NO: 2910014 - RNA, 18 nt, Human
gcuugaggguugggcugg

SEQ ID NO: 2910015 - RNA, 11 nt, Human
gcuuuagagcu

SEQ ID NO: 2910016 - RNA, 14 nt, Human
gcuuuagagcuagg

SEQ ID NO: 2910017 - RNA, 23 nt, Human
gcuuuauuuuuuaaguauuuaua

SEQ ID NO: 2910018 - RNA, 11 nt, Human
gcuuucaagug

SEQ ID NO: 2910019 - RNA, 15 nt, Human
gcuuucaagugccuu

SEQ ID NO: 2910020 - RNA, 21 nt, Human
gcuuuauuuuuuaaguauuua

SEQ ID NO: 2910021 - RNA, 19 nt, Human
gcuuuauuuuuuaaguauu

SEQ ID NO: 2910022 - RNA, 16 nt, Human
gcuuuauauauggaca

SEQ ID NO: 2910023 - RNA, 18 nt, Human
gcuuuauauauggacaug

SEQ ID NO: 2910024 - RNA, 19 nt, Human
gcuuuauauauggacaugg

SEQ ID NO: 2910025 - RNA, 17 nt, Human
gcuuuauuuuuuaagua

SEQ ID NO: 2910026 - RNA, 20 nt, Human
ggaaaagcugcugacagugu

SEQ ID NO: 2910027 - RNA, 18 nt, Human
ggaaaagcugcugacagu

SEQ ID NO: 2910028 - RNA, 12 nt, Human
ggaaaagggaag

SEQ ID NO: 2910029 - RNA, 14 nt, Human
ggaaaagcugcuga

SEQ ID NO: 2910030 - RNA, 19 nt, Human
ggaaaagcggacaucagcu

SEQ ID NO: 2910031 - RNA, 22 nt, Human
ggaaaacagaacaucauuagaa

SEQ ID NO: 2910032 - RNA, 18 nt, Human
ggaaaagcagcucucccc

SEQ ID NO: 2910033 - RNA, 14 nt, Human
ggaaaagcagcucu

SEQ ID NO: 2910034 - RNA, 12 nt, Human
ggaaaaauguuu

SEQ ID NO: 2910035 - RNA, 13 nt, Human
ggaaaaauguuug

SEQ ID NO: 2910036 - RNA, 14 nt, Human
ggaaaaauguuugu

SEQ ID NO: 2910037 - RNA, 20 nt, Human
gcuuuguuuggauguaauuu

SEQ ID NO: 2910038 - RNA, 22 nt, Human
gcuuuucacugcuggcugccuu

SEQ ID NO: 2910039 - RNA, 23 nt, Human
gcuuuucacugcuggcugccuua

SEQ ID NO: 2910040 - RNA, 13 nt, Human
gcuuuucacugcu

SEQ ID NO: 2910041 - RNA, 22 nt, Human
gcuuuguuuugggggucaggca

SEQ ID NO: 2910042 - RNA, 14 nt, Human
gcuuuucacugcug

SEQ ID NO: 2910043 - RNA, 18 nt, Human
gcuuuucacugcuggcug

SEQ ID NO: 2910044 - RNA, 13 nt, Human
gcuguccucccuc

SEQ ID NO: 2910045 - RNA, 15 nt, Human
gcuguccucccucca

SEQ ID NO: 2910046 - RNA, 14 nt, Human
gcuguccugaucug

SEQ ID NO: 2910047 - RNA, 18 nt, Human
gcuguccuugaaugccau

SEQ ID NO: 2910048 - RNA, 15 nt, Human
gcuguucuacuuuuu

SEQ ID NO: 2910049 - RNA, 14 nt, Human
gcuguucuagcacu

SEQ ID NO: 2910050 - RNA, 13 nt, Human
gcuguucugcacu

SEQ ID NO: 2910051 - RNA, 14 nt, Human
gcuguucugcacug

SEQ ID NO: 2910052 - RNA, 15 nt, Human
gcuguucugcacuga

SEQ ID NO: 2910053 - RNA, 16 nt, Human
gcuguucugcacugaa

SEQ ID NO: 2910054 - RNA, 17 nt, Human
gcuguucugcacugaaa

SEQ ID NO: 2910055 - RNA, 22 nt, Human
gcuguucccauguagcccccug

SEQ ID NO: 2910056 - RNA, 12 nt, Human
gcuguucuucug

SEQ ID NO: 2910057 - RNA, 20 nt, Human
gcuguucuucuguucugcag

SEQ ID NO: 2910058 - RNA, 20 nt, Human
gcugugggcgugagaccugc

SEQ ID NO: 2910059 - RNA, 22 nt, Human
gcugugggcgugagaccugccc

SEQ ID NO: 2910060 - RNA, 21 nt, Human
gcugugggcgugagaccugcc

SEQ ID NO: 2910061 - RNA, 14 nt, Human
gcuguugacauauu

SEQ ID NO: 2910062 - RNA, 17 nt, Human
gcuguugacauauuuaa

SEQ ID NO: 2910063 - RNA, 19 nt, Human
gcuguugacauauuuaaug

SEQ ID NO: 2910064 - RNA, 23 nt, Human
gcuguugacauauuuaauguuuu

SEQ ID NO: 2910065 - RNA, 13 nt, Human
gcuguugaaagca

SEQ ID NO: 2910066 - RNA, 14 nt, Human
gcuguugaaagcaa

SEQ ID NO: 2910067 - RNA, 19 nt, Human
gcuguugaaagcaaaaaug

SEQ ID NO: 2910068 - RNA, 20 nt, Human
gcuguugaaagcaaaaaugc

SEQ ID NO: 2910069 - RNA, 16 nt, Human
gcuuagagaauguucu

SEQ ID NO: 2910070 - RNA, 18 nt, Human
gcuuagagaauguucucc

SEQ ID NO: 2910071 - RNA, 12 nt, Human
gcuuagagcagu

SEQ ID NO: 2910072 - RNA, 18 nt, Human
gcuuagcuuugcucugcc

SEQ ID NO: 2910073 - RNA, 17 nt, Human
gcuuagcuuugcucugc

SEQ ID NO: 2910074 - RNA, 19 nt, Human
gcuuagcuuugcucugcca

SEQ ID NO: 2910075 - RNA, 15 nt, Human
gcuuaguaaaauuua

SEQ ID NO: 2910076 - RNA, 16 nt, Human
gcuuaguaaaauuuau

SEQ ID NO: 2910077 - RNA, 19 nt, Human
gcuuaguaaaauuuauuuc

SEQ ID NO: 2910078 - RNA, 14 nt, Human
gcuuaguaucucau

SEQ ID NO: 2910079 - RNA, 22 nt, Human
gcuuaguaucucaucaacaaag

SEQ ID NO: 2910080 - RNA, 23 nt, Human
gcuuaguaucucaucaacaaaga

SEQ ID NO: 2910081 - RNA, 18 nt, Human
gcuucucauccugcaggc

SEQ ID NO: 2910082 - RNA, 22 nt, Human
gcuucucauccugcaggcagcu

SEQ ID NO: 2910083 - RNA, 16 nt, Human
gcuucucaucuuguga

SEQ ID NO: 2910084 - RNA, 18 nt, Human
gcuucucaucuugugaaa

SEQ ID NO: 2910085 - RNA, 17 nt, Human
gcuucauuuccuguguc

SEQ ID NO: 2910086 - RNA, 10 nt, Human
gcuucauugu

SEQ ID NO: 2910087 - RNA, 11 nt, Human
gcuucauugua

SEQ ID NO: 2910088 - RNA, 16 nt, Human
gcuugaggguugggcu

SEQ ID NO: 2910089 - RNA, 13 nt, Human
gcuucuccccaga

SEQ ID NO: 2910090 - RNA, 14 nt, Human
gcuucuccccagaa

SEQ ID NO: 2910091 - RNA, 15 nt, Human
gcuucuccccagaau

SEQ ID NO: 2910092 - RNA, 17 nt, Human
gcuucugaaugugcuga

SEQ ID NO: 2910093 - RNA, 16 nt, Human
gcuucauuuccugugu

SEQ ID NO: 2910094 - RNA, 13 nt, Human
gcuucauuuccug

SEQ ID NO: 2910095 - RNA, 18 nt, Human
gcuucaguggcagcugcu

SEQ ID NO: 2910096 - RNA, 17 nt, Human
gcuucaguggcagcugc

SEQ ID NO: 2910097 - RNA, 17 nt, Human
gcuucaucauucccucu

SEQ ID NO: 2910098 - RNA, 19 nt, Human
gcuucaucauucccucuca

SEQ ID NO: 2910099 - RNA, 16 nt, Human
gcuucaguggcagcug

SEQ ID NO: 2910100 - RNA, 17 nt, Human
gcuuauaauaaaggacu

SEQ ID NO: 2910101 - RNA, 17 nt, Human
gcuuaugaauauauuua

SEQ ID NO: 2910102 - RNA, 15 nt, Human
gcuuaucucuuuuau

SEQ ID NO: 2910103 - RNA, 21 nt, Human
gcuuaucucuuuuauauuugu

SEQ ID NO: 2910104 - RNA, 22 nt, Human
gcuuaucucuuuuauauuugua

SEQ ID NO: 2910105 - RNA, 23 nt, Human
gcuuaugacaucacuuguacaaa

SEQ ID NO: 2910106 - RNA, 22 nt, Human
gcuuaugacaucacuuguacaa

SEQ ID NO: 2910107 - RNA, 18 nt, Human
gcuuaugacaucacuugu

SEQ ID NO: 2910108 - RNA, 12 nt, Human
gccucccacugg

SEQ ID NO: 2910109 - RNA, 17 nt, Human
gccucccacccccaucu

SEQ ID NO: 2910110 - RNA, 21 nt, Human
gccucccgaauagcugggacu

SEQ ID NO: 2910111 - RNA, 13 nt, Human
gccucccacagac

SEQ ID NO: 2910112 - RNA, 20 nt, Human
gccucccaaggagaacaaau

SEQ ID NO: 2910113 - RNA, 21 nt, Human
gccucccaaggagaacaaaua

SEQ ID NO: 2910114 - RNA, 12 nt, Human
gccucccacccc

SEQ ID NO: 2910115 - RNA, 13 nt, Human
gccucauauuuaa

SEQ ID NO: 2910116 - RNA, 15 nt, Human
gccucauauuuaaag

SEQ ID NO: 2910117 - RNA, 22 nt, Human
gccucauauuuaaagacaggga

SEQ ID NO: 2910118 - RNA, 15 nt, Human
gccucagugccacua

SEQ ID NO: 2910119 - RNA, 24 nt, Human
gccucaguccuccccucacagccu

SEQ ID NO: 2910120 - RNA, 17 nt, Human
gccucggccucccaaag

SEQ ID NO: 2910121 - RNA, 20 nt, Human
gccucggcuuuucucagcug

SEQ ID NO: 2910122 - RNA, 19 nt, Human
gccucggcuuuucucagcu

SEQ ID NO: 2910123 - RNA, 21 nt, Human
gccucgggacaccugcccugc

SEQ ID NO: 2910124 - RNA, 18 nt, Human
gccucggcuuuucucagc

SEQ ID NO: 2910125 - RNA, 15 nt, Human
gccucccgaguagcu

SEQ ID NO: 2910126 - RNA, 23 nt, Human
gccucccgaauagcugggacuac

SEQ ID NO: 2910127 - RNA, 21 nt, Human
gccucggacuuagcugggaga

SEQ ID NO: 2910128 - RNA, 20 nt, Human
gccucggacuuagcugggag

SEQ ID NO: 2910129 - RNA, 20 nt, Human
gccucuccuuguggccuggg

SEQ ID NO: 2910130 - RNA, 21 nt, Human
gccucuccuuguggccugggc

SEQ ID NO: 2910131 - RNA, 22 nt, Human
gccucuccuuguggccugggcc

SEQ ID NO: 2910132 - RNA, 21 nt, Human
gccucuauccuacaaggccua

SEQ ID NO: 2910133 - RNA, 13 nt, Human
gccucucacacac

SEQ ID NO: 2910134 - RNA, 15 nt, Human
gccucucacacacau

SEQ ID NO: 2910135 - RNA, 23 nt, Human
gccucucaccucugugccucugu

SEQ ID NO: 2910136 - RNA, 20 nt, Human
gccucguuggaagaggaaca

SEQ ID NO: 2910137 - RNA, 22 nt, Human
gccucgggacaccugcccugcc

SEQ ID NO: 2910138 - RNA, 13 nt, Human
gccucgggaccuc

SEQ ID NO: 2910139 - RNA, 15 nt, Human
gccuaauaaacaauu

SEQ ID NO: 2910140 - RNA, 19 nt, Human
gccuauaugagaagaauag

SEQ ID NO: 2910141 - RNA, 18 nt, Human
gccuaaguauuaaaacau

SEQ ID NO: 2910142 - RNA, 14 nt, Human
gccuaaguauuaaa

SEQ ID NO: 2910143 - RNA, 14 nt, Human
gccuaaggcugaac

SEQ ID NO: 2910144 - RNA, 12 nt, Human
gccuaaguauua

SEQ ID NO: 2910145 - RNA, 16 nt, Human
gccuaaggcugaacuu

SEQ ID NO: 2910146 - RNA, 15 nt, Human
gccgaggacuuugau

SEQ ID NO: 2910147 - RNA, 16 nt, Human
gccgaggagccaggca

SEQ ID NO: 2910148 - RNA, 18 nt, Human
gccgaggagccaggcaac

SEQ ID NO: 2910149 - RNA, 18 nt, Human
gccgaggaggugccugga

SEQ ID NO: 2910150 - RNA, 21 nt, Human
gccucaagugauucuccugcc

SEQ ID NO: 2910151 - RNA, 20 nt, Human
gccucaagugauucuccugc

SEQ ID NO: 2910152 - RNA, 19 nt, Human
gccucaagugauucuccug

SEQ ID NO: 2910153 - RNA, 16 nt, Human
gccucaaccuccuggg

SEQ ID NO: 2910154 - RNA, 14 nt, Human
gccucaaccuccug

SEQ ID NO: 2910155 - RNA, 14 nt, Human
gccuauccuggcca

SEQ ID NO: 2910156 - RNA, 21 nt, Human
gccuaucuccuagggcuaugg

SEQ ID NO: 2910157 - RNA, 16 nt, Human
gccuaugagcauccug

SEQ ID NO: 2910158 - RNA, 20 nt, Human
gccuaugagcauccugagcc

SEQ ID NO: 2910159 - RNA, 20 nt, Human
gccucacuucuaggguaugg

SEQ ID NO: 2910160 - RNA, 19 nt, Human
gccucacuuggucugccag

SEQ ID NO: 2910161 - RNA, 20 nt, Human
gccucacuuggucugccagg

SEQ ID NO: 2910162 - RNA, 22 nt, Human
gccucacuuggucugccaggcc

SEQ ID NO: 2910163 - RNA, 22 nt, Human
gccucacugauauauuuuccag

SEQ ID NO: 2910164 - RNA, 14 nt, Human
gccucacccuugcg

SEQ ID NO: 2910165 - RNA, 17 nt, Human
gccucaccgcuucccuc

SEQ ID NO: 2910166 - RNA, 20 nt, Human
gccucaccgcuucccuccug

SEQ ID NO: 2910167 - RNA, 16 nt, Human
gccucaccucuaccca

SEQ ID NO: 2910168 - RNA, 17 nt, Human
gccucaccucuacccaa

SEQ ID NO: 2910169 - RNA, 18 nt, Human
gccucaccucuacccaaa

SEQ ID NO: 2910170 - RNA, 23 nt, Human
gccucagccucccaaagugcugg

SEQ ID NO: 2910171 - RNA, 16 nt, Human
gccucagccucccaag

SEQ ID NO: 2910172 - RNA, 20 nt, Human
gccucagcuacccacuaucc

SEQ ID NO: 2910173 - RNA, 23 nt, Human
gccucagcuacccacuauccuuc

SEQ ID NO: 2910174 - RNA, 15 nt, Human
gccucagccucccga

SEQ ID NO: 2910175 - RNA, 16 nt, Human
gccucagccucccgag

SEQ ID NO: 2910176 - RNA, 18 nt, Human
gccucagccuccugagua

SEQ ID NO: 2910177 - RNA, 16 nt, Human
gccucagccuccugag

SEQ ID NO: 2910178 - RNA, 14 nt, Human
gccucagccucccg

SEQ ID NO: 2910179 - RNA, 14 nt, Human
gccucagugccacu

SEQ ID NO: 2910180 - RNA, 12 nt, Human
gccucagugcca

SEQ ID NO: 2910181 - RNA, 18 nt, Human
gccucagucucccucccu

SEQ ID NO: 2910182 - RNA, 15 nt, Human
gccucagucucccuc

SEQ ID NO: 2910183 - RNA, 15 nt, Human
gccucaguauauuua

SEQ ID NO: 2910184 - RNA, 16 nt, Human
gccucaguauauuuaa

SEQ ID NO: 2910185 - RNA, 21 nt, Human
gccucaguauauuuaaacuca

SEQ ID NO: 2910186 - RNA, 20 nt, Human
gccucaguaagacgacaagg

SEQ ID NO: 2910187 - RNA, 15 nt, Human
gccucaguccucccc

SEQ ID NO: 2910188 - RNA, 16 nt, Human
gccucaguccuccccu

SEQ ID NO: 2910189 - RNA, 18 nt, Human
gccucaguccuccccuca

SEQ ID NO: 2910190 - RNA, 22 nt, Human
gccucaguccuccccucacagc

SEQ ID NO: 2910191 - RNA, 23 nt, Human
gccucaguccuccccucacagcc

SEQ ID NO: 2910192 - RNA, 15 nt, Human
gccucagcugccuca

SEQ ID NO: 2910193 - RNA, 14 nt, Human
gccucagcugccuc

SEQ ID NO: 2910194 - RNA, 19 nt, Human
gccucagcugccucacuuc

SEQ ID NO: 2910195 - RNA, 16 nt, Human
gccucagcugccucac

SEQ ID NO: 2910196 - RNA, 20 nt, Human
gccucagcugccucacuucc

SEQ ID NO: 2910197 - RNA, 19 nt, Human
gccucagcugaaugccucc

SEQ ID NO: 2910198 - RNA, 12 nt, Human
gccucaggcugc

SEQ ID NO: 2910199 - RNA, 11 nt, Human
gccugcacaca

SEQ ID NO: 2910200 - RNA, 13 nt, Human
gccugcacacaag

SEQ ID NO: 2910201 - RNA, 17 nt, Human
gccugcaaacgcugccu

SEQ ID NO: 2910202 - RNA, 16 nt, Human
gccugcaaacgcugcc

SEQ ID NO: 2910203 - RNA, 20 nt, Human
gccugauugccaagcucagg

SEQ ID NO: 2910204 - RNA, 21 nt, Human
gccugauugccaagcucagga

SEQ ID NO: 2910205 - RNA, 19 nt, Human
gccugauugccaagcucag

SEQ ID NO: 2910206 - RNA, 20 nt, Human
gccugaugcucccuccccug

SEQ ID NO: 2910207 - RNA, 13 nt, Human
gccugauggaccu

SEQ ID NO: 2910208 - RNA, 14 nt, Human
gccugauggaccug

SEQ ID NO: 2910209 - RNA, 17 nt, Human
gccugcacuccucaggg

SEQ ID NO: 2910210 - RNA, 13 nt, Human
gccugcuucccac

SEQ ID NO: 2910211 - RNA, 21 nt, Human
gccugcuucccaccucccugc

SEQ ID NO: 2910212 - RNA, 22 nt, Human
gccugcuucccaccucccugcc

SEQ ID NO: 2910213 - RNA, 23 nt, Human
gccugcuucccaccucccugccc

SEQ ID NO: 2910214 - RNA, 22 nt, Human
gccugcuggucacagccuccuc

SEQ ID NO: 2910215 - RNA, 18 nt, Human
gccucugccucugacaca

SEQ ID NO: 2910216 - RNA, 12 nt, Human
gccucugccugu

SEQ ID NO: 2910217 - RNA, 22 nt, Human
gccugaagucacacagugaguc

SEQ ID NO: 2910218 - RNA, 19 nt, Human
gccucugcugauccuccca

SEQ ID NO: 2910219 - RNA, 18 nt, Human
gccucucgguugaaaccu

SEQ ID NO: 2910220 - RNA, 15 nt, Human
gccucugccuuagag

SEQ ID NO: 2910221 - RNA, 18 nt, Human
gccucugccuuagaggag

SEQ ID NO: 2910222 - RNA, 19 nt, Human
gccucugccuuagaggagc

SEQ ID NO: 2910223 - RNA, 13 nt, Human
gccucugccuguc

SEQ ID NO: 2910224 - RNA, 18 nt, Human
gccucugcugauccuccc

SEQ ID NO: 2910225 - RNA, 19 nt, Human
gccugaugcucccuccccu

SEQ ID NO: 2910226 - RNA, 17 nt, Human
gccugaugcucccuccc

SEQ ID NO: 2910227 - RNA, 16 nt, Human
gccugaugcucccucc

SEQ ID NO: 2910228 - RNA, 14 nt, Human
gccugaugcucccu

SEQ ID NO: 2910229 - RNA, 16 nt, Human
gccugauccuccaaca

SEQ ID NO: 2910230 - RNA, 14 nt, Human
gccugaucucuucc

SEQ ID NO: 2910231 - RNA, 15 nt, Human
gccugaucucuuccu

SEQ ID NO: 2910232 - RNA, 16 nt, Human
gccugaucucuuccug

SEQ ID NO: 2910233 - RNA, 17 nt, Human
gccugaucucuuccugu

SEQ ID NO: 2910234 - RNA, 15 nt, Human
gccugagugccuggc

SEQ ID NO: 2910235 - RNA, 12 nt, Human
gccugagucagg

SEQ ID NO: 2910236 - RNA, 18 nt, Human
gccugagucagggcccag

SEQ ID NO: 2910237 - RNA, 19 nt, Human
gccugagucagggcccaga

SEQ ID NO: 2910238 - RNA, 20 nt, Human
gccugagucagggcccagag

SEQ ID NO: 2910239 - RNA, 22 nt, Human
gccugagucagggcccagaggc

SEQ ID NO: 2910240 - RNA, 23 nt, Human
gccugaguccacgaccuaggcag

SEQ ID NO: 2910241 - RNA, 23 nt, Human
gccugacccuacuucuuuugcuc

SEQ ID NO: 2910242 - RNA, 13 nt, Human
gccugacagaaac

SEQ ID NO: 2910243 - RNA, 15 nt, Human
gccugacagaaacca

SEQ ID NO: 2910244 - RNA, 22 nt, Human
gccugaaugcuuauagguggcc

SEQ ID NO: 2910245 - RNA, 19 nt, Human
gccuggcagggaggucagg

SEQ ID NO: 2910246 - RNA, 20 nt, Human
gccuggcagggaggucaggc

SEQ ID NO: 2910247 - RNA, 23 nt, Human
gccuggcagggaggucaggcccu

SEQ ID NO: 2910248 - RNA, 21 nt, Human
gccuggauauuauucuuguag

SEQ ID NO: 2910249 - RNA, 22 nt, Human
gccuggauacaguauaaaaaua

SEQ ID NO: 2910250 - RNA, 14 nt, Human
gccuggccaccucu

SEQ ID NO: 2910251 - RNA, 20 nt, Human
gccuggcauucuuguacagu

SEQ ID NO: 2910252 - RNA, 22 nt, Human
gccuggcauucuuguacagugu

SEQ ID NO: 2910253 - RNA, 15 nt, Human
gccuggccaaaggga

SEQ ID NO: 2910254 - RNA, 20 nt, Human
gccuggccaacauggcgaaa

SEQ ID NO: 2910255 - RNA, 16 nt, Human
gccuggccaccucucu

SEQ ID NO: 2910256 - RNA, 17 nt, Human
gccuggccaccucucuc

SEQ ID NO: 2910257 - RNA, 18 nt, Human
gccuggccaccucucucc

SEQ ID NO: 2910258 - RNA, 19 nt, Human
gccuggccaccucucuccu

SEQ ID NO: 2910259 - RNA, 13 nt, Human
gccuggccacgcc

SEQ ID NO: 2910260 - RNA, 15 nt, Human
gccuggccagaugca

SEQ ID NO: 2910261 - RNA, 14 nt, Human
gccuggccagaugc

SEQ ID NO: 2910262 - RNA, 17 nt, Human
gccuggccaggcagauc

SEQ ID NO: 2910263 - RNA, 15 nt, Human
gccuggccaggcaga

SEQ ID NO: 2910264 - RNA, 23 nt, Human
gccuggccaggcagaucugugcc

SEQ ID NO: 2910265 - RNA, 17 nt, Human
gccuggccagggccugg

SEQ ID NO: 2910266 - RNA, 14 nt, Human
gccuggccaggagc

SEQ ID NO: 2910267 - RNA, 15 nt, Human
gccuggccaggagcu

SEQ ID NO: 2910268 - RNA, 21 nt, Human
gccuggccagccuacaauggg

SEQ ID NO: 2910269 - RNA, 16 nt, Human
gccuggccagccuaca

SEQ ID NO: 2910270 - RNA, 19 nt, Human
gccuggccaggagcucuuc

SEQ ID NO: 2910271 - RNA, 14 nt, Human
gccuggccaggcag

SEQ ID NO: 2910272 - RNA, 19 nt, Human
gccugggggaguuuuccuc

SEQ ID NO: 2910273 - RNA, 21 nt, Human
gccugggggaguuuuccucua

SEQ ID NO: 2910274 - RNA, 23 nt, Human
gccugggugacaaagugagacuc

SEQ ID NO: 2910275 - RNA, 20 nt, Human
gccugggugacaaagcgaga

SEQ ID NO: 2910276 - RNA, 15 nt, Human
gccuggguggacaug

SEQ ID NO: 2910277 - RNA, 19 nt, Human
gccuggguggaucggccuc

SEQ ID NO: 2910278 - RNA, 23 nt, Human
gccuggguggaucggccuccucu

SEQ ID NO: 2910279 - RNA, 19 nt, Human
gccuguagaauagccugug

SEQ ID NO: 2910280 - RNA, 20 nt, Human
gccuguagaauagccugugg

SEQ ID NO: 2910281 - RNA, 22 nt, Human
gccuguagaauagccuguggcc

SEQ ID NO: 2910282 - RNA, 23 nt, Human
gccuguaguuaggaaauaaaacc

SEQ ID NO: 2910283 - RNA, 13 nt, Human
gccuguauacuuu

SEQ ID NO: 2910284 - RNA, 15 nt, Human
gccuguauacuuuag

SEQ ID NO: 2910285 - RNA, 17 nt, Human
gccuguauacuuuagua

SEQ ID NO: 2910286 - RNA, 18 nt, Human
gccuguauacuuuaguau

SEQ ID NO: 2910287 - RNA, 19 nt, Human
gccuguauacuuuaguaug

SEQ ID NO: 2910288 - RNA, 22 nt, Human
gccuguaguuaggaaauaaaac

SEQ ID NO: 2910289 - RNA, 19 nt, Human
gccuguaguuaggaaauaa

SEQ ID NO: 2910290 - RNA, 18 nt, Human
gccuguaguuaggaaaua

SEQ ID NO: 2910291 - RNA, 17 nt, Human
gccuguaguuaggaaau

SEQ ID NO: 2910292 - RNA, 16 nt, Human
gccuguaguuaggaaa

SEQ ID NO: 2910293 - RNA, 14 nt, Human
gccuguaguuagga

SEQ ID NO: 2910294 - RNA, 13 nt, Human
gccuguagcccac

SEQ ID NO: 2910295 - RNA, 14 nt, Human
gccuguagcaguga

SEQ ID NO: 2910296 - RNA, 22 nt, Human
gccuguagcccacucugcucgc

SEQ ID NO: 2910297 - RNA, 19 nt, Human
gccuguagcccacucugcu

SEQ ID NO: 2910298 - RNA, 17 nt, Human
gcccucucccucuaggc

SEQ ID NO: 2910299 - RNA, 21 nt, Human
gcccucucccucuaggcucug

SEQ ID NO: 2910300 - RNA, 22 nt, Human
gcccucucccucuaggcucugc

SEQ ID NO: 2910301 - RNA, 24 nt, Human
gcccucucccucuaggcucugccu

SEQ ID NO: 2910302 - RNA, 17 nt, Human
gcccucucccuuacccu

SEQ ID NO: 2910303 - RNA, 21 nt, Human
gcccucucccuuacccuggga

SEQ ID NO: 2910304 - RNA, 22 nt, Human
gcccucucccuuacccugggaa

SEQ ID NO: 2910305 - RNA, 16 nt, Human
gcccucuccuuccuua

SEQ ID NO: 2910306 - RNA, 16 nt, Human
gcccugaggaaggagg

SEQ ID NO: 2910307 - RNA, 22 nt, Human
gcccugaggaaggaggggaagc

SEQ ID NO: 2910308 - RNA, 18 nt, Human
gcccggcuccaggcuccu

SEQ ID NO: 2910309 - RNA, 17 nt, Human
gcccggcuccaggcucc

SEQ ID NO: 2910310 - RNA, 15 nt, Human
gcccucgcugcuucu

SEQ ID NO: 2910311 - RNA, 16 nt, Human
gcccucgcugcuucug

SEQ ID NO: 2910312 - RNA, 17 nt, Human
gcccuccuuguccaccc

SEQ ID NO: 2910313 - RNA, 19 nt, Human
gcccuccuuguccacccac

SEQ ID NO: 2910314 - RNA, 13 nt, Human
gcccuccuuucug

SEQ ID NO: 2910315 - RNA, 17 nt, Human
gcccuccuuucugugcc

SEQ ID NO: 2910316 - RNA, 18 nt, Human
gcccuccuuucugugccc

SEQ ID NO: 2910317 - RNA, 20 nt, Human
gcccuccuuucugugcccua

SEQ ID NO: 2910318 - RNA, 13 nt, Human
gcccucgacacuc

SEQ ID NO: 2910319 - RNA, 23 nt, Human
gcccucgacacucaccaugaagc

SEQ ID NO: 2910320 - RNA, 21 nt, Human
gcccucgcacggccccgaagg

SEQ ID NO: 2910321 - RNA, 11 nt, Human
gcccucucccc

SEQ ID NO: 2910322 - RNA, 15 nt, Human
gcccucuccccaccc

SEQ ID NO: 2910323 - RNA, 20 nt, Human
gcccucuccccaccccuacc

SEQ ID NO: 2910324 - RNA, 22 nt, Human
gcccucuccccaccccuacccc

SEQ ID NO: 2910325 - RNA, 23 nt, Human
gcccucuccccaccccuaccccu

SEQ ID NO: 2910326 - RNA, 22 nt, Human
gcccugaggugaaagggagcua

SEQ ID NO: 2910327 - RNA, 21 nt, Human
gcccugaggugaaagggagcu

SEQ ID NO: 2910328 - RNA, 22 nt, Human
gcccugauguguccucagggag

SEQ ID NO: 2910329 - RNA, 20 nt, Human
gcccugcuuugggcugcccu

SEQ ID NO: 2910330 - RNA, 21 nt, Human
gcccugcuuugggcugcccug

SEQ ID NO: 2910331 - RNA, 19 nt, Human
gcccugcuuugggcugccc

SEQ ID NO: 2910332 - RNA, 23 nt, Human
gcccugcaauguaucccuucuca

SEQ ID NO: 2910333 - RNA, 20 nt, Human
gcccuggaacauccuuugca

SEQ ID NO: 2910334 - RNA, 21 nt, Human
gcccuggaacucuaucugggc

SEQ ID NO: 2910335 - RNA, 22 nt, Human
gcccugcuuugggcugcccugg

SEQ ID NO: 2910336 - RNA, 23 nt, Human
gcccugcuuugggcugcccuggu

SEQ ID NO: 2910337 - RNA, 15 nt, Human
gcagacucuacagag

SEQ ID NO: 2910338 - RNA, 15 nt, Human
gcagacuacacagga

SEQ ID NO: 2910339 - RNA, 16 nt, Human
gcagacuacacaggau

SEQ ID NO: 2910340 - RNA, 14 nt, Human
gcagacgccgggga

SEQ ID NO: 2910341 - RNA, 17 nt, Human
gcagacaggaggaauca

SEQ ID NO: 2910342 - RNA, 22 nt, Human
gcagaccuccccagccccuagc

SEQ ID NO: 2910343 - RNA, 23 nt, Human
gcagaccuccccagccccuagcc

SEQ ID NO: 2910344 - RNA, 12 nt, Human
gcagaccucugg

SEQ ID NO: 2910345 - RNA, 19 nt, Human
gccccuccucucugcccua

SEQ ID NO: 2910346 - RNA, 12 nt, Human
gccccucccuuc

SEQ ID NO: 2910347 - RNA, 14 nt, Human
gccccucccuucaa

SEQ ID NO: 2910348 - RNA, 15 nt, Human
gccccucccuucaac

SEQ ID NO: 2910349 - RNA, 18 nt, Human
gccccuccucucugcccu

SEQ ID NO: 2910350 - RNA, 15 nt, Human
gccccugccacccug

SEQ ID NO: 2910351 - RNA, 14 nt, Human
gccccugccacccu

SEQ ID NO: 2910352 - RNA, 13 nt, Human
gccccugccaccc

SEQ ID NO: 2910353 - RNA, 12 nt, Human
gccccucucugg

SEQ ID NO: 2910354 - RNA, 14 nt, Human
gccccucucugggc

SEQ ID NO: 2910355 - RNA, 15 nt, Human
gccccucucugggcc

SEQ ID NO: 2910356 - RNA, 17 nt, Human
gccccucuccuucuuag

SEQ ID NO: 2910357 - RNA, 14 nt, Human
gccccucucaccaa

SEQ ID NO: 2910358 - RNA, 15 nt, Human
gccccucgccugugg

SEQ ID NO: 2910359 - RNA, 23 nt, Human
gccccucgccuguggagcucagc

SEQ ID NO: 2910360 - RNA, 15 nt, Human
gccccucucaccaaa

SEQ ID NO: 2910361 - RNA, 21 nt, Human
gccccucucccgccagacugu

SEQ ID NO: 2910362 - RNA, 16 nt, Human
gcccggcuccaggcuc

SEQ ID NO: 2910363 - RNA, 18 nt, Human
gcccggcuaauuuuugua

SEQ ID NO: 2910364 - RNA, 20 nt, Human
gcccggccgcuccaccagca

SEQ ID NO: 2910365 - RNA, 17 nt, Human
gcccggcgccccugcca

SEQ ID NO: 2910366 - RNA, 15 nt, Human
gcccggcgccuggcc

SEQ ID NO: 2910367 - RNA, 18 nt, Human
gcccggcgccuggccucc

SEQ ID NO: 2910368 - RNA, 20 nt, Human
gcccggcgccuggccuccag

SEQ ID NO: 2910369 - RNA, 21 nt, Human
gcccggcgccuggccuccagg

SEQ ID NO: 2910370 - RNA, 22 nt, Human
gcccggcgccuggccuccaggc

SEQ ID NO: 2910371 - RNA, 23 nt, Human
gcccggcgccuggccuccaggcc

SEQ ID NO: 2910372 - RNA, 22 nt, Human
gcccggagauuggacggccuga

SEQ ID NO: 2910373 - RNA, 19 nt, Human
gcccggagcugccccucuc

SEQ ID NO: 2910374 - RNA, 23 nt, Human
gcccggagcugccccucucuggg

SEQ ID NO: 2910375 - RNA, 15 nt, Human
gcccggaugcugcuu

SEQ ID NO: 2910376 - RNA, 16 nt, Human
gcccggaugcugcuuc

SEQ ID NO: 2910377 - RNA, 16 nt, Human
gcccggauucugggag

SEQ ID NO: 2910378 - RNA, 15 nt, Human
gcccggauucuggga

SEQ ID NO: 2910379 - RNA, 17 nt, Human
gcccggauucugggagg

SEQ ID NO: 2910380 - RNA, 14 nt, Human
gcccgccugcccac

SEQ ID NO: 2910381 - RNA, 15 nt, Human
gcccgccugcccacc

SEQ ID NO: 2910382 - RNA, 16 nt, Human
gcccgccugcccaccu

SEQ ID NO: 2910383 - RNA, 18 nt, Human
gcccgccugcccaccugc

SEQ ID NO: 2910384 - RNA, 22 nt, Human
gcccgccugcccaccugccugg

SEQ ID NO: 2910385 - RNA, 23 nt, Human
gcccgccugcccaccugccuggc

SEQ ID NO: 2910386 - RNA, 14 nt, Human
gcccgccccugcag

SEQ ID NO: 2910387 - RNA, 15 nt, Human
gcccgccccugcagc

SEQ ID NO: 2910388 - RNA, 16 nt, Human
gcccgccccugcagca

SEQ ID NO: 2910389 - RNA, 15 nt, Human
gcccgccacacagac

SEQ ID NO: 2910390 - RNA, 21 nt, Human
gccccuucauugauuuccugu

SEQ ID NO: 2910391 - RNA, 22 nt, Human
gccccuucauugauuuccugug

SEQ ID NO: 2910392 - RNA, 23 nt, Human
gccccuucauugauuuccugugu

SEQ ID NO: 2910393 - RNA, 19 nt, Human
gccccuucccacucacccc

SEQ ID NO: 2910394 - RNA, 23 nt, Human
gccccugcauccccuuggcugug

SEQ ID NO: 2910395 - RNA, 14 nt, Human
gccccugcaucccc

SEQ ID NO: 2910396 - RNA, 20 nt, Human
gccccugcauccccuuggcu

SEQ ID NO: 2910397 - RNA, 15 nt, Human
gccccuuaggccagu

SEQ ID NO: 2910398 - RNA, 12 nt, Human
gccccuuccccc

SEQ ID NO: 2910399 - RNA, 16 nt, Human
gcccgacagccuggca

SEQ ID NO: 2910400 - RNA, 17 nt, Human
gcccgacagccuggcac

SEQ ID NO: 2910401 - RNA, 19 nt, Human
gcccgacagccuggcacag

SEQ ID NO: 2910402 - RNA, 23 nt, Human
gcccugguggcagugggagcugc

SEQ ID NO: 2910403 - RNA, 22 nt, Human
gcccugguggcagugggagcug

SEQ ID NO: 2910404 - RNA, 21 nt, Human
gcccugguggcagugggagcu

SEQ ID NO: 2910405 - RNA, 20 nt, Human
gcccugguggcagugggagc

SEQ ID NO: 2910406 - RNA, 19 nt, Human
gcccugguggcagugggag

SEQ ID NO: 2910407 - RNA, 18 nt, Human
gcccugguggcaguggga

SEQ ID NO: 2910408 - RNA, 17 nt, Human
gcccugguggcaguggg

SEQ ID NO: 2910409 - RNA, 14 nt, Human
gcccugguggcagu

SEQ ID NO: 2910410 - RNA, 23 nt, Human
gcccugguuuccugcccugggag

SEQ ID NO: 2910411 - RNA, 21 nt, Human
gcccugguuuccugcccuggg

SEQ ID NO: 2910412 - RNA, 20 nt, Human
gcccugguuuccugcccugg

SEQ ID NO: 2910413 - RNA, 19 nt, Human
gcccugguuuccugcccug

SEQ ID NO: 2910414 - RNA, 18 nt, Human
gcccugguuuccugcccu

SEQ ID NO: 2910415 - RNA, 17 nt, Human
gcccugguuuccugccc

SEQ ID NO: 2910416 - RNA, 22 nt, Human
gcccugguuucacuggcccaag

SEQ ID NO: 2910417 - RNA, 20 nt, Human
gcccugguuucacuggccca

SEQ ID NO: 2910418 - RNA, 18 nt, Human
gcccugguuucacuggcc

SEQ ID NO: 2910419 - RNA, 16 nt, Human
gcccugguuucacugg

SEQ ID NO: 2910420 - RNA, 15 nt, Human
gcccugguuuccugc

SEQ ID NO: 2910421 - RNA, 14 nt, Human
gcccugguuuccug

SEQ ID NO: 2910422 - RNA, 21 nt, Human
gcccuggugcgaauggacuuu

SEQ ID NO: 2910423 - RNA, 16 nt, Human
gccgagaucacgccac

SEQ ID NO: 2910424 - RNA, 12 nt, Human
gcccuuucugug

SEQ ID NO: 2910425 - RNA, 20 nt, Human
gcccuuugcaucguccccuc

SEQ ID NO: 2910426 - RNA, 13 nt, Human
gcccuuucugugu

SEQ ID NO: 2910427 - RNA, 16 nt, Human
gcccuuugaagccuca

SEQ ID NO: 2910428 - RNA, 17 nt, Human
gcccuuugaagccucag

SEQ ID NO: 2910429 - RNA, 18 nt, Human
gcccuuugaagccucagc

SEQ ID NO: 2910430 - RNA, 19 nt, Human
gcccuuugaagccucagcu

SEQ ID NO: 2910431 - RNA, 22 nt, Human
gcccuuucuguaccauuuauuu

SEQ ID NO: 2910432 - RNA, 16 nt, Human
gcccuuucuguaccau

SEQ ID NO: 2910433 - RNA, 19 nt, Human
gccgagaucacgccacugc

SEQ ID NO: 2910434 - RNA, 18 nt, Human
gccgagaucacgccacug

SEQ ID NO: 2910435 - RNA, 21 nt, Human
gcccuuccucuccacugccuu

SEQ ID NO: 2910436 - RNA, 17 nt, Human
gcccuuccucuccacug

SEQ ID NO: 2910437 - RNA, 16 nt, Human
gcccuuccucuccacu

SEQ ID NO: 2910438 - RNA, 18 nt, Human
gcccuuccucuccacugc

SEQ ID NO: 2910439 - RNA, 19 nt, Human
gcccuuccucuccacugcc

SEQ ID NO: 2910440 - RNA, 22 nt, Human
gcccuuuccccgacgcccaccc

SEQ ID NO: 2910441 - RNA, 21 nt, Human
gcccuuuccccgacgcccacc

SEQ ID NO: 2910442 - RNA, 20 nt, Human
gcccuuccucuccacugccu

SEQ ID NO: 2910443 - RNA, 23 nt, Human
gcccugggcucggaggcugcccc

SEQ ID NO: 2910444 - RNA, 14 nt, Human
gcccugguccaggg

SEQ ID NO: 2910445 - RNA, 13 nt, Human
gcccugguccagg

SEQ ID NO: 2910446 - RNA, 15 nt, Human
gcccuggggcugggc

SEQ ID NO: 2910447 - RNA, 16 nt, Human
gcccuggggcugggcc

SEQ ID NO: 2910448 - RNA, 18 nt, Human
gcccugguccuuccaggc

SEQ ID NO: 2910449 - RNA, 15 nt, Human
gcccugguccuucca

SEQ ID NO: 2910450 - RNA, 23 nt, Human
gcccugguccagggaagcuggcc

SEQ ID NO: 2910451 - RNA, 20 nt, Human
gcccugguccagggaagcug

SEQ ID NO: 2910452 - RNA, 18 nt, Human
gcccugguccagggaagc

SEQ ID NO: 2910453 - RNA, 17 nt, Human
gcccugguccagggaag

SEQ ID NO: 2910454 - RNA, 16 nt, Human
gcccugguccagggaa

SEQ ID NO: 2910455 - RNA, 15 nt, Human
gcccuggugcugcca

SEQ ID NO: 2910456 - RNA, 16 nt, Human
gcccuggugcugccac

SEQ ID NO: 2910457 - RNA, 17 nt, Human
gcccuggugcugccaca

SEQ ID NO: 2910458 - RNA, 21 nt, Human
gcccuggugcugccacacuuc

SEQ ID NO: 2910459 - RNA, 16 nt, Human
gcccugggaggcagug

SEQ ID NO: 2910460 - RNA, 17 nt, Human
gcccugggccacacuga

SEQ ID NO: 2910461 - RNA, 15 nt, Human
gcccugggcucggag

SEQ ID NO: 2910462 - RNA, 16 nt, Human
gcccugggcucggagg

SEQ ID NO: 2910463 - RNA, 17 nt, Human
gcccugggcucggaggc

SEQ ID NO: 2910464 - RNA, 19 nt, Human
gcccugggcucggaggcug

SEQ ID NO: 2910465 - RNA, 21 nt, Human
gcccugggcucggaggcugcc

SEQ ID NO: 2910466 - RNA, 18 nt, Human
gcccugggaaaccccuuc

SEQ ID NO: 2910467 - RNA, 22 nt, Human
gcccugggaaaccccuucucug

SEQ ID NO: 2910468 - RNA, 23 nt, Human
gcccugggaaaccccuucucugu

SEQ ID NO: 2910469 - RNA, 14 nt, Human
gcccugggaggcag

SEQ ID NO: 2910470 - RNA, 11 nt, Human
gcccugggagg

SEQ ID NO: 2910471 - RNA, 17 nt, Human
gcccuggcagggggcau

SEQ ID NO: 2910472 - RNA, 21 nt, Human
gcccuggcagggucauccugu

SEQ ID NO: 2910473 - RNA, 16 nt, Human
gcccuggcagggggca

SEQ ID NO: 2910474 - RNA, 15 nt, Human
gcccuggcagggggc

SEQ ID NO: 2910475 - RNA, 12 nt, Human
gcccuggcagga

SEQ ID NO: 2910476 - RNA, 19 nt, Human
gcccuggcaggaugacccu

SEQ ID NO: 2910477 - RNA, 12 nt, Human
gcccuggcucug

SEQ ID NO: 2910478 - RNA, 14 nt, Human
gcccuggcucugca

SEQ ID NO: 2910479 - RNA, 17 nt, Human
gcccuggcucugcuguc

SEQ ID NO: 2910480 - RNA, 20 nt, Human
gcccuggcucccacaggccc

SEQ ID NO: 2910481 - RNA, 15 nt, Human
gcccuggcucccaca

SEQ ID NO: 2910482 - RNA, 19 nt, Human
gcccuggcucccacaggcc

SEQ ID NO: 2910483 - RNA, 13 nt, Human
gcuaaauuuucug

SEQ ID NO: 2910484 - RNA, 19 nt, Human
gcuaagcaagcuaaccuua

SEQ ID NO: 2910485 - RNA, 19 nt, Human
gcuaagcuaggaaugaaau

SEQ ID NO: 2910486 - RNA, 15 nt, Human
gcuaagcuaggaaug

SEQ ID NO: 2910487 - RNA, 12 nt, Human
gcuacgccugca

SEQ ID NO: 2910488 - RNA, 15 nt, Human
gcuacuauaaagaga

SEQ ID NO: 2910489 - RNA, 16 nt, Human
gcuacuauaaagagaa

SEQ ID NO: 2910490 - RNA, 18 nt, Human
gcuacuagaauucuguau

SEQ ID NO: 2910491 - RNA, 21 nt, Human
gcuacuaaguucacauuagaa

SEQ ID NO: 2910492 - RNA, 22 nt, Human
gcuacuaaguucacauuagaau

SEQ ID NO: 2910493 - RNA, 14 nt, Human
gcuacgaaucuucc

SEQ ID NO: 2910494 - RNA, 15 nt, Human
gcuacgaaucuuccg

SEQ ID NO: 2910495 - RNA, 16 nt, Human
gcuagaguccucacuc

SEQ ID NO: 2910496 - RNA, 13 nt, Human
gcuagaguccuca

SEQ ID NO: 2910497 - RNA, 14 nt, Human
gcuagcaucccuga

SEQ ID NO: 2910498 - RNA, 14 nt, Human
gcuagcuggagccu

SEQ ID NO: 2910499 - RNA, 15 nt, Human
gcuagcuggagccug

SEQ ID NO: 2910500 - RNA, 20 nt, Human
gcuaucucugugugcacaaa

SEQ ID NO: 2910501 - RNA, 21 nt, Human
gcuaucuggaggccuuccagc

SEQ ID NO: 2910502 - RNA, 16 nt, Human
gcuaucucugugugca

SEQ ID NO: 2910503 - RNA, 13 nt, Human
gcuaucucugugu

SEQ ID NO: 2910504 - RNA, 20 nt, Human
gcuaacaaggcgaaauccug

SEQ ID NO: 2910505 - RNA, 16 nt, Human
gcuaacaccagacaga

SEQ ID NO: 2910506 - RNA, 20 nt, Human
gcuaacacacagcucccaua

SEQ ID NO: 2910507 - RNA, 18 nt, Human
gcuaaaugccuaauaaac

SEQ ID NO: 2910508 - RNA, 19 nt, Human
gcuaaaugccuaauaaaca

SEQ ID NO: 2910509 - RNA, 18 nt, Human
gcuaaauaaucuuacucu

SEQ ID NO: 2910510 - RNA, 23 nt, Human
gcuaaauggucgcccaggagaca

SEQ ID NO: 2910511 - RNA, 19 nt, Human
gcuaaauggucgcccagga

SEQ ID NO: 2910512 - RNA, 23 nt, Human
gcgugagccacugcaccgggcca

SEQ ID NO: 2910513 - RNA, 12 nt, Human
gcgugaaucugu

SEQ ID NO: 2910514 - RNA, 19 nt, Human
gcgugacacucuccuugca

SEQ ID NO: 2910515 - RNA, 21 nt, Human
gcgugacacucuccuugcagu

SEQ ID NO: 2910516 - RNA, 15 nt, Human
gcgugaucaaagcca

SEQ ID NO: 2910517 - RNA, 16 nt, Human
gcgugaggucccagga

SEQ ID NO: 2910518 - RNA, 18 nt, Human
gcgugagccacugcaccg

SEQ ID NO: 2910519 - RNA, 16 nt, Human
gcgugagccacugcac

SEQ ID NO: 2910520 - RNA, 23 nt, Human
gcgugaacccgggaggcggagcu

SEQ ID NO: 2910521 - RNA, 16 nt, Human
gcgguccacccaggag

SEQ ID NO: 2910522 - RNA, 13 nt, Human
gcggggacagcuc

SEQ ID NO: 2910523 - RNA, 12 nt, Human
gcggggacagcu

SEQ ID NO: 2910524 - RNA, 19 nt, Human
gccugugcauguaugucuu

SEQ ID NO: 2910525 - RNA, 15 nt, Human
gccugugcaaugcau

SEQ ID NO: 2910526 - RNA, 13 nt, Human
gccugugcacaca

SEQ ID NO: 2910527 - RNA, 15 nt, Human
gccugugcacacaca

SEQ ID NO: 2910528 - RNA, 23 nt, Human
gccugugcacacacacacacaug

SEQ ID NO: 2910529 - RNA, 17 nt, Human
gccugugaacugaacuc

SEQ ID NO: 2910530 - RNA, 19 nt, Human
gcgguccacccaggagccc

SEQ ID NO: 2910531 - RNA, 18 nt, Human
gcgguccacccaggagcc

SEQ ID NO: 2910532 - RNA, 19 nt, Human
gcgggcggcugggucugug

SEQ ID NO: 2910533 - RNA, 19 nt, Human
gcgggcuuauuuauuaaca

SEQ ID NO: 2910534 - RNA, 20 nt, Human
gcguagcgugcccgugugca

SEQ ID NO: 2910535 - RNA, 21 nt, Human
gcgucaggguuggugugcuga

SEQ ID NO: 2910536 - RNA, 14 nt, Human
gcgucagucuuuuu

SEQ ID NO: 2910537 - RNA, 18 nt, Human
gcgucagucuuuuucugu

SEQ ID NO: 2910538 - RNA, 19 nt, Human
gcgucagucuuuuucuguu

SEQ ID NO: 2910539 - RNA, 23 nt, Human
gcgucagucuuuuucuguuguaa

SEQ ID NO: 2910540 - RNA, 17 nt, Human
gcgucccaagauguuga

SEQ ID NO: 2910541 - RNA, 14 nt, Human
gcgucccaagaugu

SEQ ID NO: 2910542 - RNA, 14 nt, Human
gcguccagaaaugg

SEQ ID NO: 2910543 - RNA, 19 nt, Human
gcgucccagucucuggcag

SEQ ID NO: 2910544 - RNA, 15 nt, Human
gcgucccgcaccugu

SEQ ID NO: 2910545 - RNA, 16 nt, Human
gcgucccuagcaguga

SEQ ID NO: 2910546 - RNA, 19 nt, Human
gcgucccuagcagugaacu

SEQ ID NO: 2910547 - RNA, 16 nt, Human
gcgucuuccgccccug

SEQ ID NO: 2910548 - RNA, 18 nt, Human
gcgucuuccgccccugcc

SEQ ID NO: 2910549 - RNA, 20 nt, Human
gcgucuuccgccccugccug

SEQ ID NO: 2910550 - RNA, 21 nt, Human
gcgucuuccgccccugccugc

SEQ ID NO: 2910551 - RNA, 22 nt, Human
gcgucuuccgccccugccugcc

SEQ ID NO: 2910552 - RNA, 15 nt, Human
gcucagcggggacag

SEQ ID NO: 2910553 - RNA, 20 nt, Human
gcucagcggggacagcuccu

SEQ ID NO: 2910554 - RNA, 17 nt, Human
gcucaggugucccugca

SEQ ID NO: 2910555 - RNA, 18 nt, Human
gcucaggugucccugcac

SEQ ID NO: 2910556 - RNA, 22 nt, Human
gcucagcggggacagcuccuuc

SEQ ID NO: 2910557 - RNA, 21 nt, Human
gcucagcggggacagcuccuu

SEQ ID NO: 2910558 - RNA, 19 nt, Human
gcucaggugucccugcacu

SEQ ID NO: 2910559 - RNA, 15 nt, Human
gcucagcgccagccu

SEQ ID NO: 2910560 - RNA, 16 nt, Human
gcucaguaauuugagg

SEQ ID NO: 2910561 - RNA, 12 nt, Human
gcucagucccau

SEQ ID NO: 2910562 - RNA, 21 nt, Human
gcucaguaauuugaggacaac

SEQ ID NO: 2910563 - RNA, 20 nt, Human
gcucagucucaggagcaugg

SEQ ID NO: 2910564 - RNA, 17 nt, Human
gcucagucucaggagca

SEQ ID NO: 2910565 - RNA, 14 nt, Human
gcucagucucagga

SEQ ID NO: 2910566 - RNA, 23 nt, Human
gcucagucccaucagagagcgag

SEQ ID NO: 2910567 - RNA, 21 nt, Human
gcucagucucaggagcauggg

SEQ ID NO: 2910568 - RNA, 17 nt, Human
gcucagugcaaccucug

SEQ ID NO: 2910569 - RNA, 18 nt, Human
gcucagugcaaccucugc

SEQ ID NO: 2910570 - RNA, 19 nt, Human
gcucagugcaaccucugcu

SEQ ID NO: 2910571 - RNA, 20 nt, Human
gcucagugcaaccucugcuu

SEQ ID NO: 2910572 - RNA, 21 nt, Human
gcucagugcaaccucugcuuc

SEQ ID NO: 2910573 - RNA, 16 nt, Human
gcucaguucagaauca

SEQ ID NO: 2910574 - RNA, 17 nt, Human
gcucaguucagaaucac

SEQ ID NO: 2910575 - RNA, 19 nt, Human
gcucaguugcuaaacacug

SEQ ID NO: 2910576 - RNA, 19 nt, Human
gcucauauggggcugggag

SEQ ID NO: 2910577 - RNA, 19 nt, Human
gcuagcaguaaaagaugaa

SEQ ID NO: 2910578 - RNA, 19 nt, Human
gcucaccagccccagugcc

SEQ ID NO: 2910579 - RNA, 18 nt, Human
gcucaccagccccagugc

SEQ ID NO: 2910580 - RNA, 23 nt, Human
gcucaccagccccagugcccaca

SEQ ID NO: 2910581 - RNA, 20 nt, Human
gcucaccagccccagugccc

SEQ ID NO: 2910582 - RNA, 13 nt, Human
gcucaccuagagc

SEQ ID NO: 2910583 - RNA, 14 nt, Human
gcucaccuagagcc

SEQ ID NO: 2910584 - RNA, 15 nt, Human
gcucaccuagagcca

SEQ ID NO: 2910585 - RNA, 16 nt, Human
gcucaccuagagccag

SEQ ID NO: 2910586 - RNA, 17 nt, Human
gcucaccuagagccaga

SEQ ID NO: 2910587 - RNA, 18 nt, Human
gcucaccuagagccagac

SEQ ID NO: 2910588 - RNA, 19 nt, Human
gcucaccuagagccagacc

SEQ ID NO: 2910589 - RNA, 20 nt, Human
gcucaccuagagccagacca

SEQ ID NO: 2910590 - RNA, 23 nt, Human
gcuccaggcuccuuuagcgccca

SEQ ID NO: 2910591 - RNA, 16 nt, Human
gcuccaggcuccuuua

SEQ ID NO: 2910592 - RNA, 13 nt, Human
gcuccaggcuccu

SEQ ID NO: 2910593 - RNA, 14 nt, Human
gcuccaucuccacu

SEQ ID NO: 2910594 - RNA, 16 nt, Human
gcuccaugugccucuu

SEQ ID NO: 2910595 - RNA, 17 nt, Human
gcuccaugugccucuuu

SEQ ID NO: 2910596 - RNA, 17 nt, Human
gcuccauuuacaaacua

SEQ ID NO: 2910597 - RNA, 22 nt, Human
gcuccauuuucuuauugcgcug

SEQ ID NO: 2910598 - RNA, 19 nt, Human
gcuccaugcuccucacugc

SEQ ID NO: 2910599 - RNA, 23 nt, Human
gcuccaugcuccucacugcccgc

SEQ ID NO: 2910600 - RNA, 13 nt, Human
gcucccucucccc

SEQ ID NO: 2910601 - RNA, 15 nt, Human
gcucccucucccccu

SEQ ID NO: 2910602 - RNA, 20 nt, Human
gcucccuccccugcccuggu

SEQ ID NO: 2910603 - RNA, 19 nt, Human
gcucccuccccugcccugg

SEQ ID NO: 2910604 - RNA, 23 nt, Human
gcucccuccccugcccuggucca

SEQ ID NO: 2910605 - RNA, 13 nt, Human
gcucccucccgca

SEQ ID NO: 2910606 - RNA, 24 nt, Human
gcucccugaagccagccuucuucc

SEQ ID NO: 2910607 - RNA, 13 nt, Human
gcucccugcccca

SEQ ID NO: 2910608 - RNA, 14 nt, Human
gcucccugccccaa

SEQ ID NO: 2910609 - RNA, 15 nt, Human
gcucccugccccaaa

SEQ ID NO: 2910610 - RNA, 12 nt, Human
gcucccugaagc

SEQ ID NO: 2910611 - RNA, 13 nt, Human
gcucccugaagcc

SEQ ID NO: 2910612 - RNA, 14 nt, Human
gcucccugaagcca

SEQ ID NO: 2910613 - RNA, 15 nt, Human
gcucccugaagccag

SEQ ID NO: 2910614 - RNA, 16 nt, Human
gcucccugaagccagc

SEQ ID NO: 2910615 - RNA, 17 nt, Human
gcucccugaagccagcc

SEQ ID NO: 2910616 - RNA, 18 nt, Human
gcucccugaagccagccu

SEQ ID NO: 2910617 - RNA, 20 nt, Human
gcucccugaagccagccuuc

SEQ ID NO: 2910618 - RNA, 17 nt, Human
gcucccuccccugcccu

SEQ ID NO: 2910619 - RNA, 21 nt, Human
gcucccucccaggacucugac

SEQ ID NO: 2910620 - RNA, 19 nt, Human
gcucccucccaggacucug

SEQ ID NO: 2910621 - RNA, 18 nt, Human
gcucccucccaggacucu

SEQ ID NO: 2910622 - RNA, 15 nt, Human
gcucccucccaggac

SEQ ID NO: 2910623 - RNA, 14 nt, Human
gcucccucccagga

SEQ ID NO: 2910624 - RNA, 18 nt, Human
gcuccaagauucuagaug

SEQ ID NO: 2910625 - RNA, 23 nt, Human
gcuccagcuggccgggagccuga

SEQ ID NO: 2910626 - RNA, 17 nt, Human
gcuccagcuggccggga

SEQ ID NO: 2910627 - RNA, 14 nt, Human
gcuccaagaccuag

SEQ ID NO: 2910628 - RNA, 18 nt, Human
gcuccaagaccuaggcuc

SEQ ID NO: 2910629 - RNA, 16 nt, Human
gcuccaaaugcagcuu

SEQ ID NO: 2910630 - RNA, 14 nt, Human
gcuccaagauucua

SEQ ID NO: 2910631 - RNA, 15 nt, Human
gcuccaagauucuag

SEQ ID NO: 2910632 - RNA, 16 nt, Human
gcuccaagauucuaga

SEQ ID NO: 2910633 - RNA, 17 nt, Human
gcuccaagauucuagau

SEQ ID NO: 2910634 - RNA, 19 nt, Human
gcucucggguugugugucu

SEQ ID NO: 2910635 - RNA, 18 nt, Human
gcucucugaguccuggcc

SEQ ID NO: 2910636 - RNA, 21 nt, Human
gcucucugaguccuggcccaa

SEQ ID NO: 2910637 - RNA, 16 nt, Human
gcucuccuuucuuucu

SEQ ID NO: 2910638 - RNA, 14 nt, Human
gcucuccugacuuu

SEQ ID NO: 2910639 - RNA, 16 nt, Human
gcucuccugacuuuua

SEQ ID NO: 2910640 - RNA, 14 nt, Human
gcucuccugccaca

SEQ ID NO: 2910641 - RNA, 17 nt, Human
gcucuccgaccagacac

SEQ ID NO: 2910642 - RNA, 13 nt, Human
gcucuccgaccag

SEQ ID NO: 2910643 - RNA, 19 nt, Human
gcucuccccugcccugcug

SEQ ID NO: 2910644 - RNA, 19 nt, Human
gcucuccgaccagacaccu

SEQ ID NO: 2910645 - RNA, 19 nt, Human
gcucuccucuugccacugc

SEQ ID NO: 2910646 - RNA, 22 nt, Human
gcucuccucuugccacugccuc

SEQ ID NO: 2910647 - RNA, 15 nt, Human
gcucuccucuugcca

SEQ ID NO: 2910648 - RNA, 21 nt, Human
gcuccuucuguccuacucugu

SEQ ID NO: 2910649 - RNA, 19 nt, Human
gcuccuuggcuuaccugac

SEQ ID NO: 2910650 - RNA, 15 nt, Human
gcuccuucuguccua

SEQ ID NO: 2910651 - RNA, 22 nt, Human
gcucccugugacaaaauuuuau

SEQ ID NO: 2910652 - RNA, 21 nt, Human
gcucccuguguccaccugugg

SEQ ID NO: 2910653 - RNA, 22 nt, Human
gcucccuguguccaccuguggg

SEQ ID NO: 2910654 - RNA, 12 nt, Human
gcucccuucagc

SEQ ID NO: 2910655 - RNA, 13 nt, Human
gcucccuucagcc

SEQ ID NO: 2910656 - RNA, 14 nt, Human
gcucccuucagccc

SEQ ID NO: 2910657 - RNA, 15 nt, Human
gcucccuucagcccc

SEQ ID NO: 2910658 - RNA, 19 nt, Human
gcucccuucagcccccagc

SEQ ID NO: 2910659 - RNA, 20 nt, Human
gcucccuucagcccccagcc

SEQ ID NO: 2910660 - RNA, 23 nt, Human
gcucccuucagcccccagccccu

SEQ ID NO: 2910661 - RNA, 17 nt, Human
gcucgagcaguccugcc

SEQ ID NO: 2910662 - RNA, 17 nt, Human
gcucuccagccugggag

SEQ ID NO: 2910663 - RNA, 18 nt, Human
gcucuccagccugggagg

SEQ ID NO: 2910664 - RNA, 19 nt, Human
gcucuccauucaauuucag

SEQ ID NO: 2910665 - RNA, 16 nt, Human
gcucuccccugcccug

SEQ ID NO: 2910666 - RNA, 17 nt, Human
gcucucccauuuccuga

SEQ ID NO: 2910667 - RNA, 21 nt, Human
gcucgagcaguccugccucag

SEQ ID NO: 2910668 - RNA, 20 nt, Human
gcucgagcaguccugccuca

SEQ ID NO: 2910669 - RNA, 11 nt, Human
gcucucugcug

SEQ ID NO: 2910670 - RNA, 14 nt, Human
gcucugcuccucuc

SEQ ID NO: 2910671 - RNA, 13 nt, Human
gcucugcuccucu

SEQ ID NO: 2910672 - RNA, 18 nt, Human
gcucugccgucucuggag

SEQ ID NO: 2910673 - RNA, 17 nt, Human
gcucugccgucucugga

SEQ ID NO: 2910674 - RNA, 16 nt, Human
gcucugccgucucugg

SEQ ID NO: 2910675 - RNA, 13 nt, Human
gcucucugcugua

SEQ ID NO: 2910676 - RNA, 22 nt, Human
gcucugccuucgaggucagagg

SEQ ID NO: 2910677 - RNA, 23 nt, Human
gcucugcugacagacacaggccc

SEQ ID NO: 2910678 - RNA, 20 nt, Human
gcucugcugacagacacagg

SEQ ID NO: 2910679 - RNA, 19 nt, Human
gcucugcugacagacacag

SEQ ID NO: 2910680 - RNA, 18 nt, Human
gcucugcugacagacaca

SEQ ID NO: 2910681 - RNA, 14 nt, Human
gcucugcugacaga

SEQ ID NO: 2910682 - RNA, 13 nt, Human
gcucugcugacag

SEQ ID NO: 2910683 - RNA, 21 nt, Human
gcucugcuccucuccccagca

SEQ ID NO: 2910684 - RNA, 19 nt, Human
gcucugcuccucuccccag

SEQ ID NO: 2910685 - RNA, 22 nt, Human
gcucuggacaggcauguucucu

SEQ ID NO: 2910686 - RNA, 21 nt, Human
gcucuggacaggcauguucuc

SEQ ID NO: 2910687 - RNA, 16 nt, Human
gcucuggacaggcaug

SEQ ID NO: 2910688 - RNA, 15 nt, Human
gcucuggacaggcau

SEQ ID NO: 2910689 - RNA, 14 nt, Human
gcucuggacaggca

SEQ ID NO: 2910690 - RNA, 23 nt, Human
gcugccaaggccagaguggccug

SEQ ID NO: 2910691 - RNA, 22 nt, Human
gcugccaaggccagaguggccu

SEQ ID NO: 2910692 - RNA, 18 nt, Human
gcugccaaggccagagug

SEQ ID NO: 2910693 - RNA, 22 nt, Human
gcugcauggggugggguagggc

SEQ ID NO: 2910694 - RNA, 15 nt, Human
gcugcauuagaaaaa

SEQ ID NO: 2910695 - RNA, 20 nt, Human
gcugcaugccuggucuuucc

SEQ ID NO: 2910696 - RNA, 14 nt, Human
gcugcaugccuggu

SEQ ID NO: 2910697 - RNA, 18 nt, Human
gcugcaugccuggucuuu

SEQ ID NO: 2910698 - RNA, 13 nt, Human
gcugcaucuuaua

SEQ ID NO: 2910699 - RNA, 17 nt, Human
gcugcaucuuauagcac

SEQ ID NO: 2910700 - RNA, 19 nt, Human
gcugcaucuuauagcacuu

SEQ ID NO: 2910701 - RNA, 22 nt, Human
gcugcaucuuauagcacuuuga

SEQ ID NO: 2910702 - RNA, 23 nt, Human
gcugcaucuuauagcacuuugaa

SEQ ID NO: 2910703 - RNA, 14 nt, Human
gcugcauccagagg

SEQ ID NO: 2910704 - RNA, 19 nt, Human
gcugaugucccuagaaaac

SEQ ID NO: 2910705 - RNA, 20 nt, Human
gcugauguccucaccacaug

SEQ ID NO: 2910706 - RNA, 23 nt, Human
gcugauggauaaccuauaugauu

SEQ ID NO: 2910707 - RNA, 13 nt, Human
gcugauggucugg

SEQ ID NO: 2910708 - RNA, 16 nt, Human
gcugacuguccucucc

SEQ ID NO: 2910709 - RNA, 21 nt, Human
gcugacuguacuccucccagg

SEQ ID NO: 2910710 - RNA, 17 nt, Human
gcugagucccaggcuga

SEQ ID NO: 2910711 - RNA, 22 nt, Human
gcugagucccaggcugagccuc

SEQ ID NO: 2910712 - RNA, 21 nt, Human
gcugagucccaggcugagccu

SEQ ID NO: 2910713 - RNA, 15 nt, Human
gcugaugcaggauuu

SEQ ID NO: 2910714 - RNA, 20 nt, Human
gcugaguuuucucuuugugg

SEQ ID NO: 2910715 - RNA, 17 nt, Human
gcugagugggagaaggc

SEQ ID NO: 2910716 - RNA, 22 nt, Human
gcugagugggagaaggcaguga

SEQ ID NO: 2910717 - RNA, 16 nt, Human
gcucuucuccaggcug

SEQ ID NO: 2910718 - RNA, 14 nt, Human
gcucuucuccaggc

SEQ ID NO: 2910719 - RNA, 13 nt, Human
gcucuucuccuuu

SEQ ID NO: 2910720 - RNA, 17 nt, Human
gcucuucuccuuucaca

SEQ ID NO: 2910721 - RNA, 21 nt, Human
gcucuucuccuuucacaaccu

SEQ ID NO: 2910722 - RNA, 23 nt, Human
gcucuucuccuuucacaaccuuc

SEQ ID NO: 2910723 - RNA, 23 nt, Human
gcucuucugcccaauuggaggaa

SEQ ID NO: 2910724 - RNA, 20 nt, Human
gcucuugauaccccccucug

SEQ ID NO: 2910725 - RNA, 12 nt, Human
gcucuucuccag

SEQ ID NO: 2910726 - RNA, 20 nt, Human
gcucuuccgaaaaccaggcc

SEQ ID NO: 2910727 - RNA, 13 nt, Human
gcucuucgcgccc

SEQ ID NO: 2910728 - RNA, 21 nt, Human
gcucuucgcgcccgccccugc

SEQ ID NO: 2910729 - RNA, 20 nt, Human
gcugacagacacaggcccgg

SEQ ID NO: 2910730 - RNA, 17 nt, Human
gcucuuucgucacccuu

SEQ ID NO: 2910731 - RNA, 21 nt, Human
gcugacagacacaggcccggc

SEQ ID NO: 2910732 - RNA, 17 nt, Human
gcugacagacagcccuc

SEQ ID NO: 2910733 - RNA, 21 nt, Human
gcucuuuaugaaugaaaaaac

SEQ ID NO: 2910734 - RNA, 22 nt, Human
gcucuuguuuuuauuaauuuau

SEQ ID NO: 2910735 - RNA, 23 nt, Human
gcucuuguuuuuauuaauuuaua

SEQ ID NO: 2910736 - RNA, 22 nt, Human
gcucuugugcuggauggagccc

SEQ ID NO: 2910737 - RNA, 15 nt, Human
gcucuugucccacgu

SEQ ID NO: 2910738 - RNA, 22 nt, Human
gcucuugucccacgugucuucc

SEQ ID NO: 2910739 - RNA, 23 nt, Human
gcucuuguccucaguccauuuau

SEQ ID NO: 2910740 - RNA, 22 nt, Human
gcucuugauaccccccucuguc

SEQ ID NO: 2910741 - RNA, 23 nt, Human
gcucuugauaccccccucugucu

SEQ ID NO: 2910742 - RNA, 22 nt, Human
gcugacugccaauaacauucuu

SEQ ID NO: 2910743 - RNA, 21 nt, Human
gcugacuccacgauccugcca

SEQ ID NO: 2910744 - RNA, 18 nt, Human
gcugacuguacuccuccc

SEQ ID NO: 2910745 - RNA, 19 nt, Human
gcugacuguacuccuccca

SEQ ID NO: 2910746 - RNA, 18 nt, Human
gcugaccucccagugacc

SEQ ID NO: 2910747 - RNA, 23 nt, Human
gcugacuagaagggccaguccug

SEQ ID NO: 2910748 - RNA, 15 nt, Human
gcugacuagaagggc

SEQ ID NO: 2910749 - RNA, 20 nt, Human
gcugacuaaauuuggggaca

SEQ ID NO: 2910750 - RNA, 18 nt, Human
guaaugaugucguuugaa

SEQ ID NO: 2910751 - RNA, 20 nt, Human
guaaugcuuagagaauguuc

SEQ ID NO: 2910752 - RNA, 12 nt, Human
guaaugcugcac

SEQ ID NO: 2910753 - RNA, 14 nt, Human
guaaugcugcacuu

SEQ ID NO: 2910754 - RNA, 17 nt, Human
guaaugcugcacuuccu

SEQ ID NO: 2910755 - RNA, 21 nt, Human
guaaugcuuaagggaguuuaa

SEQ ID NO: 2910756 - RNA, 19 nt, Human
guaaugcauacagaaauau

SEQ ID NO: 2910757 - RNA, 16 nt, Human
guaaugccucugucua

SEQ ID NO: 2910758 - RNA, 15 nt, Human
guaaugcgauuuuau

SEQ ID NO: 2910759 - RNA, 16 nt, Human
guaaugcgauuuuauu

SEQ ID NO: 2910760 - RNA, 19 nt, Human
guaaugcgauuuuauuacu

SEQ ID NO: 2910761 - RNA, 20 nt, Human
guaaugcgauuuuauuacug

SEQ ID NO: 2910762 - RNA, 17 nt, Human
guaauguggaagaaaau

SEQ ID NO: 2910763 - RNA, 18 nt, Human
guaaugugugguggccuc

SEQ ID NO: 2910764 - RNA, 20 nt, Human
guaaugugugguggccucag

SEQ ID NO: 2910765 - RNA, 17 nt, Human
guaauguguuuuagagu

SEQ ID NO: 2910766 - RNA, 20 nt, Human
guaauguuaauguuauauca

SEQ ID NO: 2910767 - RNA, 18 nt, Human
guaauguagcguguuuac

SEQ ID NO: 2910768 - RNA, 20 nt, Human
guaauguagcguguuuacau

SEQ ID NO: 2910769 - RNA, 21 nt, Human
guaauguagcguguuuacaug

SEQ ID NO: 2910770 - RNA, 17 nt, Human
guaauguaaaauccauc

SEQ ID NO: 2910771 - RNA, 16 nt, Human
guaagugcuacauaaa

SEQ ID NO: 2910772 - RNA, 15 nt, Human
guaaucguguccccu

SEQ ID NO: 2910773 - RNA, 17 nt, Human
guaaucgaccugccucg

SEQ ID NO: 2910774 - RNA, 22 nt, Human
guaaucuccacagucaaagaag

SEQ ID NO: 2910775 - RNA, 14 nt, Human
guaaucucucugca

SEQ ID NO: 2910776 - RNA, 17 nt, Human
guaaucucucugcagcu

SEQ ID NO: 2910777 - RNA, 18 nt, Human
guaaucucucugcagcug

SEQ ID NO: 2910778 - RNA, 19 nt, Human
guaaucucucugcagcugc

SEQ ID NO: 2910779 - RNA, 20 nt, Human
guaaucucucugcagcugcc

SEQ ID NO: 2910780 - RNA, 21 nt, Human
guaaucucucugcagcugccg

SEQ ID NO: 2910781 - RNA, 22 nt, Human
guaaucucucugcagcugccgg

SEQ ID NO: 2910782 - RNA, 16 nt, Human
guaaucugauggcuuc

SEQ ID NO: 2910783 - RNA, 23 nt, Human
guaaucuguacauuuuguuguaa

SEQ ID NO: 2910784 - RNA, 17 nt, Human
guaaugaaaaugaauau

SEQ ID NO: 2910785 - RNA, 13 nt, Human
guaaugaaguaaa

SEQ ID NO: 2910786 - RNA, 15 nt, Human
guaauugaacuuauc

SEQ ID NO: 2910787 - RNA, 15 nt, Human
guaauucuucaguug

SEQ ID NO: 2910788 - RNA, 15 nt, Human
guaauugacaugugc

SEQ ID NO: 2910789 - RNA, 18 nt, Human
guaauugacgguuuuuua

SEQ ID NO: 2910790 - RNA, 12 nt, Human
guaauugcuuuu

SEQ ID NO: 2910791 - RNA, 14 nt, Human
guaauuaaauuaug

SEQ ID NO: 2910792 - RNA, 15 nt, Human
guaauuguaauuuug

SEQ ID NO: 2910793 - RNA, 14 nt, Human
guaauucaagaaaa

SEQ ID NO: 2910794 - RNA, 13 nt, Human
guaauucaagaaa

SEQ ID NO: 2910795 - RNA, 21 nt, Human
guaauuccucucacuaaacuu

SEQ ID NO: 2910796 - RNA, 21 nt, Human
guaauucaguguauuucaguu

SEQ ID NO: 2910797 - RNA, 13 nt, Human
guaauuaugauuu

SEQ ID NO: 2910798 - RNA, 14 nt, Human
guaauuaugauuug

SEQ ID NO: 2910799 - RNA, 21 nt, Human
guaauuaugcacuaaauauga

SEQ ID NO: 2910800 - RNA, 15 nt, Human
guaauguuauuuucu

SEQ ID NO: 2910801 - RNA, 19 nt, Human
guaauguuuucuuugcaaa

SEQ ID NO: 2910802 - RNA, 21 nt, Human
guaauguuuucuuugcaaagu

SEQ ID NO: 2910803 - RNA, 16 nt, Human
guacagacuuguugug

SEQ ID NO: 2910804 - RNA, 23 nt, Human
guacagacagagaauaugucugc

SEQ ID NO: 2910805 - RNA, 16 nt, Human
guacagacauauuuaa

SEQ ID NO: 2910806 - RNA, 17 nt, Human
guacagacauauuuaac

SEQ ID NO: 2910807 - RNA, 20 nt, Human
guacagagaccucccuguuc

SEQ ID NO: 2910808 - RNA, 18 nt, Human
guacagcuguuuaagaug

SEQ ID NO: 2910809 - RNA, 13 nt, Human
guacagcugggcu

SEQ ID NO: 2910810 - RNA, 21 nt, Human
guacagaguguggacucuggu

SEQ ID NO: 2910811 - RNA, 15 nt, Human
guacagcaugugccu

SEQ ID NO: 2910812 - RNA, 12 nt, Human
guacagcccaga

SEQ ID NO: 2910813 - RNA, 14 nt, Human
guacagcccagagg

SEQ ID NO: 2910814 - RNA, 16 nt, Human
guacagcccagaggcc

SEQ ID NO: 2910815 - RNA, 23 nt, Human
guacagcccagaggccaacacug

SEQ ID NO: 2910816 - RNA, 19 nt, Human
guacauacccuggccgccc

SEQ ID NO: 2910817 - RNA, 22 nt, Human
guacauacccuggccgcccccu

SEQ ID NO: 2910818 - RNA, 22 nt, Human
guacauaauacacuugcccugc

SEQ ID NO: 2910819 - RNA, 23 nt, Human
guacauaauacacuugcccugcu

SEQ ID NO: 2910820 - RNA, 20 nt, Human
guacauaaauugcauaaagc

SEQ ID NO: 2910821 - RNA, 21 nt, Human
guacauaaauugcauaaagca

SEQ ID NO: 2910822 - RNA, 22 nt, Human
guacauaaauugcauaaagcau

SEQ ID NO: 2910823 - RNA, 23 nt, Human
guacauaaauugcauaaagcaua

SEQ ID NO: 2910824 - RNA, 16 nt, Human
guacauaacucuguaa

SEQ ID NO: 2910825 - RNA, 12 nt, Human
guacauaaaaga

SEQ ID NO: 2910826 - RNA, 16 nt, Human
guacauaaaagaauuu

SEQ ID NO: 2910827 - RNA, 15 nt, Human
guacauaaacaauga

SEQ ID NO: 2910828 - RNA, 15 nt, Human
guacccacugcucug

SEQ ID NO: 2910829 - RNA, 18 nt, Human
guacauauguaaaauaaa

SEQ ID NO: 2910830 - RNA, 17 nt, Human
guacauauguaaacaua

SEQ ID NO: 2910831 - RNA, 22 nt, Human
guacauaaugcuuaauuucuaa

SEQ ID NO: 2910832 - RNA, 18 nt, Human
guacauaguuauuuauuu

SEQ ID NO: 2910833 - RNA, 17 nt, Human
guacauaguuauuuauu

SEQ ID NO: 2910834 - RNA, 16 nt, Human
guacaggguuuuuacc

SEQ ID NO: 2910835 - RNA, 13 nt, Human
guacagucugucu

SEQ ID NO: 2910836 - RNA, 14 nt, Human
guacagucugucuu

SEQ ID NO: 2910837 - RNA, 17 nt, Human
guacagucugucuucug

SEQ ID NO: 2910838 - RNA, 19 nt, Human
guacagucugucuucugua

SEQ ID NO: 2910839 - RNA, 20 nt, Human
guacagucugucuucuguau

SEQ ID NO: 2910840 - RNA, 21 nt, Human
guacagucugucuucuguaua

SEQ ID NO: 2910841 - RNA, 15 nt, Human
guacagaauuuugga

SEQ ID NO: 2910842 - RNA, 17 nt, Human
guacaguaggauaagcc

SEQ ID NO: 2910843 - RNA, 20 nt, Human
guacaguggugccaucauug

SEQ ID NO: 2910844 - RNA, 19 nt, Human
guacagucuugcagcagga

SEQ ID NO: 2910845 - RNA, 15 nt, Human
guacccucuggaggg

SEQ ID NO: 2910846 - RNA, 17 nt, Human
guacccuccuggcucuu

SEQ ID NO: 2910847 - RNA, 17 nt, Human
guacccucucagcucca

SEQ ID NO: 2910848 - RNA, 18 nt, Human
guacccucucagcuccag

SEQ ID NO: 2910849 - RNA, 19 nt, Human
guacccucucagcuccagg

SEQ ID NO: 2910850 - RNA, 16 nt, Human
guacccacugcucugg

SEQ ID NO: 2910851 - RNA, 20 nt, Human
guacccacuuagucauguaa

SEQ ID NO: 2910852 - RNA, 17 nt, Human
guacauauuuguggaau

SEQ ID NO: 2910853 - RNA, 17 nt, Human
guacauauuuauuuucu

SEQ ID NO: 2910854 - RNA, 19 nt, Human
guacauauuuauuuucuuu

SEQ ID NO: 2910855 - RNA, 17 nt, Human
guacccaucuaguacuu

SEQ ID NO: 2910856 - RNA, 12 nt, Human
guaccuggugga

SEQ ID NO: 2910857 - RNA, 19 nt, Human
guaccuguuccuuagaccu

SEQ ID NO: 2910858 - RNA, 18 nt, Human
guaccuugaccuuuguac

SEQ ID NO: 2910859 - RNA, 19 nt, Human
guaccuugaccuuuguaca

SEQ ID NO: 2910860 - RNA, 20 nt, Human
guaccuugaccuuuguacag

SEQ ID NO: 2910861 - RNA, 12 nt, Human
guaccugaaaag

SEQ ID NO: 2910862 - RNA, 14 nt, Human
guaccugaaaagua

SEQ ID NO: 2910863 - RNA, 18 nt, Human
guaccugaaaaguaacuu

SEQ ID NO: 2910864 - RNA, 23 nt, Human
guaccugaaaaguaacuuggcuu

SEQ ID NO: 2910865 - RNA, 14 nt, Human
guaccucaucccau

SEQ ID NO: 2910866 - RNA, 16 nt, Human
guaccucaucccauga

SEQ ID NO: 2910867 - RNA, 15 nt, Human
guaccuccccugccu

SEQ ID NO: 2910868 - RNA, 16 nt, Human
guaccuccccugccuu

SEQ ID NO: 2910869 - RNA, 17 nt, Human
guaccuccccugccuug

SEQ ID NO: 2910870 - RNA, 18 nt, Human
guaccuccccugccuugc

SEQ ID NO: 2910871 - RNA, 20 nt, Human
guaccuccccugccuugcug

SEQ ID NO: 2910872 - RNA, 13 nt, Human
guaccuccucuca

SEQ ID NO: 2910873 - RNA, 14 nt, Human
guaccuccucucag

SEQ ID NO: 2910874 - RNA, 16 nt, Human
guaccuccucucagug

SEQ ID NO: 2910875 - RNA, 18 nt, Human
guaccuccucucaguguu

SEQ ID NO: 2910876 - RNA, 19 nt, Human
guaccuccucucaguguuu

SEQ ID NO: 2910877 - RNA, 14 nt, Human
guaccucuggcuga

SEQ ID NO: 2910878 - RNA, 15 nt, Human
guaccucuggcugac

SEQ ID NO: 2910879 - RNA, 21 nt, Human
guaccucuggcugacuaaauu

SEQ ID NO: 2910880 - RNA, 17 nt, Human
guacgucugacaggcaa

SEQ ID NO: 2910881 - RNA, 15 nt, Human
guacgucugacaggc

SEQ ID NO: 2910882 - RNA, 14 nt, Human
guacgucugacagg

SEQ ID NO: 2910883 - RNA, 11 nt, Human
guaccuugcuu

SEQ ID NO: 2910884 - RNA, 13 nt, Human
guaccuugcuucu

SEQ ID NO: 2910885 - RNA, 23 nt, Human
guaccuugcuucuuacugauaau

SEQ ID NO: 2910886 - RNA, 21 nt, Human
guaccuuuugaggagccccag

SEQ ID NO: 2910887 - RNA, 23 nt, Human
guaccuuuugaggagccccagcu

SEQ ID NO: 2910888 - RNA, 22 nt, Human
guaccuuuuuuguuuuuucaaa

SEQ ID NO: 2910889 - RNA, 23 nt, Human
guaccuuuuuuguuuuuucaaaa

SEQ ID NO: 2910890 - RNA, 12 nt, Human
guacgcacagac

SEQ ID NO: 2910891 - RNA, 13 nt, Human
guacgcacagaca

SEQ ID NO: 2910892 - RNA, 14 nt, Human
guacgcacagacag

SEQ ID NO: 2910893 - RNA, 15 nt, Human
guacgcacagacagg

SEQ ID NO: 2910894 - RNA, 12 nt, Human
guacgugacccu

SEQ ID NO: 2910895 - RNA, 13 nt, Human
guacgugacccuc

SEQ ID NO: 2910896 - RNA, 14 nt, Human
guacguuuguaugu

SEQ ID NO: 2910897 - RNA, 17 nt, Human
guacguuuguaugugug

SEQ ID NO: 2910898 - RNA, 15 nt, Human
guacuucuccacccu

SEQ ID NO: 2910899 - RNA, 14 nt, Human
guacuucuccaccc

SEQ ID NO: 2910900 - RNA, 23 nt, Human
guacuacacauuuuuaaauuguu

SEQ ID NO: 2910901 - RNA, 13 nt, Human
guacuaagcauuu

SEQ ID NO: 2910902 - RNA, 13 nt, Human
guacuaaauuuaa

SEQ ID NO: 2910903 - RNA, 17 nt, Human
guacuaaauuuaaauuu

SEQ ID NO: 2910904 - RNA, 14 nt, Human
guacuuuuugugaa

SEQ ID NO: 2910905 - RNA, 15 nt, Human
guacuuuuugugaag

SEQ ID NO: 2910906 - RNA, 23 nt, Human
guacuuuuauuuuacacagaaac

SEQ ID NO: 2910907 - RNA, 12 nt, Human
guagaaaaacau

SEQ ID NO: 2910908 - RNA, 20 nt, Human
guagaaaaaaaaacagcucu

SEQ ID NO: 2910909 - RNA, 21 nt, Human
guacuuguggacacagcucuu

SEQ ID NO: 2910910 - RNA, 16 nt, Human
guacuuguuucucugu

SEQ ID NO: 2910911 - RNA, 12 nt, Human
guacuuguuugc

SEQ ID NO: 2910912 - RNA, 20 nt, Human
guacuugugaaacacagcug

SEQ ID NO: 2910913 - RNA, 21 nt, Human
guacuugugaaacacagcugu

SEQ ID NO: 2910914 - RNA, 22 nt, Human
guacuugugaaacacagcuguu

SEQ ID NO: 2910915 - RNA, 21 nt, Human
guacuuuucccauuuguaauu

SEQ ID NO: 2910916 - RNA, 18 nt, Human
guacuuuugagugugugu

SEQ ID NO: 2910917 - RNA, 19 nt, Human
guacuuuugagugugugug

SEQ ID NO: 2910918 - RNA, 22 nt, Human
guacuuuugagugugugugugc

SEQ ID NO: 2910919 - RNA, 24 nt, Human
guacuuuugagugugugugugcau

SEQ ID NO: 2910920 - RNA, 19 nt, Human
guacuucuccacccugcuc

SEQ ID NO: 2910921 - RNA, 18 nt, Human
guacuucuccacccugcu

SEQ ID NO: 2910922 - RNA, 17 nt, Human
guacuucuccacccugc

SEQ ID NO: 2910923 - RNA, 16 nt, Human
guacuucuccacccug

SEQ ID NO: 2910924 - RNA, 21 nt, Human
guacuucuccacccugcucuc

SEQ ID NO: 2910925 - RNA, 20 nt, Human
guacuucuccacccugcucu

SEQ ID NO: 2910926 - RNA, 23 nt, Human
guacuugaagucuaaaagcagaa

SEQ ID NO: 2910927 - RNA, 18 nt, Human
guacuugaguguaauguu

SEQ ID NO: 2910928 - RNA, 23 nt, Human
guacuugccagaaguuguggauu

SEQ ID NO: 2910929 - RNA, 21 nt, Human
guacuuccugaguggccaggg

SEQ ID NO: 2910930 - RNA, 20 nt, Human
guacuuguggacacagcucu

SEQ ID NO: 2910931 - RNA, 16 nt, Human
guacuuguggacacag

SEQ ID NO: 2910932 - RNA, 13 nt, Human
guacuugguccaa

SEQ ID NO: 2910933 - RNA, 15 nt, Human
guacuugguccaacu

SEQ ID NO: 2910934 - RNA, 19 nt, Human
guacuugguccaacugcaa

SEQ ID NO: 2910935 - RNA, 21 nt, Human
guacuugguccaacugcaacu

SEQ ID NO: 2910936 - RNA, 22 nt, Human
guacuugguccaacugcaacuc

SEQ ID NO: 2910937 - RNA, 21 nt, Human
guacuuggaguauuggggucu

SEQ ID NO: 2910938 - RNA, 23 nt, Human
guaagggaggaggagcuucuggg

SEQ ID NO: 2910939 - RNA, 15 nt, Human
guaagggauuucuua

SEQ ID NO: 2910940 - RNA, 16 nt, Human
guaagggauuucuuag

SEQ ID NO: 2910941 - RNA, 14 nt, Human
guaaggcucuagau

SEQ ID NO: 2910942 - RNA, 16 nt, Human
guaaggcucuagauca

SEQ ID NO: 2910943 - RNA, 24 nt, Human
guaagcuccuuuguggagugcugg

SEQ ID NO: 2910944 - RNA, 13 nt, Human
guaaggcucuaga

SEQ ID NO: 2910945 - RNA, 20 nt, Human
guaagugagugugcugcugu

SEQ ID NO: 2910946 - RNA, 18 nt, Human
guaaguaccacucaggcc

SEQ ID NO: 2910947 - RNA, 14 nt, Human
guaagucaguguug

SEQ ID NO: 2910948 - RNA, 17 nt, Human
guaagucaguguugaga

SEQ ID NO: 2910949 - RNA, 19 nt, Human
guaagucaguguugagaug

SEQ ID NO: 2910950 - RNA, 17 nt, Human
guaagucucaacucugu

SEQ ID NO: 2910951 - RNA, 15 nt, Human
guaaguaauuaugca

SEQ ID NO: 2910952 - RNA, 18 nt, Human
guaaguaauuaugcacua

SEQ ID NO: 2910953 - RNA, 13 nt, Human
guaagccaaagaa

SEQ ID NO: 2910954 - RNA, 17 nt, Human
guaagccaaagaaauga

SEQ ID NO: 2910955 - RNA, 22 nt, Human
guaagccaaagaaaugaacauu

SEQ ID NO: 2910956 - RNA, 17 nt, Human
guaagcacuguuuuucc

SEQ ID NO: 2910957 - RNA, 19 nt, Human
guaagcacuguuuuuccau

SEQ ID NO: 2910958 - RNA, 20 nt, Human
guaagcaggagagaaauuuc

SEQ ID NO: 2910959 - RNA, 17 nt, Human
guaacuuuuguaagaca

SEQ ID NO: 2910960 - RNA, 15 nt, Human
guaacuuuuguaaga

SEQ ID NO: 2910961 - RNA, 14 nt, Human
guaacuuuuguaag

SEQ ID NO: 2910962 - RNA, 19 nt, Human
guaagaaaaugcuagaaga

SEQ ID NO: 2910963 - RNA, 17 nt, Human
guaagaaaagugguugu

SEQ ID NO: 2910964 - RNA, 12 nt, Human
guaacuuuaugu

SEQ ID NO: 2910965 - RNA, 16 nt, Human
guaacuuuauguguaa

SEQ ID NO: 2910966 - RNA, 18 nt, Human
guaacuuuauucuugaaa

SEQ ID NO: 2910967 - RNA, 14 nt, Human
guaacuuuaugugu

SEQ ID NO: 2910968 - RNA, 15 nt, Human
guaacuuuaugugua

SEQ ID NO: 2910969 - RNA, 21 nt, Human
guaaauguuuguuaaaaauaa

SEQ ID NO: 2910970 - RNA, 19 nt, Human
guaaauuaaacauaaaaca

SEQ ID NO: 2910971 - RNA, 14 nt, Human
guaacugugucaug

SEQ ID NO: 2910972 - RNA, 14 nt, Human
guaacuuaaaauag

SEQ ID NO: 2910973 - RNA, 14 nt, Human
guaacuuauauuga

SEQ ID NO: 2910974 - RNA, 15 nt, Human
guaacuuauauugaa

SEQ ID NO: 2910975 - RNA, 19 nt, Human
guaacuuauauugaagaca

SEQ ID NO: 2910976 - RNA, 22 nt, Human
guaacuuauauugaagacaauu

SEQ ID NO: 2910977 - RNA, 23 nt, Human
guaacuuauauugaagacaauuu

SEQ ID NO: 2910978 - RNA, 15 nt, Human
guaacuuauguagau

SEQ ID NO: 2910979 - RNA, 16 nt, Human
guaacuuauguagaua

SEQ ID NO: 2910980 - RNA, 22 nt, Human
guaacuuauguagauauuuggc

SEQ ID NO: 2910981 - RNA, 20 nt, Human
guaacuucacauuaaaaaau

SEQ ID NO: 2910982 - RNA, 18 nt, Human
guaacuucuuauggaauu

SEQ ID NO: 2910983 - RNA, 21 nt, Human
guaacuucuuauggaauugau

SEQ ID NO: 2910984 - RNA, 20 nt, Human
guaacuucuuauggaauuga

SEQ ID NO: 2910985 - RNA, 22 nt, Human
guaagaaaucucccaugugcau

SEQ ID NO: 2910986 - RNA, 16 nt, Human
guaagaacuaaagaag

SEQ ID NO: 2910987 - RNA, 17 nt, Human
guaagaauucagaagac

SEQ ID NO: 2910988 - RNA, 22 nt, Human
guaagaaguuucuuaaacauug

SEQ ID NO: 2910989 - RNA, 11 nt, Human
guaagaagccg

SEQ ID NO: 2910990 - RNA, 15 nt, Human
guaagacaaagguuu

SEQ ID NO: 2910991 - RNA, 14 nt, Human
guaagagacagaau

SEQ ID NO: 2910992 - RNA, 23 nt, Human
guaagagacagaauguaucugug

SEQ ID NO: 2910993 - RNA, 10 nt, Human
guaagagacu

SEQ ID NO: 2910994 - RNA, 20 nt, Human
guaagauuauagauucuaaa

SEQ ID NO: 2910995 - RNA, 21 nt, Human
guaagauuauagauucuaaag

SEQ ID NO: 2910996 - RNA, 22 nt, Human
guaagauuauagauucuaaaga

SEQ ID NO: 2910997 - RNA, 23 nt, Human
guaagauuauagauucuaaagau

SEQ ID NO: 2910998 - RNA, 14 nt, Human
guaagaugucuguu

SEQ ID NO: 2910999 - RNA, 18 nt, Human
guaagauuauagauucua

SEQ ID NO: 2911000 - RNA, 18 nt, Human
guaagaguguagaagcau

SEQ ID NO: 2911001 - RNA, 22 nt, Human
guaagaguguagaagcauuccu

SEQ ID NO: 2911002 - RNA, 19 nt, Human
guaagaucguucucugccu

SEQ ID NO: 2911003 - RNA, 14 nt, Human
guaagaguguagaa

SEQ ID NO: 2911004 - RNA, 13 nt, Human
guaagaggcugga

SEQ ID NO: 2911005 - RNA, 15 nt, Human
guaagaguguagaag

SEQ ID NO: 2911006 - RNA, 17 nt, Human
guaagaguguagaagca

SEQ ID NO: 2911007 - RNA, 13 nt, Human
guaaauaccagga

SEQ ID NO: 2911008 - RNA, 16 nt, Human
guaaauaccauugaca

SEQ ID NO: 2911009 - RNA, 19 nt, Human
guaaauacacaacacacac

SEQ ID NO: 2911010 - RNA, 14 nt, Human
guaaauacagguag

SEQ ID NO: 2911011 - RNA, 15 nt, Human
guaaauaguauuuga

SEQ ID NO: 2911012 - RNA, 17 nt, Human
guaaauaguauuugaga

SEQ ID NO: 2911013 - RNA, 16 nt, Human
guaaauaguauuugag

SEQ ID NO: 2911014 - RNA, 18 nt, Human
guaaaucagauguugaau

SEQ ID NO: 2911015 - RNA, 19 nt, Human
guaaaucagauguugaauu

SEQ ID NO: 2911016 - RNA, 22 nt, Human
guaaaucagauguugaauucuu

SEQ ID NO: 2911017 - RNA, 14 nt, Human
guaaauauucuaua

SEQ ID NO: 2911018 - RNA, 15 nt, Human
guaaauauucuauau

SEQ ID NO: 2911019 - RNA, 19 nt, Human
guaaauauugaggcuuugu

SEQ ID NO: 2911020 - RNA, 22 nt, Human
guaaauauugaggcuuuguguu

SEQ ID NO: 2911021 - RNA, 17 nt, Human
guaaaucacauccuuau

SEQ ID NO: 2911022 - RNA, 13 nt, Human
guaaauauucuau

SEQ ID NO: 2911023 - RNA, 16 nt, Human
guaaauauaugaacau

SEQ ID NO: 2911024 - RNA, 21 nt, Human
guaaauaucccaaacugugau

SEQ ID NO: 2911025 - RNA, 15 nt, Human
guaaauaugaaucug

SEQ ID NO: 2911026 - RNA, 16 nt, Human
guaaauaugaaucugc

SEQ ID NO: 2911027 - RNA, 23 nt, Human
guaaauaugaaucugcucacuuu

SEQ ID NO: 2911028 - RNA, 23 nt, Human
guaaagugauaauuucuggaauu

SEQ ID NO: 2911029 - RNA, 18 nt, Human
guaaagugauaauuucug

SEQ ID NO: 2911030 - RNA, 17 nt, Human
guaaagugauaauuucu

SEQ ID NO: 2911031 - RNA, 13 nt, Human
guaaauaaaaaga

SEQ ID NO: 2911032 - RNA, 19 nt, Human
guaaaguccuuuucuugcu

SEQ ID NO: 2911033 - RNA, 20 nt, Human
guaaaguccuuuucuugcuu

SEQ ID NO: 2911034 - RNA, 14 nt, Human
guaaagugaagaau

SEQ ID NO: 2911035 - RNA, 19 nt, Human
guaaagugaagaauccuuu

SEQ ID NO: 2911036 - RNA, 17 nt, Human
guaaaagguauuaaauu

SEQ ID NO: 2911037 - RNA, 16 nt, Human
guaaauccugccauuu

SEQ ID NO: 2911038 - RNA, 17 nt, Human
guaaauccugccauuua

SEQ ID NO: 2911039 - RNA, 19 nt, Human
guaaauccugccauuuaaa

SEQ ID NO: 2911040 - RNA, 20 nt, Human
guaaauccugccauuuaaaa

SEQ ID NO: 2911041 - RNA, 14 nt, Human
guaaaucuuuuaca

SEQ ID NO: 2911042 - RNA, 19 nt, Human
guaaauguguuggacaaau

SEQ ID NO: 2911043 - RNA, 20 nt, Human
guaaauguguuggacaaaug

SEQ ID NO: 2911044 - RNA, 16 nt, Human
guaaauguuaguuucu

SEQ ID NO: 2911045 - RNA, 19 nt, Human
guaaauguuaguuucuugg

SEQ ID NO: 2911046 - RNA, 22 nt, Human
guaaauguuaucuuauacugua

SEQ ID NO: 2911047 - RNA, 13 nt, Human
guaaauguuauuu

SEQ ID NO: 2911048 - RNA, 15 nt, Human
guaaauguuauuucu

SEQ ID NO: 2911049 - RNA, 16 nt, Human
guaaauguuauuucug

SEQ ID NO: 2911050 - RNA, 18 nt, Human
guaaauguuauuucugca

SEQ ID NO: 2911051 - RNA, 20 nt, Human
guaaauguuauuucugcaaa

SEQ ID NO: 2911052 - RNA, 17 nt, Human
guaaauguuuagguuuu

SEQ ID NO: 2911053 - RNA, 22 nt, Human
guaaauggcuuauccagcuggu

SEQ ID NO: 2911054 - RNA, 13 nt, Human
guaaaugucuuug

SEQ ID NO: 2911055 - RNA, 14 nt, Human
guaaaugucuuugu

SEQ ID NO: 2911056 - RNA, 15 nt, Human
guaaaugucuuugua

SEQ ID NO: 2911057 - RNA, 18 nt, Human
guaaaugucuuuguaagu

SEQ ID NO: 2911058 - RNA, 17 nt, Human
guaaaugcaaaguucug

SEQ ID NO: 2911059 - RNA, 17 nt, Human
guaaaugcagcgugaag

SEQ ID NO: 2911060 - RNA, 11 nt, Human
guaaaugccac

SEQ ID NO: 2911061 - RNA, 15 nt, Human
guaaaugcuguguug

SEQ ID NO: 2911062 - RNA, 13 nt, Human
guaaaacacagag

SEQ ID NO: 2911063 - RNA, 14 nt, Human
guaaaacacagagg

SEQ ID NO: 2911064 - RNA, 19 nt, Human
guaaaacgcugucaaaagu

SEQ ID NO: 2911065 - RNA, 21 nt, Human
guaaaacgcugucaaaaguug

SEQ ID NO: 2911066 - RNA, 21 nt, Human
guaaaacuacacaucccuaau

SEQ ID NO: 2911067 - RNA, 17 nt, Human
guaaaagauuaaacugc

SEQ ID NO: 2911068 - RNA, 19 nt, Human
guaaaaaaaaaaacaauua

SEQ ID NO: 2911069 - RNA, 23 nt, Human
gguuuuuuuuuuuaaaaaaagaa

SEQ ID NO: 2911070 - RNA, 13 nt, Human
guaaaaaaaaaug

SEQ ID NO: 2911071 - RNA, 19 nt, Human
guaaaaaaaaaugccuuug

SEQ ID NO: 2911072 - RNA, 22 nt, Human
guaaaaacacugaaaaauuaua

SEQ ID NO: 2911073 - RNA, 20 nt, Human
guaaaaaaaaaugccuuuga

SEQ ID NO: 2911074 - RNA, 23 nt, Human
guaaaaaaaaaugccuuugagac

SEQ ID NO: 2911075 - RNA, 15 nt, Human
guaaaacaaaacaaa

SEQ ID NO: 2911076 - RNA, 11 nt, Human
guaaaaagaaa

SEQ ID NO: 2911077 - RNA, 12 nt, Human
guaaaaauacaa

SEQ ID NO: 2911078 - RNA, 14 nt, Human
guaaaaauaaaauu

SEQ ID NO: 2911079 - RNA, 13 nt, Human
guaaaaauaaaau

SEQ ID NO: 2911080 - RNA, 12 nt, Human
guaaaaagaaaa

SEQ ID NO: 2911081 - RNA, 13 nt, Human
gguuuaauauuac

SEQ ID NO: 2911082 - RNA, 12 nt, Human
gguuuacuuuca

SEQ ID NO: 2911083 - RNA, 14 nt, Human
gguuuacuuucaaa

SEQ ID NO: 2911084 - RNA, 13 nt, Human
gguuuuccacgcu

SEQ ID NO: 2911085 - RNA, 13 nt, Human
gguuuuccugaaa

SEQ ID NO: 2911086 - RNA, 22 nt, Human
gguuuacaugugauguuuuagu

SEQ ID NO: 2911087 - RNA, 19 nt, Human
gguuuacauucaucucauu

SEQ ID NO: 2911088 - RNA, 22 nt, Human
gguuuacauucaucucauucca

SEQ ID NO: 2911089 - RNA, 12 nt, Human
gguuuacauuua

SEQ ID NO: 2911090 - RNA, 15 nt, Human
gguuuacauuuaaag

SEQ ID NO: 2911091 - RNA, 18 nt, Human
gguuuacauuuaaagcau

SEQ ID NO: 2911092 - RNA, 17 nt, Human
gguuuaccuagagaaca

SEQ ID NO: 2911093 - RNA, 14 nt, Human
gguuuacaggcccu

SEQ ID NO: 2911094 - RNA, 23 nt, Human
gguuuugccauguuggccaggcu

SEQ ID NO: 2911095 - RNA, 18 nt, Human
gguuuuuaaauuuuguaa

SEQ ID NO: 2911096 - RNA, 19 nt, Human
gguuuuuaaauuuuguaau

SEQ ID NO: 2911097 - RNA, 13 nt, Human
gguuuuuaccugu

SEQ ID NO: 2911098 - RNA, 20 nt, Human
gguuuuuaccugucacauug

SEQ ID NO: 2911099 - RNA, 22 nt, Human
gguuuuuaccugucacauugca

SEQ ID NO: 2911100 - RNA, 23 nt, Human
gguuuuuguuuguuuccuuuguu

SEQ ID NO: 2911101 - RNA, 9 nt, Human
gguuuuuuu

SEQ ID NO: 2911102 - RNA, 19 nt, Human
gguuuuuuuccuguuucug

SEQ ID NO: 2911103 - RNA, 14 nt, Human
gguuuuuuaauaua

SEQ ID NO: 2911104 - RNA, 15 nt, Human
gguuuaaagagucua

SEQ ID NO: 2911105 - RNA, 20 nt, Human
gguuuaaagagucuagauuc

SEQ ID NO: 2911106 - RNA, 22 nt, Human
gguuuaaagagucuagauucaa

SEQ ID NO: 2911107 - RNA, 20 nt, Human
gguuuaaacuuguuugcugu

SEQ ID NO: 2911108 - RNA, 20 nt, Human
gguuguuuuuuccuuugcuc

SEQ ID NO: 2911109 - RNA, 13 nt, Human
gguugucagcucu

SEQ ID NO: 2911110 - RNA, 14 nt, Human
gguugucagcucuc

SEQ ID NO: 2911111 - RNA, 14 nt, Human
gguugggcuggugu

SEQ ID NO: 2911112 - RNA, 17 nt, Human
gguugggcccagaucug

SEQ ID NO: 2911113 - RNA, 14 nt, Human
gguuggggugacag

SEQ ID NO: 2911114 - RNA, 15 nt, Human
gguuggggugacagu

SEQ ID NO: 2911115 - RNA, 14 nt, Human
gguuggaccccaga

SEQ ID NO: 2911116 - RNA, 23 nt, Human
gguucuuugagggacugccucug

SEQ ID NO: 2911117 - RNA, 15 nt, Human
gguugcuaacugaac

SEQ ID NO: 2911118 - RNA, 13 nt, Human
gguugcuggagcc

SEQ ID NO: 2911119 - RNA, 15 nt, Human
gguugcuggagccug

SEQ ID NO: 2911120 - RNA, 17 nt, Human
gguucuuucuuccucug

SEQ ID NO: 2911121 - RNA, 14 nt, Human
gguugaagcaccaa

SEQ ID NO: 2911122 - RNA, 18 nt, Human
gguucuuucuuccucugc

SEQ ID NO: 2911123 - RNA, 23 nt, Human
gguucaagcgauucuucugcuuc

SEQ ID NO: 2911124 - RNA, 22 nt, Human
gguucaagcgauucuucugcuu

SEQ ID NO: 2911125 - RNA, 20 nt, Human
gguucacugcaaccuccgcc

SEQ ID NO: 2911126 - RNA, 21 nt, Human
gguucaagcgauucuucugcu

SEQ ID NO: 2911127 - RNA, 11 nt, Human
gguggccucag

SEQ ID NO: 2911128 - RNA, 12 nt, Human
gguggccucagc

SEQ ID NO: 2911129 - RNA, 19 nt, Human
gguggcccacgccuguaau

SEQ ID NO: 2911130 - RNA, 16 nt, Human
gguggcccgacagccu

SEQ ID NO: 2911131 - RNA, 17 nt, Human
gguggcccgacagccug

SEQ ID NO: 2911132 - RNA, 18 nt, Human
gguggcccgacagccugg

SEQ ID NO: 2911133 - RNA, 19 nt, Human
gguggcccgacagccuggc

SEQ ID NO: 2911134 - RNA, 20 nt, Human
gguggcccgacagccuggca

SEQ ID NO: 2911135 - RNA, 13 nt, Human
gguggcccugucc

SEQ ID NO: 2911136 - RNA, 23 nt, Human
gguggcccugucccucccaccuc

SEQ ID NO: 2911137 - RNA, 20 nt, Human
gguacuuuugagugugugug

SEQ ID NO: 2911138 - RNA, 17 nt, Human
gguacuuuuugugaaga

SEQ ID NO: 2911139 - RNA, 13 nt, Human
gguagaaaaacau

SEQ ID NO: 2911140 - RNA, 16 nt, Human
gguagaaaaaggguca

SEQ ID NO: 2911141 - RNA, 19 nt, Human
gguagaccaggauuucuaa

SEQ ID NO: 2911142 - RNA, 18 nt, Human
gguagaccuuuauugggu

SEQ ID NO: 2911143 - RNA, 16 nt, Human
ggucacagccuccucu

SEQ ID NO: 2911144 - RNA, 17 nt, Human
ggucacagccuccucug

SEQ ID NO: 2911145 - RNA, 14 nt, Human
ggucacacacugau

SEQ ID NO: 2911146 - RNA, 19 nt, Human
ggucacacgaccggggcca

SEQ ID NO: 2911147 - RNA, 13 nt, Human
ggucacagccucc

SEQ ID NO: 2911148 - RNA, 15 nt, Human
ggucacagccuccuc

SEQ ID NO: 2911149 - RNA, 13 nt, Human
ggucaaucccaaa

SEQ ID NO: 2911150 - RNA, 12 nt, Human
ggucaaugcuau

SEQ ID NO: 2911151 - RNA, 14 nt, Human
ggucaaugcuauuu

SEQ ID NO: 2911152 - RNA, 16 nt, Human
ggucaaugcuauuuuu

SEQ ID NO: 2911153 - RNA, 23 nt, Human
ggucaaugcuauuuuuguuuuua

SEQ ID NO: 2911154 - RNA, 22 nt, Human
ggucacaaauccuaaaagaagc

SEQ ID NO: 2911155 - RNA, 21 nt, Human
ggucaagggcuuacuauuucu

SEQ ID NO: 2911156 - RNA, 16 nt, Human
ggucagagccugcagu

SEQ ID NO: 2911157 - RNA, 15 nt, Human
ggucagagccugcag

SEQ ID NO: 2911158 - RNA, 14 nt, Human
ggucagagccugca

SEQ ID NO: 2911159 - RNA, 13 nt, Human
ggucagagccugc

SEQ ID NO: 2911160 - RNA, 12 nt, Human
ggucagagccug

SEQ ID NO: 2911161 - RNA, 12 nt, Human
gguccccagggc

SEQ ID NO: 2911162 - RNA, 13 nt, Human
ggucccccucagc

SEQ ID NO: 2911163 - RNA, 20 nt, Human
ggucccccucagcaagcccu

SEQ ID NO: 2911164 - RNA, 13 nt, Human
ggucccccugcag

SEQ ID NO: 2911165 - RNA, 15 nt, Human
ggucccccugcagcu

SEQ ID NO: 2911166 - RNA, 16 nt, Human
ggucccccugcagcua

SEQ ID NO: 2911167 - RNA, 15 nt, Human
ggucccagccacccc

SEQ ID NO: 2911168 - RNA, 14 nt, Human
ggucccaggcagag

SEQ ID NO: 2911169 - RNA, 16 nt, Human
gguccccaccugggac

SEQ ID NO: 2911170 - RNA, 14 nt, Human
ggucccacucaguc

SEQ ID NO: 2911171 - RNA, 12 nt, Human
ggucccacucag

SEQ ID NO: 2911172 - RNA, 22 nt, Human
ggucccacucaguccauagcag

SEQ ID NO: 2911173 - RNA, 14 nt, Human
ggucccagccaccc

SEQ ID NO: 2911174 - RNA, 22 nt, Human
ggucccacgaauuugcugggga

SEQ ID NO: 2911175 - RNA, 12 nt, Human
ggucccaccccu

SEQ ID NO: 2911176 - RNA, 16 nt, Human
ggucccaccuccagcc

SEQ ID NO: 2911177 - RNA, 17 nt, Human
ggucccaccuccagccc

SEQ ID NO: 2911178 - RNA, 22 nt, Human
ggucccaccuccagcccgggag

SEQ ID NO: 2911179 - RNA, 18 nt, Human
ggucagaggaccuguauu

SEQ ID NO: 2911180 - RNA, 19 nt, Human
ggucagaggaccuguauuu

SEQ ID NO: 2911181 - RNA, 20 nt, Human
ggucagaggaccuguauuua

SEQ ID NO: 2911182 - RNA, 23 nt, Human
ggucagaggagagauagccugug

SEQ ID NO: 2911183 - RNA, 21 nt, Human
gguacuuguggacacagcucu

SEQ ID NO: 2911184 - RNA, 22 nt, Human
gguacuuguggacacagcucuu

SEQ ID NO: 2911185 - RNA, 20 nt, Human
gguacuuguggacacagcuc

SEQ ID NO: 2911186 - RNA, 20 nt, Human
gguacuucaggggcacuuca

SEQ ID NO: 2911187 - RNA, 14 nt, Human
gguacgcacagaca

SEQ ID NO: 2911188 - RNA, 15 nt, Human
gguacgcacagacag

SEQ ID NO: 2911189 - RNA, 16 nt, Human
gguacgcacagacagg

SEQ ID NO: 2911190 - RNA, 13 nt, Human
gguacgugacccu

SEQ ID NO: 2911191 - RNA, 14 nt, Human
gguacuaaauuuaa

SEQ ID NO: 2911192 - RNA, 14 nt, Human
gguacccuccuggc

SEQ ID NO: 2911193 - RNA, 13 nt, Human
gguacccucugga

SEQ ID NO: 2911194 - RNA, 15 nt, Human
gguacucuuguugag

SEQ ID NO: 2911195 - RNA, 14 nt, Human
gguacuauauuugc

SEQ ID NO: 2911196 - RNA, 13 nt, Human
gguacuuagaguu

SEQ ID NO: 2911197 - RNA, 21 nt, Human
gguacuuagaguuucuguuug

SEQ ID NO: 2911198 - RNA, 15 nt, Human
ggguugggcuggugu

SEQ ID NO: 2911199 - RNA, 22 nt, Human
ggguugggcccagaucuggucc

SEQ ID NO: 2911200 - RNA, 14 nt, Human
ggguugggcccaga

SEQ ID NO: 2911201 - RNA, 12 nt, Human
ggguugggccca

SEQ ID NO: 2911202 - RNA, 15 nt, Human
ggguugugugucugu

SEQ ID NO: 2911203 - RNA, 15 nt, Human
ggguuggggccgggc

SEQ ID NO: 2911204 - RNA, 15 nt, Human
ggguuggggugacag

SEQ ID NO: 2911205 - RNA, 14 nt, Human
ggguuggugugcug

SEQ ID NO: 2911206 - RNA, 15 nt, Human
ggguuggugugcuga

SEQ ID NO: 2911207 - RNA, 16 nt, Human
gguacccacugcucug

SEQ ID NO: 2911208 - RNA, 20 nt, Human
ggguuucaccauguuggcca

SEQ ID NO: 2911209 - RNA, 17 nt, Human
gguacccacugcucugg

SEQ ID NO: 2911210 - RNA, 19 nt, Human
gguaccccuuucuggcucu

SEQ ID NO: 2911211 - RNA, 19 nt, Human
ggguagaguuuacagcucu

SEQ ID NO: 2911212 - RNA, 21 nt, Human
ggguggacaaacuggagucug

SEQ ID NO: 2911213 - RNA, 22 nt, Human
ggguuccagcaauucuccugcc

SEQ ID NO: 2911214 - RNA, 19 nt, Human
ggguuggccccugcccggc

SEQ ID NO: 2911215 - RNA, 22 nt, Human
ggguucuaggcaucucuguacu

SEQ ID NO: 2911216 - RNA, 14 nt, Human
ggguucuuucuucc

SEQ ID NO: 2911217 - RNA, 16 nt, Human
ggguuggccccugccc

SEQ ID NO: 2911218 - RNA, 15 nt, Human
ggguucugcugggac

SEQ ID NO: 2911219 - RNA, 12 nt, Human
ggguacuaaauu

SEQ ID NO: 2911220 - RNA, 16 nt, Human
ggguuccgcacuuucc

SEQ ID NO: 2911221 - RNA, 21 nt, Human
ggguucccuuuccuuccaucc

SEQ ID NO: 2911222 - RNA, 18 nt, Human
ggguucccuuuccuucca

SEQ ID NO: 2911223 - RNA, 20 nt, Human
ggugcuaaauggucgcccag

SEQ ID NO: 2911224 - RNA, 17 nt, Human
ggugcgggcaccuguag

SEQ ID NO: 2911225 - RNA, 14 nt, Human
ggugcgucugggag

SEQ ID NO: 2911226 - RNA, 19 nt, Human
ggugcgucugggagguugg

SEQ ID NO: 2911227 - RNA, 12 nt, Human
ggugcuaaaucu

SEQ ID NO: 2911228 - RNA, 15 nt, Human
ggugcgaucuggguu

SEQ ID NO: 2911229 - RNA, 20 nt, Human
ggugcucaccaugcuuccag

SEQ ID NO: 2911230 - RNA, 23 nt, Human
ggugcucagaauaaggcaggcau

SEQ ID NO: 2911231 - RNA, 22 nt, Human
ggugcuaaauggucgcccagga

SEQ ID NO: 2911232 - RNA, 21 nt, Human
ggugcuaaauggucgcccagg

SEQ ID NO: 2911233 - RNA, 23 nt, Human
ggugcuaaauggucgcccaggag

SEQ ID NO: 2911234 - RNA, 13 nt, Human
gguggcagcugcg

SEQ ID NO: 2911235 - RNA, 12 nt, Human
gguggcagcugc

SEQ ID NO: 2911236 - RNA, 11 nt, Human
gguggcagcug

SEQ ID NO: 2911237 - RNA, 23 nt, Human
gguggcagcugcgguccacccag

SEQ ID NO: 2911238 - RNA, 15 nt, Human
gguggcagcugcggu

SEQ ID NO: 2911239 - RNA, 15 nt, Human
ggugcuccaggcagg

SEQ ID NO: 2911240 - RNA, 15 nt, Human
gguggcaguggaggu

SEQ ID NO: 2911241 - RNA, 18 nt, Human
gguggcaguggagguggg

SEQ ID NO: 2911242 - RNA, 19 nt, Human
ggugcccuguucucuacca

SEQ ID NO: 2911243 - RNA, 15 nt, Human
ggugauaaggacaug

SEQ ID NO: 2911244 - RNA, 16 nt, Human
ggugauagcauugcuu

SEQ ID NO: 2911245 - RNA, 22 nt, Human
ggugauagguauaaguggugug

SEQ ID NO: 2911246 - RNA, 22 nt, Human
ggugcccagcuauaccugugcc

SEQ ID NO: 2911247 - RNA, 14 nt, Human
ggugaccucugccu

SEQ ID NO: 2911248 - RNA, 18 nt, Human
ggugaauggccuuccuuc

SEQ ID NO: 2911249 - RNA, 21 nt, Human
ggugacaaagauggcucagag

SEQ ID NO: 2911250 - RNA, 13 nt, Human
ggugacaagagcc

SEQ ID NO: 2911251 - RNA, 14 nt, Human
ggugacaagagccu

SEQ ID NO: 2911252 - RNA, 17 nt, Human
ggugacaagagccugau

SEQ ID NO: 2911253 - RNA, 13 nt, Human
ggugacagagcga

SEQ ID NO: 2911254 - RNA, 12 nt, Human
ggugacacagac

SEQ ID NO: 2911255 - RNA, 13 nt, Human
ggugacacagacu

SEQ ID NO: 2911256 - RNA, 14 nt, Human
ggugacacagacuc

SEQ ID NO: 2911257 - RNA, 15 nt, Human
ggugacacagacuca

SEQ ID NO: 2911258 - RNA, 20 nt, Human
ggugacacagacucauccug

SEQ ID NO: 2911259 - RNA, 16 nt, Human
ggugaccucugccuga

SEQ ID NO: 2911260 - RNA, 12 nt, Human
ggugaggccugu

SEQ ID NO: 2911261 - RNA, 17 nt, Human
ggugaggccugucugug

SEQ ID NO: 2911262 - RNA, 19 nt, Human
ggugaggccugucugugac

SEQ ID NO: 2911263 - RNA, 20 nt, Human
ggugaagagaaccgagcaaa

SEQ ID NO: 2911264 - RNA, 19 nt, Human
ggugaagaugggaacgcag

SEQ ID NO: 2911265 - RNA, 19 nt, Human
ggucugaggaauccagacc

SEQ ID NO: 2911266 - RNA, 22 nt, Human
ggucugagccacagcagcauuu

SEQ ID NO: 2911267 - RNA, 23 nt, Human
ggucugagccacagcagcauuuu

SEQ ID NO: 2911268 - RNA, 17 nt, Human
ggugaaccacuucauuc

SEQ ID NO: 2911269 - RNA, 18 nt, Human
ggugaaccacuucauucu

SEQ ID NO: 2911270 - RNA, 16 nt, Human
ggucucacucugucgc

SEQ ID NO: 2911271 - RNA, 12 nt, Human
ggucucacucug

SEQ ID NO: 2911272 - RNA, 21 nt, Human
ggucucacuauguugcccagg

SEQ ID NO: 2911273 - RNA, 16 nt, Human
ggucugacccacugcu

SEQ ID NO: 2911274 - RNA, 15 nt, Human
ggucugacccacugc

SEQ ID NO: 2911275 - RNA, 20 nt, Human
ggucucgaacuccugaccuu

SEQ ID NO: 2911276 - RNA, 19 nt, Human
ggucucgaacuccugaccu

SEQ ID NO: 2911277 - RNA, 16 nt, Human
gguccgguguucuaag

SEQ ID NO: 2911278 - RNA, 17 nt, Human
gguccgguguucuaaga

SEQ ID NO: 2911279 - RNA, 23 nt, Human
ggucccuugcagcuaguuuucua

SEQ ID NO: 2911280 - RNA, 17 nt, Human
gguccggacacuccuag

SEQ ID NO: 2911281 - RNA, 18 nt, Human
gguccggacacuccuaga

SEQ ID NO: 2911282 - RNA, 20 nt, Human
gguccggacacuccuagaga

SEQ ID NO: 2911283 - RNA, 21 nt, Human
gguccggacacuccuagagaa

SEQ ID NO: 2911284 - RNA, 21 nt, Human
gguccgguguucuaagaugug

SEQ ID NO: 2911285 - RNA, 16 nt, Human
gguccuaaaagcaaaa

SEQ ID NO: 2911286 - RNA, 18 nt, Human
gguccuaaaagcaaaaua

SEQ ID NO: 2911287 - RNA, 22 nt, Human
gguccuaauuaccagucuuuaa

SEQ ID NO: 2911288 - RNA, 22 nt, Human
ggucucacuauguugcccaggc

SEQ ID NO: 2911289 - RNA, 17 nt, Human
ggucccuccccuucucu

SEQ ID NO: 2911290 - RNA, 13 nt, Human
ggucccugccuua

SEQ ID NO: 2911291 - RNA, 14 nt, Human
ggucccugccuuag

SEQ ID NO: 2911292 - RNA, 20 nt, Human
ggucccuccagaaccacccc

SEQ ID NO: 2911293 - RNA, 15 nt, Human
ggguacauuuauaau

SEQ ID NO: 2911294 - RNA, 16 nt, Human
ggguaaugagaggugg

SEQ ID NO: 2911295 - RNA, 20 nt, Human
ggguaauuuagauuguaaac

SEQ ID NO: 2911296 - RNA, 13 nt, Human
ggguacagcuggg

SEQ ID NO: 2911297 - RNA, 15 nt, Human
ggguacagcugggcu

SEQ ID NO: 2911298 - RNA, 18 nt, Human
ggguacccacugcucugg

SEQ ID NO: 2911299 - RNA, 15 nt, Human
ggguacccacugcuc

SEQ ID NO: 2911300 - RNA, 13 nt, Human
ggguacccacugc

SEQ ID NO: 2911301 - RNA, 23 nt, Human
ggguacuuguggacacagcucuu

SEQ ID NO: 2911302 - RNA, 22 nt, Human
ggguacuuguggacacagcucu

SEQ ID NO: 2911303 - RNA, 19 nt, Human
ggguacuuguggacacagc

SEQ ID NO: 2911304 - RNA, 20 nt, Human
gggguucuuucuuccucugc

SEQ ID NO: 2911305 - RNA, 22 nt, Human
gggguucuuucuuccucugcug

SEQ ID NO: 2911306 - RNA, 15 nt, Human
ggggugcagcaguga

SEQ ID NO: 2911307 - RNA, 18 nt, Human
ggggugacggcccucauc

SEQ ID NO: 2911308 - RNA, 12 nt, Human
ggggugacacag

SEQ ID NO: 2911309 - RNA, 21 nt, Human
ggggugacagucaucaucagg

SEQ ID NO: 2911310 - RNA, 18 nt, Human
gggggaaggccaagggga

SEQ ID NO: 2911311 - RNA, 12 nt, Human
gggggaaugagc

SEQ ID NO: 2911312 - RNA, 16 nt, Human
gggggaaugagcccag

SEQ ID NO: 2911313 - RNA, 21 nt, Human
gggggaaugagcccagagaac

SEQ ID NO: 2911314 - RNA, 15 nt, Human
ggggcuuucuggaga

SEQ ID NO: 2911315 - RNA, 12 nt, Human
gggggaaagcac

SEQ ID NO: 2911316 - RNA, 17 nt, Human
gggggaacgaugugucu

SEQ ID NO: 2911317 - RNA, 18 nt, Human
gggggaacgaugugucug

SEQ ID NO: 2911318 - RNA, 11 nt, Human
ggggcuuggcg

SEQ ID NO: 2911319 - RNA, 19 nt, Human
ggggcuuggcguggagcag

SEQ ID NO: 2911320 - RNA, 20 nt, Human
ggggcuuucguccacagcuu

SEQ ID NO: 2911321 - RNA, 21 nt, Human
ggggcuuucguccacagcuuc

SEQ ID NO: 2911322 - RNA, 22 nt, Human
ggggcuuucguccacagcuucc

SEQ ID NO: 2911323 - RNA, 22 nt, Human
ggggcuuagggucggaacccaa

SEQ ID NO: 2911324 - RNA, 20 nt, Human
ggggcuuauaauaaaggacu

SEQ ID NO: 2911325 - RNA, 18 nt, Human
ggggcuguugaagucacc

SEQ ID NO: 2911326 - RNA, 11 nt, Human
ggggcugggcc

SEQ ID NO: 2911327 - RNA, 16 nt, Human
ggggcaggcugggcca

SEQ ID NO: 2911328 - RNA, 15 nt, Human
ggggcaggcugggcc

SEQ ID NO: 2911329 - RNA, 14 nt, Human
ggggcaggcugggc

SEQ ID NO: 2911330 - RNA, 13 nt, Human
ggggcaggcuggg

SEQ ID NO: 2911331 - RNA, 16 nt, Human
ggggcaggagggcccu

SEQ ID NO: 2911332 - RNA, 15 nt, Human
ggggcugcuggccug

SEQ ID NO: 2911333 - RNA, 18 nt, Human
ggggcugcccuugggcca

SEQ ID NO: 2911334 - RNA, 22 nt, Human
gggcugugcacccagaagaaga

SEQ ID NO: 2911335 - RNA, 18 nt, Human
ggggaugugggagggagc

SEQ ID NO: 2911336 - RNA, 14 nt, Human
ggggcagagccucc

SEQ ID NO: 2911337 - RNA, 15 nt, Human
ggggcagagccuccc

SEQ ID NO: 2911338 - RNA, 21 nt, Human
ggggcagccaaacccaugagg

SEQ ID NO: 2911339 - RNA, 20 nt, Human
ggggcagcugauacaaauug

SEQ ID NO: 2911340 - RNA, 20 nt, Human
ggggcagaucuuggacucau

SEQ ID NO: 2911341 - RNA, 20 nt, Human
ggggauaaaaugacuacuua

SEQ ID NO: 2911342 - RNA, 14 nt, Human
ggggaugugggagg

SEQ ID NO: 2911343 - RNA, 15 nt, Human
ggggaucauaaaguu

SEQ ID NO: 2911344 - RNA, 19 nt, Human
ggggaucauaaaguuagaa

SEQ ID NO: 2911345 - RNA, 20 nt, Human
ggggagggugacaguggccg

SEQ ID NO: 2911346 - RNA, 14 nt, Human
ggggagggugacag

SEQ ID NO: 2911347 - RNA, 15 nt, Human
ggggagucaccuucc

SEQ ID NO: 2911348 - RNA, 23 nt, Human
ggggaggaccugacccuacuccc

SEQ ID NO: 2911349 - RNA, 22 nt, Human
ggggagcuuggcugagggucug

SEQ ID NO: 2911350 - RNA, 18 nt, Human
ggggagccaaaaucucaa

SEQ ID NO: 2911351 - RNA, 18 nt, Human
gggcuucaguggcagcug

SEQ ID NO: 2911352 - RNA, 17 nt, Human
gggcuucaguggcagcu

SEQ ID NO: 2911353 - RNA, 16 nt, Human
gggcuucaguggcagc

SEQ ID NO: 2911354 - RNA, 15 nt, Human
gggcuucaguggcag

SEQ ID NO: 2911355 - RNA, 16 nt, Human
gggcuucacuguauaa

SEQ ID NO: 2911356 - RNA, 19 nt, Human
gggcuucagccuaguggcu

SEQ ID NO: 2911357 - RNA, 14 nt, Human
gggcuucagggcag

SEQ ID NO: 2911358 - RNA, 15 nt, Human
gggcuucagggcagg

SEQ ID NO: 2911359 - RNA, 17 nt, Human
gggcuucagggcaggug

SEQ ID NO: 2911360 - RNA, 19 nt, Human
gggcuucagggcagguggg

SEQ ID NO: 2911361 - RNA, 20 nt, Human
gggcuucaguggcagcugcu

SEQ ID NO: 2911362 - RNA, 19 nt, Human
gggcuucaguggcagcugc

SEQ ID NO: 2911363 - RNA, 14 nt, Human
gggcuuggcgugga

SEQ ID NO: 2911364 - RNA, 20 nt, Human
gggcuuggcguggagcaggc

SEQ ID NO: 2911365 - RNA, 20 nt, Human
gggcuucccaguggcugcug

SEQ ID NO: 2911366 - RNA, 21 nt, Human
gggcuucccaguggcugcugc

SEQ ID NO: 2911367 - RNA, 22 nt, Human
gggcuucccaguggcugcugcc

SEQ ID NO: 2911368 - RNA, 23 nt, Human
gggcuucccaguggcugcugccc

SEQ ID NO: 2911369 - RNA, 14 nt, Human
gggcuucaguggca

SEQ ID NO: 2911370 - RNA, 24 nt, Human
gggcuuagagcaguuucuguccug

SEQ ID NO: 2911371 - RNA, 14 nt, Human
gggcuuagagcagu

SEQ ID NO: 2911372 - RNA, 20 nt, Human
gggcuuauaauaaaggacug

SEQ ID NO: 2911373 - RNA, 12 nt, Human
gggcugugaucg

SEQ ID NO: 2911374 - RNA, 22 nt, Human
gggcuuaccuguacacugacuu

SEQ ID NO: 2911375 - RNA, 15 nt, Human
gggcuuaagaaaucu

SEQ ID NO: 2911376 - RNA, 13 nt, Human
gggcuuagagcag

SEQ ID NO: 2911377 - RNA, 21 nt, Human
gggcuguugaagucaccuugu

SEQ ID NO: 2911378 - RNA, 15 nt, Human
gggcuguuuagggga

SEQ ID NO: 2911379 - RNA, 22 nt, Human
gggcuguuuaggggaucuggaa

SEQ ID NO: 2911380 - RNA, 16 nt, Human
gggcucugugcugaca

SEQ ID NO: 2911381 - RNA, 16 nt, Human
gggcucuggagagaaa

SEQ ID NO: 2911382 - RNA, 13 nt, Human
gggcucuggagag

SEQ ID NO: 2911383 - RNA, 14 nt, Human
gggcucuggagaga

SEQ ID NO: 2911384 - RNA, 15 nt, Human
gggcucuggagagaa

SEQ ID NO: 2911385 - RNA, 21 nt, Human
gggcucugccccagcucuggc

SEQ ID NO: 2911386 - RNA, 15 nt, Human
gggcucugccccagu

SEQ ID NO: 2911387 - RNA, 20 nt, Human
gggcucugccccagcucugg

SEQ ID NO: 2911388 - RNA, 20 nt, Human
gggcugacuagaagggccag

SEQ ID NO: 2911389 - RNA, 23 nt, Human
gggcugagcuggggaccugguac

SEQ ID NO: 2911390 - RNA, 15 nt, Human
gggcugagcccuggc

SEQ ID NO: 2911391 - RNA, 13 nt, Human
gggcugagcccug

SEQ ID NO: 2911392 - RNA, 17 nt, Human
gggcugagcccuggcag

SEQ ID NO: 2911393 - RNA, 16 nt, Human
gggcugagcccuggca

SEQ ID NO: 2911394 - RNA, 18 nt, Human
gggcugagcccuggcagg

SEQ ID NO: 2911395 - RNA, 19 nt, Human
gggcucugccccagcucug

SEQ ID NO: 2911396 - RNA, 12 nt, Human
gggcucugcccc

SEQ ID NO: 2911397 - RNA, 13 nt, Human
gggcucugcccca

SEQ ID NO: 2911398 - RNA, 14 nt, Human
gggcucugccccag

SEQ ID NO: 2911399 - RNA, 11 nt, Human
gggcucugccc

SEQ ID NO: 2911400 - RNA, 19 nt, Human
gggcucucugcuguacaua

SEQ ID NO: 2911401 - RNA, 20 nt, Human
gggcucugcaauuccccucu

SEQ ID NO: 2911402 - RNA, 21 nt, Human
gggcucugcaauuccccucug

SEQ ID NO: 2911403 - RNA, 23 nt, Human
gggcucugcaauuccccucugcu

SEQ ID NO: 2911404 - RNA, 14 nt, Human
gggcuccugcaggc

SEQ ID NO: 2911405 - RNA, 12 nt, Human
gggcuccuccca

SEQ ID NO: 2911406 - RNA, 14 nt, Human
gggcuccucccagc

SEQ ID NO: 2911407 - RNA, 23 nt, Human
gggcuccuggaaaggcucagucu

SEQ ID NO: 2911408 - RNA, 20 nt, Human
gggcuccuggaaaggcucag

SEQ ID NO: 2911409 - RNA, 12 nt, Human
gggcuccuggaa

SEQ ID NO: 2911410 - RNA, 11 nt, Human
gggcuccugga

SEQ ID NO: 2911411 - RNA, 18 nt, Human
gggcuccuggcagaaggg

SEQ ID NO: 2911412 - RNA, 21 nt, Human
gggcuccuggggguggggagg

SEQ ID NO: 2911413 - RNA, 20 nt, Human
gggcuccuucuccaccccag

SEQ ID NO: 2911414 - RNA, 13 nt, Human
gggcucucagcuc

SEQ ID NO: 2911415 - RNA, 14 nt, Human
gggcucggaggcug

SEQ ID NO: 2911416 - RNA, 15 nt, Human
gggcucggaggcugc

SEQ ID NO: 2911417 - RNA, 18 nt, Human
gggcgcggccagccccgg

SEQ ID NO: 2911418 - RNA, 23 nt, Human
gggcgcggccagccccggcccug

SEQ ID NO: 2911419 - RNA, 18 nt, Human
gggcgaucgcggcggagc

SEQ ID NO: 2911420 - RNA, 12 nt, Human
gggcgaggcagg

SEQ ID NO: 2911421 - RNA, 22 nt, Human
gggcgccgcaaaccacacugga

SEQ ID NO: 2911422 - RNA, 15 nt, Human
gggcgcggccagccc

SEQ ID NO: 2911423 - RNA, 18 nt, Human
gggcgcgaucccacacag

SEQ ID NO: 2911424 - RNA, 22 nt, Human
gggcgaucgcggcggagcuggc

SEQ ID NO: 2911425 - RNA, 13 nt, Human
gggcgcccaccuc

SEQ ID NO: 2911426 - RNA, 21 nt, Human
gggcgcccaccuccccacgcc

SEQ ID NO: 2911427 - RNA, 17 nt, Human
gggccuuagugggccag

SEQ ID NO: 2911428 - RNA, 18 nt, Human
gggccuuagugggccagg

SEQ ID NO: 2911429 - RNA, 20 nt, Human
gggccuuagugggccagggc

SEQ ID NO: 2911430 - RNA, 22 nt, Human
gggccuuagugggccagggcug

SEQ ID NO: 2911431 - RNA, 16 nt, Human
gggccuguggaaugag

SEQ ID NO: 2911432 - RNA, 22 nt, Human
gggccuguggaaugagugugca

SEQ ID NO: 2911433 - RNA, 12 nt, Human
gggccuguacag

SEQ ID NO: 2911434 - RNA, 15 nt, Human
gggccuguacagucu

SEQ ID NO: 2911435 - RNA, 17 nt, Human
gggccuguacagucugu

SEQ ID NO: 2911436 - RNA, 19 nt, Human
gggccuguacagucugucu

SEQ ID NO: 2911437 - RNA, 21 nt, Human
gggccuguacagucugucuuc

SEQ ID NO: 2911438 - RNA, 15 nt, Human
gggccugguugaaga

SEQ ID NO: 2911439 - RNA, 14 nt, Human
gggccuguugcccu

SEQ ID NO: 2911440 - RNA, 12 nt, Human
gggccuguugcc

SEQ ID NO: 2911441 - RNA, 13 nt, Human
gggccuggcaggg

SEQ ID NO: 2911442 - RNA, 22 nt, Human
gggccuggcauucuuguacagu

SEQ ID NO: 2911443 - RNA, 22 nt, Human
gggccuggcagccgugccuuca

SEQ ID NO: 2911444 - RNA, 10 nt, Human
gggccuggca

SEQ ID NO: 2911445 - RNA, 21 nt, Human
gggcccuccgaccacuuccag

SEQ ID NO: 2911446 - RNA, 14 nt, Human
gggccuggaccugc

SEQ ID NO: 2911447 - RNA, 16 nt, Human
gggccuggaccugccu

SEQ ID NO: 2911448 - RNA, 13 nt, Human
gggccuggaccug

SEQ ID NO: 2911449 - RNA, 20 nt, Human
ggcucccacaggcccuuccu

SEQ ID NO: 2911450 - RNA, 21 nt, Human
ggcucccacaggcccuuccuc

SEQ ID NO: 2911451 - RNA, 13 nt, Human
guauuucagugua

SEQ ID NO: 2911452 - RNA, 21 nt, Human
guauuucaguguaguuaauuu

SEQ ID NO: 2911453 - RNA, 15 nt, Human
guauuucauguggcu

SEQ ID NO: 2911454 - RNA, 16 nt, Human
guauuucauguggcug

SEQ ID NO: 2911455 - RNA, 17 nt, Human
guauuucauguggcugu

SEQ ID NO: 2911456 - RNA, 18 nt, Human
guauuucauguggcugua

SEQ ID NO: 2911457 - RNA, 18 nt, Human
guauuuauugaagaaaca

SEQ ID NO: 2911458 - RNA, 22 nt, Human
guauuucuuauacgcuuuucuu

SEQ ID NO: 2911459 - RNA, 12 nt, Human
guauuuauuuug

SEQ ID NO: 2911460 - RNA, 13 nt, Human
guauuuauuuugu

SEQ ID NO: 2911461 - RNA, 15 nt, Human
guauuuauuuuguaa

SEQ ID NO: 2911462 - RNA, 16 nt, Human
guauuuauuuuguaau

SEQ ID NO: 2911463 - RNA, 17 nt, Human
guauuuauuuuguaauu

SEQ ID NO: 2911464 - RNA, 23 nt, Human
guauuuauuuuguaauuaugauu

SEQ ID NO: 2911465 - RNA, 15 nt, Human
guauuugggaaacuu

SEQ ID NO: 2911466 - RNA, 21 nt, Human
guauuugggaaacuugucacu

SEQ ID NO: 2911467 - RNA, 22 nt, Human
guauuugggaaacuugucacuu

SEQ ID NO: 2911468 - RNA, 13 nt, Human
guauuugcaguuc

SEQ ID NO: 2911469 - RNA, 18 nt, Human
guauuugauucaaaauau

SEQ ID NO: 2911470 - RNA, 19 nt, Human
guauuugauucaaaauauu

SEQ ID NO: 2911471 - RNA, 21 nt, Human
guauuugagaguucuaaauuu

SEQ ID NO: 2911472 - RNA, 19 nt, Human
guauuugagaguucuaaau

SEQ ID NO: 2911473 - RNA, 14 nt, Human
guauuugaaacuga

SEQ ID NO: 2911474 - RNA, 14 nt, Human
guauuugaauuaaa

SEQ ID NO: 2911475 - RNA, 18 nt, Human
guauuugaauuaaaacuu

SEQ ID NO: 2911476 - RNA, 21 nt, Human
guauuugaauuaaaacuucuu

SEQ ID NO: 2911477 - RNA, 22 nt, Human
guauuugaauuaaaacuucuua

SEQ ID NO: 2911478 - RNA, 23 nt, Human
guauuugaauuaaaacuucuuaa

SEQ ID NO: 2911479 - RNA, 14 nt, Human
guauuuauuuaugu

SEQ ID NO: 2911480 - RNA, 21 nt, Human
guauuuauuuaaaagauucau

SEQ ID NO: 2911481 - RNA, 16 nt, Human
guauuuauuuauguac

SEQ ID NO: 2911482 - RNA, 13 nt, Human
guauuuauuuaaa

SEQ ID NO: 2911483 - RNA, 14 nt, Human
guauuuauuuaaaa

SEQ ID NO: 2911484 - RNA, 18 nt, Human
guauuuauuuaaaagauu

SEQ ID NO: 2911485 - RNA, 19 nt, Human
guauuuauuuaguauuuau

SEQ ID NO: 2911486 - RNA, 11 nt, Human
guauuuauuca

SEQ ID NO: 2911487 - RNA, 12 nt, Human
guauuccccuuc

SEQ ID NO: 2911488 - RNA, 16 nt, Human
guauuccccuucccac

SEQ ID NO: 2911489 - RNA, 14 nt, Human
guauuccugccucc

SEQ ID NO: 2911490 - RNA, 21 nt, Human
guauuagugauauuucucuag

SEQ ID NO: 2911491 - RNA, 22 nt, Human
guauuagugauauuucucuagu

SEQ ID NO: 2911492 - RNA, 14 nt, Human
guauuauucuacua

SEQ ID NO: 2911493 - RNA, 12 nt, Human
guauuauugcug

SEQ ID NO: 2911494 - RNA, 14 nt, Human
guauuauugcuguu

SEQ ID NO: 2911495 - RNA, 17 nt, Human
guauuauugcuguugcu

SEQ ID NO: 2911496 - RNA, 20 nt, Human
guauuauugcuguugcuuga

SEQ ID NO: 2911497 - RNA, 12 nt, Human
guauuauuuaua

SEQ ID NO: 2911498 - RNA, 19 nt, Human
guauucaaaaauuaucuau

SEQ ID NO: 2911499 - RNA, 15 nt, Human
guauuacuucugcua

SEQ ID NO: 2911500 - RNA, 14 nt, Human
guauuacuucugcu

SEQ ID NO: 2911501 - RNA, 13 nt, Human
guauuacuucugc

SEQ ID NO: 2911502 - RNA, 23 nt, Human
guauuacccaagaaguaaagaug

SEQ ID NO: 2911503 - RNA, 22 nt, Human
guauuacacuguauuuguaucu

SEQ ID NO: 2911504 - RNA, 13 nt, Human
guauuacacugua

SEQ ID NO: 2911505 - RNA, 14 nt, Human
guagagguuuuguu

SEQ ID NO: 2911506 - RNA, 14 nt, Human
guauuuguucaugu

SEQ ID NO: 2911507 - RNA, 15 nt, Human
guauuuguucauguu

SEQ ID NO: 2911508 - RNA, 16 nt, Human
guauuuguucauguuu

SEQ ID NO: 2911509 - RNA, 17 nt, Human
guauuuguucauguuug

SEQ ID NO: 2911510 - RNA, 18 nt, Human
guauuuguucauguuugg

SEQ ID NO: 2911511 - RNA, 22 nt, Human
guauuuguucauguuuggugca

SEQ ID NO: 2911512 - RNA, 20 nt, Human
guauuugggaagugaagacu

SEQ ID NO: 2911513 - RNA, 19 nt, Human
gucaagagggucugaggaa

SEQ ID NO: 2911514 - RNA, 18 nt, Human
gucaagagggucugagga

SEQ ID NO: 2911515 - RNA, 12 nt, Human
gucaagaagaaa

SEQ ID NO: 2911516 - RNA, 15 nt, Human
gucaagaagaaaaag

SEQ ID NO: 2911517 - RNA, 17 nt, Human
gucaacuucaacauuua

SEQ ID NO: 2911518 - RNA, 20 nt, Human
gucaccugaagacucauucu

SEQ ID NO: 2911519 - RNA, 15 nt, Human
gucaccuagcaagcu

SEQ ID NO: 2911520 - RNA, 16 nt, Human
gucaccuagcaagcug

SEQ ID NO: 2911521 - RNA, 19 nt, Human
gucaccuagcaagcugccg

SEQ ID NO: 2911522 - RNA, 16 nt, Human
gucacccuccaccucu

SEQ ID NO: 2911523 - RNA, 14 nt, Human
gucacccuagcccu

SEQ ID NO: 2911524 - RNA, 20 nt, Human
gucacccuagcccucucccu

SEQ ID NO: 2911525 - RNA, 22 nt, Human
gucacccuagcccucucccucu

SEQ ID NO: 2911526 - RNA, 23 nt, Human
gucaccaucuuaagagaugccuc

SEQ ID NO: 2911527 - RNA, 20 nt, Human
gucacccaggcuggagugca

SEQ ID NO: 2911528 - RNA, 16 nt, Human
gucaccccaaguaguc

SEQ ID NO: 2911529 - RNA, 23 nt, Human
gucaccccaaguagucugcucac

SEQ ID NO: 2911530 - RNA, 13 nt, Human
gucaccccagagc

SEQ ID NO: 2911531 - RNA, 14 nt, Human
gucaccccagagcc

SEQ ID NO: 2911532 - RNA, 15 nt, Human
gucaccccagagcca

SEQ ID NO: 2911533 - RNA, 17 nt, Human
gucaccccagagccaca

SEQ ID NO: 2911534 - RNA, 18 nt, Human
gucaccccagagccacac

SEQ ID NO: 2911535 - RNA, 19 nt, Human
gucaccccagagccacaca

SEQ ID NO: 2911536 - RNA, 20 nt, Human
gucaccccagagccacacau

SEQ ID NO: 2911537 - RNA, 21 nt, Human
gucaccccagagccacacaug

SEQ ID NO: 2911538 - RNA, 17 nt, Human
gucaaguuccuuugggu

SEQ ID NO: 2911539 - RNA, 16 nt, Human
gucaagugggaucugu

SEQ ID NO: 2911540 - RNA, 14 nt, Human
gucaagugggaucu

SEQ ID NO: 2911541 - RNA, 22 nt, Human
gucaaugcuauuuuuguuuuua

SEQ ID NO: 2911542 - RNA, 17 nt, Human
gucaagaguaguuauau

SEQ ID NO: 2911543 - RNA, 21 nt, Human
gucccagccaccccgggcucu

SEQ ID NO: 2911544 - RNA, 18 nt, Human
gucccagccaccccgggc

SEQ ID NO: 2911545 - RNA, 14 nt, Human
gucccagcuacucg

SEQ ID NO: 2911546 - RNA, 22 nt, Human
gucccagcuacucagaagccug

SEQ ID NO: 2911547 - RNA, 23 nt, Human
gucccagccaccccgggcucucu

SEQ ID NO: 2911548 - RNA, 16 nt, Human
gucccagccaccccgg

SEQ ID NO: 2911549 - RNA, 15 nt, Human
gucccagccaccccg

SEQ ID NO: 2911550 - RNA, 14 nt, Human
gucccagccacccc

SEQ ID NO: 2911551 - RNA, 19 nt, Human
gucccacuuggcaucagcu

SEQ ID NO: 2911552 - RNA, 12 nt, Human
gucccacugugc

SEQ ID NO: 2911553 - RNA, 14 nt, Human
gucccacugugcag

SEQ ID NO: 2911554 - RNA, 14 nt, Human
gucccacucagucc

SEQ ID NO: 2911555 - RNA, 15 nt, Human
gucccacucagucca

SEQ ID NO: 2911556 - RNA, 20 nt, Human
guccagggaagcuggccgag

SEQ ID NO: 2911557 - RNA, 15 nt, Human
guccagggaagcugg

SEQ ID NO: 2911558 - RNA, 13 nt, Human
guccagggaagcu

SEQ ID NO: 2911559 - RNA, 14 nt, Human
guccaggcacagga

SEQ ID NO: 2911560 - RNA, 15 nt, Human
guccaggcacaggau

SEQ ID NO: 2911561 - RNA, 16 nt, Human
guccacccaggagccc

SEQ ID NO: 2911562 - RNA, 15 nt, Human
guccacccaggagcc

SEQ ID NO: 2911563 - RNA, 13 nt, Human
guccacccaggag

SEQ ID NO: 2911564 - RNA, 23 nt, Human
gucauguuggucaaaagcuggau

SEQ ID NO: 2911565 - RNA, 16 nt, Human
gucauguguucccuuu

SEQ ID NO: 2911566 - RNA, 18 nt, Human
gucauguguucccuuugu

SEQ ID NO: 2911567 - RNA, 23 nt, Human
gucauguguucccuuugucuuuc

SEQ ID NO: 2911568 - RNA, 14 nt, Human
guccacccaggagc

SEQ ID NO: 2911569 - RNA, 21 nt, Human
gucaugguuucuuggagggcc

SEQ ID NO: 2911570 - RNA, 15 nt, Human
gucauguaaauacug

SEQ ID NO: 2911571 - RNA, 16 nt, Human
gucauguaaauacugu

SEQ ID NO: 2911572 - RNA, 19 nt, Human
gucauguaaauacuguugg

SEQ ID NO: 2911573 - RNA, 20 nt, Human
gucaugguuacaaacuacag

SEQ ID NO: 2911574 - RNA, 15 nt, Human
gucaugugacaggua

SEQ ID NO: 2911575 - RNA, 12 nt, Human
gucauguggcua

SEQ ID NO: 2911576 - RNA, 17 nt, Human
gucaugugggucuucca

SEQ ID NO: 2911577 - RNA, 18 nt, Human
gucaugugggucuuccag

SEQ ID NO: 2911578 - RNA, 20 nt, Human
gucaugugggucuuccaggg

SEQ ID NO: 2911579 - RNA, 21 nt, Human
gucaugugggucuuccagggg

SEQ ID NO: 2911580 - RNA, 12 nt, Human
gucaugcuucau

SEQ ID NO: 2911581 - RNA, 12 nt, Human
gucauggccaca

SEQ ID NO: 2911582 - RNA, 13 nt, Human
gucauggccacac

SEQ ID NO: 2911583 - RNA, 15 nt, Human
gucauggccacacug

SEQ ID NO: 2911584 - RNA, 16 nt, Human
gucauggccacacugu

SEQ ID NO: 2911585 - RNA, 17 nt, Human
gucauggccacacugug

SEQ ID NO: 2911586 - RNA, 18 nt, Human
gucauggccacacuguga

SEQ ID NO: 2911587 - RNA, 20 nt, Human
gucauggccacacugugaca

SEQ ID NO: 2911588 - RNA, 21 nt, Human
gucauggccacacugugacac

SEQ ID NO: 2911589 - RNA, 22 nt, Human
gucauggccacacugugacaca

SEQ ID NO: 2911590 - RNA, 18 nt, Human
guccagcuggccuggaca

SEQ ID NO: 2911591 - RNA, 17 nt, Human
guccagcuggccuggac

SEQ ID NO: 2911592 - RNA, 14 nt, Human
guccagcuggccug

SEQ ID NO: 2911593 - RNA, 13 nt, Human
guccagcuggccu

SEQ ID NO: 2911594 - RNA, 12 nt, Human
guccagcuggcc

SEQ ID NO: 2911595 - RNA, 19 nt, Human
guccagcuggccuggacag

SEQ ID NO: 2911596 - RNA, 13 nt, Human
guccaggagccug

SEQ ID NO: 2911597 - RNA, 12 nt, Human
guccaggaacaa

SEQ ID NO: 2911598 - RNA, 15 nt, Human
guccaggaacaagcu

SEQ ID NO: 2911599 - RNA, 18 nt, Human
guccaggaacaagcuaau

SEQ ID NO: 2911600 - RNA, 23 nt, Human
guccacuguguauagaaguagau

SEQ ID NO: 2911601 - RNA, 14 nt, Human
guccacuguguaua

SEQ ID NO: 2911602 - RNA, 23 nt, Human
gucaucuuucuuuucuuugaguc

SEQ ID NO: 2911603 - RNA, 12 nt, Human
guccagaaaugg

SEQ ID NO: 2911604 - RNA, 17 nt, Human
gucaucugauuggacag

SEQ ID NO: 2911605 - RNA, 19 nt, Human
gucaucugauuggacaggc

SEQ ID NO: 2911606 - RNA, 14 nt, Human
gucaugaagcccaa

SEQ ID NO: 2911607 - RNA, 20 nt, Human
gucaugaauucuuaugcuua

SEQ ID NO: 2911608 - RNA, 15 nt, Human
gucaugauggcacca

SEQ ID NO: 2911609 - RNA, 16 nt, Human
gucaugcaaaggcugg

SEQ ID NO: 2911610 - RNA, 17 nt, Human
gucaugcaaaggcuggg

SEQ ID NO: 2911611 - RNA, 18 nt, Human
gucaugcaaaggcuggga

SEQ ID NO: 2911612 - RNA, 13 nt, Human
gucaugcauaaau

SEQ ID NO: 2911613 - RNA, 14 nt, Human
gucaugcauaaaua

SEQ ID NO: 2911614 - RNA, 17 nt, Human
gucaugcauaaauaugc

SEQ ID NO: 2911615 - RNA, 18 nt, Human
gucaugcauaaauaugca

SEQ ID NO: 2911616 - RNA, 19 nt, Human
gucaugcauaaauaugcag

SEQ ID NO: 2911617 - RNA, 12 nt, Human
gucaugcaugaa

SEQ ID NO: 2911618 - RNA, 17 nt, Human
gucaucaggagaaaaag

SEQ ID NO: 2911619 - RNA, 14 nt, Human
gucaucaucagggc

SEQ ID NO: 2911620 - RNA, 15 nt, Human
gucaucaucagggcc

SEQ ID NO: 2911621 - RNA, 16 nt, Human
gucaucaucagggccu

SEQ ID NO: 2911622 - RNA, 17 nt, Human
gucaucaucagggccug

SEQ ID NO: 2911623 - RNA, 18 nt, Human
gucaucaucagggccugg

SEQ ID NO: 2911624 - RNA, 20 nt, Human
gucaucaucagggccugggg

SEQ ID NO: 2911625 - RNA, 21 nt, Human
gucaucaucagggccuggggc

SEQ ID NO: 2911626 - RNA, 23 nt, Human
gucaucaucagggccuggggccu

SEQ ID NO: 2911627 - RNA, 23 nt, Human
gucaucuagcgcaauugaaggau

SEQ ID NO: 2911628 - RNA, 22 nt, Human
gucauccuuggucuuuguaucu

SEQ ID NO: 2911629 - RNA, 23 nt, Human
gucaucgcucguguguucuaucc

SEQ ID NO: 2911630 - RNA, 23 nt, Human
gucaucugaauuugcccugggaa

SEQ ID NO: 2911631 - RNA, 16 nt, Human
gucaucucagcuggau

SEQ ID NO: 2911632 - RNA, 17 nt, Human
gucauauacugccaugu

SEQ ID NO: 2911633 - RNA, 22 nt, Human
gucauauacugccauguacuag

SEQ ID NO: 2911634 - RNA, 16 nt, Human
gucauauguuaagcag

SEQ ID NO: 2911635 - RNA, 23 nt, Human
gucaucaauaguguccuaugcaa

SEQ ID NO: 2911636 - RNA, 17 nt, Human
gucaucaauguauuugu

SEQ ID NO: 2911637 - RNA, 15 nt, Human
gucaucacuuuucag

SEQ ID NO: 2911638 - RNA, 17 nt, Human
gucaucacuuuucagug

SEQ ID NO: 2911639 - RNA, 20 nt, Human
gucaucagagcuccucuguc

SEQ ID NO: 2911640 - RNA, 16 nt, Human
gucaucacuuuucagu

SEQ ID NO: 2911641 - RNA, 14 nt, Human
gucaucagccacca

SEQ ID NO: 2911642 - RNA, 22 nt, Human
gucauagaaauuacacccaaag

SEQ ID NO: 2911643 - RNA, 13 nt, Human
gucauagaaauua

SEQ ID NO: 2911644 - RNA, 22 nt, Human
gucagccuucccccucccaggg

SEQ ID NO: 2911645 - RNA, 21 nt, Human
gucagcgcagguuuaguuuac

SEQ ID NO: 2911646 - RNA, 21 nt, Human
gucagcgccuggccuacccag

SEQ ID NO: 2911647 - RNA, 19 nt, Human
gucaccuuccaggaccccu

SEQ ID NO: 2911648 - RNA, 13 nt, Human
gucaccuucccuu

SEQ ID NO: 2911649 - RNA, 17 nt, Human
gucaccuucccuugcca

SEQ ID NO: 2911650 - RNA, 16 nt, Human
gucagcaauuuaacua

SEQ ID NO: 2911651 - RNA, 22 nt, Human
gucacguggaggagcagugcag

SEQ ID NO: 2911652 - RNA, 16 nt, Human
gucacguacugucuga

SEQ ID NO: 2911653 - RNA, 23 nt, Human
gucacgugcgcugggcacuuccc

SEQ ID NO: 2911654 - RNA, 15 nt, Human
gucagccaggagcug

SEQ ID NO: 2911655 - RNA, 20 nt, Human
gucagccaggagcugucacc

SEQ ID NO: 2911656 - RNA, 13 nt, Human
gucagccauugca

SEQ ID NO: 2911657 - RNA, 23 nt, Human
gucagccauugcacccagcccag

SEQ ID NO: 2911658 - RNA, 16 nt, Human
gucuacacugcaauca

SEQ ID NO: 2911659 - RNA, 19 nt, Human
gucuacacugcaaucauau

SEQ ID NO: 2911660 - RNA, 21 nt, Human
gucuacacugcaaucauaugu

SEQ ID NO: 2911661 - RNA, 22 nt, Human
gucuacacugcaaucauaugug

SEQ ID NO: 2911662 - RNA, 22 nt, Human
gucuaauuaaaacacuuucaaa

SEQ ID NO: 2911663 - RNA, 22 nt, Human
gucuaauugcaucucaaaauua

SEQ ID NO: 2911664 - RNA, 15 nt, Human
gucuacaaauauaag

SEQ ID NO: 2911665 - RNA, 20 nt, Human
gucuacaaauauaagauuuu

SEQ ID NO: 2911666 - RNA, 23 nt, Human
gucuaagauaguaacaaugaaga

SEQ ID NO: 2911667 - RNA, 21 nt, Human
gucuaaacaaugcugauuugg

SEQ ID NO: 2911668 - RNA, 20 nt, Human
gucuaaagauggaguuucua

SEQ ID NO: 2911669 - RNA, 21 nt, Human
gucuaaagauggaguuucuaa

SEQ ID NO: 2911670 - RNA, 12 nt, Human
gucuaagauucu

SEQ ID NO: 2911671 - RNA, 13 nt, Human
gucuaagauucua

SEQ ID NO: 2911672 - RNA, 14 nt, Human
gucuaagauucuag

SEQ ID NO: 2911673 - RNA, 15 nt, Human
gucuaagauucuaga

SEQ ID NO: 2911674 - RNA, 16 nt, Human
gucuaagauucuagau

SEQ ID NO: 2911675 - RNA, 18 nt, Human
gucuaagauucuagauca

SEQ ID NO: 2911676 - RNA, 19 nt, Human
guccugugagguuucccaa

SEQ ID NO: 2911677 - RNA, 20 nt, Human
guccugugagguuucccaau

SEQ ID NO: 2911678 - RNA, 15 nt, Human
guccugugaucuuau

SEQ ID NO: 2911679 - RNA, 20 nt, Human
guccugugaucuuauuuuuc

SEQ ID NO: 2911680 - RNA, 22 nt, Human
guccugugaucuuauuuuucua

SEQ ID NO: 2911681 - RNA, 19 nt, Human
guccuuaaaaaucacacug

SEQ ID NO: 2911682 - RNA, 22 nt, Human
guccuuaaaaaucacacuguaa

SEQ ID NO: 2911683 - RNA, 14 nt, Human
gucgugggugugug

SEQ ID NO: 2911684 - RNA, 16 nt, Human
gucuaaacaaugcuga

SEQ ID NO: 2911685 - RNA, 11 nt, Human
gucuaaaacuc

SEQ ID NO: 2911686 - RNA, 12 nt, Human
gucuaaaaacac

SEQ ID NO: 2911687 - RNA, 12 nt, Human
gucguuuuccaa

SEQ ID NO: 2911688 - RNA, 17 nt, Human
gucguuuuccaaacuga

SEQ ID NO: 2911689 - RNA, 18 nt, Human
gucucagacuuuuguaca

SEQ ID NO: 2911690 - RNA, 19 nt, Human
gucucagacuuuuguacau

SEQ ID NO: 2911691 - RNA, 20 nt, Human
gucucagacuuuuguacauc

SEQ ID NO: 2911692 - RNA, 23 nt, Human
gucucacuguugcccaggcuggc

SEQ ID NO: 2911693 - RNA, 22 nt, Human
gucucacuguugcccaggcugg

SEQ ID NO: 2911694 - RNA, 21 nt, Human
gucucacuguugcccaggcug

SEQ ID NO: 2911695 - RNA, 20 nt, Human
gucucacuguugcccaggcu

SEQ ID NO: 2911696 - RNA, 19 nt, Human
gucucacuguugcccaggc

SEQ ID NO: 2911697 - RNA, 18 nt, Human
gucucacuguugcccagg

SEQ ID NO: 2911698 - RNA, 17 nt, Human
gucucacuguugcccag

SEQ ID NO: 2911699 - RNA, 16 nt, Human
gucucacuguugccca

SEQ ID NO: 2911700 - RNA, 23 nt, Human
gucucacuauguugcccaggcag

SEQ ID NO: 2911701 - RNA, 13 nt, Human
gucucacuguugc

SEQ ID NO: 2911702 - RNA, 21 nt, Human
gucucacuauguugcccaggc

SEQ ID NO: 2911703 - RNA, 20 nt, Human
gucucacuauguugcccagg

SEQ ID NO: 2911704 - RNA, 19 nt, Human
gucugauucccaagcucug

SEQ ID NO: 2911705 - RNA, 18 nt, Human
gucugauucccaagcucu

SEQ ID NO: 2911706 - RNA, 17 nt, Human
gucugauucccaagcuc

SEQ ID NO: 2911707 - RNA, 21 nt, Human
gucugaggaauccagacccgg

SEQ ID NO: 2911708 - RNA, 15 nt, Human
gucugagccacagca

SEQ ID NO: 2911709 - RNA, 16 nt, Human
gucugagccacagcag

SEQ ID NO: 2911710 - RNA, 20 nt, Human
gucugagccacagcagcauu

SEQ ID NO: 2911711 - RNA, 21 nt, Human
gucugagccacagcagcauuu

SEQ ID NO: 2911712 - RNA, 22 nt, Human
gucugagccacagcagcauuuu

SEQ ID NO: 2911713 - RNA, 21 nt, Human
gucugauucccaagcucugcu

SEQ ID NO: 2911714 - RNA, 20 nt, Human
gucugauucccaagcucugc

SEQ ID NO: 2911715 - RNA, 13 nt, Human
gucugauuggcuu

SEQ ID NO: 2911716 - RNA, 14 nt, Human
gucugauuggcuug

SEQ ID NO: 2911717 - RNA, 18 nt, Human
gucugauuggcuuguaga

SEQ ID NO: 2911718 - RNA, 19 nt, Human
gucugauuggcuuguagaa

SEQ ID NO: 2911719 - RNA, 22 nt, Human
gucugauuggcuuguagaauug

SEQ ID NO: 2911720 - RNA, 18 nt, Human
gucugauggaucccgaag

SEQ ID NO: 2911721 - RNA, 19 nt, Human
gucugcagauagaaagcau

SEQ ID NO: 2911722 - RNA, 11 nt, Human
gucugcagccc

SEQ ID NO: 2911723 - RNA, 18 nt, Human
gucugccaauuuuugccu

SEQ ID NO: 2911724 - RNA, 21 nt, Human
gucugccaauuuuugccuuca

SEQ ID NO: 2911725 - RNA, 12 nt, Human
gucugcagcccu

SEQ ID NO: 2911726 - RNA, 13 nt, Human
gucugcagcccug

SEQ ID NO: 2911727 - RNA, 15 nt, Human
gucugcagcccugag

SEQ ID NO: 2911728 - RNA, 19 nt, Human
gucugaggaauccagaccc

SEQ ID NO: 2911729 - RNA, 18 nt, Human
gucugaggaauccagacc

SEQ ID NO: 2911730 - RNA, 15 nt, Human
gucugacccacugcu

SEQ ID NO: 2911731 - RNA, 17 nt, Human
gucucuucuccacugga

SEQ ID NO: 2911732 - RNA, 14 nt, Human
gucugacccacugc

SEQ ID NO: 2911733 - RNA, 13 nt, Human
gucugacccacug

SEQ ID NO: 2911734 - RNA, 15 nt, Human
gucucuucuccacug

SEQ ID NO: 2911735 - RNA, 16 nt, Human
gucucuucuccacugg

SEQ ID NO: 2911736 - RNA, 14 nt, Human
gucucuucuccacu

SEQ ID NO: 2911737 - RNA, 16 nt, Human
gucucggacuaagccu

SEQ ID NO: 2911738 - RNA, 23 nt, Human
gucucgcuuuguugcccaggcug

SEQ ID NO: 2911739 - RNA, 19 nt, Human
gucucgcuuuguugcccag

SEQ ID NO: 2911740 - RNA, 17 nt, Human
gucucgcuuuguugccc

SEQ ID NO: 2911741 - RNA, 16 nt, Human
gucucgcuuuguugcc

SEQ ID NO: 2911742 - RNA, 23 nt, Human
gucucuaugccagcucaguccca

SEQ ID NO: 2911743 - RNA, 17 nt, Human
gucucuaugccagcuca

SEQ ID NO: 2911744 - RNA, 20 nt, Human
gucucuguugacuggcugug

SEQ ID NO: 2911745 - RNA, 14 nt, Human
gucucucccucagg

SEQ ID NO: 2911746 - RNA, 15 nt, Human
gucucucccucaggu

SEQ ID NO: 2911747 - RNA, 21 nt, Human
gucucuccuguaagccaaaga

SEQ ID NO: 2911748 - RNA, 11 nt, Human
gucucuccuuu

SEQ ID NO: 2911749 - RNA, 12 nt, Human
gucucuccuuuu

SEQ ID NO: 2911750 - RNA, 14 nt, Human
gucucuccuuuucu

SEQ ID NO: 2911751 - RNA, 15 nt, Human
gucucuccuuuucuu

SEQ ID NO: 2911752 - RNA, 19 nt, Human
gucucuccuuuucuuuugu

SEQ ID NO: 2911753 - RNA, 20 nt, Human
gucucuccuuuucuuuuguu

SEQ ID NO: 2911754 - RNA, 22 nt, Human
gucucuccuuuucuuuuguuac

SEQ ID NO: 2911755 - RNA, 23 nt, Human
gucucuccuuuucuuuuguuacu

SEQ ID NO: 2911756 - RNA, 16 nt, Human
gucucuauuucauuuu

SEQ ID NO: 2911757 - RNA, 15 nt, Human
guccugugaauuucu

SEQ ID NO: 2911758 - RNA, 21 nt, Human
guccuguaguugcguggacuc

SEQ ID NO: 2911759 - RNA, 23 nt, Human
guccuguaguugcguggacucug

SEQ ID NO: 2911760 - RNA, 20 nt, Human
guccuguaguuuuauuuuau

SEQ ID NO: 2911761 - RNA, 22 nt, Human
guccuguaguuuuauuuuaugu

SEQ ID NO: 2911762 - RNA, 15 nt, Human
guccuguaugucugu

SEQ ID NO: 2911763 - RNA, 18 nt, Human
guccuguaugucugucau

SEQ ID NO: 2911764 - RNA, 20 nt, Human
guccuggggaaccugacccc

SEQ ID NO: 2911765 - RNA, 19 nt, Human
guccuggggaaccugaccc

SEQ ID NO: 2911766 - RNA, 15 nt, Human
guccuggggcucugu

SEQ ID NO: 2911767 - RNA, 17 nt, Human
guccuggggcucugugc

SEQ ID NO: 2911768 - RNA, 16 nt, Human
guccuggggcucugug

SEQ ID NO: 2911769 - RNA, 18 nt, Human
guccugggagugagcugg

SEQ ID NO: 2911770 - RNA, 17 nt, Human
guccugggagugagcug

SEQ ID NO: 2911771 - RNA, 19 nt, Human
guccugggagugagcuggu

SEQ ID NO: 2911772 - RNA, 18 nt, Human
guccucccauccccugga

SEQ ID NO: 2911773 - RNA, 19 nt, Human
guccucccauccccuggac

SEQ ID NO: 2911774 - RNA, 20 nt, Human
guccucccauccccuggacu

SEQ ID NO: 2911775 - RNA, 21 nt, Human
guccucccauccccuggacug

SEQ ID NO: 2911776 - RNA, 15 nt, Human
guccuccccucacag

SEQ ID NO: 2911777 - RNA, 12 nt, Human
guccuccccuca

SEQ ID NO: 2911778 - RNA, 16 nt, Human
guccuccccucacagc

SEQ ID NO: 2911779 - RNA, 11 nt, Human
guccuccccuc

SEQ ID NO: 2911780 - RNA, 21 nt, Human
guccuccccucacagccucug

SEQ ID NO: 2911781 - RNA, 22 nt, Human
guccuccccucacagccucuga

SEQ ID NO: 2911782 - RNA, 17 nt, Human
guccuccccucacagcc

SEQ ID NO: 2911783 - RNA, 18 nt, Human
guccuccccucacagccu

SEQ ID NO: 2911784 - RNA, 19 nt, Human
guccuccccucacagccuc

SEQ ID NO: 2911785 - RNA, 20 nt, Human
guccuccccucacagccucu

SEQ ID NO: 2911786 - RNA, 16 nt, Human
guccucccauccccug

SEQ ID NO: 2911787 - RNA, 17 nt, Human
guccucccauccccugg

SEQ ID NO: 2911788 - RNA, 22 nt, Human
guccuccaucccaacagccaug

SEQ ID NO: 2911789 - RNA, 23 nt, Human
guccuccaucccaacagccaugc

SEQ ID NO: 2911790 - RNA, 21 nt, Human
guccuggccagauggcccgga
